United States Patent Application Publication US 2007/0042381 A1 - sequence listing, part 6

SEQ ID NO: 221997 - RNA, 22 nt, Human
cuuucagaggggcguacacagc

SEQ ID NO: 221998 - RNA, 22 nt, Human
gccagucugcucccacaaguuc

SEQ ID NO: 221999 - RNA, 22 nt, Human
agagcuggagcagccccacugg

SEQ ID NO: 222000 - RNA, 22 nt, Human
uaucaaaaggaguugaaagggg

SEQ ID NO: 222001 - RNA, 18 nt, Human
cugaauuaucucaucauu

SEQ ID NO: 222002 - RNA, 22 nt, Human
cacuggaauguugaggagacaa

SEQ ID NO: 222003 - RNA, 22 nt, Human
agagugcagaggucaaagaaca

SEQ ID NO: 222004 - RNA, 22 nt, Human
aauugcuugaugacuaguaauu

SEQ ID NO: 222005 - RNA, 22 nt, Human
augcuuugauuugguuucucua

SEQ ID NO: 222006 - RNA, 22 nt, Human
aaugucacucuguuuccucugc

SEQ ID NO: 222007 - RNA, 22 nt, Human
ugaagacucagaagcuaagaua

SEQ ID NO: 222008 - RNA, 22 nt, Human
uugaagauucuuuuuguuagua

SEQ ID NO: 222009 - RNA, 22 nt, Human
uuucuucauagaccuugucuug

SEQ ID NO: 222010 - RNA, 22 nt, Human
ugcucccauguguggguacaga

SEQ ID NO: 222011 - RNA, 22 nt, Human
acagaagacagaguguucaucu

SEQ ID NO: 222012 - RNA, 22 nt, Human
aggacuaaggaacagcugauuc

SEQ ID NO: 222013 - RNA, 21 nt, Human
gggugcuguggucaugcagga

SEQ ID NO: 222014 - RNA, 22 nt, Human
uauuucucuucaaaauugaugu

SEQ ID NO: 222015 - RNA, 22 nt, Human
aaugaguuauuagguguaagug

SEQ ID NO: 222016 - RNA, 23 nt, Human
uugaggcaaacauguaaguagga

SEQ ID NO: 222017 - RNA, 22 nt, Human
ggcauggucuuugcuugcagga

SEQ ID NO: 222018 - RNA, 22 nt, Human
uaauuauaacaugcuuucuggc

SEQ ID NO: 222019 - RNA, 22 nt, Human
cuauugaggacauaaggacucu

SEQ ID NO: 222020 - RNA, 21 nt, Human
cagcagaagcaucuauggaag

SEQ ID NO: 222021 - RNA, 22 nt, Human
ggaccuggcaauuugcaucucu

SEQ ID NO: 222022 - RNA, 21 nt, Human
guacagggauaguagugucaa

SEQ ID NO: 222023 - RNA, 22 nt, Human
gucagaggaggcugaguaggaa

SEQ ID NO: 222024 - RNA, 22 nt, Human
cagacagguagggacagaacau

SEQ ID NO: 222025 - RNA, 20 nt, Human
aucaucuuuacaaugucagu

SEQ ID NO: 222026 - RNA, 22 nt, Human
ucagggaaucagacucugcagc

SEQ ID NO: 222027 - RNA, 22 nt, Human
gcaaggagacuguagggccaag

SEQ ID NO: 222028 - RNA, 22 nt, Human
gucagucauauuguacagauau

SEQ ID NO: 222029 - RNA, 22 nt, Human
accugagacuugggaugggaau

SEQ ID NO: 222030 - RNA, 20 nt, Human
cagccuccacucacucagcu

SEQ ID NO: 222031 - RNA, 22 nt, Human
uucuugaaggggauauaaauag

SEQ ID NO: 222032 - RNA, 22 nt, Human
ccaggggccugugaaggugccc

SEQ ID NO: 222033 - RNA, 22 nt, Human
aagaaagugaugagcuacagau

SEQ ID NO: 222034 - RNA, 23 nt, Human
ugcugcccgcuuggcacgcuccc

SEQ ID NO: 222035 - RNA, 22 nt, Human
cugguccuugacgcgugggagg

SEQ ID NO: 222036 - RNA, 22 nt, Human
agauucauuauuaaugugaucu

SEQ ID NO: 222037 - RNA, 22 nt, Human
aguggcaggaucucgguucacu

SEQ ID NO: 222038 - RNA, 22 nt, Human
ggcaggugcaccugagccaucu

SEQ ID NO: 222039 - RNA, 23 nt, Human
agcagcugugguuuaccuuagua

SEQ ID NO: 222040 - RNA, 22 nt, Human
ucuggaaguuagaggaggaaag

SEQ ID NO: 222041 - RNA, 22 nt, Human
ccugagcucaaagggugccugg

SEQ ID NO: 222042 - RNA, 22 nt, Human
agauguaccagguauuacagga

SEQ ID NO: 222043 - RNA, 22 nt, Human
cagccagaucaaacucagaugu

SEQ ID NO: 222044 - RNA, 22 nt, Human
ggccugugcacaugugcaggaa

SEQ ID NO: 222045 - RNA, 22 nt, Human
acagacaguaugguggggcuga

SEQ ID NO: 222046 - RNA, 22 nt, Human
aggaggcugguucaggccauau

SEQ ID NO: 222047 - RNA, 23 nt, Human
cuggggcucauugcaguagccau

SEQ ID NO: 222048 - RNA, 22 nt, Human
uccugagcaacacagcuaagug

SEQ ID NO: 222049 - RNA, 22 nt, Human
uauucuuguaccuuaaaugauu

SEQ ID NO: 222050 - RNA, 22 nt, Human
gggcacaguacuccaaucaacu

SEQ ID NO: 222051 - RNA, 22 nt, Human
acccaggagguggaggcugcag

SEQ ID NO: 222052 - RNA, 22 nt, Human
auuugcauaauagugauuugua

SEQ ID NO: 222053 - RNA, 23 nt, Human
uuugcaaauuuuccugacuacuc

SEQ ID NO: 222054 - RNA, 22 nt, Human
cagggacaggggagaaaagaug

SEQ ID NO: 222055 - RNA, 22 nt, Human
uccuuagcacccaccaaggacu

SEQ ID NO: 222056 - RNA, 22 nt, Human
caaguacaaaaugauauuuagu

SEQ ID NO: 222057 - RNA, 22 nt, Human
agcuucugcaucuuuucuuccc

SEQ ID NO: 222058 - RNA, 22 nt, Human
aaauuaacuaucacuuuuguga

SEQ ID NO: 222059 - RNA, 19 nt, Human
guacaacaaugcugagcau

SEQ ID NO: 222060 - RNA, 22 nt, Human
ccagccaguauauuccaaagcc

SEQ ID NO: 222061 - RNA, 22 nt, Human
uacaccauuuucugcaguguuu

SEQ ID NO: 222062 - RNA, 22 nt, Human
accuuucugcaaguucugggac

SEQ ID NO: 222063 - RNA, 22 nt, Human
caaggaaggagagaugaugggu

SEQ ID NO: 222064 - RNA, 22 nt, Human
aggaggugcuguuuguccugga

SEQ ID NO: 222065 - RNA, 22 nt, Human
gccaaaucacagggccaaaagc

SEQ ID NO: 222066 - RNA, 22 nt, Human
uaaacucuucuguagaaucaga

SEQ ID NO: 222067 - RNA, 22 nt, Human
caucucugguucagucucugug

SEQ ID NO: 222068 - RNA, 22 nt, Human
uggcucagucuggguugacuga

SEQ ID NO: 222069 - RNA, 22 nt, Human
ucacaucuuaguuugggacucu

SEQ ID NO: 222070 - RNA, 22 nt, Human
agucacaugaguuucucuuuau

SEQ ID NO: 222071 - RNA, 22 nt, Human
uuccaggaagauucaacaaaag

SEQ ID NO: 222072 - RNA, 22 nt, Human
aaacuuuaggaaggaauuuaca

SEQ ID NO: 222073 - RNA, 22 nt, Human
uucucagacuuccagcaccagc

SEQ ID NO: 222074 - RNA, 22 nt, Human
aagcccucagagccucuuugac

SEQ ID NO: 222075 - RNA, 21 nt, Human
aggggaaguagaguuuugauu

SEQ ID NO: 222076 - RNA, 22 nt, Human
acagcuuuucaauucugcugag

SEQ ID NO: 222077 - RNA, 22 nt, Human
ugagcagagacuucaagggcag

SEQ ID NO: 222078 - RNA, 22 nt, Human
ucucuggcacauaauaaggucu

SEQ ID NO: 222079 - RNA, 22 nt, Human
cugucccuucauuauucacuac

SEQ ID NO: 222080 - RNA, 22 nt, Human
agagcuaagaaacagaauugcu

SEQ ID NO: 222081 - RNA, 22 nt, Human
agccuacagagggcagguggag

SEQ ID NO: 222082 - RNA, 22 nt, Human
gccugcagggugaugggcugcc

SEQ ID NO: 222083 - RNA, 22 nt, Human
uggagcugauacagcuggcuuu

SEQ ID NO: 222084 - RNA, 22 nt, Human
acauacaucaaguaucacaaga

SEQ ID NO: 222085 - RNA, 22 nt, Human
uccuggcacccuuggguuggag

SEQ ID NO: 222086 - RNA, 18 nt, Human
aguuugaacaaggaagaa

SEQ ID NO: 222087 - RNA, 21 nt, Human
uaucaaggcacuuuuuaaaga

SEQ ID NO: 222088 - RNA, 22 nt, Human
ccagaggacuugggggcugaau

SEQ ID NO: 222089 - RNA, 22 nt, Human
uuuguaaaaggaggaagcaugg

SEQ ID NO: 222090 - RNA, 22 nt, Human
agauuccagaucccaaaaauga

SEQ ID NO: 222091 - RNA, 23 nt, Human
cuucagugugggacugcagcgug

SEQ ID NO: 222092 - RNA, 22 nt, Human
uugagaacuacuuuauuauucu

SEQ ID NO: 222093 - RNA, 18 nt, Human
ccuguggcucagcccaca

SEQ ID NO: 222094 - RNA, 22 nt, Human
ggcccagcugugcuuccagccc

SEQ ID NO: 222095 - RNA, 22 nt, Human
uacuacaaggccgaagcucuca

SEQ ID NO: 222096 - RNA, 22 nt, Human
uggcagcagcuaacuuaggcag

SEQ ID NO: 222097 - RNA, 22 nt, Human
agccagagauugagaugcaggc

SEQ ID NO: 222098 - RNA, 22 nt, Human
cuggcaccuccagcucauggcc

SEQ ID NO: 222099 - RNA, 22 nt, Human
agcagggccucuggcacugguc

SEQ ID NO: 222100 - RNA, 22 nt, Human
uaagcaguuuuucuuguauuaa

SEQ ID NO: 222101 - RNA, 14 nt, Human
gcaggcagaccacc

SEQ ID NO: 222102 - RNA, 22 nt, Human
gagaaagaugaagaguggcguu

SEQ ID NO: 222103 - RNA, 22 nt, Human
acuguggccggaacagugggac

SEQ ID NO: 222104 - RNA, 22 nt, Human
acacaugauuaaugccaagcau

SEQ ID NO: 222105 - RNA, 22 nt, Human
acagaugauuuuuaugaaaaca

SEQ ID NO: 222106 - RNA, 22 nt, Human
gcauuagauuugccuuugaagc

SEQ ID NO: 222107 - RNA, 22 nt, Human
uugaggaguggcgcuggacuua

SEQ ID NO: 222108 - RNA, 22 nt, Human
uaacaagauuuguaaaauugua

SEQ ID NO: 222109 - RNA, 22 nt, Human
ugugacccagacucaucuucuu

SEQ ID NO: 222110 - RNA, 22 nt, Human
aucuccaggaagugucauuuac

SEQ ID NO: 222111 - RNA, 22 nt, Human
gccucugcaucaucacuccagc

SEQ ID NO: 222112 - RNA, 22 nt, Human
uguauaaaccauggacagcuuu

SEQ ID NO: 222113 - RNA, 22 nt, Human
gaguuaaaaaugccuccaugga

SEQ ID NO: 222114 - RNA, 22 nt, Human
ccaggugggcgugucuucaccu

SEQ ID NO: 222115 - RNA, 22 nt, Human
agaguccauaugugggaggagu

SEQ ID NO: 222116 - RNA, 22 nt, Human
cagcucauuccucaaucuagga

SEQ ID NO: 222117 - RNA, 22 nt, Human
ucccugaguguauguggugaac

SEQ ID NO: 222118 - RNA, 22 nt, Human
uuuugucagugagaacagaguu

SEQ ID NO: 222119 - RNA, 22 nt, Human
cugcacaaugcaccaucaaguu

SEQ ID NO: 222120 - RNA, 22 nt, Human
augagcugggccauccagugau

SEQ ID NO: 222121 - RNA, 19 nt, Human
augcagagaauggcaguag

SEQ ID NO: 222122 - RNA, 20 nt, Human
caaggcuucuuugauggggu

SEQ ID NO: 222123 - RNA, 22 nt, Human
ggucagggcucuuccaguggcu

SEQ ID NO: 222124 - RNA, 22 nt, Human
cuuguccccagcagguugguuu

SEQ ID NO: 222125 - RNA, 22 nt, Human
ugaaaucaucugccaauaaguu

SEQ ID NO: 222126 - RNA, 22 nt, Human
uugaaaguaauaacuuuguuca

SEQ ID NO: 222127 - RNA, 22 nt, Human
cuggcaguuugccaggagcucg

SEQ ID NO: 222128 - RNA, 22 nt, Human
cugaggagcccccucucagcau

SEQ ID NO: 222129 - RNA, 22 nt, Human
gcugugcaaaucgauuuguugg

SEQ ID NO: 222130 - RNA, 22 nt, Human
aggccagaugucgggcuagaag

SEQ ID NO: 222131 - RNA, 22 nt, Human
agcaaagaaauggaggcucaga

SEQ ID NO: 222132 - RNA, 22 nt, Human
uggcagagugcggcauccccug

SEQ ID NO: 222133 - RNA, 22 nt, Human
aaacaggucugaaaauagcuac

SEQ ID NO: 222134 - RNA, 22 nt, Human
uuugacucuugucucuuguuag

SEQ ID NO: 222135 - RNA, 22 nt, Human
gagcacagaaucuucccaugca

SEQ ID NO: 222136 - RNA, 22 nt, Human
agugaaaucagguuuugacugc

SEQ ID NO: 222137 - RNA, 19 nt, Human
guccaugcuuagaggggcc

SEQ ID NO: 222138 - RNA, 21 nt, Human
ggugacacguggccccgcucu

SEQ ID NO: 222139 - RNA, 22 nt, Human
aucaguaaauauucauugugca

SEQ ID NO: 222140 - RNA, 22 nt, Human
uuagaacacugagaaagugaug

SEQ ID NO: 222141 - RNA, 22 nt, Human
uggcucuggagcuggcggcuga

SEQ ID NO: 222142 - RNA, 22 nt, Human
aaauagcugaaaguuccuagau

SEQ ID NO: 222143 - RNA, 22 nt, Human
aguuaaaucauuacugacagag

SEQ ID NO: 222144 - RNA, 22 nt, Human
cagccucuguggcugccacacc

SEQ ID NO: 222145 - RNA, 23 nt, Human
ucagaaguuugguuguaacaugg

SEQ ID NO: 222146 - RNA, 22 nt, Human
acuuccaaaacacagcauggca

SEQ ID NO: 222147 - RNA, 22 nt, Human
agauggcucuuugaaggggaau

SEQ ID NO: 222148 - RNA, 22 nt, Human
ccaggcuugaagggaagaaugg

SEQ ID NO: 222149 - RNA, 22 nt, Human
ccaggaagcugugagauuccaa

SEQ ID NO: 222150 - RNA, 23 nt, Human
agcuccagggaacaggcaguagg

SEQ ID NO: 222151 - RNA, 22 nt, Human
ccauaguacauaauacauuuua

SEQ ID NO: 222152 - RNA, 22 nt, Human
aacaaagaagacugguuauuuu

SEQ ID NO: 222153 - RNA, 22 nt, Human
agcaggcuaggaaccucacugc

SEQ ID NO: 222154 - RNA, 22 nt, Human
uccaccauguaacaagcucugu

SEQ ID NO: 222155 - RNA, 22 nt, Human
agcagccagagucugaacauua

SEQ ID NO: 222156 - RNA, 22 nt, Human
aggacagguguagugggcucug

SEQ ID NO: 222157 - RNA, 22 nt, Human
uuaauaggcuucuaacauagcu

SEQ ID NO: 222158 - RNA, 22 nt, Human
aucuagaaagccaggggccugc

SEQ ID NO: 222159 - RNA, 22 nt, Human
cugugcucuggcaucgcugcaa

SEQ ID NO: 222160 - RNA, 21 nt, Human
ugggacagugauggcuccucc

SEQ ID NO: 222161 - RNA, 23 nt, Human
uucauugauugcaaggagauugg

SEQ ID NO: 222162 - RNA, 22 nt, Human
gggagggaaggaccuuaugaau

SEQ ID NO: 222163 - RNA, 22 nt, Human
aaggacucuccagcuagcaaau

SEQ ID NO: 222164 - RNA, 22 nt, Human
aucucacagaggcccaccagga

SEQ ID NO: 222165 - RNA, 22 nt, Human
cuccagcuucugcccagagacu

SEQ ID NO: 222166 - RNA, 22 nt, Human
agaggccagcagugccuaucug

SEQ ID NO: 222167 - RNA, 22 nt, Human
uuauugaguuguaagagcucuu

SEQ ID NO: 222168 - RNA, 19 nt, Human
caucagagggcauaggaug

SEQ ID NO: 222169 - RNA, 22 nt, Human
aggcuggcuggggaugcgucuu

SEQ ID NO: 222170 - RNA, 22 nt, Human
cuucugggccauggccuuccuc

SEQ ID NO: 222171 - RNA, 22 nt, Human
uuucaacaccagagaccaugcg

SEQ ID NO: 222172 - RNA, 23 nt, Human
aaacugcaucucugagccucagc

SEQ ID NO: 222173 - RNA, 23 nt, Human
acagagacaaugguuucaucuug

SEQ ID NO: 222174 - RNA, 22 nt, Human
gacagguggguaccuuuaugga

SEQ ID NO: 222175 - RNA, 17 nt, Human
ccugcccagagacagau

SEQ ID NO: 222176 - RNA, 22 nt, Human
aggcuucuucuuccuauuuagu

SEQ ID NO: 222177 - RNA, 22 nt, Human
ucacagaagcccucgcaaacua

SEQ ID NO: 222178 - RNA, 22 nt, Human
ucaauguaauaaaauacucuau

SEQ ID NO: 222179 - RNA, 22 nt, Human
uuccuccuacgcuuaucacuuu

SEQ ID NO: 222180 - RNA, 21 nt, Human
uccugggaagcacuggggugg

SEQ ID NO: 222181 - RNA, 22 nt, Human
uagaaacaugagagaaacucuu

SEQ ID NO: 222182 - RNA, 22 nt, Human
agacuccaggagggaggcugcu

SEQ ID NO: 222183 - RNA, 22 nt, Human
aacccagccguguagcugccgc

SEQ ID NO: 222184 - RNA, 22 nt, Human
agaaucugcauuuuuaauaaca

SEQ ID NO: 222185 - RNA, 19 nt, Human
agcuaacucacuaacuaug

SEQ ID NO: 222186 - RNA, 22 nt, Human
ggcccugggcccucuagcuugu

SEQ ID NO: 222187 - RNA, 22 nt, Human
ugacugaggcagccugaguuau

SEQ ID NO: 222188 - RNA, 22 nt, Human
cucuggcuguuugcagcucaag

SEQ ID NO: 222189 - RNA, 22 nt, Human
cagggcugaacugagcuuguga

SEQ ID NO: 222190 - RNA, 22 nt, Human
agucugugaacuuggcagggaa

SEQ ID NO: 222191 - RNA, 17 nt, Human
uccugugggugcagcag

SEQ ID NO: 222192 - RNA, 22 nt, Human
cagaaggcaaggccugccacgc

SEQ ID NO: 222193 - RNA, 22 nt, Human
acaauauaguccaugagcaugc

SEQ ID NO: 222194 - RNA, 22 nt, Human
agcucuuccaccucaugauggg

SEQ ID NO: 222195 - RNA, 22 nt, Human
gaggcucaaaccuggacagagc

SEQ ID NO: 222196 - RNA, 22 nt, Human
acagacuggagugagagaaaua

SEQ ID NO: 222197 - RNA, 22 nt, Human
caaguaaugguuuuauaauagu

SEQ ID NO: 222198 - RNA, 19 nt, Human
agcauuaggcaaauuuuga

SEQ ID NO: 222199 - RNA, 22 nt, Human
agcacaggacguagagcuugga

SEQ ID NO: 222200 - RNA, 22 nt, Human
aauguccuaggcaugauuuugu

SEQ ID NO: 222201 - RNA, 22 nt, Human
cugugggaugggaccucagcug

SEQ ID NO: 222202 - RNA, 22 nt, Human
cuuuucauuguuuguacaugca

SEQ ID NO: 222203 - RNA, 22 nt, Human
auaguuugaaggcuguucuacu

SEQ ID NO: 222204 - RNA, 22 nt, Human
ucagaaguugauaaaguaguug

SEQ ID NO: 222205 - RNA, 22 nt, Human
ggcaauaguuguggguucuuua

SEQ ID NO: 222206 - RNA, 19 nt, Human
ucuugaggaaaguaaggca

SEQ ID NO: 222207 - RNA, 22 nt, Human
gagggaggcaucaugaauccag

SEQ ID NO: 222208 - RNA, 22 nt, Human
gcugccuuuagggggugcucag

SEQ ID NO: 222209 - RNA, 22 nt, Human
gcucugccaaggacccauucuc

SEQ ID NO: 222210 - RNA, 22 nt, Human
aauaugcauguauacaugugua

SEQ ID NO: 222211 - RNA, 22 nt, Human
gaaguucaacugccaugcuugg

SEQ ID NO: 222212 - RNA, 22 nt, Human
ugaggccaggacccccagcagg

SEQ ID NO: 222213 - RNA, 22 nt, Human
uacaguagacaggaccacaggc

SEQ ID NO: 222214 - RNA, 22 nt, Human
accaauuucuuggcuuccaaau

SEQ ID NO: 222215 - RNA, 22 nt, Human
aguggcuaauaacagcuaaaca

SEQ ID NO: 222216 - RNA, 22 nt, Human
aaccagcuccucaccccauugu

SEQ ID NO: 222217 - RNA, 22 nt, Human
ggcugaggguauagcuguccca

SEQ ID NO: 222218 - RNA, 22 nt, Human
gcacugagcaccagccacagau

SEQ ID NO: 222219 - RNA, 22 nt, Human
gggugguggccagcagugggca

SEQ ID NO: 222220 - RNA, 22 nt, Human
ugcacuucauuguaaauuguac

SEQ ID NO: 222221 - RNA, 22 nt, Human
gcacagugauaggcaguugugc

SEQ ID NO: 222222 - RNA, 22 nt, Human
aagcuuuaugaucucucagcua

SEQ ID NO: 222223 - RNA, 21 nt, Human
agcaagcagaauccaucuaga

SEQ ID NO: 222224 - RNA, 22 nt, Human
uuccucagagagacagaaacua

SEQ ID NO: 222225 - RNA, 21 nt, Human
acucaggcaccaggggauggc

SEQ ID NO: 222226 - RNA, 22 nt, Human
gggccuccggggugagcugugg

SEQ ID NO: 222227 - RNA, 22 nt, Human
uuauauauauguagaggucacg

SEQ ID NO: 222228 - RNA, 22 nt, Human
cuccucagaagaggguaacaca

SEQ ID NO: 222229 - RNA, 22 nt, Human
ggcaguugcgugcaucaguggu

SEQ ID NO: 222230 - RNA, 22 nt, Human
ugcuggcacguggaccaggaga

SEQ ID NO: 222231 - RNA, 22 nt, Human
ucaguguccugugcggugcagc

SEQ ID NO: 222232 - RNA, 22 nt, Human
ucugcccaaggcugucacuaga

SEQ ID NO: 222233 - RNA, 18 nt, Human
gagggaguagcugagguu

SEQ ID NO: 222234 - RNA, 22 nt, Human
ugcuuaaaaugaugauuauuuu

SEQ ID NO: 222235 - RNA, 22 nt, Human
uggcugagaaaaaagagcuaua

SEQ ID NO: 222236 - RNA, 18 nt, Human
aagcugggaaggagacag

SEQ ID NO: 222237 - RNA, 19 nt, Human
ggcugcagagccccggcgc

SEQ ID NO: 222238 - RNA, 22 nt, Human
agaggagguccuuuucugaugu

SEQ ID NO: 222239 - RNA, 21 nt, Human
cacuggaauuuucugugacau

SEQ ID NO: 222240 - RNA, 17 nt, Human
ucugucugugguccacu

SEQ ID NO: 222241 - RNA, 22 nt, Human
aauagagucaguucuacauucu

SEQ ID NO: 222242 - RNA, 22 nt, Human
uggagcaggaaacaucuagagg

SEQ ID NO: 222243 - RNA, 22 nt, Human
uucuuauaaguuaauauuucca

SEQ ID NO: 222244 - RNA, 22 nt, Human
uccugggcacaagugagucucc

SEQ ID NO: 222245 - RNA, 22 nt, Human
uucucuuuauguauuuaguggg

SEQ ID NO: 222246 - RNA, 23 nt, Human
cagugggcuucuaacugcuccug

SEQ ID NO: 222247 - RNA, 22 nt, Human
cagaggccauauuucuucacuc

SEQ ID NO: 222248 - RNA, 22 nt, Human
ggugcaaacguaauugugguuu

SEQ ID NO: 222249 - RNA, 22 nt, Human
gugcuacagacugaguacacuu

SEQ ID NO: 222250 - RNA, 22 nt, Human
aagcaugggaggccuggaggag

SEQ ID NO: 222251 - RNA, 22 nt, Human
aguguucagugauugucaaccg

SEQ ID NO: 222252 - RNA, 22 nt, Human
uagcaggugcucauuuaacucc

SEQ ID NO: 222253 - RNA, 22 nt, Human
cagccagaaccuaggaugagcu

SEQ ID NO: 222254 - RNA, 22 nt, Human
uuccuucuuccuuuaguaacca

SEQ ID NO: 222255 - RNA, 22 nt, Human
caaacauugcuaccagagguuu

SEQ ID NO: 222256 - RNA, 22 nt, Human
agcucccugcacgacccugccc

SEQ ID NO: 222257 - RNA, 22 nt, Human
uuauuaggaaaaggucagaugu

SEQ ID NO: 222258 - RNA, 22 nt, Human
cagagcagccuccagggggagc

SEQ ID NO: 222259 - RNA, 22 nt, Human
gggcuguguaaugugcucuuuu

SEQ ID NO: 222260 - RNA, 22 nt, Human
uuuauucacuucagugccaaag

SEQ ID NO: 222261 - RNA, 22 nt, Human
ucuguggcugucuuuccagagg

SEQ ID NO: 222262 - RNA, 22 nt, Human
cagcuuucaucagugacacuca

SEQ ID NO: 222263 - RNA, 21 nt, Human
cauuagggcagaagcaggaag

SEQ ID NO: 222264 - RNA, 22 nt, Human
auggaacaggcucagagaugcu

SEQ ID NO: 222265 - RNA, 21 nt, Human
gaaauacugccuuaggagcug

SEQ ID NO: 222266 - RNA, 20 nt, Human
cuacauguucugcuucucuc

SEQ ID NO: 222267 - RNA, 22 nt, Human
ucuuuguuuguacuguuagaau

SEQ ID NO: 222268 - RNA, 22 nt, Human
gggccagagcacagaggauguu

SEQ ID NO: 222269 - RNA, 22 nt, Human
aauucacaaaaccagauugcuu

SEQ ID NO: 222270 - RNA, 23 nt, Human
ucaguuaacuguguuaccugugc

SEQ ID NO: 222271 - RNA, 22 nt, Human
augaggauaccgcagggggcag

SEQ ID NO: 222272 - RNA, 22 nt, Human
aaggcuuccuggaggagguguc

SEQ ID NO: 222273 - RNA, 22 nt, Human
uggcacagccaucuucuccugc

SEQ ID NO: 222274 - RNA, 22 nt, Human
agagcccagguccuggagaggg

SEQ ID NO: 222275 - RNA, 22 nt, Human
cucuguuuuucaauaguucuug

SEQ ID NO: 222276 - RNA, 22 nt, Human
gucucauugguucugccagagu

SEQ ID NO: 222277 - RNA, 22 nt, Human
gcagccuuccguggaccuggac

SEQ ID NO: 222278 - RNA, 22 nt, Human
ccaauaauucuucaaguguuuu

SEQ ID NO: 222279 - RNA, 21 nt, Human
uauacaugugcacacacaugc

SEQ ID NO: 222280 - RNA, 22 nt, Human
agcagcagaagggagacccagg

SEQ ID NO: 222281 - RNA, 22 nt, Human
uugcccugcguuaccaucucuu

SEQ ID NO: 222282 - RNA, 22 nt, Human
cauuuggaaagagacuagagaa

SEQ ID NO: 222283 - RNA, 22 nt, Human
acaggaagugcuggcacuuaca

SEQ ID NO: 222284 - RNA, 22 nt, Human
uacuggguauacaaagaugaau

SEQ ID NO: 222285 - RNA, 22 nt, Human
auacaugugucccugauuuauu

SEQ ID NO: 222286 - RNA, 22 nt, Human
ucuccccagacccuggacauaa

SEQ ID NO: 222287 - RNA, 22 nt, Human
ugcaggcugccuucacagagcc

SEQ ID NO: 222288 - RNA, 20 nt, Human
gccuccacacucaccccuua

SEQ ID NO: 222289 - RNA, 20 nt, Human
cugugaccagagacccagga

SEQ ID NO: 222290 - RNA, 19 nt, Human
uuccaaaaucaggauuuga

SEQ ID NO: 222291 - RNA, 22 nt, Human
ggcagguguggaguguuauuuu

SEQ ID NO: 222292 - RNA, 22 nt, Human
ccccagagaaagucagcagcau

SEQ ID NO: 222293 - RNA, 22 nt, Human
ugggagcacucuuugggaagca

SEQ ID NO: 222294 - RNA, 22 nt, Human
gcccagggcgauggucggggcc

SEQ ID NO: 222295 - RNA, 22 nt, Human
uaguuucauaugcaaaauagua

SEQ ID NO: 222296 - RNA, 22 nt, Human
aauugcuaaagauuauguuuuc

SEQ ID NO: 222297 - RNA, 22 nt, Human
cuuauaaaguccaucugaacaa

SEQ ID NO: 222298 - RNA, 19 nt, Human
cuguggcugaccucuggcc

SEQ ID NO: 222299 - RNA, 21 nt, Human
agaaacaugaucaaaggaacc

SEQ ID NO: 222300 - RNA, 22 nt, Human
augcauauagaacauuugacau

SEQ ID NO: 222301 - RNA, 22 nt, Human
cagcaucuucuagauccaggcu

SEQ ID NO: 222302 - RNA, 22 nt, Human
ggaaggcuuuaagcaccaaagc

SEQ ID NO: 222303 - RNA, 22 nt, Human
ugacauguuagggaaaugugau

SEQ ID NO: 222304 - RNA, 22 nt, Human
uccuuggagcucuccaagggau

SEQ ID NO: 222305 - RNA, 22 nt, Human
uaugcauagugauuuagaacag

SEQ ID NO: 222306 - RNA, 22 nt, Human
uccuggagagaggccuggaaga

SEQ ID NO: 222307 - RNA, 22 nt, Human
aauucagagacucauucuggag

SEQ ID NO: 222308 - RNA, 22 nt, Human
ccauggcucuuaccuuguuaua

SEQ ID NO: 222309 - RNA, 19 nt, Human
agagccagacagcauagga

SEQ ID NO: 222310 - RNA, 22 nt, Human
gggguacuggcuggagccccac

SEQ ID NO: 222311 - RNA, 22 nt, Human
ugaggagaaaugcucagagcca

SEQ ID NO: 222312 - RNA, 20 nt, Human
uagaacuuuucaguauggau

SEQ ID NO: 222313 - RNA, 22 nt, Human
gagagagaaggccugugggugu

SEQ ID NO: 222314 - RNA, 22 nt, Human
ggaugucgaggaugggguagca

SEQ ID NO: 222315 - RNA, 22 nt, Human
ggggcagaaagcccacagagug

SEQ ID NO: 222316 - RNA, 22 nt, Human
cuggagcugucuucacaggccu

SEQ ID NO: 222317 - RNA, 22 nt, Human
uggcagcugcaggccuccugag

SEQ ID NO: 222318 - RNA, 22 nt, Human
agcaucuggauggaaagcaagg

SEQ ID NO: 222319 - RNA, 22 nt, Human
ucuguggcuucuauuuaacuuu

SEQ ID NO: 222320 - RNA, 22 nt, Human
agacagaaauaggagaaaccag

SEQ ID NO: 222321 - RNA, 22 nt, Human
uauaguuaguuucauaaucaug

SEQ ID NO: 222322 - RNA, 22 nt, Human
caauaauugcuuuccagaguua

SEQ ID NO: 222323 - RNA, 22 nt, Human
cugugggagcacaugacagaua

SEQ ID NO: 222324 - RNA, 21 nt, Human
uagcccucucugucuguguac

SEQ ID NO: 222325 - RNA, 22 nt, Human
uaguuaaagagauccacauucc

SEQ ID NO: 222326 - RNA, 22 nt, Human
ccuggcugcugucacugaccau

SEQ ID NO: 222327 - RNA, 20 nt, Human
cugugcuuuggaaccuggaa

SEQ ID NO: 222328 - RNA, 22 nt, Human
uuaguguguuaaugaguauauc

SEQ ID NO: 222329 - RNA, 22 nt, Human
aaauaguucagcuuguaaaccc

SEQ ID NO: 222330 - RNA, 22 nt, Human
ggggcuccagucuucacauuuu

SEQ ID NO: 222331 - RNA, 22 nt, Human
gugcaggcucucguucuugaca

SEQ ID NO: 222332 - RNA, 22 nt, Human
agcuuuagaauuguucagcaag

SEQ ID NO: 222333 - RNA, 22 nt, Human
uauugcugaugcugaagggaag

SEQ ID NO: 222334 - RNA, 18 nt, Human
agcuggggccucuggucc

SEQ ID NO: 222335 - RNA, 22 nt, Human
gcuggaguuagaacuagccugg

SEQ ID NO: 222336 - RNA, 22 nt, Human
uugcagggaaaucagugaggau

SEQ ID NO: 222337 - RNA, 22 nt, Human
uuucuguauuuugucauaaccu

SEQ ID NO: 222338 - RNA, 22 nt, Human
cugagcugugcuaagugaaaug

SEQ ID NO: 222339 - RNA, 22 nt, Human
uaaauucacuccugguagaccu

SEQ ID NO: 222340 - RNA, 22 nt, Human
uggcacaguuaaaguuguagaa

SEQ ID NO: 222341 - RNA, 22 nt, Human
agguuucuccuuuaaagcaugg

SEQ ID NO: 222342 - RNA, 21 nt, Human
aucaccagcagaagcugcaga

SEQ ID NO: 222343 - RNA, 22 nt, Human
uucaugaaacuuaacuguuggg

SEQ ID NO: 222344 - RNA, 22 nt, Human
uuggaaagcaagcuggacauac

SEQ ID NO: 222345 - RNA, 22 nt, Human
ugcccuguuccugccuccagcu

SEQ ID NO: 222346 - RNA, 22 nt, Human
uaaacagaaagcagauguacuu

SEQ ID NO: 222347 - RNA, 22 nt, Human
ugugugucacugaaagaaaucu

SEQ ID NO: 222348 - RNA, 22 nt, Human
caugcaaaugguggcuaaaugg

SEQ ID NO: 222349 - RNA, 22 nt, Human
uuacagagggcuucucugaacu

SEQ ID NO: 222350 - RNA, 22 nt, Human
ucucacugggucacagcagagg

SEQ ID NO: 222351 - RNA, 22 nt, Human
ggcagguguuuuuauauuaaag

SEQ ID NO: 222352 - RNA, 22 nt, Human
cugccugggccaugcccagucc

SEQ ID NO: 222353 - RNA, 22 nt, Human
agucacccuccaacucuccacu

SEQ ID NO: 222354 - RNA, 23 nt, Human
cagggccaggcagcagcugucac

SEQ ID NO: 222355 - RNA, 22 nt, Human
agggccuggcuucacuuucuca

SEQ ID NO: 222356 - RNA, 22 nt, Human
cagucuaaucuguuacucauua

SEQ ID NO: 222357 - RNA, 22 nt, Human
auucucuggcuaaaaccugaag

SEQ ID NO: 222358 - RNA, 20 nt, Human
uuggcucugaucaguggagc

SEQ ID NO: 222359 - RNA, 22 nt, Human
ugggaggcccaggccuggcagg

SEQ ID NO: 222360 - RNA, 22 nt, Human
gacauaauaaucugaccuagau

SEQ ID NO: 222361 - RNA, 22 nt, Human
agaggccaccacugucagggac

SEQ ID NO: 222362 - RNA, 20 nt, Human
gccugggauuauccacuggu

SEQ ID NO: 222363 - RNA, 22 nt, Human
caucuaccuccacccuauauau

SEQ ID NO: 222364 - RNA, 19 nt, Human
cacauuuugagucugagau

SEQ ID NO: 222365 - RNA, 20 nt, Human
aagggagaauaaugauugua

SEQ ID NO: 222366 - RNA, 22 nt, Human
uggaguuccuuugaaaggcucu

SEQ ID NO: 222367 - RNA, 22 nt, Human
aguggggccggugaggccgagg

SEQ ID NO: 222368 - RNA, 22 nt, Human
auauauacaacuagauuaaaag

SEQ ID NO: 222369 - RNA, 17 nt, Human
gauggggcugacaucag

SEQ ID NO: 222370 - RNA, 22 nt, Human
caugcaggccuauggagcagug

SEQ ID NO: 222371 - RNA, 22 nt, Human
ugggaugauagguaaguaauua

SEQ ID NO: 222372 - RNA, 22 nt, Human
aggcucaguuugguuuccauug

SEQ ID NO: 222373 - RNA, 22 nt, Human
agcaggggcaggguuuugugcu

SEQ ID NO: 222374 - RNA, 22 nt, Human
uuuucugugugucccucgacag

SEQ ID NO: 222375 - RNA, 22 nt, Human
ccucccucccucuuaugguuua

SEQ ID NO: 222376 - RNA, 22 nt, Human
ugggggugugccagggaccucc

SEQ ID NO: 222377 - RNA, 22 nt, Human
cuagaaagauacuuaaaucaag

SEQ ID NO: 222378 - RNA, 22 nt, Human
ugugcacauucuaggacuagua

SEQ ID NO: 222379 - RNA, 22 nt, Human
agggcuccuaugaugcucugcc

SEQ ID NO: 222380 - RNA, 22 nt, Human
cugggacauauugcuaguguug

SEQ ID NO: 222381 - RNA, 22 nt, Human
uuagaagugggccuauaguccu

SEQ ID NO: 222382 - RNA, 22 nt, Human
caguggcuucucaugucauuca

SEQ ID NO: 222383 - RNA, 22 nt, Human
ggagaaggugcuggucacugug

SEQ ID NO: 222384 - RNA, 20 nt, Human
ugcaaggaagcaggcaagug

SEQ ID NO: 222385 - RNA, 22 nt, Human
cuguacuaauugcuuuacaugu

SEQ ID NO: 222386 - RNA, 22 nt, Human
ucauuuugccugccauuugagu

SEQ ID NO: 222387 - RNA, 22 nt, Human
gccaggccacucccggguccug

SEQ ID NO: 222388 - RNA, 22 nt, Human
aaggcuugauauuuacagucuu

SEQ ID NO: 222389 - RNA, 22 nt, Human
auguuacaauccaacaaaauua

SEQ ID NO: 222390 - RNA, 23 nt, Human
aguuucuuugagacuugcccugu

SEQ ID NO: 222391 - RNA, 22 nt, Human
uggcuccucuucuggguguccc

SEQ ID NO: 222392 - RNA, 22 nt, Human
uaggcucagugaguagggaguu

SEQ ID NO: 222393 - RNA, 22 nt, Human
gcagcuuucugggacagaaagg

SEQ ID NO: 222394 - RNA, 22 nt, Human
cuuucugaaguuuaaguucuaa

SEQ ID NO: 222395 - RNA, 22 nt, Human
gucaggaugacaagugcuuuca

SEQ ID NO: 222396 - RNA, 22 nt, Human
ucuggcuagauugaugaguccc

SEQ ID NO: 222397 - RNA, 22 nt, Human
ugccaggcuuagagcaggggcu

SEQ ID NO: 222398 - RNA, 22 nt, Human
gcuccugcaggacccaggagac

SEQ ID NO: 222399 - RNA, 22 nt, Human
uuugaaagagcugauacaugaa

SEQ ID NO: 222400 - RNA, 22 nt, Human
cagucccacuagugccaauacc

SEQ ID NO: 222401 - RNA, 22 nt, Human
auuauuuauccucuuggucuau

SEQ ID NO: 222402 - RNA, 22 nt, Human
uggcucaggcuugaaaauagau

SEQ ID NO: 222403 - RNA, 22 nt, Human
cucagccccaauucuccccauu

SEQ ID NO: 222404 - RNA, 22 nt, Human
ggcuccagaaacuucaguccau

SEQ ID NO: 222405 - RNA, 22 nt, Human
gcacaauuauuuaugcaguaug

SEQ ID NO: 222406 - RNA, 22 nt, Human
ugcucuggacgcugagugguuu

SEQ ID NO: 222407 - RNA, 22 nt, Human
uuuuaaaggcagauuauggcuu

SEQ ID NO: 222408 - RNA, 22 nt, Human
aguuuggaagaauuuggucugu

SEQ ID NO: 222409 - RNA, 20 nt, Human
uauuuacaacuuagagccuc

SEQ ID NO: 222410 - RNA, 22 nt, Human
agcuccugcaccaggggccccu

SEQ ID NO: 222411 - RNA, 22 nt, Human
gcagcaucuguacauagacgcu

SEQ ID NO: 222412 - RNA, 22 nt, Human
aaagugcugagacagacuggga

SEQ ID NO: 222413 - RNA, 22 nt, Human
agggucuguuguuuguucugga

SEQ ID NO: 222414 - RNA, 22 nt, Human
aaguccagcagugcuuguugau

SEQ ID NO: 222415 - RNA, 22 nt, Human
ggccgcugcgccuccaaccgag

SEQ ID NO: 222416 - RNA, 22 nt, Human
cagagccucucagaggucagac

SEQ ID NO: 222417 - RNA, 22 nt, Human
ucucuucuuguguuuuccugcc

SEQ ID NO: 222418 - RNA, 19 nt, Human
ggacagucucagccucaug

SEQ ID NO: 222419 - RNA, 22 nt, Human
agcaguuauauuacucucaggu

SEQ ID NO: 222420 - RNA, 23 nt, Human
acuggacagaguggacgaggcug

SEQ ID NO: 222421 - RNA, 22 nt, Human
cuucccugagcuuucucaggcu

SEQ ID NO: 222422 - RNA, 22 nt, Human
agauauuaaucguacauaaggu

SEQ ID NO: 222423 - RNA, 20 nt, Human
uuuaucugugggaguggaga

SEQ ID NO: 222424 - RNA, 22 nt, Human
cccaaguuaauuuguagcugaa

SEQ ID NO: 222425 - RNA, 22 nt, Human
gcagaagcuguucgaaggccgc

SEQ ID NO: 222426 - RNA, 22 nt, Human
ugcagcugcugguggcugaaag

SEQ ID NO: 222427 - RNA, 22 nt, Human
ucacagaacaauguuuaguucu

SEQ ID NO: 222428 - RNA, 22 nt, Human
uacauucaacaugucacuaugu

SEQ ID NO: 222429 - RNA, 22 nt, Human
aucacauugccagugauuaccc

SEQ ID NO: 222430 - RNA, 19 nt, Human
agcccagcuuauuugucag

SEQ ID NO: 222431 - RNA, 22 nt, Human
gcucuggcagcugauauuagga

SEQ ID NO: 222432 - RNA, 20 nt, Human
agcucuuacuuugcagcagc

SEQ ID NO: 222433 - RNA, 19 nt, Human
acagcagggauuuuuggag

SEQ ID NO: 222434 - RNA, 22 nt, Human
auuugaagaaaguuuucuagau

SEQ ID NO: 222435 - RNA, 22 nt, Human
agcugccagaugacagugcuau

SEQ ID NO: 222436 - RNA, 22 nt, Human
aucauggaagccuaucuugaga

SEQ ID NO: 222437 - RNA, 22 nt, Human
auuucuuuucaagagggugcuu

SEQ ID NO: 222438 - RNA, 18 nt, Human
aaugaaauguacaccuuu

SEQ ID NO: 222439 - RNA, 22 nt, Human
ucuggcaggacaugcugaccau

SEQ ID NO: 222440 - RNA, 17 nt, Human
cauuuguugaucaguug

SEQ ID NO: 222441 - RNA, 22 nt, Human
ccagcugcagguguuccagaug

SEQ ID NO: 222442 - RNA, 22 nt, Human
ucccaggccauaaaacucagag

SEQ ID NO: 222443 - RNA, 22 nt, Human
aaagacuuuagguuagaggcau

SEQ ID NO: 222444 - RNA, 22 nt, Human
cauagaacagcuccuagcacau

SEQ ID NO: 222445 - RNA, 20 nt, Human
cugugccuccugcuaguccu

SEQ ID NO: 222446 - RNA, 19 nt, Human
cagcugccuuuucuuugca

SEQ ID NO: 222447 - RNA, 22 nt, Human
cuucuauucacuggucacaguu

SEQ ID NO: 222448 - RNA, 23 nt, Human
aggcccaacucugugagggcugc

SEQ ID NO: 222449 - RNA, 22 nt, Human
auaaauuuauaauuguuuccug

SEQ ID NO: 222450 - RNA, 16 nt, Human
caauacauggcauuuc

SEQ ID NO: 222451 - RNA, 22 nt, Human
uucucaguuucacugauaacag

SEQ ID NO: 222452 - RNA, 22 nt, Human
ucccagcccagguaugaugaua

SEQ ID NO: 222453 - RNA, 22 nt, Human
cagaugaacuaggcugcacuug

SEQ ID NO: 222454 - RNA, 22 nt, Human
uccaggcuuuggggcaggagcg

SEQ ID NO: 222455 - RNA, 22 nt, Human
guucaguuuugaaauguuaauu

SEQ ID NO: 222456 - RNA, 22 nt, Human
augggggcggcugaagcccagg

SEQ ID NO: 222457 - RNA, 22 nt, Human
auaauauaauccuacuucccau

SEQ ID NO: 222458 - RNA, 22 nt, Human
uagggcagcugcaucaggcacu

SEQ ID NO: 222459 - RNA, 22 nt, Human
aaguuucaugauguaauuauug

SEQ ID NO: 222460 - RNA, 22 nt, Human
uucaggaagugcugccuggugu

SEQ ID NO: 222461 - RNA, 22 nt, Human
ggagaggggcaaguuuaucuag

SEQ ID NO: 222462 - RNA, 22 nt, Human
agacaugccaagaaacccagug

SEQ ID NO: 222463 - RNA, 22 nt, Human
uuugcuuugggagguugucugg

SEQ ID NO: 222464 - RNA, 22 nt, Human
gaggagaaauuuggggaccuga

SEQ ID NO: 222465 - RNA, 22 nt, Human
uccugcaggccagaggggugag

SEQ ID NO: 222466 - RNA, 22 nt, Human
auuuucucucaaaccuuaaaau

SEQ ID NO: 222467 - RNA, 22 nt, Human
aaugaacaggugaaugucagau

SEQ ID NO: 222468 - RNA, 22 nt, Human
ugggccagcaauugcugcucag

SEQ ID NO: 222469 - RNA, 22 nt, Human
ucuauauuauacauccaggauu

SEQ ID NO: 222470 - RNA, 19 nt, Human
guguggcagagagugacca

SEQ ID NO: 222471 - RNA, 22 nt, Human
ucuuugaaaagggagauagaaa

SEQ ID NO: 222472 - RNA, 22 nt, Human
uucacauuagugguucuauaua

SEQ ID NO: 222473 - RNA, 22 nt, Human
gacagggaggagcagagcuucu

SEQ ID NO: 222474 - RNA, 23 nt, Human
gcucuggcagcuugugucagcac

SEQ ID NO: 222475 - RNA, 22 nt, Human
ucuagaaagccaaauuaggaau

SEQ ID NO: 222476 - RNA, 22 nt, Human
aacaaauuuagcucugagugcu

SEQ ID NO: 222477 - RNA, 19 nt, Human
ugagggacauugggagcag

SEQ ID NO: 222478 - RNA, 22 nt, Human
agguagaucaacuggggaggga

SEQ ID NO: 222479 - RNA, 22 nt, Human
aagaggaagucuccauggagag

SEQ ID NO: 222480 - RNA, 22 nt, Human
ccucagaccccugcugagcuuc

SEQ ID NO: 222481 - RNA, 22 nt, Human
aggccacagucagugggugcug

SEQ ID NO: 222482 - RNA, 22 nt, Human
uuucucaguuacuagcuguggu

SEQ ID NO: 222483 - RNA, 20 nt, Human
gcagcagugcaaguccucuu

SEQ ID NO: 222484 - RNA, 22 nt, Human
augguuuaguuagggcuuuuca

SEQ ID NO: 222485 - RNA, 22 nt, Human
gugcaaaaauaauugugguuuu

SEQ ID NO: 222486 - RNA, 22 nt, Human
ccuuccagauguaagagcugau

SEQ ID NO: 222487 - RNA, 22 nt, Human
uauggaaauaauuagacaagug

SEQ ID NO: 222488 - RNA, 22 nt, Human
cuccagaauuguccauuggaaa

SEQ ID NO: 222489 - RNA, 23 nt, Human
cagugggaggacugagauaaaac

SEQ ID NO: 222490 - RNA, 22 nt, Human
uccaaaaaacguuugaauaguu

SEQ ID NO: 222491 - RNA, 22 nt, Human
aagucuuuuguucaggcuggca

SEQ ID NO: 222492 - RNA, 22 nt, Human
aagggcugaucucacuuucuuu

SEQ ID NO: 222493 - RNA, 22 nt, Human
cacagcauaaugaaauauacuu

SEQ ID NO: 222494 - RNA, 22 nt, Human
auuggcuccuucuaacaugucu

SEQ ID NO: 222495 - RNA, 22 nt, Human
ccugcaguuuguugugaccccg

SEQ ID NO: 222496 - RNA, 22 nt, Human
gaaacagcacguuuggagagau

SEQ ID NO: 222497 - RNA, 22 nt, Human
aaaaaguauuggccaugguuga

SEQ ID NO: 222498 - RNA, 22 nt, Human
cagaaguuccuauuuaccuccu

SEQ ID NO: 222499 - RNA, 22 nt, Human
auuuccaaaaccacuuauugcc

SEQ ID NO: 222500 - RNA, 22 nt, Human
agcugcacugugaaguucauag

SEQ ID NO: 222501 - RNA, 22 nt, Human
ccuucaaucagcagucuagcuu

SEQ ID NO: 222502 - RNA, 22 nt, Human
acuuccuuguacugacuccauu

SEQ ID NO: 222503 - RNA, 18 nt, Human
ggacacagauagguacag

SEQ ID NO: 222504 - RNA, 22 nt, Human
uuucaaauagaaucuuuccaaa

SEQ ID NO: 222505 - RNA, 22 nt, Human
acggggcuagagaagguuucuu

SEQ ID NO: 222506 - RNA, 22 nt, Human
aaaauugagagucuugugcaag

SEQ ID NO: 222507 - RNA, 22 nt, Human
uaucacuacacuucagcuuuaa

SEQ ID NO: 222508 - RNA, 22 nt, Human
cugcaaucuccaugcuugauuu

SEQ ID NO: 222509 - RNA, 22 nt, Human
aaaacaguuuuugcuaacugcu

SEQ ID NO: 222510 - RNA, 22 nt, Human
ugagaauuuuuugucaugcauu

SEQ ID NO: 222511 - RNA, 22 nt, Human
aggcucuggaguguggugcugg

SEQ ID NO: 222512 - RNA, 22 nt, Human
aaaucuuucccuuuacuaucca

SEQ ID NO: 222513 - RNA, 22 nt, Human
uaucuagaaauuucuuuuguug

SEQ ID NO: 222514 - RNA, 22 nt, Human
uaaagcuguuagaguaguaaga

SEQ ID NO: 222515 - RNA, 22 nt, Human
augcugaaaauuggauuugaau

SEQ ID NO: 222516 - RNA, 22 nt, Human
uagguucacugucuugaggagc

SEQ ID NO: 222517 - RNA, 22 nt, Human
gugaauuaggcuauggcagagg

SEQ ID NO: 222518 - RNA, 22 nt, Human
gugcagggcuggcaccggaggc

SEQ ID NO: 222519 - RNA, 22 nt, Human
cugagggagggacuuugagacu

SEQ ID NO: 222520 - RNA, 22 nt, Human
aacacuguaacagcaucauuuu

SEQ ID NO: 222521 - RNA, 22 nt, Human
agaacguggaauguggcuccuu

SEQ ID NO: 222522 - RNA, 18 nt, Human
ggcaccucucuugccuua

SEQ ID NO: 222523 - RNA, 22 nt, Human
agaguccagaaaacagugugcu

SEQ ID NO: 222524 - RNA, 22 nt, Human
agcggucaggagaaauaagcau

SEQ ID NO: 222525 - RNA, 22 nt, Human
gaacaguaaauuuaugcagcac

SEQ ID NO: 222526 - RNA, 22 nt, Human
aggcuucuguuucuuaaaggug

SEQ ID NO: 222527 - RNA, 19 nt, Human
uccuuucuguuccugagau

SEQ ID NO: 222528 - RNA, 22 nt, Human
cagaggaaaugggaaggagaua

SEQ ID NO: 222529 - RNA, 22 nt, Human
uuaccuguguguuugauacaua

SEQ ID NO: 222530 - RNA, 22 nt, Human
gaggaaaauaacaacuaagggc

SEQ ID NO: 222531 - RNA, 22 nt, Human
agagugggccucugagucccag

SEQ ID NO: 222532 - RNA, 22 nt, Human
guauucuuauacucagugagcu

SEQ ID NO: 222533 - RNA, 22 nt, Human
aggcaguggcugagaccagggg

SEQ ID NO: 222534 - RNA, 22 nt, Human
cccugcagagaccacugaccuu

SEQ ID NO: 222535 - RNA, 22 nt, Human
ugaggcaacagaaagggccaau

SEQ ID NO: 222536 - RNA, 22 nt, Human
uggccaccccuuucucugcacu

SEQ ID NO: 222537 - RNA, 22 nt, Human
caguguggagggagagagccug

SEQ ID NO: 222538 - RNA, 17 nt, Human
cugaggagaacagaaag

SEQ ID NO: 222539 - RNA, 22 nt, Human
uagggcuguuuaaaagugaggu

SEQ ID NO: 222540 - RNA, 22 nt, Human
ugagcuuucauguaugaaaaga

SEQ ID NO: 222541 - RNA, 21 nt, Human
aggccaaguuggauuucuuca

SEQ ID NO: 222542 - RNA, 22 nt, Human
uuuuaccugaaccacacaguau

SEQ ID NO: 222543 - RNA, 22 nt, Human
ccaggucuuggcccccggaccu

SEQ ID NO: 222544 - RNA, 22 nt, Human
uaugcuaaauauguucacauug

SEQ ID NO: 222545 - RNA, 22 nt, Human
auggcuucgaguauauacauag

SEQ ID NO: 222546 - RNA, 22 nt, Human
cauguuaaugaauuuuugcagu

SEQ ID NO: 222547 - RNA, 18 nt, Human
cccagcuuagcgccccuc

SEQ ID NO: 222548 - RNA, 22 nt, Human
ggcaguggcauguggguagugg

SEQ ID NO: 222549 - RNA, 22 nt, Human
gcagcaguaggaaauaacacag

SEQ ID NO: 222550 - RNA, 22 nt, Human
cccugagaugccucacccuagu

SEQ ID NO: 222551 - RNA, 22 nt, Human
acaucuucacugguuucuggaa

SEQ ID NO: 222552 - RNA, 22 nt, Human
gcuggcucugcacccaggccuc

SEQ ID NO: 222553 - RNA, 23 nt, Human
uucugucuugcugucagcuuucu

SEQ ID NO: 222554 - RNA, 22 nt, Human
aggcacaggccucagcacccag

SEQ ID NO: 222555 - RNA, 22 nt, Human
cuugcacacauguacaugugua

SEQ ID NO: 222556 - RNA, 22 nt, Human
cugggagagccuuuccugaguc

SEQ ID NO: 222557 - RNA, 22 nt, Human
ugagucacuaucacuuucucug

SEQ ID NO: 222558 - RNA, 22 nt, Human
guacuucuggccaggcuggcca

SEQ ID NO: 222559 - RNA, 22 nt, Human
ggguaggccagaagggccugga

SEQ ID NO: 222560 - RNA, 22 nt, Human
ugugcuuucaaaguuaaguaaa

SEQ ID NO: 222561 - RNA, 22 nt, Human
aggaccauccuaagguaggcaa

SEQ ID NO: 222562 - RNA, 22 nt, Human
cugaggcaggauggccuggcug

SEQ ID NO: 222563 - RNA, 22 nt, Human
ugccuucaaucaggauggucuc

SEQ ID NO: 222564 - RNA, 22 nt, Human
cacaucuacugaaugagcagug

SEQ ID NO: 222565 - RNA, 22 nt, Human
uagaggcaaccaguguugagaa

SEQ ID NO: 222566 - RNA, 22 nt, Human
gaguccuuccagcaggcauuua

SEQ ID NO: 222567 - RNA, 22 nt, Human
aaauggaaguguauuuaguguu

SEQ ID NO: 222568 - RNA, 22 nt, Human
cuguuuucccuggaguucagca

SEQ ID NO: 222569 - RNA, 23 nt, Human
cauccaggagcugagucugacug

SEQ ID NO: 222570 - RNA, 22 nt, Human
ggccuggcauggggacuaaggg

SEQ ID NO: 222571 - RNA, 17 nt, Human
ccaggagcgugggucuc

SEQ ID NO: 222572 - RNA, 22 nt, Human
ugcagauucaaaugaaaugcaa

SEQ ID NO: 222573 - RNA, 22 nt, Human
agcuccagaagccugcaaggua

SEQ ID NO: 222574 - RNA, 20 nt, Human
agugcaagaaagcacagcug

SEQ ID NO: 222575 - RNA, 22 nt, Human
gugaaaagagagccugugucag

SEQ ID NO: 222576 - RNA, 22 nt, Human
ucuggcuguuaggccugaccuu

SEQ ID NO: 222577 - RNA, 20 nt, Human
agugacugggagaauggauu

SEQ ID NO: 222578 - RNA, 23 nt, Human
ccuguggcaaguagaugagauga

SEQ ID NO: 222579 - RNA, 22 nt, Human
auacuucuggugacaaagucuu

SEQ ID NO: 222580 - RNA, 22 nt, Human
uuugaguagugagacuaggcag

SEQ ID NO: 222581 - RNA, 22 nt, Human
uccugcagccauuagaggucaa

SEQ ID NO: 222582 - RNA, 22 nt, Human
aggcuccacggucacuggcucu

SEQ ID NO: 222583 - RNA, 22 nt, Human
cacagguucaaauucaggucgc

SEQ ID NO: 222584 - RNA, 22 nt, Human
aagcaaagugcuuugccuccag

SEQ ID NO: 222585 - RNA, 22 nt, Human
uucuuaaaacuuauggacaggu

SEQ ID NO: 222586 - RNA, 22 nt, Human
cuuucuaguaggaaguagauca

SEQ ID NO: 222587 - RNA, 22 nt, Human
gcuggcagacugggggcagaac

SEQ ID NO: 222588 - RNA, 22 nt, Human
ccagcuggucugugcucauguu

SEQ ID NO: 222589 - RNA, 22 nt, Human
uacacaucacuguaucuuucag

SEQ ID NO: 222590 - RNA, 22 nt, Human
cuuuaguuuaagaacaugauga

SEQ ID NO: 222591 - RNA, 22 nt, Human
auaaggcaagcugucaguuugu

SEQ ID NO: 222592 - RNA, 22 nt, Human
uccagugcaauggcucauucau

SEQ ID NO: 222593 - RNA, 22 nt, Human
ccucaggauccgcaggugcagu

SEQ ID NO: 222594 - RNA, 22 nt, Human
gcaccugguuuauauaaucaua

SEQ ID NO: 222595 - RNA, 22 nt, Human
ggccagaaguuggaaaagagcc

SEQ ID NO: 222596 - RNA, 22 nt, Human
cagcagagcuuauguuggguca

SEQ ID NO: 222597 - RNA, 22 nt, Human
agcaggcuaagggaccuguuua

SEQ ID NO: 222598 - RNA, 22 nt, Human
gccucaggccuauagcugcugu

SEQ ID NO: 222599 - RNA, 23 nt, Human
cagcccuggagaugugggaggca

SEQ ID NO: 222600 - RNA, 16 nt, Human
cagcuuuaugucagug

SEQ ID NO: 222601 - RNA, 22 nt, Human
cuugaauguaaauaauguacag

SEQ ID NO: 222602 - RNA, 23 nt, Human
cuagaugcaagcuccaugaggga

SEQ ID NO: 222603 - RNA, 22 nt, Human
gacaauuucucaauauagaaac

SEQ ID NO: 222604 - RNA, 22 nt, Human
ucagcaggugaacaucaugcca

SEQ ID NO: 222605 - RNA, 22 nt, Human
cugaaggagaaggccacuguuc

SEQ ID NO: 222606 - RNA, 16 nt, Human
gagaagagcccggcag

SEQ ID NO: 222607 - RNA, 22 nt, Human
aguggcaucaaaucaagguuug

SEQ ID NO: 222608 - RNA, 21 nt, Human
aaacuagcagcaaccaugauc

SEQ ID NO: 222609 - RNA, 22 nt, Human
ugcaggcucugugugugccugg

SEQ ID NO: 222610 - RNA, 22 nt, Human
uauuuccuguggauacuuuuag

SEQ ID NO: 222611 - RNA, 22 nt, Human
aaauccaacgacagguguacuu

SEQ ID NO: 222612 - RNA, 22 nt, Human
uggcugucagcugccuggugcg

SEQ ID NO: 222613 - RNA, 22 nt, Human
uauacacauauacguuugugug

SEQ ID NO: 222614 - RNA, 22 nt, Human
gaggcugagacucugaauuuuu

SEQ ID NO: 222615 - RNA, 22 nt, Human
ugggcucugugccagguuggug

SEQ ID NO: 222616 - RNA, 22 nt, Human
auuacagaaauauggucaaaga

SEQ ID NO: 222617 - RNA, 22 nt, Human
ccagugcacaauggaacaacuc

SEQ ID NO: 222618 - RNA, 21 nt, Human
uacaagauagagguaauauau

SEQ ID NO: 222619 - RNA, 23 nt, Human
aggcccagguauguuuguuuugg

SEQ ID NO: 222620 - RNA, 22 nt, Human
ccucuggcauagcaaguggccu

SEQ ID NO: 222621 - RNA, 22 nt, Human
gcugcuguugauuuaguccaau

SEQ ID NO: 222622 - RNA, 19 nt, Human
ggcaccuuggcuaugccug

SEQ ID NO: 222623 - RNA, 22 nt, Human
ucucuguggagcaguguguuca

SEQ ID NO: 222624 - RNA, 22 nt, Human
uggggaagggcacccuggagac

SEQ ID NO: 222625 - RNA, 22 nt, Human
gcuucugcgccuagccucaggu

SEQ ID NO: 222626 - RNA, 21 nt, Human
cucaggcuggcagcaggcuag

SEQ ID NO: 222627 - RNA, 22 nt, Human
gcccugagaagaagucggaggg

SEQ ID NO: 222628 - RNA, 22 nt, Human
caggcugccgugggguccaggc

SEQ ID NO: 222629 - RNA, 22 nt, Human
guagggacaauauguuauuaga

SEQ ID NO: 222630 - RNA, 22 nt, Human
uuugguaaguacccaccugggu

SEQ ID NO: 222631 - RNA, 22 nt, Human
caugcuaaccagagacauaaag

SEQ ID NO: 222632 - RNA, 22 nt, Human
uuuagcagugaagugaagugaa

SEQ ID NO: 222633 - RNA, 16 nt, Human
gcagguggggcgcgca

SEQ ID NO: 222634 - RNA, 22 nt, Human
uucaguuucaaauccugugaag

SEQ ID NO: 222635 - RNA, 16 nt, Human
guuccuucccacaccu

SEQ ID NO: 222636 - RNA, 22 nt, Human
cacaccagagguuaccugcaaa

SEQ ID NO: 222637 - RNA, 22 nt, Human
gguccaugauaggaaguuccga

SEQ ID NO: 222638 - RNA, 23 nt, Human
uucauuuaggaguucauaagagc

SEQ ID NO: 222639 - RNA, 22 nt, Human
cagaggcugaugugggaugggc

SEQ ID NO: 222640 - RNA, 22 nt, Human
auccuucuucugcuagugucua

SEQ ID NO: 222641 - RNA, 22 nt, Human
augauucucauuuuauaaacuu

SEQ ID NO: 222642 - RNA, 22 nt, Human
gcccaggcuagcguagagugca

SEQ ID NO: 222643 - RNA, 22 nt, Human
ggcucagaaaccucuggugucu

SEQ ID NO: 222644 - RNA, 22 nt, Human
aaagcagauucugaugcaguag

SEQ ID NO: 222645 - RNA, 21 nt, Human
aacaugauauguguauggauu

SEQ ID NO: 222646 - RNA, 22 nt, Human
uuagaucauuuuagcuaaaugg

SEQ ID NO: 222647 - RNA, 22 nt, Human
gaaauucugugucccagagugc

SEQ ID NO: 222648 - RNA, 22 nt, Human
cugcacaguggguggggcguca

SEQ ID NO: 222649 - RNA, 22 nt, Human
cccugccucugaagcugcucag

SEQ ID NO: 222650 - RNA, 22 nt, Human
guagaaauauuuaucucugaga

SEQ ID NO: 222651 - RNA, 22 nt, Human
uacaagugugcaccaccauguc

SEQ ID NO: 222652 - RNA, 22 nt, Human
acuuucuauucccacagagaua

SEQ ID NO: 222653 - RNA, 22 nt, Human
cuguagcagacagacccuaggu

SEQ ID NO: 222654 - RNA, 22 nt, Human
ggaagcucuguggcuuggaguc

SEQ ID NO: 222655 - RNA, 22 nt, Human
gggacaugccccucagugggug

SEQ ID NO: 222656 - RNA, 22 nt, Human
gccgggaccaaggccacggagc

SEQ ID NO: 222657 - RNA, 22 nt, Human
ccauggagcgggugagugagug

SEQ ID NO: 222658 - RNA, 22 nt, Human
ucucuggcagggauaucuggcu

SEQ ID NO: 222659 - RNA, 22 nt, Human
ggcaggcaggagcucugucucc

SEQ ID NO: 222660 - RNA, 22 nt, Human
ucccugggccacagcugugagc

SEQ ID NO: 222661 - RNA, 22 nt, Human
cuccuggggccauggaaggaac

SEQ ID NO: 222662 - RNA, 22 nt, Human
uuuuauucucaagacaauggga

SEQ ID NO: 222663 - RNA, 22 nt, Human
uggcucaguuuagcagcucagu

SEQ ID NO: 222664 - RNA, 22 nt, Human
auacaugaggcucauuuauguc

SEQ ID NO: 222665 - RNA, 22 nt, Human
agguccaguuuucugacaaggg

SEQ ID NO: 222666 - RNA, 20 nt, Human
aggguggcaaguuagugaca

SEQ ID NO: 222667 - RNA, 22 nt, Human
uauuuucuggacagucuugcuu

SEQ ID NO: 222668 - RNA, 22 nt, Human
uugaacauuggcaauuucauau

SEQ ID NO: 222669 - RNA, 23 nt, Human
auguuaaacauaacugaagagcc

SEQ ID NO: 222670 - RNA, 22 nt, Human
aagcagagcaagcguauuuauu

SEQ ID NO: 222671 - RNA, 22 nt, Human
uagaaacacagaucugguguca

SEQ ID NO: 222672 - RNA, 22 nt, Human
ugccugguauuugaauaaagag

SEQ ID NO: 222673 - RNA, 22 nt, Human
ccauguguugagauuccagccu

SEQ ID NO: 222674 - RNA, 22 nt, Human
augaggcaggagugcaguggca

SEQ ID NO: 222675 - RNA, 19 nt, Human
cugguuuagguagugaguc

SEQ ID NO: 222676 - RNA, 22 nt, Human
ucuaacuuguauguauaguuuu

SEQ ID NO: 222677 - RNA, 22 nt, Human
gucuagaauugcuuggcagaug

SEQ ID NO: 222678 - RNA, 22 nt, Human
ccucaaaggccuggcaccagaa

SEQ ID NO: 222679 - RNA, 22 nt, Human
ccauggcuaaguaucuguagaa

SEQ ID NO: 222680 - RNA, 22 nt, Human
augaggugauggacauauuaac

SEQ ID NO: 222681 - RNA, 21 nt, Human
ugccagggauuuacagagccu

SEQ ID NO: 222682 - RNA, 22 nt, Human
cucaggaugcaauuccaucaag

SEQ ID NO: 222683 - RNA, 22 nt, Human
cccugcaguccuuucuuggcuc

SEQ ID NO: 222684 - RNA, 22 nt, Human
aaacaaguguaaacuagucugu

SEQ ID NO: 222685 - RNA, 22 nt, Human
gccuggcacaggaauuaggagg

SEQ ID NO: 222686 - RNA, 22 nt, Human
cucugcacccccggcuccucgu

SEQ ID NO: 222687 - RNA, 18 nt, Human
cuguugagauguggcuga

SEQ ID NO: 222688 - RNA, 22 nt, Human
uccugucugcucacagagcugg

SEQ ID NO: 222689 - RNA, 22 nt, Human
ugggccaguuucucauugaaau

SEQ ID NO: 222690 - RNA, 22 nt, Human
uuuaaauguguucuuaguagcu

SEQ ID NO: 222691 - RNA, 23 nt, Human
ugagaucuuuguaguaucaauga

SEQ ID NO: 222692 - RNA, 22 nt, Human
uccugggcgagguacuggggcu

SEQ ID NO: 222693 - RNA, 22 nt, Human
uccauuuucuaaguaucacuua

SEQ ID NO: 222694 - RNA, 22 nt, Human
gagcuggucgaaaugggcugac

SEQ ID NO: 222695 - RNA, 19 nt, Human
uucuaccuuacuguaggcu

SEQ ID NO: 222696 - RNA, 21 nt, Human
ccaggcagagcugugaguucu

SEQ ID NO: 222697 - RNA, 22 nt, Human
uaauuuuacuuccugagcaccu

SEQ ID NO: 222698 - RNA, 22 nt, Human
uggcaaagacugcaaggacuuu

SEQ ID NO: 222699 - RNA, 22 nt, Human
aaaauuacuauuguuccugggc

SEQ ID NO: 222700 - RNA, 22 nt, Human
uggagcaggacggggaguggua

SEQ ID NO: 222701 - RNA, 22 nt, Human
uuagcucagaaaauuuaaacuu

SEQ ID NO: 222702 - RNA, 22 nt, Human
guuuacauuaaguauuagcauc

SEQ ID NO: 222703 - RNA, 22 nt, Human
augaggucuggcaaucagaaac

SEQ ID NO: 222704 - RNA, 22 nt, Human
agagcagauggagcuggaagag

SEQ ID NO: 222705 - RNA, 22 nt, Human
gacagcagcauguuuacaggcc

SEQ ID NO: 222706 - RNA, 22 nt, Human
aggcagaugugauuaauuuccu

SEQ ID NO: 222707 - RNA, 22 nt, Human
ccugugggagcccaggcagaua

SEQ ID NO: 222708 - RNA, 22 nt, Human
uagaauaaguugaugauauaug

SEQ ID NO: 222709 - RNA, 22 nt, Human
uccugucuaaagaccugcaggc

SEQ ID NO: 222710 - RNA, 22 nt, Human
uuguucaggccugggacaguuu

SEQ ID NO: 222711 - RNA, 22 nt, Human
gcagggcugggugggagacaga

SEQ ID NO: 222712 - RNA, 22 nt, Human
agacaggugcucgcccaagucc

SEQ ID NO: 222713 - RNA, 22 nt, Human
cauuacaucuuugaugcaguau

SEQ ID NO: 222714 - RNA, 22 nt, Human
uaacugguuuggcucagggucu

SEQ ID NO: 222715 - RNA, 23 nt, Human
ccagggagugcuacuaucaagcc

SEQ ID NO: 222716 - RNA, 22 nt, Human
uugaaugaauuugagcagagau

SEQ ID NO: 222717 - RNA, 22 nt, Human
agucaguucauggcucuguccu

SEQ ID NO: 222718 - RNA, 22 nt, Human
uaucuaaaggauuuaauuuagu

SEQ ID NO: 222719 - RNA, 22 nt, Human
uaguccugaccuugccaccagc

SEQ ID NO: 222720 - RNA, 22 nt, Human
acagaagugacaauuucuuggg

SEQ ID NO: 222721 - RNA, 22 nt, Human
auaguacaagggaagagugaag

SEQ ID NO: 222722 - RNA, 22 nt, Human
ggcgcaggccuuggauccuggu

SEQ ID NO: 222723 - RNA, 22 nt, Human
aaaggcuuuaaagaaccagaac

SEQ ID NO: 222724 - RNA, 22 nt, Human
caggaaagggaugggcugccac

SEQ ID NO: 222725 - RNA, 22 nt, Human
cuguacauauacauuuuuuucc

SEQ ID NO: 222726 - RNA, 22 nt, Human
gcccuggagggccagcgacugg

SEQ ID NO: 222727 - RNA, 22 nt, Human
accauuugacucucuaaggaua

SEQ ID NO: 222728 - RNA, 22 nt, Human
augcaugugcauggcucuaucu

SEQ ID NO: 222729 - RNA, 22 nt, Human
gugcccagugcaggcccgcagg

SEQ ID NO: 222730 - RNA, 19 nt, Human
caagauuuguucacacaug

SEQ ID NO: 222731 - RNA, 22 nt, Human
auguccuuccugagaucccugu

SEQ ID NO: 222732 - RNA, 22 nt, Human
uuggagucagaugacuguagga

SEQ ID NO: 222733 - RNA, 22 nt, Human
ccuggccuuaagggcagggagc

SEQ ID NO: 222734 - RNA, 22 nt, Human
ccuccagcugccucagucucuu

SEQ ID NO: 222735 - RNA, 22 nt, Human
uucugauucaugauccaguucu

SEQ ID NO: 222736 - RNA, 22 nt, Human
cuagggaaugagagacuggauc

SEQ ID NO: 222737 - RNA, 22 nt, Human
uguaagaauaaugauuucuaag

SEQ ID NO: 222738 - RNA, 22 nt, Human
ucuguggaagauuccaggcguu

SEQ ID NO: 222739 - RNA, 22 nt, Human
acugugcaggggaagagagaaa

SEQ ID NO: 222740 - RNA, 22 nt, Human
agagacacaucauauaaguaua

SEQ ID NO: 222741 - RNA, 22 nt, Human
gcaagcuggcuguuagaggaug

SEQ ID NO: 222742 - RNA, 22 nt, Human
ucugagaaaauaggaaacuuga

SEQ ID NO: 222743 - RNA, 22 nt, Human
ccugccuucccagcuuggcuuu

SEQ ID NO: 222744 - RNA, 22 nt, Human
cuuuuuguguaugcuacaguug

SEQ ID NO: 222745 - RNA, 22 nt, Human
agccucaguuucaggccuccuc

SEQ ID NO: 222746 - RNA, 22 nt, Human
agcccugcaggaggugggagag

SEQ ID NO: 222747 - RNA, 22 nt, Human
auaauguagguauguguauuua

SEQ ID NO: 222748 - RNA, 22 nt, Human
cacccagcuuuugcauccuccg

SEQ ID NO: 222749 - RNA, 20 nt, Human
ggcuucuucaggugucuauu

SEQ ID NO: 222750 - RNA, 22 nt, Human
ucugcccucaggguaaugauca

SEQ ID NO: 222751 - RNA, 22 nt, Human
gcuucucuuaaugccuggcuuu

SEQ ID NO: 222752 - RNA, 22 nt, Human
gggcugacaccacccaggcgca

SEQ ID NO: 222753 - RNA, 22 nt, Human
ucuauuuucuugccaaaacugc

SEQ ID NO: 222754 - RNA, 22 nt, Human
aguggcaguuugggagcuacag

SEQ ID NO: 222755 - RNA, 22 nt, Human
ccugcucagccccagcucaccc

SEQ ID NO: 222756 - RNA, 22 nt, Human
aggcuccugcaggccuuguagg

SEQ ID NO: 222757 - RNA, 21 nt, Human
ggccucugccuugccccacuc

SEQ ID NO: 222758 - RNA, 19 nt, Human
ucucagaauuaagagugcu

SEQ ID NO: 222759 - RNA, 22 nt, Human
gguggaaggccuggaaggaggc

SEQ ID NO: 222760 - RNA, 22 nt, Human
auuuccuguugcuuuugccacu

SEQ ID NO: 222761 - RNA, 22 nt, Human
gcacaggucaggagaugagauu

SEQ ID NO: 222762 - RNA, 22 nt, Human
ugcaauaauguaugucacuccc

SEQ ID NO: 222763 - RNA, 22 nt, Human
ggcucagaaacuaaaggcgcug

SEQ ID NO: 222764 - RNA, 22 nt, Human
agggaggaaggaacuccuucua

SEQ ID NO: 222765 - RNA, 22 nt, Human
ucugagcuuuagcugggauuuu

SEQ ID NO: 222766 - RNA, 22 nt, Human
cuacuucuugaucugucgaccu

SEQ ID NO: 222767 - RNA, 22 nt, Human
uagucagacccaagagagccau

SEQ ID NO: 222768 - RNA, 22 nt, Human
ugcuuugugauaugcugugucu

SEQ ID NO: 222769 - RNA, 22 nt, Human
ccacgacgagucaucagggcga

SEQ ID NO: 222770 - RNA, 22 nt, Human
aaaagagaauccuguacagaga

SEQ ID NO: 222771 - RNA, 22 nt, Human
ugcuuuauggauuuguguccug

SEQ ID NO: 222772 - RNA, 22 nt, Human
gccuccuggccuuugcuccuca

SEQ ID NO: 222773 - RNA, 22 nt, Human
uacaagaaggaaaacuagcaau

SEQ ID NO: 222774 - RNA, 22 nt, Human
ugagaaggaaacaauggcuuuu

SEQ ID NO: 222775 - RNA, 22 nt, Human
agugugagggguucuuugauau

SEQ ID NO: 222776 - RNA, 22 nt, Human
uuucccaguuagugaagacaug

SEQ ID NO: 222777 - RNA, 22 nt, Human
gcagcucccuugaacuucuccu

SEQ ID NO: 222778 - RNA, 22 nt, Human
gcagagcuguuaauggagcuga

SEQ ID NO: 222779 - RNA, 20 nt, Human
uuccagccgccacuuccgcc

SEQ ID NO: 222780 - RNA, 22 nt, Human
ccaaacaaauccccauucuuag

SEQ ID NO: 222781 - RNA, 22 nt, Human
guguuacugacacauuuuuguc

SEQ ID NO: 222782 - RNA, 22 nt, Human
ccagguggacggcgaguacagg

SEQ ID NO: 222783 - RNA, 22 nt, Human
gaggaagaaagcauaggugggg

SEQ ID NO: 222784 - RNA, 22 nt, Human
gcaggcagucaucuuucauauu

SEQ ID NO: 222785 - RNA, 22 nt, Human
caggacaauggucauacuggau

SEQ ID NO: 222786 - RNA, 17 nt, Human
uccuggauccauggugg

SEQ ID NO: 222787 - RNA, 22 nt, Human
agggccagcacuccuggcagga

SEQ ID NO: 222788 - RNA, 22 nt, Human
cuuuguuacugauuucaguggg

SEQ ID NO: 222789 - RNA, 22 nt, Human
gcuggaggcuggagugcagugg

SEQ ID NO: 222790 - RNA, 22 nt, Human
aucuaagauuuugcuaagauca

SEQ ID NO: 222791 - RNA, 22 nt, Human
gcagguggauauugcuacuuga

SEQ ID NO: 222792 - RNA, 22 nt, Human
ucaggagccugaaagaggucua

SEQ ID NO: 222793 - RNA, 22 nt, Human
uucccauuugugguagugaauu

SEQ ID NO: 222794 - RNA, 22 nt, Human
ugcuggcuggagugccucugga

SEQ ID NO: 222795 - RNA, 22 nt, Human
ccaggaguuggaagcugccaug

SEQ ID NO: 222796 - RNA, 22 nt, Human
aaaggccuugagcugggugcca

SEQ ID NO: 222797 - RNA, 22 nt, Human
aaguuugagagccuuuaguaua

SEQ ID NO: 222798 - RNA, 22 nt, Human
aagacaccauuugacaguggca

SEQ ID NO: 222799 - RNA, 22 nt, Human
acuggggaauggaacugggaau

SEQ ID NO: 222800 - RNA, 22 nt, Human
agcccuggguuagggugggagc

SEQ ID NO: 222801 - RNA, 22 nt, Human
gagagaaaugugcaguuugggc

SEQ ID NO: 222802 - RNA, 22 nt, Human
aggugcagaaaaaaguccuuua

SEQ ID NO: 222803 - RNA, 22 nt, Human
augcaggaguuggaaaaaauga

SEQ ID NO: 222804 - RNA, 22 nt, Human
uguccuauuucucugugcauga

SEQ ID NO: 222805 - RNA, 22 nt, Human
uuacaacacuacuuauccuuga

SEQ ID NO: 222806 - RNA, 22 nt, Human
caguccugcuggccuucccugg

SEQ ID NO: 222807 - RNA, 22 nt, Human
uccaggaaaaggcuugcagggg

SEQ ID NO: 222808 - RNA, 23 nt, Human
uagagcaguagaucaccauggga

SEQ ID NO: 222809 - RNA, 22 nt, Human
uugcagcuucaagcagguugac

SEQ ID NO: 222810 - RNA, 22 nt, Human
cagaugaggacagaugacuggg

SEQ ID NO: 222811 - RNA, 20 nt, Human
cugaagagacuggaggggca

SEQ ID NO: 222812 - RNA, 22 nt, Human
cgagagauggguuggcaggggc

SEQ ID NO: 222813 - RNA, 22 nt, Human
ugccuucaccaggccuucagcc

SEQ ID NO: 222814 - RNA, 16 nt, Human
ugggugggaggagcgg

SEQ ID NO: 222815 - RNA, 22 nt, Human
cauaucauuugcuuauaaaucu

SEQ ID NO: 222816 - RNA, 22 nt, Human
cagauucuucauucauucuaca

SEQ ID NO: 222817 - RNA, 22 nt, Human
aagggcugccagggggugccag

SEQ ID NO: 222818 - RNA, 21 nt, Human
auacacauacacauaaaugug

SEQ ID NO: 222819 - RNA, 22 nt, Human
agaagcacaccaguagacaggg

SEQ ID NO: 222820 - RNA, 22 nt, Human
uaguuacaaaccaacaggcagc

SEQ ID NO: 222821 - RNA, 22 nt, Human
ggccagggaggagaggccccug

SEQ ID NO: 222822 - RNA, 22 nt, Human
ggaggcacaccucagacuggga

SEQ ID NO: 222823 - RNA, 22 nt, Human
acaaguuucauuguuuagaacc

SEQ ID NO: 222824 - RNA, 22 nt, Human
aaagcaaugcuuguggaaugua

SEQ ID NO: 222825 - RNA, 23 nt, Human
ugucuggcucauggugggucuca

SEQ ID NO: 222826 - RNA, 22 nt, Human
aauucaugaguagaaucuauau

SEQ ID NO: 222827 - RNA, 22 nt, Human
cagccccucacagagcuguccu

SEQ ID NO: 222828 - RNA, 20 nt, Human
aaagcauuuacuugugauug

SEQ ID NO: 222829 - RNA, 22 nt, Human
cacugagagaugugucacagca

SEQ ID NO: 222830 - RNA, 22 nt, Human
uugcagcugcaguaaauguuca

SEQ ID NO: 222831 - RNA, 21 nt, Human
uaucaagauguuaugguugaa

SEQ ID NO: 222832 - RNA, 22 nt, Human
cuuuacuucagcaagcuuuccu

SEQ ID NO: 222833 - RNA, 19 nt, Human
acuagcacccagguaaaug

SEQ ID NO: 222834 - RNA, 22 nt, Human
uuggccuuugucaucaagauca

SEQ ID NO: 222835 - RNA, 22 nt, Human
aguguuaguggcugcagcuggu

SEQ ID NO: 222836 - RNA, 22 nt, Human
ggaagagaauuucucucuuuuu

SEQ ID NO: 222837 - RNA, 22 nt, Human
aggcugaggcuuuccuuggaga

SEQ ID NO: 222838 - RNA, 22 nt, Human
cuccuccacuaggcaaaaugug

SEQ ID NO: 222839 - RNA, 22 nt, Human
uucuguggcugggagccuggcu

SEQ ID NO: 222840 - RNA, 22 nt, Human
gaaaacuaacggaaaaguuagg

SEQ ID NO: 222841 - RNA, 22 nt, Human
auuuccuauacaguuguccaua

SEQ ID NO: 222842 - RNA, 22 nt, Human
cagggccugcaagagaccuggg

SEQ ID NO: 222843 - RNA, 22 nt, Human
acuggaggccccucccagugaa

SEQ ID NO: 222844 - RNA, 22 nt, Human
cuggaucugaacaucgguauca

SEQ ID NO: 222845 - RNA, 22 nt, Human
cagagcaugucaacuagcuuua

SEQ ID NO: 222846 - RNA, 22 nt, Human
uccucccaacuuuuccaucuca

SEQ ID NO: 222847 - RNA, 22 nt, Human
aaaauagcaugaaaggccuuug

SEQ ID NO: 222848 - RNA, 22 nt, Human
auuaaacaauguaaaguucuug

SEQ ID NO: 222849 - RNA, 22 nt, Human
cacugucuccuagggggacuuc

SEQ ID NO: 222850 - RNA, 20 nt, Human
ccaggccugggccugcucua

SEQ ID NO: 222851 - RNA, 22 nt, Human
acaagcaugggcuuugacauca

SEQ ID NO: 222852 - RNA, 22 nt, Human
cuccaugggggcuggccugugu

SEQ ID NO: 222853 - RNA, 22 nt, Human
uuggccuuugcugggcuguuga

SEQ ID NO: 222854 - RNA, 23 nt, Human
uccaauucaauugggucaggaag

SEQ ID NO: 222855 - RNA, 22 nt, Human
gauaacuacacuuaagacaacc

SEQ ID NO: 222856 - RNA, 22 nt, Human
aauaugcauuaacuguguacau

SEQ ID NO: 222857 - RNA, 22 nt, Human
uucacauuugcccuuaugugug

SEQ ID NO: 222858 - RNA, 22 nt, Human
guugcuuuucuccaucacaugg

SEQ ID NO: 222859 - RNA, 22 nt, Human
caggauggagggagggcuguua

SEQ ID NO: 222860 - RNA, 22 nt, Human
ggaaugaauuuccagcuggguc

SEQ ID NO: 222861 - RNA, 22 nt, Human
ccauuuuauuagugacauuuag

SEQ ID NO: 222862 - RNA, 23 nt, Human
gggaccagcuagggcugugaccu

SEQ ID NO: 222863 - RNA, 22 nt, Human
uauucagaguauuccaugaggu

SEQ ID NO: 222864 - RNA, 22 nt, Human
cagcagccuacaaugcacagaa

SEQ ID NO: 222865 - RNA, 22 nt, Human
cagggauggagagacuacuggc

SEQ ID NO: 222866 - RNA, 22 nt, Human
cugcuguggguuaagacacugu

SEQ ID NO: 222867 - RNA, 22 nt, Human
aaaucagucccucuuggaauuu

SEQ ID NO: 222868 - RNA, 22 nt, Human
ggcugaaaccguuauccacuga

SEQ ID NO: 222869 - RNA, 22 nt, Human
aaagccacguggccuggggagc

SEQ ID NO: 222870 - RNA, 22 nt, Human
gaggagcuucagaggaaucuua

SEQ ID NO: 222871 - RNA, 22 nt, Human
ucuagaauguuccaccuuguuu

SEQ ID NO: 222872 - RNA, 19 nt, Human
uucagcagugucugcucuu

SEQ ID NO: 222873 - RNA, 22 nt, Human
agcugucugucuccugaggaga

SEQ ID NO: 222874 - RNA, 22 nt, Human
ucugggcccugagauguucuuc

SEQ ID NO: 222875 - RNA, 23 nt, Human
uggcuggcgccugccucacccug

SEQ ID NO: 222876 - RNA, 22 nt, Human
cagcuccucagcccugccuugg

SEQ ID NO: 222877 - RNA, 22 nt, Human
augaguguuuagaaaacacugg

SEQ ID NO: 222878 - RNA, 22 nt, Human
uccaguuuacaggguugcuuuu

SEQ ID NO: 222879 - RNA, 22 nt, Human
gaccuuagaacgugacacaaga

SEQ ID NO: 222880 - RNA, 22 nt, Human
aagcuuucagagcagaauguga

SEQ ID NO: 222881 - RNA, 22 nt, Human
ucagaacauuaaggauuugaag

SEQ ID NO: 222882 - RNA, 23 nt, Human
agagccaagcuucuuucucacau

SEQ ID NO: 222883 - RNA, 22 nt, Human
cagggugguaccagcaucuagu

SEQ ID NO: 222884 - RNA, 22 nt, Human
uuugguauugcacacugucuuc

SEQ ID NO: 222885 - RNA, 22 nt, Human
aauauuaguuucucaagagaga

SEQ ID NO: 222886 - RNA, 22 nt, Human
cagcuuuauuaaugauugucuu

SEQ ID NO: 222887 - RNA, 20 nt, Human
uccaggcagcucagaguguc

SEQ ID NO: 222888 - RNA, 22 nt, Human
uaugcacacauguaugcaugug

SEQ ID NO: 222889 - RNA, 22 nt, Human
agccauguuggggaaggugggc

SEQ ID NO: 222890 - RNA, 22 nt, Human
aagcuguguauuacagaauauu

SEQ ID NO: 222891 - RNA, 21 nt, Human
cagccugcugcuccagggcca

SEQ ID NO: 222892 - RNA, 22 nt, Human
gaaucauuggaaccacauccaa

SEQ ID NO: 222893 - RNA, 22 nt, Human
guuuugaauacuacuagaacuu

SEQ ID NO: 222894 - RNA, 21 nt, Human
cuuaagauggcauaguacgaa

SEQ ID NO: 222895 - RNA, 22 nt, Human
auuacauauguuggcaacauuu

SEQ ID NO: 222896 - RNA, 22 nt, Human
ucacagugugaaggucagucac

SEQ ID NO: 222897 - RNA, 22 nt, Human
aaguccuuggagaauagaaagg

SEQ ID NO: 222898 - RNA, 22 nt, Human
uugcagaggcaaaaaugaacuc

SEQ ID NO: 222899 - RNA, 22 nt, Human
aggcuacaauaauucccaugca

SEQ ID NO: 222900 - RNA, 22 nt, Human
agacccugguaaacacuccagg

SEQ ID NO: 222901 - RNA, 22 nt, Human
caaggccacugcucagguuucc

SEQ ID NO: 222902 - RNA, 22 nt, Human
caggaugagaagggcucuuacg

SEQ ID NO: 222903 - RNA, 22 nt, Human
cagggcucgcucgcucgcucgc

SEQ ID NO: 222904 - RNA, 22 nt, Human
ugcacagugaccacugagcaag

SEQ ID NO: 222905 - RNA, 22 nt, Human
uggaggagggcuggugucugua

SEQ ID NO: 222906 - RNA, 22 nt, Human
aaucuggagagucaucucugac

SEQ ID NO: 222907 - RNA, 22 nt, Human
ccugcugucaguggggcaggca

SEQ ID NO: 222908 - RNA, 22 nt, Human
cugggaacuguacugccuugaa

SEQ ID NO: 222909 - RNA, 22 nt, Human
ucagcagggccaugcucucucu

SEQ ID NO: 222910 - RNA, 17 nt, Human
uacauguguaucugauu

SEQ ID NO: 222911 - RNA, 22 nt, Human
augaggcaucuaacauugcaaa

SEQ ID NO: 222912 - RNA, 22 nt, Human
aaauauguaaccaaggugaagu

SEQ ID NO: 222913 - RNA, 22 nt, Human
uucuguggagguuuggaacauu

SEQ ID NO: 222914 - RNA, 23 nt, Human
gagauguggguuuguucaguguc

SEQ ID NO: 222915 - RNA, 22 nt, Human
ugcaauaaagugcuauaaaucc

SEQ ID NO: 222916 - RNA, 23 nt, Human
uacauucuguauuuuuauagagu

SEQ ID NO: 222917 - RNA, 21 nt, Human
ugcuccagggcagcuuccagc

SEQ ID NO: 222918 - RNA, 22 nt, Human
ucuccccaguauggauucucug

SEQ ID NO: 222919 - RNA, 22 nt, Human
gcuuccugagaaacaaucugau

SEQ ID NO: 222920 - RNA, 22 nt, Human
aaggcugguggauuaugagguc

SEQ ID NO: 222921 - RNA, 22 nt, Human
ugaguuuuggaagacaacacaa

SEQ ID NO: 222922 - RNA, 22 nt, Human
ucugaaauguucucuuguuuug

SEQ ID NO: 222923 - RNA, 23 nt, Human
gaaagucaauaugguagcuuuga

SEQ ID NO: 222924 - RNA, 22 nt, Human
guggccugccgugugguauggg

SEQ ID NO: 222925 - RNA, 22 nt, Human
gacuuuggagcagaaagaaauu

SEQ ID NO: 222926 - RNA, 20 nt, Human
cagagcagugcccaggcggc

SEQ ID NO: 222927 - RNA, 22 nt, Human
ugaagccaucccucagauggcc

SEQ ID NO: 222928 - RNA, 22 nt, Human
ccagugucuacuguggcauauc

SEQ ID NO: 222929 - RNA, 22 nt, Human
acagaggacaacuaggcgcuca

SEQ ID NO: 222930 - RNA, 21 nt, Human
ugagucucccuuagcccacgc

SEQ ID NO: 222931 - RNA, 21 nt, Human
uacaccaguuuacacuuccuc

SEQ ID NO: 222932 - RNA, 22 nt, Human
aacuugguuguuggcaauuugc

SEQ ID NO: 222933 - RNA, 22 nt, Human
ggcaggugcccagagagcacga

SEQ ID NO: 222934 - RNA, 22 nt, Human
cagagccuaaaacgacuccacu

SEQ ID NO: 222935 - RNA, 22 nt, Human
uggcagaaagaaccaugugcaa

SEQ ID NO: 222936 - RNA, 22 nt, Human
gcuggagcuugagaggacaggg

SEQ ID NO: 222937 - RNA, 22 nt, Human
aguuuacaugacguguauuuca

SEQ ID NO: 222938 - RNA, 22 nt, Human
gucccucaguagugcacagugg

SEQ ID NO: 222939 - RNA, 22 nt, Human
gagcagugaugggaggacguca

SEQ ID NO: 222940 - RNA, 22 nt, Human
acaggcuuuaaauuuaaaacca

SEQ ID NO: 222941 - RNA, 22 nt, Human
ugauuacacuauuugggaauag

SEQ ID NO: 222942 - RNA, 22 nt, Human
cuugccucugcuaaugguuucu

SEQ ID NO: 222943 - RNA, 22 nt, Human
ggcugugggaugcauaggagcu

SEQ ID NO: 222944 - RNA, 22 nt, Human
gaggucugggcuugggccuggu

SEQ ID NO: 222945 - RNA, 22 nt, Human
uuacugaacccuacuuuuacag

SEQ ID NO: 222946 - RNA, 20 nt, Human
aacauuuguagucaggcaca

SEQ ID NO: 222947 - RNA, 22 nt, Human
agccaggcggggcagguuuccu

SEQ ID NO: 222948 - RNA, 22 nt, Human
ucaauuuaagguacuacuuugg

SEQ ID NO: 222949 - RNA, 22 nt, Human
caguaacaugaagagacaugga

SEQ ID NO: 222950 - RNA, 22 nt, Human
ucccugggaaaugucaguuuca

SEQ ID NO: 222951 - RNA, 17 nt, Human
caagagagaugacugga

SEQ ID NO: 222952 - RNA, 22 nt, Human
caacagaagguguacuacugaa

SEQ ID NO: 222953 - RNA, 22 nt, Human
uccugaggagaagagugcuagg

SEQ ID NO: 222954 - RNA, 22 nt, Human
acagggcagagaggcaggcuug

SEQ ID NO: 222955 - RNA, 22 nt, Human
gucuguggucccugcuggggac

SEQ ID NO: 222956 - RNA, 22 nt, Human
ucccagggugcgccugcccucg

SEQ ID NO: 222957 - RNA, 22 nt, Human
acauaccauacauggugagaug

SEQ ID NO: 222958 - RNA, 22 nt, Human
auccaggcuuaaugggagccac

SEQ ID NO: 222959 - RNA, 22 nt, Human
cagguccugcagggagaguaaa

SEQ ID NO: 222960 - RNA, 21 nt, Human
gcagagcuggaaccaggaccc

SEQ ID NO: 222961 - RNA, 22 nt, Human
aggaucugugccucaacccaga

SEQ ID NO: 222962 - RNA, 22 nt, Human
acagcagagacacucaggaggc

SEQ ID NO: 222963 - RNA, 22 nt, Human
agacacuguguacagaaaaaga

SEQ ID NO: 222964 - RNA, 22 nt, Human
caaauagaagguacucagagaa

SEQ ID NO: 222965 - RNA, 22 nt, Human
ucaaaaauguuuuauauuggua

SEQ ID NO: 222966 - RNA, 22 nt, Human
ugcaggaaauuccaggguggcc

SEQ ID NO: 222967 - RNA, 19 nt, Human
cagaggcacuuucucuuag

SEQ ID NO: 222968 - RNA, 22 nt, Human
ugucucagggcagcagcagggg

SEQ ID NO: 222969 - RNA, 22 nt, Human
ucugggccucaccugcugcuca

SEQ ID NO: 222970 - RNA, 22 nt, Human
cucacagcauggaauuuucugg

SEQ ID NO: 222971 - RNA, 22 nt, Human
gguguccuuguccuuugguacc

SEQ ID NO: 222972 - RNA, 22 nt, Human
cuccuguguucaagcgauucuc

SEQ ID NO: 222973 - RNA, 22 nt, Human
guuuccuggagguuauuuuuga

SEQ ID NO: 222974 - RNA, 22 nt, Human
aggaaacuguccccucauccua

SEQ ID NO: 222975 - RNA, 22 nt, Human
gcucuggggaugcuucugccgu

SEQ ID NO: 222976 - RNA, 22 nt, Human
agggcugacagugaggagucaa

SEQ ID NO: 222977 - RNA, 19 nt, Human
uggaaacuccugauauuag

SEQ ID NO: 222978 - RNA, 22 nt, Human
uacuaguuuuuaggaaaaguga

SEQ ID NO: 222979 - RNA, 22 nt, Human
ggagauaguccaggugaaggga

SEQ ID NO: 222980 - RNA, 20 nt, Human
acaggaugccugccauuuca

SEQ ID NO: 222981 - RNA, 21 nt, Human
acaggaugauuuuuccuuaug

SEQ ID NO: 222982 - RNA, 22 nt, Human
ggcccagagggguugagcaucu

SEQ ID NO: 222983 - RNA, 22 nt, Human
gcugugcagagcacaggguccc

SEQ ID NO: 222984 - RNA, 22 nt, Human
cccuggcauaaaacuucuccag

SEQ ID NO: 222985 - RNA, 20 nt, Human
uggcagguggccucaguucc

SEQ ID NO: 222986 - RNA, 22 nt, Human
uacauucucuucccauugucuc

SEQ ID NO: 222987 - RNA, 22 nt, Human
aaauaguaaagugguagccauc

SEQ ID NO: 222988 - RNA, 22 nt, Human
accugggaacgcuuuguggagg

SEQ ID NO: 222989 - RNA, 22 nt, Human
ggagugaaucacuagaugcaga

SEQ ID NO: 222990 - RNA, 22 nt, Human
ugacaguuaagguauacauuca

SEQ ID NO: 222991 - RNA, 22 nt, Human
uauaaagaaaugauuuccagaa

SEQ ID NO: 222992 - RNA, 22 nt, Human
gcuccuggcuucacugacauca

SEQ ID NO: 222993 - RNA, 22 nt, Human
uggaaggagacugggaagugug

SEQ ID NO: 222994 - RNA, 22 nt, Human
agcauacaguugaaaguggcuu

SEQ ID NO: 222995 - RNA, 19 nt, Human
uaauaagcaauauggaagu

SEQ ID NO: 222996 - RNA, 22 nt, Human
cugggucugugcccagggaccu

SEQ ID NO: 222997 - RNA, 22 nt, Human
gccugcucuccggaucccugau

SEQ ID NO: 222998 - RNA, 22 nt, Human
cuucaaguugggcggcgggcag

SEQ ID NO: 222999 - RNA, 22 nt, Human
acugaaugaggggugaucuggg

SEQ ID NO: 223000 - RNA, 22 nt, Human
ggcugcucugccuuccagcugg

SEQ ID NO: 223001 - RNA, 22 nt, Human
ggugucuguugccuccugguua

SEQ ID NO: 223002 - RNA, 22 nt, Human
uagaaaguaaaucaguuuuauu

SEQ ID NO: 223003 - RNA, 22 nt, Human
aauaugcacucugauuuagcag

SEQ ID NO: 223004 - RNA, 22 nt, Human
ucaggagcuauggacugucaaa

SEQ ID NO: 223005 - RNA, 22 nt, Human
cugagccauaagggaggcuggg

SEQ ID NO: 223006 - RNA, 22 nt, Human
uagcaugggucgcgucucugga

SEQ ID NO: 223007 - RNA, 22 nt, Human
cucauguagcucucaggccaca

SEQ ID NO: 223008 - RNA, 22 nt, Human
caguuuauuuccaagaugacaa

SEQ ID NO: 223009 - RNA, 22 nt, Human
uucaaguuaccuuuaaacagcu

SEQ ID NO: 223010 - RNA, 21 nt, Human
gcaaggcaaugccaugauuuc

SEQ ID NO: 223011 - RNA, 22 nt, Human
aggaagaggguggcagauaauc

SEQ ID NO: 223012 - RNA, 22 nt, Human
cgcagguguguuuucaggacua

SEQ ID NO: 223013 - RNA, 19 nt, Human
ugaggcacaugauaagaac

SEQ ID NO: 223014 - RNA, 22 nt, Human
guuugccugccgacgcucucau

SEQ ID NO: 223015 - RNA, 22 nt, Human
gagacacagagaggcuguguga

SEQ ID NO: 223016 - RNA, 22 nt, Human
ucugggcuuuugcacuggccau

SEQ ID NO: 223017 - RNA, 22 nt, Human
ucagaggagaaguugggaaaau

SEQ ID NO: 223018 - RNA, 22 nt, Human
uuuguguuguacuucugugcau

SEQ ID NO: 223019 - RNA, 22 nt, Human
gggcugccaagccugccugccu

SEQ ID NO: 223020 - RNA, 22 nt, Human
gccugggaaagaguagggaaau

SEQ ID NO: 223021 - RNA, 22 nt, Human
gacacagggggauguguggacg

SEQ ID NO: 223022 - RNA, 22 nt, Human
ucugaagaacugaguaaacaug

SEQ ID NO: 223023 - RNA, 22 nt, Human
accagcauccuuccuauuaaca

SEQ ID NO: 223024 - RNA, 22 nt, Human
ccacagaggacaacugccuggc

SEQ ID NO: 223025 - RNA, 22 nt, Human
uggagcugaacuuugaggccag

SEQ ID NO: 223026 - RNA, 22 nt, Human
uugaauggcuucuagguucucc

SEQ ID NO: 223027 - RNA, 22 nt, Human
gaaucucaaauuaagaauuuua

SEQ ID NO: 223028 - RNA, 23 nt, Human
ucuguggcuccuucaggcugcug

SEQ ID NO: 223029 - RNA, 22 nt, Human
auaaacaucuguuucucuucug

SEQ ID NO: 223030 - RNA, 22 nt, Human
ccuggagaggcgcugcagagga

SEQ ID NO: 223031 - RNA, 22 nt, Human
uuuacagacaacuuaauagggg

SEQ ID NO: 223032 - RNA, 22 nt, Human
agcccugaagcuggccaugucc

SEQ ID NO: 223033 - RNA, 22 nt, Human
agcugccagcaaguuucaaaca

SEQ ID NO: 223034 - RNA, 22 nt, Human
gucuggaguggggccugagaau

SEQ ID NO: 223035 - RNA, 22 nt, Human
ugauuauauucuaacuucauaa

SEQ ID NO: 223036 - RNA, 17 nt, Human
ggagcagauccaccauu

SEQ ID NO: 223037 - RNA, 22 nt, Human
acuggaggauuccuggaaggcg

SEQ ID NO: 223038 - RNA, 22 nt, Human
uuccuggcagaggccccgacag

SEQ ID NO: 223039 - RNA, 22 nt, Human
acagguguaaaacccaggaugg

SEQ ID NO: 223040 - RNA, 22 nt, Human
uuggaaauggcuguaguuauga

SEQ ID NO: 223041 - RNA, 22 nt, Human
uccaaggacuaaauucuagauu

SEQ ID NO: 223042 - RNA, 22 nt, Human
cugagcgcaugguugcugggga

SEQ ID NO: 223043 - RNA, 22 nt, Human
auuacugugacuagccaucugg

SEQ ID NO: 223044 - RNA, 22 nt, Human
uaguuacagugcauagcaagau

SEQ ID NO: 223045 - RNA, 22 nt, Human
uucaugaaauucucguguaccu

SEQ ID NO: 223046 - RNA, 22 nt, Human
ucaugugucugcugcagcuguu

SEQ ID NO: 223047 - RNA, 22 nt, Human
uauuuucuguggaggaccagau

SEQ ID NO: 223048 - RNA, 22 nt, Human
agccagaggccagccugccuca

SEQ ID NO: 223049 - RNA, 22 nt, Human
ucucugggaucagguggcccag

SEQ ID NO: 223050 - RNA, 22 nt, Human
aagcaguguucccagcuggccc

SEQ ID NO: 223051 - RNA, 22 nt, Human
uggcacagagggacccagcagc

SEQ ID NO: 223052 - RNA, 22 nt, Human
cugagaggcggagguugcagug

SEQ ID NO: 223053 - RNA, 22 nt, Human
ccaaggagcaaguuuacaccug

SEQ ID NO: 223054 - RNA, 20 nt, Human
acagaauaugcugguugugg

SEQ ID NO: 223055 - RNA, 22 nt, Human
agcugucaggcagaacugagcu

SEQ ID NO: 223056 - RNA, 22 nt, Human
auuuuuuauauaccaagguggg

SEQ ID NO: 223057 - RNA, 22 nt, Human
gggcuguaggagcuggaauggg

SEQ ID NO: 223058 - RNA, 22 nt, Human
cuccauauggcccugggaccug

SEQ ID NO: 223059 - RNA, 22 nt, Human
ggcugugcccucacauggggca

SEQ ID NO: 223060 - RNA, 22 nt, Human
auguucaaacuuuuuacacacc

SEQ ID NO: 223061 - RNA, 22 nt, Human
uaauaaaugaaagugcuggcau

SEQ ID NO: 223062 - RNA, 22 nt, Human
agagagcugacuuuggagucag

SEQ ID NO: 223063 - RNA, 22 nt, Human
ucaaacagaggaacaauuguuu

SEQ ID NO: 223064 - RNA, 22 nt, Human
ucugagcucaagugacaguuag

SEQ ID NO: 223065 - RNA, 21 nt, Human
ccuggcuccagaacuuccggu

SEQ ID NO: 223066 - RNA, 22 nt, Human
caagucaaugauuauaagaguc

SEQ ID NO: 223067 - RNA, 17 nt, Human
gcuccaggcgugaguga

SEQ ID NO: 223068 - RNA, 22 nt, Human
acauucuuugaguuuuguuaaa

SEQ ID NO: 223069 - RNA, 19 nt, Human
uccucugguaccacccuug

SEQ ID NO: 223070 - RNA, 22 nt, Human
uacacaggggagcaugguugac

SEQ ID NO: 223071 - RNA, 22 nt, Human
auguaaacuuuaccagcucuga

SEQ ID NO: 223072 - RNA, 22 nt, Human
auggcagaccugggcuggagaa

SEQ ID NO: 223073 - RNA, 22 nt, Human
cccaggcagucuggcucuaaag

SEQ ID NO: 223074 - RNA, 22 nt, Human
gaggaggcacuugagcagaugu

SEQ ID NO: 223075 - RNA, 18 nt, Human
cugccccuucucugagau

SEQ ID NO: 223076 - RNA, 22 nt, Human
guggccagccagggugcugaug

SEQ ID NO: 223077 - RNA, 22 nt, Human
uguuacuccuucccuacucaug

SEQ ID NO: 223078 - RNA, 22 nt, Human
gagaaagauguaggcugggagg

SEQ ID NO: 223079 - RNA, 22 nt, Human
gagcuuuaagggcacuggucuu

SEQ ID NO: 223080 - RNA, 22 nt, Human
uagcugggaauuaucugguugc

SEQ ID NO: 223081 - RNA, 22 nt, Human
acuuccagccccugucagcaaa

SEQ ID NO: 223082 - RNA, 22 nt, Human
cuucuuguaucugccgccgagc

SEQ ID NO: 223083 - RNA, 22 nt, Human
uugauuccuugaaauauccuug

SEQ ID NO: 223084 - RNA, 22 nt, Human
gugagagggcugggcucaugau

SEQ ID NO: 223085 - RNA, 22 nt, Human
uucauauaccuugcguuucaca

SEQ ID NO: 223086 - RNA, 23 nt, Human
gggcugcuccaggccaaggcugg

SEQ ID NO: 223087 - RNA, 22 nt, Human
uagggaugaaguugcuauuuac

SEQ ID NO: 223088 - RNA, 22 nt, Human
acaauucaagaagagagaugaa

SEQ ID NO: 223089 - RNA, 19 nt, Human
ucugugcugggaggcagca

SEQ ID NO: 223090 - RNA, 22 nt, Human
cugaaggcaccaggggugccag

SEQ ID NO: 223091 - RNA, 22 nt, Human
uuugcagugucagcuucugugu

SEQ ID NO: 223092 - RNA, 22 nt, Human
uuuuauugucucccaguucugg

SEQ ID NO: 223093 - RNA, 22 nt, Human
ccuccacaggagcugcagugcu

SEQ ID NO: 223094 - RNA, 23 nt, Human
augugcaaagugcuacaguauag

SEQ ID NO: 223095 - RNA, 22 nt, Human
ugguccuggggugcaggcugac

SEQ ID NO: 223096 - RNA, 22 nt, Human
cugaggccagcugcagagcucu

SEQ ID NO: 223097 - RNA, 22 nt, Human
ggaucuucagccagcaggugcc

SEQ ID NO: 223098 - RNA, 22 nt, Human
agcccugcugcuucuuguauuu

SEQ ID NO: 223099 - RNA, 22 nt, Human
cuccugaggaaaagcuugguca

SEQ ID NO: 223100 - RNA, 22 nt, Human
cuaggguggauuugugcagagu

SEQ ID NO: 223101 - RNA, 22 nt, Human
acacuuuaucucaucucagaca

SEQ ID NO: 223102 - RNA, 22 nt, Human
ggagaagccacacauugggugu

SEQ ID NO: 223103 - RNA, 17 nt, Human
uuaagguggaucagcac

SEQ ID NO: 223104 - RNA, 22 nt, Human
uuuuuaucuacagauucucagc

SEQ ID NO: 223105 - RNA, 22 nt, Human
cuuugcauacaauuuuuagaaa

SEQ ID NO: 223106 - RNA, 20 nt, Human
uggcuccuggcuccucccuc

SEQ ID NO: 223107 - RNA, 22 nt, Human
ugcaaauauuccaugcuguuca

SEQ ID NO: 223108 - RNA, 23 nt, Human
ggaauguuuaccugugaauguca

SEQ ID NO: 223109 - RNA, 22 nt, Human
uggauaaauggugcuaucaccc

SEQ ID NO: 223110 - RNA, 22 nt, Human
ugaaaaaccucaguccgcuuua

SEQ ID NO: 223111 - RNA, 22 nt, Human
uccagugcuguuuccaauguaa

SEQ ID NO: 223112 - RNA, 22 nt, Human
uuagagaaccaaugaauagucu

SEQ ID NO: 223113 - RNA, 18 nt, Human
uggcuucugaacaacugc

SEQ ID NO: 223114 - RNA, 22 nt, Human
gucuggaagaacuagggauguu

SEQ ID NO: 223115 - RNA, 22 nt, Human
ucauguguuaaacuccaagaua

SEQ ID NO: 223116 - RNA, 22 nt, Human
ucuguggcuaucauacugaagg

SEQ ID NO: 223117 - RNA, 22 nt, Human
caagaucuuccucaauagaccu

SEQ ID NO: 223118 - RNA, 22 nt, Human
gugauuuugagaccuauauagu

SEQ ID NO: 223119 - RNA, 22 nt, Human
caggcuacuggggcuuggaugg

SEQ ID NO: 223120 - RNA, 22 nt, Human
uccuggccuuauccccaaacug

SEQ ID NO: 223121 - RNA, 22 nt, Human
acucaggcuguuuuuuccuugu

SEQ ID NO: 223122 - RNA, 22 nt, Human
uaaggguucagaaugcaguggu

SEQ ID NO: 223123 - RNA, 22 nt, Human
aguguccuccucugggagccag

SEQ ID NO: 223124 - RNA, 22 nt, Human
uccuagaauaaguaacaggaca

SEQ ID NO: 223125 - RNA, 19 nt, Human
acagagggcaacugagaaa

SEQ ID NO: 223126 - RNA, 22 nt, Human
guuuuucuaggaccaugugauu

SEQ ID NO: 223127 - RNA, 22 nt, Human
cacugguaguuucagcaaccag

SEQ ID NO: 223128 - RNA, 23 nt, Human
ugcagcucaaagauggguaaaug

SEQ ID NO: 223129 - RNA, 20 nt, Human
aggaaggagaaucugagcaa

SEQ ID NO: 223130 - RNA, 22 nt, Human
augugggagauuucaggaggug

SEQ ID NO: 223131 - RNA, 18 nt, Human
cccauguugccagucagc

SEQ ID NO: 223132 - RNA, 22 nt, Human
acacaugcagguauacauguuc

SEQ ID NO: 223133 - RNA, 22 nt, Human
caggaccuggaaugcuugugaa

SEQ ID NO: 223134 - RNA, 22 nt, Human
agcugaaagugcuuugaggacu

SEQ ID NO: 223135 - RNA, 22 nt, Human
aagcacccaauuuacagcaguu

SEQ ID NO: 223136 - RNA, 22 nt, Human
ucagguguggaccgaggucaga

SEQ ID NO: 223137 - RNA, 22 nt, Human
aaucaagaggcgauggauggaa

SEQ ID NO: 223138 - RNA, 22 nt, Human
aagcuuuaugacuuggagacag

SEQ ID NO: 223139 - RNA, 22 nt, Human
gaauauuuucaguacagauggu

SEQ ID NO: 223140 - RNA, 22 nt, Human
gaauuacauaauaaaaugagag

SEQ ID NO: 223141 - RNA, 22 nt, Human
ugguggcuaccagguccugggg

SEQ ID NO: 223142 - RNA, 18 nt, Human
uacuguuuaauugauuac

SEQ ID NO: 223143 - RNA, 22 nt, Human
ccugugggcgcagcuggaguca

SEQ ID NO: 223144 - RNA, 22 nt, Human
gaaacauucagucaacaguguu

SEQ ID NO: 223145 - RNA, 18 nt, Human
agcaagcaguuuucaugu

SEQ ID NO: 223146 - RNA, 22 nt, Human
aggcaguguucuucuaagggca

SEQ ID NO: 223147 - RNA, 22 nt, Human
gccuggcacucaaucaucugcu

SEQ ID NO: 223148 - RNA, 22 nt, Human
uccuggcuccugaucugucacu

SEQ ID NO: 223149 - RNA, 22 nt, Human
cagacacagcaauucuguguug

SEQ ID NO: 223150 - RNA, 22 nt, Human
gguuucaacuuuugugaggaau

SEQ ID NO: 223151 - RNA, 22 nt, Human
ugggacagagugagcuuuggcc

SEQ ID NO: 223152 - RNA, 22 nt, Human
ugaaauuaugcauuguuguacc

SEQ ID NO: 223153 - RNA, 22 nt, Human
caugguuuuuacccuacaccau

SEQ ID NO: 223154 - RNA, 22 nt, Human
uucugcagcaugaggcuggagc

SEQ ID NO: 223155 - RNA, 22 nt, Human
uagaggaaccaggcaggcugag

SEQ ID NO: 223156 - RNA, 22 nt, Human
gcagaggagugauuaugccgug

SEQ ID NO: 223157 - RNA, 17 nt, Human
gcuuuggaaggguagac

SEQ ID NO: 223158 - RNA, 22 nt, Human
gagacagagagguacucaacau

SEQ ID NO: 223159 - RNA, 22 nt, Human
ucccuguauaucacaagggcua

SEQ ID NO: 223160 - RNA, 21 nt, Human
cucaaagaccaaaaguguaga

SEQ ID NO: 223161 - RNA, 22 nt, Human
uccugcaguuacaucccagcca

SEQ ID NO: 223162 - RNA, 22 nt, Human
ccaugugucgggccugcagugg

SEQ ID NO: 223163 - RNA, 22 nt, Human
uugcagggucccagaggccugg

SEQ ID NO: 223164 - RNA, 22 nt, Human
uuacugauacacauaagaauuu

SEQ ID NO: 223165 - RNA, 23 nt, Human
uucuuuguggauaaucuccagug

SEQ ID NO: 223166 - RNA, 22 nt, Human
cagggcuguggcuuugugcugu

SEQ ID NO: 223167 - RNA, 22 nt, Human
aucucugguccaaauguuaccu

SEQ ID NO: 223168 - RNA, 22 nt, Human
uggugagauguauggaggguug

SEQ ID NO: 223169 - RNA, 22 nt, Human
ucaccaggauugggcuguaggc

SEQ ID NO: 223170 - RNA, 22 nt, Human
ucuggcuccacuuucuucauuu

SEQ ID NO: 223171 - RNA, 22 nt, Human
uacaguuuacaugagaggaagc

SEQ ID NO: 223172 - RNA, 22 nt, Human
aauaucuguggccauacaauuu

SEQ ID NO: 223173 - RNA, 22 nt, Human
ugcagagauuuggcucuuaaag

SEQ ID NO: 223174 - RNA, 22 nt, Human
gagcaagacucacugcaucuug

SEQ ID NO: 223175 - RNA, 22 nt, Human
aggaugccuucauugcauggcc

SEQ ID NO: 223176 - RNA, 22 nt, Human
auauauaaccuggauaaggcuu

SEQ ID NO: 223177 - RNA, 17 nt, Human
cugucugcugcuuccuc

SEQ ID NO: 223178 - RNA, 22 nt, Human
gagcugggcacacgccacuuga

SEQ ID NO: 223179 - RNA, 22 nt, Human
ccauuaaaauggaauguaguga

SEQ ID NO: 223180 - RNA, 22 nt, Human
cuguguccucccgcugcaccca

SEQ ID NO: 223181 - RNA, 22 nt, Human
aaaaaucacuuuuauaggcagc

SEQ ID NO: 223182 - RNA, 22 nt, Human
gggcugagggccaauuccuacu

SEQ ID NO: 223183 - RNA, 22 nt, Human
ugcuuccuauccacacaaugcc

SEQ ID NO: 223184 - RNA, 22 nt, Human
gcuacaagucuugucauucauu

SEQ ID NO: 223185 - RNA, 22 nt, Human
auuguacagaugagguaaguga

SEQ ID NO: 223186 - RNA, 15 nt, Human
ucccugggagauggu

SEQ ID NO: 223187 - RNA, 22 nt, Human
gcugagccccccugcguggguc

SEQ ID NO: 223188 - RNA, 17 nt, Human
aggagcuggggguggug

SEQ ID NO: 223189 - RNA, 21 nt, Human
ucuucccucaggauguccugc

SEQ ID NO: 223190 - RNA, 21 nt, Human
gcccucaggggaggauggccu

SEQ ID NO: 223191 - RNA, 22 nt, Human
augccagggucccuucagagau

SEQ ID NO: 223192 - RNA, 22 nt, Human
aguccccucuaacccaacuuua

SEQ ID NO: 223193 - RNA, 19 nt, Human
ugagauuucuuaggugauu

SEQ ID NO: 223194 - RNA, 22 nt, Human
gcugaggcugggagcagccugu

SEQ ID NO: 223195 - RNA, 22 nt, Human
cagcaggaccauugaggcauca

SEQ ID NO: 223196 - RNA, 22 nt, Human
cagcaugagaaaaugaaucaga

SEQ ID NO: 223197 - RNA, 22 nt, Human
caaaugaagagggcaacuucug

SEQ ID NO: 223198 - RNA, 22 nt, Human
guauccucaccuauacaaugga

SEQ ID NO: 223199 - RNA, 23 nt, Human
auguuuuaugucucuagcugcca

SEQ ID NO: 223200 - RNA, 22 nt, Human
uaguuuuaugaauugguauaau

SEQ ID NO: 223201 - RNA, 22 nt, Human
uggcucaguuugggggauugaa

SEQ ID NO: 223202 - RNA, 22 nt, Human
cagggaugguaaauauguaaag

SEQ ID NO: 223203 - RNA, 22 nt, Human
uaucauuuguuauuauuagugg

SEQ ID NO: 223204 - RNA, 18 nt, Human
ggcacuggugaugcagag

SEQ ID NO: 223205 - RNA, 22 nt, Human
aaauuauuauaggcagagcuga

SEQ ID NO: 223206 - RNA, 19 nt, Human
ucagggccaugagcgccac

SEQ ID NO: 223207 - RNA, 22 nt, Human
ugccugccucuggagcccaucc

SEQ ID NO: 223208 - RNA, 22 nt, Human
gcagcagcagcaauuuucuguc

SEQ ID NO: 223209 - RNA, 22 nt, Human
caagaaccgcaauuacuuuugc

SEQ ID NO: 223210 - RNA, 22 nt, Human
caagaauauaaauacuuucaaa

SEQ ID NO: 223211 - RNA, 22 nt, Human
uaacauuuaaauuuuucacaua

SEQ ID NO: 223212 - RNA, 22 nt, Human
accagaguaauguguggaaauu

SEQ ID NO: 223213 - RNA, 22 nt, Human
gucuuuauuacaaauccuuuuc

SEQ ID NO: 223214 - RNA, 22 nt, Human
uuaguucacugcuauaucauca

SEQ ID NO: 223215 - RNA, 18 nt, Human
cagaaaguuauuuacucu

SEQ ID NO: 223216 - RNA, 22 nt, Human
aaccaagcccauuacuuuacuu

SEQ ID NO: 223217 - RNA, 22 nt, Human
auaguuuacaaaaaugaugcau

SEQ ID NO: 223218 - RNA, 22 nt, Human
uucccaaagcuuugucugugaa

SEQ ID NO: 223219 - RNA, 19 nt, Human
uccagggcuuuauggcuuu

SEQ ID NO: 223220 - RNA, 22 nt, Human
ucacaaauagcuauauuaagga

SEQ ID NO: 223221 - RNA, 22 nt, Human
ccuggaagagcugaaucaggca

SEQ ID NO: 223222 - RNA, 22 nt, Human
cucggcagguggagguuguagu

SEQ ID NO: 223223 - RNA, 22 nt, Human
aggggagguggcagaaaugugc

SEQ ID NO: 223224 - RNA, 22 nt, Human
auacaguaaccacauucuauag

SEQ ID NO: 223225 - RNA, 22 nt, Human
ugugaaauucuugaaaugcaca

SEQ ID NO: 223226 - RNA, 17 nt, Human
ucuggaugucauggaag

SEQ ID NO: 223227 - RNA, 15 nt, Human
aagaaucugaagcuu

SEQ ID NO: 223228 - RNA, 19 nt, Human
aaaguuuuauucucauuug

SEQ ID NO: 223229 - RNA, 22 nt, Human
ucaaaucagcaagcagcuuccc

SEQ ID NO: 223230 - RNA, 22 nt, Human
uacugucuaauaagauugaugg

SEQ ID NO: 223231 - RNA, 22 nt, Human
cagauuaagugcucaacagugu

SEQ ID NO: 223232 - RNA, 22 nt, Human
auguaaaggcagacuuuaauuu

SEQ ID NO: 223233 - RNA, 22 nt, Human
uggcagguuucguuaaaaaugg

SEQ ID NO: 223234 - RNA, 22 nt, Human
gaaugcugagucuuaucucuua

SEQ ID NO: 223235 - RNA, 22 nt, Human
gagggcucuacucaccacccug

SEQ ID NO: 223236 - RNA, 22 nt, Human
guccaguuucagggucugcgcu

SEQ ID NO: 223237 - RNA, 22 nt, Human
uuacacaacaucuguauuauua

SEQ ID NO: 223238 - RNA, 22 nt, Human
cugaggcagaaaaagcaagggu

SEQ ID NO: 223239 - RNA, 22 nt, Human
aggcuucuaaaucacaaggaaa

SEQ ID NO: 223240 - RNA, 22 nt, Human
ggcgcccaucggugcagagggc

SEQ ID NO: 223241 - RNA, 22 nt, Human
gguauacugcaugacauugggg

SEQ ID NO: 223242 - RNA, 22 nt, Human
ucucagauggcaucagcuagag

SEQ ID NO: 223243 - RNA, 22 nt, Human
agccagagcagggaauuggaca

SEQ ID NO: 223244 - RNA, 22 nt, Human
ucagggcagccuaaggcaccuc

SEQ ID NO: 223245 - RNA, 22 nt, Human
gucauuuucuagaauuauuuga

SEQ ID NO: 223246 - RNA, 22 nt, Human
gcuccugucagucaucaggugc

SEQ ID NO: 223247 - RNA, 22 nt, Human
gagcucagaggauucuggggag

SEQ ID NO: 223248 - RNA, 22 nt, Human
uggagcagcugaacagaguuga

SEQ ID NO: 223249 - RNA, 22 nt, Human
uucugugauugacauguggcuu

SEQ ID NO: 223250 - RNA, 22 nt, Human
aagaugaaaauuuacugugaug

SEQ ID NO: 223251 - RNA, 22 nt, Human
cucugccacucgaagucaagga

SEQ ID NO: 223252 - RNA, 22 nt, Human
cagagucagagcaccugggauu

SEQ ID NO: 223253 - RNA, 17 nt, Human
agccgggcauggaccag

SEQ ID NO: 223254 - RNA, 22 nt, Human
ccaggugugauuucaucugagg

SEQ ID NO: 223255 - RNA, 22 nt, Human
cuccagauaggagggggucccc

SEQ ID NO: 223256 - RNA, 22 nt, Human
ccagcaucagcacccaaggagc

SEQ ID NO: 223257 - RNA, 22 nt, Human
cagcagcuacuuggagcagcag

SEQ ID NO: 223258 - RNA, 22 nt, Human
gcaggguaggugacagguaguc

SEQ ID NO: 223259 - RNA, 22 nt, Human
ccucagaguuuaagaugucaga

SEQ ID NO: 223260 - RNA, 22 nt, Human
aaaucugaaauagugugaagua

SEQ ID NO: 223261 - RNA, 22 nt, Human
cauucaaaagcuccauguuugu

SEQ ID NO: 223262 - RNA, 22 nt, Human
acgugauauauuuacuucccca

SEQ ID NO: 223263 - RNA, 22 nt, Human
acugugccuucuuauugggucc

SEQ ID NO: 223264 - RNA, 22 nt, Human
agagagcaguggaucaccuagc

SEQ ID NO: 223265 - RNA, 22 nt, Human
aucucuagcuaacccucuggca

SEQ ID NO: 223266 - RNA, 22 nt, Human
accaggacuucauuagguucuu

SEQ ID NO: 223267 - RNA, 21 nt, Human
aaagaacaggcagauguucuu

SEQ ID NO: 223268 - RNA, 22 nt, Human
cugccuguaacuuucugaagca

SEQ ID NO: 223269 - RNA, 22 nt, Human
uggaaugagcuggcuaauaacc

SEQ ID NO: 223270 - RNA, 22 nt, Human
uauuuccaccuauuauuuucug

SEQ ID NO: 223271 - RNA, 22 nt, Human
acauagaagugaugcuuaucca

SEQ ID NO: 223272 - RNA, 22 nt, Human
augggaaagaagccacugccca

SEQ ID NO: 223273 - RNA, 22 nt, Human
aacaggcaggagaauucugccu

SEQ ID NO: 223274 - RNA, 22 nt, Human
cuuucucuuacccaaggaucug

SEQ ID NO: 223275 - RNA, 22 nt, Human
uguguguguuccuccucagcua

SEQ ID NO: 223276 - RNA, 22 nt, Human
acagucuucaugcuagaauggc

SEQ ID NO: 223277 - RNA, 22 nt, Human
ccugcagguaaggcuaacugcc

SEQ ID NO: 223278 - RNA, 22 nt, Human
aggaugaggcuggacacuucuu

SEQ ID NO: 223279 - RNA, 21 nt, Human
agacaaugcuguaaaauucag

SEQ ID NO: 223280 - RNA, 22 nt, Human
uaugaaauuucuaguucugcuu

SEQ ID NO: 223281 - RNA, 22 nt, Human
aagcaggaagcucagguccuug

SEQ ID NO: 223282 - RNA, 22 nt, Human
ucagugugaggucuuccacccg

SEQ ID NO: 223283 - RNA, 22 nt, Human
cucuguauagaaaggaaacauu

SEQ ID NO: 223284 - RNA, 22 nt, Human
uaggggaacuggcacagggcag

SEQ ID NO: 223285 - RNA, 22 nt, Human
agcuggagaaaccugggagggu

SEQ ID NO: 223286 - RNA, 22 nt, Human
aagguggugcuucugcuccucu

SEQ ID NO: 223287 - RNA, 22 nt, Human
ugccugggccucugaggaaggc

SEQ ID NO: 223288 - RNA, 22 nt, Human
ccucaagucaauucugucucgc

SEQ ID NO: 223289 - RNA, 22 nt, Human
uccuuggagucaugauggaggu

SEQ ID NO: 223290 - RNA, 22 nt, Human
ugaguacuuuauguuaguuauu

SEQ ID NO: 223291 - RNA, 22 nt, Human
ggaucuuuaaguucuuuuccau

SEQ ID NO: 223292 - RNA, 22 nt, Human
auguagggaacuaaauucacug

SEQ ID NO: 223293 - RNA, 22 nt, Human
cauugaaaaacguugacugagu

SEQ ID NO: 223294 - RNA, 22 nt, Human
uugggaaauuacucugcuagga

SEQ ID NO: 223295 - RNA, 22 nt, Human
agaagccauugaagcagaccuc

SEQ ID NO: 223296 - RNA, 22 nt, Human
ggcugccucccaggagaaucug

SEQ ID NO: 223297 - RNA, 22 nt, Human
aagcagcauuguaaccaaugcc

SEQ ID NO: 223298 - RNA, 17 nt, Human
cuuauacuuuacggaag

SEQ ID NO: 223299 - RNA, 22 nt, Human
gacuguggggggcggacacaag

SEQ ID NO: 223300 - RNA, 22 nt, Human
uauacuuaugcuaaaaaauguu

SEQ ID NO: 223301 - RNA, 22 nt, Human
cugcaggguuucgccaguugug

SEQ ID NO: 223302 - RNA, 22 nt, Human
aagaaacaaccacugcucuccu

SEQ ID NO: 223303 - RNA, 22 nt, Human
gcugauuuugucacauagcaag

SEQ ID NO: 223304 - RNA, 22 nt, Human
accauccugaaaccuucaugcu

SEQ ID NO: 223305 - RNA, 22 nt, Human
cacugggucaggauagagccca

SEQ ID NO: 223306 - RNA, 22 nt, Human
auuuccaaucucugcauauggg

SEQ ID NO: 223307 - RNA, 22 nt, Human
guacauuuauuuuugcagcaua

SEQ ID NO: 223308 - RNA, 22 nt, Human
gaggagaaagcagugauuugug

SEQ ID NO: 223309 - RNA, 22 nt, Human
aguggagaagaggauggucucc

SEQ ID NO: 223310 - RNA, 22 nt, Human
augugguuuuggauuauucaug

SEQ ID NO: 223311 - RNA, 22 nt, Human
uugauacauagcacaguuuagg

SEQ ID NO: 223312 - RNA, 22 nt, Human
uggcugggcccccaccugccuc

SEQ ID NO: 223313 - RNA, 22 nt, Human
ccugggcuugcaucugugcugg

SEQ ID NO: 223314 - RNA, 22 nt, Human
auuacacuaaugugacaacaau

SEQ ID NO: 223315 - RNA, 22 nt, Human
gaaacuuuggcuaaaagccaga

SEQ ID NO: 223316 - RNA, 22 nt, Human
gcaucccucugaggggccaggc

SEQ ID NO: 223317 - RNA, 22 nt, Human
uucauucuugucuuuguauagu

SEQ ID NO: 223318 - RNA, 22 nt, Human
ucugggcuuuaguuuguuaucu

SEQ ID NO: 223319 - RNA, 22 nt, Human
guuuacuggagaagaugaccug

SEQ ID NO: 223320 - RNA, 22 nt, Human
uccugcuagagaauaacagcac

SEQ ID NO: 223321 - RNA, 19 nt, Human
uuuuuaaugggcuggagca

SEQ ID NO: 223322 - RNA, 21 nt, Human
uuucugucucugccacuaguu

SEQ ID NO: 223323 - RNA, 22 nt, Human
uguuacagugacuaauguuuua

SEQ ID NO: 223324 - RNA, 22 nt, Human
gcccugcugucuucagaguaua

SEQ ID NO: 223325 - RNA, 22 nt, Human
uaggauuuggcuuuagucaggu

SEQ ID NO: 223326 - RNA, 22 nt, Human
aaaacugaaccuugagaucuuu

SEQ ID NO: 223327 - RNA, 22 nt, Human
ccaaaauaacagcccaauucac

SEQ ID NO: 223328 - RNA, 22 nt, Human
cacaugcucauuggcacuguuc

SEQ ID NO: 223329 - RNA, 22 nt, Human
gacugugggcuccuugagggca

SEQ ID NO: 223330 - RNA, 20 nt, Human
auuagcuuggagacaguggc

SEQ ID NO: 223331 - RNA, 22 nt, Human
uaggaaacaaaccugccucuuc

SEQ ID NO: 223332 - RNA, 21 nt, Human
cagcuucuucugugaccuggu

SEQ ID NO: 223333 - RNA, 22 nt, Human
gcugugcagauguagggagugg

SEQ ID NO: 223334 - RNA, 22 nt, Human
uuggcuggcuucucgacuuguu

SEQ ID NO: 223335 - RNA, 22 nt, Human
cugcugucccagccuccucaca

SEQ ID NO: 223336 - RNA, 22 nt, Human
aaggcugaggcuggagaauuac

SEQ ID NO: 223337 - RNA, 22 nt, Human
gucagauuaauagcaauaauaa

SEQ ID NO: 223338 - RNA, 22 nt, Human
cagguugguauucaucuccaca

SEQ ID NO: 223339 - RNA, 22 nt, Human
auacuacaaucauaauuguaca

SEQ ID NO: 223340 - RNA, 22 nt, Human
ggcagugaaugaaacagaggcu

SEQ ID NO: 223341 - RNA, 22 nt, Human
acuguucaucucuuagaaagua

SEQ ID NO: 223342 - RNA, 19 nt, Human
augaaugagcugugagguu

SEQ ID NO: 223343 - RNA, 22 nt, Human
cugggccuuugcuuauuaauuu

SEQ ID NO: 223344 - RNA, 22 nt, Human
ucaggcugcuuucaugcuuaga

SEQ ID NO: 223345 - RNA, 22 nt, Human
ugcucuucacaguuucagcauc

SEQ ID NO: 223346 - RNA, 22 nt, Human
cuccuggccccagaucccaauc

SEQ ID NO: 223347 - RNA, 22 nt, Human
gguaacacaggugcaguuuuaa

SEQ ID NO: 223348 - RNA, 22 nt, Human
cuugaaagcacuccuuugacug

SEQ ID NO: 223349 - RNA, 22 nt, Human
ccagccuugcaccgagccagcc

SEQ ID NO: 223350 - RNA, 22 nt, Human
gcacuuucagcaggcagacaga

SEQ ID NO: 223351 - RNA, 19 nt, Human
ggaacuuggccuuuaccca

SEQ ID NO: 223352 - RNA, 22 nt, Human
uggcagagucugggcuugggca

SEQ ID NO: 223353 - RNA, 22 nt, Human
uccuccuuguuuugucucugcu

SEQ ID NO: 223354 - RNA, 22 nt, Human
uagggcuggguacacucuugcc

SEQ ID NO: 223355 - RNA, 22 nt, Human
uauugcuggaaaauggugugau

SEQ ID NO: 223356 - RNA, 22 nt, Human
aagugugggaaguagguggcga

SEQ ID NO: 223357 - RNA, 22 nt, Human
acuccaggcaucugcuucugcu

SEQ ID NO: 223358 - RNA, 22 nt, Human
gcagaugaggaagcuaaugcug

SEQ ID NO: 223359 - RNA, 22 nt, Human
aagcaccacccucccaaccugu

SEQ ID NO: 223360 - RNA, 22 nt, Human
uagaaagucaugaauuacacca

SEQ ID NO: 223361 - RNA, 22 nt, Human
ggccagaggccauccuccugcu

SEQ ID NO: 223362 - RNA, 22 nt, Human
ccagacaguuccuugagguuca

SEQ ID NO: 223363 - RNA, 22 nt, Human
uguccagguuagcuucaaacac

SEQ ID NO: 223364 - RNA, 22 nt, Human
aagcccucauuagccauagccc

SEQ ID NO: 223365 - RNA, 23 nt, Human
uccucaguauauaaaggcagaug

SEQ ID NO: 223366 - RNA, 22 nt, Human
gagcucuguguagccugagggu

SEQ ID NO: 223367 - RNA, 22 nt, Human
uuuacaaggcagaacugauuaa

SEQ ID NO: 223368 - RNA, 22 nt, Human
aaagaauacuccuuuugccuug

SEQ ID NO: 223369 - RNA, 21 nt, Human
ccaggacuccauggggucucu

SEQ ID NO: 223370 - RNA, 22 nt, Human
augagcagauauggauuuuaga

SEQ ID NO: 223371 - RNA, 22 nt, Human
uuaccuguuuuacaugcacaac

SEQ ID NO: 223372 - RNA, 22 nt, Human
gaccaggcuguuccagucuaac

SEQ ID NO: 223373 - RNA, 22 nt, Human
uccugcaggggcugaggaacca

SEQ ID NO: 223374 - RNA, 22 nt, Human
guggcagggugcucaucaugca

SEQ ID NO: 223375 - RNA, 22 nt, Human
ucuuuccccuacauuugguuaa

SEQ ID NO: 223376 - RNA, 22 nt, Human
augucacuccagggacacaggu

SEQ ID NO: 223377 - RNA, 22 nt, Human
ucauugcagacuaacaaucuca

SEQ ID NO: 223378 - RNA, 22 nt, Human
uagaaaccaucucacugcucag

SEQ ID NO: 223379 - RNA, 22 nt, Human
uucuuuauugagacuucauugu

SEQ ID NO: 223380 - RNA, 22 nt, Human
acuguugaagugccagcuugau

SEQ ID NO: 223381 - RNA, 22 nt, Human
cauagcuuagggguuaaacuca

SEQ ID NO: 223382 - RNA, 22 nt, Human
uaaaucuuuaggaagcucaaac

SEQ ID NO: 223383 - RNA, 22 nt, Human
uagggguuaccuuuagcaucuc

SEQ ID NO: 223384 - RNA, 22 nt, Human
caaaggcugguagaaugagcca

SEQ ID NO: 223385 - RNA, 22 nt, Human
aucuuucucugcacuauacaau

SEQ ID NO: 223386 - RNA, 22 nt, Human
cugcaggggcuggaguuggcuu

SEQ ID NO: 223387 - RNA, 22 nt, Human
agaggaggcuggguccagauaa

SEQ ID NO: 223388 - RNA, 21 nt, Human
agucuuugauaaagacaaagu

SEQ ID NO: 223389 - RNA, 22 nt, Human
uucaggauccccaccgcguuua

SEQ ID NO: 223390 - RNA, 22 nt, Human
cccaggccagaacuugguugcu

SEQ ID NO: 223391 - RNA, 22 nt, Human
gagcauuuuugucugcauuuua

SEQ ID NO: 223392 - RNA, 22 nt, Human
auacacauguguaugugcaugc

SEQ ID NO: 223393 - RNA, 22 nt, Human
uccuggcccacuccuagcuucu

SEQ ID NO: 223394 - RNA, 22 nt, Human
aauuccauccauuuguuucaac

SEQ ID NO: 223395 - RNA, 18 nt, Human
aggcacagagcauacaua

SEQ ID NO: 223396 - RNA, 22 nt, Human
uccugagcuucaguuucuucau

SEQ ID NO: 223397 - RNA, 19 nt, Human
gccugcagaaaaggcaggg

SEQ ID NO: 223398 - RNA, 22 nt, Human
cauacaaucaaguucuuuauua

SEQ ID NO: 223399 - RNA, 22 nt, Human
aacugcaaaaaugguagucuua

SEQ ID NO: 223400 - RNA, 22 nt, Human
uuucacaucagagguagauuag

SEQ ID NO: 223401 - RNA, 22 nt, Human
uuacacaaaaauaagauauggc

SEQ ID NO: 223402 - RNA, 22 nt, Human
ugggugaggagaggcugucuaa

SEQ ID NO: 223403 - RNA, 22 nt, Human
aauaagaauuuacuugucaaga

SEQ ID NO: 223404 - RNA, 18 nt, Human
gaaaauacucugggcuca

SEQ ID NO: 223405 - RNA, 22 nt, Human
cuucuucaucuguaaaacuugg

SEQ ID NO: 223406 - RNA, 22 nt, Human
cucaacauuuaacagugaaaaa

SEQ ID NO: 223407 - RNA, 22 nt, Human
uuggagggacugagcuucaguc

SEQ ID NO: 223408 - RNA, 22 nt, Human
uagcaaaaacugcaguuacuuu

SEQ ID NO: 223409 - RNA, 22 nt, Human
gagugucugaauuagagcacaa

SEQ ID NO: 223410 - RNA, 22 nt, Human
acagcuuuguuuucccugcuga

SEQ ID NO: 223411 - RNA, 22 nt, Human
gggcagcuagcccucuagccca

SEQ ID NO: 223412 - RNA, 22 nt, Human
aaagagcacccucaaugucuga

SEQ ID NO: 223413 - RNA, 22 nt, Human
guuuguaugaauguuuuaugcu

SEQ ID NO: 223414 - RNA, 22 nt, Human
cagcagggcccccgggugcgcc

SEQ ID NO: 223415 - RNA, 22 nt, Human
uuuaugaaccacucuacaccuu

SEQ ID NO: 223416 - RNA, 22 nt, Human
aacuugaaacuguuccagaaaa

SEQ ID NO: 223417 - RNA, 22 nt, Human
ucugcaggaaaaaagugccugg

SEQ ID NO: 223418 - RNA, 22 nt, Human
aacagacuuagagcaucccaau

SEQ ID NO: 223419 - RNA, 22 nt, Human
cagccagggagcaaagaguuga

SEQ ID NO: 223420 - RNA, 22 nt, Human
aggaugaauaacugaaauggug

SEQ ID NO: 223421 - RNA, 23 nt, Human
aaauaggaguaucuggaucauga

SEQ ID NO: 223422 - RNA, 22 nt, Human
ugccuacauuccuugcuuaugg

SEQ ID NO: 223423 - RNA, 22 nt, Human
ucgugcaaaccugacacagcca

SEQ ID NO: 223424 - RNA, 19 nt, Human
aauguuuaagagaaaaagg

SEQ ID NO: 223425 - RNA, 22 nt, Human
aaaagagaguugccagucugua

SEQ ID NO: 223426 - RNA, 22 nt, Human
acaauuagugaucagugaugcc

SEQ ID NO: 223427 - RNA, 22 nt, Human
aagucuuuugcugucauaggug

SEQ ID NO: 223428 - RNA, 18 nt, Human
cagaugagaugcaaucuc

SEQ ID NO: 223429 - RNA, 22 nt, Human
caaaugugguuucucagcauuc

SEQ ID NO: 223430 - RNA, 23 nt, Human
uucuggauguucuagucugagag

SEQ ID NO: 223431 - RNA, 22 nt, Human
gccagccagaguccaucugaga

SEQ ID NO: 223432 - RNA, 22 nt, Human
caggcugggcugguguuagagu

SEQ ID NO: 223433 - RNA, 22 nt, Human
gugucaacagccgaagauaaau

SEQ ID NO: 223434 - RNA, 22 nt, Human
cucaaauaccucuccaugugac

SEQ ID NO: 223435 - RNA, 22 nt, Human
auacaacuuuaucuguaaugag

SEQ ID NO: 223436 - RNA, 22 nt, Human
ucaauucuaguggagagaguuu

SEQ ID NO: 223437 - RNA, 22 nt, Human
ccuccugggacaggcuggcaca

SEQ ID NO: 223438 - RNA, 22 nt, Human
aguaaacagaaagcaagaugau

SEQ ID NO: 223439 - RNA, 22 nt, Human
ugcucccaggcucuguggucug

SEQ ID NO: 223440 - RNA, 22 nt, Human
aaaaguauuggccaccauuucu

SEQ ID NO: 223441 - RNA, 22 nt, Human
aggcaguguggagggcuguugc

SEQ ID NO: 223442 - RNA, 22 nt, Human
aaccagcugagaaugcuucugc

SEQ ID NO: 223443 - RNA, 22 nt, Human
ugcuggcugggcugcuggagac

SEQ ID NO: 223444 - RNA, 22 nt, Human
guuuuuucaugaguaguuaucu

SEQ ID NO: 223445 - RNA, 22 nt, Human
gaagcuuggauaacuguauggg

SEQ ID NO: 223446 - RNA, 22 nt, Human
aguggguguagucuuccuccug

SEQ ID NO: 223447 - RNA, 22 nt, Human
caggcagcaggagcccugcucg

SEQ ID NO: 223448 - RNA, 22 nt, Human
ggguccaggcggcauaguugua

SEQ ID NO: 223449 - RNA, 22 nt, Human
guuuacuguuaaccaacgaaug

SEQ ID NO: 223450 - RNA, 22 nt, Human
cuggagagaccgaaagaggcug

SEQ ID NO: 223451 - RNA, 22 nt, Human
ugccuggcaagaggggcuggcu

SEQ ID NO: 223452 - RNA, 22 nt, Human
uugccauuaaaacauguuaucu

SEQ ID NO: 223453 - RNA, 22 nt, Human
uucaguguuaaucuugggagaa

SEQ ID NO: 223454 - RNA, 22 nt, Human
ggaaggucgagcugcaucuggc

SEQ ID NO: 223455 - RNA, 22 nt, Human
acauauauuuucacacaugguu

SEQ ID NO: 223456 - RNA, 22 nt, Human
caggcuccuuaucuuacaacuu

SEQ ID NO: 223457 - RNA, 20 nt, Human
ugagcuucagauaucgugca

SEQ ID NO: 223458 - RNA, 22 nt, Human
gcucucuuuuuccagugguggu

SEQ ID NO: 223459 - RNA, 22 nt, Human
aagcaagccaaucuguuuuguu

SEQ ID NO: 223460 - RNA, 22 nt, Human
aauggcuucugaagcacacuuu

SEQ ID NO: 223461 - RNA, 22 nt, Human
uacuguuuuugccucuuuagaa

SEQ ID NO: 223462 - RNA, 22 nt, Human
acugccuucuuggccuucaaaa

SEQ ID NO: 223463 - RNA, 22 nt, Human
ccaggcugaauauguuccaggg

SEQ ID NO: 223464 - RNA, 22 nt, Human
uaaacagagagugcaguuauag

SEQ ID NO: 223465 - RNA, 22 nt, Human
ucugggcucugggaauuaggga

SEQ ID NO: 223466 - RNA, 22 nt, Human
ccagucuguacuuugcucuguu

SEQ ID NO: 223467 - RNA, 22 nt, Human
ucugucuuagccaucucaggcu

SEQ ID NO: 223468 - RNA, 22 nt, Human
ggacaucucuugccagggcugc

SEQ ID NO: 223469 - RNA, 22 nt, Human
aagugcugagacuacaggcaug

SEQ ID NO: 223470 - RNA, 21 nt, Human
ugcaggcugugcgcuccugcc

SEQ ID NO: 223471 - RNA, 22 nt, Human
ggcugcugggucaugaugcaga

SEQ ID NO: 223472 - RNA, 22 nt, Human
gccaggcuccaggcccuccuga

SEQ ID NO: 223473 - RNA, 22 nt, Human
ucaucugaggcaccagagcaua

SEQ ID NO: 223474 - RNA, 22 nt, Human
uuagagaagcuguaauuauuca

SEQ ID NO: 223475 - RNA, 22 nt, Human
ccugagcaaaggcccagaggga

SEQ ID NO: 223476 - RNA, 22 nt, Human
aaaauuuccaccaucuuugugu

SEQ ID NO: 223477 - RNA, 22 nt, Human
gugcagcugggcgcugaccuuc

SEQ ID NO: 223478 - RNA, 22 nt, Human
gacaccagcaaggcugugagga

SEQ ID NO: 223479 - RNA, 18 nt, Human
uaagagcagacuguaggc

SEQ ID NO: 223480 - RNA, 22 nt, Human
ucuccaggacugagcuccagcc

SEQ ID NO: 223481 - RNA, 22 nt, Human
auuaagcuccaaguugcucuga

SEQ ID NO: 223482 - RNA, 22 nt, Human
ccacagaaugaugacacuucag

SEQ ID NO: 223483 - RNA, 22 nt, Human
aaauucauuuuucuuagugugc

SEQ ID NO: 223484 - RNA, 22 nt, Human
auucuugauauagauaguuaau

SEQ ID NO: 223485 - RNA, 22 nt, Human
agaugguuaucuuuucuuugua

SEQ ID NO: 223486 - RNA, 22 nt, Human
cacauucuugaguuacagucua

SEQ ID NO: 223487 - RNA, 22 nt, Human
cgggcagugcccagcggggcag

SEQ ID NO: 223488 - RNA, 22 nt, Human
auuuaagauugcguauucaugu

SEQ ID NO: 223489 - RNA, 22 nt, Human
gagggaggggagcuccacccuc

SEQ ID NO: 223490 - RNA, 20 nt, Human
gaguccuuaugggcugaggu

SEQ ID NO: 223491 - RNA, 22 nt, Human
ucagcucuuaacccucuggccu

SEQ ID NO: 223492 - RNA, 22 nt, Human
cacccuagcugucauuucaguu

SEQ ID NO: 223493 - RNA, 20 nt, Human
agcaccucccauaugcuaga

SEQ ID NO: 223494 - RNA, 22 nt, Human
uguucuugagccuuuagaccua

SEQ ID NO: 223495 - RNA, 22 nt, Human
gaggucaggcuugcagcagggu

SEQ ID NO: 223496 - RNA, 22 nt, Human
uuggcgcccaggacgccgccgc

SEQ ID NO: 223497 - RNA, 21 nt, Human
aggaagaucuggaggucggcg

SEQ ID NO: 223498 - RNA, 22 nt, Human
ugggaagggucaacagcuggaa

SEQ ID NO: 223499 - RNA, 22 nt, Human
ggcuaccagauaaauuacagag

SEQ ID NO: 223500 - RNA, 22 nt, Human
accagccccaccgggacugcag

SEQ ID NO: 223501 - RNA, 22 nt, Human
aggcugaggcgggaggaucacu

SEQ ID NO: 223502 - RNA, 22 nt, Human
auaugaaaagaagucaccauug

SEQ ID NO: 223503 - RNA, 22 nt, Human
cauaauuuuccaugguuugcua

SEQ ID NO: 223504 - RNA, 22 nt, Human
gaaaaaggauaaauacaguguu

SEQ ID NO: 223505 - RNA, 22 nt, Human
auccacccugugguggcuuucu

SEQ ID NO: 223506 - RNA, 22 nt, Human
agccaggccagcugucuugagu

SEQ ID NO: 223507 - RNA, 22 nt, Human
aacagagcauucugcacuacaa

SEQ ID NO: 223508 - RNA, 22 nt, Human
uguccucaaggagcuucagucu

SEQ ID NO: 223509 - RNA, 22 nt, Human
aagguuuuuuuccaguaucucu

SEQ ID NO: 223510 - RNA, 18 nt, Human
ccauggcucccuccugcc

SEQ ID NO: 223511 - RNA, 19 nt, Human
cugaggugcaguaagaggc

SEQ ID NO: 223512 - RNA, 22 nt, Human
gaggccugaaaggggaccuaug

SEQ ID NO: 223513 - RNA, 22 nt, Human
ugugguggcuauucuggucuca

SEQ ID NO: 223514 - RNA, 22 nt, Human
ggugagggaguggaacgaggug

SEQ ID NO: 223515 - RNA, 22 nt, Human
gugcagcugguggagucugggg

SEQ ID NO: 223516 - RNA, 22 nt, Human
augagcaggaagagcacaaaga

SEQ ID NO: 223517 - RNA, 22 nt, Human
aggcugaggcagguggaucacc

SEQ ID NO: 223518 - RNA, 22 nt, Human
uuguacaaaggauuuggaagag

SEQ ID NO: 223519 - RNA, 22 nt, Human
ccaggcacaggugggccucaga

SEQ ID NO: 223520 - RNA, 22 nt, Human
ucacagugcaccagugugaagc

SEQ ID NO: 223521 - RNA, 19 nt, Human
ccugugugggguagagauc

SEQ ID NO: 223522 - RNA, 22 nt, Human
aaugcagaccaguaugaaaaac

SEQ ID NO: 223523 - RNA, 22 nt, Human
aggcuccaccagucaggugcau

SEQ ID NO: 223524 - RNA, 22 nt, Human
gcuggcuugacagaggccuggg

SEQ ID NO: 223525 - RNA, 22 nt, Human
uaacauguuaagaaauuagaua

SEQ ID NO: 223526 - RNA, 22 nt, Human
gcucagaggagcaucauaagga

SEQ ID NO: 223527 - RNA, 22 nt, Human
aaagcauuucaugucuagaaag

SEQ ID NO: 223528 - RNA, 22 nt, Human
acuguuacagagcaggaaauug

SEQ ID NO: 223529 - RNA, 18 nt, Human
agcuucccucugagaggg

SEQ ID NO: 223530 - RNA, 22 nt, Human
ucuuucaaaguaacaaccacga

SEQ ID NO: 223531 - RNA, 22 nt, Human
cacauguucuugaagccaacuc

SEQ ID NO: 223532 - RNA, 22 nt, Human
agaaccucacgagauuccuuca

SEQ ID NO: 223533 - RNA, 21 nt, Human
uccagggaacuucucaggaau

SEQ ID NO: 223534 - RNA, 22 nt, Human
ugugguuuugguucagaaacaa

SEQ ID NO: 223535 - RNA, 22 nt, Human
ccaggcugcucacaagcugccc

SEQ ID NO: 223536 - RNA, 18 nt, Human
aagaacugagguccuaga

SEQ ID NO: 223537 - RNA, 22 nt, Human
uugaaagacuucuccugugaaa

SEQ ID NO: 223538 - RNA, 22 nt, Human
caugggcaccuuaaaaugaggc

SEQ ID NO: 223539 - RNA, 22 nt, Human
uaaagacaugcaaagucuaauu

SEQ ID NO: 223540 - RNA, 22 nt, Human
uggcugcaguugggcccucaga

SEQ ID NO: 223541 - RNA, 22 nt, Human
gugguccuggcaaccaugguga

SEQ ID NO: 223542 - RNA, 19 nt, Human
uugugacuggcucugcaua

SEQ ID NO: 223543 - RNA, 22 nt, Human
gcuuuggaaauauagacucaag

SEQ ID NO: 223544 - RNA, 22 nt, Human
gugggggcuggaaaucuugcca

SEQ ID NO: 223545 - RNA, 22 nt, Human
gacaagaugacaucauggcuuc

SEQ ID NO: 223546 - RNA, 21 nt, Human
auaaacagcaugugauccaug

SEQ ID NO: 223547 - RNA, 21 nt, Human
guucaugucagcauuaaggga

SEQ ID NO: 223548 - RNA, 22 nt, Human
auggcagaaaggcaugugggcc

SEQ ID NO: 223549 - RNA, 22 nt, Human
gggaucugcuccagagggaaaa

SEQ ID NO: 223550 - RNA, 22 nt, Human
uuauagcagcaugauuuauaau

SEQ ID NO: 223551 - RNA, 22 nt, Human
aagggcagggaguuugugucua

SEQ ID NO: 223552 - RNA, 22 nt, Human
cuggcugcgcuaguccagaaga

SEQ ID NO: 223553 - RNA, 22 nt, Human
uuugaaagucaaccuuccaguu

SEQ ID NO: 223554 - RNA, 21 nt, Human
augguagguggagcaggugau

SEQ ID NO: 223555 - RNA, 22 nt, Human
uagcucaaagguuaagugugga

SEQ ID NO: 223556 - RNA, 22 nt, Human
aggcagccuuuagacagucugc

SEQ ID NO: 223557 - RNA, 22 nt, Human
uuaaaaccaucagcuguaagau

SEQ ID NO: 223558 - RNA, 22 nt, Human
caccagcucuccaccagguuuc

SEQ ID NO: 223559 - RNA, 22 nt, Human
ggcuggcucuuaccgacagcgu

SEQ ID NO: 223560 - RNA, 22 nt, Human
gcacagacucaccuuaauuuga

SEQ ID NO: 223561 - RNA, 22 nt, Human
aagguauuauugucuauguacu

SEQ ID NO: 223562 - RNA, 22 nt, Human
cuggcccucagacucaugggca

SEQ ID NO: 223563 - RNA, 22 nt, Human
uugagaaauaagcaugucuaga

SEQ ID NO: 223564 - RNA, 22 nt, Human
ucagggcaccaaaaaagaugcc

SEQ ID NO: 223565 - RNA, 21 nt, Human
uuguguuuccccagucacuuu

SEQ ID NO: 223566 - RNA, 22 nt, Human
uagcugagaggccaauugaacu

SEQ ID NO: 223567 - RNA, 22 nt, Human
cugcucagucauguuggauugu

SEQ ID NO: 223568 - RNA, 22 nt, Human
cuagagaacaacauucauaugg

SEQ ID NO: 223569 - RNA, 22 nt, Human
auuuuaccuuaaagucuauauu

SEQ ID NO: 223570 - RNA, 22 nt, Human
gcucccuccaugaggcagaccg

SEQ ID NO: 223571 - RNA, 22 nt, Human
ugucacauguuuaauguggacu

SEQ ID NO: 223572 - RNA, 22 nt, Human
uccaggccgcaggggcagcccc

SEQ ID NO: 223573 - RNA, 22 nt, Human
ggacugggcaugggugcucugc

SEQ ID NO: 223574 - RNA, 22 nt, Human
ccucagcauccuccugcucagu

SEQ ID NO: 223575 - RNA, 22 nt, Human
caguuacagcugcaccagagcc

SEQ ID NO: 223576 - RNA, 22 nt, Human
uacacacagaggccaugggauu

SEQ ID NO: 223577 - RNA, 22 nt, Human
uaguggaggggaugcaaagcuu

SEQ ID NO: 223578 - RNA, 20 nt, Human
ugggagcuggugaggucuca

SEQ ID NO: 223579 - RNA, 22 nt, Human
cucuaaaggcuuguuauugcau

SEQ ID NO: 223580 - RNA, 20 nt, Human
ugcucuggggguggagagac

SEQ ID NO: 223581 - RNA, 22 nt, Human
ucuuuggaucucaagguggcag

SEQ ID NO: 223582 - RNA, 20 nt, Human
gcuuccagaggaggccccgu

SEQ ID NO: 223583 - RNA, 22 nt, Human
uucaguguauauuuuuugagua

SEQ ID NO: 223584 - RNA, 22 nt, Human
uggucucugcaggccaggcuca

SEQ ID NO: 223585 - RNA, 22 nt, Human
agcuugggcaacacagcaagac

SEQ ID NO: 223586 - RNA, 22 nt, Human
ugguccuggagaucaauaugca

SEQ ID NO: 223587 - RNA, 22 nt, Human
cagcacaguuugcuuggcagag

SEQ ID NO: 223588 - RNA, 22 nt, Human
accuguuuucagaaaaugcaga

SEQ ID NO: 223589 - RNA, 22 nt, Human
ucugggcucuuaguguacccuc

SEQ ID NO: 223590 - RNA, 22 nt, Human
ucaguaauauucuuuaaaauac

SEQ ID NO: 223591 - RNA, 22 nt, Human
cucuggaggccguuggcccuua

SEQ ID NO: 223592 - RNA, 22 nt, Human
uacauuaucuuguuaucuuuca

SEQ ID NO: 223593 - RNA, 22 nt, Human
uggcccugcuuaugucucucuu

SEQ ID NO: 223594 - RNA, 22 nt, Human
acauucuuucucuucaggaaac

SEQ ID NO: 223595 - RNA, 22 nt, Human
auuuucaugacuaccuuaaaua

SEQ ID NO: 223596 - RNA, 22 nt, Human
uuucaugcacaaaugagcaagg

SEQ ID NO: 223597 - RNA, 22 nt, Human
uggaaggcugugauuacugugc

SEQ ID NO: 223598 - RNA, 22 nt, Human
uccuccacgauggcacaccugg

SEQ ID NO: 223599 - RNA, 22 nt, Human
ggcucuggagacauguggagag

SEQ ID NO: 223600 - RNA, 22 nt, Human
ugaguccaauaggggccuggaa

SEQ ID NO: 223601 - RNA, 22 nt, Human
ugcagcagcagggaggaggcuc

SEQ ID NO: 223602 - RNA, 23 nt, Human
uaagugauuagaauuugcuguca

SEQ ID NO: 223603 - RNA, 22 nt, Human
uccugggcuuaguggcuagguc

SEQ ID NO: 223604 - RNA, 22 nt, Human
ugucaugguagcugaaggaugu

SEQ ID NO: 223605 - RNA, 22 nt, Human
cuucccaggugcucuuagcaug

SEQ ID NO: 223606 - RNA, 22 nt, Human
uccuucuguagucccugucccu

SEQ ID NO: 223607 - RNA, 22 nt, Human
cagccugggcuccagagucccu

SEQ ID NO: 223608 - RNA, 22 nt, Human
cgguccuguacuugaugagaua

SEQ ID NO: 223609 - RNA, 22 nt, Human
acauguuuaaguuuaaugaaaa

SEQ ID NO: 223610 - RNA, 22 nt, Human
gcauucauacaucaauaagcuu

SEQ ID NO: 223611 - RNA, 22 nt, Human
cagagcuggcucugcauguaca

SEQ ID NO: 223612 - RNA, 22 nt, Human
gaguccaguuguucacagaggc

SEQ ID NO: 223613 - RNA, 22 nt, Human
auggcugcuuucccuuagcacc

SEQ ID NO: 223614 - RNA, 22 nt, Human
guccuagagggugagcuaggcu

SEQ ID NO: 223615 - RNA, 22 nt, Human
accucagaggaggcuccuggcu

SEQ ID NO: 223616 - RNA, 22 nt, Human
cggcugaggaucuccaggccug

SEQ ID NO: 223617 - RNA, 22 nt, Human
agucagguacuccgagggcaug

SEQ ID NO: 223618 - RNA, 22 nt, Human
aaugcacacauuugguacugaa

SEQ ID NO: 223619 - RNA, 22 nt, Human
ugagcccaggaguuggaggcug

SEQ ID NO: 223620 - RNA, 21 nt, Human
acagcaagccuucacaugagu

SEQ ID NO: 223621 - RNA, 22 nt, Human
auccuucagcugcccuguuacc

SEQ ID NO: 223622 - RNA, 22 nt, Human
uguacuugcuuauuagaaaucu

SEQ ID NO: 223623 - RNA, 22 nt, Human
aguggcaaaagcaggcuuaggc

SEQ ID NO: 223624 - RNA, 22 nt, Human
uacaacauuguguugcuucaua

SEQ ID NO: 223625 - RNA, 21 nt, Human
auucagaguaauucaucuuua

SEQ ID NO: 223626 - RNA, 22 nt, Human
gccccaccgagggugcaguccu

SEQ ID NO: 223627 - RNA, 22 nt, Human
acaaauuuggugagaguaaaua

SEQ ID NO: 223628 - RNA, 22 nt, Human
uacuuguuaucaucuuuuccuu

SEQ ID NO: 223629 - RNA, 22 nt, Human
ucacacauuucucaaguguagg

SEQ ID NO: 223630 - RNA, 22 nt, Human
ucuguuauauguuuuuucuaaa

SEQ ID NO: 223631 - RNA, 22 nt, Human
gucucccaucucuguccuugug

SEQ ID NO: 223632 - RNA, 22 nt, Human
uccaggcccauagacacuucuc

SEQ ID NO: 223633 - RNA, 19 nt, Human
uggcucuguuucucuggag

SEQ ID NO: 223634 - RNA, 22 nt, Human
aaaggccaauaaagacaagcug

SEQ ID NO: 223635 - RNA, 19 nt, Human
ccagugcaagguaagauag

SEQ ID NO: 223636 - RNA, 22 nt, Human
uguggagguuuaaguaauggga

SEQ ID NO: 223637 - RNA, 22 nt, Human
ugcaaaugggugaggguuagga

SEQ ID NO: 223638 - RNA, 22 nt, Human
augaaugggucauuauuugauc

SEQ ID NO: 223639 - RNA, 22 nt, Human
uggcccuguucuguaccucaua

SEQ ID NO: 223640 - RNA, 22 nt, Human
acccauacacacauauuuaugu

SEQ ID NO: 223641 - RNA, 22 nt, Human
cuaauauuuuuagaaaucacga

SEQ ID NO: 223642 - RNA, 22 nt, Human
ucuguuuuguaccagauacagc

SEQ ID NO: 223643 - RNA, 22 nt, Human
aguuggcaaggucuggccagcg

SEQ ID NO: 223644 - RNA, 22 nt, Human
augucacagcucccauuccucc

SEQ ID NO: 223645 - RNA, 22 nt, Human
cuuucuuugcagugagccagag

SEQ ID NO: 223646 - RNA, 22 nt, Human
agaugcugugaggaagcuagga

SEQ ID NO: 223647 - RNA, 22 nt, Human
ugcaucugauucucaggcagaa

SEQ ID NO: 223648 - RNA, 22 nt, Human
uaaacauggcuguuucaguuau

SEQ ID NO: 223649 - RNA, 20 nt, Human
ucccaaggaugccugggugu

SEQ ID NO: 223650 - RNA, 22 nt, Human
acaggccacaguggagucucug

SEQ ID NO: 223651 - RNA, 22 nt, Human
cauuccugagggcccccuacuu

SEQ ID NO: 223652 - RNA, 22 nt, Human
ggccagcuguaagcugcugaau

SEQ ID NO: 223653 - RNA, 22 nt, Human
caguguaucauuagugugauga

SEQ ID NO: 223654 - RNA, 22 nt, Human
ggucaacacugugaccaacagg

SEQ ID NO: 223655 - RNA, 18 nt, Human
agcaacaggaucccaggg

SEQ ID NO: 223656 - RNA, 23 nt, Human
aaggguccauagcuaucauuaca

SEQ ID NO: 223657 - RNA, 22 nt, Human
ggccccagggaagaaggugguc

SEQ ID NO: 223658 - RNA, 22 nt, Human
gucacacucaaaagcuaggaug

SEQ ID NO: 223659 - RNA, 22 nt, Human
uagagacaccaguaccauucug

SEQ ID NO: 223660 - RNA, 22 nt, Human
auuugucuagugguauucacgu

SEQ ID NO: 223661 - RNA, 22 nt, Human
agggaugguggaggaauuucaa

SEQ ID NO: 223662 - RNA, 22 nt, Human
uuggcuucuuuagucaguuugg

SEQ ID NO: 223663 - RNA, 22 nt, Human
ucucaggcaugguuuguucauc

SEQ ID NO: 223664 - RNA, 22 nt, Human
gaggggcuggcacgauggcugc

SEQ ID NO: 223665 - RNA, 22 nt, Human
auauuacacacgguaucacggg

SEQ ID NO: 223666 - RNA, 22 nt, Human
augcagcugacauuuucauguu

SEQ ID NO: 223667 - RNA, 20 nt, Human
auuagagcuacauggcuaca

SEQ ID NO: 223668 - RNA, 22 nt, Human
acagcugggugucccacuucug

SEQ ID NO: 223669 - RNA, 22 nt, Human
aaguggcuuugagcuucugcca

SEQ ID NO: 223670 - RNA, 22 nt, Human
ugcauauugugaaaauguagau

SEQ ID NO: 223671 - RNA, 22 nt, Human
ggcuccagaaaucauagagcag

SEQ ID NO: 223672 - RNA, 22 nt, Human
cacagcuucccaaaguggaccu

SEQ ID NO: 223673 - RNA, 22 nt, Human
uccacagguauuucuccuugcu

SEQ ID NO: 223674 - RNA, 22 nt, Human
uaaauacuuuacaggaugucuc

SEQ ID NO: 223675 - RNA, 22 nt, Human
uuguacuuaaauaugcaaauag

SEQ ID NO: 223676 - RNA, 22 nt, Human
ggggccagguccagcuuccaaa

SEQ ID NO: 223677 - RNA, 22 nt, Human
aggcuggcgacaucuggcgggc

SEQ ID NO: 223678 - RNA, 22 nt, Human
acucuuugucuguugccgcuua

SEQ ID NO: 223679 - RNA, 22 nt, Human
uccugguggugccagcugcagg

SEQ ID NO: 223680 - RNA, 22 nt, Human
cccucucccugcagaauguggc

SEQ ID NO: 223681 - RNA, 22 nt, Human
uagaucuuucacuacuguguag

SEQ ID NO: 223682 - RNA, 22 nt, Human
cugagcagcacagggcgccagg

SEQ ID NO: 223683 - RNA, 17 nt, Human
uggcaagacagcucagg

SEQ ID NO: 223684 - RNA, 22 nt, Human
cuuuggaaggcagagcucugug

SEQ ID NO: 223685 - RNA, 23 nt, Human
ucacuugaagcuagaaucugccc

SEQ ID NO: 223686 - RNA, 19 nt, Human
ccaggccuggcgucuccgc

SEQ ID NO: 223687 - RNA, 22 nt, Human
cugcacagcugggcaagauaua

SEQ ID NO: 223688 - RNA, 23 nt, Human
uggccaggguacuacacccaccc

SEQ ID NO: 223689 - RNA, 22 nt, Human
ucucaggcuaguaaaagauggg

SEQ ID NO: 223690 - RNA, 22 nt, Human
uugguuuagcaacuuccugugu

SEQ ID NO: 223691 - RNA, 22 nt, Human
cuccacagccccuccaguggca

SEQ ID NO: 223692 - RNA, 22 nt, Human
guuuucugauuagcaaaucuga

SEQ ID NO: 223693 - RNA, 22 nt, Human
uuuuucaucugauugauaacuc

SEQ ID NO: 223694 - RNA, 22 nt, Human
agucaccaucuguggcagccug

SEQ ID NO: 223695 - RNA, 22 nt, Human
ccugccaggccagugagcuucc

SEQ ID NO: 223696 - RNA, 22 nt, Human
aaugucuacaccguauguuguu

SEQ ID NO: 223697 - RNA, 22 nt, Human
ucucugaagaaucgaugauucu

SEQ ID NO: 223698 - RNA, 22 nt, Human
agcuggugugccacuguugggg

SEQ ID NO: 223699 - RNA, 22 nt, Human
ucugcaggagagugcccuagag

SEQ ID NO: 223700 - RNA, 22 nt, Human
ugcuuuuaggagauuaaaauua

SEQ ID NO: 223701 - RNA, 22 nt, Human
aguggcugccaagagcaaugcu

SEQ ID NO: 223702 - RNA, 22 nt, Human
ggggaaagugaauuguguagug

SEQ ID NO: 223703 - RNA, 22 nt, Human
gagcagcucugugccuggagac

SEQ ID NO: 223704 - RNA, 22 nt, Human
cucgcaggacagugcuaggacu

SEQ ID NO: 223705 - RNA, 22 nt, Human
uauguuuaguauccauuuucag

SEQ ID NO: 223706 - RNA, 21 nt, Human
aggacagauguaggaauaaag

SEQ ID NO: 223707 - RNA, 22 nt, Human
ccuggucagagcagucaggauc

SEQ ID NO: 223708 - RNA, 22 nt, Human
aacucuauuuacccuacuaaac

SEQ ID NO: 223709 - RNA, 22 nt, Human
aagacucuaucuuuagagauca

SEQ ID NO: 223710 - RNA, 22 nt, Human
ccuguguuaguuaugggucucu

SEQ ID NO: 223711 - RNA, 22 nt, Human
ucccaccccuugacucuuuaag

SEQ ID NO: 223712 - RNA, 22 nt, Human
gcccucuggcagccuuggcugg

SEQ ID NO: 223713 - RNA, 22 nt, Human
aggcuucugagcauggaguuuu

SEQ ID NO: 223714 - RNA, 22 nt, Human
gaggccaggaagcccaagauca

SEQ ID NO: 223715 - RNA, 22 nt, Human
cugaggcacugucagcugaggc

SEQ ID NO: 223716 - RNA, 22 nt, Human
ucuaggaggcacacaaguaguu

SEQ ID NO: 223717 - RNA, 22 nt, Human
caauuugauuaauaccauacuu

SEQ ID NO: 223718 - RNA, 22 nt, Human
ugaugaggggcucagaggucag

SEQ ID NO: 223719 - RNA, 22 nt, Human
auuucccacucaggccgcggcg

SEQ ID NO: 223720 - RNA, 22 nt, Human
ucagagaaugugaauauuaaac

SEQ ID NO: 223721 - RNA, 19 nt, Human
uccugcugugugaagggga

SEQ ID NO: 223722 - RNA, 22 nt, Human
agaagccaaaugccagugaccu

SEQ ID NO: 223723 - RNA, 22 nt, Human
aauugaugauucuuaugugaaa

SEQ ID NO: 223724 - RNA, 22 nt, Human
cuccagaggaaagcacauagug

SEQ ID NO: 223725 - RNA, 22 nt, Human
cugaagagaaagggagcucuuc

SEQ ID NO: 223726 - RNA, 22 nt, Human
gcuggcaguguauuguuagcug

SEQ ID NO: 223727 - RNA, 22 nt, Human
aaguuucaaauauaaaauuaca

SEQ ID NO: 223728 - RNA, 20 nt, Human
aagcacugugguggcaugga

SEQ ID NO: 223729 - RNA, 22 nt, Human
aggaggcccuagagcucuagag

SEQ ID NO: 223730 - RNA, 22 nt, Human
ccaguuuagguacuaggcucua

SEQ ID NO: 223731 - RNA, 22 nt, Human
uccugugaguagauaguauugu

SEQ ID NO: 223732 - RNA, 22 nt, Human
cagaggugcuggagugaguccu

SEQ ID NO: 223733 - RNA, 22 nt, Human
gaggcucacugggcaaagacuc

SEQ ID NO: 223734 - RNA, 22 nt, Human
aagacacugauacucugugauu

SEQ ID NO: 223735 - RNA, 22 nt, Human
agugacaacaaguugacuagaa

SEQ ID NO: 223736 - RNA, 22 nt, Human
aaggcauagucuuuaaguucug

SEQ ID NO: 223737 - RNA, 22 nt, Human
gcaaggcugugcacuuugcauu

SEQ ID NO: 223738 - RNA, 22 nt, Human
agaggggcgggaacucaaccuc

SEQ ID NO: 223739 - RNA, 22 nt, Human
cccugcagcauucucuaacugg

SEQ ID NO: 223740 - RNA, 22 nt, Human
ugggcagguuguuauuugacau

SEQ ID NO: 223741 - RNA, 22 nt, Human
ucacagacgcauccucagguag

SEQ ID NO: 223742 - RNA, 22 nt, Human
agcagcugccagagagaguucc

SEQ ID NO: 223743 - RNA, 22 nt, Human
uggagauguaaagcaaggcuua

SEQ ID NO: 223744 - RNA, 22 nt, Human
cuuucuagaguauggagucugu

SEQ ID NO: 223745 - RNA, 22 nt, Human
aauauaguucuagaaauauuuu

SEQ ID NO: 223746 - RNA, 22 nt, Human
gccuuggcuguuggagcuugau

SEQ ID NO: 223747 - RNA, 22 nt, Human
agaauaaauguuggacuuagga

SEQ ID NO: 223748 - RNA, 22 nt, Human
cugcugcugagaaugccucagg

SEQ ID NO: 223749 - RNA, 22 nt, Human
uuacaaaguguuaugauaaaca

SEQ ID NO: 223750 - RNA, 22 nt, Human
ugggauaagguaugugaaguac

SEQ ID NO: 223751 - RNA, 22 nt, Human
agacaugacagauaguugcuag

SEQ ID NO: 223752 - RNA, 22 nt, Human
ucuggguggcuucagaggccac

SEQ ID NO: 223753 - RNA, 20 nt, Human
caugccagaaugugagguag

SEQ ID NO: 223754 - RNA, 22 nt, Human
aauaccaccucauucuggaggc

SEQ ID NO: 223755 - RNA, 22 nt, Human
aagcagcauaugacagcaucca

SEQ ID NO: 223756 - RNA, 22 nt, Human
auaugcuugggacugauacagu

SEQ ID NO: 223757 - RNA, 22 nt, Human
cagcuccugcagcuggcuccca

SEQ ID NO: 223758 - RNA, 19 nt, Human
aacaccagagucaggaguc

SEQ ID NO: 223759 - RNA, 22 nt, Human
gaugugucauuuggucaucugc

SEQ ID NO: 223760 - RNA, 22 nt, Human
uuucauguauuucccaaagcuu

SEQ ID NO: 223761 - RNA, 22 nt, Human
gcagggcugggauuugagccca

SEQ ID NO: 223762 - RNA, 20 nt, Human
uugguugagccagggccugg

SEQ ID NO: 223763 - RNA, 22 nt, Human
uggcucugggaaugggaagaug

SEQ ID NO: 223764 - RNA, 22 nt, Human
ccugaaaauauccucuccuuug

SEQ ID NO: 223765 - RNA, 22 nt, Human
aggagacccaaugccagaaaga

SEQ ID NO: 223766 - RNA, 22 nt, Human
ucuuuggcuuugccacacccaa

SEQ ID NO: 223767 - RNA, 22 nt, Human
aagauaauguucuagcugucag

SEQ ID NO: 223768 - RNA, 22 nt, Human
cugccaggcgauggauuggcug

SEQ ID NO: 223769 - RNA, 22 nt, Human
guggggaggcauucuucucccu

SEQ ID NO: 223770 - RNA, 23 nt, Human
acuuuauugaccccaggucaguu

SEQ ID NO: 223771 - RNA, 22 nt, Human
acugcaaaaaugggugcauuca

SEQ ID NO: 223772 - RNA, 22 nt, Human
ucugaagagcuuuggaaguaug

SEQ ID NO: 223773 - RNA, 19 nt, Human
cagagccuucagugacucc

SEQ ID NO: 223774 - RNA, 22 nt, Human
aagcaaaggcaggagcuuguga

SEQ ID NO: 223775 - RNA, 22 nt, Human
auuucaaggcuacagaaaccuu

SEQ ID NO: 223776 - RNA, 22 nt, Human
acugggccuacccagauuggca

SEQ ID NO: 223777 - RNA, 22 nt, Human
agaacucucgcuggaucagacu

SEQ ID NO: 223778 - RNA, 22 nt, Human
uaacacugauuuguucucaggg

SEQ ID NO: 223779 - RNA, 22 nt, Human
gcaaagcaaucaggaguagcau

SEQ ID NO: 223780 - RNA, 22 nt, Human
ucaggcaccccuugaguagggg

SEQ ID NO: 223781 - RNA, 22 nt, Human
uuccagaaaguucuggaacugg

SEQ ID NO: 223782 - RNA, 22 nt, Human
ugcagggucccgaagggaagac

SEQ ID NO: 223783 - RNA, 22 nt, Human
uggccuggaaaaaugcagaugg

SEQ ID NO: 223784 - RNA, 22 nt, Human
augaaaugaaguuggccuggcu

SEQ ID NO: 223785 - RNA, 22 nt, Human
accaggcaaaaccacaggagca

SEQ ID NO: 223786 - RNA, 22 nt, Human
augaggcaggagcggggacccu

SEQ ID NO: 223787 - RNA, 22 nt, Human
agaaccuuucuuuagaaauuca

SEQ ID NO: 223788 - RNA, 22 nt, Human
uggagcuggaauuucugggccu

SEQ ID NO: 223789 - RNA, 19 nt, Human
uccaggcuccauuggcaga

SEQ ID NO: 223790 - RNA, 22 nt, Human
ugcauuaagcacacuuuugaau

SEQ ID NO: 223791 - RNA, 22 nt, Human
uagacacaucaaggaucaguuu

SEQ ID NO: 223792 - RNA, 22 nt, Human
uuaauauacaauuuuacgggcu

SEQ ID NO: 223793 - RNA, 22 nt, Human
ccugaagggacuccagagagca

SEQ ID NO: 223794 - RNA, 22 nt, Human
agcugcaagaagaggucccuga

SEQ ID NO: 223795 - RNA, 22 nt, Human
ugcagucuuccagcugcacaaa

SEQ ID NO: 223796 - RNA, 23 nt, Human
ggucacaugugagauuaaacuug

SEQ ID NO: 223797 - RNA, 20 nt, Human
cugugcuccggguuccugga

SEQ ID NO: 223798 - RNA, 22 nt, Human
uaugugcaggggcaggagcuca

SEQ ID NO: 223799 - RNA, 22 nt, Human
uuuacaugaguagcagauguuc

SEQ ID NO: 223800 - RNA, 22 nt, Human
uucuucugacacugaugcugua

SEQ ID NO: 223801 - RNA, 22 nt, Human
ugucccugccugcccacucugu

SEQ ID NO: 223802 - RNA, 22 nt, Human
ucugaggaccaucggggagcug

SEQ ID NO: 223803 - RNA, 20 nt, Human
ucuguggcagguggcgcuug

SEQ ID NO: 223804 - RNA, 22 nt, Human
agugggggccaacgagggcagc

SEQ ID NO: 223805 - RNA, 20 nt, Human
ucagacccagauuagcaggu

SEQ ID NO: 223806 - RNA, 23 nt, Human
uuucccacccucucucauugcug

SEQ ID NO: 223807 - RNA, 22 nt, Human
auucagcauaaucaguagcuug

SEQ ID NO: 223808 - RNA, 22 nt, Human
agagcccuggagggcagucccg

SEQ ID NO: 223809 - RNA, 22 nt, Human
gcuccaggugaauccucucacc

SEQ ID NO: 223810 - RNA, 22 nt, Human
cagcugcucugguggucucucc

SEQ ID NO: 223811 - RNA, 22 nt, Human
ucuggcuuggcuggcaucucug

SEQ ID NO: 223812 - RNA, 23 nt, Human
uccuuuaaugcuggaauggcuag

SEQ ID NO: 223813 - RNA, 22 nt, Human
cauacuguaagugcaaaagugu

SEQ ID NO: 223814 - RNA, 22 nt, Human
ucaggguaaaccuucacuguga

SEQ ID NO: 223815 - RNA, 22 nt, Human
cugguuuagucauaauggagaa

SEQ ID NO: 223816 - RNA, 22 nt, Human
uuacaaguacugaauaugauuu

SEQ ID NO: 223817 - RNA, 22 nt, Human
cuggggcccugggucugcccuc

SEQ ID NO: 223818 - RNA, 19 nt, Human
cagcccucuuaccacugug

SEQ ID NO: 223819 - RNA, 22 nt, Human
uacaccagaaucucugugggga

SEQ ID NO: 223820 - RNA, 22 nt, Human
cuuuuuauagcuauguccuaug

SEQ ID NO: 223821 - RNA, 22 nt, Human
cuggacagugggcagaggagac

SEQ ID NO: 223822 - RNA, 22 nt, Human
caguaaacacuagcauucuugg

SEQ ID NO: 223823 - RNA, 22 nt, Human
agaagaugucacugcagacagc

SEQ ID NO: 223824 - RNA, 22 nt, Human
cucuggagggaggcugagcugg

SEQ ID NO: 223825 - RNA, 22 nt, Human
caggaggcagaggaugcccagu

SEQ ID NO: 223826 - RNA, 22 nt, Human
uuccuaauggcaaaacauguuu

SEQ ID NO: 223827 - RNA, 22 nt, Human
cagccucugagccuuggcagau

SEQ ID NO: 223828 - RNA, 22 nt, Human
gagcaggccagcaauggaaggg

SEQ ID NO: 223829 - RNA, 22 nt, Human
aagacaggaaaagcuccaggcc

SEQ ID NO: 223830 - RNA, 22 nt, Human
uguccuggagugcuugggggaa

SEQ ID NO: 223831 - RNA, 22 nt, Human
aaaaaaucagaucuuugguuaa

SEQ ID NO: 223832 - RNA, 22 nt, Human
uccccaccuacacacugcuccu

SEQ ID NO: 223833 - RNA, 22 nt, Human
aguggaccagaagacugaagcu

SEQ ID NO: 223834 - RNA, 20 nt, Human
agaaaauguuuucagcugga

SEQ ID NO: 223835 - RNA, 22 nt, Human
ccuccccaugacccggugcugg

SEQ ID NO: 223836 - RNA, 22 nt, Human
aagcaagcaagguguuacauau

SEQ ID NO: 223837 - RNA, 22 nt, Human
cucuggacagcaggugcugugg

SEQ ID NO: 223838 - RNA, 18 nt, Human
uggcagguagacucaggu

SEQ ID NO: 223839 - RNA, 22 nt, Human
accucuguauaguugccugugg

SEQ ID NO: 223840 - RNA, 22 nt, Human
uuauucagggauaacauccagg

SEQ ID NO: 223841 - RNA, 22 nt, Human
cuuccuggccauugccauggca

SEQ ID NO: 223842 - RNA, 22 nt, Human
uauaagugugucagcuuccaac

SEQ ID NO: 223843 - RNA, 22 nt, Human
agcaaagauguccggggcaagc

SEQ ID NO: 223844 - RNA, 22 nt, Human
ucugagcuguaaguagacaagg

SEQ ID NO: 223845 - RNA, 22 nt, Human
ggggagaauuacauggcgugga

SEQ ID NO: 223846 - RNA, 22 nt, Human
acucagagucugagauaaaucu

SEQ ID NO: 223847 - RNA, 19 nt, Human
cagcucaggacucagcccc

SEQ ID NO: 223848 - RNA, 22 nt, Human
agggaagaaucacugggauguu

SEQ ID NO: 223849 - RNA, 22 nt, Human
gagaggagucccuaucacaguu

SEQ ID NO: 223850 - RNA, 22 nt, Human
ucucucugagcccugcuuuuuc

SEQ ID NO: 223851 - RNA, 22 nt, Human
cuuuucuggaaucaucucuaac

SEQ ID NO: 223852 - RNA, 22 nt, Human
ggugcugggaacgaggaauuca

SEQ ID NO: 223853 - RNA, 23 nt, Human
uccuccaaccagcagcugcauaa

SEQ ID NO: 223854 - RNA, 22 nt, Human
caaauucaaauuucaucagugu

SEQ ID NO: 223855 - RNA, 22 nt, Human
uggcuucucccgacacccuggc

SEQ ID NO: 223856 - RNA, 22 nt, Human
auaguuacaaagacuuuuuaaa

SEQ ID NO: 223857 - RNA, 23 nt, Human
agcugaggugcagauccaaagaa

SEQ ID NO: 223858 - RNA, 22 nt, Human
ggagccagugcccucuggugga

SEQ ID NO: 223859 - RNA, 22 nt, Human
gacagagauugaaucaggaaau

SEQ ID NO: 223860 - RNA, 22 nt, Human
uccuccccucagggcaacggau

SEQ ID NO: 223861 - RNA, 22 nt, Human
gcuggguccuaugcugguagag

SEQ ID NO: 223862 - RNA, 22 nt, Human
uacauauacugagugauuugcu

SEQ ID NO: 223863 - RNA, 21 nt, Human
aguuuuauauuauaagcuaaa

SEQ ID NO: 223864 - RNA, 19 nt, Human
gcacacauacacccuuugg

SEQ ID NO: 223865 - RNA, 22 nt, Human
aaaguaugauuggggauuauuu

SEQ ID NO: 223866 - RNA, 21 nt, Human
uucuguagcuguuagcuuuuc

SEQ ID NO: 223867 - RNA, 22 nt, Human
uauuaaauauaucuguuaguug

SEQ ID NO: 223868 - RNA, 22 nt, Human
guccuuucuuaaauuccugcuu

SEQ ID NO: 223869 - RNA, 22 nt, Human
gcacagaacacuggugaguccc

SEQ ID NO: 223870 - RNA, 22 nt, Human
uggccaggggaguuccccucca

SEQ ID NO: 223871 - RNA, 22 nt, Human
gcaggagcuggaaagugauguu

SEQ ID NO: 223872 - RNA, 22 nt, Human
uaacauuugcugucuccuaugu

SEQ ID NO: 223873 - RNA, 22 nt, Human
agccaugugucuuuauucuguu

SEQ ID NO: 223874 - RNA, 22 nt, Human
ucugcccaggaggucccauggg

SEQ ID NO: 223875 - RNA, 22 nt, Human
gcacaugacaguaaguagagca

SEQ ID NO: 223876 - RNA, 22 nt, Human
gugaaaaaucaucaugacuuga

SEQ ID NO: 223877 - RNA, 22 nt, Human
auuucuacaguacacaugcauu

SEQ ID NO: 223878 - RNA, 22 nt, Human
cugcagaaaccuuuccugauuu

SEQ ID NO: 223879 - RNA, 22 nt, Human
ccaggaggcucugacuggaccc

SEQ ID NO: 223880 - RNA, 22 nt, Human
auauuucaugggguuccauacu

SEQ ID NO: 223881 - RNA, 22 nt, Human
agaaugucaacagccucucaag

SEQ ID NO: 223882 - RNA, 17 nt, Human
ggcuuccagguggcucu

SEQ ID NO: 223883 - RNA, 22 nt, Human
aacaggcaauuuaggacucuuu

SEQ ID NO: 223884 - RNA, 22 nt, Human
gucauuuuuuucguaauagugg

SEQ ID NO: 223885 - RNA, 22 nt, Human
cucuucaaaagucuaauccuua

SEQ ID NO: 223886 - RNA, 22 nt, Human
uccucccuguaccauuccucug

SEQ ID NO: 223887 - RNA, 22 nt, Human
ccacaguaaagaaacaacuucg

SEQ ID NO: 223888 - RNA, 22 nt, Human
aagcuauugaauuuauagcaua

SEQ ID NO: 223889 - RNA, 22 nt, Human
ugggccagcucccugccccugg

SEQ ID NO: 223890 - RNA, 22 nt, Human
agcaggugguaggcagucagca

SEQ ID NO: 223891 - RNA, 22 nt, Human
ugcccagagccugagaggauua

SEQ ID NO: 223892 - RNA, 22 nt, Human
agggcgaggagacggaggcaca

SEQ ID NO: 223893 - RNA, 22 nt, Human
auuagagguacaaaccuucacu

SEQ ID NO: 223894 - RNA, 22 nt, Human
gcagagaguugggcugcgccag

SEQ ID NO: 223895 - RNA, 22 nt, Human
agugugcuauugcaccaucaua

SEQ ID NO: 223896 - RNA, 22 nt, Human
aguucuaaguaaauauuuuaua

SEQ ID NO: 223897 - RNA, 17 nt, Human
auuuccucagggcugag

SEQ ID NO: 223898 - RNA, 22 nt, Human
uggaaaaacugagacuuagaca

SEQ ID NO: 223899 - RNA, 22 nt, Human
uccagccacguauuaucucacu

SEQ ID NO: 223900 - RNA, 22 nt, Human
ggcagccuucucucauagguga

SEQ ID NO: 223901 - RNA, 22 nt, Human
accagcagguggcaguauguau

SEQ ID NO: 223902 - RNA, 22 nt, Human
uuccagcacagaaguauacauu

SEQ ID NO: 223903 - RNA, 22 nt, Human
auccaauucuaauauuguguuu

SEQ ID NO: 223904 - RNA, 22 nt, Human
uagaaccuccagaguggccccc

SEQ ID NO: 223905 - RNA, 22 nt, Human
ugcccugggaguuggagcugcu

SEQ ID NO: 223906 - RNA, 22 nt, Human
gcucagggaaggccacgugaga

SEQ ID NO: 223907 - RNA, 22 nt, Human
auuuccaugccuuagcuuaagg

SEQ ID NO: 223908 - RNA, 22 nt, Human
cuauugaaaguguacaauucaa

SEQ ID NO: 223909 - RNA, 22 nt, Human
ucugaaagaagggcagucuuuu

SEQ ID NO: 223910 - RNA, 22 nt, Human
aucuuuguugcucucauuucug

SEQ ID NO: 223911 - RNA, 22 nt, Human
uauuccaagcacagcaacccag

SEQ ID NO: 223912 - RNA, 22 nt, Human
ccccagcagacucagggcaggu

SEQ ID NO: 223913 - RNA, 22 nt, Human
agcuggagaucaugcugauacu

SEQ ID NO: 223914 - RNA, 22 nt, Human
uggcagguuuccuccucauagu

SEQ ID NO: 223915 - RNA, 22 nt, Human
aguucuuauugaauagaaauca

SEQ ID NO: 223916 - RNA, 22 nt, Human
gacucagugauuugacaugccu

SEQ ID NO: 223917 - RNA, 22 nt, Human
gcugagucuugccugugcuguc

SEQ ID NO: 223918 - RNA, 22 nt, Human
uugaaacugcuuauugaauuug

SEQ ID NO: 223919 - RNA, 22 nt, Human
aaggcuccagugaaugcuggca

SEQ ID NO: 223920 - RNA, 22 nt, Human
aagcagaauuucccacuaguug

SEQ ID NO: 223921 - RNA, 22 nt, Human
aaagaaguguugaauuugcaag

SEQ ID NO: 223922 - RNA, 22 nt, Human
uuuauucacucauucagccagu

SEQ ID NO: 223923 - RNA, 22 nt, Human
uuacaguaaucgaguguugugg

SEQ ID NO: 223924 - RNA, 22 nt, Human
agcagggcagcuuuuuucagaa

SEQ ID NO: 223925 - RNA, 22 nt, Human
agcugagcuaguaguuccagug

SEQ ID NO: 223926 - RNA, 22 nt, Human
agacccucuccaugcccacugc

SEQ ID NO: 223927 - RNA, 22 nt, Human
aaagugcaccugcuucuucuug

SEQ ID NO: 223928 - RNA, 22 nt, Human
aagugcuuucauauagucuuaa

SEQ ID NO: 223929 - RNA, 22 nt, Human
auguuucagauacagaucaaau

SEQ ID NO: 223930 - RNA, 21 nt, Human
uucuucaguuuaauauaaaau

SEQ ID NO: 223931 - RNA, 22 nt, Human
aacaguuuggguagguauguag

SEQ ID NO: 223932 - RNA, 22 nt, Human
aucuggaauuaagagaaaguga

SEQ ID NO: 223933 - RNA, 22 nt, Human
uuuccaaagcugaguugagcaa

SEQ ID NO: 223934 - RNA, 22 nt, Human
agcaggcugagcacccaggggg

SEQ ID NO: 223935 - RNA, 22 nt, Human
uccuggacagauccccaucauc

SEQ ID NO: 223936 - RNA, 22 nt, Human
agggaaggaggccauguguccc

SEQ ID NO: 223937 - RNA, 22 nt, Human
caucacaucaaaccuacucuca

SEQ ID NO: 223938 - RNA, 22 nt, Human
gcagaggcugggugucccaguc

SEQ ID NO: 223939 - RNA, 22 nt, Human
ugcugugcucuuuaaggugcug

SEQ ID NO: 223940 - RNA, 22 nt, Human
agugcaacagcaguucucuuua

SEQ ID NO: 223941 - RNA, 22 nt, Human
uucuccaguuauauuauguuaa

SEQ ID NO: 223942 - RNA, 22 nt, Human
caguuuuaucaucugugaaaug

SEQ ID NO: 223943 - RNA, 22 nt, Human
cuuucucuugagcaagagcugu

SEQ ID NO: 223944 - RNA, 22 nt, Human
agagagggcauagaaaaaggga

SEQ ID NO: 223945 - RNA, 22 nt, Human
cucccagguugauucuuucccu

SEQ ID NO: 223946 - RNA, 22 nt, Human
auucuuuuuuaaggaauagaac

SEQ ID NO: 223947 - RNA, 22 nt, Human
agcagguguuggcugggccauc

SEQ ID NO: 223948 - RNA, 22 nt, Human
cugcugggccuggucucugagg

SEQ ID NO: 223949 - RNA, 22 nt, Human
ccuggguggcagagguugcagu

SEQ ID NO: 223950 - RNA, 22 nt, Human
uucucugacccccuuaaauauu

SEQ ID NO: 223951 - RNA, 22 nt, Human
cugaggcaucauggagaacagu

SEQ ID NO: 223952 - RNA, 22 nt, Human
ugaggccugaagccuggagccu

SEQ ID NO: 223953 - RNA, 23 nt, Human
ugacaggcugcuucuggcugagg

SEQ ID NO: 223954 - RNA, 22 nt, Human
ucuguuuaugcauauuuaaaac

SEQ ID NO: 223955 - RNA, 22 nt, Human
uggcauugcuagugacccagca

SEQ ID NO: 223956 - RNA, 22 nt, Human
ggccacagcaaugcugugaugu

SEQ ID NO: 223957 - RNA, 22 nt, Human
cacuugaauggcauuguuccuu

SEQ ID NO: 223958 - RNA, 22 nt, Human
uggaaauacaagaaguauguca

SEQ ID NO: 223959 - RNA, 22 nt, Human
gccugcacucaaacacucucuu

SEQ ID NO: 223960 - RNA, 22 nt, Human
guucucugccacuuaccagcua

SEQ ID NO: 223961 - RNA, 22 nt, Human
uuauaucuuuuuacaucucucc

SEQ ID NO: 223962 - RNA, 18 nt, Human
ccucacagacuuccaugu

SEQ ID NO: 223963 - RNA, 22 nt, Human
uccuggccuuagcgaggcgguc

SEQ ID NO: 223964 - RNA, 22 nt, Human
gggugguguauuagagcugcag

SEQ ID NO: 223965 - RNA, 22 nt, Human
ugaggcaaagacaaagcagcau

SEQ ID NO: 223966 - RNA, 22 nt, Human
ugagggagucaugauuaaggaa

SEQ ID NO: 223967 - RNA, 21 nt, Human
uaugguaaccagacaagaaug

SEQ ID NO: 223968 - RNA, 22 nt, Human
ugcuacauaccacgaugcagua

SEQ ID NO: 223969 - RNA, 22 nt, Human
uuccuguguguugguggcagaa

SEQ ID NO: 223970 - RNA, 22 nt, Human
cacaaauggccguguucaaaga

SEQ ID NO: 223971 - RNA, 22 nt, Human
uggcuucccaggaaaggagaag

SEQ ID NO: 223972 - RNA, 22 nt, Human
cagccaggccuggugaccaaag

SEQ ID NO: 223973 - RNA, 22 nt, Human
aaugaugagaacuggaguaauu

SEQ ID NO: 223974 - RNA, 22 nt, Human
uuguuaaaaugcauauucuggu

SEQ ID NO: 223975 - RNA, 22 nt, Human
aggcuaagauguggucugagca

SEQ ID NO: 223976 - RNA, 22 nt, Human
ccuaggcuuguuuucaucagcu

SEQ ID NO: 223977 - RNA, 22 nt, Human
agaguuuggagguguuccugga

SEQ ID NO: 223978 - RNA, 22 nt, Human
ccuccuggaggcucuaagggag

SEQ ID NO: 223979 - RNA, 22 nt, Human
cgcaggggaggaagguacaccu

SEQ ID NO: 223980 - RNA, 22 nt, Human
aagcaggcaagguuguggggca

SEQ ID NO: 223981 - RNA, 17 nt, Human
acacagggagagggagc

SEQ ID NO: 223982 - RNA, 22 nt, Human
aacaaacucaaauggaagagug

SEQ ID NO: 223983 - RNA, 22 nt, Human
cagcuggcuccaccucugggcu

SEQ ID NO: 223984 - RNA, 22 nt, Human
cagcccucaaaccacuuccagg

SEQ ID NO: 223985 - RNA, 22 nt, Human
gagcccagggcaggcaaggcag

SEQ ID NO: 223986 - RNA, 22 nt, Human
aaagugcacucucagugcugcu

SEQ ID NO: 223987 - RNA, 22 nt, Human
ucuagaaaaacaaaguaucuga

SEQ ID NO: 223988 - RNA, 22 nt, Human
aaagcaauaguaaugguaauag

SEQ ID NO: 223989 - RNA, 22 nt, Human
gcacuugaagaauugaacugga

SEQ ID NO: 223990 - RNA, 22 nt, Human
ucugggugagcugccucggguc

SEQ ID NO: 223991 - RNA, 19 nt, Human
guauaacuuacaccagcaa

SEQ ID NO: 223992 - RNA, 22 nt, Human
ggauucugccuuguugcuucaa

SEQ ID NO: 223993 - RNA, 22 nt, Human
cugggccauggaagucucugcc

SEQ ID NO: 223994 - RNA, 23 nt, Human
ucguugaauagcaauagcacaac

SEQ ID NO: 223995 - RNA, 22 nt, Human
acaaacagcuaacauauguuaa

SEQ ID NO: 223996 - RNA, 22 nt, Human
aguucuucauaaccuuacugug

SEQ ID NO: 223997 - RNA, 22 nt, Human
uaauacaucauucaucuaagga

SEQ ID NO: 223998 - RNA, 22 nt, Human
ucacaucugugugauugucauu

SEQ ID NO: 223999 - RNA, 22 nt, Human
cgcugggggaacagcgagggug

SEQ ID NO: 224000 - RNA, 22 nt, Human
agggcucuguuggggucagcac

SEQ ID NO: 224001 - RNA, 22 nt, Human
ggcucagaccucccagcuccag

SEQ ID NO: 224002 - RNA, 22 nt, Human
uugcaaauaauagccugaaacu

SEQ ID NO: 224003 - RNA, 22 nt, Human
uguccagugauucucaugagcc

SEQ ID NO: 224004 - RNA, 17 nt, Human
cucuggaauuggugaag

SEQ ID NO: 224005 - RNA, 22 nt, Human
ucagacagucaucagagcuugu

SEQ ID NO: 224006 - RNA, 22 nt, Human
cuuacaggaaagaagaaagcau

SEQ ID NO: 224007 - RNA, 20 nt, Human
caggcagaggaugcugacca

SEQ ID NO: 224008 - RNA, 22 nt, Human
ucucuuggaaagcuugcccacu

SEQ ID NO: 224009 - RNA, 22 nt, Human
uacaucuauacugaucuacauu

SEQ ID NO: 224010 - RNA, 22 nt, Human
cuuucucuguguuucacaugcu

SEQ ID NO: 224011 - RNA, 22 nt, Human
uccagcccucagccaaguggaa

SEQ ID NO: 224012 - RNA, 21 nt, Human
agcagacacuugugaccuucc

SEQ ID NO: 224013 - RNA, 22 nt, Human
gcagaauacauuuuguuuuccu

SEQ ID NO: 224014 - RNA, 22 nt, Human
guacuuuaaaucaauguagauu

SEQ ID NO: 224015 - RNA, 19 nt, Human
agauggggaagagugugag

SEQ ID NO: 224016 - RNA, 22 nt, Human
uaagguuuguggggagcaaaag

SEQ ID NO: 224017 - RNA, 22 nt, Human
gcaggguccauggaggcagccc

SEQ ID NO: 224018 - RNA, 22 nt, Human
uugcagacauuccagagcuuuu

SEQ ID NO: 224019 - RNA, 20 nt, Human
ucugugcaccugcuacaagg

SEQ ID NO: 224020 - RNA, 22 nt, Human
agcccagagggguuugaggacu

SEQ ID NO: 224021 - RNA, 22 nt, Human
caggugagaggcgguccugcau

SEQ ID NO: 224022 - RNA, 22 nt, Human
uggaaauauuugcucauuaucu

SEQ ID NO: 224023 - RNA, 19 nt, Human
caggccucuggucugcugu

SEQ ID NO: 224024 - RNA, 22 nt, Human
ugagccagccuugcagcugugc

SEQ ID NO: 224025 - RNA, 22 nt, Human
ccuguucaagguauuaauuauc

SEQ ID NO: 224026 - RNA, 22 nt, Human
ucucagugagcuuuucuauguu

SEQ ID NO: 224027 - RNA, 22 nt, Human
agcauuuaauccuacauagauc

SEQ ID NO: 224028 - RNA, 22 nt, Human
gggcugaccccaccccucacuc

SEQ ID NO: 224029 - RNA, 22 nt, Human
gagaaagggauaauuugaagag

SEQ ID NO: 224030 - RNA, 18 nt, Human
uggcuccugccuccugca

SEQ ID NO: 224031 - RNA, 22 nt, Human
ggaagcuggacaggcuuugagu

SEQ ID NO: 224032 - RNA, 15 nt, Human
gcagguggaucacuu

SEQ ID NO: 224033 - RNA, 22 nt, Human
aagcucagcagccaggcccugu

SEQ ID NO: 224034 - RNA, 22 nt, Human
uggcuaugguauugauggguuu

SEQ ID NO: 224035 - RNA, 22 nt, Human
caggcuugagggcaggcccagu

SEQ ID NO: 224036 - RNA, 22 nt, Human
gccacacuuauucucaugcaca

SEQ ID NO: 224037 - RNA, 22 nt, Human
uuucaguugauugcuuggguua

SEQ ID NO: 224038 - RNA, 22 nt, Human
uaacaagucauuuuaaauuaug

SEQ ID NO: 224039 - RNA, 22 nt, Human
ccugaccuauuuuucucagcug

SEQ ID NO: 224040 - RNA, 22 nt, Human
ucaggcugauuucuuuugaggg

SEQ ID NO: 224041 - RNA, 22 nt, Human
ggccugagaauguaccagaucu

SEQ ID NO: 224042 - RNA, 23 nt, Human
uucauuugucuacuucacuuguu

SEQ ID NO: 224043 - RNA, 22 nt, Human
aggugccuaucuggucucugca

SEQ ID NO: 224044 - RNA, 22 nt, Human
ucuagaaauuuugccuuguauu

SEQ ID NO: 224045 - RNA, 22 nt, Human
caggggagugagucccucucug

SEQ ID NO: 224046 - RNA, 22 nt, Human
uuucuggcagcgggacaggggu

SEQ ID NO: 224047 - RNA, 22 nt, Human
uggcagaaguacacaagcaugc

SEQ ID NO: 224048 - RNA, 22 nt, Human
gcucuauuacuuucaauaaaaa

SEQ ID NO: 224049 - RNA, 22 nt, Human
uccugcagccacugcaggcaga

SEQ ID NO: 224050 - RNA, 22 nt, Human
cucaggcccacagcagacccac

SEQ ID NO: 224051 - RNA, 22 nt, Human
ugaaacaggcaaaacugcagau

SEQ ID NO: 224052 - RNA, 22 nt, Human
uuuccaagacuccaguucuccc

SEQ ID NO: 224053 - RNA, 22 nt, Human
gugugucccuuggaaccucagc

SEQ ID NO: 224054 - RNA, 22 nt, Human
cuguuuguuggcuauugacagu

SEQ ID NO: 224055 - RNA, 22 nt, Human
cuggccaguugccuuccugggu

SEQ ID NO: 224056 - RNA, 22 nt, Human
ggcaguggcuguagucucuugg

SEQ ID NO: 224057 - RNA, 22 nt, Human
acaggcauugggauggagguug

SEQ ID NO: 224058 - RNA, 22 nt, Human
acucugagggguauguuccuau

SEQ ID NO: 224059 - RNA, 22 nt, Human
agaagcagacucugaggcaagg

SEQ ID NO: 224060 - RNA, 22 nt, Human
ggcucuggguucugcaaugcgu

SEQ ID NO: 224061 - RNA, 21 nt, Human
aggcuuggauagguuauguga

SEQ ID NO: 224062 - RNA, 22 nt, Human
ugcuucugacugggucaguuga

SEQ ID NO: 224063 - RNA, 20 nt, Human
aacagggggcugcagagggc

SEQ ID NO: 224064 - RNA, 22 nt, Human
ugcaaaggaggaugggaaagaa

SEQ ID NO: 224065 - RNA, 22 nt, Human
gagggaauggugugcaagaggu

SEQ ID NO: 224066 - RNA, 22 nt, Human
uccuggcuccuggagaccugcu

SEQ ID NO: 224067 - RNA, 22 nt, Human
acugccauuggucaaaugagug

SEQ ID NO: 224068 - RNA, 22 nt, Human
ucuauaaaacucaagagcaauu

SEQ ID NO: 224069 - RNA, 22 nt, Human
uggcaaaguuuaucaggaauau

SEQ ID NO: 224070 - RNA, 20 nt, Human
uccagagaguggcaaagcuc

SEQ ID NO: 224071 - RNA, 22 nt, Human
caguguggugagauuccaggug

SEQ ID NO: 224072 - RNA, 23 nt, Human
uguguacacaauagaugagguuu

SEQ ID NO: 224073 - RNA, 22 nt, Human
agagcugggaccgucuggaagu

SEQ ID NO: 224074 - RNA, 22 nt, Human
auucuacaugauagaagggaga

SEQ ID NO: 224075 - RNA, 22 nt, Human
cuacagacccaccuuggaagaa

SEQ ID NO: 224076 - RNA, 22 nt, Human
caggaaacggcuauucuuuugu

SEQ ID NO: 224077 - RNA, 22 nt, Human
ucuggcagugauuucugugauc

SEQ ID NO: 224078 - RNA, 23 nt, Human
uucuggguugcugugcuuggaau

SEQ ID NO: 224079 - RNA, 22 nt, Human
ggucucugcucagaugccacuu

SEQ ID NO: 224080 - RNA, 22 nt, Human
aggccucugggucuccucugac

SEQ ID NO: 224081 - RNA, 22 nt, Human
ccaggcugcuuagccuuaucuu

SEQ ID NO: 224082 - RNA, 22 nt, Human
augcuaaauguuaauguuaccu

SEQ ID NO: 224083 - RNA, 22 nt, Human
uuacaacuugcagaggauguug

SEQ ID NO: 224084 - RNA, 22 nt, Human
ugcccaggcuggaaugcagugg

SEQ ID NO: 224085 - RNA, 22 nt, Human
gcaggcucguuggaaguccccu

SEQ ID NO: 224086 - RNA, 22 nt, Human
aauccaggguguggccuuucca

SEQ ID NO: 224087 - RNA, 22 nt, Human
gguuccaccuggcgagggguau

SEQ ID NO: 224088 - RNA, 20 nt, Human
accugggaaaaccuuuuccu

SEQ ID NO: 224089 - RNA, 19 nt, Human
ggccaccucucuucccagg

SEQ ID NO: 224090 - RNA, 23 nt, Human
uaccuuucccugggagacugcuc

SEQ ID NO: 224091 - RNA, 22 nt, Human
ccagaucuaaguccaaaguacu

SEQ ID NO: 224092 - RNA, 23 nt, Human
guacacauaguguaguuauauuu

SEQ ID NO: 224093 - RNA, 22 nt, Human
gcuuucaauuaugucagccugu

SEQ ID NO: 224094 - RNA, 22 nt, Human
ccucagagaaagguauggcuga

SEQ ID NO: 224095 - RNA, 22 nt, Human
cugagccagcgggcucacuuuu

SEQ ID NO: 224096 - RNA, 22 nt, Human
gacaagacaugugaugacauca

SEQ ID NO: 224097 - RNA, 22 nt, Human
ccugcaagacuauuuaguucca

SEQ ID NO: 224098 - RNA, 22 nt, Human
ugucucugccagcuagcagaau

SEQ ID NO: 224099 - RNA, 21 nt, Human
agaaaaacacgauauaagccc

SEQ ID NO: 224100 - RNA, 22 nt, Human
uuacagaguucgcaccuggugg

SEQ ID NO: 224101 - RNA, 22 nt, Human
cagccuguggcagaggucuaau

SEQ ID NO: 224102 - RNA, 22 nt, Human
ugaguggacaccugcuucuuua

SEQ ID NO: 224103 - RNA, 22 nt, Human
uauggcuucugggccaaauuua

SEQ ID NO: 224104 - RNA, 22 nt, Human
uccugagugguuguuuucuucc

SEQ ID NO: 224105 - RNA, 22 nt, Human
ugcagggcaguuuguuucggca

SEQ ID NO: 224106 - RNA, 22 nt, Human
aaggcuggcaauauauuuguua

SEQ ID NO: 224107 - RNA, 22 nt, Human
cuggaaggagcccgggcggauc

SEQ ID NO: 224108 - RNA, 22 nt, Human
ugcuuuauaaccauuucugugg

SEQ ID NO: 224109 - RNA, 22 nt, Human
ugaggccacuuccccacagccc

SEQ ID NO: 224110 - RNA, 22 nt, Human
cagggccagccgcagcauccac

SEQ ID NO: 224111 - RNA, 22 nt, Human
ucaggcagguuggcugcagguc

SEQ ID NO: 224112 - RNA, 22 nt, Human
auuuuucucuccacuccauuaa

SEQ ID NO: 224113 - RNA, 22 nt, Human
cuguucagaaaaaaucuucaug

SEQ ID NO: 224114 - RNA, 20 nt, Human
ccuccuggucaggugugcag

SEQ ID NO: 224115 - RNA, 22 nt, Human
uucuacaugguugcucagaggg

SEQ ID NO: 224116 - RNA, 22 nt, Human
cagaaagccaacuccaacuguc

SEQ ID NO: 224117 - RNA, 22 nt, Human
uggacacaguggugaagguaca

SEQ ID NO: 224118 - RNA, 22 nt, Human
uaguuuaccaaauugaucuucc

SEQ ID NO: 224119 - RNA, 22 nt, Human
gucuuuaucuuugaaauuaguc

SEQ ID NO: 224120 - RNA, 22 nt, Human
aauaagcuggagcuauauugag

SEQ ID NO: 224121 - RNA, 22 nt, Human
aagggacauagacuguacaucu

SEQ ID NO: 224122 - RNA, 22 nt, Human
ggcaccugguaagugcucagua

SEQ ID NO: 224123 - RNA, 22 nt, Human
uuucugaauaacucuaugauau

SEQ ID NO: 224124 - RNA, 20 nt, Human
acuaaucauccagucacagu

SEQ ID NO: 224125 - RNA, 22 nt, Human
aguccuuagaacacuguaucug

SEQ ID NO: 224126 - RNA, 22 nt, Human
agaccucaauaccaggcaccac

SEQ ID NO: 224127 - RNA, 22 nt, Human
agaagcugccuacaugaccagc

SEQ ID NO: 224128 - RNA, 22 nt, Human
ccuucaaggcaaggagggcugg

SEQ ID NO: 224129 - RNA, 22 nt, Human
auuagugucugugaauaauucu

SEQ ID NO: 224130 - RNA, 22 nt, Human
ucccaggauuuuaggcucucag

SEQ ID NO: 224131 - RNA, 22 nt, Human
cagaauuuuucacucaaucuuc

SEQ ID NO: 224132 - RNA, 22 nt, Human
cagggccuccccggcagucuuu

SEQ ID NO: 224133 - RNA, 22 nt, Human
aagcccugucacccugacuuca

SEQ ID NO: 224134 - RNA, 22 nt, Human
ggcagccaugcacgcugccugg

SEQ ID NO: 224135 - RNA, 20 nt, Human
aacaaacuacaaaauuaugu

SEQ ID NO: 224136 - RNA, 22 nt, Human
gaggggagaggcuuauggauca

SEQ ID NO: 224137 - RNA, 22 nt, Human
caacuaauccuuugaaaagaag

SEQ ID NO: 224138 - RNA, 22 nt, Human
aauacaaucaaauucacuagca

SEQ ID NO: 224139 - RNA, 18 nt, Human
ugaggcucagcuccuggu

SEQ ID NO: 224140 - RNA, 22 nt, Human
cugcuuuagacaacugcuggga

SEQ ID NO: 224141 - RNA, 22 nt, Human
uuagaaaacauaagugguaaag

SEQ ID NO: 224142 - RNA, 22 nt, Human
gaugcaaacugugacauagagu

SEQ ID NO: 224143 - RNA, 22 nt, Human
ccaggaucuggguccaugggac

SEQ ID NO: 224144 - RNA, 22 nt, Human
gacccugaggauucccugcuga

SEQ ID NO: 224145 - RNA, 22 nt, Human
guuacucuugagaggcugaggu

SEQ ID NO: 224146 - RNA, 22 nt, Human
cagccagggucaggcagcuucu

SEQ ID NO: 224147 - RNA, 22 nt, Human
ccuggcugguugucugauucua

SEQ ID NO: 224148 - RNA, 22 nt, Human
cccuguuuauuuuuggagagaa

SEQ ID NO: 224149 - RNA, 22 nt, Human
gcugucucucccaggauccaug

SEQ ID NO: 224150 - RNA, 22 nt, Human
gccugccacgcaugcagaguca

SEQ ID NO: 224151 - RNA, 22 nt, Human
cugagccaguagucagggacaa

SEQ ID NO: 224152 - RNA, 22 nt, Human
aucuuuuuugucuuggucacug

SEQ ID NO: 224153 - RNA, 22 nt, Human
aaguuacauauucuugggcuau

SEQ ID NO: 224154 - RNA, 22 nt, Human
cuaaaugucauggaguuguaga

SEQ ID NO: 224155 - RNA, 22 nt, Human
augacacuguccuaguaaggaa

SEQ ID NO: 224156 - RNA, 22 nt, Human
cagcccugcucuuagugucucc

SEQ ID NO: 224157 - RNA, 22 nt, Human
cccagccucuggauucugcccu

SEQ ID NO: 224158 - RNA, 22 nt, Human
uacagaauaaagcgugaagcuu

SEQ ID NO: 224159 - RNA, 22 nt, Human
ucaggacacuuggcacaagguc

SEQ ID NO: 224160 - RNA, 22 nt, Human
uggugggacaucugaggagagg

SEQ ID NO: 224161 - RNA, 22 nt, Human
guuugugucaaugacuucugca

SEQ ID NO: 224162 - RNA, 22 nt, Human
ucaggucuguacuauugucuug

SEQ ID NO: 224163 - RNA, 18 nt, Human
agaagccacgaggagucc

SEQ ID NO: 224164 - RNA, 22 nt, Human
ucugggaauuuauuggcacuuu

SEQ ID NO: 224165 - RNA, 22 nt, Human
ggcaguuucaucaggagaaaag

SEQ ID NO: 224166 - RNA, 22 nt, Human
ugcugucugauucagggugauu

SEQ ID NO: 224167 - RNA, 22 nt, Human
acugaaagaaccuuccuguugc

SEQ ID NO: 224168 - RNA, 22 nt, Human
uuuggcucggcugcugauggug

SEQ ID NO: 224169 - RNA, 21 nt, Human
gggugggaggacacagcaggc

SEQ ID NO: 224170 - RNA, 22 nt, Human
uaaauuuacccaaggaacaugu

SEQ ID NO: 224171 - RNA, 22 nt, Human
auggaauuaaaagucaaguaau

SEQ ID NO: 224172 - RNA, 22 nt, Human
cucugaagguuucuguuacugu

SEQ ID NO: 224173 - RNA, 18 nt, Human
cacaggcucccagugagg

SEQ ID NO: 224174 - RNA, 22 nt, Human
aacagcugcuucaguacuugaa

SEQ ID NO: 224175 - RNA, 19 nt, Human
guauuucaggacaagacgu

SEQ ID NO: 224176 - RNA, 22 nt, Human
guggcagguuccguagacagca

SEQ ID NO: 224177 - RNA, 22 nt, Human
accuacauacggaaauauuuac

SEQ ID NO: 224178 - RNA, 22 nt, Human
ucaagagaaggggaaauagacu

SEQ ID NO: 224179 - RNA, 22 nt, Human
acaucuuuuuggaaacggcuga

SEQ ID NO: 224180 - RNA, 22 nt, Human
aaauguaguugaaaaguuaagg

SEQ ID NO: 224181 - RNA, 23 nt, Human
gcccacauuggugcaugaauguu

SEQ ID NO: 224182 - RNA, 22 nt, Human
ucugaggccuugggacagaagu

SEQ ID NO: 224183 - RNA, 19 nt, Human
gcacacccugcaccaccau

SEQ ID NO: 224184 - RNA, 22 nt, Human
gcaggcaggcuuccuugaacug

SEQ ID NO: 224185 - RNA, 22 nt, Human
agaaaaacacaaucgggccucc

SEQ ID NO: 224186 - RNA, 22 nt, Human
auuuagcaaaaaaugaugaagc

SEQ ID NO: 224187 - RNA, 22 nt, Human
caacacagggguuaugccaugg

SEQ ID NO: 224188 - RNA, 22 nt, Human
gggcuguggagccgcgagggcu

SEQ ID NO: 224189 - RNA, 22 nt, Human
cagggccagagagggcuggcug

SEQ ID NO: 224190 - RNA, 22 nt, Human
gagcuucagcugccaugacugu

SEQ ID NO: 224191 - RNA, 22 nt, Human
ccugagcugcggggcagugcuc

SEQ ID NO: 224192 - RNA, 22 nt, Human
auacuguaauaccuaaaugaac

SEQ ID NO: 224193 - RNA, 22 nt, Human
cuucagagugacucagcaucuu

SEQ ID NO: 224194 - RNA, 17 nt, Human
aaguccagaguugagca

SEQ ID NO: 224195 - RNA, 22 nt, Human
cauuuguauguuccuccuuagg

SEQ ID NO: 224196 - RNA, 22 nt, Human
gcagcgcuacucacagcucuga

SEQ ID NO: 224197 - RNA, 22 nt, Human
gcagaagggaauaaggagcuuu

SEQ ID NO: 224198 - RNA, 22 nt, Human
ggaagaguaacaggagguggaa

SEQ ID NO: 224199 - RNA, 22 nt, Human
gaggccagaguuccccgaguca

SEQ ID NO: 224200 - RNA, 22 nt, Human
caaaaugaugugauuuuauugu

SEQ ID NO: 224201 - RNA, 22 nt, Human
cacaggcacgccucuggccagg

SEQ ID NO: 224202 - RNA, 22 nt, Human
uuuauucuagcucagaauaguu

SEQ ID NO: 224203 - RNA, 22 nt, Human
uugaaggacauccuauuucuag

SEQ ID NO: 224204 - RNA, 22 nt, Human
ucuugaaaggagauuggaggca

SEQ ID NO: 224205 - RNA, 22 nt, Human
gcagggcagccacaggcccccu

SEQ ID NO: 224206 - RNA, 22 nt, Human
uccauuuuagagaugaagaaac

SEQ ID NO: 224207 - RNA, 22 nt, Human
cuggauguccuuccccugaagc

SEQ ID NO: 224208 - RNA, 22 nt, Human
cggcagggcuccaugcauuucu

SEQ ID NO: 224209 - RNA, 22 nt, Human
ucuugggcauguguuugauuuc

SEQ ID NO: 224210 - RNA, 22 nt, Human
ccuccuuuccuguuuuccugag

SEQ ID NO: 224211 - RNA, 22 nt, Human
ccagacccugcucuggggcucu

SEQ ID NO: 224212 - RNA, 22 nt, Human
ugugcagcagcagcuguggaga

SEQ ID NO: 224213 - RNA, 22 nt, Human
agcugcagugaacuguuuuguc

SEQ ID NO: 224214 - RNA, 22 nt, Human
cagggcucgcugccagcuucag

SEQ ID NO: 224215 - RNA, 22 nt, Human
acauugaauucaaaauuacuga

SEQ ID NO: 224216 - RNA, 22 nt, Human
gcagggcuccacuguggccaag

SEQ ID NO: 224217 - RNA, 22 nt, Human
uacacaugaucauuuaguagca

SEQ ID NO: 224218 - RNA, 22 nt, Human
ucugcaggcucuagaugagguu

SEQ ID NO: 224219 - RNA, 22 nt, Human
agaugcagaguuugcuguggac

SEQ ID NO: 224220 - RNA, 22 nt, Human
gugugcaggugucagugcagcu

SEQ ID NO: 224221 - RNA, 22 nt, Human
ucccagggacucucugccuucc

SEQ ID NO: 224222 - RNA, 22 nt, Human
auuugccuugugaauuggauau

SEQ ID NO: 224223 - RNA, 21 nt, Human
cagugcagggguuagcgugua

SEQ ID NO: 224224 - RNA, 22 nt, Human
aauaacuucaguucuuacauua

SEQ ID NO: 224225 - RNA, 22 nt, Human
caaguacugugauagcugaagu

SEQ ID NO: 224226 - RNA, 22 nt, Human
ucaaagcuuagauaauuucuuu

SEQ ID NO: 224227 - RNA, 17 nt, Human
gcaguggagggguaguu

SEQ ID NO: 224228 - RNA, 22 nt, Human
ggcucugaacauggggaggagu

SEQ ID NO: 224229 - RNA, 22 nt, Human
ccugcugcuaugaaggugacag

SEQ ID NO: 224230 - RNA, 22 nt, Human
caagauuugacuucgugguuug

SEQ ID NO: 224231 - RNA, 22 nt, Human
agcagggcaugaauaaggguuu

SEQ ID NO: 224232 - RNA, 22 nt, Human
cagagcuggacuuaaauauauu

SEQ ID NO: 224233 - RNA, 22 nt, Human
caugaaacaucagagauuucuc

SEQ ID NO: 224234 - RNA, 21 nt, Human
ucacaucuauguuaagcaaac

SEQ ID NO: 224235 - RNA, 22 nt, Human
acauucuaugaagauaauuuua

SEQ ID NO: 224236 - RNA, 22 nt, Human
gcagacaucaccucagugcuau

SEQ ID NO: 224237 - RNA, 22 nt, Human
uacugucuuuccauccuugccu

SEQ ID NO: 224238 - RNA, 22 nt, Human
agcuccuggggguuccaagcag

SEQ ID NO: 224239 - RNA, 22 nt, Human
ugcucuauuaauuuuaacgaug

SEQ ID NO: 224240 - RNA, 22 nt, Human
cagguccagucacuggucugca

SEQ ID NO: 224241 - RNA, 22 nt, Human
uucugggcaguuggaaauuuca

SEQ ID NO: 224242 - RNA, 23 nt, Human
aaaugacauaugguuucugaagg

SEQ ID NO: 224243 - RNA, 23 nt, Human
aagcacagaaugguuuaggaguu

SEQ ID NO: 224244 - RNA, 22 nt, Human
caugcacaaagguaagaugcgu

SEQ ID NO: 224245 - RNA, 22 nt, Human
gcaggcucacucuguuuggcuc

SEQ ID NO: 224246 - RNA, 18 nt, Human
ucugcaggaccucagggc

SEQ ID NO: 224247 - RNA, 22 nt, Human
cacaauuauagaagaaagcaua

SEQ ID NO: 224248 - RNA, 22 nt, Human
gacagcuguggagaggcaugug

SEQ ID NO: 224249 - RNA, 23 nt, Human
ccucuccagacacugggccuugu

SEQ ID NO: 224250 - RNA, 22 nt, Human
uagaaagacaugggccagcagc

SEQ ID NO: 224251 - RNA, 22 nt, Human
cauaauauacuacauugaugaa

SEQ ID NO: 224252 - RNA, 17 nt, Human
ucugucuugacugucac

SEQ ID NO: 224253 - RNA, 22 nt, Human
aggaaacucaaagugucaggua

SEQ ID NO: 224254 - RNA, 23 nt, Human
agugccauugacccuaugucuau

SEQ ID NO: 224255 - RNA, 22 nt, Human
acauaacauaguugacauuuuu

SEQ ID NO: 224256 - RNA, 22 nt, Human
gcagguguccugggcuggcagu

SEQ ID NO: 224257 - RNA, 22 nt, Human
gaaaagcuaggccaguucagcu

SEQ ID NO: 224258 - RNA, 22 nt, Human
aaguuacaggagaaagagauca

SEQ ID NO: 224259 - RNA, 23 nt, Human
guguuacuaaagaugaacauuua

SEQ ID NO: 224260 - RNA, 22 nt, Human
ccugugacaaacccgccuauuc

SEQ ID NO: 224261 - RNA, 22 nt, Human
uacagaauagaauagggacagg

SEQ ID NO: 224262 - RNA, 18 nt, Human
ucagguguuuucuguaua

SEQ ID NO: 224263 - RNA, 22 nt, Human
aggaucaggcccucuaggguag

SEQ ID NO: 224264 - RNA, 22 nt, Human
gcccugcucuggucucugcccg

SEQ ID NO: 224265 - RNA, 22 nt, Human
ucaggcagaguggaagcugcaa

SEQ ID NO: 224266 - RNA, 22 nt, Human
uuuagcuuuaccucauagauuu

SEQ ID NO: 224267 - RNA, 18 nt, Human
cacaggagccacacucac

SEQ ID NO: 224268 - RNA, 22 nt, Human
agcccagcuuccuucugucucu

SEQ ID NO: 224269 - RNA, 22 nt, Human
aauaaugaacauuuaaaaccug

SEQ ID NO: 224270 - RNA, 22 nt, Human
ugaagugaccuggggcagugua

SEQ ID NO: 224271 - RNA, 22 nt, Human
cuggauguccagguagaaguuu

SEQ ID NO: 224272 - RNA, 22 nt, Human
uuucagaaccaagagagacauc

SEQ ID NO: 224273 - RNA, 22 nt, Human
uauugcuguucuuuaaaugaag

SEQ ID NO: 224274 - RNA, 22 nt, Human
uuccugggcucuggcuggccua

SEQ ID NO: 224275 - RNA, 22 nt, Human
ucuucaaaugcuaguaauauca

SEQ ID NO: 224276 - RNA, 22 nt, Human
ugacauuauuaucaugucacca

SEQ ID NO: 224277 - RNA, 22 nt, Human
cucuuaaaaacuugauauauuu

SEQ ID NO: 224278 - RNA, 22 nt, Human
gaccauuucaggggcagggacu

SEQ ID NO: 224279 - RNA, 22 nt, Human
cagugaggaguccagggcagag

SEQ ID NO: 224280 - RNA, 19 nt, Human
cuguacagguugcuucugg

SEQ ID NO: 224281 - RNA, 22 nt, Human
uuuuccuaguaggccuauuaga

SEQ ID NO: 224282 - RNA, 22 nt, Human
cauccauagccucaauaaauag

SEQ ID NO: 224283 - RNA, 22 nt, Human
ccacagaaagccugggaagugg

SEQ ID NO: 224284 - RNA, 22 nt, Human
uuuccuuugggagcaugaauuu

SEQ ID NO: 224285 - RNA, 22 nt, Human
ucuuuucuugcauuauugcacu

SEQ ID NO: 224286 - RNA, 22 nt, Human
cccuggcugccagucaccagac

SEQ ID NO: 224287 - RNA, 22 nt, Human
ugaaauucaaaacacauuuguc

SEQ ID NO: 224288 - RNA, 22 nt, Human
acaauauuguacccagaaguuu

SEQ ID NO: 224289 - RNA, 22 nt, Human
uucuaacuuucaagguccuuuc

SEQ ID NO: 224290 - RNA, 22 nt, Human
auccacaggaggguuuggaaaa

SEQ ID NO: 224291 - RNA, 22 nt, Human
gggggacuaacuggauccugga

SEQ ID NO: 224292 - RNA, 22 nt, Human
aaaagucugcuuucuauuauca

SEQ ID NO: 224293 - RNA, 22 nt, Human
gggagcucgugcgcccaggugc

SEQ ID NO: 224294 - RNA, 22 nt, Human
gcagcccaggacccuggacaga

SEQ ID NO: 224295 - RNA, 22 nt, Human
cagaaguuagacuucaacuaau

SEQ ID NO: 224296 - RNA, 22 nt, Human
cuguuauuugagaguguugaau

SEQ ID NO: 224297 - RNA, 22 nt, Human
ggcaggcaccagcucagcaaua

SEQ ID NO: 224298 - RNA, 22 nt, Human
cuccugguuccugucuuaaaua

SEQ ID NO: 224299 - RNA, 20 nt, Human
guauuacaggcuuagaacca

SEQ ID NO: 224300 - RNA, 22 nt, Human
ugaucuccugaccuuguaaucc

SEQ ID NO: 224301 - RNA, 22 nt, Human
acuuucuuaggcuguauaaaug

SEQ ID NO: 224302 - RNA, 21 nt, Human
cggcucagugccugcuccuuc

SEQ ID NO: 224303 - RNA, 22 nt, Human
guccagaagcucaaguugaacu

SEQ ID NO: 224304 - RNA, 22 nt, Human
acaaauuugaauccugacuucu

SEQ ID NO: 224305 - RNA, 21 nt, Human
agacacagggguugcuggggu

SEQ ID NO: 224306 - RNA, 22 nt, Human
ugcuggaguucgacauugcaaa

SEQ ID NO: 224307 - RNA, 22 nt, Human
gcugccugcaguguuuucccag

SEQ ID NO: 224308 - RNA, 22 nt, Human
cagggggcagcguagaaaauga

SEQ ID NO: 224309 - RNA, 22 nt, Human
ccaggacaagccagagggacag

SEQ ID NO: 224310 - RNA, 22 nt, Human
aaugcauauguaggcaagcagu

SEQ ID NO: 224311 - RNA, 22 nt, Human
ucagugcauggacagauuuaga

SEQ ID NO: 224312 - RNA, 22 nt, Human
aaaguggugggcgaacucauca

SEQ ID NO: 224313 - RNA, 22 nt, Human
gugcacagaaacauacaaugug

SEQ ID NO: 224314 - RNA, 22 nt, Human
ugaaggcuugguggcagccucu

SEQ ID NO: 224315 - RNA, 22 nt, Human
aaauuacagaucaccaaugcau

SEQ ID NO: 224316 - RNA, 22 nt, Human
cuguucaguaaccuauaaaaca

SEQ ID NO: 224317 - RNA, 23 nt, Human
aggcagagccaaggucaaaaccc

SEQ ID NO: 224318 - RNA, 22 nt, Human
aguauuuagcugacucgcuaca

SEQ ID NO: 224319 - RNA, 22 nt, Human
aguuccugaacuucuuaaugac

SEQ ID NO: 224320 - RNA, 22 nt, Human
uguauauucugccuaaaagcuu

SEQ ID NO: 224321 - RNA, 22 nt, Human
aggucagaagugccagggaauu

SEQ ID NO: 224322 - RNA, 22 nt, Human
auauacacagagcuuaugguga

SEQ ID NO: 224323 - RNA, 22 nt, Human
ugggcucucucaccuggaggcu

SEQ ID NO: 224324 - RNA, 22 nt, Human
ugucucuggcugcagccuguuc

SEQ ID NO: 224325 - RNA, 22 nt, Human
aguggcagaagccaagucugca

SEQ ID NO: 224326 - RNA, 22 nt, Human
uccaggcccgagaugggcugga

SEQ ID NO: 224327 - RNA, 22 nt, Human
aaagcagucucagacuuaagca

SEQ ID NO: 224328 - RNA, 22 nt, Human
gugcccaggggccagcugccgg

SEQ ID NO: 224329 - RNA, 22 nt, Human
gaaaggcugggauuuagcgcug

SEQ ID NO: 224330 - RNA, 22 nt, Human
auggccagagaggccagccugg

SEQ ID NO: 224331 - RNA, 22 nt, Human
guuaagaaucaagacuuaucuu

SEQ ID NO: 224332 - RNA, 22 nt, Human
cugagggcuggagcugaggccu

SEQ ID NO: 224333 - RNA, 22 nt, Human
agcugaaucucaggcauccuuu

SEQ ID NO: 224334 - RNA, 22 nt, Human
uuucucuuuggaggggcugaau

SEQ ID NO: 224335 - RNA, 22 nt, Human
auguccuuuuauuuaaagcagg

SEQ ID NO: 224336 - RNA, 21 nt, Human
ggcuuuaugcucacccagccu

SEQ ID NO: 224337 - RNA, 22 nt, Human
agcugagggcaggaugggguga

SEQ ID NO: 224338 - RNA, 22 nt, Human
ucucagagauuuuguuucccuu

SEQ ID NO: 224339 - RNA, 22 nt, Human
gaguuacauggacauucucucc

SEQ ID NO: 224340 - RNA, 22 nt, Human
uguucucaucuggaucucagga

SEQ ID NO: 224341 - RNA, 22 nt, Human
caaaugauaccuauuacuaggc

SEQ ID NO: 224342 - RNA, 22 nt, Human
ggcaggugcucaaaaauauuug

SEQ ID NO: 224343 - RNA, 22 nt, Human
gccagucucccucaguccucug

SEQ ID NO: 224344 - RNA, 22 nt, Human
caggcaggugcagauuccucuu

SEQ ID NO: 224345 - RNA, 22 nt, Human
gugucacuggaauacugucugu

SEQ ID NO: 224346 - RNA, 22 nt, Human
cucucagcaggaaagcaugcaa

SEQ ID NO: 224347 - RNA, 22 nt, Human
guuuccuaccagugguuccaga

SEQ ID NO: 224348 - RNA, 22 nt, Human
acugacuuuggaauauuucuag

SEQ ID NO: 224349 - RNA, 22 nt, Human
ugccuugcuggaugucaguuuu

SEQ ID NO: 224350 - RNA, 22 nt, Human
agcuucuuuaauucagcaugau

SEQ ID NO: 224351 - RNA, 23 nt, Human
ugacacaggucaaaaauaagaug

SEQ ID NO: 224352 - RNA, 22 nt, Human
cuuguuaaaaugcagauuccaa

SEQ ID NO: 224353 - RNA, 22 nt, Human
uuauaugaacuggacuuuagga

SEQ ID NO: 224354 - RNA, 22 nt, Human
gcaaggaacaaaugcucugcuu

SEQ ID NO: 224355 - RNA, 22 nt, Human
ucaggauguuaauauagcauua

SEQ ID NO: 224356 - RNA, 22 nt, Human
gauauuuugagaaauccuauga

SEQ ID NO: 224357 - RNA, 22 nt, Human
uuauacuuuauacuacaucauu

SEQ ID NO: 224358 - RNA, 22 nt, Human
cuagggaaaguggacauggcuu

SEQ ID NO: 224359 - RNA, 22 nt, Human
ccucaggccagggggcggccag

SEQ ID NO: 224360 - RNA, 22 nt, Human
augguuuuagaaucaggaaaaa

SEQ ID NO: 224361 - RNA, 22 nt, Human
acagucucuccacacugcaggg

SEQ ID NO: 224362 - RNA, 22 nt, Human
uuugaaacccgucacuuugagu

SEQ ID NO: 224363 - RNA, 22 nt, Human
agacagacuguguuugaauccu

SEQ ID NO: 224364 - RNA, 22 nt, Human
acauuucuggaguuucucaaca

SEQ ID NO: 224365 - RNA, 18 nt, Human
ucucucagggaaacagaa

SEQ ID NO: 224366 - RNA, 22 nt, Human
aaugucuuuuaaauguugaggu

SEQ ID NO: 224367 - RNA, 22 nt, Human
guccaugauucugugacacccu

SEQ ID NO: 224368 - RNA, 20 nt, Human
aggccugagagaugacuggg

SEQ ID NO: 224369 - RNA, 22 nt, Human
ccaggguuggcaagcaaggcuu

SEQ ID NO: 224370 - RNA, 22 nt, Human
ucaguggaguauggaugaaguc

SEQ ID NO: 224371 - RNA, 21 nt, Human
ccuguucacagaucuguaacu

SEQ ID NO: 224372 - RNA, 22 nt, Human
caggguggcacucagcgcaucu

SEQ ID NO: 224373 - RNA, 22 nt, Human
acauuugacuacauuuauauau

SEQ ID NO: 224374 - RNA, 22 nt, Human
ucagggcagguuaacuugggug

SEQ ID NO: 224375 - RNA, 22 nt, Human
uguuaaacuguauugcauaagg

SEQ ID NO: 224376 - RNA, 22 nt, Human
gcaaguuuagcuaacuggccca

SEQ ID NO: 224377 - RNA, 22 nt, Human
uucauugaaauguuucuagcug

SEQ ID NO: 224378 - RNA, 22 nt, Human
aggaagcuggugugaggaugaa

SEQ ID NO: 224379 - RNA, 22 nt, Human
uuguuucuggaaaaggcgagaa

SEQ ID NO: 224380 - RNA, 22 nt, Human
ugcuggagaucauuaauguuca

SEQ ID NO: 224381 - RNA, 22 nt, Human
gcucaguguucaucuguaugca

SEQ ID NO: 224382 - RNA, 22 nt, Human
ccaugccccaauacaggacacc

SEQ ID NO: 224383 - RNA, 22 nt, Human
uuuucucaggugcuuaucuaag

SEQ ID NO: 224384 - RNA, 22 nt, Human
aggugcaccugagggugucauc

SEQ ID NO: 224385 - RNA, 22 nt, Human
ucagaagaaagauguuauuacu

SEQ ID NO: 224386 - RNA, 22 nt, Human
ucuguccauucagaauggcccu

SEQ ID NO: 224387 - RNA, 22 nt, Human
uuccuuucccucacagccucgg

SEQ ID NO: 224388 - RNA, 22 nt, Human
gugccagccgcaccccaggaga

SEQ ID NO: 224389 - RNA, 22 nt, Human
aucuacaggauaguuuaauauu

SEQ ID NO: 224390 - RNA, 22 nt, Human
gcugugcagucuuuggugugcc

SEQ ID NO: 224391 - RNA, 18 nt, Human
gucucugugggaauuggc

SEQ ID NO: 224392 - RNA, 22 nt, Human
gcuggaaaugaauggagaggug

SEQ ID NO: 224393 - RNA, 22 nt, Human
ucagggcccagagcucaggcaa

SEQ ID NO: 224394 - RNA, 19 nt, Human
gaagaagcuugagaaguag

SEQ ID NO: 224395 - RNA, 22 nt, Human
ucuggcccugcugcugugagca

SEQ ID NO: 224396 - RNA, 22 nt, Human
caguggcgugaucucugcucac

SEQ ID NO: 224397 - RNA, 22 nt, Human
gaggccaggagugcuguaaguu

SEQ ID NO: 224398 - RNA, 22 nt, Human
gaccacagcagugcaagaggag

SEQ ID NO: 224399 - RNA, 22 nt, Human
cagucucucugaaguauuaaga

SEQ ID NO: 224400 - RNA, 22 nt, Human
gcugccugugcgggucgcuagg

SEQ ID NO: 224401 - RNA, 22 nt, Human
agguuaggaaauagggcuguaa

SEQ ID NO: 224402 - RNA, 22 nt, Human
ucugcaggccucgacaaggcca

SEQ ID NO: 224403 - RNA, 22 nt, Human
gggagcauuucccuguguugaa

SEQ ID NO: 224404 - RNA, 22 nt, Human
cugggaacaggcacugcuguca

SEQ ID NO: 224405 - RNA, 22 nt, Human
agaucuggaaaaucacaggugc

SEQ ID NO: 224406 - RNA, 22 nt, Human
ccaggcagccaagugugugugu

SEQ ID NO: 224407 - RNA, 21 nt, Human
uagggcucuauuuuuauuuca

SEQ ID NO: 224408 - RNA, 22 nt, Human
cugccguugugaagcucuuaga

SEQ ID NO: 224409 - RNA, 22 nt, Human
ucugcaaacuggcucuuacugc

SEQ ID NO: 224410 - RNA, 22 nt, Human
aggcugugacagggucauggag

SEQ ID NO: 224411 - RNA, 22 nt, Human
ucagucuauccagcucagaucc

SEQ ID NO: 224412 - RNA, 22 nt, Human
uucucuggauguuucucaguca

SEQ ID NO: 224413 - RNA, 22 nt, Human
augcugagguguguuuaauuua

SEQ ID NO: 224414 - RNA, 22 nt, Human
ucuggcuuggacacaaucuucc

SEQ ID NO: 224415 - RNA, 22 nt, Human
cccugcuaguugucucagugau

SEQ ID NO: 224416 - RNA, 22 nt, Human
auguuaaagauggugggaaauu

SEQ ID NO: 224417 - RNA, 22 nt, Human
aucauuacuccuguaaaauugu

SEQ ID NO: 224418 - RNA, 22 nt, Human
aacaucauuauguccauuaaug

SEQ ID NO: 224419 - RNA, 22 nt, Human
ugcaucuuucugcauauguaaa

SEQ ID NO: 224420 - RNA, 22 nt, Human
cuuccaggacaccaggguagua

SEQ ID NO: 224421 - RNA, 22 nt, Human
ggucaaagugaggagucagguu

SEQ ID NO: 224422 - RNA, 22 nt, Human
cagccagguucaaguccuuaua

SEQ ID NO: 224423 - RNA, 22 nt, Human
ccagcuuuagguugccugccag

SEQ ID NO: 224424 - RNA, 21 nt, Human
acuguuauucccauuuucacc

SEQ ID NO: 224425 - RNA, 22 nt, Human
acagauuuggcccagccaaugc

SEQ ID NO: 224426 - RNA, 22 nt, Human
gccaggcgggucucaaacuccu

SEQ ID NO: 224427 - RNA, 22 nt, Human
gagggucagaagggccugguuc

SEQ ID NO: 224428 - RNA, 18 nt, Human
gaggaaacaggcucugug

SEQ ID NO: 224429 - RNA, 20 nt, Human
cucugggucgagacagacuu

SEQ ID NO: 224430 - RNA, 22 nt, Human
gcucugugcuagaacuaagaau

SEQ ID NO: 224431 - RNA, 22 nt, Human
caccagcugcaacaccaucucc

SEQ ID NO: 224432 - RNA, 22 nt, Human
ucagaggaacacuguuucaugc

SEQ ID NO: 224433 - RNA, 22 nt, Human
caugcagggacuugugcuccau

SEQ ID NO: 224434 - RNA, 22 nt, Human
ggggcucaguucggacagccug

SEQ ID NO: 224435 - RNA, 22 nt, Human
gguuucaaauuaaagucuuaag

SEQ ID NO: 224436 - RNA, 16 nt, Human
ucugccagggacaggc

SEQ ID NO: 224437 - RNA, 22 nt, Human
cuggaggaccccugccuggaag

SEQ ID NO: 224438 - RNA, 22 nt, Human
aacgugcaccaggaggucauga

SEQ ID NO: 224439 - RNA, 22 nt, Human
auacauagcaggguaguagauc

SEQ ID NO: 224440 - RNA, 22 nt, Human
ugucucuuggcucuaucacuua

SEQ ID NO: 224441 - RNA, 22 nt, Human
agaaaguuuugugcuauauaug

SEQ ID NO: 224442 - RNA, 23 nt, Human
cuuuucauugccuuagcgcagag

SEQ ID NO: 224443 - RNA, 22 nt, Human
agcugaaauuuuacugaguaua

SEQ ID NO: 224444 - RNA, 22 nt, Human
ucugggucacugugggagggca

SEQ ID NO: 224445 - RNA, 22 nt, Human
agaggggcccgguucuccgucu

SEQ ID NO: 224446 - RNA, 22 nt, Human
agaaaagugcucuagugagagc

SEQ ID NO: 224447 - RNA, 22 nt, Human
uagaaagcugaguaauacauuu

SEQ ID NO: 224448 - RNA, 22 nt, Human
aggugccaggagggaauuuagg

SEQ ID NO: 224449 - RNA, 22 nt, Human
cacagaggauuuuuagggcagu

SEQ ID NO: 224450 - RNA, 22 nt, Human
ugcaggaccuugauccuggacu

SEQ ID NO: 224451 - RNA, 22 nt, Human
ucacaaaagcuuuugaauuugg

SEQ ID NO: 224452 - RNA, 22 nt, Human
uagauccugcauagguugugcu

SEQ ID NO: 224453 - RNA, 22 nt, Human
augugucuuugagacucugcua

SEQ ID NO: 224454 - RNA, 22 nt, Human
cuguggcaagucugccugucac

SEQ ID NO: 224455 - RNA, 23 nt, Human
gcaguggaaugucucuguuugga

SEQ ID NO: 224456 - RNA, 22 nt, Human
uuggcuucuuuucuagacagaa

SEQ ID NO: 224457 - RNA, 22 nt, Human
ucuuuaucuggcucagagacac

SEQ ID NO: 224458 - RNA, 22 nt, Human
caggcuucuuuucuuuccagac

SEQ ID NO: 224459 - RNA, 19 nt, Human
gucacauuugucucccagg

SEQ ID NO: 224460 - RNA, 22 nt, Human
aacauaaauuugaaguggcaaa

SEQ ID NO: 224461 - RNA, 22 nt, Human
aacaggcaacaguugacucuga

SEQ ID NO: 224462 - RNA, 22 nt, Human
aaacuguaaacacagcaguaca

SEQ ID NO: 224463 - RNA, 22 nt, Human
ugucauaugcugucauagccau

SEQ ID NO: 224464 - RNA, 22 nt, Human
cccaagccagacccugacccug

SEQ ID NO: 224465 - RNA, 22 nt, Human
agcacagugcugggcacacagu

SEQ ID NO: 224466 - RNA, 22 nt, Human
agcagccaggaaucugcagagc

SEQ ID NO: 224467 - RNA, 22 nt, Human
ucuggcagcucaguucaggucu

SEQ ID NO: 224468 - RNA, 22 nt, Human
uggcagcuuccugcucauagga

SEQ ID NO: 224469 - RNA, 22 nt, Human
cuggggaccgagcaagcucugg

SEQ ID NO: 224470 - RNA, 16 nt, Human
agcaccagaucauauc

SEQ ID NO: 224471 - RNA, 22 nt, Human
ggcuggcucagggcuugagaga

SEQ ID NO: 224472 - RNA, 22 nt, Human
cuggcuuuaaugucaucuuucu

SEQ ID NO: 224473 - RNA, 22 nt, Human
aucuccagugcccaaaggaaau

SEQ ID NO: 224474 - RNA, 23 nt, Human
ucucaagaggaagcagggcucau

SEQ ID NO: 224475 - RNA, 22 nt, Human
ggcccagagucugcaauggagu

SEQ ID NO: 224476 - RNA, 22 nt, Human
agaaauuaugcaguaguuuuau

SEQ ID NO: 224477 - RNA, 22 nt, Human
cauuugcagagggugacacucu

SEQ ID NO: 224478 - RNA, 22 nt, Human
agauauauuuaagguaauaagu

SEQ ID NO: 224479 - RNA, 22 nt, Human
augcuucagugcuaccuucaaa

SEQ ID NO: 224480 - RNA, 22 nt, Human
uuaugaaagacauuucuguugg

SEQ ID NO: 224481 - RNA, 22 nt, Human
gagcugaacaaauugcgagugg

SEQ ID NO: 224482 - RNA, 22 nt, Human
uggccugccuucgcugagcuga

SEQ ID NO: 224483 - RNA, 22 nt, Human
gauuguaauuuucaagagguaa

SEQ ID NO: 224484 - RNA, 22 nt, Human
ucagccaagcagccaucaucug

SEQ ID NO: 224485 - RNA, 22 nt, Human
uuggaaagaagggcugagcaag

SEQ ID NO: 224486 - RNA, 22 nt, Human
ucagugucuugaccugggugug

SEQ ID NO: 224487 - RNA, 19 nt, Human
gugaggaguguuuacagaa

SEQ ID NO: 224488 - RNA, 22 nt, Human
augaagcaggcacagcuucagg

SEQ ID NO: 224489 - RNA, 22 nt, Human
uggggaggaagucagauuucag

SEQ ID NO: 224490 - RNA, 22 nt, Human
uuucucugcuguguuggcagcu

SEQ ID NO: 224491 - RNA, 22 nt, Human
acccuggccugguucaugugau

SEQ ID NO: 224492 - RNA, 22 nt, Human
gauucucugcuaucuaucaccu

SEQ ID NO: 224493 - RNA, 22 nt, Human
ugcccugcuugguuuauuuuca

SEQ ID NO: 224494 - RNA, 22 nt, Human
acugucacugugauguuagaga

SEQ ID NO: 224495 - RNA, 18 nt, Human
uccagcccacauuuucug

SEQ ID NO: 224496 - RNA, 22 nt, Human
acagacagaggcuccaugagga

SEQ ID NO: 224497 - RNA, 22 nt, Human
agugcugaggccauacuccaua

SEQ ID NO: 224498 - RNA, 22 nt, Human
agcuccugcucuuugucccuaa

SEQ ID NO: 224499 - RNA, 22 nt, Human
gugugcugcccaacucgcagau

SEQ ID NO: 224500 - RNA, 22 nt, Human
aguauacauauauuagccuucg

SEQ ID NO: 224501 - RNA, 22 nt, Human
acuuuaaaaagagccuucuaac

SEQ ID NO: 224502 - RNA, 22 nt, Human
agggcugacaaauggcagugac

SEQ ID NO: 224503 - RNA, 22 nt, Human
uucuggcuccagaugcuucugu

SEQ ID NO: 224504 - RNA, 22 nt, Human
aggugcuggagucugggcagga

SEQ ID NO: 224505 - RNA, 22 nt, Human
gcagcugggucugugugggcug

SEQ ID NO: 224506 - RNA, 22 nt, Human
aagaaauauugggccuuauaaa

SEQ ID NO: 224507 - RNA, 22 nt, Human
aacagcaguuacuuuugcauca

SEQ ID NO: 224508 - RNA, 22 nt, Human
auauuuugguagcucucaauga

SEQ ID NO: 224509 - RNA, 22 nt, Human
gacaccagagacugaugaggcc

SEQ ID NO: 224510 - RNA, 22 nt, Human
auucuacaggacuggcaauccc

SEQ ID NO: 224511 - RNA, 22 nt, Human
guuuagaauucuaacuuuaagg

SEQ ID NO: 224512 - RNA, 22 nt, Human
uggcuuccagaacugagcaaca

SEQ ID NO: 224513 - RNA, 22 nt, Human
uaacugccagcagcgaugaaca

SEQ ID NO: 224514 - RNA, 22 nt, Human
ggacaguccaccucagugaaga

SEQ ID NO: 224515 - RNA, 22 nt, Human
gcccucuggugggugagccccg

SEQ ID NO: 224516 - RNA, 22 nt, Human
uccuuggcuuucuggagcuucu

SEQ ID NO: 224517 - RNA, 22 nt, Human
uuuuaaugggcgacuauuaugg

SEQ ID NO: 224518 - RNA, 22 nt, Human
uaaaggcuuuauuuuccaguca

SEQ ID NO: 224519 - RNA, 22 nt, Human
uguggugguaaugagccagaug

SEQ ID NO: 224520 - RNA, 22 nt, Human
ucugcucuguggcuucagcuaa

SEQ ID NO: 224521 - RNA, 22 nt, Human
uucauguguauggaacauuuuu

SEQ ID NO: 224522 - RNA, 22 nt, Human
aguaacacuuggaaugauagca

SEQ ID NO: 224523 - RNA, 22 nt, Human
gaauucugucgcuuacuagaug

SEQ ID NO: 224524 - RNA, 19 nt, Human
ggcugggucuggcagguuc

SEQ ID NO: 224525 - RNA, 22 nt, Human
uacacagacucuucaauucaga

SEQ ID NO: 224526 - RNA, 22 nt, Human
ucuguggcauguugcacuugua

SEQ ID NO: 224527 - RNA, 22 nt, Human
ggcugagcuuauauaugugcug

SEQ ID NO: 224528 - RNA, 22 nt, Human
uagugcauaccuaacauuuuug

SEQ ID NO: 224529 - RNA, 22 nt, Human
ggcaggguggcagaggcucaga

SEQ ID NO: 224530 - RNA, 22 nt, Human
acacaaaguuggaugacaaaau

SEQ ID NO: 224531 - RNA, 22 nt, Human
auacagagcaguaauagaggag

SEQ ID NO: 224532 - RNA, 22 nt, Human
uuggcuucuguuuuggcucugu

SEQ ID NO: 224533 - RNA, 22 nt, Human
auuucucagcacuuccuaucuc

SEQ ID NO: 224534 - RNA, 22 nt, Human
cagagcagguaucuuuggugaa

SEQ ID NO: 224535 - RNA, 22 nt, Human
cagcacacagugacucgcaccu

SEQ ID NO: 224536 - RNA, 22 nt, Human
cucacaggagaaagucaugguc

SEQ ID NO: 224537 - RNA, 22 nt, Human
uaauucagggccagaaucccca

SEQ ID NO: 224538 - RNA, 22 nt, Human
uuaacaaggugacugcauuaaa

SEQ ID NO: 224539 - RNA, 22 nt, Human
uaccauuuugaaacauuucauc

SEQ ID NO: 224540 - RNA, 22 nt, Human
uucacauuauaaucaguucugc

SEQ ID NO: 224541 - RNA, 22 nt, Human
aacuuaggaaaauaaggcauga

SEQ ID NO: 224542 - RNA, 18 nt, Human
gcagcuagccaggggggc

SEQ ID NO: 224543 - RNA, 22 nt, Human
acuuccagguuccacccaagac

SEQ ID NO: 224544 - RNA, 22 nt, Human
ucuagaauucccuuuugacaau

SEQ ID NO: 224545 - RNA, 19 nt, Human
aguguguacugaaagcacu

SEQ ID NO: 224546 - RNA, 22 nt, Human
cccacccugggcuacacaucca

SEQ ID NO: 224547 - RNA, 17 nt, Human
uugaacugcugagucag

SEQ ID NO: 224548 - RNA, 22 nt, Human
acaggcuuagggcuugggcccg

SEQ ID NO: 224549 - RNA, 22 nt, Human
agauaucuuacacuuugaaguu

SEQ ID NO: 224550 - RNA, 18 nt, Human
uggaucuuuaugaggcug

SEQ ID NO: 224551 - RNA, 22 nt, Human
uaaggaaagugccaugauuucu

SEQ ID NO: 224552 - RNA, 22 nt, Human
cuagccugggauuugaacuuau

SEQ ID NO: 224553 - RNA, 22 nt, Human
cuggcuaugugguuagacauaa

SEQ ID NO: 224554 - RNA, 22 nt, Human
cccagugugguucuuuggagaa

SEQ ID NO: 224555 - RNA, 23 nt, Human
aagaaucucagaauuagaaauac

SEQ ID NO: 224556 - RNA, 22 nt, Human
ggaaucuuugaaggauuuuaag

SEQ ID NO: 224557 - RNA, 22 nt, Human
aagggcugagaaguggggcugg

SEQ ID NO: 224558 - RNA, 22 nt, Human
ugagucacacauuucuucauac

SEQ ID NO: 224559 - RNA, 22 nt, Human
auuauguauuugguauaguuug

SEQ ID NO: 224560 - RNA, 22 nt, Human
ggauguagugcaaggagugaau

SEQ ID NO: 224561 - RNA, 22 nt, Human
ccagcaggcagucauauccuuu

SEQ ID NO: 224562 - RNA, 22 nt, Human
ugaaggccucugguacaugcca

SEQ ID NO: 224563 - RNA, 22 nt, Human
ucacuggggcccacaucaacau

SEQ ID NO: 224564 - RNA, 20 nt, Human
agacccucuggacugggccc

SEQ ID NO: 224565 - RNA, 22 nt, Human
augaaaaguucgaucuagaagg

SEQ ID NO: 224566 - RNA, 17 nt, Human
ugccugccagcauugga

SEQ ID NO: 224567 - RNA, 22 nt, Human
ccugggugaugugcugcccucg

SEQ ID NO: 224568 - RNA, 22 nt, Human
augacugcucugggcucccaug

SEQ ID NO: 224569 - RNA, 22 nt, Human
ugaggaaagaaaggcaugcaug

SEQ ID NO: 224570 - RNA, 19 nt, Human
uuuggaacuuuuugaugcc

SEQ ID NO: 224571 - RNA, 22 nt, Human
ccacagcuagggcaaucugauu

SEQ ID NO: 224572 - RNA, 22 nt, Human
uagucucugcuuugcccuuggc

SEQ ID NO: 224573 - RNA, 22 nt, Human
ggccucaguuucuucaacugua

SEQ ID NO: 224574 - RNA, 22 nt, Human
ggcugcagguugguuggcagcu

SEQ ID NO: 224575 - RNA, 22 nt, Human
acugugcauuucaugucuuuuc

SEQ ID NO: 224576 - RNA, 22 nt, Human
aagcuguagaggcaguacauuu

SEQ ID NO: 224577 - RNA, 17 nt, Human
caucuuuaaaauccuga

SEQ ID NO: 224578 - RNA, 22 nt, Human
agaaagcacccugcacuuucug

SEQ ID NO: 224579 - RNA, 22 nt, Human
acuguacuuuagaaaguguagu

SEQ ID NO: 224580 - RNA, 18 nt, Human
agagaagagguguuaguc

SEQ ID NO: 224581 - RNA, 22 nt, Human
ugagaccucuggguucugagcu

SEQ ID NO: 224582 - RNA, 22 nt, Human
uccugaggccucugugauguga

SEQ ID NO: 224583 - RNA, 22 nt, Human
cuggcugguuggggagaagaca

SEQ ID NO: 224584 - RNA, 22 nt, Human
ugaaagauugugauucaauaug

SEQ ID NO: 224585 - RNA, 22 nt, Human
acuugucuggcagaucaugcaa

SEQ ID NO: 224586 - RNA, 22 nt, Human
caggaaguggggucauggagua

SEQ ID NO: 224587 - RNA, 22 nt, Human
ugaccaggauacugcagggaug

SEQ ID NO: 224588 - RNA, 22 nt, Human
gaccagcugguccuguccuggg

SEQ ID NO: 224589 - RNA, 22 nt, Human
aagggcagaaagggacgcuuug

SEQ ID NO: 224590 - RNA, 22 nt, Human
aaacacaauguuucuuuguucu

SEQ ID NO: 224591 - RNA, 22 nt, Human
auguuuacagaggaagugccuc

SEQ ID NO: 224592 - RNA, 21 nt, Human
auacauucuauuaagcauuua

SEQ ID NO: 224593 - RNA, 22 nt, Human
caggguccccgggucuccugug

SEQ ID NO: 224594 - RNA, 16 nt, Human
ucaggugugacuuuuu

SEQ ID NO: 224595 - RNA, 22 nt, Human
gaacuggucaguuuagcccacu

SEQ ID NO: 224596 - RNA, 22 nt, Human
gaaaagggcaagagagagggca

SEQ ID NO: 224597 - RNA, 20 nt, Human
auguccucagccacugcccu

SEQ ID NO: 224598 - RNA, 22 nt, Human
uccuguuuuuguaaucgacucu

SEQ ID NO: 224599 - RNA, 22 nt, Human
uuaaagcuagguggaacaaauu

SEQ ID NO: 224600 - RNA, 22 nt, Human
cuggaugcugagagguaccaag

SEQ ID NO: 224601 - RNA, 22 nt, Human
uggcuuccccuaccuuccaauu

SEQ ID NO: 224602 - RNA, 22 nt, Human
agagacaggauaucugcucaug

SEQ ID NO: 224603 - RNA, 19 nt, Human
gcaggcacagcccugggug

SEQ ID NO: 224604 - RNA, 22 nt, Human
uuggaauuuuccagguacagug

SEQ ID NO: 224605 - RNA, 22 nt, Human
uuggcccagcaugcgggucugu

SEQ ID NO: 224606 - RNA, 22 nt, Human
ggcaucaggguaggaagguauc

SEQ ID NO: 224607 - RNA, 22 nt, Human
gagcugaauugcugccauuugc

SEQ ID NO: 224608 - RNA, 22 nt, Human
aagauuauggcagauaacaauu

SEQ ID NO: 224609 - RNA, 19 nt, Human
cuguugcuggggcucucuu

SEQ ID NO: 224610 - RNA, 22 nt, Human
agcuggaaagaagguggcagcc

SEQ ID NO: 224611 - RNA, 22 nt, Human
cacagcugccauggcugcacuu

SEQ ID NO: 224612 - RNA, 22 nt, Human
uuuaaagaaauuccucaucuuu

SEQ ID NO: 224613 - RNA, 22 nt, Human
uuagugcucauccagauggggg

SEQ ID NO: 224614 - RNA, 22 nt, Human
aaggaacuugccacagaaaaga

SEQ ID NO: 224615 - RNA, 22 nt, Human
cauucugggucuggcucaggga

SEQ ID NO: 224616 - RNA, 22 nt, Human
aggcugugagaaguccuucagu

SEQ ID NO: 224617 - RNA, 22 nt, Human
auuauucaauguuauuucagug

SEQ ID NO: 224618 - RNA, 22 nt, Human
gggccugcagguucugagaggc

SEQ ID NO: 224619 - RNA, 23 nt, Human
caugcaaacacuauugcauuugg

SEQ ID NO: 224620 - RNA, 22 nt, Human
auguacagugauaagagggcag

SEQ ID NO: 224621 - RNA, 17 nt, Human
auacauuguuaaaguau

SEQ ID NO: 224622 - RNA, 20 nt, Human
ggcauccuucugacccagag

SEQ ID NO: 224623 - RNA, 22 nt, Human
auuuaaugucgagcuauuguag

SEQ ID NO: 224624 - RNA, 22 nt, Human
guuccucaaaaaggagagcccc

SEQ ID NO: 224625 - RNA, 22 nt, Human
acuguggcucaucaggcuggug

SEQ ID NO: 224626 - RNA, 22 nt, Human
cagggugacugcccuggccacu

SEQ ID NO: 224627 - RNA, 20 nt, Human
ugcuauauugaagugcaguu

SEQ ID NO: 224628 - RNA, 22 nt, Human
ugggaagguacacgggaaagag

SEQ ID NO: 224629 - RNA, 22 nt, Human
cagggagcagccccuagaagua

SEQ ID NO: 224630 - RNA, 22 nt, Human
cucacucagacauccagugcag

SEQ ID NO: 224631 - RNA, 22 nt, Human
cagcuucuggcguggagccuga

SEQ ID NO: 224632 - RNA, 22 nt, Human
gucccaggcuccauggcagcca

SEQ ID NO: 224633 - RNA, 22 nt, Human
uucugugcguaggcgaugcagu

SEQ ID NO: 224634 - RNA, 22 nt, Human
ugaaggcugucaccugcaccuu

SEQ ID NO: 224635 - RNA, 22 nt, Human
cuguaugaggaucagacuggac

SEQ ID NO: 224636 - RNA, 22 nt, Human
gaaacaaucaucaugugauuug

SEQ ID NO: 224637 - RNA, 22 nt, Human
gcaugcaggaagggcuugggga

SEQ ID NO: 224638 - RNA, 22 nt, Human
uucccuccuaugcccacugaaa

SEQ ID NO: 224639 - RNA, 22 nt, Human
aacaucaucaugaacaacuaau

SEQ ID NO: 224640 - RNA, 22 nt, Human
uugggaaguuuaaugacagacu

SEQ ID NO: 224641 - RNA, 22 nt, Human
auuguacaugcagugagucauc

SEQ ID NO: 224642 - RNA, 22 nt, Human
cacugagaguagggcacaagug

SEQ ID NO: 224643 - RNA, 21 nt, Human
ccaggcugggagggcaguucc

SEQ ID NO: 224644 - RNA, 22 nt, Human
ugagucugcuccugguagcaga

SEQ ID NO: 224645 - RNA, 22 nt, Human
gcaggcaguuauuuaguagaau

SEQ ID NO: 224646 - RNA, 23 nt, Human
gggagaugggaaaugaaggcucu

SEQ ID NO: 224647 - RNA, 22 nt, Human
uuacaucacuuuacuuaauaau

SEQ ID NO: 224648 - RNA, 22 nt, Human
ggcuagggaucuagaccaggac

SEQ ID NO: 224649 - RNA, 22 nt, Human
accaggcccgcugcuauggugg

SEQ ID NO: 224650 - RNA, 22 nt, Human
agcccagccggauucccaguuc

SEQ ID NO: 224651 - RNA, 22 nt, Human
ucuguuccauguuuuguuccau

SEQ ID NO: 224652 - RNA, 20 nt, Human
ucacagaaacaaauagagaa

SEQ ID NO: 224653 - RNA, 22 nt, Human
ccacagaauucugucuccagga

SEQ ID NO: 224654 - RNA, 22 nt, Human
ugggggcagaggauucaggaau

SEQ ID NO: 224655 - RNA, 18 nt, Human
cuugagcuaagggacccc

SEQ ID NO: 224656 - RNA, 22 nt, Human
aggcucagucccggcccgcgcc

SEQ ID NO: 224657 - RNA, 23 nt, Human
uggcccugaaucuguccuggagg

SEQ ID NO: 224658 - RNA, 22 nt, Human
uauuagguuggugcaacaguaa

SEQ ID NO: 224659 - RNA, 22 nt, Human
gccuugggggugaaagaggcua

SEQ ID NO: 224660 - RNA, 22 nt, Human
aauuuuguucuuggaaaucagg

SEQ ID NO: 224661 - RNA, 22 nt, Human
cccugcagagggaugggggcag

SEQ ID NO: 224662 - RNA, 20 nt, Human
ggcuucuuuacaucuguguu

SEQ ID NO: 224663 - RNA, 22 nt, Human
agccagggucucucgcucuguu

SEQ ID NO: 224664 - RNA, 22 nt, Human
caccauuuucuaaaaauaugac

SEQ ID NO: 224665 - RNA, 19 nt, Human
aaggcagcaguagcaucca

SEQ ID NO: 224666 - RNA, 22 nt, Human
ggccucuguucugcauuccucc

SEQ ID NO: 224667 - RNA, 22 nt, Human
ugggccacucuucccugggucu

SEQ ID NO: 224668 - RNA, 22 nt, Human
aauagacuccagggucuauuuu

SEQ ID NO: 224669 - RNA, 22 nt, Human
ugcugaaauuagaacauugagg

SEQ ID NO: 224670 - RNA, 22 nt, Human
uaaaccaaguguccauauuagu

SEQ ID NO: 224671 - RNA, 22 nt, Human
aaacugguaauaaaauggauua

SEQ ID NO: 224672 - RNA, 22 nt, Human
agcccaggagccuuuggagggu

SEQ ID NO: 224673 - RNA, 22 nt, Human
ucugggcugaaaugaaggccuu

SEQ ID NO: 224674 - RNA, 22 nt, Human
cugggagacaagagagggcuga

SEQ ID NO: 224675 - RNA, 21 nt, Human
ugcccaugagcagaagucacc

SEQ ID NO: 224676 - RNA, 22 nt, Human
uucugauauaacacucuagcua

SEQ ID NO: 224677 - RNA, 22 nt, Human
gcaucugauccaauagauauau

SEQ ID NO: 224678 - RNA, 22 nt, Human
ggcacacagcuuggcaggagau

SEQ ID NO: 224679 - RNA, 21 nt, Human
aguccaggccugcccacuucc

SEQ ID NO: 224680 - RNA, 22 nt, Human
ugccuauucaauauaugcauuu

SEQ ID NO: 224681 - RNA, 22 nt, Human
acugugaacggacugaagccca

SEQ ID NO: 224682 - RNA, 22 nt, Human
aagcugcacuacuugagggacc

SEQ ID NO: 224683 - RNA, 22 nt, Human
gcuaggcucuuccaucagggca

SEQ ID NO: 224684 - RNA, 22 nt, Human
acacagcuucaaagucuaauuc

SEQ ID NO: 224685 - RNA, 22 nt, Human
cuggcucccgaagcccucagug

SEQ ID NO: 224686 - RNA, 22 nt, Human
uuaaaguguuaacugaagcuua

SEQ ID NO: 224687 - RNA, 22 nt, Human
gccaggaaggcugaagccagaa

SEQ ID NO: 224688 - RNA, 22 nt, Human
cucaggauuuaaaggggcacuc

SEQ ID NO: 224689 - RNA, 22 nt, Human
acugccuuuuccauuacuuaau

SEQ ID NO: 224690 - RNA, 22 nt, Human
cugggccucaugcacagagaug

SEQ ID NO: 224691 - RNA, 22 nt, Human
gccucaggccgcccugcugcuc

SEQ ID NO: 224692 - RNA, 22 nt, Human
gggcaguguggucgugccuuug

SEQ ID NO: 224693 - RNA, 22 nt, Human
gcccagguuucaucugcuccgu

SEQ ID NO: 224694 - RNA, 22 nt, Human
uugaaaucaccacuagcauuug

SEQ ID NO: 224695 - RNA, 22 nt, Human
gaggaggguuggccuuagguag

SEQ ID NO: 224696 - RNA, 22 nt, Human
uacaggcaugaaugaaaucugu

SEQ ID NO: 224697 - RNA, 22 nt, Human
ucuggccccuggucucuggugu

SEQ ID NO: 224698 - RNA, 21 nt, Human
ugcaccuguucacugcaguuc

SEQ ID NO: 224699 - RNA, 22 nt, Human
ggaagccccagcugugggaucc

SEQ ID NO: 224700 - RNA, 22 nt, Human
caggccuggagugcaauggcac

SEQ ID NO: 224701 - RNA, 22 nt, Human
agucuggggucugguagaacga

SEQ ID NO: 224702 - RNA, 21 nt, Human
ugcagcugacacccuuuggga

SEQ ID NO: 224703 - RNA, 22 nt, Human
uuaauuuuuauguauagugugu

SEQ ID NO: 224704 - RNA, 22 nt, Human
gccccagcccuguggaccaugg

SEQ ID NO: 224705 - RNA, 22 nt, Human
ccucuggcuuacuguuggguuu

SEQ ID NO: 224706 - RNA, 22 nt, Human
gguccagucagauauucaugca

SEQ ID NO: 224707 - RNA, 22 nt, Human
augugucucuaccaaugcaauu

SEQ ID NO: 224708 - RNA, 22 nt, Human
uuucauugucuacauaugacau

SEQ ID NO: 224709 - RNA, 22 nt, Human
uaucauuuaacagaaucauugc

SEQ ID NO: 224710 - RNA, 22 nt, Human
ccuggcugccgagugugcagcg

SEQ ID NO: 224711 - RNA, 22 nt, Human
gcuucccaaugugcuaguuucu

SEQ ID NO: 224712 - RNA, 22 nt, Human
cuagaugccaauuuuuauggau

SEQ ID NO: 224713 - RNA, 22 nt, Human
cagcuggcgggcagagccgcca

SEQ ID NO: 224714 - RNA, 21 nt, Human
uucaaaaugguguguuugucu

SEQ ID NO: 224715 - RNA, 22 nt, Human
cuggcugguccucggggacagc

SEQ ID NO: 224716 - RNA, 22 nt, Human
uuccaagaguaaauucaaauug

SEQ ID NO: 224717 - RNA, 22 nt, Human
uguuuugcuucucuguuuccca

SEQ ID NO: 224718 - RNA, 21 nt, Human
uagaauccuggacugggacuc

SEQ ID NO: 224719 - RNA, 22 nt, Human
ggacaacauguuuuaauuaagg

SEQ ID NO: 224720 - RNA, 17 nt, Human
agugagaaugucaugua

SEQ ID NO: 224721 - RNA, 22 nt, Human
gugggguagaucuuucucagga

SEQ ID NO: 224722 - RNA, 22 nt, Human
uauacacaccuccaaagcagga

SEQ ID NO: 224723 - RNA, 22 nt, Human
gggugggagucuggcccucaaa

SEQ ID NO: 224724 - RNA, 22 nt, Human
cuuugguggaggggugcaggca

SEQ ID NO: 224725 - RNA, 22 nt, Human
uaaagguuuauucaacaaaaua

SEQ ID NO: 224726 - RNA, 22 nt, Human
cuggccagugccugugggcccc

SEQ ID NO: 224727 - RNA, 22 nt, Human
aauugcuuuuauuuagggccag

SEQ ID NO: 224728 - RNA, 22 nt, Human
ggggggugcugaucaguggagc

SEQ ID NO: 224729 - RNA, 22 nt, Human
cucugagguccuacagugaccc

SEQ ID NO: 224730 - RNA, 22 nt, Human
acagaauuaaaguguuugugga

SEQ ID NO: 224731 - RNA, 22 nt, Human
cagcuggggcagccacgugcgg

SEQ ID NO: 224732 - RNA, 22 nt, Human
uuccagccagauuugcuggguu

SEQ ID NO: 224733 - RNA, 22 nt, Human
aagacacacacauaugcugagu

SEQ ID NO: 224734 - RNA, 22 nt, Human
auguagaaaguucauagaugcg

SEQ ID NO: 224735 - RNA, 22 nt, Human
gauggcuuacagacaguuagga

SEQ ID NO: 224736 - RNA, 22 nt, Human
augguccuuauggccgugauau

SEQ ID NO: 224737 - RNA, 22 nt, Human
uguggcaguauaagagcuagaa

SEQ ID NO: 224738 - RNA, 22 nt, Human
gugcaaaaguaauggcaguuuu

SEQ ID NO: 224739 - RNA, 22 nt, Human
aaaaagauguccugaaguuuag

SEQ ID NO: 224740 - RNA, 22 nt, Human
gcaacuuucaagcaccaugggg

SEQ ID NO: 224741 - RNA, 22 nt, Human
agacgcuauuuugaggggucua

SEQ ID NO: 224742 - RNA, 22 nt, Human
cccugcagccuugcaugccuuc

SEQ ID NO: 224743 - RNA, 22 nt, Human
uuccaaugacuaguggcauccu

SEQ ID NO: 224744 - RNA, 22 nt, Human
gacaauaaaaugaucuuacagu

SEQ ID NO: 224745 - RNA, 22 nt, Human
ucaccccuacauuucccuugcu

SEQ ID NO: 224746 - RNA, 22 nt, Human
aaugaucuacucucauuaucuc

SEQ ID NO: 224747 - RNA, 18 nt, Human
gcuuucuguagaaaaggg

SEQ ID NO: 224748 - RNA, 22 nt, Human
uguuaauauacuaaaauccacu

SEQ ID NO: 224749 - RNA, 22 nt, Human
uguccugggccggcgacugguc

SEQ ID NO: 224750 - RNA, 22 nt, Human
aagcaguagaaugcauugcuuu

SEQ ID NO: 224751 - RNA, 22 nt, Human
uggcagcucccagagcuuccaa

SEQ ID NO: 224752 - RNA, 22 nt, Human
cugcuuuaacucugggaagcca

SEQ ID NO: 224753 - RNA, 21 nt, Human
cugucgcaggucgccccaccc

SEQ ID NO: 224754 - RNA, 22 nt, Human
cauugauuauggaaagcagugg

SEQ ID NO: 224755 - RNA, 22 nt, Human
gccugccugcugucaucugccu

SEQ ID NO: 224756 - RNA, 22 nt, Human
auaacagaugugaagugcuaau

SEQ ID NO: 224757 - RNA, 22 nt, Human
uguaauauuguagugacaguac

SEQ ID NO: 224758 - RNA, 22 nt, Human
uuucucuuaaugucucugugcu

SEQ ID NO: 224759 - RNA, 22 nt, Human
uggucacccacugggacugcgg

SEQ ID NO: 224760 - RNA, 23 nt, Human
ccuggcuucauucucuuagggug

SEQ ID NO: 224761 - RNA, 22 nt, Human
gaaaggaagaaaggucauuuua

SEQ ID NO: 224762 - RNA, 22 nt, Human
aagugugaauuuuagagucagg

SEQ ID NO: 224763 - RNA, 22 nt, Human
gcaggugucugacugccuucuu

SEQ ID NO: 224764 - RNA, 22 nt, Human
uccuagaaucuuuguaagauug

SEQ ID NO: 224765 - RNA, 22 nt, Human
aaacuguauagggaaaaguaga

SEQ ID NO: 224766 - RNA, 22 nt, Human
gccuguuuguuaugucauggua

SEQ ID NO: 224767 - RNA, 22 nt, Human
caccagcuucccaucgcggguc

SEQ ID NO: 224768 - RNA, 20 nt, Human
gcugaagauucccaugcaag

SEQ ID NO: 224769 - RNA, 22 nt, Human
uggcuucuuuguagaaauugaa

SEQ ID NO: 224770 - RNA, 22 nt, Human
gguuucuagcagagucucuuua

SEQ ID NO: 224771 - RNA, 22 nt, Human
ugucugucagcagugggucagg

SEQ ID NO: 224772 - RNA, 22 nt, Human
ucugagaaaucaguggugaaua

SEQ ID NO: 224773 - RNA, 22 nt, Human
uuagaaccagcauuuguccugg

SEQ ID NO: 224774 - RNA, 22 nt, Human
uggagcuggcuuguggaaguug

SEQ ID NO: 224775 - RNA, 22 nt, Human
ugcugccagggcucugcccaca

SEQ ID NO: 224776 - RNA, 22 nt, Human
ggcacagcgacuaccaucgaaa

SEQ ID NO: 224777 - RNA, 22 nt, Human
cacaguaugaucuaaaguaagu

SEQ ID NO: 224778 - RNA, 22 nt, Human
aacacuuuccugccuuucugau

SEQ ID NO: 224779 - RNA, 23 nt, Human
uuccaggcagagcagggauuaga

SEQ ID NO: 224780 - RNA, 22 nt, Human
aaauaacagucagggacaacau

SEQ ID NO: 224781 - RNA, 22 nt, Human
cugaaaggaauaaggcucuuug

SEQ ID NO: 224782 - RNA, 22 nt, Human
ucagaaguugagauauucaggg

SEQ ID NO: 224783 - RNA, 21 nt, Human
gcugcccuggcucagcauuca

SEQ ID NO: 224784 - RNA, 22 nt, Human
auggcagggcacagcucuaguu

SEQ ID NO: 224785 - RNA, 22 nt, Human
gcagguggaagcagcagacuca

SEQ ID NO: 224786 - RNA, 22 nt, Human
aguuugaagaaggaucuaugaa

SEQ ID NO: 224787 - RNA, 22 nt, Human
aucaagaauugggagcuauuga

SEQ ID NO: 224788 - RNA, 22 nt, Human
uuaugauuugccacagauuggu

SEQ ID NO: 224789 - RNA, 22 nt, Human
augaaaugugaaugcuuuucau

SEQ ID NO: 224790 - RNA, 22 nt, Human
gaaacugaguaggcuagagcac

SEQ ID NO: 224791 - RNA, 22 nt, Human
ucugagcugggcacagaaggcg

SEQ ID NO: 224792 - RNA, 22 nt, Human
aagaguuaaaugaaugaguggg

SEQ ID NO: 224793 - RNA, 23 nt, Human
ucuuuagaagaacaucagaaaug

SEQ ID NO: 224794 - RNA, 22 nt, Human
ggcccagccuugggguuucuuu

SEQ ID NO: 224795 - RNA, 22 nt, Human
uccuggcagagagcaugaggcc

SEQ ID NO: 224796 - RNA, 21 nt, Human
aagugccacccacagaugcau

SEQ ID NO: 224797 - RNA, 22 nt, Human
cggggucccugcccacccauac

SEQ ID NO: 224798 - RNA, 22 nt, Human
cuccuggugacucccagauaaa

SEQ ID NO: 224799 - RNA, 22 nt, Human
gaacucagagccugagcuagga

SEQ ID NO: 224800 - RNA, 22 nt, Human
uucuguacucuuugagaagaau

SEQ ID NO: 224801 - RNA, 22 nt, Human
acaggagccaaacacaugccag

SEQ ID NO: 224802 - RNA, 23 nt, Human
ccuggcugaccugaagguguagu

SEQ ID NO: 224803 - RNA, 22 nt, Human
agcaaguggaaucauggaaaag

SEQ ID NO: 224804 - RNA, 22 nt, Human
caggaagugcucgcugugggga

SEQ ID NO: 224805 - RNA, 22 nt, Human
ggcucccuggaaaucccgaggc

SEQ ID NO: 224806 - RNA, 22 nt, Human
ucagagccaaucauggugcauu

SEQ ID NO: 224807 - RNA, 20 nt, Human
agggucagagagcgugagug

SEQ ID NO: 224808 - RNA, 22 nt, Human
ggcuucuuaaucaugagaguga

SEQ ID NO: 224809 - RNA, 22 nt, Human
ucuaauccuugcuaccugggug

SEQ ID NO: 224810 - RNA, 22 nt, Human
aggcuggcuuggcucuccugug

SEQ ID NO: 224811 - RNA, 17 nt, Human
ugcuggcaacauacaaa

SEQ ID NO: 224812 - RNA, 22 nt, Human
ucaugcauauuuguaguaguuc

SEQ ID NO: 224813 - RNA, 22 nt, Human
ggcuaggccucaggccugccug

SEQ ID NO: 224814 - RNA, 22 nt, Human
guggaggaaaagaaguugggug

SEQ ID NO: 224815 - RNA, 22 nt, Human
augcugaauaguucacucuucu

SEQ ID NO: 224816 - RNA, 20 nt, Human
gauguguccucagcaguggu

SEQ ID NO: 224817 - RNA, 22 nt, Human
gccacaggugggcucugggaaa

SEQ ID NO: 224818 - RNA, 19 nt, Human
cugcuccaggagcugggga

SEQ ID NO: 224819 - RNA, 22 nt, Human
uuagaguuuuaucauugccuua

SEQ ID NO: 224820 - RNA, 22 nt, Human
uucuugcaggucacucacugag

SEQ ID NO: 224821 - RNA, 22 nt, Human
gccaggugcauauuagaagcau

SEQ ID NO: 224822 - RNA, 22 nt, Human
uccaggaaagugggaugugugu

SEQ ID NO: 224823 - RNA, 22 nt, Human
ccuggccugugaaucugagagc

SEQ ID NO: 224824 - RNA, 22 nt, Human
ucugauguggagacacuguuuu

SEQ ID NO: 224825 - RNA, 22 nt, Human
ccacagaaccucagcuuugagc

SEQ ID NO: 224826 - RNA, 22 nt, Human
gcacagcucagcaugggaggac

SEQ ID NO: 224827 - RNA, 22 nt, Human
guccuggguccccgcaggucag

SEQ ID NO: 224828 - RNA, 19 nt, Human
uagucuuuauucuuaauuu

SEQ ID NO: 224829 - RNA, 22 nt, Human
cccagccugaucucggccagcu

SEQ ID NO: 224830 - RNA, 22 nt, Human
agacagcugguagcacuuccug

SEQ ID NO: 224831 - RNA, 22 nt, Human
uuaccuaaaauagcucaauuua

SEQ ID NO: 224832 - RNA, 22 nt, Human
ugccugcaagaguuggggcuac

SEQ ID NO: 224833 - RNA, 22 nt, Human
uuuaggaugcucuauucugacu

SEQ ID NO: 224834 - RNA, 22 nt, Human
cuuaauuacuguccaauaugca

SEQ ID NO: 224835 - RNA, 22 nt, Human
aaacaguuucauuuucaugacc

SEQ ID NO: 224836 - RNA, 22 nt, Human
cucuggcagagcuguagacuuc

SEQ ID NO: 224837 - RNA, 22 nt, Human
auuguuggguaguuuguucagc

SEQ ID NO: 224838 - RNA, 22 nt, Human
cagggcaguuuuacuucucucu

SEQ ID NO: 224839 - RNA, 22 nt, Human
cccaggcugaugggaugggcca

SEQ ID NO: 224840 - RNA, 22 nt, Human
cugagcugggcaacucuuagau

SEQ ID NO: 224841 - RNA, 21 nt, Human
ucaagacagcauauuuaagaa

SEQ ID NO: 224842 - RNA, 22 nt, Human
ccaggguuucuucucuguauag

SEQ ID NO: 224843 - RNA, 22 nt, Human
gacuuuauaaaugagaggcgga

SEQ ID NO: 224844 - RNA, 22 nt, Human
uccuccagcaggacugaggccc

SEQ ID NO: 224845 - RNA, 22 nt, Human
aggagggagaugcccauccugg

SEQ ID NO: 224846 - RNA, 22 nt, Human
aaagauucgagcgauguauaaa

SEQ ID NO: 224847 - RNA, 22 nt, Human
uuguagcugaaaguaaagaagu

SEQ ID NO: 224848 - RNA, 20 nt, Human
cagcaaaaugaaaauggauu

SEQ ID NO: 224849 - RNA, 22 nt, Human
aacuaaaucuggcauuuagagc

SEQ ID NO: 224850 - RNA, 19 nt, Human
ugcuuugccuugauuagcu

SEQ ID NO: 224851 - RNA, 22 nt, Human
aagguguucagguuuucccauu

SEQ ID NO: 224852 - RNA, 22 nt, Human
acucuggcuauucacuauaaua

SEQ ID NO: 224853 - RNA, 22 nt, Human
gcccagcuuuucacuuccacac

SEQ ID NO: 224854 - RNA, 22 nt, Human
gcugcccuagaaguacagagag

SEQ ID NO: 224855 - RNA, 22 nt, Human
aaggccuugguucugagcaaua

SEQ ID NO: 224856 - RNA, 22 nt, Human
uuucacauauaggggaagcuac

SEQ ID NO: 224857 - RNA, 22 nt, Human
auucacaaagaagggaaguaca

SEQ ID NO: 224858 - RNA, 22 nt, Human
ccuuucuugcuaagaguuuaug

SEQ ID NO: 224859 - RNA, 22 nt, Human
uccaggcuucacgucugcccuc

SEQ ID NO: 224860 - RNA, 22 nt, Human
aaagguguugccuuggagaccu

SEQ ID NO: 224861 - RNA, 22 nt, Human
uggcaguagauccagucucucu

SEQ ID NO: 224862 - RNA, 22 nt, Human
uaauacaauggaguugggcccc

SEQ ID NO: 224863 - RNA, 22 nt, Human
aaagcuuagaggccaguggagg

SEQ ID NO: 224864 - RNA, 19 nt, Human
ucugaagaauuagagagca

SEQ ID NO: 224865 - RNA, 22 nt, Human
ucccagggacugggcuaggcuu

SEQ ID NO: 224866 - RNA, 22 nt, Human
ucaaauaaugccauucaucauc

SEQ ID NO: 224867 - RNA, 22 nt, Human
gaaucuuauuuuuaaaucuucc

SEQ ID NO: 224868 - RNA, 20 nt, Human
aaaaagacaaaacgaguugg

SEQ ID NO: 224869 - RNA, 22 nt, Human
ugagcaguggcaccaggucacc

SEQ ID NO: 224870 - RNA, 22 nt, Human
agacaucauguuacagauuaag

SEQ ID NO: 224871 - RNA, 22 nt, Human
acaugaaugaagacuuuacaau

SEQ ID NO: 224872 - RNA, 22 nt, Human
ccugugcauugcaggguguuca

SEQ ID NO: 224873 - RNA, 22 nt, Human
gaacaaacagucaggacagucu

SEQ ID NO: 224874 - RNA, 22 nt, Human
gggaucuugggaacacccuuac

SEQ ID NO: 224875 - RNA, 22 nt, Human
gcaugcagggagggucuggcug

SEQ ID NO: 224876 - RNA, 22 nt, Human
gaggcaguuugccaugccagga

SEQ ID NO: 224877 - RNA, 22 nt, Human
ggcagggcccugauuccugggg

SEQ ID NO: 224878 - RNA, 22 nt, Human
aauucuaaauguaauuuagaau

SEQ ID NO: 224879 - RNA, 22 nt, Human
ucccuagucgcaucuguggaga

SEQ ID NO: 224880 - RNA, 22 nt, Human
cuggagcagcagguggccaggg

SEQ ID NO: 224881 - RNA, 22 nt, Human
ucuguccuguuuccuccugaca

SEQ ID NO: 224882 - RNA, 22 nt, Human
acucugggaugagaaaaggguu

SEQ ID NO: 224883 - RNA, 22 nt, Human
uuucuaacagcaaauguuuauc

SEQ ID NO: 224884 - RNA, 22 nt, Human
cugggcucaguggcucauggcu

SEQ ID NO: 224885 - RNA, 22 nt, Human
ugucaaaaauaagagagauugu

SEQ ID NO: 224886 - RNA, 22 nt, Human
ucauucuugaucacuaguuagu

SEQ ID NO: 224887 - RNA, 22 nt, Human
ugcagucuggauguccucagau

SEQ ID NO: 224888 - RNA, 22 nt, Human
gccuggagacaaggacaaaggg

SEQ ID NO: 224889 - RNA, 22 nt, Human
ucucuguaguugggcagcugcu

SEQ ID NO: 224890 - RNA, 22 nt, Human
cuuucccugcuuagaaggauuu

SEQ ID NO: 224891 - RNA, 22 nt, Human
aggcaacuuuuggggaugaugg

SEQ ID NO: 224892 - RNA, 22 nt, Human
ucccagggggaugaacacugcc

SEQ ID NO: 224893 - RNA, 22 nt, Human
ucaggccuagggagccacacca

SEQ ID NO: 224894 - RNA, 22 nt, Human
gaaagugcuaggaaguguuaga

SEQ ID NO: 224895 - RNA, 22 nt, Human
acuguucugccaacuuugguua

SEQ ID NO: 224896 - RNA, 22 nt, Human
uagcugaaugugaccuuaaaga

SEQ ID NO: 224897 - RNA, 22 nt, Human
ccugggccuggcgggucggcuc

SEQ ID NO: 224898 - RNA, 22 nt, Human
caccaggagcaucuaggaggcg

SEQ ID NO: 224899 - RNA, 22 nt, Human
uccuggaggggacagcaugggc

SEQ ID NO: 224900 - RNA, 18 nt, Human
ucucucugauaacauuuu

SEQ ID NO: 224901 - RNA, 22 nt, Human
uguuucuuacguuuuuagaggc

SEQ ID NO: 224902 - RNA, 22 nt, Human
aggcuucuaggaaacuuucugg

SEQ ID NO: 224903 - RNA, 22 nt, Human
gcauuacagcaguucaacuugg

SEQ ID NO: 224904 - RNA, 22 nt, Human
gagcccagguucugcuuccagc

SEQ ID NO: 224905 - RNA, 22 nt, Human
agagagggaauauuugggguau

SEQ ID NO: 224906 - RNA, 22 nt, Human
caguuaaacgaugaugggguca

SEQ ID NO: 224907 - RNA, 20 nt, Human
cuguggcucaugcaucugcc

SEQ ID NO: 224908 - RNA, 22 nt, Human
auuaagaucauuguagaagauu

SEQ ID NO: 224909 - RNA, 22 nt, Human
ccagagcccagggucaugcagg

SEQ ID NO: 224910 - RNA, 22 nt, Human
accuuuauaugaaagaugacau

SEQ ID NO: 224911 - RNA, 22 nt, Human
ccuggauucaagucuuucuuuc

SEQ ID NO: 224912 - RNA, 22 nt, Human
cugacauguauaagcuuuaagu

SEQ ID NO: 224913 - RNA, 19 nt, Human
ggcuucgaggcuggggaag

SEQ ID NO: 224914 - RNA, 22 nt, Human
gagguugggaaguccaagcugg

SEQ ID NO: 224915 - RNA, 21 nt, Human
aaccagagccaggcucucagc

SEQ ID NO: 224916 - RNA, 23 nt, Human
cccagcugcagacaagggagggu

SEQ ID NO: 224917 - RNA, 22 nt, Human
ucuuuguguucaggagccacgu

SEQ ID NO: 224918 - RNA, 22 nt, Human
acuuucaagcaagaacacuuug

SEQ ID NO: 224919 - RNA, 16 nt, Human
gcuccugggcccucga

SEQ ID NO: 224920 - RNA, 22 nt, Human
auccauuguggucuuguacauu

SEQ ID NO: 224921 - RNA, 22 nt, Human
agaggucauaucucagaagaga

SEQ ID NO: 224922 - RNA, 22 nt, Human
uggcuuuaggagcuauauaccu

SEQ ID NO: 224923 - RNA, 22 nt, Human
cagacaggguggguuucugggc

SEQ ID NO: 224924 - RNA, 22 nt, Human
auuuuaguaccucaaguaucca

SEQ ID NO: 224925 - RNA, 22 nt, Human
cagaugcuuggaggacacuugg

SEQ ID NO: 224926 - RNA, 22 nt, Human
ucaggccccuugucagcucugu

SEQ ID NO: 224927 - RNA, 19 nt, Human
aggcccagcgcugggggcu

SEQ ID NO: 224928 - RNA, 22 nt, Human
ccaggaagauuuauuuuggcuu

SEQ ID NO: 224929 - RNA, 20 nt, Human
gcagagccucacugcaaggg

SEQ ID NO: 224930 - RNA, 23 nt, Human
auccagccuggggguuuaaccac

SEQ ID NO: 224931 - RNA, 22 nt, Human
uaagugguaccaagcucaguga

SEQ ID NO: 224932 - RNA, 22 nt, Human
gaagccaggggccugacaggca

SEQ ID NO: 224933 - RNA, 22 nt, Human
gcuggagugcaguugcacaguc

SEQ ID NO: 224934 - RNA, 22 nt, Human
ugaaacugaaagguauuuauag

SEQ ID NO: 224935 - RNA, 22 nt, Human
cuuaaugaaagguugcacaugg

SEQ ID NO: 224936 - RNA, 22 nt, Human
ucugucuuagcaucuuugcuca

SEQ ID NO: 224937 - RNA, 22 nt, Human
agccucugacugucagcaaggu

SEQ ID NO: 224938 - RNA, 22 nt, Human
ccacacuaaacugcucaaacca

SEQ ID NO: 224939 - RNA, 22 nt, Human
accucccagaaaguuuugcagg

SEQ ID NO: 224940 - RNA, 22 nt, Human
agagccagguguagucucggag

SEQ ID NO: 224941 - RNA, 22 nt, Human
aaaagacaucuauuucaggcag

SEQ ID NO: 224942 - RNA, 22 nt, Human
cuggugcaagauucccugcuuc

SEQ ID NO: 224943 - RNA, 22 nt, Human
cuuuuauuuugaauuaagggcu

SEQ ID NO: 224944 - RNA, 22 nt, Human
accaccccagaauuuuucaagg

SEQ ID NO: 224945 - RNA, 22 nt, Human
aggccucucugcuuagcuugua

SEQ ID NO: 224946 - RNA, 22 nt, Human
ugugugucagagucuccauggu

SEQ ID NO: 224947 - RNA, 22 nt, Human
gacucguucauaguuccaauuu

SEQ ID NO: 224948 - RNA, 22 nt, Human
ugcaggcaggggaugagcagcc

SEQ ID NO: 224949 - RNA, 22 nt, Human
auuagagaaugugcugacauug

SEQ ID NO: 224950 - RNA, 22 nt, Human
ugaguuugguaucuaggggguc

SEQ ID NO: 224951 - RNA, 22 nt, Human
ugauggcucccaugggcauaug

SEQ ID NO: 224952 - RNA, 22 nt, Human
caggagugaaaugaggcccagg

SEQ ID NO: 224953 - RNA, 22 nt, Human
ucccugagggcagcucaagucc

SEQ ID NO: 224954 - RNA, 22 nt, Human
acaguguucacuuaacaaugga

SEQ ID NO: 224955 - RNA, 22 nt, Human
aacuauacauauuuacauagac

SEQ ID NO: 224956 - RNA, 22 nt, Human
uuuagagcccaugugaguguga

SEQ ID NO: 224957 - RNA, 22 nt, Human
uuuauccauucaccaguugaac

SEQ ID NO: 224958 - RNA, 21 nt, Human
ugguggagugugcugagcaug

SEQ ID NO: 224959 - RNA, 22 nt, Human
cucucuggauauuuguaugcug

SEQ ID NO: 224960 - RNA, 22 nt, Human
uucuaugccauguucagcuacu

SEQ ID NO: 224961 - RNA, 22 nt, Human
ugacaggugaaauguccuuauu

SEQ ID NO: 224962 - RNA, 23 nt, Human
uucagggccucagaggugaagcu

SEQ ID NO: 224963 - RNA, 22 nt, Human
gggcacaggaauuugggaugug

SEQ ID NO: 224964 - RNA, 19 nt, Human
acuuccugcccgcuccuuu

SEQ ID NO: 224965 - RNA, 22 nt, Human
cauuagaagaacaguuauauua

SEQ ID NO: 224966 - RNA, 22 nt, Human
uagauucuacugucacuuaguu

SEQ ID NO: 224967 - RNA, 22 nt, Human
aaauuuaaaaagcagcauugca

SEQ ID NO: 224968 - RNA, 22 nt, Human
aggugggguguuggauguuuau

SEQ ID NO: 224969 - RNA, 22 nt, Human
aaacuguuauagcagaaaggac

SEQ ID NO: 224970 - RNA, 19 nt, Human
ccaugccaucauuuuaaag

SEQ ID NO: 224971 - RNA, 22 nt, Human
cagggaugagcagauggagcaa

SEQ ID NO: 224972 - RNA, 22 nt, Human
uugcacccaguaguuuaaauuc

SEQ ID NO: 224973 - RNA, 22 nt, Human
gcuuuguguagaaggaggaugg

SEQ ID NO: 224974 - RNA, 22 nt, Human
uaauugcuuuauccuguuagaa

SEQ ID NO: 224975 - RNA, 22 nt, Human
cugugaccuccaggaaggggug

SEQ ID NO: 224976 - RNA, 22 nt, Human
uguccuggugcuccagguggcu

SEQ ID NO: 224977 - RNA, 22 nt, Human
ugacucaccaucggaguuugaa

SEQ ID NO: 224978 - RNA, 22 nt, Human
ucaauauucuucuuuaguagga

SEQ ID NO: 224979 - RNA, 22 nt, Human
gcaugugucuuuauagcagcau

SEQ ID NO: 224980 - RNA, 22 nt, Human
auuugcaauuacucaugucauu

SEQ ID NO: 224981 - RNA, 22 nt, Human
agcugagcacauucaaacaggu

SEQ ID NO: 224982 - RNA, 22 nt, Human
agguguggcuugaagucucuau

SEQ ID NO: 224983 - RNA, 22 nt, Human
ggguccaguaguugguggccgu

SEQ ID NO: 224984 - RNA, 22 nt, Human
uacuguauaugcuuguaucuga

SEQ ID NO: 224985 - RNA, 22 nt, Human
gaaaggcaguacagcugagccu

SEQ ID NO: 224986 - RNA, 20 nt, Human
caguccugucccugcugccc

SEQ ID NO: 224987 - RNA, 22 nt, Human
cucaggaucgcuugcccuaggg

SEQ ID NO: 224988 - RNA, 22 nt, Human
cugggcuuagcagcuccugguc

SEQ ID NO: 224989 - RNA, 22 nt, Human
acuucucuccacccaagucccu

SEQ ID NO: 224990 - RNA, 19 nt, Human
uuuuuacaaguagguguga

SEQ ID NO: 224991 - RNA, 22 nt, Human
cacugagccuugccagcuuggu

SEQ ID NO: 224992 - RNA, 22 nt, Human
cagacaggcaggugagagcucc

SEQ ID NO: 224993 - RNA, 22 nt, Human
uugagaaauguuuuuuaagcug

SEQ ID NO: 224994 - RNA, 19 nt, Human
ccugcagggaugagagguu

SEQ ID NO: 224995 - RNA, 22 nt, Human
ucugaacauccagcaaugcaca

SEQ ID NO: 224996 - RNA, 22 nt, Human
cugggccuaggauggaagggcc

SEQ ID NO: 224997 - RNA, 16 nt, Human
ggggaaggcaagaggg

SEQ ID NO: 224998 - RNA, 22 nt, Human
uaggugguuaugucagccuaga

SEQ ID NO: 224999 - RNA, 18 nt, Human
uaauccauaugcuuugcc

SEQ ID NO: 225000 - RNA, 21 nt, Human
uuacaacauuuguguucuaug

SEQ ID NO: 225001 - RNA, 22 nt, Human
agcuggggcugcagagaacagg

SEQ ID NO: 225002 - RNA, 22 nt, Human
gccaggcucagcagucaaccug

SEQ ID NO: 225003 - RNA, 19 nt, Human
agaagcugugaaaugaagg

SEQ ID NO: 225004 - RNA, 22 nt, Human
ucauggauggccgggaggugau

SEQ ID NO: 225005 - RNA, 22 nt, Human
gagaacugauuagcauuugcca

SEQ ID NO: 225006 - RNA, 22 nt, Human
caaaucuuuaauugaggaauca

SEQ ID NO: 225007 - RNA, 22 nt, Human
uucccucucacuuaaagcuugg

SEQ ID NO: 225008 - RNA, 22 nt, Human
cuggugaauauuggaggcauug

SEQ ID NO: 225009 - RNA, 22 nt, Human
accuccugaugagaguaaagga

SEQ ID NO: 225010 - RNA, 22 nt, Human
acuuucugucaucuagacaagu

SEQ ID NO: 225011 - RNA, 22 nt, Human
acuaugauguauuuugcaucua

SEQ ID NO: 225012 - RNA, 18 nt, Human
ucuguugagcagagaggc

SEQ ID NO: 225013 - RNA, 22 nt, Human
gaugauuuaaguggccaaagua

SEQ ID NO: 225014 - RNA, 22 nt, Human
accugccucuaagcagcaggug

SEQ ID NO: 225015 - RNA, 19 nt, Human
aucugccuuagugcugcug

SEQ ID NO: 225016 - RNA, 22 nt, Human
cccagcauccucagggagcggg

SEQ ID NO: 225017 - RNA, 22 nt, Human
auguacaggucuuggcaaaggg

SEQ ID NO: 225018 - RNA, 22 nt, Human
cugcagggacccaagucuuugg

SEQ ID NO: 225019 - RNA, 22 nt, Human
aaauagacaggcuuaaauagga

SEQ ID NO: 225020 - RNA, 22 nt, Human
agagggguuaagugcuaguccg

SEQ ID NO: 225021 - RNA, 22 nt, Human
caggccucuuccaugcagcagc

SEQ ID NO: 225022 - RNA, 22 nt, Human
cuccccauccaggcagcaggug

SEQ ID NO: 225023 - RNA, 22 nt, Human
aaguauaagcuauucuucauga

SEQ ID NO: 225024 - RNA, 22 nt, Human
agcugcugagccaggcugaugu

SEQ ID NO: 225025 - RNA, 22 nt, Human
gagaagccgagucagcugagcc

SEQ ID NO: 225026 - RNA, 22 nt, Human
acugggccagacacugauuccc

SEQ ID NO: 225027 - RNA, 22 nt, Human
cagcagugucuccagcaucaca

SEQ ID NO: 225028 - RNA, 22 nt, Human
caucagaauagcucuguggaua

SEQ ID NO: 225029 - RNA, 22 nt, Human
ugccuuuuccaguuccuagaag

SEQ ID NO: 225030 - RNA, 22 nt, Human
gucuucauucucauagcccugg

SEQ ID NO: 225031 - RNA, 22 nt, Human
cagagcacugcuuggaggauuu

SEQ ID NO: 225032 - RNA, 22 nt, Human
gagaaagggaacuuacagagug

SEQ ID NO: 225033 - RNA, 22 nt, Human
cccuggugcccugggucagccu

SEQ ID NO: 225034 - RNA, 21 nt, Human
uuucccagcugaaaauaaaug

SEQ ID NO: 225035 - RNA, 22 nt, Human
aacaggcuuccaggagggacga

SEQ ID NO: 225036 - RNA, 22 nt, Human
gccacaggcuccagcaucagua

SEQ ID NO: 225037 - RNA, 22 nt, Human
agaggcugauggaguagugucu

SEQ ID NO: 225038 - RNA, 22 nt, Human
ugauuuacaguagugucuaaac

SEQ ID NO: 225039 - RNA, 22 nt, Human
cagauggagucccguggaguuc

SEQ ID NO: 225040 - RNA, 22 nt, Human
aggcaaagaggauauuuugggg

SEQ ID NO: 225041 - RNA, 22 nt, Human
auaaaaaugagggcgguagcua

SEQ ID NO: 225042 - RNA, 22 nt, Human
cugggcucagcaggccaaggcc

SEQ ID NO: 225043 - RNA, 22 nt, Human
acaguguccccagcucugugag

SEQ ID NO: 225044 - RNA, 22 nt, Human
uuucuucagccacuccaaacug

SEQ ID NO: 225045 - RNA, 22 nt, Human
guucucagggauaacuuccccc

SEQ ID NO: 225046 - RNA, 20 nt, Human
cugacucuccuuggcuugga

SEQ ID NO: 225047 - RNA, 22 nt, Human
cagcaucccucaggggccucug

SEQ ID NO: 225048 - RNA, 22 nt, Human
ucucagaggugcccuggcaucu

SEQ ID NO: 225049 - RNA, 22 nt, Human
gucuuucugccaugugaagaga

SEQ ID NO: 225050 - RNA, 22 nt, Human
uggcauuuggcuuacuuauguu

SEQ ID NO: 225051 - RNA, 21 nt, Human
uuuacugagcacuuacuaugu

SEQ ID NO: 225052 - RNA, 22 nt, Human
ggagggggacugacacugauuu

SEQ ID NO: 225053 - RNA, 17 nt, Human
cguggcugagccauaga

SEQ ID NO: 225054 - RNA, 22 nt, Human
gagcuuuaggagaaggagguca

SEQ ID NO: 225055 - RNA, 22 nt, Human
uggaagaauuuggggauaaauu

SEQ ID NO: 225056 - RNA, 22 nt, Human
ggcugcagauuguagucuguua

SEQ ID NO: 225057 - RNA, 22 nt, Human
agcauccugccucuccucccaa

SEQ ID NO: 225058 - RNA, 22 nt, Human
agcuggaggggccagcaggugu

SEQ ID NO: 225059 - RNA, 22 nt, Human
gcuggcugaguucugucgucug

SEQ ID NO: 225060 - RNA, 22 nt, Human
agggagcuuccgaacuacagcu

SEQ ID NO: 225061 - RNA, 22 nt, Human
uugcaugcuagaaagauugauu

SEQ ID NO: 225062 - RNA, 22 nt, Human
gccuugggaaagugggaggaga

SEQ ID NO: 225063 - RNA, 22 nt, Human
gcuccagggaguacauuuauca

SEQ ID NO: 225064 - RNA, 22 nt, Human
ccaccaggacagcccugagggg

SEQ ID NO: 225065 - RNA, 22 nt, Human
agcucccagaaggcccugcgcc

SEQ ID NO: 225066 - RNA, 22 nt, Human
uuaaaauagccagugccccucu

SEQ ID NO: 225067 - RNA, 22 nt, Human
uuugaaagccuggcuuuucucu

SEQ ID NO: 225068 - RNA, 22 nt, Human
ucugagcuggagcccaucaccu

SEQ ID NO: 225069 - RNA, 22 nt, Human
ccuuggcugugcugcccuuugc

SEQ ID NO: 225070 - RNA, 22 nt, Human
uccaggagcauccaggugaagc

SEQ ID NO: 225071 - RNA, 22 nt, Human
uaaagccaacacuuuacugcuc

SEQ ID NO: 225072 - RNA, 19 nt, Human
ggacacagaaagcugcauu

SEQ ID NO: 225073 - RNA, 22 nt, Human
aggggagcaaggccguggugua

SEQ ID NO: 225074 - RNA, 21 nt, Human
uucccuucugguuuugagaga

SEQ ID NO: 225075 - RNA, 22 nt, Human
cucaggauccaucuccugcccu

SEQ ID NO: 225076 - RNA, 22 nt, Human
cagcagcaaaucuagaagagga

SEQ ID NO: 225077 - RNA, 22 nt, Human
acccuucauagaggagaagcug

SEQ ID NO: 225078 - RNA, 22 nt, Human
ugaccagugaucuacugggauu

SEQ ID NO: 225079 - RNA, 19 nt, Human
uuugcagugguuccuuugu

SEQ ID NO: 225080 - RNA, 22 nt, Human
gcauuacaggcuguaagaugca

SEQ ID NO: 225081 - RNA, 22 nt, Human
cugagcuguuacucuguccucg

SEQ ID NO: 225082 - RNA, 22 nt, Human
ucugggagccaugccuuggagu

SEQ ID NO: 225083 - RNA, 21 nt, Human
aggaugccgcaggcggagaag

SEQ ID NO: 225084 - RNA, 22 nt, Human
ugcaggaccggaaccaugggau

SEQ ID NO: 225085 - RNA, 22 nt, Human
auuauacauuuuguguagagau

SEQ ID NO: 225086 - RNA, 22 nt, Human
gccagaugccguaaagaugggc

SEQ ID NO: 225087 - RNA, 22 nt, Human
gugaaggacuagcauggagggc

SEQ ID NO: 225088 - RNA, 22 nt, Human
gaugcgggcccgcuccacugcc

SEQ ID NO: 225089 - RNA, 22 nt, Human
cagccaggcccagaucaugcug

SEQ ID NO: 225090 - RNA, 22 nt, Human
cccagccucuggguucugccgg

SEQ ID NO: 225091 - RNA, 19 nt, Human
agugaaauggaguauucaa

SEQ ID NO: 225092 - RNA, 22 nt, Human
augaguacauugggaucaaaga

SEQ ID NO: 225093 - RNA, 22 nt, Human
aaaugugucauauucaaaguca

SEQ ID NO: 225094 - RNA, 22 nt, Human
aaggaagcagccagagacccuc

SEQ ID NO: 225095 - RNA, 22 nt, Human
agcauaaaggcacuagaaagag

SEQ ID NO: 225096 - RNA, 22 nt, Human
uccagcuuugagauuuuaugga

SEQ ID NO: 225097 - RNA, 23 nt, Human
aagaguuuagagucuugcagagu

SEQ ID NO: 225098 - RNA, 22 nt, Human
acauaauaaaaauaacagcuca

SEQ ID NO: 225099 - RNA, 22 nt, Human
ccuggcagcgccgaagcuggcc

SEQ ID NO: 225100 - RNA, 22 nt, Human
auuuacagugugccuacuauau

SEQ ID NO: 225101 - RNA, 22 nt, Human
uugcaauuaacauaugucaacu

SEQ ID NO: 225102 - RNA, 20 nt, Human
uggccuuuuggcuuggagcu

SEQ ID NO: 225103 - RNA, 22 nt, Human
gccagccuucuguggccugcaa

SEQ ID NO: 225104 - RNA, 22 nt, Human
gcugggcugcgucggggaagcc

SEQ ID NO: 225105 - RNA, 22 nt, Human
ugcauuuccagauuucuggagu

SEQ ID NO: 225106 - RNA, 22 nt, Human
cugaguggaacauaggaugaua

SEQ ID NO: 225107 - RNA, 22 nt, Human
aagaaauggaagauccauggug

SEQ ID NO: 225108 - RNA, 22 nt, Human
aacucaguuacauauuagaaua

SEQ ID NO: 225109 - RNA, 22 nt, Human
gaaaauuauugaaaauggcucu

SEQ ID NO: 225110 - RNA, 22 nt, Human
ucuaugaaccucugcaaugaca

SEQ ID NO: 225111 - RNA, 22 nt, Human
auauugaacccuacagacugua

SEQ ID NO: 225112 - RNA, 22 nt, Human
ccagaagcaaaacagacaguuu

SEQ ID NO: 225113 - RNA, 22 nt, Human
gcauaggccacuagugccagga

SEQ ID NO: 225114 - RNA, 22 nt, Human
aggcagcucuguggccucccag

SEQ ID NO: 225115 - RNA, 22 nt, Human
gucugggacaggacuggggaac

SEQ ID NO: 225116 - RNA, 22 nt, Human
acugccuguagcucuucaucuc

SEQ ID NO: 225117 - RNA, 17 nt, Human
gguggccugcaguggcu

SEQ ID NO: 225118 - RNA, 18 nt, Human
uuucucugucgucuucug

SEQ ID NO: 225119 - RNA, 22 nt, Human
gaaagccauagcccagcuuuac

SEQ ID NO: 225120 - RNA, 22 nt, Human
agaggacagacggaaagugcca

SEQ ID NO: 225121 - RNA, 23 nt, Human
gugcgccaggacaaccugacgga

SEQ ID NO: 225122 - RNA, 21 nt, Human
acagccugucaucucaugguc

SEQ ID NO: 225123 - RNA, 22 nt, Human
gagcaagacuacaggcagauga

SEQ ID NO: 225124 - RNA, 22 nt, Human
uagaagcucaggaauaggcaua

SEQ ID NO: 225125 - RNA, 22 nt, Human
uaacugguagauuuuaaaucgg

SEQ ID NO: 225126 - RNA, 22 nt, Human
ugaaugaugaggggagaauaau

SEQ ID NO: 225127 - RNA, 22 nt, Human
ucaauucugguccucaggaacu

SEQ ID NO: 225128 - RNA, 22 nt, Human
uggcaucucaaacaggcagauu

SEQ ID NO: 225129 - RNA, 22 nt, Human
caauaaagaagauuuuugcaau

SEQ ID NO: 225130 - RNA, 22 nt, Human
ugcauagggaaccucaugcauu

SEQ ID NO: 225131 - RNA, 22 nt, Human
uagcucuggagucuucucagaa

SEQ ID NO: 225132 - RNA, 20 nt, Human
acaguuuauccaguuagcag

SEQ ID NO: 225133 - RNA, 22 nt, Human
ggucuggauaauuccaguaccu

SEQ ID NO: 225134 - RNA, 20 nt, Human
ucaaguuuugcuugacaaga

SEQ ID NO: 225135 - RNA, 22 nt, Human
ugaggaaguugaucucaucagu

SEQ ID NO: 225136 - RNA, 22 nt, Human
aacuuucuuugcaucuaaguuu

SEQ ID NO: 225137 - RNA, 22 nt, Human
cuugacucuugcuucccaugga

SEQ ID NO: 225138 - RNA, 22 nt, Human
auuauaaagaacaugugugugg

SEQ ID NO: 225139 - RNA, 22 nt, Human
ccaggguugcuguauggcacuu

SEQ ID NO: 225140 - RNA, 22 nt, Human
cuugagaaucuugaugucuacc

SEQ ID NO: 225141 - RNA, 22 nt, Human
caaagggcauuuuagugaacug

SEQ ID NO: 225142 - RNA, 22 nt, Human
cugauuuacauauacaaaagau

SEQ ID NO: 225143 - RNA, 22 nt, Human
aagagaacagucaccaugcaca

SEQ ID NO: 225144 - RNA, 22 nt, Human
ucacugugcucucuagauaggc

SEQ ID NO: 225145 - RNA, 22 nt, Human
acacugugucuagcauuuuaca

SEQ ID NO: 225146 - RNA, 22 nt, Human
gcaguggaagccucuuuaagca

SEQ ID NO: 225147 - RNA, 22 nt, Human
cugccucugcgucccacagagu

SEQ ID NO: 225148 - RNA, 21 nt, Human
gagcccaggcaucucauuaau

SEQ ID NO: 225149 - RNA, 22 nt, Human
cugggccuuggauugacacugu

SEQ ID NO: 225150 - RNA, 22 nt, Human
aauaucaacaguguccuucuaa

SEQ ID NO: 225151 - RNA, 22 nt, Human
cuggcucuuuccuagcuaggcu

SEQ ID NO: 225152 - RNA, 22 nt, Human
uggaggugagugugguacagca

SEQ ID NO: 225153 - RNA, 22 nt, Human
agugagucaaaaaacuuagaua

SEQ ID NO: 225154 - RNA, 22 nt, Human
augauucuggggcaaaagcugg

SEQ ID NO: 225155 - RNA, 22 nt, Human
ggcucagguuuccuucccagcu

SEQ ID NO: 225156 - RNA, 22 nt, Human
ccauggcagccuggccuggcuu

SEQ ID NO: 225157 - RNA, 22 nt, Human
uuaaugcagaaaucaaacugac

SEQ ID NO: 225158 - RNA, 22 nt, Human
aguccuggccccaaggaaggau

SEQ ID NO: 225159 - RNA, 22 nt, Human
aguggggcggacaggaccagga

SEQ ID NO: 225160 - RNA, 22 nt, Human
caucaucaaaacaaauggaguc

SEQ ID NO: 225161 - RNA, 22 nt, Human
augccagaagagucugcaggga

SEQ ID NO: 225162 - RNA, 22 nt, Human
cccagaggaggaucucggcccg

SEQ ID NO: 225163 - RNA, 22 nt, Human
uccugugaccagcuuccaugcu

SEQ ID NO: 225164 - RNA, 22 nt, Human
aaaggcuacgggggccgugugc

SEQ ID NO: 225165 - RNA, 22 nt, Human
aacuuuauuguuaggggcuaaa

SEQ ID NO: 225166 - RNA, 22 nt, Human
agacauagauaggcacugauug

SEQ ID NO: 225167 - RNA, 22 nt, Human
uguggcugugccgucacacgug

SEQ ID NO: 225168 - RNA, 22 nt, Human
aggaucuuauguaauaauuaug

SEQ ID NO: 225169 - RNA, 23 nt, Human
caggcucccggaccaggauccgc

SEQ ID NO: 225170 - RNA, 22 nt, Human
ugcuauauaauggaauuucuaa

SEQ ID NO: 225171 - RNA, 22 nt, Human
ucagggagagccugucugacgu

SEQ ID NO: 225172 - RNA, 22 nt, Human
ugagugggauuaaaugagguga

SEQ ID NO: 225173 - RNA, 22 nt, Human
acagcaucuaguacagucuagu

SEQ ID NO: 225174 - RNA, 22 nt, Human
ggcuuugcccuggacugaggca

SEQ ID NO: 225175 - RNA, 22 nt, Human
cuccucccacggucucaggaag

SEQ ID NO: 225176 - RNA, 18 nt, Human
gucucaggaguggcacgu

SEQ ID NO: 225177 - RNA, 18 nt, Human
gcuuccugaaagcugccc

SEQ ID NO: 225178 - RNA, 23 nt, Human
ucuggcucuaugugacagcucuc

SEQ ID NO: 225179 - RNA, 22 nt, Human
caggcucccuaagucagcagcc

SEQ ID NO: 225180 - RNA, 22 nt, Human
cuguacaaguccuucaucaggg

SEQ ID NO: 225181 - RNA, 22 nt, Human
aaagacacauaugcuuaaccca

SEQ ID NO: 225182 - RNA, 20 nt, Human
uacuucugaggcacucugaa

SEQ ID NO: 225183 - RNA, 22 nt, Human
ccugccuucagcccugaagucu

SEQ ID NO: 225184 - RNA, 22 nt, Human
ugcuuuaguucaacaugccaaa

SEQ ID NO: 225185 - RNA, 22 nt, Human
ccaggugugccagcagggacug

SEQ ID NO: 225186 - RNA, 22 nt, Human
ucagauggaaagguuacugucc

SEQ ID NO: 225187 - RNA, 22 nt, Human
augugaaaauccaauggcagca

SEQ ID NO: 225188 - RNA, 22 nt, Human
gccuggagaaaggaagguggga

SEQ ID NO: 225189 - RNA, 22 nt, Human
gucuggggaagucagggcauca

SEQ ID NO: 225190 - RNA, 22 nt, Human
gaggccugguuugcaugagaau

SEQ ID NO: 225191 - RNA, 22 nt, Human
caggucuggugagagaacaguu

SEQ ID NO: 225192 - RNA, 22 nt, Human
uuuguucaugccuauauucuca

SEQ ID NO: 225193 - RNA, 22 nt, Human
acagagcuuaauucaggagcuu

SEQ ID NO: 225194 - RNA, 22 nt, Human
ccaccagcagugugcaaggauu

SEQ ID NO: 225195 - RNA, 22 nt, Human
cgggcagcggcguggccauggu

SEQ ID NO: 225196 - RNA, 22 nt, Human
caggccuggcugcagcucgccu

SEQ ID NO: 225197 - RNA, 22 nt, Human
aagcccucauccccaugggcgu

SEQ ID NO: 225198 - RNA, 22 nt, Human
gaaaagaguccugugugaggag

SEQ ID NO: 225199 - RNA, 22 nt, Human
uuggcugagagcugcucugcag

SEQ ID NO: 225200 - RNA, 22 nt, Human
gagugagggcagcaggggcugc

SEQ ID NO: 225201 - RNA, 22 nt, Human
ucuuuauaaaagucauuauguc

SEQ ID NO: 225202 - RNA, 22 nt, Human
cuccaguggugauggggaagaa

SEQ ID NO: 225203 - RNA, 21 nt, Human
agcugcuuucagcuccuagag

SEQ ID NO: 225204 - RNA, 22 nt, Human
uugcucugaaccacaccaucac

SEQ ID NO: 225205 - RNA, 22 nt, Human
ucauaaauucuggugcugugag

SEQ ID NO: 225206 - RNA, 22 nt, Human
uuuuaauucaaagugaauagug

SEQ ID NO: 225207 - RNA, 22 nt, Human
aucuucaaagggauguccaugg

SEQ ID NO: 225208 - RNA, 22 nt, Human
gccucuguggcucagccuugcu

SEQ ID NO: 225209 - RNA, 22 nt, Human
cuucagagugcagaagauuggg

SEQ ID NO: 225210 - RNA, 22 nt, Human
cuccagugggggugagccuaga

SEQ ID NO: 225211 - RNA, 22 nt, Human
agcagaagaaagccacaugacu

SEQ ID NO: 225212 - RNA, 22 nt, Human
agugugggugagggaggcccuc

SEQ ID NO: 225213 - RNA, 22 nt, Human
uguccugggucaaauccugguc

SEQ ID NO: 225214 - RNA, 22 nt, Human
caagcagauauuuuagucaaga

SEQ ID NO: 225215 - RNA, 22 nt, Human
aaugugucuaugugguucacag

SEQ ID NO: 225216 - RNA, 22 nt, Human
aaauacaguguguguucuuuga

SEQ ID NO: 225217 - RNA, 22 nt, Human
aggcucagcugguggugaucgc

SEQ ID NO: 225218 - RNA, 22 nt, Human
cccucagcuucucccugcagcu

SEQ ID NO: 225219 - RNA, 22 nt, Human
agagucuuccaggcagccugag

SEQ ID NO: 225220 - RNA, 22 nt, Human
guccagcccgggcuccgccagc

SEQ ID NO: 225221 - RNA, 22 nt, Human
accugccuucucaaggacauga

SEQ ID NO: 225222 - RNA, 21 nt, Human
cuccugggcuaagauauagug

SEQ ID NO: 225223 - RNA, 22 nt, Human
ugauaaacuggagagguggagg

SEQ ID NO: 225224 - RNA, 22 nt, Human
cucuggaauguuuacaugcccu

SEQ ID NO: 225225 - RNA, 22 nt, Human
ucugcaggaucagagccagagg

SEQ ID NO: 225226 - RNA, 22 nt, Human
uggcucagaguucaucuuuuag

SEQ ID NO: 225227 - RNA, 22 nt, Human
agucuucuugaucuuuucagug

SEQ ID NO: 225228 - RNA, 22 nt, Human
ccugccuggagcugagugugga

SEQ ID NO: 225229 - RNA, 22 nt, Human
ggagcugaguggguuuauugau

SEQ ID NO: 225230 - RNA, 22 nt, Human
uuccaggaacacucuguguccc

SEQ ID NO: 225231 - RNA, 23 nt, Human
gcaaagacucugccaaaaacugc

SEQ ID NO: 225232 - RNA, 22 nt, Human
agcuuacuguaauuaaaagacu

SEQ ID NO: 225233 - RNA, 22 nt, Human
ccauccugcauugcuauucaga

SEQ ID NO: 225234 - RNA, 22 nt, Human
acuucuuucacaauguuucuag

SEQ ID NO: 225235 - RNA, 22 nt, Human
cucugagcugaaacaugagcau

SEQ ID NO: 225236 - RNA, 22 nt, Human
uucuguaucucuguguuucuug

SEQ ID NO: 225237 - RNA, 22 nt, Human
cuuauucagaaggagaaaugga

SEQ ID NO: 225238 - RNA, 22 nt, Human
gcuguacaucacaauuugcugu

SEQ ID NO: 225239 - RNA, 22 nt, Human
gugcucaggggcaauccuggga

SEQ ID NO: 225240 - RNA, 22 nt, Human
agcuggccagcaccuccagguc

SEQ ID NO: 225241 - RNA, 22 nt, Human
ggccugagggugggcucucagu

SEQ ID NO: 225242 - RNA, 22 nt, Human
aagggaggaggauuuauuguac

SEQ ID NO: 225243 - RNA, 20 nt, Human
ccagaagcacucuucauguu

SEQ ID NO: 225244 - RNA, 22 nt, Human
guacauuucucuuguucuuauu

SEQ ID NO: 225245 - RNA, 22 nt, Human
cagcaagauuuuuaaagcaagg

SEQ ID NO: 225246 - RNA, 22 nt, Human
guggccagaggucccauguguc

SEQ ID NO: 225247 - RNA, 22 nt, Human
augcaaacauucgcuugucucu

SEQ ID NO: 225248 - RNA, 23 nt, Human
agagcaaggaaaugaggugugau

SEQ ID NO: 225249 - RNA, 22 nt, Human
caguuacuguaugucaaagacu

SEQ ID NO: 225250 - RNA, 22 nt, Human
aggccacagagagugcaugugc

SEQ ID NO: 225251 - RNA, 23 nt, Human
acaagauagggauaaaaagauaa

SEQ ID NO: 225252 - RNA, 20 nt, Human
gggguugacccucuuggacu

SEQ ID NO: 225253 - RNA, 22 nt, Human
uaagagaauguuguggcuaggu

SEQ ID NO: 225254 - RNA, 22 nt, Human
ucagaaaggaguuagaggucuc

SEQ ID NO: 225255 - RNA, 22 nt, Human
uuuaagcuguggcauuaauucu

SEQ ID NO: 225256 - RNA, 22 nt, Human
aaggccuugccgaaggaugcca

SEQ ID NO: 225257 - RNA, 22 nt, Human
ugguccaguucugugauauugc

SEQ ID NO: 225258 - RNA, 22 nt, Human
auuucagaugaccaaauggaaa

SEQ ID NO: 225259 - RNA, 22 nt, Human
gcugaggccccagggugauggg

SEQ ID NO: 225260 - RNA, 22 nt, Human
uacaagauaagaauuggcaagg

SEQ ID NO: 225261 - RNA, 22 nt, Human
ucugccaguuuauagacaagcc

SEQ ID NO: 225262 - RNA, 22 nt, Human
augguuuagcaacuuagggaaa

SEQ ID NO: 225263 - RNA, 22 nt, Human
gcagacuggucuucagccuugg

SEQ ID NO: 225264 - RNA, 22 nt, Human
gcucagggugcaguguccauga

SEQ ID NO: 225265 - RNA, 22 nt, Human
aaugaucuggcucaggauauca

SEQ ID NO: 225266 - RNA, 22 nt, Human
cucugcugcaggaaggcgugca

SEQ ID NO: 225267 - RNA, 22 nt, Human
uacaaaugaguuguaugaacca

SEQ ID NO: 225268 - RNA, 22 nt, Human
caagagacuuauguggaaaccu

SEQ ID NO: 225269 - RNA, 22 nt, Human
aagaguuugggcaagucauaaa

SEQ ID NO: 225270 - RNA, 19 nt, Human
agcagcucagggaggcacc

SEQ ID NO: 225271 - RNA, 22 nt, Human
uccuuccugcaggccaaguccu

SEQ ID NO: 225272 - RNA, 22 nt, Human
acuugguuguuuuaacuuggca

SEQ ID NO: 225273 - RNA, 22 nt, Human
uuugagaaggugacaaauucua

SEQ ID NO: 225274 - RNA, 22 nt, Human
augaggcauagcagggaucgga

SEQ ID NO: 225275 - RNA, 21 nt, Human
cccugcuuggggcagaacaac

SEQ ID NO: 225276 - RNA, 22 nt, Human
agcagcaugaugacagagucuc

SEQ ID NO: 225277 - RNA, 22 nt, Human
ugcccagccaauuuguuauguu

SEQ ID NO: 225278 - RNA, 22 nt, Human
aaauuuguucaaugucuauuug

SEQ ID NO: 225279 - RNA, 22 nt, Human
gagcuuccacucuagaaggagu

SEQ ID NO: 225280 - RNA, 22 nt, Human
cuguggcucaaaaucccaugau

SEQ ID NO: 225281 - RNA, 22 nt, Human
ccuccugucuccuuccuauauu

SEQ ID NO: 225282 - RNA, 22 nt, Human
acaugucuacacauucugcaau

SEQ ID NO: 225283 - RNA, 22 nt, Human
ugagguggugcuaaucucugcu

SEQ ID NO: 225284 - RNA, 21 nt, Human
uccaggcuggaaggggcguug

SEQ ID NO: 225285 - RNA, 22 nt, Human
caccaggcuggagugcagaggu

SEQ ID NO: 225286 - RNA, 22 nt, Human
ccagccagucccgcaugaccgc

SEQ ID NO: 225287 - RNA, 22 nt, Human
caggcuggcaaugcgucaagca

SEQ ID NO: 225288 - RNA, 22 nt, Human
caccagggcagcagccuagucu

SEQ ID NO: 225289 - RNA, 22 nt, Human
uugagcaaaggaguaaaaugca

SEQ ID NO: 225290 - RNA, 17 nt, Human
gcugagaggcagcacag

SEQ ID NO: 225291 - RNA, 22 nt, Human
aggggagaauuucaacucaggu

SEQ ID NO: 225292 - RNA, 22 nt, Human
uucuuucuguccauaaugagac

SEQ ID NO: 225293 - RNA, 21 nt, Human
agccagucauuaugagcggga

SEQ ID NO: 225294 - RNA, 22 nt, Human
acaguguuuggcaaugcaugca

SEQ ID NO: 225295 - RNA, 22 nt, Human
uugugaguagugccgcaauaaa

SEQ ID NO: 225296 - RNA, 22 nt, Human
cugcucuucacacuacacccgu

SEQ ID NO: 225297 - RNA, 22 nt, Human
augcccugugacucuccuggac

SEQ ID NO: 225298 - RNA, 22 nt, Human
gacaguaacugagagauguaau

SEQ ID NO: 225299 - RNA, 22 nt, Human
agagguggagcucuuggcauca

SEQ ID NO: 225300 - RNA, 22 nt, Human
aaugaaacucgaaauaaucaca

SEQ ID NO: 225301 - RNA, 22 nt, Human
ggaagggcaauaaaaucucagg

SEQ ID NO: 225302 - RNA, 22 nt, Human
acuuuacuacauccacagaugg

SEQ ID NO: 225303 - RNA, 22 nt, Human
cggcucagacuucccaagaaca

SEQ ID NO: 225304 - RNA, 22 nt, Human
ugggacagugugccuugcuccu

SEQ ID NO: 225305 - RNA, 22 nt, Human
gccccaccuugagagcagaaac

SEQ ID NO: 225306 - RNA, 22 nt, Human
aggcuggugcuuccuagggcag

SEQ ID NO: 225307 - RNA, 22 nt, Human
uggagcaggaagucuauggcug

SEQ ID NO: 225308 - RNA, 22 nt, Human
gaggaggcuaagugggcucugg

SEQ ID NO: 225309 - RNA, 22 nt, Human
uguaucaaaccaaauuaauucu

SEQ ID NO: 225310 - RNA, 22 nt, Human
augaaggacaacaggggagcag

SEQ ID NO: 225311 - RNA, 21 nt, Human
ucagcagcuuuugcagucccu

SEQ ID NO: 225312 - RNA, 22 nt, Human
agaggggaaggaugugauguga

SEQ ID NO: 225313 - RNA, 22 nt, Human
agcugcagcccuccugcauggc

SEQ ID NO: 225314 - RNA, 18 nt, Human
uuuuaauuucaggggugg

SEQ ID NO: 225315 - RNA, 22 nt, Human
auccugugaggauaagcccuug

SEQ ID NO: 225316 - RNA, 22 nt, Human
agcgcaggaacacgucugccuu

SEQ ID NO: 225317 - RNA, 22 nt, Human
aggaaucugugguuuuaacagg

SEQ ID NO: 225318 - RNA, 22 nt, Human
ccccucucccucacuuaucaau

SEQ ID NO: 225319 - RNA, 22 nt, Human
agcccagaaaugaaaggaugau

SEQ ID NO: 225320 - RNA, 23 nt, Human
aggaagcuaccaauuuuguaggc

SEQ ID NO: 225321 - RNA, 22 nt, Human
acagacauauuuggcccauagc

SEQ ID NO: 225322 - RNA, 22 nt, Human
caaggaaaagaaguauuucaga

SEQ ID NO: 225323 - RNA, 22 nt, Human
ugaaagcaggcgggcuacuuua

SEQ ID NO: 225324 - RNA, 22 nt, Human
cagcuguguaugagagcaugcu

SEQ ID NO: 225325 - RNA, 21 nt, Human
aagcuuggcugauguuauugg

SEQ ID NO: 225326 - RNA, 22 nt, Human
acagaauugggguucuugggga

SEQ ID NO: 225327 - RNA, 22 nt, Human
uuuccucaacugucaaaugggg

SEQ ID NO: 225328 - RNA, 22 nt, Human
ucaaaaguuucacauagagaua

SEQ ID NO: 225329 - RNA, 22 nt, Human
cucagugugaaugcucaguaaa

SEQ ID NO: 225330 - RNA, 22 nt, Human
agaaaucaauaucuauauguug

SEQ ID NO: 225331 - RNA, 22 nt, Human
cuuuaaauaauacaagguccag

SEQ ID NO: 225332 - RNA, 22 nt, Human
caguuaaagugcuuaucacaga

SEQ ID NO: 225333 - RNA, 22 nt, Human
uuccugaauauaaagacacuag

SEQ ID NO: 225334 - RNA, 22 nt, Human
aacaaagucguugccuagaaga

SEQ ID NO: 225335 - RNA, 22 nt, Human
ugcuggcuguauaugugagagu

SEQ ID NO: 225336 - RNA, 22 nt, Human
gaaagacuuccuuugagaguac

SEQ ID NO: 225337 - RNA, 22 nt, Human
guaaacauuacugugcuguaua

SEQ ID NO: 225338 - RNA, 22 nt, Human
ucucuaaaugauuguguacucc

SEQ ID NO: 225339 - RNA, 22 nt, Human
uuggaacaaucacauccuugcu

SEQ ID NO: 225340 - RNA, 23 nt, Human
uccagcagagccuuccaggaggg

SEQ ID NO: 225341 - RNA, 22 nt, Human
acagggauuaugacugacagcc

SEQ ID NO: 225342 - RNA, 22 nt, Human
aggccagccucaggcagggacc

SEQ ID NO: 225343 - RNA, 22 nt, Human
aauguuuuaaaagagauugaga

SEQ ID NO: 225344 - RNA, 22 nt, Human
cuuccaguggcaccaacaugca

SEQ ID NO: 225345 - RNA, 22 nt, Human
uggcacagacauuuaauagccu

SEQ ID NO: 225346 - RNA, 22 nt, Human
uugagggacagaggugcugucu

SEQ ID NO: 225347 - RNA, 22 nt, Human
aucagaaaguucaucauguuug

SEQ ID NO: 225348 - RNA, 22 nt, Human
ugaguucuuugcaaauaacaag

SEQ ID NO: 225349 - RNA, 19 nt, Human
cuggucugcugcuuccagg

SEQ ID NO: 225350 - RNA, 18 nt, Human
augcugcccucugagggu

SEQ ID NO: 225351 - RNA, 22 nt, Human
aaaaauugcugagaacggaauu

SEQ ID NO: 225352 - RNA, 22 nt, Human
ugcaggugguuuggacacugcu

SEQ ID NO: 225353 - RNA, 22 nt, Human
uuugaacuucuccauucugaug

SEQ ID NO: 225354 - RNA, 22 nt, Human
gcuggucagagagaaaggaggc

SEQ ID NO: 225355 - RNA, 22 nt, Human
ucugagguuacugcuuuguaga

SEQ ID NO: 225356 - RNA, 22 nt, Human
ugagaacugaggauuugaauuc

SEQ ID NO: 225357 - RNA, 22 nt, Human
uggaauguaaaccucagguggg

SEQ ID NO: 225358 - RNA, 22 nt, Human
uucaauguuucuuaucaaguug

SEQ ID NO: 225359 - RNA, 22 nt, Human
uacuucaaccuucucuauuaga

SEQ ID NO: 225360 - RNA, 21 nt, Human
cagaggcaggcucugugugug

SEQ ID NO: 225361 - RNA, 22 nt, Human
gaauaauuuugaucagaaggga

SEQ ID NO: 225362 - RNA, 22 nt, Human
aagcauuugguucugaagacuc

SEQ ID NO: 225363 - RNA, 22 nt, Human
auggcugccuuaauucuucagc

SEQ ID NO: 225364 - RNA, 22 nt, Human
aagcccugggauguucagcagu

SEQ ID NO: 225365 - RNA, 22 nt, Human
cauuguuuguaaaauuccagua

SEQ ID NO: 225366 - RNA, 22 nt, Human
aggcuuguggauuggagcgagu

SEQ ID NO: 225367 - RNA, 22 nt, Human
auuuggaaacaauuauauucuu

SEQ ID NO: 225368 - RNA, 22 nt, Human
ggugacauaguuacuucaggcu

SEQ ID NO: 225369 - RNA, 17 nt, Human
augauuacaucuuuccu

SEQ ID NO: 225370 - RNA, 22 nt, Human
ugcugaggagggcacccggggg

SEQ ID NO: 225371 - RNA, 22 nt, Human
ucagagaguuagugucuuagcu

SEQ ID NO: 225372 - RNA, 22 nt, Human
cccuccucaacucuggcuucca

SEQ ID NO: 225373 - RNA, 22 nt, Human
cauggcugaacacucagugacu

SEQ ID NO: 225374 - RNA, 22 nt, Human
uuugaaguccaucuggcccagu

SEQ ID NO: 225375 - RNA, 22 nt, Human
aaaaggcucuucaaaauggaag

SEQ ID NO: 225376 - RNA, 22 nt, Human
aaagcugcccuacacggaagca

SEQ ID NO: 225377 - RNA, 22 nt, Human
aaacagaugaguuauaauagcc

SEQ ID NO: 225378 - RNA, 19 nt, Human
ggcugagcgccuuggcugc

SEQ ID NO: 225379 - RNA, 22 nt, Human
uuccauauuuguguggcaaaag

SEQ ID NO: 225380 - RNA, 22 nt, Human
cucuguccuccaccugcuuuca

SEQ ID NO: 225381 - RNA, 22 nt, Human
cucaggccuugaagucuuuucu

SEQ ID NO: 225382 - RNA, 22 nt, Human
gccuguccuauacaggcggcug

SEQ ID NO: 225383 - RNA, 22 nt, Human
cuagaaauguagauucuuagug

SEQ ID NO: 225384 - RNA, 22 nt, Human
uuacauucccagugugcagcau

SEQ ID NO: 225385 - RNA, 22 nt, Human
caacauauaauauuugaguucu

SEQ ID NO: 225386 - RNA, 19 nt, Human
cauuuagaaguacauauua

SEQ ID NO: 225387 - RNA, 22 nt, Human
gccaggcagcuagcaaccccug

SEQ ID NO: 225388 - RNA, 22 nt, Human
ugcaauaacccaguaucuguga

SEQ ID NO: 225389 - RNA, 22 nt, Human
cacacuaucuuccuauccuggc

SEQ ID NO: 225390 - RNA, 22 nt, Human
gggccccuugcugcucugcugg

SEQ ID NO: 225391 - RNA, 22 nt, Human
cugguuuauguaucaucuagaa

SEQ ID NO: 225392 - RNA, 22 nt, Human
cccagcagcuugcacagugcug

SEQ ID NO: 225393 - RNA, 22 nt, Human
gcugguuuccuuaucuauaaag

SEQ ID NO: 225394 - RNA, 22 nt, Human
ugucauuuaugcuucuucagug

SEQ ID NO: 225395 - RNA, 20 nt, Human
uacaucucucagaugucuaa

SEQ ID NO: 225396 - RNA, 22 nt, Human
ugaaacuucuaauaugaauagu

SEQ ID NO: 225397 - RNA, 22 nt, Human
ugcaugcaugcuacugggaggu

SEQ ID NO: 225398 - RNA, 21 nt, Human
uggugccuucagcugucuuuu

SEQ ID NO: 225399 - RNA, 22 nt, Human
ccgggccucgggacaccgggua

SEQ ID NO: 225400 - RNA, 22 nt, Human
guaagccucugcucuaucuggu

SEQ ID NO: 225401 - RNA, 22 nt, Human
ggagccaggcaaucuguacuuu

SEQ ID NO: 225402 - RNA, 22 nt, Human
gcuguggcaauguuuauaauua

SEQ ID NO: 225403 - RNA, 22 nt, Human
auuccaaagcacaucagaacua

SEQ ID NO: 225404 - RNA, 20 nt, Human
uaaauuagccuugaagauua

SEQ ID NO: 225405 - RNA, 22 nt, Human
cagcuggcauaccugggcccgg

SEQ ID NO: 225406 - RNA, 22 nt, Human
acaggcaccugccaccacaucu

SEQ ID NO: 225407 - RNA, 22 nt, Human
aguaagcaauagagugagaauu

SEQ ID NO: 225408 - RNA, 22 nt, Human
ugaggagcuucuggaaagugca

SEQ ID NO: 225409 - RNA, 22 nt, Human
ugaguucuucacauuaccuacg

SEQ ID NO: 225410 - RNA, 22 nt, Human
cuagagaagaggcucagccagc

SEQ ID NO: 225411 - RNA, 22 nt, Human
caguguuuaaucauugugaauu

SEQ ID NO: 225412 - RNA, 22 nt, Human
caacugguggucaaccuucugu

SEQ ID NO: 225413 - RNA, 22 nt, Human
ccaagguugagaaacuguagga

SEQ ID NO: 225414 - RNA, 22 nt, Human
acaaauaugguacucggagaaa

SEQ ID NO: 225415 - RNA, 22 nt, Human
aaaagcacuacaauuucgcuuc

SEQ ID NO: 225416 - RNA, 22 nt, Human
aucagagaccggucaagucaug

SEQ ID NO: 225417 - RNA, 22 nt, Human
gacuccagguguccaggccucc

SEQ ID NO: 225418 - RNA, 22 nt, Human
uucauuuuuaccgcgugucaaa

SEQ ID NO: 225419 - RNA, 22 nt, Human
gagugggggguccgucucagug

SEQ ID NO: 225420 - RNA, 22 nt, Human
cuggguaaguuccuaaggcuca

SEQ ID NO: 225421 - RNA, 22 nt, Human
agcugagaaucuuccccagugu

SEQ ID NO: 225422 - RNA, 16 nt, Human
ugcagagagcauggug

SEQ ID NO: 225423 - RNA, 22 nt, Human
gcagcauauuguacuggccugc

SEQ ID NO: 225424 - RNA, 22 nt, Human
gaggagccuggccccacaucca

SEQ ID NO: 225425 - RNA, 22 nt, Human
gcugcccugugguagagggugg

SEQ ID NO: 225426 - RNA, 22 nt, Human
gcagucccauaucuuuaacaua

SEQ ID NO: 225427 - RNA, 22 nt, Human
cacaguuagagguagaguccag

SEQ ID NO: 225428 - RNA, 22 nt, Human
uugagaacuagcauggucuauc

SEQ ID NO: 225429 - RNA, 22 nt, Human
uccccacucaccacuggccaaa

SEQ ID NO: 225430 - RNA, 22 nt, Human
cuggcagcugcccgagaugccc

SEQ ID NO: 225431 - RNA, 22 nt, Human
uguggggcugucaggcaacugg

SEQ ID NO: 225432 - RNA, 22 nt, Human
cuuauuagaaagaaaagacaug

SEQ ID NO: 225433 - RNA, 22 nt, Human
ugcuaucuaggcaagguggucc

SEQ ID NO: 225434 - RNA, 22 nt, Human
aaccccaggcuggaggagucuc

SEQ ID NO: 225435 - RNA, 22 nt, Human
gcagcuuuaaacauuggaaaua

SEQ ID NO: 225436 - RNA, 22 nt, Human
cagaaccugugaauguguuauc

SEQ ID NO: 225437 - RNA, 22 nt, Human
gccagguggucuggcuccagag

SEQ ID NO: 225438 - RNA, 22 nt, Human
aaucuacauuucaguuuugccc

SEQ ID NO: 225439 - RNA, 22 nt, Human
caaagcaguauuggauucuuua

SEQ ID NO: 225440 - RNA, 22 nt, Human
uagugaaagucaaagacagcua

SEQ ID NO: 225441 - RNA, 22 nt, Human
ugcuggcuuuaagguuaaagug

SEQ ID NO: 225442 - RNA, 22 nt, Human
caaguccuuuucuuggcucagg

SEQ ID NO: 225443 - RNA, 22 nt, Human
cacaguuucaauaauuauucuu

SEQ ID NO: 225444 - RNA, 22 nt, Human
uugaaaggguuaaagugguaaa

SEQ ID NO: 225445 - RNA, 19 nt, Human
gcacacaguagggcuggca

SEQ ID NO: 225446 - RNA, 22 nt, Human
gucauucaacugcacauuaggu

SEQ ID NO: 225447 - RNA, 22 nt, Human
ugguucagagaguugcugacca

SEQ ID NO: 225448 - RNA, 22 nt, Human
gcugcagagggaggggcucgca

SEQ ID NO: 225449 - RNA, 22 nt, Human
uugcaacaucugaacauuuauc

SEQ ID NO: 225450 - RNA, 19 nt, Human
gcaggguggcagagcucuu

SEQ ID NO: 225451 - RNA, 22 nt, Human
ggcucaccauggccucccugcu

SEQ ID NO: 225452 - RNA, 20 nt, Human
gaggccucagccucagcucc

SEQ ID NO: 225453 - RNA, 22 nt, Human
uuggaacuuaacccugauaggu

SEQ ID NO: 225454 - RNA, 22 nt, Human
aggauguggguuuucacauugu

SEQ ID NO: 225455 - RNA, 19 nt, Human
ggcugccuccugggagauu

SEQ ID NO: 225456 - RNA, 22 nt, Human
agaacaaaucgauggaagccug

SEQ ID NO: 225457 - RNA, 22 nt, Human
cagucagagucacaguaauuug

SEQ ID NO: 225458 - RNA, 22 nt, Human
gcgagccucuggaguccucugg

SEQ ID NO: 225459 - RNA, 22 nt, Human
guuuuccuacuguaucaucaaa

SEQ ID NO: 225460 - RNA, 22 nt, Human
gacuuuggcuuuuauucuaggu

SEQ ID NO: 225461 - RNA, 22 nt, Human
agaccauggccauccuaggaaa

SEQ ID NO: 225462 - RNA, 22 nt, Human
gagcacugauuuauuuuugucu

SEQ ID NO: 225463 - RNA, 22 nt, Human
gcaccagggagggugugcuuca

SEQ ID NO: 225464 - RNA, 22 nt, Human
aggcuucucaauagguuugaag

SEQ ID NO: 225465 - RNA, 22 nt, Human
cagauggcugccaagaugggcu

SEQ ID NO: 225466 - RNA, 22 nt, Human
gaggccagugugcuguguuuuc

SEQ ID NO: 225467 - RNA, 19 nt, Human
aucuuuggguccugaaggg

SEQ ID NO: 225468 - RNA, 22 nt, Human
gcagugcuaaggauucugccuu

SEQ ID NO: 225469 - RNA, 22 nt, Human
uucuguuuacucagaaauacaa

SEQ ID NO: 225470 - RNA, 22 nt, Human
cucuuagaaacuauagagauua

SEQ ID NO: 225471 - RNA, 18 nt, Human
gggaagccgggaagccgg

SEQ ID NO: 225472 - RNA, 22 nt, Human
ggcagcuuacguuuugcuagug

SEQ ID NO: 225473 - RNA, 22 nt, Human
acucccuggcaggucuuuaucu

SEQ ID NO: 225474 - RNA, 22 nt, Human
uaguuuacuguucacuuugccc

SEQ ID NO: 225475 - RNA, 22 nt, Human
ggaagaaagguggacaacaggu

SEQ ID NO: 225476 - RNA, 22 nt, Human
ucuggcuccugaguccaugcuc

SEQ ID NO: 225477 - RNA, 22 nt, Human
augccuuucuuuggugcagguu

SEQ ID NO: 225478 - RNA, 22 nt, Human
agauggcugauuaacuccaugg

SEQ ID NO: 225479 - RNA, 22 nt, Human
acuugguugcaaaugaauuauu

SEQ ID NO: 225480 - RNA, 22 nt, Human
cccaguggugcuggcaucugug

SEQ ID NO: 225481 - RNA, 22 nt, Human
ucuguggcauagugcuugggaa

SEQ ID NO: 225482 - RNA, 22 nt, Human
augaggagcuccuugaaaugag

SEQ ID NO: 225483 - RNA, 22 nt, Human
ugaaguaggcagcaugcugaga

SEQ ID NO: 225484 - RNA, 22 nt, Human
uguucccaagauaagauuauga

SEQ ID NO: 225485 - RNA, 22 nt, Human
uccuggcccucugcaaacgcca

SEQ ID NO: 225486 - RNA, 22 nt, Human
cuuuauauauucccaggcugcc

SEQ ID NO: 225487 - RNA, 22 nt, Human
gauacauaaaaaugugcucuau

SEQ ID NO: 225488 - RNA, 22 nt, Human
ggcuuucuuguuaaauguccau

SEQ ID NO: 225489 - RNA, 22 nt, Human
caugccaacaacaagcaaugag

SEQ ID NO: 225490 - RNA, 22 nt, Human
ugagcaguggggccugcauucu

SEQ ID NO: 225491 - RNA, 22 nt, Human
uggaugaguucaaugaggcaga

SEQ ID NO: 225492 - RNA, 22 nt, Human
ugagccaguucuucagauccau

SEQ ID NO: 225493 - RNA, 22 nt, Human
cacuguauuauuaggaaugaca

SEQ ID NO: 225494 - RNA, 22 nt, Human
agcagagccugggcuaggggug

SEQ ID NO: 225495 - RNA, 22 nt, Human
cuuguccuuuacuugagacuca

SEQ ID NO: 225496 - RNA, 22 nt, Human
ucccagagugugggcaucaagg

SEQ ID NO: 225497 - RNA, 22 nt, Human
ccccacagccgccagcagggag

SEQ ID NO: 225498 - RNA, 20 nt, Human
agcuucauuauagcccacag

SEQ ID NO: 225499 - RNA, 22 nt, Human
aauaacaggcucaucagaugcu

SEQ ID NO: 225500 - RNA, 22 nt, Human
ccaggucugucuucuuagcuca

SEQ ID NO: 225501 - RNA, 22 nt, Human
uccugggcgaguggugguacac

SEQ ID NO: 225502 - RNA, 22 nt, Human
gcaggucuggcauagagccugc

SEQ ID NO: 225503 - RNA, 22 nt, Human
uuugacuccuguguuucuggaa

SEQ ID NO: 225504 - RNA, 22 nt, Human
acaggugcaugcuaccaugucu

SEQ ID NO: 225505 - RNA, 22 nt, Human
caggcugaggguuaggccuuag

SEQ ID NO: 225506 - RNA, 22 nt, Human
gacuucuguuaacuuguaagag

SEQ ID NO: 225507 - RNA, 22 nt, Human
cagagagcuuagugugcugcau

SEQ ID NO: 225508 - RNA, 22 nt, Human
caucaaauuaugugucaaagca

SEQ ID NO: 225509 - RNA, 22 nt, Human
ccagaaaacucuacaugcuugu

SEQ ID NO: 225510 - RNA, 22 nt, Human
ugacccuuucauuauucucauu

SEQ ID NO: 225511 - RNA, 22 nt, Human
ggagcuguuggcagcuaucuug

SEQ ID NO: 225512 - RNA, 22 nt, Human
cacagagaucggaacagaagua

SEQ ID NO: 225513 - RNA, 22 nt, Human
agcccaggagguggagguugca

SEQ ID NO: 225514 - RNA, 22 nt, Human
uuuccucauuuaucugcuggga

SEQ ID NO: 225515 - RNA, 22 nt, Human
uggguccacaaacaucagauau

SEQ ID NO: 225516 - RNA, 22 nt, Human
gcucccagcauugcugcugaau

SEQ ID NO: 225517 - RNA, 22 nt, Human
caaggcuauaauguugcuggaa

SEQ ID NO: 225518 - RNA, 22 nt, Human
gcuggcucugaugggcuccagg

SEQ ID NO: 225519 - RNA, 20 nt, Human
ucucuggcaagaagcugcag

SEQ ID NO: 225520 - RNA, 22 nt, Human
auuauuuacagugugcucgaag

SEQ ID NO: 225521 - RNA, 22 nt, Human
aggaagcuuagugaaaggacca

SEQ ID NO: 225522 - RNA, 22 nt, Human
acuccaguuaccuuggcugagg

SEQ ID NO: 225523 - RNA, 22 nt, Human
aagcagaacugggaaguagugg

SEQ ID NO: 225524 - RNA, 23 nt, Human
aggaaggagguccuaacaguauc

SEQ ID NO: 225525 - RNA, 22 nt, Human
uagaaagaucuguaggcaagag

SEQ ID NO: 225526 - RNA, 22 nt, Human
cugucuuuaguacaaaaaaugu

SEQ ID NO: 225527 - RNA, 22 nt, Human
ugggagcagcuuugcgagggag

SEQ ID NO: 225528 - RNA, 22 nt, Human
caggagccagcugucccaacca

SEQ ID NO: 225529 - RNA, 22 nt, Human
auccaaaauuuacuguagcauu

SEQ ID NO: 225530 - RNA, 20 nt, Human
cagcccugugaccuggcccu

SEQ ID NO: 225531 - RNA, 21 nt, Human
acaguagcugacacacaguuu

SEQ ID NO: 225532 - RNA, 22 nt, Human
uaagcccacauuuuucugaaga

SEQ ID NO: 225533 - RNA, 22 nt, Human
acagcugugacuuagagaaguu

SEQ ID NO: 225534 - RNA, 20 nt, Human
uacugggucuggguccugga

SEQ ID NO: 225535 - RNA, 22 nt, Human
ugcaggaaucagaggggaagcg

SEQ ID NO: 225536 - RNA, 22 nt, Human
guguuacuuaccugggacagca

SEQ ID NO: 225537 - RNA, 22 nt, Human
uagaagaaagugaagcugggga

SEQ ID NO: 225538 - RNA, 22 nt, Human
aggacacagcugcucugcagag

SEQ ID NO: 225539 - RNA, 22 nt, Human
guucagagacacuuauuggaaa

SEQ ID NO: 225540 - RNA, 22 nt, Human
gauuacauucuccuuguauuag

SEQ ID NO: 225541 - RNA, 22 nt, Human
ggcaggcugcuugggucauguc

SEQ ID NO: 225542 - RNA, 22 nt, Human
cagacaggcaggugcugcuuug

SEQ ID NO: 225543 - RNA, 22 nt, Human
gggcuccaaggaggccagccug

SEQ ID NO: 225544 - RNA, 22 nt, Human
cagguucuauacugaauaauuu

SEQ ID NO: 225545 - RNA, 22 nt, Human
gggcacagccuaacuauggaga

SEQ ID NO: 225546 - RNA, 22 nt, Human
aggaaugugaaacagguggcug

SEQ ID NO: 225547 - RNA, 22 nt, Human
ccugagacaugaaccaggcucc

SEQ ID NO: 225548 - RNA, 22 nt, Human
cgaugcuggaaugacagcugcu

SEQ ID NO: 225549 - RNA, 22 nt, Human
ucagcauuucagaaguggcaua

SEQ ID NO: 225550 - RNA, 18 nt, Human
auccaaaaagauggaagu

SEQ ID NO: 225551 - RNA, 22 nt, Human
uuaggaacuucugucucagugu

SEQ ID NO: 225552 - RNA, 22 nt, Human
cccuaggcugaggccagggugc

SEQ ID NO: 225553 - RNA, 22 nt, Human
uguguccuacugaggagcuccu

SEQ ID NO: 225554 - RNA, 22 nt, Human
ugaaggagggaagaaggcucug

SEQ ID NO: 225555 - RNA, 22 nt, Human
cccaggcacacugaagugacau

SEQ ID NO: 225556 - RNA, 22 nt, Human
ggcuugggagcaggcaugugac

SEQ ID NO: 225557 - RNA, 21 nt, Human
uggccaaacuggagcauuuga

SEQ ID NO: 225558 - RNA, 22 nt, Human
gagacacacccaagguuaugag

SEQ ID NO: 225559 - RNA, 22 nt, Human
gccuggcuucccuuggagcauu

SEQ ID NO: 225560 - RNA, 19 nt, Human
ucagaggauuuggcuauga

SEQ ID NO: 225561 - RNA, 22 nt, Human
agcccuggcccggcugugcuuu

SEQ ID NO: 225562 - RNA, 22 nt, Human
cugcccuggaaaacguaucuua

SEQ ID NO: 225563 - RNA, 22 nt, Human
agacccuggggaaagucacuuc

SEQ ID NO: 225564 - RNA, 22 nt, Human
uagccagugaauguuuccagug

SEQ ID NO: 225565 - RNA, 22 nt, Human
acaaggcuuauaguugcuuuuu

SEQ ID NO: 225566 - RNA, 22 nt, Human
agggacuugaugucagggagau

SEQ ID NO: 225567 - RNA, 22 nt, Human
cccaggaguaagugacauuguu

SEQ ID NO: 225568 - RNA, 22 nt, Human
gaccauuagcugcuauucagua

SEQ ID NO: 225569 - RNA, 22 nt, Human
cagcuuuggcccagucgggagg

SEQ ID NO: 225570 - RNA, 22 nt, Human
cuucaucuuucugagccucagu

SEQ ID NO: 225571 - RNA, 22 nt, Human
ugcagggaugcuagagguaaga

SEQ ID NO: 225572 - RNA, 22 nt, Human
aauaagacucugcuagaaauuc

SEQ ID NO: 225573 - RNA, 22 nt, Human
agcagguggucuguugcugcug

SEQ ID NO: 225574 - RNA, 22 nt, Human
aaagaucacgucccaggacucg

SEQ ID NO: 225575 - RNA, 22 nt, Human
agcaacagcccugagguucaug

SEQ ID NO: 225576 - RNA, 22 nt, Human
cauagacauucagcacucacua

SEQ ID NO: 225577 - RNA, 22 nt, Human
cccagccuacucugccauagca

SEQ ID NO: 225578 - RNA, 22 nt, Human
gcccucagaugggaaaggaggg

SEQ ID NO: 225579 - RNA, 22 nt, Human
caugaacauugcagggauguga

SEQ ID NO: 225580 - RNA, 22 nt, Human
guuuuucugugagcgguaaagg

SEQ ID NO: 225581 - RNA, 22 nt, Human
gggcagguguuuccaaggugag

SEQ ID NO: 225582 - RNA, 22 nt, Human
ggaugagguagaugaacaaggg

SEQ ID NO: 225583 - RNA, 22 nt, Human
ugcacaagucagaguaacauuu

SEQ ID NO: 225584 - RNA, 22 nt, Human
ucuggggagggagccacagguc

SEQ ID NO: 225585 - RNA, 22 nt, Human
gagugaugucuguagugaagaa

SEQ ID NO: 225586 - RNA, 22 nt, Human
accugcagcugagaaaaugacu

SEQ ID NO: 225587 - RNA, 22 nt, Human
agcagggcuguguagguaauga

SEQ ID NO: 225588 - RNA, 22 nt, Human
ccugggcuguaccugugcgcgg

SEQ ID NO: 225589 - RNA, 22 nt, Human
gucugggauugggguaaagaag

SEQ ID NO: 225590 - RNA, 22 nt, Human
ugaggugguucaagagccuugu

SEQ ID NO: 225591 - RNA, 22 nt, Human
gcaucuaaacuugcaucauugu

SEQ ID NO: 225592 - RNA, 22 nt, Human
acauucaaguuucugcucaugg

SEQ ID NO: 225593 - RNA, 22 nt, Human
gcucccaggcauggagguaauu

SEQ ID NO: 225594 - RNA, 22 nt, Human
ccugggucuucagucugcuggu

SEQ ID NO: 225595 - RNA, 22 nt, Human
ugagcagacuugaugaggcagc

SEQ ID NO: 225596 - RNA, 22 nt, Human
aaacugaguaccucugcauuca

SEQ ID NO: 225597 - RNA, 21 nt, Human
ugauuucugccaaguucacua

SEQ ID NO: 225598 - RNA, 22 nt, Human
ucagagaggauuuuaauaagug

SEQ ID NO: 225599 - RNA, 22 nt, Human
agucuuagagucugugucauga

SEQ ID NO: 225600 - RNA, 22 nt, Human
guagacaucuagauuuaugugu

SEQ ID NO: 225601 - RNA, 22 nt, Human
uccuuagagugguugugcuaug

SEQ ID NO: 225602 - RNA, 22 nt, Human
gucaguuacagccacggcgggu

SEQ ID NO: 225603 - RNA, 22 nt, Human
gagagaagaacaaugucauuca

SEQ ID NO: 225604 - RNA, 22 nt, Human
agcuggguguucuugggccuaa

SEQ ID NO: 225605 - RNA, 20 nt, Human
agucacaggccuggaacaug

SEQ ID NO: 225606 - RNA, 22 nt, Human
caggaauguuugugcuccuuua

SEQ ID NO: 225607 - RNA, 22 nt, Human
uaaggcuuuuguucagcguggg

SEQ ID NO: 225608 - RNA, 22 nt, Human
ccaagggaaaccgagaggcugg

SEQ ID NO: 225609 - RNA, 22 nt, Human
agaaauguauucuguauguuuu

SEQ ID NO: 225610 - RNA, 22 nt, Human
gagucuuuguauuuacuuccca

SEQ ID NO: 225611 - RNA, 22 nt, Human
acuaaaugagauacugucuuca

SEQ ID NO: 225612 - RNA, 22 nt, Human
aguuucagaauuuaugcagaca

SEQ ID NO: 225613 - RNA, 22 nt, Human
gucuggagccugggucccugcu

SEQ ID NO: 225614 - RNA, 22 nt, Human
uuccaggcaugucagacauagg

SEQ ID NO: 225615 - RNA, 22 nt, Human
ccagccagccuugaucugagua

SEQ ID NO: 225616 - RNA, 22 nt, Human
gagucuaaguagaaugugaaaa

SEQ ID NO: 225617 - RNA, 22 nt, Human
accagggccgcgggcgacuagc

SEQ ID NO: 225618 - RNA, 23 nt, Human
guuaauaaugaacacuuucuccc

SEQ ID NO: 225619 - RNA, 22 nt, Human
uccauacauacagauaugcauu

SEQ ID NO: 225620 - RNA, 22 nt, Human
uacuuaaaacugauagaaucuc

SEQ ID NO: 225621 - RNA, 22 nt, Human
aagugucuagcaccuggaugca

SEQ ID NO: 225622 - RNA, 22 nt, Human
ugggccaccugcucuguuucua

SEQ ID NO: 225623 - RNA, 22 nt, Human
ugcagugccucggcagugcagc

SEQ ID NO: 225624 - RNA, 22 nt, Human
agugcauugcaucucugcuuca

SEQ ID NO: 225625 - RNA, 22 nt, Human
gaagccaguguuugaagaauuu

SEQ ID NO: 225626 - RNA, 22 nt, Human
gaacacaacucagaaugcuggu

SEQ ID NO: 225627 - RNA, 22 nt, Human
caaggaggaagaugcaggggac

SEQ ID NO: 225628 - RNA, 22 nt, Human
ugguucagauauggagcuggga

SEQ ID NO: 225629 - RNA, 22 nt, Human
acagcuggugaauguucucugu

SEQ ID NO: 225630 - RNA, 22 nt, Human
gggcuucuugcaggggcaacau

SEQ ID NO: 225631 - RNA, 22 nt, Human
uucuaacucuguuauguguuuc

SEQ ID NO: 225632 - RNA, 22 nt, Human
uauauaugggggaagcuggaug

SEQ ID NO: 225633 - RNA, 22 nt, Human
aggaggaaagaaggcccccagc

SEQ ID NO: 225634 - RNA, 22 nt, Human
caggaugggauguagugggccc

SEQ ID NO: 225635 - RNA, 22 nt, Human
uuccaguucuggcuuugccacu

SEQ ID NO: 225636 - RNA, 22 nt, Human
augacauaagugaaaaacauca

SEQ ID NO: 225637 - RNA, 22 nt, Human
uacuuuuagccuauuugauucu

SEQ ID NO: 225638 - RNA, 22 nt, Human
gccuucccacccugcgaggcug

SEQ ID NO: 225639 - RNA, 22 nt, Human
ccacucugauuuuggcuccacu

SEQ ID NO: 225640 - RNA, 22 nt, Human
auauuguugacuauaagaguaa

SEQ ID NO: 225641 - RNA, 22 nt, Human
cacaucuauggagacagagagu

SEQ ID NO: 225642 - RNA, 20 nt, Human
ggccacagggugcuggugga

SEQ ID NO: 225643 - RNA, 22 nt, Human
cacugcaggucugagauggggg

SEQ ID NO: 225644 - RNA, 22 nt, Human
ugucuuuuuacuauguucaauc

SEQ ID NO: 225645 - RNA, 22 nt, Human
auacuacacauugacuauauuu

SEQ ID NO: 225646 - RNA, 22 nt, Human
aaacaggcuugcaacauguuuu

SEQ ID NO: 225647 - RNA, 22 nt, Human
agucuuugguuauaagagacag

SEQ ID NO: 225648 - RNA, 22 nt, Human
agaugcugauugaauagauuuc

SEQ ID NO: 225649 - RNA, 22 nt, Human
uauauccauaggcugugccuag

SEQ ID NO: 225650 - RNA, 22 nt, Human
cgccggcuugaggcaggcggca

SEQ ID NO: 225651 - RNA, 22 nt, Human
ccagggugcucuguggcgucgc

SEQ ID NO: 225652 - RNA, 22 nt, Human
agaauuacagcuuuuagaauag

SEQ ID NO: 225653 - RNA, 22 nt, Human
caggccagggagaauaugaagc

SEQ ID NO: 225654 - RNA, 22 nt, Human
cauuccuuaacguggggagucu

SEQ ID NO: 225655 - RNA, 22 nt, Human
uuagaggacuguaggugggaau

SEQ ID NO: 225656 - RNA, 22 nt, Human
cuuggcagagggcugggcucag

SEQ ID NO: 225657 - RNA, 22 nt, Human
ugggccagggcacccaguccag

SEQ ID NO: 225658 - RNA, 22 nt, Human
ucuagaaaguuuguacugauuu

SEQ ID NO: 225659 - RNA, 22 nt, Human
guuagggaagcgcuguguucuu

SEQ ID NO: 225660 - RNA, 22 nt, Human
uggcugaggagagggcggaagu

SEQ ID NO: 225661 - RNA, 22 nt, Human
ggagggaagugaguucucagcu

SEQ ID NO: 225662 - RNA, 22 nt, Human
cagugucaggaucaguauauuu

SEQ ID NO: 225663 - RNA, 22 nt, Human
uuucuuuguuguuaucacauca

SEQ ID NO: 225664 - RNA, 22 nt, Human
gggcuucuggucauuccucauc

SEQ ID NO: 225665 - RNA, 22 nt, Human
cauagaauguaauaaagaguag

SEQ ID NO: 225666 - RNA, 22 nt, Human
aaauucaauuaacuuucaugcu

SEQ ID NO: 225667 - RNA, 22 nt, Human
cauagaaugcagcaggaaaguu

SEQ ID NO: 225668 - RNA, 22 nt, Human
ugcucuggcugggaugagugca

SEQ ID NO: 225669 - RNA, 22 nt, Human
ucaagaauuuggauaagaaaug

SEQ ID NO: 225670 - RNA, 22 nt, Human
uugguaaauacucuuuggagac

SEQ ID NO: 225671 - RNA, 22 nt, Human
gcuuuagagaagaaagguugcu

SEQ ID NO: 225672 - RNA, 22 nt, Human
ucaccaggcaacuauguacucc

SEQ ID NO: 225673 - RNA, 22 nt, Human
agcagggcugugcuccuuccga

SEQ ID NO: 225674 - RNA, 22 nt, Human
aaacacuguacaaucugcaggg

SEQ ID NO: 225675 - RNA, 19 nt, Human
ucuggcagguaauuaggga

SEQ ID NO: 225676 - RNA, 22 nt, Human
gugcaauauugccauguucuug

SEQ ID NO: 225677 - RNA, 22 nt, Human
guugugcaaccaucaccaccau

SEQ ID NO: 225678 - RNA, 22 nt, Human
uaccuagaccaguuacaaugca

SEQ ID NO: 225679 - RNA, 22 nt, Human
aaccagcuuugauacgcauuau

SEQ ID NO: 225680 - RNA, 22 nt, Human
caggcggccaugaucuggcagg

SEQ ID NO: 225681 - RNA, 22 nt, Human
cagcuccagccgacuguaagaa

SEQ ID NO: 225682 - RNA, 22 nt, Human
uaucuauuauguucuauguguc

SEQ ID NO: 225683 - RNA, 22 nt, Human
uugcugauucuguauuuaaggu

SEQ ID NO: 225684 - RNA, 22 nt, Human
ccacagaagauggggagagugg

SEQ ID NO: 225685 - RNA, 21 nt, Human
ugcagagauaucugaagcaga

SEQ ID NO: 225686 - RNA, 22 nt, Human
aagcacaucuccugugcagaac

SEQ ID NO: 225687 - RNA, 22 nt, Human
cuugucuugcacacgguugcca

SEQ ID NO: 225688 - RNA, 23 nt, Human
gcacaagaccuggcagcuuccau

SEQ ID NO: 225689 - RNA, 22 nt, Human
aggcaggugggucacuugaguc

SEQ ID NO: 225690 - RNA, 22 nt, Human
aaaguaguccuuggagcgaaau

SEQ ID NO: 225691 - RNA, 22 nt, Human
auuggucuggggaaaugaagag

SEQ ID NO: 225692 - RNA, 21 nt, Human
uagggcucucugugucaggug

SEQ ID NO: 225693 - RNA, 22 nt, Human
aagaaauggcuucaucugagua

SEQ ID NO: 225694 - RNA, 22 nt, Human
ggaggcacuucaugcugacccg

SEQ ID NO: 225695 - RNA, 22 nt, Human
acugaugaagaguaccacuguu

SEQ ID NO: 225696 - RNA, 22 nt, Human
auucauuugcuauuguguaugg

SEQ ID NO: 225697 - RNA, 22 nt, Human
aagcaauaggguaaucuacuca

SEQ ID NO: 225698 - RNA, 22 nt, Human
uccuguagcugucacugggggc

SEQ ID NO: 225699 - RNA, 22 nt, Human
cacagcuagauggauagauaga

SEQ ID NO: 225700 - RNA, 22 nt, Human
acagaaauucugggacagaaaa

SEQ ID NO: 225701 - RNA, 22 nt, Human
gagccuccuccuggugugccga

SEQ ID NO: 225702 - RNA, 22 nt, Human
ucuccugugcacccucccugug

SEQ ID NO: 225703 - RNA, 22 nt, Human
agcuacagcuguacucugcagg

SEQ ID NO: 225704 - RNA, 22 nt, Human
ccaggccuggaccaugccaggg

SEQ ID NO: 225705 - RNA, 22 nt, Human
aaggguccagcaccucggcucc

SEQ ID NO: 225706 - RNA, 22 nt, Human
uaaaugaagcucaugggccaca

SEQ ID NO: 225707 - RNA, 22 nt, Human
aggugcagcugguggagucugg

SEQ ID NO: 225708 - RNA, 22 nt, Human
acagugcagugugaugaguauu

SEQ ID NO: 225709 - RNA, 22 nt, Human
uagugaaaugauaacagagcag

SEQ ID NO: 225710 - RNA, 22 nt, Human
cucuggaaaauugugugggggu

SEQ ID NO: 225711 - RNA, 22 nt, Human
agaacucugaacacugucugga

SEQ ID NO: 225712 - RNA, 20 nt, Human
cagagauuuuacuuccucac

SEQ ID NO: 225713 - RNA, 22 nt, Human
acaugcaauauugagacuuucu

SEQ ID NO: 225714 - RNA, 21 nt, Human
uucauugaacuauuuguggag

SEQ ID NO: 225715 - RNA, 22 nt, Human
gacuaggcucucauagagguag

SEQ ID NO: 225716 - RNA, 22 nt, Human
agcccagcuccuccacagaaua

SEQ ID NO: 225717 - RNA, 22 nt, Human
gccaaaguccacuugcuuucug

SEQ ID NO: 225718 - RNA, 22 nt, Human
gcaggucuugaaggugugauuu

SEQ ID NO: 225719 - RNA, 22 nt, Human
uuccaggauagcuuucaggaau

SEQ ID NO: 225720 - RNA, 22 nt, Human
gagcaguugggcucuaggaagu

SEQ ID NO: 225721 - RNA, 22 nt, Human
aacagaacccgagugugaaucu

SEQ ID NO: 225722 - RNA, 22 nt, Human
gggguggccuguaggcagcaug

SEQ ID NO: 225723 - RNA, 22 nt, Human
ugcuugucccucuuuaugaugg

SEQ ID NO: 225724 - RNA, 23 nt, Human
cauuagaagguagaguggaauga

SEQ ID NO: 225725 - RNA, 22 nt, Human
aauuucagaccauuugcaauua

SEQ ID NO: 225726 - RNA, 22 nt, Human
cagcccugggaguuggggccga

SEQ ID NO: 225727 - RNA, 22 nt, Human
uagggcuuagaaaagaauuuac

SEQ ID NO: 225728 - RNA, 22 nt, Human
gcugaaggucucuggagagguc

SEQ ID NO: 225729 - RNA, 22 nt, Human
gggcuucuaagugaaaguguaa

SEQ ID NO: 225730 - RNA, 22 nt, Human
cguguaaccccugaacucgcau

SEQ ID NO: 225731 - RNA, 17 nt, Human
uucaaagcuuaucaagg

SEQ ID NO: 225732 - RNA, 16 nt, Human
uuauugaggccaagga

SEQ ID NO: 225733 - RNA, 22 nt, Human
agagccaggugcugcuguuuga

SEQ ID NO: 225734 - RNA, 22 nt, Human
ugggggaagagcuuguuaaagu

SEQ ID NO: 225735 - RNA, 22 nt, Human
ucagaauaugcuaaugacauuu

SEQ ID NO: 225736 - RNA, 22 nt, Human
gcugcugugccuggcguccugu

SEQ ID NO: 225737 - RNA, 22 nt, Human
ugcaggguagacaggugagguc

SEQ ID NO: 225738 - RNA, 22 nt, Human
auagcuguagaauguauacaca

SEQ ID NO: 225739 - RNA, 22 nt, Human
uucucugggaacauaaaugaag

SEQ ID NO: 225740 - RNA, 22 nt, Human
cacagggcagagaccugggugc

SEQ ID NO: 225741 - RNA, 22 nt, Human
aaaugcacagguuuuaaauccu

SEQ ID NO: 225742 - RNA, 22 nt, Human
uuauuuagucuagaugaauuuu

SEQ ID NO: 225743 - RNA, 22 nt, Human
aacuccuaugacccacugaacu

SEQ ID NO: 225744 - RNA, 18 nt, Human
uuggaggauguccaugaa

SEQ ID NO: 225745 - RNA, 22 nt, Human
guaauuaggaauaaaaugggaa

SEQ ID NO: 225746 - RNA, 22 nt, Human
ugggccagaggcauggagcuau

SEQ ID NO: 225747 - RNA, 22 nt, Human
aaggugucggguuagcucagcc

SEQ ID NO: 225748 - RNA, 22 nt, Human
cuggguuuagggucuccccuug

SEQ ID NO: 225749 - RNA, 22 nt, Human
ugcucagccgugagcagagccg

SEQ ID NO: 225750 - RNA, 22 nt, Human
auugucuuaaacaaauguguuu

SEQ ID NO: 225751 - RNA, 22 nt, Human
uccagggcaggugcugggcucu

SEQ ID NO: 225752 - RNA, 22 nt, Human
ucugccuguugcuagaauguca

SEQ ID NO: 225753 - RNA, 20 nt, Human
ccucaaauaagugccagcau

SEQ ID NO: 225754 - RNA, 22 nt, Human
aggaauguuuacacgacagaaa

SEQ ID NO: 225755 - RNA, 22 nt, Human
ucucagugcuauccauauucca

SEQ ID NO: 225756 - RNA, 22 nt, Human
uucaacaagucuuuuuucacug

SEQ ID NO: 225757 - RNA, 22 nt, Human
gaggacaccucacagccucaca

SEQ ID NO: 225758 - RNA, 22 nt, Human
gcuaggaggaagaaugugaauu

SEQ ID NO: 225759 - RNA, 22 nt, Human
guccugugccgaggugggaagc

SEQ ID NO: 225760 - RNA, 22 nt, Human
uagaacaugggauagaguuuuu

SEQ ID NO: 225761 - RNA, 22 nt, Human
ggaagccacccagcuuugauag

SEQ ID NO: 225762 - RNA, 22 nt, Human
guuaauacaaccaugaucuucu

SEQ ID NO: 225763 - RNA, 22 nt, Human
ccuuagaggcaggaagaauugc

SEQ ID NO: 225764 - RNA, 22 nt, Human
ugucuuuucuacuguaagcaua

SEQ ID NO: 225765 - RNA, 22 nt, Human
acauuuuuuagagucccacauu

SEQ ID NO: 225766 - RNA, 22 nt, Human
ucuuuggcauuuaggagcagga

SEQ ID NO: 225767 - RNA, 22 nt, Human
ucuggcucccagccugcucuca

SEQ ID NO: 225768 - RNA, 22 nt, Human
uaucuguagucagaauaauuuu

SEQ ID NO: 225769 - RNA, 22 nt, Human
uuacagagaggugauugugaag

SEQ ID NO: 225770 - RNA, 22 nt, Human
gcagcugccccgacugugaguc

SEQ ID NO: 225771 - RNA, 22 nt, Human
aaaguacuuugggcuauguuug

SEQ ID NO: 225772 - RNA, 17 nt, Human
ugcuccuguggcagccu

SEQ ID NO: 225773 - RNA, 22 nt, Human
aaaguuuucugccuucauuaga

SEQ ID NO: 225774 - RNA, 22 nt, Human
uuuccauauucugcgucugcca

SEQ ID NO: 225775 - RNA, 22 nt, Human
gacuuccuaagauucaggaaug

SEQ ID NO: 225776 - RNA, 22 nt, Human
acacagaguuugacacauggga

SEQ ID NO: 225777 - RNA, 22 nt, Human
cagcagaaguccgacuccaguc

SEQ ID NO: 225778 - RNA, 22 nt, Human
uuaauacauuucagacuguuau

SEQ ID NO: 225779 - RNA, 22 nt, Human
ucuauuuaccaaauguaguucc

SEQ ID NO: 225780 - RNA, 21 nt, Human
ugcaauauauauuugccugaa

SEQ ID NO: 225781 - RNA, 22 nt, Human
cccaggcagugugugcaugcgu

SEQ ID NO: 225782 - RNA, 22 nt, Human
gggcagggguagcauuccaagu

SEQ ID NO: 225783 - RNA, 22 nt, Human
agccagagaguguuggagaugu

SEQ ID NO: 225784 - RNA, 22 nt, Human
ucuggcagaucuucccacguuu

SEQ ID NO: 225785 - RNA, 22 nt, Human
ucugugcaauaguuuguuuuac

SEQ ID NO: 225786 - RNA, 22 nt, Human
gccagcagguggagagaucaag

SEQ ID NO: 225787 - RNA, 22 nt, Human
caggcugauuaggccucgucca

SEQ ID NO: 225788 - RNA, 22 nt, Human
aaaccugauagauuuucagaau

SEQ ID NO: 225789 - RNA, 22 nt, Human
ggagacaguauggcuuguagcu

SEQ ID NO: 225790 - RNA, 22 nt, Human
ucuagaaacaugacauugaucu

SEQ ID NO: 225791 - RNA, 22 nt, Human
gccagggaaacugcagaccagc

SEQ ID NO: 225792 - RNA, 22 nt, Human
aggccucugagcagcacucaug

SEQ ID NO: 225793 - RNA, 23 nt, Human
uuguuuaccguaggacuuuuaac

SEQ ID NO: 225794 - RNA, 22 nt, Human
cagcaugguggagcugcucuuu

SEQ ID NO: 225795 - RNA, 22 nt, Human
gucuucuggggccaggcccgcu

SEQ ID NO: 225796 - RNA, 22 nt, Human
cucacuguuuaauagcuggauc

SEQ ID NO: 225797 - RNA, 20 nt, Human
caaauucuguugaauacacc

SEQ ID NO: 225798 - RNA, 22 nt, Human
aaaaauacuucacuucugggug

SEQ ID NO: 225799 - RNA, 22 nt, Human
cuuguuuaauaauaccuuagca

SEQ ID NO: 225800 - RNA, 22 nt, Human
ucuuuuaaaagcccugcugucu

SEQ ID NO: 225801 - RNA, 22 nt, Human
accaggagccauagagucaggc

SEQ ID NO: 225802 - RNA, 22 nt, Human
ucuuaaaaguaugccaauugga

SEQ ID NO: 225803 - RNA, 22 nt, Human
uaggaaauauuugaacauagga

SEQ ID NO: 225804 - RNA, 20 nt, Human
auguuaaauagcauuuagag

SEQ ID NO: 225805 - RNA, 22 nt, Human
agcccugcauaaaucaguuggu

SEQ ID NO: 225806 - RNA, 22 nt, Human
cacauuuaagugcuuguucaga

SEQ ID NO: 225807 - RNA, 20 nt, Human
uugcaaauaucuauugauug

SEQ ID NO: 225808 - RNA, 22 nt, Human
agccacagucugaugccugaga

SEQ ID NO: 225809 - RNA, 22 nt, Human
uacaaaggagauaaauuggagg

SEQ ID NO: 225810 - RNA, 22 nt, Human
ccagccagggaaacuuuuucuu

SEQ ID NO: 225811 - RNA, 22 nt, Human
ccaggcuagagugcaguggcau

SEQ ID NO: 225812 - RNA, 20 nt, Human
ccuuuauuauuuguaugaug

SEQ ID NO: 225813 - RNA, 22 nt, Human
uccagcuuuuaccaaaugagca

SEQ ID NO: 225814 - RNA, 22 nt, Human
cuagagaaaaagcuuagguacg

SEQ ID NO: 225815 - RNA, 22 nt, Human
gaguuacacagaagucaguuug

SEQ ID NO: 225816 - RNA, 22 nt, Human
ucaggcuuuuccugccuccuac

SEQ ID NO: 225817 - RNA, 22 nt, Human
uuggcugccuucaccccuggcc

SEQ ID NO: 225818 - RNA, 22 nt, Human
ccugggcauaaaucacuccaag

SEQ ID NO: 225819 - RNA, 22 nt, Human
ucucagagagaugaaacuucca

SEQ ID NO: 225820 - RNA, 21 nt, Human
aagcuacagaaaauaauuuga

SEQ ID NO: 225821 - RNA, 23 nt, Human
ucaggcagcugggguaguuggag

SEQ ID NO: 225822 - RNA, 20 nt, Human
gcagccguggagacuaggag

SEQ ID NO: 225823 - RNA, 22 nt, Human
ccuggcugaacaaagucccucc

SEQ ID NO: 225824 - RNA, 22 nt, Human
agcucagggcgaucugucucgg

SEQ ID NO: 225825 - RNA, 22 nt, Human
agucuggucaucugauucuuuu

SEQ ID NO: 225826 - RNA, 22 nt, Human
gcagcagggugccagcuuugca

SEQ ID NO: 225827 - RNA, 22 nt, Human
acaggcagugggccagauuugu

SEQ ID NO: 225828 - RNA, 22 nt, Human
uccucccacauaggacaauggg

SEQ ID NO: 225829 - RNA, 22 nt, Human
gcugcccaggcaacauugacuu

SEQ ID NO: 225830 - RNA, 19 nt, Human
ugcugaggaugcaagaucc

SEQ ID NO: 225831 - RNA, 22 nt, Human
uuggguuuucccuugaaacuga

SEQ ID NO: 225832 - RNA, 22 nt, Human
uugagucugugcccuaugcugu

SEQ ID NO: 225833 - RNA, 22 nt, Human
caucuuuguuucaucuguccag

SEQ ID NO: 225834 - RNA, 22 nt, Human
cuggcuucccugucuuauggaa

SEQ ID NO: 225835 - RNA, 22 nt, Human
ugauaacucucaguuucucaug

SEQ ID NO: 225836 - RNA, 22 nt, Human
gcagcagcggggccccugcgcg

SEQ ID NO: 225837 - RNA, 22 nt, Human
gaugccuguggugagcacacau

SEQ ID NO: 225838 - RNA, 22 nt, Human
uaguaaacccaugaggcuuaaa

SEQ ID NO: 225839 - RNA, 22 nt, Human
caggacaguuggcaucugcugc

SEQ ID NO: 225840 - RNA, 22 nt, Human
uuacaaagugcugcaccauuuu

SEQ ID NO: 225841 - RNA, 22 nt, Human
agugauugcuugcuuaaggaca

SEQ ID NO: 225842 - RNA, 22 nt, Human
aagagcuggauggaaucuggga

SEQ ID NO: 225843 - RNA, 22 nt, Human
ggccagcucaggguccuugggc

SEQ ID NO: 225844 - RNA, 22 nt, Human
auucugggaguguaggaugguu

SEQ ID NO: 225845 - RNA, 22 nt, Human
gcucagggaaagagcuccuguc

SEQ ID NO: 225846 - RNA, 22 nt, Human
ucuguucaagacugaggugaca

SEQ ID NO: 225847 - RNA, 22 nt, Human
agugcuccacauugcacuauuc

SEQ ID NO: 225848 - RNA, 22 nt, Human
ugugggaaucagccaggggggc

SEQ ID NO: 225849 - RNA, 22 nt, Human
cuacaucucaccuuccaggaca

SEQ ID NO: 225850 - RNA, 22 nt, Human
aagaagcauggcuguagauucc

SEQ ID NO: 225851 - RNA, 20 nt, Human
cagcagccaaacuucuauuc

SEQ ID NO: 225852 - RNA, 22 nt, Human
aagggaaaauaguugaugacca

SEQ ID NO: 225853 - RNA, 22 nt, Human
cucuaggccauccagggccauu

SEQ ID NO: 225854 - RNA, 22 nt, Human
cagaaagugauuugcuauucca

SEQ ID NO: 225855 - RNA, 23 nt, Human
guccagaacccaggcuggggugg

SEQ ID NO: 225856 - RNA, 22 nt, Human
ugguaaaaacugcaauuacuuu

SEQ ID NO: 225857 - RNA, 22 nt, Human
gcccgugugcagagugggagcu

SEQ ID NO: 225858 - RNA, 22 nt, Human
gcagcagaugcuuucauggaca

SEQ ID NO: 225859 - RNA, 22 nt, Human
uuucacagcuuccacuuaagga

SEQ ID NO: 225860 - RNA, 22 nt, Human
gccccaggggaggugcccugca

SEQ ID NO: 225861 - RNA, 22 nt, Human
cugcuggggucagagcacuggg

SEQ ID NO: 225862 - RNA, 22 nt, Human
gauggcuuguuuucuggcugaa

SEQ ID NO: 225863 - RNA, 22 nt, Human
gcuuucugaugagcuuaagaaa

SEQ ID NO: 225864 - RNA, 22 nt, Human
uuugcuuaaaguucuuucuggu

SEQ ID NO: 225865 - RNA, 22 nt, Human
agucugguguucucacacuagu

SEQ ID NO: 225866 - RNA, 22 nt, Human
agggagcucugggggcacacgg

SEQ ID NO: 225867 - RNA, 22 nt, Human
acauguaaaaauuaagguaaga

SEQ ID NO: 225868 - RNA, 23 nt, Human
agugccagggagaucaggacgga

SEQ ID NO: 225869 - RNA, 22 nt, Human
cacaggugucucuaguagcguu

SEQ ID NO: 225870 - RNA, 22 nt, Human
ggagaccagaaggaagcuucga

SEQ ID NO: 225871 - RNA, 22 nt, Human
cuggguggagccuggucaucug

SEQ ID NO: 225872 - RNA, 22 nt, Human
ggagaaaggauaggaaugugcu

SEQ ID NO: 225873 - RNA, 22 nt, Human
cuggcaguauuaagagaaguga

SEQ ID NO: 225874 - RNA, 23 nt, Human
ugagaagccgccgggcagccugg

SEQ ID NO: 225875 - RNA, 22 nt, Human
aaugacaugcuuuuuaauuaua

SEQ ID NO: 225876 - RNA, 22 nt, Human
ugcauuccauguguuuccugag

SEQ ID NO: 225877 - RNA, 22 nt, Human
uccccagacagcgggaggccug

SEQ ID NO: 225878 - RNA, 22 nt, Human
cucaaggacuuauucaugccug

SEQ ID NO: 225879 - RNA, 22 nt, Human
uucuagaauccuugucuacuuu

SEQ ID NO: 225880 - RNA, 22 nt, Human
uccagccauucauuaugacacc

SEQ ID NO: 225881 - RNA, 22 nt, Human
aggaagaaaccuacuagaguuu

SEQ ID NO: 225882 - RNA, 22 nt, Human
agaggggguguuccagaagcau

SEQ ID NO: 225883 - RNA, 22 nt, Human
aggaagagcuggaccagaggac

SEQ ID NO: 225884 - RNA, 22 nt, Human
cuauuucagcagaagccggaga

SEQ ID NO: 225885 - RNA, 22 nt, Human
gacaugugcugucucuuaaauu

SEQ ID NO: 225886 - RNA, 22 nt, Human
uggaguucauccaugacagcuu

SEQ ID NO: 225887 - RNA, 23 nt, Human
acaucaugauagccaacuuggga

SEQ ID NO: 225888 - RNA, 22 nt, Human
auagacauagccguaauuuauu

SEQ ID NO: 225889 - RNA, 22 nt, Human
ugaucaaagugcuggaauuaca

SEQ ID NO: 225890 - RNA, 22 nt, Human
ugccuggguguaaagggccaac

SEQ ID NO: 225891 - RNA, 22 nt, Human
ucuucuguuaccacagcgauga

SEQ ID NO: 225892 - RNA, 22 nt, Human
uucugucacagugcugguauca

SEQ ID NO: 225893 - RNA, 22 nt, Human
guucuucaucauuuuagauagg

SEQ ID NO: 225894 - RNA, 22 nt, Human
ugaaaucauugggguugaauaa

SEQ ID NO: 225895 - RNA, 22 nt, Human
ugguccagugacagauaggcac

SEQ ID NO: 225896 - RNA, 22 nt, Human
aagcaucuuagaccugaguucc

SEQ ID NO: 225897 - RNA, 22 nt, Human
auuuuaauaagauccauuuggu

SEQ ID NO: 225898 - RNA, 22 nt, Human
acaguggcaucuacuuaaucug

SEQ ID NO: 225899 - RNA, 22 nt, Human
gcucuguguuuugcccaggaga

SEQ ID NO: 225900 - RNA, 22 nt, Human
uauugguaugguaagaauugaa

SEQ ID NO: 225901 - RNA, 22 nt, Human
ggcagcaucacuugucuccagc

SEQ ID NO: 225902 - RNA, 22 nt, Human
uuugggaauaauugcacagauu

SEQ ID NO: 225903 - RNA, 22 nt, Human
ucugaaaugaccuuuccccacu

SEQ ID NO: 225904 - RNA, 22 nt, Human
cugcagggcuguggucuggagu

SEQ ID NO: 225905 - RNA, 22 nt, Human
uccuuucuccagcuggcauugu

SEQ ID NO: 225906 - RNA, 22 nt, Human
gacuuucuuuuaccucaaggau

SEQ ID NO: 225907 - RNA, 21 nt, Human
agaaaaaccagcauguuuuca

SEQ ID NO: 225908 - RNA, 22 nt, Human
agaauccugaugaaaaggagag

SEQ ID NO: 225909 - RNA, 22 nt, Human
caagcagguuugcuauuuucuu

SEQ ID NO: 225910 - RNA, 22 nt, Human
ugcaaauaggggacaacucuuu

SEQ ID NO: 225911 - RNA, 22 nt, Human
uagugugguaaauaaauguuuu

SEQ ID NO: 225912 - RNA, 22 nt, Human
aauguauucucuuuauaagaua

SEQ ID NO: 225913 - RNA, 22 nt, Human
aggccaggggugagcacuucug

SEQ ID NO: 225914 - RNA, 22 nt, Human
aaaauuaagugucugggaagcc

SEQ ID NO: 225915 - RNA, 22 nt, Human
ucaugucaguuucuucuauaaa

SEQ ID NO: 225916 - RNA, 21 nt, Human
cagagcugaaggguguagugu

SEQ ID NO: 225917 - RNA, 22 nt, Human
aggcuccuggguguggccgcca

SEQ ID NO: 225918 - RNA, 22 nt, Human
ggcucugcgccugcggggacuu

SEQ ID NO: 225919 - RNA, 17 nt, Human
cacaugucuacauggau

SEQ ID NO: 225920 - RNA, 22 nt, Human
uaacuguagcuaaccgaugaga

SEQ ID NO: 225921 - RNA, 19 nt, Human
aggcagcacccaguccuug

SEQ ID NO: 225922 - RNA, 22 nt, Human
cagaggcacaagaaagcaaggc

SEQ ID NO: 225923 - RNA, 20 nt, Human
cauuugaaucuccauucugc

SEQ ID NO: 225924 - RNA, 22 nt, Human
uuagaaucagguguuauaauca

SEQ ID NO: 225925 - RNA, 22 nt, Human
gagcuggggcagcuuaggagug

SEQ ID NO: 225926 - RNA, 22 nt, Human
aauaaauguuuguuggauguuu

SEQ ID NO: 225927 - RNA, 22 nt, Human
gugaauuaggacaaaagggcuu

SEQ ID NO: 225928 - RNA, 22 nt, Human
uuuuagaaggaaugcuauggug

SEQ ID NO: 225929 - RNA, 23 nt, Human
ucuguacaauugagaagagaaca

SEQ ID NO: 225930 - RNA, 20 nt, Human
cuggcccaucuaccgcucug

SEQ ID NO: 225931 - RNA, 22 nt, Human
ucagacagggcuucucaaacuu

SEQ ID NO: 225932 - RNA, 22 nt, Human
cauuuguuaaugcugcuuuuaa

SEQ ID NO: 225933 - RNA, 22 nt, Human
uccugugaagaauagcacucaa

SEQ ID NO: 225934 - RNA, 22 nt, Human
uccugggcugugugccacucug

SEQ ID NO: 225935 - RNA, 22 nt, Human
gcuggagaaacugcagcugagg

SEQ ID NO: 225936 - RNA, 18 nt, Human
cagucccaaaccuuagga

SEQ ID NO: 225937 - RNA, 22 nt, Human
gcugugugacugagagccuggc

SEQ ID NO: 225938 - RNA, 22 nt, Human
aagcacagugccaaguucuauu

SEQ ID NO: 225939 - RNA, 18 nt, Human
ugauucaaguugcccucc

SEQ ID NO: 225940 - RNA, 22 nt, Human
guuuuccuucucagccauugcc

SEQ ID NO: 225941 - RNA, 22 nt, Human
uuguauguuucugugcacauga

SEQ ID NO: 225942 - RNA, 22 nt, Human
aguaaacacugucuuuauauau

SEQ ID NO: 225943 - RNA, 22 nt, Human
gauuuauaaagguugcacugga

SEQ ID NO: 225944 - RNA, 22 nt, Human
gagggacagcuaaagagaaauu

SEQ ID NO: 225945 - RNA, 22 nt, Human
caguuuauaugucagagcugua

SEQ ID NO: 225946 - RNA, 22 nt, Human
auuugcuggugaaauagugaca

SEQ ID NO: 225947 - RNA, 22 nt, Human
cugcugggucuaugcaagugga

SEQ ID NO: 225948 - RNA, 21 nt, Human
ccuggcugcacaguugcuggu

SEQ ID NO: 225949 - RNA, 19 nt, Human
cuguuucugagcuugcuuu

SEQ ID NO: 225950 - RNA, 22 nt, Human
aaggcauuaugauuugaguacc

SEQ ID NO: 225951 - RNA, 22 nt, Human
aggagagagcugagcuuugcug

SEQ ID NO: 225952 - RNA, 22 nt, Human
ucaggagcagccuuggagagcg

SEQ ID NO: 225953 - RNA, 22 nt, Human
gucugggcaggaaucugcauuc

SEQ ID NO: 225954 - RNA, 22 nt, Human
uauuggucaaguugaggacccu

SEQ ID NO: 225955 - RNA, 22 nt, Human
gauuuuacaugucauaucuauu

SEQ ID NO: 225956 - RNA, 22 nt, Human
agacagaauuugucagauaaau

SEQ ID NO: 225957 - RNA, 22 nt, Human
agggaauguagcaagaugccaa

SEQ ID NO: 225958 - RNA, 22 nt, Human
ugauuacaguauuugagaucca

SEQ ID NO: 225959 - RNA, 22 nt, Human
augcggugaauugacuguuucu

SEQ ID NO: 225960 - RNA, 18 nt, Human
uagaaucuguuauugccu

SEQ ID NO: 225961 - RNA, 22 nt, Human
cagugaggcucugcugagcggu

SEQ ID NO: 225962 - RNA, 22 nt, Human
ucagucuuugcuuaugacaaua

SEQ ID NO: 225963 - RNA, 22 nt, Human
caccugggucauugcugguguu

SEQ ID NO: 225964 - RNA, 22 nt, Human
auuuccagcagcauauuugucu

SEQ ID NO: 225965 - RNA, 22 nt, Human
gucuggccauuugcccauugug

SEQ ID NO: 225966 - RNA, 22 nt, Human
cuggcagcugugugaagaacug

SEQ ID NO: 225967 - RNA, 22 nt, Human
uacacugaagugucuugguaua

SEQ ID NO: 225968 - RNA, 22 nt, Human
gccuguggggcugaggcugccu

SEQ ID NO: 225969 - RNA, 22 nt, Human
aggugcuggaguagaagaaaaa

SEQ ID NO: 225970 - RNA, 22 nt, Human
uccaaggacauuguucuaguug

SEQ ID NO: 225971 - RNA, 22 nt, Human
uccucuggggcgugguccugga

SEQ ID NO: 225972 - RNA, 22 nt, Human
cuggacacaaacaucuccucug

SEQ ID NO: 225973 - RNA, 22 nt, Human
uaacacauaucuacaacaugug

SEQ ID NO: 225974 - RNA, 22 nt, Human
agcuagcaaauagcauguagga

SEQ ID NO: 225975 - RNA, 22 nt, Human
ugacaaguacauaauuucaugu

SEQ ID NO: 225976 - RNA, 22 nt, Human
augaugaaauuuucuaucaugu

SEQ ID NO: 225977 - RNA, 22 nt, Human
gauauuuuuaggugaugcaggc

SEQ ID NO: 225978 - RNA, 22 nt, Human
uuccuggcgccacggagccggu

SEQ ID NO: 225979 - RNA, 22 nt, Human
uacaagacgagggaaguucuuu

SEQ ID NO: 225980 - RNA, 22 nt, Human
aggcccugcugaggccucccuc

SEQ ID NO: 225981 - RNA, 22 nt, Human
uuucaaaauuuugcagugguaa

SEQ ID NO: 225982 - RNA, 22 nt, Human
ugaaagcagauagcucuguugu

SEQ ID NO: 225983 - RNA, 20 nt, Human
cagggcacacugcagccucg

SEQ ID NO: 225984 - RNA, 22 nt, Human
agacacagcugcaggagguggg

SEQ ID NO: 225985 - RNA, 22 nt, Human
guuauuaguaagacucgcacau

SEQ ID NO: 225986 - RNA, 23 nt, Human
caugugugacaguaucacuguuu

SEQ ID NO: 225987 - RNA, 22 nt, Human
acaggacauguaccaggugguc

SEQ ID NO: 225988 - RNA, 22 nt, Human
caguuagcugacaaguaggcua

SEQ ID NO: 225989 - RNA, 22 nt, Human
auucauguuagcccacauguag

SEQ ID NO: 225990 - RNA, 22 nt, Human
auaugaaguuacagguaagaaa

SEQ ID NO: 225991 - RNA, 22 nt, Human
uuaggaaaauggaguccuuuua

SEQ ID NO: 225992 - RNA, 22 nt, Human
uggcuucuugacuucuuggcug

SEQ ID NO: 225993 - RNA, 22 nt, Human
ucaaaggguaauguaauagucu

SEQ ID NO: 225994 - RNA, 22 nt, Human
gaugugucccuuucaacucaga

SEQ ID NO: 225995 - RNA, 22 nt, Human
ucaggagauguaaccuuagcug

SEQ ID NO: 225996 - RNA, 22 nt, Human
uuuuuaaugcagucugagacau

SEQ ID NO: 225997 - RNA, 21 nt, Human
ugagcaggugcagggaagugg

SEQ ID NO: 225998 - RNA, 22 nt, Human
cugacaggguagacagagggca

SEQ ID NO: 225999 - RNA, 22 nt, Human
agcuggcauugcagggagcugc

SEQ ID NO: 226000 - RNA, 22 nt, Human
ccugagugccaugagagcaccc

SEQ ID NO: 226001 - RNA, 22 nt, Human
aaacauuguacauucuguagcu

SEQ ID NO: 226002 - RNA, 22 nt, Human
gucugucuguuguugagaagca

SEQ ID NO: 226003 - RNA, 22 nt, Human
cacauggaagagauacagugag

SEQ ID NO: 226004 - RNA, 22 nt, Human
guuagagggcugccuuuuguuu

SEQ ID NO: 226005 - RNA, 22 nt, Human
agguccugacgcccuuugaaau

SEQ ID NO: 226006 - RNA, 22 nt, Human
gccccagauggaggaagcuggg

SEQ ID NO: 226007 - RNA, 22 nt, Human
gccugggugagggucuccuuca

SEQ ID NO: 226008 - RNA, 22 nt, Human
augaaucaagugagaacagcau

SEQ ID NO: 226009 - RNA, 22 nt, Human
aggcagagcugauguucuguga

SEQ ID NO: 226010 - RNA, 22 nt, Human
uuagggaaauaaaauuaucagu

SEQ ID NO: 226011 - RNA, 21 nt, Human
cacuugaaugguguuuuacaa

SEQ ID NO: 226012 - RNA, 22 nt, Human
aggagaaggaggccccucacac

SEQ ID NO: 226013 - RNA, 18 nt, Human
ggugagggagcuggaagc

SEQ ID NO: 226014 - RNA, 22 nt, Human
gggaagaagacauggugaaggc

SEQ ID NO: 226015 - RNA, 22 nt, Human
gcagcuguagaggggagaaaga

SEQ ID NO: 226016 - RNA, 22 nt, Human
ggagggccccuccagugggcag

SEQ ID NO: 226017 - RNA, 22 nt, Human
caauuucuggaacuaauucuga

SEQ ID NO: 226018 - RNA, 22 nt, Human
ggccuuccuggcggcucagggu

SEQ ID NO: 226019 - RNA, 23 nt, Human
cggcuucugaaaucccaucuguu

SEQ ID NO: 226020 - RNA, 22 nt, Human
gccuggcuaguuagugucaggu

SEQ ID NO: 226021 - RNA, 22 nt, Human
uuugggcucacuaugcugaaga

SEQ ID NO: 226022 - RNA, 22 nt, Human
aaguguuuaacggugauugagc

SEQ ID NO: 226023 - RNA, 22 nt, Human
gucucagauaacauguauucua

SEQ ID NO: 226024 - RNA, 22 nt, Human
gauucccaugucugaggaggug

SEQ ID NO: 226025 - RNA, 22 nt, Human
accaggaaacugugcccacgac

SEQ ID NO: 226026 - RNA, 22 nt, Human
gguguccuugcagaaggcggcg

SEQ ID NO: 226027 - RNA, 22 nt, Human
gcagacuguacacuggacuuug

SEQ ID NO: 226028 - RNA, 22 nt, Human
gugguccucauaauucagugag

SEQ ID NO: 226029 - RNA, 22 nt, Human
gaugccuccaaaugagggcaga

SEQ ID NO: 226030 - RNA, 22 nt, Human
gcccagagugaguccugggccc

SEQ ID NO: 226031 - RNA, 22 nt, Human
aagccuugauucacucugugga

SEQ ID NO: 226032 - RNA, 22 nt, Human
uugaggaguagaagcuuugaau

SEQ ID NO: 226033 - RNA, 22 nt, Human
agauuuugucucaauacuucug

SEQ ID NO: 226034 - RNA, 22 nt, Human
ucugugccaucagucuccagag

SEQ ID NO: 226035 - RNA, 22 nt, Human
cuggggccagugaggaggcuuu

SEQ ID NO: 226036 - RNA, 22 nt, Human
ucuguagguuaaaaguagacaa

SEQ ID NO: 226037 - RNA, 22 nt, Human
uguucagagacagaaauucuaa

SEQ ID NO: 226038 - RNA, 22 nt, Human
aaaguccugacugcaggggaug

SEQ ID NO: 226039 - RNA, 22 nt, Human
cagcaucucugcacccuccccc

SEQ ID NO: 226040 - RNA, 19 nt, Human
acaugcaaggcaccugcag

SEQ ID NO: 226041 - RNA, 20 nt, Human
ucagagagagggugccacuu

SEQ ID NO: 226042 - RNA, 22 nt, Human
gcaguguccaggguggucugca

SEQ ID NO: 226043 - RNA, 19 nt, Human
acauucccaucagcaaugu

SEQ ID NO: 226044 - RNA, 22 nt, Human
ggugaaggucagagcaggaaaa

SEQ ID NO: 226045 - RNA, 22 nt, Human
caggaagaaagaggugaggugu

SEQ ID NO: 226046 - RNA, 22 nt, Human
guuaaagaagaauaguuccuuu

SEQ ID NO: 226047 - RNA, 22 nt, Human
cagagacaguuucacagggucu

SEQ ID NO: 226048 - RNA, 22 nt, Human
uauucaagauugaacuggcaga

SEQ ID NO: 226049 - RNA, 22 nt, Human
auuagcauauuaaauagucauu

SEQ ID NO: 226050 - RNA, 22 nt, Human
gagcuauaauagagcuucagug

SEQ ID NO: 226051 - RNA, 22 nt, Human
ugccaguguggaacuaggaaga

SEQ ID NO: 226052 - RNA, 22 nt, Human
gcaagcaaguaucuggcaggga

SEQ ID NO: 226053 - RNA, 22 nt, Human
ucauucuuuaccaaguugucac

SEQ ID NO: 226054 - RNA, 22 nt, Human
ccuccagggcagacggggagca

SEQ ID NO: 226055 - RNA, 22 nt, Human
uguccauacaauguaacaucuu

SEQ ID NO: 226056 - RNA, 22 nt, Human
guugcaggaagcacacacaugu

SEQ ID NO: 226057 - RNA, 22 nt, Human
uaaguauuggccuauagcuaga

SEQ ID NO: 226058 - RNA, 22 nt, Human
guacuucccugggaggcaagca

SEQ ID NO: 226059 - RNA, 22 nt, Human
gacuuucugagucaaagaaagg

SEQ ID NO: 226060 - RNA, 17 nt, Human
aggcaccucuuccugcu

SEQ ID NO: 226061 - RNA, 22 nt, Human
augcagggauuaaaugacugcc

SEQ ID NO: 226062 - RNA, 16 nt, Human
gccugggagggaacag

SEQ ID NO: 226063 - RNA, 22 nt, Human
ucagcuuugggggucucaggag

SEQ ID NO: 226064 - RNA, 22 nt, Human
ugccccucagggaacggguauc

SEQ ID NO: 226065 - RNA, 17 nt, Human
agcuccugcccauggcu

SEQ ID NO: 226066 - RNA, 22 nt, Human
cccaggccuggucugggccagu

SEQ ID NO: 226067 - RNA, 22 nt, Human
uggauucugggagaguucuaua

SEQ ID NO: 226068 - RNA, 22 nt, Human
aggcuucuugcuuccaaaugca

SEQ ID NO: 226069 - RNA, 22 nt, Human
cauguuaaaauauacauucuga

SEQ ID NO: 226070 - RNA, 22 nt, Human
ucaagcuuucugucucuuaugg

SEQ ID NO: 226071 - RNA, 22 nt, Human
gggcucucaaggcagggcccca

SEQ ID NO: 226072 - RNA, 22 nt, Human
uuguacuuuugucagguggaca

SEQ ID NO: 226073 - RNA, 22 nt, Human
uagaagaacaugucaaacuaua

SEQ ID NO: 226074 - RNA, 22 nt, Human
ugcuccaggagcaaccuuugag

SEQ ID NO: 226075 - RNA, 22 nt, Human
gaguagcagccacagaggaccc

SEQ ID NO: 226076 - RNA, 23 nt, Human
uaaagcaaagucaagugcacucc

SEQ ID NO: 226077 - RNA, 22 nt, Human
auaagaugagaucagcuuucug

SEQ ID NO: 226078 - RNA, 22 nt, Human
cauacauauguggaugucauau

SEQ ID NO: 226079 - RNA, 19 nt, Human
gaguacaggugcagaaaug

SEQ ID NO: 226080 - RNA, 22 nt, Human
aguguggcaggaaugacuagaa

SEQ ID NO: 226081 - RNA, 21 nt, Human
aaaaagcuggggcaugcaugc

SEQ ID NO: 226082 - RNA, 22 nt, Human
gauguggaugaucuuagauggu

SEQ ID NO: 226083 - RNA, 22 nt, Human
agauuacaacaugggacgcaua

SEQ ID NO: 226084 - RNA, 22 nt, Human
ccuggggaagucacuucucuuu

SEQ ID NO: 226085 - RNA, 22 nt, Human
caggaagcuggguuuccauaca

SEQ ID NO: 226086 - RNA, 22 nt, Human
gucaaaaugagcuuuguuauug

SEQ ID NO: 226087 - RNA, 22 nt, Human
uauguacaucuugagcaaugaa

SEQ ID NO: 226088 - RNA, 22 nt, Human
uucauucacccaggaaacaucu

SEQ ID NO: 226089 - RNA, 22 nt, Human
ugucaucuucacugggucacaa

SEQ ID NO: 226090 - RNA, 22 nt, Human
gagcagugagugaauguugccu

SEQ ID NO: 226091 - RNA, 22 nt, Human
agcccugcauagaagggaacac

SEQ ID NO: 226092 - RNA, 22 nt, Human
uagggaugaggauagauuuuuc

SEQ ID NO: 226093 - RNA, 22 nt, Human
aacagcaccgaagucgucuaag

SEQ ID NO: 226094 - RNA, 22 nt, Human
agaaugcaagauaaacuuuauu

SEQ ID NO: 226095 - RNA, 22 nt, Human
ggcagguggauuuucuacucua

SEQ ID NO: 226096 - RNA, 22 nt, Human
ggugagggacaucacucagcca

SEQ ID NO: 226097 - RNA, 22 nt, Human
aucuagaggagggcugcuggau

SEQ ID NO: 226098 - RNA, 22 nt, Human
uccccaccccagaacuacuagg

SEQ ID NO: 226099 - RNA, 20 nt, Human
uagauuucauacuucucuuu

SEQ ID NO: 226100 - RNA, 22 nt, Human
ugcccagagccucuuaccucca

SEQ ID NO: 226101 - RNA, 22 nt, Human
aaguuacacauuuucauuguaa

SEQ ID NO: 226102 - RNA, 18 nt, Human
ggagcugggccugguucc

SEQ ID NO: 226103 - RNA, 22 nt, Human
acagcauuuaaagaaaaugaac

SEQ ID NO: 226104 - RNA, 22 nt, Human
cugaaugaaaucaaggacugag

SEQ ID NO: 226105 - RNA, 22 nt, Human
uggaagaagcuacaagcgguga

SEQ ID NO: 226106 - RNA, 22 nt, Human
guagaauuaccucucuaugucc

SEQ ID NO: 226107 - RNA, 22 nt, Human
cugagggaguuccugagcccac

SEQ ID NO: 226108 - RNA, 22 nt, Human
agucacuugauucuccugagcu

SEQ ID NO: 226109 - RNA, 22 nt, Human
gcucuuuucacaguccaaaaug

SEQ ID NO: 226110 - RNA, 22 nt, Human
uccagggccaguccuugucugu

SEQ ID NO: 226111 - RNA, 22 nt, Human
cgcaggcuccggggugcccugg

SEQ ID NO: 226112 - RNA, 20 nt, Human
ggcaguuaaggcacagucau

SEQ ID NO: 226113 - RNA, 18 nt, Human
cugucccauccucagguu

SEQ ID NO: 226114 - RNA, 22 nt, Human
cucaaaaugguuaauuuuaaua

SEQ ID NO: 226115 - RNA, 22 nt, Human
aagggcuguaguuuguugauca

SEQ ID NO: 226116 - RNA, 22 nt, Human
cuacaggaguaaaauaauuuca

SEQ ID NO: 226117 - RNA, 23 nt, Human
agaagcugggagccuggggaugg

SEQ ID NO: 226118 - RNA, 22 nt, Human
ucucugaaagcagcugcucauc

SEQ ID NO: 226119 - RNA, 22 nt, Human
uucucucuuacugccaugcugu

SEQ ID NO: 226120 - RNA, 22 nt, Human
acauuuaaauaccuauguuucu

SEQ ID NO: 226121 - RNA, 22 nt, Human
augagcaguagguucauggcug

SEQ ID NO: 226122 - RNA, 22 nt, Human
aacaguuuguggauagcuugua

SEQ ID NO: 226123 - RNA, 22 nt, Human
gaaguauuauagcauauuagcc

SEQ ID NO: 226124 - RNA, 22 nt, Human
uauuuguuccagagauaaaaau

SEQ ID NO: 226125 - RNA, 22 nt, Human
ucaggcagugguaaaugaguua

SEQ ID NO: 226126 - RNA, 19 nt, Human
uagugucaaggaggagggu

SEQ ID NO: 226127 - RNA, 22 nt, Human
ugcucaggugccuuggcugcug

SEQ ID NO: 226128 - RNA, 22 nt, Human
auggcccacucuggucccggca

SEQ ID NO: 226129 - RNA, 22 nt, Human
gugauaaaauucaaauagcucu

SEQ ID NO: 226130 - RNA, 22 nt, Human
ucauuuaauaauuuuugaguag

SEQ ID NO: 226131 - RNA, 22 nt, Human
caggugucggucaggcgguuuu

SEQ ID NO: 226132 - RNA, 22 nt, Human
uucuuuuagucauucagggaag

SEQ ID NO: 226133 - RNA, 22 nt, Human
guccuggcccacuggcaggcug

SEQ ID NO: 226134 - RNA, 22 nt, Human
uagaaacugauagucuugugcu

SEQ ID NO: 226135 - RNA, 22 nt, Human
auggaaauguuccauauauuga

SEQ ID NO: 226136 - RNA, 22 nt, Human
guguuacuugccauacagaaaa

SEQ ID NO: 226137 - RNA, 22 nt, Human
aucuccagcucgcagagcuccu

SEQ ID NO: 226138 - RNA, 22 nt, Human
gcagacagaugagggugcuggg

SEQ ID NO: 226139 - RNA, 20 nt, Human
agaaaaaguguggaaauuuc

SEQ ID NO: 226140 - RNA, 22 nt, Human
uuucaaggugcaggaggguuuu

SEQ ID NO: 226141 - RNA, 22 nt, Human
caggguggcacaucacagcauu

SEQ ID NO: 226142 - RNA, 22 nt, Human
uucacuuaacaucauaucauga

SEQ ID NO: 226143 - RNA, 22 nt, Human
ugcaggagagcuggucuggccc

SEQ ID NO: 226144 - RNA, 22 nt, Human
cuuaggaagcuuuugaggacaa

SEQ ID NO: 226145 - RNA, 22 nt, Human
cugggccuucauugcucuccca

SEQ ID NO: 226146 - RNA, 22 nt, Human
uaacagcacuggcaggcacugu

SEQ ID NO: 226147 - RNA, 20 nt, Human
guaaaauauggucuuugggu

SEQ ID NO: 226148 - RNA, 22 nt, Human
caauguuuuuccuuccuuaaua

SEQ ID NO: 226149 - RNA, 22 nt, Human
cagagccucccuccucugccau

SEQ ID NO: 226150 - RNA, 22 nt, Human
uguaaaaggaaaucaaagcacu

SEQ ID NO: 226151 - RNA, 22 nt, Human
uagaaagcuugggguguuuaaa

SEQ ID NO: 226152 - RNA, 22 nt, Human
uagaaccucugauuauguuacu

SEQ ID NO: 226153 - RNA, 22 nt, Human
aggaugagagauacauggagca

SEQ ID NO: 226154 - RNA, 22 nt, Human
caagcagagacuagauagcugu

SEQ ID NO: 226155 - RNA, 19 nt, Human
aggugaggggcaccauguc

SEQ ID NO: 226156 - RNA, 22 nt, Human
cuuuuaaugagcauugcugucu

SEQ ID NO: 226157 - RNA, 22 nt, Human
agugauggcagugaauaaggcu

SEQ ID NO: 226158 - RNA, 22 nt, Human
gcugccagggaggugguggagg

SEQ ID NO: 226159 - RNA, 22 nt, Human
gcucuuuggauuccuuuacaaa

SEQ ID NO: 226160 - RNA, 16 nt, Human
uguuugcaaagcaauc

SEQ ID NO: 226161 - RNA, 22 nt, Human
uuagaaccaggguuacgauucu

SEQ ID NO: 226162 - RNA, 22 nt, Human
ugcuccuggaugagguacucca

SEQ ID NO: 226163 - RNA, 22 nt, Human
ccaaguacucucaccaaagcuu

SEQ ID NO: 226164 - RNA, 22 nt, Human
ucuauacaaguuucacuuugac

SEQ ID NO: 226165 - RNA, 22 nt, Human
augaguucccaggugauuugug

SEQ ID NO: 226166 - RNA, 21 nt, Human
uuaccaauggcuucucuuucc

SEQ ID NO: 226167 - RNA, 22 nt, Human
ugcagggcagcuagggagcuuu

SEQ ID NO: 226168 - RNA, 21 nt, Human
agagacagagaaaguaacauu

SEQ ID NO: 226169 - RNA, 22 nt, Human
agccacaccuguccugccagcu

SEQ ID NO: 226170 - RNA, 22 nt, Human
acauggggcccaaagagagguc

SEQ ID NO: 226171 - RNA, 22 nt, Human
caagauuuccaacccuggguaa

SEQ ID NO: 226172 - RNA, 22 nt, Human
agugcauucuccaucaucuagg

SEQ ID NO: 226173 - RNA, 22 nt, Human
gaccucagauuuucccaggcca

SEQ ID NO: 226174 - RNA, 22 nt, Human
guacaggccaccacugaauuuu

SEQ ID NO: 226175 - RNA, 22 nt, Human
cucaggagacaguguccacaug

SEQ ID NO: 226176 - RNA, 22 nt, Human
gggaccuggcgagggucacaca

SEQ ID NO: 226177 - RNA, 22 nt, Human
cagggcugaggacacaaguaaa

SEQ ID NO: 226178 - RNA, 23 nt, Human
gaggcagcuccugcagugcccug

SEQ ID NO: 226179 - RNA, 22 nt, Human
gggaaugugcagccacagugag

SEQ ID NO: 226180 - RNA, 22 nt, Human
acagcaaaagacaagaacuuaa

SEQ ID NO: 226181 - RNA, 22 nt, Human
cugucccagugauccugagugc

SEQ ID NO: 226182 - RNA, 22 nt, Human
aaagccuuuuaugaucaguuaa

SEQ ID NO: 226183 - RNA, 22 nt, Human
uccuuucuccuuccgacuucau

SEQ ID NO: 226184 - RNA, 22 nt, Human
uaggugguagagccuggcuugc

SEQ ID NO: 226185 - RNA, 18 nt, Human
agcugaggggacugaaga

SEQ ID NO: 226186 - RNA, 22 nt, Human
caagauaaaaucagcauuccaa

SEQ ID NO: 226187 - RNA, 22 nt, Human
ucuaaccuuugaaacugcuuuc

SEQ ID NO: 226188 - RNA, 22 nt, Human
uagaaacagaaaacuguaauag

SEQ ID NO: 226189 - RNA, 22 nt, Human
gggagacacgcugcaggcauaa

SEQ ID NO: 226190 - RNA, 22 nt, Human
auuuaaaugcuuaagaggguuu

SEQ ID NO: 226191 - RNA, 22 nt, Human
gggcucuggaaaugggagcucc

SEQ ID NO: 226192 - RNA, 22 nt, Human
acagguguccucacagggggug

SEQ ID NO: 226193 - RNA, 22 nt, Human
acuucucugguugagguccaau

SEQ ID NO: 226194 - RNA, 22 nt, Human
gcagaaguggugcugugccacu

SEQ ID NO: 226195 - RNA, 22 nt, Human
ucccagagugagccaggggcag

SEQ ID NO: 226196 - RNA, 22 nt, Human
cugggugguuuugaugugaauu

SEQ ID NO: 226197 - RNA, 22 nt, Human
uaaaaucauucuggugucagua

SEQ ID NO: 226198 - RNA, 22 nt, Human
cgggagccucugggucacacug

SEQ ID NO: 226199 - RNA, 22 nt, Human
agcacagaaaguauugacugaa

SEQ ID NO: 226200 - RNA, 22 nt, Human
gguugcaaacuccugggaucaa

SEQ ID NO: 226201 - RNA, 22 nt, Human
aucgagggugaguacagcggac

SEQ ID NO: 226202 - RNA, 22 nt, Human
acaggcagcgucauugcugcuc

SEQ ID NO: 226203 - RNA, 22 nt, Human
uaggaaacauuugaagaggauu

SEQ ID NO: 226204 - RNA, 22 nt, Human
uucauucagguguauuuauggg

SEQ ID NO: 226205 - RNA, 22 nt, Human
cuaauuuaaugaaugagucuua

SEQ ID NO: 226206 - RNA, 22 nt, Human
ggagacacgggugcugaggacc

SEQ ID NO: 226207 - RNA, 22 nt, Human
aacuuucuauagguugggauuu

SEQ ID NO: 226208 - RNA, 20 nt, Human
agccaggccucaaguuaagu

SEQ ID NO: 226209 - RNA, 22 nt, Human
cccaggcagaauuaguguuuca

SEQ ID NO: 226210 - RNA, 22 nt, Human
cacagcugugagaagggagccu

SEQ ID NO: 226211 - RNA, 22 nt, Human
ucuguggcacgauugcacugca

SEQ ID NO: 226212 - RNA, 22 nt, Human
cccagugccaggcacaggcagc

SEQ ID NO: 226213 - RNA, 21 nt, Human
gaggcugucugcugcuggccu

SEQ ID NO: 226214 - RNA, 22 nt, Human
ucuuggauuuuaauggaucaaa

SEQ ID NO: 226215 - RNA, 22 nt, Human
cccacgucgaacuugcuccaga

SEQ ID NO: 226216 - RNA, 22 nt, Human
aggaacagaagagcaaugcagg

SEQ ID NO: 226217 - RNA, 22 nt, Human
ucagggagaggugagagccugu

SEQ ID NO: 226218 - RNA, 22 nt, Human
ccaggagucaauaaaggaagcu

SEQ ID NO: 226219 - RNA, 22 nt, Human
auauacaugggaauauguggag

SEQ ID NO: 226220 - RNA, 22 nt, Human
gcuccaguggauacagcagugg

SEQ ID NO: 226221 - RNA, 19 nt, Human
ccuccugcuagauaugcaa

SEQ ID NO: 226222 - RNA, 22 nt, Human
ucugcagaauucgaggaagaaa

SEQ ID NO: 226223 - RNA, 22 nt, Human
aguguguaagggaucaaagagu

SEQ ID NO: 226224 - RNA, 22 nt, Human
gaggcagagugcaccccaggag

SEQ ID NO: 226225 - RNA, 17 nt, Human
caguuggagacaagucc

SEQ ID NO: 226226 - RNA, 22 nt, Human
ccaggcuugguguguggucagg

SEQ ID NO: 226227 - RNA, 22 nt, Human
guauuaggugguggaauuguag

SEQ ID NO: 226228 - RNA, 22 nt, Human
augugcaauggugucaccacau

SEQ ID NO: 226229 - RNA, 22 nt, Human
agcagccagaaauccagaggug

SEQ ID NO: 226230 - RNA, 22 nt, Human
uccgccaggacugagggcccau

SEQ ID NO: 226231 - RNA, 23 nt, Human
uagauccuuccaacuacucuuac

SEQ ID NO: 226232 - RNA, 22 nt, Human
uccaguccagggaauggcugau

SEQ ID NO: 226233 - RNA, 21 nt, Human
uuuuuucuugcgugaggccug

SEQ ID NO: 226234 - RNA, 22 nt, Human
ucaguuugaauguuagcacagu

SEQ ID NO: 226235 - RNA, 22 nt, Human
uggcuguguuaccacuucaugu

SEQ ID NO: 226236 - RNA, 22 nt, Human
ccucccugcgcuccugcggcgg

SEQ ID NO: 226237 - RNA, 22 nt, Human
guagaauuuuaauaauggagau

SEQ ID NO: 226238 - RNA, 22 nt, Human
cuuguauucugccuaaccuuca

SEQ ID NO: 226239 - RNA, 22 nt, Human
gaggcugcggggaggagccugc

SEQ ID NO: 226240 - RNA, 22 nt, Human
uguuuucucuugaaaagcaguc

SEQ ID NO: 226241 - RNA, 22 nt, Human
uuacaacaaaggcacgugcaug

SEQ ID NO: 226242 - RNA, 22 nt, Human
accucagcuauuucaaaacaga

SEQ ID NO: 226243 - RNA, 22 nt, Human
uaacagaauccuguuauugcca

SEQ ID NO: 226244 - RNA, 22 nt, Human
uacugucuggguucccaagcaa

SEQ ID NO: 226245 - RNA, 22 nt, Human
uguaggauguaaggcaggcauc

SEQ ID NO: 226246 - RNA, 22 nt, Human
agucagugacuuuugcugagag

SEQ ID NO: 226247 - RNA, 22 nt, Human
gcaccaggcagcugagcaggcc

SEQ ID NO: 226248 - RNA, 22 nt, Human
aauagaaaggaggggcucuugu

SEQ ID NO: 226249 - RNA, 22 nt, Human
uagaaacagaauaugagugaga

SEQ ID NO: 226250 - RNA, 22 nt, Human
aggcccagugccauuaguuuug

SEQ ID NO: 226251 - RNA, 22 nt, Human
gggagggaaggaggcgccgugu

SEQ ID NO: 226252 - RNA, 22 nt, Human
cugggccugucagggcuuuuug

SEQ ID NO: 226253 - RNA, 22 nt, Human
gccagcugaggccgugcaggcu

SEQ ID NO: 226254 - RNA, 22 nt, Human
uguccugggaaugggaugcagu

SEQ ID NO: 226255 - RNA, 19 nt, Human
agcugcaaaagguggaacu

SEQ ID NO: 226256 - RNA, 22 nt, Human
caggcccaucugcucccaggcu

SEQ ID NO: 226257 - RNA, 22 nt, Human
cagagcuguuacuauucaugaa

SEQ ID NO: 226258 - RNA, 22 nt, Human
ugcagagagauauggcaagagg

SEQ ID NO: 226259 - RNA, 22 nt, Human
aaaaaugcugugguagcugugu

SEQ ID NO: 226260 - RNA, 20 nt, Human
aggcuuggcuuggcaggaac

SEQ ID NO: 226261 - RNA, 22 nt, Human
aggcuucugucuuuaggaguug

SEQ ID NO: 226262 - RNA, 22 nt, Human
ucuuaagcagagaagaaguuga

SEQ ID NO: 226263 - RNA, 22 nt, Human
cccuggcucuucaccaccugcc

SEQ ID NO: 226264 - RNA, 22 nt, Human
gcugccacuuggucaugucaug

SEQ ID NO: 226265 - RNA, 22 nt, Human
acacacguauauauacguaugu

SEQ ID NO: 226266 - RNA, 19 nt, Human
cuguggacucuagaucaug

SEQ ID NO: 226267 - RNA, 22 nt, Human
agcuucuuggcucagcacuugg

SEQ ID NO: 226268 - RNA, 23 nt, Human
cccaagccugugcccucugacuc

SEQ ID NO: 226269 - RNA, 22 nt, Human
auuuugacugcauuacagaaca

SEQ ID NO: 226270 - RNA, 22 nt, Human
acuguggcuaauucauuugguc

SEQ ID NO: 226271 - RNA, 22 nt, Human
aauuauguagccauaugaaaca

SEQ ID NO: 226272 - RNA, 22 nt, Human
ucucuggggaugcuuauucuug

SEQ ID NO: 226273 - RNA, 22 nt, Human
ucuucaguauuuggauaacauu

SEQ ID NO: 226274 - RNA, 22 nt, Human
uugaaaguuuauggagucugca

SEQ ID NO: 226275 - RNA, 22 nt, Human
cuagaauaucauaugaagagac

SEQ ID NO: 226276 - RNA, 22 nt, Human
aggcagguguuaccucugguuu

SEQ ID NO: 226277 - RNA, 22 nt, Human
ccuccuggcuuuucccauugaa

SEQ ID NO: 226278 - RNA, 22 nt, Human
gucuucuuuaaccuacuaaagc

SEQ ID NO: 226279 - RNA, 22 nt, Human
cucugugcccuacugcucagcu

SEQ ID NO: 226280 - RNA, 22 nt, Human
ugccugggggacuaaggccaaa

SEQ ID NO: 226281 - RNA, 22 nt, Human
gacaggguccaaaggcagggga

SEQ ID NO: 226282 - RNA, 19 nt, Human
ggcugccuuuccuuaccag

SEQ ID NO: 226283 - RNA, 22 nt, Human
cagucccaggguugguucagcu

SEQ ID NO: 226284 - RNA, 22 nt, Human
uccaggcaagggaggagcaugg

SEQ ID NO: 226285 - RNA, 22 nt, Human
guuacauggagcaaugaugcau

SEQ ID NO: 226286 - RNA, 22 nt, Human
caaaguuuggcucucaugacau

SEQ ID NO: 226287 - RNA, 22 nt, Human
gucucaguaagaaaggcuccug

SEQ ID NO: 226288 - RNA, 22 nt, Human
aaggcugggaaacaugcaggcc

SEQ ID NO: 226289 - RNA, 21 nt, Human
caagcugccugagggugguug

SEQ ID NO: 226290 - RNA, 22 nt, Human
ucucacuggguauaaaugagua

SEQ ID NO: 226291 - RNA, 22 nt, Human
gcucugagaggaugcugagcag

SEQ ID NO: 226292 - RNA, 22 nt, Human
ugggcugagcacugaggaagga

SEQ ID NO: 226293 - RNA, 22 nt, Human
agggcccaguggagagcugagc

SEQ ID NO: 226294 - RNA, 22 nt, Human
acagccuggacuggcucucugc

SEQ ID NO: 226295 - RNA, 22 nt, Human
caggaagaccagggcuguggcu

SEQ ID NO: 226296 - RNA, 22 nt, Human
uguucucuucucauugaacaug

SEQ ID NO: 226297 - RNA, 22 nt, Human
guuaaugucacuuuauguggcu

SEQ ID NO: 226298 - RNA, 22 nt, Human
aagugggaauagaaaugaaggu

SEQ ID NO: 226299 - RNA, 22 nt, Human
gagcaaagcuuuuagggccuuu

SEQ ID NO: 226300 - RNA, 22 nt, Human
gacaggaggcagagcucaggug

SEQ ID NO: 226301 - RNA, 22 nt, Human
uaaggcuuucuaaauaugcaga

SEQ ID NO: 226302 - RNA, 22 nt, Human
ggaacuugcaaccucuggucac

SEQ ID NO: 226303 - RNA, 22 nt, Human
aauaugcagcaugaugaaguaa

SEQ ID NO: 226304 - RNA, 22 nt, Human
gaggagaagggcacggagaaaa

SEQ ID NO: 226305 - RNA, 22 nt, Human
auguguuuguaccuuuaaauau

SEQ ID NO: 226306 - RNA, 22 nt, Human
uagaauauacacuacagcuuaa

SEQ ID NO: 226307 - RNA, 22 nt, Human
uuucauaaucugucaagugggg

SEQ ID NO: 226308 - RNA, 22 nt, Human
ugcuggguguuccgcacuugac

SEQ ID NO: 226309 - RNA, 22 nt, Human
gguggcaccuuacccugcgcag

SEQ ID NO: 226310 - RNA, 22 nt, Human
gucccaggugcccagugggcag

SEQ ID NO: 226311 - RNA, 22 nt, Human
auacagaagaacuauagccacu

SEQ ID NO: 226312 - RNA, 20 nt, Human
acugugaaugcugaauuagc

SEQ ID NO: 226313 - RNA, 22 nt, Human
aucaaagugauuuguaaacagg

SEQ ID NO: 226314 - RNA, 22 nt, Human
uuucuuuaggcuguguugccaa

SEQ ID NO: 226315 - RNA, 22 nt, Human
aggcucuguuauucuagagggc

SEQ ID NO: 226316 - RNA, 22 nt, Human
uauacacaggaaucugugaaaa

SEQ ID NO: 226317 - RNA, 22 nt, Human
gaagucuucauucucucugaga

SEQ ID NO: 226318 - RNA, 22 nt, Human
uuacuacugcuuuacuacuggg

SEQ ID NO: 226319 - RNA, 22 nt, Human
ugucucaggcccaagccaguaa

SEQ ID NO: 226320 - RNA, 19 nt, Human
ccagagacauuggcaucuu

SEQ ID NO: 226321 - RNA, 22 nt, Human
ccaccaggcacucacagggaag

SEQ ID NO: 226322 - RNA, 22 nt, Human
uggugcagagagggaucuaggg

SEQ ID NO: 226323 - RNA, 22 nt, Human
aagaaucucugaucaggcuuua

SEQ ID NO: 226324 - RNA, 22 nt, Human
gcagcaggaauuuaaauuuaua

SEQ ID NO: 226325 - RNA, 22 nt, Human
caguggaggcucaagugugcuu

SEQ ID NO: 226326 - RNA, 22 nt, Human
ucuggggguuaagugaggacaa

SEQ ID NO: 226327 - RNA, 22 nt, Human
guggccucuguuggcuccuagg

SEQ ID NO: 226328 - RNA, 20 nt, Human
uggagcuguaaucuugucug

SEQ ID NO: 226329 - RNA, 22 nt, Human
ucagucucuggggcuucuguuu

SEQ ID NO: 226330 - RNA, 22 nt, Human
cucauggcagagucaccugucc

SEQ ID NO: 226331 - RNA, 21 nt, Human
agcagcaaccacauaguuuuu

SEQ ID NO: 226332 - RNA, 23 nt, Human
uggagcugacagucagagggagg

SEQ ID NO: 226333 - RNA, 22 nt, Human
uccuggcugucacucggguuga

SEQ ID NO: 226334 - RNA, 22 nt, Human
caaagcuauaaauucagacaga

SEQ ID NO: 226335 - RNA, 22 nt, Human
auucucugccauugcgguggau

SEQ ID NO: 226336 - RNA, 22 nt, Human
uauaugcaugcccauguauaca

SEQ ID NO: 226337 - RNA, 22 nt, Human
ugacauuugagagagauauaca

SEQ ID NO: 226338 - RNA, 18 nt, Human
ucaggcuuugagagaauc

SEQ ID NO: 226339 - RNA, 22 nt, Human
cagggaugucucuggaagggag

SEQ ID NO: 226340 - RNA, 22 nt, Human
uccuggcagugcuuguuuugga

SEQ ID NO: 226341 - RNA, 22 nt, Human
acuguacucuuauagccaucug

SEQ ID NO: 226342 - RNA, 22 nt, Human
uucugcugagugggcaggugca

SEQ ID NO: 226343 - RNA, 22 nt, Human
gaggagacauauuuuugaagca

SEQ ID NO: 226344 - RNA, 22 nt, Human
ccacaguagaauucaucucccu

SEQ ID NO: 226345 - RNA, 22 nt, Human
cuccuaggacgccgcugcuccu

SEQ ID NO: 226346 - RNA, 22 nt, Human
aagggugggcccuggcagccau

SEQ ID NO: 226347 - RNA, 22 nt, Human
cagggcagggccacacccccug

SEQ ID NO: 226348 - RNA, 22 nt, Human
aaggagggaaagcagugcuucu

SEQ ID NO: 226349 - RNA, 22 nt, Human
cugagggagcugcuggccuugg

SEQ ID NO: 226350 - RNA, 22 nt, Human
gagcugaaucagagauauuauu

SEQ ID NO: 226351 - RNA, 22 nt, Human
uugggagauauuguucuuuaca

SEQ ID NO: 226352 - RNA, 22 nt, Human
ccugggugaaugauauucuaaa

SEQ ID NO: 226353 - RNA, 22 nt, Human
acagacagacagauugcauaug

SEQ ID NO: 226354 - RNA, 22 nt, Human
aaaauaacuucuacuauuugca

SEQ ID NO: 226355 - RNA, 22 nt, Human
gcugccuuccaaagaguuuuau

SEQ ID NO: 226356 - RNA, 22 nt, Human
aaguuucucaauggcaacuggg

SEQ ID NO: 226357 - RNA, 22 nt, Human
aaugcucaaaauguuucaucua

SEQ ID NO: 226358 - RNA, 22 nt, Human
ugaggcagcuuuuucugugugu

SEQ ID NO: 226359 - RNA, 22 nt, Human
gcugucaguuuuacccacagac

SEQ ID NO: 226360 - RNA, 22 nt, Human
auggcugggaugggguagagaa

SEQ ID NO: 226361 - RNA, 22 nt, Human
acucugaggaauguacaggacc

SEQ ID NO: 226362 - RNA, 22 nt, Human
ccucaaauagcccccagucuag

SEQ ID NO: 226363 - RNA, 22 nt, Human
cugagacuguaccacuuccucc

SEQ ID NO: 226364 - RNA, 22 nt, Human
uucugugucuucuuguucugug

SEQ ID NO: 226365 - RNA, 22 nt, Human
cagugggguuucugugggugcu

SEQ ID NO: 226366 - RNA, 22 nt, Human
ucccuguaaaccucaaguugau

SEQ ID NO: 226367 - RNA, 18 nt, Human
ucugaaagcccuuuucca

SEQ ID NO: 226368 - RNA, 22 nt, Human
acuuccuguuaugugugccucu

SEQ ID NO: 226369 - RNA, 20 nt, Human
uucaggauucuagaccacac

SEQ ID NO: 226370 - RNA, 22 nt, Human
aggugucuuugcggcccgccgc

SEQ ID NO: 226371 - RNA, 22 nt, Human
auggcccaggccuccuguggcu

SEQ ID NO: 226372 - RNA, 22 nt, Human
ucccaggcuggggccaggugac

SEQ ID NO: 226373 - RNA, 22 nt, Human
uggcuuccuccagagcaggagg

SEQ ID NO: 226374 - RNA, 22 nt, Human
ucagugcacagagauuuuuguu

SEQ ID NO: 226375 - RNA, 22 nt, Human
ccaggaggcagaaguugcagug

SEQ ID NO: 226376 - RNA, 22 nt, Human
uaaaaucaugacagauugacau

SEQ ID NO: 226377 - RNA, 22 nt, Human
ugucugcagaagauggcauggg

SEQ ID NO: 226378 - RNA, 18 nt, Human
aggagaaagggaccaggg

SEQ ID NO: 226379 - RNA, 22 nt, Human
auuucucagugaaaugacaggc

SEQ ID NO: 226380 - RNA, 21 nt, Human
aggcugcaugcaugagugugg

SEQ ID NO: 226381 - RNA, 22 nt, Human
aggcugaggcagguggaucacu

SEQ ID NO: 226382 - RNA, 22 nt, Human
agaaguaugugagaaauuaucc

SEQ ID NO: 226383 - RNA, 22 nt, Human
ccaguggacaauuucugaggaa

SEQ ID NO: 226384 - RNA, 22 nt, Human
ucuuuuaaccuaacuagcuugg

SEQ ID NO: 226385 - RNA, 22 nt, Human
uuuguuuucaaugugucauuca

SEQ ID NO: 226386 - RNA, 22 nt, Human
gccucaagacauuuuuaauugc

SEQ ID NO: 226387 - RNA, 22 nt, Human
uggcuucuccagaaaucuuggu

SEQ ID NO: 226388 - RNA, 22 nt, Human
uuguuaaagaugcagauuccau

SEQ ID NO: 226389 - RNA, 22 nt, Human
accaggccuggcugggcagcca

SEQ ID NO: 226390 - RNA, 22 nt, Human
gcagcagaguagacagagcccu

SEQ ID NO: 226391 - RNA, 22 nt, Human
aaagcagucacuccagugugau

SEQ ID NO: 226392 - RNA, 22 nt, Human
acaggacagggaauucgaaauu

SEQ ID NO: 226393 - RNA, 22 nt, Human
cauuaauuguauuuuucaaagu

SEQ ID NO: 226394 - RNA, 22 nt, Human
caggagucuguuccucauuugu

SEQ ID NO: 226395 - RNA, 22 nt, Human
cagaggaagcagacacaucuug

SEQ ID NO: 226396 - RNA, 22 nt, Human
ucagugcagaauagugaugcau

SEQ ID NO: 226397 - RNA, 22 nt, Human
aagucagagcaacugagacauu

SEQ ID NO: 226398 - RNA, 22 nt, Human
caaaguuuuaguaaacauauau

SEQ ID NO: 226399 - RNA, 22 nt, Human
ggccugagaaccauggggccaa

SEQ ID NO: 226400 - RNA, 23 nt, Human
cccacaugucugagucagugcca

SEQ ID NO: 226401 - RNA, 22 nt, Human
acagaagaccagagagcuaacu

SEQ ID NO: 226402 - RNA, 22 nt, Human
uccauuuucuugcucuagguaa

SEQ ID NO: 226403 - RNA, 22 nt, Human
aaacaucuaucagcauuuuuua

SEQ ID NO: 226404 - RNA, 22 nt, Human
uggggcagaguaggauuuuggc

SEQ ID NO: 226405 - RNA, 22 nt, Human
ucagcaggcagugggucacaau

SEQ ID NO: 226406 - RNA, 22 nt, Human
aacaugugagcagguuuuuuau

SEQ ID NO: 226407 - RNA, 22 nt, Human
auagauguacguauguaaauca

SEQ ID NO: 226408 - RNA, 22 nt, Human
aaguacauuuuuaacuuacagc

SEQ ID NO: 226409 - RNA, 22 nt, Human
cagagcauuuggaagccacgug

SEQ ID NO: 226410 - RNA, 22 nt, Human
auuauuagacuuauaugguagu

SEQ ID NO: 226411 - RNA, 22 nt, Human
gccauccucugagcacuaggca

SEQ ID NO: 226412 - RNA, 22 nt, Human
uuuaagaucuaucccauuuugu

SEQ ID NO: 226413 - RNA, 22 nt, Human
uccaggaccugacugggccugc

SEQ ID NO: 226414 - RNA, 22 nt, Human
guccucuggccuuucccaggac

SEQ ID NO: 226415 - RNA, 22 nt, Human
ccugugaguuuacauucuggcc

SEQ ID NO: 226416 - RNA, 21 nt, Human
ggaaagaaggcaaggcucagg

SEQ ID NO: 226417 - RNA, 22 nt, Human
aacaucucagaagugacccuga

SEQ ID NO: 226418 - RNA, 22 nt, Human
cucacagcacuugugucauugg

SEQ ID NO: 226419 - RNA, 22 nt, Human
agccuugaacacugacugaagg

SEQ ID NO: 226420 - RNA, 22 nt, Human
ucagggcugccgggcagaccgu

SEQ ID NO: 226421 - RNA, 22 nt, Human
aagccuugcucuugaaaaaguu

SEQ ID NO: 226422 - RNA, 21 nt, Human
agcuggcucucucuggagaga

SEQ ID NO: 226423 - RNA, 22 nt, Human
gauuuuacugucuguguaucuc

SEQ ID NO: 226424 - RNA, 22 nt, Human
auuugcaugcuucuauugugaa

SEQ ID NO: 226425 - RNA, 22 nt, Human
agaggccagcccaggccaccga

SEQ ID NO: 226426 - RNA, 22 nt, Human
aaaaggcuuggaaccuuucccu

SEQ ID NO: 226427 - RNA, 21 nt, Human
agcugagguaaggcaagagag

SEQ ID NO: 226428 - RNA, 22 nt, Human
ggcuacuagacuuugauacuag

SEQ ID NO: 226429 - RNA, 22 nt, Human
auucaacuguaaacuuguucac

SEQ ID NO: 226430 - RNA, 22 nt, Human
ucacacagcuaguaagggccga

SEQ ID NO: 226431 - RNA, 22 nt, Human
gcugggucucuggguguaacaa

SEQ ID NO: 226432 - RNA, 19 nt, Human
gcuccugggccucacucau

SEQ ID NO: 226433 - RNA, 22 nt, Human
acaauuuuccccauagguuauc

SEQ ID NO: 226434 - RNA, 22 nt, Human
auucuucaccugagucagucua

SEQ ID NO: 226435 - RNA, 22 nt, Human
uucauugugauucuuggcuagc

SEQ ID NO: 226436 - RNA, 22 nt, Human
guuuuuguccauggaggcaaac

SEQ ID NO: 226437 - RNA, 22 nt, Human
aucugucuaugauauagucugu

SEQ ID NO: 226438 - RNA, 17 nt, Human
ucugcagggggccgugu

SEQ ID NO: 226439 - RNA, 22 nt, Human
cuccuggaggcuccaagggaga

SEQ ID NO: 226440 - RNA, 22 nt, Human
ggcuacugugauggucugcaag

SEQ ID NO: 226441 - RNA, 22 nt, Human
caggaacagaguggcauugucu

SEQ ID NO: 226442 - RNA, 22 nt, Human
uaacacugaaaaugaugcaugu

SEQ ID NO: 226443 - RNA, 22 nt, Human
uggcuucaaaaucuaguggucu

SEQ ID NO: 226444 - RNA, 22 nt, Human
gggaccugccaaggccacccag

SEQ ID NO: 226445 - RNA, 22 nt, Human
aagcaaaggaaagcugacuuuu

SEQ ID NO: 226446 - RNA, 22 nt, Human
cugaggcacugguaaugggcau

SEQ ID NO: 226447 - RNA, 22 nt, Human
acugucugugccagaugcuggg

SEQ ID NO: 226448 - RNA, 22 nt, Human
auuuuucagcuucauugaggca

SEQ ID NO: 226449 - RNA, 22 nt, Human
caggaaagccgagugccauagg

SEQ ID NO: 226450 - RNA, 22 nt, Human
cugcccugccuggccagugugg

SEQ ID NO: 226451 - RNA, 22 nt, Human
gccuuuauuguuuauucagugc

SEQ ID NO: 226452 - RNA, 22 nt, Human
gcugugcagaggugagaaucca

SEQ ID NO: 226453 - RNA, 22 nt, Human
uuggagcccugaggaucuggau

SEQ ID NO: 226454 - RNA, 20 nt, Human
acaguagaagggauuucaaa

SEQ ID NO: 226455 - RNA, 22 nt, Human
ugggacagggaaucugaucccc

SEQ ID NO: 226456 - RNA, 22 nt, Human
cauaaaauggcuuguucuuuaa

SEQ ID NO: 226457 - RNA, 22 nt, Human
aaaccuuucugcucucagcgua

SEQ ID NO: 226458 - RNA, 19 nt, Human
caugcugaccugcuguggu

SEQ ID NO: 226459 - RNA, 22 nt, Human
ugaggcuugucucagauggggg

SEQ ID NO: 226460 - RNA, 22 nt, Human
uuuauauguauugacuuugaug

SEQ ID NO: 226461 - RNA, 22 nt, Human
uacacuuuuuacuacagauucu

SEQ ID NO: 226462 - RNA, 23 nt, Human
uagaauccucugagauggaauag

SEQ ID NO: 226463 - RNA, 22 nt, Human
ugcccugugccagacuuccugg

SEQ ID NO: 226464 - RNA, 20 nt, Human
cuaacuaaccacuuucugau

SEQ ID NO: 226465 - RNA, 22 nt, Human
agcuggugugccaguuccaguu

SEQ ID NO: 226466 - RNA, 22 nt, Human
ucauugaauuucacagcuuuau

SEQ ID NO: 226467 - RNA, 22 nt, Human
gcaagcagcccagaacagcucu

SEQ ID NO: 226468 - RNA, 22 nt, Human
gagggaugucaggggaccuugg

SEQ ID NO: 226469 - RNA, 22 nt, Human
ucaauuucauucuauuaguuaa

SEQ ID NO: 226470 - RNA, 22 nt, Human
auccaguucucagugcuuacag

SEQ ID NO: 226471 - RNA, 22 nt, Human
auggaaaaggcugauuucauua

SEQ ID NO: 226472 - RNA, 22 nt, Human
uuguuucuccuggugccugaua

SEQ ID NO: 226473 - RNA, 22 nt, Human
ugugaaaugaguauauuugaau

SEQ ID NO: 226474 - RNA, 18 nt, Human
ccagagcuggcuccucgc

SEQ ID NO: 226475 - RNA, 22 nt, Human
cuucuucccagcuucccucacc

SEQ ID NO: 226476 - RNA, 22 nt, Human
ccagcccugccucucagggccc

SEQ ID NO: 226477 - RNA, 22 nt, Human
ucuguucacugagcaauggcaa

SEQ ID NO: 226478 - RNA, 22 nt, Human
agugcauucuggcagaacaggu

SEQ ID NO: 226479 - RNA, 22 nt, Human
gaaaggggcauguagggaucac

SEQ ID NO: 226480 - RNA, 22 nt, Human
aaggaggaauaaagagguggug

SEQ ID NO: 226481 - RNA, 22 nt, Human
agaaaauuagauuuuacugugu

SEQ ID NO: 226482 - RNA, 22 nt, Human
auguccuugagacccuccucgg

SEQ ID NO: 226483 - RNA, 22 nt, Human
gaacuuuaauuagcuuuugucu

SEQ ID NO: 226484 - RNA, 22 nt, Human
aaucuagaguucccagcauaaa

SEQ ID NO: 226485 - RNA, 22 nt, Human
cuagagaaucuuuuaagaagug

SEQ ID NO: 226486 - RNA, 22 nt, Human
gggcugcuuggaggaggcgcuc

SEQ ID NO: 226487 - RNA, 22 nt, Human
cugggucuggugucaggcgacg

SEQ ID NO: 226488 - RNA, 22 nt, Human
agucagcauuuucacugagcua

SEQ ID NO: 226489 - RNA, 22 nt, Human
uucucuggagaguaucuucuua

SEQ ID NO: 226490 - RNA, 22 nt, Human
ugacaaauauuugaagaggcug

SEQ ID NO: 226491 - RNA, 22 nt, Human
gacugucuccugucaugaggga

SEQ ID NO: 226492 - RNA, 22 nt, Human
gagagggcaaacuuguagcuaa

SEQ ID NO: 226493 - RNA, 22 nt, Human
gaguggagcaaaagagguagau

SEQ ID NO: 226494 - RNA, 22 nt, Human
acagagcaguaagaacacagcu

SEQ ID NO: 226495 - RNA, 22 nt, Human
aguacauauaguaauuuagcca

SEQ ID NO: 226496 - RNA, 22 nt, Human
ugagacaggagaggccccuccu

SEQ ID NO: 226497 - RNA, 23 nt, Human
agaaaaacaggauuguguuccua

SEQ ID NO: 226498 - RNA, 22 nt, Human
uacagaggaggggauuuuaaua

SEQ ID NO: 226499 - RNA, 22 nt, Human
gcaggcugugaggcucagaugg

SEQ ID NO: 226500 - RNA, 22 nt, Human
uucuguuuuagaaauaaguagu

SEQ ID NO: 226501 - RNA, 22 nt, Human
agcaaugcuuauugcugacuau

SEQ ID NO: 226502 - RNA, 22 nt, Human
gauuagaaauguuaccauacag

SEQ ID NO: 226503 - RNA, 22 nt, Human
gaauuccacuuuggcuuuuggg

SEQ ID NO: 226504 - RNA, 22 nt, Human
gucaggagagaucaggacagca

SEQ ID NO: 226505 - RNA, 22 nt, Human
aagaguaaagcaaagcacuugu

SEQ ID NO: 226506 - RNA, 22 nt, Human
uucauauuugaaacagaaguua

SEQ ID NO: 226507 - RNA, 21 nt, Human
ugucacagauucucagcuugc

SEQ ID NO: 226508 - RNA, 22 nt, Human
acauuuugaaagggaaauuguu

SEQ ID NO: 226509 - RNA, 22 nt, Human
uagggaugacuaugauucccac

SEQ ID NO: 226510 - RNA, 22 nt, Human
ugcccagcuauuccuuucuuag

SEQ ID NO: 226511 - RNA, 22 nt, Human
cauguuauuuauccauuaaaca

SEQ ID NO: 226512 - RNA, 22 nt, Human
aguggcagagucaggguuugga

SEQ ID NO: 226513 - RNA, 22 nt, Human
aagaauaaauuaagauacuuag

SEQ ID NO: 226514 - RNA, 22 nt, Human
agaagcuuccuacauuguucuu

SEQ ID NO: 226515 - RNA, 23 nt, Human
ggucagugaguucguuucucugg

SEQ ID NO: 226516 - RNA, 22 nt, Human
uaaggcuaggaauucucugaag

SEQ ID NO: 226517 - RNA, 22 nt, Human
gcauggcuccugucuuacuccc

SEQ ID NO: 226518 - RNA, 22 nt, Human
ugagaucugugcauguuaguua

SEQ ID NO: 226519 - RNA, 22 nt, Human
gggcacuggcagucggggacgc

SEQ ID NO: 226520 - RNA, 22 nt, Human
cagcagguauguuuguucagca

SEQ ID NO: 226521 - RNA, 22 nt, Human
cugccugcuuuucugggagccg

SEQ ID NO: 226522 - RNA, 22 nt, Human
aggucagcaggccaggggcgaa

SEQ ID NO: 226523 - RNA, 22 nt, Human
ugcuuuaaccaucuuguuugga

SEQ ID NO: 226524 - RNA, 22 nt, Human
uauugugccccucccaggaaca

SEQ ID NO: 226525 - RNA, 22 nt, Human
cagagacauuaagugccaugau

SEQ ID NO: 226526 - RNA, 22 nt, Human
gugaccaucagagaauaacaaa

SEQ ID NO: 226527 - RNA, 20 nt, Human
ugggagaagaacacuggaac

SEQ ID NO: 226528 - RNA, 22 nt, Human
cagugcuggaggggugcuugca

SEQ ID NO: 226529 - RNA, 22 nt, Human
cagagccaugguaugggcuugu

SEQ ID NO: 226530 - RNA, 22 nt, Human
ugacagaccacugcaacucugu

SEQ ID NO: 226531 - RNA, 22 nt, Human
ugauucaaauauuguguaugau

SEQ ID NO: 226532 - RNA, 22 nt, Human
cuggcaggucucgcugacgugu

SEQ ID NO: 226533 - RNA, 22 nt, Human
auuucacaucuaucucagauuu

SEQ ID NO: 226534 - RNA, 22 nt, Human
agugugucuuauccugggagaa

SEQ ID NO: 226535 - RNA, 22 nt, Human
gcaagaaaaaggcuucaugaac

SEQ ID NO: 226536 - RNA, 23 nt, Human
ugaaucaauuaugggauucaaug

SEQ ID NO: 226537 - RNA, 18 nt, Human
gaguccaggcucuucacc

SEQ ID NO: 226538 - RNA, 22 nt, Human
auauaguaagcagucuguaaau

SEQ ID NO: 226539 - RNA, 21 nt, Human
uagaaucacuaauaagaugua

SEQ ID NO: 226540 - RNA, 22 nt, Human
agcuguggaagacugucagggu

SEQ ID NO: 226541 - RNA, 22 nt, Human
agcucagguagacucagcaucu

SEQ ID NO: 226542 - RNA, 22 nt, Human
ucccagccuuucuuuucugcug

SEQ ID NO: 226543 - RNA, 22 nt, Human
acuggcagguccaucgcccuuu

SEQ ID NO: 226544 - RNA, 22 nt, Human
cugccugcucuauccaggccug

SEQ ID NO: 226545 - RNA, 22 nt, Human
ggaggcugagaggucgcagugg

SEQ ID NO: 226546 - RNA, 22 nt, Human
acuccaguucucuuguuuauaa

SEQ ID NO: 226547 - RNA, 23 nt, Human
aauaucugcagcuccuggggagg

SEQ ID NO: 226548 - RNA, 22 nt, Human
aguuuguaaaauguggccugga

SEQ ID NO: 226549 - RNA, 22 nt, Human
cugagagaugauauagcuuaau

SEQ ID NO: 226550 - RNA, 22 nt, Human
gccaguggcccucuggagaagg

SEQ ID NO: 226551 - RNA, 22 nt, Human
gucuggacuuuaucccaagguu

SEQ ID NO: 226552 - RNA, 22 nt, Human
uuucucugaggcuggccucccu

SEQ ID NO: 226553 - RNA, 22 nt, Human
aagcauuuuaguaaugaacuug

SEQ ID NO: 226554 - RNA, 17 nt, Human
cccaugagcccacuccc

SEQ ID NO: 226555 - RNA, 22 nt, Human
uacagagaguacagcauccaca

SEQ ID NO: 226556 - RNA, 22 nt, Human
guguaaaaacauacuauuucua

SEQ ID NO: 226557 - RNA, 22 nt, Human
accugcaggcacaggugugcgc

SEQ ID NO: 226558 - RNA, 22 nt, Human
ugucuagacaagaaguauugcc

SEQ ID NO: 226559 - RNA, 22 nt, Human
agccuggcuuagcucucucacu

SEQ ID NO: 226560 - RNA, 22 nt, Human
ucauugcaguugaguuguguua

SEQ ID NO: 226561 - RNA, 22 nt, Human
cacugucuuuugugaagacaau

SEQ ID NO: 226562 - RNA, 22 nt, Human
acagguggucuuugcuccuuuu

SEQ ID NO: 226563 - RNA, 22 nt, Human
cgagcaugaugacggcuguggc

SEQ ID NO: 226564 - RNA, 22 nt, Human
gugccuggcacacagaaggcaa

SEQ ID NO: 226565 - RNA, 22 nt, Human
accagcccucaggucagauacu

SEQ ID NO: 226566 - RNA, 22 nt, Human
guccaggcugcccaggguccug

SEQ ID NO: 226567 - RNA, 20 nt, Human
aaaagagugcuucaacugcu

SEQ ID NO: 226568 - RNA, 22 nt, Human
cauguuaaauugaguuugcaau

SEQ ID NO: 226569 - RNA, 22 nt, Human
gcuugguuucuaacuuuucaua

SEQ ID NO: 226570 - RNA, 22 nt, Human
uggagccagcgagccgaggcgg

SEQ ID NO: 226571 - RNA, 22 nt, Human
caaguuauuccuuuacacuaua

SEQ ID NO: 226572 - RNA, 22 nt, Human
ggccuccaucuuaucuuacucu

SEQ ID NO: 226573 - RNA, 22 nt, Human
ucaugacaggugaguuuuuagg

SEQ ID NO: 226574 - RNA, 22 nt, Human
uuuugaaagggugauuuggcuu

SEQ ID NO: 226575 - RNA, 22 nt, Human
uccuccugccuuugcuucuugu

SEQ ID NO: 226576 - RNA, 22 nt, Human
aggccagcgcugcuagcucccg

SEQ ID NO: 226577 - RNA, 22 nt, Human
gauccacagggcccuggcccag

SEQ ID NO: 226578 - RNA, 22 nt, Human
uugacaggaaaaaguuuaggau

SEQ ID NO: 226579 - RNA, 22 nt, Human
aggcugaggaucccuguguucu

SEQ ID NO: 226580 - RNA, 22 nt, Human
ggacaagccugugaguggguuu

SEQ ID NO: 226581 - RNA, 20 nt, Human
ucugccuuaugaccuucgcc

SEQ ID NO: 226582 - RNA, 22 nt, Human
gcagagcuggaacugguacuca

SEQ ID NO: 226583 - RNA, 22 nt, Human
augaacaaucuguugacuucug

SEQ ID NO: 226584 - RNA, 22 nt, Human
uggagaugaauauguguaccug

SEQ ID NO: 226585 - RNA, 22 nt, Human
ugcaggugcugauaccuacucc

SEQ ID NO: 226586 - RNA, 22 nt, Human
ugcuccuucccuucccagugag

SEQ ID NO: 226587 - RNA, 22 nt, Human
ugcucccagggacucuggcugg

SEQ ID NO: 226588 - RNA, 22 nt, Human
ugcccagaauagaugggcugug

SEQ ID NO: 226589 - RNA, 22 nt, Human
cauggcuuuuagcccuacauga

SEQ ID NO: 226590 - RNA, 22 nt, Human
accuagaaacugacagaauauu

SEQ ID NO: 226591 - RNA, 21 nt, Human
aagagcucuuuuguuaugguc

SEQ ID NO: 226592 - RNA, 22 nt, Human
acagcagagaacuuuagagggu

SEQ ID NO: 226593 - RNA, 22 nt, Human
gucuucuuguguugccugucuu

SEQ ID NO: 226594 - RNA, 22 nt, Human
ggaccacaauauuugugagguu

SEQ ID NO: 226595 - RNA, 22 nt, Human
acaggcaggcgggacagcccga

SEQ ID NO: 226596 - RNA, 19 nt, Human
agcuguggaugugggauuu

SEQ ID NO: 226597 - RNA, 22 nt, Human
cucucaguccugcgcgccucug

SEQ ID NO: 226598 - RNA, 22 nt, Human
agugugaguaauucagggaggg

SEQ ID NO: 226599 - RNA, 21 nt, Human
ucucuuucuggaagcuucccu

SEQ ID NO: 226600 - RNA, 22 nt, Human
ggacuucuggggacuguagauu

SEQ ID NO: 226601 - RNA, 19 nt, Human
cuggcugcaaugccagggu

SEQ ID NO: 226602 - RNA, 22 nt, Human
ccucaggauacaggagccacag

SEQ ID NO: 226603 - RNA, 22 nt, Human
gucacacucuucccuccacaug

SEQ ID NO: 226604 - RNA, 21 nt, Human
uuugaauagaaauagugcuua

SEQ ID NO: 226605 - RNA, 22 nt, Human
aucuguguccuuauaagagaca

SEQ ID NO: 226606 - RNA, 22 nt, Human
ggaaguagaaguaaugaaauca

SEQ ID NO: 226607 - RNA, 22 nt, Human
uccucacagggcaggaaggagg

SEQ ID NO: 226608 - RNA, 22 nt, Human
cagacuuucugacucccuugcc

SEQ ID NO: 226609 - RNA, 22 nt, Human
gagguggguguaucacagguca

SEQ ID NO: 226610 - RNA, 22 nt, Human
ccugacaggcggaggcugcagu

SEQ ID NO: 226611 - RNA, 22 nt, Human
acauucaugcaccuuccuaucc

SEQ ID NO: 226612 - RNA, 22 nt, Human
ccaaauaauauuucagaaccau

SEQ ID NO: 226613 - RNA, 20 nt, Human
auuauucauacaugugugac

SEQ ID NO: 226614 - RNA, 17 nt, Human
ucuucucuuccagucuu

SEQ ID NO: 226615 - RNA, 22 nt, Human
agucaggauaugccuugugggc

SEQ ID NO: 226616 - RNA, 23 nt, Human
gguauucauucauuuaugcuaag

SEQ ID NO: 226617 - RNA, 22 nt, Human
gaggucugggauggggccugaa

SEQ ID NO: 226618 - RNA, 22 nt, Human
gaucugguacaggccugcagcc

SEQ ID NO: 226619 - RNA, 22 nt, Human
uuacaguuuaagaggaaacaaa

SEQ ID NO: 226620 - RNA, 22 nt, Human
auucuguuacuuggugaucuuc

SEQ ID NO: 226621 - RNA, 22 nt, Human
uuauucugcacuuuuaaaauau

SEQ ID NO: 226622 - RNA, 22 nt, Human
cagcccaggacugcagguguuu

SEQ ID NO: 226623 - RNA, 22 nt, Human
gagugcaguaucuucugugucc

SEQ ID NO: 226624 - RNA, 22 nt, Human
aaccuggcugcaaagaagggga

SEQ ID NO: 226625 - RNA, 22 nt, Human
gggaggagugaagauucaccug

SEQ ID NO: 226626 - RNA, 22 nt, Human
ucauuguuucugcuuuucauga

SEQ ID NO: 226627 - RNA, 22 nt, Human
guguccugggcauuaggcuuag

SEQ ID NO: 226628 - RNA, 22 nt, Human
agagcugagaauguggcuuccu

SEQ ID NO: 226629 - RNA, 22 nt, Human
ucaagauguccagugccuauaa

SEQ ID NO: 226630 - RNA, 22 nt, Human
agaucccaaaucaccugcuuau

SEQ ID NO: 226631 - RNA, 22 nt, Human
gcugggaggaauuuggggaaua

SEQ ID NO: 226632 - RNA, 22 nt, Human
ugccuacuaguacuauuuugug

SEQ ID NO: 226633 - RNA, 22 nt, Human
aaauuuuagacuccugggucua

SEQ ID NO: 226634 - RNA, 22 nt, Human
ucugaaauacugcagguucucu

SEQ ID NO: 226635 - RNA, 22 nt, Human
uuauucuuuaaacauauauguu

SEQ ID NO: 226636 - RNA, 22 nt, Human
acuccuguguggcugggagguu

SEQ ID NO: 226637 - RNA, 22 nt, Human
aaaggcuucagugaguggguau

SEQ ID NO: 226638 - RNA, 22 nt, Human
uugauucauuuauugagugccu

SEQ ID NO: 226639 - RNA, 22 nt, Human
acacuuauuuuuguccacuucc

SEQ ID NO: 226640 - RNA, 20 nt, Human
ccaccuggccaaggcugugc

SEQ ID NO: 226641 - RNA, 22 nt, Human
uacacauacaccaaugugguca

SEQ ID NO: 226642 - RNA, 23 nt, Human
uugaggagcagcgcuuuuuaccg

SEQ ID NO: 226643 - RNA, 22 nt, Human
acugucuuccaggucuggaggu

SEQ ID NO: 226644 - RNA, 22 nt, Human
uagggauggaaacccguuuucu

SEQ ID NO: 226645 - RNA, 22 nt, Human
aaacucuauuucuguuggcuua

SEQ ID NO: 226646 - RNA, 22 nt, Human
ucuccaggagcaagucacccag

SEQ ID NO: 226647 - RNA, 22 nt, Human
uuguguccuaacaucuaguuaa

SEQ ID NO: 226648 - RNA, 22 nt, Human
uguucuuugcuguugauguaga

SEQ ID NO: 226649 - RNA, 22 nt, Human
ucucugaagagucagacauaac

SEQ ID NO: 226650 - RNA, 21 nt, Human
ccuucuccauuacaguaagcu

SEQ ID NO: 226651 - RNA, 22 nt, Human
ugaaaucuucacuaagucucuu

SEQ ID NO: 226652 - RNA, 22 nt, Human
aaagacuagcauuuauauguac

SEQ ID NO: 226653 - RNA, 22 nt, Human
aaaagucucucugaguaaaagu

SEQ ID NO: 226654 - RNA, 22 nt, Human
aggcuguauguuuccauuugaa

SEQ ID NO: 226655 - RNA, 22 nt, Human
aaaagagucuuaggcagucaua

SEQ ID NO: 226656 - RNA, 20 nt, Human
ucugugcauugccugcuggu

SEQ ID NO: 226657 - RNA, 22 nt, Human
agcugcagaaaggacaacuaau

SEQ ID NO: 226658 - RNA, 22 nt, Human
uucuauguucuaagucucaagg

SEQ ID NO: 226659 - RNA, 22 nt, Human
gugcacaggugggaaaaugagu

SEQ ID NO: 226660 - RNA, 22 nt, Human
cuguccuggccgcccuugugag

SEQ ID NO: 226661 - RNA, 22 nt, Human
uauguacaaucagcaguucaua

SEQ ID NO: 226662 - RNA, 23 nt, Human
ugcagcugccucuggcgggccgg

SEQ ID NO: 226663 - RNA, 22 nt, Human
cugccucagcguuguggcccua

SEQ ID NO: 226664 - RNA, 22 nt, Human
gggguuaacaguauugcucaug

SEQ ID NO: 226665 - RNA, 22 nt, Human
ucacuaagugccgaguuuaguu

SEQ ID NO: 226666 - RNA, 22 nt, Human
auugguuaacucugugugucaa

SEQ ID NO: 226667 - RNA, 22 nt, Human
uugauacaggcucuauuucauc

SEQ ID NO: 226668 - RNA, 22 nt, Human
uauugcacaugcgcuagaacca

SEQ ID NO: 226669 - RNA, 22 nt, Human
uugagacuccugguguagaaua

SEQ ID NO: 226670 - RNA, 22 nt, Human
ccuggcagcccagagcgccgcu

SEQ ID NO: 226671 - RNA, 22 nt, Human
caaaaguucucacccagacaug

SEQ ID NO: 226672 - RNA, 17 nt, Human
agcuccuggggucuuua

SEQ ID NO: 226673 - RNA, 22 nt, Human
uccuucuggaggcucuaagggg

SEQ ID NO: 226674 - RNA, 22 nt, Human
agggccuccagggcagcagugg

SEQ ID NO: 226675 - RNA, 22 nt, Human
uggguccuuuuuggacuucuuc

SEQ ID NO: 226676 - RNA, 22 nt, Human
aauggaauaccuagguggccca

SEQ ID NO: 226677 - RNA, 22 nt, Human
aaggccagagcagacuggaguu

SEQ ID NO: 226678 - RNA, 22 nt, Human
uuguagcuagguuuuuguagaa

SEQ ID NO: 226679 - RNA, 22 nt, Human
agcuggcucagccggguggucu

SEQ ID NO: 226680 - RNA, 22 nt, Human
gauccagcuucuacacagagcu

SEQ ID NO: 226681 - RNA, 22 nt, Human
agccucagcacgcagcucugug

SEQ ID NO: 226682 - RNA, 22 nt, Human
ccagaggcuggcaagggcuccu

SEQ ID NO: 226683 - RNA, 22 nt, Human
uagaaccuauuagaaauguauu

SEQ ID NO: 226684 - RNA, 22 nt, Human
gaaucucaggaagaucucugca

SEQ ID NO: 226685 - RNA, 22 nt, Human
cuuagaaagaguuuucuccccu

SEQ ID NO: 226686 - RNA, 20 nt, Human
aacacaggguuaccaucaga

SEQ ID NO: 226687 - RNA, 22 nt, Human
uuucugugguggguaguucaga

SEQ ID NO: 226688 - RNA, 22 nt, Human
aucagcaaguccuguuaauucu

SEQ ID NO: 226689 - RNA, 22 nt, Human
auacaguagacaaucucaugaa

SEQ ID NO: 226690 - RNA, 22 nt, Human
cauggcucacaggaugggcuag

SEQ ID NO: 226691 - RNA, 22 nt, Human
ugggccacgugacccuuacccu

SEQ ID NO: 226692 - RNA, 22 nt, Human
ccucuggcaagugauuuaucau

SEQ ID NO: 226693 - RNA, 22 nt, Human
cuuaagaauauugaaguugugg

SEQ ID NO: 226694 - RNA, 22 nt, Human
gugcuucugccaacuaauuaac

SEQ ID NO: 226695 - RNA, 17 nt, Human
ccugccugagccauagc

SEQ ID NO: 226696 - RNA, 22 nt, Human
uccaguguugucagaucaucug

SEQ ID NO: 226697 - RNA, 21 nt, Human
gaaggcuucugccuggaggag

SEQ ID NO: 226698 - RNA, 22 nt, Human
agugucuuugucucucaagcac

SEQ ID NO: 226699 - RNA, 22 nt, Human
uucacaaaaaugcugaacaguu

SEQ ID NO: 226700 - RNA, 22 nt, Human
agugucugagcuaucauuaggg

SEQ ID NO: 226701 - RNA, 22 nt, Human
caggcugcaagaaaggcauuca

SEQ ID NO: 226702 - RNA, 22 nt, Human
acugucuguccugcucuccgug

SEQ ID NO: 226703 - RNA, 22 nt, Human
gcaguggggaaugcuggggaga

SEQ ID NO: 226704 - RNA, 22 nt, Human
ucugcaccuccugcuugcuaga

SEQ ID NO: 226705 - RNA, 22 nt, Human
uucuuuuaauugugggggagug

SEQ ID NO: 226706 - RNA, 22 nt, Human
guaaagaaggcaaccugguuau

SEQ ID NO: 226707 - RNA, 22 nt, Human
cuuccugcccacuuccugcugg

SEQ ID NO: 226708 - RNA, 22 nt, Human
uucuccagagggcucugcagga

SEQ ID NO: 226709 - RNA, 22 nt, Human
ugucaguucagugauuacaaaa

SEQ ID NO: 226710 - RNA, 23 nt, Human
cacaaagguuccauucucucacc

SEQ ID NO: 226711 - RNA, 22 nt, Human
gcauuauuaauagcugcaugag

SEQ ID NO: 226712 - RNA, 22 nt, Human
aucgugcauuuuuauuaacccu

SEQ ID NO: 226713 - RNA, 22 nt, Human
uaguaugggaagaacuuuguag

SEQ ID NO: 226714 - RNA, 22 nt, Human
gugcccucaugaaacgaaggau

SEQ ID NO: 226715 - RNA, 22 nt, Human
cauuuguaucugggcugcugug

SEQ ID NO: 226716 - RNA, 22 nt, Human
gguccuggaaauugacggaaag

SEQ ID NO: 226717 - RNA, 22 nt, Human
gugggcugcccuugaggucagc

SEQ ID NO: 226718 - RNA, 22 nt, Human
uccaggcugacgcagcuauuua

SEQ ID NO: 226719 - RNA, 22 nt, Human
uguacagauugaucauggagag

SEQ ID NO: 226720 - RNA, 22 nt, Human
gggcagguuggcaucccgggca

SEQ ID NO: 226721 - RNA, 22 nt, Human
ugaaauguacaagugcuuuuuu

SEQ ID NO: 226722 - RNA, 22 nt, Human
aagaugaagaacaugagcacac

SEQ ID NO: 226723 - RNA, 22 nt, Human
uauuuaguuaucuuucauaaaa

SEQ ID NO: 226724 - RNA, 22 nt, Human
aagcugaggucaaguagcuagu

SEQ ID NO: 226725 - RNA, 22 nt, Human
uagaaaugucgucuccacauuu

SEQ ID NO: 226726 - RNA, 22 nt, Human
guagacagguuauaaaucagug

SEQ ID NO: 226727 - RNA, 22 nt, Human
aagaauaaguagaugggagaag

SEQ ID NO: 226728 - RNA, 22 nt, Human
cagcaaggacugggcaugugaa

SEQ ID NO: 226729 - RNA, 22 nt, Human
ucucuuauuuugccuuugacaa

SEQ ID NO: 226730 - RNA, 22 nt, Human
gccuggagaagauggaacuagc

SEQ ID NO: 226731 - RNA, 22 nt, Human
aaauccuaauaaugcacuagug

SEQ ID NO: 226732 - RNA, 22 nt, Human
acaagcuguggugggacaagag

SEQ ID NO: 226733 - RNA, 22 nt, Human
ugucuccacaggugucagcuca

SEQ ID NO: 226734 - RNA, 18 nt, Human
gcuuggcugcagagagag

SEQ ID NO: 226735 - RNA, 22 nt, Human
ugccucugcugcuguggcauca

SEQ ID NO: 226736 - RNA, 15 nt, Human
ucugggcugugagca

SEQ ID NO: 226737 - RNA, 22 nt, Human
auuuauugaacacugacuaugu

SEQ ID NO: 226738 - RNA, 22 nt, Human
gcaugugucccucagucugugc

SEQ ID NO: 226739 - RNA, 22 nt, Human
cuggcucaccuccgcuccagca

SEQ ID NO: 226740 - RNA, 22 nt, Human
aggcaauuguuuguguaauagg

SEQ ID NO: 226741 - RNA, 22 nt, Human
aagacauugucauuuuauaauu

SEQ ID NO: 226742 - RNA, 22 nt, Human
gaauuauaaacuagugacuuca

SEQ ID NO: 226743 - RNA, 22 nt, Human
gcacagcaguggcauaaacaau

SEQ ID NO: 226744 - RNA, 22 nt, Human
cccaggcuaguaugauaucagu

SEQ ID NO: 226745 - RNA, 22 nt, Human
agaggccagaaaguaugccacc

SEQ ID NO: 226746 - RNA, 22 nt, Human
gaaauugugcauuuagcaacac

SEQ ID NO: 226747 - RNA, 22 nt, Human
gcugccuucuggaggaagugaa

SEQ ID NO: 226748 - RNA, 22 nt, Human
aggcuucacgaugggugaggug

SEQ ID NO: 226749 - RNA, 22 nt, Human
uacaaugugugcuucuugucac

SEQ ID NO: 226750 - RNA, 18 nt, Human
ggaaguuuggguccccug

SEQ ID NO: 226751 - RNA, 22 nt, Human
uuacaagauaaccugaugcugu

SEQ ID NO: 226752 - RNA, 22 nt, Human
uauuauugaaucaguucuuuga

SEQ ID NO: 226753 - RNA, 22 nt, Human
ucuggcuucaguaggguucacu

SEQ ID NO: 226754 - RNA, 22 nt, Human
ucacaggcuccagggccuggau

SEQ ID NO: 226755 - RNA, 22 nt, Human
ucagaggagggacucagaccca

SEQ ID NO: 226756 - RNA, 22 nt, Human
gcugggcucauuugugugucug

SEQ ID NO: 226757 - RNA, 22 nt, Human
cauaauuuuuuuaagucagaac

SEQ ID NO: 226758 - RNA, 22 nt, Human
agagcuggauggucaagauggc

SEQ ID NO: 226759 - RNA, 22 nt, Human
agguucuugacucuaccuucca

SEQ ID NO: 226760 - RNA, 22 nt, Human
ggucagugcgauuucccacucc

SEQ ID NO: 226761 - RNA, 22 nt, Human
auuuagagugaaacauuaugca

SEQ ID NO: 226762 - RNA, 22 nt, Human
ugagguggccgaggagcaggac

SEQ ID NO: 226763 - RNA, 22 nt, Human
uugccaggggacaucuggagcc

SEQ ID NO: 226764 - RNA, 22 nt, Human
cagcccugcuggcaaugaugag

SEQ ID NO: 226765 - RNA, 22 nt, Human
cugcugucgccgagcugcaugc

SEQ ID NO: 226766 - RNA, 22 nt, Human
ucaggcugcccguucagggcuc

SEQ ID NO: 226767 - RNA, 22 nt, Human
cuggccuggcagggagggcaug

SEQ ID NO: 226768 - RNA, 22 nt, Human
gaacagcauguaagaagcuacu

SEQ ID NO: 226769 - RNA, 22 nt, Human
aacacugucuuauacuucaaug

SEQ ID NO: 226770 - RNA, 20 nt, Human
ggagaugcagcccaggugcc

SEQ ID NO: 226771 - RNA, 17 nt, Human
cuacuucuucuauucuu

SEQ ID NO: 226772 - RNA, 22 nt, Human
uaaacagagugcuaguucacgg

SEQ ID NO: 226773 - RNA, 22 nt, Human
acaaaccagcuuaagcaagaug

SEQ ID NO: 226774 - RNA, 22 nt, Human
gucuccuaaaccauccugguac

SEQ ID NO: 226775 - RNA, 22 nt, Human
uuccaggaggagguacuagagg

SEQ ID NO: 226776 - RNA, 20 nt, Human
aacugccugcccagaggugg

SEQ ID NO: 226777 - RNA, 22 nt, Human
gcucucugguuccagucaggaa

SEQ ID NO: 226778 - RNA, 22 nt, Human
uuuggaauucugcagcucaugu

SEQ ID NO: 226779 - RNA, 22 nt, Human
acuggcugaggaaguugccacu

SEQ ID NO: 226780 - RNA, 22 nt, Human
cuuagggaauugggaggaugcc

SEQ ID NO: 226781 - RNA, 22 nt, Human
gacagacaggaggcauucaggg

SEQ ID NO: 226782 - RNA, 22 nt, Human
acagugaaugagaauggagaaa

SEQ ID NO: 226783 - RNA, 19 nt, Human
agugagcauggcuugacug

SEQ ID NO: 226784 - RNA, 22 nt, Human
ucuuccaagguugcacacuauc

SEQ ID NO: 226785 - RNA, 22 nt, Human
uucuagaaccaugacuucaggg

SEQ ID NO: 226786 - RNA, 22 nt, Human
ccaggcuuucccagccucucca

SEQ ID NO: 226787 - RNA, 22 nt, Human
uccauuuucaucucauguauaa

SEQ ID NO: 226788 - RNA, 22 nt, Human
ucucaggaauagaguggcagca

SEQ ID NO: 226789 - RNA, 22 nt, Human
uagcaagaaaacacaagaauua

SEQ ID NO: 226790 - RNA, 22 nt, Human
agccuccaguagcugaagagac

SEQ ID NO: 226791 - RNA, 22 nt, Human
aaagccuuugucucaggcucug

SEQ ID NO: 226792 - RNA, 23 nt, Human
cugggccuauggucugaauccaa

SEQ ID NO: 226793 - RNA, 22 nt, Human
gcugaaaucccagcauucccca

SEQ ID NO: 226794 - RNA, 22 nt, Human
gccuacuuaguagcugggauua

SEQ ID NO: 226795 - RNA, 20 nt, Human
ugcaggaauuugcauuccuu

SEQ ID NO: 226796 - RNA, 22 nt, Human
uagcaaaagccacgauuacuuu

SEQ ID NO: 226797 - RNA, 22 nt, Human
cuccccuuuggaagaagggucu

SEQ ID NO: 226798 - RNA, 22 nt, Human
uuagaaaaaggcuguggucuua

SEQ ID NO: 226799 - RNA, 22 nt, Human
uacagaggagaccaaggcucag

SEQ ID NO: 226800 - RNA, 22 nt, Human
agcugaaauucuuuguccucag

SEQ ID NO: 226801 - RNA, 22 nt, Human
acagugcaaacuuuugucuccu

SEQ ID NO: 226802 - RNA, 22 nt, Human
cauuagggucucucagcugaau

SEQ ID NO: 226803 - RNA, 22 nt, Human
aagaacuuuaaagcacuuauga

SEQ ID NO: 226804 - RNA, 22 nt, Human
gccugcugaagccagagugugu

SEQ ID NO: 226805 - RNA, 22 nt, Human
ggaaggaaguaaaugaugcuau

SEQ ID NO: 226806 - RNA, 22 nt, Human
agauggucuuuugaguaaugaa

SEQ ID NO: 226807 - RNA, 22 nt, Human
acucaguuaucauguguccaca

SEQ ID NO: 226808 - RNA, 22 nt, Human
acuuugaaacuaaaauucauua

SEQ ID NO: 226809 - RNA, 22 nt, Human
ucaacaguggcaaagaggcacg

SEQ ID NO: 226810 - RNA, 22 nt, Human
cuaguuuaaagcagcugaaagg

SEQ ID NO: 226811 - RNA, 22 nt, Human
uggauuuauuagguuggugaaa

SEQ ID NO: 226812 - RNA, 22 nt, Human
acauuucuuccuaauuaucccu

SEQ ID NO: 226813 - RNA, 22 nt, Human
aagcagccuggcaugaugcuuu

SEQ ID NO: 226814 - RNA, 22 nt, Human
guuguuuuaaaauacuccagaa

SEQ ID NO: 226815 - RNA, 22 nt, Human
auuuauuaugggauuuggcuca

SEQ ID NO: 226816 - RNA, 22 nt, Human
gauguacaagauuguaggaaug

SEQ ID NO: 226817 - RNA, 22 nt, Human
uuuggccuuaguccagaagaag

SEQ ID NO: 226818 - RNA, 22 nt, Human
gcucuagaucauaggucauuau

SEQ ID NO: 226819 - RNA, 22 nt, Human
aacuggugagauaaauuauuua

SEQ ID NO: 226820 - RNA, 22 nt, Human
gccuccuggaagucacauguuu

SEQ ID NO: 226821 - RNA, 20 nt, Human
ugcacagcugugaauaggau

SEQ ID NO: 226822 - RNA, 22 nt, Human
gugcacccccaaggagguggag

SEQ ID NO: 226823 - RNA, 22 nt, Human
gcagcccaggcucgcucacugc

SEQ ID NO: 226824 - RNA, 20 nt, Human
ccagcauguacacaugugga

SEQ ID NO: 226825 - RNA, 22 nt, Human
ggcugcucuccaucccaggccu

SEQ ID NO: 226826 - RNA, 22 nt, Human
gucuggaagugucuuguuaagu

SEQ ID NO: 226827 - RNA, 22 nt, Human
uuccuggcuucauacuuuguac

SEQ ID NO: 226828 - RNA, 22 nt, Human
cuacauuucauccagggagagc

SEQ ID NO: 226829 - RNA, 22 nt, Human
gugcugaggugggugggcagcc

SEQ ID NO: 226830 - RNA, 22 nt, Human
cagguggcuuauuagggucagu

SEQ ID NO: 226831 - RNA, 22 nt, Human
cacugagguaucugucucuccu

SEQ ID NO: 226832 - RNA, 22 nt, Human
agguuucuuuaugcugcuagaa

SEQ ID NO: 226833 - RNA, 22 nt, Human
ccugggaagcccauagcagcuu

SEQ ID NO: 226834 - RNA, 22 nt, Human
uggaugcugcugucagggaugg

SEQ ID NO: 226835 - RNA, 22 nt, Human
agaggaauguauuucccugcaa

SEQ ID NO: 226836 - RNA, 22 nt, Human
uuagcagcuaaacugacagacc

SEQ ID NO: 226837 - RNA, 22 nt, Human
aguggagacaggacagucgaua

SEQ ID NO: 226838 - RNA, 22 nt, Human
aaaaccagguagcaaaggagac

SEQ ID NO: 226839 - RNA, 22 nt, Human
caggagaccugguaagccaagu

SEQ ID NO: 226840 - RNA, 21 nt, Human
caauaaacugcacauugagac

SEQ ID NO: 226841 - RNA, 22 nt, Human
cgucccaguuccagccgcgcug

SEQ ID NO: 226842 - RNA, 22 nt, Human
gcccuagcgccagcucagcacc

SEQ ID NO: 226843 - RNA, 22 nt, Human
cugccaggccuccgcugucccc

SEQ ID NO: 226844 - RNA, 22 nt, Human
cugcugugcaacauugcaccua

SEQ ID NO: 226845 - RNA, 22 nt, Human
uggcuucucaaaauaacugguu

SEQ ID NO: 226846 - RNA, 22 nt, Human
uuuaguucacaccaggguagca

SEQ ID NO: 226847 - RNA, 22 nt, Human
ucacaucacuagcugguaauga

SEQ ID NO: 226848 - RNA, 22 nt, Human
ugguccuguagcacuugauuag

SEQ ID NO: 226849 - RNA, 22 nt, Human
uuugacucauugauuuucucug

SEQ ID NO: 226850 - RNA, 22 nt, Human
ugcaggucauguggcgggacug

SEQ ID NO: 226851 - RNA, 22 nt, Human
caguaaaugcagauauagauac

SEQ ID NO: 226852 - RNA, 22 nt, Human
ccaggccuguguuguguggagg

SEQ ID NO: 226853 - RNA, 22 nt, Human
ugaaagcuuguuggaaauguag

SEQ ID NO: 226854 - RNA, 22 nt, Human
ggaaaaauagaguauacuuuaa

SEQ ID NO: 226855 - RNA, 22 nt, Human
cccugggcaagcccuauuuucc

SEQ ID NO: 226856 - RNA, 23 nt, Human
uuguacagcccagauuccucuuc

SEQ ID NO: 226857 - RNA, 22 nt, Human
aauuacaaauguagacucucau

SEQ ID NO: 226858 - RNA, 22 nt, Human
gaaaaggcugcccacuuauuga

SEQ ID NO: 226859 - RNA, 22 nt, Human
aggccucagccugccaggccug

SEQ ID NO: 226860 - RNA, 19 nt, Human
uaagacacaaaugcaagcc

SEQ ID NO: 226861 - RNA, 22 nt, Human
aggauccuuuuucugcuguuug

SEQ ID NO: 226862 - RNA, 22 nt, Human
cuccagggcagcauggcagugg

SEQ ID NO: 226863 - RNA, 22 nt, Human
ugggaagaggcgggaggcuguu

SEQ ID NO: 226864 - RNA, 22 nt, Human
uaggugucuuguguaugguaca

SEQ ID NO: 226865 - RNA, 22 nt, Human
auggaguggggacugcagugga

SEQ ID NO: 226866 - RNA, 22 nt, Human
accuucaacucaaaguguccca

SEQ ID NO: 226867 - RNA, 22 nt, Human
gcuacaggugacagccucugca

SEQ ID NO: 226868 - RNA, 22 nt, Human
ccugggcucugucagaauuggg

SEQ ID NO: 226869 - RNA, 22 nt, Human
cuguuaaaugagaaagcagacu

SEQ ID NO: 226870 - RNA, 16 nt, Human
uccuggccuuuggaag

SEQ ID NO: 226871 - RNA, 22 nt, Human
guccagagagaucuucugauag

SEQ ID NO: 226872 - RNA, 22 nt, Human
uuacauauugucuauuguucaa

SEQ ID NO: 226873 - RNA, 22 nt, Human
ccaagcugccugaggcaaauuu

SEQ ID NO: 226874 - RNA, 22 nt, Human
gagcagggagacaacucuggug

SEQ ID NO: 226875 - RNA, 22 nt, Human
caaggcagaauucagacucagg

SEQ ID NO: 226876 - RNA, 22 nt, Human
ugaagcaguucucagaaguggg

SEQ ID NO: 226877 - RNA, 22 nt, Human
acuggcagagguuggacaccau

SEQ ID NO: 226878 - RNA, 22 nt, Human
ccaggcuggucugaauuucuag

SEQ ID NO: 226879 - RNA, 22 nt, Human
gcauucaggaaccggaagggua

SEQ ID NO: 226880 - RNA, 22 nt, Human
ucaagacaucacugugcauuuu

SEQ ID NO: 226881 - RNA, 22 nt, Human
uccagccccgggauguucuuca

SEQ ID NO: 226882 - RNA, 22 nt, Human
cuuuccaacucuagugaaauuu

SEQ ID NO: 226883 - RNA, 22 nt, Human
uggcagucugccucuucaccau

SEQ ID NO: 226884 - RNA, 22 nt, Human
gagccagcugagcugcacuguc

SEQ ID NO: 226885 - RNA, 19 nt, Human
ucauugaacauaauuacuu

SEQ ID NO: 226886 - RNA, 22 nt, Human
gagcuccacuuagcaaggccac

SEQ ID NO: 226887 - RNA, 22 nt, Human
gccagagguaucaaagauagua

SEQ ID NO: 226888 - RNA, 22 nt, Human
ucuagaauuuugccauauagcu

SEQ ID NO: 226889 - RNA, 19 nt, Human
gacauuccugacacuggcu

SEQ ID NO: 226890 - RNA, 22 nt, Human
ugggcucugaagucagucugcu

SEQ ID NO: 226891 - RNA, 22 nt, Human
gacuuucucuccucccaggugu

SEQ ID NO: 226892 - RNA, 22 nt, Human
ucugagagccacugaacagcaa

SEQ ID NO: 226893 - RNA, 22 nt, Human
uauguacaucguugaauucaaa

SEQ ID NO: 226894 - RNA, 22 nt, Human
uugcuaauaaaguuuuuaugug

SEQ ID NO: 226895 - RNA, 22 nt, Human
cucaguuuuuuuaagagccaug

SEQ ID NO: 226896 - RNA, 22 nt, Human
aggcuucagaaagaguaauugg

SEQ ID NO: 226897 - RNA, 22 nt, Human
uggguaggaaucgaguguaugg

SEQ ID NO: 226898 - RNA, 22 nt, Human
uuuauaucuggaguugcuagga

SEQ ID NO: 226899 - RNA, 22 nt, Human
uggggagagauugaggaguuuu

SEQ ID NO: 226900 - RNA, 22 nt, Human
ucuuccugcuuggugugucugg

SEQ ID NO: 226901 - RNA, 22 nt, Human
uggagcagaguucagcggggag

SEQ ID NO: 226902 - RNA, 22 nt, Human
uuguauuugauugucauaucgu

SEQ ID NO: 226903 - RNA, 22 nt, Human
auuaguguacaucucacacgca

SEQ ID NO: 226904 - RNA, 22 nt, Human
uucaggauccccuugaugggcu

SEQ ID NO: 226905 - RNA, 19 nt, Human
gcaggcuugggucucccca

SEQ ID NO: 226906 - RNA, 18 nt, Human
uucggcagauacgcuugg

SEQ ID NO: 226907 - RNA, 22 nt, Human
ucugccccugcugggcacagag

SEQ ID NO: 226908 - RNA, 22 nt, Human
auguuaaauaaucccuuaaagc

SEQ ID NO: 226909 - RNA, 19 nt, Human
uuucuguuugcuucugguu

SEQ ID NO: 226910 - RNA, 22 nt, Human
aagugcuuggcuaaugguuaug

SEQ ID NO: 226911 - RNA, 22 nt, Human
caucuuugaacucuguauaaac

SEQ ID NO: 226912 - RNA, 22 nt, Human
auuuucacccugaauauauuga

SEQ ID NO: 226913 - RNA, 22 nt, Human
ugauggucaacaauuuugagug

SEQ ID NO: 226914 - RNA, 22 nt, Human
ucugggggcgaccagggacugc

SEQ ID NO: 226915 - RNA, 22 nt, Human
caguuauaggagccauuguaua

SEQ ID NO: 226916 - RNA, 22 nt, Human
caugaguucaucugcuucucuu

SEQ ID NO: 226917 - RNA, 22 nt, Human
uuugaaaguccuaggagagucc

SEQ ID NO: 226918 - RNA, 22 nt, Human
agaggcagcagucauacuacag

SEQ ID NO: 226919 - RNA, 22 nt, Human
uuuaucugaccucacuucuuaa

SEQ ID NO: 226920 - RNA, 21 nt, Human
uacuguagccuugcacuguag

SEQ ID NO: 226921 - RNA, 22 nt, Human
uucacaagucauuagcugcaua

SEQ ID NO: 226922 - RNA, 22 nt, Human
gucaggggaugugcugguggcc

SEQ ID NO: 226923 - RNA, 22 nt, Human
auuugcaaagucguaucuguga

SEQ ID NO: 226924 - RNA, 22 nt, Human
auuuggaaaugcaucucuugag

SEQ ID NO: 226925 - RNA, 22 nt, Human
gcuccccuugguccuccuggga

SEQ ID NO: 226926 - RNA, 22 nt, Human
cacuuucucaugaauuuggccc

SEQ ID NO: 226927 - RNA, 22 nt, Human
uuagacaucagugcuucucagc

SEQ ID NO: 226928 - RNA, 22 nt, Human
agcagagcauggugggaagggc

SEQ ID NO: 226929 - RNA, 22 nt, Human
caaagacugcauaacacaugaa

SEQ ID NO: 226930 - RNA, 22 nt, Human
uggucugggcaaauccuucuga

SEQ ID NO: 226931 - RNA, 22 nt, Human
ccucagaguuggaaucacauuu

SEQ ID NO: 226932 - RNA, 22 nt, Human
ccuccuggugacaaggcaaagc

SEQ ID NO: 226933 - RNA, 22 nt, Human
acugaauuuuaauuagaucugc

SEQ ID NO: 226934 - RNA, 22 nt, Human
cagagucaugggccgucaggca

SEQ ID NO: 226935 - RNA, 22 nt, Human
cuucugugaagagcagaaccau

SEQ ID NO: 226936 - RNA, 22 nt, Human
ccaggaaggcguuguuccucuc

SEQ ID NO: 226937 - RNA, 23 nt, Human
uccagcucccuucaauggcacug

SEQ ID NO: 226938 - RNA, 22 nt, Human
gcaagcugcucuuauguggagg

SEQ ID NO: 226939 - RNA, 22 nt, Human
agcaccagagcuaugggccugc

SEQ ID NO: 226940 - RNA, 22 nt, Human
agcugcaggcccaugcucaguc

SEQ ID NO: 226941 - RNA, 22 nt, Human
cagggugugaacaguguaaaac

SEQ ID NO: 226942 - RNA, 22 nt, Human
ugucucaguacacuccgauguu

SEQ ID NO: 226943 - RNA, 22 nt, Human
aauggagacccuaaggaagagg

SEQ ID NO: 226944 - RNA, 22 nt, Human
agacacaguacuugcccucaug

SEQ ID NO: 226945 - RNA, 22 nt, Human
aggaccugacauuguguuuucu

SEQ ID NO: 226946 - RNA, 22 nt, Human
ucuccccuacucuaaaucugca

SEQ ID NO: 226947 - RNA, 22 nt, Human
aggcagcaugggccccagcucc

SEQ ID NO: 226948 - RNA, 22 nt, Human
ccaggcugggcuacaaguugag

SEQ ID NO: 226949 - RNA, 22 nt, Human
gaaggggaguggcuagugugug

SEQ ID NO: 226950 - RNA, 22 nt, Human
augaacaauaaucaugucuaug

SEQ ID NO: 226951 - RNA, 22 nt, Human
aucaaugcuugccaaauggaag

SEQ ID NO: 226952 - RNA, 22 nt, Human
aaaacuccugaaauuguuuccc

SEQ ID NO: 226953 - RNA, 21 nt, Human
acuuuaauauacaugaggagg

SEQ ID NO: 226954 - RNA, 22 nt, Human
aggcagcauuucugcuuaucca

SEQ ID NO: 226955 - RNA, 18 nt, Human
aggcaggauccuggccuc

SEQ ID NO: 226956 - RNA, 22 nt, Human
agaugaauccacacauggcaaa

SEQ ID NO: 226957 - RNA, 23 nt, Human
ccaccuggacucugggcaggugc

SEQ ID NO: 226958 - RNA, 17 nt, Human
gcaaccagcccccaucu

SEQ ID NO: 226959 - RNA, 22 nt, Human
cccuccagcucaaagcaaccgg

SEQ ID NO: 226960 - RNA, 22 nt, Human
uucugauugcugaugaggccca

SEQ ID NO: 226961 - RNA, 22 nt, Human
agaggugggagccuggucacau

SEQ ID NO: 226962 - RNA, 22 nt, Human
cagcuucugcucauggaggggu

SEQ ID NO: 226963 - RNA, 22 nt, Human
uaguuaggaauagcagcgacuc

SEQ ID NO: 226964 - RNA, 23 nt, Human
gcaugaagugcuacgucuacagc

SEQ ID NO: 226965 - RNA, 22 nt, Human
uccuucaagaugccacagcuuu

SEQ ID NO: 226966 - RNA, 22 nt, Human
aguccuggcucuacgggcuuca

SEQ ID NO: 226967 - RNA, 22 nt, Human
ugaggcacugggagagcacacu

SEQ ID NO: 226968 - RNA, 22 nt, Human
aaggaagguucauagucaaaga

SEQ ID NO: 226969 - RNA, 22 nt, Human
agacaggcuuggaaaaaaccuc

SEQ ID NO: 226970 - RNA, 22 nt, Human
uuuaauguuaaauuuguagaug

SEQ ID NO: 226971 - RNA, 22 nt, Human
ugggcugcccugaugguccuca

SEQ ID NO: 226972 - RNA, 22 nt, Human
gugcaaaaguaaaugugguuuu

SEQ ID NO: 226973 - RNA, 22 nt, Human
ccaggaggucugaguguggaca

SEQ ID NO: 226974 - RNA, 22 nt, Human
ugcccugcaugcagggagcugu

SEQ ID NO: 226975 - RNA, 22 nt, Human
uccuuccaugguggggcugcuu

SEQ ID NO: 226976 - RNA, 15 nt, Human
gcucuggguauuuga

SEQ ID NO: 226977 - RNA, 22 nt, Human
aaaaaugaauucuucaguggca

SEQ ID NO: 226978 - RNA, 22 nt, Human
uaagaguuagggcuagcaauau

SEQ ID NO: 226979 - RNA, 22 nt, Human
guauuuuauggcaugcaguggc

SEQ ID NO: 226980 - RNA, 22 nt, Human
uuagcaauaugaaugcauuugc

SEQ ID NO: 226981 - RNA, 22 nt, Human
uaaagcaauuugagcaaguucu

SEQ ID NO: 226982 - RNA, 22 nt, Human
acuuuuaaaugaguuucaguug

SEQ ID NO: 226983 - RNA, 22 nt, Human
agggaagggaaaaacacucguc

SEQ ID NO: 226984 - RNA, 22 nt, Human
ccagcucugcuugcccagucag

SEQ ID NO: 226985 - RNA, 22 nt, Human
acugcuuuagaccuagagcucu

SEQ ID NO: 226986 - RNA, 22 nt, Human
cagggcagggauguugcggcag

SEQ ID NO: 226987 - RNA, 22 nt, Human
cuggcugccagcauuuggggga

SEQ ID NO: 226988 - RNA, 22 nt, Human
uucaugagguaccugugaucau

SEQ ID NO: 226989 - RNA, 22 nt, Human
uuugaaagcaccauuugaguag

SEQ ID NO: 226990 - RNA, 22 nt, Human
ugcaaacaggcauuucacaaac

SEQ ID NO: 226991 - RNA, 22 nt, Human
aaggccagauucacuuuacaau

SEQ ID NO: 226992 - RNA, 22 nt, Human
uggcuacaaguguguuuaguuu

SEQ ID NO: 226993 - RNA, 22 nt, Human
auaguucacuaauagcaaaagc

SEQ ID NO: 226994 - RNA, 22 nt, Human
gacuaaaugcuuugugcaugca

SEQ ID NO: 226995 - RNA, 22 nt, Human
agugcugucuccuucccccggg

SEQ ID NO: 226996 - RNA, 21 nt, Human
guuuucaugauagagucugua

SEQ ID NO: 226997 - RNA, 22 nt, Human
uggaauggaaacaaacugagga

SEQ ID NO: 226998 - RNA, 18 nt, Human
ggcaucugcacagcagcc

SEQ ID NO: 226999 - RNA, 22 nt, Human
aauguauucuucaaccuugcua

SEQ ID NO: 227000 - RNA, 22 nt, Human
caggccaggugcucuagaauca

SEQ ID NO: 227001 - RNA, 22 nt, Human
ugagucacagccuugccuuggu

SEQ ID NO: 227002 - RNA, 19 nt, Human
ccugaguguuucagagaca

SEQ ID NO: 227003 - RNA, 22 nt, Human
acguuagaaaagcaggagcuca

SEQ ID NO: 227004 - RNA, 22 nt, Human
cuucagaagccugcagccuuug

SEQ ID NO: 227005 - RNA, 22 nt, Human
aaaaggacaagcuuuggaguua

SEQ ID NO: 227006 - RNA, 22 nt, Human
cagcuuuauuucacguguuugu

SEQ ID NO: 227007 - RNA, 22 nt, Human
acauucuagauauguuauauuu

SEQ ID NO: 227008 - RNA, 22 nt, Human
uucuguuacauggggcacagug

SEQ ID NO: 227009 - RNA, 22 nt, Human
ggccucagagaaggcugugcgg

SEQ ID NO: 227010 - RNA, 22 nt, Human
uacugaaagaauacauaauuuc

SEQ ID NO: 227011 - RNA, 22 nt, Human
agcagcagggugauagugccca

SEQ ID NO: 227012 - RNA, 22 nt, Human
aaaaugaauaaguuaacccagg

SEQ ID NO: 227013 - RNA, 22 nt, Human
gaaagcaguauuuaguucuguu

SEQ ID NO: 227014 - RNA, 22 nt, Human
aggcucaggaggagcugccgga

SEQ ID NO: 227015 - RNA, 22 nt, Human
uacauguguucuguuucaaguu

SEQ ID NO: 227016 - RNA, 22 nt, Human
aaaggcuaguggauucauugau

SEQ ID NO: 227017 - RNA, 22 nt, Human
ucugugcacuaacauuccuggu

SEQ ID NO: 227018 - RNA, 22 nt, Human
uagggaugggagauucucaaac

SEQ ID NO: 227019 - RNA, 22 nt, Human
aaugaguucugacacuucacga

SEQ ID NO: 227020 - RNA, 22 nt, Human
ugggaacaacaugcacugccac

SEQ ID NO: 227021 - RNA, 19 nt, Human
ugaggcaagauggcucugg

SEQ ID NO: 227022 - RNA, 22 nt, Human
aaauauguaagauuagcacuag

SEQ ID NO: 227023 - RNA, 22 nt, Human
aggaauguggcaaucuucaagu

SEQ ID NO: 227024 - RNA, 23 nt, Human
uccaggcaugagcucuggaugga

SEQ ID NO: 227025 - RNA, 22 nt, Human
uuuaucuguuccucuuggaggc

SEQ ID NO: 227026 - RNA, 22 nt, Human
augcaacagagaaaauauugag

SEQ ID NO: 227027 - RNA, 22 nt, Human
guccagagggcugcaggaugcu

SEQ ID NO: 227028 - RNA, 22 nt, Human
ugucagggauuuaaagacacaa

SEQ ID NO: 227029 - RNA, 22 nt, Human
guuccagguggucacagagcuc

SEQ ID NO: 227030 - RNA, 22 nt, Human
uucucuggacuauuugcacucc

SEQ ID NO: 227031 - RNA, 22 nt, Human
agagcugggugaagugccauca

SEQ ID NO: 227032 - RNA, 22 nt, Human
gaggcaguaauugugggcaaua

SEQ ID NO: 227033 - RNA, 22 nt, Human
aacaaugcugaacugaggaaag

SEQ ID NO: 227034 - RNA, 22 nt, Human
acagugaugagccggcugaggc

SEQ ID NO: 227035 - RNA, 22 nt, Human
aggugcuguuaacauaugaggu

SEQ ID NO: 227036 - RNA, 23 nt, Human
acagacauuccauaauguacacc

SEQ ID NO: 227037 - RNA, 23 nt, Human
ugggaccuguuugcccacagaug

SEQ ID NO: 227038 - RNA, 22 nt, Human
cccaguuucaacuuuccagugg

SEQ ID NO: 227039 - RNA, 22 nt, Human
agggccaccagagcagggcagu

SEQ ID NO: 227040 - RNA, 22 nt, Human
aguguccuuucuguuccagcca

SEQ ID NO: 227041 - RNA, 22 nt, Human
auagaaucaucugugcacuagu

SEQ ID NO: 227042 - RNA, 22 nt, Human
gcagagcucaagguguucagcu

SEQ ID NO: 227043 - RNA, 22 nt, Human
cagaggcacagugcgggccacu

SEQ ID NO: 227044 - RNA, 22 nt, Human
augggcucggcgcugcugggau

SEQ ID NO: 227045 - RNA, 22 nt, Human
aaauggauguugaguuaaaugu

SEQ ID NO: 227046 - RNA, 22 nt, Human
ugaaacauuauagaauauuuau

SEQ ID NO: 227047 - RNA, 22 nt, Human
cugcaucauuuucagacaaugg

SEQ ID NO: 227048 - RNA, 22 nt, Human
ccugaggggcugcaggccagcu

SEQ ID NO: 227049 - RNA, 22 nt, Human
cuaucaaacagccauuaauaua

SEQ ID NO: 227050 - RNA, 22 nt, Human
ugucuucaaauauugaaauccu

SEQ ID NO: 227051 - RNA, 22 nt, Human
ucucagcucagcuuccacagag

SEQ ID NO: 227052 - RNA, 22 nt, Human
ccagagccuggcaucugcauaa

SEQ ID NO: 227053 - RNA, 22 nt, Human
guccugagaugucacaagguuu

SEQ ID NO: 227054 - RNA, 22 nt, Human
gcagguguuuuaagacauugaa

SEQ ID NO: 227055 - RNA, 22 nt, Human
aaagccaugaauguuauagagg

SEQ ID NO: 227056 - RNA, 22 nt, Human
acuccuggguuccggagauucu

SEQ ID NO: 227057 - RNA, 22 nt, Human
guuucuuaaaagaggaguuaga

SEQ ID NO: 227058 - RNA, 22 nt, Human
ucugaggguuguagagagggac

SEQ ID NO: 227059 - RNA, 22 nt, Human
uuugcugauauuuugcugauac

SEQ ID NO: 227060 - RNA, 22 nt, Human
uuucaacagcucucaaaugauc

SEQ ID NO: 227061 - RNA, 22 nt, Human
aaaugucagaggaacauauuga

SEQ ID NO: 227062 - RNA, 22 nt, Human
ccacaggacacaacugcugacc

SEQ ID NO: 227063 - RNA, 22 nt, Human
uuuuggaugagcccagauuucu

SEQ ID NO: 227064 - RNA, 22 nt, Human
uucuguauguaugccagagcau

SEQ ID NO: 227065 - RNA, 22 nt, Human
agccauuuuccugaaauauaac

SEQ ID NO: 227066 - RNA, 22 nt, Human
ugcagggccuuguugaugugcu

SEQ ID NO: 227067 - RNA, 22 nt, Human
gccugggagaaugaccuccaac

SEQ ID NO: 227068 - RNA, 23 nt, Human
gcaggugguucgaacagaaguuu

SEQ ID NO: 227069 - RNA, 22 nt, Human
gacagggaacuucauuagcugu

SEQ ID NO: 227070 - RNA, 22 nt, Human
aggaauguuaggagaugagucu

SEQ ID NO: 227071 - RNA, 22 nt, Human
cuuaagcaaaauauucuuucac

SEQ ID NO: 227072 - RNA, 22 nt, Human
aggucaaggcugcagugagcug

SEQ ID NO: 227073 - RNA, 22 nt, Human
agagcagcugugacauggacag

SEQ ID NO: 227074 - RNA, 22 nt, Human
acaaaggcagccaaucaucugc

SEQ ID NO: 227075 - RNA, 19 nt, Human
uacuuauuagaaauauggg

SEQ ID NO: 227076 - RNA, 22 nt, Human
augauugaccaucugcugggcu

SEQ ID NO: 227077 - RNA, 22 nt, Human
ugaaugaucuccgauuaguccu

SEQ ID NO: 227078 - RNA, 20 nt, Human
auugacagaaaguguucacc

SEQ ID NO: 227079 - RNA, 22 nt, Human
aucaguuuuuauuaauguagcu

SEQ ID NO: 227080 - RNA, 22 nt, Human
acagcauggauaacaaggcacu

SEQ ID NO: 227081 - RNA, 22 nt, Human
ggugggaggacuguuugaggca

SEQ ID NO: 227082 - RNA, 22 nt, Human
gcaagcugugccuucucaggau

SEQ ID NO: 227083 - RNA, 22 nt, Human
cccugcuugucaccccuggguc

SEQ ID NO: 227084 - RNA, 22 nt, Human
uuugacucuugcuuugguggcu

SEQ ID NO: 227085 - RNA, 22 nt, Human
ccaggacucaaugaccacaggg

SEQ ID NO: 227086 - RNA, 22 nt, Human
agcagggggcauccuugcccuu

SEQ ID NO: 227087 - RNA, 22 nt, Human
ucucagaguuuagagcugagcc

SEQ ID NO: 227088 - RNA, 22 nt, Human
auguuucuaguuguaugucacu

SEQ ID NO: 227089 - RNA, 22 nt, Human
gaaaucuugcucauugugacaa

SEQ ID NO: 227090 - RNA, 22 nt, Human
cugggccugggaggccaggucu

SEQ ID NO: 227091 - RNA, 22 nt, Human
guuauaaaaugcacaguuguuu

SEQ ID NO: 227092 - RNA, 22 nt, Human
uccagcugcaaggggcacagcu

SEQ ID NO: 227093 - RNA, 22 nt, Human
aaauuauuaugccccucuauaa

SEQ ID NO: 227094 - RNA, 22 nt, Human
augaggaggucaggccuuacaa

SEQ ID NO: 227095 - RNA, 22 nt, Human
agaaucaauucacugcugcagc

SEQ ID NO: 227096 - RNA, 22 nt, Human
ccagagagguagcuuacccucu

SEQ ID NO: 227097 - RNA, 22 nt, Human
uccuuggagguguucaucugcc

SEQ ID NO: 227098 - RNA, 22 nt, Human
aauuuuacaaaauaccuccgau

SEQ ID NO: 227099 - RNA, 22 nt, Human
ucuggcagggguucugcacuug

SEQ ID NO: 227100 - RNA, 22 nt, Human
ugcaggagcagagauggcugga

SEQ ID NO: 227101 - RNA, 22 nt, Human
uagcuucucauaauuuaugcug

SEQ ID NO: 227102 - RNA, 22 nt, Human
ucuguuuagaugcuuuaucugu

SEQ ID NO: 227103 - RNA, 23 nt, Human
gcagaggagcaagcuggacacca

SEQ ID NO: 227104 - RNA, 22 nt, Human
aaagacaugacacauuggagag

SEQ ID NO: 227105 - RNA, 22 nt, Human
cuggagagauccuccugaaaaa

SEQ ID NO: 227106 - RNA, 21 nt, Human
uaaauaauaaguugcugagau

SEQ ID NO: 227107 - RNA, 22 nt, Human
ugucaguuuggcucuaaaguuu

SEQ ID NO: 227108 - RNA, 22 nt, Human
ggagucugauacugaguuccuc

SEQ ID NO: 227109 - RNA, 22 nt, Human
acuucuugaugaaaaugguacu

SEQ ID NO: 227110 - RNA, 22 nt, Human
agaaaaacuaagaguggguggu

SEQ ID NO: 227111 - RNA, 22 nt, Human
agucacauggacucaggaugac

SEQ ID NO: 227112 - RNA, 23 nt, Human
agggcaugaagcagaggacgugg

SEQ ID NO: 227113 - RNA, 22 nt, Human
ggcauccaaauaccaagaugua

SEQ ID NO: 227114 - RNA, 22 nt, Human
aagcagaaaaacugagcuccaa

SEQ ID NO: 227115 - RNA, 22 nt, Human
cuggaggaaucacagaaggcuu

SEQ ID NO: 227116 - RNA, 22 nt, Human
aguccagggcucucugugggau

SEQ ID NO: 227117 - RNA, 22 nt, Human
aacuggaucaguugagggaggc

SEQ ID NO: 227118 - RNA, 18 nt, Human
cauuguuuccagaagacc

SEQ ID NO: 227119 - RNA, 22 nt, Human
gagcugagaucgugccauugca

SEQ ID NO: 227120 - RNA, 22 nt, Human
cuuuucucugcgggucuuucau

SEQ ID NO: 227121 - RNA, 22 nt, Human
ccucuuccuucucacuguggaa

SEQ ID NO: 227122 - RNA, 22 nt, Human
cugccaggcacugggcucugca

SEQ ID NO: 227123 - RNA, 22 nt, Human
uccacccugcuuuugucuuuga

SEQ ID NO: 227124 - RNA, 22 nt, Human
auucuucauuguugauucaugu

SEQ ID NO: 227125 - RNA, 22 nt, Human
gagguaacacuguucagugggc

SEQ ID NO: 227126 - RNA, 21 nt, Human
uccuugcuauuuuccucagcu

SEQ ID NO: 227127 - RNA, 22 nt, Human
uagcaaagaaccugauacccca

SEQ ID NO: 227128 - RNA, 22 nt, Human
cuggcccuguaggaugugaguu

SEQ ID NO: 227129 - RNA, 22 nt, Human
uuuuuuauaucaacugaagucu

SEQ ID NO: 227130 - RNA, 22 nt, Human
agccaggcuaaaugagccauga

SEQ ID NO: 227131 - RNA, 22 nt, Human
gcuagagaccagaggccuugaa

SEQ ID NO: 227132 - RNA, 22 nt, Human
uuggcugcuuuacucugacggg

SEQ ID NO: 227133 - RNA, 22 nt, Human
gcagccaggaagcccaggacac

SEQ ID NO: 227134 - RNA, 22 nt, Human
uccaggaguccugggagugauu

SEQ ID NO: 227135 - RNA, 22 nt, Human
uucagugugccuaagucaguug

SEQ ID NO: 227136 - RNA, 22 nt, Human
aaguuacagauugggagcagag

SEQ ID NO: 227137 - RNA, 22 nt, Human
cugccuuuucaucugagcugga

SEQ ID NO: 227138 - RNA, 22 nt, Human
gccuccaggguagaggaggaag

SEQ ID NO: 227139 - RNA, 22 nt, Human
auuuacuggaaaaacuaugagc

SEQ ID NO: 227140 - RNA, 22 nt, Human
uguggcagcuggagguggagaa

SEQ ID NO: 227141 - RNA, 22 nt, Human
gaaggcuugcaagugguucaua

SEQ ID NO: 227142 - RNA, 22 nt, Human
aacugcaagcucuuuacugcua

SEQ ID NO: 227143 - RNA, 22 nt, Human
gagcuuggggcauauggugcua

SEQ ID NO: 227144 - RNA, 22 nt, Human
ucagugcacccaauucucucca

SEQ ID NO: 227145 - RNA, 22 nt, Human
cagcaaauacuacuaguuuuua

SEQ ID NO: 227146 - RNA, 22 nt, Human
ccuuuugcucucccauccagaa

SEQ ID NO: 227147 - RNA, 22 nt, Human
ucagguggaauuaauuaagaga

SEQ ID NO: 227148 - RNA, 22 nt, Human
ucaggcaggcucagaggaaaac

SEQ ID NO: 227149 - RNA, 22 nt, Human
gugccuggaacuggguaggcug

SEQ ID NO: 227150 - RNA, 22 nt, Human
ccuuuagaauacagacuuucua

SEQ ID NO: 227151 - RNA, 22 nt, Human
uguggcugcucaggugcagacc

SEQ ID NO: 227152 - RNA, 22 nt, Human
aagguguuauagcugaggaaua

SEQ ID NO: 227153 - RNA, 22 nt, Human
aggcucagugcaaaucauucug

SEQ ID NO: 227154 - RNA, 22 nt, Human
uguaucuuucuguacuuuuaug

SEQ ID NO: 227155 - RNA, 22 nt, Human
cuguuuauaaaccaccaguuua

SEQ ID NO: 227156 - RNA, 22 nt, Human
cuggagcuggcccaggcuggcc

SEQ ID NO: 227157 - RNA, 22 nt, Human
aguuuagaguucaaauuaguuc

SEQ ID NO: 227158 - RNA, 22 nt, Human
aaggcacagaggcagggcacuu

SEQ ID NO: 227159 - RNA, 22 nt, Human
aguauguugacuuauucuugga

SEQ ID NO: 227160 - RNA, 22 nt, Human
gacagacaggagcucacaggca

SEQ ID NO: 227161 - RNA, 22 nt, Human
gcagggcacaaggacgcacagg

SEQ ID NO: 227162 - RNA, 22 nt, Human
caggcuucgcucugugggcagg

SEQ ID NO: 227163 - RNA, 20 nt, Human
ucccaggcuccacccuagac

SEQ ID NO: 227164 - RNA, 22 nt, Human
aacugguagaaagcaguaagug

SEQ ID NO: 227165 - RNA, 22 nt, Human
cugaagcacagcauauaaauaa

SEQ ID NO: 227166 - RNA, 22 nt, Human
ucccagugagguccuggcuguc

SEQ ID NO: 227167 - RNA, 22 nt, Human
ccuccuguuguccugcuggggc

SEQ ID NO: 227168 - RNA, 22 nt, Human
augccacauaauuacaaauaga

SEQ ID NO: 227169 - RNA, 22 nt, Human
ugaggcucaaggucugguggag

SEQ ID NO: 227170 - RNA, 18 nt, Human
ggagcccagaggacagga

SEQ ID NO: 227171 - RNA, 22 nt, Human
uggaugguucugggcggcagca

SEQ ID NO: 227172 - RNA, 22 nt, Human
cauccgcaugcaagugcugucc

SEQ ID NO: 227173 - RNA, 22 nt, Human
aaagccuucuuguaucgagcca

SEQ ID NO: 227174 - RNA, 22 nt, Human
gcugggucccaagccuggggag

SEQ ID NO: 227175 - RNA, 22 nt, Human
uuuaauguagcgugaaaugauu

SEQ ID NO: 227176 - RNA, 22 nt, Human
guccuggcugguucuguggggc

SEQ ID NO: 227177 - RNA, 22 nt, Human
ugggagaugguucugagacuuu

SEQ ID NO: 227178 - RNA, 22 nt, Human
uucugugauuccuccagccagc

SEQ ID NO: 227179 - RNA, 22 nt, Human
uguuacagggauaaaugaggua

SEQ ID NO: 227180 - RNA, 22 nt, Human
ggcaccagggaaggaaggcugg

SEQ ID NO: 227181 - RNA, 22 nt, Human
ggucugagugggcaggggccgg

SEQ ID NO: 227182 - RNA, 22 nt, Human
agucccuguacuuuccacugcc

SEQ ID NO: 227183 - RNA, 22 nt, Human
cagcacuucagcauucagauuu

SEQ ID NO: 227184 - RNA, 22 nt, Human
acauugaugaucccacuuacag

SEQ ID NO: 227185 - RNA, 22 nt, Human
gagcuggcuaauacugacuuau

SEQ ID NO: 227186 - RNA, 22 nt, Human
cuucuuuacuuucuagaaauaa

SEQ ID NO: 227187 - RNA, 22 nt, Human
gagggggucuaugagguagagc

SEQ ID NO: 227188 - RNA, 22 nt, Human
ccuuuuggccaggucagugcag

SEQ ID NO: 227189 - RNA, 22 nt, Human
uugcuggcaauuuagagauuuc

SEQ ID NO: 227190 - RNA, 22 nt, Human
uucagcaagaccaccauguacc

SEQ ID NO: 227191 - RNA, 22 nt, Human
auagggcccccgugggugcuca

SEQ ID NO: 227192 - RNA, 22 nt, Human
acaguuugguugcuacaguaaa

SEQ ID NO: 227193 - RNA, 22 nt, Human
uggagagaaaguugaauggagg

SEQ ID NO: 227194 - RNA, 22 nt, Human
gcagcagcucaguucugggagg

SEQ ID NO: 227195 - RNA, 22 nt, Human
augaggcacuuaaaagugaaga

SEQ ID NO: 227196 - RNA, 22 nt, Human
acguagcacugagagaugcagg

SEQ ID NO: 227197 - RNA, 22 nt, Human
uuucacaaguuucaggauucug

SEQ ID NO: 227198 - RNA, 22 nt, Human
ugagacuuggcacugaggaacu

SEQ ID NO: 227199 - RNA, 22 nt, Human
ggacagcucugccaggagcuca

SEQ ID NO: 227200 - RNA, 22 nt, Human
agaaacauccugcuuuccauuu

SEQ ID NO: 227201 - RNA, 22 nt, Human
uaucucagcuggaucaguggaa

SEQ ID NO: 227202 - RNA, 22 nt, Human
ggucucuguugccuccaucaag

SEQ ID NO: 227203 - RNA, 22 nt, Human
cuggccacugcgggccucugcc

SEQ ID NO: 227204 - RNA, 22 nt, Human
ugagcagucauccauuucuccu

SEQ ID NO: 227205 - RNA, 22 nt, Human
uuuguacaugaaugugcaccca

SEQ ID NO: 227206 - RNA, 22 nt, Human
acugucuuugagcuggaggagg

SEQ ID NO: 227207 - RNA, 22 nt, Human
ucugacuuccuuuucugaucca

SEQ ID NO: 227208 - RNA, 22 nt, Human
aggcagugguguuugcuggugg

SEQ ID NO: 227209 - RNA, 22 nt, Human
guagaaaugguguguuucuucu

SEQ ID NO: 227210 - RNA, 22 nt, Human
ugucucugucucccagguugug

SEQ ID NO: 227211 - RNA, 23 nt, Human
aggaggaaaaguuaucugcugag

SEQ ID NO: 227212 - RNA, 22 nt, Human
aaauggaacugggcuacuaggu

SEQ ID NO: 227213 - RNA, 18 nt, Human
uuucacaaccuccagagg

SEQ ID NO: 227214 - RNA, 22 nt, Human
gaauuacauuuguguuacugca

SEQ ID NO: 227215 - RNA, 22 nt, Human
ucugugcucaaguucugccucu

SEQ ID NO: 227216 - RNA, 22 nt, Human
gguacaaaguuagauuuaacuu

SEQ ID NO: 227217 - RNA, 22 nt, Human
uuuagggacaagggucuggggu

SEQ ID NO: 227218 - RNA, 22 nt, Human
caucuguagcuccaugacaauu

SEQ ID NO: 227219 - RNA, 22 nt, Human
ugggaagaguuagagacagcug

SEQ ID NO: 227220 - RNA, 22 nt, Human
uaaagacagauggaccagccau

SEQ ID NO: 227221 - RNA, 22 nt, Human
uauagauagacugacgauacag

SEQ ID NO: 227222 - RNA, 22 nt, Human
ugggauaauaaauagaggcaga

SEQ ID NO: 227223 - RNA, 22 nt, Human
ucuguauuuuaagaugcuguuu

SEQ ID NO: 227224 - RNA, 22 nt, Human
gcaggagcucguuuccaggcug

SEQ ID NO: 227225 - RNA, 22 nt, Human
gcagcagagcuuuguccuggcu

SEQ ID NO: 227226 - RNA, 21 nt, Human
gcauggcaggucacuggggca

SEQ ID NO: 227227 - RNA, 22 nt, Human
gcagggugauagugaggcucag

SEQ ID NO: 227228 - RNA, 22 nt, Human
aggugcugaacuggugaggucu

SEQ ID NO: 227229 - RNA, 19 nt, Human
guucuuucauaguaagagc

SEQ ID NO: 227230 - RNA, 22 nt, Human
auuacaaucgagagaaacaaau

SEQ ID NO: 227231 - RNA, 18 nt, Human
uggugccuuucacucuuc

SEQ ID NO: 227232 - RNA, 23 nt, Human
ccacagcuauaggguagugcagu

SEQ ID NO: 227233 - RNA, 22 nt, Human
gguuagagggcaugcgaucuuu

SEQ ID NO: 227234 - RNA, 22 nt, Human
cuacccuuaaguuucugugggg

SEQ ID NO: 227235 - RNA, 22 nt, Human
auucagaagcuauucuuaguuc

SEQ ID NO: 227236 - RNA, 22 nt, Human
cccagcagaaucugaugagggc

SEQ ID NO: 227237 - RNA, 22 nt, Human
ggcagcucgaugacuucugcau

SEQ ID NO: 227238 - RNA, 22 nt, Human
aagggcucugugcuugucccau

SEQ ID NO: 227239 - RNA, 22 nt, Human
cauuugcaagagauaaauguuu

SEQ ID NO: 227240 - RNA, 22 nt, Human
aaacagaaggguagguaaacau

SEQ ID NO: 227241 - RNA, 22 nt, Human
uguuuauaaauuuucuugccau

SEQ ID NO: 227242 - RNA, 22 nt, Human
ccucagaauaguccucagauca

SEQ ID NO: 227243 - RNA, 22 nt, Human
cuggaaagugcugagacaauug

SEQ ID NO: 227244 - RNA, 19 nt, Human
cucuuuggagauccuugga

SEQ ID NO: 227245 - RNA, 22 nt, Human
ugcaggugcguuuucaagccuc

SEQ ID NO: 227246 - RNA, 22 nt, Human
auaggcagacucuuuuuggagg

SEQ ID NO: 227247 - RNA, 22 nt, Human
cagagcugacccaaggauugaa

SEQ ID NO: 227248 - RNA, 22 nt, Human
caggugcuguccugcacauguc

SEQ ID NO: 227249 - RNA, 17 nt, Human
ccugggaggaguuauga

SEQ ID NO: 227250 - RNA, 22 nt, Human
agcuggcuauacuugaaaaguc

SEQ ID NO: 227251 - RNA, 21 nt, Human
cacacagcugcccuuagguag

SEQ ID NO: 227252 - RNA, 22 nt, Human
ucccuguacuuacacagcgucc

SEQ ID NO: 227253 - RNA, 21 nt, Human
ugagcaggagucaugggaaug

SEQ ID NO: 227254 - RNA, 22 nt, Human
uuccaggaggucaaaggccugu

SEQ ID NO: 227255 - RNA, 22 nt, Human
guccuugcuugagacaggcagu

SEQ ID NO: 227256 - RNA, 23 nt, Human
agucuucauuguauuuccagacc

SEQ ID NO: 227257 - RNA, 22 nt, Human
ucucuggcccuguuuucuaucu

SEQ ID NO: 227258 - RNA, 23 nt, Human
aucaaaugauuggccauucagug

SEQ ID NO: 227259 - RNA, 21 nt, Human
gagugcagcaagguagagucu

SEQ ID NO: 227260 - RNA, 22 nt, Human
uuguuucaggaugguuuguuac

SEQ ID NO: 227261 - RNA, 22 nt, Human
ccaguggacuucucccuguggu

SEQ ID NO: 227262 - RNA, 22 nt, Human
uuccugggauuauugucaagca

SEQ ID NO: 227263 - RNA, 19 nt, Human
gcaggccucuugggaauua

SEQ ID NO: 227264 - RNA, 17 nt, Human
cagcugugagagccuua

SEQ ID NO: 227265 - RNA, 22 nt, Human
gagcccaggcagagguugcagu

SEQ ID NO: 227266 - RNA, 22 nt, Human
uagaacuugagaucaggucuuc

SEQ ID NO: 227267 - RNA, 22 nt, Human
cccaggucuaugccagcucuga

SEQ ID NO: 227268 - RNA, 22 nt, Human
uuggcucugaaacccaagcucu

SEQ ID NO: 227269 - RNA, 22 nt, Human
uuccugggagcuagccacaucu

SEQ ID NO: 227270 - RNA, 22 nt, Human
aaaccauuugaauuauuacuga

SEQ ID NO: 227271 - RNA, 22 nt, Human
gcuccugugaggacacagccgc

SEQ ID NO: 227272 - RNA, 22 nt, Human
accugggaggcggagguugcag

SEQ ID NO: 227273 - RNA, 22 nt, Human
gggugggcccagcccagagaag

SEQ ID NO: 227274 - RNA, 22 nt, Human
aggaaaugggaauagaugguau

SEQ ID NO: 227275 - RNA, 22 nt, Human
cuacaacauagucuucuacaga

SEQ ID NO: 227276 - RNA, 22 nt, Human
aacacuguaucagucuucaaua

SEQ ID NO: 227277 - RNA, 22 nt, Human
caggcaugcuucugucugggca

SEQ ID NO: 227278 - RNA, 22 nt, Human
aagaaaugcagaaaugugcugg

SEQ ID NO: 227279 - RNA, 22 nt, Human
ugguggggucaucgucagaugc

SEQ ID NO: 227280 - RNA, 22 nt, Human
cagcaugaugagugcaguuugg

SEQ ID NO: 227281 - RNA, 22 nt, Human
aggagcugcagauucugccuug

SEQ ID NO: 227282 - RNA, 22 nt, Human
agacacagcaauaacuacuguu

SEQ ID NO: 227283 - RNA, 22 nt, Human
guauagaaggaucuggugaauu

SEQ ID NO: 227284 - RNA, 22 nt, Human
gccuguuuccaucaacacaugc

SEQ ID NO: 227285 - RNA, 22 nt, Human
uaaugcugccaagccaugcaga

SEQ ID NO: 227286 - RNA, 19 nt, Human
gccacaucuuuuccagagu

SEQ ID NO: 227287 - RNA, 22 nt, Human
guaaaaccugcuuuucaacacc

SEQ ID NO: 227288 - RNA, 22 nt, Human
uuucucaaauugcaugaguagc

SEQ ID NO: 227289 - RNA, 22 nt, Human
cagcagaguaggugcuacuucu

SEQ ID NO: 227290 - RNA, 22 nt, Human
agcagaggacaguucuuaggaa

SEQ ID NO: 227291 - RNA, 22 nt, Human
ccugagccugaguggugcaggg

SEQ ID NO: 227292 - RNA, 22 nt, Human
aauuacuguaauuuucuacagc

SEQ ID NO: 227293 - RNA, 22 nt, Human
uaacaacaugcaauuuaaccuu

SEQ ID NO: 227294 - RNA, 21 nt, Human
aaguggagaagaaaagcugga

SEQ ID NO: 227295 - RNA, 22 nt, Human
agagugucugguagcugcucug

SEQ ID NO: 227296 - RNA, 22 nt, Human
accaggcuuaauccuuugcuau

SEQ ID NO: 227297 - RNA, 19 nt, Human
ccuccuguggcgggugggg

SEQ ID NO: 227298 - RNA, 22 nt, Human
aguguucuucugggguaugcuc

SEQ ID NO: 227299 - RNA, 22 nt, Human
cccagaaggcuugccaggaagc

SEQ ID NO: 227300 - RNA, 22 nt, Human
aacacugaguaucagaguuggg

SEQ ID NO: 227301 - RNA, 22 nt, Human
uaaggcuuggggaaaagugagg

SEQ ID NO: 227302 - RNA, 22 nt, Human
acuucuuuucaaaucaugcaaa

SEQ ID NO: 227303 - RNA, 22 nt, Human
aagggcugaaugaaggguugaa

SEQ ID NO: 227304 - RNA, 23 nt, Human
caggaaaugaauccaggaggaug

SEQ ID NO: 227305 - RNA, 22 nt, Human
ugacccaucaggccacaugagg

SEQ ID NO: 227306 - RNA, 22 nt, Human
agagaggcgaguuaccugugcu

SEQ ID NO: 227307 - RNA, 22 nt, Human
ugccuucaagacccauccucca

SEQ ID NO: 227308 - RNA, 21 nt, Human
ucacguggucacaugagcuuu

SEQ ID NO: 227309 - RNA, 22 nt, Human
uuccucagagggcgcuggggaa

SEQ ID NO: 227310 - RNA, 22 nt, Human
uucauagugcuuaauuugauaa

SEQ ID NO: 227311 - RNA, 22 nt, Human
acucuaaauagauaaccaugca

SEQ ID NO: 227312 - RNA, 22 nt, Human
aguuugaaauguuggcaauauu

SEQ ID NO: 227313 - RNA, 22 nt, Human
agagguugggucugaggugaga

SEQ ID NO: 227314 - RNA, 22 nt, Human
agacaucuugcacacauauacu

SEQ ID NO: 227315 - RNA, 22 nt, Human
aaggccagcaguuugagaccag

SEQ ID NO: 227316 - RNA, 22 nt, Human
ggcaguggugggaggcucgcuc

SEQ ID NO: 227317 - RNA, 22 nt, Human
gaggcaggguguugauuacaga

SEQ ID NO: 227318 - RNA, 23 nt, Human
gcagugcuuggcacagcuggguc

SEQ ID NO: 227319 - RNA, 22 nt, Human
acagguguagcaggagcaucaa

SEQ ID NO: 227320 - RNA, 22 nt, Human
cugccucuauaggaguccacca

SEQ ID NO: 227321 - RNA, 22 nt, Human
aaacugguauucaaauguuugg

SEQ ID NO: 227322 - RNA, 22 nt, Human
cccaaagguugaggcugcagug

SEQ ID NO: 227323 - RNA, 22 nt, Human
gcugguccauuggcacugcuca

SEQ ID NO: 227324 - RNA, 22 nt, Human
aagcaugucccuugugauucaa

SEQ ID NO: 227325 - RNA, 22 nt, Human
uuuuaaaucuccaguugacccc

SEQ ID NO: 227326 - RNA, 22 nt, Human
cacaugcuccauacagaauggg

SEQ ID NO: 227327 - RNA, 22 nt, Human
ugagccagucugucugggugaa

SEQ ID NO: 227328 - RNA, 22 nt, Human
gaagucugacucuuuguaagcu

SEQ ID NO: 227329 - RNA, 22 nt, Human
uuauuuaaugugaucugaagag

SEQ ID NO: 227330 - RNA, 22 nt, Human
acuuuccuggcccuguccucug

SEQ ID NO: 227331 - RNA, 22 nt, Human
acaguggauauauuaaaugaga

SEQ ID NO: 227332 - RNA, 22 nt, Human
ccaugccauacuggccacccgg

SEQ ID NO: 227333 - RNA, 22 nt, Human
ugcaggguauccuugucucugc

SEQ ID NO: 227334 - RNA, 22 nt, Human
cagcaucaacauucucagcucu

SEQ ID NO: 227335 - RNA, 22 nt, Human
uuauuacaaugcagaaaauaga

SEQ ID NO: 227336 - RNA, 22 nt, Human
uuuacaauucucuaccaguguu

SEQ ID NO: 227337 - RNA, 22 nt, Human
cauuucuaccaaaugugacugg

SEQ ID NO: 227338 - RNA, 22 nt, Human
uuaggaaacgcugcuauugacu

SEQ ID NO: 227339 - RNA, 22 nt, Human
cagcagagguuuugcuccauga

SEQ ID NO: 227340 - RNA, 22 nt, Human
ggccaggcugguuccuugaccu

SEQ ID NO: 227341 - RNA, 22 nt, Human
uggguucuuucacuucucaguu

SEQ ID NO: 227342 - RNA, 17 nt, Human
aagcauuuaauuugcua

SEQ ID NO: 227343 - RNA, 22 nt, Human
aacauuugaaaaucaagaaucu

SEQ ID NO: 227344 - RNA, 20 nt, Human
uuuacauuuugaaacaguga

SEQ ID NO: 227345 - RNA, 22 nt, Human
uguguccugugcaaggggauga

SEQ ID NO: 227346 - RNA, 22 nt, Human
gcaggugauucacccugggccu

SEQ ID NO: 227347 - RNA, 22 nt, Human
aacaagaauaagugguuucugg

SEQ ID NO: 227348 - RNA, 21 nt, Human
gucauccaccucucgggcucu

SEQ ID NO: 227349 - RNA, 22 nt, Human
uugauuuuuccagcuucuagag

SEQ ID NO: 227350 - RNA, 23 nt, Human
ugcuggcuuccagcugcucccuc

SEQ ID NO: 227351 - RNA, 22 nt, Human
ggagagagagcucauuagcugc

SEQ ID NO: 227352 - RNA, 22 nt, Human
agcgacagaaaccaaggacaag

SEQ ID NO: 227353 - RNA, 22 nt, Human
agauuuguugugagcaggaaua

SEQ ID NO: 227354 - RNA, 22 nt, Human
gcgacagugcggccaccuucau

SEQ ID NO: 227355 - RNA, 22 nt, Human
cuggcugcauuggcaagucaau

SEQ ID NO: 227356 - RNA, 23 nt, Human
ucuccuggcugcacuguggccac

SEQ ID NO: 227357 - RNA, 22 nt, Human
cagcagguccugggcguggccu

SEQ ID NO: 227358 - RNA, 22 nt, Human
ccucaggcagugguauggaugg

SEQ ID NO: 227359 - RNA, 22 nt, Human
aguggcaaagucuucagaaguu

SEQ ID NO: 227360 - RNA, 22 nt, Human
auugcuuuugagcuagaauuuu

SEQ ID NO: 227361 - RNA, 22 nt, Human
uuuccagagggugcucagggcg

SEQ ID NO: 227362 - RNA, 22 nt, Human
aaggaucugacagacuauagaa

SEQ ID NO: 227363 - RNA, 22 nt, Human
cagaaccugaacgugaggugga

SEQ ID NO: 227364 - RNA, 22 nt, Human
ccaaaagcagcugucugugaau

SEQ ID NO: 227365 - RNA, 22 nt, Human
ucuacaaauaaauuacuaugua

SEQ ID NO: 227366 - RNA, 22 nt, Human
auaaugcaccuuugaguauggc

SEQ ID NO: 227367 - RNA, 22 nt, Human
gaggaaaagagacagguuauug

SEQ ID NO: 227368 - RNA, 22 nt, Human
aaccaguacuuuacacagcucu

SEQ ID NO: 227369 - RNA, 22 nt, Human
uacaagaagaggcagagcugga

SEQ ID NO: 227370 - RNA, 22 nt, Human
gcugugugaaaacugggccugg

SEQ ID NO: 227371 - RNA, 22 nt, Human
agcugcccuuaauaggcauuca

SEQ ID NO: 227372 - RNA, 22 nt, Human
aauuuggagcuuuguuucuaga

SEQ ID NO: 227373 - RNA, 22 nt, Human
ggcugcagcagagggacucacg

SEQ ID NO: 227374 - RNA, 22 nt, Human
aaaggacaugucaauaucaggc

SEQ ID NO: 227375 - RNA, 22 nt, Human
ccagcauccaugcucccucggg

SEQ ID NO: 227376 - RNA, 22 nt, Human
uucugggcucccacauauuuca

SEQ ID NO: 227377 - RNA, 22 nt, Human
gcucccaggaagagaagggcca

SEQ ID NO: 227378 - RNA, 22 nt, Human
uacaguuauaugugauaaguaa

SEQ ID NO: 227379 - RNA, 22 nt, Human
uagagaugaauucugcagucuu

SEQ ID NO: 227380 - RNA, 22 nt, Human
cuggugaauggauaaacuguug

SEQ ID NO: 227381 - RNA, 23 nt, Human
uccuccuggauacaaagggaaca

SEQ ID NO: 227382 - RNA, 22 nt, Human
ccuucucccucugagaggaacc

SEQ ID NO: 227383 - RNA, 22 nt, Human
ugacaagagcauucccacaccu

SEQ ID NO: 227384 - RNA, 22 nt, Human
cacaugagagcccccaagagca

SEQ ID NO: 227385 - RNA, 22 nt, Human
uacaaguguaagcuugugagac

SEQ ID NO: 227386 - RNA, 17 nt, Human
gcccugccugcugcccu

SEQ ID NO: 227387 - RNA, 22 nt, Human
aacagcagcaugacagcugggu

SEQ ID NO: 227388 - RNA, 22 nt, Human
agccaggaaugcaugcucugcu

SEQ ID NO: 227389 - RNA, 22 nt, Human
ggccugacauuugcaucaacac

SEQ ID NO: 227390 - RNA, 22 nt, Human
aaguugagaugucauaggagac

SEQ ID NO: 227391 - RNA, 22 nt, Human
guggauggauugaggcaguggg

SEQ ID NO: 227392 - RNA, 22 nt, Human
ucugcagaacuuuaugagcaaa

SEQ ID NO: 227393 - RNA, 22 nt, Human
uuuacuguguccaucugugacu

SEQ ID NO: 227394 - RNA, 22 nt, Human
agcuggcaguaugacuggugac

SEQ ID NO: 227395 - RNA, 22 nt, Human
caguuucuuagugacacaaauc

SEQ ID NO: 227396 - RNA, 22 nt, Human
uauaauuuuagaagagauggaa

SEQ ID NO: 227397 - RNA, 22 nt, Human
agcucccagaagccagagucgg

SEQ ID NO: 227398 - RNA, 22 nt, Human
guuacaaacucaggugccaaaa

SEQ ID NO: 227399 - RNA, 22 nt, Human
uccugaggcacaauccuagaau

SEQ ID NO: 227400 - RNA, 22 nt, Human
ucaaagcacacuuagugguaga

SEQ ID NO: 227401 - RNA, 22 nt, Human
gaguggggcuuuaaaggcucag

SEQ ID NO: 227402 - RNA, 22 nt, Human
gcagggagggccuuucaugaca

SEQ ID NO: 227403 - RNA, 22 nt, Human
uggcagggucuugcuguguugc

SEQ ID NO: 227404 - RNA, 22 nt, Human
auguauuugcguauggacauac

SEQ ID NO: 227405 - RNA, 22 nt, Human
cuggaggggcuggcaugguagc

SEQ ID NO: 227406 - RNA, 21 nt, Human
ugacugaggcuucuucacaca

SEQ ID NO: 227407 - RNA, 22 nt, Human
aaccacagagcccccucagaug

SEQ ID NO: 227408 - RNA, 22 nt, Human
acaugaaaugcagccuguaacc

SEQ ID NO: 227409 - RNA, 22 nt, Human
aguggcuguacuauuuuuucau

SEQ ID NO: 227410 - RNA, 22 nt, Human
aagaugugcaguucauggcagg

SEQ ID NO: 227411 - RNA, 22 nt, Human
ucagggccaucuuuugccucaa

SEQ ID NO: 227412 - RNA, 22 nt, Human
gcaggccuaagagaaggcauug

SEQ ID NO: 227413 - RNA, 22 nt, Human
ccucagugcguacugaacagug

SEQ ID NO: 227414 - RNA, 22 nt, Human
aaaagcagaucuccaaagucua

SEQ ID NO: 227415 - RNA, 22 nt, Human
uagaaccuccacaggaccucca

SEQ ID NO: 227416 - RNA, 21 nt, Human
uuuguucaggggcaaaguuaa

SEQ ID NO: 227417 - RNA, 22 nt, Human
ccagcauggcaccugagaugag

SEQ ID NO: 227418 - RNA, 20 nt, Human
auucaccaaaucaucccagg

SEQ ID NO: 227419 - RNA, 23 nt, Human
ccagcucauccauuaccucucuu

SEQ ID NO: 227420 - RNA, 22 nt, Human
aggggcucaaagugugcaggga

SEQ ID NO: 227421 - RNA, 22 nt, Human
gcacaauuccaugggacagccc

SEQ ID NO: 227422 - RNA, 22 nt, Human
cuuucucugugugguaaagggc

SEQ ID NO: 227423 - RNA, 19 nt, Human
ucaagauggauggcuccca

SEQ ID NO: 227424 - RNA, 22 nt, Human
uggcagaauuuuaaagacagau

SEQ ID NO: 227425 - RNA, 22 nt, Human
cugacuucagggauaaaaagua

SEQ ID NO: 227426 - RNA, 22 nt, Human
gccuggcagauugacauagcca

SEQ ID NO: 227427 - RNA, 22 nt, Human
gggagaaggaggacugugcugu

SEQ ID NO: 227428 - RNA, 22 nt, Human
uuacaguguuacuugaugucca

SEQ ID NO: 227429 - RNA, 22 nt, Human
ugucagagcaaggccaggccag

SEQ ID NO: 227430 - RNA, 22 nt, Human
caaaaguaccuugugugcuuug

SEQ ID NO: 227431 - RNA, 22 nt, Human
ucuggccccggucuucacagcu

SEQ ID NO: 227432 - RNA, 22 nt, Human
uccaagcucucuaugccaugau

SEQ ID NO: 227433 - RNA, 22 nt, Human
auucagaagcaaucacagugag

SEQ ID NO: 227434 - RNA, 22 nt, Human
cuuuggaauaauuuccuggagu

SEQ ID NO: 227435 - RNA, 22 nt, Human
ucacaucacaugacaguaggcc

SEQ ID NO: 227436 - RNA, 22 nt, Human
accagccaccaccaggagaucg

SEQ ID NO: 227437 - RNA, 22 nt, Human
caggcacaugggagcucaucau

SEQ ID NO: 227438 - RNA, 21 nt, Human
gaaucuuugauuuacauggga

SEQ ID NO: 227439 - RNA, 22 nt, Human
acacagaagaucucuuaaugcu

SEQ ID NO: 227440 - RNA, 22 nt, Human
ggcugugcuuugcccaaagggc

SEQ ID NO: 227441 - RNA, 22 nt, Human
agcagggcucugccaugggccc

SEQ ID NO: 227442 - RNA, 22 nt, Human
agagcuuuagcugcuggucugg

SEQ ID NO: 227443 - RNA, 22 nt, Human
acagaguccuagcugcaaagaa

SEQ ID NO: 227444 - RNA, 22 nt, Human
ucacugcucugaaaguacaggg

SEQ ID NO: 227445 - RNA, 22 nt, Human
uccuucaaucacccagugggga

SEQ ID NO: 227446 - RNA, 22 nt, Human
guagcuuccagaaagugucuuu

SEQ ID NO: 227447 - RNA, 23 nt, Human
uuucaguugagaaugcacggacc

SEQ ID NO: 227448 - RNA, 20 nt, Human
uaggugucuuugccagcuuu

SEQ ID NO: 227449 - RNA, 22 nt, Human
auguuuguguuucccauucagg

SEQ ID NO: 227450 - RNA, 22 nt, Human
agcuucuugaccaagccuguaa

SEQ ID NO: 227451 - RNA, 22 nt, Human
gggccugcuccccaucgcugcu

SEQ ID NO: 227452 - RNA, 22 nt, Human
acuggggcagugggcagugguu

SEQ ID NO: 227453 - RNA, 22 nt, Human
agguggcagccgagacauaagg

SEQ ID NO: 227454 - RNA, 21 nt, Human
agcaggcuuuggaguggggcu

SEQ ID NO: 227455 - RNA, 22 nt, Human
ccagguguggccacauggcugg

SEQ ID NO: 227456 - RNA, 22 nt, Human
ucagaggagcugcagaacgcug

SEQ ID NO: 227457 - RNA, 20 nt, Human
ucacuguaauugccuacauu

SEQ ID NO: 227458 - RNA, 22 nt, Human
aaagcaaugggucuaagguaaa

SEQ ID NO: 227459 - RNA, 18 nt, Human
aaaggcugaauauagaag

SEQ ID NO: 227460 - RNA, 22 nt, Human
cuggcugggguccauccucuaa

SEQ ID NO: 227461 - RNA, 20 nt, Human
cagagccaggguuuuguuuu

SEQ ID NO: 227462 - RNA, 22 nt, Human
uuacugauuuuugggcccuacc

SEQ ID NO: 227463 - RNA, 22 nt, Human
cacuccagccucagugacagag

SEQ ID NO: 227464 - RNA, 22 nt, Human
uucugcuuagagggcauuugca

SEQ ID NO: 227465 - RNA, 22 nt, Human
gguuuauuaaugugaacuguau

SEQ ID NO: 227466 - RNA, 22 nt, Human
gccuccccaggggugucaugag

SEQ ID NO: 227467 - RNA, 18 nt, Human
agcagggcauuuugccau

SEQ ID NO: 227468 - RNA, 22 nt, Human
accaggcccuccagcugcgugg

SEQ ID NO: 227469 - RNA, 17 nt, Human
ucucuuucccuuucugc

SEQ ID NO: 227470 - RNA, 22 nt, Human
ucaauaauggcaggauaaauuu

SEQ ID NO: 227471 - RNA, 22 nt, Human
augaauggauggggucaagaua

SEQ ID NO: 227472 - RNA, 22 nt, Human
caggaggcuccuagggcucugu

SEQ ID NO: 227473 - RNA, 19 nt, Human
aucugaaguaggugcagcu

SEQ ID NO: 227474 - RNA, 22 nt, Human
uuguauuuauauugaauagcuu

SEQ ID NO: 227475 - RNA, 22 nt, Human
agauggucaaggauacuguuca

SEQ ID NO: 227476 - RNA, 22 nt, Human
augcccugagcaggccuucaag

SEQ ID NO: 227477 - RNA, 22 nt, Human
uuuacagagagagaacuggacu

SEQ ID NO: 227478 - RNA, 22 nt, Human
acugucaaaagagauuauauua

SEQ ID NO: 227479 - RNA, 22 nt, Human
cuguggcacucaagaagccucc

SEQ ID NO: 227480 - RNA, 22 nt, Human
uagaaaguaaacacgaagucuc

SEQ ID NO: 227481 - RNA, 22 nt, Human
agggagacacaugaggaaguca

SEQ ID NO: 227482 - RNA, 22 nt, Human
uccaguccuaucugcccuugga

SEQ ID NO: 227483 - RNA, 17 nt, Human
cuaaauacuugcguuuc

SEQ ID NO: 227484 - RNA, 20 nt, Human
uucugagaguucacagcccc

SEQ ID NO: 227485 - RNA, 22 nt, Human
uaaccagacagaaacagcuaga

SEQ ID NO: 227486 - RNA, 22 nt, Human
aagggcuccauccuuauaaaug

SEQ ID NO: 227487 - RNA, 22 nt, Human
gagcccuguucaggccuccuca

SEQ ID NO: 227488 - RNA, 22 nt, Human
caguuuaaagaaggaugggagu

SEQ ID NO: 227489 - RNA, 22 nt, Human
ucauucauugcaagcacacgca

SEQ ID NO: 227490 - RNA, 22 nt, Human
cguuuuucaguggucuuagguc

SEQ ID NO: 227491 - RNA, 22 nt, Human
ucaggaagcugcucuggguggu

SEQ ID NO: 227492 - RNA, 22 nt, Human
gggcuaggucugaucagagaag

SEQ ID NO: 227493 - RNA, 22 nt, Human
gaggagcuugaggcuaggagcc

SEQ ID NO: 227494 - RNA, 22 nt, Human
uuugaaauuaagauauugucca

SEQ ID NO: 227495 - RNA, 22 nt, Human
acugugcaggugaacuguuugc

SEQ ID NO: 227496 - RNA, 22 nt, Human
gcagugggccugaggaagggug

SEQ ID NO: 227497 - RNA, 22 nt, Human
uguucucuuuuccugcugagcc

SEQ ID NO: 227498 - RNA, 22 nt, Human
ggagcuggcagcgcaacccaga

SEQ ID NO: 227499 - RNA, 22 nt, Human
accacaucuagauugcagcccu

SEQ ID NO: 227500 - RNA, 22 nt, Human
uuaaaaggcaucauaggugaau

SEQ ID NO: 227501 - RNA, 22 nt, Human
ucuuggagaauggcagagaagc

SEQ ID NO: 227502 - RNA, 22 nt, Human
aggacagagccugugcagaccg

SEQ ID NO: 227503 - RNA, 22 nt, Human
aucagagcuaguacuugcaggu

SEQ ID NO: 227504 - RNA, 22 nt, Human
caugugugggacccuuagguug

SEQ ID NO: 227505 - RNA, 22 nt, Human
uuacagaagagaaagaauucag

SEQ ID NO: 227506 - RNA, 22 nt, Human
cuggcccagagagcagagcuua

SEQ ID NO: 227507 - RNA, 22 nt, Human
ucagucuuuaaaagcucaggaa

SEQ ID NO: 227508 - RNA, 22 nt, Human
accuguuuguguuuggacugca

SEQ ID NO: 227509 - RNA, 17 nt, Human
ugaaacaccaagacugu

SEQ ID NO: 227510 - RNA, 22 nt, Human
uuugaaagggaaauaaacuccu

SEQ ID NO: 227511 - RNA, 22 nt, Human
gcuggcuguguuccuucugcca

SEQ ID NO: 227512 - RNA, 22 nt, Human
cucugcuacuguuaaaccauuu

SEQ ID NO: 227513 - RNA, 22 nt, Human
cucagcacauuccuaagggaug

SEQ ID NO: 227514 - RNA, 22 nt, Human
gagcaucugugguccaucagaa

SEQ ID NO: 227515 - RNA, 22 nt, Human
gggcccagcacuggcugggauc

SEQ ID NO: 227516 - RNA, 22 nt, Human
cuugcuuuugcugaugauuaag

SEQ ID NO: 227517 - RNA, 20 nt, Human
uugaagagucagguagggcc

SEQ ID NO: 227518 - RNA, 22 nt, Human
ggcaaaaaccacaauuacuuuu

SEQ ID NO: 227519 - RNA, 20 nt, Human
gcuguggcaaagcuuugugu

SEQ ID NO: 227520 - RNA, 20 nt, Human
cuggggagcugcucccacga

SEQ ID NO: 227521 - RNA, 22 nt, Human
uguucuuuggcuucacagcucu

SEQ ID NO: 227522 - RNA, 22 nt, Human
cuguguccugcgucaagccaau

SEQ ID NO: 227523 - RNA, 22 nt, Human
ggccagagagccgcuguuagga

SEQ ID NO: 227524 - RNA, 22 nt, Human
ucuucagacccuuagcugugau

SEQ ID NO: 227525 - RNA, 22 nt, Human
gugcuggcugccaggaggcugc

SEQ ID NO: 227526 - RNA, 22 nt, Human
acagaaguguguguguaggaau

SEQ ID NO: 227527 - RNA, 22 nt, Human
caugugguucaaguacuccaca

SEQ ID NO: 227528 - RNA, 22 nt, Human
cacugugguuauuaucacuguu

SEQ ID NO: 227529 - RNA, 22 nt, Human
gugcuacuaguuucauuuuuca

SEQ ID NO: 227530 - RNA, 22 nt, Human
guaucuuuaucccucguuggag

SEQ ID NO: 227531 - RNA, 22 nt, Human
uagaugaccuuguguuaggcaa

SEQ ID NO: 227532 - RNA, 22 nt, Human
uuagccauuuuauacaagugua

SEQ ID NO: 227533 - RNA, 22 nt, Human
ucacccagaaaagacagcagau

SEQ ID NO: 227534 - RNA, 22 nt, Human
ugaauagacuggggcugugaag

SEQ ID NO: 227535 - RNA, 22 nt, Human
uuaaacauuuauggaggcagca

SEQ ID NO: 227536 - RNA, 22 nt, Human
uauuagguaugaacuggcaacc

SEQ ID NO: 227537 - RNA, 22 nt, Human
acaaaguauuuuuagguuugua

SEQ ID NO: 227538 - RNA, 19 nt, Human
auucucugguuugcuggcu

SEQ ID NO: 227539 - RNA, 18 nt, Human
ucccuggggcugccaccc

SEQ ID NO: 227540 - RNA, 22 nt, Human
ucugcaggcuuggaguggcagc

SEQ ID NO: 227541 - RNA, 22 nt, Human
ucagagaaguaagguggggugc

SEQ ID NO: 227542 - RNA, 22 nt, Human
gaagcaaaaugucugcacauau

SEQ ID NO: 227543 - RNA, 22 nt, Human
auacaagacaguaggaaacuga

SEQ ID NO: 227544 - RNA, 22 nt, Human
aagcugcagguugaauccaggu

SEQ ID NO: 227545 - RNA, 22 nt, Human
auuccucaaagguagcccauua

SEQ ID NO: 227546 - RNA, 22 nt, Human
ucuggcagagucagugcacaca

SEQ ID NO: 227547 - RNA, 22 nt, Human
agugugagcuaauagcagagcc

SEQ ID NO: 227548 - RNA, 22 nt, Human
guagauaaggauugauuuuuau

SEQ ID NO: 227549 - RNA, 22 nt, Human
ucuggcagguucccauguuaug

SEQ ID NO: 227550 - RNA, 22 nt, Human
cccaggagagaggccaguuggc

SEQ ID NO: 227551 - RNA, 22 nt, Human
ggaggccaaggcagguggaucg

SEQ ID NO: 227552 - RNA, 22 nt, Human
agagcagcuggggcagagacca

SEQ ID NO: 227553 - RNA, 22 nt, Human
ucuggcagagugauaggauaag

SEQ ID NO: 227554 - RNA, 22 nt, Human
ggagaaggaauauuggaguagg

SEQ ID NO: 227555 - RNA, 22 nt, Human
aagcuguauguuaccacuguca

SEQ ID NO: 227556 - RNA, 22 nt, Human
cagcccugcagagggcgcuccu

SEQ ID NO: 227557 - RNA, 22 nt, Human
cuauuguuucuaugcucugagg

SEQ ID NO: 227558 - RNA, 22 nt, Human
gcaggcucaaaagcugguagga

SEQ ID NO: 227559 - RNA, 19 nt, Human
uccucccuuugguguccug

SEQ ID NO: 227560 - RNA, 22 nt, Human
gcugugagugagcugccuaggc

SEQ ID NO: 227561 - RNA, 22 nt, Human
guagaaaauuaggaugaggcuu

SEQ ID NO: 227562 - RNA, 22 nt, Human
acucugggcuuugauuuguuac

SEQ ID NO: 227563 - RNA, 20 nt, Human
augcaucugguaucuuuccu

SEQ ID NO: 227564 - RNA, 22 nt, Human
uacaaguuccauuuugaaagug

SEQ ID NO: 227565 - RNA, 22 nt, Human
augcaugucugccaguugcuua

SEQ ID NO: 227566 - RNA, 22 nt, Human
ggagaugcuuuccaguggggau

SEQ ID NO: 227567 - RNA, 22 nt, Human
aagccggcugggccgaggcugc

SEQ ID NO: 227568 - RNA, 22 nt, Human
agcugcuccaacccagcgggcu

SEQ ID NO: 227569 - RNA, 21 nt, Human
cauauuaaaucggugccuuua

SEQ ID NO: 227570 - RNA, 22 nt, Human
acucagagaacauucccagucu

SEQ ID NO: 227571 - RNA, 22 nt, Human
auguacaaaauguuuugaaaug

SEQ ID NO: 227572 - RNA, 18 nt, Human
uucucugguggauguuau

SEQ ID NO: 227573 - RNA, 22 nt, Human
uucaacaaguaguacacacagu

SEQ ID NO: 227574 - RNA, 22 nt, Human
accuacauggcuuuaaguaagu

SEQ ID NO: 227575 - RNA, 22 nt, Human
ugggacagguuggagagaagca

SEQ ID NO: 227576 - RNA, 22 nt, Human
acacuguagauauagaguuagu

SEQ ID NO: 227577 - RNA, 22 nt, Human
gacccauauauacguaauuugu

SEQ ID NO: 227578 - RNA, 22 nt, Human
gaacaaacagaagaggcggaac

SEQ ID NO: 227579 - RNA, 21 nt, Human
agggccagaucaccaaggagc

SEQ ID NO: 227580 - RNA, 22 nt, Human
auguacagccacuucacaguua

SEQ ID NO: 227581 - RNA, 22 nt, Human
acagaaauugggcaaauggaag

SEQ ID NO: 227582 - RNA, 22 nt, Human
gcuuuacauaaacauuuauuau

SEQ ID NO: 227583 - RNA, 22 nt, Human
ucaaauggguaugcuuuauaau

SEQ ID NO: 227584 - RNA, 22 nt, Human
cuuuacagaauaagaauacugg

SEQ ID NO: 227585 - RNA, 22 nt, Human
gacuuuaugaagagaugaccaa

SEQ ID NO: 227586 - RNA, 22 nt, Human
auaauuaucucagacacuuguu

SEQ ID NO: 227587 - RNA, 22 nt, Human
gaggccaaucaauagggcaaua

SEQ ID NO: 227588 - RNA, 22 nt, Human
acacacagaguuuauacaggca

SEQ ID NO: 227589 - RNA, 22 nt, Human
ggcugagaaucaacaaccugcu

SEQ ID NO: 227590 - RNA, 22 nt, Human
gggcugcaucagcaggacccgg

SEQ ID NO: 227591 - RNA, 22 nt, Human
gcaguguuacuuggaguacuaa

SEQ ID NO: 227592 - RNA, 22 nt, Human
agcuacagaugagcccaguauc

SEQ ID NO: 227593 - RNA, 22 nt, Human
gggcagcucagccaccaugcag

SEQ ID NO: 227594 - RNA, 22 nt, Human
cuccccaacucagccgaggcuu

SEQ ID NO: 227595 - RNA, 22 nt, Human
cacugucuguguguccuugggg

SEQ ID NO: 227596 - RNA, 22 nt, Human
agcuuuaucuucaccugggaau

SEQ ID NO: 227597 - RNA, 19 nt, Human
acucugaggcugagacaag

SEQ ID NO: 227598 - RNA, 22 nt, Human
ccaggaggcuucguccguggag

SEQ ID NO: 227599 - RNA, 22 nt, Human
ggagacagugguagggccuaag

SEQ ID NO: 227600 - RNA, 22 nt, Human
cugcagcuaaggaaugugguug

SEQ ID NO: 227601 - RNA, 22 nt, Human
gguucccggaucuccgaguccc

SEQ ID NO: 227602 - RNA, 22 nt, Human
agcuccaggauaagacaggugc

SEQ ID NO: 227603 - RNA, 22 nt, Human
aucaggaucagggcuagcagag

SEQ ID NO: 227604 - RNA, 22 nt, Human
auuaaauguuggcauauuuugu

SEQ ID NO: 227605 - RNA, 22 nt, Human
aguaacucauguaaaccucaca

SEQ ID NO: 227606 - RNA, 22 nt, Human
uauacagauggaaagauacaca

SEQ ID NO: 227607 - RNA, 22 nt, Human
ucaggcugcagcugucagcagc

SEQ ID NO: 227608 - RNA, 22 nt, Human
cagucucuugcuucauuaguug

SEQ ID NO: 227609 - RNA, 22 nt, Human
cuggcauucuuguuucuggaaa

SEQ ID NO: 227610 - RNA, 22 nt, Human
gagggggagaugugcacacacu

SEQ ID NO: 227611 - RNA, 22 nt, Human
uuuuucauauuccccucucugg

SEQ ID NO: 227612 - RNA, 22 nt, Human
cugcagggcccaaggucaacgg

SEQ ID NO: 227613 - RNA, 23 nt, Human
cccagcuggaaguuagaggacca

SEQ ID NO: 227614 - RNA, 22 nt, Human
cucugugcgggccauggucagg

SEQ ID NO: 227615 - RNA, 22 nt, Human
uagaaacagcauauauuagccc

SEQ ID NO: 227616 - RNA, 20 nt, Human
uggugagagcaccugauggg

SEQ ID NO: 227617 - RNA, 22 nt, Human
cagucuaaguuaauuuccacaa

SEQ ID NO: 227618 - RNA, 22 nt, Human
uaugcauaguggaauuagcaaa

SEQ ID NO: 227619 - RNA, 22 nt, Human
aagggcuguaagccaaguaaag

SEQ ID NO: 227620 - RNA, 22 nt, Human
uaaaacugaauacauacugagg

SEQ ID NO: 227621 - RNA, 22 nt, Human
aggcaaauugugagaaaaugaa

SEQ ID NO: 227622 - RNA, 22 nt, Human
aaugucugccugaacuuuauau

SEQ ID NO: 227623 - RNA, 22 nt, Human
ugucuucaucucagacacaguu

SEQ ID NO: 227624 - RNA, 22 nt, Human
uaccagcuuccuucaagaugug

SEQ ID NO: 227625 - RNA, 22 nt, Human
aguuaggacacuugagggcuaa

SEQ ID NO: 227626 - RNA, 22 nt, Human
aagugucugcaaaaugacagag

SEQ ID NO: 227627 - RNA, 22 nt, Human
agagggcaaguguaguccagua

SEQ ID NO: 227628 - RNA, 17 nt, Human
ugccuccagcaggguga

SEQ ID NO: 227629 - RNA, 22 nt, Human
cagggcugaagaaauucaaaag

SEQ ID NO: 227630 - RNA, 22 nt, Human
cucacagguucugcagcucaca

SEQ ID NO: 227631 - RNA, 18 nt, Human
cgaggcaggcggaucacg

SEQ ID NO: 227632 - RNA, 22 nt, Human
gguagggcaaaguagggcaccu

SEQ ID NO: 227633 - RNA, 22 nt, Human
gccaggagcccugggcaaguuc

SEQ ID NO: 227634 - RNA, 22 nt, Human
ccucaggugugggccagcuguc

SEQ ID NO: 227635 - RNA, 22 nt, Human
uauuugaagauucuucugaugu

SEQ ID NO: 227636 - RNA, 22 nt, Human
caguguauaaacuuuaacauag

SEQ ID NO: 227637 - RNA, 23 nt, Human
agggcugaaugcagagaagcaga

SEQ ID NO: 227638 - RNA, 22 nt, Human
gcuggcuggcacguucgcacgu

SEQ ID NO: 227639 - RNA, 22 nt, Human
cugauccagagccaaccaaggc

SEQ ID NO: 227640 - RNA, 21 nt, Human
aggaggccaguacugcugaac

SEQ ID NO: 227641 - RNA, 22 nt, Human
agcagugggggaguguuaguuu

SEQ ID NO: 227642 - RNA, 20 nt, Human
agcuaggagaaagcauggag

SEQ ID NO: 227643 - RNA, 22 nt, Human
ucaagaaacugugcuacagagu

SEQ ID NO: 227644 - RNA, 22 nt, Human
uagcccucuuuaauccuucccu

SEQ ID NO: 227645 - RNA, 22 nt, Human
gaggugucaggguagucaugau

SEQ ID NO: 227646 - RNA, 22 nt, Human
ucuguagcaucuuaaauguagu

SEQ ID NO: 227647 - RNA, 22 nt, Human
uucagagaacuucauggaagag

SEQ ID NO: 227648 - RNA, 22 nt, Human
aacaagaagagagggacguaau

SEQ ID NO: 227649 - RNA, 22 nt, Human
ucuuuugugauucuuuaguuac

SEQ ID NO: 227650 - RNA, 22 nt, Human
gguuggggcgagcuggaggccc

SEQ ID NO: 227651 - RNA, 22 nt, Human
cuguuacuguuggcccagggug

SEQ ID NO: 227652 - RNA, 22 nt, Human
aguggcuucauuucugccagaa

SEQ ID NO: 227653 - RNA, 22 nt, Human
ucucagcucauggcagccuuga

SEQ ID NO: 227654 - RNA, 22 nt, Human
ccaaaguccauaguuuacuuua

SEQ ID NO: 227655 - RNA, 22 nt, Human
cagcaggugucuagcaaggguc

SEQ ID NO: 227656 - RNA, 22 nt, Human
uccaggagcucauccacgucaa

SEQ ID NO: 227657 - RNA, 23 nt, Human
uggcaaggaaugggauggagacu

SEQ ID NO: 227658 - RNA, 22 nt, Human
gcagagaccccgcagugaggcc

SEQ ID NO: 227659 - RNA, 22 nt, Human
ugucacauauauaauguucaau

SEQ ID NO: 227660 - RNA, 21 nt, Human
ucagcaaaauaagcaaaugga

SEQ ID NO: 227661 - RNA, 22 nt, Human
auugcuuuuagugaaauuauau

SEQ ID NO: 227662 - RNA, 22 nt, Human
aucuggagugggacacagaaau

SEQ ID NO: 227663 - RNA, 22 nt, Human
ugcccagccuaaacuuggcaag

SEQ ID NO: 227664 - RNA, 22 nt, Human
gguuuuaacuacagaauugcaa

SEQ ID NO: 227665 - RNA, 22 nt, Human
uuccaugacugaagcaggggcg

SEQ ID NO: 227666 - RNA, 22 nt, Human
uuucuccugaguuccacgcuac

SEQ ID NO: 227667 - RNA, 22 nt, Human
gaaggaagucauuagugcagac

SEQ ID NO: 227668 - RNA, 22 nt, Human
aagcccugccacccauucacug

SEQ ID NO: 227669 - RNA, 21 nt, Human
aaagauguuucaucugagaaa

SEQ ID NO: 227670 - RNA, 22 nt, Human
gaaaucuuugccuuagcugugu

SEQ ID NO: 227671 - RNA, 22 nt, Human
caagcuuguuucuccugggggu

SEQ ID NO: 227672 - RNA, 22 nt, Human
cccuccaggccugucauguucc

SEQ ID NO: 227673 - RNA, 22 nt, Human
auagauguucaaucagauauuu

SEQ ID NO: 227674 - RNA, 22 nt, Human
cugagcugaaacuugagaggcu

SEQ ID NO: 227675 - RNA, 22 nt, Human
ucucaguguguuuucucucaga

SEQ ID NO: 227676 - RNA, 21 nt, Human
ccaccaggucuucugcucggg

SEQ ID NO: 227677 - RNA, 22 nt, Human
aaggaaguuaagucuuagaaug

SEQ ID NO: 227678 - RNA, 22 nt, Human
augcaccccagaagcugcagug

SEQ ID NO: 227679 - RNA, 22 nt, Human
cauggccugccuccuccuggug

SEQ ID NO: 227680 - RNA, 22 nt, Human
guuuccuagaucaguguucuua

SEQ ID NO: 227681 - RNA, 22 nt, Human
cagcaagaguugggguuguugg

SEQ ID NO: 227682 - RNA, 22 nt, Human
agcugguggaagggagcccaaa

SEQ ID NO: 227683 - RNA, 22 nt, Human
gaagcaagugcaaggaagaggc

SEQ ID NO: 227684 - RNA, 22 nt, Human
gauuuacagaucuaagggucac

SEQ ID NO: 227685 - RNA, 22 nt, Human
cccaggcacaccccgaacggaa

SEQ ID NO: 227686 - RNA, 22 nt, Human
agaggggaaguaaugaaugaua

SEQ ID NO: 227687 - RNA, 22 nt, Human
ccugaguguaauaaugaaggca

SEQ ID NO: 227688 - RNA, 22 nt, Human
gguuucaaaguggacaguuagu

SEQ ID NO: 227689 - RNA, 22 nt, Human
cuggcagcucuacucagagccu

SEQ ID NO: 227690 - RNA, 16 nt, Human
cuuccucuucacuggc

SEQ ID NO: 227691 - RNA, 22 nt, Human
caggcagccugagggaucuggg

SEQ ID NO: 227692 - RNA, 22 nt, Human
acauccaccacaugccaggcuc

SEQ ID NO: 227693 - RNA, 22 nt, Human
acagggcucugacaccaaggua

SEQ ID NO: 227694 - RNA, 22 nt, Human
ccugaguggccaggcagcugug

SEQ ID NO: 227695 - RNA, 22 nt, Human
gcugcucugugacagccuccgg

SEQ ID NO: 227696 - RNA, 22 nt, Human
guuuccugcccugucuuaucca

SEQ ID NO: 227697 - RNA, 22 nt, Human
gugacuguaauuaccuuagcaa

SEQ ID NO: 227698 - RNA, 22 nt, Human
ucuuuagagccuuuccucccga

SEQ ID NO: 227699 - RNA, 23 nt, Human
acuccccagucucuucuugccaa

SEQ ID NO: 227700 - RNA, 22 nt, Human
ggcuuccuaauacucccuacac

SEQ ID NO: 227701 - RNA, 19 nt, Human
cucuggagaacaauagugc

SEQ ID NO: 227702 - RNA, 22 nt, Human
accugggaguaugcagugguga

SEQ ID NO: 227703 - RNA, 23 nt, Human
ucugcuggugacacggucacauu

SEQ ID NO: 227704 - RNA, 20 nt, Human
ucccaggcugggcuccagcu

SEQ ID NO: 227705 - RNA, 22 nt, Human
ugaggcagugcugggaagccug

SEQ ID NO: 227706 - RNA, 22 nt, Human
ccuggguacgcagggcuccucu

SEQ ID NO: 227707 - RNA, 22 nt, Human
ggcuuugacaugcugaauuaaa

SEQ ID NO: 227708 - RNA, 22 nt, Human
cuccuggcaggcugagugaaau

SEQ ID NO: 227709 - RNA, 22 nt, Human
uccaggcauuggagagauaaug

SEQ ID NO: 227710 - RNA, 23 nt, Human
gccuggagaaaagcugcaguuca

SEQ ID NO: 227711 - RNA, 22 nt, Human
aaggcuuguugucacgcucuug

SEQ ID NO: 227712 - RNA, 22 nt, Human
aagguauuauuugcaaucauuu

SEQ ID NO: 227713 - RNA, 22 nt, Human
agggccacaguggggccugaga

SEQ ID NO: 227714 - RNA, 22 nt, Human
acagaagcaaagacucaggcaa

SEQ ID NO: 227715 - RNA, 22 nt, Human
auuaauguguagccaacuuaau

SEQ ID NO: 227716 - RNA, 22 nt, Human
ggauggcagacagugaguggcu

SEQ ID NO: 227717 - RNA, 22 nt, Human
gagaagaaauagaaucacauuu

SEQ ID NO: 227718 - RNA, 22 nt, Human
uuuguuuacucauucauugaug

SEQ ID NO: 227719 - RNA, 22 nt, Human
ucagacacagaugagacaagga

SEQ ID NO: 227720 - RNA, 22 nt, Human
agguccagagguugaacggugg

SEQ ID NO: 227721 - RNA, 22 nt, Human
ucagaggccaaacugagcaggg

SEQ ID NO: 227722 - RNA, 22 nt, Human
aggcuucuacguggucccaggg

SEQ ID NO: 227723 - RNA, 22 nt, Human
ucugcacccuucuggguuggaa

SEQ ID NO: 227724 - RNA, 22 nt, Human
cuccagugcacccagaggauuu

SEQ ID NO: 227725 - RNA, 22 nt, Human
caggcccucgcccgcagcgacc

SEQ ID NO: 227726 - RNA, 22 nt, Human
cuuagaaugucuacucuuacca

SEQ ID NO: 227727 - RNA, 22 nt, Human
augugcuugcagaugagccuca

SEQ ID NO: 227728 - RNA, 22 nt, Human
uuuaagaucauuuguauuaucc

SEQ ID NO: 227729 - RNA, 22 nt, Human
ucccugaggaagggguguggug

SEQ ID NO: 227730 - RNA, 22 nt, Human
uaguuugagaauugaaauagaa

SEQ ID NO: 227731 - RNA, 22 nt, Human
ccuggcagcuguuuggcuuggc

SEQ ID NO: 227732 - RNA, 22 nt, Human
acagcagaucuggcuacagguu

SEQ ID NO: 227733 - RNA, 22 nt, Human
cugaggagaaaugggaugguuc

SEQ ID NO: 227734 - RNA, 22 nt, Human
agucacaggcaagagggcucca

SEQ ID NO: 227735 - RNA, 22 nt, Human
aauauuucaaaaggaaacacag

SEQ ID NO: 227736 - RNA, 22 nt, Human
uccagcagguccgagacaaguu

SEQ ID NO: 227737 - RNA, 22 nt, Human
ggucuucucuaugagcuggucu

SEQ ID NO: 227738 - RNA, 22 nt, Human
ucaaauaccagcuuuuccagaa

SEQ ID NO: 227739 - RNA, 22 nt, Human
uacuauuuggaauuuuaaauug

SEQ ID NO: 227740 - RNA, 22 nt, Human
aggagugggggcgagaaguuaa

SEQ ID NO: 227741 - RNA, 22 nt, Human
aaugucugaaaaucagacugca

SEQ ID NO: 227742 - RNA, 22 nt, Human
gagggaugcagaaacagaggcc

SEQ ID NO: 227743 - RNA, 19 nt, Human
uuacuucaggagugaaauu

SEQ ID NO: 227744 - RNA, 22 nt, Human
acagcugacauuggcagcuauu

SEQ ID NO: 227745 - RNA, 22 nt, Human
ucaguaaaguucuuucuugcug

SEQ ID NO: 227746 - RNA, 22 nt, Human
ugacaaagguguugccagaggg

SEQ ID NO: 227747 - RNA, 22 nt, Human
aaugcaaacuccacuggagcag

SEQ ID NO: 227748 - RNA, 22 nt, Human
aaacagauaaugcuauaaaugg

SEQ ID NO: 227749 - RNA, 22 nt, Human
cugguuuaguaggggacugaag

SEQ ID NO: 227750 - RNA, 22 nt, Human
gcugcucagugggccugagccu

SEQ ID NO: 227751 - RNA, 22 nt, Human
uucacagaugccugaugugugg

SEQ ID NO: 227752 - RNA, 22 nt, Human
agggccaguucuaccucugaau

SEQ ID NO: 227753 - RNA, 22 nt, Human
cagaacagacuuaacagggcug

SEQ ID NO: 227754 - RNA, 22 nt, Human
aguguguuuaggcugcggguug

SEQ ID NO: 227755 - RNA, 22 nt, Human
agugcuccuuucauugcugccc

SEQ ID NO: 227756 - RNA, 22 nt, Human
gcauccaaauguuucauuucuu

SEQ ID NO: 227757 - RNA, 22 nt, Human
gugaggcaggcauucuccuuuc

SEQ ID NO: 227758 - RNA, 22 nt, Human
uguguccuguccccuugcugcu

SEQ ID NO: 227759 - RNA, 22 nt, Human
gggcugagcuguucugaguuua

SEQ ID NO: 227760 - RNA, 22 nt, Human
gucauuuaaaagggaacacaug

SEQ ID NO: 227761 - RNA, 18 nt, Human
agaggcuggacaggggau

SEQ ID NO: 227762 - RNA, 22 nt, Human
uguccugggucccugcuagaag

SEQ ID NO: 227763 - RNA, 22 nt, Human
ggugcauguagccaucaagaua

SEQ ID NO: 227764 - RNA, 22 nt, Human
gccuuagaaaaauaagauuuua

SEQ ID NO: 227765 - RNA, 22 nt, Human
ccuucauugcaucuuuaagaga

SEQ ID NO: 227766 - RNA, 22 nt, Human
ccaagcugacugugcuguugug

SEQ ID NO: 227767 - RNA, 22 nt, Human
cacagguguucuugcagugaaa

SEQ ID NO: 227768 - RNA, 22 nt, Human
gagguggauguugcagugagcu

SEQ ID NO: 227769 - RNA, 22 nt, Human
aagugcaucacuacucauuaca

SEQ ID NO: 227770 - RNA, 22 nt, Human
ggcaggugaggcaugugccugg

SEQ ID NO: 227771 - RNA, 22 nt, Human
ccuuuucuauguaccagcagug

SEQ ID NO: 227772 - RNA, 22 nt, Human
cucuggagagguucccauggga

SEQ ID NO: 227773 - RNA, 22 nt, Human
agggcagcaauuugguuccugg

SEQ ID NO: 227774 - RNA, 22 nt, Human
uccuccaggcaccucacuggcu

SEQ ID NO: 227775 - RNA, 23 nt, Human
agcuccugaggccagccucuccu

SEQ ID NO: 227776 - RNA, 22 nt, Human
aaggucaaagacaguaacuuuu

SEQ ID NO: 227777 - RNA, 22 nt, Human
gucugggcuucagaguuagaga

SEQ ID NO: 227778 - RNA, 20 nt, Human
uucagaaauaaggaaugagg

SEQ ID NO: 227779 - RNA, 22 nt, Human
aggcccagagcaggaaaggguu

SEQ ID NO: 227780 - RNA, 22 nt, Human
uggaaauguauuugggcaugcc

SEQ ID NO: 227781 - RNA, 22 nt, Human
ugcuccuguuucaucagcuaua

SEQ ID NO: 227782 - RNA, 22 nt, Human
cugccucuccccagaguggccc

SEQ ID NO: 227783 - RNA, 22 nt, Human
aucuuguuaaaaugcagaaacu

SEQ ID NO: 227784 - RNA, 22 nt, Human
gucaucauuuuuagcauauggg

SEQ ID NO: 227785 - RNA, 22 nt, Human
ccucacccagucaccuaggugg

SEQ ID NO: 227786 - RNA, 22 nt, Human
cuuuuguugcccuugucgcagg

SEQ ID NO: 227787 - RNA, 19 nt, Human
cuguccuuggcugcacugu

SEQ ID NO: 227788 - RNA, 22 nt, Human
caaauuacccucaacaucuaga

SEQ ID NO: 227789 - RNA, 22 nt, Human
accagggcaaauguuuguacuc

SEQ ID NO: 227790 - RNA, 21 nt, Human
ugagaugcuagaaggcaggga

SEQ ID NO: 227791 - RNA, 22 nt, Human
gcuggccugggcagccugucgg

SEQ ID NO: 227792 - RNA, 22 nt, Human
auuuccuucaguguuuaauacu

SEQ ID NO: 227793 - RNA, 22 nt, Human
aacacagaguauuugaagcauu

SEQ ID NO: 227794 - RNA, 22 nt, Human
aaaguucauugaugacugaggu

SEQ ID NO: 227795 - RNA, 21 nt, Human
aguguguguggaaugagaaua

SEQ ID NO: 227796 - RNA, 17 nt, Human
ucaaagaaugcaugcag

SEQ ID NO: 227797 - RNA, 22 nt, Human
aauucuacauugguucacauuu

SEQ ID NO: 227798 - RNA, 22 nt, Human
ugucaggcaaaggaagguauuu

SEQ ID NO: 227799 - RNA, 22 nt, Human
ggaggagauuccccucucacuu

SEQ ID NO: 227800 - RNA, 22 nt, Human
ucaguggagagcuuccaggauu

SEQ ID NO: 227801 - RNA, 22 nt, Human
cagucucucagcuuucagcugu

SEQ ID NO: 227802 - RNA, 22 nt, Human
agaggcacuguucuuagcgacu

SEQ ID NO: 227803 - RNA, 22 nt, Human
uugaaaugagcaaacugucagc

SEQ ID NO: 227804 - RNA, 22 nt, Human
aggagcugggcugcugcuggga

SEQ ID NO: 227805 - RNA, 22 nt, Human
uucauugugaacacauucugcc

SEQ ID NO: 227806 - RNA, 22 nt, Human
aauuagggagccaucauaaggu

SEQ ID NO: 227807 - RNA, 22 nt, Human
aggacugaaaaugaguucuucu

SEQ ID NO: 227808 - RNA, 22 nt, Human
ggcuccacccugcuuccagaag

SEQ ID NO: 227809 - RNA, 22 nt, Human
caggccagaguccaacuccaga

SEQ ID NO: 227810 - RNA, 22 nt, Human
agaaguuguagguuugcauauu

SEQ ID NO: 227811 - RNA, 22 nt, Human
ugugacccucuccgaugggcag

SEQ ID NO: 227812 - RNA, 22 nt, Human
cuguggcauugugaggacugca

SEQ ID NO: 227813 - RNA, 22 nt, Human
uugcaccccuugauugagccuu

SEQ ID NO: 227814 - RNA, 21 nt, Human
agagucugcauuucugacaag

SEQ ID NO: 227815 - RNA, 22 nt, Human
cagaggcucaccagccuuucac

SEQ ID NO: 227816 - RNA, 22 nt, Human
uguuauucucugccuacaaguc

SEQ ID NO: 227817 - RNA, 22 nt, Human
uugcaucuagggcaacccagag

SEQ ID NO: 227818 - RNA, 22 nt, Human
gggaagagauuuccacaucauu

SEQ ID NO: 227819 - RNA, 22 nt, Human
ucuaaagauuuggauucauuug

SEQ ID NO: 227820 - RNA, 22 nt, Human
agagaaacugauguccuuugaa

SEQ ID NO: 227821 - RNA, 22 nt, Human
uugagacacuuugggcaucacu

SEQ ID NO: 227822 - RNA, 22 nt, Human
uuuucaagggcagggaaaucau

SEQ ID NO: 227823 - RNA, 22 nt, Human
acuuucauuugugaagacugua

SEQ ID NO: 227824 - RNA, 22 nt, Human
ccaggagcuggcauguggagag

SEQ ID NO: 227825 - RNA, 19 nt, Human
ccugggucugcagcauuca

SEQ ID NO: 227826 - RNA, 22 nt, Human
gaggcagcuuaggguacugacu

SEQ ID NO: 227827 - RNA, 22 nt, Human
caaggccuucgucuccuagcuu

SEQ ID NO: 227828 - RNA, 22 nt, Human
gaaaguauucucccugaauuuu

SEQ ID NO: 227829 - RNA, 22 nt, Human
cuuaggcaagcagagcccaucc

SEQ ID NO: 227830 - RNA, 22 nt, Human
cggaaacuugagaaccagccag

SEQ ID NO: 227831 - RNA, 22 nt, Human
aaauucuuucauggcuaauaag

SEQ ID NO: 227832 - RNA, 23 nt, Human
uggaccugaaccagugccucugu

SEQ ID NO: 227833 - RNA, 22 nt, Human
auguccagaggugagucagagc

SEQ ID NO: 227834 - RNA, 22 nt, Human
cccagggcugcagauggaggcu

SEQ ID NO: 227835 - RNA, 21 nt, Human
uuuuacagaugaggggaaggg

SEQ ID NO: 227836 - RNA, 21 nt, Human
uucucaguguccauguuaguu

SEQ ID NO: 227837 - RNA, 19 nt, Human
aggcugcaagguggugggc

SEQ ID NO: 227838 - RNA, 22 nt, Human
uuugauagggaaguaagaauga

SEQ ID NO: 227839 - RNA, 22 nt, Human
uaugugucccugcuacucaaca

SEQ ID NO: 227840 - RNA, 22 nt, Human
uuccucagccagcacuuagggg

SEQ ID NO: 227841 - RNA, 22 nt, Human
caguggcaaguccgguauugaa

SEQ ID NO: 227842 - RNA, 22 nt, Human
gugcugacaggagccuggcggu

SEQ ID NO: 227843 - RNA, 22 nt, Human
uccuuucugggccucagugacu

SEQ ID NO: 227844 - RNA, 22 nt, Human
cagccuggccugggacugcuga

SEQ ID NO: 227845 - RNA, 20 nt, Human
ucaaagcaaagggagaugau

SEQ ID NO: 227846 - RNA, 21 nt, Human
gacaggacuagaccagagcuc

SEQ ID NO: 227847 - RNA, 22 nt, Human
gaggcucauugcauugugcauu

SEQ ID NO: 227848 - RNA, 22 nt, Human
aaaaugcuauuucauggaggag

SEQ ID NO: 227849 - RNA, 22 nt, Human
ucaacaauaggauauagcaggu

SEQ ID NO: 227850 - RNA, 22 nt, Human
ccuggagcaggagcugcagagg

SEQ ID NO: 227851 - RNA, 22 nt, Human
ucuggaauuuuauugaucaaaa

SEQ ID NO: 227852 - RNA, 22 nt, Human
aaacugguaaucggcaagugag

SEQ ID NO: 227853 - RNA, 22 nt, Human
ggguuggggcccagcagucugc

SEQ ID NO: 227854 - RNA, 22 nt, Human
acugagcacucacuuuuguuau

SEQ ID NO: 227855 - RNA, 22 nt, Human
ccuggcagccucagccaauucu

SEQ ID NO: 227856 - RNA, 22 nt, Human
ugggcacagggguaggaaugag

SEQ ID NO: 227857 - RNA, 22 nt, Human
agcuuuaccugccuuggggcac

SEQ ID NO: 227858 - RNA, 22 nt, Human
ugccaggcagugucagauugag

SEQ ID NO: 227859 - RNA, 22 nt, Human
uaccuguugucacgauaacacu

SEQ ID NO: 227860 - RNA, 22 nt, Human
ucucuguauucugauauucacu

SEQ ID NO: 227861 - RNA, 21 nt, Human
cugugggaccaagcacuggga

SEQ ID NO: 227862 - RNA, 22 nt, Human
uucuccagagguggcuagaguu

SEQ ID NO: 227863 - RNA, 22 nt, Human
augguaaacauuuaacaacuag

SEQ ID NO: 227864 - RNA, 22 nt, Human
uguuaaauguuuugcuaguguc

SEQ ID NO: 227865 - RNA, 21 nt, Human
uggagcucccugcaucccacu

SEQ ID NO: 227866 - RNA, 22 nt, Human
acaugugcucuugcuguacagc

SEQ ID NO: 227867 - RNA, 22 nt, Human
aauacuuaugugaccucauuuu

SEQ ID NO: 227868 - RNA, 22 nt, Human
uucaugaauauauugaauuagc

SEQ ID NO: 227869 - RNA, 21 nt, Human
uuagaacacuugcucuuggaa

SEQ ID NO: 227870 - RNA, 22 nt, Human
aagccuuccugagugcaaggcc

SEQ ID NO: 227871 - RNA, 22 nt, Human
uuucuacagcuggugcaacuuu

SEQ ID NO: 227872 - RNA, 22 nt, Human
uccuggccaggaugaccuaaca

SEQ ID NO: 227873 - RNA, 22 nt, Human
uagaggcauuaaugaauaaaca

SEQ ID NO: 227874 - RNA, 22 nt, Human
ccagguccuguuuucaccacag

SEQ ID NO: 227875 - RNA, 22 nt, Human
ccacaucugcauuuaauguaua

SEQ ID NO: 227876 - RNA, 22 nt, Human
gagugggcaccgugggcacacu

SEQ ID NO: 227877 - RNA, 22 nt, Human
cagagcaggcccacugcccucc

SEQ ID NO: 227878 - RNA, 22 nt, Human
gaggcugggggcugccuuccuc

SEQ ID NO: 227879 - RNA, 22 nt, Human
gagaaccucuccacaagucugg

SEQ ID NO: 227880 - RNA, 22 nt, Human
aagaaucugacauaauuuccug

SEQ ID NO: 227881 - RNA, 22 nt, Human
agucaguuuuaccaaucucagu

SEQ ID NO: 227882 - RNA, 22 nt, Human
ggaaagcuuuguacuugaaaac

SEQ ID NO: 227883 - RNA, 22 nt, Human
ugcuccugcugcaugcaucucc

SEQ ID NO: 227884 - RNA, 22 nt, Human
uggcugugcggccucgggcaga

SEQ ID NO: 227885 - RNA, 22 nt, Human
caccugcaaggagcuuucauuu

SEQ ID NO: 227886 - RNA, 22 nt, Human
ugcauuauacauggaucuaaag

SEQ ID NO: 227887 - RNA, 22 nt, Human
aauauaugacuccacugcauga

SEQ ID NO: 227888 - RNA, 22 nt, Human
uuucccaagaaaaauaauugga

SEQ ID NO: 227889 - RNA, 22 nt, Human
uccuguguuaaagggggugcua

SEQ ID NO: 227890 - RNA, 22 nt, Human
aauacugccugugagguaacuc

SEQ ID NO: 227891 - RNA, 22 nt, Human
ucugugcauuucaggaccugaa

SEQ ID NO: 227892 - RNA, 18 nt, Human
uuccauaauguauguaac

SEQ ID NO: 227893 - RNA, 22 nt, Human
uaccacaguuuaucuauucagc

SEQ ID NO: 227894 - RNA, 22 nt, Human
uccaggauugucagccagaagg

SEQ ID NO: 227895 - RNA, 22 nt, Human
uauauuuaauccuagagccauu

SEQ ID NO: 227896 - RNA, 22 nt, Human
cugggccucacacccaccaaau

SEQ ID NO: 227897 - RNA, 22 nt, Human
uagcugcugcagcacagggagg

SEQ ID NO: 227898 - RNA, 22 nt, Human
ugguggcagcugagugucaggu

SEQ ID NO: 227899 - RNA, 22 nt, Human
gugcacagauuuaauuuuauuc

SEQ ID NO: 227900 - RNA, 22 nt, Human
aguggcaggcggagauguagga

SEQ ID NO: 227901 - RNA, 22 nt, Human
caucccugucugccacucugaa

SEQ ID NO: 227902 - RNA, 22 nt, Human
cauauuuauucuucugccagug

SEQ ID NO: 227903 - RNA, 22 nt, Human
auggcaguguuucaguuuuugg

SEQ ID NO: 227904 - RNA, 22 nt, Human
ugcagggacaggcucuggggau

SEQ ID NO: 227905 - RNA, 22 nt, Human
acagcagggucacauucccucu

SEQ ID NO: 227906 - RNA, 19 nt, Human
agacacuggauggaaaaug

SEQ ID NO: 227907 - RNA, 22 nt, Human
uugaaugaguguuuuacucaug

SEQ ID NO: 227908 - RNA, 22 nt, Human
uuacacaaacacauuccagaua

SEQ ID NO: 227909 - RNA, 22 nt, Human
aggcuccagucuccucuggcag

SEQ ID NO: 227910 - RNA, 22 nt, Human
aucucugggcuuugaguuuguu

SEQ ID NO: 227911 - RNA, 22 nt, Human
ucacauuuuuuacuggacuuaa

SEQ ID NO: 227912 - RNA, 22 nt, Human
uagucagugaucaguggaguug

SEQ ID NO: 227913 - RNA, 22 nt, Human
gggagcugguuccugcccucca

SEQ ID NO: 227914 - RNA, 19 nt, Human
acaaauuguccucaucaag

SEQ ID NO: 227915 - RNA, 22 nt, Human
augccugcuuacuccaggugcu

SEQ ID NO: 227916 - RNA, 22 nt, Human
ucagggcaaagggcagaguuug

SEQ ID NO: 227917 - RNA, 22 nt, Human
acuucaaauuuucagaagaaau

SEQ ID NO: 227918 - RNA, 22 nt, Human
cagucuaacuucacagccugga

SEQ ID NO: 227919 - RNA, 22 nt, Human
cccugcugaaucccauggaguc

SEQ ID NO: 227920 - RNA, 22 nt, Human
agacaauggagagcagaguacu

SEQ ID NO: 227921 - RNA, 22 nt, Human
aacuccagggggucaauauuua

SEQ ID NO: 227922 - RNA, 22 nt, Human
uuggauuacaugaaaugcagaa

SEQ ID NO: 227923 - RNA, 22 nt, Human
agguccagcucuauugaaaaga

SEQ ID NO: 227924 - RNA, 22 nt, Human
ggguccaccugagcagcagccu

SEQ ID NO: 227925 - RNA, 22 nt, Human
ugaaccuucauaaaauuaagug

SEQ ID NO: 227926 - RNA, 22 nt, Human
ccagagcugaggagaugggcuu

SEQ ID NO: 227927 - RNA, 22 nt, Human
ccaggaagaaacagucuuuaua

SEQ ID NO: 227928 - RNA, 22 nt, Human
agggcucugagcuggaccaccu

SEQ ID NO: 227929 - RNA, 23 nt, Human
cagaaaacccagagcucaguccc

SEQ ID NO: 227930 - RNA, 22 nt, Human
ugcccugcuaaauauagguagc

SEQ ID NO: 227931 - RNA, 22 nt, Human
gcaguuugagguuuucugaugu

SEQ ID NO: 227932 - RNA, 22 nt, Human
ucagagagcagaacuuuuuuac

SEQ ID NO: 227933 - RNA, 22 nt, Human
guccauacaguggcacacaucu

SEQ ID NO: 227934 - RNA, 22 nt, Human
guuggugaugccacacauauuu

SEQ ID NO: 227935 - RNA, 22 nt, Human
aaggaacucuagagccuugaac

SEQ ID NO: 227936 - RNA, 20 nt, Human
acaauacagguugugucuga

SEQ ID NO: 227937 - RNA, 22 nt, Human
uggcccugcuggacacgccugc

SEQ ID NO: 227938 - RNA, 22 nt, Human
ggcagcuccucaaaaaauuaaa

SEQ ID NO: 227939 - RNA, 20 nt, Human
agccaggcucaagcuccccc

SEQ ID NO: 227940 - RNA, 22 nt, Human
cuacauuuguucuauagcuuuu

SEQ ID NO: 227941 - RNA, 22 nt, Human
gcagaggccugaagguggcggg

SEQ ID NO: 227942 - RNA, 19 nt, Human
gcucaacagcucggguccu

SEQ ID NO: 227943 - RNA, 22 nt, Human
cuagggcacuaggacucaugug

SEQ ID NO: 227944 - RNA, 22 nt, Human
accuacauaguuaaguaacaaa

SEQ ID NO: 227945 - RNA, 22 nt, Human
cgcaggugccggcagauggggu

SEQ ID NO: 227946 - RNA, 21 nt, Human
acaugucuggucauuuuuagc

SEQ ID NO: 227947 - RNA, 22 nt, Human
gaaauauugggacucagagcuu

SEQ ID NO: 227948 - RNA, 19 nt, Human
cacagcucugcucagggaa

SEQ ID NO: 227949 - RNA, 22 nt, Human
uguccuguagguuuauuugugu

SEQ ID NO: 227950 - RNA, 22 nt, Human
cagaacugaccucugauucuag

SEQ ID NO: 227951 - RNA, 22 nt, Human
ucucuguagggcugcuugagua

SEQ ID NO: 227952 - RNA, 22 nt, Human
ggacgcagccgagggagcaggg

SEQ ID NO: 227953 - RNA, 22 nt, Human
auuuggugagguagccauuguu

SEQ ID NO: 227954 - RNA, 22 nt, Human
agguggcugccuccccgcgcgg

SEQ ID NO: 227955 - RNA, 22 nt, Human
aaacuacaucucauggaugagg

SEQ ID NO: 227956 - RNA, 21 nt, Human
gcacagggacagaucaucaca

SEQ ID NO: 227957 - RNA, 22 nt, Human
aauguacaucucaguguaguac

SEQ ID NO: 227958 - RNA, 22 nt, Human
uuuccuaagguagugauaauuu

SEQ ID NO: 227959 - RNA, 22 nt, Human
ggccccaggccuuuggucuggc

SEQ ID NO: 227960 - RNA, 22 nt, Human
agcugcuuguacaugaccacau

SEQ ID NO: 227961 - RNA, 22 nt, Human
guccaggccccagggauucuug

SEQ ID NO: 227962 - RNA, 22 nt, Human
ccauuugugauguggcagcauc

SEQ ID NO: 227963 - RNA, 22 nt, Human
ucuuguaauuaacuagaaagau

SEQ ID NO: 227964 - RNA, 22 nt, Human
uucuggaguauuccuggcagcc

SEQ ID NO: 227965 - RNA, 22 nt, Human
uagguauaauauuuugaagaaa

SEQ ID NO: 227966 - RNA, 22 nt, Human
ggaggcuccaugagcuccugca

SEQ ID NO: 227967 - RNA, 22 nt, Human
agaagccaacagggcaggagag

SEQ ID NO: 227968 - RNA, 22 nt, Human
uccuggccagaggacaaagcug

SEQ ID NO: 227969 - RNA, 22 nt, Human
uaaaaccauaaggcuggaagga

SEQ ID NO: 227970 - RNA, 22 nt, Human
aauguauaaaguguuaauaacu

SEQ ID NO: 227971 - RNA, 22 nt, Human
cugcccuggcagccuaccaugg

SEQ ID NO: 227972 - RNA, 22 nt, Human
ugucuuuuuaccugugaugagu

SEQ ID NO: 227973 - RNA, 22 nt, Human
cagcaggucuuguugcugcuga

SEQ ID NO: 227974 - RNA, 22 nt, Human
uuguuagugcaauguuugguga

SEQ ID NO: 227975 - RNA, 22 nt, Human
ugagaaugaaucuuuugcuuuc

SEQ ID NO: 227976 - RNA, 22 nt, Human
cuucucugucacaggguuacgu

SEQ ID NO: 227977 - RNA, 22 nt, Human
gcugcagggggugggcgucucc

SEQ ID NO: 227978 - RNA, 22 nt, Human
aggcagguuuacucuuauuugg

SEQ ID NO: 227979 - RNA, 22 nt, Human
uggcuuggacuaaauggaccgu

SEQ ID NO: 227980 - RNA, 22 nt, Human
gcucaaagaauauucagaauga

SEQ ID NO: 227981 - RNA, 22 nt, Human
aggcucugugaugugccaggca

SEQ ID NO: 227982 - RNA, 22 nt, Human
accucuggacacugcauccuuc

SEQ ID NO: 227983 - RNA, 22 nt, Human
uuagauaaaaguguucaauaaa

SEQ ID NO: 227984 - RNA, 23 nt, Human
cucccuggaguuucuggaagaug

SEQ ID NO: 227985 - RNA, 22 nt, Human
aacagaauaguugauguacagu

SEQ ID NO: 227986 - RNA, 22 nt, Human
ggaggaagagguuguucucuca

SEQ ID NO: 227987 - RNA, 23 nt, Human
ucagucuucccugucaguaauag

SEQ ID NO: 227988 - RNA, 22 nt, Human
ggugaggggagagugaaagaaa

SEQ ID NO: 227989 - RNA, 22 nt, Human
aagucagaccuuguugauagcu

SEQ ID NO: 227990 - RNA, 22 nt, Human
caguucugguuugcagauauau

SEQ ID NO: 227991 - RNA, 22 nt, Human
aauaaauguuaagauugucuca

SEQ ID NO: 227992 - RNA, 22 nt, Human
agucucagaaaauaugcuuuuu

SEQ ID NO: 227993 - RNA, 22 nt, Human
ggccaggcuggucucagacuuc

SEQ ID NO: 227994 - RNA, 22 nt, Human
uuuccacacaggcucuacuacu

SEQ ID NO: 227995 - RNA, 22 nt, Human
aagaagucuggagcaaugcaau

SEQ ID NO: 227996 - RNA, 22 nt, Human
uuuccaugaucguuauagaacu

SEQ ID NO: 227997 - RNA, 22 nt, Human
agccaaaguccaaaugcagugu

SEQ ID NO: 227998 - RNA, 22 nt, Human
uggaucugacuggcuuuucuuc

SEQ ID NO: 227999 - RNA, 22 nt, Human
aacaggcuucuucugggcuccu

SEQ ID NO: 228000 - RNA, 22 nt, Human
ucagaaaagguagcugugacaa

SEQ ID NO: 228001 - RNA, 22 nt, Human
ucagguguguuguauuuuacca

SEQ ID NO: 228002 - RNA, 22 nt, Human
auugugcaauguuuuacaauuu

SEQ ID NO: 228003 - RNA, 22 nt, Human
aagggcucgguagcaguccuga

SEQ ID NO: 228004 - RNA, 22 nt, Human
caccaggcugaaccagagggga

SEQ ID NO: 228005 - RNA, 22 nt, Human
uucacacuuuggaauuccaccu

SEQ ID NO: 228006 - RNA, 22 nt, Human
uacaacagaccuagaugaauga

SEQ ID NO: 228007 - RNA, 22 nt, Human
acaguuuuuucaacauuggaau

SEQ ID NO: 228008 - RNA, 22 nt, Human
acauuagaacauuaauauuggg

SEQ ID NO: 228009 - RNA, 22 nt, Human
augugugcaucaaugauagauc

SEQ ID NO: 228010 - RNA, 22 nt, Human
acccagggucaccccguagggu

SEQ ID NO: 228011 - RNA, 22 nt, Human
agaaugcuuguaccuuuguuuu

SEQ ID NO: 228012 - RNA, 22 nt, Human
uggagcucaaaggccuguggga

SEQ ID NO: 228013 - RNA, 22 nt, Human
gccagcaguggccaccaccagg

SEQ ID NO: 228014 - RNA, 22 nt, Human
uccaguuuauuaugcauuuaca

SEQ ID NO: 228015 - RNA, 22 nt, Human
ccccagccagcuuguaguagaa

SEQ ID NO: 228016 - RNA, 22 nt, Human
cugggccuugaucacacaggug

SEQ ID NO: 228017 - RNA, 22 nt, Human
aaugggcuuucuuggacaggag

SEQ ID NO: 228018 - RNA, 22 nt, Human
gcacauuguuacucuuacugug

SEQ ID NO: 228019 - RNA, 22 nt, Human
agcagcaggguguaauugggca

SEQ ID NO: 228020 - RNA, 22 nt, Human
ucuguacaugaguugagaauca

SEQ ID NO: 228021 - RNA, 22 nt, Human
auuaggugggguuguuacuguu

SEQ ID NO: 228022 - RNA, 22 nt, Human
gccugggaagacuaagugggag

SEQ ID NO: 228023 - RNA, 22 nt, Human
uguguuuugaacucaucuacug

SEQ ID NO: 228024 - RNA, 22 nt, Human
aucuccagauugugaucaucag

SEQ ID NO: 228025 - RNA, 22 nt, Human
uucuuuuaaaagagagcagaaa

SEQ ID NO: 228026 - RNA, 22 nt, Human
cuggggacuuugguucuccaug

SEQ ID NO: 228027 - RNA, 22 nt, Human
guguguccuugggccucugcag

SEQ ID NO: 228028 - RNA, 22 nt, Human
gcacccagccagcaucucagag

SEQ ID NO: 228029 - RNA, 22 nt, Human
ucccacugugccuguuguaauc

SEQ ID NO: 228030 - RNA, 22 nt, Human
aaggugguuugcagacagaaua

SEQ ID NO: 228031 - RNA, 22 nt, Human
aaggugaaacuggaagcuggcc

SEQ ID NO: 228032 - RNA, 22 nt, Human
cugggugaguugaugaaggaga

SEQ ID NO: 228033 - RNA, 22 nt, Human
uccugggacucaacuuagaagg

SEQ ID NO: 228034 - RNA, 22 nt, Human
ucuuuuguugccuacuuauuaa

SEQ ID NO: 228035 - RNA, 22 nt, Human
ucccagcagaugagcugaccua

SEQ ID NO: 228036 - RNA, 22 nt, Human
ggcccagugucccggucguggc

SEQ ID NO: 228037 - RNA, 22 nt, Human
ucagagaaaugaaguagggauu

SEQ ID NO: 228038 - RNA, 22 nt, Human
acaugugucuaagaaugaaaga

SEQ ID NO: 228039 - RNA, 20 nt, Human
agaagcugauacugauggaa

SEQ ID NO: 228040 - RNA, 22 nt, Human
ggcacuuugauuuugagaugca

SEQ ID NO: 228041 - RNA, 22 nt, Human
augaagggugucccugugagca

SEQ ID NO: 228042 - RNA, 22 nt, Human
uuucauuuugguuaugccauaa

SEQ ID NO: 228043 - RNA, 17 nt, Human
acaguuugucauucuaa

SEQ ID NO: 228044 - RNA, 22 nt, Human
cagaagcuagcaggaaaguuuu

SEQ ID NO: 228045 - RNA, 22 nt, Human
gaagggaacugggucuccuugu

SEQ ID NO: 228046 - RNA, 22 nt, Human
uuuacaguuccaugugauaggc

SEQ ID NO: 228047 - RNA, 22 nt, Human
caggaugccaucugcugcugcu

SEQ ID NO: 228048 - RNA, 22 nt, Human
acucagagugcaucuccuauuu

SEQ ID NO: 228049 - RNA, 22 nt, Human
uccugcaggcuugaguccucag

SEQ ID NO: 228050 - RNA, 22 nt, Human
uuuguagauucauugaacuuuu

SEQ ID NO: 228051 - RNA, 22 nt, Human
guugacagugacccugaaagca

SEQ ID NO: 228052 - RNA, 20 nt, Human
gccacugggcaccagcaggg

SEQ ID NO: 228053 - RNA, 22 nt, Human
ccuuucucuuugcugaucaugu

SEQ ID NO: 228054 - RNA, 22 nt, Human
uguauuagguugaugcgaaagu

SEQ ID NO: 228055 - RNA, 22 nt, Human
ugggccuggacaaggccacuag

SEQ ID NO: 228056 - RNA, 22 nt, Human
uggcuucuagagcccauccuuc

SEQ ID NO: 228057 - RNA, 22 nt, Human
gcuaauucacaguaggaaauuu

SEQ ID NO: 228058 - RNA, 22 nt, Human
aagucccaaagucacucugcuu

SEQ ID NO: 228059 - RNA, 22 nt, Human
aaauacgugcacauacauacau

SEQ ID NO: 228060 - RNA, 23 nt, Human
acaugcaaaaaucacagucuccu

SEQ ID NO: 228061 - RNA, 22 nt, Human
uuccugggugguccugguagag

SEQ ID NO: 228062 - RNA, 22 nt, Human
cauccauuaacucauuuguuuc

SEQ ID NO: 228063 - RNA, 22 nt, Human
uuuccuucucagggagcuucaa

SEQ ID NO: 228064 - RNA, 22 nt, Human
ugauuuacccguccaggcccua

SEQ ID NO: 228065 - RNA, 22 nt, Human
cccugggagaaguugagggcug

SEQ ID NO: 228066 - RNA, 22 nt, Human
ugaauucuuuuagaauucagug

SEQ ID NO: 228067 - RNA, 22 nt, Human
ucccuccuuaauaagaggucug

SEQ ID NO: 228068 - RNA, 22 nt, Human
acaggcagagucagguuggguu

SEQ ID NO: 228069 - RNA, 22 nt, Human
ucuccgaucacagguuuucaau

SEQ ID NO: 228070 - RNA, 22 nt, Human
cccaggucugccagccuguggg

SEQ ID NO: 228071 - RNA, 22 nt, Human
cuccagauuccguuuauucagg

SEQ ID NO: 228072 - RNA, 22 nt, Human
cuacauuuugugauuaugaaau

SEQ ID NO: 228073 - RNA, 22 nt, Human
agaaagaacgcacuugugcugc

SEQ ID NO: 228074 - RNA, 19 nt, Human
cugcuuccuucccucacug

SEQ ID NO: 228075 - RNA, 22 nt, Human
uacauugcuuucuaauacaucu

SEQ ID NO: 228076 - RNA, 22 nt, Human
gucuccagaauucuugggaggg

SEQ ID NO: 228077 - RNA, 22 nt, Human
uuugacuucugggcauuuuggu

SEQ ID NO: 228078 - RNA, 22 nt, Human
cccagccagccucuucccauau

SEQ ID NO: 228079 - RNA, 19 nt, Human
ccagugucuagcgcacagc

SEQ ID NO: 228080 - RNA, 22 nt, Human
ugggagccuggcaggccagagg

SEQ ID NO: 228081 - RNA, 22 nt, Human
gguggcacucaaccuuuuauua

SEQ ID NO: 228082 - RNA, 22 nt, Human
augggacaggcaugggacuuag

SEQ ID NO: 228083 - RNA, 20 nt, Human
uugauucaagggcugaugga

SEQ ID NO: 228084 - RNA, 22 nt, Human
ucauggauuaaauuauuaaguu

SEQ ID NO: 228085 - RNA, 22 nt, Human
gcucagcacuuucuccaaccac

SEQ ID NO: 228086 - RNA, 22 nt, Human
guuagaaacacauucuuauuga

SEQ ID NO: 228087 - RNA, 22 nt, Human
ucugggccugucucagagcugg

SEQ ID NO: 228088 - RNA, 22 nt, Human
uuuguguggcguuggccggcgg

SEQ ID NO: 228089 - RNA, 22 nt, Human
ucuuacaccauucaaauauuuu

SEQ ID NO: 228090 - RNA, 22 nt, Human
cagcagaaaauaccuguaacuc

SEQ ID NO: 228091 - RNA, 22 nt, Human
uaggccaguaaaauguuucagu

SEQ ID NO: 228092 - RNA, 22 nt, Human
accagggcugacaaucugaugg

SEQ ID NO: 228093 - RNA, 22 nt, Human
cacuggaaccauccacauagug

SEQ ID NO: 228094 - RNA, 23 nt, Human
acuuggaagcagugaacaacuuu

SEQ ID NO: 228095 - RNA, 22 nt, Human
ucuagggugugcggcagggcua

SEQ ID NO: 228096 - RNA, 22 nt, Human
aaauagaauuaacuagcuacug

SEQ ID NO: 228097 - RNA, 22 nt, Human
acucuggcuugaggaccagguc

SEQ ID NO: 228098 - RNA, 22 nt, Human
gcugagcucccagcaguaucug

SEQ ID NO: 228099 - RNA, 22 nt, Human
gugcaaccaucaccacugacuc

SEQ ID NO: 228100 - RNA, 22 nt, Human
gggucucuccuccccagcugug

SEQ ID NO: 228101 - RNA, 22 nt, Human
agccagcuggagaccacuguuu

SEQ ID NO: 228102 - RNA, 22 nt, Human
ggaagagagaucccauagaugu

SEQ ID NO: 228103 - RNA, 22 nt, Human
ucugagagucuuucuucaagug

SEQ ID NO: 228104 - RNA, 22 nt, Human
agucaacaaaaauguggagccu

SEQ ID NO: 228105 - RNA, 22 nt, Human
gaacuguggguaauauauuaga

SEQ ID NO: 228106 - RNA, 22 nt, Human
ccagggcagggaccacgugucu

SEQ ID NO: 228107 - RNA, 22 nt, Human
aaugcaaagcucuuuaauccuu

SEQ ID NO: 228108 - RNA, 22 nt, Human
ggccaugccuggucuggcacca

SEQ ID NO: 228109 - RNA, 22 nt, Human
aucuuucaguuucauaccaauu

SEQ ID NO: 228110 - RNA, 22 nt, Human
ugucacuacaucauaaauauau

SEQ ID NO: 228111 - RNA, 22 nt, Human
aggaaugugaccacuagacucu

SEQ ID NO: 228112 - RNA, 23 nt, Human
uucaggaaaugaauacagacaca

SEQ ID NO: 228113 - RNA, 22 nt, Human
aauauuuuugaggcccuguuau

SEQ ID NO: 228114 - RNA, 22 nt, Human
uagaggugacacugagaccaua

SEQ ID NO: 228115 - RNA, 22 nt, Human
uuaagggccauuauggaugggu

SEQ ID NO: 228116 - RNA, 22 nt, Human
uuaacagagugccuggcaugua

SEQ ID NO: 228117 - RNA, 22 nt, Human
ucucauucauacccuacaugcu

SEQ ID NO: 228118 - RNA, 22 nt, Human
agguccagguuccguuucugcg

SEQ ID NO: 228119 - RNA, 22 nt, Human
ggcagugguuagaaacaugagc

SEQ ID NO: 228120 - RNA, 22 nt, Human
gccuggccugaacuaggaggug

SEQ ID NO: 228121 - RNA, 21 nt, Human
gaguccuggcuaggguggcag

SEQ ID NO: 228122 - RNA, 22 nt, Human
guucucccuguccccugagcuu

SEQ ID NO: 228123 - RNA, 22 nt, Human
acuguaacacucauacugaagu

SEQ ID NO: 228124 - RNA, 22 nt, Human
uggcucugugcuucuaguaucu

SEQ ID NO: 228125 - RNA, 22 nt, Human
acuugagagaaucggaggaguc

SEQ ID NO: 228126 - RNA, 19 nt, Human
uuucugucuguguuuugcc

SEQ ID NO: 228127 - RNA, 22 nt, Human
gaagccagauuaucacaagcca

SEQ ID NO: 228128 - RNA, 22 nt, Human
uccaggcaaaaggaacugcuug

SEQ ID NO: 228129 - RNA, 22 nt, Human
cucaaagaagggagguauuugg

SEQ ID NO: 228130 - RNA, 22 nt, Human
aaggaaaggaugagcaugcauu

SEQ ID NO: 228131 - RNA, 22 nt, Human
gccagcauaguaagcagucauc

SEQ ID NO: 228132 - RNA, 19 nt, Human
agcuggagauuggagggca

SEQ ID NO: 228133 - RNA, 18 nt, Human
cugauagggguggcagcu

SEQ ID NO: 228134 - RNA, 22 nt, Human
caggcucccuucucggaauucu

SEQ ID NO: 228135 - RNA, 22 nt, Human
ggguacuuaauauuuacggggu

SEQ ID NO: 228136 - RNA, 22 nt, Human
ucugaggccugaagcagcagag

SEQ ID NO: 228137 - RNA, 22 nt, Human
acagugcagggcgggaagaagg

SEQ ID NO: 228138 - RNA, 22 nt, Human
uuauuuauuguguaccuacugu

SEQ ID NO: 228139 - RNA, 22 nt, Human
acugaagaacgcaucagugguu

SEQ ID NO: 228140 - RNA, 18 nt, Human
gaggaaacaaggcagagg

SEQ ID NO: 228141 - RNA, 19 nt, Human
ggcugccuucugcucaucu

SEQ ID NO: 228142 - RNA, 19 nt, Human
cccucaggucugagcaguc

SEQ ID NO: 228143 - RNA, 22 nt, Human
cccaguggaaggaguagaagac

SEQ ID NO: 228144 - RNA, 22 nt, Human
uguaggcacauguauauauccc

SEQ ID NO: 228145 - RNA, 22 nt, Human
uuauuguuuaaagccauguaaa

SEQ ID NO: 228146 - RNA, 22 nt, Human
acccuuuguccaauagaaauga

SEQ ID NO: 228147 - RNA, 22 nt, Human
cuuauucagaccuuggauucuu

SEQ ID NO: 228148 - RNA, 22 nt, Human
gauucuuuacucagauuuuguu

SEQ ID NO: 228149 - RNA, 22 nt, Human
gcaaguacaaacgcaucggcug

SEQ ID NO: 228150 - RNA, 22 nt, Human
agcugcaagauaaaagugaugu

SEQ ID NO: 228151 - RNA, 22 nt, Human
ugggcuucauaauugguccuag

SEQ ID NO: 228152 - RNA, 22 nt, Human
gauggucuuugucucugauaag

SEQ ID NO: 228153 - RNA, 21 nt, Human
agugaaaugaaguguaugcuc

SEQ ID NO: 228154 - RNA, 22 nt, Human
agaggcccucucucuccugaug

SEQ ID NO: 228155 - RNA, 22 nt, Human
uggaauuuaguuaauuccauuu

SEQ ID NO: 228156 - RNA, 22 nt, Human
gacaauugcuuuugccgaauaa

SEQ ID NO: 228157 - RNA, 22 nt, Human
auaauuaggucuuauaacgucu

SEQ ID NO: 228158 - RNA, 22 nt, Human
cuuugcugagcugguuguucaa

SEQ ID NO: 228159 - RNA, 19 nt, Human
uuacacuucugcuuuguga

SEQ ID NO: 228160 - RNA, 20 nt, Human
acagaaagagagaaugucag

SEQ ID NO: 228161 - RNA, 22 nt, Human
uagugucauuucaguggaguuu

SEQ ID NO: 228162 - RNA, 22 nt, Human
ucaguuaauauggguaaagcau

SEQ ID NO: 228163 - RNA, 22 nt, Human
aaggccugcucagcugucugug

SEQ ID NO: 228164 - RNA, 18 nt, Human
auggaggcagagagcuga

SEQ ID NO: 228165 - RNA, 22 nt, Human
ggagcugugcugggugaucagg

SEQ ID NO: 228166 - RNA, 22 nt, Human
cauuugaagaagaaacguacua

SEQ ID NO: 228167 - RNA, 22 nt, Human
gaggaggaaaggaguugaaaug

SEQ ID NO: 228168 - RNA, 22 nt, Human
cugcuuuugagcccagugcuca

SEQ ID NO: 228169 - RNA, 22 nt, Human
aagucauagucgggaaagacau

SEQ ID NO: 228170 - RNA, 22 nt, Human
ggucagcagugcagggcagagc

SEQ ID NO: 228171 - RNA, 22 nt, Human
aaguuuauguugguaagauauc

SEQ ID NO: 228172 - RNA, 22 nt, Human
gcuggcuugauaguuucugcuu

SEQ ID NO: 228173 - RNA, 22 nt, Human
agugucaaauuaaauaaucugg

SEQ ID NO: 228174 - RNA, 22 nt, Human
ugcaggaggauuuuguggagcu

SEQ ID NO: 228175 - RNA, 22 nt, Human
agcuuuguggcuuugcaagacu

SEQ ID NO: 228176 - RNA, 22 nt, Human
gaccacagauuccuaaguggca

SEQ ID NO: 228177 - RNA, 22 nt, Human
gcaggcugccaccuucugaguu

SEQ ID NO: 228178 - RNA, 19 nt, Human
acaaauuggcaaaaugcaa

SEQ ID NO: 228179 - RNA, 22 nt, Human
uuugcaaauauguguuucuauu

SEQ ID NO: 228180 - RNA, 22 nt, Human
cugaggcaugggaaguugggug

SEQ ID NO: 228181 - RNA, 22 nt, Human
acaaaugaaucauacauaaugu

SEQ ID NO: 228182 - RNA, 22 nt, Human
ccauggccaauugcaccuugcu

SEQ ID NO: 228183 - RNA, 22 nt, Human
cacaccuguaauccuagcacuu

SEQ ID NO: 228184 - RNA, 22 nt, Human
uaggauaugcauuuuuauacau

SEQ ID NO: 228185 - RNA, 22 nt, Human
uugagaacucuguauguccagc

SEQ ID NO: 228186 - RNA, 22 nt, Human
ccugggcucaagcgaucuuguc

SEQ ID NO: 228187 - RNA, 22 nt, Human
guccaguggucaauuaucugga

SEQ ID NO: 228188 - RNA, 22 nt, Human
gaagcaaguggccugauucaga

SEQ ID NO: 228189 - RNA, 22 nt, Human
uacaguacacagguaccaagcu

SEQ ID NO: 228190 - RNA, 22 nt, Human
cagcugccaugacauguccugc

SEQ ID NO: 228191 - RNA, 22 nt, Human
agaccuggagugaagaguuccc

SEQ ID NO: 228192 - RNA, 19 nt, Human
guucaaacacugauucagc

SEQ ID NO: 228193 - RNA, 22 nt, Human
ucuaggagcuuaaaggaggcca

SEQ ID NO: 228194 - RNA, 22 nt, Human
ccuggaaggcaggcauggauug

SEQ ID NO: 228195 - RNA, 22 nt, Human
aguaucaaucacccuuugaagu

SEQ ID NO: 228196 - RNA, 22 nt, Human
gcccugcagugcggagguggca

SEQ ID NO: 228197 - RNA, 22 nt, Human
gaaucaaugguagauuaaguaa

SEQ ID NO: 228198 - RNA, 22 nt, Human
aagcagaaggggaauaauauuu

SEQ ID NO: 228199 - RNA, 22 nt, Human
aaccauuugcaguuacugagac

SEQ ID NO: 228200 - RNA, 22 nt, Human
aacaguguguacacaucauagg

SEQ ID NO: 228201 - RNA, 22 nt, Human
gcccaggugcccucugccuuac

SEQ ID NO: 228202 - RNA, 22 nt, Human
acagccaggaauucuggagaag

SEQ ID NO: 228203 - RNA, 20 nt, Human
auccaucauguccaugacuu

SEQ ID NO: 228204 - RNA, 22 nt, Human
caaaacugucuagagagagaag

SEQ ID NO: 228205 - RNA, 22 nt, Human
uuuucuauuaacucauuuugca

SEQ ID NO: 228206 - RNA, 16 nt, Human
ccucuggcaauuagau

SEQ ID NO: 228207 - RNA, 22 nt, Human
gacaccauuaccuuucuauauu

SEQ ID NO: 228208 - RNA, 22 nt, Human
acccucagacagcuguggccag

SEQ ID NO: 228209 - RNA, 21 nt, Human
ucugaggagaaacucuuggug

SEQ ID NO: 228210 - RNA, 22 nt, Human
ucuccuggauagauacuaucca

SEQ ID NO: 228211 - RNA, 22 nt, Human
gagcuucauauguugcagagaa

SEQ ID NO: 228212 - RNA, 22 nt, Human
ugccucugugugcaggugagca

SEQ ID NO: 228213 - RNA, 22 nt, Human
cccucccugugugccucauuug

SEQ ID NO: 228214 - RNA, 22 nt, Human
ucuggagcaacagagcaggaca

SEQ ID NO: 228215 - RNA, 22 nt, Human
ugcagagggaaaaggugcuccu

SEQ ID NO: 228216 - RNA, 22 nt, Human
aagaaaugcugauguuggaugg

SEQ ID NO: 228217 - RNA, 22 nt, Human
agcuugaauuauucugcucuua

SEQ ID NO: 228218 - RNA, 22 nt, Human
aggcagguuucccggcugucaa

SEQ ID NO: 228219 - RNA, 22 nt, Human
acucaccacacccuugcacuug

SEQ ID NO: 228220 - RNA, 22 nt, Human
aggcuucuugauaaaaugcaga

SEQ ID NO: 228221 - RNA, 22 nt, Human
uuaggaauauagacuaaguaga

SEQ ID NO: 228222 - RNA, 22 nt, Human
augagggaagcucacgugucca

SEQ ID NO: 228223 - RNA, 22 nt, Human
aguaaacaauguaugaggacag

SEQ ID NO: 228224 - RNA, 22 nt, Human
gugcaugguaagaugcuucaca

SEQ ID NO: 228225 - RNA, 22 nt, Human
ugcacaaagcauucuagacgca

SEQ ID NO: 228226 - RNA, 22 nt, Human
aucagagcaauggauaaaauca

SEQ ID NO: 228227 - RNA, 22 nt, Human
auauauacuuugacacauucug

SEQ ID NO: 228228 - RNA, 22 nt, Human
gagaacaggcucuggagucaga

SEQ ID NO: 228229 - RNA, 22 nt, Human
ggcaggagcucagguugguucc

SEQ ID NO: 228230 - RNA, 22 nt, Human
uggcacugaagcuggaaagccu

SEQ ID NO: 228231 - RNA, 22 nt, Human
aaagggcagaguucacuagaaa

SEQ ID NO: 228232 - RNA, 22 nt, Human
cugaggcuaaccucgagagaca

SEQ ID NO: 228233 - RNA, 23 nt, Human
gaggccacauuccccugcuugag

SEQ ID NO: 228234 - RNA, 22 nt, Human
ccagggcaaaugagaucauagc

SEQ ID NO: 228235 - RNA, 22 nt, Human
agauguuuaaaaagaugacucu

SEQ ID NO: 228236 - RNA, 22 nt, Human
gcucagggaaugagaagauguu

SEQ ID NO: 228237 - RNA, 22 nt, Human
caguuaaaagaagucuaucuua

SEQ ID NO: 228238 - RNA, 22 nt, Human
ucacaaagggagggauagcugg

SEQ ID NO: 228239 - RNA, 22 nt, Human
ccugugccaaaaggcugcuuau

SEQ ID NO: 228240 - RNA, 22 nt, Human
ggagaaugauucuuugcucacu

SEQ ID NO: 228241 - RNA, 22 nt, Human
cuuuugcaccuuuuaaguaaug

SEQ ID NO: 228242 - RNA, 22 nt, Human
caggcccagcccuuagccaggu

SEQ ID NO: 228243 - RNA, 22 nt, Human
gagguucugggggucugccugg

SEQ ID NO: 228244 - RNA, 22 nt, Human
uuaauuacaaaacacauagguu

SEQ ID NO: 228245 - RNA, 22 nt, Human
ucauuucaugucucaggcacug

SEQ ID NO: 228246 - RNA, 22 nt, Human
augaaauugaucuugaacuuuu

SEQ ID NO: 228247 - RNA, 22 nt, Human
ccugggcuucugucuagauguu

SEQ ID NO: 228248 - RNA, 22 nt, Human
ugcaaaaagagcgaggagcccu

SEQ ID NO: 228249 - RNA, 22 nt, Human
gggccuggcaugcagccccguu

SEQ ID NO: 228250 - RNA, 22 nt, Human
ccagggccuacagcuuaagucc

SEQ ID NO: 228251 - RNA, 22 nt, Human
ugcuuuaucugugagaaccuga

SEQ ID NO: 228252 - RNA, 22 nt, Human
aggggagcuugaggcauggccu

SEQ ID NO: 228253 - RNA, 22 nt, Human
agucucagaguaccugagggac

SEQ ID NO: 228254 - RNA, 22 nt, Human
ucucagagauguuagggaagag

SEQ ID NO: 228255 - RNA, 22 nt, Human
uaaacaaggguuacugagcaug

SEQ ID NO: 228256 - RNA, 23 nt, Human
guuuuacaggugagaaaauggag

SEQ ID NO: 228257 - RNA, 17 nt, Human
ucugcagaggcaaaccu

SEQ ID NO: 228258 - RNA, 22 nt, Human
acacuguaaagugaugcuuaaa

SEQ ID NO: 228259 - RNA, 19 nt, Human
aaaaacuuaguccagaaag

SEQ ID NO: 228260 - RNA, 20 nt, Human
uggcccuguuuucuccaggc

SEQ ID NO: 228261 - RNA, 22 nt, Human
caaaugaaaauggcgucuugga

SEQ ID NO: 228262 - RNA, 22 nt, Human
uaaagacaugguguaggugaac

SEQ ID NO: 228263 - RNA, 22 nt, Human
gcccagggcuucaaagagagaa

SEQ ID NO: 228264 - RNA, 22 nt, Human
uagggauggcagcauguagcuu

SEQ ID NO: 228265 - RNA, 22 nt, Human
uuggagggacagauggcuaggc

SEQ ID NO: 228266 - RNA, 22 nt, Human
ucagcagguggugggcagguga

SEQ ID NO: 228267 - RNA, 22 nt, Human
auguagagcuccuugauccucc

SEQ ID NO: 228268 - RNA, 21 nt, Human
agcaggaggcagucacagcuc

SEQ ID NO: 228269 - RNA, 22 nt, Human
acucuucaccgcuacugaaaua

SEQ ID NO: 228270 - RNA, 18 nt, Human
cuguucagcugaacuaca

SEQ ID NO: 228271 - RNA, 22 nt, Human
cuucucccugggggcucuuuau

SEQ ID NO: 228272 - RNA, 22 nt, Human
agcagggcaaagucaggcuaac

SEQ ID NO: 228273 - RNA, 22 nt, Human
auuccaaaaggauguuagaaug

SEQ ID NO: 228274 - RNA, 22 nt, Human
ucucugaguuuuaaggaugaug

SEQ ID NO: 228275 - RNA, 22 nt, Human
uuuauugcuggccaccuguagc

SEQ ID NO: 228276 - RNA, 22 nt, Human
uuccuggguucccucucauucu

SEQ ID NO: 228277 - RNA, 22 nt, Human
aaguguauauaugacuuauaaa

SEQ ID NO: 228278 - RNA, 22 nt, Human
uagaccugaaauauggaccugg

SEQ ID NO: 228279 - RNA, 22 nt, Human
augcuaauuccaugagcacagg

SEQ ID NO: 228280 - RNA, 22 nt, Human
gcccaggaguucaaggcugcag

SEQ ID NO: 228281 - RNA, 18 nt, Human
ugaauuaguuugugguuu

SEQ ID NO: 228282 - RNA, 22 nt, Human
cuuaaacaggaaagagccaggu

SEQ ID NO: 228283 - RNA, 22 nt, Human
aauuccaacagacaaaguuaga

SEQ ID NO: 228284 - RNA, 22 nt, Human
auggauaagucaaagaguaucc

SEQ ID NO: 228285 - RNA, 22 nt, Human
aagcagacagagaauggguuug

SEQ ID NO: 228286 - RNA, 22 nt, Human
ucuuuagaaacuuuucuucaug

SEQ ID NO: 228287 - RNA, 22 nt, Human
gggcccuggccgaaucccucug

SEQ ID NO: 228288 - RNA, 18 nt, Human
ucagcuggguuucugggu

SEQ ID NO: 228289 - RNA, 22 nt, Human
uggaacacacuucaaggagaaa

SEQ ID NO: 228290 - RNA, 22 nt, Human
gcaacuguuuugagcacccagu

SEQ ID NO: 228291 - RNA, 22 nt, Human
uuagcaauguaugauuaaaaua

SEQ ID NO: 228292 - RNA, 22 nt, Human
aaagugcugugggcuguaagug

SEQ ID NO: 228293 - RNA, 22 nt, Human
ccacugaguacccgauggcugc

SEQ ID NO: 228294 - RNA, 22 nt, Human
caggcauagaagggcaagaaua

SEQ ID NO: 228295 - RNA, 22 nt, Human
ggaagcugaggcccagugaagg

SEQ ID NO: 228296 - RNA, 22 nt, Human
aaucagaacuucucaggguggg

SEQ ID NO: 228297 - RNA, 18 nt, Human
cccacggugcuguagggc

SEQ ID NO: 228298 - RNA, 22 nt, Human
augauaacaacagcagugcugg

SEQ ID NO: 228299 - RNA, 22 nt, Human
gggccucaugauggcucaggaa

SEQ ID NO: 228300 - RNA, 22 nt, Human
ccucccuggccagagcagcagc

SEQ ID NO: 228301 - RNA, 22 nt, Human
caucaguaaggcaacauagcuu

SEQ ID NO: 228302 - RNA, 22 nt, Human
ucaaauugucaucuugauaaug

SEQ ID NO: 228303 - RNA, 22 nt, Human
agaaaugacacacaugagacau

SEQ ID NO: 228304 - RNA, 22 nt, Human
gcagcauccccaggcagcaggg

SEQ ID NO: 228305 - RNA, 22 nt, Human
ucgccagggaugcuguaaggaa

SEQ ID NO: 228306 - RNA, 22 nt, Human
ugcucagagcuccagcucuccu

SEQ ID NO: 228307 - RNA, 22 nt, Human
caacauucaaccaacauuuaug

SEQ ID NO: 228308 - RNA, 22 nt, Human
ucaaggcaaaguaaauauucaa

SEQ ID NO: 228309 - RNA, 22 nt, Human
cuuggugagacucccacccacc

SEQ ID NO: 228310 - RNA, 22 nt, Human
acagccagucaucucagcaggg

SEQ ID NO: 228311 - RNA, 22 nt, Human
augcaugcagggaagacaguag

SEQ ID NO: 228312 - RNA, 22 nt, Human
agcaaagcaccauauggcaguu

SEQ ID NO: 228313 - RNA, 22 nt, Human
ugcugcagggaagucggggggu

SEQ ID NO: 228314 - RNA, 22 nt, Human
gacaucuccaaggcaaccuguu

SEQ ID NO: 228315 - RNA, 22 nt, Human
ccaggugguucaggucaccaua

SEQ ID NO: 228316 - RNA, 22 nt, Human
ccuggcugugugaccuuggcaa

SEQ ID NO: 228317 - RNA, 22 nt, Human
ccaagcaaggcuaauucacuug

SEQ ID NO: 228318 - RNA, 22 nt, Human
ggaggccagccugaggcugagg

SEQ ID NO: 228319 - RNA, 22 nt, Human
uggcucagauuuuuguaggcuu

SEQ ID NO: 228320 - RNA, 21 nt, Human
aacugagaccagcuaaagugg

SEQ ID NO: 228321 - RNA, 22 nt, Human
gcaaggaagagcagguggugcu

SEQ ID NO: 228322 - RNA, 22 nt, Human
caaggauucucacuagacuaga

SEQ ID NO: 228323 - RNA, 22 nt, Human
uggcccuauuuggaaauagagc

SEQ ID NO: 228324 - RNA, 22 nt, Human
uaagugaugauaguaccuagaa

SEQ ID NO: 228325 - RNA, 23 nt, Human
uuuugcaauaagucacuggaaua

SEQ ID NO: 228326 - RNA, 22 nt, Human
aaacucuagggcuccacauucc

SEQ ID NO: 228327 - RNA, 22 nt, Human
cauuguaagcuguugaauccuc

SEQ ID NO: 228328 - RNA, 22 nt, Human
gcugcccagggcugaguguccu

SEQ ID NO: 228329 - RNA, 22 nt, Human
gcuuccagcaaacacuggcugc

SEQ ID NO: 228330 - RNA, 22 nt, Human
ugcagggaaugcuugcagcaug

SEQ ID NO: 228331 - RNA, 22 nt, Human
uauuuuacagacuacuuuagau

SEQ ID NO: 228332 - RNA, 22 nt, Human
agcagccaagguaaccugugcu

SEQ ID NO: 228333 - RNA, 22 nt, Human
uuggaggaaagaagguugauau

SEQ ID NO: 228334 - RNA, 22 nt, Human
cugggagacgcagcuggggauc

SEQ ID NO: 228335 - RNA, 22 nt, Human
ugacuaaaauaggacauuaacu

SEQ ID NO: 228336 - RNA, 22 nt, Human
uacagauugagguuuuuaauau

SEQ ID NO: 228337 - RNA, 22 nt, Human
uacauaaugagcuaguuaaguu

SEQ ID NO: 228338 - RNA, 22 nt, Human
ggacagcugcuuucaggccaca

SEQ ID NO: 228339 - RNA, 22 nt, Human
aagaaucuaugguacauccaag

SEQ ID NO: 228340 - RNA, 22 nt, Human
uagcaaaggaugacuauguacc

SEQ ID NO: 228341 - RNA, 20 nt, Human
ugcugaggccugaggccugg

SEQ ID NO: 228342 - RNA, 22 nt, Human
uucaaguacuguagauuucagg

SEQ ID NO: 228343 - RNA, 22 nt, Human
auguuaaaugguuuauuauuaa

SEQ ID NO: 228344 - RNA, 22 nt, Human
aauggcuuagcagaguuagaag

SEQ ID NO: 228345 - RNA, 21 nt, Human
ucucugugguccaaucccagc

SEQ ID NO: 228346 - RNA, 22 nt, Human
guuucuguaagacugaauugac

SEQ ID NO: 228347 - RNA, 22 nt, Human
cauuugaaauaguucauucuug

SEQ ID NO: 228348 - RNA, 22 nt, Human
ucuggaucucccucauccuggg

SEQ ID NO: 228349 - RNA, 22 nt, Human
ggacagacagugugagugaggc

SEQ ID NO: 228350 - RNA, 22 nt, Human
uuuaguagaaugauacagggca

SEQ ID NO: 228351 - RNA, 22 nt, Human
uauuccaacuucacuauugucu

SEQ ID NO: 228352 - RNA, 22 nt, Human
uccagccuugccacuuuucugu

SEQ ID NO: 228353 - RNA, 22 nt, Human
cuuguugcuaacauaugcuucu

SEQ ID NO: 228354 - RNA, 22 nt, Human
acauuguauaaugauuaucaca

SEQ ID NO: 228355 - RNA, 22 nt, Human
ggucccaguccucucccugcua

SEQ ID NO: 228356 - RNA, 22 nt, Human
auugcagcucagggugaugacu

SEQ ID NO: 228357 - RNA, 22 nt, Human
agcuggagaguuuccaggaagg

SEQ ID NO: 228358 - RNA, 22 nt, Human
gagauggggucagcugggacau

SEQ ID NO: 228359 - RNA, 22 nt, Human
gccugagaguugaaguucagug

SEQ ID NO: 228360 - RNA, 22 nt, Human
uaauguuuagaagcagacagcu

SEQ ID NO: 228361 - RNA, 22 nt, Human
gaacuuggaccugguccuuugg

SEQ ID NO: 228362 - RNA, 22 nt, Human
aaaguguugaagaaaauguuca

SEQ ID NO: 228363 - RNA, 22 nt, Human
ucuuuggggcaucugggagauu

SEQ ID NO: 228364 - RNA, 22 nt, Human
ggcaucagcccgguccugggcu

SEQ ID NO: 228365 - RNA, 22 nt, Human
gcccagcacagcuggaagaguc

SEQ ID NO: 228366 - RNA, 22 nt, Human
aggucugucuggccccaugaau

SEQ ID NO: 228367 - RNA, 22 nt, Human
caggcuccagcuuccugcucag

SEQ ID NO: 228368 - RNA, 22 nt, Human
cuuagaauuuugccuacuacaa

SEQ ID NO: 228369 - RNA, 22 nt, Human
auugcuuucuuuggggaacugu

SEQ ID NO: 228370 - RNA, 21 nt, Human
ucagguggcagaguguuuaug

SEQ ID NO: 228371 - RNA, 21 nt, Human
agaugcugaugcugcaggucc

SEQ ID NO: 228372 - RNA, 22 nt, Human
auaaacaagacuggccaacuuu

SEQ ID NO: 228373 - RNA, 22 nt, Human
auguaaagggcaugguauuggg

SEQ ID NO: 228374 - RNA, 22 nt, Human
ugacagggugauuaugagagcu

SEQ ID NO: 228375 - RNA, 22 nt, Human
cuauuauuuccucaucuauaaa

SEQ ID NO: 228376 - RNA, 22 nt, Human
ugauggucaggaugcauggaga

SEQ ID NO: 228377 - RNA, 22 nt, Human
ccagcuccucuucccaguguca

SEQ ID NO: 228378 - RNA, 22 nt, Human
ggagugaguacuggaguagcug

SEQ ID NO: 228379 - RNA, 22 nt, Human
aauugcuuaugccaggugagag

SEQ ID NO: 228380 - RNA, 22 nt, Human
cauuucaagcauugacuucuau

SEQ ID NO: 228381 - RNA, 22 nt, Human
caguggcuuaaauaagauuagg

SEQ ID NO: 228382 - RNA, 22 nt, Human
augcuauuuaccacacaucauu

SEQ ID NO: 228383 - RNA, 22 nt, Human
gggguugguuuaaaugcuugag

SEQ ID NO: 228384 - RNA, 22 nt, Human
agcugcccugggucuugcugcu

SEQ ID NO: 228385 - RNA, 22 nt, Human
agaggccaccuucucuugagaa

SEQ ID NO: 228386 - RNA, 22 nt, Human
ccucagcauccuggugaaguag

SEQ ID NO: 228387 - RNA, 22 nt, Human
ggaaaucaugggagaguuggaa

SEQ ID NO: 228388 - RNA, 22 nt, Human
uuuauauuaccuggaauagcuu

SEQ ID NO: 228389 - RNA, 23 nt, Human
agcagugaguaaacagauaggau

SEQ ID NO: 228390 - RNA, 22 nt, Human
ucucuuaacugguucagcaauu

SEQ ID NO: 228391 - RNA, 22 nt, Human
gcuccuggguguggcugccccu

SEQ ID NO: 228392 - RNA, 22 nt, Human
uuuaguguaauucugccuuuug

SEQ ID NO: 228393 - RNA, 22 nt, Human
agcccagggcuaauaggaacca

SEQ ID NO: 228394 - RNA, 22 nt, Human
aaguguuuaaauuauuugcagg

SEQ ID NO: 228395 - RNA, 21 nt, Human
acaaugucaaggucagacauu

SEQ ID NO: 228396 - RNA, 22 nt, Human
aacugucuugccuacucagcau

SEQ ID NO: 228397 - RNA, 22 nt, Human
agcccugauuaaccuuggcuuu

SEQ ID NO: 228398 - RNA, 22 nt, Human
ugacagguucguuagucauguu

SEQ ID NO: 228399 - RNA, 22 nt, Human
uggcagaggaaaaagucacugg

SEQ ID NO: 228400 - RNA, 22 nt, Human
ccagagccucgcccggagccuc

SEQ ID NO: 228401 - RNA, 22 nt, Human
gcugucucgccugacacuggcu

SEQ ID NO: 228402 - RNA, 22 nt, Human
cacuggaauucaagauacugag

SEQ ID NO: 228403 - RNA, 22 nt, Human
acagaguuaauggauaggcagg

SEQ ID NO: 228404 - RNA, 22 nt, Human
ggcauuuuugacaaagagcaau

SEQ ID NO: 228405 - RNA, 22 nt, Human
acauucuggaugucugaugaga

SEQ ID NO: 228406 - RNA, 22 nt, Human
ggaguccuggacuccaucucac

SEQ ID NO: 228407 - RNA, 20 nt, Human
uuucucagaacaguggcugc

SEQ ID NO: 228408 - RNA, 22 nt, Human
ucugggagcacacgcagugauc

SEQ ID NO: 228409 - RNA, 21 nt, Human
ccauaauuuuguuucagaagu

SEQ ID NO: 228410 - RNA, 18 nt, Human
cucaggcagagaagcuuu

SEQ ID NO: 228411 - RNA, 22 nt, Human
gcuggcauuacaggagagaacc

SEQ ID NO: 228412 - RNA, 22 nt, Human
gcuaaugacugaguuuuuagca

SEQ ID NO: 228413 - RNA, 22 nt, Human
cucuggaagugauggcagguca

SEQ ID NO: 228414 - RNA, 21 nt, Human
uaacacauuuugguacuuugg

SEQ ID NO: 228415 - RNA, 22 nt, Human
uaggaauccagaucuagacugu

SEQ ID NO: 228416 - RNA, 22 nt, Human
caaauuuuguguguucucuagu

SEQ ID NO: 228417 - RNA, 22 nt, Human
acauucuugaagugaaguuuau

SEQ ID NO: 228418 - RNA, 22 nt, Human
caguguggguuugggaggagua

SEQ ID NO: 228419 - RNA, 22 nt, Human
uauguacaccaaggauugaaaa

SEQ ID NO: 228420 - RNA, 22 nt, Human
aggcuacaggagacgccaggag

SEQ ID NO: 228421 - RNA, 21 nt, Human
agguccaguucugucuuggac

SEQ ID NO: 228422 - RNA, 20 nt, Human
acaauauguagaugaauagc

SEQ ID NO: 228423 - RNA, 20 nt, Human
gcaggcccucucucuagucu

SEQ ID NO: 228424 - RNA, 22 nt, Human
aguggcagagccaaguagagcc

SEQ ID NO: 228425 - RNA, 22 nt, Human
gcuccaggaggcucccgcgucu

SEQ ID NO: 228426 - RNA, 22 nt, Human
cagggcagcuuccuuuguuagg

SEQ ID NO: 228427 - RNA, 21 nt, Human
aucaggcucaaaucaucccaa

SEQ ID NO: 228428 - RNA, 22 nt, Human
gaaccucagugaaacuggaggu

SEQ ID NO: 228429 - RNA, 22 nt, Human
aaagcaaugcccguucauuauc

SEQ ID NO: 228430 - RNA, 22 nt, Human
uggccaggaggcugcuucugac

SEQ ID NO: 228431 - RNA, 22 nt, Human
ucacugcagagaccucuaguca

SEQ ID NO: 228432 - RNA, 22 nt, Human
uugggcuggcagagguggucuu

SEQ ID NO: 228433 - RNA, 18 nt, Human
cugaggcuggcaggagcc

SEQ ID NO: 228434 - RNA, 22 nt, Human
cugccuguuagucuagcaguua

SEQ ID NO: 228435 - RNA, 19 nt, Human
aggaauggaauuaauucug

SEQ ID NO: 228436 - RNA, 22 nt, Human
uguggaaugcuccuaagugaau

SEQ ID NO: 228437 - RNA, 22 nt, Human
agcuccuggcaaggucauggug

SEQ ID NO: 228438 - RNA, 22 nt, Human
cugggcucuaagggagcaccgu

SEQ ID NO: 228439 - RNA, 22 nt, Human
ggguguggcugcgugccaauaa

SEQ ID NO: 228440 - RNA, 22 nt, Human
auggggaagagccagugagcug

SEQ ID NO: 228441 - RNA, 20 nt, Human
ucauccaguugguuuauggu

SEQ ID NO: 228442 - RNA, 22 nt, Human
cccuuccuccucgccugucaga

SEQ ID NO: 228443 - RNA, 23 nt, Human
agcaacagugggugaguguugcu

SEQ ID NO: 228444 - RNA, 22 nt, Human
ugggcaucguucccuuggcuau

SEQ ID NO: 228445 - RNA, 22 nt, Human
uuuauguuugacaaugaucugg

SEQ ID NO: 228446 - RNA, 22 nt, Human
aagcagaaguugaucuaccaua

SEQ ID NO: 228447 - RNA, 22 nt, Human
ucacucugcaggaaggagcagc

SEQ ID NO: 228448 - RNA, 22 nt, Human
ccagggcugcugugggacucca

SEQ ID NO: 228449 - RNA, 22 nt, Human
ugcauuaaaaugugccucucuu

SEQ ID NO: 228450 - RNA, 22 nt, Human
cagcuccucacgagucuugaaa

SEQ ID NO: 228451 - RNA, 22 nt, Human
uugcaaauuauauaagggaugc

SEQ ID NO: 228452 - RNA, 22 nt, Human
uagcugggacuacuggcccugc

SEQ ID NO: 228453 - RNA, 22 nt, Human
aaaauauuuuagggccaggaga

SEQ ID NO: 228454 - RNA, 22 nt, Human
cccagcaggcauguugggagga

SEQ ID NO: 228455 - RNA, 22 nt, Human
uggaauguaaacucugugaggg

SEQ ID NO: 228456 - RNA, 22 nt, Human
acuguagucuaaauauagucuu

SEQ ID NO: 228457 - RNA, 22 nt, Human
uuccaagagcuuuaauuguuga

SEQ ID NO: 228458 - RNA, 22 nt, Human
aucuuuggaucgcucccccuuc

SEQ ID NO: 228459 - RNA, 20 nt, Human
cugggcucgguggcccuggc

SEQ ID NO: 228460 - RNA, 23 nt, Human
ucugucuguguaugugcagaaag

SEQ ID NO: 228461 - RNA, 22 nt, Human
ucuguggcaaacacagugacca

SEQ ID NO: 228462 - RNA, 22 nt, Human
gcuucuccucccgcucccaggc

SEQ ID NO: 228463 - RNA, 22 nt, Human
ugggcaguggcugggccucucu

SEQ ID NO: 228464 - RNA, 22 nt, Human
gggcucauggacagcucuccag

SEQ ID NO: 228465 - RNA, 22 nt, Human
aaacauuugcaacucgguuugg

SEQ ID NO: 228466 - RNA, 22 nt, Human
ugaggggcauguguuuacacau

SEQ ID NO: 228467 - RNA, 22 nt, Human
ccaguguccuuccuuuccaugg

SEQ ID NO: 228468 - RNA, 22 nt, Human
agauaaguacuguuauuauugc

SEQ ID NO: 228469 - RNA, 22 nt, Human
gcagagccccauugcuggcggg

SEQ ID NO: 228470 - RNA, 22 nt, Human
ugugugaccuggggugagauag

SEQ ID NO: 228471 - RNA, 20 nt, Human
caugccugcugguaucuggc

SEQ ID NO: 228472 - RNA, 22 nt, Human
acaggccugagauuuugcauuu

SEQ ID NO: 228473 - RNA, 22 nt, Human
gccagcuguaagcagugauucu

SEQ ID NO: 228474 - RNA, 22 nt, Human
aggguagguguaagauagcccu

SEQ ID NO: 228475 - RNA, 22 nt, Human
uuccacuuuucucucucaugcc

SEQ ID NO: 228476 - RNA, 22 nt, Human
gagccagacugccugaagcuca

SEQ ID NO: 228477 - RNA, 21 nt, Human
ggagucuguggaugcuguuuc

SEQ ID NO: 228478 - RNA, 22 nt, Human
agagguguggccaggacucaag

SEQ ID NO: 228479 - RNA, 22 nt, Human
uagaaacucucacgagugaaac

SEQ ID NO: 228480 - RNA, 22 nt, Human
uuugcuuugacugucagcaagu

SEQ ID NO: 228481 - RNA, 18 nt, Human
agcagcugucagaaugcc

SEQ ID NO: 228482 - RNA, 21 nt, Human
ucagugcaauucuauggggaa

SEQ ID NO: 228483 - RNA, 22 nt, Human
acaguacaagcaaugcauuuuu

SEQ ID NO: 228484 - RNA, 22 nt, Human
aggacugacuuuugccaugaaa

SEQ ID NO: 228485 - RNA, 22 nt, Human
gaugaggaaugcucagcucaau

SEQ ID NO: 228486 - RNA, 22 nt, Human
ccaggcaagcucugcugugccc

SEQ ID NO: 228487 - RNA, 22 nt, Human
cuggggcaucauccauucuuuc

SEQ ID NO: 228488 - RNA, 22 nt, Human
gaaggcauucuauucuacauau

SEQ ID NO: 228489 - RNA, 22 nt, Human
acaacucucaguuaaauaaaga

SEQ ID NO: 228490 - RNA, 22 nt, Human
uguagaaaauuggagcauucau

SEQ ID NO: 228491 - RNA, 22 nt, Human
ugcaguucaagguuguacagcu

SEQ ID NO: 228492 - RNA, 22 nt, Human
aauggagacuucaaaauggauu

SEQ ID NO: 228493 - RNA, 22 nt, Human
aagacacuuucuaaauagaagu

SEQ ID NO: 228494 - RNA, 22 nt, Human
agcagcucugagaggccagcac

SEQ ID NO: 228495 - RNA, 22 nt, Human
uaauacauuaccuaaccucucu

SEQ ID NO: 228496 - RNA, 22 nt, Human
cuccugggagcagggauggaug

SEQ ID NO: 228497 - RNA, 22 nt, Human
acagcugcacuugaagcagguu

SEQ ID NO: 228498 - RNA, 22 nt, Human
ucuguaucguaaucaugucugg

SEQ ID NO: 228499 - RNA, 22 nt, Human
uagcaagaagggagaugggguu

SEQ ID NO: 228500 - RNA, 20 nt, Human
uggagggauuguuggcaaau

SEQ ID NO: 228501 - RNA, 22 nt, Human
ccagcccugccagagagagcug

SEQ ID NO: 228502 - RNA, 22 nt, Human
cugcugccggcgagccucccuu

SEQ ID NO: 228503 - RNA, 22 nt, Human
caggucugaagagucacaugcc

SEQ ID NO: 228504 - RNA, 22 nt, Human
ucaggaauccagacagggcaca

SEQ ID NO: 228505 - RNA, 22 nt, Human
aagaguuuaauuuugucuagac

SEQ ID NO: 228506 - RNA, 22 nt, Human
uguguccaacccagggacaagu

SEQ ID NO: 228507 - RNA, 22 nt, Human
ugcagggcuauaacuccauucu

SEQ ID NO: 228508 - RNA, 22 nt, Human
gcagccucaaacuccccagcuc

SEQ ID NO: 228509 - RNA, 22 nt, Human
acacaguaggccaccaugucau

SEQ ID NO: 228510 - RNA, 22 nt, Human
aaugucuuuaaagugcaauaga

SEQ ID NO: 228511 - RNA, 22 nt, Human
agaagaggggugucccuguggc

SEQ ID NO: 228512 - RNA, 22 nt, Human
aagccagugugacaggaaacuu

SEQ ID NO: 228513 - RNA, 22 nt, Human
cucagaggucaagagcagagcu

SEQ ID NO: 228514 - RNA, 22 nt, Human
guuuggaauagcaguaaacauu

SEQ ID NO: 228515 - RNA, 22 nt, Human
uacaaagaggcagcuccauuuu

SEQ ID NO: 228516 - RNA, 22 nt, Human
auaguuguguggggauucuggu

SEQ ID NO: 228517 - RNA, 22 nt, Human
ucccagaggaaauggcagcuga

SEQ ID NO: 228518 - RNA, 22 nt, Human
ccugggcucuauccugacccag

SEQ ID NO: 228519 - RNA, 22 nt, Human
ucaggagacuuaugucacagug

SEQ ID NO: 228520 - RNA, 22 nt, Human
uucaugaauggaaucaaugcuc

SEQ ID NO: 228521 - RNA, 22 nt, Human
uccuggcucaggccccuggugc

SEQ ID NO: 228522 - RNA, 22 nt, Human
uaauuucacugauaugaaguca

SEQ ID NO: 228523 - RNA, 22 nt, Human
agucacaucgauuauaaaauuu

SEQ ID NO: 228524 - RNA, 19 nt, Human
aagaggcaacccucgagcc

SEQ ID NO: 228525 - RNA, 23 nt, Human
agucucagcuggaaacauguguc

SEQ ID NO: 228526 - RNA, 22 nt, Human
cuuggcugucauaagguccugg

SEQ ID NO: 228527 - RNA, 22 nt, Human
ucugggaugcaaacagaaucug

SEQ ID NO: 228528 - RNA, 22 nt, Human
gcucuugucaaaaauuaguuga

SEQ ID NO: 228529 - RNA, 22 nt, Human
aagcauuugugaaauucagaug

SEQ ID NO: 228530 - RNA, 22 nt, Human
aaggcuccacccucauggaugc

SEQ ID NO: 228531 - RNA, 22 nt, Human
auuugcuuucccuucccugaca

SEQ ID NO: 228532 - RNA, 22 nt, Human
uuccagauguuuaaguucugcu

SEQ ID NO: 228533 - RNA, 22 nt, Human
gucugagcacccuggccuguca

SEQ ID NO: 228534 - RNA, 21 nt, Human
cagaggggcuagccuggcugc

SEQ ID NO: 228535 - RNA, 22 nt, Human
ugucacagucucgugagcaucu

SEQ ID NO: 228536 - RNA, 22 nt, Human
gaggaacagcagccacaugucc

SEQ ID NO: 228537 - RNA, 22 nt, Human
aggccacaguugaggccagcaa

SEQ ID NO: 228538 - RNA, 22 nt, Human
aggccucaguucuugccaggug

SEQ ID NO: 228539 - RNA, 22 nt, Human
agaaagaacguugguuaucuua

SEQ ID NO: 228540 - RNA, 22 nt, Human
uccacagucuauuuuuagucua

SEQ ID NO: 228541 - RNA, 22 nt, Human
auacauguuguaccauauguuu

SEQ ID NO: 228542 - RNA, 22 nt, Human
guggcuuccaugugcaucugac

SEQ ID NO: 228543 - RNA, 22 nt, Human
cauuguuugagcaucugggauc

SEQ ID NO: 228544 - RNA, 22 nt, Human
gcccggccaggaacagaguaua

SEQ ID NO: 228545 - RNA, 22 nt, Human
auguacauuuguaguaauauca

SEQ ID NO: 228546 - RNA, 22 nt, Human
aggcuaggccuugcccuggaac

SEQ ID NO: 228547 - RNA, 22 nt, Human
uucagaaacaucaguggaugga

SEQ ID NO: 228548 - RNA, 22 nt, Human
uuuagagagcacuguagacacu

SEQ ID NO: 228549 - RNA, 22 nt, Human
cagcuccucuguuagcccuggg

SEQ ID NO: 228550 - RNA, 22 nt, Human
cccugagagugagugccaccuu

SEQ ID NO: 228551 - RNA, 22 nt, Human
cugggccuugccuugcccacag

SEQ ID NO: 228552 - RNA, 22 nt, Human
uaggcuccucucacauucuauu

SEQ ID NO: 228553 - RNA, 22 nt, Human
ccagcagagcucaaacuuccug

SEQ ID NO: 228554 - RNA, 22 nt, Human
ggcagggaagcuggcaucacgg

SEQ ID NO: 228555 - RNA, 19 nt, Human
gcuguuaaggacccucgga

SEQ ID NO: 228556 - RNA, 22 nt, Human
acaggaacccagaaacauuucu

SEQ ID NO: 228557 - RNA, 22 nt, Human
ugagcauuggaucaaaugacuu

SEQ ID NO: 228558 - RNA, 22 nt, Human
augcgagugaugcagaguggcu

SEQ ID NO: 228559 - RNA, 22 nt, Human
ccuggcaggacuguuguaagaa

SEQ ID NO: 228560 - RNA, 22 nt, Human
aucuuucuaugguacuuucucc

SEQ ID NO: 228561 - RNA, 22 nt, Human
ggcaggcaguguggugugaaac

SEQ ID NO: 228562 - RNA, 22 nt, Human
gggagaaaugucuggccugcug

SEQ ID NO: 228563 - RNA, 22 nt, Human
uauuucugaauccaaaagguca

SEQ ID NO: 228564 - RNA, 22 nt, Human
uggcucugagcugcaaagcugc

SEQ ID NO: 228565 - RNA, 22 nt, Human
cagagccugccaccuuucuccc

SEQ ID NO: 228566 - RNA, 22 nt, Human
uauuaauaugugugugcaugua

SEQ ID NO: 228567 - RNA, 22 nt, Human
ugugcacauaaaacaguacuag

SEQ ID NO: 228568 - RNA, 22 nt, Human
uuacaaaguucugaguucaaac

SEQ ID NO: 228569 - RNA, 22 nt, Human
acaggaagugggaagaaacagg

SEQ ID NO: 228570 - RNA, 22 nt, Human
gaggcucccaaggggcuaggcc

SEQ ID NO: 228571 - RNA, 20 nt, Human
uuauaucauaaugugccaau

SEQ ID NO: 228572 - RNA, 22 nt, Human
ucucuggguuuuuguccuguac

SEQ ID NO: 228573 - RNA, 23 nt, Human
cugcaacucagucuggagcaguu

SEQ ID NO: 228574 - RNA, 22 nt, Human
agaaucuuucugaaugacugug

SEQ ID NO: 228575 - RNA, 22 nt, Human
ggacaugugcaacuucuuugga

SEQ ID NO: 228576 - RNA, 22 nt, Human
ucauuuguugaacuuuagugcg

SEQ ID NO: 228577 - RNA, 22 nt, Human
acuuuagagaaauguagaagua

SEQ ID NO: 228578 - RNA, 22 nt, Human
ucuagagacuauaauguguccu

SEQ ID NO: 228579 - RNA, 22 nt, Human
aggccucacucucagagcuucu

SEQ ID NO: 228580 - RNA, 21 nt, Human
cagggcacacagaggauggua

SEQ ID NO: 228581 - RNA, 22 nt, Human
gcagaggggaagcugaggaauu

SEQ ID NO: 228582 - RNA, 22 nt, Human
aucucuucucccaacaccuggc

SEQ ID NO: 228583 - RNA, 22 nt, Human
cuucugaguuaacaguagauuu

SEQ ID NO: 228584 - RNA, 22 nt, Human
uucugagaugaggaggaaaaag

SEQ ID NO: 228585 - RNA, 22 nt, Human
ugcccugccugagagacaguaa

SEQ ID NO: 228586 - RNA, 22 nt, Human
uccccaggagcaaugauucagu

SEQ ID NO: 228587 - RNA, 22 nt, Human
gcuggugguuaccgugcuaaug

SEQ ID NO: 228588 - RNA, 23 nt, Human
agugcaugcuugacuuagcaagc

SEQ ID NO: 228589 - RNA, 22 nt, Human
agcagaggaggauuuaguuagg

SEQ ID NO: 228590 - RNA, 22 nt, Human
auucaguaggugugaacuuauu

SEQ ID NO: 228591 - RNA, 22 nt, Human
cugcugugcaggugccuaugau

SEQ ID NO: 228592 - RNA, 22 nt, Human
uaggugaguuuggggaagauag

SEQ ID NO: 228593 - RNA, 22 nt, Human
ggagcagcuugcaugcucaggg

SEQ ID NO: 228594 - RNA, 22 nt, Human
gagaaggcuggucuuaagucga

SEQ ID NO: 228595 - RNA, 22 nt, Human
uacaagaaacuacaugaaugca

SEQ ID NO: 228596 - RNA, 21 nt, Human
gacaaagugaagcaggcagga

SEQ ID NO: 228597 - RNA, 22 nt, Human
augaaggcuguguggagccccc

SEQ ID NO: 228598 - RNA, 21 nt, Human
uccagccaguaaaugcucagc

SEQ ID NO: 228599 - RNA, 22 nt, Human
uugguggaccucaucagaaccg

SEQ ID NO: 228600 - RNA, 22 nt, Human
ugcaggugauucugaugcaguu

SEQ ID NO: 228601 - RNA, 22 nt, Human
cacugagcugauagaauuccag

SEQ ID NO: 228602 - RNA, 22 nt, Human
aaaaggauguuuucaugaaaca

SEQ ID NO: 228603 - RNA, 22 nt, Human
aggcuucuuagauuggcuggag

SEQ ID NO: 228604 - RNA, 22 nt, Human
agugagguaauuagagcugcug

SEQ ID NO: 228605 - RNA, 22 nt, Human
gagacacucaacaaagauauga

SEQ ID NO: 228606 - RNA, 20 nt, Human
uuucaguugguuaauggcau

SEQ ID NO: 228607 - RNA, 22 nt, Human
cugaaggcuuguuguuuucuua

SEQ ID NO: 228608 - RNA, 22 nt, Human
uuugcaaaauuauucccagcau

SEQ ID NO: 228609 - RNA, 22 nt, Human
gaagcagcucagauugacugaa

SEQ ID NO: 228610 - RNA, 22 nt, Human
auccaaaguagauuaagucaca

SEQ ID NO: 228611 - RNA, 22 nt, Human
caaauucacaugauugcuucug

SEQ ID NO: 228612 - RNA, 22 nt, Human
ugcuggcuauuuaaagaagaaa

SEQ ID NO: 228613 - RNA, 22 nt, Human
ugccugucuccucugcagggug

SEQ ID NO: 228614 - RNA, 21 nt, Human
ucugagacuggguuagaaugu

SEQ ID NO: 228615 - RNA, 22 nt, Human
uucucugggacaggaacaguuu

SEQ ID NO: 228616 - RNA, 22 nt, Human
guuucacagucugcagaauuuu

SEQ ID NO: 228617 - RNA, 22 nt, Human
caggggaguuuuaugcaacaga

SEQ ID NO: 228618 - RNA, 22 nt, Human
gugcucagcccggaugagauca

SEQ ID NO: 228619 - RNA, 22 nt, Human
ucagcuccacagcuccucugcc

SEQ ID NO: 228620 - RNA, 22 nt, Human
ugcucagcuucagaggaucccc

SEQ ID NO: 228621 - RNA, 22 nt, Human
ugcauaaaacaugauuucugcu

SEQ ID NO: 228622 - RNA, 22 nt, Human
agagacugcuuuauauuguacu

SEQ ID NO: 228623 - RNA, 22 nt, Human
uucugggugcaacucuguucug

SEQ ID NO: 228624 - RNA, 22 nt, Human
cugcagggccauggguucuaua

SEQ ID NO: 228625 - RNA, 18 nt, Human
ucccucagaauuauagaa

SEQ ID NO: 228626 - RNA, 22 nt, Human
ucuggcccuauggcauguaccu

SEQ ID NO: 228627 - RNA, 22 nt, Human
aacauuuacaaauccuucugca

SEQ ID NO: 228628 - RNA, 22 nt, Human
uuacaacauauuuagcuugauu

SEQ ID NO: 228629 - RNA, 22 nt, Human
accuggaaugggguugagagcu

SEQ ID NO: 228630 - RNA, 22 nt, Human
aaaaacagaaugugucuaacuc

SEQ ID NO: 228631 - RNA, 22 nt, Human
uccuggucuacacugcauuggg

SEQ ID NO: 228632 - RNA, 22 nt, Human
cugucugcccuggccagagccc

SEQ ID NO: 228633 - RNA, 22 nt, Human
aauagcauccuguaucucuucc

SEQ ID NO: 228634 - RNA, 22 nt, Human
aaguaacaucugaacaugaugu

SEQ ID NO: 228635 - RNA, 22 nt, Human
uaaaagcucuucuguugaguua

SEQ ID NO: 228636 - RNA, 22 nt, Human
ggggaccuaggcucugucucuu

SEQ ID NO: 228637 - RNA, 22 nt, Human
uguggcugggcuaauaggcaaa

SEQ ID NO: 228638 - RNA, 22 nt, Human
ccccagggucaguguguggagg

SEQ ID NO: 228639 - RNA, 22 nt, Human
aaaaaucuaugacugcuucucc

SEQ ID NO: 228640 - RNA, 19 nt, Human
ugcuauuugaagaagugua

SEQ ID NO: 228641 - RNA, 22 nt, Human
ucuguucagacacuuuacaugu

SEQ ID NO: 228642 - RNA, 22 nt, Human
aacauguugcuuuaauaauauu

SEQ ID NO: 228643 - RNA, 22 nt, Human
cauguacacacaaagggacaau

SEQ ID NO: 228644 - RNA, 20 nt, Human
aaugaguuauuuuguauaug

SEQ ID NO: 228645 - RNA, 22 nt, Human
ggaggccaggguggguggaucg

SEQ ID NO: 228646 - RNA, 22 nt, Human
gaggcugcccacaccugcgccg

SEQ ID NO: 228647 - RNA, 22 nt, Human
aacaguacaacuccacaagacu

SEQ ID NO: 228648 - RNA, 22 nt, Human
uguuaaaaauucagcucuagau

SEQ ID NO: 228649 - RNA, 22 nt, Human
acacaugaggaugaggggauca

SEQ ID NO: 228650 - RNA, 22 nt, Human
ccaauucauccucuggggcuuc

SEQ ID NO: 228651 - RNA, 17 nt, Human
agagggaaaaugcgguu

SEQ ID NO: 228652 - RNA, 22 nt, Human
uggaucugguucccugagccuu

SEQ ID NO: 228653 - RNA, 22 nt, Human
aguucagaguaaauguugaagg

SEQ ID NO: 228654 - RNA, 22 nt, Human
ucaggccuagaacacagcagau

SEQ ID NO: 228655 - RNA, 23 nt, Human
ggaaaaacacugugucuuggcag

SEQ ID NO: 228656 - RNA, 22 nt, Human
ccuaccaguaggaggccagaga

SEQ ID NO: 228657 - RNA, 22 nt, Human
acagaauacucauaagaagggg

SEQ ID NO: 228658 - RNA, 22 nt, Human
ggcucuugagaggcacagguuu

SEQ ID NO: 228659 - RNA, 22 nt, Human
ggcaggcuuugagaaagagcau

SEQ ID NO: 228660 - RNA, 22 nt, Human
aaagaccugugguagcucuaaa

SEQ ID NO: 228661 - RNA, 22 nt, Human
ugcaggagaaaguacggagcgu

SEQ ID NO: 228662 - RNA, 22 nt, Human
aagcugaggcuccccugaggga

SEQ ID NO: 228663 - RNA, 16 nt, Human
agcagguguauagugu

SEQ ID NO: 228664 - RNA, 22 nt, Human
ugacucaagagccugacucauc

SEQ ID NO: 228665 - RNA, 22 nt, Human
aguguucuuccuaucugcuguu

SEQ ID NO: 228666 - RNA, 22 nt, Human
ccugcuguccccugagccugga

SEQ ID NO: 228667 - RNA, 22 nt, Human
aucuccagcagugcuuuugagc

SEQ ID NO: 228668 - RNA, 22 nt, Human
cauggcaauaaaccuacacagu

SEQ ID NO: 228669 - RNA, 22 nt, Human
uucaauuucauaauaucuagcu

SEQ ID NO: 228670 - RNA, 22 nt, Human
uagcuuuagaaauauucucaga

SEQ ID NO: 228671 - RNA, 22 nt, Human
agcaggcuugguccccagccuc

SEQ ID NO: 228672 - RNA, 22 nt, Human
acgugcaggaucugguuggcga

SEQ ID NO: 228673 - RNA, 22 nt, Human
cagcugucagccggugcaggcu

SEQ ID NO: 228674 - RNA, 22 nt, Human
uauuuguugaauaccccugucu

SEQ ID NO: 228675 - RNA, 22 nt, Human
acuccuggguucuaaauuugaa

SEQ ID NO: 228676 - RNA, 22 nt, Human
gcaggcuuugacuuggggcagc

SEQ ID NO: 228677 - RNA, 22 nt, Human
aaacucuguagcuaaacauaau

SEQ ID NO: 228678 - RNA, 22 nt, Human
gcugccaguaguuggagcucca

SEQ ID NO: 228679 - RNA, 22 nt, Human
gagagaagaauguuccgaggcc

SEQ ID NO: 228680 - RNA, 22 nt, Human
cccagccucugggcucacccaa

SEQ ID NO: 228681 - RNA, 22 nt, Human
aaagccagguugugugcaggaa

SEQ ID NO: 228682 - RNA, 22 nt, Human
gagcuuuaccuuagguucuguu

SEQ ID NO: 228683 - RNA, 22 nt, Human
cagguugaaaguggaggagcua

SEQ ID NO: 228684 - RNA, 22 nt, Human
acuuagaacaggcagaauucca

SEQ ID NO: 228685 - RNA, 22 nt, Human
agaugcagaaaaacuaagugau

SEQ ID NO: 228686 - RNA, 22 nt, Human
aaggugucauccaggauggugg

SEQ ID NO: 228687 - RNA, 22 nt, Human
gggcugggcaugguguucccuc

SEQ ID NO: 228688 - RNA, 22 nt, Human
ucugaaagagaguacauacagu

SEQ ID NO: 228689 - RNA, 22 nt, Human
uucucagauauuuguauggaac

SEQ ID NO: 228690 - RNA, 22 nt, Human
ggacagaggguugacagaguau

SEQ ID NO: 228691 - RNA, 22 nt, Human
agacacugauguucagcucaau

SEQ ID NO: 228692 - RNA, 22 nt, Human
uuaauuacuaagcacaaugcaa

SEQ ID NO: 228693 - RNA, 22 nt, Human
acagacagggcaccugccuccu

SEQ ID NO: 228694 - RNA, 22 nt, Human
agcaacauugagacugcaguug

SEQ ID NO: 228695 - RNA, 22 nt, Human
uuacauucagaaagauuugagu

SEQ ID NO: 228696 - RNA, 22 nt, Human
aagcugucaauguaucuagucu

SEQ ID NO: 228697 - RNA, 22 nt, Human
aaaguucuaaaacucuuuguga

SEQ ID NO: 228698 - RNA, 22 nt, Human
uacagugcaaugugauguagau

SEQ ID NO: 228699 - RNA, 22 nt, Human
aacuagcagcuaagacauaauu

SEQ ID NO: 228700 - RNA, 22 nt, Human
gugaaaagcaacauuguggacc

SEQ ID NO: 228701 - RNA, 22 nt, Human
cccagccugugacagccguccu

SEQ ID NO: 228702 - RNA, 22 nt, Human
uaguuuugauuaguauugucuu

SEQ ID NO: 228703 - RNA, 22 nt, Human
ucccugaaacaucucuguggau

SEQ ID NO: 228704 - RNA, 22 nt, Human
gccucccugagucacccaagca

SEQ ID NO: 228705 - RNA, 22 nt, Human
ugcaacagacuuuauuaacucu

SEQ ID NO: 228706 - RNA, 22 nt, Human
ugcuuggcuuucugagcuucug

SEQ ID NO: 228707 - RNA, 22 nt, Human
uuccuggccccaccccuggaga

SEQ ID NO: 228708 - RNA, 19 nt, Human
auucuuggugcaccuugua

SEQ ID NO: 228709 - RNA, 22 nt, Human
cugccuguauugucugcuuggg

SEQ ID NO: 228710 - RNA, 22 nt, Human
accuucugaccaguuaucuuga

SEQ ID NO: 228711 - RNA, 22 nt, Human
ucagcugggugaguguucugca

SEQ ID NO: 228712 - RNA, 22 nt, Human
ccagcagcugcaaagccugggu

SEQ ID NO: 228713 - RNA, 22 nt, Human
ggauggcauguugggcucuguu

SEQ ID NO: 228714 - RNA, 22 nt, Human
cagcuuuaggacucauaauaaa

SEQ ID NO: 228715 - RNA, 22 nt, Human
agaaguauaaagaauguuuaug

SEQ ID NO: 228716 - RNA, 22 nt, Human
ucuuuuggguucuuaugauuua

SEQ ID NO: 228717 - RNA, 22 nt, Human
ugugggaggucuggaaggcucc

SEQ ID NO: 228718 - RNA, 23 nt, Human
uggacccugcacaccagcucuac

SEQ ID NO: 228719 - RNA, 22 nt, Human
uacaacauuuacguuaggcugu

SEQ ID NO: 228720 - RNA, 22 nt, Human
acccucaguaaucgugcaguuu

SEQ ID NO: 228721 - RNA, 22 nt, Human
cugccuuccaaccccagacucc

SEQ ID NO: 228722 - RNA, 22 nt, Human
acugguggcccucaguguucuc

SEQ ID NO: 228723 - RNA, 22 nt, Human
ccuggccagcgccggcugcucg

SEQ ID NO: 228724 - RNA, 22 nt, Human
uccaggcuccugacuuuuuggg

SEQ ID NO: 228725 - RNA, 22 nt, Human
acucaaauagcugccccuagug

SEQ ID NO: 228726 - RNA, 20 nt, Human
agucucucccagaaugagca

SEQ ID NO: 228727 - RNA, 22 nt, Human
aaaggccaagcaugagguggac

SEQ ID NO: 228728 - RNA, 23 nt, Human
cucagcaggucaggccccuuccu

SEQ ID NO: 228729 - RNA, 22 nt, Human
aggcugcuucagcugcagggag

SEQ ID NO: 228730 - RNA, 22 nt, Human
ugcagaaguauuccaggcccca

SEQ ID NO: 228731 - RNA, 22 nt, Human
uuauugagcaacucuggggcuc

SEQ ID NO: 228732 - RNA, 22 nt, Human
auacuguuuugugacuuaucuu

SEQ ID NO: 228733 - RNA, 22 nt, Human
gguggggccagggcuccaaccu

SEQ ID NO: 228734 - RNA, 22 nt, Human
cagcuguggggagcuugggcca

SEQ ID NO: 228735 - RNA, 23 nt, Human
gucuuuauaguggggcacuuugu

SEQ ID NO: 228736 - RNA, 22 nt, Human
uaguuuccauguuauacaguuu

SEQ ID NO: 228737 - RNA, 22 nt, Human
gaguggagaucgugccacugca

SEQ ID NO: 228738 - RNA, 22 nt, Human
uuauuuguuuucugagaaguau

SEQ ID NO: 228739 - RNA, 22 nt, Human
uguuccuguuuaaugugcucau

SEQ ID NO: 228740 - RNA, 22 nt, Human
gggccagucugacucugcuggu

SEQ ID NO: 228741 - RNA, 19 nt, Human
uccuuccaguuccuggggu

SEQ ID NO: 228742 - RNA, 22 nt, Human
cagggccacacggaagggaaca

SEQ ID NO: 228743 - RNA, 22 nt, Human
auaggcuuuguguuuuguuauc

SEQ ID NO: 228744 - RNA, 19 nt, Human
ucucugcuucucuuggcau

SEQ ID NO: 228745 - RNA, 22 nt, Human
gugcccaguugaggccaggacu

SEQ ID NO: 228746 - RNA, 22 nt, Human
agugcagugaugaauaaugguu

SEQ ID NO: 228747 - RNA, 23 nt, Human
ugcccagugccuuugcccaugca

SEQ ID NO: 228748 - RNA, 22 nt, Human
ugaggcaaguacuuucccuuuu

SEQ ID NO: 228749 - RNA, 21 nt, Human
aaauacugggcagugacuuga

SEQ ID NO: 228750 - RNA, 19 nt, Human
cgcaggcuucgggucgcuc

SEQ ID NO: 228751 - RNA, 22 nt, Human
acccagccauguucaguucucu

SEQ ID NO: 228752 - RNA, 22 nt, Human
auaagagcuacagccaguucug

SEQ ID NO: 228753 - RNA, 22 nt, Human
ugcccaggcuucacccucagag

SEQ ID NO: 228754 - RNA, 22 nt, Human
acaucugacaugaucuucagua

SEQ ID NO: 228755 - RNA, 22 nt, Human
gcagagcagugcuugcccagcg

SEQ ID NO: 228756 - RNA, 20 nt, Human
cagcccuccaguggaggcag

SEQ ID NO: 228757 - RNA, 22 nt, Human
aucuuugcuauuguaaaucacg

SEQ ID NO: 228758 - RNA, 22 nt, Human
cuagagcuauucaagguuuuau

SEQ ID NO: 228759 - RNA, 20 nt, Human
auucagaauaggcauguaaa

SEQ ID NO: 228760 - RNA, 22 nt, Human
caaaauguucuggcaccuuuaa

SEQ ID NO: 228761 - RNA, 22 nt, Human
uuuagacaagauccuucugaau

SEQ ID NO: 228762 - RNA, 22 nt, Human
cagcuucuuacgagcugguacu

SEQ ID NO: 228763 - RNA, 22 nt, Human
ucuuuuuauauugacaaaaggu

SEQ ID NO: 228764 - RNA, 22 nt, Human
agcugucucucugguguccaua

SEQ ID NO: 228765 - RNA, 20 nt, Human
agggucugaugugguggccc

SEQ ID NO: 228766 - RNA, 22 nt, Human
acaguggagaagcaaaugcagu

SEQ ID NO: 228767 - RNA, 22 nt, Human
aucuucaucaaguucacagugg

SEQ ID NO: 228768 - RNA, 22 nt, Human
uuagugaucaaaaucaaaauug

SEQ ID NO: 228769 - RNA, 22 nt, Human
aaaucuaggcucauccuggucc

SEQ ID NO: 228770 - RNA, 22 nt, Human
cuccuggaccagggcuauuggg

SEQ ID NO: 228771 - RNA, 22 nt, Human
uggagcugacucacaccagcua

SEQ ID NO: 228772 - RNA, 22 nt, Human
uggugcagucauuggcccaggg

SEQ ID NO: 228773 - RNA, 22 nt, Human
aaagcauaguucaucuguccau

SEQ ID NO: 228774 - RNA, 22 nt, Human
uggcucugucaaacugcacaca

SEQ ID NO: 228775 - RNA, 23 nt, Human
ucuggaauccucccccuugguuc

SEQ ID NO: 228776 - RNA, 17 nt, Human
guguaacuaugagccau

SEQ ID NO: 228777 - RNA, 17 nt, Human
gagacagcaggagcccc

SEQ ID NO: 228778 - RNA, 23 nt, Human
aggaagagagagugccucuuucu

SEQ ID NO: 228779 - RNA, 22 nt, Human
cacagcuuagaaaagaagccau

SEQ ID NO: 228780 - RNA, 22 nt, Human
ccgccaggauauuguggcuuuu

SEQ ID NO: 228781 - RNA, 23 nt, Human
uucauucaaaaggaaaagucaug

SEQ ID NO: 228782 - RNA, 22 nt, Human
augcauuuguaaaauauaaucg

SEQ ID NO: 228783 - RNA, 22 nt, Human
cagcaggauuugaaaggaagag

SEQ ID NO: 228784 - RNA, 20 nt, Human
ucuggggaugaggucuagga

SEQ ID NO: 228785 - RNA, 22 nt, Human
aaaggcuggggacugaggaagg

SEQ ID NO: 228786 - RNA, 22 nt, Human
auuugccuuuuaaacucacaau

SEQ ID NO: 228787 - RNA, 22 nt, Human
cagucuggcacagcacacugaa

SEQ ID NO: 228788 - RNA, 22 nt, Human
cagagccacugcauuuuacagc

SEQ ID NO: 228789 - RNA, 22 nt, Human
ccaggaagcugucugauaugaa

SEQ ID NO: 228790 - RNA, 22 nt, Human
acagagacugggagcaagaggc

SEQ ID NO: 228791 - RNA, 18 nt, Human
uaugugucuguuacaacu

SEQ ID NO: 228792 - RNA, 22 nt, Human
uacuaucucuucuaacuucaga

SEQ ID NO: 228793 - RNA, 22 nt, Human
gugcagugacccuggagagcug

SEQ ID NO: 228794 - RNA, 22 nt, Human
acauuguaguuguucugcagca

SEQ ID NO: 228795 - RNA, 22 nt, Human
gcugugcauaaguauaauaaac

SEQ ID NO: 228796 - RNA, 19 nt, Human
ggaagcccuaaaggaccua

SEQ ID NO: 228797 - RNA, 22 nt, Human
uaaagcauaaugaauaucuaga

SEQ ID NO: 228798 - RNA, 22 nt, Human
cccaggcaggagugugguggcu

SEQ ID NO: 228799 - RNA, 23 nt, Human
agaccugcaucugauaggcccug

SEQ ID NO: 228800 - RNA, 22 nt, Human
acaugagauuagcucacccacu

SEQ ID NO: 228801 - RNA, 22 nt, Human
uuucaaaagcguacguagugaa

SEQ ID NO: 228802 - RNA, 22 nt, Human
uggcuucucgccugucaucccg

SEQ ID NO: 228803 - RNA, 22 nt, Human
ccaagcugagcaccaucugauc

SEQ ID NO: 228804 - RNA, 22 nt, Human
gccucagagggcagggugguga

SEQ ID NO: 228805 - RNA, 22 nt, Human
uuugcaaauuucgucuccucag

SEQ ID NO: 228806 - RNA, 22 nt, Human
guuuauuaacugucaagugauu

SEQ ID NO: 228807 - RNA, 22 nt, Human
cagcaggggaacugugggccag

SEQ ID NO: 228808 - RNA, 22 nt, Human
agagcuggaagcugcucuuaga

SEQ ID NO: 228809 - RNA, 22 nt, Human
ugaggccuggacucugcaugga

SEQ ID NO: 228810 - RNA, 22 nt, Human
cagcucuccacccuccugguuc

SEQ ID NO: 228811 - RNA, 22 nt, Human
ugaccuauuagauuuccuugcc

SEQ ID NO: 228812 - RNA, 22 nt, Human
caaaguaugaaccaguuucucu

SEQ ID NO: 228813 - RNA, 22 nt, Human
uccuugggguaacuccagccug

SEQ ID NO: 228814 - RNA, 22 nt, Human
agcaggagcugugggaagaugg

SEQ ID NO: 228815 - RNA, 21 nt, Human
caaauacuuagaaacuuaaga

SEQ ID NO: 228816 - RNA, 22 nt, Human
uacuucuguaagugcgccaagg

SEQ ID NO: 228817 - RNA, 23 nt, Human
ccacuagcaccuguucaacuucu

SEQ ID NO: 228818 - RNA, 22 nt, Human
auguccaggaucuauccccaga

SEQ ID NO: 228819 - RNA, 22 nt, Human
gucccugguuugcccaggacca

SEQ ID NO: 228820 - RNA, 22 nt, Human
ccaggacccugcaaacccuguu

SEQ ID NO: 228821 - RNA, 22 nt, Human
ccacauucucauguaauccuuu

SEQ ID NO: 228822 - RNA, 18 nt, Human
acacaggcugacagcacc

SEQ ID NO: 228823 - RNA, 22 nt, Human
gaugccucuuuuggcugaauua

SEQ ID NO: 228824 - RNA, 23 nt, Human
acugccugugccgaucucucuca

SEQ ID NO: 228825 - RNA, 22 nt, Human
gaagggagaagguugggugacg

SEQ ID NO: 228826 - RNA, 22 nt, Human
gaagccugggagggcugggcua

SEQ ID NO: 228827 - RNA, 22 nt, Human
gaacacagucaagggcugcugu

SEQ ID NO: 228828 - RNA, 22 nt, Human
uucagaauguacugauagaaca

SEQ ID NO: 228829 - RNA, 22 nt, Human
gugcugugucuaucaggaauaa

SEQ ID NO: 228830 - RNA, 22 nt, Human
cuguguccaauggccuuagcag

SEQ ID NO: 228831 - RNA, 19 nt, Human
ccuccccuuggaccagcaa

SEQ ID NO: 228832 - RNA, 22 nt, Human
aggcugugcucagccaauggga

SEQ ID NO: 228833 - RNA, 22 nt, Human
ccauguuguaucucuuaucggc

SEQ ID NO: 228834 - RNA, 22 nt, Human
guaacacagaaaugaaauucca

SEQ ID NO: 228835 - RNA, 22 nt, Human
ggucuccugaggcugccacacc

SEQ ID NO: 228836 - RNA, 22 nt, Human
uuaccuguaaaacugcgauaua

SEQ ID NO: 228837 - RNA, 22 nt, Human
augguuuauaaucuagguguga

SEQ ID NO: 228838 - RNA, 22 nt, Human
ugucauuuauucucuuauucua

SEQ ID NO: 228839 - RNA, 22 nt, Human
ugauggaauggaggacaugugg

SEQ ID NO: 228840 - RNA, 22 nt, Human
uuagaguuuuuguaaguacaau

SEQ ID NO: 228841 - RNA, 22 nt, Human
agguaagguuuggaggcagugg

SEQ ID NO: 228842 - RNA, 23 nt, Human
aagaaugcuucugaagagcugcc

SEQ ID NO: 228843 - RNA, 22 nt, Human
uugaacaguccuaagagacccu

SEQ ID NO: 228844 - RNA, 22 nt, Human
cccacugcaugaguugguauua

SEQ ID NO: 228845 - RNA, 22 nt, Human
uguaaagaaagacgcagaguua

SEQ ID NO: 228846 - RNA, 22 nt, Human
acaggauuaauaaaaaauugua

SEQ ID NO: 228847 - RNA, 22 nt, Human
ugaacaugcuguugauggccug

SEQ ID NO: 228848 - RNA, 17 nt, Human
aguuggcagccguugcu

SEQ ID NO: 228849 - RNA, 22 nt, Human
acagaguaucuaucaggaguau

SEQ ID NO: 228850 - RNA, 22 nt, Human
auggccugcagugcugccacag

SEQ ID NO: 228851 - RNA, 22 nt, Human
uuuccacacucacugcacucau

SEQ ID NO: 228852 - RNA, 22 nt, Human
auggcuccagcuuggcuucacc

SEQ ID NO: 228853 - RNA, 22 nt, Human
cagaugaaguaggugacgagca

SEQ ID NO: 228854 - RNA, 22 nt, Human
uaaaguuuauuggcaccaccau

SEQ ID NO: 228855 - RNA, 22 nt, Human
aggagccauugcaggauggcag

SEQ ID NO: 228856 - RNA, 22 nt, Human
gaaggcaguaaauggcuguuuu

SEQ ID NO: 228857 - RNA, 19 nt, Human
ugguggaggccccauguuc

SEQ ID NO: 228858 - RNA, 18 nt, Human
uacagcuugaguugacug

SEQ ID NO: 228859 - RNA, 21 nt, Human
ccacaauucuaguuacauaug

SEQ ID NO: 228860 - RNA, 22 nt, Human
gcaugagacuagcucaugagca

SEQ ID NO: 228861 - RNA, 19 nt, Human
caggauuguuuaaagcuuu

SEQ ID NO: 228862 - RNA, 21 nt, Human
caaaagagacugauucuugga

SEQ ID NO: 228863 - RNA, 22 nt, Human
aguggcuguuccaggugaggac

SEQ ID NO: 228864 - RNA, 21 nt, Human
aaguccaauaccuaaggcucc

SEQ ID NO: 228865 - RNA, 22 nt, Human
acagagguuaggauggguugua

SEQ ID NO: 228866 - RNA, 22 nt, Human
cugagcugcucccgcugcagcg

SEQ ID NO: 228867 - RNA, 21 nt, Human
acagaagcggcgaguggcccc

SEQ ID NO: 228868 - RNA, 22 nt, Human
ugcaugguguaauucuaaugcu

SEQ ID NO: 228869 - RNA, 22 nt, Human
gcagagucagguccaaggacug

SEQ ID NO: 228870 - RNA, 22 nt, Human
auaaugacauucuuagacugga

SEQ ID NO: 228871 - RNA, 22 nt, Human
uguccagaucaaugcccacaug

SEQ ID NO: 228872 - RNA, 22 nt, Human
cugagcagucuagccagguguu

SEQ ID NO: 228873 - RNA, 22 nt, Human
ugcauuaagaauuucugaggau

SEQ ID NO: 228874 - RNA, 22 nt, Human
agagcuccaggguuuuguagug

SEQ ID NO: 228875 - RNA, 22 nt, Human
cccagaggcugaguugggagca

SEQ ID NO: 228876 - RNA, 22 nt, Human
agguggaguuaagugugaacug

SEQ ID NO: 228877 - RNA, 22 nt, Human
augauuuguuaacagacuuaau

SEQ ID NO: 228878 - RNA, 22 nt, Human
guaaaucagugucauuuuagaa

SEQ ID NO: 228879 - RNA, 22 nt, Human
uggcuccacaggccagggugug

SEQ ID NO: 228880 - RNA, 22 nt, Human
agguggagaagagaugggcagu

SEQ ID NO: 228881 - RNA, 22 nt, Human
ggccucugccccgcggggcucg

SEQ ID NO: 228882 - RNA, 22 nt, Human
uuuggaaaugagaagccaccuu

SEQ ID NO: 228883 - RNA, 22 nt, Human
cuggccuggcaggggaccucua

SEQ ID NO: 228884 - RNA, 22 nt, Human
cccagccuuugcuuccugguuc

SEQ ID NO: 228885 - RNA, 22 nt, Human
auggcuguguuguuccucugaa

SEQ ID NO: 228886 - RNA, 22 nt, Human
ggcagaggagcuggaaacaugg

SEQ ID NO: 228887 - RNA, 22 nt, Human
gggcagagguucaacuucaaca

SEQ ID NO: 228888 - RNA, 22 nt, Human
ucagaagguacugaagacaugg

SEQ ID NO: 228889 - RNA, 22 nt, Human
ccaggccuguguuguguggagg

SEQ ID NO: 228890 - RNA, 18 nt, Human
aguaaauguuaaauauug

SEQ ID NO: 228891 - RNA, 22 nt, Human
gugcugagugcagagugcagag

SEQ ID NO: 228892 - RNA, 19 nt, Human
ugguggaggugcaccugac

SEQ ID NO: 228893 - RNA, 18 nt, Human
gaggcacauaguuggggc

SEQ ID NO: 228894 - RNA, 22 nt, Human
gcugccgacccacagggguuaa

SEQ ID NO: 228895 - RNA, 22 nt, Human
caggcacaagaucggcuagaua

SEQ ID NO: 228896 - RNA, 22 nt, Human
agaggagguccuuuucugaugu

SEQ ID NO: 228897 - RNA, 22 nt, Human
ugucuucuaccuugacagcauu

SEQ ID NO: 228898 - RNA, 22 nt, Human
auggaggaugugcagcaugggc

SEQ ID NO: 228899 - RNA, 19 nt, Human
ugaggauugagguccagua

SEQ ID NO: 228900 - RNA, 22 nt, Human
gugggaguggagcucagcaugu

SEQ ID NO: 228901 - RNA, 22 nt, Human
gcagaggggaagcugaggaauu

SEQ ID NO: 228902 - RNA, 22 nt, Human
aaggcuuugugcugaguugucg

SEQ ID NO: 228903 - RNA, 22 nt, Human
gcugucaggaacaugccuuggu

SEQ ID NO: 228904 - RNA, 22 nt, Human
guccagaguagucgaguauucu

SEQ ID NO: 228905 - RNA, 20 nt, Human
cugggcagguguuugaucuc

SEQ ID NO: 228906 - RNA, 22 nt, Human
aaugccuuggagagccuagagg

SEQ ID NO: 228907 - RNA, 22 nt, Human
uggcugagcugcagcguggcuu

SEQ ID NO: 228908 - RNA, 22 nt, Human
ccauggccaggaaagccaaggu

SEQ ID NO: 228909 - RNA, 19 nt, Human
ucucccaugccugugucua

SEQ ID NO: 228910 - RNA, 22 nt, Human
gggcagcaggcuccacguuccu

SEQ ID NO: 228911 - RNA, 22 nt, Human
uggcacugucaccaaugcuguc

SEQ ID NO: 228912 - RNA, 22 nt, Human
uaaugccuuaugucaaauguaa

SEQ ID NO: 228913 - RNA, 22 nt, Human
aggcagagaaaaaccagauaug

SEQ ID NO: 228914 - RNA, 22 nt, Human
agggcccaccuuggugcugagg

SEQ ID NO: 228915 - RNA, 22 nt, Human
gggcagcaucaggaggggcuuu

SEQ ID NO: 228916 - RNA, 22 nt, Human
augcccucuguuucccaaggcc

SEQ ID NO: 228917 - RNA, 22 nt, Human
ggaggugacuggaucaugggca

SEQ ID NO: 228918 - RNA, 22 nt, Human
uggcugagugaacauguccauu

SEQ ID NO: 228919 - RNA, 22 nt, Human
caggcacaaugagcgccaucuu

SEQ ID NO: 228920 - RNA, 21 nt, Human
agggaaaaggcugagugaggg

SEQ ID NO: 228921 - RNA, 22 nt, Human
cuggcagcugcccgagaugccc

SEQ ID NO: 228922 - RNA, 22 nt, Human
uggcugaguuacgaacagagca

SEQ ID NO: 228923 - RNA, 22 nt, Human
acagaagugacaauuucuuggg

SEQ ID NO: 228924 - RNA, 22 nt, Human
gagguggcugcuugcugggaaa

SEQ ID NO: 228925 - RNA, 22 nt, Human
aggauaauaauaaucucguuua

SEQ ID NO: 228926 - RNA, 22 nt, Human
uggcagcauuuuuuccagaaca

SEQ ID NO: 228927 - RNA, 22 nt, Human
uuaggauuugaaaaggggcaga

SEQ ID NO: 228928 - RNA, 22 nt, Human
ggagaagggaacugaguuuuug

SEQ ID NO: 228929 - RNA, 22 nt, Human
gugagagugguuuauguccaug

SEQ ID NO: 228930 - RNA, 17 nt, Human
uggcacagaggugcuau

SEQ ID NO: 228931 - RNA, 22 nt, Human
gagcuuggugcugccuguuguc

SEQ ID NO: 228932 - RNA, 23 nt, Human
uagacugcaggcuccuugagggc

SEQ ID NO: 228933 - RNA, 22 nt, Human
acugcauuaucaccaagaugua

SEQ ID NO: 228934 - RNA, 22 nt, Human
ugcuggaguggcacuguguggc

SEQ ID NO: 228935 - RNA, 22 nt, Human
gagccacaguggauugauucca

SEQ ID NO: 228936 - RNA, 22 nt, Human
cccacugcugcucuccauggca

SEQ ID NO: 228937 - RNA, 22 nt, Human
uccacagguccucuuugcaaag

SEQ ID NO: 228938 - RNA, 22 nt, Human
ggcagaggaagcuggaaguggg

SEQ ID NO: 228939 - RNA, 22 nt, Human
ugaauaaucuuggguauuaaua

SEQ ID NO: 228940 - RNA, 22 nt, Human
guggcccaggcuuggcgcuggc

SEQ ID NO: 228941 - RNA, 22 nt, Human
ccuggauucucacuggacucca

SEQ ID NO: 228942 - RNA, 19 nt, Human
uccugcccaccagccaggg

SEQ ID NO: 228943 - RNA, 23 nt, Human
agguggagcugugcagccggggc

SEQ ID NO: 228944 - RNA, 22 nt, Human
cugaggagauccccccagaagu

SEQ ID NO: 228945 - RNA, 22 nt, Human
aaggcacuugcccagagcugca

SEQ ID NO: 228946 - RNA, 22 nt, Human
gggcacagucugcagcccccca

SEQ ID NO: 228947 - RNA, 22 nt, Human
uuugacaugugcuuauaacuuu

SEQ ID NO: 228948 - RNA, 22 nt, Human
aaaucccacucacgaguuuugc

SEQ ID NO: 228949 - RNA, 22 nt, Human
agucaggaagcuggagcugggg

SEQ ID NO: 228950 - RNA, 22 nt, Human
uacugcauuaucaaggggaagg

SEQ ID NO: 228951 - RNA, 22 nt, Human
cugagggccuucuaugcugagc

SEQ ID NO: 228952 - RNA, 22 nt, Human
uggccuuggcagugagaagagu

SEQ ID NO: 228953 - RNA, 22 nt, Human
cagaccuggaaaacaggcuugc

SEQ ID NO: 228954 - RNA, 22 nt, Human
acuggcaguagagggagcgcau

SEQ ID NO: 228955 - RNA, 22 nt, Human
caaagaagagauuuacagagcu

SEQ ID NO: 228956 - RNA, 22 nt, Human
ggauugaagggaaccucagaau

SEQ ID NO: 228957 - RNA, 22 nt, Human
ugcaaauauuccaugcuguuca

SEQ ID NO: 228958 - RNA, 22 nt, Human
uggcagcagggccccuggagga

SEQ ID NO: 228959 - RNA, 22 nt, Human
uggcagugugggaggaagguac

SEQ ID NO: 228960 - RNA, 20 nt, Human
ugugugaauuagggcauguu

SEQ ID NO: 228961 - RNA, 22 nt, Human
augaacaguacaaagcacagac

SEQ ID NO: 228962 - RNA, 22 nt, Human
ccugaguucuuauuuccaguca

SEQ ID NO: 228963 - RNA, 22 nt, Human
ugauuugaaaccuuuggcaaga

SEQ ID NO: 228964 - RNA, 22 nt, Human
cuugaaguggagcuuuugaaau

SEQ ID NO: 228965 - RNA, 22 nt, Human
uggcacaguuaaaguuguagaa

SEQ ID NO: 228966 - RNA, 22 nt, Human
uggaaagaggaagugcccagca

SEQ ID NO: 228967 - RNA, 22 nt, Human
aaaugccucauuuucucucacu

SEQ ID NO: 228968 - RNA, 22 nt, Human
uggccugauuuugcuaagagaa

SEQ ID NO: 228969 - RNA, 22 nt, Human
uuccugagucgccgagucuaug

SEQ ID NO: 228970 - RNA, 22 nt, Human
gcagauggauguggacggcgcc

SEQ ID NO: 228971 - RNA, 22 nt, Human
uugaauaguuuuggauagcaua

SEQ ID NO: 228972 - RNA, 22 nt, Human
aaggcacauauuuuagagucac

SEQ ID NO: 228973 - RNA, 22 nt, Human
uacagccuggcacuacccuggg

SEQ ID NO: 228974 - RNA, 22 nt, Human
ggggugaagguuuucugaaagc

SEQ ID NO: 228975 - RNA, 17 nt, Human
gagguaggaagugaguc

SEQ ID NO: 228976 - RNA, 22 nt, Human
ugccuguguccccuucuuggca

SEQ ID NO: 228977 - RNA, 22 nt, Human
gcaaggagcaccuuucuggaac

SEQ ID NO: 228978 - RNA, 22 nt, Human
uugaacaguuuugucagguuca

SEQ ID NO: 228979 - RNA, 22 nt, Human
agaaggcaucagaaguguguag

SEQ ID NO: 228980 - RNA, 22 nt, Human
augcccugggagugcuguacca

SEQ ID NO: 228981 - RNA, 22 nt, Human
aagaggaggacgguucccagaa

SEQ ID NO: 228982 - RNA, 22 nt, Human
agguuuggguucauugcuggcu

SEQ ID NO: 228983 - RNA, 21 nt, Human
agaaggcaaaagcagacaucu

SEQ ID NO: 228984 - RNA, 20 nt, Human
acagaugaggaugcggaggc

SEQ ID NO: 228985 - RNA, 22 nt, Human
uaaaugaaaggguuuaauuuau

SEQ ID NO: 228986 - RNA, 21 nt, Human
agaugcaguuugcaggugggu

SEQ ID NO: 228987 - RNA, 22 nt, Human
guugcauuaaucugcucaggcu

SEQ ID NO: 228988 - RNA, 22 nt, Human
agguggcuaugaggaugcaguc

SEQ ID NO: 228989 - RNA, 20 nt, Human
ugagccugcuguaggaggcc

SEQ ID NO: 228990 - RNA, 22 nt, Human
cggcagagcccugagucagccu

SEQ ID NO: 228991 - RNA, 17 nt, Human
ugagcaguagaagaugc

SEQ ID NO: 228992 - RNA, 21 nt, Human
cccagaaguuccauggggggc

SEQ ID NO: 228993 - RNA, 22 nt, Human
gucaggaugagggaugaggagu

SEQ ID NO: 228994 - RNA, 19 nt, Human
uggcagcauugguaccuug

SEQ ID NO: 228995 - RNA, 22 nt, Human
gggcagcaaaucugagucuggu

SEQ ID NO: 228996 - RNA, 22 nt, Human
cuugucugcuauaaaaauccag

SEQ ID NO: 228997 - RNA, 16 nt, Human
ccagaugaaugggagu

SEQ ID NO: 228998 - RNA, 21 nt, Human
ucccacuggcccagggcucca

SEQ ID NO: 228999 - RNA, 22 nt, Human
gcacugagcuuuggaggagcag

SEQ ID NO: 229000 - RNA, 22 nt, Human
agagcagaggcauggccguggg

SEQ ID NO: 229001 - RNA, 22 nt, Human
cugagauggaguuucgcucuuc

SEQ ID NO: 229002 - RNA, 22 nt, Human
uggccagucuuagcugugccug

SEQ ID NO: 229003 - RNA, 22 nt, Human
gagccugagcaaugugauguuu

SEQ ID NO: 229004 - RNA, 20 nt, Human
ggccugagcauggcuggcag

SEQ ID NO: 229005 - RNA, 22 nt, Human
uggcuccaggggacacgcagua

SEQ ID NO: 229006 - RNA, 22 nt, Human
uaaugccuuucuguacuauaug

SEQ ID NO: 229007 - RNA, 22 nt, Human
ggcacagcugaugcagacacac

SEQ ID NO: 229008 - RNA, 22 nt, Human
aggauugugccuccagucagaa

SEQ ID NO: 229009 - RNA, 20 nt, Human
gaacagucuucugagccaca

SEQ ID NO: 229010 - RNA, 22 nt, Human
aggcagaugggagcuggaaguu

SEQ ID NO: 229011 - RNA, 22 nt, Human
cucagaggggaugcuuggagaa

SEQ ID NO: 229012 - RNA, 22 nt, Human
uuaccugagcggauuuguugca

SEQ ID NO: 229013 - RNA, 19 nt, Human
cgcacagccugccaggcgc

SEQ ID NO: 229014 - RNA, 22 nt, Hepatitis C virus
caaugaggguugcgggugggcg

SEQ ID NO: 229015 - RNA, 23 nt, Hepatitis C virus
gcagcccugccuccucuggacag

SEQ ID NO: 229016 - RNA, 22 nt, Hepatitis C virus
gccgggagaagguuggcgagag

SEQ ID NO: 229017 - RNA, 22 nt, Hepatitis C virus
aacuguagucucggcgggcgug

SEQ ID NO: 229018 - RNA, 22 nt, Hepatitis C virus
aguaccucuucaacugggcagu

SEQ ID NO: 229019 - RNA, 22 nt, Hepatitis C virus
ucgaucugcuugucgggagcgc

SEQ ID NO: 229020 - RNA, 22 nt, Hepatitis C virus
ugucuccccguggcucucggcc

SEQ ID NO: 229021 - RNA, 22 nt, Hepatitis C virus
uccuccugcuccugcuggcguu

SEQ ID NO: 229022 - RNA, 22 nt, Hepatitis C virus
ucuguccagaggaggcagggcu

SEQ ID NO: 229023 - RNA, 22 nt, Hepatitis C virus
uggaccaagaccuugugggcug

SEQ ID NO: 229024 - RNA, 22 nt, Hepatitis C virus
uuguucuaucuaucccggccau

SEQ ID NO: 229025 - RNA, 22 nt, Hepatitis C virus
gcgcucccgacaagcagaucga

SEQ ID NO: 229026 - RNA, 22 nt, Hepatitis C virus
gcacacuccggggugugucccu

SEQ ID NO: 229027 - RNA, 22 nt, Hepatitis C virus
acgacugguuccacagccacgg

SEQ ID NO: 229028 - RNA, 22 nt, Hepatitis C virus
cacccaaggguccugucaucca

SEQ ID NO: 229029 - RNA, 22 nt, Hepatitis C virus
cagcccgcgucauagcacucac

SEQ ID NO: 229030 - RNA, 22 nt, Hepatitis C virus
acuccccacaacgcagcuucga

SEQ ID NO: 229031 - RNA, 22 nt, Hepatitis C virus
aggccgcuuccguuggcauaac

SEQ ID NO: 229032 - RNA, 22 nt, Human
acaguuuaggaugagagaacac

SEQ ID NO: 229033 - RNA, 22 nt, Human
acuuuggaggguguuguagaug

SEQ ID NO: 229034 - RNA, 22 nt, Human
acuggcugaaguuuacuuuuug

SEQ ID NO: 229035 - RNA, 22 nt, Human
gcagucaguaaggcagccagaa

SEQ ID NO: 229036 - RNA, 22 nt, Human
ugggguugaagaaaggaucuag

SEQ ID NO: 229037 - RNA, 22 nt, Human
cagggccuuauccugccauuga

SEQ ID NO: 229038 - RNA, 22 nt, Human
aaugagauggaauucccgccua

SEQ ID NO: 229039 - RNA, 22 nt, Human
uucuaagucugcugucuucauc

SEQ ID NO: 229040 - RNA, 22 nt, Human
agugagggacuagugcugggga

SEQ ID NO: 229041 - RNA, 22 nt, Human
uauuuccaagcugaauccaaug

SEQ ID NO: 229042 - RNA, 17 nt, Human
cugagccccgggcagcu

SEQ ID NO: 229043 - RNA, 22 nt, Human
uccccucucugcgcucccaggu

SEQ ID NO: 229044 - RNA, 22 nt, Human
uaccucaaguuccaggaaagcg

SEQ ID NO: 229045 - RNA, 22 nt, Human
gucacuuuacacuccuacuaaa

SEQ ID NO: 229046 - RNA, 22 nt, Human
cugccaggcacugggcucugca

SEQ ID NO: 229047 - RNA, 22 nt, Human
ccuagggucaguguggcaggag

SEQ ID NO: 229048 - RNA, 22 nt, Human
agcuggccagcaccuccagguc

SEQ ID NO: 229049 - RNA, 22 nt, Human
ucuuuggacuuuccaauuuguu

SEQ ID NO: 229050 - RNA, 22 nt, Human
aauuuuauuagaaggcaagggg

SEQ ID NO: 229051 - RNA, 22 nt, Human
ugccuguguauuuccggccugc

SEQ ID NO: 229052 - RNA, 22 nt, Human
ugccugucuucaggagugucac

SEQ ID NO: 229053 - RNA, 22 nt, Human
uuugggcaguagauguaucacu

SEQ ID NO: 229054 - RNA, 22 nt, Human
ucauuuaauaauuuuugaguag

SEQ ID NO: 229055 - RNA, 22 nt, Human
acaaauguggacauggauaaug

SEQ ID NO: 229056 - RNA, 22 nt, Human
cuggugcaggaaggagcuggca

SEQ ID NO: 229057 - RNA, 22 nt, Human
uucuuauagaagcaaccauugu

SEQ ID NO: 229058 - RNA, 22 nt, Human
caaagaagagauuuacagagcu

SEQ ID NO: 229059 - RNA, 22 nt, Human
aguguucuuguuucuaagcaaa

SEQ ID NO: 229060 - RNA, 22 nt, Human
ucuugcauacacuauauguaca

SEQ ID NO: 229061 - RNA, 22 nt, Human
gaacagaguugaaacaaggcug

SEQ ID NO: 229062 - RNA, 22 nt, Human
ugacuuuaaaauaacaaguuua

SEQ ID NO: 229063 - RNA, 21 nt, Human
ccagccucagaucagggagcu

SEQ ID NO: 229064 - RNA, 22 nt, Human
auauacaggugguauguguaaa

SEQ ID NO: 229065 - RNA, 22 nt, Human
cagccacugaacuccuggcuau

SEQ ID NO: 229066 - RNA, 22 nt, Human
uagcaaagaagauauuauugca

SEQ ID NO: 229067 - RNA, 22 nt, Human
agaaauuccuaagguacacaag

SEQ ID NO: 229068 - RNA, 22 nt, Human
gauuuacagcuauacccaaugg

SEQ ID NO: 229069 - RNA, 22 nt, Human
ggccucagugggccgcugcagg

SEQ ID NO: 229070 - RNA, 22 nt, Human
ugcugcaggcagccccucuacu

SEQ ID NO: 229071 - RNA, 21 nt, Human
agggccucuguguacuggggg

SEQ ID NO: 229072 - RNA, 17 nt, Human
acaugggcugagacucc

SEQ ID NO: 229073 - RNA, 22 nt, Human
cagggcagccaggccccguggg

SEQ ID NO: 229074 - RNA, 22 nt, Human
auuuacaguuuagcauuucaag

SEQ ID NO: 229075 - RNA, 22 nt, Human
uccucagucucucaaaugaggc

SEQ ID NO: 229076 - RNA, 22 nt, Human
cugcaugucacucugcuguccc

SEQ ID NO: 229077 - RNA, 22 nt, Human
gccuaauaugcaaaauugauac

SEQ ID NO: 229078 - RNA, 22 nt, Human
uuccuguuagccauuauuagcu

SEQ ID NO: 229079 - RNA, 22 nt, Human
aacaacaacggagaaaggguug

SEQ ID NO: 229080 - RNA, 22 nt, Human
guggcagugggaugcuaucagg

SEQ ID NO: 229081 - RNA, 22 nt, Human
uggccacaugcgucugugaggc

SEQ ID NO: 229082 - RNA, 22 nt, Human
ccugccaggcuuugggcuucug

SEQ ID NO: 229083 - RNA, 22 nt, Human
auguucuuuggaauuuaugaaa

SEQ ID NO: 229084 - RNA, 22 nt, Human
aaguaaucuggaauuugguuuu

SEQ ID NO: 229085 - RNA, 22 nt, Human
cucagcaacagcgacuuaaggg

SEQ ID NO: 229086 - RNA, 22 nt, Human
agacaggcagggcauggaaaaa

SEQ ID NO: 229087 - RNA, 22 nt, Human
agagaguuguaccacacucaua

SEQ ID NO: 229088 - RNA, 22 nt, Human
aucugcugcccagccacuugcu

SEQ ID NO: 229089 - RNA, 22 nt, Human
acaucuucacugguuucuggaa

SEQ ID NO: 229090 - RNA, 18 nt, Human
ucugaaggaaugauucca

SEQ ID NO: 229091 - RNA, 22 nt, Human
ugggagaagcagugggacagua

SEQ ID NO: 229092 - RNA, 22 nt, Human
uggaagggaacagguggguguu

SEQ ID NO: 229093 - RNA, 22 nt, Human
ggcuggacuuuuugcaggucau

SEQ ID NO: 229094 - RNA, 22 nt, Human
agccaacacauguaaaugcacc

SEQ ID NO: 229095 - RNA, 22 nt, Human
uuaacacuugaacucuacaugu

SEQ ID NO: 229096 - RNA, 21 nt, Human
uucuucuuggacuguuuuggc

SEQ ID NO: 229097 - RNA, 22 nt, Human
acauucaaaauuagguuaguug

SEQ ID NO: 229098 - RNA, 22 nt, Human
cccaucaggaacccaggagccc

SEQ ID NO: 229099 - RNA, 22 nt, Human
uauacacauauacguuugugug

SEQ ID NO: 229100 - RNA, 22 nt, Human
uccaggagagguguggggacug

SEQ ID NO: 229101 - RNA, 22 nt, Human
uuucugaaaugcuggcuuugga

SEQ ID NO: 229102 - RNA, 22 nt, Human
ucauggcuuuuauuauguugag

SEQ ID NO: 229103 - RNA, 22 nt, Human
gccaaaguaccuagcccucugc

SEQ ID NO: 229104 - RNA, 22 nt, Human
ccuccagggccccucucacugg

SEQ ID NO: 229105 - RNA, 22 nt, Human
gugcaaaaguaauugagguuuu

SEQ ID NO: 229106 - RNA, 22 nt, Human
ucuccccucccuggaccagugc

SEQ ID NO: 229107 - RNA, 22 nt, Human
gcuuuagaaauguaggagauac

SEQ ID NO: 229108 - RNA, 22 nt, Human
uccuucuuucaccucauaguca

SEQ ID NO: 229109 - RNA, 22 nt, Human
auguuuucuagaguuuaaaauc

SEQ ID NO: 229110 - RNA, 22 nt, Human
cauuuuguagcaaugacuguug

SEQ ID NO: 229111 - RNA, 22 nt, Human
ucuguaucuaauuuuacaguag

SEQ ID NO: 229112 - RNA, 22 nt, Human
auuuauaacgugcagccagggu

SEQ ID NO: 229113 - RNA, 22 nt, Human
guaauagaacacucagcaugga

SEQ ID NO: 229114 - RNA, 22 nt, Human
uggggcuggcuauugucucccu

SEQ ID NO: 229115 - RNA, 22 nt, Human
uccagccaagccuugguagcug

SEQ ID NO: 229116 - RNA, 22 nt, Human
gucuugaucuccugaccuugug

SEQ ID NO: 229117 - RNA, 22 nt, Human
uuaggaaacgcugcuauugacu

SEQ ID NO: 229118 - RNA, 22 nt, Human
acuaaaaacuacugccaauagc

SEQ ID NO: 229119 - RNA, 22 nt, Human
ccagcucugauuuugaccucca

SEQ ID NO: 229120 - RNA, 22 nt, Human
ucacaugcccuguauuuaccag

SEQ ID NO: 229121 - RNA, 22 nt, Human
acaggucagauaaaggcuggug

SEQ ID NO: 229122 - RNA, 22 nt, Human
gcagaaacuuggagaagccagg

SEQ ID NO: 229123 - RNA, 22 nt, Human
cagauucuucauugccccauuc

SEQ ID NO: 229124 - RNA, 22 nt, Human
gugcccugagcuuaugcauucu

SEQ ID NO: 229125 - RNA, 22 nt, Human
uuaaaagaauccuguuauccuc

SEQ ID NO: 229126 - RNA, 22 nt, Human
caaaugcaugagaaauaagagg

SEQ ID NO: 229127 - RNA, 22 nt, Human
cccagggauguggcagauguua

SEQ ID NO: 229128 - RNA, 22 nt, Human
ugggagcaguugugaagcucag

SEQ ID NO: 229129 - RNA, 22 nt, Human
uaagagcagaacagcaacauau

SEQ ID NO: 229130 - RNA, 22 nt, Human
aagcaggcaagguuguggggca

SEQ ID NO: 229131 - RNA, 22 nt, Human
gcacagugaugucagaauugga

SEQ ID NO: 229132 - RNA, 22 nt, Human
gagccaaggguugccauggaga

SEQ ID NO: 229133 - RNA, 22 nt, Human
uuuggaaaguugucacuuuaga

SEQ ID NO: 229134 - RNA, 22 nt, Human
aucuccagguugugccugcguc

SEQ ID NO: 229135 - RNA, 22 nt, Human
auguccagaggugagucagagc

SEQ ID NO: 229136 - RNA, 22 nt, Human
ccccaaggugcucacugucugg

SEQ ID NO: 229137 - RNA, 22 nt, Human
uccuuaaaggacuagaagucaa

SEQ ID NO: 229138 - RNA, 22 nt, Human
aggccugggacgggagccguga

SEQ ID NO: 229139 - RNA, 22 nt, Human
ucaggcugcccguucagggcuc

SEQ ID NO: 229140 - RNA, 22 nt, Human
gcagguguggguggcugccagg

SEQ ID NO: 229141 - RNA, 22 nt, Human
uacuucaaacaaugguacaaac

SEQ ID NO: 229142 - RNA, 22 nt, Human
gcugcucuuuucagagaugaga

SEQ ID NO: 229143 - RNA, 22 nt, Human
ccagggcccacggccagaauag

SEQ ID NO: 229144 - RNA, 22 nt, Human
uugaggcugcacaguacaggcu

SEQ ID NO: 229145 - RNA, 22 nt, Human
aaagaacuuauccuagaauuug

SEQ ID NO: 229146 - RNA, 22 nt, Human
guagaaauuccauuuacuuuga

SEQ ID NO: 229147 - RNA, 22 nt, Human
ugcugaggcaguccuaacagga

SEQ ID NO: 229148 - RNA, 22 nt, Human
ugagucagugacaugaacuugu

SEQ ID NO: 229149 - RNA, 22 nt, Human
ugaggccugaagccuggagccu

SEQ ID NO: 229150 - RNA, 22 nt, Human
uugcaaaugaccauugccacau

SEQ ID NO: 229151 - RNA, 22 nt, Human
ugcagggcaucuuugaagugug

SEQ ID NO: 229152 - RNA, 22 nt, Human
ccuuuguucauugccuucaguc

SEQ ID NO: 229153 - RNA, 22 nt, Human
gggugggacucuuuggccugag

SEQ ID NO: 229154 - RNA, 18 nt, Human
gcagugcaggaagaagag

SEQ ID NO: 229155 - RNA, 21 nt, Human
cggcucagugccugcuccuuc

SEQ ID NO: 229156 - RNA, 22 nt, Human
gaagucuuggcugaaaacccuc

SEQ ID NO: 229157 - RNA, 22 nt, Human
uguacaaucugaugauguaugg

SEQ ID NO: 229158 - RNA, 22 nt, Human
accacugucuacacauugacuc

SEQ ID NO: 229159 - RNA, 22 nt, Human
ggagcuggcagcgcaacccaga

SEQ ID NO: 229160 - RNA, 22 nt, Human
acugaauaauggucugugaucu

SEQ ID NO: 229161 - RNA, 22 nt, Human
aaggccaguggauaaaaccucu

SEQ ID NO: 229162 - RNA, 22 nt, Human
ggcucugcugcacccuuggcuc

SEQ ID NO: 229163 - RNA, 19 nt, Human
gcuugggagagggagcuaa

SEQ ID NO: 229164 - RNA, 22 nt, Human
uggagagguuuaaacaaaaguu

SEQ ID NO: 229165 - RNA, 22 nt, Human
ucacacauguaagggcuuugga

SEQ ID NO: 229166 - RNA, 22 nt, Human
uguguucaguaugacauucaca

SEQ ID NO: 229167 - RNA, 22 nt, Human
auccaaagaaugcuuagaccug

SEQ ID NO: 229168 - RNA, 22 nt, Human
ccugagcugcggggcagugcuc

SEQ ID NO: 229169 - RNA, 22 nt, Human
acauagaucugugauucauucu

SEQ ID NO: 229170 - RNA, 22 nt, Human
uaccagccuuuuaacaugggcc

SEQ ID NO: 229171 - RNA, 22 nt, Human
caccagcagaagacugagggug

SEQ ID NO: 229172 - RNA, 22 nt, Human
uugaggagcaggaugggaggcu

SEQ ID NO: 229173 - RNA, 22 nt, Human
cucugagcagaggccguggcua

SEQ ID NO: 229174 - RNA, 22 nt, Human
cugaggcaucauggagaacagu

SEQ ID NO: 229175 - RNA, 22 nt, Human
cugcguguuugcacccugucug

SEQ ID NO: 229176 - RNA, 22 nt, Human
ucuuuagagcucagaaauacag

SEQ ID NO: 229177 - RNA, 22 nt, Human
ugacauguccaggugguccugu

SEQ ID NO: 229178 - RNA, 22 nt, Human
uuucuuguaagauguuuauuaa

SEQ ID NO: 229179 - RNA, 22 nt, Human
ugguuccaguuuucaauagagc

SEQ ID NO: 229180 - RNA, 22 nt, Human
gugccagagaugacaggccugc

SEQ ID NO: 229181 - RNA, 22 nt, Human
aaugauacauauguaucguuag

SEQ ID NO: 229182 - RNA, 19 nt, Human
ucaacaguggugcugugga

SEQ ID NO: 229183 - RNA, 22 nt, Human
aggcaggauugcugacaacaau

SEQ ID NO: 229184 - RNA, 22 nt, Human
aggcucugugcagccugcaucu

SEQ ID NO: 229185 - RNA, 22 nt, Human
uguaauggagcuuagaguuauc

SEQ ID NO: 229186 - RNA, 22 nt, Human
guggccuggauagacuccaucu

SEQ ID NO: 229187 - RNA, 22 nt, Human
cugggcagccucacacaauguu

SEQ ID NO: 229188 - RNA, 22 nt, Human
gagggcugugaaggagcggguu

SEQ ID NO: 229189 - RNA, 22 nt, Human
guuccucauccagucaugacua

SEQ ID NO: 229190 - RNA, 22 nt, Human
uauugucuguccgggucaaagc

SEQ ID NO: 229191 - RNA, 22 nt, Human
ccacaaaacugugugucaaaga

SEQ ID NO: 229192 - RNA, 22 nt, Human
aaacuugaggcaaugaaggugu

SEQ ID NO: 229193 - RNA, 22 nt, Human
ucuucuucccaucccucaaaug

SEQ ID NO: 229194 - RNA, 22 nt, Human
ccuggguccaauucuggcuugu

SEQ ID NO: 229195 - RNA, 22 nt, Human
aggcugaggcggguagaucacc

SEQ ID NO: 229196 - RNA, 22 nt, Human
cugauccagagccaaccaaggc

SEQ ID NO: 229197 - RNA, 22 nt, Human
uccuuggcacacucggaucuga

SEQ ID NO: 229198 - RNA, 22 nt, Human
cccaggagauaacguucccaag

SEQ ID NO: 229199 - RNA, 22 nt, Human
uuuaaacaaauaggauugccua

SEQ ID NO: 229200 - RNA, 22 nt, Human
uccucagacacccugcuggcuu

SEQ ID NO: 229201 - RNA, 19 nt, Human
auucucugguuugcuggcu

SEQ ID NO: 229202 - RNA, 22 nt, Human
uucagaaagguuaaucuggauu

SEQ ID NO: 229203 - RNA, 19 nt, Human
ucucagaauuggcaaucau

SEQ ID NO: 229204 - RNA, 22 nt, Human
gugagcuggaauaguggagaaa

SEQ ID NO: 229205 - RNA, 22 nt, Human
ggccugugcacaugugcaggaa

SEQ ID NO: 229206 - RNA, 22 nt, Human
gggcacagagggucuugaagaa

SEQ ID NO: 229207 - RNA, 21 nt, Human
ugaggaugugcagcagcagga

SEQ ID NO: 229208 - RNA, 22 nt, Human
uguuuuagcugacacauggagc

SEQ ID NO: 229209 - RNA, 22 nt, Human
cccagccucuggauucugcccu

SEQ ID NO: 229210 - RNA, 22 nt, Human
uuuuugcuaauccccagccacu

SEQ ID NO: 229211 - RNA, 22 nt, Human
ugagcuggcacuuuuccuggga

SEQ ID NO: 229212 - RNA, 22 nt, Human
uuggcaaaauuuaaagaaguga

SEQ ID NO: 229213 - RNA, 22 nt, Human
gcaucucuacaacgaagacagu

SEQ ID NO: 229214 - RNA, 22 nt, Human
ugaguucuccaggaagcagacu

SEQ ID NO: 229215 - RNA, 19 nt, Human
acucugaggcugagacaag

SEQ ID NO: 229216 - RNA, 22 nt, Human
aagaaauuaaugugccauuacu

SEQ ID NO: 229217 - RNA, 22 nt, Human
ucaaaguaagaauuuauuacaa

SEQ ID NO: 229218 - RNA, 22 nt, Human
uuuuguguccuucacaucaugu

SEQ ID NO: 229219 - RNA, 22 nt, Human
uuauugcuauggugagagggau

SEQ ID NO: 229220 - RNA, 22 nt, Human
uuucacagagaaauauaacagg

SEQ ID NO: 229221 - RNA, 22 nt, Human
acugucaucuuguaagcaaugu

SEQ ID NO: 229222 - RNA, 22 nt, Human
gucuggccauuugcccauugug

SEQ ID NO: 229223 - RNA, 19 nt, Human
agaaggcuccuguuggaga

SEQ ID NO: 229224 - RNA, 22 nt, Human
gagcuggugugugcccgagcac

SEQ ID NO: 229225 - RNA, 23 nt, Human
aaacaugcagcacaugaaugcua

SEQ ID NO: 229226 - RNA, 22 nt, Human
aaaucagugcucauuugaaagg

SEQ ID NO: 229227 - RNA, 22 nt, Human
ucugaaggcauccucacugcaa

SEQ ID NO: 229228 - RNA, 22 nt, Human
cccucuccuggcugcauggagc

SEQ ID NO: 229229 - RNA, 22 nt, Human
acacagaugcauuacacaucua

SEQ ID NO: 229230 - RNA, 22 nt, Human
uuauuauuuuguguacagcaaa

SEQ ID NO: 229231 - RNA, 22 nt, Human
ucucagaguuuagagcugagcc

SEQ ID NO: 229232 - RNA, 22 nt, Human
auuuccuugcaaguuucuguaa

SEQ ID NO: 229233 - RNA, 22 nt, Human
cuggugcaagauucccugcuuc

SEQ ID NO: 229234 - RNA, 22 nt, Human
agguggcagcagaaucagggag

SEQ ID NO: 229235 - RNA, 22 nt, Human
aaaacacaagaagcaggguaca

SEQ ID NO: 229236 - RNA, 18 nt, Human
gggaagaggaucuggccc

SEQ ID NO: 229237 - RNA, 22 nt, Human
gagcucaguguagucauggcuu

SEQ ID NO: 229238 - RNA, 22 nt, Human
augauauagagaguagauuaaa

SEQ ID NO: 229239 - RNA, 22 nt, Human
acuuggauauguucacuagacc

SEQ ID NO: 229240 - RNA, 22 nt, Human
uuuuccuaguaggccuauuaga

SEQ ID NO: 229241 - RNA, 22 nt, Human
uuggaauucagcuugcuuauaa

SEQ ID NO: 229242 - RNA, 22 nt, Human
ugucaaagacagaaggaaaugg

SEQ ID NO: 229243 - RNA, 22 nt, Human
auucagcauucauuaugcgcca

SEQ ID NO: 229244 - RNA, 22 nt, Human
cacuugaaaguaaugguugugc

SEQ ID NO: 229245 - RNA, 22 nt, Human
uuuccuccuagccuccagccgc

SEQ ID NO: 229246 - RNA, 22 nt, Human
gcgaggcugggcccugcaggcg

SEQ ID NO: 229247 - RNA, 23 nt, Human
acagagguccaaacaguauaagc

SEQ ID NO: 229248 - RNA, 22 nt, Human
cacaugaauucacauguauuuu

SEQ ID NO: 229249 - RNA, 22 nt, Human
uggaaacuagagaguuuguauu

SEQ ID NO: 229250 - RNA, 22 nt, Human
uuauauaacucaggugggcuca

SEQ ID NO: 229251 - RNA, 22 nt, Human
ugcuccagcaacaggcuuagcu

SEQ ID NO: 229252 - RNA, 22 nt, Human
uccacaguuuugccacuagcug

SEQ ID NO: 229253 - RNA, 22 nt, Human
uuguucaugguuguaaguuuga

SEQ ID NO: 229254 - RNA, 22 nt, Human
gcuaauucacaguaggaaauuu

SEQ ID NO: 229255 - RNA, 22 nt, Human
acuuuugaagaauuaugcaaaa

SEQ ID NO: 229256 - RNA, 22 nt, Human
auuagcuuuauuugaaauagga

SEQ ID NO: 229257 - RNA, 22 nt, Human
uauucauguguuggaaaggaac

SEQ ID NO: 229258 - RNA, 22 nt, Human
ugugccugucccgcauucuggu

SEQ ID NO: 229259 - RNA, 22 nt, Human
cauuuguauguuccuccuuagg

SEQ ID NO: 229260 - RNA, 22 nt, Human
uccagccaagggagguuacuag

SEQ ID NO: 229261 - RNA, 22 nt, Human
uuuuauguuccugaagcuaucu

SEQ ID NO: 229262 - RNA, 22 nt, Human
agcauaaguugguacagccacu

SEQ ID NO: 229263 - RNA, 23 nt, Human
ggcuggugcccuuggccagucgg

SEQ ID NO: 229264 - RNA, 22 nt, Human
ugcaaauguguggugaggcauu

SEQ ID NO: 229265 - RNA, 22 nt, Human
ugugcuuucaaaguuaaguaaa

SEQ ID NO: 229266 - RNA, 22 nt, Human
uacacaguauaugggaucacag

SEQ ID NO: 229267 - RNA, 22 nt, Human
agcccuuaguacauuucucaag

SEQ ID NO: 229268 - RNA, 22 nt, Human
aaacacugaaaauuuuggucau

SEQ ID NO: 229269 - RNA, 18 nt, Human
ccaggccaugaaccucug

SEQ ID NO: 229270 - RNA, 22 nt, Human
cuucaagaagacagcagagcau

SEQ ID NO: 229271 - RNA, 22 nt, Human
uggcagauguauaucacagcuu

SEQ ID NO: 229272 - RNA, 22 nt, Human
ucacaggcucuccaccaugagg

SEQ ID NO: 229273 - RNA, 22 nt, Human
ugggggcugggaugucacuuuc

SEQ ID NO: 229274 - RNA, 22 nt, Human
caaggcauuucgcuuagagaga

SEQ ID NO: 229275 - RNA, 23 nt, Human
guccagaacccaggcuggggugg

SEQ ID NO: 229276 - RNA, 22 nt, Human
acagccaguccucccacagggu

SEQ ID NO: 229277 - RNA, 22 nt, Human
uugcagggcaggaccauggaca

SEQ ID NO: 229278 - RNA, 22 nt, Human
uguguguguuuacaguuucuca

SEQ ID NO: 229279 - RNA, 22 nt, Human
ugaaagcuguacaugugguaca

SEQ ID NO: 229280 - RNA, 22 nt, Human
ugauucugagggagcauucugc

SEQ ID NO: 229281 - RNA, 22 nt, Human
ccagguguagcacugcucacag

SEQ ID NO: 229282 - RNA, 18 nt, Human
gagaggagccagaauuuu

SEQ ID NO: 229283 - RNA, 22 nt, Human
uacagugugacauuucuacaaa

SEQ ID NO: 229284 - RNA, 22 nt, Human
aagauuauggcagauaacaauu

SEQ ID NO: 229285 - RNA, 22 nt, Human
ugacauuuaucaaagaaauggu

SEQ ID NO: 229286 - RNA, 22 nt, Human
augggacacguuuuaaggaaaa

SEQ ID NO: 229287 - RNA, 19 nt, Human
caauauauagugaguggau

SEQ ID NO: 229288 - RNA, 22 nt, Human
cagcuccagcucugggcgccuc

SEQ ID NO: 229289 - RNA, 22 nt, Human
ggcuggcugcaugcccccuccu

SEQ ID NO: 229290 - RNA, 22 nt, Human
gggccagguaucgucuuuagua

SEQ ID NO: 229291 - RNA, 22 nt, Human
agcuucucagauggacuguuag

SEQ ID NO: 229292 - RNA, 20 nt, Human
auuccacuuauaugaggucc

SEQ ID NO: 229293 - RNA, 22 nt, Human
auuuccuucccagauuugguuc

SEQ ID NO: 229294 - RNA, 22 nt, Human
aaaacacacuggaccaauuuaa

SEQ ID NO: 229295 - RNA, 22 nt, Human
aaaguauguuguggcuuuuaaa

SEQ ID NO: 229296 - RNA, 22 nt, Human
gagcuaaaugaaucauaaauca

SEQ ID NO: 229297 - RNA, 22 nt, Human
ggcagguggaaguuggcagagc

SEQ ID NO: 229298 - RNA, 22 nt, Human
uuauuuauaucucugcaguuua

SEQ ID NO: 229299 - RNA, 22 nt, Human
uaacacugguuaucccugugca

SEQ ID NO: 229300 - RNA, 22 nt, Human
cuguuuaucauguacauuucca

SEQ ID NO: 229301 - RNA, 22 nt, Human
gugggccuccccuuuacgagcc

SEQ ID NO: 229302 - RNA, 20 nt, Human
uucugcuugcaaauaucaag

SEQ ID NO: 229303 - RNA, 20 nt, Human
cauuugggaucaugagguuu

SEQ ID NO: 229304 - RNA, 22 nt, Human
augcauaucagugauuguuugc

SEQ ID NO: 229305 - RNA, 22 nt, Human
aggcucagauccuuguguccug

SEQ ID NO: 229306 - RNA, 22 nt, Human
uuccuucuuccuuuaguaacca

SEQ ID NO: 229307 - RNA, 22 nt, Human
gagagaggccuccauguacuga

SEQ ID NO: 229308 - RNA, 21 nt, Human
gaaaagcaagggaguagaaca

SEQ ID NO: 229309 - RNA, 21 nt, Human
agcacagcuuuaagccaugug

SEQ ID NO: 229310 - RNA, 22 nt, Human
guuacauggagcaaugaugcau

SEQ ID NO: 229311 - RNA, 22 nt, Human
augaggcagagggcugugccag

SEQ ID NO: 229312 - RNA, 22 nt, Human
guuugcauguguacuuaauugg

SEQ ID NO: 229313 - RNA, 22 nt, Human
ucaaggcuauuaauucugugag

SEQ ID NO: 229314 - RNA, 22 nt, Human
uccuggguagccuguccaagau

SEQ ID NO: 229315 - RNA, 22 nt, Human
gaccaagauacagcaucauaga

SEQ ID NO: 229316 - RNA, 22 nt, Human
gggcaggagagggccaccugga

SEQ ID NO: 229317 - RNA, 22 nt, Human
ggcaucaggguaggaagguauc

SEQ ID NO: 229318 - RNA, 22 nt, Human
ugaucuuuacugcuguuuauaa

SEQ ID NO: 229319 - RNA, 21 nt, Human
uccagaggaggacagacucag

SEQ ID NO: 229320 - RNA, 20 nt, Human
gcugccuuguccugcuuggu

SEQ ID NO: 229321 - RNA, 20 nt, Human
ucugccuuaugaccuucgcc

SEQ ID NO: 229322 - RNA, 22 nt, Human
cucugggaaguagauuuggccu

SEQ ID NO: 229323 - RNA, 22 nt, Human
aacuacagaaaagguaagcucu

SEQ ID NO: 229324 - RNA, 18 nt, Human
aaacagugccuaaguguc

SEQ ID NO: 229325 - RNA, 22 nt, Human
cauggcaggaaggacaugcacu

SEQ ID NO: 229326 - RNA, 22 nt, Human
accagagcccaucugcuccuag

SEQ ID NO: 229327 - RNA, 22 nt, Human
cuucaucaacucuaacaaaugu

SEQ ID NO: 229328 - RNA, 17 nt, Human
cucagagcaggacagaa

SEQ ID NO: 229329 - RNA, 22 nt, Human
ggcaggcaguguggugugaaac

SEQ ID NO: 229330 - RNA, 22 nt, Human
aaguagcauuuucaaaauguau

SEQ ID NO: 229331 - RNA, 23 nt, Human
ugccucugccucccuagucugca

SEQ ID NO: 229332 - RNA, 19 nt, Human
cgcaggagccgaggugacc

SEQ ID NO: 229333 - RNA, 22 nt, Human
aggaaacuccccuacaucucaa

SEQ ID NO: 229334 - RNA, 22 nt, Human
auuauucauggucuuccacaau

SEQ ID NO: 229335 - RNA, 22 nt, Human
gccacaggugggcucugggaaa

SEQ ID NO: 229336 - RNA, 22 nt, Human
gcauuuguguucuuccuagagc

SEQ ID NO: 229337 - RNA, 22 nt, Human
agagaagagcaaugauaaauuu

SEQ ID NO: 229338 - RNA, 22 nt, Human
ucccagcagucagagcuaugug

SEQ ID NO: 229339 - RNA, 22 nt, Human
uacugucuggaguugccaaagg

SEQ ID NO: 229340 - RNA, 22 nt, Human
uuucaucucucuaaaagacagu

SEQ ID NO: 229341 - RNA, 22 nt, Human
uuaggaauauagacuaaguaga

SEQ ID NO: 229342 - RNA, 23 nt, Human
cccaagccugugcccucugacuc

SEQ ID NO: 229343 - RNA, 22 nt, Human
auuucucaguguacauuauguu

SEQ ID NO: 229344 - RNA, 22 nt, Human
aaucacauuuacauugcuaauu

SEQ ID NO: 229345 - RNA, 22 nt, Human
aguuuuucugcuggucucacua

SEQ ID NO: 229346 - RNA, 22 nt, Human
aaauagauugcugaggcauuac

SEQ ID NO: 229347 - RNA, 22 nt, Human
uuuccuuccaaaugcccgggag

SEQ ID NO: 229348 - RNA, 22 nt, Human
acugggccagacacugauuccc

SEQ ID NO: 229349 - RNA, 22 nt, Human
aggcuuuccugucacucaugcu

SEQ ID NO: 229350 - RNA, 21 nt, Human
augcacaaaaagacucuuucu

SEQ ID NO: 229351 - RNA, 22 nt, Human
auuuccugugucucuauuuaug

SEQ ID NO: 229352 - RNA, 22 nt, Human
aggcuaagugggugucagggcc

SEQ ID NO: 229353 - RNA, 22 nt, Human
auuugcugauggcauuugagcu

SEQ ID NO: 229354 - RNA, 22 nt, Human
agagccugcaguggagaccuug

SEQ ID NO: 229355 - RNA, 18 nt, Human
auccugggccagucuuuc

SEQ ID NO: 229356 - RNA, 22 nt, Human
uuagaacacugagaaagugaug

SEQ ID NO: 229357 - RNA, 19 nt, Human
gaggcaaggaguuuaagcc

SEQ ID NO: 229358 - RNA, 22 nt, Human
ccaaggccccuguggucuagcc

SEQ ID NO: 229359 - RNA, 22 nt, Human
cagucacagugacaggaugugg

SEQ ID NO: 229360 - RNA, 22 nt, Human
uuccaugaaagugaaauggagc

SEQ ID NO: 229361 - RNA, 22 nt, Human
caaauucacaugauugcuucug

SEQ ID NO: 229362 - RNA, 21 nt, Human
augacagaugcugcagaucgu

SEQ ID NO: 229363 - RNA, 22 nt, Human
agagccacggcaggccuaggaa

SEQ ID NO: 229364 - RNA, 22 nt, Human
uauguacaauuuguuguauguc

SEQ ID NO: 229365 - RNA, 22 nt, Human
agauuuuauagauaauuuccca

SEQ ID NO: 229366 - RNA, 22 nt, Human
ucuuguuaaagugaagauacug

SEQ ID NO: 229367 - RNA, 22 nt, Human
caauaauugcuuuccagaguua

SEQ ID NO: 229368 - RNA, 22 nt, Human
ucagcauuucagaaguggcaua

SEQ ID NO: 229369 - RNA, 22 nt, Human
aggucacccguuugacuaucca

SEQ ID NO: 229370 - RNA, 22 nt, Human
cauguuaaauugaguuugcaau

SEQ ID NO: 229371 - RNA, 22 nt, Human
aacugagguaucugcuguguuu

SEQ ID NO: 229372 - RNA, 22 nt, Human
uuacaucauugagacauacaua

SEQ ID NO: 229373 - RNA, 22 nt, Human
agcugguaaguggcagagauuc

SEQ ID NO: 229374 - RNA, 22 nt, Human
ugcaauuucaaauaucagaaag

SEQ ID NO: 229375 - RNA, 22 nt, Human
ccugucacgaugacugcacucu

SEQ ID NO: 229376 - RNA, 19 nt, Human
agauuuaccucauauaguu

SEQ ID NO: 229377 - RNA, 22 nt, Human
uggucauuaauucuuaccuuua

SEQ ID NO: 229378 - RNA, 22 nt, Human
agccuccaucccaugcacaaag

SEQ ID NO: 229379 - RNA, 22 nt, Human
gaggccuggucuaugagauguu

SEQ ID NO: 229380 - RNA, 22 nt, Human
uucucugcucucacauacagaa

SEQ ID NO: 229381 - RNA, 22 nt, Human
auggccugcagugcugccacag

SEQ ID NO: 229382 - RNA, 22 nt, Human
uagcacaaagagucuuucagag

SEQ ID NO: 229383 - RNA, 22 nt, Human
caauacaucaggucaaaaugug

SEQ ID NO: 229384 - RNA, 22 nt, Human
ugcaggugauucugaugcaguu

SEQ ID NO: 229385 - RNA, 22 nt, Human
guacaaaguggaccugauagua

SEQ ID NO: 229386 - RNA, 22 nt, Human
aauuaaauugguuuagagagga

SEQ ID NO: 229387 - RNA, 22 nt, Human
uucugauaauaccacaucgcag

SEQ ID NO: 229388 - RNA, 22 nt, Human
uccacccugcuuucuuaucucc

SEQ ID NO: 229389 - RNA, 22 nt, Human
uaaagacacugguuuuaaucau

SEQ ID NO: 229390 - RNA, 22 nt, Human
gcuggcugaggucuagcucuuu

SEQ ID NO: 229391 - RNA, 22 nt, Human
ccagcccaaacaagccgccuuc

SEQ ID NO: 229392 - RNA, 22 nt, Human
uucuuacagauuuggugaauga

SEQ ID NO: 229393 - RNA, 23 nt, Human
uuagacaauccucaaaagguaau

SEQ ID NO: 229394 - RNA, 22 nt, Human
ugguucauaauuugcacuacug

SEQ ID NO: 229395 - RNA, 22 nt, Human
aucucuaauuuaaaaaguaaca

SEQ ID NO: 229396 - RNA, 22 nt, Human
cauuuggaaagagacuagagaa

SEQ ID NO: 229397 - RNA, 22 nt, Human
cuagagaaaacuguguaucuug

SEQ ID NO: 229398 - RNA, 22 nt, Human
agccuuagggauugagguugcu

SEQ ID NO: 229399 - RNA, 22 nt, Human
ucugacccucagaucaugucca

SEQ ID NO: 229400 - RNA, 22 nt, Human
uuauuccauagaagucaaggaa

SEQ ID NO: 229401 - RNA, 22 nt, Human
ggggagcaauaguugaggugug

SEQ ID NO: 229402 - RNA, 16 nt, Human
acagugucucaagcac

SEQ ID NO: 229403 - RNA, 22 nt, Human
cuuagugaggaaugaauuuguu

SEQ ID NO: 229404 - RNA, 22 nt, Human
caaaugcagucccuuuguugcu

SEQ ID NO: 229405 - RNA, 22 nt, Human
cagcuuuauuucacguguuugu

SEQ ID NO: 229406 - RNA, 22 nt, Human
cugcacccaggccuggucccag

SEQ ID NO: 229407 - RNA, 22 nt, Human
aagaaagcugaauauucugugu

SEQ ID NO: 229408 - RNA, 22 nt, Human
ggggaccugggcuucaaggguu

SEQ ID NO: 229409 - RNA, 21 nt, Human
aaagauguuucuuuuccucac

SEQ ID NO: 229410 - RNA, 22 nt, Human
caggucuguuuucaaggucagu

SEQ ID NO: 229411 - RNA, 17 nt, Human
aaaauucuguaaagagg

SEQ ID NO: 229412 - RNA, 22 nt, Human
uuuaucugaccucacuucuuaa

SEQ ID NO: 229413 - RNA, 22 nt, Human
uucucaggucaccagggugcca

SEQ ID NO: 229414 - RNA, 22 nt, Human
gggagggaucugcuaggcaaug

SEQ ID NO: 229415 - RNA, 22 nt, Human
ucccaccccuugacucuuuaag

SEQ ID NO: 229416 - RNA, 22 nt, Human
cuccucccacggucucaggaag

SEQ ID NO: 229417 - RNA, 19 nt, Human
uguggucucuguucucagg

SEQ ID NO: 229418 - RNA, 22 nt, Human
acacuucucauuugauacuaac

SEQ ID NO: 229419 - RNA, 22 nt, Human
ucuggcucagggcucugaggga

SEQ ID NO: 229420 - RNA, 22 nt, Human
uuuauuggauggauggauggau

SEQ ID NO: 229421 - RNA, 18 nt, Human
uuggaggauguccaugaa

SEQ ID NO: 229422 - RNA, 22 nt, Human
cccaugcaucccucuccugggc

SEQ ID NO: 229423 - RNA, 22 nt, Human
gcuggcugggucccugagaggc

SEQ ID NO: 229424 - RNA, 22 nt, Human
uuccuugguagagagaauauuu

SEQ ID NO: 229425 - RNA, 22 nt, Human
agccuugaacacugacugaagg

SEQ ID NO: 229426 - RNA, 22 nt, Human
uccaguuuauuaugcauuuaca

SEQ ID NO: 229427 - RNA, 22 nt, Human
cuccaggcuucaagggccggcc

SEQ ID NO: 229428 - RNA, 22 nt, Human
gggaaacuagaagcaggguuau

SEQ ID NO: 229429 - RNA, 22 nt, Human
caagaggagcaggcaggugugc

SEQ ID NO: 229430 - RNA, 22 nt, Human
cacaaaguggguggaaaacuaa

SEQ ID NO: 229431 - RNA, 22 nt, Human
ucagcaaacauugauuggacuu

SEQ ID NO: 229432 - RNA, 22 nt, Human
agcacauuuaaguaugaaauau

SEQ ID NO: 229433 - RNA, 22 nt, Human
uagaaagcccuguguucacugc

SEQ ID NO: 229434 - RNA, 21 nt, Human
uucuuucugaaucugaaguau

SEQ ID NO: 229435 - RNA, 22 nt, Human
acauuucugucuuagggacugu

SEQ ID NO: 229436 - RNA, 22 nt, Human
uuucuuaauuugaguuccacua

SEQ ID NO: 229437 - RNA, 22 nt, Human
gggccucaugauggcucaggaa

SEQ ID NO: 229438 - RNA, 22 nt, Human
gaagcagcgaaguggaagggac

SEQ ID NO: 229439 - RNA, 22 nt, Human
uuaacauuugugaagcauuuag

SEQ ID NO: 229440 - RNA, 22 nt, Human
cagcacaggaauaugguggaca

SEQ ID NO: 229441 - RNA, 22 nt, Human
cagcccuuggcuggcuccuugc

SEQ ID NO: 229442 - RNA, 22 nt, Human
auacauagauagauaaucuggc

SEQ ID NO: 229443 - RNA, 22 nt, Human
augagacaagagucuaaauuca

SEQ ID NO: 229444 - RNA, 21 nt, Human
ccacaauucuaguuacauaug

SEQ ID NO: 229445 - RNA, 22 nt, Human
ucuuaaaugacugauaagagga

SEQ ID NO: 229446 - RNA, 22 nt, Human
uaaggcuuuguagugauugcuu

SEQ ID NO: 229447 - RNA, 22 nt, Human
auuucccacucaggccgcggcg

SEQ ID NO: 229448 - RNA, 22 nt, Human
gcauccaaauguuucauuucuu

SEQ ID NO: 229449 - RNA, 21 nt, Human
agcaggcccaauggagggggc

SEQ ID NO: 229450 - RNA, 22 nt, Human
gcucagaguggccuggcuaggg

SEQ ID NO: 229451 - RNA, 22 nt, Human
agccaugcucaguuccuggagc

SEQ ID NO: 229452 - RNA, 22 nt, Human
gugccuggggguaauguaggau

SEQ ID NO: 229453 - RNA, 22 nt, Human
aguccagucucacucuuggcag

SEQ ID NO: 229454 - RNA, 22 nt, Human
acagugcuaaacacuucuugaa

SEQ ID NO: 229455 - RNA, 22 nt, Human
cuguagcagugugcucuuuuuc

SEQ ID NO: 229456 - RNA, 22 nt, Human
aggaccugccaggugcaaagca

SEQ ID NO: 229457 - RNA, 19 nt, Human
ggcucuggcggcuguagcc

SEQ ID NO: 229458 - RNA, 23 nt, Human
aggacaguggaauuuagggauug

SEQ ID NO: 229459 - RNA, 16 nt, Human
agccuuaggaacagcc

SEQ ID NO: 229460 - RNA, 22 nt, Human
aguauguauuuuauacuuacag

SEQ ID NO: 229461 - RNA, 22 nt, Human
gacaggugcuaagggaccuggc

SEQ ID NO: 229462 - RNA, 22 nt, Human
cuuucauccgcagaugagccuc

SEQ ID NO: 229463 - RNA, 22 nt, Human
guguuuguuuagugcagagaga

SEQ ID NO: 229464 - RNA, 19 nt, Human
agcagcagcuaccacuugu

SEQ ID NO: 229465 - RNA, 22 nt, Human
acuuuacucuucauaugugaca

SEQ ID NO: 229466 - RNA, 22 nt, Human
caagcuggcugggagaggcacg

SEQ ID NO: 229467 - RNA, 22 nt, Human
aggugggggcuguguccuugac

SEQ ID NO: 229468 - RNA, 22 nt, Human
uuccuugagaugacugucuugu

SEQ ID NO: 229469 - RNA, 22 nt, Human
augggaguccaacaucaaggac

SEQ ID NO: 229470 - RNA, 22 nt, Human
gcuggcagugugaaugacaagc

SEQ ID NO: 229471 - RNA, 22 nt, Human
uuacaguuuacauaagaauugu

SEQ ID NO: 229472 - RNA, 22 nt, Human
auauguuuuuggaaagaacaca

SEQ ID NO: 229473 - RNA, 22 nt, Human
ucacaucuuauuagaguaucuc

SEQ ID NO: 229474 - RNA, 22 nt, Human
ucugggugugguaucuuagcca

SEQ ID NO: 229475 - RNA, 22 nt, Human
aagcugcuggugacugggcuga

SEQ ID NO: 229476 - RNA, 22 nt, Human
aaagccauaagccuaauacuaa

SEQ ID NO: 229477 - RNA, 22 nt, Human
uuccugggaggcuguguacuug

SEQ ID NO: 229478 - RNA, 22 nt, Human
gcaguguuaggaauaaaaauga

SEQ ID NO: 229479 - RNA, 22 nt, Human
uggcacugaagcuggaaagccu

SEQ ID NO: 229480 - RNA, 22 nt, Human
cagguucuuaacuuguucuucc

SEQ ID NO: 229481 - RNA, 22 nt, Human
ucucuuccaguaagagucuuua

SEQ ID NO: 229482 - RNA, 22 nt, Human
uguagauuuuggagucuacaag

SEQ ID NO: 229483 - RNA, 22 nt, Human
uagagcugauaaugaggccaag

SEQ ID NO: 229484 - RNA, 22 nt, Human
auuagggcuggaugcaaggaaa

SEQ ID NO: 229485 - RNA, 22 nt, Human
uucucuuuucaccaguugcuaa

SEQ ID NO: 229486 - RNA, 22 nt, Human
ccuccugggacucauuagcacc

SEQ ID NO: 229487 - RNA, 22 nt, Human
cuggcucccgucugguggccau

SEQ ID NO: 229488 - RNA, 22 nt, Human
gagagcuggccagcuucaguau

SEQ ID NO: 229489 - RNA, 22 nt, Human
cuguucauggaaaaauaguugg

SEQ ID NO: 229490 - RNA, 22 nt, Human
gggagcuguaguccagauaccg

SEQ ID NO: 229491 - RNA, 22 nt, Human
uagggcuccacucccagagauu

SEQ ID NO: 229492 - RNA, 22 nt, Human
cucuggaauugaccugggaggg

SEQ ID NO: 229493 - RNA, 22 nt, Human
accaggcugugaagugagacua

SEQ ID NO: 229494 - RNA, 22 nt, Human
uccugugggcucucggccucca

SEQ ID NO: 229495 - RNA, 22 nt, Human
cucugggcaggacgccaggccu

SEQ ID NO: 229496 - RNA, 22 nt, Human
aggcucuccagagagcugcuuu

SEQ ID NO: 229497 - RNA, 22 nt, Human
auggcccaaacugcaauuacuu

SEQ ID NO: 229498 - RNA, 22 nt, Human
agaacucuauauucaugaacaa

SEQ ID NO: 229499 - RNA, 22 nt, Human
aguggcuuauguuuagaaucau

SEQ ID NO: 229500 - RNA, 20 nt, Human
ggggaagaaaaggaugugau

SEQ ID NO: 229501 - RNA, 22 nt, Human
ugcaggcauuggugagagaagc

SEQ ID NO: 229502 - RNA, 20 nt, Human
uuccacaucuuugcacaugc

SEQ ID NO: 229503 - RNA, 22 nt, Human
aaggccugcucagcugucugug

SEQ ID NO: 229504 - RNA, 19 nt, Human
uccucagugacaaccucag

SEQ ID NO: 229505 - RNA, 22 nt, Human
cagcacuugagcuuucauguaa

SEQ ID NO: 229506 - RNA, 22 nt, Human
ucucuuaacugguucagcaauu

SEQ ID NO: 229507 - RNA, 22 nt, Human
uccuuccuggggucucugcugc

SEQ ID NO: 229508 - RNA, 22 nt, Human
caugguuugaugacuggaagga

SEQ ID NO: 229509 - RNA, 22 nt, Human
acagagccacuuuggugccuac

SEQ ID NO: 229510 - RNA, 22 nt, Human
cuccagugcgcaggacagcccc

SEQ ID NO: 229511 - RNA, 22 nt, Human
uaaaggcuuuauuuuccaguca

SEQ ID NO: 229512 - RNA, 22 nt, Human
uuccugggguacuggagaaaau

SEQ ID NO: 229513 - RNA, 22 nt, Human
agcauaaaggcacuagaaagag

SEQ ID NO: 229514 - RNA, 22 nt, Human
acagaugaggaauuuauuuggu

SEQ ID NO: 229515 - RNA, 22 nt, Human
uaugaguacaaggacucugucu

SEQ ID NO: 229516 - RNA, 22 nt, Human
cuggaagguaacaaggccauua

SEQ ID NO: 229517 - RNA, 22 nt, Human
gaagauuaaauggcucccauau

SEQ ID NO: 229518 - RNA, 22 nt, Human
uccaggccuuugcacauguugu

SEQ ID NO: 229519 - RNA, 22 nt, Human
agcaaacauucagcagauuggc

SEQ ID NO: 229520 - RNA, 22 nt, Human
ggagugaaucacuagaugcaga

SEQ ID NO: 229521 - RNA, 22 nt, Human
uagaagcucaggaauaggcaua

SEQ ID NO: 229522 - RNA, 22 nt, Human
caugugcuguagcagagaggaa

SEQ ID NO: 229523 - RNA, 22 nt, Human
cuucucucugcauaggcauggg

SEQ ID NO: 229524 - RNA, 22 nt, Human
agcacagaguugcagagagcgu

SEQ ID NO: 229525 - RNA, 22 nt, Human
agauaaugucaaauucugucug

SEQ ID NO: 229526 - RNA, 22 nt, Human
ccuuuggagcaacugagagcua

SEQ ID NO: 229527 - RNA, 22 nt, Human
ucaguuaauauggguaaagcau

SEQ ID NO: 229528 - RNA, 22 nt, Human
ucagagaacuccacaccuuagg

SEQ ID NO: 229529 - RNA, 22 nt, Human
uuuccucacacagaagaucuug

SEQ ID NO: 229530 - RNA, 22 nt, Human
ugucaguucagugauuacaaaa

SEQ ID NO: 229531 - RNA, 22 nt, Human
caaaucuuuaauugaggaauca

SEQ ID NO: 229532 - RNA, 22 nt, Human
gccaggcauuauuccgaucccu

SEQ ID NO: 229533 - RNA, 18 nt, Human
gguccugggccuggcuca

SEQ ID NO: 229534 - RNA, 19 nt, Human
gaggcaguagucaaagcuu

SEQ ID NO: 229535 - RNA, 22 nt, Human
acagaaauuagcagugaguuua

SEQ ID NO: 229536 - RNA, 22 nt, Human
cauuucuaagaagaucugggua

SEQ ID NO: 229537 - RNA, 22 nt, Human
cugggaaggggaagguccucuc

SEQ ID NO: 229538 - RNA, 22 nt, Human
ccugggcaaaugccagagacaa

SEQ ID NO: 229539 - RNA, 22 nt, Human
ucuguucaguuguaccuucccc

SEQ ID NO: 229540 - RNA, 22 nt, Human
ccugcagagggacuggcaggaa

SEQ ID NO: 229541 - RNA, 22 nt, Human
augucacaugguucuggggccu

SEQ ID NO: 229542 - RNA, 22 nt, Human
agauuuuaguuuggggaggugc

SEQ ID NO: 229543 - RNA, 22 nt, Human
ucugagaaaucaguggugaaua

SEQ ID NO: 229544 - RNA, 22 nt, Human
gacagcugccucuguguagauc

SEQ ID NO: 229545 - RNA, 22 nt, Human
uggaaacuuaccguuuggggaa

SEQ ID NO: 229546 - RNA, 22 nt, Human
cagagucuggacugcaggcucc

SEQ ID NO: 229547 - RNA, 22 nt, Human
ugcuauauaauggaauuucuaa

SEQ ID NO: 229548 - RNA, 22 nt, Human
gaauacaaagcagaacucauac

SEQ ID NO: 229549 - RNA, 22 nt, Human
gcagcagaugugggcccagagc

SEQ ID NO: 229550 - RNA, 22 nt, Human
uauuucuuguucccuccaaguu

SEQ ID NO: 229551 - RNA, 22 nt, Human
uaauauaccaaacuguaauuuu

SEQ ID NO: 229552 - RNA, 22 nt, Human
agcagcagggcaugucuuacuc

SEQ ID NO: 229553 - RNA, 22 nt, Human
gcuccaaaguccagcuguuucc

SEQ ID NO: 229554 - RNA, 22 nt, Human
agucgcagacaugguccccuuu

SEQ ID NO: 229555 - RNA, 22 nt, Human
gcugccacgaucucugcuguag

SEQ ID NO: 229556 - RNA, 22 nt, Human
uucucagauccaucagaagucc

SEQ ID NO: 229557 - RNA, 22 nt, Human
gcagggcacacaagaaugauaa

SEQ ID NO: 229558 - RNA, 22 nt, Human
gcccgcagagaucuuuaacaaa

SEQ ID NO: 229559 - RNA, 17 nt, Human
ugagcaguagaagaugc

SEQ ID NO: 229560 - RNA, 22 nt, Human
ugucccucugaggcuucccugg

SEQ ID NO: 229561 - RNA, 22 nt, Human
ugcucagcaaaaagcuugugag

SEQ ID NO: 229562 - RNA, 20 nt, Human
cuccagggaacagacuggag

SEQ ID NO: 229563 - RNA, 22 nt, Human
acucuguaauucugaagcaccu

SEQ ID NO: 229564 - RNA, 22 nt, Human
uaucuuuagaggaagagaaucu

SEQ ID NO: 229565 - RNA, 20 nt, Human
cagaacaugagcaucgagcc

SEQ ID NO: 229566 - RNA, 22 nt, Human
ucccagcccagguaugaugaua

SEQ ID NO: 229567 - RNA, 22 nt, Human
aagggagacaguugugugagga

SEQ ID NO: 229568 - RNA, 22 nt, Human
caggucuggguugauggccugg

SEQ ID NO: 229569 - RNA, 22 nt, Human
auguaacuucugugaaucugac

SEQ ID NO: 229570 - RNA, 22 nt, Human
uccaugagacagauacuguaag

SEQ ID NO: 229571 - RNA, 22 nt, Human
aacaucuuugauaaacuuagug

SEQ ID NO: 229572 - RNA, 22 nt, Human
accaauuuuagagcaccaagaa

SEQ ID NO: 229573 - RNA, 22 nt, Human
uccuuggaacauugauccaaac

SEQ ID NO: 229574 - RNA, 18 nt, Human
gacacauccccaggccuc

SEQ ID NO: 229575 - RNA, 22 nt, Human
caggagacucagcauccaggau

SEQ ID NO: 229576 - RNA, 22 nt, Human
ugaacuuucacaagaauaugcu

SEQ ID NO: 229577 - RNA, 22 nt, Human
aagaauguuaguuucugauaca

SEQ ID NO: 229578 - RNA, 22 nt, Human
agcugccauggccugaauuuac

SEQ ID NO: 229579 - RNA, 22 nt, Human
cuuguucaguccugacuuccug

SEQ ID NO: 229580 - RNA, 22 nt, Human
gucuggaagugucuuguuaagu

SEQ ID NO: 229581 - RNA, 22 nt, Human
acugaauuagggaacacugaac

SEQ ID NO: 229582 - RNA, 22 nt, Human
gucuccuggcugcagcuaagac

SEQ ID NO: 229583 - RNA, 22 nt, Human
aagggcucugcugucucucccc

SEQ ID NO: 229584 - RNA, 22 nt, Human
ccuggcagcgccgaagcuggcc

SEQ ID NO: 229585 - RNA, 22 nt, Human
acuuuuuacaggguguauacca

SEQ ID NO: 229586 - RNA, 22 nt, Human
gcuggcagggacagcugcgugu

SEQ ID NO: 229587 - RNA, 22 nt, Human
cuuccugcuccccugccaauuc

SEQ ID NO: 229588 - RNA, 17 nt, Human
ugaguggccgggggaca

SEQ ID NO: 229589 - RNA, 22 nt, Human
agagcuggauggucaagauggc

SEQ ID NO: 229590 - RNA, 22 nt, Human
uauugugccccucccaggaaca

SEQ ID NO: 229591 - RNA, 21 nt, Human
gcucuccagggccagcccagg

SEQ ID NO: 229592 - RNA, 22 nt, Human
cuggcuggccauguagagauga

SEQ ID NO: 229593 - RNA, 22 nt, Human
agaacucugaacacugucugga

SEQ ID NO: 229594 - RNA, 22 nt, Human
ugggccuggaguuuguccagag

SEQ ID NO: 229595 - RNA, 20 nt, Human
ucauggcugcugagagguuc

SEQ ID NO: 229596 - RNA, 22 nt, Human
aggguccaguaacagaugccag

SEQ ID NO: 229597 - RNA, 22 nt, Human
agucacacuucguaucucuagc

SEQ ID NO: 229598 - RNA, 22 nt, Human
guaaaauucuagcaucugaaag

SEQ ID NO: 229599 - RNA, 22 nt, Human
gagccacagcaaccucaaagga

SEQ ID NO: 229600 - RNA, 22 nt, Human
ccagagagggcgccaccuggag

SEQ ID NO: 229601 - RNA, 22 nt, Human
gaggcucacgacgggacgaacu

SEQ ID NO: 229602 - RNA, 21 nt, Human
ccuccugcccgcaagcuaggg

SEQ ID NO: 229603 - RNA, 19 nt, Human
ccagucccauacaggagau

SEQ ID NO: 229604 - RNA, 22 nt, Human
uauucagaauaaagacuacauu

SEQ ID NO: 229605 - RNA, 22 nt, Human
cacuggggugggccugguagag

SEQ ID NO: 229606 - RNA, 22 nt, Human
caaaguauaguguaggauggca

SEQ ID NO: 229607 - RNA, 22 nt, Human
ugacauguauguuguuggcaug

SEQ ID NO: 229608 - RNA, 14 nt, Human
gcaggcagaccacc

SEQ ID NO: 229609 - RNA, 23 nt, Human
uuucucaaagaguggcagcuuca

SEQ ID NO: 229610 - RNA, 22 nt, Human
uauuucauucuuuaucaggagc

SEQ ID NO: 229611 - RNA, 22 nt, Human
cagugcaagugacugaucaagg

SEQ ID NO: 229612 - RNA, 22 nt, Human
cugcagagcuaggcugagugaa

SEQ ID NO: 229613 - RNA, 17 nt, Human
ggaagaaaaggaucauc

SEQ ID NO: 229614 - RNA, 22 nt, Human
uuuauuguuaucaugggugagu

SEQ ID NO: 229615 - RNA, 18 nt, Human
ggcagccuacccacuugu

SEQ ID NO: 229616 - RNA, 20 nt, Human
aaacucuaccucaaucguca

SEQ ID NO: 229617 - RNA, 22 nt, Human
gcuucaggaggucggucuccuu

SEQ ID NO: 229618 - RNA, 22 nt, Human
cagcagucaggccugugggaga

SEQ ID NO: 229619 - RNA, 22 nt, Human
agcagccacccagcugcucauu

SEQ ID NO: 229620 - RNA, 22 nt, Human
cugccuugcaccggcucucugg

SEQ ID NO: 229621 - RNA, 22 nt, Human
cucuugcaugagauccaggagu

SEQ ID NO: 229622 - RNA, 22 nt, Human
uagauuuaagacccugaauuug

SEQ ID NO: 229623 - RNA, 22 nt, Human
ugcagccccccagauggccgua

SEQ ID NO: 229624 - RNA, 22 nt, Human
cugggcucaagaagucuucccu

SEQ ID NO: 229625 - RNA, 22 nt, Human
gaaaguuuucucacacaguaau

SEQ ID NO: 229626 - RNA, 22 nt, Human
accaguaggaguuggagaggaa

SEQ ID NO: 229627 - RNA, 22 nt, Human
aucaucuugcuuucuguuuacu

SEQ ID NO: 229628 - RNA, 22 nt, Human
uaugugcacauuagagagaugg

SEQ ID NO: 229629 - RNA, 22 nt, Human
ucagaacugguauuuaucaagg

SEQ ID NO: 229630 - RNA, 22 nt, Human
uucuaguucccacauaguugcc

SEQ ID NO: 229631 - RNA, 22 nt, Human
gaacaucuuauccauuuccucu

SEQ ID NO: 229632 - RNA, 22 nt, Human
aaaguuuuuaagcaagacccuu

SEQ ID NO: 229633 - RNA, 22 nt, Human
gcucagcuugggagcgcccggu

SEQ ID NO: 229634 - RNA, 22 nt, Human
gcugccuccaaucugugccccg

SEQ ID NO: 229635 - RNA, 22 nt, Human
ccagccagcaagcucccaguuc

SEQ ID NO: 229636 - RNA, 22 nt, Human
aagggcucugugcuugucccau

SEQ ID NO: 229637 - RNA, 22 nt, Human
uuccuuccuccuccaguucugg

SEQ ID NO: 229638 - RNA, 22 nt, Human
ccagugucugugguauagaaag

SEQ ID NO: 229639 - RNA, 22 nt, Human
cccugccucugaagcugcucag

SEQ ID NO: 229640 - RNA, 17 nt, Human
ggcuggagcagcucccc

SEQ ID NO: 229641 - RNA, 22 nt, Human
guagaaaugguguguuucuucu

SEQ ID NO: 229642 - RNA, 22 nt, Human
ucuguagucugugccauagcug

SEQ ID NO: 229643 - RNA, 22 nt, Human
agcuuuauauaaaagaguacau

SEQ ID NO: 229644 - RNA, 22 nt, Human
ucagucuuuugcccugaggagu

SEQ ID NO: 229645 - RNA, 22 nt, Human
uggcuucugggauguguugaca

SEQ ID NO: 229646 - RNA, 22 nt, Human
cuguggaaagagccuuuggagg

SEQ ID NO: 229647 - RNA, 22 nt, Human
auggcagccugaacacuuccug

SEQ ID NO: 229648 - RNA, 22 nt, Human
uccugagccugacaaucaccau

SEQ ID NO: 229649 - RNA, 22 nt, Human
ucccagcaggaguccaguuccc

SEQ ID NO: 229650 - RNA, 22 nt, Human
cuaaaugauauuuugguuuccu

SEQ ID NO: 229651 - RNA, 22 nt, Human
uugcuauuuccugaaauaagca

SEQ ID NO: 229652 - RNA, 22 nt, Human
gcagagauggcugccucugagu

SEQ ID NO: 229653 - RNA, 22 nt, Human
gccagcucagugccaggccccu

SEQ ID NO: 229654 - RNA, 22 nt, Human
cugugccaggcccagcugacuu

SEQ ID NO: 229655 - RNA, 22 nt, Human
accaggagccauagagucaggc

SEQ ID NO: 229656 - RNA, 22 nt, Human
cuugaguuacagcucuccaaga

SEQ ID NO: 229657 - RNA, 22 nt, Human
gcugcaggcggccgugguggcg

SEQ ID NO: 229658 - RNA, 22 nt, Human
agguggcuguauucagcuguaa

SEQ ID NO: 229659 - RNA, 22 nt, Human
ucacuggcaacuugugcucccu

SEQ ID NO: 229660 - RNA, 22 nt, Human
aggaggccaggcccucaagccu

SEQ ID NO: 229661 - RNA, 22 nt, Human
ggcagagcgcaugcgucgcaga

SEQ ID NO: 229662 - RNA, 22 nt, Human
ucuguauauauuaaugaaauuc

SEQ ID NO: 229663 - RNA, 22 nt, Human
gccuggugaaaggcagagagcg

SEQ ID NO: 229664 - RNA, 22 nt, Human
ucuuuguuuguacuguuagaau

SEQ ID NO: 229665 - RNA, 22 nt, Human
uugaacaauuugguauacaaac

SEQ ID NO: 229666 - RNA, 22 nt, Human
gacuuucuuguagugucugaug

SEQ ID NO: 229667 - RNA, 22 nt, Human
uuucaaggcuaguuuuaauuag

SEQ ID NO: 229668 - RNA, 22 nt, Human
ugagccagaguggagugugccu

SEQ ID NO: 229669 - RNA, 22 nt, Human
auucauaacggcaaaugucacc

SEQ ID NO: 229670 - RNA, 22 nt, Human
ccugcccuaugaccagcuucac

SEQ ID NO: 229671 - RNA, 22 nt, Human
cauuccaaggccaagucuaaga

SEQ ID NO: 229672 - RNA, 22 nt, Human
uaauauauuucugcuaagcuca

SEQ ID NO: 229673 - RNA, 22 nt, Human
ugaaauguacaagugcuuuuuu

SEQ ID NO: 229674 - RNA, 22 nt, Human
aaagcaaacagaaccccaagcu

SEQ ID NO: 229675 - RNA, 21 nt, Human
uuucauugaaugagauaaggu

SEQ ID NO: 229676 - RNA, 22 nt, Human
ugugggaaguuuggagggaaag

SEQ ID NO: 229677 - RNA, 22 nt, Human
uaaguauuggccuauagcuaga

SEQ ID NO: 229678 - RNA, 22 nt, Human
gucugggcucccagggucggcg

SEQ ID NO: 229679 - RNA, 23 nt, Human
aucuguucaucugacacagauuc

SEQ ID NO: 229680 - RNA, 22 nt, Human
aucuagaaguggcaugaauuac

SEQ ID NO: 229681 - RNA, 22 nt, Human
ugggggagauugugcaucucua

SEQ ID NO: 229682 - RNA, 22 nt, Human
ugcucauuaggacugcaaauuc

SEQ ID NO: 229683 - RNA, 22 nt, Human
gaagccugggagggcugggcua

SEQ ID NO: 229684 - RNA, 22 nt, Human
accaggaaacugugcccacgac

SEQ ID NO: 229685 - RNA, 22 nt, Human
ccugccagugaagcugacgggc

SEQ ID NO: 229686 - RNA, 22 nt, Human
uugaaucuauaauuucaguauu

SEQ ID NO: 229687 - RNA, 22 nt, Human
cccaggucuccugcuucccagg

SEQ ID NO: 229688 - RNA, 22 nt, Human
agaggcugugcccaccaggcaa

SEQ ID NO: 229689 - RNA, 22 nt, Human
ugagccagugugguaaagcuga

SEQ ID NO: 229690 - RNA, 22 nt, Human
auuagaaaauacaugggcuguc

SEQ ID NO: 229691 - RNA, 22 nt, Human
gccuccagcuggggcauuucag

SEQ ID NO: 229692 - RNA, 22 nt, Human
ccuggccagaggcgugccugug

SEQ ID NO: 229693 - RNA, 22 nt, Human
aaacugcacaugaggcuggugc

SEQ ID NO: 229694 - RNA, 21 nt, Human
agagacagagaaaguaacauu

SEQ ID NO: 229695 - RNA, 22 nt, Human
uugcuuuagguauagaauccau

SEQ ID NO: 229696 - RNA, 22 nt, Human
agacucuuggagaagagcuaua

SEQ ID NO: 229697 - RNA, 23 nt, Human
cucagagguguuuuucacuuacu

SEQ ID NO: 229698 - RNA, 22 nt, Human
uucauuccuucuguaccuugcc

SEQ ID NO: 229699 - RNA, 20 nt, Human
uaggcagcuugacccuuggu

SEQ ID NO: 229700 - RNA, 22 nt, Human
caggagugucgggucacuaggu

SEQ ID NO: 229701 - RNA, 22 nt, Human
ugagucuuuucauuguguggau

SEQ ID NO: 229702 - RNA, 22 nt, Human
ucagaggagggacucagaccca

SEQ ID NO: 229703 - RNA, 22 nt, Human
augucacauuggagcugcugga

SEQ ID NO: 229704 - RNA, 19 nt, Human
ucucacaguuuccuugccu

SEQ ID NO: 229705 - RNA, 19 nt, Human
gaguacaggugcagaaaug

SEQ ID NO: 229706 - RNA, 22 nt, Human
auaaggcacacauagauagggu

SEQ ID NO: 229707 - RNA, 22 nt, Human
caggacacuacagaugggaggg

SEQ ID NO: 229708 - RNA, 22 nt, Human
aggccagcauucucucuccagg

SEQ ID NO: 229709 - RNA, 22 nt, Human
gccauugggcuguaguuuuuug

SEQ ID NO: 229710 - RNA, 22 nt, Human
uaagcaguuuuucuuguauuaa

SEQ ID NO: 229711 - RNA, 22 nt, Human
aucaauucuuaggaaaauagcu

SEQ ID NO: 229712 - RNA, 22 nt, Human
auuucagacuguguuggaaaau

SEQ ID NO: 229713 - RNA, 22 nt, Human
aggcauggacauuucggcagcu

SEQ ID NO: 229714 - RNA, 22 nt, Human
acagcagaucuguggagcuuau

SEQ ID NO: 229715 - RNA, 22 nt, Human
agacaauuguucuaaguaaaaa

SEQ ID NO: 229716 - RNA, 22 nt, Human
uaaauucacuccugguagaccu

SEQ ID NO: 229717 - RNA, 23 nt, Human
uccaggcugggacuucaacuggc

SEQ ID NO: 229718 - RNA, 22 nt, Human
agaaguauucugcauguacuga

SEQ ID NO: 229719 - RNA, 22 nt, Human
ccaccaggcacucacagggaag

SEQ ID NO: 229720 - RNA, 22 nt, Human
uuugucuuaaaucuuguuacug

SEQ ID NO: 229721 - RNA, 22 nt, Human
ccagagagguagcuuacccucu

SEQ ID NO: 229722 - RNA, 17 nt, Human
gagugcugguggagcuc

SEQ ID NO: 229723 - RNA, 22 nt, Human
ccucugagccagcgucuucucu

SEQ ID NO: 229724 - RNA, 22 nt, Human
caaggcuuucucauuauccuuu

SEQ ID NO: 229725 - RNA, 22 nt, Human
gcucagagaaguugugccuggc

SEQ ID NO: 229726 - RNA, 22 nt, Human
auuccaaagccugaauaaugga

SEQ ID NO: 229727 - RNA, 22 nt, Human
uguaccaggaggaggacaaauu

SEQ ID NO: 229728 - RNA, 22 nt, Human
gcuccaggcagcauaguggaug

SEQ ID NO: 229729 - RNA, 22 nt, Human
uaaggcuaggaauucucugaag

SEQ ID NO: 229730 - RNA, 22 nt, Human
aaaaugaauaaguuaacccagg

SEQ ID NO: 229731 - RNA, 22 nt, Human
aucuuuggugcuuggugcuccc

SEQ ID NO: 229732 - RNA, 22 nt, Human
acuuuacuccccaacauaaaug

SEQ ID NO: 229733 - RNA, 22 nt, Human
gcaccaggcagcugagcaggcc

SEQ ID NO: 229734 - RNA, 22 nt, Human
ugacacacuaggaaaagcauuu

SEQ ID NO: 229735 - RNA, 22 nt, Human
aaauguguuccuuugcuacaga

SEQ ID NO: 229736 - RNA, 22 nt, Human
agucugugcuguuggugaggau

SEQ ID NO: 229737 - RNA, 22 nt, Human
uucauuugccaucaguguaaug

SEQ ID NO: 229738 - RNA, 22 nt, Human
aucucagaucuacagaucuaca

SEQ ID NO: 229739 - RNA, 22 nt, Human
cuuuauggaaucaaagacugga

SEQ ID NO: 229740 - RNA, 22 nt, Human
auggccaagaucacagacuuca

SEQ ID NO: 229741 - RNA, 22 nt, Human
gaagucagaaaagaauuaggga

SEQ ID NO: 229742 - RNA, 19 nt, Human
ggcugcagagccccggcgc

SEQ ID NO: 229743 - RNA, 22 nt, Human
gagccagagcuacaagugucug

SEQ ID NO: 229744 - RNA, 22 nt, Human
uccacauccauugcuugacuuu

SEQ ID NO: 229745 - RNA, 22 nt, Human
uaaaugcuuagauucauagaaa

SEQ ID NO: 229746 - RNA, 19 nt, Human
uggcaugaugauggauggg

SEQ ID NO: 229747 - RNA, 22 nt, Human
agauaucugaugaaaauacucu

SEQ ID NO: 229748 - RNA, 22 nt, Human
cugccugcucaccagggcucug

SEQ ID NO: 229749 - RNA, 22 nt, Human
uucaaaauccgggaggcgcccc

SEQ ID NO: 229750 - RNA, 22 nt, Human
guuuacaguggcuucauuggau

SEQ ID NO: 229751 - RNA, 19 nt, Human
cccuggcaggcaagccugg

SEQ ID NO: 229752 - RNA, 22 nt, Human
aaggccagagcguguccugccu

SEQ ID NO: 229753 - RNA, 17 nt, Human
ccuuccucaucuccuuc

SEQ ID NO: 229754 - RNA, 17 nt, Human
aaugaaugaauucuuug

SEQ ID NO: 229755 - RNA, 22 nt, Human
uacauagaggguaauagcauca

SEQ ID NO: 229756 - RNA, 22 nt, Human
uguccuggccaaggccuugcuu

SEQ ID NO: 229757 - RNA, 22 nt, Human
uccucugagacaucagguugag

SEQ ID NO: 229758 - RNA, 22 nt, Human
aagcucagugaugccuccaggg

SEQ ID NO: 229759 - RNA, 22 nt, Human
aggagcucccgugaggagacca

SEQ ID NO: 229760 - RNA, 22 nt, Human
ugcaggugguccuuccucugcu

SEQ ID NO: 229761 - RNA, 22 nt, Human
aaagcaagucucuacaaaguac

SEQ ID NO: 229762 - RNA, 22 nt, Human
ucagaaguaagguucucccaag

SEQ ID NO: 229763 - RNA, 22 nt, Human
caggaagaccagggcuguggcu

SEQ ID NO: 229764 - RNA, 18 nt, Human
agaugaaagcaaaugaca

SEQ ID NO: 229765 - RNA, 22 nt, Human
gacuggaaagccuguccucaga

SEQ ID NO: 229766 - RNA, 21 nt, Human
ugcaggaguguaaugugaccc

SEQ ID NO: 229767 - RNA, 22 nt, Human
ccagcccuugcugaaggguggc

SEQ ID NO: 229768 - RNA, 22 nt, Human
gguggccuuuuaugagcagggu

SEQ ID NO: 229769 - RNA, 22 nt, Human
cccaggaacagggcucagaccc

SEQ ID NO: 229770 - RNA, 22 nt, Human
aacagugucugugguuaaaggu

SEQ ID NO: 229771 - RNA, 22 nt, Human
ugacaaauauuugaagaggcug

SEQ ID NO: 229772 - RNA, 22 nt, Human
aaaagcuagucaaugauguauu

SEQ ID NO: 229773 - RNA, 22 nt, Human
uucacaaagcuggagcauuucc

SEQ ID NO: 229774 - RNA, 22 nt, Human
ccucuggcaagugauuuaucau

SEQ ID NO: 229775 - RNA, 22 nt, Human
uuggcugguuucaagaaggcau

SEQ ID NO: 229776 - RNA, 22 nt, Human
uagcugguccucagcuccagcc

SEQ ID NO: 229777 - RNA, 22 nt, Human
ggcagugcccggugccuccucu

SEQ ID NO: 229778 - RNA, 22 nt, Human
cagcaucuguuuuucugaccca

SEQ ID NO: 229779 - RNA, 22 nt, Human
augcagggauuaaaugacugcc

SEQ ID NO: 229780 - RNA, 23 nt, Human
ccacagcuauaggguagugcagu

SEQ ID NO: 229781 - RNA, 22 nt, Human
uucucagacuuccagcaccagc

SEQ ID NO: 229782 - RNA, 21 nt, Human
aggcugcucuuucuuguggua

SEQ ID NO: 229783 - RNA, 22 nt, Human
guauucuuaaggauugagcaaa

SEQ ID NO: 229784 - RNA, 22 nt, Human
aauaucaguauauuguaucagu

SEQ ID NO: 229785 - RNA, 22 nt, Human
cugggugagcuggccagagggu

SEQ ID NO: 229786 - RNA, 22 nt, Human
cagaggccccauuggcugugcg

SEQ ID NO: 229787 - RNA, 22 nt, Human
auuccauuguauguguagacua

SEQ ID NO: 229788 - RNA, 20 nt, Human
ucuuuguuaauuuuaucucc

SEQ ID NO: 229789 - RNA, 22 nt, Human
ggcaggugguaaggauuucaua

SEQ ID NO: 229790 - RNA, 22 nt, Human
caggaugauguuaauugaaguu

SEQ ID NO: 229791 - RNA, 22 nt, Human
agcaccaggauauuguuggaga

SEQ ID NO: 229792 - RNA, 22 nt, Human
aaacaugagcacuugcuucaua

SEQ ID NO: 229793 - RNA, 22 nt, Human
uuucucagcucagcaucugggu

SEQ ID NO: 229794 - RNA, 22 nt, Human
cucugcugagccagagucccca

SEQ ID NO: 229795 - RNA, 22 nt, Human
ugggacagggaaucugaucccc

SEQ ID NO: 229796 - RNA, 22 nt, Human
aaugcaaagcaagcagagauuu

SEQ ID NO: 229797 - RNA, 22 nt, Human
gggacaggcaaagguaugcuuc

SEQ ID NO: 229798 - RNA, 22 nt, Human
cugcaggagcaagccugggaga

SEQ ID NO: 229799 - RNA, 22 nt, Human
uauugcauacuuaaauuuccgg

SEQ ID NO: 229800 - RNA, 22 nt, Human
agcuccugcaccaggggccccu

SEQ ID NO: 229801 - RNA, 22 nt, Human
uucuacaauaugaauaaugaag

SEQ ID NO: 229802 - RNA, 22 nt, Human
uaaagugcugggauuauaggcc

SEQ ID NO: 229803 - RNA, 22 nt, Human
auuuucaagggagaggccucug

SEQ ID NO: 229804 - RNA, 22 nt, Human
aguagugugacaauuaauauuu

SEQ ID NO: 229805 - RNA, 22 nt, Human
gcagaaccugaauugaacauug

SEQ ID NO: 229806 - RNA, 22 nt, Human
aacacaaagaagcugcaggauc

SEQ ID NO: 229807 - RNA, 22 nt, Human
ugcccagcugucaaaguagaua

SEQ ID NO: 229808 - RNA, 22 nt, Human
agaucccaaaucaccugcuuau

SEQ ID NO: 229809 - RNA, 22 nt, Human
ugcaggaaucagaggggaagcg

SEQ ID NO: 229810 - RNA, 22 nt, Human
ccacugggcguuucuguccaau

SEQ ID NO: 229811 - RNA, 22 nt, Human
gagaagcaaucaguggccaccc

SEQ ID NO: 229812 - RNA, 22 nt, Human
ucccuguacuuacacagcgucc

SEQ ID NO: 229813 - RNA, 22 nt, Human
gugcaauaaauaaauagauugu

SEQ ID NO: 229814 - RNA, 22 nt, Human
agcuucuuguagaacucaaaag

SEQ ID NO: 229815 - RNA, 22 nt, Human
augaaauaucuugaagaaauuc

SEQ ID NO: 229816 - RNA, 18 nt, Human
ucugaaagcccuuuucca

SEQ ID NO: 229817 - RNA, 22 nt, Human
ccagggcagugggagaaggugc

SEQ ID NO: 229818 - RNA, 22 nt, Human
uccaggugagugcaggugcaga

SEQ ID NO: 229819 - RNA, 22 nt, Human
agaaaguuagcagacucuuggc

SEQ ID NO: 229820 - RNA, 22 nt, Human
cucugggcuccuucagcccuuu

SEQ ID NO: 229821 - RNA, 22 nt, Human
uuacuuacaaaggcaaaggaag

SEQ ID NO: 229822 - RNA, 19 nt, Human
ucucagaggaaaaauugcu

SEQ ID NO: 229823 - RNA, 22 nt, Human
acaugucaauuuaguacucuua

SEQ ID NO: 229824 - RNA, 22 nt, Human
cagagcaguggagaguaggucu

SEQ ID NO: 229825 - RNA, 22 nt, Human
uuggagaguuaauugacaguua

SEQ ID NO: 229826 - RNA, 17 nt, Human
acagcaggcccggaggg

SEQ ID NO: 229827 - RNA, 22 nt, Human
aguuuaugaaacacagauuuga

SEQ ID NO: 229828 - RNA, 22 nt, Human
gaaugcacuuccaacaucuauu

SEQ ID NO: 229829 - RNA, 22 nt, Human
auuuauuaugggauuuggcuca

SEQ ID NO: 229830 - RNA, 22 nt, Human
ugguguggggauaagcacucug

SEQ ID NO: 229831 - RNA, 22 nt, Human
caggccaguuuugauuuaagcc

SEQ ID NO: 229832 - RNA, 22 nt, Human
ucaauagcauagcaauuaaugu

SEQ ID NO: 229833 - RNA, 23 nt, Human
agacaaacuuccuucacugcacc

SEQ ID NO: 229834 - RNA, 22 nt, Human
ccaggcacucacggggcacugg

SEQ ID NO: 229835 - RNA, 22 nt, Human
uagcugaaggcuacagcagaac

SEQ ID NO: 229836 - RNA, 22 nt, Human
aacaugcauguuauuuaucagu

SEQ ID NO: 229837 - RNA, 22 nt, Human
augcccugcucucgggaaggga

SEQ ID NO: 229838 - RNA, 22 nt, Human
gcugcccaggcaacauugacuu

SEQ ID NO: 229839 - RNA, 22 nt, Human
gcugcaggagcuggagcugugg

SEQ ID NO: 229840 - RNA, 22 nt, Human
aggagacauaacuaugaugaga

SEQ ID NO: 229841 - RNA, 22 nt, Human
uaggacauguguuuuauauaug

SEQ ID NO: 229842 - RNA, 20 nt, Human
cugccuggaggccucuaccu

SEQ ID NO: 229843 - RNA, 22 nt, Human
uaaagcacgucuauuuaaugau

SEQ ID NO: 229844 - RNA, 22 nt, Human
aacuacaauauguauguaugua

SEQ ID NO: 229845 - RNA, 22 nt, Human
uucccucccccagccuggcagg

SEQ ID NO: 229846 - RNA, 22 nt, Human
auacugauuaguugagaaagca

SEQ ID NO: 229847 - RNA, 22 nt, Human
auuucucagugaaaugacaggc

SEQ ID NO: 229848 - RNA, 22 nt, Human
gccaggcuguuuuuauuacugu

SEQ ID NO: 229849 - RNA, 22 nt, Human
ucugaggaccuacugaagaguu

SEQ ID NO: 229850 - RNA, 22 nt, Human
gagggaccuuuacacagacauu

SEQ ID NO: 229851 - RNA, 22 nt, Human
uucaaugcauauagauauagaa

SEQ ID NO: 229852 - RNA, 22 nt, Human
ugaugcaauguuuacaucuuga

SEQ ID NO: 229853 - RNA, 22 nt, Human
ugccaggcugucaauucaccca

SEQ ID NO: 229854 - RNA, 22 nt, Human
acuuagaacaggcagaauucca

SEQ ID NO: 229855 - RNA, 20 nt, Human
guccuagguuugaagguaaa

SEQ ID NO: 229856 - RNA, 22 nt, Human
ggcugggcucgcugauuggcug

SEQ ID NO: 229857 - RNA, 22 nt, Human
gggucuccauguuaacaucacu

SEQ ID NO: 229858 - RNA, 20 nt, Human
aaugagaugacuuagaggaa

SEQ ID NO: 229859 - RNA, 22 nt, Human
ucaggcuguuccuguccaaaau

SEQ ID NO: 229860 - RNA, 22 nt, Human
ugggcuccucgucacucgcugu

SEQ ID NO: 229861 - RNA, 22 nt, Human
aguuuuauggcucaaccuaaua

SEQ ID NO: 229862 - RNA, 22 nt, Human
cacaucugacuuccagugcagg

SEQ ID NO: 229863 - RNA, 21 nt, Human
gguguccugagggauagguag

SEQ ID NO: 229864 - RNA, 22 nt, Human
agcaggugaauuccuggaugug

SEQ ID NO: 229865 - RNA, 22 nt, Human
gggcagguuggcaucccgggca

SEQ ID NO: 229866 - RNA, 22 nt, Human
uugaauucauuucucauugagu

SEQ ID NO: 229867 - RNA, 22 nt, Human
aaugcucaaaauguuucaucua

SEQ ID NO: 229868 - RNA, 23 nt, Human
agaggggagcaucugcuggcuga

SEQ ID NO: 229869 - RNA, 22 nt, Human
ggcuggcagcuucaucccagau

SEQ ID NO: 229870 - RNA, 22 nt, Human
agucuuaugguuaaauagaugc

SEQ ID NO: 229871 - RNA, 22 nt, Human
cagagccagaacuagaccuugu

SEQ ID NO: 229872 - RNA, 22 nt, Human
ccacaguagaauucaucucccu

SEQ ID NO: 229873 - RNA, 22 nt, Human
gaaacaugucugacaauuuacc

SEQ ID NO: 229874 - RNA, 22 nt, Human
ucuuccagaaucucagagggcu

SEQ ID NO: 229875 - RNA, 22 nt, Human
auucaacuguaaacuuguucac

SEQ ID NO: 229876 - RNA, 22 nt, Human
uccccacacuuucacuccuggc

SEQ ID NO: 229877 - RNA, 22 nt, Human
acagcagggguggaauaaacgu

SEQ ID NO: 229878 - RNA, 22 nt, Human
cagauuaacacggagcuuaaca

SEQ ID NO: 229879 - RNA, 22 nt, Human
cugcagaggucuugcugauggu

SEQ ID NO: 229880 - RNA, 22 nt, Human
uggugcccauguaucccuucac

SEQ ID NO: 229881 - RNA, 22 nt, Human
caggcacaaaaggaccccagca

SEQ ID NO: 229882 - RNA, 22 nt, Human
uauugacauuuuuauagcuuga

SEQ ID NO: 229883 - RNA, 20 nt, Human
uggcggggaugagggaguua

SEQ ID NO: 229884 - RNA, 22 nt, Human
agucagcagccuggccaggaga

SEQ ID NO: 229885 - RNA, 22 nt, Human
uagcaagaagcugucacaggug

SEQ ID NO: 229886 - RNA, 22 nt, Human
gggcuucuugcaggggcaacau

SEQ ID NO: 229887 - RNA, 22 nt, Human
ucauagaaauggaaaguauauu

SEQ ID NO: 229888 - RNA, 22 nt, Human
cuccuggugacucccagauaaa

SEQ ID NO: 229889 - RNA, 22 nt, Human
uuggauccaucucaggcauagg

SEQ ID NO: 229890 - RNA, 22 nt, Human
auucaagagcccauguuuccug

SEQ ID NO: 229891 - RNA, 22 nt, Human
aaucugcacaauucaguuucag

SEQ ID NO: 229892 - RNA, 22 nt, Human
acauuaaagaguaagguuaguu

SEQ ID NO: 229893 - RNA, 22 nt, Human
uagauaccugcuggaccucauu

SEQ ID NO: 229894 - RNA, 22 nt, Human
gccuggugauaagcagugaccu

SEQ ID NO: 229895 - RNA, 22 nt, Human
acaggcugagcguccaucuuca

SEQ ID NO: 229896 - RNA, 21 nt, Human
gacacaguaaucuuggggcuu

SEQ ID NO: 229897 - RNA, 22 nt, Human
aguuaacuaaauuaagagacaa

SEQ ID NO: 229898 - RNA, 19 nt, Human
ggcucagggcgcugccgcc

SEQ ID NO: 229899 - RNA, 22 nt, Human
ucuuuuguugccuacuuauuaa

SEQ ID NO: 229900 - RNA, 22 nt, Human
cuuucagagguuacucaggaaa

SEQ ID NO: 229901 - RNA, 22 nt, Human
uccuuucuccuuccgacuucau

SEQ ID NO: 229902 - RNA, 22 nt, Human
accuuggcaguuucuaccuuuu

SEQ ID NO: 229903 - RNA, 22 nt, Human
cucagugucuuauuguacacau

SEQ ID NO: 229904 - RNA, 22 nt, Human
ccauaguacauaauacauuuua

SEQ ID NO: 229905 - RNA, 22 nt, Human
aucuuugcuauuguaaaucacg

SEQ ID NO: 229906 - RNA, 22 nt, Human
augcauaucuccuaucuccuca

SEQ ID NO: 229907 - RNA, 22 nt, Human
aaagacagagcuguaggggaaa

SEQ ID NO: 229908 - RNA, 22 nt, Human
uggcccagggcacagcagggag

SEQ ID NO: 229909 - RNA, 22 nt, Human
accucagauuguggcuccgcug

SEQ ID NO: 229910 - RNA, 22 nt, Human
auauacaugggaauauguggag

SEQ ID NO: 229911 - RNA, 22 nt, Human
gggagcugagggaccucugugg

SEQ ID NO: 229912 - RNA, 16 nt, Human
gacaaguggaggggcc

SEQ ID NO: 229913 - RNA, 22 nt, Human
gacugccucaguuucccugcag

SEQ ID NO: 229914 - RNA, 22 nt, Human
gagguagcaugcuggaagggac

SEQ ID NO: 229915 - RNA, 20 nt, Human
cucucuccaucucaguggcc

SEQ ID NO: 229916 - RNA, 22 nt, Human
uagcaaaagcucaacaggaagg

SEQ ID NO: 229917 - RNA, 22 nt, Human
ccugcuuugcugguaccaucag

SEQ ID NO: 229918 - RNA, 22 nt, Human
ggaagcagccugaagccaaggg

SEQ ID NO: 229919 - RNA, 22 nt, Human
aagcaaaacgugcucuaggagg

SEQ ID NO: 229920 - RNA, 22 nt, Human
uuuagagcccaugugaguguga

SEQ ID NO: 229921 - RNA, 22 nt, Human
aggccaagauuuuggaucagcu

SEQ ID NO: 229922 - RNA, 22 nt, Human
ugcuccaggcaagcugagaguu

SEQ ID NO: 229923 - RNA, 22 nt, Human
aagugcaggaguggggaaagua

SEQ ID NO: 229924 - RNA, 22 nt, Human
cagaagcauugacuccuugcuc

SEQ ID NO: 229925 - RNA, 20 nt, Human
aagucccuaagucucuggcc

SEQ ID NO: 229926 - RNA, 22 nt, Human
gccagccauaggccagcacugg

SEQ ID NO: 229927 - RNA, 22 nt, Human
cuacauaaucuggauuugucug

SEQ ID NO: 229928 - RNA, 22 nt, Human
auuauuuagaaaucgauugaaa

SEQ ID NO: 229929 - RNA, 22 nt, Human
aaagcaauggcacaugauggua

SEQ ID NO: 229930 - RNA, 22 nt, Human
cagguccccuccccuaccaggc

SEQ ID NO: 229931 - RNA, 22 nt, Human
agaaauguauagugaauuuuuc

SEQ ID NO: 229932 - RNA, 18 nt, Human
cuugagcuaagggacccc

SEQ ID NO: 229933 - RNA, 22 nt, Human
aagagcuggcccaaucugagca

SEQ ID NO: 229934 - RNA, 22 nt, Human
ccacccuaacaauccuuacugu

SEQ ID NO: 229935 - RNA, 22 nt, Human
uuugacuccuguguuucuggaa

SEQ ID NO: 229936 - RNA, 22 nt, Human
cauauuucagucuaagaugugu

SEQ ID NO: 229937 - RNA, 21 nt, Human
caauuacagauggcucagggg

SEQ ID NO: 229938 - RNA, 23 nt, Human
uggcccugaaucuguccuggagg

SEQ ID NO: 229939 - RNA, 22 nt, Human
gcccagcacauugcugaggacc

SEQ ID NO: 229940 - RNA, 22 nt, Human
gaggcuggagauauuccaaucu

SEQ ID NO: 229941 - RNA, 23 nt, Human
ggccucagcgcacagaaacugcu

SEQ ID NO: 229942 - RNA, 22 nt, Human
agguuauaugucauacugaagu

SEQ ID NO: 229943 - RNA, 22 nt, Human
ugcucuccugcuccucagccca

SEQ ID NO: 229944 - RNA, 15 nt, Human
ccaggcucugcacuc

SEQ ID NO: 229945 - RNA, 22 nt, Human
agcuggagauucuggggacagu

SEQ ID NO: 229946 - RNA, 22 nt, Human
uccacuccuuaugccagacggu

SEQ ID NO: 229947 - RNA, 22 nt, Human
uggcagcagggaggccaguguu

SEQ ID NO: 229948 - RNA, 22 nt, Human
cuggccagugacugcucacccg

SEQ ID NO: 229949 - RNA, 22 nt, Human
uagaaagacaugggccagcagc

SEQ ID NO: 229950 - RNA, 22 nt, Human
cauuuguacagaacagcuuuau

SEQ ID NO: 229951 - RNA, 22 nt, Human
uauuaauaugugugugcaugua

SEQ ID NO: 229952 - RNA, 22 nt, Human
uguucaguuaacacagacacca

SEQ ID NO: 229953 - RNA, 18 nt, Human
auugagcaugacagaccu

SEQ ID NO: 229954 - RNA, 22 nt, Human
agggagcucgaugccugagugu

SEQ ID NO: 229955 - RNA, 22 nt, Human
aguaacacuauuuucauaugua

SEQ ID NO: 229956 - RNA, 22 nt, Human
caggccagagcgcgugguuggg

SEQ ID NO: 229957 - RNA, 22 nt, Human
uagagucuaguguauacaaagu

SEQ ID NO: 229958 - RNA, 22 nt, Human
ucacacaugcuaagccagagau

SEQ ID NO: 229959 - RNA, 22 nt, Human
aagggcugaaagaccuugggca

SEQ ID NO: 229960 - RNA, 22 nt, Human
ucccucacugguucugcauccc

SEQ ID NO: 229961 - RNA, 22 nt, Human
aaacucuggggguggagcccag

SEQ ID NO: 229962 - RNA, 22 nt, Human
uaguauucagcuucucaggcaa

SEQ ID NO: 229963 - RNA, 22 nt, Human
cuguuauauugguauauuuaca

SEQ ID NO: 229964 - RNA, 22 nt, Human
agucugguauuggucuuuaauc

SEQ ID NO: 229965 - RNA, 22 nt, Human
ggcugugagcaggcagaaugcu

SEQ ID NO: 229966 - RNA, 22 nt, Human
ucaugccaaaauccaguggcuu

SEQ ID NO: 229967 - RNA, 22 nt, Human
aagaaugucguugguauuuuaa

SEQ ID NO: 229968 - RNA, 22 nt, Human
ccucaguguguggauguuagag

SEQ ID NO: 229969 - RNA, 22 nt, Human
cuugaaucuggcuuugccacuu

SEQ ID NO: 229970 - RNA, 22 nt, Human
ggcagggguccugguguugacu

SEQ ID NO: 229971 - RNA, 22 nt, Human
aaugauuuggcaaaggaaucca

SEQ ID NO: 229972 - RNA, 22 nt, Human
cuccugcaugguugugcuauug

SEQ ID NO: 229973 - RNA, 22 nt, Human
uuuagccaacuauaugacuagu

SEQ ID NO: 229974 - RNA, 22 nt, Human
uucugccauugccaugagggcu

SEQ ID NO: 229975 - RNA, 22 nt, Human
gggcucuguuuagaccagagau

SEQ ID NO: 229976 - RNA, 22 nt, Human
ugucuccaggggcaggccagcc

SEQ ID NO: 229977 - RNA, 22 nt, Human
ggcagcugcaaaucugcucugu

SEQ ID NO: 229978 - RNA, 22 nt, Human
ucugagccccuagaacugagcg

SEQ ID NO: 229979 - RNA, 22 nt, Human
uccuccccugcccaugaggagg

SEQ ID NO: 229980 - RNA, 22 nt, Human
ucugccuuccccauaaucugau

SEQ ID NO: 229981 - RNA, 22 nt, Human
ucucucagggggaaggcugaag

SEQ ID NO: 229982 - RNA, 18 nt, Human
ggagcugggccugguucc

SEQ ID NO: 229983 - RNA, 22 nt, Human
uuaauuuucucaucugugaaau

SEQ ID NO: 229984 - RNA, 22 nt, Human
uccagcuguugauauucuaggu

SEQ ID NO: 229985 - RNA, 22 nt, Human
ucacacaggguucuggucucau

SEQ ID NO: 229986 - RNA, 22 nt, Human
cacauucacuucucuguccacc

SEQ ID NO: 229987 - RNA, 22 nt, Human
auugaacauacauauccacacc

SEQ ID NO: 229988 - RNA, 22 nt, Human
uuggccagugcuugugauuuuc

SEQ ID NO: 229989 - RNA, 22 nt, Human
uggcagguccacucacagaucu

SEQ ID NO: 229990 - RNA, 22 nt, Human
ugggccucccaugucuuaggga

SEQ ID NO: 229991 - RNA, 22 nt, Human
cauuagaagaacaguuauauua

SEQ ID NO: 229992 - RNA, 22 nt, Human
agcagcaggguguaauugggca

SEQ ID NO: 229993 - RNA, 22 nt, Human
aacagcaccgaagucgucuaag

SEQ ID NO: 229994 - RNA, 22 nt, Human
agucagugacuuuugcugagag

SEQ ID NO: 229995 - RNA, 22 nt, Human
ugguccagucguuccuuuccuu

SEQ ID NO: 229996 - RNA, 22 nt, Human
acagaauauugguuacuguugc

SEQ ID NO: 229997 - RNA, 22 nt, Human
ucacugcagagaccucuaguca

SEQ ID NO: 229998 - RNA, 22 nt, Human
guccacugcugugugcuucacc

SEQ ID NO: 229999 - RNA, 22 nt, Human
uugucauugggguuauuuguua

SEQ ID NO: 230000 - RNA, 22 nt, Human
gggaaagacccugagucuuauu

SEQ ID NO: 230001 - RNA, 22 nt, Human
aggaaacucaaagugucaggua

SEQ ID NO: 230002 - RNA, 22 nt, Human
aauuuggcagugucuugaagua

SEQ ID NO: 230003 - RNA, 22 nt, Human
uuuauauuaccuggaauagcuu

SEQ ID NO: 230004 - RNA, 22 nt, Human
ccacucugcugugcuccaugau

SEQ ID NO: 230005 - RNA, 22 nt, Human
uuccuggugguggugacagcac

SEQ ID NO: 230006 - RNA, 22 nt, Human
augcaacaguucauaguuuuau

SEQ ID NO: 230007 - RNA, 22 nt, Human
cagauaaauagauagauaaacu

SEQ ID NO: 230008 - RNA, 22 nt, Human
aggacacagcugcucugcagag

SEQ ID NO: 230009 - RNA, 22 nt, Human
ugugugucagagucuccauggu

SEQ ID NO: 230010 - RNA, 22 nt, Human
cugugugcugaaaugcagugag

SEQ ID NO: 230011 - RNA, 22 nt, Human
gacuuucugagucaaagaaagg

SEQ ID NO: 230012 - RNA, 22 nt, Human
uuaguuuucucaucuaucucac

SEQ ID NO: 230013 - RNA, 22 nt, Human
aucucccagccacagcauucuu

SEQ ID NO: 230014 - RNA, 22 nt, Human
ccagcucucuguccuccccaca

SEQ ID NO: 230015 - RNA, 22 nt, Human
ggagcugaaggggugggcucag

SEQ ID NO: 230016 - RNA, 22 nt, Human
acuccuggggauccauuccuuu

SEQ ID NO: 230017 - RNA, 22 nt, Human
aagcaggauggagguugaguua

SEQ ID NO: 230018 - RNA, 19 nt, Human
augcuuuauguuauuucuu

SEQ ID NO: 230019 - RNA, 22 nt, Human
agcuuuaucccuugcccaucga

SEQ ID NO: 230020 - RNA, 19 nt, Human
aguuuauuauaggugauuc

SEQ ID NO: 230021 - RNA, 22 nt, Human
auuuccuaggugcucgagugcu

SEQ ID NO: 230022 - RNA, 19 nt, Human
ugagcuggcugagccucuc

SEQ ID NO: 230023 - RNA, 19 nt, Human
ucaaugcaugaaaucagcc

SEQ ID NO: 230024 - RNA, 22 nt, Human
uccagcucaaagugcuccuguc

SEQ ID NO: 230025 - RNA, 22 nt, Human
gccugcugaagccagagugugu

SEQ ID NO: 230026 - RNA, 22 nt, Human
gaaacugaguaggcuagagcac

SEQ ID NO: 230027 - RNA, 22 nt, Human
ggaaaacugaggcucucagcag

SEQ ID NO: 230028 - RNA, 22 nt, Human
agccagaguugaaugugagucu

SEQ ID NO: 230029 - RNA, 22 nt, Human
agcccuaacucccaguaucuug

SEQ ID NO: 230030 - RNA, 22 nt, Human
uaggcuucccgcucacaugccc

SEQ ID NO: 230031 - RNA, 22 nt, Human
uucuacaucacuuaacaugcua

SEQ ID NO: 230032 - RNA, 22 nt, Human
gcaggugugaaugugaauuaag

SEQ ID NO: 230033 - RNA, 22 nt, Human
cccugcagcuuuugcauaguca

SEQ ID NO: 230034 - RNA, 22 nt, Human
ucauugcagaaauaaaggugaa

SEQ ID NO: 230035 - RNA, 22 nt, Human
cagcaggcguugggagaaagac

SEQ ID NO: 230036 - RNA, 22 nt, Human
uugagaauaaauuagcagacau

SEQ ID NO: 230037 - RNA, 22 nt, Human
cagcuccugcagcugcugccgu

SEQ ID NO: 230038 - RNA, 17 nt, Human
ugaggccugcaucagug

SEQ ID NO: 230039 - RNA, 22 nt, Human
auauugaucuuggaacugauuu

SEQ ID NO: 230040 - RNA, 22 nt, Human
uacaaugugugcuucuugucac

SEQ ID NO: 230041 - RNA, 22 nt, Human
auaggagccauaaauaaaaucu

SEQ ID NO: 230042 - RNA, 22 nt, Human
aaauucacuugccugcuuagcu

SEQ ID NO: 230043 - RNA, 22 nt, Human
aggaagaaaugugacuucaaac

SEQ ID NO: 230044 - RNA, 22 nt, Human
ucuucuggaugagagcggaggc

SEQ ID NO: 230045 - RNA, 22 nt, Human
gacaggcugugauggccgggag

SEQ ID NO: 230046 - RNA, 22 nt, Human
uccaggagaggccugaccaggu

SEQ ID NO: 230047 - RNA, 22 nt, Human
cagcagcaaaucuagaagagga

SEQ ID NO: 230048 - RNA, 22 nt, Human
gaauuacaaagugagacaagcu

SEQ ID NO: 230049 - RNA, 23 nt, Human
ugcaguaggauggggcugggccu

SEQ ID NO: 230050 - RNA, 22 nt, Human
uccaggcuggagugcaguggcg

SEQ ID NO: 230051 - RNA, 22 nt, Human
acagguggaaacaugguguugg

SEQ ID NO: 230052 - RNA, 22 nt, Human
ccuccuggaaaaauucccuggc

SEQ ID NO: 230053 - RNA, 22 nt, Human
ucuccaagaaaagaucucagcu

SEQ ID NO: 230054 - RNA, 22 nt, Human
cuucuccucugaguccugggag

SEQ ID NO: 230055 - RNA, 22 nt, Human
cacaggugcaagaaguugcagu

SEQ ID NO: 230056 - RNA, 22 nt, Human
acaagagcauugcagguguguu

SEQ ID NO: 230057 - RNA, 22 nt, Human
ucaauuauuugauaugaaaggg

SEQ ID NO: 230058 - RNA, 22 nt, Human
agagcccugacggggacagaug

SEQ ID NO: 230059 - RNA, 18 nt, Human
gcuccugguuggaaagaa

SEQ ID NO: 230060 - RNA, 22 nt, Human
uuaucugaaaaccucaaaauau

SEQ ID NO: 230061 - RNA, 19 nt, Human
cucuuuggagauccuugga

SEQ ID NO: 230062 - RNA, 21 nt, Human
ucucuuucuggaagcuucccu

SEQ ID NO: 230063 - RNA, 22 nt, Human
caggagacaguguuauuuuauu

SEQ ID NO: 230064 - RNA, 22 nt, Human
gagcaagaguguuggacuuuga

SEQ ID NO: 230065 - RNA, 22 nt, Human
cugagucucccggcaguggagg

SEQ ID NO: 230066 - RNA, 22 nt, Human
uggccuggccacauccagcagg

SEQ ID NO: 230067 - RNA, 22 nt, Human
cucugucccagacccaccucuc

SEQ ID NO: 230068 - RNA, 22 nt, Human
gaacaguacuaagagcuuuaca

SEQ ID NO: 230069 - RNA, 17 nt, Human
acccaggcucuaucuug

SEQ ID NO: 230070 - RNA, 22 nt, Human
gaggguccuggcuaagucugac

SEQ ID NO: 230071 - RNA, 22 nt, Human
cacuugauguugucacuauugc

SEQ ID NO: 230072 - RNA, 22 nt, Human
ugcacuucauuguaaauuguac

SEQ ID NO: 230073 - RNA, 22 nt, Human
acagccagguaaaggcauggca

SEQ ID NO: 230074 - RNA, 22 nt, Human
ucugaaagucugaaacaguguc

SEQ ID NO: 230075 - RNA, 22 nt, Human
aaaccuuucugcucucagcgua

SEQ ID NO: 230076 - RNA, 22 nt, Human
uucagagaguccaguaugcagu

SEQ ID NO: 230077 - RNA, 17 nt, Human
cucccccccacgugucc

SEQ ID NO: 230078 - RNA, 23 nt, Human
auuuuacaggucaguuccuugaa

SEQ ID NO: 230079 - RNA, 22 nt, Human
ugguacaagauguucuaacuga

SEQ ID NO: 230080 - RNA, 22 nt, Human
gaauguuuaaggaaggcguggc

SEQ ID NO: 230081 - RNA, 22 nt, Human
auucuacaggacuggcaauccc

SEQ ID NO: 230082 - RNA, 22 nt, Human
uuccugccccugagagcuccca

SEQ ID NO: 230083 - RNA, 18 nt, Human
ucucuccaucuauuuguu

SEQ ID NO: 230084 - RNA, 22 nt, Human
ccucuggcucacagcaccaacu

SEQ ID NO: 230085 - RNA, 22 nt, Human
auauucacuccuggugagacua

SEQ ID NO: 230086 - RNA, 22 nt, Human
cugcugugcaggugccuaugau

SEQ ID NO: 230087 - RNA, 22 nt, Human
ccacagcaccugcagccaguug

SEQ ID NO: 230088 - RNA, 22 nt, Human
aaacugguagcaauuuaagggu

SEQ ID NO: 230089 - RNA, 22 nt, Human
uugcugauucaugauuugagaa

SEQ ID NO: 230090 - RNA, 22 nt, Human
gaauacaugaacccuccugugg

SEQ ID NO: 230091 - RNA, 22 nt, Human
uaaagugguggugcuaauguau

SEQ ID NO: 230092 - RNA, 22 nt, Human
gucuuuggaaagacaaaguuca

SEQ ID NO: 230093 - RNA, 22 nt, Human
acugggccagaucagagcaacu

SEQ ID NO: 230094 - RNA, 22 nt, Human
acauccagaucucagcauggcu

SEQ ID NO: 230095 - RNA, 22 nt, Human
agugagucaaaaaacuuagaua

SEQ ID NO: 230096 - RNA, 23 nt, Human
ugggauagaauuucauggcugcu

SEQ ID NO: 230097 - RNA, 22 nt, Human
uuucauuacguguuugacuugu

SEQ ID NO: 230098 - RNA, 22 nt, Human
gaggcaaggccgcacgucucag

SEQ ID NO: 230099 - RNA, 22 nt, Human
acucagagugcaucuccuauuu

SEQ ID NO: 230100 - RNA, 22 nt, Human
agcagggcucacauuaguggau

SEQ ID NO: 230101 - RNA, 18 nt, Human
aggagacagccucaccug

SEQ ID NO: 230102 - RNA, 22 nt, Human
cauguaaagaauuucacacaag

SEQ ID NO: 230103 - RNA, 22 nt, Human
agauuguagaaacuguagcauu

SEQ ID NO: 230104 - RNA, 22 nt, Human
augcauaauguauguauugacu

SEQ ID NO: 230105 - RNA, 22 nt, Human
ccucccucuuucagucccacag

SEQ ID NO: 230106 - RNA, 22 nt, Human
aggcugagcuggcccuugaaau

SEQ ID NO: 230107 - RNA, 22 nt, Human
ggggcggggcucugagaagcau

SEQ ID NO: 230108 - RNA, 22 nt, Human
ccagugcacagccaggcaggug

SEQ ID NO: 230109 - RNA, 22 nt, Human
gcagcccaggagcaggcgaccc

SEQ ID NO: 230110 - RNA, 22 nt, Human
ugaaagcuuguuggaaauguag

SEQ ID NO: 230111 - RNA, 22 nt, Human
uuucaggaaggugaggcacaug

SEQ ID NO: 230112 - RNA, 22 nt, Human
ucagaggcucaucugccuugca

SEQ ID NO: 230113 - RNA, 22 nt, Human
cuccagggaugagacagaguag

SEQ ID NO: 230114 - RNA, 22 nt, Human
cugaaugagggauucugagggc

SEQ ID NO: 230115 - RNA, 17 nt, Human
ccugccugagccauagc

SEQ ID NO: 230116 - RNA, 22 nt, Human
uuuagagaggcucuguaaaaug

SEQ ID NO: 230117 - RNA, 22 nt, Human
ggaguagcugcauuccgagcac

SEQ ID NO: 230118 - RNA, 22 nt, Human
ucuguaggcuuacgcggcuucu

SEQ ID NO: 230119 - RNA, 22 nt, Human
gaugaucugagguacaugaaac

SEQ ID NO: 230120 - RNA, 22 nt, Human
auugcuggcccagaugcuuuag

SEQ ID NO: 230121 - RNA, 20 nt, Human
uucugggcagccauguacuu

SEQ ID NO: 230122 - RNA, 22 nt, Human
aggagcucucccaugcugcaga

SEQ ID NO: 230123 - RNA, 22 nt, Human
uccuggcccucugcaaacgcca

SEQ ID NO: 230124 - RNA, 22 nt, Human
ugacauguguaaucagcuccgu

SEQ ID NO: 230125 - RNA, 22 nt, Human
ucuuuuauuaggcugaaauggg

SEQ ID NO: 230126 - RNA, 21 nt, Human
ucucugagaggucugcuuaga

SEQ ID NO: 230127 - RNA, 22 nt, Human
ucccugagagcacuggggagcc

SEQ ID NO: 230128 - RNA, 22 nt, Human
agacaagacuaggcaguuguug

SEQ ID NO: 230129 - RNA, 22 nt, Human
agccggccauguggucuugugc

SEQ ID NO: 230130 - RNA, 22 nt, Human
uagauaaaagggcaaagggcau

SEQ ID NO: 230131 - RNA, 22 nt, Human
ccuggcugggccugauuucuca

SEQ ID NO: 230132 - RNA, 22 nt, Human
caugaaauaugcuaccugucuu

SEQ ID NO: 230133 - RNA, 22 nt, Human
agaaacucuggaagaacuuuua

SEQ ID NO: 230134 - RNA, 16 nt, Human
ggcaccagugaacaca

SEQ ID NO: 230135 - RNA, 22 nt, Human
guggccagaggucccauguguc

SEQ ID NO: 230136 - RNA, 18 nt, Human
uguggcugguccacacug

SEQ ID NO: 230137 - RNA, 22 nt, Human
ugggccugccccaggcuucagc

SEQ ID NO: 230138 - RNA, 22 nt, Human
gguccuggaaauugacggaaag

SEQ ID NO: 230139 - RNA, 22 nt, Human
gcagucuauaaaucagcuuugc

SEQ ID NO: 230140 - RNA, 22 nt, Human
ccaggcuccccaggaggcccuu

SEQ ID NO: 230141 - RNA, 22 nt, Human
aaaguucuuuuucuauaaaucc

SEQ ID NO: 230142 - RNA, 22 nt, Human
gcagacaauuuauuagcagauu

SEQ ID NO: 230143 - RNA, 22 nt, Human
guuaauaaagguauagaaucag

SEQ ID NO: 230144 - RNA, 22 nt, Human
ucacacaucucagguguuuaau

SEQ ID NO: 230145 - RNA, 22 nt, Human
ccugggagguggagguugcagu

SEQ ID NO: 230146 - RNA, 22 nt, Human
ucccaggguuacagccagggca

SEQ ID NO: 230147 - RNA, 22 nt, Human
gguccagucagauauucaugca

SEQ ID NO: 230148 - RNA, 22 nt, Human
cuggcuuucauuucaagcacgu

SEQ ID NO: 230149 - RNA, 22 nt, Human
ggcugcuguuucagagacuguu

SEQ ID NO: 230150 - RNA, 22 nt, Human
aaggcagugguuggguggagga

SEQ ID NO: 230151 - RNA, 22 nt, Human
augacagacagaagggauuuuu

SEQ ID NO: 230152 - RNA, 22 nt, Human
uggagggucaccccuugcugag

SEQ ID NO: 230153 - RNA, 22 nt, Human
uggccagcacuuagcccuuacc

SEQ ID NO: 230154 - RNA, 22 nt, Human
aauugcuuacuguuuuucaccu

SEQ ID NO: 230155 - RNA, 22 nt, Human
uacacugugacaaucaugacag

SEQ ID NO: 230156 - RNA, 22 nt, Human
acauguggaggaggcgagggua

SEQ ID NO: 230157 - RNA, 22 nt, Human
aaugugguuaacccauuuaaga

SEQ ID NO: 230158 - RNA, 22 nt, Human
auauguguacgugcaguauaua

SEQ ID NO: 230159 - RNA, 22 nt, Human
ucaguguuuuuaaagcaauaua

SEQ ID NO: 230160 - RNA, 22 nt, Human
cuucugagggccuuugcuucca

SEQ ID NO: 230161 - RNA, 22 nt, Human
auuuucagagacaucuggacuu

SEQ ID NO: 230162 - RNA, 22 nt, Human
ccucaaaggccuggcaccagaa

SEQ ID NO: 230163 - RNA, 22 nt, Human
uuaguuauacuacugaauggag

SEQ ID NO: 230164 - RNA, 20 nt, Human
ggggcagguuuuuauggcua

SEQ ID NO: 230165 - RNA, 22 nt, Human
ggggaggaccuuuccaaggcuu

SEQ ID NO: 230166 - RNA, 22 nt, Human
acacaugaggaugaggggauca

SEQ ID NO: 230167 - RNA, 22 nt, Human
aaugccaacuuggauauacauu

SEQ ID NO: 230168 - RNA, 22 nt, Human
ucagaccccagaaugaagccag

SEQ ID NO: 230169 - RNA, 22 nt, Human
guuauguauugggaaauccaag

SEQ ID NO: 230170 - RNA, 22 nt, Human
aagggaggccagagguuuugca

SEQ ID NO: 230171 - RNA, 22 nt, Human
auacaugucaucauauguuugu

SEQ ID NO: 230172 - RNA, 21 nt, Human
gccugcaguuuugaagcccuu

SEQ ID NO: 230173 - RNA, 22 nt, Human
ucuauagaucaguaaauaucuc

SEQ ID NO: 230174 - RNA, 22 nt, Human
aggaacagaagagcaaugcagg

SEQ ID NO: 230175 - RNA, 22 nt, Human
uccugauggccucuggcuccag

SEQ ID NO: 230176 - RNA, 21 nt, Human
gcucagaguauugcacuguuu

SEQ ID NO: 230177 - RNA, 22 nt, Human
ugccuuuuccagcuuccagagg

SEQ ID NO: 230178 - RNA, 22 nt, Human
aaagauuucagaagccugugcc

SEQ ID NO: 230179 - RNA, 22 nt, Human
aagccaagguuuuggucacagc

SEQ ID NO: 230180 - RNA, 22 nt, Human
aaagcacaggagaguucaguaa

SEQ ID NO: 230181 - RNA, 22 nt, Human
cccaggcucuuaugugacuugc

SEQ ID NO: 230182 - RNA, 19 nt, Human
gcaaaucugaccaaauagu

SEQ ID NO: 230183 - RNA, 22 nt, Human
uucugggcucccacauauuuca

SEQ ID NO: 230184 - RNA, 22 nt, Human
uuggaucuuaugaagguggcau

SEQ ID NO: 230185 - RNA, 22 nt, Human
agaaauuauuagugaauagucu

SEQ ID NO: 230186 - RNA, 22 nt, Human
auggccugaugcaccuguccca

SEQ ID NO: 230187 - RNA, 18 nt, Human
caauagaaacaguaggaa

SEQ ID NO: 230188 - RNA, 22 nt, Human
ucugggaaaugcuguuccuugu

SEQ ID NO: 230189 - RNA, 22 nt, Human
acaugucuacacauucugcaau

SEQ ID NO: 230190 - RNA, 22 nt, Human
cugggccucaagcucagauuuc

SEQ ID NO: 230191 - RNA, 22 nt, Human
uggcugagguuaugcugguugu

SEQ ID NO: 230192 - RNA, 22 nt, Human
aguuucuguuaccauauuugac

SEQ ID NO: 230193 - RNA, 22 nt, Human
gacaggcuuucucaggaugagc

SEQ ID NO: 230194 - RNA, 20 nt, Human
caaauucuguugaauacacc

SEQ ID NO: 230195 - RNA, 22 nt, Human
ugacaggcuaggaggcugaagg

SEQ ID NO: 230196 - RNA, 22 nt, Human
uuggccucauggacagcucauc

SEQ ID NO: 230197 - RNA, 22 nt, Human
ccugugcucccauagcuucugu

SEQ ID NO: 230198 - RNA, 22 nt, Human
acugucuucauaucugugucuc

SEQ ID NO: 230199 - RNA, 22 nt, Human
aagugcauuagauagaaugaug

SEQ ID NO: 230200 - RNA, 22 nt, Human
ucucugucugcacccaaucaau

SEQ ID NO: 230201 - RNA, 22 nt, Human
gcaagcugugauuuaugugaau

SEQ ID NO: 230202 - RNA, 21 nt, Human
agagccugagaucuuccagca

SEQ ID NO: 230203 - RNA, 22 nt, Human
caggugguuugauaggauaacu

SEQ ID NO: 230204 - RNA, 22 nt, Human
auuccaaagcacaucagaacua

SEQ ID NO: 230205 - RNA, 22 nt, Human
aguaaaaauugaggugcaaaau

SEQ ID NO: 230206 - RNA, 22 nt, Human
aguguguucucaaugaaaagaa

SEQ ID NO: 230207 - RNA, 22 nt, Human
ucuuagcaaauuuucuuugccu

SEQ ID NO: 230208 - RNA, 22 nt, Human
ucucuagagcaugugcugggca

SEQ ID NO: 230209 - RNA, 22 nt, Human
cagguggcuucucugcagccuu

SEQ ID NO: 230210 - RNA, 22 nt, Human
ugaaggcuuggauuggucauuu

SEQ ID NO: 230211 - RNA, 22 nt, Human
ccugccagccagaucacucgcc

SEQ ID NO: 230212 - RNA, 22 nt, Human
cucugagcugaaacaugagcau

SEQ ID NO: 230213 - RNA, 22 nt, Human
uggcucagcgcggccuggucuu

SEQ ID NO: 230214 - RNA, 22 nt, Human
gcuggguccaugguccucgggu

SEQ ID NO: 230215 - RNA, 22 nt, Human
cauaaaauggcuuguucuuuaa

SEQ ID NO: 230216 - RNA, 22 nt, Human
aaaugacaauaaaaguccaugc

SEQ ID NO: 230217 - RNA, 22 nt, Human
uuagggaaggacagugaagaaa

SEQ ID NO: 230218 - RNA, 22 nt, Human
aaagccaggcuggccugggguu

SEQ ID NO: 230219 - RNA, 18 nt, Human
gcugcaggcgccugcggu

SEQ ID NO: 230220 - RNA, 22 nt, Human
gcauuacaggcuguaagaugca

SEQ ID NO: 230221 - RNA, 22 nt, Human
aaagugacaaccauuuauuaag

SEQ ID NO: 230222 - RNA, 22 nt, Human
uaggcuggggguaggaauugag

SEQ ID NO: 230223 - RNA, 21 nt, Human
gcugagacgcaaccucaguga

SEQ ID NO: 230224 - RNA, 18 nt, Human
uuucacagauucaugacu

SEQ ID NO: 230225 - RNA, 22 nt, Human
gcauauuaguaaucuuucaaca

SEQ ID NO: 230226 - RNA, 22 nt, Human
cauuugaaauucuuagaacaaa

SEQ ID NO: 230227 - RNA, 22 nt, Human
uuuccucugggcccugccaccc

SEQ ID NO: 230228 - RNA, 22 nt, Human
acuagaaccagaggaggcaggu

SEQ ID NO: 230229 - RNA, 22 nt, Human
aagaaucucucaagugugacaa

SEQ ID NO: 230230 - RNA, 23 nt, Human
gcagaggagcaagcuggacacca

SEQ ID NO: 230231 - RNA, 22 nt, Human
uucccacauucuuuacauucau

SEQ ID NO: 230232 - RNA, 22 nt, Human
uuagaacaccauucuauauuac

SEQ ID NO: 230233 - RNA, 22 nt, Human
aaggcuuguugucacgcucuug

SEQ ID NO: 230234 - RNA, 22 nt, Human
ggccagcagaccucagggacuc

SEQ ID NO: 230235 - RNA, 22 nt, Human
uauguacaccaaggauugaaaa

SEQ ID NO: 230236 - RNA, 22 nt, Human
gcugccugucccaggaugagga

SEQ ID NO: 230237 - RNA, 22 nt, Human
gguccaaggcucgguggcgggg

SEQ ID NO: 230238 - RNA, 22 nt, Human
gagcuuggccucuugaacgugg

SEQ ID NO: 230239 - RNA, 22 nt, Human
uagcugacagauacaaucagau

SEQ ID NO: 230240 - RNA, 22 nt, Human
agggcugacaaauggcagugac

SEQ ID NO: 230241 - RNA, 18 nt, Human
aagccaggucaagauaag

SEQ ID NO: 230242 - RNA, 22 nt, Human
uuuuuauacuuugcucaagauu

SEQ ID NO: 230243 - RNA, 22 nt, Human
uccauuuuucaugacuccucaa

SEQ ID NO: 230244 - RNA, 22 nt, Human
auggcugcagagaccugaagaa

SEQ ID NO: 230245 - RNA, 22 nt, Human
aagcacaucuccugugcagaac

SEQ ID NO: 230246 - RNA, 22 nt, Human
acauuguaaauaccuuuaucac

SEQ ID NO: 230247 - RNA, 22 nt, Human
uggcugaguguuccaaggagca

SEQ ID NO: 230248 - RNA, 22 nt, Human
uucuagaagugucuaugucugu

SEQ ID NO: 230249 - RNA, 18 nt, Human
uuucuuucugccuggggc

SEQ ID NO: 230250 - RNA, 22 nt, Human
uggugagauguauggaggguug

SEQ ID NO: 230251 - RNA, 22 nt, Human
ucugggcccuaaaccagcucua

SEQ ID NO: 230252 - RNA, 18 nt, Human
gaugaggcugucugagaa

SEQ ID NO: 230253 - RNA, 23 nt, Human
cagugugacgaggugaggcaggc

SEQ ID NO: 230254 - RNA, 22 nt, Human
uuagcuuucuuggagaauuaca

SEQ ID NO: 230255 - RNA, 22 nt, Human
cauuucuguucucuuccuguac

SEQ ID NO: 230256 - RNA, 22 nt, Human
cauuagggucucucagcugaau

SEQ ID NO: 230257 - RNA, 22 nt, Human
uguccucagauaugucuacucu

SEQ ID NO: 230258 - RNA, 22 nt, Human
cugagcagcaacccagagccuc

SEQ ID NO: 230259 - RNA, 22 nt, Human
ugagcuguguccugggggcagu

SEQ ID NO: 230260 - RNA, 23 nt, Human
acaugcaaaaaucacagucuccu

SEQ ID NO: 230261 - RNA, 22 nt, Human
uauguauucugaguacaaguuc

SEQ ID NO: 230262 - RNA, 22 nt, Human
uuucucuugcgauaugcuacac

SEQ ID NO: 230263 - RNA, 22 nt, Human
ucccagaggaaauggcagcuga

SEQ ID NO: 230264 - RNA, 22 nt, Human
uacagucaagcauaagaaguca

SEQ ID NO: 230265 - RNA, 23 nt, Human
uggcaaggaaugggauggagacu

SEQ ID NO: 230266 - RNA, 22 nt, Human
ucagaacaauuccuuuauaaca

SEQ ID NO: 230267 - RNA, 22 nt, Human
uacagguggaucacuaguauag

SEQ ID NO: 230268 - RNA, 22 nt, Human
cacuugaguucuuaauagucag

SEQ ID NO: 230269 - RNA, 22 nt, Human
aagaaauggaagauccauggug

SEQ ID NO: 230270 - RNA, 22 nt, Human
uagcuauuguugguaguuaccc

SEQ ID NO: 230271 - RNA, 22 nt, Human
gcuggccaguguggugaccacc

SEQ ID NO: 230272 - RNA, 22 nt, Human
uccuguuuaucugugugacucg

SEQ ID NO: 230273 - RNA, 22 nt, Human
gcagagccccauugcuggcggg

SEQ ID NO: 230274 - RNA, 22 nt, Human
gcuggugguuaccgugcuaaug

SEQ ID NO: 230275 - RNA, 22 nt, Human
agcugggcaaaaugugagguug

SEQ ID NO: 230276 - RNA, 22 nt, Human
ccucagcauccuggugaaguag

SEQ ID NO: 230277 - RNA, 22 nt, Human
cuggaguuagaguagacacuga

SEQ ID NO: 230278 - RNA, 22 nt, Human
auggcugcugccuuccccugcu

SEQ ID NO: 230279 - RNA, 22 nt, Human
ucuccagggugagcuaggccag

SEQ ID NO: 230280 - RNA, 22 nt, Human
ccaccagcuuugccacccugcu

SEQ ID NO: 230281 - RNA, 22 nt, Human
gcaggguggauggcagggccag

SEQ ID NO: 230282 - RNA, 22 nt, Human
acaggucuccagagugagagga

SEQ ID NO: 230283 - RNA, 22 nt, Human
aggcuguggcaucacaucagga

SEQ ID NO: 230284 - RNA, 22 nt, Human
acaaugcaauuguaaggugugu

SEQ ID NO: 230285 - RNA, 21 nt, Human
aaucauacaaaacaugucagg

SEQ ID NO: 230286 - RNA, 22 nt, Human
agugcauugcaucucugcuuca

SEQ ID NO: 230287 - RNA, 22 nt, Human
ucagaucuggugaaguuauagu

SEQ ID NO: 230288 - RNA, 22 nt, Human
ugcaugaacacaugugcaugua

SEQ ID NO: 230289 - RNA, 22 nt, Human
uagaaauguugguauuaacauu

SEQ ID NO: 230290 - RNA, 22 nt, Human
gcaucaagacgaugugaaaucg

SEQ ID NO: 230291 - RNA, 22 nt, Human
cagcccagagaaggggcccgug

SEQ ID NO: 230292 - RNA, 22 nt, Human
agaaucagugagcaguugugau

SEQ ID NO: 230293 - RNA, 22 nt, Human
uaccugcagcgggaauccauua

SEQ ID NO: 230294 - RNA, 22 nt, Human
uuaaauuuuagaaacagacucu

SEQ ID NO: 230295 - RNA, 22 nt, Human
aggcccauguucacuugcucag

SEQ ID NO: 230296 - RNA, 22 nt, Human
cacagcuuccauuagaaugaga

SEQ ID NO: 230297 - RNA, 22 nt, Human
gcaguguccaggguggucugca

SEQ ID NO: 230298 - RNA, 22 nt, Human
auuuuagagaaacaaacguagg

SEQ ID NO: 230299 - RNA, 22 nt, Human
agugccccaugggugccugggg

SEQ ID NO: 230300 - RNA, 22 nt, Human
acauauuuccaugcagcauguc

SEQ ID NO: 230301 - RNA, 22 nt, Human
ugaggggguuaauuaggagagu

SEQ ID NO: 230302 - RNA, 22 nt, Human
aguguccucaggcuuuguuccu

SEQ ID NO: 230303 - RNA, 22 nt, Human
augagcaguagguucauggcug

SEQ ID NO: 230304 - RNA, 22 nt, Human
ucucacugauuugagaccaagg

SEQ ID NO: 230305 - RNA, 22 nt, Human
ugcauauuuuauaaagauggaa

SEQ ID NO: 230306 - RNA, 22 nt, Human
gggcuaggcuuggccagcacug

SEQ ID NO: 230307 - RNA, 22 nt, Human
uaggcugggaagaaagauucuc

SEQ ID NO: 230308 - RNA, 18 nt, Human
gcagguguggagaagggg

SEQ ID NO: 230309 - RNA, 20 nt, Human
cagcaaaaugaaaauggauu

SEQ ID NO: 230310 - RNA, 22 nt, Human
aggaaaugcaggcaaauacucu

SEQ ID NO: 230311 - RNA, 18 nt, Human
ucagucuauuguauaaga

SEQ ID NO: 230312 - RNA, 22 nt, Human
gcugccuccacuggcucccagu

SEQ ID NO: 230313 - RNA, 22 nt, Human
cagggggcucaaaggagagugc

SEQ ID NO: 230314 - RNA, 22 nt, Human
uacugcaugguggaguggagcu

SEQ ID NO: 230315 - RNA, 22 nt, Human
ucacaaagggagggauagcugg

SEQ ID NO: 230316 - RNA, 22 nt, Human
agccugggcccugccucuucuc

SEQ ID NO: 230317 - RNA, 22 nt, Human
ucccagugcugcuaaagaggua

SEQ ID NO: 230318 - RNA, 22 nt, Human
uggguacuccuauuaguucagu

SEQ ID NO: 230319 - RNA, 22 nt, Human
agcuucuccugguacagaacug

SEQ ID NO: 230320 - RNA, 22 nt, Human
uuagcuuuuaagugugcuacau

SEQ ID NO: 230321 - RNA, 16 nt, Human
ucagggcagaauggca

SEQ ID NO: 230322 - RNA, 22 nt, Human
ggcuuuugaauuccaaggcauu

SEQ ID NO: 230323 - RNA, 22 nt, Human
aggaggccgggauucuggagau

SEQ ID NO: 230324 - RNA, 19 nt, Human
aucuuuggguccugaaggg

SEQ ID NO: 230325 - RNA, 18 nt, Human
gguggcuggggacggaca

SEQ ID NO: 230326 - RNA, 22 nt, Human
ucucagguggcccccaugagug

SEQ ID NO: 230327 - RNA, 22 nt, Human
aaugcacagcguuccaugcuug

SEQ ID NO: 230328 - RNA, 22 nt, Human
agugccagcuccacacagcagc

SEQ ID NO: 230329 - RNA, 23 nt, Human
ggcucacacggagugccuccacc

SEQ ID NO: 230330 - RNA, 22 nt, Human
augauacaucuucaugucagug

SEQ ID NO: 230331 - RNA, 22 nt, Human
uuguauuuuguuaugcuacugc

SEQ ID NO: 230332 - RNA, 20 nt, Human
ugagggcuaaccagacucug

SEQ ID NO: 230333 - RNA, 22 nt, Human
ucauuuguaccauuuuuuaaga

SEQ ID NO: 230334 - RNA, 16 nt, Human
uaugugucucaucuac

SEQ ID NO: 230335 - RNA, 23 nt, Human
ccuggggagcuguauccagagug

SEQ ID NO: 230336 - RNA, 22 nt, Human
aaggaaacagaggaugaccuug

SEQ ID NO: 230337 - RNA, 22 nt, Human
ucacucaauaucccaguggggc

SEQ ID NO: 230338 - RNA, 22 nt, Human
uggcuucuuuguagaaauugaa

SEQ ID NO: 230339 - RNA, 22 nt, Human
ucugguggugggccacaagcau

SEQ ID NO: 230340 - RNA, 22 nt, Human
uuucagaaaacuuaucaucagu

SEQ ID NO: 230341 - RNA, 22 nt, Human
uguuuuaagcucuagaagggga

SEQ ID NO: 230342 - RNA, 22 nt, Human
ugugacaagcauuguauauugg

SEQ ID NO: 230343 - RNA, 22 nt, Human
ucugugccuuuaagaagcucau

SEQ ID NO: 230344 - RNA, 20 nt, Human
ucaggcuggugggcuuuccc

SEQ ID NO: 230345 - RNA, 23 nt, Human
ucucagaaaggagaaguaauuug

SEQ ID NO: 230346 - RNA, 22 nt, Human
ccaggcagccugcuccauucug

SEQ ID NO: 230347 - RNA, 22 nt, Human
cagucuaagacucacgccaaga

SEQ ID NO: 230348 - RNA, 22 nt, Human
aaauacaguguguguucuuuga

SEQ ID NO: 230349 - RNA, 22 nt, Human
auaacagaguugggaagugaaa

SEQ ID NO: 230350 - RNA, 22 nt, Human
aaugugucuaugugguucacag

SEQ ID NO: 230351 - RNA, 18 nt, Human
gcugaaauucuaaacaaa

SEQ ID NO: 230352 - RNA, 22 nt, Human
auauuucaugggguuccauacu

SEQ ID NO: 230353 - RNA, 22 nt, Human
acauuucuuuucaucucuauau

SEQ ID NO: 230354 - RNA, 22 nt, Human
ccauucugaacaauucuugucu

SEQ ID NO: 230355 - RNA, 22 nt, Human
caaugugucaggaaaagggcca

SEQ ID NO: 230356 - RNA, 22 nt, Human
cgcaggugaaagaggcugggca

SEQ ID NO: 230357 - RNA, 22 nt, Human
gccacagcccgagcaccaugag

SEQ ID NO: 230358 - RNA, 22 nt, Human
uucacaguuugcugggacagga

SEQ ID NO: 230359 - RNA, 22 nt, Human
uacacuaauagccacacuaaug

SEQ ID NO: 230360 - RNA, 22 nt, Human
gcccaggaaauaaaagugggcu

SEQ ID NO: 230361 - RNA, 22 nt, Human
ugaggggcagagagguguccag

SEQ ID NO: 230362 - RNA, 23 nt, Human
ucuggaugccaccacauacuaac

SEQ ID NO: 230363 - RNA, 22 nt, Human
uccauauauauuagucuuccuu

SEQ ID NO: 230364 - RNA, 22 nt, Human
uccaggcugcaaggccacaggg

SEQ ID NO: 230365 - RNA, 22 nt, Human
ccuaggcuuguuuucaucagcu

SEQ ID NO: 230366 - RNA, 22 nt, Human
uaagaaacccaggaauuucuua

SEQ ID NO: 230367 - RNA, 22 nt, Human
ugagcccagagcccuuguaggg

SEQ ID NO: 230368 - RNA, 22 nt, Human
cagaaguuagacuucaacuaau

SEQ ID NO: 230369 - RNA, 22 nt, Human
uuuccuuugggagcaugaauuu

SEQ ID NO: 230370 - RNA, 21 nt, Human
auauuucagauuuccguaauc

SEQ ID NO: 230371 - RNA, 22 nt, Human
uuacagaguucgcaccuggugg

SEQ ID NO: 230372 - RNA, 22 nt, Human
augcagagcuuccaguggccug

SEQ ID NO: 230373 - RNA, 22 nt, Human
gcuuuagacauaaaguucuuca

SEQ ID NO: 230374 - RNA, 22 nt, Human
ggaaaaggccauuguuucucug

SEQ ID NO: 230375 - RNA, 20 nt, Human
cugugcuccggguuccugga

SEQ ID NO: 230376 - RNA, 22 nt, Human
cagaagugauguugagcuaguc

SEQ ID NO: 230377 - RNA, 22 nt, Human
uccaggcaguuuuccagguugu

SEQ ID NO: 230378 - RNA, 22 nt, Human
gccaggaaagggaauucccuga

SEQ ID NO: 230379 - RNA, 21 nt, Human
uucaaugaaaacaaagugagg

SEQ ID NO: 230380 - RNA, 22 nt, Human
uuccacagccaucacuguugcu

SEQ ID NO: 230381 - RNA, 22 nt, Human
uccaggcaugucugaguccuuc

SEQ ID NO: 230382 - RNA, 22 nt, Human
gcuucucuggcuggucugccac

SEQ ID NO: 230383 - RNA, 22 nt, Human
auacaaaaauuagccgggagua

SEQ ID NO: 230384 - RNA, 22 nt, Human
aagcacauuuggaaaacaugga

SEQ ID NO: 230385 - RNA, 22 nt, Human
cagggggcagcguagaaaauga

SEQ ID NO: 230386 - RNA, 22 nt, Human
cucuguggaagaagaaagaagg

SEQ ID NO: 230387 - RNA, 22 nt, Human
aucuccagaugccuggaaauga

SEQ ID NO: 230388 - RNA, 23 nt, Human
uggcucuguggaucccucaggag

SEQ ID NO: 230389 - RNA, 20 nt, Human
aagauucauuguaauuaggg

SEQ ID NO: 230390 - RNA, 22 nt, Human
ccuucuccccucugcagggugu

SEQ ID NO: 230391 - RNA, 22 nt, Human
acauuucagauucaugaaguga

SEQ ID NO: 230392 - RNA, 22 nt, Human
cauaggaagccaucucagucac

SEQ ID NO: 230393 - RNA, 22 nt, Human
aggcuguggugaugauuggguc

SEQ ID NO: 230394 - RNA, 22 nt, Human
augacauaagugaaaaacauca

SEQ ID NO: 230395 - RNA, 22 nt, Human
uuucacaugcagcagggaagug

SEQ ID NO: 230396 - RNA, 22 nt, Human
aucagucuguuggaauaucgcu

SEQ ID NO: 230397 - RNA, 22 nt, Human
cuggcuuucucugugguguuca

SEQ ID NO: 230398 - RNA, 22 nt, Human
cucugcaaucugagcacuugua

SEQ ID NO: 230399 - RNA, 22 nt, Human
caggaagaggacaggcuucccc

SEQ ID NO: 230400 - RNA, 22 nt, Human
uacuguuagagcgauuuguccu

SEQ ID NO: 230401 - RNA, 22 nt, Human
aauuagagaucaguucuuugac

SEQ ID NO: 230402 - RNA, 22 nt, Human
ggagggugcauuuuacccugug

SEQ ID NO: 230403 - RNA, 22 nt, Human
ucacaggcuggucuccgaggac

SEQ ID NO: 230404 - RNA, 22 nt, Human
acuggcagugucguuuacauga

SEQ ID NO: 230405 - RNA, 22 nt, Human
aaagggagcauggcugcaggga

SEQ ID NO: 230406 - RNA, 22 nt, Human
acuuagcagguacuuucauauu

SEQ ID NO: 230407 - RNA, 22 nt, Human
cugagaggaugcugcaguggag

SEQ ID NO: 230408 - RNA, 22 nt, Human
agcaggugguaggcagucagca

SEQ ID NO: 230409 - RNA, 22 nt, Human
acuuccagugucugcugcuagc

SEQ ID NO: 230410 - RNA, 22 nt, Human
uuuaagacucuuguaguacaca

SEQ ID NO: 230411 - RNA, 22 nt, Human
gagcacaguaaagcagugucac

SEQ ID NO: 230412 - RNA, 22 nt, Human
gcaccugggcaaggauucagag

SEQ ID NO: 230413 - RNA, 22 nt, Human
gcugcagcaagcccuccagggg

SEQ ID NO: 230414 - RNA, 22 nt, Human
augggaagugaagucagggagg

SEQ ID NO: 230415 - RNA, 22 nt, Human
gggcugaccccaccccucacuc

SEQ ID NO: 230416 - RNA, 22 nt, Human
cagguggucaggcaaggacacg

SEQ ID NO: 230417 - RNA, 22 nt, Human
guagaaaauuaggaugaggcuu

SEQ ID NO: 230418 - RNA, 22 nt, Human
auuaaacaauguaaaguucuug

SEQ ID NO: 230419 - RNA, 22 nt, Human
gaacauaugcauguuuguuuug

SEQ ID NO: 230420 - RNA, 22 nt, Human
ucaggcucuggguacaccugac

SEQ ID NO: 230421 - RNA, 22 nt, Human
uuuccauguguacuggccagaa

SEQ ID NO: 230422 - RNA, 22 nt, Human
uuaaaagaccuguugagguuag

SEQ ID NO: 230423 - RNA, 22 nt, Human
guguccugggucucugauucuu

SEQ ID NO: 230424 - RNA, 22 nt, Human
aucauuacuccuguaaaauugu

SEQ ID NO: 230425 - RNA, 22 nt, Human
agcaguuacgggccuaucuagg

SEQ ID NO: 230426 - RNA, 22 nt, Human
aguuaaauguguuagccagggu

SEQ ID NO: 230427 - RNA, 22 nt, Human
cgugauuucuggcuuucuauau

SEQ ID NO: 230428 - RNA, 22 nt, Human
uauacagucuuuugcuauauuc

SEQ ID NO: 230429 - RNA, 22 nt, Human
aucuccaguccugguuuccugg

SEQ ID NO: 230430 - RNA, 17 nt, Human
uuagagcuacauguuga

SEQ ID NO: 230431 - RNA, 22 nt, Human
uggucccuagcacagcuguccu

SEQ ID NO: 230432 - RNA, 22 nt, Human
uguuauucucugccuacaaguc

SEQ ID NO: 230433 - RNA, 22 nt, Human
cugcagagggguugaagggucc

SEQ ID NO: 230434 - RNA, 22 nt, Human
cugagccaugggucuaagcacu

SEQ ID NO: 230435 - RNA, 22 nt, Human
gcuaaugauagcaagauaaaca

SEQ ID NO: 230436 - RNA, 22 nt, Human
acuuucuuaggcuguauaaaug

SEQ ID NO: 230437 - RNA, 22 nt, Human
guaggucuucugaaaaccaaaa

SEQ ID NO: 230438 - RNA, 18 nt, Human
agcccaggcaucgucugc

SEQ ID NO: 230439 - RNA, 22 nt, Human
uuagaaauacaagugagguuga

SEQ ID NO: 230440 - RNA, 22 nt, Human
uaggaaaauaucucuuauuggg

SEQ ID NO: 230441 - RNA, 22 nt, Human
uggcacaguccugggugccugc

SEQ ID NO: 230442 - RNA, 22 nt, Human
acaacaaaaugaggaagugguc

SEQ ID NO: 230443 - RNA, 22 nt, Human
agcaggugucacuuucacucca

SEQ ID NO: 230444 - RNA, 22 nt, Human
cacugugguuauuaucacuguu

SEQ ID NO: 230445 - RNA, 22 nt, Human
cuuuacaauucaagggaacucu

SEQ ID NO: 230446 - RNA, 22 nt, Human
ucugucauccaggcuggaauau

SEQ ID NO: 230447 - RNA, 22 nt, Human
uuccaugccuagaacaggauuc

SEQ ID NO: 230448 - RNA, 22 nt, Human
gaagcacauggcuauagcuauu

SEQ ID NO: 230449 - RNA, 21 nt, Human
cagcuccacuaaagcagcugu

SEQ ID NO: 230450 - RNA, 22 nt, Human
cccuguuuuaaguugauauuga

SEQ ID NO: 230451 - RNA, 22 nt, Human
agcuguguuauuagaaaccugc

SEQ ID NO: 230452 - RNA, 22 nt, Human
ggugacagcgggucaagaggag

SEQ ID NO: 230453 - RNA, 22 nt, Human
aaugauaccaaacauguagaua

SEQ ID NO: 230454 - RNA, 22 nt, Human
uggauucuaaugcacuucaaau

SEQ ID NO: 230455 - RNA, 22 nt, Human
acaugagaucacaaagauaaau

SEQ ID NO: 230456 - RNA, 22 nt, Human
ccucuggcuuacuguuggguuu

SEQ ID NO: 230457 - RNA, 22 nt, Human
acauuuaaccaaacuguuuaau

SEQ ID NO: 230458 - RNA, 22 nt, Human
aagcccuguaaauugcccuuaa

SEQ ID NO: 230459 - RNA, 19 nt, Human
gcugcuggcucuggcugga

SEQ ID NO: 230460 - RNA, 22 nt, Human
aggcucuccuccccaggaccau

SEQ ID NO: 230461 - RNA, 22 nt, Human
uaauuagagucacaaguaacca

SEQ ID NO: 230462 - RNA, 22 nt, Human
ugacauucuguuaagucucaua

SEQ ID NO: 230463 - RNA, 22 nt, Human
uuuucuuauggugaagcacaaa

SEQ ID NO: 230464 - RNA, 19 nt, Human
ugccucagggcuuugagga

SEQ ID NO: 230465 - RNA, 22 nt, Human
cugaauuaauacacagaauggc

SEQ ID NO: 230466 - RNA, 22 nt, Human
cugguuuaugagggaagggaug

SEQ ID NO: 230467 - RNA, 21 nt, Human
ccuggcugcacaguugcuggu

SEQ ID NO: 230468 - RNA, 22 nt, Human
aagcacagugccaaguucuauu

SEQ ID NO: 230469 - RNA, 22 nt, Human
ggucccaggauugguugcgcag

SEQ ID NO: 230470 - RNA, 23 nt, Human
cauuucuagguguguuuggccau

SEQ ID NO: 230471 - RNA, 22 nt, Human
aaggcugaccaguuuacacuuu

SEQ ID NO: 230472 - RNA, 22 nt, Human
agagaggcauucggugauccca

SEQ ID NO: 230473 - RNA, 22 nt, Human
cucucaaaugucauuccucuau

SEQ ID NO: 230474 - RNA, 22 nt, Human
uccaggcuggaaaugucaaacu

SEQ ID NO: 230475 - RNA, 22 nt, Human
uaacacuguaaaccuagauguu

SEQ ID NO: 230476 - RNA, 22 nt, Human
uaacuguauuuuucugagauuc

SEQ ID NO: 230477 - RNA, 22 nt, Human
cagggagcagcgcuggggccuc

SEQ ID NO: 230478 - RNA, 23 nt, Human
ucugcuggugacacggucacauu

SEQ ID NO: 230479 - RNA, 20 nt, Human
auagacaaagacaugccaga

SEQ ID NO: 230480 - RNA, 22 nt, Human
cucugaagguuucuguuacugu

SEQ ID NO: 230481 - RNA, 22 nt, Human
ucccagccuuccagucugguuu

SEQ ID NO: 230482 - RNA, 22 nt, Human
ucucaggccccugaguuucucu

SEQ ID NO: 230483 - RNA, 22 nt, Human
gucugguccucuucacaguggc

SEQ ID NO: 230484 - RNA, 22 nt, Human
aggcagaagccagccagggucc

SEQ ID NO: 230485 - RNA, 22 nt, Human
ucccuucuggcagcagugugag

SEQ ID NO: 230486 - RNA, 22 nt, Human
acagccugcagccccaggucgc

SEQ ID NO: 230487 - RNA, 22 nt, Human
agagcuggacgucugagcccua

SEQ ID NO: 230488 - RNA, 22 nt, Human
augccuggacugacaugcacug

SEQ ID NO: 230489 - RNA, 22 nt, Human
gaggagcugcagggggagucua

SEQ ID NO: 230490 - RNA, 22 nt, Human
ggucacaugcggggcuguagcc

SEQ ID NO: 230491 - RNA, 22 nt, Human
cacaggagagcugggaggugcc

SEQ ID NO: 230492 - RNA, 22 nt, Human
caauguaucaaccagaaaguuc

SEQ ID NO: 230493 - RNA, 20 nt, Human
gccacugugcuuacacugcu

SEQ ID NO: 230494 - RNA, 22 nt, Human
uucuccagacacaaaaucuaag

SEQ ID NO: 230495 - RNA, 22 nt, Human
gaauaauugugaugcuugaagu

SEQ ID NO: 230496 - RNA, 22 nt, Human
ccacaucugguggccagugcua

SEQ ID NO: 230497 - RNA, 22 nt, Human
uucaacuagauuuauacaauuc

SEQ ID NO: 230498 - RNA, 22 nt, Human
agcucccagcuccuuugagaga

SEQ ID NO: 230499 - RNA, 22 nt, Human
auuauucaauguuauuucagug

SEQ ID NO: 230500 - RNA, 19 nt, Human
ucuucccuggcugucaguc

SEQ ID NO: 230501 - RNA, 22 nt, Human
ugggaggaagugcuaaugggag

SEQ ID NO: 230502 - RNA, 22 nt, Human
acucagaggaaaguugagauug

SEQ ID NO: 230503 - RNA, 22 nt, Human
uuucucugcagagccccaagga

SEQ ID NO: 230504 - RNA, 18 nt, Human
caaauagcaugauguccu

SEQ ID NO: 230505 - RNA, 20 nt, Human
uccagggcuagggagcucau

SEQ ID NO: 230506 - RNA, 22 nt, Human
uggggaugaaacccaggcaucu

SEQ ID NO: 230507 - RNA, 22 nt, Human
ugggccagaggcauggagcuau

SEQ ID NO: 230508 - RNA, 22 nt, Human
uauuuugagguauuuuugagcu

SEQ ID NO: 230509 - RNA, 22 nt, Human
ucucaggcuaccuugcacaagg

SEQ ID NO: 230510 - RNA, 22 nt, Human
ucagagaaaugcugagcucaug

SEQ ID NO: 230511 - RNA, 22 nt, Human
caggaccuggaaugcuugugaa

SEQ ID NO: 230512 - RNA, 22 nt, Human
auuaauauacacuguuagcaug

SEQ ID NO: 230513 - RNA, 22 nt, Human
gaagggugcauggagggaaguc

SEQ ID NO: 230514 - RNA, 22 nt, Human
guuacucuugagaggcugaggu

SEQ ID NO: 230515 - RNA, 20 nt, Human
auguaaaagacagggaguag

SEQ ID NO: 230516 - RNA, 22 nt, Human
gaggggcagugcacccgggccc

SEQ ID NO: 230517 - RNA, 20 nt, Human
gcauccagacacccagcugc

SEQ ID NO: 230518 - RNA, 22 nt, Human
acauaucuuucccucuccugaa

SEQ ID NO: 230519 - RNA, 22 nt, Human
acuguacuguguauuguagaau

SEQ ID NO: 230520 - RNA, 22 nt, Human
uucuguauuucaaugucuuuau

SEQ ID NO: 230521 - RNA, 22 nt, Human
cugggccuugcaucccagagcc

SEQ ID NO: 230522 - RNA, 22 nt, Human
aauuuuguuuaagugaucugcu

SEQ ID NO: 230523 - RNA, 22 nt, Human
ucagacagcuugcagggaggug

SEQ ID NO: 230524 - RNA, 23 nt, Human
cuggggcucauugcaguagccau

SEQ ID NO: 230525 - RNA, 22 nt, Human
ggggaggaguguacagguuuau

SEQ ID NO: 230526 - RNA, 22 nt, Human
gcagaguuggagccagcccagg

SEQ ID NO: 230527 - RNA, 22 nt, Human
uucugggcauguuacauucugu

SEQ ID NO: 230528 - RNA, 22 nt, Human
acuugccuguuacauuucuagu

SEQ ID NO: 230529 - RNA, 23 nt, Human
uuguauuuuuaguagagacaggg

SEQ ID NO: 230530 - RNA, 22 nt, Human
uccagaggggcagcccugugcu

SEQ ID NO: 230531 - RNA, 23 nt, Human
cccaggcuacaaauuaugcucug

SEQ ID NO: 230532 - RNA, 22 nt, Human
cauuuguaguaucuguuuauau

SEQ ID NO: 230533 - RNA, 22 nt, Human
caggcacagugggguccucucu

SEQ ID NO: 230534 - RNA, 22 nt, Human
ggacauuuaguuucauugggca

SEQ ID NO: 230535 - RNA, 22 nt, Human
uauuuauaaucugccaaagaga

SEQ ID NO: 230536 - RNA, 22 nt, Human
acaaagcuuagaccuaagagau

SEQ ID NO: 230537 - RNA, 18 nt, Human
agcaggugcuguuucuuu

SEQ ID NO: 230538 - RNA, 22 nt, Human
ccuuuagaaagucaguaguugc

SEQ ID NO: 230539 - RNA, 22 nt, Human
ccagaggugagggggauucuug

SEQ ID NO: 230540 - RNA, 22 nt, Human
uagaucaggcugcuuagauaga

SEQ ID NO: 230541 - RNA, 22 nt, Human
agugucaguugccuugucauaa

SEQ ID NO: 230542 - RNA, 22 nt, Human
ugggucagaaucagagaguugc

SEQ ID NO: 230543 - RNA, 22 nt, Human
uuugacucaguggacguacuag

SEQ ID NO: 230544 - RNA, 22 nt, Human
accuccccauuaggucacccac

SEQ ID NO: 230545 - RNA, 22 nt, Human
uugaggcacacacagguugcau

SEQ ID NO: 230546 - RNA, 22 nt, Human
agguccagagguugaacggugg

SEQ ID NO: 230547 - RNA, 22 nt, Human
cucccuggaggugagcuggcac

SEQ ID NO: 230548 - RNA, 22 nt, Human
acaguguuuauguacagauugu

SEQ ID NO: 230549 - RNA, 22 nt, Human
ugagugaggcugggcagucccu

SEQ ID NO: 230550 - RNA, 22 nt, Human
caguccaggccuggaggagcca

SEQ ID NO: 230551 - RNA, 22 nt, Human
accaggagggacccugguggcc

SEQ ID NO: 230552 - RNA, 22 nt, Human
cugggcucuguguuucaguuuc

SEQ ID NO: 230553 - RNA, 22 nt, Human
uuggaaacuuucaagcauaaug

SEQ ID NO: 230554 - RNA, 22 nt, Human
agaaaugucaggaaagaagucc

SEQ ID NO: 230555 - RNA, 22 nt, Human
auaugagaauuggaaaauauca

SEQ ID NO: 230556 - RNA, 22 nt, Human
aguacuuuagcauaaagcaguu

SEQ ID NO: 230557 - RNA, 22 nt, Human
cagggagcaggcucuguccauc

SEQ ID NO: 230558 - RNA, 21 nt, Human
acagaugggaugagcacacug

SEQ ID NO: 230559 - RNA, 19 nt, Human
agcuguggggccuagcacc

SEQ ID NO: 230560 - RNA, 22 nt, Human
uuaguugacccccaguccuggc

SEQ ID NO: 230561 - RNA, 22 nt, Human
cugaggcaugaaugugggcuuu

SEQ ID NO: 230562 - RNA, 22 nt, Human
aagaaauuaaggaaugcaacga

SEQ ID NO: 230563 - RNA, 22 nt, Human
auugcugaaaguauuuuaugac

SEQ ID NO: 230564 - RNA, 22 nt, Human
agcacuuuagaauuuagaguug

SEQ ID NO: 230565 - RNA, 22 nt, Human
uuugacaucuaagaauucuuac

SEQ ID NO: 230566 - RNA, 22 nt, Human
aaaaaccuuucauugcaaaugu

SEQ ID NO: 230567 - RNA, 22 nt, Human
ggagucuggaguggggcccaag

SEQ ID NO: 230568 - RNA, 22 nt, Human
uggcacagggcuuggucgcuca

SEQ ID NO: 230569 - RNA, 22 nt, Human
uuuacaguuccaugugauaggc

SEQ ID NO: 230570 - RNA, 20 nt, Human
ggcaggcuuuauauggaggg

SEQ ID NO: 230571 - RNA, 22 nt, Human
gagcagugacuggagcaugaga

SEQ ID NO: 230572 - RNA, 22 nt, Human
uucugucaaauuugccauaugg

SEQ ID NO: 230573 - RNA, 22 nt, Human
cagaaucuguugggguugcaga

SEQ ID NO: 230574 - RNA, 22 nt, Human
ggaggaaaugaaaggaggguuu

SEQ ID NO: 230575 - RNA, 22 nt, Human
auggcuggauuugauccauggg

SEQ ID NO: 230576 - RNA, 22 nt, Human
gugugucccuccucuccugagu

SEQ ID NO: 230577 - RNA, 22 nt, Human
gacugagguauuaagauggcuu

SEQ ID NO: 230578 - RNA, 22 nt, Human
ucucaguguuguucugcagaug

SEQ ID NO: 230579 - RNA, 22 nt, Human
guacaaaugagaguucuguuuu

SEQ ID NO: 230580 - RNA, 22 nt, Human
ccucucaguauugaacuuuaua

SEQ ID NO: 230581 - RNA, 22 nt, Human
accaguuuauagcgaucuguca

SEQ ID NO: 230582 - RNA, 22 nt, Human
uccacagugguugaacuaguaa

SEQ ID NO: 230583 - RNA, 22 nt, Human
cagcaagaaucagacaaccuca

SEQ ID NO: 230584 - RNA, 22 nt, Human
aaagcagugcaccuuaauugau

SEQ ID NO: 230585 - RNA, 22 nt, Human
guucucuggagucccugggccc

SEQ ID NO: 230586 - RNA, 23 nt, Human
cagucucuccccggacagcaaaa

SEQ ID NO: 230587 - RNA, 22 nt, Human
uccugaggacuaacaggaagga

SEQ ID NO: 230588 - RNA, 22 nt, Human
cucccagauuccugcuguggga

SEQ ID NO: 230589 - RNA, 22 nt, Human
uccagguaauuuggaugcuagu

SEQ ID NO: 230590 - RNA, 22 nt, Human
aaugagaucagagauaacucaa

SEQ ID NO: 230591 - RNA, 22 nt, Human
aguuauuucaguaacauaauag

SEQ ID NO: 230592 - RNA, 17 nt, Human
agcagcuggcacaggag

SEQ ID NO: 230593 - RNA, 22 nt, Human
gaauagcuuccuuuuuuccaaa

SEQ ID NO: 230594 - RNA, 22 nt, Human
ucugaaauaagggagaagggaa

SEQ ID NO: 230595 - RNA, 22 nt, Human
cugcccugagggccuguguguu

SEQ ID NO: 230596 - RNA, 23 nt, Human
cugugggaagucggggagcgcgc

SEQ ID NO: 230597 - RNA, 22 nt, Human
ggaggggaacuaaucccgugac

SEQ ID NO: 230598 - RNA, 22 nt, Human
ggacuggguaggagcccagggc

SEQ ID NO: 230599 - RNA, 22 nt, Human
cuauguuuaucuguauuucugu

SEQ ID NO: 230600 - RNA, 22 nt, Human
ugauuacaguauuugagaucca

SEQ ID NO: 230601 - RNA, 17 nt, Human
cguggcugagccauaga

SEQ ID NO: 230602 - RNA, 22 nt, Human
uccugggaguggccauguaaug

SEQ ID NO: 230603 - RNA, 22 nt, Human
uccugguaggcuaugucauguc

SEQ ID NO: 230604 - RNA, 20 nt, Human
cugcuuccaggcucaccccc

SEQ ID NO: 230605 - RNA, 22 nt, Human
uucuggcuccagaugcuucugu

SEQ ID NO: 230606 - RNA, 22 nt, Human
acuguaacacucauacugaagu

SEQ ID NO: 230607 - RNA, 22 nt, Human
aggcuccuggguguggccgcca

SEQ ID NO: 230608 - RNA, 22 nt, Human
cuggauuuugaugagcaguuuu

SEQ ID NO: 230609 - RNA, 22 nt, Human
caggaagggggauccuuggaag

SEQ ID NO: 230610 - RNA, 22 nt, Human
ucagccugcuccaagugcugcc

SEQ ID NO: 230611 - RNA, 22 nt, Human
caucccugucugccacucugaa

SEQ ID NO: 230612 - RNA, 22 nt, Human
uuauuguuuaaagccauguaaa

SEQ ID NO: 230613 - RNA, 22 nt, Human
cauugcaggagaguaaauaaaa

SEQ ID NO: 230614 - RNA, 22 nt, Human
gcauucaggaaccggaagggua

SEQ ID NO: 230615 - RNA, 22 nt, Human
uuguccugugauuucagggccu

SEQ ID NO: 230616 - RNA, 22 nt, Human
aagcucagcagccaggcccugu

SEQ ID NO: 230617 - RNA, 22 nt, Human
ucaugcugaggaugcugugaag

SEQ ID NO: 230618 - RNA, 22 nt, Human
aagggcuggucuagaaagggag

SEQ ID NO: 230619 - RNA, 17 nt, Human
cccguucucuucgcugg

SEQ ID NO: 230620 - RNA, 19 nt, Human
cccucaggucugagcaguc

SEQ ID NO: 230621 - RNA, 22 nt, Human
cucuccaggagagcacuuugag

SEQ ID NO: 230622 - RNA, 22 nt, Human
ccaaaugcuccacugacuuugg

SEQ ID NO: 230623 - RNA, 22 nt, Human
ugguccuucuugaagagugagu

SEQ ID NO: 230624 - RNA, 22 nt, Human
aaaacuccugaaauuguuuccc

SEQ ID NO: 230625 - RNA, 22 nt, Human
aucuuuggucuugagugcaucu

SEQ ID NO: 230626 - RNA, 22 nt, Human
ugaggcucagugagcccugcag

SEQ ID NO: 230627 - RNA, 22 nt, Human
uagaguccauuaaugcaaguuu

SEQ ID NO: 230628 - RNA, 22 nt, Human
gcacauuguuacucuuacugug

SEQ ID NO: 230629 - RNA, 22 nt, Human
ucauaaauuagcugucuuugaa

SEQ ID NO: 230630 - RNA, 22 nt, Human
ucacagugaggaguuacaguuu

SEQ ID NO: 230631 - RNA, 22 nt, Human
ugcaggugugugcaagggaggg

SEQ ID NO: 230632 - RNA, 22 nt, Human
cauucccaugacuccugcucag

SEQ ID NO: 230633 - RNA, 22 nt, Human
acccuuuguccaauagaaauga

SEQ ID NO: 230634 - RNA, 22 nt, Human
agaggcugugcagagggagugc

SEQ ID NO: 230635 - RNA, 22 nt, Human
uuuucuauuaacucauuuugca

SEQ ID NO: 230636 - RNA, 22 nt, Human
ucaggaagggcucagucugugc

SEQ ID NO: 230637 - RNA, 22 nt, Human
acugggccuugugugucucauc

SEQ ID NO: 230638 - RNA, 22 nt, Human
agcccugucucucacuccaggu

SEQ ID NO: 230639 - RNA, 22 nt, Human
uaggaaagaaaugaguagugau

SEQ ID NO: 230640 - RNA, 22 nt, Human
uacauugcuuucuaauacaucu

SEQ ID NO: 230641 - RNA, 21 nt, Human
cugucgcaggucgccccaccc

SEQ ID NO: 230642 - RNA, 22 nt, Human
auuuuaucugcuuacuuucagg

SEQ ID NO: 230643 - RNA, 22 nt, Human
aaaugucagaaaacauggagug

SEQ ID NO: 230644 - RNA, 23 nt, Human
acacguguguguacauagauagu

SEQ ID NO: 230645 - RNA, 22 nt, Human
ccagugcuucuuugcuagcugg

SEQ ID NO: 230646 - RNA, 22 nt, Human
gauauuuuuaggugaugcaggc

SEQ ID NO: 230647 - RNA, 19 nt, Human
ccagcagacacagcugccc

SEQ ID NO: 230648 - RNA, 22 nt, Human
augaugaaauuuucuaucaugu

SEQ ID NO: 230649 - RNA, 21 nt, Human
cagacccucuagaggccaccu

SEQ ID NO: 230650 - RNA, 22 nt, Human
aaggugguugcaauuaccauaa

SEQ ID NO: 230651 - RNA, 22 nt, Human
aggaccagaccgaacuagcuaa

SEQ ID NO: 230652 - RNA, 19 nt, Human
gggcuccuugggccucucu

SEQ ID NO: 230653 - RNA, 22 nt, Human
ggcagugcaaggcagccuggau

SEQ ID NO: 230654 - RNA, 22 nt, Human
auuuggaaaaucugguuauaga

SEQ ID NO: 230655 - RNA, 22 nt, Human
aguuagaauauaauuauguuaa

SEQ ID NO: 230656 - RNA, 18 nt, Human
uuggcuuugagaacuggu

SEQ ID NO: 230657 - RNA, 22 nt, Human
uguuuagacucaaaauugaaag

SEQ ID NO: 230658 - RNA, 22 nt, Human
cacagcugccauggcugcacuu

SEQ ID NO: 230659 - RNA, 22 nt, Human
uggcacagaccuuaucuucucu

SEQ ID NO: 230660 - RNA, 22 nt, Human
cuguguccauuuaucauuguca

SEQ ID NO: 230661 - RNA, 22 nt, Human
ugucauuuaauagauaugaugg

SEQ ID NO: 230662 - RNA, 22 nt, Human
gguggcagagacauaggacaua

SEQ ID NO: 230663 - RNA, 22 nt, Human
aacuguugucauauggucuuaa

SEQ ID NO: 230664 - RNA, 22 nt, Human
cugguuggugccacaugguggc

SEQ ID NO: 230665 - RNA, 23 nt, Human
cuggcuccgaagacuccaggauc

SEQ ID NO: 230666 - RNA, 20 nt, Human
cugaggggucugacuuggac

SEQ ID NO: 230667 - RNA, 22 nt, Human
ucuuuagugacaguugugcaag

SEQ ID NO: 230668 - RNA, 22 nt, Human
uggcacuggaaucguagccuug

SEQ ID NO: 230669 - RNA, 22 nt, Human
gucaucuucgcagagugauuuu

SEQ ID NO: 230670 - RNA, 20 nt, Human
ucugcucagcccucaguggc

SEQ ID NO: 230671 - RNA, 22 nt, Human
uacaaacuuguuuuaaguaagu

SEQ ID NO: 230672 - RNA, 22 nt, Human
agagcugggacuuggacucaau

SEQ ID NO: 230673 - RNA, 22 nt, Human
cgcugggugcagugauuggcau

SEQ ID NO: 230674 - RNA, 19 nt, Human
uuccugggguuccauugug

SEQ ID NO: 230675 - RNA, 22 nt, Human
ucagugucuugaccugggugug

SEQ ID NO: 230676 - RNA, 22 nt, Human
ugugaauagugccgcaauaaac

SEQ ID NO: 230677 - RNA, 22 nt, Human
uuucaguucaguuuauuauauc

SEQ ID NO: 230678 - RNA, 22 nt, Human
uuccuggcucucuguugcacag

SEQ ID NO: 230679 - RNA, 22 nt, Human
ugggcucuagacuuuagugugg

SEQ ID NO: 230680 - RNA, 22 nt, Human
ccugugugcugaugacgacaga

SEQ ID NO: 230681 - RNA, 22 nt, Human
cugggaggcagucucucuagaa

SEQ ID NO: 230682 - RNA, 21 nt, Human
uuuucuggaguaugucuccuc

SEQ ID NO: 230683 - RNA, 22 nt, Human
cuggugccauucuguggccuag

SEQ ID NO: 230684 - RNA, 22 nt, Human
cagcuucuggcguggagccuga

SEQ ID NO: 230685 - RNA, 22 nt, Human
ucuaaagauuuggauucauuug

SEQ ID NO: 230686 - RNA, 22 nt, Human
ugguaccaugacaaaugucagg

SEQ ID NO: 230687 - RNA, 22 nt, Human
gcccagcacuaaaagcuuugcu

SEQ ID NO: 230688 - RNA, 22 nt, Human
cuuuggaauaaucaagcucuga

SEQ ID NO: 230689 - RNA, 22 nt, Human
uggaaccuggcauuagggacac

SEQ ID NO: 230690 - RNA, 22 nt, Human
acagugcaggucucaacaauua

SEQ ID NO: 230691 - RNA, 22 nt, Human
uaggccacaaauaagauccugu

SEQ ID NO: 230692 - RNA, 22 nt, Human
acacuguagcugagggcaugcg

SEQ ID NO: 230693 - RNA, 22 nt, Human
ccccaccagcacccucucuauc

SEQ ID NO: 230694 - RNA, 22 nt, Human
aguggcuggacgacaaggguga

SEQ ID NO: 230695 - RNA, 22 nt, Human
cuuucccugcuuagaaggauuu

SEQ ID NO: 230696 - RNA, 17 nt, Human
aggcaugaggcaucacu

SEQ ID NO: 230697 - RNA, 22 nt, Human
cugccucuguugggcauggucu

SEQ ID NO: 230698 - RNA, 22 nt, Human
uuaggagaugguccucuaggga

SEQ ID NO: 230699 - RNA, 22 nt, Human
ugaaugaugcaguauaaugaua

SEQ ID NO: 230700 - RNA, 22 nt, Human
ucaucaaagcgcuuggaguagg

SEQ ID NO: 230701 - RNA, 22 nt, Human
gggccugcuccccaucgcugcu

SEQ ID NO: 230702 - RNA, 22 nt, Human
cuucauuggcuuccauagaugc

SEQ ID NO: 230703 - RNA, 22 nt, Human
ggguuccaaugaugagcaagag

SEQ ID NO: 230704 - RNA, 23 nt, Human
gccuggguuguaacuagugcauc

SEQ ID NO: 230705 - RNA, 22 nt, Human
cauuagaaaagcagcugggacc

SEQ ID NO: 230706 - RNA, 22 nt, Human
uccaggcccacucagcugaaau

SEQ ID NO: 230707 - RNA, 22 nt, Human
uugaggaguagaagcuuugaau

SEQ ID NO: 230708 - RNA, 22 nt, Human
ggaagagccuggggugucaggc

SEQ ID NO: 230709 - RNA, 22 nt, Human
ucacaaaagcuuuugaauuugg

SEQ ID NO: 230710 - RNA, 22 nt, Human
uugcaaauugcaagaguuggau

SEQ ID NO: 230711 - RNA, 22 nt, Human
aacagcagguccuggcaugggu

SEQ ID NO: 230712 - RNA, 22 nt, Human
ugagcagaagcccuccuggacu

SEQ ID NO: 230713 - RNA, 22 nt, Human
gggcuucuacuugcaaaggaua

SEQ ID NO: 230714 - RNA, 22 nt, Human
gccuggcuuuugccucauguuc

SEQ ID NO: 230715 - RNA, 22 nt, Human
gggacagaggcaaacuagcaga

SEQ ID NO: 230716 - RNA, 22 nt, Human
ugcuuuaucugugagaaccuga

SEQ ID NO: 230717 - RNA, 22 nt, Human
ggcucagggaaugaggaagaau

SEQ ID NO: 230718 - RNA, 22 nt, Human
cagaugaagaucauagaauagu

SEQ ID NO: 230719 - RNA, 22 nt, Human
guucaaauucuaugaaauaugu

SEQ ID NO: 230720 - RNA, 22 nt, Human
aggcaacaugggccaggcagaa

SEQ ID NO: 230721 - RNA, 22 nt, Human
ccagcaucuaacgcuccuggga

SEQ ID NO: 230722 - RNA, 22 nt, Human
uuucaaagggaaguuaugaagu

SEQ ID NO: 230723 - RNA, 22 nt, Human
ggcccagcugggcggggacacg

SEQ ID NO: 230724 - RNA, 22 nt, Human
ugcauacauaaagugcuaucau

SEQ ID NO: 230725 - RNA, 22 nt, Human
agacacaucuuagguugucagg

SEQ ID NO: 230726 - RNA, 22 nt, Human
ucugccucuuucaggccuggca

SEQ ID NO: 230727 - RNA, 22 nt, Human
aagugauuguuccguugagugu

SEQ ID NO: 230728 - RNA, 22 nt, Human
acagagaugcaaguguguauuu

SEQ ID NO: 230729 - RNA, 22 nt, Human
ucaacaaugggucuguaaugga

SEQ ID NO: 230730 - RNA, 22 nt, Human
gcuuuacugagaugacacaggg

SEQ ID NO: 230731 - RNA, 22 nt, Human
gcucuuuucacaguccaaaaug

SEQ ID NO: 230732 - RNA, 21 nt, Human
uuuaauuugcauguaugacgc

SEQ ID NO: 230733 - RNA, 22 nt, Human
uuccuggccucuuccaccacca

SEQ ID NO: 230734 - RNA, 22 nt, Human
ccagagaaccaucugcuugagg

SEQ ID NO: 230735 - RNA, 17 nt, Human
ugacagacaucaugagc

SEQ ID NO: 230736 - RNA, 22 nt, Human
uugaaaaguuuugaaacacucu

SEQ ID NO: 230737 - RNA, 22 nt, Human
gcuagaaaaugaaagauaauuu

SEQ ID NO: 230738 - RNA, 22 nt, Human
uggccccauuuuacagaugaaa

SEQ ID NO: 230739 - RNA, 22 nt, Human
uuaacaguuaaacaauuggcua

SEQ ID NO: 230740 - RNA, 20 nt, Human
ggcugcagugcaccucaucu

SEQ ID NO: 230741 - RNA, 22 nt, Human
acacucacccucccacugccug

SEQ ID NO: 230742 - RNA, 22 nt, Human
gcaggcugccaccuucugaguu

SEQ ID NO: 230743 - RNA, 22 nt, Human
cucuccagucauauucucaguc

SEQ ID NO: 230744 - RNA, 22 nt, Human
ugucaacugugaugucaacacu

SEQ ID NO: 230745 - RNA, 22 nt, Human
uagcccagagagccaggggcuu

SEQ ID NO: 230746 - RNA, 18 nt, Human
uccagcccacauuuucug

SEQ ID NO: 230747 - RNA, 22 nt, Human
uauuucacucaguauaccauag

SEQ ID NO: 230748 - RNA, 21 nt, Human
ucagaagugcagcccaggaau

SEQ ID NO: 230749 - RNA, 22 nt, Human
aggacagagccugugcagaccg

SEQ ID NO: 230750 - RNA, 22 nt, Human
cugggagauugaggccauggug

SEQ ID NO: 230751 - RNA, 22 nt, Human
acaacacagcaaaaccccaucu

SEQ ID NO: 230752 - RNA, 22 nt, Human
ucugagagucuuucuucaagug

SEQ ID NO: 230753 - RNA, 22 nt, Human
uugguguugaacaaaacuaaau

SEQ ID NO: 230754 - RNA, 22 nt, Human
cuggaggaaucacagaaggcuu

SEQ ID NO: 230755 - RNA, 22 nt, Human
ugaggcaaucccuaggguaagg

SEQ ID NO: 230756 - RNA, 22 nt, Human
aggcuuguggggaaucugugug

SEQ ID NO: 230757 - RNA, 22 nt, Human
gccuuugcugugacaaugcugg

SEQ ID NO: 230758 - RNA, 22 nt, Human
gggcugcugggcaagaaacauu

SEQ ID NO: 230759 - RNA, 22 nt, Human
ugcucagccgugagcagagccg

SEQ ID NO: 230760 - RNA, 22 nt, Human
ucacucugagaggucacuggaa

SEQ ID NO: 230761 - RNA, 22 nt, Human
uacacauacaccaaugugguca

SEQ ID NO: 230762 - RNA, 22 nt, Human
ucccagaggucucugcugguuc

SEQ ID NO: 230763 - RNA, 22 nt, Human
agaagccaauccuugucucucu

SEQ ID NO: 230764 - RNA, 19 nt, Human
uacuuauuagaaauauggg

SEQ ID NO: 230765 - RNA, 22 nt, Human
acauguguggccgcuguagaca

SEQ ID NO: 230766 - RNA, 22 nt, Human
cuuggcuccaaucccagcucug

SEQ ID NO: 230767 - RNA, 22 nt, Human
gcugagggauagcugcucacug

SEQ ID NO: 230768 - RNA, 22 nt, Human
ucuuccaggagggugggcaaac

SEQ ID NO: 230769 - RNA, 22 nt, Human
aacagcuguucgcagauguagg

SEQ ID NO: 230770 - RNA, 22 nt, Human
acccaugaguguaucuuuaaaa

SEQ ID NO: 230771 - RNA, 22 nt, Human
guugcuuuacagcuggugacag

SEQ ID NO: 230772 - RNA, 22 nt, Human
cuguugcucugaacaggucuug

SEQ ID NO: 230773 - RNA, 22 nt, Human
cagaauuuagcacaauguaugg

SEQ ID NO: 230774 - RNA, 22 nt, Human
ggcaguuuuaacagagguagua

SEQ ID NO: 230775 - RNA, 22 nt, Human
uaauuccaaguugagacaugca

SEQ ID NO: 230776 - RNA, 22 nt, Human
auucaaacaggaagaaaucauu

SEQ ID NO: 230777 - RNA, 22 nt, Human
cccagggaagggcuaccugagg

SEQ ID NO: 230778 - RNA, 22 nt, Human
cuggcucccucucccugaguca

SEQ ID NO: 230779 - RNA, 22 nt, Human
cauuuguaguuaaaaaugucuc

SEQ ID NO: 230780 - RNA, 22 nt, Human
uucuuuggugggagauugaggu

SEQ ID NO: 230781 - RNA, 22 nt, Human
ucagcacugauguuucagaaga

SEQ ID NO: 230782 - RNA, 22 nt, Human
agcuucccaggagaaucaggga

SEQ ID NO: 230783 - RNA, 22 nt, Human
gggaccagaggcugugcacaau

SEQ ID NO: 230784 - RNA, 22 nt, Human
guucuucaggcugugcucuaga

SEQ ID NO: 230785 - RNA, 22 nt, Human
gggcauggccaggugagggguc

SEQ ID NO: 230786 - RNA, 22 nt, Human
ccugagagugagggccuccuua

SEQ ID NO: 230787 - RNA, 22 nt, Human
ucuugcacuucaugaauauguu

SEQ ID NO: 230788 - RNA, 18 nt, Human
uggaucuuuaugaggcug

SEQ ID NO: 230789 - RNA, 22 nt, Human
gacugaaggucucagcauguga

SEQ ID NO: 230790 - RNA, 22 nt, Human
gugaggagcucuuugacucacg

SEQ ID NO: 230791 - RNA, 19 nt, Human
ggcugccuucugcucaucu

SEQ ID NO: 230792 - RNA, 22 nt, Human
ucuuagcacagcuauauaaguu

SEQ ID NO: 230793 - RNA, 22 nt, Human
agugcaggagccuggccagagc

SEQ ID NO: 230794 - RNA, 22 nt, Human
aagcaggagaugcaggaaugua

SEQ ID NO: 230795 - RNA, 22 nt, Human
cuguguccugucuccuaaggug

SEQ ID NO: 230796 - RNA, 22 nt, Human
cuuaauuacuguccaauaugca

SEQ ID NO: 230797 - RNA, 22 nt, Human
ccagaggaaaaauaucucccua

SEQ ID NO: 230798 - RNA, 22 nt, Human
aagccaugcaagccacaaggug

SEQ ID NO: 230799 - RNA, 23 nt, Human
uaccuuucccugggagacugcuc

SEQ ID NO: 230800 - RNA, 22 nt, Human
ugggcaggugcuauuuuccaug

SEQ ID NO: 230801 - RNA, 22 nt, Human
gugugcaggggcuugguggagc

SEQ ID NO: 230802 - RNA, 22 nt, Human
ggaacuugcaaccucuggucac

SEQ ID NO: 230803 - RNA, 22 nt, Human
cuauuagguaugugguugcuau

SEQ ID NO: 230804 - RNA, 22 nt, Human
cagaggcacaagaaagcaaggc

SEQ ID NO: 230805 - RNA, 22 nt, Human
agcagcugagaugguaagauuc

SEQ ID NO: 230806 - RNA, 22 nt, Human
ugcaggagagcuggucuggccc

SEQ ID NO: 230807 - RNA, 22 nt, Human
guggcauucucggcaccaucug

SEQ ID NO: 230808 - RNA, 22 nt, Human
aggcuuccuggaggaagaggua

SEQ ID NO: 230809 - RNA, 22 nt, Human
cuccuucccuaccaucaauguu

SEQ ID NO: 230810 - RNA, 22 nt, Human
aguccuggcauauagguccuca

SEQ ID NO: 230811 - RNA, 22 nt, Human
aggggauggagcuggaaggcag

SEQ ID NO: 230812 - RNA, 22 nt, Human
cuuuccuaguuggucccagcac

SEQ ID NO: 230813 - RNA, 22 nt, Human
augacaauauagcuuugauuuu

SEQ ID NO: 230814 - RNA, 22 nt, Human
cacucuggggaugcaaggagag

SEQ ID NO: 230815 - RNA, 22 nt, Human
aggcagguuucccggcugucaa

SEQ ID NO: 230816 - RNA, 22 nt, Human
ucagaaguugagauauucaggg

SEQ ID NO: 230817 - RNA, 23 nt, Human
aggguccagggaucaccaggugu

SEQ ID NO: 230818 - RNA, 21 nt, Human
ugauacaggaaugguucuaug

SEQ ID NO: 230819 - RNA, 22 nt, Human
aaucacaugugcucaauuuuaa

SEQ ID NO: 230820 - RNA, 22 nt, Human
agaaguuaccacauacuucucu

SEQ ID NO: 230821 - RNA, 21 nt, Human
gcaugccugcaucuuaguguu

SEQ ID NO: 230822 - RNA, 22 nt, Human
uuucagaugcaauuaauuuuca

SEQ ID NO: 230823 - RNA, 21 nt, Human
uuccuccucuggagaagaaga

SEQ ID NO: 230824 - RNA, 22 nt, Human
ugagacagcccuucugcacagg

SEQ ID NO: 230825 - RNA, 22 nt, Human
uagaaacaucagcuaaccaaaa

SEQ ID NO: 230826 - RNA, 22 nt, Human
agcccugccucuccaaugccca

SEQ ID NO: 230827 - RNA, 22 nt, Human
auggcagcagcuuuagcugugg

SEQ ID NO: 230828 - RNA, 22 nt, Human
ugcugcagggaagucggggggu

SEQ ID NO: 230829 - RNA, 22 nt, Human
uggcccuauuuggaaauagagc

SEQ ID NO: 230830 - RNA, 22 nt, Human
gcacaguggugaaagcaugggu

SEQ ID NO: 230831 - RNA, 22 nt, Human
ugcuggagugcaguggcuuaac

SEQ ID NO: 230832 - RNA, 22 nt, Human
agauggugauagagcugggauu

SEQ ID NO: 230833 - RNA, 22 nt, Human
cuggcaggcggcagagcccagg

SEQ ID NO: 230834 - RNA, 22 nt, Human
uacaugcuuaaaaugcaauguu

SEQ ID NO: 230835 - RNA, 22 nt, Human
agagcugggugguggugacuca

SEQ ID NO: 230836 - RNA, 22 nt, Human
auaaucuuucuuuuccagauag

SEQ ID NO: 230837 - RNA, 22 nt, Human
uaucaacauuaauauuuucugg

SEQ ID NO: 230838 - RNA, 22 nt, Human
gcaaauggagugaagagcugga

SEQ ID NO: 230839 - RNA, 22 nt, Human
ucugcuguaaagaauuucugcc

SEQ ID NO: 230840 - RNA, 22 nt, Human
ccugggagguggagguugcagc

SEQ ID NO: 230841 - RNA, 22 nt, Human
gaggcuucuguaacccuguccu

SEQ ID NO: 230842 - RNA, 22 nt, Human
gacagacagggguucuccugga

SEQ ID NO: 230843 - RNA, 22 nt, Human
ugcauuggucuuaaucuucagg

SEQ ID NO: 230844 - RNA, 22 nt, Human
ccagucugcagccccuggggac

SEQ ID NO: 230845 - RNA, 22 nt, Human
ggcugggagccccacagaguca

SEQ ID NO: 230846 - RNA, 22 nt, Human
cugggccauggaagucucugcc

SEQ ID NO: 230847 - RNA, 22 nt, Human
gugaaguugauuguuaucguca

SEQ ID NO: 230848 - RNA, 22 nt, Human
uguuuguauggaccuguucuau

SEQ ID NO: 230849 - RNA, 22 nt, Human
gagggcagugaauuuugaagcu

SEQ ID NO: 230850 - RNA, 22 nt, Human
gauuugcauucugaaagcuacc

SEQ ID NO: 230851 - RNA, 22 nt, Human
cugcuuuagacaacugcuggga

SEQ ID NO: 230852 - RNA, 22 nt, Human
aggaaauaggaccagacaaagc

SEQ ID NO: 230853 - RNA, 22 nt, Human
gcagccagcccuagucccacuu

SEQ ID NO: 230854 - RNA, 22 nt, Human
acaucuuuuuggaaacggcuga

SEQ ID NO: 230855 - RNA, 22 nt, Human
accuacauacggaaauauuuac

SEQ ID NO: 230856 - RNA, 22 nt, Human
ccugaggaccagcacccaucug

SEQ ID NO: 230857 - RNA, 22 nt, Human
caucuaaauuugacuccaagga

SEQ ID NO: 230858 - RNA, 22 nt, Human
gcuguaggaagacagaaugcag

SEQ ID NO: 230859 - RNA, 22 nt, Human
augguauucucuaacucagcuu

SEQ ID NO: 230860 - RNA, 18 nt, Human
agucuuuauuucuuucau

SEQ ID NO: 230861 - RNA, 19 nt, Human
gcacacccugcaccaccau

SEQ ID NO: 230862 - RNA, 22 nt, Human
uccaguguuuuucuucacaggu

SEQ ID NO: 230863 - RNA, 22 nt, Human
cguauacaugaagacauugcug

SEQ ID NO: 230864 - RNA, 22 nt, Human
agugcagguuaaggaacuggcc

SEQ ID NO: 230865 - RNA, 22 nt, Human
auguuaaauaaucccuuaaagc

SEQ ID NO: 230866 - RNA, 22 nt, Human
ugaucaaagugcuggaauuaca

SEQ ID NO: 230867 - RNA, 22 nt, Human
aucuccagugcccaaaggaaau

SEQ ID NO: 230868 - RNA, 19 nt, Human
caguuuaacuaauuuuauc

SEQ ID NO: 230869 - RNA, 22 nt, Human
cagggagcagccccuagaagua

SEQ ID NO: 230870 - RNA, 22 nt, Human
cagggcagggauguugcggcag

SEQ ID NO: 230871 - RNA, 22 nt, Human
gccuuggacucggguggacuca

SEQ ID NO: 230872 - RNA, 22 nt, Human
gcacagaacacuggugaguccc

SEQ ID NO: 230873 - RNA, 22 nt, Human
cugaauauuagucaugucugau

SEQ ID NO: 230874 - RNA, 22 nt, Human
uaauugcuuuauccuguuagaa

SEQ ID NO: 230875 - RNA, 22 nt, Human
ugcugaaauauuuaugggucaa

SEQ ID NO: 230876 - RNA, 18 nt, Human
caggaugagugaugggga

SEQ ID NO: 230877 - RNA, 22 nt, Human
gccaggcagacaggucaucagg

SEQ ID NO: 230878 - RNA, 22 nt, Human
uggaaaggacaguugcugauag

SEQ ID NO: 230879 - RNA, 22 nt, Human
aaaguggucugcaucccuucug

SEQ ID NO: 230880 - RNA, 22 nt, Human
uuacauucuuggaaucuuguuu

SEQ ID NO: 230881 - RNA, 22 nt, Human
acuggaggauuccuggaaggcg

SEQ ID NO: 230882 - RNA, 22 nt, Human
uacauguggaguuuucuaguca

SEQ ID NO: 230883 - RNA, 22 nt, Human
agacagugcaagaagagcaggc

SEQ ID NO: 230884 - RNA, 22 nt, Human
uuauggaaaauacaauuauaag

SEQ ID NO: 230885 - RNA, 22 nt, Human
ucuccaaauaguuauauuuaga

SEQ ID NO: 230886 - RNA, 22 nt, Human
cuggaauugcauaauauguccu

SEQ ID NO: 230887 - RNA, 22 nt, Human
acacagccaggguaguaaggcu

SEQ ID NO: 230888 - RNA, 22 nt, Human
uggcucugcugaaccuagugca

SEQ ID NO: 230889 - RNA, 22 nt, Human
uggggugccgacagggagggca

SEQ ID NO: 230890 - RNA, 22 nt, Human
gucagaggggcagcugccaggc

SEQ ID NO: 230891 - RNA, 22 nt, Human
uccugugauauuguuuguuaua

SEQ ID NO: 230892 - RNA, 22 nt, Human
uagaaaucuacuuagacuuucu

SEQ ID NO: 230893 - RNA, 22 nt, Human
aaagccaguucuuagagaaagc

SEQ ID NO: 230894 - RNA, 22 nt, Human
gcugggcuucucaaugcugccu

SEQ ID NO: 230895 - RNA, 22 nt, Human
ucuaggaguaaugagcuagcac

SEQ ID NO: 230896 - RNA, 22 nt, Human
aggggcggccugccugaagcag

SEQ ID NO: 230897 - RNA, 22 nt, Human
gccugcacucaaacacucucuu

SEQ ID NO: 230898 - RNA, 22 nt, Human
gccuggcugguagagggggcuc

SEQ ID NO: 230899 - RNA, 22 nt, Human
agaaauguuuauggcugccuau

SEQ ID NO: 230900 - RNA, 22 nt, Human
agugcuuugguauagaacuauu

SEQ ID NO: 230901 - RNA, 22 nt, Human
uuuccagagcaugucugcucag

SEQ ID NO: 230902 - RNA, 22 nt, Human
accagcucuuucuuuucacuau

SEQ ID NO: 230903 - RNA, 22 nt, Human
augcaaaagacuauuuguugcu

SEQ ID NO: 230904 - RNA, 22 nt, Human
ccuucaaguuccuggucccugg

SEQ ID NO: 230905 - RNA, 22 nt, Human
acaaguaccaaaugcucaagua

SEQ ID NO: 230906 - RNA, 22 nt, Human
agguccagugaaacuuuauuug

SEQ ID NO: 230907 - RNA, 21 nt, Human
ugggccagaucugaguuucua

SEQ ID NO: 230908 - RNA, 22 nt, Human
cagcaacaugugguaguguagg

SEQ ID NO: 230909 - RNA, 21 nt, Human
uucaucuggccguauuccagg

SEQ ID NO: 230910 - RNA, 22 nt, Human
caggggagugagucccucucug

SEQ ID NO: 230911 - RNA, 22 nt, Human
ccucagagaaaugucuauucaa

SEQ ID NO: 230912 - RNA, 22 nt, Human
acauguuuggcucuaugcuaua

SEQ ID NO: 230913 - RNA, 22 nt, Human
ucagagaaguaagguggggugc

SEQ ID NO: 230914 - RNA, 22 nt, Human
aauauaguucuagaaauauuuu

SEQ ID NO: 230915 - RNA, 23 nt, Human
aacauacuguuuaauauucacag

SEQ ID NO: 230916 - RNA, 22 nt, Human
ugaaagcaaccuguaacaguga

SEQ ID NO: 230917 - RNA, 22 nt, Human
ggcuggcucagggcuugagaga

SEQ ID NO: 230918 - RNA, 22 nt, Human
cugccugccacguucagcugua

SEQ ID NO: 230919 - RNA, 22 nt, Human
agcauuccacacugaagucugc

SEQ ID NO: 230920 - RNA, 22 nt, Human
ucugcugugucccuggucuccu

SEQ ID NO: 230921 - RNA, 22 nt, Human
uggaugagauuaaagugagguu

SEQ ID NO: 230922 - RNA, 22 nt, Human
uguauauaagcauuuacuuguu

SEQ ID NO: 230923 - RNA, 22 nt, Human
agcuuaucuuguuaguuucauu

SEQ ID NO: 230924 - RNA, 22 nt, Human
acagcagagccugguacuuacu

SEQ ID NO: 230925 - RNA, 22 nt, Human
uucugucaaacucacaggccga

SEQ ID NO: 230926 - RNA, 22 nt, Human
uuaugcagucgacaucugauca

SEQ ID NO: 230927 - RNA, 22 nt, Human
ccacaggacacaacugcugacc

SEQ ID NO: 230928 - RNA, 23 nt, Human
uucuggguugcugugcuuggaau

SEQ ID NO: 230929 - RNA, 22 nt, Human
acaauacuauuuucaguauccu

SEQ ID NO: 230930 - RNA, 22 nt, Human
ggcugaucaggugcaaaugcau

SEQ ID NO: 230931 - RNA, 22 nt, Human
acauucuaugaagauaauuuua

SEQ ID NO: 230932 - RNA, 22 nt, Human
agucacauggacucaggaugac

SEQ ID NO: 230933 - RNA, 22 nt, Human
ggcugccuugacccuggcuccg

SEQ ID NO: 230934 - RNA, 22 nt, Human
ucacauucucagcaucuauaca

SEQ ID NO: 230935 - RNA, 22 nt, Human
acucagagucuguuugguaccu

SEQ ID NO: 230936 - RNA, 22 nt, Human
ucacagaagaugcuggauguug

SEQ ID NO: 230937 - RNA, 22 nt, Human
agcauuagguguguuucagagg

SEQ ID NO: 230938 - RNA, 22 nt, Human
ugcuggcucuaggcugagacag

SEQ ID NO: 230939 - RNA, 22 nt, Human
uauuugagcgaagcaguguuuu

SEQ ID NO: 230940 - RNA, 22 nt, Human
ugcuuauuaaacaugcauauuc

SEQ ID NO: 230941 - RNA, 22 nt, Human
aggcccugcauuguacugaggg

SEQ ID NO: 230942 - RNA, 22 nt, Human
aagggaaaauaguugaugacca

SEQ ID NO: 230943 - RNA, 22 nt, Human
ccagagaguaggaggcauuauu

SEQ ID NO: 230944 - RNA, 22 nt, Human
ucuccugugcacccucccugug

SEQ ID NO: 230945 - RNA, 22 nt, Human
gcaugcagacagucugagacca

SEQ ID NO: 230946 - RNA, 22 nt, Human
auguaauuguagcaaaaugaug

SEQ ID NO: 230947 - RNA, 22 nt, Human
ugacagaccacugcaacucugu

SEQ ID NO: 230948 - RNA, 22 nt, Human
ccccagccuuccaugggaauug

SEQ ID NO: 230949 - RNA, 22 nt, Human
uuccaggaaaacaguuggaagu

SEQ ID NO: 230950 - RNA, 22 nt, Human
cugccccaccccaaccugaggu

SEQ ID NO: 230951 - RNA, 21 nt, Human
aguguguguggaaugagaaua

SEQ ID NO: 230952 - RNA, 22 nt, Human
uucucuaagccuuaguuucuuc

SEQ ID NO: 230953 - RNA, 22 nt, Human
uagcugcuucucacaugggcaa

SEQ ID NO: 230954 - RNA, 22 nt, Human
ugcagggcuccuggcuccaauc

SEQ ID NO: 230955 - RNA, 22 nt, Human
caaagcaggaagaauauugaaa

SEQ ID NO: 230956 - RNA, 22 nt, Human
augcuaauguuuguggaagaua

SEQ ID NO: 230957 - RNA, 22 nt, Human
ucaauucuagagccuuacauug

SEQ ID NO: 230958 - RNA, 22 nt, Human
cuucaaguugucugaggguggg

SEQ ID NO: 230959 - RNA, 20 nt, Human
auacaguaggugcucaauau

SEQ ID NO: 230960 - RNA, 22 nt, Human
guucugccuguggcuucugugg

SEQ ID NO: 230961 - RNA, 22 nt, Human
ccaggaaggcguuguuccucuc

SEQ ID NO: 230962 - RNA, 23 nt, Human
gcaggacaacagagugggaaggc

SEQ ID NO: 230963 - RNA, 22 nt, Human
uugcaaaaacugcaauuacuuu

SEQ ID NO: 230964 - RNA, 22 nt, Human
ucuuuacaaucuaagcauaguu

SEQ ID NO: 230965 - RNA, 22 nt, Human
gcugcucagugggccugagccu

SEQ ID NO: 230966 - RNA, 22 nt, Human
uaccauuugagagagaacauaa

SEQ ID NO: 230967 - RNA, 22 nt, Human
gauggcagugggccucgagucc

SEQ ID NO: 230968 - RNA, 22 nt, Human
cucuccaggagcucagagucua

SEQ ID NO: 230969 - RNA, 22 nt, Human
uagaagaaaagcacuuagagau

SEQ ID NO: 230970 - RNA, 22 nt, Human
uucucaguuucauagcugagca

SEQ ID NO: 230971 - RNA, 22 nt, Human
gaucacauaauuuggaaacagc

SEQ ID NO: 230972 - RNA, 22 nt, Human
uugcccugcggguccugcgcaa

SEQ ID NO: 230973 - RNA, 22 nt, Human
guuuccuagaucaguguucuua

SEQ ID NO: 230974 - RNA, 20 nt, Human
ccaggccugggccugcucua

SEQ ID NO: 230975 - RNA, 22 nt, Human
uggcaauguuagcaaagcauuu

SEQ ID NO: 230976 - RNA, 22 nt, Human
ggcuccagggaguggagagaag

SEQ ID NO: 230977 - RNA, 22 nt, Human
agagucugaggcagcugcagcc

SEQ ID NO: 230978 - RNA, 22 nt, Human
gaccuuagaacgugacacaaga

SEQ ID NO: 230979 - RNA, 23 nt, Human
accccaggcaucgcauuccucuu

SEQ ID NO: 230980 - RNA, 20 nt, Human
uccagcauauaaacuccucu

SEQ ID NO: 230981 - RNA, 18 nt, Human
cguuuuuccgggauugca

SEQ ID NO: 230982 - RNA, 22 nt, Human
agagacaggaguucuguuucca

SEQ ID NO: 230983 - RNA, 22 nt, Human
aggcaacuugcaucucggcaag

SEQ ID NO: 230984 - RNA, 22 nt, Human
cacaugugcaaauacugaggcu

SEQ ID NO: 230985 - RNA, 22 nt, Human
cuccagucuuucagaugucccu

SEQ ID NO: 230986 - RNA, 22 nt, Human
augauguuaccaguacuuagag

SEQ ID NO: 230987 - RNA, 21 nt, Human
gagugcaggucugaugccauc

SEQ ID NO: 230988 - RNA, 22 nt, Human
gcagcagaugcuuucauggaca

SEQ ID NO: 230989 - RNA, 22 nt, Human
ucccagucuguguccuuuacag

SEQ ID NO: 230990 - RNA, 22 nt, Human
cccuggcugcuaccagguagcu

SEQ ID NO: 230991 - RNA, 22 nt, Human
augcuagaagggagcacuaugu

SEQ ID NO: 230992 - RNA, 19 nt, Human
uuucuguuugcuucugguu

SEQ ID NO: 230993 - RNA, 22 nt, Human
ccuggagcacagcccaguccca

SEQ ID NO: 230994 - RNA, 21 nt, Human
ugcagagauaucugaagcaga

SEQ ID NO: 230995 - RNA, 19 nt, Human
ccaggagcaguggugagcu

SEQ ID NO: 230996 - RNA, 16 nt, Human
gcuccugggcccucga

SEQ ID NO: 230997 - RNA, 22 nt, Human
cugggcagcuaccaccacugcu

SEQ ID NO: 230998 - RNA, 22 nt, Human
cacaggccaauacccucucucu

SEQ ID NO: 230999 - RNA, 22 nt, Human
ucccaggguccucuucuggaau

SEQ ID NO: 231000 - RNA, 22 nt, Human
cagucugggacugagcuccacc

SEQ ID NO: 231001 - RNA, 22 nt, Human
uuagacaucagugcuucucagc

SEQ ID NO: 231002 - RNA, 22 nt, Human
cagggccucauugucaguccug

SEQ ID NO: 231003 - RNA, 22 nt, Human
auuuaauuaaucauggugaauu

SEQ ID NO: 231004 - RNA, 22 nt, Human
agaacaucugaagauacaaagu

SEQ ID NO: 231005 - RNA, 22 nt, Human
cuguacaaaguagcugcuggga

SEQ ID NO: 231006 - RNA, 22 nt, Human
uuuugccugagauccgagucug

SEQ ID NO: 231007 - RNA, 22 nt, Human
ugcaaacaguuaagaugcaggc

SEQ ID NO: 231008 - RNA, 16 nt, Human
caggaaacuuaaagac

SEQ ID NO: 231009 - RNA, 22 nt, Human
auguauuucuauguagugaaga

SEQ ID NO: 231010 - RNA, 22 nt, Human
ccuucuucaccaguuuaccuga

SEQ ID NO: 231011 - RNA, 22 nt, Human
acuguucaaguuuuaugcugga

SEQ ID NO: 231012 - RNA, 22 nt, Human
uucacauucucacaagaggaaa

SEQ ID NO: 231013 - RNA, 22 nt, Human
uccaggcauuggagagauaaug

SEQ ID NO: 231014 - RNA, 22 nt, Human
gguccaggggguagauauguga

SEQ ID NO: 231015 - RNA, 22 nt, Human
ggugagaggcagaggacagcuu

SEQ ID NO: 231016 - RNA, 22 nt, Human
ugcugggggugucucaccaggc

SEQ ID NO: 231017 - RNA, 22 nt, Human
agacacaguauaagcacaacaa

SEQ ID NO: 231018 - RNA, 22 nt, Human
uaaaaguaggaaugaaacgcau

SEQ ID NO: 231019 - RNA, 22 nt, Human
uuuagacauagcugaaaucauu

SEQ ID NO: 231020 - RNA, 22 nt, Human
aaguguuaaaagauuaaaugcu

SEQ ID NO: 231021 - RNA, 22 nt, Human
ugcuggcuggaucagagauugg

SEQ ID NO: 231022 - RNA, 22 nt, Human
auucucaaacaagugguuugau

SEQ ID NO: 231023 - RNA, 22 nt, Human
cggaaacuugagaaccagccag

SEQ ID NO: 231024 - RNA, 22 nt, Human
gauaaacuggaaccauugccuc

SEQ ID NO: 231025 - RNA, 22 nt, Human
gcauggcuuacagaggcugcag

SEQ ID NO: 231026 - RNA, 22 nt, Human
ggagaaaggauaggaaugugcu

SEQ ID NO: 231027 - RNA, 22 nt, Human
acagagcuaaauuucaauccca

SEQ ID NO: 231028 - RNA, 22 nt, Human
uuagaacuuaagaauacugucu

SEQ ID NO: 231029 - RNA, 22 nt, Human
cagugccaugucugagccccua

SEQ ID NO: 231030 - RNA, 22 nt, Human
agagaggucucaggagaaacca

SEQ ID NO: 231031 - RNA, 22 nt, Human
gaggagcuggcugucgggaggc

SEQ ID NO: 231032 - RNA, 16 nt, Human
gcuggagggagggguu

SEQ ID NO: 231033 - RNA, 22 nt, Human
gccagccagaguccaucugaga

SEQ ID NO: 231034 - RNA, 22 nt, Human
caguauguacucuuaucaugua

SEQ ID NO: 231035 - RNA, 20 nt, Human
cucugcagcaaggccugggu

SEQ ID NO: 231036 - RNA, 21 nt, Human
gcucuggccuacuguucccuc

SEQ ID NO: 231037 - RNA, 22 nt, Human
cuacuguuauuauuaauaguaa

SEQ ID NO: 231038 - RNA, 22 nt, Human
uuagaaccacugaagacucaca

SEQ ID NO: 231039 - RNA, 22 nt, Human
ccuccuagaggaaccccagggc

SEQ ID NO: 231040 - RNA, 22 nt, Human
aguggcagaagccaagucugca

SEQ ID NO: 231041 - RNA, 22 nt, Human
gggcucaugauguaggcuggua

SEQ ID NO: 231042 - RNA, 22 nt, Human
agauauacagagaauuauucac

SEQ ID NO: 231043 - RNA, 22 nt, Human
gaagacauuuguaacacuugca

SEQ ID NO: 231044 - RNA, 22 nt, Human
ugcugaggagguggcugugcuu

SEQ ID NO: 231045 - RNA, 22 nt, Human
aggccuggcuuugguuugcuga

SEQ ID NO: 231046 - RNA, 22 nt, Human
ccuuccagguuuuggcuccauu

SEQ ID NO: 231047 - RNA, 22 nt, Human
uagaaaauagggccuguggagc

SEQ ID NO: 231048 - RNA, 22 nt, Human
cgcaauuaauucgggccacagu

SEQ ID NO: 231049 - RNA, 22 nt, Human
uugcauuuguuugaguagaaug

SEQ ID NO: 231050 - RNA, 22 nt, Human
agggcacaucugcugggaaugg

SEQ ID NO: 231051 - RNA, 19 nt, Human
uccagccugcuguuucucu

SEQ ID NO: 231052 - RNA, 22 nt, Human
aagcugaauuuucuaaaagaau

SEQ ID NO: 231053 - RNA, 22 nt, Human
cagcccugcagagggcgcuccu

SEQ ID NO: 231054 - RNA, 19 nt, Human
ugcugaggaugcaagaucc

SEQ ID NO: 231055 - RNA, 22 nt, Human
uguccagggggcuuaccuggag

SEQ ID NO: 231056 - RNA, 23 nt, Human
uugcaaaaugcaauugaguuaga

SEQ ID NO: 231057 - RNA, 22 nt, Human
gcacuugaagaauugaacugga

SEQ ID NO: 231058 - RNA, 19 nt, Human
ccauggcaaugaucugaug

SEQ ID NO: 231059 - RNA, 22 nt, Human
aacaguuuaugagauaugcuau

SEQ ID NO: 231060 - RNA, 22 nt, Human
ccaguauucgaucuggccaguu

SEQ ID NO: 231061 - RNA, 22 nt, Human
aguagcaguuuggcugaauuua

SEQ ID NO: 231062 - RNA, 22 nt, Human
gcucaggaaacagcagggcuug

SEQ ID NO: 231063 - RNA, 22 nt, Human
ucagucuuuaaaagcucaggaa

SEQ ID NO: 231064 - RNA, 20 nt, Human
ggcuucuucaggugucuauu

SEQ ID NO: 231065 - RNA, 22 nt, Human
gcaguaagauguuucccagagc

SEQ ID NO: 231066 - RNA, 20 nt, Human
aguguuuagaauacuauuau

SEQ ID NO: 231067 - RNA, 22 nt, Human
uuacuuacagacaguagacucu

SEQ ID NO: 231068 - RNA, 22 nt, Human
ugcaaccugcacucugucuuua

SEQ ID NO: 231069 - RNA, 20 nt, Human
uggaggcaccuguggagauc

SEQ ID NO: 231070 - RNA, 22 nt, Human
cuggcucacaggugagaugcau

SEQ ID NO: 231071 - RNA, 22 nt, Human
ggggcagcuaccggaaguaggg

SEQ ID NO: 231072 - RNA, 22 nt, Human
gagcaguguuuguggaccugga

SEQ ID NO: 231073 - RNA, 22 nt, Human
gagggugggcuccuaucugggu

SEQ ID NO: 231074 - RNA, 22 nt, Human
aguggcuucauuucugccagaa

SEQ ID NO: 231075 - RNA, 22 nt, Human
gcucccagacugaccagaggug

SEQ ID NO: 231076 - RNA, 20 nt, Human
ucaagacagacauggaguuu

SEQ ID NO: 231077 - RNA, 22 nt, Human
cucagauguagaaagauuguga

SEQ ID NO: 231078 - RNA, 21 nt, Human
acagcugucuuagcuugggcu

SEQ ID NO: 231079 - RNA, 22 nt, Human
ccagcagagcauggggaggaag

SEQ ID NO: 231080 - RNA, 22 nt, Human
uuucacauuuuauacuuaagcc

SEQ ID NO: 231081 - RNA, 22 nt, Human
cucagcacuuuggaaggcugau

SEQ ID NO: 231082 - RNA, 22 nt, Human
cuccugggaggaugcggacccg

SEQ ID NO: 231083 - RNA, 22 nt, Human
uagggcagauucgguggaguuu

SEQ ID NO: 231084 - RNA, 18 nt, Human
cugacuccuuugcugcca

SEQ ID NO: 231085 - RNA, 22 nt, Human
acugcaaaaaugggugcauuca

SEQ ID NO: 231086 - RNA, 22 nt, Human
cagggggcuguggcuguccagu

SEQ ID NO: 231087 - RNA, 22 nt, Human
uccccaggaguuuuacuuugca

SEQ ID NO: 231088 - RNA, 22 nt, Human
uauaucagcaaagcauuuaaaa

SEQ ID NO: 231089 - RNA, 22 nt, Human
ucuccacacuuucucucccagg

SEQ ID NO: 231090 - RNA, 22 nt, Human
auacacaucuauuuaagagaca

SEQ ID NO: 231091 - RNA, 22 nt, Human
guauuuuauggccuggggccua

SEQ ID NO: 231092 - RNA, 22 nt, Human
cucugggaugaggccuaggcac

SEQ ID NO: 231093 - RNA, 22 nt, Human
acaaauaugguacucggagaaa

SEQ ID NO: 231094 - RNA, 22 nt, Human
gauggucuuugucucugauaag

SEQ ID NO: 231095 - RNA, 22 nt, Human
auacaguaaccacauucuauag

SEQ ID NO: 231096 - RNA, 22 nt, Human
gcccugggcucccugcuccaca

SEQ ID NO: 231097 - RNA, 22 nt, Human
gcugagguggcugccuuaguaa

SEQ ID NO: 231098 - RNA, 22 nt, Human
agggauggcaaguuaaccugag

SEQ ID NO: 231099 - RNA, 22 nt, Human
caggauggagggagggcuguua

SEQ ID NO: 231100 - RNA, 22 nt, Human
ggacggggagcuggaaagggga

SEQ ID NO: 231101 - RNA, 22 nt, Human
ccacagcuucgcagucugcugc

SEQ ID NO: 231102 - RNA, 20 nt, Human
uagaaucuacuauuuggccc

SEQ ID NO: 231103 - RNA, 22 nt, Human
uuguauuucuccacuuucuguu

SEQ ID NO: 231104 - RNA, 22 nt, Human
caugcuuuuuucuaguauaaau

SEQ ID NO: 231105 - RNA, 22 nt, Human
agaacacucuccugaaaauuaa

SEQ ID NO: 231106 - RNA, 22 nt, Human
aagccaagugcuggccaugggc

SEQ ID NO: 231107 - RNA, 22 nt, Human
augcagcuauuugagcauguca

SEQ ID NO: 231108 - RNA, 19 nt, Human
uggcagguagugagcaguc

SEQ ID NO: 231109 - RNA, 22 nt, Human
aauacaaucaaauucacuagca

SEQ ID NO: 231110 - RNA, 22 nt, Human
caugccauuuacuuggaggaga

SEQ ID NO: 231111 - RNA, 22 nt, Human
gauaaacuuguggaguuuuggu

SEQ ID NO: 231112 - RNA, 22 nt, Human
gcagggcagccacaggcccccu

SEQ ID NO: 231113 - RNA, 22 nt, Human
gaagcacauggcugugagcaac

SEQ ID NO: 231114 - RNA, 23 nt, Human
auagacccaagaguaaaggcauc

SEQ ID NO: 231115 - RNA, 18 nt, Human
uuggcuucuuuccuuccu

SEQ ID NO: 231116 - RNA, 22 nt, Human
uacugagcugguccacugaggu

SEQ ID NO: 231117 - RNA, 22 nt, Human
auguuacagaaagcaaagauga

SEQ ID NO: 231118 - RNA, 22 nt, Human
gugugucccuuggaaccucagc

SEQ ID NO: 231119 - RNA, 22 nt, Human
caacaggcuuuauguuuaaagu

SEQ ID NO: 231120 - RNA, 20 nt, Human
ucauuacagugcuaagaugu

SEQ ID NO: 231121 - RNA, 17 nt, Human
ucugugauaguguagau

SEQ ID NO: 231122 - RNA, 22 nt, Human
acacauaugccauuacagcaaa

SEQ ID NO: 231123 - RNA, 22 nt, Human
auguaaauuguacugacacacg

SEQ ID NO: 231124 - RNA, 22 nt, Human
ggagccuuacuagaaugugagc

SEQ ID NO: 231125 - RNA, 22 nt, Human
guuacaauguccuuacaugaaa

SEQ ID NO: 231126 - RNA, 22 nt, Human
uguccuggaaaaauggagaguu

SEQ ID NO: 231127 - RNA, 22 nt, Human
uuucugauauacuguagaaucc

SEQ ID NO: 231128 - RNA, 22 nt, Human
uaggaaauucucuugcuaaguu

SEQ ID NO: 231129 - RNA, 22 nt, Human
aggguccacuuggacauugauc

SEQ ID NO: 231130 - RNA, 22 nt, Human
aaggguugcaaggucagaggaa

SEQ ID NO: 231131 - RNA, 22 nt, Human
uaggccagauuguuauccaugg

SEQ ID NO: 231132 - RNA, 21 nt, Human
ggcagagcuggggccuccagc

SEQ ID NO: 231133 - RNA, 22 nt, Human
uggccaggccucuuggugccca

SEQ ID NO: 231134 - RNA, 22 nt, Human
ugaugucuaguacauacaagag

SEQ ID NO: 231135 - RNA, 22 nt, Human
uuuccuaggagauugaucacau

SEQ ID NO: 231136 - RNA, 17 nt, Human
ucucaggggcuagcccu

SEQ ID NO: 231137 - RNA, 22 nt, Human
ugggaagccuagcagacagcug

SEQ ID NO: 231138 - RNA, 22 nt, Human
ugccacauggugcauuuccuag

SEQ ID NO: 231139 - RNA, 22 nt, Human
auauuuaacuggucccaauaua

SEQ ID NO: 231140 - RNA, 22 nt, Human
aguuuuugagaauuuacuaugu

SEQ ID NO: 231141 - RNA, 22 nt, Human
ugugaaaagggcuuuguacaaa

SEQ ID NO: 231142 - RNA, 22 nt, Human
agaaguuaauuccugaaauucu

SEQ ID NO: 231143 - RNA, 22 nt, Human
gaucaaugguguaacuuguccu

SEQ ID NO: 231144 - RNA, 22 nt, Human
ugcucccauguguggguacaga

SEQ ID NO: 231145 - RNA, 22 nt, Human
ggcuucugaaaucucugugcgu

SEQ ID NO: 231146 - RNA, 22 nt, Human
cuaucaaacagccauuaauaua

SEQ ID NO: 231147 - RNA, 22 nt, Human
agcaagcagaaaugccauggca

SEQ ID NO: 231148 - RNA, 22 nt, Human
ccaggagcuauguacacacuau

SEQ ID NO: 231149 - RNA, 22 nt, Human
gucuccaguguucaggugacug

SEQ ID NO: 231150 - RNA, 23 nt, Human
accaacaagccucuggagagugg

SEQ ID NO: 231151 - RNA, 22 nt, Human
ugcaggcuggggaggcagacuu

SEQ ID NO: 231152 - RNA, 21 nt, Human
ccauaaucuuaggaucaaaau

SEQ ID NO: 231153 - RNA, 19 nt, Human
ugcagagagaggcaaagaa

SEQ ID NO: 231154 - RNA, 22 nt, Human
uaggccagcccuuaguccuguc

SEQ ID NO: 231155 - RNA, 22 nt, Human
gcacaauaauuuuuuuaagagg

SEQ ID NO: 231156 - RNA, 22 nt, Human
ucugccuguggauacaugcucu

SEQ ID NO: 231157 - RNA, 22 nt, Human
cuguggcuaugguguacauacu

SEQ ID NO: 231158 - RNA, 22 nt, Human
uuacaugggccauuuagacaug

SEQ ID NO: 231159 - RNA, 22 nt, Human
uaaggccaauuaacaaccaggg

SEQ ID NO: 231160 - RNA, 22 nt, Human
aguauuuguggauuuguauugg

SEQ ID NO: 231161 - RNA, 22 nt, Human
uauuccuauuucuaaacauaug

SEQ ID NO: 231162 - RNA, 22 nt, Human
uuggcucuggaacuauuucuga

SEQ ID NO: 231163 - RNA, 22 nt, Human
agcccugcugcuucuuguauuu

SEQ ID NO: 231164 - RNA, 23 nt, Human
aggcccugccugucccucuuuuu

SEQ ID NO: 231165 - RNA, 22 nt, Human
ugacauguaguuagaaaauagg

SEQ ID NO: 231166 - RNA, 22 nt, Human
auuuugcacacuaugcagcuuu

SEQ ID NO: 231167 - RNA, 22 nt, Human
gacagacaggaggccaccugcu

SEQ ID NO: 231168 - RNA, 22 nt, Human
ccuguucaagguauuaauuauc

SEQ ID NO: 231169 - RNA, 22 nt, Human
uguaaucauuacaguacaugga

SEQ ID NO: 231170 - RNA, 22 nt, Human
aucucuguuagaucugcuuaaa

SEQ ID NO: 231171 - RNA, 22 nt, Human
uaaauuuacccaaggaacaugu

SEQ ID NO: 231172 - RNA, 20 nt, Human
agugucuggauuuuguaacc

SEQ ID NO: 231173 - RNA, 22 nt, Human
agccuccuggaguuucugggau

SEQ ID NO: 231174 - RNA, 22 nt, Human
gccuuagccugcacuuccuguu

SEQ ID NO: 231175 - RNA, 22 nt, Human
gcaggaggagcauuaacugagc

SEQ ID NO: 231176 - RNA, 22 nt, Human
aaauaguuuagcucucauuuca

SEQ ID NO: 231177 - RNA, 22 nt, Human
uucaacuuuaugcauauguauu

SEQ ID NO: 231178 - RNA, 20 nt, Human
agugugcauuuagagucugc

SEQ ID NO: 231179 - RNA, 22 nt, Human
gcccuggagggccagcgacugg

SEQ ID NO: 231180 - RNA, 22 nt, Human
acacacaugcaugcuugccauu

SEQ ID NO: 231181 - RNA, 22 nt, Human
agaucuuuugguuauuauaaga

SEQ ID NO: 231182 - RNA, 22 nt, Human
agguaaaauagauaguauuucu

SEQ ID NO: 231183 - RNA, 22 nt, Human
cugcugugcagacagacucucu

SEQ ID NO: 231184 - RNA, 22 nt, Human
acacaugaaauaauauuaugca

SEQ ID NO: 231185 - RNA, 22 nt, Human
uuuuggcucuugguaggucaga

SEQ ID NO: 231186 - RNA, 21 nt, Human
ggccacaguuagggcucagga

SEQ ID NO: 231187 - RNA, 22 nt, Human
cauccagugggacagagaaacc

SEQ ID NO: 231188 - RNA, 22 nt, Human
gcccagcaggggauggcagcuc

SEQ ID NO: 231189 - RNA, 21 nt, Human
gcucaggcucuugacagagca

SEQ ID NO: 231190 - RNA, 22 nt, Human
ugaaagcacucacuucugcucu

SEQ ID NO: 231191 - RNA, 20 nt, Human
caggcagaggaugcugacca

SEQ ID NO: 231192 - RNA, 22 nt, Human
augaggcagaaaaaagucggag

SEQ ID NO: 231193 - RNA, 20 nt, Human
gcagagcuguucugugggga

SEQ ID NO: 231194 - RNA, 22 nt, Human
agcauuuagucuuuauugcagc

SEQ ID NO: 231195 - RNA, 22 nt, Human
uauuaaagggaaguuaugcaug

SEQ ID NO: 231196 - RNA, 22 nt, Human
uguuauugucgcugcacuggga

SEQ ID NO: 231197 - RNA, 22 nt, Human
uauacacauuacaguuucagga

SEQ ID NO: 231198 - RNA, 22 nt, Human
ucuucaaacugaaaauuuagaa

SEQ ID NO: 231199 - RNA, 22 nt, Human
uuuuaccugaaccacacaguau

SEQ ID NO: 231200 - RNA, 22 nt, Human
cagcuuggcgaauguagguaug

SEQ ID NO: 231201 - RNA, 17 nt, Human
gcaggcacugcugccug

SEQ ID NO: 231202 - RNA, 22 nt, Human
agguuauucucuaucucauccc

SEQ ID NO: 231203 - RNA, 22 nt, Human
agagccagccuucucagcuuac

SEQ ID NO: 231204 - RNA, 19 nt, Human
guauaacuuacaccagcaa

SEQ ID NO: 231205 - RNA, 22 nt, Human
ccacaucucccuauugcucuuu

SEQ ID NO: 231206 - RNA, 22 nt, Human
agaaucuugggcaaauucaucu

SEQ ID NO: 231207 - RNA, 22 nt, Human
gucuuuauauuuacuaaagaau

SEQ ID NO: 231208 - RNA, 22 nt, Human
ggcccucccugagccagguggg

SEQ ID NO: 231209 - RNA, 22 nt, Human
cuggguggcgucuggggccagu

SEQ ID NO: 231210 - RNA, 22 nt, Human
gcugcccuaauaucacauguua

SEQ ID NO: 231211 - RNA, 18 nt, Human
gugccaggaggcgcagcc

SEQ ID NO: 231212 - RNA, 22 nt, Human
cugccugcuucugagccagagg

SEQ ID NO: 231213 - RNA, 22 nt, Human
caggcucagucagaaaauguau

SEQ ID NO: 231214 - RNA, 19 nt, Human
gaaaggcugcugcuaccug

SEQ ID NO: 231215 - RNA, 22 nt, Human
ugggggaguauagucuggccuc

SEQ ID NO: 231216 - RNA, 22 nt, Human
ggcagggaguggagacucccua

SEQ ID NO: 231217 - RNA, 20 nt, Human
gcucugggagggaugugaug

SEQ ID NO: 231218 - RNA, 22 nt, Human
acuacauuuccugaccccugug

SEQ ID NO: 231219 - RNA, 22 nt, Human
cuccugggcuucgaaggcuccc

SEQ ID NO: 231220 - RNA, 23 nt, Human
ucuauacauacugcagccucugg

SEQ ID NO: 231221 - RNA, 22 nt, Human
gcucagggccauggaccagcag

SEQ ID NO: 231222 - RNA, 22 nt, Human
ggcgcacaaugugcagguuugu

SEQ ID NO: 231223 - RNA, 22 nt, Human
ccucuggguuaguuuagggagc

SEQ ID NO: 231224 - RNA, 22 nt, Human
gaggguggccuuuagagcccau

SEQ ID NO: 231225 - RNA, 22 nt, Human
ccaggacuuauuacaguauaac

SEQ ID NO: 231226 - RNA, 20 nt, Human
ucucaggcccccuccuugcu

SEQ ID NO: 231227 - RNA, 22 nt, Human
ugacagaaagaauaugucaauc

SEQ ID NO: 231228 - RNA, 22 nt, Human
uugguaauuguguuuauuaaau

SEQ ID NO: 231229 - RNA, 22 nt, Human
uuaacugugacaguuucucaga

SEQ ID NO: 231230 - RNA, 22 nt, Human
aucuccaguauccuaguauugu

SEQ ID NO: 231231 - RNA, 19 nt, Human
ucucuacacuacauuucua

SEQ ID NO: 231232 - RNA, 22 nt, Human
auuuguaauuucuuaucugugu

SEQ ID NO: 231233 - RNA, 20 nt, Human
cugcaaaaugacauuaggaa

SEQ ID NO: 231234 - RNA, 22 nt, Human
acaaauuugaauccugacuucu

SEQ ID NO: 231235 - RNA, 22 nt, Human
cccaggcacagauuaucccaau

SEQ ID NO: 231236 - RNA, 22 nt, Human
agagagcagucuggaagaaaca

SEQ ID NO: 231237 - RNA, 22 nt, Human
ucagcccugggacccagggaug

SEQ ID NO: 231238 - RNA, 22 nt, Human
gagucagaugaagauaaaaggg

SEQ ID NO: 231239 - RNA, 22 nt, Human
uuguugccaaauguaaaauaug

SEQ ID NO: 231240 - RNA, 19 nt, Human
uccagaugauauggauuac

SEQ ID NO: 231241 - RNA, 22 nt, Human
agccuuccagguagauggcaca

SEQ ID NO: 231242 - RNA, 22 nt, Human
uaauguguugaauauuuguaca

SEQ ID NO: 231243 - RNA, 22 nt, Human
ucucugggaucguuuugggcuc

SEQ ID NO: 231244 - RNA, 21 nt, Human
auuauuauaaagaccacaggg

SEQ ID NO: 231245 - RNA, 22 nt, Human
ucaagaaggaguuauuuauuca

SEQ ID NO: 231246 - RNA, 22 nt, Human
aaugucuuuuaaauguugaggu

SEQ ID NO: 231247 - RNA, 22 nt, Human
uaccaugucuucaauaagucua

SEQ ID NO: 231248 - RNA, 22 nt, Human
uaaguauguuagaaaaucaagu

SEQ ID NO: 231249 - RNA, 22 nt, Human
caagaaauuucuuaagaacuaa

SEQ ID NO: 231250 - RNA, 22 nt, Human
uaccuagacaugaacacagaug

SEQ ID NO: 231251 - RNA, 22 nt, Human
uccuuccugcucuaacauucag

SEQ ID NO: 231252 - RNA, 22 nt, Human
ccagcuccaggacugggagcug

SEQ ID NO: 231253 - RNA, 22 nt, Human
ugcaaacaggcauuucacaaac

SEQ ID NO: 231254 - RNA, 22 nt, Human
gacugggguaaggugaggaggu

SEQ ID NO: 231255 - RNA, 22 nt, Human
gugcccaggggccagcugccgg

SEQ ID NO: 231256 - RNA, 21 nt, Human
acacaacaggcagucauuuuc

SEQ ID NO: 231257 - RNA, 22 nt, Human
auuuuguugaugguggaguagc

SEQ ID NO: 231258 - RNA, 22 nt, Human
uggcucaguuaggucagaaaca

SEQ ID NO: 231259 - RNA, 22 nt, Human
uuguguccccuguucuaccugu

SEQ ID NO: 231260 - RNA, 22 nt, Human
ccucauggccuugagcugaggg

SEQ ID NO: 231261 - RNA, 22 nt, Human
ggcaagugugagaagggacugg

SEQ ID NO: 231262 - RNA, 22 nt, Human
aggggcuccaaggaaguuuggg

SEQ ID NO: 231263 - RNA, 22 nt, Human
cccuggacuguucagggccuga

SEQ ID NO: 231264 - RNA, 22 nt, Human
agggaggauaguagucaguuua

SEQ ID NO: 231265 - RNA, 22 nt, Human
auggccuggggauuccugagca

SEQ ID NO: 231266 - RNA, 22 nt, Human
auauguauguacgcacauauuc

SEQ ID NO: 231267 - RNA, 22 nt, Human
uggccaguggacuaaguucuga

SEQ ID NO: 231268 - RNA, 22 nt, Human
gaggaaacauuguagaagcagu

SEQ ID NO: 231269 - RNA, 22 nt, Human
cuggcagccaagugggauacuc

SEQ ID NO: 231270 - RNA, 22 nt, Human
gcaggcucacucuguuuggcuc

SEQ ID NO: 231271 - RNA, 22 nt, Human
acagaugaguuagaauaggcag

SEQ ID NO: 231272 - RNA, 22 nt, Human
gaggcucccaaggggcuaggcc

SEQ ID NO: 231273 - RNA, 22 nt, Human
ugagcaggacucacugcagccu

SEQ ID NO: 231274 - RNA, 22 nt, Human
agagugaaguucaucgugcagc

SEQ ID NO: 231275 - RNA, 22 nt, Human
uggcuccuaaugcugcccagac

SEQ ID NO: 231276 - RNA, 22 nt, Human
guuaucuucccuuugaugauuu

SEQ ID NO: 231277 - RNA, 19 nt, Human
uuuuccuucuauauguuuc

SEQ ID NO: 231278 - RNA, 22 nt, Human
cuggcacaugcucccugagugg

SEQ ID NO: 231279 - RNA, 22 nt, Human
gggcccugggauucagagcaag

SEQ ID NO: 231280 - RNA, 22 nt, Human
uugcuuuacuuugccauucguu

SEQ ID NO: 231281 - RNA, 22 nt, Human
ucuccuggguaaaaggguugau

SEQ ID NO: 231282 - RNA, 22 nt, Human
ggaccaggccagccucccugcg

SEQ ID NO: 231283 - RNA, 22 nt, Human
auggaaauguaacuucugauuc

SEQ ID NO: 231284 - RNA, 22 nt, Human
ucuagauuuggggcaugaaguu

SEQ ID NO: 231285 - RNA, 22 nt, Human
uaguuuuuaaguguacaauuuc

SEQ ID NO: 231286 - RNA, 22 nt, Human
ggagcccuuggcaccuaguagg

SEQ ID NO: 231287 - RNA, 22 nt, Human
ccaggcagaugggccggcuuca

SEQ ID NO: 231288 - RNA, 22 nt, Human
gugcccaguccugccuugacag

SEQ ID NO: 231289 - RNA, 22 nt, Human
cagcuccuguuggucuugagga

SEQ ID NO: 231290 - RNA, 22 nt, Human
agauguaguagugggucuuuua

SEQ ID NO: 231291 - RNA, 22 nt, Human
uacacaugacaguggacugaga

SEQ ID NO: 231292 - RNA, 22 nt, Human
gcaggggaguccacucuaugca

SEQ ID NO: 231293 - RNA, 22 nt, Human
gaggcucauugcauugugcauu

SEQ ID NO: 231294 - RNA, 22 nt, Human
aggcucucacuauccuccuagc

SEQ ID NO: 231295 - RNA, 22 nt, Human
ccuccuucuggggccuucugcu

SEQ ID NO: 231296 - RNA, 22 nt, Human
gccuuguuucauuacacguggu

SEQ ID NO: 231297 - RNA, 23 nt, Human
gcaagcaaggcaggguaaagaga

SEQ ID NO: 231298 - RNA, 22 nt, Human
ucuggaggcaacuaaccuaguu

SEQ ID NO: 231299 - RNA, 19 nt, Human
ggagccagcuguggaaggc

SEQ ID NO: 231300 - RNA, 22 nt, Human
cagcccuuccuucuguuuauac

SEQ ID NO: 231301 - RNA, 22 nt, Human
uuuauuaagaugcgaaugcuga

SEQ ID NO: 231302 - RNA, 22 nt, Human
gcaggccucuaauucaccgcag

SEQ ID NO: 231303 - RNA, 22 nt, Human
cuucagcucuugguaaauguuu

SEQ ID NO: 231304 - RNA, 22 nt, Human
agauguggaacacuagacugcu

SEQ ID NO: 231305 - RNA, 22 nt, Human
cucucugaggcaggccuguggg

SEQ ID NO: 231306 - RNA, 22 nt, Human
ucuggcucuccagugcucuuag

SEQ ID NO: 231307 - RNA, 20 nt, Human
ucuuacaaucguuacaucca

SEQ ID NO: 231308 - RNA, 23 nt, Human
agcacaaaguguuuuccuuguag

SEQ ID NO: 231309 - RNA, 19 nt, Human
cucuuggguggcagaggcc

SEQ ID NO: 231310 - RNA, 18 nt, Human
acugcaggagaggugagg

SEQ ID NO: 231311 - RNA, 22 nt, Human
gugcagcugccgaucagauagg

SEQ ID NO: 231312 - RNA, 22 nt, Human
acagcagaguugaguaguugca

SEQ ID NO: 231313 - RNA, 22 nt, Human
uggacaugaccucgagcgagau

SEQ ID NO: 231314 - RNA, 22 nt, Human
ugggagcugggguuggacgucu

SEQ ID NO: 231315 - RNA, 22 nt, Human
cagauggcugccaagaugggcu

SEQ ID NO: 231316 - RNA, 22 nt, Human
gacauuuauuggauuuuacgag

SEQ ID NO: 231317 - RNA, 22 nt, Human
agacacagucugucuggaggag

SEQ ID NO: 231318 - RNA, 22 nt, Human
guaagccuggaauuuuugacuu

SEQ ID NO: 231319 - RNA, 22 nt, Human
guagcuuccagaaagugucuuu

SEQ ID NO: 231320 - RNA, 22 nt, Human
cagcucuacguuucuaugaauc

SEQ ID NO: 231321 - RNA, 22 nt, Human
caaggccuucgucuccuagcuu

SEQ ID NO: 231322 - RNA, 22 nt, Human
ucuaggaggcacacaaguaguu

SEQ ID NO: 231323 - RNA, 22 nt, Human
uucaggaaucaaccaagucauu

SEQ ID NO: 231324 - RNA, 20 nt, Human
agaaaauguuuucagcugga

SEQ ID NO: 231325 - RNA, 22 nt, Human
ggcagcucugaugaugcucugg

SEQ ID NO: 231326 - RNA, 20 nt, Human
aggaagcugagauguagagg

SEQ ID NO: 231327 - RNA, 22 nt, Human
gaucuagaccagaagcuguugu

SEQ ID NO: 231328 - RNA, 22 nt, Human
caugugguucaaguacuccaca

SEQ ID NO: 231329 - RNA, 22 nt, Human
ggugaggguaaacuaaaacauc

SEQ ID NO: 231330 - RNA, 22 nt, Human
guuuauuagaguuuucugucug

SEQ ID NO: 231331 - RNA, 22 nt, Human
agggauguucauuuuguggcug

SEQ ID NO: 231332 - RNA, 22 nt, Human
acaguuaucuuugaaauagaga

SEQ ID NO: 231333 - RNA, 22 nt, Human
ucaauaauggcaggauaaauuu

SEQ ID NO: 231334 - RNA, 22 nt, Human
gcuggguuuucuuccgggccua

SEQ ID NO: 231335 - RNA, 20 nt, Human
ucccucaguccuggcuuugu

SEQ ID NO: 231336 - RNA, 15 nt, Human
uugcuuuaagacaug

SEQ ID NO: 231337 - RNA, 22 nt, Human
cacauuucuguacuuagguaga

SEQ ID NO: 231338 - RNA, 22 nt, Human
cacagguaauagccuaggcuau

SEQ ID NO: 231339 - RNA, 22 nt, Human
ucaugccaguuaaaggcuguga

SEQ ID NO: 231340 - RNA, 22 nt, Human
ucccaggcugggggccugaagu

SEQ ID NO: 231341 - RNA, 22 nt, Human
cccagcuugcaaauggguugcu

SEQ ID NO: 231342 - RNA, 22 nt, Human
aauaaaaugaacugguagaguu

SEQ ID NO: 231343 - RNA, 22 nt, Human
uauuaugcauaggcaauaaugg

SEQ ID NO: 231344 - RNA, 22 nt, Human
uucagugugaagcuucugaaag

SEQ ID NO: 231345 - RNA, 22 nt, Human
uguacuauuaagaggccuaaau

SEQ ID NO: 231346 - RNA, 22 nt, Human
acucagagccucgagggacugc

SEQ ID NO: 231347 - RNA, 22 nt, Human
agaggccaggcagcccaaggug

SEQ ID NO: 231348 - RNA, 22 nt, Human
gcagagcucuguucuuaucucc

SEQ ID NO: 231349 - RNA, 22 nt, Human
cccucccaagcacucugacaua

SEQ ID NO: 231350 - RNA, 22 nt, Human
agucaggggaucuagacuugaa

SEQ ID NO: 231351 - RNA, 22 nt, Human
uucuggcaucugggggaggccu

SEQ ID NO: 231352 - RNA, 22 nt, Human
cugggcuuguguuagcugacaa

SEQ ID NO: 231353 - RNA, 22 nt, Human
aucuacauaaaacgaauacaua

SEQ ID NO: 231354 - RNA, 22 nt, Human
uauuuaaaauagugcuccagca

SEQ ID NO: 231355 - RNA, 22 nt, Human
uugcagggaccugcagaaagcu

SEQ ID NO: 231356 - RNA, 22 nt, Human
cuuuauguucaguacaaugcuu

SEQ ID NO: 231357 - RNA, 22 nt, Human
gcagccagguuugaggaccacu

SEQ ID NO: 231358 - RNA, 23 nt, Human
cuucucugagcuaggaaugcucu

SEQ ID NO: 231359 - RNA, 21 nt, Human
agugacucugaaccacuugaa

SEQ ID NO: 231360 - RNA, 22 nt, Human
ugcaggagcccuugggcucugg

SEQ ID NO: 231361 - RNA, 22 nt, Human
aaugaccugggugucauuucau

SEQ ID NO: 231362 - RNA, 18 nt, Human
aggaaagaaaggcaggug

SEQ ID NO: 231363 - RNA, 22 nt, Human
auaauggcuugugguguuauuc

SEQ ID NO: 231364 - RNA, 22 nt, Human
aaaucuaguaccuuuuugauua

SEQ ID NO: 231365 - RNA, 22 nt, Human
gucucugugccuucuccccacc

SEQ ID NO: 231366 - RNA, 22 nt, Human
ugcagagaguuagggcccguau

SEQ ID NO: 231367 - RNA, 19 nt, Human
cccagcuugaccaccugcu

SEQ ID NO: 231368 - RNA, 20 nt, Human
ggcugaaaguagaaaguauu

SEQ ID NO: 231369 - RNA, 22 nt, Human
ucaggcacugcuuucugauaug

SEQ ID NO: 231370 - RNA, 22 nt, Human
ugcuucucucuaggaagacgcu

SEQ ID NO: 231371 - RNA, 22 nt, Human
ucucugaauucugaugcaagug

SEQ ID NO: 231372 - RNA, 17 nt, Human
ccugucuuguuucugcc

SEQ ID NO: 231373 - RNA, 22 nt, Human
gcagaguugaugcaaguacuga

SEQ ID NO: 231374 - RNA, 22 nt, Human
ucuuuucuugcauuauugcacu

SEQ ID NO: 231375 - RNA, 22 nt, Human
uaaaugcaagggaaaggcaaga

SEQ ID NO: 231376 - RNA, 21 nt, Human
uugcuguuuucccaaugcagu

SEQ ID NO: 231377 - RNA, 22 nt, Human
gcagagcuaucuucuggauuug

SEQ ID NO: 231378 - RNA, 22 nt, Human
ugcugagguaaccauauccugc

SEQ ID NO: 231379 - RNA, 22 nt, Human
cuggcuggccaugcagcgccag

SEQ ID NO: 231380 - RNA, 22 nt, Human
cuguguagccucaugugggcuu

SEQ ID NO: 231381 - RNA, 22 nt, Human
cuagaaaaauacuuuauuguga

SEQ ID NO: 231382 - RNA, 19 nt, Human
ggagucugagcccagguau

SEQ ID NO: 231383 - RNA, 22 nt, Human
cagcuccucuggccagcccugc

SEQ ID NO: 231384 - RNA, 22 nt, Human
ucagaguuucugauuuaguagg

SEQ ID NO: 231385 - RNA, 22 nt, Human
aggugacaucccggcagcagag

SEQ ID NO: 231386 - RNA, 22 nt, Human
aacagcaguggcaggagaaggc

SEQ ID NO: 231387 - RNA, 22 nt, Human
gacagacuaaauggcuguagga

SEQ ID NO: 231388 - RNA, 21 nt, Human
augaggcaugagaggguuucu

SEQ ID NO: 231389 - RNA, 22 nt, Human
gcagguaagagaggcuggcuuc

SEQ ID NO: 231390 - RNA, 22 nt, Human
cauuugcaagagauaaauguuu

SEQ ID NO: 231391 - RNA, 22 nt, Human
gaauaauagcagaaauuagcag

SEQ ID NO: 231392 - RNA, 22 nt, Human
gcuggagaugcuaugcagaggg

SEQ ID NO: 231393 - RNA, 22 nt, Human
uacacaaugacuuaagauguca

SEQ ID NO: 231394 - RNA, 22 nt, Human
agaauaaaucaaauguccugag

SEQ ID NO: 231395 - RNA, 22 nt, Human
ucuggccuuaucuguccaagcc

SEQ ID NO: 231396 - RNA, 22 nt, Human
cgcuucucuacucccagccagu

SEQ ID NO: 231397 - RNA, 22 nt, Human
aaaaugugcaguuuuuaagcug

SEQ ID NO: 231398 - RNA, 22 nt, Human
cugcaauaguuuagaauaauug

SEQ ID NO: 231399 - RNA, 22 nt, Human
cuaaacuuuuauaacauugaga

SEQ ID NO: 231400 - RNA, 22 nt, Human
gcacaggcuguuggccuucaga

SEQ ID NO: 231401 - RNA, 22 nt, Human
caggcccucugcacccucgucu

SEQ ID NO: 231402 - RNA, 23 nt, Human
acaaugcacuuuaaaugguuccc

SEQ ID NO: 231403 - RNA, 22 nt, Human
acccuggguucccgcagcacca

SEQ ID NO: 231404 - RNA, 22 nt, Human
ugguccuggagaguguuccaua

SEQ ID NO: 231405 - RNA, 22 nt, Human
uuaguucacugcuauaucauca

SEQ ID NO: 231406 - RNA, 22 nt, Human
guucauguggaaauuuaaaaca

SEQ ID NO: 231407 - RNA, 20 nt, Human
uccugcaguuccuaggaggg

SEQ ID NO: 231408 - RNA, 22 nt, Human
ugugaauaccuugaauucauca

SEQ ID NO: 231409 - RNA, 22 nt, Human
aggcuagcuguuucagggcuag

SEQ ID NO: 231410 - RNA, 22 nt, Human
aagcaggagagccugggcgagc

SEQ ID NO: 231411 - RNA, 22 nt, Human
ggaaucuuuuucauaagccuca

SEQ ID NO: 231412 - RNA, 22 nt, Human
aaguuacaguuggaacugugaa

SEQ ID NO: 231413 - RNA, 22 nt, Human
aacuauuuuuggagcuaacucu

SEQ ID NO: 231414 - RNA, 22 nt, Human
gccuacauuucccaguugaaug

SEQ ID NO: 231415 - RNA, 22 nt, Human
ggcucuggggaagcucucuuca

SEQ ID NO: 231416 - RNA, 22 nt, Human
cugugagggucacagccaugcc

SEQ ID NO: 231417 - RNA, 22 nt, Human
uguucacaagcagauguugcuu

SEQ ID NO: 231418 - RNA, 22 nt, Human
aauucaaauuacaauaguuguu

SEQ ID NO: 231419 - RNA, 22 nt, Human
uggaucugguucccugagccuu

SEQ ID NO: 231420 - RNA, 22 nt, Human
acucaucugccauuccuguacc

SEQ ID NO: 231421 - RNA, 20 nt, Human
guguuucaugugauacaaug

SEQ ID NO: 231422 - RNA, 22 nt, Human
cugucuucccgaggcccuggag

SEQ ID NO: 231423 - RNA, 19 nt, Human
ucucaauucuccccacugc

SEQ ID NO: 231424 - RNA, 22 nt, Human
uuggcuuggagaguugaaaugu

SEQ ID NO: 231425 - RNA, 22 nt, Human
aagcaggcaucuuggaggucaa

SEQ ID NO: 231426 - RNA, 22 nt, Human
ugcuggggcucugaccacucca

SEQ ID NO: 231427 - RNA, 17 nt, Human
cagggcugucugccuag

SEQ ID NO: 231428 - RNA, 22 nt, Human
cauccugguuaccccauaguca

SEQ ID NO: 231429 - RNA, 22 nt, Human
guccugugaccugcauccugag

SEQ ID NO: 231430 - RNA, 22 nt, Human
ugcaauuacugggagguuuuau

SEQ ID NO: 231431 - RNA, 22 nt, Human
ugcacuuuaaaaaauggugaug

SEQ ID NO: 231432 - RNA, 22 nt, Human
agugaagguuuacagggccccu

SEQ ID NO: 231433 - RNA, 22 nt, Human
ugguuccucaagcgcuggcggc

SEQ ID NO: 231434 - RNA, 19 nt, Human
uccagacuguccaggcuau

SEQ ID NO: 231435 - RNA, 22 nt, Human
uucaguaaggauaauaaacaga

SEQ ID NO: 231436 - RNA, 22 nt, Human
acacaguuuuucagacagagau

SEQ ID NO: 231437 - RNA, 22 nt, Human
ugaaagcagugauuucuccuuc

SEQ ID NO: 231438 - RNA, 20 nt, Human
gcaguguguaugaauagcug

SEQ ID NO: 231439 - RNA, 22 nt, Human
caguguaucauuagugugauga

SEQ ID NO: 231440 - RNA, 22 nt, Human
ccaggagcagggcuggcugcac

SEQ ID NO: 231441 - RNA, 22 nt, Human
uuuccaauguagaugucucugg

SEQ ID NO: 231442 - RNA, 22 nt, Human
gcacaggcaauagauacagcua

SEQ ID NO: 231443 - RNA, 22 nt, Human
agcccuccucacaucagcgucc

SEQ ID NO: 231444 - RNA, 22 nt, Human
ggaacagacugacuucuugaau

SEQ ID NO: 231445 - RNA, 22 nt, Human
agucugugaaaagauaggaagu

SEQ ID NO: 231446 - RNA, 22 nt, Human
gcucccagcauugcugcugaau

SEQ ID NO: 231447 - RNA, 23 nt, Human
acagagacugccaagauauucuc

SEQ ID NO: 231448 - RNA, 22 nt, Human
ggaaaagacagaauucuagaau

SEQ ID NO: 231449 - RNA, 22 nt, Human
uuauccaagcagaagcugcaca

SEQ ID NO: 231450 - RNA, 23 nt, Human
aaguucaagucacagccugucuu

SEQ ID NO: 231451 - RNA, 22 nt, Human
ccucccuuuuggugucugcaua

SEQ ID NO: 231452 - RNA, 22 nt, Human
aguugcugauucugucugugau

SEQ ID NO: 231453 - RNA, 22 nt, Human
cagaaacuagauuuagacacaa

SEQ ID NO: 231454 - RNA, 20 nt, Human
gcuuggcauaggccacuuga

SEQ ID NO: 231455 - RNA, 22 nt, Human
ucccauggucuauauagaggca

SEQ ID NO: 231456 - RNA, 22 nt, Human
uacuauuuugacaugaaauuga

SEQ ID NO: 231457 - RNA, 22 nt, Human
gacucagugauuugacaugccu

SEQ ID NO: 231458 - RNA, 22 nt, Human
gagcaggaaggccagaaggguc

SEQ ID NO: 231459 - RNA, 22 nt, Human
augcuggggccucagaccagaa

SEQ ID NO: 231460 - RNA, 22 nt, Human
acuuucccucucagaacucuua

SEQ ID NO: 231461 - RNA, 22 nt, Human
uaacaagguggucuugguauuu

SEQ ID NO: 231462 - RNA, 22 nt, Human
uuuaaugugagucccuuucaag

SEQ ID NO: 231463 - RNA, 19 nt, Human
cacagggagaccacauguc

SEQ ID NO: 231464 - RNA, 22 nt, Human
ggcaguggaggacccugugucu

SEQ ID NO: 231465 - RNA, 22 nt, Human
aagaacauugacuaagaggggc

SEQ ID NO: 231466 - RNA, 22 nt, Human
aacauaauguggccaaagucac

SEQ ID NO: 231467 - RNA, 22 nt, Human
augcaaaaguaauugcaauuuu

SEQ ID NO: 231468 - RNA, 22 nt, Human
aaaacaguuuuugcuaacugcu

SEQ ID NO: 231469 - RNA, 22 nt, Human
agggaccagccugcccagggcu

SEQ ID NO: 231470 - RNA, 22 nt, Human
aaauuuaagaagugugugcgug

SEQ ID NO: 231471 - RNA, 22 nt, Human
auucuacaugauagaagggaga

SEQ ID NO: 231472 - RNA, 22 nt, Human
guaggcagugguuggaagagaa

SEQ ID NO: 231473 - RNA, 22 nt, Human
uccaucuggaugguauguguaa

SEQ ID NO: 231474 - RNA, 22 nt, Human
cagaagagaugaaauaguauua

SEQ ID NO: 231475 - RNA, 22 nt, Human
cacuguacccauuuaaauaaau

SEQ ID NO: 231476 - RNA, 22 nt, Human
gagggcuccucacauucucuau

SEQ ID NO: 231477 - RNA, 22 nt, Human
agcuggagcuucaagcagguaa

SEQ ID NO: 231478 - RNA, 21 nt, Human
agcaccaguuuuaugccaggc

SEQ ID NO: 231479 - RNA, 22 nt, Human
uuuggcauagcucuuuguuccu

SEQ ID NO: 231480 - RNA, 22 nt, Human
gagguccaggguggggccugag

SEQ ID NO: 231481 - RNA, 17 nt, Human
ccagaugcccugucucc

SEQ ID NO: 231482 - RNA, 22 nt, Human
aagggcucacccaacucacuuc

SEQ ID NO: 231483 - RNA, 22 nt, Human
uggaauguaaacucugugaggg

SEQ ID NO: 231484 - RNA, 22 nt, Human
ugcccagccaauuuguuauguu

SEQ ID NO: 231485 - RNA, 22 nt, Human
agugacagggaaggauaggauu

SEQ ID NO: 231486 - RNA, 22 nt, Human
cuucccaaguaaauuuguauuu

SEQ ID NO: 231487 - RNA, 22 nt, Human
cugggggcaagcagacagcugu

SEQ ID NO: 231488 - RNA, 22 nt, Human
uauucugugugauauguaaaug

SEQ ID NO: 231489 - RNA, 22 nt, Human
uuaauagugcuaaaccauugac

SEQ ID NO: 231490 - RNA, 22 nt, Human
cagaacugggcucgcucugguu

SEQ ID NO: 231491 - RNA, 22 nt, Human
cccaagggagugccuggucaac

SEQ ID NO: 231492 - RNA, 19 nt, Human
uggcagugugggguaugaa

SEQ ID NO: 231493 - RNA, 22 nt, Human
cucccuugcuucuggcauuuug

SEQ ID NO: 231494 - RNA, 19 nt, Human
ugucucugaaagaugagcu

SEQ ID NO: 231495 - RNA, 22 nt, Human
ccagcaggagagaacauuuccc

SEQ ID NO: 231496 - RNA, 22 nt, Human
ugccaggcugaacagggucuua

SEQ ID NO: 231497 - RNA, 22 nt, Human
guguuacugcuuuuaucuacca

SEQ ID NO: 231498 - RNA, 20 nt, Human
cuguagagcacaaguggagg

SEQ ID NO: 231499 - RNA, 22 nt, Human
acaguaacaaauggccugagga

SEQ ID NO: 231500 - RNA, 22 nt, Human
ucaguccaggggcugugauguc

SEQ ID NO: 231501 - RNA, 22 nt, Human
aaggcauaccugaauguuugug

SEQ ID NO: 231502 - RNA, 22 nt, Human
acaggucuggucugggugggac

SEQ ID NO: 231503 - RNA, 22 nt, Human
uaggaaguagauagguuguucu

SEQ ID NO: 231504 - RNA, 22 nt, Human
ugcuagaaaucugaaacuagca

SEQ ID NO: 231505 - RNA, 22 nt, Human
uguaggauguaaggcaggcauc

SEQ ID NO: 231506 - RNA, 22 nt, Human
cugugugugcuacaggcuucca

SEQ ID NO: 231507 - RNA, 22 nt, Human
aagcucaggaaagagucugguu

SEQ ID NO: 231508 - RNA, 22 nt, Human
caggccuuaguaggugcucccu

SEQ ID NO: 231509 - RNA, 22 nt, Human
uuuccucagaagugucuacuau

SEQ ID NO: 231510 - RNA, 22 nt, Human
cccacucccuacgacacgcucc

SEQ ID NO: 231511 - RNA, 18 nt, Human
caaagcaggugacagugu

SEQ ID NO: 231512 - RNA, 19 nt, Human
uagauacugaugaacucca

SEQ ID NO: 231513 - RNA, 20 nt, Human
agccaggcucaagcuccccc

SEQ ID NO: 231514 - RNA, 18 nt, Human
aagaacugagguccuaga

SEQ ID NO: 231515 - RNA, 22 nt, Human
ugcuagugugugagauguucaa

SEQ ID NO: 231516 - RNA, 22 nt, Human
gagcucugaaaaagcuugccuu

SEQ ID NO: 231517 - RNA, 22 nt, Human
aggcagcauuugaauccagguc

SEQ ID NO: 231518 - RNA, 22 nt, Human
cccagcagccuugucccuucuc

SEQ ID NO: 231519 - RNA, 22 nt, Human
uagggcaguuucauguuaucuu

SEQ ID NO: 231520 - RNA, 22 nt, Human
uacauuaucuuguuaucuuuca

SEQ ID NO: 231521 - RNA, 22 nt, Human
ucugcuguguccccugugcggg

SEQ ID NO: 231522 - RNA, 22 nt, Human
aaguacauauauuuaugauucu

SEQ ID NO: 231523 - RNA, 22 nt, Human
uucucuuauucuggauaugcag

SEQ ID NO: 231524 - RNA, 22 nt, Human
uaacagaaaggggacagaaaua

SEQ ID NO: 231525 - RNA, 22 nt, Human
cacaaaaucuuucucgauuauu

SEQ ID NO: 231526 - RNA, 22 nt, Human
ugaaaauggccugaagaagcaa

SEQ ID NO: 231527 - RNA, 22 nt, Human
aauucccauuugcagaaaauca

SEQ ID NO: 231528 - RNA, 22 nt, Human
cugggcagcuguaucagggagu

SEQ ID NO: 231529 - RNA, 22 nt, Human
uacaucuaucuagaugcucaga

SEQ ID NO: 231530 - RNA, 22 nt, Human
aaaacauguccauacagaaacu

SEQ ID NO: 231531 - RNA, 22 nt, Human
uagacacuguaugagcugggug

SEQ ID NO: 231532 - RNA, 22 nt, Human
uggaaaaucaggggacauugau

SEQ ID NO: 231533 - RNA, 22 nt, Human
ucucugcaugacccaaggcuga

SEQ ID NO: 231534 - RNA, 20 nt, Human
aggaaagccugugugagucu

SEQ ID NO: 231535 - RNA, 17 nt, Human
cagacaggcugucaccc

SEQ ID NO: 231536 - RNA, 22 nt, Human
cacaggcugggaagccuaggcc

SEQ ID NO: 231537 - RNA, 22 nt, Human
cauccugagaggucucucuacc

SEQ ID NO: 231538 - RNA, 20 nt, Human
gcaagcuuauuagugauauu

SEQ ID NO: 231539 - RNA, 20 nt, Human
uccuguccgcgccuugcguc

SEQ ID NO: 231540 - RNA, 22 nt, Human
uucacauugugguucaugugaa

SEQ ID NO: 231541 - RNA, 22 nt, Human
gcagggcaaacccagguguuca

SEQ ID NO: 231542 - RNA, 17 nt, Human
cuccucucuggguuacu

SEQ ID NO: 231543 - RNA, 22 nt, Human
acagagaaaguuccucucaggc

SEQ ID NO: 231544 - RNA, 22 nt, Human
gacacaguuuuucucacggugg

SEQ ID NO: 231545 - RNA, 22 nt, Human
cugcugcauuacucuucucaag

SEQ ID NO: 231546 - RNA, 22 nt, Human
aucaaaguaauuaacacugaga

SEQ ID NO: 231547 - RNA, 23 nt, Human
uuucuucagaagccuugcgaggc

SEQ ID NO: 231548 - RNA, 22 nt, Human
augagacuaccuguaauguggc

SEQ ID NO: 231549 - RNA, 18 nt, Human
uaugugucuguuacaacu

SEQ ID NO: 231550 - RNA, 22 nt, Human
ugggcagaggacagggaagauc

SEQ ID NO: 231551 - RNA, 22 nt, Human
aagguccuuuugcagugugauc

SEQ ID NO: 231552 - RNA, 22 nt, Human
cucucagugccugcccuaggcu

SEQ ID NO: 231553 - RNA, 22 nt, Human
ccaccagagggcagacugugau

SEQ ID NO: 231554 - RNA, 22 nt, Human
gucugccccacaggcucaguug

SEQ ID NO: 231555 - RNA, 22 nt, Human
guagggacaauauguuauuaga

SEQ ID NO: 231556 - RNA, 22 nt, Human
ucugaaagaaagauuuuguuuc

SEQ ID NO: 231557 - RNA, 22 nt, Human
caucuggguucucagauggaua

SEQ ID NO: 231558 - RNA, 22 nt, Human
cugcgugagcgugcccgucuug

SEQ ID NO: 231559 - RNA, 20 nt, Human
agagguucagucuggagaag

SEQ ID NO: 231560 - RNA, 22 nt, Human
ccucugaggugagcccagcugg

SEQ ID NO: 231561 - RNA, 22 nt, Human
ucucagcagccagauccagagc

SEQ ID NO: 231562 - RNA, 22 nt, Human
gacuucugaauuccuaucaggu

SEQ ID NO: 231563 - RNA, 22 nt, Human
ccagugucuucagaguaaaucu

SEQ ID NO: 231564 - RNA, 22 nt, Human
cagaauuuaaguggauuauucu

SEQ ID NO: 231565 - RNA, 22 nt, Human
gaugcugauaauucaugagaag

SEQ ID NO: 231566 - RNA, 22 nt, Human
caaaugcaggucagcagguguc

SEQ ID NO: 231567 - RNA, 22 nt, Human
uacaguguuucccccaggauag

SEQ ID NO: 231568 - RNA, 22 nt, Human
uucuuuuagaauuuccuaaggu

SEQ ID NO: 231569 - RNA, 22 nt, Human
uuggaauaucaugcagaauaaa

SEQ ID NO: 231570 - RNA, 22 nt, Human
auuugccuuucgaaucaacagg

SEQ ID NO: 231571 - RNA, 22 nt, Human
gccucccuguuuccugcuccaa

SEQ ID NO: 231572 - RNA, 22 nt, Human
auauggcagaccaauuagaagc

SEQ ID NO: 231573 - RNA, 22 nt, Human
ucgagcugcacgcccccgagcu

SEQ ID NO: 231574 - RNA, 22 nt, Human
agaauuacauaaauacaugaau

SEQ ID NO: 231575 - RNA, 22 nt, Human
auucaguuucaaucauuguagu

SEQ ID NO: 231576 - RNA, 22 nt, Human
aacagagcauucugcacuacaa

SEQ ID NO: 231577 - RNA, 22 nt, Human
caggagguuguaagagcaggcc

SEQ ID NO: 231578 - RNA, 22 nt, Human
ucaagcaacugaauucuaaaag

SEQ ID NO: 231579 - RNA, 22 nt, Human
cuaaaucuagucuuuacugauu

SEQ ID NO: 231580 - RNA, 22 nt, Human
gacagcaaccucaugagaaacu

SEQ ID NO: 231581 - RNA, 22 nt, Human
gucuggacuuuaucccaagguu

SEQ ID NO: 231582 - RNA, 22 nt, Human
agguacagcaauauaagagguc

SEQ ID NO: 231583 - RNA, 22 nt, Human
gcuuccaaaucuguucaaaaug

SEQ ID NO: 231584 - RNA, 21 nt, Human
aagugguuuagguuaccgggg

SEQ ID NO: 231585 - RNA, 23 nt, Human
aaagugcaguugaggaaucauag

SEQ ID NO: 231586 - RNA, 22 nt, Human
gcagaggguccugugccagcag

SEQ ID NO: 231587 - RNA, 22 nt, Human
uaacuuuaguguaugagguaag

SEQ ID NO: 231588 - RNA, 22 nt, Human
uuaaauuccagccucauaauag

SEQ ID NO: 231589 - RNA, 22 nt, Human
ggucagggggaucugugaggua

SEQ ID NO: 231590 - RNA, 22 nt, Human
auuacauauguuggcaacauuu

SEQ ID NO: 231591 - RNA, 22 nt, Human
gccaucuggcauugcagcaccu

SEQ ID NO: 231592 - RNA, 22 nt, Human
auggccagcccuucccgcagcu

SEQ ID NO: 231593 - RNA, 23 nt, Human
ugucucagacugagggguuuccc

SEQ ID NO: 231594 - RNA, 22 nt, Human
cugacuuuagaacccaaaaagu

SEQ ID NO: 231595 - RNA, 22 nt, Human
augaaauguauucagauaugua

SEQ ID NO: 231596 - RNA, 22 nt, Human
uuggagcccugaggaucuggau

SEQ ID NO: 231597 - RNA, 21 nt, Human
gagcugcaccuugaccuguuu

SEQ ID NO: 231598 - RNA, 22 nt, Human
accugcacagccccagaaugcc

SEQ ID NO: 231599 - RNA, 22 nt, Human
gaggugucaugagggccugcuc

SEQ ID NO: 231600 - RNA, 20 nt, Human
aacacagauaccaaagguug

SEQ ID NO: 231601 - RNA, 22 nt, Human
auguccucggcucugugcugcu

SEQ ID NO: 231602 - RNA, 22 nt, Human
cuguccagcuuggcuccugggg

SEQ ID NO: 231603 - RNA, 22 nt, Human
acauggcuggcaccuuaaauuu

SEQ ID NO: 231604 - RNA, 22 nt, Human
guauccuccccgcuggccuuca

SEQ ID NO: 231605 - RNA, 20 nt, Human
cuuagaaauuuuuacccugg

SEQ ID NO: 231606 - RNA, 22 nt, Human
gcaagcaaauuauuuauaggca

SEQ ID NO: 231607 - RNA, 22 nt, Human
guggccagugggaaugggcuca

SEQ ID NO: 231608 - RNA, 22 nt, Human
gaaugaagcaggucacacaguu

SEQ ID NO: 231609 - RNA, 22 nt, Human
acaggcaggcuucggccagagc

SEQ ID NO: 231610 - RNA, 20 nt, Human
uauaacaguguugggugugu

SEQ ID NO: 231611 - RNA, 22 nt, Human
aauauguuuauaagauaucuuc

SEQ ID NO: 231612 - RNA, 22 nt, Human
aaguuacagauugggagcagag

SEQ ID NO: 231613 - RNA, 22 nt, Human
agcuggugcucaggggcaugga

SEQ ID NO: 231614 - RNA, 20 nt, Human
ccuguucacugcgcaguuuc

SEQ ID NO: 231615 - RNA, 22 nt, Human
uugcugaucugaaacguuacug

SEQ ID NO: 231616 - RNA, 22 nt, Human
aucugguucuucuuaggcauca

SEQ ID NO: 231617 - RNA, 22 nt, Human
agaaucuaaguacacagacaga

SEQ ID NO: 231618 - RNA, 22 nt, Human
gacuuucugauguaaacauuua

SEQ ID NO: 231619 - RNA, 22 nt, Human
guccaugcagucaccuccagcu

SEQ ID NO: 231620 - RNA, 22 nt, Human
uugagucucugccaaaacacaa

SEQ ID NO: 231621 - RNA, 22 nt, Human
cccugccugugggcaucaacau

SEQ ID NO: 231622 - RNA, 19 nt, Human
ugucugcugaugacucuau

SEQ ID NO: 231623 - RNA, 22 nt, Human
aucagaaaucuaggauucagaa

SEQ ID NO: 231624 - RNA, 23 nt, Human
uggcucugagcuuccugguggcc

SEQ ID NO: 231625 - RNA, 22 nt, Human
ucccuggguucccguggaagug

SEQ ID NO: 231626 - RNA, 22 nt, Human
auaauuacauuauacuguuaga

SEQ ID NO: 231627 - RNA, 20 nt, Human
aacuagaaagcacccaugga

SEQ ID NO: 231628 - RNA, 22 nt, Human
aaggcugagggcuguaccuggc

SEQ ID NO: 231629 - RNA, 20 nt, Human
ucagacccagauuagcaggu

SEQ ID NO: 231630 - RNA, 22 nt, Human
uuagauaacaguagaauaucaa

SEQ ID NO: 231631 - RNA, 20 nt, Human
caguggcugauaacaaauua

SEQ ID NO: 231632 - RNA, 22 nt, Human
cugagccagggccacacaugga

SEQ ID NO: 231633 - RNA, 22 nt, Human
aauaccuuuccugccauucacu

SEQ ID NO: 231634 - RNA, 22 nt, Human
caugcagggagcagaggagaca

SEQ ID NO: 231635 - RNA, 22 nt, Human
gccuggcacaggaauuaggagg

SEQ ID NO: 231636 - RNA, 22 nt, Human
cucagauaaucuuugagucuuc

SEQ ID NO: 231637 - RNA, 22 nt, Human
aauguaguucacaauugguacu

SEQ ID NO: 231638 - RNA, 22 nt, Human
cuauuagguuggugcaaaagua

SEQ ID NO: 231639 - RNA, 22 nt, Human
agcugagguuaguauaaaugug

SEQ ID NO: 231640 - RNA, 22 nt, Human
acauuuaacccucagguuucug

SEQ ID NO: 231641 - RNA, 22 nt, Human
aauaggcugagccauuucaagu

SEQ ID NO: 231642 - RNA, 22 nt, Human
agggccugacacccuugccagc

SEQ ID NO: 231643 - RNA, 22 nt, Human
ugucuucaguaaaauacacuau

SEQ ID NO: 231644 - RNA, 22 nt, Human
aagugauuuucuucuuaguuau

SEQ ID NO: 231645 - RNA, 22 nt, Human
ccaaggcuccucagcuggucuu

SEQ ID NO: 231646 - RNA, 22 nt, Human
uaacuguaauauaaauaugagu

SEQ ID NO: 231647 - RNA, 18 nt, Human
gaaagugcggggcagggg

SEQ ID NO: 231648 - RNA, 22 nt, Human
aaaagcaagaggcuggauuaaa

SEQ ID NO: 231649 - RNA, 22 nt, Human
cuccuggaccaccuuguggcca

SEQ ID NO: 231650 - RNA, 23 nt, Human
agcuuggaacaaugcaaauacag

SEQ ID NO: 231651 - RNA, 22 nt, Human
auagauacuggguauggagaug

SEQ ID NO: 231652 - RNA, 22 nt, Human
auuagagguacaaaccuucacu

SEQ ID NO: 231653 - RNA, 22 nt, Human
acagccagugacuggacaagcu

SEQ ID NO: 231654 - RNA, 22 nt, Human
ugguccaguuuagcauugagug

SEQ ID NO: 231655 - RNA, 22 nt, Human
agauacauuaguaguuacuugu

SEQ ID NO: 231656 - RNA, 19 nt, Human
aaggacacaacagagauag

SEQ ID NO: 231657 - RNA, 22 nt, Human
acaucucuucuuaaggcuccag

SEQ ID NO: 231658 - RNA, 22 nt, Human
aaugcacuuaguaugaaugccu

SEQ ID NO: 231659 - RNA, 22 nt, Human
cauuuguugggacaaugaaaag

SEQ ID NO: 231660 - RNA, 22 nt, Human
gucacaaaggugagggacauga

SEQ ID NO: 231661 - RNA, 22 nt, Human
ugaauagauuuuuaacauauaa

SEQ ID NO: 231662 - RNA, 22 nt, Human
ugugcagcaaaauagaaucuuu

SEQ ID NO: 231663 - RNA, 22 nt, Human
cucucagggacccagccagccu

SEQ ID NO: 231664 - RNA, 22 nt, Human
ccugagaaauagcaucauuuuu

SEQ ID NO: 231665 - RNA, 22 nt, Human
agguuccaucaccugcagugga

SEQ ID NO: 231666 - RNA, 22 nt, Human
acauucaaaaagcaucugucac

SEQ ID NO: 231667 - RNA, 22 nt, Human
ucucugagggagauggccugcc

SEQ ID NO: 231668 - RNA, 22 nt, Human
cagucccuaguggagcucacag

SEQ ID NO: 231669 - RNA, 22 nt, Human
ccuuccuuugcaucauuucuag

SEQ ID NO: 231670 - RNA, 21 nt, Human
ugacugaggcuucuucacaca

SEQ ID NO: 231671 - RNA, 22 nt, Human
guccuuucuuaaauuccugcuu

SEQ ID NO: 231672 - RNA, 22 nt, Human
uugguauuuccucaggcauguc

SEQ ID NO: 231673 - RNA, 22 nt, Human
gcuccuucaggugguagcuguu

SEQ ID NO: 231674 - RNA, 22 nt, Human
ggcgccagcacugcagcgccuc

SEQ ID NO: 231675 - RNA, 22 nt, Human
cagaggcugacccugcuguugu

SEQ ID NO: 231676 - RNA, 22 nt, Human
aaacugaauucccaagggcaug

SEQ ID NO: 231677 - RNA, 22 nt, Human
ucaggaaggagcuggccugcca

SEQ ID NO: 231678 - RNA, 22 nt, Human
aauauccagguagaugucuucu

SEQ ID NO: 231679 - RNA, 22 nt, Human
gaugugucuauucaacaugaaa

SEQ ID NO: 231680 - RNA, 16 nt, Human
aaggaaugucauucug

SEQ ID NO: 231681 - RNA, 22 nt, Human
cccaaggccuucaagccagcuc

SEQ ID NO: 231682 - RNA, 22 nt, Human
aguauaauuuacauuugguauu

SEQ ID NO: 231683 - RNA, 22 nt, Human
cuaauuauguuguuauaaucaa

SEQ ID NO: 231684 - RNA, 21 nt, Human
agugccaguagguauggagga

SEQ ID NO: 231685 - RNA, 22 nt, Human
gugucugcacauaggaucucaa

SEQ ID NO: 231686 - RNA, 18 nt, Human
gccugccaacuccugauc

SEQ ID NO: 231687 - RNA, 22 nt, Human
augaggagcuguuuuaacugcu

SEQ ID NO: 231688 - RNA, 22 nt, Human
ggcugccuucagacuccagcuu

SEQ ID NO: 231689 - RNA, 22 nt, Human
ugcuuugccugcuuugacucau

SEQ ID NO: 231690 - RNA, 22 nt, Human
ugcccuguuccugccuccagcu

SEQ ID NO: 231691 - RNA, 22 nt, Human
uacauguuuacuccaagucagg

SEQ ID NO: 231692 - RNA, 22 nt, Human
gggguuaacaguauugcucaug

SEQ ID NO: 231693 - RNA, 22 nt, Human
ucacuaagugccgaguuuaguu

SEQ ID NO: 231694 - RNA, 22 nt, Human
acacaucuuagacugaaauaug

SEQ ID NO: 231695 - RNA, 18 nt, Human
caggucugucugccuccc

SEQ ID NO: 231696 - RNA, 22 nt, Human
guauucauuuauuuacucaucc

SEQ ID NO: 231697 - RNA, 22 nt, Human
aauaacuuguaugguuauucca

SEQ ID NO: 231698 - RNA, 22 nt, Human
ggacauguuccuuuucaucuuu

SEQ ID NO: 231699 - RNA, 21 nt, Human
ggcugguguuuagcugugaua

SEQ ID NO: 231700 - RNA, 22 nt, Human
guuguuuuuguucucuauagcu

SEQ ID NO: 231701 - RNA, 22 nt, Human
gaaugauaaauggaagcagcau

SEQ ID NO: 231702 - RNA, 22 nt, Human
ucuuguuaucaggaaaacagua

SEQ ID NO: 231703 - RNA, 19 nt, Human
ugcaaauguaggaagaaua

SEQ ID NO: 231704 - RNA, 22 nt, Human
ggccucagggucacucuguaga

SEQ ID NO: 231705 - RNA, 17 nt, Human
agccagcaguagcuggu

SEQ ID NO: 231706 - RNA, 18 nt, Human
ggcaggggugaaccacag

SEQ ID NO: 231707 - RNA, 22 nt, Human
ggaaaaguguuaagguguugau

SEQ ID NO: 231708 - RNA, 22 nt, Human
aguggcuguucauuuuacacaa

SEQ ID NO: 231709 - RNA, 22 nt, Human
acugcccuggcaccacacaugc

SEQ ID NO: 231710 - RNA, 21 nt, Human
agagcugguagguagguaggu

SEQ ID NO: 231711 - RNA, 19 nt, Human
ugguggcaaugucagcuaa

SEQ ID NO: 231712 - RNA, 22 nt, Human
cagguggggagaguguggagca

SEQ ID NO: 231713 - RNA, 21 nt, Human
ccugggagaucagcugccuuc

SEQ ID NO: 231714 - RNA, 22 nt, Human
ugaauagauggugacaguauga

SEQ ID NO: 231715 - RNA, 20 nt, Human
gccugggauuauccacuggu

SEQ ID NO: 231716 - RNA, 22 nt, Human
gccacuguugcuccucaggaaa

SEQ ID NO: 231717 - RNA, 22 nt, Human
uggagcugaggggaaugcugag

SEQ ID NO: 231718 - RNA, 22 nt, Human
aaagccagugguaugagagaaa

SEQ ID NO: 231719 - RNA, 22 nt, Human
agcaaaguuaagguuucucuuu

SEQ ID NO: 231720 - RNA, 22 nt, Human
aagcaaaggaaagcugacuuuu

SEQ ID NO: 231721 - RNA, 22 nt, Human
acauagaacuucgaugucuuuu

SEQ ID NO: 231722 - RNA, 22 nt, Human
ugagcagauuuguucuaggggu

SEQ ID NO: 231723 - RNA, 22 nt, Human
gcugccuucaguucugauucau

SEQ ID NO: 231724 - RNA, 22 nt, Human
uaugugaagagauuaaaaaaua

SEQ ID NO: 231725 - RNA, 22 nt, Human
caguguauaaacuuuaacauag

SEQ ID NO: 231726 - RNA, 22 nt, Human
agauggucuaguugaaccauau

SEQ ID NO: 231727 - RNA, 22 nt, Human
uucugugugucucagcaagcug

SEQ ID NO: 231728 - RNA, 22 nt, Human
ucacucugggcccuacugggcu

SEQ ID NO: 231729 - RNA, 22 nt, Human
aggucagguaucagcagguauu

SEQ ID NO: 231730 - RNA, 22 nt, Human
cccaggcuggagggcaguguca

SEQ ID NO: 231731 - RNA, 21 nt, Human
cugaggcagcacagcuaguca

SEQ ID NO: 231732 - RNA, 22 nt, Human
uuucuguauuuugucauaaccu

SEQ ID NO: 231733 - RNA, 22 nt, Human
uuacuuuggauggucaagaaag

SEQ ID NO: 231734 - RNA, 22 nt, Human
uucuucauggguucuuuuagga

SEQ ID NO: 231735 - RNA, 22 nt, Human
ugccugcugcuaagcucuuugu

SEQ ID NO: 231736 - RNA, 21 nt, Human
gaaggagaaagcaagugcugc

SEQ ID NO: 231737 - RNA, 22 nt, Human
uccagggacagcgcuggagcua

SEQ ID NO: 231738 - RNA, 22 nt, Human
gggagugguccuuuccuaucug

SEQ ID NO: 231739 - RNA, 21 nt, Human
cccagagccuagggagggcac

SEQ ID NO: 231740 - RNA, 22 nt, Human
aguucaaagcugcaguaaugga

SEQ ID NO: 231741 - RNA, 22 nt, Human
acagcucucccucagagaaaug

SEQ ID NO: 231742 - RNA, 22 nt, Human
uuccuggcacccuggacccggc

SEQ ID NO: 231743 - RNA, 22 nt, Human
cuuuauuguccuucuuaggugg

SEQ ID NO: 231744 - RNA, 23 nt, Human
uggcauuucuauacuggcaagug

SEQ ID NO: 231745 - RNA, 22 nt, Human
agucacaugaguuucucuuuau

SEQ ID NO: 231746 - RNA, 22 nt, Human
uaucuagauuucuuucucugug

SEQ ID NO: 231747 - RNA, 22 nt, Human
auuuagagugaaacauuaugca

SEQ ID NO: 231748 - RNA, 22 nt, Human
aagcacagacucccucugagug

SEQ ID NO: 231749 - RNA, 22 nt, Human
ccugugaccacucugguucugc

SEQ ID NO: 231750 - RNA, 22 nt, Human
cauggcucacaggaugggcuag

SEQ ID NO: 231751 - RNA, 22 nt, Human
gcucucugccauaugaggauac

SEQ ID NO: 231752 - RNA, 22 nt, Human
cggcuucugcccauucaguccu

SEQ ID NO: 231753 - RNA, 22 nt, Human
aaagccaagcugggaaggcagg

SEQ ID NO: 231754 - RNA, 22 nt, Human
uuuggaaaguguacaaauuuga

SEQ ID NO: 231755 - RNA, 22 nt, Human
ugcaggcucaccugccagggcc

SEQ ID NO: 231756 - RNA, 22 nt, Human
ggugggcaggcgaggcccaggu

SEQ ID NO: 231757 - RNA, 22 nt, Human
aucuccaggauuuucacacuca

SEQ ID NO: 231758 - RNA, 22 nt, Human
auucaacauauucugaguaaaa

SEQ ID NO: 231759 - RNA, 22 nt, Human
aaacucuuuugcauauuagagg

SEQ ID NO: 231760 - RNA, 22 nt, Human
agcgcugugggcgugcgaggag

SEQ ID NO: 231761 - RNA, 22 nt, Human
ugggccucaucuucaaugaguc

SEQ ID NO: 231762 - RNA, 22 nt, Human
caaauaagcaauuccauucuuc

SEQ ID NO: 231763 - RNA, 22 nt, Human
ggagcugaguucuucagccggg

SEQ ID NO: 231764 - RNA, 22 nt, Human
ccagcuccgggaguugcugcug

SEQ ID NO: 231765 - RNA, 22 nt, Human
caccugggcuaaacuaugcagg

SEQ ID NO: 231766 - RNA, 22 nt, Human
acagcagagugugagauagcca

SEQ ID NO: 231767 - RNA, 22 nt, Human
auccugaaaacuuacgaagugg

SEQ ID NO: 231768 - RNA, 22 nt, Human
aaaugccucauuuucucucacu

SEQ ID NO: 231769 - RNA, 22 nt, Human
auucaagauuaauucuauguca

SEQ ID NO: 231770 - RNA, 22 nt, Human
uccugagcugccgcaucagcag

SEQ ID NO: 231771 - RNA, 22 nt, Human
cugcucagucauguuggauugu

SEQ ID NO: 231772 - RNA, 22 nt, Human
cugcaucuuagucaaaaucugu

SEQ ID NO: 231773 - RNA, 22 nt, Human
gaggcuguaacuugggcacugg

SEQ ID NO: 231774 - RNA, 21 nt, Human
auuuuguacauagaauuuguc

SEQ ID NO: 231775 - RNA, 22 nt, Human
aagaaaugugaauauugaauag

SEQ ID NO: 231776 - RNA, 22 nt, Human
agagggaaauccaggagugcuu

SEQ ID NO: 231777 - RNA, 22 nt, Human
ucuuccagcccuucuaauggua

SEQ ID NO: 231778 - RNA, 22 nt, Human
ucucuguauucuucguaaugcc

SEQ ID NO: 231779 - RNA, 22 nt, Human
uagaaacuacuagaauaagaga

SEQ ID NO: 231780 - RNA, 22 nt, Human
gucccagcuucccacuagcagc

SEQ ID NO: 231781 - RNA, 22 nt, Human
ccagcccugucaccaacuggag

SEQ ID NO: 231782 - RNA, 22 nt, Human
ucagguguggaccgaggucaga

SEQ ID NO: 231783 - RNA, 22 nt, Human
cugagaggugacagcgugcugg

SEQ ID NO: 231784 - RNA, 22 nt, Human
ugacaauucauuauaucuacag

SEQ ID NO: 231785 - RNA, 22 nt, Human
ggagaggagcuauugggggcuc

SEQ ID NO: 231786 - RNA, 22 nt, Human
ucagggcauccauugccuguug

SEQ ID NO: 231787 - RNA, 22 nt, Human
acaugccaucuuugucaggagu

SEQ ID NO: 231788 - RNA, 22 nt, Human
auacacaugcacacaugugugu

SEQ ID NO: 231789 - RNA, 23 nt, Human
uugaggcaaacauguaaguagga

SEQ ID NO: 231790 - RNA, 22 nt, Human
gauuguaauucuacuuuccgcu

SEQ ID NO: 231791 - RNA, 22 nt, Human
guuccucaguuguaaaaaaugu

SEQ ID NO: 231792 - RNA, 22 nt, Human
agcccuugguauuuuccgaucc

SEQ ID NO: 231793 - RNA, 22 nt, Human
ucacagaaucucugauaagucu

SEQ ID NO: 231794 - RNA, 22 nt, Human
ccaggggccugugaaggugccc

SEQ ID NO: 231795 - RNA, 22 nt, Human
ggcccugcgauuagguggcagg

SEQ ID NO: 231796 - RNA, 22 nt, Human
cagcuugugcaaagguccuggg

SEQ ID NO: 231797 - RNA, 22 nt, Human
aaauucuuuggccuacuuugaa

SEQ ID NO: 231798 - RNA, 22 nt, Human
cuguuuauuacacuggauagca

SEQ ID NO: 231799 - RNA, 22 nt, Human
cacugucuucaguuucacugca

SEQ ID NO: 231800 - RNA, 22 nt, Human
ccugggagugugccaucucugu

SEQ ID NO: 231801 - RNA, 22 nt, Human
cuuccauacagacaaugcaaug

SEQ ID NO: 231802 - RNA, 22 nt, Human
agccuugaguucaagugcuggc

SEQ ID NO: 231803 - RNA, 18 nt, Human
agcugcuugcaggccuuc

SEQ ID NO: 231804 - RNA, 22 nt, Human
ucaguagcagaaagcaaugagu

SEQ ID NO: 231805 - RNA, 22 nt, Human
uucaguuuucccuccugcaggu

SEQ ID NO: 231806 - RNA, 22 nt, Human
auuauguauuugguauaguuug

SEQ ID NO: 231807 - RNA, 22 nt, Human
acagguguccaacauuuaccuu

SEQ ID NO: 231808 - RNA, 21 nt, Human
agaauucuuaaguauucuaau

SEQ ID NO: 231809 - RNA, 22 nt, Human
gccugggaaagaguagggaaau

SEQ ID NO: 231810 - RNA, 22 nt, Human
gucuguuaccuccaagaccauu

SEQ ID NO: 231811 - RNA, 22 nt, Human
gcuccaguggacugggggaggc

SEQ ID NO: 231812 - RNA, 22 nt, Human
gccagcugcuucuccagaauuu

SEQ ID NO: 231813 - RNA, 18 nt, Human
gcagcuuuugauucaccc

SEQ ID NO: 231814 - RNA, 22 nt, Human
gcuggguuuccagcaggcagga

SEQ ID NO: 231815 - RNA, 22 nt, Human
agucucuuuaaucacagugucu

SEQ ID NO: 231816 - RNA, 22 nt, Human
gugcuuuaguucuugcaacugg

SEQ ID NO: 231817 - RNA, 22 nt, Human
acccccacggaaggccguacgc

SEQ ID NO: 231818 - RNA, 22 nt, Human
ucagugucccgucucuuaacuc

SEQ ID NO: 231819 - RNA, 22 nt, Human
uuacagagggcuucucugaacu

SEQ ID NO: 231820 - RNA, 22 nt, Human
uaaccauauuuuccauuaaguu

SEQ ID NO: 231821 - RNA, 22 nt, Human
acaaaaguguaggaauuccuua

SEQ ID NO: 231822 - RNA, 22 nt, Human
ugcagugguugagagcccagac

SEQ ID NO: 231823 - RNA, 22 nt, Human
cugagaggcggagguugcagug

SEQ ID NO: 231824 - RNA, 22 nt, Human
ugauucaagccaccacauacug

SEQ ID NO: 231825 - RNA, 22 nt, Human
uacauguauguguuaauaucug

SEQ ID NO: 231826 - RNA, 22 nt, Human
ugcagcagagugggccugggug

SEQ ID NO: 231827 - RNA, 22 nt, Human
gcaggaguguauuugcauguaa

SEQ ID NO: 231828 - RNA, 22 nt, Human
uguucccacaccagccucagcc

SEQ ID NO: 231829 - RNA, 22 nt, Human
ucuuuugugauucuucaguuac

SEQ ID NO: 231830 - RNA, 22 nt, Human
uacuucuggauauucagaacuu

SEQ ID NO: 231831 - RNA, 22 nt, Human
guuguaaauacaguacugaaac

SEQ ID NO: 231832 - RNA, 22 nt, Human
ucaggcagaccaccgugggcag

SEQ ID NO: 231833 - RNA, 22 nt, Human
uuguuucuuugaaguuucuaga

SEQ ID NO: 231834 - RNA, 22 nt, Human
agagcuuuugggaauucaggua

SEQ ID NO: 231835 - RNA, 22 nt, Human
auucuucauuguugauucaugu

SEQ ID NO: 231836 - RNA, 21 nt, Human
uucucagaucgaguagugaga

SEQ ID NO: 231837 - RNA, 20 nt, Human
cucucccagcacagcuuccu

SEQ ID NO: 231838 - RNA, 22 nt, Human
ugaaggcaacugagaaaaagca

SEQ ID NO: 231839 - RNA, 22 nt, Human
cugcccaggaaggagaggaugg

SEQ ID NO: 231840 - RNA, 22 nt, Human
ggaaggcagaggugucgugggg

SEQ ID NO: 231841 - RNA, 22 nt, Human
auuucuguauccugcugucaga

SEQ ID NO: 231842 - RNA, 22 nt, Human
ggucuggccucgggcaccccca

SEQ ID NO: 231843 - RNA, 22 nt, Human
guucuucagaggggaaagaacc

SEQ ID NO: 231844 - RNA, 22 nt, Human
uaaauguuuagucuuauuuggg

SEQ ID NO: 231845 - RNA, 22 nt, Human
agcucagagauaaucaagagac

SEQ ID NO: 231846 - RNA, 22 nt, Human
gacauuuacugaauacugauua

SEQ ID NO: 231847 - RNA, 22 nt, Human
uuuugucuaagaacuuugcaaa

SEQ ID NO: 231848 - RNA, 22 nt, Human
uccugcagaccucagucagguc

SEQ ID NO: 231849 - RNA, 22 nt, Human
aaauugcagaugcuaaaugacu

SEQ ID NO: 231850 - RNA, 22 nt, Human
aaucucagcucaugcaauucca

SEQ ID NO: 231851 - RNA, 22 nt, Human
ccucuggggugagugggccacu

SEQ ID NO: 231852 - RNA, 22 nt, Human
cugggaggcacuauucaggagg

SEQ ID NO: 231853 - RNA, 22 nt, Human
gaauuauaaacuagugacuuca

SEQ ID NO: 231854 - RNA, 17 nt, Human
gcacugaacaauccugu

SEQ ID NO: 231855 - RNA, 22 nt, Human
ucaggccagcaccaucccuauc

SEQ ID NO: 231856 - RNA, 23 nt, Human
ccugccuguucuaacuccauuuc

SEQ ID NO: 231857 - RNA, 22 nt, Human
ccagcccucacugaggccucuc

SEQ ID NO: 231858 - RNA, 22 nt, Human
augcuuguacuaaaaaaauauu

SEQ ID NO: 231859 - RNA, 22 nt, Human
agaugguggacuaucugacuug

SEQ ID NO: 231860 - RNA, 22 nt, Human
uaaaaaacauuacucuguccug

SEQ ID NO: 231861 - RNA, 22 nt, Human
caggcuugugucucagcugcag

SEQ ID NO: 231862 - RNA, 22 nt, Human
agcuggcuucucugcagacauu

SEQ ID NO: 231863 - RNA, 18 nt, Human
caaauucagugcuggaag

SEQ ID NO: 231864 - RNA, 22 nt, Human
aagggcccauucucucagaaaa

SEQ ID NO: 231865 - RNA, 22 nt, Human
acggaaaacccugagcaaacuu

SEQ ID NO: 231866 - RNA, 22 nt, Human
uuuaaucauaagaaggaaaaua

SEQ ID NO: 231867 - RNA, 22 nt, Human
auucuacaacccaauaauaauu

SEQ ID NO: 231868 - RNA, 22 nt, Human
ucucagcaacgauccggaguaa

SEQ ID NO: 231869 - RNA, 22 nt, Human
gcucucugguuccagucaggaa

SEQ ID NO: 231870 - RNA, 22 nt, Human
aaguaagucuuacauucacauu

SEQ ID NO: 231871 - RNA, 22 nt, Human
uuccucuguaugcuuugcugcu

SEQ ID NO: 231872 - RNA, 22 nt, Human
augccaagcucuaucccugacc

SEQ ID NO: 231873 - RNA, 22 nt, Human
uggauuauuguaagacaaagua

SEQ ID NO: 231874 - RNA, 22 nt, Human
ucugagagcaucacugggguac

SEQ ID NO: 231875 - RNA, 22 nt, Human
cucagaaaggugccauuuaugu

SEQ ID NO: 231876 - RNA, 22 nt, Human
agagcccugaagcagagcuaaa

SEQ ID NO: 231877 - RNA, 22 nt, Human
gggugcugaggaagacagcagg

SEQ ID NO: 231878 - RNA, 22 nt, Human
cauaauuaaauucugggcaaga

SEQ ID NO: 231879 - RNA, 22 nt, Human
auuccaaagacagaagcagcug

SEQ ID NO: 231880 - RNA, 22 nt, Human
ccaaagucagugcucagucguc

SEQ ID NO: 231881 - RNA, 22 nt, Human
cagugggacaugggcacugggc

SEQ ID NO: 231882 - RNA, 21 nt, Human
uagagcuuggcacagaguaga

SEQ ID NO: 231883 - RNA, 22 nt, Human
ugcuucucccaaccagggccug

SEQ ID NO: 231884 - RNA, 22 nt, Human
uacuagaagcuguaauuuuuca

SEQ ID NO: 231885 - RNA, 22 nt, Human
gagacagcuuaauuggugguca

SEQ ID NO: 231886 - RNA, 22 nt, Human
cccccagaugcgagccauagcc

SEQ ID NO: 231887 - RNA, 22 nt, Human
ucaggcuuggugcuccagugcc

SEQ ID NO: 231888 - RNA, 22 nt, Human
ccugugccauccugagcauccc

SEQ ID NO: 231889 - RNA, 22 nt, Human
accagaggaagggaaucucaag

SEQ ID NO: 231890 - RNA, 22 nt, Human
gcugggacggcucaguaagaag

SEQ ID NO: 231891 - RNA, 20 nt, Human
ugcacagacaaugagcccag

SEQ ID NO: 231892 - RNA, 22 nt, Human
aucuccagaauggcuuguuaau

SEQ ID NO: 231893 - RNA, 22 nt, Human
ucuggcuuucucagcauggcau

SEQ ID NO: 231894 - RNA, 22 nt, Human
uccaggaacucuugauggugau

SEQ ID NO: 231895 - RNA, 22 nt, Human
ugccaggccaaugaaggcaggg

SEQ ID NO: 231896 - RNA, 21 nt, Human
aggaccuagaaaagugccuag

SEQ ID NO: 231897 - RNA, 22 nt, Human
ucuucagacuccaaauguuuua

SEQ ID NO: 231898 - RNA, 22 nt, Human
ugaaaucaucugccaauaaguu

SEQ ID NO: 231899 - RNA, 22 nt, Human
uuguacagauuuuccucggucu

SEQ ID NO: 231900 - RNA, 17 nt, Human
caggaaaauaugaguga

SEQ ID NO: 231901 - RNA, 20 nt, Human
caaggcuucuuugauggggu

SEQ ID NO: 231902 - RNA, 19 nt, Human
gccaggcucuuauucugug

SEQ ID NO: 231903 - RNA, 22 nt, Human
ucucaaaguagcucccacagau

SEQ ID NO: 231904 - RNA, 22 nt, Human
agcaguuauauuacucucaggu

SEQ ID NO: 231905 - RNA, 22 nt, Human
cucagccccaauuugcccucuu

SEQ ID NO: 231906 - RNA, 22 nt, Human
caucagugaaagugaauguucu

SEQ ID NO: 231907 - RNA, 22 nt, Human
auguacauacugcauuuucaaa

SEQ ID NO: 231908 - RNA, 22 nt, Human
uuucucugaggcuggccucccu

SEQ ID NO: 231909 - RNA, 22 nt, Human
uuuacagucugucuagcaaugu

SEQ ID NO: 231910 - RNA, 22 nt, Human
ugcucccagggacucuggcugg

SEQ ID NO: 231911 - RNA, 22 nt, Human
ggcagguggccaagugucuaag

SEQ ID NO: 231912 - RNA, 23 nt, Human
cacagguguuucaucuucucagu

SEQ ID NO: 231913 - RNA, 22 nt, Human
acccacccuacuagcagugucc

SEQ ID NO: 231914 - RNA, 22 nt, Human
cgguccagagcuaguucauugc

SEQ ID NO: 231915 - RNA, 22 nt, Human
cccacacucugagaaaugcuga

SEQ ID NO: 231916 - RNA, 22 nt, Human
agcugcugcggaaagaugccac

SEQ ID NO: 231917 - RNA, 22 nt, Human
uaucuagagcagugguucucaa

SEQ ID NO: 231918 - RNA, 22 nt, Human
uuugcugaauagauuguaaacu

SEQ ID NO: 231919 - RNA, 22 nt, Human
ugguuacauauccuuuggagcc

SEQ ID NO: 231920 - RNA, 22 nt, Human
ccuccagcauuacuggcccaug

SEQ ID NO: 231921 - RNA, 22 nt, Human
uagaauccaccuacacaagaga

SEQ ID NO: 231922 - RNA, 22 nt, Human
ggucagagggugggcugccugu

SEQ ID NO: 231923 - RNA, 22 nt, Human
acauuuuaauaugcuuagugug

SEQ ID NO: 231924 - RNA, 22 nt, Human
ucugcaggucacgcuccagccu

SEQ ID NO: 231925 - RNA, 22 nt, Human
agacagacugguuugaauuggu

SEQ ID NO: 231926 - RNA, 23 nt, Human
ugagcaucacaggagaaccaggc

SEQ ID NO: 231927 - RNA, 20 nt, Human
agggccugcucugugguguc

SEQ ID NO: 231928 - RNA, 22 nt, Human
ccgccaggauauuguggcuuuu

SEQ ID NO: 231929 - RNA, 22 nt, Human
aaacacuggcaauuucaugcac

SEQ ID NO: 231930 - RNA, 22 nt, Human
auuauuguacuuucaauaaggu

SEQ ID NO: 231931 - RNA, 22 nt, Human
cuuguuuauuaugcacuguaga

SEQ ID NO: 231932 - RNA, 22 nt, Human
caggcacaagaucggcuagaua

SEQ ID NO: 231933 - RNA, 22 nt, Human
ugaacagauggcccagcagagg

SEQ ID NO: 231934 - RNA, 22 nt, Human
agcaugcugguguucauggcag

SEQ ID NO: 231935 - RNA, 22 nt, Human
ucucagaacacccuucuauggu

SEQ ID NO: 231936 - RNA, 22 nt, Human
agcagggggccacagucacagc

SEQ ID NO: 231937 - RNA, 22 nt, Human
cacagcauaaugaaauauacuu

SEQ ID NO: 231938 - RNA, 22 nt, Human
uggccugggccggcagauauac

SEQ ID NO: 231939 - RNA, 22 nt, Human
ggcuccuggcaucuggugggua

SEQ ID NO: 231940 - RNA, 19 nt, Human
agucugucugcuuucccuc

SEQ ID NO: 231941 - RNA, 22 nt, Human
agcugcaaguguugccuccuac

SEQ ID NO: 231942 - RNA, 22 nt, Human
auuuugcugugguacauuagga

SEQ ID NO: 231943 - RNA, 22 nt, Human
uaguuauauccagucuuuaaaa

SEQ ID NO: 231944 - RNA, 22 nt, Human
uacaagugcuagcagauauugu

SEQ ID NO: 231945 - RNA, 22 nt, Human
gcccaagccgccuuccagagac

SEQ ID NO: 231946 - RNA, 22 nt, Human
augucacagcaggaguauucuu

SEQ ID NO: 231947 - RNA, 22 nt, Human
uccaggauugucagccagaagg

SEQ ID NO: 231948 - RNA, 22 nt, Human
gucuuucuaugaugaacuguug

SEQ ID NO: 231949 - RNA, 22 nt, Human
uggcaauuggcaauuucguaug

SEQ ID NO: 231950 - RNA, 22 nt, Human
gcccagugguaaaagcaggccu

SEQ ID NO: 231951 - RNA, 22 nt, Human
ugggcccugacuucaagcaucc

SEQ ID NO: 231952 - RNA, 18 nt, Human
cagaugagaugcaaucuc

SEQ ID NO: 231953 - RNA, 22 nt, Human
agcugccaggccccugagaacc

SEQ ID NO: 231954 - RNA, 22 nt, Human
cucccuggaggcccagaccugg

SEQ ID NO: 231955 - RNA, 22 nt, Human
aaggcagcucagcucauggcag

SEQ ID NO: 231956 - RNA, 22 nt, Human
agcuguggaagacugucagggu

SEQ ID NO: 231957 - RNA, 22 nt, Human
uggccugauacuuccagaguuc

SEQ ID NO: 231958 - RNA, 19 nt, Human
uauucuguuaaccuuuguc

SEQ ID NO: 231959 - RNA, 22 nt, Human
cuucugagauguuguuuuacag

SEQ ID NO: 231960 - RNA, 23 nt, Human
aggacugcucacuugaggcuucc

SEQ ID NO: 231961 - RNA, 22 nt, Human
cugucauuguacauguuauaca

SEQ ID NO: 231962 - RNA, 22 nt, Human
ugggaugauagguaaguaauua

SEQ ID NO: 231963 - RNA, 22 nt, Human
uuuuuuaucuaugguaguacca

SEQ ID NO: 231964 - RNA, 22 nt, Human
gcagggcuccccaggcccgagg

SEQ ID NO: 231965 - RNA, 22 nt, Human
cugagcucagucccagcucuac

SEQ ID NO: 231966 - RNA, 22 nt, Human
gcugaaaugccuuguaaauauu

SEQ ID NO: 231967 - RNA, 22 nt, Human
aagcugucaggagguuaccuuu

SEQ ID NO: 231968 - RNA, 22 nt, Human
ugggcugcugucugcacaugcu

SEQ ID NO: 231969 - RNA, 22 nt, Human
aguuagcaucuccuccagucua

SEQ ID NO: 231970 - RNA, 22 nt, Human
gggcucugaaucccaggucugc

SEQ ID NO: 231971 - RNA, 22 nt, Human
ugacagggggcagagguggcug

SEQ ID NO: 231972 - RNA, 22 nt, Human
ugaauaugugacuuugauuuca

SEQ ID NO: 231973 - RNA, 19 nt, Human
agcagcuguagauagacac

SEQ ID NO: 231974 - RNA, 22 nt, Human
gcaccagccugagccucuugca

SEQ ID NO: 231975 - RNA, 22 nt, Human
gugcagggcagccgaaugggcu

SEQ ID NO: 231976 - RNA, 22 nt, Human
agagcuuuguuugauugucaga

SEQ ID NO: 231977 - RNA, 22 nt, Human
ccagagcugcauccagcagguu

SEQ ID NO: 231978 - RNA, 22 nt, Human
ggagcugugcagugacuacaga

SEQ ID NO: 231979 - RNA, 22 nt, Human
ggaagaaaaugggcaacaggug

SEQ ID NO: 231980 - RNA, 22 nt, Human
ucuagaaaguacuagagcuggu

SEQ ID NO: 231981 - RNA, 22 nt, Human
aaacacugaagaccuaucuggu

SEQ ID NO: 231982 - RNA, 22 nt, Human
gggcuccaacuacaucagccuu

SEQ ID NO: 231983 - RNA, 22 nt, Human
uucugauauaacacucuagcua

SEQ ID NO: 231984 - RNA, 22 nt, Human
ugcagucuggauguccucagau

SEQ ID NO: 231985 - RNA, 22 nt, Human
gcaggucccagaaaguuaauuc

SEQ ID NO: 231986 - RNA, 22 nt, Human
gaaaauguuuguccggagcuga

SEQ ID NO: 231987 - RNA, 22 nt, Human
guggcugcagcggcuguggaga

SEQ ID NO: 231988 - RNA, 22 nt, Human
ucucugagcccaauguagcaau

SEQ ID NO: 231989 - RNA, 22 nt, Human
auguggcugccaccugccugaa

SEQ ID NO: 231990 - RNA, 22 nt, Human
auuacaagaugcauccauauuu

SEQ ID NO: 231991 - RNA, 22 nt, Human
aggggagagaacauaaggaagu

SEQ ID NO: 231992 - RNA, 22 nt, Human
cucagaauuacaucccauuuua

SEQ ID NO: 231993 - RNA, 22 nt, Human
uacaccagguguuauggucaau

SEQ ID NO: 231994 - RNA, 22 nt, Human
gggucagaguaagcaaggacaa

SEQ ID NO: 231995 - RNA, 22 nt, Human
aagcaucucuauguggagagug

SEQ ID NO: 231996 - RNA, 22 nt, Human
agacuuaggagcugacaucucu

SEQ ID NO: 231997 - RNA, 22 nt, Human
cugcucuucacacuacacccgu

SEQ ID NO: 231998 - RNA, 22 nt, Human
aaaguguuuuccaugcaaugaa

SEQ ID NO: 231999 - RNA, 22 nt, Human
auauuucacguagguuguuuuc

SEQ ID NO: 232000 - RNA, 22 nt, Human
gcccucucuucugcagccucca

SEQ ID NO: 232001 - RNA, 22 nt, Human
agaggcugucucauauuuugua

SEQ ID NO: 232002 - RNA, 22 nt, Human
ccauuuugucugacuucuugcu

SEQ ID NO: 232003 - RNA, 22 nt, Human
uagcugggaauuaucugguugc

SEQ ID NO: 232004 - RNA, 22 nt, Human
uauucaagauugaacuggcaga

SEQ ID NO: 232005 - RNA, 21 nt, Human
uccugggaagcacuggggugg

SEQ ID NO: 232006 - RNA, 22 nt, Human
gcaggccacugucuccucuggg

SEQ ID NO: 232007 - RNA, 22 nt, Human
ccuaccaguaggaggccagaga

SEQ ID NO: 232008 - RNA, 22 nt, Human
acaucuaagccaauuuugauuu

SEQ ID NO: 232009 - RNA, 18 nt, Human
uggcuucucaaagcccag

SEQ ID NO: 232010 - RNA, 19 nt, Human
uccucugaagguucuuuua

SEQ ID NO: 232011 - RNA, 22 nt, Human
uaccauuuugaaacauuucauc

SEQ ID NO: 232012 - RNA, 22 nt, Human
cugcccugucuuuuucugauga

SEQ ID NO: 232013 - RNA, 22 nt, Human
uagucaguaugaaauugcucaa

SEQ ID NO: 232014 - RNA, 22 nt, Human
aaucuacauuucaguuuugccc

SEQ ID NO: 232015 - RNA, 22 nt, Human
uuggaacuuaacccugauaggu

SEQ ID NO: 232016 - RNA, 20 nt, Human
ugcagaagaacguucugguu

SEQ ID NO: 232017 - RNA, 22 nt, Human
ucucuuggagguucuuccuguu

SEQ ID NO: 232018 - RNA, 22 nt, Human
aacuuauuccauaggcucacug

SEQ ID NO: 232019 - RNA, 22 nt, Human
acauuuuuauucaucaaagcag

SEQ ID NO: 232020 - RNA, 22 nt, Human
auucacaugauguauguagggc

SEQ ID NO: 232021 - RNA, 22 nt, Human
aagcccucauuagccauagccc

SEQ ID NO: 232022 - RNA, 22 nt, Human
cuuucccuuagccccauucuau

SEQ ID NO: 232023 - RNA, 17 nt, Human
ggucuggggccauuggc

SEQ ID NO: 232024 - RNA, 22 nt, Human
caugaaaaugucaaguucugcu

SEQ ID NO: 232025 - RNA, 22 nt, Human
augcaucauggaaaacucaguu

SEQ ID NO: 232026 - RNA, 23 nt, Human
cugaggggaaaagggcuucaggc

SEQ ID NO: 232027 - RNA, 22 nt, Human
gugagaagauaaguauugcaaa

SEQ ID NO: 232028 - RNA, 22 nt, Human
agggcacccucucugcaguacc

SEQ ID NO: 232029 - RNA, 22 nt, Human
augcagcaguuuacaaagcaau

SEQ ID NO: 232030 - RNA, 22 nt, Human
aaugaauucgagugaaggaaag

SEQ ID NO: 232031 - RNA, 22 nt, Human
agcuuugggauucaggcaggaa

SEQ ID NO: 232032 - RNA, 22 nt, Human
uggcugccgacuggcucuuggc

SEQ ID NO: 232033 - RNA, 22 nt, Human
cauuuauauaaaauguccagaa

SEQ ID NO: 232034 - RNA, 22 nt, Human
accuuccucuaagacauuuagc

SEQ ID NO: 232035 - RNA, 20 nt, Human
uaugugauuuucucaucaau

SEQ ID NO: 232036 - RNA, 22 nt, Human
uccauacucagaaaguauugca

SEQ ID NO: 232037 - RNA, 21 nt, Human
agagaucugaagaaccauuag

SEQ ID NO: 232038 - RNA, 21 nt, Human
cauuucaugauuauagaaaug

SEQ ID NO: 232039 - RNA, 22 nt, Human
ugcaaauauuccaugcuguuca

SEQ ID NO: 232040 - RNA, 22 nt, Human
gaaguuccagugauauaaaacu

SEQ ID NO: 232041 - RNA, 22 nt, Human
gggccccuugcugcucugcugg

SEQ ID NO: 232042 - RNA, 22 nt, Human
ugauuacacagcaguaauuuca

SEQ ID NO: 232043 - RNA, 22 nt, Human
gaguacuuaacuccaaauagga

SEQ ID NO: 232044 - RNA, 22 nt, Human
cuacaggaaggaucuugcucaa

SEQ ID NO: 232045 - RNA, 19 nt, Human
cucuuaaauugucucuugc

SEQ ID NO: 232046 - RNA, 22 nt, Human
uacaacauaacgggcauucagu

SEQ ID NO: 232047 - RNA, 22 nt, Human
aucccugugacgagcaucccua

SEQ ID NO: 232048 - RNA, 22 nt, Human
cuugccagcacuuggccagcug

SEQ ID NO: 232049 - RNA, 22 nt, Human
gggcucauggacagcucuccag

SEQ ID NO: 232050 - RNA, 22 nt, Human
acucagaguuccugugcauagu

SEQ ID NO: 232051 - RNA, 22 nt, Human
cauuuauugguuaggccagcag

SEQ ID NO: 232052 - RNA, 22 nt, Human
uagaagauucuaaaguggagag

SEQ ID NO: 232053 - RNA, 22 nt, Human
cccaaguauuccuccucugccc

SEQ ID NO: 232054 - RNA, 22 nt, Human
gagcccugauuugcagcauuug

SEQ ID NO: 232055 - RNA, 22 nt, Human
gugaauaacuuucuauguuaau

SEQ ID NO: 232056 - RNA, 22 nt, Human
uggguucuuucacuucucaguu

SEQ ID NO: 232057 - RNA, 22 nt, Human
ugcagaagauggucugagcacc

SEQ ID NO: 232058 - RNA, 22 nt, Human
ucuuuguuauugcuuuaucuau

SEQ ID NO: 232059 - RNA, 22 nt, Human
ccagcugggucccugcuggggc

SEQ ID NO: 232060 - RNA, 22 nt, Human
aagcugaggcccauggcaaggu

SEQ ID NO: 232061 - RNA, 22 nt, Human
ggggaggcugaugugggcaaag

SEQ ID NO: 232062 - RNA, 22 nt, Human
gcccaggggcagcgcauagugg

SEQ ID NO: 232063 - RNA, 22 nt, Human
auuccacagcuacaucaaucua

SEQ ID NO: 232064 - RNA, 21 nt, Human
acuggcugccaugauccaggg

SEQ ID NO: 232065 - RNA, 22 nt, Human
uagaaacucacguuaucauugc

SEQ ID NO: 232066 - RNA, 22 nt, Human
aggacaagcuaaaggacuuccu

SEQ ID NO: 232067 - RNA, 22 nt, Human
ucauggcuaaugcaguauauuc

SEQ ID NO: 232068 - RNA, 22 nt, Human
ucugggagagucacaggcauug

SEQ ID NO: 232069 - RNA, 22 nt, Human
ccagugccugugggcauggugc

SEQ ID NO: 232070 - RNA, 22 nt, Human
ggccuugggauguggcugcagc

SEQ ID NO: 232071 - RNA, 22 nt, Human
caguuuuucaaaauuacaugau

SEQ ID NO: 232072 - RNA, 22 nt, Human
acaacaaagacacuugaaauga

SEQ ID NO: 232073 - RNA, 22 nt, Human
caggcaggagccagggauucca

SEQ ID NO: 232074 - RNA, 22 nt, Human
uuaggcugggcuacaacaacug

SEQ ID NO: 232075 - RNA, 18 nt, Human
ucuuccaacacugacacc

SEQ ID NO: 232076 - RNA, 22 nt, Human
ugcuauuuggcacuuuugaccu

SEQ ID NO: 232077 - RNA, 22 nt, Human
uuggaaguaaugaagagguggg

SEQ ID NO: 232078 - RNA, 22 nt, Human
uaggaaauuuuacuggucuggg

SEQ ID NO: 232079 - RNA, 22 nt, Human
ucccugccugacagcacccacc

SEQ ID NO: 232080 - RNA, 22 nt, Human
gcagcuuuuuggaugucaguua

SEQ ID NO: 232081 - RNA, 22 nt, Human
uuuggaaugacagauaucaaua

SEQ ID NO: 232082 - RNA, 22 nt, Human
cuccccacauuucucccugucu

SEQ ID NO: 232083 - RNA, 22 nt, Human
acuguccauucacucauauuca

SEQ ID NO: 232084 - RNA, 22 nt, Human
auccagagagguuaggugacau

SEQ ID NO: 232085 - RNA, 20 nt, Human
uggggaaagccaucgaugag

SEQ ID NO: 232086 - RNA, 22 nt, Human
ucugcucuaguugcuuccugcc

SEQ ID NO: 232087 - RNA, 23 nt, Human
uccauacucuaaacauguuauuu

SEQ ID NO: 232088 - RNA, 22 nt, Human
aguuuuucuccccuggcuucau

SEQ ID NO: 232089 - RNA, 22 nt, Human
cuaaaugucagaguagcuugca

SEQ ID NO: 232090 - RNA, 20 nt, Human
agccucugcccuucccacug

SEQ ID NO: 232091 - RNA, 22 nt, Human
guugcacaguuccucaagcagg

SEQ ID NO: 232092 - RNA, 22 nt, Human
uagguauacagagauuucuggg

SEQ ID NO: 232093 - RNA, 22 nt, Human
cccugggcaagcccuauuuucc

SEQ ID NO: 232094 - RNA, 22 nt, Human
guuucacagucugcagaauuuu

SEQ ID NO: 232095 - RNA, 22 nt, Human
acuccuggguucuaaauuugaa

SEQ ID NO: 232096 - RNA, 22 nt, Human
agcagguggacagaggaagaaa

SEQ ID NO: 232097 - RNA, 22 nt, Human
ugcaggagcugugcggugaggg

SEQ ID NO: 232098 - RNA, 22 nt, Human
acauuugacuguagauacuugc

SEQ ID NO: 232099 - RNA, 22 nt, Human
ucaaagcagcacauucgcaagc

SEQ ID NO: 232100 - RNA, 22 nt, Human
uggcugcugcagacagacagga

SEQ ID NO: 232101 - RNA, 22 nt, Human
uuugaaaguguuuacuugggaa

SEQ ID NO: 232102 - RNA, 22 nt, Human
aaggccaggucccugcagugca

SEQ ID NO: 232103 - RNA, 22 nt, Human
guccuggggauacagaagugaa

SEQ ID NO: 232104 - RNA, 22 nt, Human
ugcuguccuguuuuggaguaau

SEQ ID NO: 232105 - RNA, 22 nt, Human
ugccuucaaucaggauggucuc

SEQ ID NO: 232106 - RNA, 21 nt, Human
acagaacuguauagugauaaa

SEQ ID NO: 232107 - RNA, 22 nt, Human
accuguuuacccugggcucccc

SEQ ID NO: 232108 - RNA, 22 nt, Human
ucugagcucaagugacaguuag

SEQ ID NO: 232109 - RNA, 21 nt, Human
uuucugucucugccacuaguu

SEQ ID NO: 232110 - RNA, 20 nt, Human
gcuccaggucagagaggacg

SEQ ID NO: 232111 - RNA, 22 nt, Human
gagucaggcuagggugacaggc

SEQ ID NO: 232112 - RNA, 22 nt, Human
uggguccauggaacagaggugc

SEQ ID NO: 232113 - RNA, 22 nt, Human
aaaaguguccagauuaugaaga

SEQ ID NO: 232114 - RNA, 22 nt, Human
caaaugugacuuuugggcuucu

SEQ ID NO: 232115 - RNA, 22 nt, Human
uccagaggugaacacccaggca

SEQ ID NO: 232116 - RNA, 22 nt, Human
agcuaucaguaggaccauguuc

SEQ ID NO: 232117 - RNA, 22 nt, Human
ccaaacaaauccccauucuuag

SEQ ID NO: 232118 - RNA, 21 nt, Human
aaggucuguaaagugacagga

SEQ ID NO: 232119 - RNA, 22 nt, Human
uggcccagcacuccaaguaggg

SEQ ID NO: 232120 - RNA, 19 nt, Human
uagacucuaauguuaagcu

SEQ ID NO: 232121 - RNA, 22 nt, Human
uucccauuugugguagugaauu

SEQ ID NO: 232122 - RNA, 22 nt, Human
cauuucaauacuaucugagaau

SEQ ID NO: 232123 - RNA, 22 nt, Human
acuaacuugcugagugaccaug

SEQ ID NO: 232124 - RNA, 21 nt, Human
agaaaaguagaguuuucagag

SEQ ID NO: 232125 - RNA, 22 nt, Human
aagcaagcuguuggcaauaggg

SEQ ID NO: 232126 - RNA, 22 nt, Human
aggaggccuacgcacaugucua

SEQ ID NO: 232127 - RNA, 22 nt, Human
gaugagcauuguuucauguguu

SEQ ID NO: 232128 - RNA, 22 nt, Human
ugccugucuuggaguccuggcc

SEQ ID NO: 232129 - RNA, 22 nt, Human
guuucucacuuaccaacacaug

SEQ ID NO: 232130 - RNA, 22 nt, Human
aagcuuguagaguuugacuucc

SEQ ID NO: 232131 - RNA, 22 nt, Human
cuagcuguguaaaccgagcugc

SEQ ID NO: 232132 - RNA, 22 nt, Human
ucuggcagaggaaggaggccug

SEQ ID NO: 232133 - RNA, 22 nt, Human
uuucacauuagauaugucauuu

SEQ ID NO: 232134 - RNA, 22 nt, Human
ucugggauuuuugacacugaag

SEQ ID NO: 232135 - RNA, 22 nt, Human
cuucaagagaaugcagggaugu

SEQ ID NO: 232136 - RNA, 22 nt, Human
cagagcaucgcgcagagagccu

SEQ ID NO: 232137 - RNA, 22 nt, Human
agcugccuucccucucauuagg

SEQ ID NO: 232138 - RNA, 22 nt, Human
aaccagcugagaaugcuucugc

SEQ ID NO: 232139 - RNA, 22 nt, Human
aauuaggaaaugagaguauuug

SEQ ID NO: 232140 - RNA, 20 nt, Human
aggcuccuguaccugaggaa

SEQ ID NO: 232141 - RNA, 22 nt, Human
aggcaggucuguaucuagucuc

SEQ ID NO: 232142 - RNA, 22 nt, Human
acaguuaacuggagagcgaguu

SEQ ID NO: 232143 - RNA, 22 nt, Human
ucuggcaggacaugcugaccau

SEQ ID NO: 232144 - RNA, 17 nt, Human
aggccucccuccaggcc

SEQ ID NO: 232145 - RNA, 18 nt, Human
gcucugcagcugaggcuu

SEQ ID NO: 232146 - RNA, 22 nt, Human
cuagaaauucugauucaguagg

SEQ ID NO: 232147 - RNA, 22 nt, Human
ucugagccacagauguccuguu

SEQ ID NO: 232148 - RNA, 22 nt, Human
uccaggccuaggccaagugauu

SEQ ID NO: 232149 - RNA, 22 nt, Human
agcucagcuuccucuccaugcu

SEQ ID NO: 232150 - RNA, 22 nt, Human
aacuagaaagaacauauuucca

SEQ ID NO: 232151 - RNA, 22 nt, Human
ugauuuccuaggucuggagaag

SEQ ID NO: 232152 - RNA, 18 nt, Human
uggcuucugcuagcugga

SEQ ID NO: 232153 - RNA, 20 nt, Human
cagagauuuuacuuccucac

SEQ ID NO: 232154 - RNA, 22 nt, Human
gacauuuauuagaaaacuauca

SEQ ID NO: 232155 - RNA, 22 nt, Human
gcuuucagggucacugucaaca

SEQ ID NO: 232156 - RNA, 22 nt, Human
cuggugccuccucucccagguc

SEQ ID NO: 232157 - RNA, 22 nt, Human
acucagagcuuggcuccuugcu

SEQ ID NO: 232158 - RNA, 22 nt, Human
uuagagaaguuuuacuuaagaa

SEQ ID NO: 232159 - RNA, 22 nt, Human
augugcaauggugucaccacau

SEQ ID NO: 232160 - RNA, 22 nt, Human
guguaaguaucuuuguaucuuu

SEQ ID NO: 232161 - RNA, 22 nt, Human
cugcuugaccuguuguucucac

SEQ ID NO: 232162 - RNA, 22 nt, Human
cacgggcagugagcacagccug

SEQ ID NO: 232163 - RNA, 22 nt, Human
caccagaguuguccaaaugauu

SEQ ID NO: 232164 - RNA, 22 nt, Human
cuuugggauuucaugagagcua

SEQ ID NO: 232165 - RNA, 22 nt, Human
cucauuuacuacucaugugacc

SEQ ID NO: 232166 - RNA, 22 nt, Human
agagagcaggacuucacugagc

SEQ ID NO: 232167 - RNA, 23 nt, Human
auucagaauuguguguuuguaua

SEQ ID NO: 232168 - RNA, 22 nt, Human
auaucuuucaaagccaaaagua

SEQ ID NO: 232169 - RNA, 22 nt, Human
ugcaaagugcuagcccacacca

SEQ ID NO: 232170 - RNA, 21 nt, Human
cccuugccugcacuccucggc

SEQ ID NO: 232171 - RNA, 22 nt, Human
ugagccaggcccagugggguca

SEQ ID NO: 232172 - RNA, 22 nt, Human
caggcuuuacuuucucucugaa

SEQ ID NO: 232173 - RNA, 22 nt, Human
uccugagcaccuaugccauggc

SEQ ID NO: 232174 - RNA, 18 nt, Human
acagaaauagcugugccu

SEQ ID NO: 232175 - RNA, 22 nt, Human
uucuguggucucccaugucugu

SEQ ID NO: 232176 - RNA, 22 nt, Human
guggagcaggacuagcugagaa

SEQ ID NO: 232177 - RNA, 22 nt, Human
gcagcaucagguucacugcgug

SEQ ID NO: 232178 - RNA, 22 nt, Human
ccugagcaaaggcccagaggga

SEQ ID NO: 232179 - RNA, 22 nt, Human
uuuugcaauauguuccugaaua

SEQ ID NO: 232180 - RNA, 21 nt, Human
aacugcaaaugaugcuggaga

SEQ ID NO: 232181 - RNA, 22 nt, Human
ucugggugcccuuugcucuguu

SEQ ID NO: 232182 - RNA, 22 nt, Human
gauuuuaucgucauccuucugg

SEQ ID NO: 232183 - RNA, 22 nt, Human
aaguggcaguucaggaagcaga

SEQ ID NO: 232184 - RNA, 22 nt, Human
ugcuggaguggcacuguguggc

SEQ ID NO: 232185 - RNA, 22 nt, Human
cugucuguuaucucaccagucc

SEQ ID NO: 232186 - RNA, 22 nt, Human
caugcauguuuacuacagugac

SEQ ID NO: 232187 - RNA, 22 nt, Human
augcagcugugggcaagaaaug

SEQ ID NO: 232188 - RNA, 22 nt, Human
gguggcugguuuuauaagaggu

SEQ ID NO: 232189 - RNA, 22 nt, Human
ccagcauccaugcucccucggg

SEQ ID NO: 232190 - RNA, 22 nt, Human
aauaccaugcagaaauaacaua

SEQ ID NO: 232191 - RNA, 22 nt, Human
gacaugugagcaagcgugcggc

SEQ ID NO: 232192 - RNA, 22 nt, Human
acaggacauggcuucugugacg

SEQ ID NO: 232193 - RNA, 22 nt, Human
auguagucucuuugggaaacuc

SEQ ID NO: 232194 - RNA, 22 nt, Human
cuuagcagaagcuucagcuuca

SEQ ID NO: 232195 - RNA, 19 nt, Human
uguuuucaagugggauuau

SEQ ID NO: 232196 - RNA, 22 nt, Human
aagucuuacagacaagcugaag

SEQ ID NO: 232197 - RNA, 22 nt, Human
ucucuggguauucacugccuuc

SEQ ID NO: 232198 - RNA, 22 nt, Human
acuuucuucuacuacuuggaga

SEQ ID NO: 232199 - RNA, 22 nt, Human
aauuucaguugcuaauaaguuc

SEQ ID NO: 232200 - RNA, 22 nt, Human
acacuuuagaaaaaagaauggu

SEQ ID NO: 232201 - RNA, 22 nt, Human
acuugguuguuuuaacuuggca

SEQ ID NO: 232202 - RNA, 22 nt, Human
cugauagguuauuuucagugag

SEQ ID NO: 232203 - RNA, 22 nt, Human
ugcaggggcuugucugggccug

SEQ ID NO: 232204 - RNA, 22 nt, Human
uguccucuuccagugcuccuuc

SEQ ID NO: 232205 - RNA, 22 nt, Human
aaacaguuuucucauuuagugu

SEQ ID NO: 232206 - RNA, 22 nt, Human
uccagaggcucugagggagagu

SEQ ID NO: 232207 - RNA, 20 nt, Human
aguguuugcucacagucucc

SEQ ID NO: 232208 - RNA, 22 nt, Human
agcagggcuggggcacgagcca

SEQ ID NO: 232209 - RNA, 18 nt, Human
ucugagguggacgaggag

SEQ ID NO: 232210 - RNA, 22 nt, Human
ugugugaguaaggcugagagag

SEQ ID NO: 232211 - RNA, 22 nt, Human
agcugccagcaucccggaaggg

SEQ ID NO: 232212 - RNA, 22 nt, Human
cagcccucugaagaggcgcuug

SEQ ID NO: 232213 - RNA, 22 nt, Human
gaaagcauguagccuguaucca

SEQ ID NO: 232214 - RNA, 22 nt, Human
uguccaggcucccuuggugcug

SEQ ID NO: 232215 - RNA, 22 nt, Human
acaguugacagggagaggguua

SEQ ID NO: 232216 - RNA, 22 nt, Human
aguaauaauagcuguaaagugc

SEQ ID NO: 232217 - RNA, 22 nt, Human
gaggcaguaauugugggcaaua

SEQ ID NO: 232218 - RNA, 22 nt, Human
uaaacagccuccccuuucacuc

SEQ ID NO: 232219 - RNA, 22 nt, Human
cugcccagaaucacucacucga

SEQ ID NO: 232220 - RNA, 22 nt, Human
gggugggcccagcccagagaag

SEQ ID NO: 232221 - RNA, 22 nt, Human
gcagggcaggauuugaacccag

SEQ ID NO: 232222 - RNA, 22 nt, Human
cucugccaucucacuggguccu

SEQ ID NO: 232223 - RNA, 22 nt, Human
ccagagaggcaaaacuccuucc

SEQ ID NO: 232224 - RNA, 23 nt, Human
uuuauacaagaaaccgcuggccu

SEQ ID NO: 232225 - RNA, 15 nt, Human
cagucccagggaccc

SEQ ID NO: 232226 - RNA, 17 nt, Human
ugagauggaagaagacu

SEQ ID NO: 232227 - RNA, 22 nt, Human
acugaaaugaaaucuaucaucu

SEQ ID NO: 232228 - RNA, 22 nt, Human
augucuuucuugugucccaaga

SEQ ID NO: 232229 - RNA, 22 nt, Human
aguauaauuagauaucaaaagu

SEQ ID NO: 232230 - RNA, 22 nt, Human
gcagugucagugccuggguggu

SEQ ID NO: 232231 - RNA, 22 nt, Human
cugguuuaaccauguauccugg

SEQ ID NO: 232232 - RNA, 22 nt, Human
acauggaaaacuaacugcuuuu

SEQ ID NO: 232233 - RNA, 22 nt, Human
auugucauuccagucauuguua

SEQ ID NO: 232234 - RNA, 22 nt, Human
uccuggcccacuaugccagcau

SEQ ID NO: 232235 - RNA, 22 nt, Human
aagcagaacugggaaguagugg

SEQ ID NO: 232236 - RNA, 22 nt, Human
gaggcaggcacuguuaucagca

SEQ ID NO: 232237 - RNA, 22 nt, Human
cagcucagucuggagagaugca

SEQ ID NO: 232238 - RNA, 22 nt, Human
ugugcacaaugugcagguuugu

SEQ ID NO: 232239 - RNA, 23 nt, Human
ucaguuaacuguguuaccugugc

SEQ ID NO: 232240 - RNA, 22 nt, Human
gagcuccagggaacagcagcua

SEQ ID NO: 232241 - RNA, 22 nt, Human
ggcuucugccacgagagggaag

SEQ ID NO: 232242 - RNA, 23 nt, Human
agaggcacagcacuuggcuggcc

SEQ ID NO: 232243 - RNA, 22 nt, Human
aagaaucucugaucaggcuuua

SEQ ID NO: 232244 - RNA, 19 nt, Human
ggcugccuuuccuuaccag

SEQ ID NO: 232245 - RNA, 22 nt, Human
gacaguuuuuaauccuuucaug

SEQ ID NO: 232246 - RNA, 22 nt, Human
cacagcuuagaaaagaagccau

SEQ ID NO: 232247 - RNA, 22 nt, Human
uugugacacaugccguccugag

SEQ ID NO: 232248 - RNA, 22 nt, Human
cugcuguacuuaggaagaggaa

SEQ ID NO: 232249 - RNA, 21 nt, Human
aaagaacaggcagauguucuu

SEQ ID NO: 232250 - RNA, 22 nt, Human
gggcagguggagggcccagcca

SEQ ID NO: 232251 - RNA, 22 nt, Human
cugggccuccagcucugccagc

SEQ ID NO: 232252 - RNA, 23 nt, Human
ccacuagcaccuguucaacuucu

SEQ ID NO: 232253 - RNA, 22 nt, Human
ugcagaaguauuccaggcccca

SEQ ID NO: 232254 - RNA, 22 nt, Human
ccaugaccccuggcauccaggg

SEQ ID NO: 232255 - RNA, 22 nt, Human
uuguacaacacauauucuacag

SEQ ID NO: 232256 - RNA, 22 nt, Human
aucugggccaauccuaguacca

SEQ ID NO: 232257 - RNA, 21 nt, Human
ucuuauacagcaauagaucug

SEQ ID NO: 232258 - RNA, 22 nt, Human
ugucaaaaccagcaauuuuguu

SEQ ID NO: 232259 - RNA, 22 nt, Human
cugcugccauuagggcacagac

SEQ ID NO: 232260 - RNA, 22 nt, Human
caacauucuuaucacuauaagc

SEQ ID NO: 232261 - RNA, 22 nt, Human
aaugaguuagaugagaaaauaa

SEQ ID NO: 232262 - RNA, 22 nt, Human
gaggagacauauuuuugaagca

SEQ ID NO: 232263 - RNA, 22 nt, Human
caggaagcuggguuuccauaca

SEQ ID NO: 232264 - RNA, 22 nt, Human
ccccagagaaagucagcagcau

SEQ ID NO: 232265 - RNA, 22 nt, Human
uugcuuuaaaauggcuaagucu

SEQ ID NO: 232266 - RNA, 23 nt, Human
uuaaaggcagauguugaguauua

SEQ ID NO: 232267 - RNA, 22 nt, Human
caggguagacaguaggugucug

SEQ ID NO: 232268 - RNA, 22 nt, Human
aaacauucacauuugcuaguaa

SEQ ID NO: 232269 - RNA, 22 nt, Human
ucucucuacuggggcacuagga

SEQ ID NO: 232270 - RNA, 22 nt, Human
aaaguauucuugacuguuuuuc

SEQ ID NO: 232271 - RNA, 22 nt, Human
ucauuucaaugauacuacuaag

SEQ ID NO: 232272 - RNA, 21 nt, Human
ucuuuuaacaccaggaauucc

SEQ ID NO: 232273 - RNA, 22 nt, Human
agcugacagugcauggagggac

SEQ ID NO: 232274 - RNA, 22 nt, Human
uagcaagauccuucccuggcgu

SEQ ID NO: 232275 - RNA, 19 nt, Human
cgcagguggaaggagccgc

SEQ ID NO: 232276 - RNA, 22 nt, Human
auuugccuguaagacaaggccu

SEQ ID NO: 232277 - RNA, 22 nt, Human
caggucccguuccccagagauu

SEQ ID NO: 232278 - RNA, 22 nt, Human
cacauucagggaacauuggagg

SEQ ID NO: 232279 - RNA, 22 nt, Human
aagaagcagagcuguggguguu

SEQ ID NO: 232280 - RNA, 18 nt, Human
cccaggcuuugugggucu

SEQ ID NO: 232281 - RNA, 22 nt, Human
cccacccugggaagcuaggcag

SEQ ID NO: 232282 - RNA, 22 nt, Human
gagcucagggcauugagcaaga

SEQ ID NO: 232283 - RNA, 22 nt, Human
gcuggcagaagagcugguucaa

SEQ ID NO: 232284 - RNA, 22 nt, Human
gcagaggccaggccaccagcaa

SEQ ID NO: 232285 - RNA, 22 nt, Human
ggcaggugggaacccuccccac

SEQ ID NO: 232286 - RNA, 22 nt, Human
acaacaguaggaaaacaugucu

SEQ ID NO: 232287 - RNA, 22 nt, Human
augaaauguaugagucuggguu

SEQ ID NO: 232288 - RNA, 22 nt, Human
aagauaauauucauuaacuaga

SEQ ID NO: 232289 - RNA, 22 nt, Human
agucaguugcaguuuauggaug

SEQ ID NO: 232290 - RNA, 22 nt, Human
guccaggcuaagucccuucugc

SEQ ID NO: 232291 - RNA, 22 nt, Human
agacaucucccaugcauuuuua

SEQ ID NO: 232292 - RNA, 22 nt, Human
uugauucaguaaagcuaaauuu

SEQ ID NO: 232293 - RNA, 22 nt, Human
gggagguaaagaugagcucagu

SEQ ID NO: 232294 - RNA, 22 nt, Human
ccagcuuuuccucucauugcuu

SEQ ID NO: 232295 - RNA, 22 nt, Human
accuagaauuuaaaacauugcu

SEQ ID NO: 232296 - RNA, 22 nt, Human
agcgccugcggugugagccugc

SEQ ID NO: 232297 - RNA, 22 nt, Human
ugcugcagcuaaggugaggugc

SEQ ID NO: 232298 - RNA, 22 nt, Human
gagccaugagauaguugguucg

SEQ ID NO: 232299 - RNA, 22 nt, Human
caagaauuguacaaacugggug

SEQ ID NO: 232300 - RNA, 22 nt, Human
ccuuccaggagucucugcaggu

SEQ ID NO: 232301 - RNA, 22 nt, Human
uucacugugauguuuaagagaa

SEQ ID NO: 232302 - RNA, 19 nt, Human
uccuggggaggggcauggc

SEQ ID NO: 232303 - RNA, 22 nt, Human
gauucacucauauuuuacguuu

SEQ ID NO: 232304 - RNA, 22 nt, Human
cagggauggagagacuacuggc

SEQ ID NO: 232305 - RNA, 22 nt, Human
aucuuuagagucaucugagugu

SEQ ID NO: 232306 - RNA, 22 nt, Human
aaagccauuacaaaauuucaua

SEQ ID NO: 232307 - RNA, 22 nt, Human
agccagcacggauuucccagga

SEQ ID NO: 232308 - RNA, 22 nt, Human
uucaaaaugcacaaagggcuag

SEQ ID NO: 232309 - RNA, 17 nt, Human
caggcuccuuccagauu

SEQ ID NO: 232310 - RNA, 21 nt, Human
ucauccagguccugcuucuuc

SEQ ID NO: 232311 - RNA, 20 nt, Human
gcagcagacagacaggggac

SEQ ID NO: 232312 - RNA, 22 nt, Human
agguggcaugccugagacauaa

SEQ ID NO: 232313 - RNA, 22 nt, Human
gccuggagaggaagccggugga

SEQ ID NO: 232314 - RNA, 22 nt, Human
auccagaacaccuguaucacca

SEQ ID NO: 232315 - RNA, 22 nt, Human
auauuacucugauuuaguaaau

SEQ ID NO: 232316 - RNA, 22 nt, Human
uccaguccuagaaacuggagag

SEQ ID NO: 232317 - RNA, 22 nt, Human
ccacugcuccugaccaagguca

SEQ ID NO: 232318 - RNA, 22 nt, Human
gauacauuucaaggaggacugg

SEQ ID NO: 232319 - RNA, 22 nt, Human
uuuuucauugcagccucucucc

SEQ ID NO: 232320 - RNA, 22 nt, Human
ugauuguuuuaguucccugaug

SEQ ID NO: 232321 - RNA, 22 nt, Human
aggugcugccccgagaaggaug

SEQ ID NO: 232322 - RNA, 22 nt, Human
acacugaauaauugagaguuga

SEQ ID NO: 232323 - RNA, 22 nt, Human
cagccaaaugagucauaaaugu

SEQ ID NO: 232324 - RNA, 22 nt, Human
ucaggugggcguuccggugcgg

SEQ ID NO: 232325 - RNA, 22 nt, Human
uagaacauaagucauucauuug

SEQ ID NO: 232326 - RNA, 22 nt, Human
caguuucuuagugacacaaauc

SEQ ID NO: 232327 - RNA, 22 nt, Human
ccuggcagcuccguggccuucc

SEQ ID NO: 232328 - RNA, 22 nt, Human
agcuggcaguaugacuggugac

SEQ ID NO: 232329 - RNA, 22 nt, Human
uuuguguuuaugaaguuauucu

SEQ ID NO: 232330 - RNA, 22 nt, Human
auauuaaaacuaugguuuucag

SEQ ID NO: 232331 - RNA, 22 nt, Human
ucucuugggaggaaagagagaa

SEQ ID NO: 232332 - RNA, 22 nt, Human
accauucuuuacacuuauuucu

SEQ ID NO: 232333 - RNA, 22 nt, Human
acuggaggccccucccagugaa

SEQ ID NO: 232334 - RNA, 23 nt, Human
aggaagcuaccaauuuuguaggc

SEQ ID NO: 232335 - RNA, 20 nt, Human
ugagaaggggucagcuguac

SEQ ID NO: 232336 - RNA, 22 nt, Human
cuuucucuucacugucaugauc

SEQ ID NO: 232337 - RNA, 22 nt, Human
caggccucuccuuagucuggca

SEQ ID NO: 232338 - RNA, 22 nt, Human
ucccugggcaaguuuacucuuc

SEQ ID NO: 232339 - RNA, 22 nt, Human
uucuuguucuccucauuuagag

SEQ ID NO: 232340 - RNA, 22 nt, Human
acaaauuguugcuucaugaaug

SEQ ID NO: 232341 - RNA, 22 nt, Human
guggucuggggucaggccugag

SEQ ID NO: 232342 - RNA, 22 nt, Human
cuggaaucuuuggagaaugugg

SEQ ID NO: 232343 - RNA, 19 nt, Human
ugcuggaacaucaguagcu

SEQ ID NO: 232344 - RNA, 22 nt, Human
uggcuuccuccagagcaggagg

SEQ ID NO: 232345 - RNA, 22 nt, Human
caauuagaggaggaagcucaua

SEQ ID NO: 232346 - RNA, 22 nt, Human
guguggucgaaguucucccgga

SEQ ID NO: 232347 - RNA, 22 nt, Human
ugaaagaguuugacaugauucu

SEQ ID NO: 232348 - RNA, 20 nt, Human
cagagaccaggccagguguc

SEQ ID NO: 232349 - RNA, 22 nt, Human
agaccuuuauuucaugauagga

SEQ ID NO: 232350 - RNA, 22 nt, Human
uuccugguccuauuauauacac

SEQ ID NO: 232351 - RNA, 22 nt, Human
acucuguguuuugguggcagca

SEQ ID NO: 232352 - RNA, 22 nt, Human
ggcuuccugggcauguguucua

SEQ ID NO: 232353 - RNA, 22 nt, Human
ggggucugcgccacugucugcg

SEQ ID NO: 232354 - RNA, 22 nt, Human
ccugugacucugucugaugguc

SEQ ID NO: 232355 - RNA, 22 nt, Human
gagcagagaauccagcuaagug

SEQ ID NO: 232356 - RNA, 22 nt, Human
agguucuuggugagcauuuggu

SEQ ID NO: 232357 - RNA, 22 nt, Human
guccaguuucagggucugcgcu

SEQ ID NO: 232358 - RNA, 22 nt, Human
uaaggccauuauggugggcccg

SEQ ID NO: 232359 - RNA, 22 nt, Human
ugcauugagucauuucaguaug

SEQ ID NO: 232360 - RNA, 22 nt, Human
cccuuagagauucugucagagu

SEQ ID NO: 232361 - RNA, 22 nt, Human
cuuucuagacuguccagaugau

SEQ ID NO: 232362 - RNA, 22 nt, Human
ucuuuuuauauugacaaaaggu

SEQ ID NO: 232363 - RNA, 22 nt, Human
gauuuuaucuuugugugcagua

SEQ ID NO: 232364 - RNA, 21 nt, Human
ugggcucagccccagcccugc

SEQ ID NO: 232365 - RNA, 22 nt, Human
uguguacuugaaagggcagguc

SEQ ID NO: 232366 - RNA, 22 nt, Human
cuuucaaaacgcucuguaugca

SEQ ID NO: 232367 - RNA, 22 nt, Human
uggaggcaugacagugucugga

SEQ ID NO: 232368 - RNA, 22 nt, Human
accccagcgcauauggucugcg

SEQ ID NO: 232369 - RNA, 22 nt, Human
cuuuaugaaggaacaaugcucc

SEQ ID NO: 232370 - RNA, 22 nt, Human
auguuauuucugaaagaucauu

SEQ ID NO: 232371 - RNA, 22 nt, Human
acagaacugagaauucucuauc

SEQ ID NO: 232372 - RNA, 22 nt, Human
ccagggcacguugggacaguac

SEQ ID NO: 232373 - RNA, 22 nt, Human
aauguguucaguuaaaugaacu

SEQ ID NO: 232374 - RNA, 22 nt, Human
gaauaacagcaaguuugcaggc

SEQ ID NO: 232375 - RNA, 22 nt, Human
guggauggauugaggcaguggg

SEQ ID NO: 232376 - RNA, 22 nt, Human
aaguagugugcuccagcgguga

SEQ ID NO: 232377 - RNA, 22 nt, Human
aguggcagaucucuggucugga

SEQ ID NO: 232378 - RNA, 22 nt, Human
caggcacacagcacauggccug

SEQ ID NO: 232379 - RNA, 22 nt, Human
ugguuauaaauugcuaugcaga

SEQ ID NO: 232380 - RNA, 22 nt, Human
gucacugccucuuaacuuuuuc

SEQ ID NO: 232381 - RNA, 22 nt, Human
agccaggaaugcaugcucugcu

SEQ ID NO: 232382 - RNA, 21 nt, Human
aguuugaugcaauuucugaga

SEQ ID NO: 232383 - RNA, 22 nt, Human
guggcauuuggaaagagcacua

SEQ ID NO: 232384 - RNA, 22 nt, Human
gggcaggggucaguggccccaa

SEQ ID NO: 232385 - RNA, 22 nt, Human
aaguuuaacuugaauucuuucu

SEQ ID NO: 232386 - RNA, 22 nt, Human
gaauacaugauuaaaguuugau

SEQ ID NO: 232387 - RNA, 18 nt, Human
acaggcuauugcaggaga

SEQ ID NO: 232388 - RNA, 22 nt, Human
ugauaacuuuaauuugaucuga

SEQ ID NO: 232389 - RNA, 22 nt, Human
uuagggaaauaaaauuaucagu

SEQ ID NO: 232390 - RNA, 22 nt, Human
uucucacaauucuuguauuugc

SEQ ID NO: 232391 - RNA, 22 nt, Human
agauacagccugccagguucuu

SEQ ID NO: 232392 - RNA, 22 nt, Human
agugcuccuauggaucaguugu

SEQ ID NO: 232393 - RNA, 22 nt, Human
agucugugaacuuggcagggaa

SEQ ID NO: 232394 - RNA, 22 nt, Human
uggcugagaaaaaagagcuaua

SEQ ID NO: 232395 - RNA, 22 nt, Human
agaaagugaacguguucaguuu

SEQ ID NO: 232396 - RNA, 22 nt, Human
ucugcacccacguaccuuggcu

SEQ ID NO: 232397 - RNA, 22 nt, Human
gggccaggucggugaaugguca

SEQ ID NO: 232398 - RNA, 22 nt, Human
gagacacaauuuccccauccua

SEQ ID NO: 232399 - RNA, 22 nt, Human
uuccaggaagcaguuagcagcc

SEQ ID NO: 232400 - RNA, 22 nt, Human
aaaguuugaaugauauauuagu

SEQ ID NO: 232401 - RNA, 22 nt, Human
aaaugccucccauucuacugac

SEQ ID NO: 232402 - RNA, 22 nt, Human
caggacagaaauaaggaauaua

SEQ ID NO: 232403 - RNA, 22 nt, Human
ggcugagccaugggcacugcag

SEQ ID NO: 232404 - RNA, 22 nt, Human
gcaccuggcugcccagguggag

SEQ ID NO: 232405 - RNA, 22 nt, Human
gccugggacuggauguguuugu

SEQ ID NO: 232406 - RNA, 22 nt, Human
aguuuacacuuuugauucuuau

SEQ ID NO: 232407 - RNA, 22 nt, Human
cagggcaguaacgggaacaucu

SEQ ID NO: 232408 - RNA, 21 nt, Human
uacaagauagagguaauauau

SEQ ID NO: 232409 - RNA, 22 nt, Human
gacagaggagaagaugcugugg

SEQ ID NO: 232410 - RNA, 22 nt, Human
caggcuccacuguaggcagcuc

SEQ ID NO: 232411 - RNA, 22 nt, Human
aauuuucuaaggugaugaucug

SEQ ID NO: 232412 - RNA, 22 nt, Human
guuuauaugaacuucauaccca

SEQ ID NO: 232413 - RNA, 22 nt, Human
ugcauuuuugagguuaacucaa

SEQ ID NO: 232414 - RNA, 20 nt, Human
aaacaagguugcucugagga

SEQ ID NO: 232415 - RNA, 23 nt, Human
cugaggucugcaauucuaguagu

SEQ ID NO: 232416 - RNA, 22 nt, Human
aaggaacugaugcucaaagaau

SEQ ID NO: 232417 - RNA, 22 nt, Human
ugccugccucuggagcccaucc

SEQ ID NO: 232418 - RNA, 22 nt, Human
ccugacaggagaagcgcagcau

SEQ ID NO: 232419 - RNA, 22 nt, Human
cuggaagacucaauggccugcc

SEQ ID NO: 232420 - RNA, 22 nt, Human
gggaaacuucugcuaaaaccag

SEQ ID NO: 232421 - RNA, 22 nt, Human
ccaugccagcugcuaggucaca

SEQ ID NO: 232422 - RNA, 22 nt, Human
ccuccugcggcguccgcgcucu

SEQ ID NO: 232423 - RNA, 22 nt, Human
aggcucuguaugaagguuuggg

SEQ ID NO: 232424 - RNA, 22 nt, Human
uuugcgucuaugugugagccuu

SEQ ID NO: 232425 - RNA, 22 nt, Human
aggcagcaugggcccagagucc

SEQ ID NO: 232426 - RNA, 22 nt, Human
ugccagccuggccugagucuuu

SEQ ID NO: 232427 - RNA, 22 nt, Human
cauucauuagaauagauaugua

SEQ ID NO: 232428 - RNA, 22 nt, Human
ugagaugguucacagagaaggc

SEQ ID NO: 232429 - RNA, 23 nt, Human
auguuacuuaaccucucugugcc

SEQ ID NO: 232430 - RNA, 22 nt, Human
guguaaaaacauacuauuucua

SEQ ID NO: 232431 - RNA, 22 nt, Human
uccaaauauucaucuacuucug

SEQ ID NO: 232432 - RNA, 22 nt, Human
aguguggggucaccggcccagg

SEQ ID NO: 232433 - RNA, 22 nt, Human
cugccuucaucucugagcuggg

SEQ ID NO: 232434 - RNA, 22 nt, Human
uuucuguaaggacuuaaugcaa

SEQ ID NO: 232435 - RNA, 22 nt, Human
ggcugcagaggcccccaguggg

SEQ ID NO: 232436 - RNA, 22 nt, Human
caggcuccaagcccucugaugu

SEQ ID NO: 232437 - RNA, 22 nt, Human
auugaguaguaggaaaauaacu

SEQ ID NO: 232438 - RNA, 19 nt, Human
caacaguacugguuugucc

SEQ ID NO: 232439 - RNA, 22 nt, Human
ucaagaacugugaagagucuga

SEQ ID NO: 232440 - RNA, 22 nt, Human
ccugcuggacguggaggagggg

SEQ ID NO: 232441 - RNA, 22 nt, Human
uuuauauuguaaaaaugguucu

SEQ ID NO: 232442 - RNA, 22 nt, Human
ugugacaugugucaucuuuucu

SEQ ID NO: 232443 - RNA, 22 nt, Human
cauguucuaauauugugacaua

SEQ ID NO: 232444 - RNA, 22 nt, Human
uguaugcuuuccaaaaaugcug

SEQ ID NO: 232445 - RNA, 22 nt, Human
agaagggccagcuggacaccug

SEQ ID NO: 232446 - RNA, 22 nt, Human
agcucuagggaagaaaggcaca

SEQ ID NO: 232447 - RNA, 22 nt, Human
auuuauuaugggauuuggcaca

SEQ ID NO: 232448 - RNA, 22 nt, Human
cuccccagcauucugacuuccu

SEQ ID NO: 232449 - RNA, 22 nt, Human
cuggcuggccggaggcaucccu

SEQ ID NO: 232450 - RNA, 22 nt, Human
gcuguguaccuacuaacugcuu

SEQ ID NO: 232451 - RNA, 22 nt, Human
uggcuggagcgcccuccucugc

SEQ ID NO: 232452 - RNA, 22 nt, Human
ucagagacaguucuggggcagg

SEQ ID NO: 232453 - RNA, 22 nt, Human
caaguaugagaaagcuauuacc

SEQ ID NO: 232454 - RNA, 22 nt, Human
ggucuuguuuauauaagguggu

SEQ ID NO: 232455 - RNA, 22 nt, Human
uacauguggagauaacugaagc

SEQ ID NO: 232456 - RNA, 22 nt, Human
acuguacugaaaaguaagcaag

SEQ ID NO: 232457 - RNA, 16 nt, Human
uccaggcauaucugag

SEQ ID NO: 232458 - RNA, 22 nt, Human
cccaguggcuuuugcccagguu

SEQ ID NO: 232459 - RNA, 18 nt, Human
uucuuuucaugugaucuc

SEQ ID NO: 232460 - RNA, 17 nt, Human
cucuuuauaaagaguua

SEQ ID NO: 232461 - RNA, 22 nt, Human
uuaacacuccuaacuacagucu

SEQ ID NO: 232462 - RNA, 22 nt, Human
ugggccugaguuugggaacugg

SEQ ID NO: 232463 - RNA, 22 nt, Human
ugaaucaugccacugagcuccc

SEQ ID NO: 232464 - RNA, 22 nt, Human
cacaggcaccccugacugcuca

SEQ ID NO: 232465 - RNA, 22 nt, Human
cuuaaucucaccugcaaagucc

SEQ ID NO: 232466 - RNA, 22 nt, Human
gcaguccauugacagaggucuu

SEQ ID NO: 232467 - RNA, 20 nt, Human
uuugcuguggguguaagaau

SEQ ID NO: 232468 - RNA, 22 nt, Human
uggugcagucauuggcccaggg

SEQ ID NO: 232469 - RNA, 22 nt, Human
uggcacaggagcacugcccugg

SEQ ID NO: 232470 - RNA, 22 nt, Human
cuuguggagauauccaugucug

SEQ ID NO: 232471 - RNA, 22 nt, Human
ucaggcagugguaaaugaguua

SEQ ID NO: 232472 - RNA, 22 nt, Human
cuugaucuacauagugaaaccc

SEQ ID NO: 232473 - RNA, 22 nt, Human
ugcagcugugaaagggaaccaa

SEQ ID NO: 232474 - RNA, 22 nt, Human
uggaaucucuuuggggacugaa

SEQ ID NO: 232475 - RNA, 22 nt, Human
uguaugcaaauuuauuagcaca

SEQ ID NO: 232476 - RNA, 22 nt, Human
ugcaaacaacuguuuaaugcug

SEQ ID NO: 232477 - RNA, 22 nt, Human
augguauuaagaacaauuccaa

SEQ ID NO: 232478 - RNA, 22 nt, Human
uucaaugucuauguacauuuua

SEQ ID NO: 232479 - RNA, 22 nt, Human
aagaguaaagcaaagcacuugu

SEQ ID NO: 232480 - RNA, 22 nt, Human
cuucuuuaauguauacaaaaga

SEQ ID NO: 232481 - RNA, 22 nt, Human
ucuuuggaaaugcuuugagaau

SEQ ID NO: 232482 - RNA, 22 nt, Human
uccuguguugauagagaugguu

SEQ ID NO: 232483 - RNA, 22 nt, Human
uuuaauuguuguggguacauag

SEQ ID NO: 232484 - RNA, 22 nt, Human
uuucagaaaucaaaaccagggu

SEQ ID NO: 232485 - RNA, 22 nt, Human
aacuuucugucugagcugcaga

SEQ ID NO: 232486 - RNA, 21 nt, Human
uuggaaucuuaggaguguggg

SEQ ID NO: 232487 - RNA, 22 nt, Human
gcuggggugugguggauaagcu

SEQ ID NO: 232488 - RNA, 22 nt, Human
ucaggaagcucuugcugauucu

SEQ ID NO: 232489 - RNA, 22 nt, Human
uggcagggccugcucaucaucc

SEQ ID NO: 232490 - RNA, 22 nt, Human
gggaucuggaauuuugguaugu

SEQ ID NO: 232491 - RNA, 22 nt, Human
gaaccuuuuuccaaguaaacaa

SEQ ID NO: 232492 - RNA, 22 nt, Human
uuaucugucuaucaagacuagc

SEQ ID NO: 232493 - RNA, 22 nt, Human
gacaugauggaaaaaaaugcuc

SEQ ID NO: 232494 - RNA, 21 nt, Human
uccuccuucaaguccuggccu

SEQ ID NO: 232495 - RNA, 22 nt, Human
uguuuaaucuauaaaauggaga

SEQ ID NO: 232496 - RNA, 19 nt, Human
auagaaaggguuaaagaca

SEQ ID NO: 232497 - RNA, 22 nt, Human
gcuggaguuggcaaggcaugua

SEQ ID NO: 232498 - RNA, 22 nt, Human
uggacacaucacugcagccacu

SEQ ID NO: 232499 - RNA, 22 nt, Human
ucuccaguaucuuuccaaugaa

SEQ ID NO: 232500 - RNA, 22 nt, Human
auucaagguuuauucaguuuag

SEQ ID NO: 232501 - RNA, 22 nt, Human
agagccuugccuggggcccugu

SEQ ID NO: 232502 - RNA, 22 nt, Human
acaguuugaauaauuuagauag

SEQ ID NO: 232503 - RNA, 22 nt, Human
cuagaaauguagauucuuagug

SEQ ID NO: 232504 - RNA, 20 nt, Human
uucgcugggaguggccaggc

SEQ ID NO: 232505 - RNA, 22 nt, Human
cgguccagggaacgcccccgcc

SEQ ID NO: 232506 - RNA, 22 nt, Human
ggcugccuucccugagccccgg

SEQ ID NO: 232507 - RNA, 22 nt, Human
uauagcaagcucuuuguaacca

SEQ ID NO: 232508 - RNA, 16 nt, Human
gaugagucuuaguggu

SEQ ID NO: 232509 - RNA, 22 nt, Human
ggagacacgggugcugaggacc

SEQ ID NO: 232510 - RNA, 22 nt, Human
augaggcaggaaaggcguaucu

SEQ ID NO: 232511 - RNA, 22 nt, Human
uguccaggcggccuugccuguu

SEQ ID NO: 232512 - RNA, 22 nt, Human
acuuguauggagacuuggaacc

SEQ ID NO: 232513 - RNA, 22 nt, Human
cugaaggagaaggccacuguuc

SEQ ID NO: 232514 - RNA, 22 nt, Human
ggaggccaaggcagguggauca

SEQ ID NO: 232515 - RNA, 22 nt, Human
agcuuuggcccuggagguuacu

SEQ ID NO: 232516 - RNA, 22 nt, Human
ucugcuguguugaaugauuggu

SEQ ID NO: 232517 - RNA, 22 nt, Human
gcugucccgaaccccugguaau

SEQ ID NO: 232518 - RNA, 22 nt, Human
uucuuuggcauuuccuguaugu

SEQ ID NO: 232519 - RNA, 22 nt, Human
ccugggucuggucacuaaguca

SEQ ID NO: 232520 - RNA, 22 nt, Human
gacuguggggggcggacacaag

SEQ ID NO: 232521 - RNA, 22 nt, Human
uguacauuuagagcucaauaga

SEQ ID NO: 232522 - RNA, 22 nt, Human
aauuuacaguugcugaugguac

SEQ ID NO: 232523 - RNA, 22 nt, Human
ggcugcaaaggaaaagugguga

SEQ ID NO: 232524 - RNA, 23 nt, Human
gccucagagaaacagcugcacac

SEQ ID NO: 232525 - RNA, 22 nt, Human
ugguaagauaagagccaggccu

SEQ ID NO: 232526 - RNA, 22 nt, Human
aggaauguggaagguggcggcg

SEQ ID NO: 232527 - RNA, 22 nt, Human
caauucaucuggguagguagcc

SEQ ID NO: 232528 - RNA, 22 nt, Human
cagagcuucugacagcugcugc

SEQ ID NO: 232529 - RNA, 22 nt, Human
ggaggacacuggcucugccuuc

SEQ ID NO: 232530 - RNA, 22 nt, Human
uuaauaggcuucuaacauagcu

SEQ ID NO: 232531 - RNA, 22 nt, Human
ccaacaguccagaugagauggu

SEQ ID NO: 232532 - RNA, 22 nt, Human
cucuuuuagagaugaaaauugg

SEQ ID NO: 232533 - RNA, 22 nt, Human
ugaagucucuguuuucucauuu

SEQ ID NO: 232534 - RNA, 22 nt, Human
uucucaguuucacugauaacag

SEQ ID NO: 232535 - RNA, 22 nt, Human
aagcaucuuagaccugaguucc

SEQ ID NO: 232536 - RNA, 22 nt, Human
cacauuucucuaccucacacaa

SEQ ID NO: 232537 - RNA, 21 nt, Human
cagagguggccugaccucuga

SEQ ID NO: 232538 - RNA, 22 nt, Human
guccuggggauuauagaguguu

SEQ ID NO: 232539 - RNA, 22 nt, Human
augcaugaaagaauccaagccu

SEQ ID NO: 232540 - RNA, 22 nt, Human
uguucaaaugaucuucuuaaau

SEQ ID NO: 232541 - RNA, 23 nt, Human
caggcaggaugaggacuacacuc

SEQ ID NO: 232542 - RNA, 22 nt, Human
aaagagcugggacuuaaagugc

SEQ ID NO: 232543 - RNA, 22 nt, Human
ccagcuuuucuuaucauuauaa

SEQ ID NO: 232544 - RNA, 22 nt, Human
ucaggacagacuagacuagcgu

SEQ ID NO: 232545 - RNA, 22 nt, Human
agcccuugaguguaucucaaau

SEQ ID NO: 232546 - RNA, 22 nt, Human
aggcuucuuagauuggcuggag

SEQ ID NO: 232547 - RNA, 22 nt, Human
cuucacagcaugagcuuuggag

SEQ ID NO: 232548 - RNA, 22 nt, Human
uaucuaagagagucaauauuua

SEQ ID NO: 232549 - RNA, 22 nt, Human
ggacucucaggcugucggcuuc

SEQ ID NO: 232550 - RNA, 22 nt, Human
uacagaggcacaugcaauuuuc

SEQ ID NO: 232551 - RNA, 22 nt, Human
ggacagaggguugacagaguau

SEQ ID NO: 232552 - RNA, 22 nt, Human
gcacagcucuccccaagacgaa

SEQ ID NO: 232553 - RNA, 22 nt, Human
ucugagguuacugcuuuguaga

SEQ ID NO: 232554 - RNA, 22 nt, Human
agaaguauaaagaauguuuaug

SEQ ID NO: 232555 - RNA, 22 nt, Human
aggcuucucuccuuggcuugca

SEQ ID NO: 232556 - RNA, 22 nt, Human
aggccucucuccuuggcuugua

SEQ ID NO: 232557 - RNA, 17 nt, Human
gaauccuucucuguucu

SEQ ID NO: 232558 - RNA, 22 nt, Human
aaagcugcuaugaacauucuau

SEQ ID NO: 232559 - RNA, 22 nt, Human
aucuccagugaggcagauucug

SEQ ID NO: 232560 - RNA, 22 nt, Human
ccagccagcugguuggacgccu

SEQ ID NO: 232561 - RNA, 22 nt, Human
uguuaaaaauucagcucuagau

SEQ ID NO: 232562 - RNA, 22 nt, Human
uaugacaagguggaguaugagu

SEQ ID NO: 232563 - RNA, 22 nt, Human
gcauucuugguaugaaggacag

SEQ ID NO: 232564 - RNA, 22 nt, Human
uuucugcaaguguagauaccca

SEQ ID NO: 232565 - RNA, 22 nt, Human
auacauacauguaugcacauac

SEQ ID NO: 232566 - RNA, 22 nt, Human
ucuggagcuggagggcaaggca

SEQ ID NO: 232567 - RNA, 22 nt, Human
auacaugaucacuguauuauaa

SEQ ID NO: 232568 - RNA, 22 nt, Human
cucugugggaggaggaguaggc

SEQ ID NO: 232569 - RNA, 22 nt, Human
gguaacugcagaaugugccuca

SEQ ID NO: 232570 - RNA, 22 nt, Human
agcugguccuaauugagccauu

SEQ ID NO: 232571 - RNA, 22 nt, Human
acacuuuaugucuagaucuggg

SEQ ID NO: 232572 - RNA, 22 nt, Human
ccugccuucccagcuuggcuuu

SEQ ID NO: 232573 - RNA, 20 nt, Human
guccagugggccuucauuuc

SEQ ID NO: 232574 - RNA, 22 nt, Human
acucagcauauggggccgcuug

SEQ ID NO: 232575 - RNA, 22 nt, Human
aucuaaacagguguucuuuaga

SEQ ID NO: 232576 - RNA, 22 nt, Human
ugagcuuccucccugcauccau

SEQ ID NO: 232577 - RNA, 22 nt, Human
cuauuuuucuguacccuaauuu

SEQ ID NO: 232578 - RNA, 22 nt, Human
uccuuucuuuucuaugggccca

SEQ ID NO: 232579 - RNA, 22 nt, Human
uuucuuucaauucuccuaaugc

SEQ ID NO: 232580 - RNA, 22 nt, Human
agcaguuauguucuauaaaguc

SEQ ID NO: 232581 - RNA, 22 nt, Human
auguacauuuuccuaauguuuu

SEQ ID NO: 232582 - RNA, 22 nt, Human
uguuuacuccagcugauggaac

SEQ ID NO: 232583 - RNA, 22 nt, Human
uguccuggggcgacuuggggcc

SEQ ID NO: 232584 - RNA, 22 nt, Human
ggcuggcagugugagagaggga

SEQ ID NO: 232585 - RNA, 22 nt, Human
caaauagacucuagaauuuauu

SEQ ID NO: 232586 - RNA, 23 nt, Human
ccacagagcugccaauuccugug

SEQ ID NO: 232587 - RNA, 22 nt, Human
cuuauguacacacauauauugu

SEQ ID NO: 232588 - RNA, 22 nt, Human
uaccaaaaccaagccauuaucu

SEQ ID NO: 232589 - RNA, 20 nt, Human
uaagaacaagacuaggaagc

SEQ ID NO: 232590 - RNA, 22 nt, Human
ucuggcugaaauuagaagguuc

SEQ ID NO: 232591 - RNA, 22 nt, Human
cagcugccugucuggaggcaau

SEQ ID NO: 232592 - RNA, 22 nt, Human
ugugcaacuccuuccacagaca

SEQ ID NO: 232593 - RNA, 22 nt, Human
uggucugaggaacaccagcacu

SEQ ID NO: 232594 - RNA, 22 nt, Human
gaggagggagaauuaggcuuaa

SEQ ID NO: 232595 - RNA, 22 nt, Human
ccuuuaugagauccugggguga

SEQ ID NO: 232596 - RNA, 22 nt, Human
gaaccuguuuauguuaccugcg

SEQ ID NO: 232597 - RNA, 22 nt, Human
ccagggaagauuagaagccacu

SEQ ID NO: 232598 - RNA, 22 nt, Human
acagaauuaacauuugaugaau

SEQ ID NO: 232599 - RNA, 22 nt, Human
aauacuuuugaacugaaaggca

SEQ ID NO: 232600 - RNA, 22 nt, Human
guuccacaaaaggucuaguuua

SEQ ID NO: 232601 - RNA, 22 nt, Human
agucuuugguuauaagagacag

SEQ ID NO: 232602 - RNA, 22 nt, Human
aagcaucuucuaucaguuagac

SEQ ID NO: 232603 - RNA, 22 nt, Human
acuucaugcagaagagagcugu

SEQ ID NO: 232604 - RNA, 22 nt, Human
ccacuuucugagggaacagcag

SEQ ID NO: 232605 - RNA, 22 nt, Human
uaaggcuagugccugacugggu

SEQ ID NO: 232606 - RNA, 22 nt, Human
ccaaggcaggggaucaaaguuu

SEQ ID NO: 232607 - RNA, 17 nt, Human
gcaguuaaauuaagaug

SEQ ID NO: 232608 - RNA, 22 nt, Human
cuucaguucuaaaguagaaugu

SEQ ID NO: 232609 - RNA, 22 nt, Human
cauaaguuggguaauauaauga

SEQ ID NO: 232610 - RNA, 22 nt, Human
gacuuuggcuuuuauucuaggu

SEQ ID NO: 232611 - RNA, 22 nt, Human
ucaggaagauuaguuuccuacc

SEQ ID NO: 232612 - RNA, 22 nt, Human
agaaaugcucaggucaacuuaa

SEQ ID NO: 232613 - RNA, 22 nt, Human
cccaggaggacauuccauaccc

SEQ ID NO: 232614 - RNA, 22 nt, Human
auucauaaguaaaugauuaccu

SEQ ID NO: 232615 - RNA, 22 nt, Human
aguucuguugucuagggaagcc

SEQ ID NO: 232616 - RNA, 22 nt, Human
gcacacuuaauacucacugugc

SEQ ID NO: 232617 - RNA, 22 nt, Human
uccaugagaacccuuggagaua

SEQ ID NO: 232618 - RNA, 22 nt, Human
ucagaggaagccuuggugggag

SEQ ID NO: 232619 - RNA, 22 nt, Human
ucugcuggucaaggcugggucc

SEQ ID NO: 232620 - RNA, 22 nt, Human
caggcuuuugcauagcacuggg

SEQ ID NO: 232621 - RNA, 22 nt, Human
agccuguggaucccugcacugg

SEQ ID NO: 232622 - RNA, 22 nt, Human
ucuagggaggcaauagcaaugu

SEQ ID NO: 232623 - RNA, 20 nt, Human
uaaauuagccuugaagauua

SEQ ID NO: 232624 - RNA, 22 nt, Human
auagugguuggauaugucagag

SEQ ID NO: 232625 - RNA, 22 nt, Human
cugaggcucugggugucacugu

SEQ ID NO: 232626 - RNA, 22 nt, Human
accuguuucucucugaguuacu

SEQ ID NO: 232627 - RNA, 22 nt, Human
aaaauauuuuagggccaggaga

SEQ ID NO: 232628 - RNA, 22 nt, Human
cccugccaaucccgucucucug

SEQ ID NO: 232629 - RNA, 23 nt, Human
ugccaggguuuguuugugguuca

SEQ ID NO: 232630 - RNA, 22 nt, Human
ucagcaguggcucucaugcagu

SEQ ID NO: 232631 - RNA, 22 nt, Human
ccagcucccauucuucaccugu

SEQ ID NO: 232632 - RNA, 22 nt, Human
aauucugaugaauaaaucaucc

SEQ ID NO: 232633 - RNA, 22 nt, Human
gagucuggugauggucauuguc

SEQ ID NO: 232634 - RNA, 22 nt, Human
ugaggccaggacccccagcagg

SEQ ID NO: 232635 - RNA, 22 nt, Human
uuuaacccaaauaaccacagga

SEQ ID NO: 232636 - RNA, 23 nt, Human
aguggcugagaguguuucauaug

SEQ ID NO: 232637 - RNA, 22 nt, Human
aaaugcugucaguguuauugga

SEQ ID NO: 232638 - RNA, 22 nt, Human
gccuacaugcuuuuaguguuuc

SEQ ID NO: 232639 - RNA, 22 nt, Human
gggcugcuuggaggaggcgcuc

SEQ ID NO: 232640 - RNA, 20 nt, Human
cccugagacgacugagcucc

SEQ ID NO: 232641 - RNA, 22 nt, Human
uggcagcugaggggaggcuuug

SEQ ID NO: 232642 - RNA, 22 nt, Human
cucucugaguggcuguacuuuc

SEQ ID NO: 232643 - RNA, 22 nt, Human
aaagccagguugugugcaggaa

SEQ ID NO: 232644 - RNA, 21 nt, Human
guagggacagagaguugguga

SEQ ID NO: 232645 - RNA, 22 nt, Human
aaaccugucugauuauggagac

SEQ ID NO: 232646 - RNA, 22 nt, Human
aagcacagggacucaggaccgg

SEQ ID NO: 232647 - RNA, 22 nt, Human
agugagguaauuagagcugcug

SEQ ID NO: 232648 - RNA, 22 nt, Human
ucaggagagaaagaauacaauu

SEQ ID NO: 232649 - RNA, 22 nt, Human
ccuguggcugccccgcuguugg

SEQ ID NO: 232650 - RNA, 22 nt, Human
uggcuccuucauucuccugcca

SEQ ID NO: 232651 - RNA, 22 nt, Human
ucaaaauucuagggagaauggu

SEQ ID NO: 232652 - RNA, 21 nt, Human
uagaacugacgauuucagagu

SEQ ID NO: 232653 - RNA, 22 nt, Human
cucuuuggcccccgaugauuca

SEQ ID NO: 232654 - RNA, 18 nt, Human
gggugcuggggccccuug

SEQ ID NO: 232655 - RNA, 22 nt, Human
ggacaucucuugccagggcugc

SEQ ID NO: 232656 - RNA, 22 nt, Human
ccacucaggccuccugcucucc

SEQ ID NO: 232657 - RNA, 22 nt, Human
caucccugcccucaugccuaua

SEQ ID NO: 232658 - RNA, 18 nt, Human
ugguccaguucagauaua

SEQ ID NO: 232659 - RNA, 22 nt, Human
ugaggccucauaaugagauuuc

SEQ ID NO: 232660 - RNA, 22 nt, Human
ucauuucuguugugcaucacug

SEQ ID NO: 232661 - RNA, 22 nt, Human
ucagaauggcccauaaauaguc

SEQ ID NO: 232662 - RNA, 22 nt, Human
aagaaucuccauuccuguuuua

SEQ ID NO: 232663 - RNA, 22 nt, Human
ugccaaauuagaguucccaggc

SEQ ID NO: 232664 - RNA, 23 nt, Human
acugccugugccgaucucucuca

SEQ ID NO: 232665 - RNA, 22 nt, Human
cagagaugugauccagcugucu

SEQ ID NO: 232666 - RNA, 20 nt, Human
gagcugugcucucaggagcc

SEQ ID NO: 232667 - RNA, 22 nt, Human
uccuggccaaguuacucucugc

SEQ ID NO: 232668 - RNA, 22 nt, Human
uggcaagggauuguggagaacu

SEQ ID NO: 232669 - RNA, 22 nt, Human
gacuguggcaggcucagcacug

SEQ ID NO: 232670 - RNA, 20 nt, Human
ugcacagcugugaauaggau

SEQ ID NO: 232671 - RNA, 22 nt, Human
caaaaguaauggcgguuuuuac

SEQ ID NO: 232672 - RNA, 19 nt, Human
ggacagacgcagagaucug

SEQ ID NO: 232673 - RNA, 22 nt, Human
cugcuaaaccucucugagagcu

SEQ ID NO: 232674 - RNA, 22 nt, Human
ggguuggauuacuuagggagaa

SEQ ID NO: 232675 - RNA, 20 nt, Human
caaagcaguaggauaaaaau

SEQ ID NO: 232676 - RNA, 22 nt, Human
uaauguaaacacagagacagaa

SEQ ID NO: 232677 - RNA, 22 nt, Human
gcccauggucagggaggcaggg

SEQ ID NO: 232678 - RNA, 22 nt, Human
agagggguuaagugcuaguccg

SEQ ID NO: 232679 - RNA, 22 nt, Human
cugcccugccuggccagugugg

SEQ ID NO: 232680 - RNA, 22 nt, Human
cauuugaauuguucugugggaa

SEQ ID NO: 232681 - RNA, 22 nt, Human
gagcuuuaccuuagguucuguu

SEQ ID NO: 232682 - RNA, 22 nt, Human
ugaggcaaaguucaagcugaaa

SEQ ID NO: 232683 - RNA, 22 nt, Human
gugcagcucaguugaaaugcag

SEQ ID NO: 232684 - RNA, 22 nt, Human
uugcagggcaucuaugucuggu

SEQ ID NO: 232685 - RNA, 22 nt, Human
gauccacagggcccuggcccag

SEQ ID NO: 232686 - RNA, 22 nt, Human
ggguagggugacuuaggcuggc

SEQ ID NO: 232687 - RNA, 22 nt, Human
uggcuaauggcauuuccugggu

SEQ ID NO: 232688 - RNA, 22 nt, Human
auacacacaaucagguuuugua

SEQ ID NO: 232689 - RNA, 22 nt, Human
acugggaggcaucuggagcuga

SEQ ID NO: 232690 - RNA, 22 nt, Human
gcuggcugccuuacuuugugga

SEQ ID NO: 232691 - RNA, 22 nt, Human
aaagccagaauucguccagccu

SEQ ID NO: 232692 - RNA, 21 nt, Human
uggagcugaauuuuuggcauc

SEQ ID NO: 232693 - RNA, 22 nt, Human
uauuugaugguucuaaaacagc

SEQ ID NO: 232694 - RNA, 22 nt, Human
acugcagagcuuuucaguugag

SEQ ID NO: 232695 - RNA, 22 nt, Human
ccuggcucgcugaccucagggg

SEQ ID NO: 232696 - RNA, 18 nt, Human
auguucauauuuuuaggg

SEQ ID NO: 232697 - RNA, 22 nt, Human
aaauuauaggugccaccuugga

SEQ ID NO: 232698 - RNA, 22 nt, Human
guaucuggugaggguuccccug

SEQ ID NO: 232699 - RNA, 22 nt, Human
ucucugggauaaacugggccag

SEQ ID NO: 232700 - RNA, 22 nt, Human
acuuccaggguagaggggaaga

SEQ ID NO: 232701 - RNA, 22 nt, Human
aagaugacuauuuaucuguaag

SEQ ID NO: 232702 - RNA, 22 nt, Human
gauggauacuauaggaggcaca

SEQ ID NO: 232703 - RNA, 22 nt, Human
gacucuuucaaacagaaagcca

SEQ ID NO: 232704 - RNA, 22 nt, Human
gagaaaugcuagcuuaggaauc

SEQ ID NO: 232705 - RNA, 22 nt, Human
aauaaugagcuugucuaauugu

SEQ ID NO: 232706 - RNA, 22 nt, Human
acaaggacauaggaaacuacaa

SEQ ID NO: 232707 - RNA, 22 nt, Human
caggcuugauuauucagacaau

SEQ ID NO: 232708 - RNA, 22 nt, Human
gucuagaaauagguuucagaaa

SEQ ID NO: 232709 - RNA, 22 nt, Human
ugaccugucacauuuugaugaa

SEQ ID NO: 232710 - RNA, 22 nt, Human
acagccagggucucaggaggcg

SEQ ID NO: 232711 - RNA, 22 nt, Human
cacuuuauauucuaagacggcc

SEQ ID NO: 232712 - RNA, 22 nt, Human
ugaaacuucuaauaugaauagu

SEQ ID NO: 232713 - RNA, 22 nt, Human
cagucccagacauaguaaggga

SEQ ID NO: 232714 - RNA, 22 nt, Human
aaccagaucgacuguuaacagc

SEQ ID NO: 232715 - RNA, 19 nt, Human
ccagaguuggcagagcagg

SEQ ID NO: 232716 - RNA, 22 nt, Human
guuuauucuucagcaacaucug

SEQ ID NO: 232717 - RNA, 22 nt, Human
uggagccagaagagccaguuca

SEQ ID NO: 232718 - RNA, 22 nt, Human
gggccacuggguccugcuggcc

SEQ ID NO: 232719 - RNA, 22 nt, Human
aucuagaaagccaggggccugc

SEQ ID NO: 232720 - RNA, 22 nt, Human
gagccuggauugucaccgacuu

SEQ ID NO: 232721 - RNA, 22 nt, Human
cacaugaguccugccagguaug

SEQ ID NO: 232722 - RNA, 22 nt, Human
aucugucuggaggccuggcaug

SEQ ID NO: 232723 - RNA, 22 nt, Human
ucccugggcuucuccagacuug

SEQ ID NO: 232724 - RNA, 22 nt, Human
aacagucuuccuacggccauua

SEQ ID NO: 232725 - RNA, 22 nt, Human
ggcuggcugauaaaggguugag

SEQ ID NO: 232726 - RNA, 20 nt, Human
ccuggcugcauucaggacgg

SEQ ID NO: 232727 - RNA, 19 nt, Human
gcagggcucucccagaugc

SEQ ID NO: 232728 - RNA, 22 nt, Human
cagcugcugauggccugacaga

SEQ ID NO: 232729 - RNA, 22 nt, Human
uuacaaucaucuaggauaaaga

SEQ ID NO: 232730 - RNA, 22 nt, Human
aucaaauauaauaauuuucgcu

SEQ ID NO: 232731 - RNA, 22 nt, Human
ggcuguggacacugagcucaga

SEQ ID NO: 232732 - RNA, 22 nt, Human
uuagaguuuuaucauugccuua

SEQ ID NO: 232733 - RNA, 22 nt, Human
gccugcaggcuguaguuuguga

SEQ ID NO: 232734 - RNA, 22 nt, Human
uugucucugccaugcuugaggg

SEQ ID NO: 232735 - RNA, 22 nt, Human
ugggccagcacugggugcucau

SEQ ID NO: 232736 - RNA, 22 nt, Human
auggacagagcugagcuccacc

SEQ ID NO: 232737 - RNA, 22 nt, Human
caguuagcugacaaguaggcua

SEQ ID NO: 232738 - RNA, 22 nt, Human
auucuucaguauguguggauug

SEQ ID NO: 232739 - RNA, 22 nt, Human
cuucauuaaugucuauaaguuu

SEQ ID NO: 232740 - RNA, 22 nt, Human
gugagcagccucaccugagggu

SEQ ID NO: 232741 - RNA, 22 nt, Human
uccucagucguuugagccaaaa

SEQ ID NO: 232742 - RNA, 22 nt, Human
aggccaaauguguauaaaacau

SEQ ID NO: 232743 - RNA, 22 nt, Human
ucuggcuuucauuuguuuaaag

SEQ ID NO: 232744 - RNA, 22 nt, Human
acgugcaggaucugguuggcga

SEQ ID NO: 232745 - RNA, 22 nt, Human
gaggcacauauauacagagccc

SEQ ID NO: 232746 - RNA, 22 nt, Human
cacacauuucagaugcuacaau

SEQ ID NO: 232747 - RNA, 22 nt, Human
cacauacaugcacaccuaaaua

SEQ ID NO: 232748 - RNA, 22 nt, Human
ucugcagaauucgaggaagaaa

SEQ ID NO: 232749 - RNA, 22 nt, Human
aggaagcacuggaagggguugg

SEQ ID NO: 232750 - RNA, 22 nt, Human
cugagggucaacuugauuguau

SEQ ID NO: 232751 - RNA, 22 nt, Human
aagcccuguucuuucucucacc

SEQ ID NO: 232752 - RNA, 22 nt, Human
aauauaaugcuguuuuaugcca

SEQ ID NO: 232753 - RNA, 22 nt, Human
ugcauacacaagcauacaugua

SEQ ID NO: 232754 - RNA, 22 nt, Human
ggaaggcuccacccaaggcgag

SEQ ID NO: 232755 - RNA, 22 nt, Human
ccuggcccagggacuuucgccu

SEQ ID NO: 232756 - RNA, 22 nt, Human
uaacaugaaacuccaaauggua

SEQ ID NO: 232757 - RNA, 22 nt, Human
uucuaacuaauuggaaauggaa

SEQ ID NO: 232758 - RNA, 17 nt, Human
cauguguaugugggagu

SEQ ID NO: 232759 - RNA, 22 nt, Human
ugcagguggacacgggagacgg

SEQ ID NO: 232760 - RNA, 22 nt, Human
aauaacuggcacauaucacaua

SEQ ID NO: 232761 - RNA, 22 nt, Human
uggcacagacauuuaauagccu

SEQ ID NO: 232762 - RNA, 22 nt, Human
uuccagaagauggcagcaaagg

SEQ ID NO: 232763 - RNA, 22 nt, Human
cucaagaucaucaauauaccaa

SEQ ID NO: 232764 - RNA, 21 nt, Human
uagcccucucugucuguguac

SEQ ID NO: 232765 - RNA, 22 nt, Human
ggcucagcaaugaugagccccu

SEQ ID NO: 232766 - RNA, 22 nt, Human
ccuggcaguggugaagaagagg

SEQ ID NO: 232767 - RNA, 22 nt, Human
cauuucuagggaucauaaagua

SEQ ID NO: 232768 - RNA, 22 nt, Human
auacauguuguaccauauguuu

SEQ ID NO: 232769 - RNA, 22 nt, Human
gacuuuauuuccuuauuuguga

SEQ ID NO: 232770 - RNA, 22 nt, Human
ggauuuacacaccugccuguca

SEQ ID NO: 232771 - RNA, 22 nt, Human
cuggccagacuacacaugugug

SEQ ID NO: 232772 - RNA, 22 nt, Human
ggaucuucagccagcaggugcc

SEQ ID NO: 232773 - RNA, 21 nt, Human
auaauguacaaaaacugucuu

SEQ ID NO: 232774 - RNA, 20 nt, Human
uucuacaaaacugauucuga

SEQ ID NO: 232775 - RNA, 22 nt, Human
agugcccuucaugaagcaagag

SEQ ID NO: 232776 - RNA, 22 nt, Human
cagcucccuauggugaggcgac

SEQ ID NO: 232777 - RNA, 22 nt, Human
ggcuucucucccccagcuccac

SEQ ID NO: 232778 - RNA, 22 nt, Human
uaugcuauucuucagaguguuc

SEQ ID NO: 232779 - RNA, 17 nt, Human
ucagcaggggccaagcu

SEQ ID NO: 232780 - RNA, 22 nt, Human
cagcugucuaaguugagcagga

SEQ ID NO: 232781 - RNA, 22 nt, Human
ucugggcuuggguagaaaucac

SEQ ID NO: 232782 - RNA, 22 nt, Human
ugcagggaaugcuugcagcaug

SEQ ID NO: 232783 - RNA, 19 nt, Human
ggcauccagaacuaccagu

SEQ ID NO: 232784 - RNA, 22 nt, Human
agugcauguaucuacagucaca

SEQ ID NO: 232785 - RNA, 22 nt, Human
cugccuggcuaaacucaagucg

SEQ ID NO: 232786 - RNA, 22 nt, Human
aggcaacaugacucacuugcac

SEQ ID NO: 232787 - RNA, 22 nt, Human
uaacacugugucugccauaucc

SEQ ID NO: 232788 - RNA, 17 nt, Human
ccacagccuggcacuug

SEQ ID NO: 232789 - RNA, 22 nt, Human
gugcccucacaaaguggaaaga

SEQ ID NO: 232790 - RNA, 22 nt, Human
agugcugaagacuggcuaggga

SEQ ID NO: 232791 - RNA, 22 nt, Human
guucuauuacucccugcuucuu

SEQ ID NO: 232792 - RNA, 22 nt, Human
ggcuguggccagcggggcugag

SEQ ID NO: 232793 - RNA, 22 nt, Human
cacauuuaaagguugaagcuga

SEQ ID NO: 232794 - RNA, 22 nt, Human
caguuaaacgggccaugugagu

SEQ ID NO: 232795 - RNA, 22 nt, Human
uuaaguaacuuguccaaaugag

SEQ ID NO: 232796 - RNA, 22 nt, Human
uuagaaaggagcuuauuucuuu

SEQ ID NO: 232797 - RNA, 22 nt, Human
ccucugugugugcaugcaugcg

SEQ ID NO: 232798 - RNA, 22 nt, Human
gacaauuucucaauauagaaac

SEQ ID NO: 232799 - RNA, 19 nt, Human
uccuggcaucuuccucccu

SEQ ID NO: 232800 - RNA, 22 nt, Human
agcuccagggaaagaguggauc

SEQ ID NO: 232801 - RNA, 22 nt, Human
gccaggcagcuagcaaccccug

SEQ ID NO: 232802 - RNA, 22 nt, Human
accaggacuuuguauucagcuu

SEQ ID NO: 232803 - RNA, 22 nt, Human
ugcaauaaguuguguuaucacu

SEQ ID NO: 232804 - RNA, 22 nt, Human
caggcaagcaaggggucuugaa

SEQ ID NO: 232805 - RNA, 22 nt, Human
acugagauuuacauguucuagu

SEQ ID NO: 232806 - RNA, 22 nt, Human
aggcccugagaaaaucccugca

SEQ ID NO: 232807 - RNA, 22 nt, Human
auucuucauguugaagcuguca

SEQ ID NO: 232808 - RNA, 22 nt, Human
acacagcuagugaguggcagag

SEQ ID NO: 232809 - RNA, 22 nt, Human
acuuccaaaacacagcauggca

SEQ ID NO: 232810 - RNA, 22 nt, Human
cuuuccuagauggccaucuuuc

SEQ ID NO: 232811 - RNA, 21 nt, Human
caaaagagacugauucuugga

SEQ ID NO: 232812 - RNA, 22 nt, Human
auucagugucuacuccauugcc

SEQ ID NO: 232813 - RNA, 21 nt, Human
agaggccaagucaucauuucc

SEQ ID NO: 232814 - RNA, 22 nt, Human
ucccucagagggcaagcgcaga

SEQ ID NO: 232815 - RNA, 22 nt, Human
uacacuuucguuuguggauuag

SEQ ID NO: 232816 - RNA, 21 nt, Human
agaugcaguuaugagaugcag

SEQ ID NO: 232817 - RNA, 22 nt, Human
aaugcuuauggguuccauaaua

SEQ ID NO: 232818 - RNA, 22 nt, Human
aaaguguaaaagcauguuaggg

SEQ ID NO: 232819 - RNA, 22 nt, Human
ucaggccugcaggcuuccugga

SEQ ID NO: 232820 - RNA, 22 nt, Human
gagcuuuagcugagaccugcuu

SEQ ID NO: 232821 - RNA, 22 nt, Human
auauauaugcugauggcugcca

SEQ ID NO: 232822 - RNA, 22 nt, Human
uuccugaggcucaucggagucg

SEQ ID NO: 232823 - RNA, 22 nt, Human
gagugcuuugucuuguaauucu

SEQ ID NO: 232824 - RNA, 22 nt, Human
cacuuuuaaauggguccguguu

SEQ ID NO: 232825 - RNA, 22 nt, Human
uuggaauagauuuguuagaaaa

SEQ ID NO: 232826 - RNA, 22 nt, Human
gagccaagggcgugcuggagag

SEQ ID NO: 232827 - RNA, 21 nt, Human
uccaggcuggaaggggcguug

SEQ ID NO: 232828 - RNA, 20 nt, Human
caugcaacagauuauuuccc

SEQ ID NO: 232829 - RNA, 22 nt, Human
caguauguucuuccaggacaga

SEQ ID NO: 232830 - RNA, 22 nt, Human
ucuguuuauucaauuucuauau

SEQ ID NO: 232831 - RNA, 22 nt, Human
gaugugucuccauacaccaccc

SEQ ID NO: 232832 - RNA, 22 nt, Human
acagccagaggagccaggcugg

SEQ ID NO: 232833 - RNA, 21 nt, Human
ccugagccuguuuauccagaa

SEQ ID NO: 232834 - RNA, 22 nt, Human
guccugucccccaaggcugugg

SEQ ID NO: 232835 - RNA, 19 nt, Human
ugccugucaguagaucuca

SEQ ID NO: 232836 - RNA, 22 nt, Human
ucugaaagagaguacauacagu

SEQ ID NO: 232837 - RNA, 22 nt, Human
acauggugugcugagaaugaca

SEQ ID NO: 232838 - RNA, 22 nt, Human
gucugcccggccuuccuccacc

SEQ ID NO: 232839 - RNA, 22 nt, Human
cagcagcugcgugcccaggccg

SEQ ID NO: 232840 - RNA, 22 nt, Human
caacaguguugcaaucugaaaa

SEQ ID NO: 232841 - RNA, 22 nt, Human
guccugggaggggcugguccug

SEQ ID NO: 232842 - RNA, 22 nt, Human
acucagaguagaaaauagguuc

SEQ ID NO: 232843 - RNA, 21 nt, Human
guccucagcugaugggagcug

SEQ ID NO: 232844 - RNA, 22 nt, Human
agcccuggguuagggugggagc

SEQ ID NO: 232845 - RNA, 23 nt, Human
uggagcugggcagcugggaaagu

SEQ ID NO: 232846 - RNA, 22 nt, Human
acuuuucuaagcaauggucuug

SEQ ID NO: 232847 - RNA, 22 nt, Human
uacaaagucccauugccaugga

SEQ ID NO: 232848 - RNA, 22 nt, Human
cugcagagaauuguggggcuuc

SEQ ID NO: 232849 - RNA, 22 nt, Human
aaaaugucugcuguugguuuau

SEQ ID NO: 232850 - RNA, 22 nt, Human
auuccuucuuugagaauaagca

SEQ ID NO: 232851 - RNA, 22 nt, Human
ccuucucuaccaugugaggaaa

SEQ ID NO: 232852 - RNA, 22 nt, Human
cagggagcuggcuggcgugagu

SEQ ID NO: 232853 - RNA, 22 nt, Human
ggcucaggcuggagugcagugg

SEQ ID NO: 232854 - RNA, 22 nt, Human
aggcccagcccguccucgugcu

SEQ ID NO: 232855 - RNA, 22 nt, Human
guaacucuggguagaacucaug

SEQ ID NO: 232856 - RNA, 22 nt, Human
cacugagguaucugucucuccu

SEQ ID NO: 232857 - RNA, 22 nt, Human
ucaggcucugagcugaugcuaa

SEQ ID NO: 232858 - RNA, 20 nt, Human
aauaaaagaagccuucaccc

SEQ ID NO: 232859 - RNA, 22 nt, Human
acaugugaggugugagugauac

SEQ ID NO: 232860 - RNA, 22 nt, Human
cuggccagcugacagcagggcu

SEQ ID NO: 232861 - RNA, 19 nt, Human
agcacagacaagaccagca

SEQ ID NO: 232862 - RNA, 22 nt, Human
uaaggcuuuccuugucaucuuu

SEQ ID NO: 232863 - RNA, 22 nt, Human
gucauucagagaugcagguaga

SEQ ID NO: 232864 - RNA, 22 nt, Human
caucuuuuggccuauucugagg

SEQ ID NO: 232865 - RNA, 21 nt, Human
aucauucuggaaaauucaagc

SEQ ID NO: 232866 - RNA, 22 nt, Human
aauuucaaacuaauaggaacca

SEQ ID NO: 232867 - RNA, 22 nt, Human
gggauggggucaacauguaccu

SEQ ID NO: 232868 - RNA, 22 nt, Human
uagaacuguccaagucugagcu

SEQ ID NO: 232869 - RNA, 22 nt, Human
aagugcauaauaacucccaagu

SEQ ID NO: 232870 - RNA, 22 nt, Human
gugcaggcaaaagggccaggcc

SEQ ID NO: 232871 - RNA, 22 nt, Human
acaaauugaccgcaagauucau

SEQ ID NO: 232872 - RNA, 22 nt, Human
uggcacagcccagagcucuuga

SEQ ID NO: 232873 - RNA, 22 nt, Human
uggcuuccacugugugcccccu

SEQ ID NO: 232874 - RNA, 22 nt, Human
agauguaaacucucaugucauu

SEQ ID NO: 232875 - RNA, 23 nt, Human
aguguucagcauguaguaaauac

SEQ ID NO: 232876 - RNA, 22 nt, Human
cauuaaguauuucaguuacugu

SEQ ID NO: 232877 - RNA, 22 nt, Human
acauuucuccuugcaggaguca

SEQ ID NO: 232878 - RNA, 22 nt, Human
aaaacagacagccaguguagag

SEQ ID NO: 232879 - RNA, 22 nt, Human
aagucacagaguuggaagucag

SEQ ID NO: 232880 - RNA, 22 nt, Human
cugagcugguggaagcaugcag

SEQ ID NO: 232881 - RNA, 22 nt, Human
cuuuuuguuguauaagcccuuu

SEQ ID NO: 232882 - RNA, 22 nt, Human
aguggcaguggcugggcagagc

SEQ ID NO: 232883 - RNA, 22 nt, Human
uuguuuucacagcuuugcccgg

SEQ ID NO: 232884 - RNA, 22 nt, Human
uuccagugacuaagcuucugcu

SEQ ID NO: 232885 - RNA, 22 nt, Human
aagggggcccagcacuaaguug

SEQ ID NO: 232886 - RNA, 22 nt, Human
uagaaauggguuacauuuagag

SEQ ID NO: 232887 - RNA, 22 nt, Human
acaguuaauuaacauuaagggg

SEQ ID NO: 232888 - RNA, 22 nt, Human
ggcacaggaaucugugaagugc

SEQ ID NO: 232889 - RNA, 22 nt, Human
cuucucccaaguaugcaguuug

SEQ ID NO: 232890 - RNA, 22 nt, Human
ucaggcugauaggaggaacuga

SEQ ID NO: 232891 - RNA, 22 nt, Human
uguacaaauucauugaacugua

SEQ ID NO: 232892 - RNA, 22 nt, Human
augaguguacgugaaaguagau

SEQ ID NO: 232893 - RNA, 22 nt, Human
uagcuuuaauaagcugcugaau

SEQ ID NO: 232894 - RNA, 22 nt, Human
gcuguguaucagaugccacggg

SEQ ID NO: 232895 - RNA, 22 nt, Human
agucagucaccauuuaagaaca

SEQ ID NO: 232896 - RNA, 22 nt, Human
aacauacauauuucagugucca

SEQ ID NO: 232897 - RNA, 22 nt, Human
uccuuggcaugccgucuucucc

SEQ ID NO: 232898 - RNA, 18 nt, Human
gcuccuggaccaggucac

SEQ ID NO: 232899 - RNA, 21 nt, Human
uuucugaaggcaacaucuauc

SEQ ID NO: 232900 - RNA, 22 nt, Human
caaagcuauaaauucagacaga

SEQ ID NO: 232901 - RNA, 22 nt, Human
ugucaaguuguggcaugucuaa

SEQ ID NO: 232902 - RNA, 22 nt, Human
cuggcccaguucugcguuuugc

SEQ ID NO: 232903 - RNA, 22 nt, Human
aguacauauaguaauuuagcca

SEQ ID NO: 232904 - RNA, 22 nt, Human
acacagccccacggugagcaaa

SEQ ID NO: 232905 - RNA, 22 nt, Human
aaaauaacuucuacuauuugca

SEQ ID NO: 232906 - RNA, 22 nt, Human
guguuuauacagcaaagagcau

SEQ ID NO: 232907 - RNA, 22 nt, Human
uaguaaaucucagaaaaagauc

SEQ ID NO: 232908 - RNA, 22 nt, Human
cugagcccuggcucgccuggag

SEQ ID NO: 232909 - RNA, 22 nt, Human
uaaaggcucagggaaccagauc

SEQ ID NO: 232910 - RNA, 22 nt, Human
augaguugaagcuacaagaggc

SEQ ID NO: 232911 - RNA, 22 nt, Human
uguugaguauauaccuacaagu

SEQ ID NO: 232912 - RNA, 22 nt, Human
gaggccugguuugcaugagaau

SEQ ID NO: 232913 - RNA, 19 nt, Human
ugaggggcucacagucuca

SEQ ID NO: 232914 - RNA, 21 nt, Human
acuccaaacaaguuaagcugu

SEQ ID NO: 232915 - RNA, 22 nt, Human
gcuugaaaaugacucuugugaa

SEQ ID NO: 232916 - RNA, 22 nt, Human
uugcaaaugguaccaagggucu

SEQ ID NO: 232917 - RNA, 22 nt, Human
uggcuguguuaccacuucaugu

SEQ ID NO: 232918 - RNA, 22 nt, Human
uccuggcucgauugcuaccaau

SEQ ID NO: 232919 - RNA, 23 nt, Human
gaaucaguggcuaacaaggaaac

SEQ ID NO: 232920 - RNA, 22 nt, Human
uugaccacugaaugguucugaa

SEQ ID NO: 232921 - RNA, 22 nt, Human
cuguuuucaaagagagagaaug

SEQ ID NO: 232922 - RNA, 22 nt, Human
uagugaaaugagaauguaugac

SEQ ID NO: 232923 - RNA, 22 nt, Human
gggcacuggaaggcucucaggc

SEQ ID NO: 232924 - RNA, 22 nt, Human
gguuucucaccuucagcacuac

SEQ ID NO: 232925 - RNA, 19 nt, Human
caugugcaugagcacagga

SEQ ID NO: 232926 - RNA, 22 nt, Human
ggcaggcacugugcuaggcgcu

SEQ ID NO: 232927 - RNA, 22 nt, Human
cagagcccuuggcuggagccca

SEQ ID NO: 232928 - RNA, 22 nt, Human
gcaaacaucuuuauuuggcaag

SEQ ID NO: 232929 - RNA, 22 nt, Human
gaagauuucuuuaugaaagaug

SEQ ID NO: 232930 - RNA, 22 nt, Human
uccacaggcugaggcccuucug

SEQ ID NO: 232931 - RNA, 22 nt, Human
uuguccuggagguuaauagagu

SEQ ID NO: 232932 - RNA, 19 nt, Human
gccuggcugggaugagccc

SEQ ID NO: 232933 - RNA, 22 nt, Human
agggucugacuccucuggcaag

SEQ ID NO: 232934 - RNA, 22 nt, Human
ccuccuggguucaagcgauucu

SEQ ID NO: 232935 - RNA, 22 nt, Human
aauaagaugugcuugaguuugg

SEQ ID NO: 232936 - RNA, 22 nt, Human
auucagugccaaggagaacuug

SEQ ID NO: 232937 - RNA, 22 nt, Human
ucagggagccuggacuucaagg

SEQ ID NO: 232938 - RNA, 21 nt, Human
agaauccauucagaccuucuc

SEQ ID NO: 232939 - RNA, 18 nt, Human
ugaacuggcaucagaauc

SEQ ID NO: 232940 - RNA, 22 nt, Human
gggagguucuguucgcacuuga

SEQ ID NO: 232941 - RNA, 22 nt, Human
ucugggagcagcucagcagauu

SEQ ID NO: 232942 - RNA, 21 nt, Human
ucugccagcugaagaggugga

SEQ ID NO: 232943 - RNA, 22 nt, Human
acugccuucaugcagaccccug

SEQ ID NO: 232944 - RNA, 22 nt, Human
aggcuucuuuuagaggggaugg

SEQ ID NO: 232945 - RNA, 20 nt, Human
gcuccuguccugguggaggg

SEQ ID NO: 232946 - RNA, 22 nt, Human
cuguuguauuauucaauauuau

SEQ ID NO: 232947 - RNA, 22 nt, Human
gagcucagcaaaggucugugug

SEQ ID NO: 232948 - RNA, 21 nt, Human
agaguggcaaaguguccaaga

SEQ ID NO: 232949 - RNA, 23 nt, Human
agagccaagcuucuuucucacau

SEQ ID NO: 232950 - RNA, 22 nt, Human
cacagguucaaauucaggucgc

SEQ ID NO: 232951 - RNA, 22 nt, Human
uaugaaagaaucucagagcaca

SEQ ID NO: 232952 - RNA, 22 nt, Human
agcauguucaucuucuguuggu

SEQ ID NO: 232953 - RNA, 22 nt, Human
ucagcuuuuaaaaacaagaagu

SEQ ID NO: 232954 - RNA, 22 nt, Human
caccaggcuggagugcagaggu

SEQ ID NO: 232955 - RNA, 22 nt, Human
gccuccuggaagucacauguuu

SEQ ID NO: 232956 - RNA, 22 nt, Human
cugcugagaaaagacugaggga

SEQ ID NO: 232957 - RNA, 22 nt, Human
cagacaggcaggugcugcuuug

SEQ ID NO: 232958 - RNA, 22 nt, Human
cugaggcugaagagggccuacg

SEQ ID NO: 232959 - RNA, 22 nt, Human
uuucaaguggcgagauaaggaa

SEQ ID NO: 232960 - RNA, 22 nt, Human
agggauggagcccagcuguucu

SEQ ID NO: 232961 - RNA, 22 nt, Human
gugggggacccaggugcugucc

SEQ ID NO: 232962 - RNA, 22 nt, Human
agcaggcuugguccccagccuc

SEQ ID NO: 232963 - RNA, 22 nt, Human
uccugcagccuugggcuggagc

SEQ ID NO: 232964 - RNA, 19 nt, Human
cucagucuggcucugccug

SEQ ID NO: 232965 - RNA, 22 nt, Human
caggaaagccgagugccauagg

SEQ ID NO: 232966 - RNA, 22 nt, Human
uguccagcugacauucccuucc

SEQ ID NO: 232967 - RNA, 22 nt, Human
acuuagcaccuauggcauuuuu

SEQ ID NO: 232968 - RNA, 22 nt, Human
cuccaguggcaaguccgggcgg

SEQ ID NO: 232969 - RNA, 22 nt, Human
aagggcacagggaaagagugca

SEQ ID NO: 232970 - RNA, 22 nt, Human
ucuuuuaaccuaacuagcuugg

SEQ ID NO: 232971 - RNA, 22 nt, Human
ucccugccuccuggcagugcca

SEQ ID NO: 232972 - RNA, 22 nt, Human
ucucagagugguggucccucug

SEQ ID NO: 232973 - RNA, 22 nt, Human
uuccggaagguucucuagaauu

SEQ ID NO: 232974 - RNA, 22 nt, Human
gcacuugucaaauauuauagua

SEQ ID NO: 232975 - RNA, 22 nt, Human
auuuagaaauuccaaaaguauu

SEQ ID NO: 232976 - RNA, 21 nt, Human
ugccaggccugagcugggguc

SEQ ID NO: 232977 - RNA, 22 nt, Human
ggagagagaugccgccuugcuc

SEQ ID NO: 232978 - RNA, 22 nt, Human
uccugggaccaggcaccuacug

SEQ ID NO: 232979 - RNA, 22 nt, Human
ucagugcacccaauucucucca

SEQ ID NO: 232980 - RNA, 22 nt, Human
aacuccugaggaaauggucuca

SEQ ID NO: 232981 - RNA, 22 nt, Human
uccagcccacaccugaagcugg

SEQ ID NO: 232982 - RNA, 22 nt, Human
cuucaauuuuugguaugaugga

SEQ ID NO: 232983 - RNA, 22 nt, Human
cugugcaaugccuaaucacaaa

SEQ ID NO: 232984 - RNA, 23 nt, Human
agcuuccuagugaccuggagucu

SEQ ID NO: 232985 - RNA, 22 nt, Human
cagcccaguaccaagcaguugg

SEQ ID NO: 232986 - RNA, 19 nt, Human
uccuuaaaaaagcaguucu

SEQ ID NO: 232987 - RNA, 22 nt, Human
gcacacauucuagccuuuugug

SEQ ID NO: 232988 - RNA, 22 nt, Human
caaaaguaauugugguuuuugc

SEQ ID NO: 232989 - RNA, 22 nt, Human
uaugugcauaugcauacacaca

SEQ ID NO: 232990 - RNA, 22 nt, Human
gccagccccagacauccuaucg

SEQ ID NO: 232991 - RNA, 22 nt, Human
agccagcaggugagugcagccu

SEQ ID NO: 232992 - RNA, 18 nt, Human
cugaaggcaccagggcag

SEQ ID NO: 232993 - RNA, 22 nt, Human
gcagggaugcugaggcucagug

SEQ ID NO: 232994 - RNA, 22 nt, Human
accuccccucaccaaucugguu

SEQ ID NO: 232995 - RNA, 22 nt, Human
gaggcauggccugaggcuagga

SEQ ID NO: 232996 - RNA, 22 nt, Human
gcugccuuccauaauguacgua

SEQ ID NO: 232997 - RNA, 21 nt, Human
accauucugcacaugcuguca

SEQ ID NO: 232998 - RNA, 22 nt, Human
uguguucaagauuaguucuagu

SEQ ID NO: 232999 - RNA, 20 nt, Human
gcagagugugagagggugaa

SEQ ID NO: 233000 - RNA, 20 nt, Human
cucugggucgagacagacuu

SEQ ID NO: 233001 - RNA, 22 nt, Human
gcccaggauggcuggaggugcu

SEQ ID NO: 233002 - RNA, 22 nt, Human
ugccuugcagguuuuaaauaca

SEQ ID NO: 233003 - RNA, 22 nt, Human
gacagacaggugugguaggcac

SEQ ID NO: 233004 - RNA, 22 nt, Human
ccaguuaguuaaaggcgcagua

SEQ ID NO: 233005 - RNA, 22 nt, Human
gcuucauagcauucauugccug

SEQ ID NO: 233006 - RNA, 22 nt, Human
ggcucaccauggccucccugcu

SEQ ID NO: 233007 - RNA, 22 nt, Human
cuccuggcaggcugagugaaau

SEQ ID NO: 233008 - RNA, 22 nt, Human
aguggcugccaagauauaauuc

SEQ ID NO: 233009 - RNA, 22 nt, Human
agagccaggaaguggcgugggg

SEQ ID NO: 233010 - RNA, 22 nt, Human
uuccuggguugugcauuguaca

SEQ ID NO: 233011 - RNA, 23 nt, Human
cccagaccuugugcugcccuugg

SEQ ID NO: 233012 - RNA, 22 nt, Human
auaguuacauacagaaauauuu

SEQ ID NO: 233013 - RNA, 20 nt, Human
agccaggguucuggaugcac

SEQ ID NO: 233014 - RNA, 23 nt, Human
uggagcuccugcccauccuggcu

SEQ ID NO: 233015 - RNA, 22 nt, Human
gagccagguuggaggcugcagu

SEQ ID NO: 233016 - RNA, 22 nt, Human
cagcagagacgguaagcagaac

SEQ ID NO: 233017 - RNA, 22 nt, Human
ccuuagaaaaucauggaauauu

SEQ ID NO: 233018 - RNA, 22 nt, Human
gggcuccaguuuggccaggaag

SEQ ID NO: 233019 - RNA, 22 nt, Human
ugugugcacaaagaguacaugg

SEQ ID NO: 233020 - RNA, 22 nt, Human
cccucagagccugaagcaagca

SEQ ID NO: 233021 - RNA, 19 nt, Human
ucccaggaagcaaauguca

SEQ ID NO: 233022 - RNA, 22 nt, Human
caggccucaugguguguccuuc

SEQ ID NO: 233023 - RNA, 18 nt, Human
ccagcccugcagcaccug

SEQ ID NO: 233024 - RNA, 22 nt, Human
uuccugggcugcagagagcacc

SEQ ID NO: 233025 - RNA, 22 nt, Human
ccauaaucauguaaguaaauuc

SEQ ID NO: 233026 - RNA, 22 nt, Human
gggaacuugccccagaggaauu

SEQ ID NO: 233027 - RNA, 22 nt, Human
ggagucuuggccugcugagaaa

SEQ ID NO: 233028 - RNA, 22 nt, Human
ugucuucaucucagacacaguu

SEQ ID NO: 233029 - RNA, 22 nt, Human
gauguacacucagaaaagucau

SEQ ID NO: 233030 - RNA, 22 nt, Human
ccagucccagcucugccaugcu

SEQ ID NO: 233031 - RNA, 22 nt, Human
cugcuucuccaaaguaggacuu

SEQ ID NO: 233032 - RNA, 22 nt, Human
cuuucauaaaggaaaugaugag

SEQ ID NO: 233033 - RNA, 22 nt, Human
uuucaguuuccagcuuugucau

SEQ ID NO: 233034 - RNA, 22 nt, Human
agcagcucccuccucagccacc

SEQ ID NO: 233035 - RNA, 22 nt, Human
gcugagagugggugcagugcuu

SEQ ID NO: 233036 - RNA, 22 nt, Human
uagaacagaguuccagugauca

SEQ ID NO: 233037 - RNA, 22 nt, Human
cggggcugcgcucuuccugccg

SEQ ID NO: 233038 - RNA, 22 nt, Human
caucucugguucagucucugug

SEQ ID NO: 233039 - RNA, 17 nt, Human
gccugcaggcccgcaga

SEQ ID NO: 233040 - RNA, 19 nt, Human
ccaggaaccccuagcuacc

SEQ ID NO: 233041 - RNA, 21 nt, Human
gcugggucagcagguccucug

SEQ ID NO: 233042 - RNA, 22 nt, Human
ugccaggcauauggccucuuug

SEQ ID NO: 233043 - RNA, 22 nt, Human
gcucuggcccaaacccuuucua

SEQ ID NO: 233044 - RNA, 22 nt, Human
uucuccaggggaggguucucca

SEQ ID NO: 233045 - RNA, 22 nt, Human
uagcgagguguuucuaggacug

SEQ ID NO: 233046 - RNA, 22 nt, Human
uaaaggauuuuguauaauauaa

SEQ ID NO: 233047 - RNA, 22 nt, Human
uccuguggcuuccacgaccuaa

SEQ ID NO: 233048 - RNA, 22 nt, Human
uuuaaguuccuuuucaacaacu

SEQ ID NO: 233049 - RNA, 22 nt, Human
gcagacaggauuggguuaauag

SEQ ID NO: 233050 - RNA, 22 nt, Human
uucuagaaccaugacuucaggg

SEQ ID NO: 233051 - RNA, 22 nt, Human
ccugacaggcggaggcugcagu

SEQ ID NO: 233052 - RNA, 22 nt, Human
cuguucuuuaguuccacugcaa

SEQ ID NO: 233053 - RNA, 22 nt, Human
aaagugcugagacagacuggga

SEQ ID NO: 233054 - RNA, 22 nt, Human
uucauuuaaucagaaucucuaa

SEQ ID NO: 233055 - RNA, 23 nt, Human
uugcacauuggagcuggucuucu

SEQ ID NO: 233056 - RNA, 22 nt, Human
caggucucggguucagcaguga

SEQ ID NO: 233057 - RNA, 22 nt, Human
gcucuguaucuuacaacagggu

SEQ ID NO: 233058 - RNA, 22 nt, Human
ucaaacacuguaacauggaaaa

SEQ ID NO: 233059 - RNA, 22 nt, Human
uuagcaccuugaacagacccug

SEQ ID NO: 233060 - RNA, 22 nt, Human
cugcaaaauuguucuuugcucc

SEQ ID NO: 233061 - RNA, 22 nt, Human
guuacaaaggaagcuucacugc

SEQ ID NO: 233062 - RNA, 22 nt, Human
gucuacacugaauuuccacaga

SEQ ID NO: 233063 - RNA, 22 nt, Human
ggcagccaugcuccaggugcag

SEQ ID NO: 233064 - RNA, 22 nt, Human
uuacauucuuaucucaguuauu

SEQ ID NO: 233065 - RNA, 22 nt, Human
uacaagaaacuacaugaaugca

SEQ ID NO: 233066 - RNA, 22 nt, Human
ggacccugggcuugcuccuggg

SEQ ID NO: 233067 - RNA, 22 nt, Human
cuggcccagagcucuggccuuu

SEQ ID NO: 233068 - RNA, 22 nt, Human
uagagagccaguugucauaguu

SEQ ID NO: 233069 - RNA, 21 nt, Human
ugaugaggucauagcacccuc

SEQ ID NO: 233070 - RNA, 22 nt, Human
uguauucagugauuucacaaua

SEQ ID NO: 233071 - RNA, 22 nt, Human
caaggcuguguuagcugcccuc

SEQ ID NO: 233072 - RNA, 22 nt, Human
aagacaaugaguccugauggga

SEQ ID NO: 233073 - RNA, 22 nt, Human
ucaaaaguuucacauagagaua

SEQ ID NO: 233074 - RNA, 22 nt, Human
uaggccaggaaucagcaagcuu

SEQ ID NO: 233075 - RNA, 22 nt, Human
agaugcagacuugguucaggca

SEQ ID NO: 233076 - RNA, 19 nt, Human
ucucacaucagcuccuagc

SEQ ID NO: 233077 - RNA, 22 nt, Human
ugugugcaggcacugugccaga

SEQ ID NO: 233078 - RNA, 22 nt, Human
ucccugagcugagcucaacagc

SEQ ID NO: 233079 - RNA, 22 nt, Human
agcucccagaaggcccugcgcc

SEQ ID NO: 233080 - RNA, 22 nt, Human
ugugaaagucaaauuaauugaa

SEQ ID NO: 233081 - RNA, 23 nt, Human
uugggaaauaguuaagacaugag

SEQ ID NO: 233082 - RNA, 22 nt, Human
ggagccagaguuuaauguggag

SEQ ID NO: 233083 - RNA, 22 nt, Human
gagcuggcuaauacugacuuau

SEQ ID NO: 233084 - RNA, 22 nt, Human
uauuaacaugaacugacuuuuc

SEQ ID NO: 233085 - RNA, 22 nt, Human
auugagcuguuuuguaggauaa

SEQ ID NO: 233086 - RNA, 22 nt, Human
aagcaauugguuuuaguaaaau

SEQ ID NO: 233087 - RNA, 22 nt, Human
aguguccuuguuauuacugcuc

SEQ ID NO: 233088 - RNA, 22 nt, Human
uccagccacucagcagggauug

SEQ ID NO: 233089 - RNA, 22 nt, Human
ugaaggcuuuuagcucugaaaa

SEQ ID NO: 233090 - RNA, 22 nt, Human
aauagaauguaaucuaauacau

SEQ ID NO: 233091 - RNA, 22 nt, Human
uuccuaacaaacuucagugaau

SEQ ID NO: 233092 - RNA, 20 nt, Human
auucagaauaggcauguaaa

SEQ ID NO: 233093 - RNA, 22 nt, Human
auggacaaugugaaacuacaag

SEQ ID NO: 233094 - RNA, 22 nt, Human
ugccaggccacguagcuucaag

SEQ ID NO: 233095 - RNA, 22 nt, Human
ucagcuggcaucggcucaccca

SEQ ID NO: 233096 - RNA, 22 nt, Human
gagguggcacugugaggagcac

SEQ ID NO: 233097 - RNA, 22 nt, Human
aagaacugugcuccaggcucca

SEQ ID NO: 233098 - RNA, 19 nt, Human
cgcaggcuucgggucgcuc

SEQ ID NO: 233099 - RNA, 22 nt, Human
caggcucuagguuaguaggaga

SEQ ID NO: 233100 - RNA, 22 nt, Human
aaggaagaugcuggccugggga

SEQ ID NO: 233101 - RNA, 22 nt, Human
uauuuccaggccccacucuaga

SEQ ID NO: 233102 - RNA, 22 nt, Human
ugcucagcagucaaggucauag

SEQ ID NO: 233103 - RNA, 22 nt, Human
guacuucuggccaggcuggcca

SEQ ID NO: 233104 - RNA, 22 nt, Human
aauuucuguaugaauagagaaa

SEQ ID NO: 233105 - RNA, 22 nt, Human
uucagugugugauaccugcugu

SEQ ID NO: 233106 - RNA, 22 nt, Human
agcagaugaaucccagauaaag

SEQ ID NO: 233107 - RNA, 20 nt, Human
accagaggaaagagcaguga

SEQ ID NO: 233108 - RNA, 22 nt, Human
cuggcuggucugagcagucgca

SEQ ID NO: 233109 - RNA, 19 nt, Human
uccugcagaccagaccugu

SEQ ID NO: 233110 - RNA, 22 nt, Human
uucucugguaaacacaugcgua

SEQ ID NO: 233111 - RNA, 22 nt, Human
aucuuacagcagcaaggaagua

SEQ ID NO: 233112 - RNA, 22 nt, Human
aauuccaaaucaacuagucuag

SEQ ID NO: 233113 - RNA, 22 nt, Human
caaaaugugagucccaccucaa

SEQ ID NO: 233114 - RNA, 23 nt, Human
cucccuggcccuugggagaccug

SEQ ID NO: 233115 - RNA, 22 nt, Human
cugcagagcagccaguccccca

SEQ ID NO: 233116 - RNA, 22 nt, Human
aaaggcuaugagauagaagaua

SEQ ID NO: 233117 - RNA, 22 nt, Human
cauuucuguacauguuuuggug

SEQ ID NO: 233118 - RNA, 22 nt, Human
agcuucucaucuuccaaaauug

SEQ ID NO: 233119 - RNA, 21 nt, Human
ugcagcagaguaagcagggga

SEQ ID NO: 233120 - RNA, 22 nt, Human
gcucagagagaggauauguuau

SEQ ID NO: 233121 - RNA, 22 nt, Human
cuccugggaauuuaguugugag

SEQ ID NO: 233122 - RNA, 22 nt, Human
uguacaugugucuguauaucuu

SEQ ID NO: 233123 - RNA, 22 nt, Human
guguuacuugccauacagaaaa

SEQ ID NO: 233124 - RNA, 22 nt, Human
uuuuagauaguuuaacugcacu

SEQ ID NO: 233125 - RNA, 22 nt, Human
uucuuguaauuuggagaaauga

SEQ ID NO: 233126 - RNA, 22 nt, Human
accuugggcaaguuggaaacug

SEQ ID NO: 233127 - RNA, 22 nt, Human
gcuggccaggaagagucucaga

SEQ ID NO: 233128 - RNA, 22 nt, Human
ugacagcaugaccacagggucu

SEQ ID NO: 233129 - RNA, 22 nt, Human
uaagacaccucucugcccuuca

SEQ ID NO: 233130 - RNA, 22 nt, Human
caggagaggaggcuacuucuua

SEQ ID NO: 233131 - RNA, 22 nt, Human
uaauugaacuaacaugcaaaca

SEQ ID NO: 233132 - RNA, 22 nt, Human
aaauguacugauacuuauuuua

SEQ ID NO: 233133 - RNA, 22 nt, Human
uauuuuaaagugaagggucuug

SEQ ID NO: 233134 - RNA, 22 nt, Human
ggguccagaaugagaaugggcu

SEQ ID NO: 233135 - RNA, 22 nt, Human
uauuauugaaucaguucuuuga

SEQ ID NO: 233136 - RNA, 22 nt, Human
cauggcaacaacucuuuauucc

SEQ ID NO: 233137 - RNA, 22 nt, Human
uguuuauaccuugguauaacca

SEQ ID NO: 233138 - RNA, 23 nt, Human
aauucaaauucagugugacuagg

SEQ ID NO: 233139 - RNA, 22 nt, Human
guacccuguggccagccagcca

SEQ ID NO: 233140 - RNA, 22 nt, Human
augguuuacaauguuuucaguu

SEQ ID NO: 233141 - RNA, 22 nt, Human
uauaugcaauuuuuuagugcaa

SEQ ID NO: 233142 - RNA, 21 nt, Human
aucuagaaucucucuccccac

SEQ ID NO: 233143 - RNA, 22 nt, Human
aagccagauuucacucuuaauu

SEQ ID NO: 233144 - RNA, 22 nt, Human
cucauuuaacagauuaaaaagu

SEQ ID NO: 233145 - RNA, 22 nt, Human
cccuccccacaaagcuucacac

SEQ ID NO: 233146 - RNA, 22 nt, Human
guacaaauugauacagguuuuc

SEQ ID NO: 233147 - RNA, 22 nt, Human
uuuauugacuucagugagucuu

SEQ ID NO: 233148 - RNA, 22 nt, Human
gagcagagcuucucaaaguaaa

SEQ ID NO: 233149 - RNA, 20 nt, Human
uaugaauucuggucccuggg

SEQ ID NO: 233150 - RNA, 19 nt, Human
cuuccuggaggagagccuc

SEQ ID NO: 233151 - RNA, 22 nt, Human
acagacagggcaccugccuccu

SEQ ID NO: 233152 - RNA, 22 nt, Human
cccagccucugggcucacccaa

SEQ ID NO: 233153 - RNA, 22 nt, Human
guauuuuaagugacuacuaggu

SEQ ID NO: 233154 - RNA, 20 nt, Human
aaagucuguuuaucucugga

SEQ ID NO: 233155 - RNA, 22 nt, Human
agucuggugagaacauaaauag

SEQ ID NO: 233156 - RNA, 22 nt, Human
ugccuugcuuaacaagauggca

SEQ ID NO: 233157 - RNA, 23 nt, Human
ccuccaugguaagaagcuuagag

SEQ ID NO: 233158 - RNA, 22 nt, Human
cacauuucuaggaaauuaaaug

SEQ ID NO: 233159 - RNA, 22 nt, Human
cagggcaguaccgcccucuggc

SEQ ID NO: 233160 - RNA, 22 nt, Human
ggagaaagggacugaucugcuc

SEQ ID NO: 233161 - RNA, 22 nt, Human
aggaaaggccucagcagaaacc

SEQ ID NO: 233162 - RNA, 22 nt, Human
uucaugugauaaaugugugacu

SEQ ID NO: 233163 - RNA, 22 nt, Human
cauaauaucuccgauuacuugc

SEQ ID NO: 233164 - RNA, 22 nt, Human
agugcauucaguauucauaggc

SEQ ID NO: 233165 - RNA, 22 nt, Human
uccagaccaugugagaggcgca

SEQ ID NO: 233166 - RNA, 22 nt, Human
gccaggcugccuuaucucuagc

SEQ ID NO: 233167 - RNA, 22 nt, Human
cagcuuuaggacucauaauaaa

SEQ ID NO: 233168 - RNA, 22 nt, Human
agacccugcaccucucgugggc

SEQ ID NO: 233169 - RNA, 22 nt, Human
uuagaguuuuuguaaguacaau

SEQ ID NO: 233170 - RNA, 22 nt, Human
ugaucuggaauucccuguggua

SEQ ID NO: 233171 - RNA, 22 nt, Human
aauaaaucaauccuauugguag

SEQ ID NO: 233172 - RNA, 22 nt, Human
ccacugaguacccgauggcugc

SEQ ID NO: 233173 - RNA, 22 nt, Human
uuccacuuuucucucucaugcc

SEQ ID NO: 233174 - RNA, 22 nt, Human
ccuggaucagucacuguugcug

SEQ ID NO: 233175 - RNA, 22 nt, Human
aacaggcacuaagcaugugggg

SEQ ID NO: 233176 - RNA, 22 nt, Human
uuuucucuauauugucugugaa

SEQ ID NO: 233177 - RNA, 22 nt, Human
uaauuucuggagggagaaagag

SEQ ID NO: 233178 - RNA, 22 nt, Human
gcucagagaaguuaaggaauuu

SEQ ID NO: 233179 - RNA, 22 nt, Human
ggcagaggaggggugaauuugc

SEQ ID NO: 233180 - RNA, 22 nt, Human
uccacccugcuuuugucuuuga

SEQ ID NO: 233181 - RNA, 22 nt, Human
uuugggaauaauugcacagauu

SEQ ID NO: 233182 - RNA, 22 nt, Human
gucucagauaacauguauucua

SEQ ID NO: 233183 - RNA, 22 nt, Human
ugguauguaauaaguguucuaa

SEQ ID NO: 233184 - RNA, 22 nt, Human
ucaacacaacagagaaaugcug

SEQ ID NO: 233185 - RNA, 22 nt, Human
uuuccaaaggaggaaccaguuu

SEQ ID NO: 233186 - RNA, 22 nt, Human
ugacuucugggugagccagcau

SEQ ID NO: 233187 - RNA, 18 nt, Human
cccacggugcuguagggc

SEQ ID NO: 233188 - RNA, 22 nt, Human
agaacuguccuuggaggagagu

SEQ ID NO: 233189 - RNA, 22 nt, Human
aucucuguuuuaggagauagug

SEQ ID NO: 233190 - RNA, 22 nt, Human
aucgugcauuuuuauuaacccu

SEQ ID NO: 233191 - RNA, 16 nt, Human
gcagguggggcgcgca

SEQ ID NO: 233192 - RNA, 22 nt, Human
auacaacagaaaaugauuauuc

SEQ ID NO: 233193 - RNA, 22 nt, Human
gccaggcaaauuaaggaaugca

SEQ ID NO: 233194 - RNA, 20 nt, Human
gccacugggcaccagcaggg

SEQ ID NO: 233195 - RNA, 20 nt, Human
gcucaguggagaaaugcacc

SEQ ID NO: 233196 - RNA, 22 nt, Human
acugggcccagugguguggcug

SEQ ID NO: 233197 - RNA, 22 nt, Human
agcagcuugggucucuccugcu

SEQ ID NO: 233198 - RNA, 22 nt, Human
aggucagaagugccagggaauu

SEQ ID NO: 233199 - RNA, 22 nt, Human
gaggcugguucugaaguacugu

SEQ ID NO: 233200 - RNA, 22 nt, Human
aaguguuuaacggugauugagc

SEQ ID NO: 233201 - RNA, 22 nt, Human
agauaugucccugucuaauauu

SEQ ID NO: 233202 - RNA, 22 nt, Human
acuguaaagaaguaaguauggg

SEQ ID NO: 233203 - RNA, 19 nt, Human
uguggccaugguucagcug

SEQ ID NO: 233204 - RNA, 22 nt, Human
uccugagcucccaugaacaggc

SEQ ID NO: 233205 - RNA, 20 nt, Human
uagaacuuuucaguauggau

SEQ ID NO: 233206 - RNA, 22 nt, Human
cccacaggugugagcuugcugg

SEQ ID NO: 233207 - RNA, 22 nt, Human
uagaagcacagguuaaaggcau

SEQ ID NO: 233208 - RNA, 22 nt, Human
aguggggcggacaggaccagga

SEQ ID NO: 233209 - RNA, 22 nt, Human
cuuccagucuagagcuaucugu

SEQ ID NO: 233210 - RNA, 23 nt, Human
ugggucucuaguacaggcaggca

SEQ ID NO: 233211 - RNA, 22 nt, Human
aggucaagggcaagagugaggu

SEQ ID NO: 233212 - RNA, 22 nt, Human
uccccaggaaauucugauucuu

SEQ ID NO: 233213 - RNA, 22 nt, Human
cucuucuuauggccguggcuga

SEQ ID NO: 233214 - RNA, 22 nt, Human
uggcucugagacacaggcucuc

SEQ ID NO: 233215 - RNA, 22 nt, Human
caacaauuucccaguuucccau

SEQ ID NO: 233216 - RNA, 22 nt, Human
cagaaacagacaugacgcagua

SEQ ID NO: 233217 - RNA, 22 nt, Human
gcaaggaccuuugagcgugcca

SEQ ID NO: 233218 - RNA, 22 nt, Human
aagcuguuuuggccuuaguuga

SEQ ID NO: 233219 - RNA, 20 nt, Human
ugggucugcuuggcuucagu

SEQ ID NO: 233220 - RNA, 22 nt, Human
acaaaagugagugugucucaga

SEQ ID NO: 233221 - RNA, 22 nt, Human
ggaaagcuuuguuuuccucacc

SEQ ID NO: 233222 - RNA, 22 nt, Human
uaguagaauccaaaccaacagu

SEQ ID NO: 233223 - RNA, 22 nt, Human
agucuuacaugagaaagaaccu

SEQ ID NO: 233224 - RNA, 22 nt, Human
agugcugagugauugcaaagga

SEQ ID NO: 233225 - RNA, 20 nt, Human
cagaggcaaggagacuugga

SEQ ID NO: 233226 - RNA, 23 nt, Human
uggccuggagagaaaagaugagu

SEQ ID NO: 233227 - RNA, 22 nt, Human
cagcagguauguuuguucagca

SEQ ID NO: 233228 - RNA, 22 nt, Human
uucucuaagaguuauaugaauu

SEQ ID NO: 233229 - RNA, 22 nt, Human
ucagucuucccuccagugcaac

SEQ ID NO: 233230 - RNA, 22 nt, Human
ccucugaguacagugauggauu

SEQ ID NO: 233231 - RNA, 22 nt, Human
ugcuggaacucagugaaucauu

SEQ ID NO: 233232 - RNA, 22 nt, Human
aagaacaguugggaggugagcc

SEQ ID NO: 233233 - RNA, 22 nt, Human
agucuguguacuggguuucugu

SEQ ID NO: 233234 - RNA, 22 nt, Human
aaaggcuucagugaguggguau

SEQ ID NO: 233235 - RNA, 21 nt, Human
caucacauuacucaaaguccu

SEQ ID NO: 233236 - RNA, 22 nt, Human
gugcagggcagguguccuucca

SEQ ID NO: 233237 - RNA, 20 nt, Human
gucugcaguaagagggaaua

SEQ ID NO: 233238 - RNA, 22 nt, Human
caagcaggguuuaugcauggag

SEQ ID NO: 233239 - RNA, 22 nt, Human
aucuagaggagggcugcuggau

SEQ ID NO: 233240 - RNA, 22 nt, Human
ugcauacacacauagguauggg

SEQ ID NO: 233241 - RNA, 22 nt, Human
cagugcuauuuggacacaggga

SEQ ID NO: 233242 - RNA, 22 nt, Human
aggagcucagcuaaguuggaga

SEQ ID NO: 233243 - RNA, 22 nt, Human
agguuuaugccuuggagcuggg

SEQ ID NO: 233244 - RNA, 22 nt, Human
ugcaggugcugauaccuacucc

SEQ ID NO: 233245 - RNA, 22 nt, Human
uuacaguagcuuuauuuggagu

SEQ ID NO: 233246 - RNA, 22 nt, Human
uagggaugaggauagauuuuuc

SEQ ID NO: 233247 - RNA, 22 nt, Human
ucugagcuggagcccaucaccu

SEQ ID NO: 233248 - RNA, 21 nt, Human
ugucacuuuaagcuagcucua

SEQ ID NO: 233249 - RNA, 23 nt, Human
acuggacagaguggacgaggcug

SEQ ID NO: 233250 - RNA, 22 nt, Human
acuuccuguuaugugugccucu

SEQ ID NO: 233251 - RNA, 22 nt, Human
cucaaagaagggagguauuugg

SEQ ID NO: 233252 - RNA, 22 nt, Human
cugggugaguugaugaaggaga

SEQ ID NO: 233253 - RNA, 22 nt, Human
gacaugugucugcaaguugauc

SEQ ID NO: 233254 - RNA, 22 nt, Human
uuagcuguggaagcuucagcca

SEQ ID NO: 233255 - RNA, 22 nt, Human
cugcaggggcaguccacuuccu

SEQ ID NO: 233256 - RNA, 22 nt, Human
gauagauaaaacuauauuuuca

SEQ ID NO: 233257 - RNA, 22 nt, Human
ugaaacacugcgauaaaauccu

SEQ ID NO: 233258 - RNA, 22 nt, Human
acuugagagaaucggaggaguc

SEQ ID NO: 233259 - RNA, 22 nt, Human
cuuaauuucaaacugcuaguga

SEQ ID NO: 233260 - RNA, 22 nt, Human
aacuguagugcuuauagacucu

SEQ ID NO: 233261 - RNA, 22 nt, Human
aaguggcucauguggcuucugc

SEQ ID NO: 233262 - RNA, 22 nt, Human
ccaaggcagaagauggcucuug

SEQ ID NO: 233263 - RNA, 22 nt, Human
gcagagugauggaaugugggug

SEQ ID NO: 233264 - RNA, 21 nt, Human
ggcaagaaacacaaucaagua

SEQ ID NO: 233265 - RNA, 22 nt, Human
uuugcauuguaauauuuaguuc

SEQ ID NO: 233266 - RNA, 22 nt, Human
uggccuugaaccaggucuccac

SEQ ID NO: 233267 - RNA, 22 nt, Human
aacaaugugaagugcuguucag

SEQ ID NO: 233268 - RNA, 22 nt, Human
gagcugcuugcccagaagcaga

SEQ ID NO: 233269 - RNA, 22 nt, Human
aaugcagugagccauuaaaugg

SEQ ID NO: 233270 - RNA, 22 nt, Human
gggagggaggugcugguucacg

SEQ ID NO: 233271 - RNA, 22 nt, Human
cuuuaacaguuccauucaauuu

SEQ ID NO: 233272 - RNA, 22 nt, Human
gaucuuuacuacugccuucucu

SEQ ID NO: 233273 - RNA, 22 nt, Human
aguuugaagaaggugagaugca

SEQ ID NO: 233274 - RNA, 22 nt, Human
gggaccugccauugcucacagg

SEQ ID NO: 233275 - RNA, 22 nt, Human
guggaggaaaagaaguugggug

SEQ ID NO: 233276 - RNA, 22 nt, Human
gucaggaaaacccggguugacu

SEQ ID NO: 233277 - RNA, 22 nt, Human
uauccacacugggauguuuuga

SEQ ID NO: 233278 - RNA, 22 nt, Human
ggaaggcucuguuccuugacuu

SEQ ID NO: 233279 - RNA, 22 nt, Human
uaggaaauugccaauauaugac

SEQ ID NO: 233280 - RNA, 22 nt, Human
ugcugggcuguuccuguccaug

SEQ ID NO: 233281 - RNA, 22 nt, Human
cauuuuguaagucucucuuguu

SEQ ID NO: 233282 - RNA, 22 nt, Human
cccuucagcugagugggacagc

SEQ ID NO: 233283 - RNA, 22 nt, Human
uuauucagucugucuagggagu

SEQ ID NO: 233284 - RNA, 22 nt, Human
acccuggccugguucaugugau

SEQ ID NO: 233285 - RNA, 22 nt, Human
aaggggaauagaguggguugug

SEQ ID NO: 233286 - RNA, 19 nt, Human
cacaacuucgcuugauucc

SEQ ID NO: 233287 - RNA, 22 nt, Human
gggggcuguccugugcauugua

SEQ ID NO: 233288 - RNA, 22 nt, Human
ugggagccuggcaggccagagg

SEQ ID NO: 233289 - RNA, 22 nt, Human
acuccaaaaccugcggcuuggu

SEQ ID NO: 233290 - RNA, 22 nt, Human
acucagagaaacagcagggugu

SEQ ID NO: 233291 - RNA, 22 nt, Human
agcagcucauggaguaggcacu

SEQ ID NO: 233292 - RNA, 22 nt, Human
gaacaguauuuccaggaauccc

SEQ ID NO: 233293 - RNA, 22 nt, Human
ucucaaucaaacaugucugacu

SEQ ID NO: 233294 - RNA, 17 nt, Human
uggcccuagacuccagc

SEQ ID NO: 233295 - RNA, 19 nt, Human
gcccugaguaagcuaggag

SEQ ID NO: 233296 - RNA, 22 nt, Human
gagagcugcagccgagaggggg

SEQ ID NO: 233297 - RNA, 22 nt, Human
ugcuccagugccugccccacag

SEQ ID NO: 233298 - RNA, 22 nt, Human
caguuggugaugaggcuaguag

SEQ ID NO: 233299 - RNA, 22 nt, Human
cagggccauuggaacaaagagg

SEQ ID NO: 233300 - RNA, 22 nt, Human
gagguucaguaaggaauacuga

SEQ ID NO: 233301 - RNA, 22 nt, Human
acaggacucucugaaaauguac

SEQ ID NO: 233302 - RNA, 22 nt, Human
ggcaggggugaggccacucuga

SEQ ID NO: 233303 - RNA, 19 nt, Human
uguuggugcggauguggag

SEQ ID NO: 233304 - RNA, 18 nt, Human
agcaccagucacuaacag

SEQ ID NO: 233305 - RNA, 22 nt, Human
caggggcuuaagugacagaagg

SEQ ID NO: 233306 - RNA, 22 nt, Human
aggaagaaacugagcucugaca

SEQ ID NO: 233307 - RNA, 22 nt, Human
ucucuggggguagaacucaggc

SEQ ID NO: 233308 - RNA, 22 nt, Human
augcaugcagggaagacaguag

SEQ ID NO: 233309 - RNA, 22 nt, Human
uaauacugagccaccagguagg

SEQ ID NO: 233310 - RNA, 22 nt, Human
cugucccuucauuauucacuac

SEQ ID NO: 233311 - RNA, 22 nt, Human
uauguacaagcacacaugugac

SEQ ID NO: 233312 - RNA, 22 nt, Human
ggcugaauguuggacacuuacg

SEQ ID NO: 233313 - RNA, 22 nt, Human
uagaaacccugccuuaguagcu

SEQ ID NO: 233314 - RNA, 21 nt, Human
gccugggaagagaaagguaag

SEQ ID NO: 233315 - RNA, 22 nt, Human
aaccagcuccagccuccauuca

SEQ ID NO: 233316 - RNA, 22 nt, Human
cuguccugucugcuuuuaauuu

SEQ ID NO: 233317 - RNA, 22 nt, Human
aaggagucugggccauucagag

SEQ ID NO: 233318 - RNA, 22 nt, Human
uugaaugaauaguugcuagaag

SEQ ID NO: 233319 - RNA, 22 nt, Human
ucagacuugacuuuguaaguuu

SEQ ID NO: 233320 - RNA, 23 nt, Human
agacacuguaaagaauugcaguu

SEQ ID NO: 233321 - RNA, 22 nt, Human
acagcuuuaucucagggaucag

SEQ ID NO: 233322 - RNA, 22 nt, Human
uuauacuaaaacgcauugaauu

SEQ ID NO: 233323 - RNA, 22 nt, Human
uagcauaauuuguagaaaauca

SEQ ID NO: 233324 - RNA, 22 nt, Human
cacagcauuaacugggacagcu

SEQ ID NO: 233325 - RNA, 22 nt, Human
aaccuagaaguuagaguaucau

SEQ ID NO: 233326 - RNA, 22 nt, Human
agaaaacugggaggagagcuuc

SEQ ID NO: 233327 - RNA, 22 nt, Human
gcaugcugcugaggcuggaaua

SEQ ID NO: 233328 - RNA, 22 nt, Human
ucuccccaaccauggcacucac

SEQ ID NO: 233329 - RNA, 22 nt, Human
gggcugcugcugccagcgacac

SEQ ID NO: 233330 - RNA, 22 nt, Human
acuuagaauuaguguagaauga

SEQ ID NO: 233331 - RNA, 22 nt, Human
aaaguguugaagaaaauguuca

SEQ ID NO: 233332 - RNA, 22 nt, Human
ugguuuugcuaaaauagaaaga

SEQ ID NO: 233333 - RNA, 22 nt, Human
aaaggcuacgggggccgugugc

SEQ ID NO: 233334 - RNA, 22 nt, Human
ugcuggcuccucgaggcuucgu

SEQ ID NO: 233335 - RNA, 21 nt, Human
gcaaguacuaucaucauuauc

SEQ ID NO: 233336 - RNA, 22 nt, Human
guguccaucucuguaugcugcu

SEQ ID NO: 233337 - RNA, 22 nt, Human
ucuggccccuggucucuggugu

SEQ ID NO: 233338 - RNA, 22 nt, Human
aaagaucaaguaggcauggccu

SEQ ID NO: 233339 - RNA, 22 nt, Human
ccuuagcaaauuggcaucuucu

SEQ ID NO: 233340 - RNA, 20 nt, Human
cagcccuccaguggaggcag

SEQ ID NO: 233341 - RNA, 18 nt, Human
aaauuauucuuccuuuuc

SEQ ID NO: 233342 - RNA, 22 nt, Human
uacacaguuccauuuaagccag

SEQ ID NO: 233343 - RNA, 22 nt, Human
aauccauugcugugcugccagg

SEQ ID NO: 233344 - RNA, 23 nt, Human
aggcuuccuaucuuagagcuggg

SEQ ID NO: 233345 - RNA, 22 nt, Human
gcacagaggaagcacagacucu

SEQ ID NO: 233346 - RNA, 22 nt, Human
cauuaaauuccuuguucucaaa

SEQ ID NO: 233347 - RNA, 22 nt, Human
ggcaggcauuagagauucccag

SEQ ID NO: 233348 - RNA, 22 nt, Human
uggggagcccacucaccucccc

SEQ ID NO: 233349 - RNA, 22 nt, Human
gcagcugggucugugugggcug

SEQ ID NO: 233350 - RNA, 22 nt, Human
cccagcugaacuugcauuccaa

SEQ ID NO: 233351 - RNA, 16 nt, Human
augaggcauaggcugc

SEQ ID NO: 233352 - RNA, 22 nt, Human
uggcugacaaauaggugcaguu

SEQ ID NO: 233353 - RNA, 22 nt, Human
aaagagcuuuccacacuaguca

SEQ ID NO: 233354 - RNA, 22 nt, Human
uggaggcugguuucugcugagg

SEQ ID NO: 233355 - RNA, 22 nt, Human
uucuagaggggagauacuagua

SEQ ID NO: 233356 - RNA, 22 nt, Human
uauuuguagaauggauuaaggg

SEQ ID NO: 233357 - RNA, 17 nt, Human
uccuccccgcaguugca

SEQ ID NO: 233358 - RNA, 22 nt, Human
gaacucuugguggucauuagau

SEQ ID NO: 233359 - RNA, 22 nt, Human
aaggugguuugcagacagaaua

SEQ ID NO: 233360 - RNA, 22 nt, Human
uuuacuguucaacuugcaagua

SEQ ID NO: 233361 - RNA, 22 nt, Human
aaaagucuacaagcuucaacaa

SEQ ID NO: 233362 - RNA, 22 nt, Human
agcuucuuaaguuccugcagca

SEQ ID NO: 233363 - RNA, 17 nt, Human
cauuugcugguuggcuc

SEQ ID NO: 233364 - RNA, 22 nt, Human
aagcacaucauguuguucagac

SEQ ID NO: 233365 - RNA, 22 nt, Human
ucccucagagaccguggugcag

SEQ ID NO: 233366 - RNA, 21 nt, Human
ugugucagucuuuggaagcaa

SEQ ID NO: 233367 - RNA, 22 nt, Human
cacagagaacugugggagugug

SEQ ID NO: 233368 - RNA, 22 nt, Human
guauuuuacuuacgcaugacuu

SEQ ID NO: 233369 - RNA, 22 nt, Human
uccuuagcacccaccaaggacu

SEQ ID NO: 233370 - RNA, 22 nt, Human
acaaagugugcggagcccaggg

SEQ ID NO: 233371 - RNA, 22 nt, Human
aaugcauucucgguuugugugu

SEQ ID NO: 233372 - RNA, 22 nt, Human
gcacaaguuucuucauuguuca

SEQ ID NO: 233373 - RNA, 22 nt, Human
agcauccacucacugggagagg

SEQ ID NO: 233374 - RNA, 22 nt, Human
ucacaggcuccagggccuggau

SEQ ID NO: 233375 - RNA, 21 nt, Human
uaacacauuuugguacuuugg

SEQ ID NO: 233376 - RNA, 22 nt, Human
aaaggacacacaggaggugucu

SEQ ID NO: 233377 - RNA, 22 nt, Human
gcucagugaaacaucaaauagu

SEQ ID NO: 233378 - RNA, 22 nt, Human
caguuuauaugucagagcugua

SEQ ID NO: 233379 - RNA, 22 nt, Human
accacuuaucaucacuaucuca

SEQ ID NO: 233380 - RNA, 22 nt, Human
ugaaagcauuagucuaagguag

SEQ ID NO: 233381 - RNA, 22 nt, Human
gcuaggcucggaagcagcaggg

SEQ ID NO: 233382 - RNA, 21 nt, Human
gcagaauagucucugucuuca

SEQ ID NO: 233383 - RNA, 22 nt, Human
ucugagacccauacaggcccac

SEQ ID NO: 233384 - RNA, 22 nt, Human
uucuuuucggccugugagaagg

SEQ ID NO: 233385 - RNA, 22 nt, Human
cggcuucuucaucaggucagca

SEQ ID NO: 233386 - RNA, 22 nt, Human
aauaagauccugaagauauguu

SEQ ID NO: 233387 - RNA, 22 nt, Human
augaguucccaggugauuugug

SEQ ID NO: 233388 - RNA, 22 nt, Human
aggggagcuaacaccagagccc

SEQ ID NO: 233389 - RNA, 22 nt, Human
gagguggguguaucacagguca

SEQ ID NO: 233390 - RNA, 22 nt, Human
cagggagcuggaguuggaguac

SEQ ID NO: 233391 - RNA, 22 nt, Human
aacauuguuuugcacaacucuu

SEQ ID NO: 233392 - RNA, 22 nt, Human
uacagucaacauugaugaugau

SEQ ID NO: 233393 - RNA, 22 nt, Human
uguaagaaaaguaaauagugac

SEQ ID NO: 233394 - RNA, 22 nt, Human
cucagagcccaggguacacccg

SEQ ID NO: 233395 - RNA, 22 nt, Human
gaggagcaugggaaggcucugg

SEQ ID NO: 233396 - RNA, 22 nt, Human
aggaggaagggaagacaaguaa

SEQ ID NO: 233397 - RNA, 22 nt, Human
cauuguuuugagaacaaccuga

SEQ ID NO: 233398 - RNA, 22 nt, Human
uggcucccgcagacccugugcu

SEQ ID NO: 233399 - RNA, 22 nt, Human
agggagaacaguugcagcagac

SEQ ID NO: 233400 - RNA, 22 nt, Human
cugccugugugugccugcagaa

SEQ ID NO: 233401 - RNA, 22 nt, Human
acacugugugacuucugagacu

SEQ ID NO: 233402 - RNA, 22 nt, Human
agcuggaggauaacucacuucu

SEQ ID NO: 233403 - RNA, 22 nt, Human
cagcuguguagaugcaggguca

SEQ ID NO: 233404 - RNA, 22 nt, Human
acagcaggaauuaacauauaag

SEQ ID NO: 233405 - RNA, 22 nt, Human
auuaaauuggaucugcauaguu

SEQ ID NO: 233406 - RNA, 22 nt, Human
uggcuggcuguccagcugggca

SEQ ID NO: 233407 - RNA, 22 nt, Human
agcuaaugaaauauuuucugau

SEQ ID NO: 233408 - RNA, 19 nt, Human
cauaauacaguggaucuga

SEQ ID NO: 233409 - RNA, 22 nt, Human
ugucccuggaacuauggcucca

SEQ ID NO: 233410 - RNA, 22 nt, Human
aaagcugcaagcuccugaggaa

SEQ ID NO: 233411 - RNA, 22 nt, Human
uucccagugauugaacaucccu

SEQ ID NO: 233412 - RNA, 22 nt, Human
cuagaaagauacuuaaaucaag

SEQ ID NO: 233413 - RNA, 22 nt, Human
ugcauugagauuuuaaaauuca

SEQ ID NO: 233414 - RNA, 18 nt, Human
gccucccuggcuacacuu

SEQ ID NO: 233415 - RNA, 22 nt, Human
ccugggcuugcaucugugcugg

SEQ ID NO: 233416 - RNA, 22 nt, Human
gcaggccucuguugagggccuu

SEQ ID NO: 233417 - RNA, 22 nt, Human
gauguacuuuaaaauacuucag

SEQ ID NO: 233418 - RNA, 22 nt, Human
ccauuuguuuucgcuaccaugg

SEQ ID NO: 233419 - RNA, 22 nt, Human
agcugguaaaggggaaagcaga

SEQ ID NO: 233420 - RNA, 22 nt, Human
cacaggagcccugaggccuccc

SEQ ID NO: 233421 - RNA, 22 nt, Human
ccagagccggauugugaagugc

SEQ ID NO: 233422 - RNA, 22 nt, Human
agggaaaucuuucaacacuuca

SEQ ID NO: 233423 - RNA, 21 nt, Human
aagucugguugauuccuuugc

SEQ ID NO: 233424 - RNA, 22 nt, Human
acacuuuuaagacuuuaaugaa

SEQ ID NO: 233425 - RNA, 22 nt, Human
aaauuucuaagcagccacuucc

SEQ ID NO: 233426 - RNA, 22 nt, Human
aggaaggcacauuguuggcuaa

SEQ ID NO: 233427 - RNA, 22 nt, Human
ccaggcugcagucaaggggcau

SEQ ID NO: 233428 - RNA, 22 nt, Human
acaguaaauaaugcauguugau

SEQ ID NO: 233429 - RNA, 22 nt, Human
uccagcccuguggcuuccaccc

SEQ ID NO: 233430 - RNA, 22 nt, Human
uaaccuacuaugauucugggaa

SEQ ID NO: 233431 - RNA, 22 nt, Human
ucuccgaucacagguuuucaau

SEQ ID NO: 233432 - RNA, 22 nt, Human
cauuagggccaccauaacaaaa

SEQ ID NO: 233433 - RNA, 23 nt, Human
ugcaacaaugaggaaagcuacug

SEQ ID NO: 233434 - RNA, 22 nt, Human
aaaguccuagcgauccacagaa

SEQ ID NO: 233435 - RNA, 22 nt, Human
ccagggcagggaccacgugucu

SEQ ID NO: 233436 - RNA, 20 nt, Human
aaagauacuuuuuguaaugg

SEQ ID NO: 233437 - RNA, 22 nt, Human
ccagggcagcgccccuccacgc

SEQ ID NO: 233438 - RNA, 22 nt, Human
agagccuugaagaucuggaaaa

SEQ ID NO: 233439 - RNA, 22 nt, Human
aagagagacaauagguagcauu

SEQ ID NO: 233440 - RNA, 22 nt, Human
uuuacaguccccaggugaggau

SEQ ID NO: 233441 - RNA, 20 nt, Human
cuugguggcucugggaagug

SEQ ID NO: 233442 - RNA, 22 nt, Human
gaaaugaugucugugcugccac

SEQ ID NO: 233443 - RNA, 22 nt, Human
cugccagguuggcgcucgcucu

SEQ ID NO: 233444 - RNA, 22 nt, Human
ucugacuuuucucacuguugug

SEQ ID NO: 233445 - RNA, 22 nt, Human
ggggaggagccauguaacuagu

SEQ ID NO: 233446 - RNA, 22 nt, Human
cuggcuggaacgccgaggcggc

SEQ ID NO: 233447 - RNA, 22 nt, Human
uauaucauggagauuaacauuc

SEQ ID NO: 233448 - RNA, 22 nt, Human
aauuuuacaagaaggccucgua

SEQ ID NO: 233449 - RNA, 22 nt, Human
cauuuccacuucugaaaacugg

SEQ ID NO: 233450 - RNA, 18 nt, Human
ggccucagccuggccgga

SEQ ID NO: 233451 - RNA, 22 nt, Human
gcaaguacaaacgcaucggcug

SEQ ID NO: 233452 - RNA, 22 nt, Human
ucagagaaaggccaaaauauca

SEQ ID NO: 233453 - RNA, 20 nt, Human
aaggaacucacccaugggcu

SEQ ID NO: 233454 - RNA, 22 nt, Human
acacauauauacauauuugugc

SEQ ID NO: 233455 - RNA, 22 nt, Human
cauuaugugggaaaauguucuu

SEQ ID NO: 233456 - RNA, 22 nt, Human
auguuuacaaaaaggaggcuug

SEQ ID NO: 233457 - RNA, 22 nt, Human
caucaguaaggcaacauagcuu

SEQ ID NO: 233458 - RNA, 18 nt, Human
uagaaucuguuauugccu

SEQ ID NO: 233459 - RNA, 23 nt, Human
augcccuguagaggcugcugacc

SEQ ID NO: 233460 - RNA, 22 nt, Human
acaugacaagguuuauaaggcu

SEQ ID NO: 233461 - RNA, 22 nt, Human
ucaggcugccuaucagacugug

SEQ ID NO: 233462 - RNA, 22 nt, Human
ggcugaaagcgcgacuugcccc

SEQ ID NO: 233463 - RNA, 22 nt, Human
ugccucugugugcaggugagca

SEQ ID NO: 233464 - RNA, 22 nt, Human
auaguacauggguguccucaca

SEQ ID NO: 233465 - RNA, 22 nt, Human
ucccagagucagagguggggcc

SEQ ID NO: 233466 - RNA, 22 nt, Human
gaggcugaaguguacaugggug

SEQ ID NO: 233467 - RNA, 20 nt, Human
ugccuuagagauaaaggcuu

SEQ ID NO: 233468 - RNA, 18 nt, Human
gccagagggaagcaggug

SEQ ID NO: 233469 - RNA, 22 nt, Human
ggcugagcuuauauaugugcug

SEQ ID NO: 233470 - RNA, 22 nt, Human
caaaaaacacagaugucugugu

SEQ ID NO: 233471 - RNA, 22 nt, Human
aucuacagugcacaggacagcc

SEQ ID NO: 233472 - RNA, 22 nt, Human
aaucaagagcugacuauauuuu

SEQ ID NO: 233473 - RNA, 22 nt, Human
aacaauguucuuuuagcuugaa

SEQ ID NO: 233474 - RNA, 22 nt, Human
uauugcugccauuuuccaaugu

SEQ ID NO: 233475 - RNA, 22 nt, Human
guucucucagcgauagugaugg

SEQ ID NO: 233476 - RNA, 22 nt, Human
aucuuggggaauccucugugua

SEQ ID NO: 233477 - RNA, 23 nt, Human
aguuucuuugagacuugcccugu

SEQ ID NO: 233478 - RNA, 19 nt, Human
ucucuggcaguucagagca

SEQ ID NO: 233479 - RNA, 22 nt, Human
gcugggagcaaagccaugcaua

SEQ ID NO: 233480 - RNA, 22 nt, Human
uacauguggccagaaauuugag

SEQ ID NO: 233481 - RNA, 22 nt, Human
augcugcacaagccacauguag

SEQ ID NO: 233482 - RNA, 22 nt, Human
guuauuuuaucucugagagguu

SEQ ID NO: 233483 - RNA, 22 nt, Human
uccuggcuuccacuccucuguu

SEQ ID NO: 233484 - RNA, 22 nt, Human
gcaacagcauucucauugacau

SEQ ID NO: 233485 - RNA, 22 nt, Human
uggcccaguagaaaagggaucg

SEQ ID NO: 233486 - RNA, 22 nt, Human
ccaggaggcagaaguugcagug

SEQ ID NO: 233487 - RNA, 22 nt, Human
auuggagaagaacaugaauuag

SEQ ID NO: 233488 - RNA, 22 nt, Human
agaggccagaaggcgcaccccg

SEQ ID NO: 233489 - RNA, 22 nt, Human
uuuggaaauacgcguaggcaga

SEQ ID NO: 233490 - RNA, 22 nt, Human
ggcuuuauguuuuucauguggu

SEQ ID NO: 233491 - RNA, 22 nt, Human
uucaguuuugcuuuuaaucaug

SEQ ID NO: 233492 - RNA, 22 nt, Human
ugcuggcuguauaugugagagu

SEQ ID NO: 233493 - RNA, 22 nt, Human
cuacuucugugaugaaacuaca

SEQ ID NO: 233494 - RNA, 22 nt, Human
uuucuucaauugcuaacaagga

SEQ ID NO: 233495 - RNA, 22 nt, Human
aaaaccacuuccuugcuauugg

SEQ ID NO: 233496 - RNA, 22 nt, Human
acagcagagaacuuuagagggu

SEQ ID NO: 233497 - RNA, 22 nt, Human
auuuccuucggacaguuugggu

SEQ ID NO: 233498 - RNA, 22 nt, Human
ggagaggagauuguggcauuuu

SEQ ID NO: 233499 - RNA, 19 nt, Human
aucuagauuauugagaagg

SEQ ID NO: 233500 - RNA, 22 nt, Human
uccaggcaaagggacuagcagg

SEQ ID NO: 233501 - RNA, 22 nt, Human
aaucuagagaacuguggggcag

SEQ ID NO: 233502 - RNA, 22 nt, Human
cuggugcacuacagccuggaac

SEQ ID NO: 233503 - RNA, 22 nt, Human
uaaaaucauucuggugucagua

SEQ ID NO: 233504 - RNA, 22 nt, Human
acagucuacaaagugaugugug

SEQ ID NO: 233505 - RNA, 22 nt, Human
agucuguguaccuuuggccuuc

SEQ ID NO: 233506 - RNA, 22 nt, Human
auggaaaaggcugauuucauua

SEQ ID NO: 233507 - RNA, 22 nt, Human
uugcugggucagaagccaggag

SEQ ID NO: 233508 - RNA, 22 nt, Human
aaggggauagagcagacacucc

SEQ ID NO: 233509 - RNA, 18 nt, Human
ucaaaauauuucugugga

SEQ ID NO: 233510 - RNA, 22 nt, Human
aggccaggggugagcacuucug

SEQ ID NO: 233511 - RNA, 22 nt, Human
uuuauguaauuucauaggugug

SEQ ID NO: 233512 - RNA, 21 nt, Human
aaugucuuuguccaugcucug

SEQ ID NO: 233513 - RNA, 22 nt, Human
cagaggaacguuuggauugauu

SEQ ID NO: 233514 - RNA, 22 nt, Human
ggaaggguuuggaaagccgaga

SEQ ID NO: 233515 - RNA, 22 nt, Human
gcagaugcagaacucagugggu

SEQ ID NO: 233516 - RNA, 22 nt, Human
ucuguacaugaguugagaauca

SEQ ID NO: 233517 - RNA, 21 nt, Human
ucccugaguucucugagcauc

SEQ ID NO: 233518 - RNA, 22 nt, Human
aaacucagauguggugaagacc

SEQ ID NO: 233519 - RNA, 22 nt, Human
uguacaggagaacaaugagaaa

SEQ ID NO: 233520 - RNA, 22 nt, Human
ugugggaagauguugcaggaga

SEQ ID NO: 233521 - RNA, 22 nt, Human
uggugcaguagagcugucuggg

SEQ ID NO: 233522 - RNA, 22 nt, Human
ucuucuccagugcuucugcaca

SEQ ID NO: 233523 - RNA, 22 nt, Human
uagcuauuuggaaaauuccaau

SEQ ID NO: 233524 - RNA, 22 nt, Human
ucccugaugccuugauccgugg

SEQ ID NO: 233525 - RNA, 22 nt, Human
uguggcaguauaagagcuagaa

SEQ ID NO: 233526 - RNA, 22 nt, Human
gauacauuccauuucuacuuaa

SEQ ID NO: 233527 - RNA, 22 nt, Human
ucuagaaaguuuguacugauuu

SEQ ID NO: 233528 - RNA, 22 nt, Human
acccagagucauggcacuuagc

SEQ ID NO: 233529 - RNA, 22 nt, Human
agcagcucaagacuuaaauuug

SEQ ID NO: 233530 - RNA, 22 nt, Human
ccagggugggguccaggaacca

SEQ ID NO: 233531 - RNA, 22 nt, Human
uuugggcucacuaugcugaaga

SEQ ID NO: 233532 - RNA, 20 nt, Human
ucagagagagggugccacuu

SEQ ID NO: 233533 - RNA, 22 nt, Human
cccacacauuuuucacuuaccg

SEQ ID NO: 233534 - RNA, 22 nt, Human
uuccuggcauagagagggcaca

SEQ ID NO: 233535 - RNA, 22 nt, Human
ccagguguuuggccugcaugau

SEQ ID NO: 233536 - RNA, 22 nt, Human
acucuguaaagcauaacguuug

SEQ ID NO: 233537 - RNA, 23 nt, Human
aauaucugcagcuccuggggagg

SEQ ID NO: 233538 - RNA, 22 nt, Human
ugucuccauggugaagcagggu

SEQ ID NO: 233539 - RNA, 22 nt, Human
auaagacacgccccacucacuc

SEQ ID NO: 233540 - RNA, 22 nt, Human
uuccuucuagcccaaguauugg

SEQ ID NO: 233541 - RNA, 22 nt, Human
caugucccaaaugcaggcaaag

SEQ ID NO: 233542 - RNA, 22 nt, Human
guuuuccuucucagccauugcc

SEQ ID NO: 233543 - RNA, 22 nt, Human
ucuacauuuucacaaggucucc

SEQ ID NO: 233544 - RNA, 19 nt, Human
cugcuuccuucccucacug

SEQ ID NO: 233545 - RNA, 22 nt, Human
augucuuugccauaguucauau

SEQ ID NO: 233546 - RNA, 22 nt, Human
gaucagaguggcuagagccuug

SEQ ID NO: 233547 - RNA, 22 nt, Human
ucaauaacuuuguuuagcauug

SEQ ID NO: 233548 - RNA, 22 nt, Human
auucuuggcaaggagauuuaaa

SEQ ID NO: 233549 - RNA, 22 nt, Human
gugcaggcucucguucuugaca

SEQ ID NO: 233550 - RNA, 22 nt, Human
gaggaguguauuccacaccacu

SEQ ID NO: 233551 - RNA, 22 nt, Human
agcuucucccuuuccuauuggu

SEQ ID NO: 233552 - RNA, 22 nt, Human
uccaggcaucuguauuuuuuaa

SEQ ID NO: 233553 - RNA, 22 nt, Human
ugaagggguucagcaugggggu

SEQ ID NO: 233554 - RNA, 22 nt, Human
ugcuggaggccugacuguguuu

SEQ ID NO: 233555 - RNA, 22 nt, Human
uugcaggguccuguggcucucc

SEQ ID NO: 233556 - RNA, 22 nt, Human
aggcaggcacacuuccuccagg

SEQ ID NO: 233557 - RNA, 20 nt, Human
ugggcucugcuuccuggagu

SEQ ID NO: 233558 - RNA, 22 nt, Human
ucaggaagcugaauuacaaaaa

SEQ ID NO: 233559 - RNA, 22 nt, Human
uaacagaagaugaaacuucuuu

SEQ ID NO: 233560 - RNA, 22 nt, Human
uaaagcugaaaugauuaugaca

SEQ ID NO: 233561 - RNA, 22 nt, Human
guacauuuacugaugaaaagua

SEQ ID NO: 233562 - RNA, 17 nt, Human
cccugcacccuacucuc

SEQ ID NO: 233563 - RNA, 22 nt, Human
acuucugauuaaggaugaaugc

SEQ ID NO: 233564 - RNA, 22 nt, Human
uguccagagucacagagcucaa

SEQ ID NO: 233565 - RNA, 22 nt, Human
uuuguuacaaagaaagaagagc

SEQ ID NO: 233566 - RNA, 22 nt, Human
aaccuggcugcaaagaagggga

SEQ ID NO: 233567 - RNA, 22 nt, Human
guggcagauugcucaccauggu

SEQ ID NO: 233568 - RNA, 22 nt, Human
augagcaauuaggaagaaaaca

SEQ ID NO: 233569 - RNA, 22 nt, Human
agaauuagucacaauuauagga

SEQ ID NO: 233570 - RNA, 23 nt, Human
uaacucugugaagggugacuggg

SEQ ID NO: 233571 - RNA, 19 nt, Human
aaaaacuuaguccagaaag

SEQ ID NO: 233572 - RNA, 22 nt, Human
caggaagaaggguggugagucc

SEQ ID NO: 233573 - RNA, 22 nt, Human
gggcuccaucacaggcuccauc

SEQ ID NO: 233574 - RNA, 22 nt, Human
agauguuuaaaaagaugacucu

SEQ ID NO: 233575 - RNA, 21 nt, Human
agcaggaggcagucacagcuc

SEQ ID NO: 233576 - RNA, 22 nt, Human
gcauaguaggcugucaaaaaug

SEQ ID NO: 233577 - RNA, 22 nt, Human
ccaguuucuuaaguaggaagaa

SEQ ID NO: 233578 - RNA, 20 nt, Human
uggaaguucuguugcauugg

SEQ ID NO: 233579 - RNA, 22 nt, Human
uggaacacacuucaaggagaaa

SEQ ID NO: 233580 - RNA, 22 nt, Human
cacaccuguaauccuagcacuu

SEQ ID NO: 233581 - RNA, 22 nt, Human
gugaaaauaaggcugguucuug

SEQ ID NO: 233582 - RNA, 22 nt, Human
acagcagcuaaccccugggcca

SEQ ID NO: 233583 - RNA, 22 nt, Human
auguacaaccugcaugacaguc

SEQ ID NO: 233584 - RNA, 22 nt, Human
ugcuugaagccuacauucguca

SEQ ID NO: 233585 - RNA, 22 nt, Human
ggcaagagguccaagaggucuc

SEQ ID NO: 233586 - RNA, 22 nt, Human
auguaacuguuauauuuuguug

SEQ ID NO: 233587 - RNA, 22 nt, Human
auuaguguguaggcuggaaaaa

SEQ ID NO: 233588 - RNA, 20 nt, Human
gccugcagagaaggucagag

SEQ ID NO: 233589 - RNA, 20 nt, Human
accagagauagcaauagugc

SEQ ID NO: 233590 - RNA, 22 nt, Human
cugcuuuugagcccagugcuca

SEQ ID NO: 233591 - RNA, 22 nt, Human
uaagacugugagcucagagacu

SEQ ID NO: 233592 - RNA, 22 nt, Human
caggcuugaugugucuauacuu

SEQ ID NO: 233593 - RNA, 22 nt, Human
aggcccaguuauccuacuuguu

SEQ ID NO: 233594 - RNA, 22 nt, Human
ggucagaggggauuccuuggga

SEQ ID NO: 233595 - RNA, 22 nt, Human
aggcugcugaggccaccacgcu

SEQ ID NO: 233596 - RNA, 22 nt, Human
gcugguuagaaaacagagcuca

SEQ ID NO: 233597 - RNA, 22 nt, Human
cccagcauccucagggagcggg

SEQ ID NO: 233598 - RNA, 22 nt, Human
caggcagaaggaaguaccaggc

SEQ ID NO: 233599 - RNA, 22 nt, Human
uaacuggugaguaggauuuaua

SEQ ID NO: 233600 - RNA, 22 nt, Human
ccagggagcggggcugggucuc

SEQ ID NO: 233601 - RNA, 22 nt, Human
cucuucuugccugaugaggcag

SEQ ID NO: 233602 - RNA, 22 nt, Human
gcccccucuuuggagccagcca

SEQ ID NO: 233603 - RNA, 22 nt, Human
gcaugcaggaagggcuugggga

SEQ ID NO: 233604 - RNA, 22 nt, Human
ucccugagaaagcccaggaggu

SEQ ID NO: 233605 - RNA, 22 nt, Human
acagacauauuuggcccauagc

SEQ ID NO: 233606 - RNA, 22 nt, Human
uggcagagguaauucaaauccc

SEQ ID NO: 233607 - RNA, 22 nt, Human
ccagagggagccaccagggugu

SEQ ID NO: 233608 - RNA, 22 nt, Human
aauguaaacagcaagagaaggg

SEQ ID NO: 233609 - RNA, 22 nt, Human
gagggcugccacguugggcgag

SEQ ID NO: 233610 - RNA, 22 nt, Human
ucaccagggcuccagccagccu

SEQ ID NO: 233611 - RNA, 22 nt, Human
uaaauuacucaaugcacauaaa

SEQ ID NO: 233612 - RNA, 22 nt, Human
ugacagagccaagaucaguacu

SEQ ID NO: 233613 - RNA, 22 nt, Human
agaaaaaucuuggcgcuugucu

SEQ ID NO: 233614 - RNA, 22 nt, Human
cuguccccgcgaguccagagcu

SEQ ID NO: 233615 - RNA, 22 nt, Human
agagccuguuuugugggagaug

SEQ ID NO: 233616 - RNA, 22 nt, Human
gaggcuccgugcugcugcccug

SEQ ID NO: 233617 - RNA, 23 nt, Human
aggagacagggaagugccuggcu

SEQ ID NO: 233618 - RNA, 22 nt, Human
cugcccugggccaggaagcggc

SEQ ID NO: 233619 - RNA, 22 nt, Human
ugcagugugagguccacaucug

SEQ ID NO: 233620 - RNA, 21 nt, Human
uuugccuucacgaagcauccu

SEQ ID NO: 233621 - RNA, 22 nt, Human
ccagacuggggcuccuugaggg

SEQ ID NO: 233622 - RNA, 22 nt, Human
ugggcucucuuuaccucauaac

SEQ ID NO: 233623 - RNA, 21 nt, Human
ucugagaacuucugcugcagc

SEQ ID NO: 233624 - RNA, 22 nt, Human
ggacaguccaccucagugaaga

SEQ ID NO: 233625 - RNA, 22 nt, Human
aaguuuuugauucuaagagaga

SEQ ID NO: 233626 - RNA, 23 nt, Human
gcaaagacucugccaaaaacugc

SEQ ID NO: 233627 - RNA, 22 nt, Human
uaauuuugucacagugacaugc

SEQ ID NO: 233628 - RNA, 22 nt, Human
ugacacaugcaccagucuuuaa

SEQ ID NO: 233629 - RNA, 22 nt, Human
cuuggcugucauaagguccugg

SEQ ID NO: 233630 - RNA, 22 nt, Human
gccuggguuccaugaucuccag

SEQ ID NO: 233631 - RNA, 22 nt, Human
ccagcaggagacuagcaacaua

SEQ ID NO: 233632 - RNA, 15 nt, Human
gggcaggucuggggc

SEQ ID NO: 233633 - RNA, 23 nt, Human
uaagacacccgacuccagagaug

SEQ ID NO: 233634 - RNA, 22 nt, Human
cugaggccucacuguagucccu

SEQ ID NO: 233635 - RNA, 22 nt, Human
ugauugauacaacucaauccaa

SEQ ID NO: 233636 - RNA, 22 nt, Human
uggcuuccagaacugagcaaca

SEQ ID NO: 233637 - RNA, 22 nt, Human
uuuaauuugaaaugaguaaccc

SEQ ID NO: 233638 - RNA, 23 nt, Human
cuacugccuugcacaggcuagau

SEQ ID NO: 233639 - RNA, 22 nt, Human
agcaaagcaccauauggcaguu

SEQ ID NO: 233640 - RNA, 22 nt, Human
ucuaaugaguuagauaauuuug

SEQ ID NO: 233641 - RNA, 22 nt, Human
gaugauggguugaugugaaggg

SEQ ID NO: 233642 - RNA, 22 nt, Human
gucuuuaugguaugaaaacuga

SEQ ID NO: 233643 - RNA, 22 nt, Human
uuccuccuacgcuuaucacuuu

SEQ ID NO: 233644 - RNA, 22 nt, Human
uaggcugggcugagcuggacgg

SEQ ID NO: 233645 - RNA, 22 nt, Human
auacaguagggaccaugucuga

SEQ ID NO: 233646 - RNA, 22 nt, Human
agcugaaaggguguuggagugu

SEQ ID NO: 233647 - RNA, 19 nt, Human
cugcucuccuugacuugga

SEQ ID NO: 233648 - RNA, 22 nt, Human
gggcuguguaaugugcucuuuu

SEQ ID NO: 233649 - RNA, 22 nt, Human
gcugcagggaauguauggauuu

SEQ ID NO: 233650 - RNA, 22 nt, Human
gcuguauuccugcacuguauag

SEQ ID NO: 233651 - RNA, 22 nt, Human
cagugcagaacacauggaaaau

SEQ ID NO: 233652 - RNA, 22 nt, Human
ugagcaguggggccugcauucu

SEQ ID NO: 233653 - RNA, 22 nt, Human
auauuacauaaacaugagugaa

SEQ ID NO: 233654 - RNA, 22 nt, Human
augaaggcuguguggagccccc

SEQ ID NO: 233655 - RNA, 22 nt, Human
agguguccaggaagaugcuggc

SEQ ID NO: 233656 - RNA, 22 nt, Human
ccaaaagcagcugucugugaau

SEQ ID NO: 233657 - RNA, 22 nt, Human
gggaccugccaaggccacccag

SEQ ID NO: 233658 - RNA, 22 nt, Human
ccuucucucugaagaccccaaa

SEQ ID NO: 233659 - RNA, 22 nt, Human
guugggaaggugaacaugaugc

SEQ ID NO: 233660 - RNA, 22 nt, Human
ucccauauaugcaaaaauguaa

SEQ ID NO: 233661 - RNA, 22 nt, Human
aguauuucuucauaugauuacu

SEQ ID NO: 233662 - RNA, 22 nt, Human
uggagagcaagucgcagacaug

SEQ ID NO: 233663 - RNA, 22 nt, Human
aauauguugagucuaucuuuau

SEQ ID NO: 233664 - RNA, 21 nt, Human
aaggaaaagcuuggucucuga

SEQ ID NO: 233665 - RNA, 22 nt, Human
agcauggggcaaugcaugugcu

SEQ ID NO: 233666 - RNA, 22 nt, Human
aauaugaauuauuguuacaagu

SEQ ID NO: 233667 - RNA, 22 nt, Human
accaagugaguacuuggcagaa

SEQ ID NO: 233668 - RNA, 22 nt, Human
ugaauucuuuuagaauucagug

SEQ ID NO: 233669 - RNA, 22 nt, Human
gcacagaaguaaaauacaaguc

SEQ ID NO: 233670 - RNA, 21 nt, Human
gcugcccaacccugcaucucc

SEQ ID NO: 233671 - RNA, 22 nt, Human
uaacauuagguagacauaagcc

SEQ ID NO: 233672 - RNA, 22 nt, Human
agcucccauuaucuucugaaac

SEQ ID NO: 233673 - RNA, 22 nt, Human
gugaggugguacaauauuaacu

SEQ ID NO: 233674 - RNA, 22 nt, Human
ggaggccuggacuuccugaugg

SEQ ID NO: 233675 - RNA, 19 nt, Human
uuucugucuguguuuugcc

SEQ ID NO: 233676 - RNA, 22 nt, Human
uggcccagggucuacagccuca

SEQ ID NO: 233677 - RNA, 22 nt, Human
aucuuucaguuucauaccaauu

SEQ ID NO: 233678 - RNA, 22 nt, Human
ccaggaaggccuggaugccccc

SEQ ID NO: 233679 - RNA, 22 nt, Human
ccagccacgaagcucccuucau

SEQ ID NO: 233680 - RNA, 23 nt, Human
uggauaaaauacuuacauucaac

SEQ ID NO: 233681 - RNA, 22 nt, Human
agcuuuguggcuuugcaagacu

SEQ ID NO: 233682 - RNA, 22 nt, Human
uucugggcuuggcuguuuccau

SEQ ID NO: 233683 - RNA, 21 nt, Human
accaggcuugugggagggagc

SEQ ID NO: 233684 - RNA, 22 nt, Human
aagagcaggcugcuguggagua

SEQ ID NO: 233685 - RNA, 22 nt, Human
cagagccagggcuaggaacugg

SEQ ID NO: 233686 - RNA, 22 nt, Human
uuacacagugcacaagcagagu

SEQ ID NO: 233687 - RNA, 22 nt, Human
auacagaagaacuauagccacu

SEQ ID NO: 233688 - RNA, 22 nt, Human
gggcagguacuggguggugagc

SEQ ID NO: 233689 - RNA, 22 nt, Human
augacaagggaggguccugcua

SEQ ID NO: 233690 - RNA, 22 nt, Human
cagagacaggcuugcccuccac

SEQ ID NO: 233691 - RNA, 22 nt, Human
auauuagggucucuaaauucua

SEQ ID NO: 233692 - RNA, 22 nt, Human
ccagugacuggcuuucuggugu

SEQ ID NO: 233693 - RNA, 22 nt, Human
uuucauugagacuauagacauc

SEQ ID NO: 233694 - RNA, 22 nt, Human
gcuggggccugaacagucagcu

SEQ ID NO: 233695 - RNA, 22 nt, Human
acccugccaaggauggccccga

SEQ ID NO: 233696 - RNA, 22 nt, Human
gugugcagggaugagugcaggu

SEQ ID NO: 233697 - RNA, 22 nt, Human
aggaaugugaccacuagacucu

SEQ ID NO: 233698 - RNA, 22 nt, Human
auuuaaaugcuuaagaggguuu

SEQ ID NO: 233699 - RNA, 22 nt, Human
uuagauaaaaguguucaauaaa

SEQ ID NO: 233700 - RNA, 22 nt, Human
auuucagaugaccaaauggaaa

SEQ ID NO: 233701 - RNA, 22 nt, Human
auguucauuagucaacauuucu

SEQ ID NO: 233702 - RNA, 20 nt, Human
ccugcuguuuccauggggcc

SEQ ID NO: 233703 - RNA, 22 nt, Human
ggcugaaagguaguaguaggcu

SEQ ID NO: 233704 - RNA, 22 nt, Human
gcauccuggcucuaggugucau

SEQ ID NO: 233705 - RNA, 22 nt, Human
caggggcucugggugaugugag

SEQ ID NO: 233706 - RNA, 19 nt, Human
aaggcagcaguagcaucca

SEQ ID NO: 233707 - RNA, 22 nt, Human
cccaggcagccccagaagcuug

SEQ ID NO: 233708 - RNA, 22 nt, Human
augaggcaggagcggggacccu

SEQ ID NO: 233709 - RNA, 22 nt, Human
gcaggcaucucuguagccaggg

SEQ ID NO: 233710 - RNA, 22 nt, Human
ccagagccuggcaucugcauaa

SEQ ID NO: 233711 - RNA, 22 nt, Human
cuggccccaggcagccugcugg

SEQ ID NO: 233712 - RNA, 21 nt, Human
agaugcugaugcugcaggucc

SEQ ID NO: 233713 - RNA, 22 nt, Human
augaagggugucccugugagca

SEQ ID NO: 233714 - RNA, 22 nt, Human
uguuucuuacguuuuuagaggc

SEQ ID NO: 233715 - RNA, 22 nt, Human
uggaauuuaguuaauuccauuu

SEQ ID NO: 233716 - RNA, 22 nt, Human
agugcaggcucgcuugugaggc

SEQ ID NO: 233717 - RNA, 22 nt, Human
gggaccaggucagggcucugac

SEQ ID NO: 233718 - RNA, 21 nt, Human
cauuucuaagccuggcuauag

SEQ ID NO: 233719 - RNA, 22 nt, Human
uugcuaauaaaguuuuuaugug

SEQ ID NO: 233720 - RNA, 22 nt, Human
cuugagaagcauuaagagguag

SEQ ID NO: 233721 - RNA, 22 nt, Human
cacaggcuuuuuuggcugaugu

SEQ ID NO: 233722 - RNA, 22 nt, Human
acaggcagugauuuccucuggu

SEQ ID NO: 233723 - RNA, 22 nt, Human
ucaaaugcuguauuguaguaau

SEQ ID NO: 233724 - RNA, 22 nt, Human
ucuggagccuuggaugggaaag

SEQ ID NO: 233725 - RNA, 22 nt, Human
cuuuacagaaagagaacucugg

SEQ ID NO: 233726 - RNA, 22 nt, Human
ucuaacuugaacucaugacugu

SEQ ID NO: 233727 - RNA, 21 nt, Human
ccuccaggagcagagcccuga

SEQ ID NO: 233728 - RNA, 22 nt, Human
gcaggcuccaacuggaggaguu

SEQ ID NO: 233729 - RNA, 21 nt, Human
agugaaaugaaguguaugcuc

SEQ ID NO: 233730 - RNA, 22 nt, Human
auuuuacuacuccaauuaauga

SEQ ID NO: 233731 - RNA, 22 nt, Human
caggcugagcucuggccugggc

SEQ ID NO: 233732 - RNA, 21 nt, Human
aacauuucaggauccaaauug

SEQ ID NO: 233733 - RNA, 22 nt, Human
uauucccugauguacacuggca

SEQ ID NO: 233734 - RNA, 22 nt, Human
gaaagugccucaguccucuuau

SEQ ID NO: 233735 - RNA, 22 nt, Human
cucaaaaugguuaauuuuaaua

SEQ ID NO: 233736 - RNA, 22 nt, Human
cugguccuugacgcgugggagg

SEQ ID NO: 233737 - RNA, 22 nt, Human
ggugcuggacacguggcacucc

SEQ ID NO: 233738 - RNA, 22 nt, Human
ugccuuaggguaccuggugcuu

SEQ ID NO: 233739 - RNA, 22 nt, Human
uuaagggccauuauggaugggu

SEQ ID NO: 233740 - RNA, 22 nt, Human
ucagcacugaaauucuucacau

SEQ ID NO: 233741 - RNA, 22 nt, Human
ucugggucucagagugaccaug

SEQ ID NO: 233742 - RNA, 22 nt, Human
aguuuuauguagacaauucauu

SEQ ID NO: 233743 - RNA, 22 nt, Human
ucacuccucaggcuagcaucau

SEQ ID NO: 233744 - RNA, 22 nt, Human
aggaggaauugacacagaagcc

SEQ ID NO: 233745 - RNA, 15 nt, Human
ucccucagcuaaaga

SEQ ID NO: 233746 - RNA, 22 nt, Human
gagguucugggggucugccugg

SEQ ID NO: 233747 - RNA, 22 nt, Human
uuuauugucuaugaacugcuug

SEQ ID NO: 233748 - RNA, 22 nt, Human
auucugauaucuuauucuagcu

SEQ ID NO: 233749 - RNA, 22 nt, Human
cacugagaccagagucccugac

SEQ ID NO: 233750 - RNA, 22 nt, Human
ucaggagcugcauuauccugug

SEQ ID NO: 233751 - RNA, 22 nt, Human
cugcccuggcagccuaccaugg

SEQ ID NO: 233752 - RNA, 22 nt, Human
ucugcaagaucauuaaagcaga

SEQ ID NO: 233753 - RNA, 22 nt, Human
ucaggccuagggagccacacca

SEQ ID NO: 233754 - RNA, 22 nt, Human
aggcagguuuacucuuauuugg

SEQ ID NO: 233755 - RNA, 22 nt, Human
uuguauuuuuuccuggcggugg

SEQ ID NO: 233756 - RNA, 22 nt, Human
uccuggcacaacccuuuaccag

SEQ ID NO: 233757 - RNA, 22 nt, Human
gccucuccgagccacugccucu

SEQ ID NO: 233758 - RNA, 22 nt, Human
cagcagugacaagacuaagaag

SEQ ID NO: 233759 - RNA, 22 nt, Human
acaauacaggcuucuggacuua

SEQ ID NO: 233760 - RNA, 22 nt, Human
guccucuggccuuucccaggac

SEQ ID NO: 233761 - RNA, 22 nt, Human
auucuacauuuggagugauguc

SEQ ID NO: 233762 - RNA, 22 nt, Human
auuggcuuugauaucuaaaggg

SEQ ID NO: 233763 - RNA, 17 nt, Human
acagaggcaggagugga

SEQ ID NO: 233764 - RNA, 22 nt, Human
uugcuuugguagcagcuauaga

SEQ ID NO: 233765 - RNA, 19 nt, Human
ugcuguccucagaguaagu

SEQ ID NO: 233766 - RNA, 22 nt, Human
acagucuaggccuaggucaaaa

SEQ ID NO: 233767 - RNA, 22 nt, Human
uacacaugugcacgcguguccu

SEQ ID NO: 233768 - RNA, 20 nt, Human
uuaaaaagagucacaggaga

SEQ ID NO: 233769 - RNA, 22 nt, Human
gcauguguggaggagaugugcu

SEQ ID NO: 233770 - RNA, 22 nt, Human
ucaggcagaauuaucaaaagau

SEQ ID NO: 233771 - RNA, 22 nt, Human
aaugugacugaauauuuacucu

SEQ ID NO: 233772 - RNA, 22 nt, Human
gugcccugcaugccccggguau

SEQ ID NO: 233773 - RNA, 22 nt, Human
ugagacaggagaggccccuccu

SEQ ID NO: 233774 - RNA, 22 nt, Human
uucuuucuguccauaaugagac

SEQ ID NO: 233775 - RNA, 22 nt, Human
ucucuguaauaucuuuuacaac

SEQ ID NO: 233776 - RNA, 22 nt, Human
uuucacauuggcuucuauuucu

SEQ ID NO: 233777 - RNA, 22 nt, Human
cagugcucccgcugccgcugug

SEQ ID NO: 233778 - RNA, 22 nt, Human
ugaggccucuugguauggugug

SEQ ID NO: 233779 - RNA, 21 nt, Human
gggcagaggggccuccugggu

SEQ ID NO: 233780 - RNA, 22 nt, Human
uuuccucaacugucaaaugggg

SEQ ID NO: 233781 - RNA, 22 nt, Human
aggagccaggccccauggggcu

SEQ ID NO: 233782 - RNA, 22 nt, Human
aggcugagucaaguuaggguga

SEQ ID NO: 233783 - RNA, 22 nt, Human
acaggcaccugccaccacaucu

SEQ ID NO: 233784 - RNA, 22 nt, Human
cucaggcugugccaccugugug

SEQ ID NO: 233785 - RNA, 22 nt, Human
uucuccagccuauuggccuauc

SEQ ID NO: 233786 - RNA, 22 nt, Human
uguagcaccagucaccagccca

SEQ ID NO: 233787 - RNA, 22 nt, Human
ggcagcuguaagaugagugaau

SEQ ID NO: 233788 - RNA, 22 nt, Human
aauagcauccuguaucucuucc

SEQ ID NO: 233789 - RNA, 22 nt, Human
agggccugucuguagaacugaa

SEQ ID NO: 233790 - RNA, 22 nt, Human
uaacacugugcccagaguccca

SEQ ID NO: 233791 - RNA, 21 nt, Human
gcuuuuuguauggcccaggaa

SEQ ID NO: 233792 - RNA, 22 nt, Human
ugaaugauauauugggaauaau

SEQ ID NO: 233793 - RNA, 21 nt, Human
ucucuggcgguguuuggcucc

SEQ ID NO: 233794 - RNA, 22 nt, Human
aggauucagaauguaugcagug

SEQ ID NO: 233795 - RNA, 22 nt, Human
auauuguuaguaauauuucgaa

SEQ ID NO: 233796 - RNA, 22 nt, Human
gcgugcaacagccucuuccauu

SEQ ID NO: 233797 - RNA, 22 nt, Human
aggagagagaacacuugggucc

SEQ ID NO: 233798 - RNA, 22 nt, Human
ucagugcuugccucuggaggag

SEQ ID NO: 233799 - RNA, 22 nt, Human
ucuuuggauggaaaauguauuc

SEQ ID NO: 233800 - RNA, 22 nt, Human
guauaucaccccaagcagcuga

SEQ ID NO: 233801 - RNA, 22 nt, Human
cuguccccauuguuugaggguu

SEQ ID NO: 233802 - RNA, 22 nt, Human
uucauuuaauuuguguauuaac

SEQ ID NO: 233803 - RNA, 22 nt, Human
cagagccagagaccugcugugc

SEQ ID NO: 233804 - RNA, 22 nt, Human
agcagggccaacaguaaacacc

SEQ ID NO: 233805 - RNA, 22 nt, Human
gcaguccaaaguggcucucacc

SEQ ID NO: 233806 - RNA, 22 nt, Human
ucagugucaucacuuaauauaa

SEQ ID NO: 233807 - RNA, 22 nt, Human
aggaaaagugugaaguauggag

SEQ ID NO: 233808 - RNA, 19 nt, Human
agcagcuggagguggagug

SEQ ID NO: 233809 - RNA, 22 nt, Human
acauucuucuugugaauuuacu

SEQ ID NO: 233810 - RNA, 20 nt, Human
ccugcugggaacccucugaa

SEQ ID NO: 233811 - RNA, 21 nt, Human
auggaaaaacagguagagcau

SEQ ID NO: 233812 - RNA, 22 nt, Human
uguuuuuccaugugcagaacaa

SEQ ID NO: 233813 - RNA, 22 nt, Human
ugcaggguagacaggugagguc

SEQ ID NO: 233814 - RNA, 22 nt, Human
cuggauguccagguagaaguuu

SEQ ID NO: 233815 - RNA, 22 nt, Human
uuggccaguggaaagaggagga

SEQ ID NO: 233816 - RNA, 22 nt, Human
ggagaaggguauguguggcgga

SEQ ID NO: 233817 - RNA, 22 nt, Human
uacugaggguaugaagccaagg

SEQ ID NO: 233818 - RNA, 22 nt, Human
uacaucaaaucaauguuccagu

SEQ ID NO: 233819 - RNA, 22 nt, Human
uuucaacagcucucaaaugauc

SEQ ID NO: 233820 - RNA, 22 nt, Human
ccagacagcaguuaaaggacau

SEQ ID NO: 233821 - RNA, 22 nt, Human
auuuauuaagcaucugcuaugu

SEQ ID NO: 233822 - RNA, 22 nt, Human
cccuccuuucuaggcuuccagc

SEQ ID NO: 233823 - RNA, 21 nt, Human
aggaggaacccguggcugggc

SEQ ID NO: 233824 - RNA, 22 nt, Human
aucuauuucugcuaauaacaau

SEQ ID NO: 233825 - RNA, 22 nt, Human
uuaauaaaguaugaauuggaaa

SEQ ID NO: 233826 - RNA, 17 nt, Human
caggcacaugaagccag

SEQ ID NO: 233827 - RNA, 18 nt, Human
ucuggcucaggacugaac

SEQ ID NO: 233828 - RNA, 22 nt, Human
acuuugcaaaaggaaaucaccu

SEQ ID NO: 233829 - RNA, 22 nt, Human
cuguugcugagguucaaggguc

SEQ ID NO: 233830 - RNA, 22 nt, Human
gcugucuugaugauuggaugcu

SEQ ID NO: 233831 - RNA, 20 nt, Human
ucauccaggacaggaguggc

SEQ ID NO: 233832 - RNA, 23 nt, Human
guguuacuaaagaugaacauuua

SEQ ID NO: 233833 - RNA, 22 nt, Human
uuucaaaguggagaauuagaca

SEQ ID NO: 233834 - RNA, 18 nt, Human
gaugggagcaagagaaga

SEQ ID NO: 233835 - RNA, 22 nt, Human
acugaagaacgcaucagugguu

SEQ ID NO: 233836 - RNA, 22 nt, Human
agaaguuuguuauguaaacaaa

SEQ ID NO: 233837 - RNA, 22 nt, Human
ccuguacagugaaugaauguga

SEQ ID NO: 233838 - RNA, 21 nt, Human
agguggucugcagcagcugaa

SEQ ID NO: 233839 - RNA, 22 nt, Human
uaugaagacaaugauagcauga

SEQ ID NO: 233840 - RNA, 22 nt, Human
uagaagcagcaggaguaaaggc

SEQ ID NO: 233841 - RNA, 22 nt, Human
ccagggcugcugugggacucca

SEQ ID NO: 233842 - RNA, 22 nt, Human
aaacaguacucgauuuuuguag

SEQ ID NO: 233843 - RNA, 22 nt, Human
uaugcaacaucugguagaaauc

SEQ ID NO: 233844 - RNA, 22 nt, Human
uacuucaaccuucucuauuaga

SEQ ID NO: 233845 - RNA, 22 nt, Human
acaggugugcggaaagcuguga

SEQ ID NO: 233846 - RNA, 22 nt, Human
ucuggccccuggcaguccugga

SEQ ID NO: 233847 - RNA, 22 nt, Human
gcagcagcucucaaaguggucu

SEQ ID NO: 233848 - RNA, 22 nt, Human
agaaaagguugaaaguaggauu

SEQ ID NO: 233849 - RNA, 22 nt, Human
cccaggcuccuacuguauucug

SEQ ID NO: 233850 - RNA, 22 nt, Human
cccuuagaauuuuguaguuauu

SEQ ID NO: 233851 - RNA, 22 nt, Human
augaaacugaaggacaaccaga

SEQ ID NO: 233852 - RNA, 22 nt, Human
ucagagcuuaucucuugcugga

SEQ ID NO: 233853 - RNA, 22 nt, Human
ucagcuuuugucagaaauugua

SEQ ID NO: 233854 - RNA, 22 nt, Human
cagggaggcugucuuaugccug

SEQ ID NO: 233855 - RNA, 22 nt, Human
aagaauaaauuaagauacuuag

SEQ ID NO: 233856 - RNA, 22 nt, Human
aacuauacauauuuacauagac

SEQ ID NO: 233857 - RNA, 22 nt, Human
ccauuuguuguguauuaauauu

SEQ ID NO: 233858 - RNA, 22 nt, Human
gaagauuugaaacacauagaca

SEQ ID NO: 233859 - RNA, 22 nt, Human
augcacgccccacacuggugug

SEQ ID NO: 233860 - RNA, 22 nt, Human
gcagcuuuguaaaguaugaagc

SEQ ID NO: 233861 - RNA, 19 nt, Human
augcaacaaaaguguaaga

SEQ ID NO: 233862 - RNA, 22 nt, Human
agaggggcucauauccugucau

SEQ ID NO: 233863 - RNA, 22 nt, Human
uugagaacaggaguguucuuuu

SEQ ID NO: 233864 - RNA, 22 nt, Human
cuggguucucugcuuagggccu

SEQ ID NO: 233865 - RNA, 18 nt, Human
cccugaggcuagcaugcu

SEQ ID NO: 233866 - RNA, 22 nt, Human
caauaguauuuauugaacaccu

SEQ ID NO: 233867 - RNA, 22 nt, Human
ucucuguauucugauauucacu

SEQ ID NO: 233868 - RNA, 22 nt, Human
acacacagcgccuaccaugugc

SEQ ID NO: 233869 - RNA, 22 nt, Human
uugcagggcaaauggucagaua

SEQ ID NO: 233870 - RNA, 22 nt, Human
ucucaaauaggccuugguccug

SEQ ID NO: 233871 - RNA, 22 nt, Human
ugcaggaccggaaccaugggau

SEQ ID NO: 233872 - RNA, 22 nt, Human
aguccuggcucuacgggcuuca

SEQ ID NO: 233873 - RNA, 22 nt, Human
acaucucuccaaaggaaggugc

SEQ ID NO: 233874 - RNA, 22 nt, Human
gauugcuggggcaggcuguagc

SEQ ID NO: 233875 - RNA, 22 nt, Human
guggcugcagagggcacagcau

SEQ ID NO: 233876 - RNA, 22 nt, Human
agaauccuguuuuacuucauca

SEQ ID NO: 233877 - RNA, 22 nt, Human
aauggcaagagccacagaggcg

SEQ ID NO: 233878 - RNA, 22 nt, Human
cucugggaccacgugacucugc

SEQ ID NO: 233879 - RNA, 22 nt, Human
uccaggcacagaguuggucagu

SEQ ID NO: 233880 - RNA, 23 nt, Human
ugcuggcuguguuauugccaaca

SEQ ID NO: 233881 - RNA, 22 nt, Human
ggcuucuugugugucaggcucu

SEQ ID NO: 233882 - RNA, 22 nt, Human
ucaucugagguuugaggcaguu

SEQ ID NO: 233883 - RNA, 22 nt, Human
uaacaguagccuuauguggucu

SEQ ID NO: 233884 - RNA, 23 nt, Human
acuccccagucucuucuugccaa

SEQ ID NO: 233885 - RNA, 22 nt, Human
acauguaaaagauaaauuaaca

SEQ ID NO: 233886 - RNA, 22 nt, Human
uauaaaugcacuuuugaaauau

SEQ ID NO: 233887 - RNA, 22 nt, Human
gccagccaguuugcugauggcu

SEQ ID NO: 233888 - RNA, 22 nt, Human
uuaauacaacuguugucacugg

SEQ ID NO: 233889 - RNA, 22 nt, Human
uuuauauccaucuuugaaguaa

SEQ ID NO: 233890 - RNA, 22 nt, Human
ucuuccugcuuggugugucugg

SEQ ID NO: 233891 - RNA, 22 nt, Human
gccagcagccacagaagucacu

SEQ ID NO: 233892 - RNA, 22 nt, Human
gugagcuucugccucucagucc

SEQ ID NO: 233893 - RNA, 22 nt, Human
auguggcacagcacaguaagag

SEQ ID NO: 233894 - RNA, 18 nt, Human
agucaguugauggggacc

SEQ ID NO: 233895 - RNA, 21 nt, Human
ccucaaagaugaugggguuuc

SEQ ID NO: 233896 - RNA, 21 nt, Human
aaauacagaaacuuguuuuca

SEQ ID NO: 233897 - RNA, 22 nt, Human
uagcuguggagcagaggucucc

SEQ ID NO: 233898 - RNA, 22 nt, Human
auuuugacugcauuacagaaca

SEQ ID NO: 233899 - RNA, 22 nt, Human
uuucaguuuaugucuugaauua

SEQ ID NO: 233900 - RNA, 22 nt, Human
cugccuggccugaucuccacgc

SEQ ID NO: 233901 - RNA, 22 nt, Human
ucagugcaggaaucucuagcca

SEQ ID NO: 233902 - RNA, 22 nt, Human
auaucuaggcugaauguaaaau

SEQ ID NO: 233903 - RNA, 22 nt, Human
uuugaaagaaaccagugaguga

SEQ ID NO: 233904 - RNA, 22 nt, Human
caaaugaaguccaaagggcuua

SEQ ID NO: 233905 - RNA, 22 nt, Human
gaaaauguuagcuucauaguca

SEQ ID NO: 233906 - RNA, 22 nt, Human
ggcuuucuaugaacucaaaggc

SEQ ID NO: 233907 - RNA, 22 nt, Human
agugcuuuuauuauauacagga

SEQ ID NO: 233908 - RNA, 22 nt, Human
agcauuuauuucuuagaaauug

SEQ ID NO: 233909 - RNA, 22 nt, Human
guccuucucaaauccuguguuu

SEQ ID NO: 233910 - RNA, 22 nt, Human
ccaguccacgucaagaagaggu

SEQ ID NO: 233911 - RNA, 22 nt, Human
guucaguuuugaaauguuaauu

SEQ ID NO: 233912 - RNA, 23 nt, Human
agaaaccacugaagagauccagu

SEQ ID NO: 233913 - RNA, 22 nt, Human
gaaagcaguauuuaguucuguu

SEQ ID NO: 233914 - RNA, 22 nt, Human
gcucagagaaaacuggggcuug

SEQ ID NO: 233915 - RNA, 22 nt, Human
uuuuuauaccaccucucacuua

SEQ ID NO: 233916 - RNA, 22 nt, Human
aacaguuugcuuuaagaggcac

SEQ ID NO: 233917 - RNA, 22 nt, Human
uccagcacagaauuuccuagcu

SEQ ID NO: 233918 - RNA, 22 nt, Human
uggcccugacacgugguacugg

SEQ ID NO: 233919 - RNA, 18 nt, Human
cccagcccaccauuucuc

SEQ ID NO: 233920 - RNA, 22 nt, Human
ucugcuguugagcacaagugaa

SEQ ID NO: 233921 - RNA, 22 nt, Human
auuauacauuuuguguagagau

SEQ ID NO: 233922 - RNA, 22 nt, Human
uguuaaauguauuauguguucu

SEQ ID NO: 233923 - RNA, 22 nt, Human
ugccugccaugcagaaagcuga

SEQ ID NO: 233924 - RNA, 22 nt, Human
ucccagccugacagugcaucaa

SEQ ID NO: 233925 - RNA, 22 nt, Human
acagugcuuagcacagaguaga

SEQ ID NO: 233926 - RNA, 22 nt, Human
uacaaggaggcuaaugaugaca

SEQ ID NO: 233927 - RNA, 22 nt, Human
uguaaacaguaggacuaaagag

SEQ ID NO: 233928 - RNA, 22 nt, Human
cuggcagacuuaccaucagaca

SEQ ID NO: 233929 - RNA, 22 nt, Human
cuuacaagcaaaacaacuguag

SEQ ID NO: 233930 - RNA, 22 nt, Human
uuuguuuacaaaaauaagcagu

SEQ ID NO: 233931 - RNA, 22 nt, Human
aaaggcuugacuagaagggaga

SEQ ID NO: 233932 - RNA, 22 nt, Human
uacaugcaugauacaaaguugc

SEQ ID NO: 233933 - RNA, 22 nt, Human
uucuacaaauauuuacuguucc

SEQ ID NO: 233934 - RNA, 22 nt, Human
ugcaagagcagaaagaacugag

SEQ ID NO: 233935 - RNA, 22 nt, Human
aguguccuccucugggagccag

SEQ ID NO: 233936 - RNA, 22 nt, Human
aucuguggcagugaugagucuu

SEQ ID NO: 233937 - RNA, 22 nt, Human
ccaggagacaaagaugacugcu

SEQ ID NO: 233938 - RNA, 22 nt, Human
cagcuacaaauacuuuuguaug

SEQ ID NO: 233939 - RNA, 22 nt, Human
aaacugcacacgaugugccuga

SEQ ID NO: 233940 - RNA, 22 nt, Human
uugcuucaguagcucuuuaaag

SEQ ID NO: 233941 - RNA, 22 nt, Human
uccugggaugaggaaacaagga

SEQ ID NO: 233942 - RNA, 22 nt, Human
gauucucugcuaucuaucaccu

SEQ ID NO: 233943 - RNA, 22 nt, Human
cagagcaugaauaaaaguuaca

SEQ ID NO: 233944 - RNA, 22 nt, Human
uacagaauguuaugaagcauag

SEQ ID NO: 233945 - RNA, 22 nt, Human
agacacagaacacaaaagcaua

SEQ ID NO: 233946 - RNA, 22 nt, Human
aggcccucucauuccagaggca

SEQ ID NO: 233947 - RNA, 21 nt, Human
aagaaagauaauuaaggaccc

SEQ ID NO: 233948 - RNA, 22 nt, Human
ggccaagguguucugauaugcc

SEQ ID NO: 233949 - RNA, 22 nt, Human
auacuuucugaccaauuaauug

SEQ ID NO: 233950 - RNA, 22 nt, Human
caggaagcacagugaggagacc

SEQ ID NO: 233951 - RNA, 22 nt, Human
uauuguacauuucaaaguagcu

SEQ ID NO: 233952 - RNA, 22 nt, Human
uucacugugaacucauauucag

SEQ ID NO: 233953 - RNA, 22 nt, Human
ucacagaauaaauugagaagac

SEQ ID NO: 233954 - RNA, 22 nt, Human
gguagcacauugcauuaggaga

SEQ ID NO: 233955 - RNA, 22 nt, Human
agagaaaacucauugagguguc

SEQ ID NO: 233956 - RNA, 22 nt, Human
agaaaggguucucugaggugcu

SEQ ID NO: 233957 - RNA, 20 nt, Human
uauugaguaccuacuguaua

SEQ ID NO: 233958 - RNA, 22 nt, Human
acacauuucucuuuuuguaagu

SEQ ID NO: 233959 - RNA, 23 nt, Human
agcuucugguucaggucaagcag

SEQ ID NO: 233960 - RNA, 19 nt, Human
ggcaggcuggauagagagg

SEQ ID NO: 233961 - RNA, 22 nt, Human
aaaaacugguaacuauucccca

SEQ ID NO: 233962 - RNA, 22 nt, Human
uguucucuucucauugaacaug

SEQ ID NO: 233963 - RNA, 22 nt, Human
cugcuuuaauuuagacaaggca

SEQ ID NO: 233964 - RNA, 22 nt, Human
uuacauguggugugaagaagag

SEQ ID NO: 233965 - RNA, 22 nt, Human
agaggccucuguuguucagacg

SEQ ID NO: 233966 - RNA, 22 nt, Human
uuuuuagauuacucagccacca

SEQ ID NO: 233967 - RNA, 22 nt, Human
agcuuguuaaggaugcauauua

SEQ ID NO: 233968 - RNA, 22 nt, Human
aaacucuagggcuccacauucc

SEQ ID NO: 233969 - RNA, 22 nt, Human
aagaguuuucuauaaucuuggc

SEQ ID NO: 233970 - RNA, 22 nt, Human
cuggggaacgcagcgagcagcg

SEQ ID NO: 233971 - RNA, 22 nt, Human
gggccugucucacucccugguu

SEQ ID NO: 233972 - RNA, 22 nt, Human
ccugugccaaaaggcugcuuau

SEQ ID NO: 233973 - RNA, 22 nt, Human
ucaggcaggacaauuauuuagg

SEQ ID NO: 233974 - RNA, 22 nt, Human
ggucagcagugcagggcagagc

SEQ ID NO: 233975 - RNA, 22 nt, Human
ugcagccugguggucacuggag

SEQ ID NO: 233976 - RNA, 20 nt, Human
agaaggcaggagacaaaagg

SEQ ID NO: 233977 - RNA, 22 nt, Human
ccuuccuuuuacugucuccgga

SEQ ID NO: 233978 - RNA, 22 nt, Human
aaaaugaugcuguaauuuggca

SEQ ID NO: 233979 - RNA, 18 nt, Human
ucugagggugcgggagcu

SEQ ID NO: 233980 - RNA, 22 nt, Human
guucuggguagauguaucuuuu

SEQ ID NO: 233981 - RNA, 22 nt, Human
ccaccccugggugcagggagcg

SEQ ID NO: 233982 - RNA, 22 nt, Human
gaacaguacaguugaguaguug

SEQ ID NO: 233983 - RNA, 22 nt, Human
uuacagugcucuucaagacuuc

SEQ ID NO: 233984 - RNA, 22 nt, Human
uauuagguuggugcaacaguaa

SEQ ID NO: 233985 - RNA, 22 nt, Human
ugggaccugaagcagguuggca

SEQ ID NO: 233986 - RNA, 22 nt, Human
ugaugguuuuauuaauaggacc

SEQ ID NO: 233987 - RNA, 22 nt, Human
gcuggcuuuaucgucagacucc

SEQ ID NO: 233988 - RNA, 22 nt, Human
gacacagguagaauaaaguacu

SEQ ID NO: 233989 - RNA, 22 nt, Human
aucucugggcuuugaguuuguu

SEQ ID NO: 233990 - RNA, 22 nt, Human
aggagcucugggcagggccucc

SEQ ID NO: 233991 - RNA, 22 nt, Human
uggccuggaaaaaugcagaugg

SEQ ID NO: 233992 - RNA, 22 nt, Human
agcuggcuuugagcugggaggu

SEQ ID NO: 233993 - RNA, 22 nt, Human
acacaaaguuggaugacaaaau

SEQ ID NO: 233994 - RNA, 22 nt, Human
aagcacuggggccacagacacg

SEQ ID NO: 233995 - RNA, 22 nt, Human
aagaguuauaccuauuucuaac

SEQ ID NO: 233996 - RNA, 22 nt, Human
auuuucacccugaauauauuga

SEQ ID NO: 233997 - RNA, 22 nt, Human
uauguugagcauucagugaucu

SEQ ID NO: 233998 - RNA, 22 nt, Human
gcuccagcucguggcucccagc

SEQ ID NO: 233999 - RNA, 22 nt, Human
agugauggcagugaauaaggcu

SEQ ID NO: 234000 - RNA, 22 nt, Human
ugcugaaaacucaaccauugug

SEQ ID NO: 234001 - RNA, 22 nt, Human
auguggccagucauguaguaac

SEQ ID NO: 234002 - RNA, 22 nt, Human
caggguggcccuguggucucau

SEQ ID NO: 234003 - RNA, 22 nt, Human
uuacagugagggugacauuuac

SEQ ID NO: 234004 - RNA, 22 nt, Human
uggaaugucauaccauaaaaga

SEQ ID NO: 234005 - RNA, 22 nt, Human
ccuggcauucucuccagagaga

SEQ ID NO: 234006 - RNA, 22 nt, Human
aguccaggaagcaucauggucu

SEQ ID NO: 234007 - RNA, 22 nt, Human
aucuggaauuaagagaaaguga

SEQ ID NO: 234008 - RNA, 22 nt, Human
gcugauuauuacaugucugugg

SEQ ID NO: 234009 - RNA, 22 nt, Human
uauauucacuuguguccaacca

SEQ ID NO: 234010 - RNA, 22 nt, Human
cuggggcugcagcgaucuucau

SEQ ID NO: 234011 - RNA, 22 nt, Human
ucccauugccauagauaggaca

SEQ ID NO: 234012 - RNA, 22 nt, Human
gcacagaacccuaucuuucgga

SEQ ID NO: 234013 - RNA, 22 nt, Human
auauuuugguagcucucaauga

SEQ ID NO: 234014 - RNA, 22 nt, Human
uuuccuaagguagugauaauuu

SEQ ID NO: 234015 - RNA, 22 nt, Human
aagaagcaggucacagacaggg

SEQ ID NO: 234016 - RNA, 22 nt, Human
acauuucagcgugcaugacaug

SEQ ID NO: 234017 - RNA, 22 nt, Human
uuugcuuguucaagauuucugu

SEQ ID NO: 234018 - RNA, 19 nt, Human
ccugccugagcugucccuc

SEQ ID NO: 234019 - RNA, 22 nt, Human
agccccaggcccggacgccucu

SEQ ID NO: 234020 - RNA, 22 nt, Human
uugcuugacuuuguguaccugu

SEQ ID NO: 234021 - RNA, 22 nt, Human
gcaucuaauccaguccagcauc

SEQ ID NO: 234022 - RNA, 22 nt, Human
agguccugucuuaucucuguaa

SEQ ID NO: 234023 - RNA, 22 nt, Human
cuaaaauuaucaagauaauucc

SEQ ID NO: 234024 - RNA, 22 nt, Human
aaaaugagcauauugauccuuu

SEQ ID NO: 234025 - RNA, 22 nt, Human
uggucuggggaccgaggguuac

SEQ ID NO: 234026 - RNA, 22 nt, Human
aggacaguccgggguccuccac

SEQ ID NO: 234027 - RNA, 22 nt, Human
guuauauauaguauuucucuga

SEQ ID NO: 234028 - RNA, 22 nt, Human
acagacuggagugagagaaaua

SEQ ID NO: 234029 - RNA, 22 nt, Human
ucuggguggcagugauggcgug

SEQ ID NO: 234030 - RNA, 22 nt, Human
ucuuguuucuguauauaaugac

SEQ ID NO: 234031 - RNA, 22 nt, Human
cuccaggcucguccaagaucga

SEQ ID NO: 234032 - RNA, 22 nt, Human
aacagcaguuacuuuugcauca

SEQ ID NO: 234033 - RNA, 21 nt, Human
uucaauacuauuucaauaguc

SEQ ID NO: 234034 - RNA, 22 nt, Human
aauucuaaauguaauuuagaau

SEQ ID NO: 234035 - RNA, 22 nt, Human
ucagaaagcuuuuacuuaaaca

SEQ ID NO: 234036 - RNA, 23 nt, Human
aaugaacugagaaucuguacagu

SEQ ID NO: 234037 - RNA, 22 nt, Human
agagccucugucauggagagaa

SEQ ID NO: 234038 - RNA, 22 nt, Human
auuucucacugagcagauaaaa

SEQ ID NO: 234039 - RNA, 22 nt, Human
ggagcugagaguagucccuuuu

SEQ ID NO: 234040 - RNA, 22 nt, Human
uuuucaguuacuguuuauguga

SEQ ID NO: 234041 - RNA, 20 nt, Human
ggaaaaaugcaugcucaaga

SEQ ID NO: 234042 - RNA, 22 nt, Human
aauaucagcacuuuugugguau

SEQ ID NO: 234043 - RNA, 22 nt, Human
guccaagagucaagaagggggc

SEQ ID NO: 234044 - RNA, 22 nt, Human
uccuccuuguuuuccuguuuac

SEQ ID NO: 234045 - RNA, 22 nt, Human
ucuaaccuuugaaacugcuuuc

SEQ ID NO: 234046 - RNA, 22 nt, Human
ccuggaaggcaggcauggauug

SEQ ID NO: 234047 - RNA, 22 nt, Human
uguggugguaaugagccagaug

SEQ ID NO: 234048 - RNA, 19 nt, Human
uaucuuuaugcaguggugg

SEQ ID NO: 234049 - RNA, 22 nt, Human
uuucagaagucaacuagguaaa

SEQ ID NO: 234050 - RNA, 22 nt, Human
uuuuaauacugcuauuguagga

SEQ ID NO: 234051 - RNA, 22 nt, Human
ucugugcuagcacgcagcaagg

SEQ ID NO: 234052 - RNA, 22 nt, Human
uccaggucugguuggacagguu

SEQ ID NO: 234053 - RNA, 22 nt, Human
ggacaugugcaacuucuuugga

SEQ ID NO: 234054 - RNA, 22 nt, Human
ugggcucucgucccugcagaag

SEQ ID NO: 234055 - RNA, 22 nt, Human
guacaacaugauuuuacucucu

SEQ ID NO: 234056 - RNA, 22 nt, Human
cauuuagacauuugauuugggg

SEQ ID NO: 234057 - RNA, 22 nt, Human
uccugggcuuaagugauccucc

SEQ ID NO: 234058 - RNA, 22 nt, Human
agcuccaagguugaggagugag

SEQ ID NO: 234059 - RNA, 22 nt, Human
gggccagagcacagaggauguu

SEQ ID NO: 234060 - RNA, 22 nt, Human
guguccugggcauuaggcuuag

SEQ ID NO: 234061 - RNA, 22 nt, Human
acuguucugccaacuuugguua

SEQ ID NO: 234062 - RNA, 22 nt, Human
ccagccuggagggcaguggugg

SEQ ID NO: 234063 - RNA, 22 nt, Human
cauaacaguggcuucagcaagu

SEQ ID NO: 234064 - RNA, 22 nt, Human
uauagaaguaagcauugugaug

SEQ ID NO: 234065 - RNA, 22 nt, Human
auuuuuucuguaaacuggccuu

SEQ ID NO: 234066 - RNA, 22 nt, Human
ucugucuuugagaucucagccu

SEQ ID NO: 234067 - RNA, 22 nt, Human
cagggucaggaggaucuggcuu

SEQ ID NO: 234068 - RNA, 22 nt, Human
uuuuuaagcuccuuugauguca

SEQ ID NO: 234069 - RNA, 22 nt, Human
gcaagcuguccuuuugcauggc

SEQ ID NO: 234070 - RNA, 22 nt, Human
cagaacagaaucguguggugag

SEQ ID NO: 234071 - RNA, 22 nt, Human
gaggcacaucacuuggugcauu

SEQ ID NO: 234072 - RNA, 22 nt, Human
acuugucuggcagaucaugcaa

SEQ ID NO: 234073 - RNA, 22 nt, Human
ugaaaacuccaaguuucaucag

SEQ ID NO: 234074 - RNA, 22 nt, Human
cuuguuuaagccgcuguuaagc

SEQ ID NO: 234075 - RNA, 22 nt, Human
gggauggggucgggacccugcu

SEQ ID NO: 234076 - RNA, 22 nt, Human
aguggcuguccuggcucuaacu

SEQ ID NO: 234077 - RNA, 22 nt, Human
agacauccuggggagggcaaug

SEQ ID NO: 234078 - RNA, 23 nt, Human
ugacaggcuuugcuccuucugcc

SEQ ID NO: 234079 - RNA, 22 nt, Human
auccaguucuuggaagcacagg

SEQ ID NO: 234080 - RNA, 22 nt, Human
ccugugagucaaccccuccuug

SEQ ID NO: 234081 - RNA, 22 nt, Human
cugagcaguagagggucucuuu

SEQ ID NO: 234082 - RNA, 22 nt, Human
gccuguuugacuggucucugcu

SEQ ID NO: 234083 - RNA, 22 nt, Human
uggcaaagacgcuagcuaagau

SEQ ID NO: 234084 - RNA, 22 nt, Human
aggcuuucgaugaacgcuugcu

SEQ ID NO: 234085 - RNA, 21 nt, Human
uggccaaaaccauauuauuaa

SEQ ID NO: 234086 - RNA, 22 nt, Human
cucuuuccucagccacagucua

SEQ ID NO: 234087 - RNA, 22 nt, Human
uagaacaugggauagaguuuuu

SEQ ID NO: 234088 - RNA, 22 nt, Human
aaggucaaagacaguaacuuuu

SEQ ID NO: 234089 - RNA, 22 nt, Human
cagagguaccagcagccucugg

SEQ ID NO: 234090 - RNA, 22 nt, Human
uucuguacuucaggggcucugu

SEQ ID NO: 234091 - RNA, 22 nt, Human
cugggccuuugggaguucggug

SEQ ID NO: 234092 - RNA, 22 nt, Human
cccugggauugccuuggccuug

SEQ ID NO: 234093 - RNA, 17 nt, Human
agcugagcuggccaggg

SEQ ID NO: 234094 - RNA, 22 nt, Human
ucaacugguucuugaauguaua

SEQ ID NO: 234095 - RNA, 23 nt, Human
acaaaguaauuccugcuuccaaa

SEQ ID NO: 234096 - RNA, 22 nt, Human
gucccugggucuaaggcaguaa

SEQ ID NO: 234097 - RNA, 22 nt, Human
caaaugaagggagcugaagucu

SEQ ID NO: 234098 - RNA, 22 nt, Human
aaaaaugaaacggcugguuggc

SEQ ID NO: 234099 - RNA, 22 nt, Human
ucucaucuauucacauuaacug

SEQ ID NO: 234100 - RNA, 22 nt, Human
gagccagcugagcugcacuguc

SEQ ID NO: 234101 - RNA, 22 nt, Human
gcaagcugcucuuauguggagg

SEQ ID NO: 234102 - RNA, 22 nt, Human
uggcccuuugguuuaugacuga

SEQ ID NO: 234103 - RNA, 22 nt, Human
gcucucagcccacugaggggaa

SEQ ID NO: 234104 - RNA, 22 nt, Human
cuagagaauugucuugagaguu

SEQ ID NO: 234105 - RNA, 22 nt, Human
ucuuuagagccuuuccucccga

SEQ ID NO: 234106 - RNA, 22 nt, Human
aggcuaggcaugugcuaccaca

SEQ ID NO: 234107 - RNA, 22 nt, Human
caggcauugugacgaguguucu

SEQ ID NO: 234108 - RNA, 22 nt, Human
augagagguuucgucagaggaa

SEQ ID NO: 234109 - RNA, 20 nt, Human
ugacuucugggauuuguggu

SEQ ID NO: 234110 - RNA, 22 nt, Human
uugaauuauauguauguccuuu

SEQ ID NO: 234111 - RNA, 22 nt, Human
gcugcucugugacagccuccgg

SEQ ID NO: 234112 - RNA, 22 nt, Human
gggcuaggucugaucagagaag

SEQ ID NO: 234113 - RNA, 22 nt, Human
agcacguucuucauuacuucac

SEQ ID NO: 234114 - RNA, 22 nt, Human
ucugggcugugguuccacuccg

SEQ ID NO: 234115 - RNA, 22 nt, Human
uagguucacuuagcugugggaa

SEQ ID NO: 234116 - RNA, 22 nt, Human
ggcuuccuccuuccugcuguca

SEQ ID NO: 234117 - RNA, 22 nt, Human
ucuguagguuaaaaguagacaa

SEQ ID NO: 234118 - RNA, 22 nt, Human
ggguaggcugcuccuggggccc

SEQ ID NO: 234119 - RNA, 22 nt, Human
auguuucuacagcguccacuga

SEQ ID NO: 234120 - RNA, 22 nt, Human
uaugugucaaaccauucaucug

SEQ ID NO: 234121 - RNA, 22 nt, Human
uaaucacagaaacagacuguuu

SEQ ID NO: 234122 - RNA, 22 nt, Human
agaggggguguuccagaagcau

SEQ ID NO: 234123 - RNA, 22 nt, Human
ugacaggcagugcugggcaugu

SEQ ID NO: 234124 - RNA, 21 nt, Human
aaagauguuucaucugagaaa

SEQ ID NO: 234125 - RNA, 22 nt, Human
cugggcugcaggaguggggcaa

SEQ ID NO: 234126 - RNA, 20 nt, Human
aggccugagagaugacuggg

SEQ ID NO: 234127 - RNA, 21 nt, Human
acauaggcgaauguucgggag

SEQ ID NO: 234128 - RNA, 22 nt, Human
ccugugucagccccugccucca

SEQ ID NO: 234129 - RNA, 22 nt, Human
uggucugauaccggauuccagu

SEQ ID NO: 234130 - RNA, 22 nt, Human
agcagagcauggugggaagggc

SEQ ID NO: 234131 - RNA, 22 nt, Human
aaguuacaggagaaagagauca

SEQ ID NO: 234132 - RNA, 22 nt, Human
acuggccaggcagcaguagcuu

SEQ ID NO: 234133 - RNA, 22 nt, Human
caggaaauguauaauuuuauaa

SEQ ID NO: 234134 - RNA, 22 nt, Human
acuacaguaagggaggcagcau

SEQ ID NO: 234135 - RNA, 22 nt, Human
acacauuuauggaucgcagaaa

SEQ ID NO: 234136 - RNA, 23 nt, Human
acagaaaguucugcuggacagag

SEQ ID NO: 234137 - RNA, 22 nt, Human
cagagacauguggccugcacgu

SEQ ID NO: 234138 - RNA, 22 nt, Human
ggcugccuucauagaccauggg

SEQ ID NO: 234139 - RNA, 22 nt, Human
uugcaggguuaaaguaagguag

SEQ ID NO: 234140 - RNA, 20 nt, Human
auauuucuuaagaacuuuca

SEQ ID NO: 234141 - RNA, 22 nt, Human
auucacaguucauuagcuguaa

SEQ ID NO: 234142 - RNA, 22 nt, Human
gaauagcuugacaauuauuuuu

SEQ ID NO: 234143 - RNA, 22 nt, Human
ccaggcuccgcauagaccccac

SEQ ID NO: 234144 - RNA, 22 nt, Human
caggccagaguccaacuccaga

SEQ ID NO: 234145 - RNA, 22 nt, Human
uccuggcucugcugccuccuag

SEQ ID NO: 234146 - RNA, 22 nt, Human
caguuuuauacacugcagcucc

SEQ ID NO: 234147 - RNA, 22 nt, Human
cuccaguaucuguaggaaaagg

SEQ ID NO: 234148 - RNA, 22 nt, Human
cuaauacucauuucuguaacuc

SEQ ID NO: 234149 - RNA, 22 nt, Human
cagcugugcugauugcucagua

SEQ ID NO: 234150 - RNA, 19 nt, Human
aggagaaguagcagaaauu

SEQ ID NO: 234151 - RNA, 22 nt, Human
ucuggaauagguccugaguauu

SEQ ID NO: 234152 - RNA, 22 nt, Human
cuucugugguaaacuuuguugu

SEQ ID NO: 234153 - RNA, 22 nt, Human
ucugaaagcauuacaguuuauu

SEQ ID NO: 234154 - RNA, 22 nt, Human
aaguucaaggcagguccugagg

SEQ ID NO: 234155 - RNA, 22 nt, Human
caaguacugugauagcugaagu

SEQ ID NO: 234156 - RNA, 22 nt, Human
ggcuuugacaugcugaauuaaa

SEQ ID NO: 234157 - RNA, 22 nt, Human
uuucuuaugggguaguccuuua

SEQ ID NO: 234158 - RNA, 22 nt, Human
cauuugaaugagauugcuguaa

SEQ ID NO: 234159 - RNA, 22 nt, Human
uuguuuacacugcagaauuggg

SEQ ID NO: 234160 - RNA, 22 nt, Human
uuucucagaggagccagacggu

SEQ ID NO: 234161 - RNA, 22 nt, Human
gcaugugugagaccuuuuagca

SEQ ID NO: 234162 - RNA, 22 nt, Human
gacaggaaacaagaaggcagga

SEQ ID NO: 234163 - RNA, 22 nt, Human
ccaaguacagauuccuccacug

SEQ ID NO: 234164 - RNA, 22 nt, Human
uucauuccuucccuaagcaacu

SEQ ID NO: 234165 - RNA, 22 nt, Human
agggccugaggcugacggggag

SEQ ID NO: 234166 - RNA, 22 nt, Human
uuaaaagagacuuccuuuguuu

SEQ ID NO: 234167 - RNA, 22 nt, Human
aggacagcagccauuggcaguc

SEQ ID NO: 234168 - RNA, 22 nt, Human
gcccagggugcuuagaacccau

SEQ ID NO: 234169 - RNA, 22 nt, Human
ccuggcagggcugcaguaaugg

SEQ ID NO: 234170 - RNA, 22 nt, Human
auacaagacaguaggaaacuga

SEQ ID NO: 234171 - RNA, 22 nt, Human
aaaucacuguuauugaucuuaa

SEQ ID NO: 234172 - RNA, 22 nt, Human
ucugggucuauuccuacuguga

SEQ ID NO: 234173 - RNA, 22 nt, Human
ucagacagaggagcucgugcag

SEQ ID NO: 234174 - RNA, 22 nt, Human
gggcuggaucuccugcaggcag

SEQ ID NO: 234175 - RNA, 22 nt, Human
ucuuugguauucacuugugaag

SEQ ID NO: 234176 - RNA, 22 nt, Human
agaaucuuucugaaugacugug

SEQ ID NO: 234177 - RNA, 22 nt, Human
agucugucucugcuaaucacua

SEQ ID NO: 234178 - RNA, 22 nt, Human
acugagcaggguuccgcaugga

SEQ ID NO: 234179 - RNA, 22 nt, Human
cugaggaggcuaauuugaggau

SEQ ID NO: 234180 - RNA, 22 nt, Human
cagggcuguuagcugcugcucu

SEQ ID NO: 234181 - RNA, 22 nt, Human
ggccucagaccggagcuggcca

SEQ ID NO: 234182 - RNA, 22 nt, Human
cuggagggagauucaaaggagg

SEQ ID NO: 234183 - RNA, 22 nt, Human
ucaggaagggugguccacaggg

SEQ ID NO: 234184 - RNA, 22 nt, Human
aguugacauccagagacauucu

SEQ ID NO: 234185 - RNA, 22 nt, Human
caggucagagucccccuguccu

SEQ ID NO: 234186 - RNA, 22 nt, Human
gugguccaucaugcagagcucc

SEQ ID NO: 234187 - RNA, 22 nt, Human
gcaaggcuuugugaauuuuaaa

SEQ ID NO: 234188 - RNA, 17 nt, Human
gcaaccagcccccaucu

SEQ ID NO: 234189 - RNA, 22 nt, Human
caaaacugucuagagagagaag

SEQ ID NO: 234190 - RNA, 22 nt, Human
uccuccuucgggacugcuugac

SEQ ID NO: 234191 - RNA, 22 nt, Human
gauguuuggcucaaacgagugu

SEQ ID NO: 234192 - RNA, 22 nt, Human
agcaacagcaacgacauuucuc

SEQ ID NO: 234193 - RNA, 22 nt, Human
aucuagaacuuaaagucaguca

SEQ ID NO: 234194 - RNA, 22 nt, Human
agagccagguguagucucggag

SEQ ID NO: 234195 - RNA, 22 nt, Human
uuuccuuccuugcuagccugag

SEQ ID NO: 234196 - RNA, 22 nt, Human
uuauguacucugcaauguuuga

SEQ ID NO: 234197 - RNA, 22 nt, Human
uuccagaaaaaaauguauaucu

SEQ ID NO: 234198 - RNA, 22 nt, Human
uucacauuaagccuccuccuac

SEQ ID NO: 234199 - RNA, 22 nt, Human
agggcuccgggccaccggccug

SEQ ID NO: 234200 - RNA, 22 nt, Human
cuggccugaucucaugcugucc

SEQ ID NO: 234201 - RNA, 18 nt, Human
accuccccauuuucugaa

SEQ ID NO: 234202 - RNA, 22 nt, Human
ugcauuccauguguuuccugag

SEQ ID NO: 234203 - RNA, 22 nt, Human
gucccaggcuccauggcagcca

SEQ ID NO: 234204 - RNA, 19 nt, Human
uguguccuagcagccaguc

SEQ ID NO: 234205 - RNA, 22 nt, Human
uuuaagcuaaugucauaauuag

SEQ ID NO: 234206 - RNA, 19 nt, Human
aguggcugggcagaagcaa

SEQ ID NO: 234207 - RNA, 22 nt, Human
ggaauguuuuucauugcucucu

SEQ ID NO: 234208 - RNA, 22 nt, Human
uuagagcuucccaauuaaaacg

SEQ ID NO: 234209 - RNA, 22 nt, Human
gauggcuuguuuucuggcugaa

SEQ ID NO: 234210 - RNA, 22 nt, Human
gcuuucugaugagcuuaagaaa

SEQ ID NO: 234211 - RNA, 22 nt, Human
cuccugugcaugcaucucccua

SEQ ID NO: 234212 - RNA, 22 nt, Human
augcacaagaggcuagaaaaga

SEQ ID NO: 234213 - RNA, 23 nt, Human
cauuucugggagauuuauaaaau

SEQ ID NO: 234214 - RNA, 22 nt, Human
gcugccccagcugggggcugga

SEQ ID NO: 234215 - RNA, 22 nt, Human
acacuuuacagaauguuuugau

SEQ ID NO: 234216 - RNA, 22 nt, Human
acaagguuguucugaggauuua

SEQ ID NO: 234217 - RNA, 22 nt, Human
gacaugcuaauuacugguucaa

SEQ ID NO: 234218 - RNA, 22 nt, Human
ucagaaguugaaggcucuuuuu

SEQ ID NO: 234219 - RNA, 21 nt, Human
cuguccaguaauuccuggcac

SEQ ID NO: 234220 - RNA, 22 nt, Human
uguaauuauuucugugcaguca

SEQ ID NO: 234221 - RNA, 22 nt, Human
acacaagaaguuaaugggcaaa

SEQ ID NO: 234222 - RNA, 22 nt, Human
ucuggcaguaauaggggagaga

SEQ ID NO: 234223 - RNA, 22 nt, Human
uaacacuuuggauuaaaauucu

SEQ ID NO: 234224 - RNA, 23 nt, Human
uggcagagacccagaaucuacau

SEQ ID NO: 234225 - RNA, 22 nt, Human
cugggccuccacgggccaucac

SEQ ID NO: 234226 - RNA, 22 nt, Human
gcucuguauguaguucuugcuu

SEQ ID NO: 234227 - RNA, 23 nt, Human
caugacaaaggaucucaugggcc

SEQ ID NO: 234228 - RNA, 22 nt, Human
uagaaucauugagaauaacagg

SEQ ID NO: 234229 - RNA, 22 nt, Human
ucaggagacuuaugucacagug

SEQ ID NO: 234230 - RNA, 22 nt, Human
gcauggcuauuaugaggcagaa

SEQ ID NO: 234231 - RNA, 22 nt, Human
uuuccaaguacugagcugucaa

SEQ ID NO: 234232 - RNA, 22 nt, Human
aucaggaaagaaaagcuuggcg

SEQ ID NO: 234233 - RNA, 22 nt, Human
cucagcuucuaccuccugagug

SEQ ID NO: 234234 - RNA, 22 nt, Human
cuuuccaacucuagugaaauuu

SEQ ID NO: 234235 - RNA, 22 nt, Human
agcugagggcaggaugggguga

SEQ ID NO: 234236 - RNA, 22 nt, Human
cuccaggacugaggacagagcu

SEQ ID NO: 234237 - RNA, 22 nt, Human
ugguccuggucaucugggcugg

SEQ ID NO: 234238 - RNA, 22 nt, Human
ucugggggcgaccagggacugc

SEQ ID NO: 234239 - RNA, 22 nt, Human
ugagaaugaaucuuuugcuuuc

SEQ ID NO: 234240 - RNA, 22 nt, Human
acauggaagcaaaguucuauuu

SEQ ID NO: 234241 - RNA, 20 nt, Human
uuucaccaucuuggccaggc

SEQ ID NO: 234242 - RNA, 22 nt, Human
ucacagaaaucuguuuuuucua

SEQ ID NO: 234243 - RNA, 19 nt, Human
gccagcagaaugaugaggc

SEQ ID NO: 234244 - RNA, 22 nt, Human
ccagagcaugaagggcaaugac

SEQ ID NO: 234245 - RNA, 22 nt, Human
ggucccaguugcccaggucagg

SEQ ID NO: 234246 - RNA, 18 nt, Human
uacuguuuaauugauuac

SEQ ID NO: 234247 - RNA, 22 nt, Human
acuggcagcuguaggaugcaug

SEQ ID NO: 234248 - RNA, 22 nt, Human
uucuggguaguaugguuaguuu

SEQ ID NO: 234249 - RNA, 22 nt, Human
acccaggccauuggcaagaguc

SEQ ID NO: 234250 - RNA, 22 nt, Human
aacaggcuauuucuuuacaaac

SEQ ID NO: 234251 - RNA, 22 nt, Human
caugaaggaccauuucacgguc

SEQ ID NO: 234252 - RNA, 22 nt, Human
ucuuauugucuagauugagaug

SEQ ID NO: 234253 - RNA, 17 nt, Human
ggcuuccagguggcucu

SEQ ID NO: 234254 - RNA, 22 nt, Human
ucagaggaauaaugcugcauuu

SEQ ID NO: 234255 - RNA, 22 nt, Human
caggugagaggcgguccugcau

SEQ ID NO: 234256 - RNA, 22 nt, Human
gcagguguggauuugcauccag

SEQ ID NO: 234257 - RNA, 22 nt, Human
uccuggcuucugucuccuuauu

SEQ ID NO: 234258 - RNA, 22 nt, Human
accugaggaagggcgagaagcu

SEQ ID NO: 234259 - RNA, 22 nt, Human
agacaugucaccaauucuuacu

SEQ ID NO: 234260 - RNA, 22 nt, Human
ucugggcuauauggucucugcu

SEQ ID NO: 234261 - RNA, 22 nt, Human
aauaugaugccaaauugcuaca

SEQ ID NO: 234262 - RNA, 22 nt, Human
cggccgcagcagugucggccca

SEQ ID NO: 234263 - RNA, 22 nt, Human
augucacagucugacucaguga

SEQ ID NO: 234264 - RNA, 22 nt, Human
acagaacugcagacagugccaa

SEQ ID NO: 234265 - RNA, 22 nt, Human
acauguguaagaugugauauau

SEQ ID NO: 234266 - RNA, 22 nt, Human
auggcuggcaugugcauaacgg

SEQ ID NO: 234267 - RNA, 22 nt, Human
guuccucaaaaaggagagcccc

SEQ ID NO: 234268 - RNA, 22 nt, Human
uuugcaaugugaaauuaaagaa

SEQ ID NO: 234269 - RNA, 19 nt, Human
uccagcagugcuugaaauc

SEQ ID NO: 234270 - RNA, 22 nt, Human
cucugaaaaugugguggggaaa

SEQ ID NO: 234271 - RNA, 22 nt, Human
gggcuggcuaagacuuuucugu

SEQ ID NO: 234272 - RNA, 22 nt, Human
uguggcugacuccuggucccca

SEQ ID NO: 234273 - RNA, 16 nt, Human
ucacacauuuguuggu

SEQ ID NO: 234274 - RNA, 22 nt, Human
aaacuguaaacacagcaguaca

SEQ ID NO: 234275 - RNA, 22 nt, Human
ugaggggagcuagcaugccuug

SEQ ID NO: 234276 - RNA, 22 nt, Human
ucauggggcucuucaaguggag

SEQ ID NO: 234277 - RNA, 22 nt, Human
auuuauugaacacugacuaugu

SEQ ID NO: 234278 - RNA, 22 nt, Human
auagcaaaaaugaacaaagcuu

SEQ ID NO: 234279 - RNA, 22 nt, Human
accacugcccauggugaaaacu

SEQ ID NO: 234280 - RNA, 22 nt, Human
ggugagacuuuagaagagccag

SEQ ID NO: 234281 - RNA, 22 nt, Human
cuuucucuguguuucacaugcu

SEQ ID NO: 234282 - RNA, 22 nt, Human
agucaagauucuggcacuagca

SEQ ID NO: 234283 - RNA, 22 nt, Human
ugcaggugguccauuugggaac

SEQ ID NO: 234284 - RNA, 22 nt, Human
guauucagaaggaugaucuagu

SEQ ID NO: 234285 - RNA, 22 nt, Human
ggcccagugcuguucacccagu

SEQ ID NO: 234286 - RNA, 21 nt, Human
aaggcugagacaacucaggag

SEQ ID NO: 234287 - RNA, 22 nt, Human
uccccaccuaagauacccaucu

SEQ ID NO: 234288 - RNA, 22 nt, Human
cuggcugccagcauuuggggga

SEQ ID NO: 234289 - RNA, 23 nt, Human
uuguuuaccguaggacuuuuaac

SEQ ID NO: 234290 - RNA, 22 nt, Human
gaccagcugguccuguccuggg

SEQ ID NO: 234291 - RNA, 22 nt, Human
cuugagaaucuugaugucuacc

SEQ ID NO: 234292 - RNA, 21 nt, Human
agucuuaggcacagcuguguc

SEQ ID NO: 234293 - RNA, 22 nt, Human
gaaucucauucuaacuaguagg

SEQ ID NO: 234294 - RNA, 22 nt, Human
ucuuacgaauucuuagaggaca

SEQ ID NO: 234295 - RNA, 22 nt, Human
uucuuucugucaugguguacug

SEQ ID NO: 234296 - RNA, 22 nt, Human
guauuacauuuaguaauuaggc

SEQ ID NO: 234297 - RNA, 22 nt, Human
auuguacagguuggaggaagug

SEQ ID NO: 234298 - RNA, 22 nt, Human
agaggugggagccuggucacau

SEQ ID NO: 234299 - RNA, 22 nt, Human
auauuguugacuauaagaguaa

SEQ ID NO: 234300 - RNA, 22 nt, Human
agaacugugaaguaugugaaau

SEQ ID NO: 234301 - RNA, 22 nt, Human
ccugagaagagcuuaugaguga

SEQ ID NO: 234302 - RNA, 19 nt, Human
agagacacagguaaguagg

SEQ ID NO: 234303 - RNA, 22 nt, Human
acccucagcuggagauugaauu

SEQ ID NO: 234304 - RNA, 22 nt, Human
gcugggcaugugaccaacagaa

SEQ ID NO: 234305 - RNA, 22 nt, Human
aaucuuucccuauuaaaugugg

SEQ ID NO: 234306 - RNA, 22 nt, Human
acaaaugccauauauaaauucu

SEQ ID NO: 234307 - RNA, 22 nt, Human
ugucagcucccagucagagaga

SEQ ID NO: 234308 - RNA, 22 nt, Human
guagggacaugccauuaucuca

SEQ ID NO: 234309 - RNA, 22 nt, Human
gagaaggauguggcucauagcu

SEQ ID NO: 234310 - RNA, 22 nt, Human
uauuuccugcauggugauguaa

SEQ ID NO: 234311 - RNA, 22 nt, Human
ucuuuaucaggugaagagggac

SEQ ID NO: 234312 - RNA, 22 nt, Human
aggcugugacagggucauggag

SEQ ID NO: 234313 - RNA, 22 nt, Human
agcucagguagacucagcaucu

SEQ ID NO: 234314 - RNA, 22 nt, Human
auuugcaaagucguaucuguga

SEQ ID NO: 234315 - RNA, 22 nt, Human
agggccacaguggggccugaga

SEQ ID NO: 234316 - RNA, 20 nt, Human
ucacaggagggaaggcaggu

SEQ ID NO: 234317 - RNA, 22 nt, Human
agauuuauguggucacacucag

SEQ ID NO: 234318 - RNA, 16 nt, Human
ucccugggaguggugg

SEQ ID NO: 234319 - RNA, 22 nt, Human
ugcuggcugcagugcugucaaa

SEQ ID NO: 234320 - RNA, 22 nt, Human
gcccaggggaguagucaauuua

SEQ ID NO: 234321 - RNA, 23 nt, Human
acaucaugauagccaacuuggga

SEQ ID NO: 234322 - RNA, 22 nt, Human
uggccugccuucgcugagcuga

SEQ ID NO: 234323 - RNA, 22 nt, Human
agcaggugacagggcuguggug

SEQ ID NO: 234324 - RNA, 22 nt, Human
cacccagggcugugccugccca

SEQ ID NO: 234325 - RNA, 21 nt, Human
ugaaguucgcgggcaagauua

SEQ ID NO: 234326 - RNA, 22 nt, Human
ggcucuggaaaguguccuugau

SEQ ID NO: 234327 - RNA, 20 nt, Human
uacaaauuuuccauguuucc

SEQ ID NO: 234328 - RNA, 22 nt, Human
acagugcauuauugcugaaugc

SEQ ID NO: 234329 - RNA, 22 nt, Human
aagacaaugcauuacuaagaag

SEQ ID NO: 234330 - RNA, 22 nt, Human
acuucucucauucagacauagc

SEQ ID NO: 234331 - RNA, 22 nt, Human
aagaaagggagaaggauggugu

SEQ ID NO: 234332 - RNA, 23 nt, Human
ugggguugaauuguagcugugcc

SEQ ID NO: 234333 - RNA, 21 nt, Human
ggcuuuaugcucacccagccu

SEQ ID NO: 234334 - RNA, 20 nt, Human
ucccaggcugggcuccagcu

SEQ ID NO: 234335 - RNA, 22 nt, Human
gaugccuguggugagcacacau

SEQ ID NO: 234336 - RNA, 22 nt, Human
aagccaaguuggaagacugaau

SEQ ID NO: 234337 - RNA, 19 nt, Human
acagggcucuggacgccau

SEQ ID NO: 234338 - RNA, 22 nt, Human
uaagugguaccaagcucaguga

SEQ ID NO: 234339 - RNA, 22 nt, Human
ucugaaauggcagcgggaauga

SEQ ID NO: 234340 - RNA, 22 nt, Human
uccugagugguuguuuucuucc

SEQ ID NO: 234341 - RNA, 22 nt, Human
ugccaaaauggccaaaagcuag

SEQ ID NO: 234342 - RNA, 22 nt, Human
gagaaagacguaggcugggagg

SEQ ID NO: 234343 - RNA, 19 nt, Human
uucuccagccugaccugag

SEQ ID NO: 234344 - RNA, 22 nt, Human
aaaggcaugcauggucugcucc

SEQ ID NO: 234345 - RNA, 22 nt, Human
cagcugaauggcucccugcuaa

SEQ ID NO: 234346 - RNA, 22 nt, Human
uucuggaacauagcaagaaguu

SEQ ID NO: 234347 - RNA, 22 nt, Human
ccucaggcccugucccugcgcc

SEQ ID NO: 234348 - RNA, 22 nt, Human
aggcuggcugacuucugaagca

SEQ ID NO: 234349 - RNA, 22 nt, Human
uucacaagucauuagcugcaua

SEQ ID NO: 234350 - RNA, 22 nt, Human
ugucaggcaaaggaagguauuu

SEQ ID NO: 234351 - RNA, 22 nt, Human
ugguccugucucaaggagccuu

SEQ ID NO: 234352 - RNA, 22 nt, Human
gccuucccacccugcgaggcug

SEQ ID NO: 234353 - RNA, 22 nt, Human
aguauacaguaaugacauaucu

SEQ ID NO: 234354 - RNA, 22 nt, Human
gccuggcugcuuagccuacuuc

SEQ ID NO: 234355 - RNA, 22 nt, Human
ccagcuuucugggugguuucug

SEQ ID NO: 234356 - RNA, 22 nt, Human
ggaagaaaguagaaaaccgugg

SEQ ID NO: 234357 - RNA, 22 nt, Human
cccuggagaucgggagaggaag

SEQ ID NO: 234358 - RNA, 22 nt, Human
cccugccuugggguccacaccg

SEQ ID NO: 234359 - RNA, 22 nt, Human
ugucuucagcagucaucugggg

SEQ ID NO: 234360 - RNA, 22 nt, Human
aaacacaucauucaugucguca

SEQ ID NO: 234361 - RNA, 22 nt, Human
agauggucaaggauacuguuca

SEQ ID NO: 234362 - RNA, 22 nt, Human
gagcacagggaauagacagaua

SEQ ID NO: 234363 - RNA, 22 nt, Human
cccagguguuuguggcagaggu

SEQ ID NO: 234364 - RNA, 22 nt, Human
aagcagaggccacagagugggc

SEQ ID NO: 234365 - RNA, 22 nt, Human
aggcucucaauaugauccaguc

SEQ ID NO: 234366 - RNA, 22 nt, Human
ugaggagcgggcagggaugcag

SEQ ID NO: 234367 - RNA, 21 nt, Human
ccuggccaaucugauaggguu

SEQ ID NO: 234368 - RNA, 22 nt, Human
gggcaggagaagguggaugucc

SEQ ID NO: 234369 - RNA, 22 nt, Human
uuuccaagacuccaguucuccc

SEQ ID NO: 234370 - RNA, 22 nt, Human
aaauggcacuuugacagccugc

SEQ ID NO: 234371 - RNA, 22 nt, Human
cuggcucccagcuuucagggag

SEQ ID NO: 234372 - RNA, 22 nt, Human
ugcacuucaaaaaugucacuga

SEQ ID NO: 234373 - RNA, 22 nt, Human
uucauugagcuguacacuuagg

SEQ ID NO: 234374 - RNA, 22 nt, Human
auucacaauuagaaguagauaa

SEQ ID NO: 234375 - RNA, 22 nt, Human
augaugcaccauuauaagaguu

SEQ ID NO: 234376 - RNA, 22 nt, Human
gcagccuuuggaauuagagacu

SEQ ID NO: 234377 - RNA, 22 nt, Human
aaaaaguuucaacugccaacuc

SEQ ID NO: 234378 - RNA, 22 nt, Human
uuaucguacgcuucagaaauuu

SEQ ID NO: 234379 - RNA, 22 nt, Human
guucuggguucaaaccccggcc

SEQ ID NO: 234380 - RNA, 21 nt, Human
gcagccacugccuucaacaau

SEQ ID NO: 234381 - RNA, 22 nt, Human
ggcucugcuccuggugccagug

SEQ ID NO: 234382 - RNA, 15 nt, Human
uguuaacagcuggga

SEQ ID NO: 234383 - RNA, 22 nt, Human
aacacagaguauuugaagcauu

SEQ ID NO: 234384 - RNA, 22 nt, Human
acaggcugguuuguaaaagaug

SEQ ID NO: 234385 - RNA, 22 nt, Human
agauauguuuguauauauuugu

SEQ ID NO: 234386 - RNA, 22 nt, Human
gagucuuugguaaagucugcug

SEQ ID NO: 234387 - RNA, 22 nt, Human
uuuauucaucaucuguucauau

SEQ ID NO: 234388 - RNA, 22 nt, Human
gauuagaauggauagaucccca

SEQ ID NO: 234389 - RNA, 22 nt, Human
cugccguugugaagcucuuaga

SEQ ID NO: 234390 - RNA, 22 nt, Human
aucaguuuauacuuauaaaucu

SEQ ID NO: 234391 - RNA, 22 nt, Human
uuucucugugggcuuuaugcau

SEQ ID NO: 234392 - RNA, 20 nt, Human
auugacagaaaguguucacc

SEQ ID NO: 234393 - RNA, 22 nt, Human
agaguguuucagucuuccuaga

SEQ ID NO: 234394 - RNA, 22 nt, Human
cuggcauucuuguuucuggaaa

SEQ ID NO: 234395 - RNA, 22 nt, Human
caggcuugcuagaggagccaaa

SEQ ID NO: 234396 - RNA, 22 nt, Human
ccugggcugggcgucucauggg

SEQ ID NO: 234397 - RNA, 22 nt, Human
ucuuuccacauucucuguuuag

SEQ ID NO: 234398 - RNA, 22 nt, Human
uccugagcugacacuuggggag

SEQ ID NO: 234399 - RNA, 22 nt, Human
cugccugcacugccuggcucca

SEQ ID NO: 234400 - RNA, 22 nt, Human
auauauacuuugacacauucug

SEQ ID NO: 234401 - RNA, 22 nt, Human
ccugagggucaaggagcccuag

SEQ ID NO: 234402 - RNA, 23 nt, Human
aguguugguugggaagccaagca

SEQ ID NO: 234403 - RNA, 22 nt, Human
gcuccuggucuggagcuucaag

SEQ ID NO: 234404 - RNA, 22 nt, Human
ucuuagucacagaggugagaaa

SEQ ID NO: 234405 - RNA, 22 nt, Human
gaggcaugcagagcuggagcag

SEQ ID NO: 234406 - RNA, 22 nt, Human
auuaguguuguggcuucauggc

SEQ ID NO: 234407 - RNA, 22 nt, Human
cuccagugcacccagaggauuu

SEQ ID NO: 234408 - RNA, 22 nt, Human
ccaaauuaaaucauacagacag

SEQ ID NO: 234409 - RNA, 22 nt, Human
ccuugggagaaauugcagaguc

SEQ ID NO: 234410 - RNA, 22 nt, Human
ugcugggcuggagcugccaggg

SEQ ID NO: 234411 - RNA, 22 nt, Human
gugggugucaguaucuuuaacg

SEQ ID NO: 234412 - RNA, 22 nt, Human
agcagcucuuaacaaagcaugg

SEQ ID NO: 234413 - RNA, 22 nt, Human
cacccaggcagguggcugagaa

SEQ ID NO: 234414 - RNA, 22 nt, Human
aaaauucucuugaucuugacag

SEQ ID NO: 234415 - RNA, 22 nt, Human
uucauagguuugcugugaacau

SEQ ID NO: 234416 - RNA, 21 nt, Human
uuagcaaagcaaacacaugcu

SEQ ID NO: 234417 - RNA, 22 nt, Human
ggcaguggcuguagucucuugg

SEQ ID NO: 234418 - RNA, 22 nt, Human
cugucaggaagcugggcaucca

SEQ ID NO: 234419 - RNA, 22 nt, Human
ccugccugcggcccgcggggag

SEQ ID NO: 234420 - RNA, 22 nt, Human
aaguuuuucacauugcuguugu

SEQ ID NO: 234421 - RNA, 22 nt, Human
gaauucugggagagaucugaca

SEQ ID NO: 234422 - RNA, 22 nt, Human
uagcugaagaggguauuguagg

SEQ ID NO: 234423 - RNA, 22 nt, Human
ugaaauuauucuuaccaaggug

SEQ ID NO: 234424 - RNA, 22 nt, Human
cagcuuggaggaggaucuaaga

SEQ ID NO: 234425 - RNA, 22 nt, Human
ccucugagugcuuugagggaga

SEQ ID NO: 234426 - RNA, 22 nt, Human
cagaaagugauuugcuauucca

SEQ ID NO: 234427 - RNA, 22 nt, Human
cauguaaaaagaagaaucugga

SEQ ID NO: 234428 - RNA, 18 nt, Human
uguuuauuuuucucuuac

SEQ ID NO: 234429 - RNA, 17 nt, Human
aguggcaggcagauggg

SEQ ID NO: 234430 - RNA, 22 nt, Human
aucucuggccccugggguccga

SEQ ID NO: 234431 - RNA, 22 nt, Human
gcuccuggcucuggccaaggga

SEQ ID NO: 234432 - RNA, 22 nt, Human
ccagcccuugagauggaaggga

SEQ ID NO: 234433 - RNA, 19 nt, Human
gcaggucauuaggcuaggu

SEQ ID NO: 234434 - RNA, 22 nt, Human
agucagaaucugcauuuuaacc

SEQ ID NO: 234435 - RNA, 22 nt, Human
augaggcagucuggccugaggg

SEQ ID NO: 234436 - RNA, 22 nt, Human
uccaaaacagaacucugugaau

SEQ ID NO: 234437 - RNA, 22 nt, Human
uacacuuuauggauccuacuuu

SEQ ID NO: 234438 - RNA, 22 nt, Human
agcugccaccucugccuuuggg

SEQ ID NO: 234439 - RNA, 22 nt, Human
gccaggagcccugggcaaguuc

SEQ ID NO: 234440 - RNA, 22 nt, Human
ggcgcucaguguugccccagag

SEQ ID NO: 234441 - RNA, 16 nt, Human
gcugggagggagaggu

SEQ ID NO: 234442 - RNA, 22 nt, Human
uuacaguuuaagaggaaacaaa

SEQ ID NO: 234443 - RNA, 22 nt, Human
ugugggaggauucagaauuggg

SEQ ID NO: 234444 - RNA, 22 nt, Human
cuucugagaggggcuaggagca

SEQ ID NO: 234445 - RNA, 18 nt, Human
acagaggcagacauguau

SEQ ID NO: 234446 - RNA, 22 nt, Human
aggaagagcccgggugacauaa

SEQ ID NO: 234447 - RNA, 23 nt, Human
ggguccagagaagccauuagggc

SEQ ID NO: 234448 - RNA, 22 nt, Human
cuggcaugaaauggcaucucau

SEQ ID NO: 234449 - RNA, 23 nt, Human
ucucaggcaaaccaggacaaguu

SEQ ID NO: 234450 - RNA, 19 nt, Human
cacacccaugcuugccaag

SEQ ID NO: 234451 - RNA, 22 nt, Human
uuggcugccuucaccccuggcc

SEQ ID NO: 234452 - RNA, 22 nt, Human
auuagaaugacagaaaugaggc

SEQ ID NO: 234453 - RNA, 22 nt, Human
cuccucaaggucucaggaauaa

SEQ ID NO: 234454 - RNA, 22 nt, Human
acagccacucaaagggccgaag

SEQ ID NO: 234455 - RNA, 18 nt, Human
cucagagaugcccuuauu

SEQ ID NO: 234456 - RNA, 22 nt, Human
uuugacuccuuugugaaaagag

SEQ ID NO: 234457 - RNA, 22 nt, Human
uacugagggcaaagagugaagc

SEQ ID NO: 234458 - RNA, 22 nt, Human
cugcauaugauagaugccuugc

SEQ ID NO: 234459 - RNA, 22 nt, Human
cacagucuuaucccaaccacca

SEQ ID NO: 234460 - RNA, 22 nt, Human
ggguccaguuucaucugagguu

SEQ ID NO: 234461 - RNA, 18 nt, Human
uggcucugcagccagaug

SEQ ID NO: 234462 - RNA, 22 nt, Human
uagcaagacaacuuuucucagu

SEQ ID NO: 234463 - RNA, 22 nt, Human
cacaguuaugggaaacguaguu

SEQ ID NO: 234464 - RNA, 22 nt, Human
cccugcuugucaccccuggguc

SEQ ID NO: 234465 - RNA, 22 nt, Human
auuuccuucaguguuuaauacu

SEQ ID NO: 234466 - RNA, 22 nt, Human
cuuagaacauacuuagugugau

SEQ ID NO: 234467 - RNA, 22 nt, Human
uccugagcccuggggucagugu

SEQ ID NO: 234468 - RNA, 22 nt, Human
aggccagguggucaugcuugcu

SEQ ID NO: 234469 - RNA, 22 nt, Human
uaggccaggagucagacagauu

SEQ ID NO: 234470 - RNA, 22 nt, Human
ccaggagcuggcauguggagag

SEQ ID NO: 234471 - RNA, 22 nt, Human
uacaggcugcagggcuagaggg

SEQ ID NO: 234472 - RNA, 22 nt, Human
ugcuuugacagggaugacauga

SEQ ID NO: 234473 - RNA, 22 nt, Human
uucuguauguaugccagagcau

SEQ ID NO: 234474 - RNA, 22 nt, Human
ccauuugugauguggcagcauc

SEQ ID NO: 234475 - RNA, 22 nt, Human
gagcaguugggcucuaggaagu

SEQ ID NO: 234476 - RNA, 20 nt, Human
cuguggugagcaggagagua

SEQ ID NO: 234477 - RNA, 22 nt, Human
aaggcagccgugugacugcaug

SEQ ID NO: 234478 - RNA, 22 nt, Human
ugaaggaaugagggaguggguc

SEQ ID NO: 234479 - RNA, 22 nt, Human
ucucccccagucucuacagcag

SEQ ID NO: 234480 - RNA, 22 nt, Human
cuuaagaagcaagucucagcaa

SEQ ID NO: 234481 - RNA, 18 nt, Human
cagaaaucacaccagcac

SEQ ID NO: 234482 - RNA, 18 nt, Human
cuguucagcugaacuaca

SEQ ID NO: 234483 - RNA, 22 nt, Human
ggguggcacaggugcagagggu

SEQ ID NO: 234484 - RNA, 17 nt, Human
gcaagggaugggagauu

SEQ ID NO: 234485 - RNA, 22 nt, Human
auguaguuagaagauucaaaca

SEQ ID NO: 234486 - RNA, 18 nt, Human
ucagcuuuugaaaaccaa

SEQ ID NO: 234487 - RNA, 22 nt, Human
aucuuccuucacuuucucccac

SEQ ID NO: 234488 - RNA, 22 nt, Human
gcugccuguggcccuucugggu

SEQ ID NO: 234489 - RNA, 22 nt, Human
uucuggcucuccccugcugggu

SEQ ID NO: 234490 - RNA, 22 nt, Human
uguuuauagauggccacaauga

SEQ ID NO: 234491 - RNA, 22 nt, Human
uaacugaugugaacuuaccauu

SEQ ID NO: 234492 - RNA, 22 nt, Human
gaagauuuaagcacaauagucu

SEQ ID NO: 234493 - RNA, 22 nt, Human
auacuuuagagcuagauugccu

SEQ ID NO: 234494 - RNA, 22 nt, Human
uuauucacaugggcucauucua

SEQ ID NO: 234495 - RNA, 22 nt, Human
ugacaugcuaagauuauguuau

SEQ ID NO: 234496 - RNA, 22 nt, Human
ucuggccagugaaaugcagaau

SEQ ID NO: 234497 - RNA, 22 nt, Human
aaucugagggaacuugaacucc

SEQ ID NO: 234498 - RNA, 22 nt, Human
acuguucuccagcauggcugua

SEQ ID NO: 234499 - RNA, 22 nt, Human
ucuuucuuuaucaccugauaug

SEQ ID NO: 234500 - RNA, 22 nt, Human
agccugggcaacaacacagcga

SEQ ID NO: 234501 - RNA, 22 nt, Human
acuuucauuugugaagacugua

SEQ ID NO: 234502 - RNA, 22 nt, Human
gccucagaaagcuuuuauucau

SEQ ID NO: 234503 - RNA, 22 nt, Human
gagggugcaggaggaugguagu

SEQ ID NO: 234504 - RNA, 22 nt, Human
agcuuuaccugccuuggggcac

SEQ ID NO: 234505 - RNA, 22 nt, Human
aagcccugggguugcacaaggc

SEQ ID NO: 234506 - RNA, 22 nt, Human
ugcuggccaagcagaggucaau

SEQ ID NO: 234507 - RNA, 20 nt, Human
cugucuugugggcuuccccu

SEQ ID NO: 234508 - RNA, 22 nt, Human
cccucaccaggcuccaggcaug

SEQ ID NO: 234509 - RNA, 22 nt, Human
gaauuacagaguuguuaaguca

SEQ ID NO: 234510 - RNA, 22 nt, Human
gaaaggcugcaucucgccucag

SEQ ID NO: 234511 - RNA, 22 nt, Human
acaucuuuauacuaguccuuga

SEQ ID NO: 234512 - RNA, 22 nt, Human
ggcacccuuggggggccacagc

SEQ ID NO: 234513 - RNA, 22 nt, Human
augauuucuauauaaacuuaaa

SEQ ID NO: 234514 - RNA, 23 nt, Human
aagauccauucaaauuauguauc

SEQ ID NO: 234515 - RNA, 22 nt, Human
aucauucuauuguugagcugcc

SEQ ID NO: 234516 - RNA, 22 nt, Human
aggaauguaaaucuagauuuua

SEQ ID NO: 234517 - RNA, 22 nt, Human
gagaggcugcauaugcacacug

SEQ ID NO: 234518 - RNA, 22 nt, Human
uaaaucuucuacaucaucauaa

SEQ ID NO: 234519 - RNA, 23 nt, Human
uugcaaauuucaguuaguucaug

SEQ ID NO: 234520 - RNA, 22 nt, Human
uuuaguagaauaguauaucaaa

SEQ ID NO: 234521 - RNA, 22 nt, Human
aaaguaguccuuggagcgaaau

SEQ ID NO: 234522 - RNA, 22 nt, Human
ugaagcaaauuuuucucagagu

SEQ ID NO: 234523 - RNA, 22 nt, Human
uaaggcuucuuggaauacugca

SEQ ID NO: 234524 - RNA, 22 nt, Human
agugcagggccugcccagcagg

SEQ ID NO: 234525 - RNA, 22 nt, Human
uucaaugcuuauauggacuaau

SEQ ID NO: 234526 - RNA, 21 nt, Human
uuuuaacaaggauuucccuag

SEQ ID NO: 234527 - RNA, 22 nt, Human
aaguaucaaaugguagcauaug

SEQ ID NO: 234528 - RNA, 21 nt, Human
augucaaaugcuuuauuuuau

SEQ ID NO: 234529 - RNA, 22 nt, Human
aauccauagaauaaaauugcag

SEQ ID NO: 234530 - RNA, 22 nt, Human
cagcccucucugggccccaagg

SEQ ID NO: 234531 - RNA, 22 nt, Human
uuagcaauguaugauuaaaaua

SEQ ID NO: 234532 - RNA, 22 nt, Human
acagauaauuagcauaaaugcu

SEQ ID NO: 234533 - RNA, 22 nt, Human
uuuaguguaagcauaaagaaca

SEQ ID NO: 234534 - RNA, 22 nt, Human
ccagagcuccagggcuacagaa

SEQ ID NO: 234535 - RNA, 22 nt, Human
aauugcuucccaagggaggucu

SEQ ID NO: 234536 - RNA, 22 nt, Human
aacacagacauagugauuacag

SEQ ID NO: 234537 - RNA, 22 nt, Human
ucaacuaacucuauuauuugaa

SEQ ID NO: 234538 - RNA, 22 nt, Human
cagcagcuuugccaagucagcc

SEQ ID NO: 234539 - RNA, 22 nt, Human
ugcugccagccaggccauggag

SEQ ID NO: 234540 - RNA, 22 nt, Human
agagcuggccagggaucacucu

SEQ ID NO: 234541 - RNA, 22 nt, Human
uacauuucagagcuccucucug

SEQ ID NO: 234542 - RNA, 23 nt, Human
gggagaugggaaaugaaggcucu

SEQ ID NO: 234543 - RNA, 22 nt, Human
gggauggaggguagagcaagug

SEQ ID NO: 234544 - RNA, 22 nt, Human
aacaugaaaagcccagagaggu

SEQ ID NO: 234545 - RNA, 22 nt, Human
ccacaucugcauuuaauguaua

SEQ ID NO: 234546 - RNA, 21 nt, Human
aacuacaguuguuccuucauu

SEQ ID NO: 234547 - RNA, 22 nt, Human
ugggaagguacacgggaaagag

SEQ ID NO: 234548 - RNA, 22 nt, Human
ccauacacacaccaaauuugua

SEQ ID NO: 234549 - RNA, 22 nt, Human
ggcaucugagcuguguaugguu

SEQ ID NO: 234550 - RNA, 22 nt, Human
agaacgcuauucagaacacugg

SEQ ID NO: 234551 - RNA, 21 nt, Human
ugaaagaaggugcagucugaa

SEQ ID NO: 234552 - RNA, 22 nt, Human
uauuagaaaggcuauugcauag

SEQ ID NO: 234553 - RNA, 23 nt, Human
acagggcauugcuggccucgagg

SEQ ID NO: 234554 - RNA, 17 nt, Human
aggcaggagauuggaga

SEQ ID NO: 234555 - RNA, 22 nt, Human
gucuagagccugaugaggauga

SEQ ID NO: 234556 - RNA, 22 nt, Human
gggagcugguuccugcccucca

SEQ ID NO: 234557 - RNA, 22 nt, Human
uagggcucacugagaugaauau

SEQ ID NO: 234558 - RNA, 22 nt, Human
aaguacaacgcauacagagaaa

SEQ ID NO: 234559 - RNA, 22 nt, Human
uuugacauuaaggaacauauau

SEQ ID NO: 234560 - RNA, 22 nt, Human
cauuucuagacaaguccuggag

SEQ ID NO: 234561 - RNA, 22 nt, Human
aaguuuauguugguaagauauc

SEQ ID NO: 234562 - RNA, 22 nt, Human
aaaauacuguggaguguugaaa

SEQ ID NO: 234563 - RNA, 21 nt, Human
auucaguuugacaucuagcag

SEQ ID NO: 234564 - RNA, 17 nt, Human
gccuucucugcccucac

SEQ ID NO: 234565 - RNA, 22 nt, Human
uugcucauuugccuuuagguuu

SEQ ID NO: 234566 - RNA, 22 nt, Human
ggaggcuccaugagcuccugca

SEQ ID NO: 234567 - RNA, 22 nt, Human
gcacaguuaaagggucauguga

SEQ ID NO: 234568 - RNA, 22 nt, Human
augaagucucuuuuucaugaga

SEQ ID NO: 234569 - RNA, 22 nt, Human
gacuaggcucucauagagguag

SEQ ID NO: 234570 - RNA, 22 nt, Human
uaguuuaauggucaacuaauga

SEQ ID NO: 234571 - RNA, 22 nt, Human
ccagcagagggucuuggccauu

SEQ ID NO: 234572 - RNA, 22 nt, Human
gacaggcuauuuucuuacgggu

SEQ ID NO: 234573 - RNA, 23 nt, Human
agggcugaugccauugcagcucu

SEQ ID NO: 234574 - RNA, 22 nt, Human
ucaggagugauaccauuuguca

SEQ ID NO: 234575 - RNA, 22 nt, Human
aggcccugcugaggccucccuc

SEQ ID NO: 234576 - RNA, 22 nt, Human
uagucagugaucaguggaguug

SEQ ID NO: 234577 - RNA, 22 nt, Human
gcuggagguuucaccugaguuu

SEQ ID NO: 234578 - RNA, 22 nt, Human
cagccagagaggaaggaaugca

SEQ ID NO: 234579 - RNA, 22 nt, Human
cauauuuauucuucugccagug

SEQ ID NO: 234580 - RNA, 19 nt, Human
agcugcuggcccagggacc

SEQ ID NO: 234581 - RNA, 22 nt, Human
cuggccuggucuggccucucca

SEQ ID NO: 234582 - RNA, 22 nt, Human
ugcuucuccauugaugcuaagu

SEQ ID NO: 234583 - RNA, 22 nt, Human
agguacaguagacagacaguua

SEQ ID NO: 234584 - RNA, 22 nt, Human
cugacagaugcugcuggcagua

SEQ ID NO: 234585 - RNA, 22 nt, Human
aguaacucauguaaaccucaca

SEQ ID NO: 234586 - RNA, 22 nt, Human
ucagaggccaaacugagcaggg

SEQ ID NO: 234587 - RNA, 22 nt, Human
uuucuccugaguuccacgcuac

SEQ ID NO: 234588 - RNA, 18 nt, Human
gucucugugggaauuggc

SEQ ID NO: 234589 - RNA, 21 nt, Human
aaugugugcuauuuaucuuuu

SEQ ID NO: 234590 - RNA, 22 nt, Human
gcaggaagcauagaagaaugcc

SEQ ID NO: 234591 - RNA, 22 nt, Human
cagaugugauucuucccucagc

SEQ ID NO: 234592 - RNA, 22 nt, Human
ugugaaaagcaggcuacuuucu

SEQ ID NO: 234593 - RNA, 22 nt, Human
gaaggcuugcagcucuguggca

SEQ ID NO: 234594 - RNA, 22 nt, Human
agcugugcuguggucaucuggg

SEQ ID NO: 234595 - RNA, 22 nt, Human
cauuggucuucuaacagagaga

SEQ ID NO: 234596 - RNA, 22 nt, Human
cagucuaaguuaauuuccacaa

SEQ ID NO: 234597 - RNA, 22 nt, Human
gggggcagaauguacucuuguc

SEQ ID NO: 234598 - RNA, 22 nt, Human
ggccagagaagucagacccuug

SEQ ID NO: 234599 - RNA, 22 nt, Human
gaaaguauuuaaguccauauuu

SEQ ID NO: 234600 - RNA, 22 nt, Human
aggguggccaccaaguauguca

SEQ ID NO: 234601 - RNA, 22 nt, Human
gcacugccaucaaugcaugaca

SEQ ID NO: 234602 - RNA, 22 nt, Human
gacagcuuagugaaaauguaaa

SEQ ID NO: 234603 - RNA, 22 nt, Human
auuaaugacgcagauaauaauu

SEQ ID NO: 234604 - RNA, 22 nt, Human
caagagcucaccggagagcauu

SEQ ID NO: 234605 - RNA, 22 nt, Human
ugauuucccucaucauaacaga

SEQ ID NO: 234606 - RNA, 22 nt, Human
aucaagagaaggggaagaugaa

SEQ ID NO: 234607 - RNA, 22 nt, Human
gcuguucauagaaauggucuca

SEQ ID NO: 234608 - RNA, 22 nt, Human
cugcuggcccccauuucagggu

SEQ ID NO: 234609 - RNA, 22 nt, Human
ccuuccaagugcugcuuuuucc

SEQ ID NO: 234610 - RNA, 22 nt, Human
gcagacagacugcagugauuuu

SEQ ID NO: 234611 - RNA, 22 nt, Human
caggcccuggcagggcugaguc

SEQ ID NO: 234612 - RNA, 22 nt, Human
caugugugaaucuugugaucau

SEQ ID NO: 234613 - RNA, 21 nt, Human
acuguuauucccauuuucacc

SEQ ID NO: 234614 - RNA, 22 nt, Human
cacagggcuaaaugaaggguug

SEQ ID NO: 234615 - RNA, 22 nt, Human
acagcagggucacauucccucu

SEQ ID NO: 234616 - RNA, 23 nt, Human
gcugucugucaucucugcgggag

SEQ ID NO: 234617 - RNA, 22 nt, Human
cugacaggguagacagagggca

SEQ ID NO: 234618 - RNA, 22 nt, Human
ggucaaagugaggagucagguu

SEQ ID NO: 234619 - RNA, 22 nt, Human
ggagaagggacagacucagcuu

SEQ ID NO: 234620 - RNA, 23 nt, Human
uagaacaucggugucuuggagca

SEQ ID NO: 234621 - RNA, 22 nt, Human
cugcugagguauacuaugugac

SEQ ID NO: 234622 - RNA, 22 nt, Human
aggaagcuggugugaggaugaa

SEQ ID NO: 234623 - RNA, 22 nt, Human
ugcaaggguguuugagcugccc

SEQ ID NO: 234624 - RNA, 19 nt, Human
acauugaauuuucuucuuu

SEQ ID NO: 234625 - RNA, 22 nt, Human
cuguuacuguuggcccagggug

SEQ ID NO: 234626 - RNA, 22 nt, Human
cugagggaaggcagucaguugg

SEQ ID NO: 234627 - RNA, 22 nt, Human
cccuccagcucaaagcaaccgg

SEQ ID NO: 234628 - RNA, 21 nt, Human
ucagcaaaauaagcaaaugga

SEQ ID NO: 234629 - RNA, 22 nt, Human
gcccagcacagcuggaagaguc

SEQ ID NO: 234630 - RNA, 22 nt, Human
auguuaaagauggugggaaauu

SEQ ID NO: 234631 - RNA, 22 nt, Human
gcagggcuguggacacuuuggu

SEQ ID NO: 234632 - RNA, 22 nt, Human
cauuugugcuuuuauaaaauag

SEQ ID NO: 234633 - RNA, 22 nt, Human
aagacacagcgaaauguuccug

SEQ ID NO: 234634 - RNA, 22 nt, Human
uggaggcauuucuuuuuggucg

SEQ ID NO: 234635 - RNA, 22 nt, Human
cuggcugguaauggaacgacag

SEQ ID NO: 234636 - RNA, 22 nt, Human
gaggcagcaugguaccuuggag

SEQ ID NO: 234637 - RNA, 22 nt, Human
aaggccaucuacuuacggaauu

SEQ ID NO: 234638 - RNA, 22 nt, Human
ccagcugcuugggaaaaugucu

SEQ ID NO: 234639 - RNA, 22 nt, Human
ugggccuggagcccuggagagu

SEQ ID NO: 234640 - RNA, 22 nt, Human
gcagaggcacagccccagauga

SEQ ID NO: 234641 - RNA, 21 nt, Human
ggcagcccgcccucuccuggc

SEQ ID NO: 234642 - RNA, 22 nt, Human
cucugugcgggccauggucagg

SEQ ID NO: 234643 - RNA, 23 nt, Human
uaucaguaagcaucccugaaccc

SEQ ID NO: 234644 - RNA, 22 nt, Human
uuaaauauuauguugucugcaa

SEQ ID NO: 234645 - RNA, 22 nt, Human
accuuagaaagugacaaacgaa

SEQ ID NO: 234646 - RNA, 22 nt, Human
gaaucagauacugauuucaguc

SEQ ID NO: 234647 - RNA, 22 nt, Human
gagaaccucuccacaagucugg

SEQ ID NO: 234648 - RNA, 17 nt, Human
auggaggcagacagguc

SEQ ID NO: 234649 - RNA, 22 nt, Human
acauaauagguaccugaauaau

SEQ ID NO: 234650 - RNA, 22 nt, Human
agucacuuugcuacucugccuu

SEQ ID NO: 234651 - RNA, 22 nt, Human
aacaugaaacccaaacagaaua

SEQ ID NO: 234652 - RNA, 22 nt, Human
ugggcagagucguggggaauag

SEQ ID NO: 234653 - RNA, 22 nt, Human
ucuucuguuaccacagcgauga

SEQ ID NO: 234654 - RNA, 22 nt, Human
agugauugcuugcuuaaggaca

SEQ ID NO: 234655 - RNA, 17 nt, Human
agcuacaaggcaguuca

SEQ ID NO: 234656 - RNA, 18 nt, Human
gaugggguccaggcauag

SEQ ID NO: 234657 - RNA, 22 nt, Human
ugcugggcggugggcucauccc

SEQ ID NO: 234658 - RNA, 22 nt, Human
agguggggugagcugcagacua

SEQ ID NO: 234659 - RNA, 22 nt, Human
agagcacagccaccauuuacaa

SEQ ID NO: 234660 - RNA, 22 nt, Human
ugccugggaaccaauccuggcu

SEQ ID NO: 234661 - RNA, 22 nt, Human
uacaaagagguaauugcauaua

SEQ ID NO: 234662 - RNA, 22 nt, Human
uuuggacugcaugaugaucugg

SEQ ID NO: 234663 - RNA, 22 nt, Human
ccaggacucaaugaccacaggg

SEQ ID NO: 234664 - RNA, 22 nt, Human
acaaagauguuuaaagcauuua

SEQ ID NO: 234665 - RNA, 22 nt, Human
ccucccucuguuagagcugucu

SEQ ID NO: 234666 - RNA, 22 nt, Human
cuggcacaacuccaccucagcg

SEQ ID NO: 234667 - RNA, 19 nt, Human
cauacaauuaccauaggau

SEQ ID NO: 234668 - RNA, 20 nt, Human
gucucagaauggauuugcau

SEQ ID NO: 234669 - RNA, 22 nt, Human
uagugcagaggaggagccucug

SEQ ID NO: 234670 - RNA, 22 nt, Human
uaggugucagguauagaauuua

SEQ ID NO: 234671 - RNA, 22 nt, Human
caggacacaggguguggcugau

SEQ ID NO: 234672 - RNA, 20 nt, Human
uaucuaaaugcuuacauuac

SEQ ID NO: 234673 - RNA, 22 nt, Human
aaauuuuaguaaggaaguugag

SEQ ID NO: 234674 - RNA, 22 nt, Human
cagguucugaggauggugccug

SEQ ID NO: 234675 - RNA, 22 nt, Human
gcacccagugggaugcuuagca

SEQ ID NO: 234676 - RNA, 22 nt, Human
gccucugcucucagguagccuc

SEQ ID NO: 234677 - RNA, 22 nt, Human
ccacagcaggacuggagccgcc

SEQ ID NO: 234678 - RNA, 22 nt, Human
uccuggcuccuggagaccugcu

SEQ ID NO: 234679 - RNA, 22 nt, Human
uagggacacugcucaugaguuc

SEQ ID NO: 234680 - RNA, 22 nt, Human
cuccagcucgcgagcucugcuc

SEQ ID NO: 234681 - RNA, 22 nt, Human
ugagccagccucagaagucacg

SEQ ID NO: 234682 - RNA, 22 nt, Human
ccaggagccacucaggcccaca

SEQ ID NO: 234683 - RNA, 22 nt, Human
cugagaagaggguauguggcgc

SEQ ID NO: 234684 - RNA, 22 nt, Human
ugauuuacaauuguaaaaguuu

SEQ ID NO: 234685 - RNA, 22 nt, Human
augcuuuuccuaaaaugaugcc

SEQ ID NO: 234686 - RNA, 22 nt, Human
agagggcugccucagucagcua

SEQ ID NO: 234687 - RNA, 22 nt, Human
guuuagaaugaaacuuuugagc

SEQ ID NO: 234688 - RNA, 22 nt, Human
gugaauauucuuugugcaguau

SEQ ID NO: 234689 - RNA, 22 nt, Human
ucuauugcagauggaugcccuc

SEQ ID NO: 234690 - RNA, 22 nt, Human
gcaguggggaaugcuggggaga

SEQ ID NO: 234691 - RNA, 22 nt, Human
uugaaaucuuccacagcccaag

SEQ ID NO: 234692 - RNA, 22 nt, Human
gccaccaggagcccaguccaaa

SEQ ID NO: 234693 - RNA, 19 nt, Human
gcucagagacaccuguugc

SEQ ID NO: 234694 - RNA, 22 nt, Human
cuacaggcucagggagcccucu

SEQ ID NO: 234695 - RNA, 22 nt, Human
aaaaagggauuugugauccagg

SEQ ID NO: 234696 - RNA, 23 nt, Human
aaaugcagggucgcagguuacag

SEQ ID NO: 234697 - RNA, 21 nt, Human
acagucuccccagaucucucc

SEQ ID NO: 234698 - RNA, 22 nt, Human
cccagcccaucucaaaggucua

SEQ ID NO: 234699 - RNA, 22 nt, Human
gaauacacgaauagagcauggu

SEQ ID NO: 234700 - RNA, 22 nt, Human
cuaaagcucaacaggcacuauu

SEQ ID NO: 234701 - RNA, 22 nt, Human
ucucagagaugucaagagucua

SEQ ID NO: 234702 - RNA, 22 nt, Human
uggcucaguuucugcccagcug

SEQ ID NO: 234703 - RNA, 22 nt, Human
ucacuggggccuuuggucagga

SEQ ID NO: 234704 - RNA, 20 nt, Human
aguacaauguaugauucaga

SEQ ID NO: 234705 - RNA, 19 nt, Human
uucuccaggcugcagaggg

SEQ ID NO: 234706 - RNA, 22 nt, Human
acagagcacugcccugugccgc

SEQ ID NO: 234707 - RNA, 19 nt, Human
guccuggcgccgccacacc

SEQ ID NO: 234708 - RNA, 22 nt, Human
guugugcaaccaucaccaccau

SEQ ID NO: 234709 - RNA, 21 nt, Human
gaaggcuucugccuggaggag

SEQ ID NO: 234710 - RNA, 22 nt, Human
ucuccaggcacuuggcugcuac

SEQ ID NO: 234711 - RNA, 22 nt, Human
agacagcuagggcugcagggac

SEQ ID NO: 234712 - RNA, 22 nt, Human
cuggcugcuuguuuugaugggu

SEQ ID NO: 234713 - RNA, 22 nt, Human
gcagccaggaagcccaggacac

SEQ ID NO: 234714 - RNA, 22 nt, Human
gagcuccacuuagcaaggccac

SEQ ID NO: 234715 - RNA, 22 nt, Human
ucuucagaaaauuaucacuugu

SEQ ID NO: 234716 - RNA, 22 nt, Human
cuggcugcaggaugaggcugcc

SEQ ID NO: 234717 - RNA, 22 nt, Human
aggccaguguggcuggagcaca

SEQ ID NO: 234718 - RNA, 22 nt, Human
ggaaagcucagaucuuguugga

SEQ ID NO: 234719 - RNA, 22 nt, Human
uguucacauguacaugaauauu

SEQ ID NO: 234720 - RNA, 22 nt, Human
auggcuuggcaccaucuccuug

SEQ ID NO: 234721 - RNA, 22 nt, Human
ugguaucagagccaucuguauu

SEQ ID NO: 234722 - RNA, 22 nt, Human
acugggaggcaaagagcaagga

SEQ ID NO: 234723 - RNA, 22 nt, Human
cauguacauucuguagauggag

SEQ ID NO: 234724 - RNA, 22 nt, Human
uggcugacaauguagcaguaac

SEQ ID NO: 234725 - RNA, 17 nt, Human
ucagagggaugagcagg

SEQ ID NO: 234726 - RNA, 20 nt, Human
agagugcuggacugaggagc

SEQ ID NO: 234727 - RNA, 22 nt, Human
ugcagggagggcccagcaaucu

SEQ ID NO: 234728 - RNA, 22 nt, Human
agcacaguuuucauugcagggu

SEQ ID NO: 234729 - RNA, 22 nt, Human
uggggcuccuccuggcaggagg

SEQ ID NO: 234730 - RNA, 22 nt, Human
caguaaacacuagcauucuugg

SEQ ID NO: 234731 - RNA, 22 nt, Human
cagcucugggagucccaccccu

SEQ ID NO: 234732 - RNA, 22 nt, Human
uggcaggagguuuucuccagga

SEQ ID NO: 234733 - RNA, 22 nt, Human
uagggaggaggguuuucaaauc

SEQ ID NO: 234734 - RNA, 22 nt, Human
ugggggcagaggauucaggaau

SEQ ID NO: 234735 - RNA, 22 nt, Human
uaggaacaaagagccucacauu

SEQ ID NO: 234736 - RNA, 22 nt, Human
ggagcuggcuacagagaacucc

SEQ ID NO: 234737 - RNA, 22 nt, Human
ucauggcuggaagcucaguuag

SEQ ID NO: 234738 - RNA, 20 nt, Human
gcacaucugcuuuggauuuc

SEQ ID NO: 234739 - RNA, 22 nt, Human
uucuuacuaugauuugagccuc

SEQ ID NO: 234740 - RNA, 23 nt, Human
ccagcugugccuggcccaggagc

SEQ ID NO: 234741 - RNA, 22 nt, Human
cucagcaauuaccugugucucu

SEQ ID NO: 234742 - RNA, 22 nt, Human
gugaggcauugaagaccggaau

SEQ ID NO: 234743 - RNA, 22 nt, Human
gcagggaccuaugacgauggaa

SEQ ID NO: 234744 - RNA, 22 nt, Human
cuguccugugucagccugaaau

SEQ ID NO: 234745 - RNA, 22 nt, Human
ugagaucucugccuauauggau

SEQ ID NO: 234746 - RNA, 20 nt, Human
agcaguguggggagacugug

SEQ ID NO: 234747 - RNA, 22 nt, Human
uauggcuucuuuugcaacuacu

SEQ ID NO: 234748 - RNA, 21 nt, Human
cuggaggcagguggugccagg

SEQ ID NO: 234749 - RNA, 22 nt, Human
gcuucugucuuagcuaccuccc

SEQ ID NO: 234750 - RNA, 22 nt, Human
ccacagaaagccugggaagugg

SEQ ID NO: 234751 - RNA, 22 nt, Human
aggcagguuggggaaaagcacu

SEQ ID NO: 234752 - RNA, 22 nt, Human
gugcaaaaguaauuacaguuuu

SEQ ID NO: 234753 - RNA, 22 nt, Human
gugaggagcugacacuggggug

SEQ ID NO: 234754 - RNA, 22 nt, Human
ugucuuuuuacuauguucaauc

SEQ ID NO: 234755 - RNA, 22 nt, Human
cucacucagacauccagugcag

SEQ ID NO: 234756 - RNA, 22 nt, Human
ucugaaaugaacucuugaacuu

SEQ ID NO: 234757 - RNA, 22 nt, Human
gcuggcuggcgggugcguccuc

SEQ ID NO: 234758 - RNA, 22 nt, Human
agcauuuaguuaguaaauguuu

SEQ ID NO: 234759 - RNA, 22 nt, Human
acauucuauucugcaggacaag

SEQ ID NO: 234760 - RNA, 22 nt, Human
ggauuuuagaguaccuaagugu

SEQ ID NO: 234761 - RNA, 22 nt, Human
gccaccugcgggccguggugga

SEQ ID NO: 234762 - RNA, 22 nt, Human
uuuuccuauaugcaaagaaugc

SEQ ID NO: 234763 - RNA, 22 nt, Human
cacuucaaggaauaucuagaaa

SEQ ID NO: 234764 - RNA, 22 nt, Human
ucaggccuuucuucagagcuuc

SEQ ID NO: 234765 - RNA, 22 nt, Human
uaaauuagagccagguaaguuu

SEQ ID NO: 234766 - RNA, 22 nt, Human
uacuguacugucuuuuuugcug

SEQ ID NO: 234767 - RNA, 22 nt, Human
agucucagccacacagaccuau

SEQ ID NO: 234768 - RNA, 22 nt, Human
gaaaacuuggaucucuagaaug

SEQ ID NO: 234769 - RNA, 22 nt, Human
agcaacaguguauaucauaggc

SEQ ID NO: 234770 - RNA, 22 nt, Human
ugaguucuuuccguuagguaug

SEQ ID NO: 234771 - RNA, 22 nt, Human
uucacaguggcccucucugagu

SEQ ID NO: 234772 - RNA, 22 nt, Human
cuggcagucugccucuucacug

SEQ ID NO: 234773 - RNA, 22 nt, Human
uccugugagcagcacagagaca

SEQ ID NO: 234774 - RNA, 22 nt, Human
caguggcugguuagggacagga

SEQ ID NO: 234775 - RNA, 22 nt, Human
gucucaagggggaacucacugu

SEQ ID NO: 234776 - RNA, 22 nt, Human
aauuuuaugccuugcacguugg

SEQ ID NO: 234777 - RNA, 22 nt, Human
uccaggccccagaccguacugc

SEQ ID NO: 234778 - RNA, 22 nt, Human
agaagggcuacacgggcucucc

SEQ ID NO: 234779 - RNA, 22 nt, Human
uugccuggacucugcugguauu

SEQ ID NO: 234780 - RNA, 22 nt, Human
ucugugcagauguagaccaguu

SEQ ID NO: 234781 - RNA, 22 nt, Human
uggaaagucucuuuugacugua

SEQ ID NO: 234782 - RNA, 19 nt, Human
ugagccagggaggccaugc

SEQ ID NO: 234783 - RNA, 22 nt, Human
caggcuucagcauccacuuagu

SEQ ID NO: 234784 - RNA, 22 nt, Human
agcagggacugagccaguggga

SEQ ID NO: 234785 - RNA, 22 nt, Human
cuagaauugcauucuaugaaua

SEQ ID NO: 234786 - RNA, 22 nt, Human
auuugcucuagcugcagugaau

SEQ ID NO: 234787 - RNA, 20 nt, Human
aaaguguaagcauauaauua

SEQ ID NO: 234788 - RNA, 22 nt, Human
ccuuuucuauguaccagcagug

SEQ ID NO: 234789 - RNA, 22 nt, Human
ccuccccacagcccaggagacu

SEQ ID NO: 234790 - RNA, 22 nt, Human
agaucuggaaaaucacaggugc

SEQ ID NO: 234791 - RNA, 22 nt, Human
gcauaggcacuuuccuccuccu

SEQ ID NO: 234792 - RNA, 19 nt, Human
gaagaagcuugagaaguag

SEQ ID NO: 234793 - RNA, 22 nt, Human
cuuuucugugaugcugacaguc

SEQ ID NO: 234794 - RNA, 22 nt, Human
acagagcuuaauucaggagcuu

SEQ ID NO: 234795 - RNA, 22 nt, Human
uggcuuccgccgcgggccucgg

SEQ ID NO: 234796 - RNA, 22 nt, Human
cuagagaaaaagcuuagguacg

SEQ ID NO: 234797 - RNA, 22 nt, Human
auaguuuuauagauauugugua

SEQ ID NO: 234798 - RNA, 22 nt, Human
ggcucuggggggaagucuguug

SEQ ID NO: 234799 - RNA, 22 nt, Human
agaguuuguacuuuacccugag

SEQ ID NO: 234800 - RNA, 20 nt, Human
gcuguucacauuauuaguag

SEQ ID NO: 234801 - RNA, 22 nt, Human
aaggccaggaaauuaucccuau

SEQ ID NO: 234802 - RNA, 22 nt, Human
aaagcagugcugugagaacacu

SEQ ID NO: 234803 - RNA, 22 nt, Human
agucacauucugggguacuggg

SEQ ID NO: 234804 - RNA, 22 nt, Human
uuacaguaauguauuauuuaac

SEQ ID NO: 234805 - RNA, 22 nt, Human
cagagcaguccuugucaaucag

SEQ ID NO: 234806 - RNA, 20 nt, Human
gcuuggaagccaccuguauu

SEQ ID NO: 234807 - RNA, 22 nt, Human
uccagcccugugucugggagag

SEQ ID NO: 234808 - RNA, 20 nt, Human
uucuuaaagaccucacuuug

SEQ ID NO: 234809 - RNA, 22 nt, Human
uccugugcuguuaauagugaua

SEQ ID NO: 234810 - RNA, 22 nt, Human
aaucugucccuuaacuagucau

SEQ ID NO: 234811 - RNA, 22 nt, Human
ucucagagagaugaaacuucca

SEQ ID NO: 234812 - RNA, 22 nt, Human
uuucuccuccagagagacacag

SEQ ID NO: 234813 - RNA, 22 nt, Human
ucccugggagaugaugaugagg

SEQ ID NO: 234814 - RNA, 22 nt, Human
gcagagaccccgcagugaggcc

SEQ ID NO: 234815 - RNA, 22 nt, Human
auggcagacgaggcagcagggg

SEQ ID NO: 234816 - RNA, 22 nt, Human
uggucuggaacuccuggcuuca

SEQ ID NO: 234817 - RNA, 18 nt, Human
ggucugagaucguuuuuc

SEQ ID NO: 234818 - RNA, 22 nt, Human
cauggccaaggaugcucaacca

SEQ ID NO: 234819 - RNA, 19 nt, Human
uggaccugugcccauggcu

SEQ ID NO: 234820 - RNA, 22 nt, Human
ggcuucugucucaagcaccagc

SEQ ID NO: 234821 - RNA, 22 nt, Human
agcugcaaguaagcuugcuccu

SEQ ID NO: 234822 - RNA, 23 nt, Human
ugcugggguaguuuguggcacag

SEQ ID NO: 234823 - RNA, 22 nt, Human
uucuuuauagcuauuggaugag

SEQ ID NO: 234824 - RNA, 22 nt, Human
ucccaggaagaucccagggacc

SEQ ID NO: 234825 - RNA, 22 nt, Human
cagaauuuuucgaauguacugu

SEQ ID NO: 234826 - RNA, 22 nt, Human
cuccugagcugcagccuugugu

SEQ ID NO: 234827 - RNA, 22 nt, Human
agcagguguauauaaggcugag

SEQ ID NO: 234828 - RNA, 22 nt, Human
uuggaacagaaacagacaaaua

SEQ ID NO: 234829 - RNA, 22 nt, Human
cuuuuuauagcuauguccuaug

SEQ ID NO: 234830 - RNA, 22 nt, Human
aggcuggcgacaucuggcgggc

SEQ ID NO: 234831 - RNA, 22 nt, Human
uaucauaaguuaauuaaacagu

SEQ ID NO: 234832 - RNA, 22 nt, Human
aagucucuuuggguacuuuauu

SEQ ID NO: 234833 - RNA, 22 nt, Human
uuucuguuguauggcuucugca

SEQ ID NO: 234834 - RNA, 22 nt, Human
acagucuacuugagcuuguaua

SEQ ID NO: 234835 - RNA, 22 nt, Human
gacauuuagcuguuuugcauuu

SEQ ID NO: 234836 - RNA, 20 nt, Human
aggucucagagcaagagccc

SEQ ID NO: 234837 - RNA, 22 nt, Human
cuuuacugaagugaagaccugg

SEQ ID NO: 234838 - RNA, 22 nt, Human
guggucaggcagugggagagaa

SEQ ID NO: 234839 - RNA, 22 nt, Human
gugcacagagcccagggccgcg

SEQ ID NO: 234840 - RNA, 22 nt, Human
aguucuguggcugugcccugua

SEQ ID NO: 234841 - RNA, 22 nt, Human
gaaggcuucaaaagguguaauu

SEQ ID NO: 234842 - RNA, 22 nt, Human
cagggagaaaucuccaggaggu

SEQ ID NO: 234843 - RNA, 22 nt, Human
ugguccagaugccuuggcuuua

SEQ ID NO: 234844 - RNA, 23 nt, Human
augccaggcugccuggccagccu

SEQ ID NO: 234845 - RNA, 22 nt, Human
ccuggugggcaggagugagacc

SEQ ID NO: 234846 - RNA, 22 nt, Human
ccagcccuuugugguucacuga

SEQ ID NO: 234847 - RNA, 22 nt, Human
ucucagagcuucaguuauuuuc

SEQ ID NO: 234848 - RNA, 22 nt, Human
ugaugaggagacuguggcuugg

SEQ ID NO: 234849 - RNA, 22 nt, Human
gccagauguagauagcaaggua

SEQ ID NO: 234850 - RNA, 22 nt, Human
ucaugugucugcugcagcuguu

SEQ ID NO: 234851 - RNA, 22 nt, Human
aauaucuucuaaggauagaacu

SEQ ID NO: 234852 - RNA, 22 nt, Human
aauugcuuugaagaagggagcg

SEQ ID NO: 234853 - RNA, 21 nt, Human
ggcuguggagccaugacucac

SEQ ID NO: 234854 - RNA, 22 nt, Human
uuggaggaugucggcauauuua

SEQ ID NO: 234855 - RNA, 20 nt, Human
agcaguuuccuaacucagcu

SEQ ID NO: 234856 - RNA, 17 nt, Human
uaaguuauagcagaaga

SEQ ID NO: 234857 - RNA, 22 nt, Human
gccagagcuucccccgagugug

SEQ ID NO: 234858 - RNA, 22 nt, Human
gggaccugcgccacucacuguc

SEQ ID NO: 234859 - RNA, 22 nt, Human
uauuaaauauaucuguuaguug

SEQ ID NO: 234860 - RNA, 22 nt, Human
ucuguaggggccggcggagccc

SEQ ID NO: 234861 - RNA, 22 nt, Human
ucaggaaguugaggcguagaga

SEQ ID NO: 234862 - RNA, 22 nt, Human
gucagucauauuguacagauau

SEQ ID NO: 234863 - RNA, 22 nt, Human
uuuagaaauugcagagugggug

SEQ ID NO: 234864 - RNA, 22 nt, Human
ggaagcuggacaggcuuugagu

SEQ ID NO: 234865 - RNA, 22 nt, Human
auugugcaaaaccucaggccuc

SEQ ID NO: 234866 - RNA, 22 nt, Human
ugcaggaaauuccaggguggcc

SEQ ID NO: 234867 - RNA, 22 nt, Human
uucugugaggacuucucaagga

SEQ ID NO: 234868 - RNA, 22 nt, Human
uugaauggcuucuagguucucc

SEQ ID NO: 234869 - RNA, 22 nt, Human
uugggagguaauggagccaagu

SEQ ID NO: 234870 - RNA, 22 nt, Human
cuccuuccugcagaucugagau

SEQ ID NO: 234871 - RNA, 22 nt, Human
ucuguagcaucuuaaauguagu

SEQ ID NO: 234872 - RNA, 22 nt, Human
cagucuccaaaucagucugaau

SEQ ID NO: 234873 - RNA, 22 nt, Human
agggcucugggguggcagagau

SEQ ID NO: 234874 - RNA, 22 nt, Human
aggcugagcaaagggccuuacc

SEQ ID NO: 234875 - RNA, 22 nt, Human
cagcagccucuugugccugugg

SEQ ID NO: 234876 - RNA, 22 nt, Human
acguguaaugaucaccacaauc

SEQ ID NO: 234877 - RNA, 22 nt, Human
cuuaggaacgcucugccuagug

SEQ ID NO: 234878 - RNA, 22 nt, Human
ucuggaggcaggcugccaggau

SEQ ID NO: 234879 - RNA, 22 nt, Human
acugccuucuuggccuucaaaa

SEQ ID NO: 234880 - RNA, 22 nt, Human
uucuguuucuggggucucugac

SEQ ID NO: 234881 - RNA, 22 nt, Human
cagaggaagagauacaagcccu

SEQ ID NO: 234882 - RNA, 22 nt, Human
auugagaaaauaaguauggaua

SEQ ID NO: 234883 - RNA, 22 nt, Human
gugcagcugcccaagccugagc

SEQ ID NO: 234884 - RNA, 22 nt, Human
aucuuuaaagacaugugaacuu

SEQ ID NO: 234885 - RNA, 22 nt, Human
uucugagguccaugcaguacug

SEQ ID NO: 234886 - RNA, 22 nt, Human
gcaggagcaauggccuaucaga

SEQ ID NO: 234887 - RNA, 20 nt, Human
cuguccugaucuuuucagaa

SEQ ID NO: 234888 - RNA, 22 nt, Human
uucuucaaugugcccuguuuuc

SEQ ID NO: 234889 - RNA, 22 nt, Human
gcccucaguggauucuuauugu

SEQ ID NO: 234890 - RNA, 22 nt, Human
ucuguggagugaccugggcuuu

SEQ ID NO: 234891 - RNA, 22 nt, Human
uggcuucaaagguagcauacaa

SEQ ID NO: 234892 - RNA, 22 nt, Human
auguccaauuucagagucucau

SEQ ID NO: 234893 - RNA, 22 nt, Human
aaggccagcccuaaugaugcuc

SEQ ID NO: 234894 - RNA, 22 nt, Human
aggccuuggaagccagggagcc

SEQ ID NO: 234895 - RNA, 22 nt, Human
ggcucuggagacauguggagag

SEQ ID NO: 234896 - RNA, 22 nt, Human
aagagacuauggugucuaugaa

SEQ ID NO: 234897 - RNA, 22 nt, Human
cucuggaguucuucaagcuacu

SEQ ID NO: 234898 - RNA, 22 nt, Human
gaaggggaaaguugagcaaaua

SEQ ID NO: 234899 - RNA, 23 nt, Human
cuguccuguaguucacguuggcc

SEQ ID NO: 234900 - RNA, 22 nt, Human
uucauguagcuuagcagagagg

SEQ ID NO: 234901 - RNA, 21 nt, Human
acauuuucuguuuuaggaagu

SEQ ID NO: 234902 - RNA, 22 nt, Human
gaggggcuggguagggcaaccc

SEQ ID NO: 234903 - RNA, 22 nt, Human
cuggcccauugccuucucucuc

SEQ ID NO: 234904 - RNA, 22 nt, Human
uccugggcagcgggacgcucag

SEQ ID NO: 234905 - RNA, 22 nt, Human
ugccuggcacuccuggagcuca

SEQ ID NO: 234906 - RNA, 17 nt, Human
aaguccagaguugagca

SEQ ID NO: 234907 - RNA, 20 nt, Human
ucccagucagccagagugag

SEQ ID NO: 234908 - RNA, 22 nt, Human
auggcugggucaccaucagggu

SEQ ID NO: 234909 - RNA, 22 nt, Human
uaauacauguauuccagagagu

SEQ ID NO: 234910 - RNA, 22 nt, Human
ucuucagacccuuagcugugau

SEQ ID NO: 234911 - RNA, 22 nt, Human
ccagcugggauuaagggaaaau

SEQ ID NO: 234912 - RNA, 22 nt, Human
gcagggaagacccggagcagcg

SEQ ID NO: 234913 - RNA, 22 nt, Human
uaguaagccucuccagagacag

SEQ ID NO: 234914 - RNA, 22 nt, Human
cgguccaggauggcuggcaagc

SEQ ID NO: 234915 - RNA, 22 nt, Human
auucagcagccauggcuucuga

SEQ ID NO: 234916 - RNA, 22 nt, Human
gcugucuuuuccuggcaguaaa

SEQ ID NO: 234917 - RNA, 22 nt, Human
aaggucagagcaggaaggaguc

SEQ ID NO: 234918 - RNA, 22 nt, Human
gcugggcaggccucgugagggc

SEQ ID NO: 234919 - RNA, 22 nt, Human
aggcugagaaagugggaagaug

SEQ ID NO: 234920 - RNA, 22 nt, Human
agaugccugccaguuauuuagc

SEQ ID NO: 234921 - RNA, 22 nt, Human
cuauugaaaguguacaauucaa

SEQ ID NO: 234922 - RNA, 22 nt, Human
uuucauguaaucauuuaggugg

SEQ ID NO: 234923 - RNA, 22 nt, Human
ucuggcccaucuucugccacca

SEQ ID NO: 234924 - RNA, 22 nt, Human
ucuuucugaugggaagggucaa

SEQ ID NO: 234925 - RNA, 22 nt, Human
aagcaugguggaugauacagug

SEQ ID NO: 234926 - RNA, 22 nt, Human
uuuacuaagcccaguuauaugc

SEQ ID NO: 234927 - RNA, 22 nt, Human
aaucuagagugcuaggucugug

SEQ ID NO: 234928 - RNA, 22 nt, Human
gaugaguaauagcuaaugguuc

SEQ ID NO: 234929 - RNA, 21 nt, Human
cucuggagucaagagcuucca

SEQ ID NO: 234930 - RNA, 22 nt, Human
ggaagugaggaaauauuuuguu

SEQ ID NO: 234931 - RNA, 22 nt, Human
ucuggaaggaacccuuagagga

SEQ ID NO: 234932 - RNA, 22 nt, Human
gaggagacggggugccuggagc

SEQ ID NO: 234933 - RNA, 22 nt, Human
uaacacuggcuuuugcugaggc

SEQ ID NO: 234934 - RNA, 22 nt, Human
uaugugaauacagcaguggaug

SEQ ID NO: 234935 - RNA, 22 nt, Human
uaguuaacucuugguaauaggu

SEQ ID NO: 234936 - RNA, 22 nt, Human
uggcagcuguguccagguagaa

SEQ ID NO: 234937 - RNA, 22 nt, Human
aguggguguagucuuccuccug

SEQ ID NO: 234938 - RNA, 21 nt, Human
ccaggaaggacugagcucccu

SEQ ID NO: 234939 - RNA, 22 nt, Human
uuucauuucauagaauuguguu

SEQ ID NO: 234940 - RNA, 22 nt, Human
agcacagauucugaagaguccu

SEQ ID NO: 234941 - RNA, 22 nt, Human
cugcugagguccuugcucagac

SEQ ID NO: 234942 - RNA, 22 nt, Human
acagauccugguuacagccauu

SEQ ID NO: 234943 - RNA, 21 nt, Human
aauuuugaaggaagauuaagg

SEQ ID NO: 234944 - RNA, 22 nt, Human
ccugcccuguguuuggggacua

SEQ ID NO: 234945 - RNA, 22 nt, Human
auagaagcaagaacagaaugga

SEQ ID NO: 234946 - RNA, 22 nt, Human
ucuguucagguuucagagaacu

SEQ ID NO: 234947 - RNA, 22 nt, Human
gugcccugacacaccuggugug

SEQ ID NO: 234948 - RNA, 22 nt, Human
uaucuagauauuuggauaaaug

SEQ ID NO: 234949 - RNA, 22 nt, Human
uguucuugagccuuuagaccua

SEQ ID NO: 234950 - RNA, 22 nt, Human
gagugucagugcuuggggcuac

SEQ ID NO: 234951 - RNA, 22 nt, Human
gagggagggaaaguuuaacacu

SEQ ID NO: 234952 - RNA, 22 nt, Human
gccagaaacauacacaucacuu

SEQ ID NO: 234953 - RNA, 22 nt, Human
agaaggaaggaagcauucuguu

SEQ ID NO: 234954 - RNA, 21 nt, Human
agcuuccagagcacauuccau

SEQ ID NO: 234955 - RNA, 22 nt, Human
agaaaauuacuccagagacaag

SEQ ID NO: 234956 - RNA, 22 nt, Human
acuuccuuuugggaaacuguuu

SEQ ID NO: 234957 - RNA, 22 nt, Human
uaacagucaugugcuacugcua

SEQ ID NO: 234958 - RNA, 22 nt, Human
uaaaaggcaauacuagaugagu

SEQ ID NO: 234959 - RNA, 22 nt, Human
caggcaagcacggugaaccugg

SEQ ID NO: 234960 - RNA, 22 nt, Human
ucugucauugcaauaaaauuuc

SEQ ID NO: 234961 - RNA, 22 nt, Human
cucuccaggcugggacaggacc

SEQ ID NO: 234962 - RNA, 22 nt, Human
cccacccugggcuacacaucca

SEQ ID NO: 234963 - RNA, 22 nt, Human
agauaucuuacacuuugaaguu

SEQ ID NO: 234964 - RNA, 22 nt, Human
gaguccuugucauaauucagug

SEQ ID NO: 234965 - RNA, 22 nt, Human
aggcuaagauguggucugagca

SEQ ID NO: 234966 - RNA, 20 nt, Human
uuuucugugccaagaaaacu

SEQ ID NO: 234967 - RNA, 22 nt, Human
agguggcagagcuggcccagcg

SEQ ID NO: 234968 - RNA, 22 nt, Human
ugcauuaauuuuugccagguuc

SEQ ID NO: 234969 - RNA, 22 nt, Human
auuugccuugugaauuggauau

SEQ ID NO: 234970 - RNA, 22 nt, Human
aacugcaauaacuugugcacca

SEQ ID NO: 234971 - RNA, 22 nt, Human
uguuuacuuuccuucucacagg

SEQ ID NO: 234972 - RNA, 22 nt, Human
gucauuuaucaucagaagucau

SEQ ID NO: 234973 - RNA, 22 nt, Human
caggcuacauuugcucugagaa

SEQ ID NO: 234974 - RNA, 22 nt, Human
cugucuaguuaggaugccagca

SEQ ID NO: 234975 - RNA, 22 nt, Human
aacacugagaacaauacagagu

SEQ ID NO: 234976 - RNA, 22 nt, Human
agccuuagaggaaaacauuagu

SEQ ID NO: 234977 - RNA, 22 nt, Human
gucuagaaaaugccgagggaug

SEQ ID NO: 234978 - RNA, 22 nt, Human
gcucagagaaucagcagacacc

SEQ ID NO: 234979 - RNA, 22 nt, Human
agaauacaauuguucaguaaua

SEQ ID NO: 234980 - RNA, 22 nt, Human
gggugaggagcugccagucaug

SEQ ID NO: 234981 - RNA, 22 nt, Human
agguccaucguggaugaacugc

SEQ ID NO: 234982 - RNA, 17 nt, Human
gcugaacaaggaaaaua

SEQ ID NO: 234983 - RNA, 22 nt, Human
uggcagagcaaaaagauagaau

SEQ ID NO: 234984 - RNA, 22 nt, Human
cucugggccaugcuacugcucu

SEQ ID NO: 234985 - RNA, 22 nt, Human
aaugauaagacaugaguagagg

SEQ ID NO: 234986 - RNA, 22 nt, Human
ucucaacaccacuugcugaaga

SEQ ID NO: 234987 - RNA, 22 nt, Human
ucacaucacaugacaguaggcc

SEQ ID NO: 234988 - RNA, 23 nt, Human
ucugggcugcuuaaggaucaagg

SEQ ID NO: 234989 - RNA, 22 nt, Human
ccaggcuggagugcaguagugu

SEQ ID NO: 234990 - RNA, 22 nt, Human
ggaaggggagcuggaaagggua

SEQ ID NO: 234991 - RNA, 22 nt, Human
gggaauguaaucauggaaugcu

SEQ ID NO: 234992 - RNA, 22 nt, Human
auugcuugaauuaccauguaau

SEQ ID NO: 234993 - RNA, 22 nt, Human
agggcgacaauggagagcguuu

SEQ ID NO: 234994 - RNA, 22 nt, Human
gcccacaguacgaggcucaggc

SEQ ID NO: 234995 - RNA, 22 nt, Human
auuuuucucuccacuccauuaa

SEQ ID NO: 234996 - RNA, 22 nt, Human
uggcugccuucccugcuggagg

SEQ ID NO: 234997 - RNA, 22 nt, Human
ugaguucuucacauuaccuacg

SEQ ID NO: 234998 - RNA, 22 nt, Human
uauuuucaucuuguccuuggau

SEQ ID NO: 234999 - RNA, 21 nt, Human
agcugcaaaaacauacaguuc

SEQ ID NO: 235000 - RNA, 22 nt, Human
uccccagucccggcggugggug

SEQ ID NO: 235001 - RNA, 18 nt, Human
gagagcccagcagguggu

SEQ ID NO: 235002 - RNA, 22 nt, Human
gguuacucaagccugccuucuc

SEQ ID NO: 235003 - RNA, 22 nt, Human
uucucuggcgguguguuuuccu

SEQ ID NO: 235004 - RNA, 22 nt, Human
caauuacuuuugcaccaauaua

SEQ ID NO: 235005 - RNA, 22 nt, Human
ggauucugccuuguugcuucaa

SEQ ID NO: 235006 - RNA, 22 nt, Human
ucugaauucugacaauuugaau

SEQ ID NO: 235007 - RNA, 22 nt, Human
uggcaggaaaaagggccagagg

SEQ ID NO: 235008 - RNA, 22 nt, Human
ucagggcucagugggauagguc

SEQ ID NO: 235009 - RNA, 22 nt, Human
gaggcugucuguuagccuggga

SEQ ID NO: 235010 - RNA, 20 nt, Human
uggaagaagaacucaggcuu

SEQ ID NO: 235011 - RNA, 22 nt, Human
cccaggcagcggggucuccuug

SEQ ID NO: 235012 - RNA, 19 nt, Human
gucagcuggaacucugaaa

SEQ ID NO: 235013 - RNA, 22 nt, Human
acagacaguaugguggggcuga

SEQ ID NO: 235014 - RNA, 19 nt, Human
ggcuggagaaaggaaucag

SEQ ID NO: 235015 - RNA, 22 nt, Human
gcugaaauuagacugcagaagu

SEQ ID NO: 235016 - RNA, 22 nt, Human
ccacugucuuuuccaggcugaa

SEQ ID NO: 235017 - RNA, 22 nt, Human
augcuucuguguauguuucagg

SEQ ID NO: 235018 - RNA, 21 nt, Human
aaugcugcccaguaagauggc

SEQ ID NO: 235019 - RNA, 22 nt, Human
gagggaugugccugaaggcagg

SEQ ID NO: 235020 - RNA, 22 nt, Human
aacauguuuccaguguaaggcc

SEQ ID NO: 235021 - RNA, 22 nt, Human
ucuuucuugguauaaagcaggg

SEQ ID NO: 235022 - RNA, 22 nt, Human
caugagauaauuuuucuccagu

SEQ ID NO: 235023 - RNA, 22 nt, Human
uccuuggaagagcauucccagg

SEQ ID NO: 235024 - RNA, 22 nt, Human
aggccuggcaugagaccugaga

SEQ ID NO: 235025 - RNA, 22 nt, Human
aggacacaugcacacccugcgu

SEQ ID NO: 235026 - RNA, 22 nt, Human
ucugggcucugucagcaccucu

SEQ ID NO: 235027 - RNA, 22 nt, Human
cucaggcugucuaauggauuag

SEQ ID NO: 235028 - RNA, 20 nt, Human
acagaauaugcugguugugg

SEQ ID NO: 235029 - RNA, 22 nt, Human
cuguggcuguauuuggccagag

SEQ ID NO: 235030 - RNA, 22 nt, Human
guauuuuuaguagagucggggu

SEQ ID NO: 235031 - RNA, 22 nt, Human
aaagcauuauucuguggaaaaa

SEQ ID NO: 235032 - RNA, 22 nt, Human
gagucuuuguauuuacuuccca

SEQ ID NO: 235033 - RNA, 22 nt, Human
uacaguuaaaaaguucaauggu

SEQ ID NO: 235034 - RNA, 22 nt, Human
aucagcagaugcucaaugaaca

SEQ ID NO: 235035 - RNA, 22 nt, Human
acugugcacacaaaaauagauu

SEQ ID NO: 235036 - RNA, 22 nt, Human
uguggggacccaugccaugggc

SEQ ID NO: 235037 - RNA, 22 nt, Human
auugcagcucagggugaugacu

SEQ ID NO: 235038 - RNA, 21 nt, Human
uuaagacacacagauuaagga

SEQ ID NO: 235039 - RNA, 21 nt, Human
gcaggggauagaaauggucug

SEQ ID NO: 235040 - RNA, 22 nt, Human
ugaggagcuucuggaaagugca

SEQ ID NO: 235041 - RNA, 22 nt, Human
caggucuccagcucagggucca

SEQ ID NO: 235042 - RNA, 22 nt, Human
uugaaugagaaguuauugccau

SEQ ID NO: 235043 - RNA, 19 nt, Human
augucuguugaauuucaua

SEQ ID NO: 235044 - RNA, 20 nt, Human
ugcuccaggaacacuggccg

SEQ ID NO: 235045 - RNA, 20 nt, Human
agaaauauugaguucagagg

SEQ ID NO: 235046 - RNA, 22 nt, Human
cgcgguggcggccuccagcgcc

SEQ ID NO: 235047 - RNA, 22 nt, Human
uucccuccuaugcccacugaaa

SEQ ID NO: 235048 - RNA, 22 nt, Human
gaauuucagagguaacaucauc

SEQ ID NO: 235049 - RNA, 22 nt, Human
uuucucaguaguaauggcaguc

SEQ ID NO: 235050 - RNA, 22 nt, Human
cuuagaaaucgaacucagguua

SEQ ID NO: 235051 - RNA, 22 nt, Human
aucagaaaaacauaauguuauu

SEQ ID NO: 235052 - RNA, 22 nt, Human
agauacaacuguuuaaacauua

SEQ ID NO: 235053 - RNA, 22 nt, Human
ucugagacaacuuagcccucga

SEQ ID NO: 235054 - RNA, 22 nt, Human
uggcuggcgccgggcuagccac

SEQ ID NO: 235055 - RNA, 22 nt, Human
cuggagaggccccaagauauuu

SEQ ID NO: 235056 - RNA, 22 nt, Human
uccagcagccugacuucccucu

SEQ ID NO: 235057 - RNA, 22 nt, Human
gugagcagggcaggacugggga

SEQ ID NO: 235058 - RNA, 22 nt, Human
gcuggccauggccugcgccauc

SEQ ID NO: 235059 - RNA, 22 nt, Human
cagcacuucaaugagcauuuca

SEQ ID NO: 235060 - RNA, 22 nt, Human
aacuuucugaaaagcuugauca

SEQ ID NO: 235061 - RNA, 19 nt, Human
accaggccucagaggcccu

SEQ ID NO: 235062 - RNA, 22 nt, Human
uugucuguaaagacggccacca

SEQ ID NO: 235063 - RNA, 20 nt, Human
ggcauggguggggcucccag

SEQ ID NO: 235064 - RNA, 22 nt, Human
auuaguguuguaagaagcugcc

SEQ ID NO: 235065 - RNA, 22 nt, Human
ucuccugggcuugguugaaguu

SEQ ID NO: 235066 - RNA, 22 nt, Human
caucauuucacuuagaugaagu

SEQ ID NO: 235067 - RNA, 22 nt, Human
cugccagcuagcuccuaguuga

SEQ ID NO: 235068 - RNA, 22 nt, Human
auuaagagccuacuaugugccg

SEQ ID NO: 235069 - RNA, 21 nt, Human
acacuucaguuuuuaaaggga

SEQ ID NO: 235070 - RNA, 19 nt, Human
uggcccagaugguccuggg

SEQ ID NO: 235071 - RNA, 22 nt, Human
ucucugaagauauuuauuauua

SEQ ID NO: 235072 - RNA, 22 nt, Human
cuuuggaaaaauaccuggcaua

SEQ ID NO: 235073 - RNA, 22 nt, Human
uacaaaguagaaauucaguaaa

SEQ ID NO: 235074 - RNA, 22 nt, Human
agcugccagcaaguuucaaaca

SEQ ID NO: 235075 - RNA, 22 nt, Human
caauuucaauacaaaauacauu

SEQ ID NO: 235076 - RNA, 22 nt, Human
uaacuguauauuaagguggccc

SEQ ID NO: 235077 - RNA, 22 nt, Human
uaagugaugaaagcagaugucu

SEQ ID NO: 235078 - RNA, 17 nt, Human
gcucugccaggaaagag

SEQ ID NO: 235079 - RNA, 23 nt, Human
aggaagcuaaguguggcugcgga

SEQ ID NO: 235080 - RNA, 22 nt, Human
auuucagagugagagugcucaa

SEQ ID NO: 235081 - RNA, 22 nt, Human
auccauucuaugugaaaugucc

SEQ ID NO: 235082 - RNA, 22 nt, Human
gcucaggccuggcccaugggac

SEQ ID NO: 235083 - RNA, 22 nt, Human
auugguggugaggacaugccag

SEQ ID NO: 235084 - RNA, 22 nt, Human
cagucccagaagagccugggag

SEQ ID NO: 235085 - RNA, 22 nt, Human
agucaguuaaacuuuguaaagu

SEQ ID NO: 235086 - RNA, 22 nt, Human
uggaaacuaggauggaagaaau

SEQ ID NO: 235087 - RNA, 22 nt, Human
agacuguugccugaacuuagcc

SEQ ID NO: 235088 - RNA, 22 nt, Human
ucuuggagaauggcagagaagc

SEQ ID NO: 235089 - RNA, 22 nt, Human
gaaauaauacagugcucuucuc

SEQ ID NO: 235090 - RNA, 22 nt, Human
gcaggcuucucucuucccuacc

SEQ ID NO: 235091 - RNA, 22 nt, Human
acugggccuugccauggcagcc

SEQ ID NO: 235092 - RNA, 22 nt, Human
agagagccugaguggcagcuau

SEQ ID NO: 235093 - RNA, 22 nt, Human
uugcaaaaccauccuaaguaaa

SEQ ID NO: 235094 - RNA, 22 nt, Human
gcucagaccccacccuggcaga

SEQ ID NO: 235095 - RNA, 22 nt, Human
gauuucuaguaagucaugaagg

SEQ ID NO: 235096 - RNA, 22 nt, Human
gagggcugaugcuuacuuauuu

SEQ ID NO: 235097 - RNA, 22 nt, Human
ugaggcagauauuuauuggguu

SEQ ID NO: 235098 - RNA, 18 nt, Human
auugcuuuuguaccaacc

SEQ ID NO: 235099 - RNA, 22 nt, Human
cagaaucucugggaguggauca

SEQ ID NO: 235100 - RNA, 22 nt, Human
aaauucuguccugaaugccauu

SEQ ID NO: 235101 - RNA, 22 nt, Human
gcacucuccuggcugccacagu

SEQ ID NO: 235102 - RNA, 21 nt, Human
gauuuuaaagagacugccaca

SEQ ID NO: 235103 - RNA, 22 nt, Human
uugaaauagaugcgucagagau

SEQ ID NO: 235104 - RNA, 23 nt, Human
aaauauucuuuuuuaguaagugc

SEQ ID NO: 235105 - RNA, 22 nt, Human
aauguuaaaaccuucagugcuu

SEQ ID NO: 235106 - RNA, 22 nt, Human
ugaauucccugcaggcauccuc

SEQ ID NO: 235107 - RNA, 22 nt, Human
agaggguagaagacaggguugc

SEQ ID NO: 235108 - RNA, 22 nt, Human
agcaguuauauugaaauaaaaa

SEQ ID NO: 235109 - RNA, 22 nt, Human
aaaugaacaguugcauucucug

SEQ ID NO: 235110 - RNA, 22 nt, Human
ggaacugagaagcagcuaugcc

SEQ ID NO: 235111 - RNA, 22 nt, Human
augaaaauugacagcggaagua

SEQ ID NO: 235112 - RNA, 22 nt, Human
aaauaaacugaagcacagagag

SEQ ID NO: 235113 - RNA, 22 nt, Human
gaaucuuaaaucggaaucuuaa

SEQ ID NO: 235114 - RNA, 22 nt, Human
guacaguuuucaguguucacug

SEQ ID NO: 235115 - RNA, 22 nt, Human
uugugcaaaggggguuaaucau

SEQ ID NO: 235116 - RNA, 22 nt, Human
ucacugcuuucaaaaauuauug

SEQ ID NO: 235117 - RNA, 22 nt, Human
gggcucauucaucugggcuugg

SEQ ID NO: 235118 - RNA, 21 nt, Human
uuggaaucucuucaucucugc

SEQ ID NO: 235119 - RNA, 22 nt, Human
caaggacacugauguucauccu

SEQ ID NO: 235120 - RNA, 22 nt, Human
uaaaugauaauaaugcuagugu

SEQ ID NO: 235121 - RNA, 22 nt, Human
aggucaaaaucaggcagggaag

SEQ ID NO: 235122 - RNA, 22 nt, Human
ucagauggcauagguuggaauu

SEQ ID NO: 235123 - RNA, 22 nt, Human
agaaaucuuggagucuguggua

SEQ ID NO: 235124 - RNA, 22 nt, Human
aaagcaauaguaaugguaauag

SEQ ID NO: 235125 - RNA, 22 nt, Human
ggagcugaggcugaggccucac

SEQ ID NO: 235126 - RNA, 22 nt, Human
acaugucuaaguacucaacaaa

SEQ ID NO: 235127 - RNA, 22 nt, Human
aaucagacaguucuggauucaa

SEQ ID NO: 235128 - RNA, 20 nt, Human
uccucagaagacauuugggg

SEQ ID NO: 235129 - RNA, 22 nt, Human
guguuuuggccauuagugugau

SEQ ID NO: 235130 - RNA, 22 nt, Human
gcuggagaaacaggaggaggaa

SEQ ID NO: 235131 - RNA, 22 nt, Human
aucuuuagugugaauuuauuga

SEQ ID NO: 235132 - RNA, 22 nt, Human
ucuggcuccacaccucacugca

SEQ ID NO: 235133 - RNA, 18 nt, Human
ggguccugugggagacag

SEQ ID NO: 235134 - RNA, 22 nt, Human
cugugcugauucagcacaggcc

SEQ ID NO: 235135 - RNA, 22 nt, Human
gaauguuacuuugauuuugucc

SEQ ID NO: 235136 - RNA, 22 nt, Human
gggcuccaacggugagcaugga

SEQ ID NO: 235137 - RNA, 22 nt, Human
auccuggcccagguguggaggg

SEQ ID NO: 235138 - RNA, 22 nt, Human
agucugggugugaaugaacuug

SEQ ID NO: 235139 - RNA, 22 nt, Human
cuggcuuugaaaugcauuucag

SEQ ID NO: 235140 - RNA, 22 nt, Human
cucuccagggguagaugccuuc

SEQ ID NO: 235141 - RNA, 22 nt, Human
aacuugguaccaccuucugaag

SEQ ID NO: 235142 - RNA, 22 nt, Human
uguguccuuuggaggaucagcg

SEQ ID NO: 235143 - RNA, 22 nt, Human
ccaggaaguaugacccaacaga

SEQ ID NO: 235144 - RNA, 22 nt, Human
ucuggcuguuuuagaugagcuc

SEQ ID NO: 235145 - RNA, 22 nt, Human
cucugugggggagaggcagcug

SEQ ID NO: 235146 - RNA, 22 nt, Human
gaaaguuuucauauauaccaaa

SEQ ID NO: 235147 - RNA, 22 nt, Human
aacuaaaagugugucucuugua

SEQ ID NO: 235148 - RNA, 22 nt, Human
agugaccaaucacugaaugauu

SEQ ID NO: 235149 - RNA, 22 nt, Human
cagcaugguuggguucugggga

SEQ ID NO: 235150 - RNA, 22 nt, Human
uucccagaccuguaggaucaga

SEQ ID NO: 235151 - RNA, 22 nt, Human
ccagaggcagacuuacacucca

SEQ ID NO: 235152 - RNA, 22 nt, Human
cugccuggguucaaguccuguu

SEQ ID NO: 235153 - RNA, 22 nt, Human
uuugacucuagucauagaagug

SEQ ID NO: 235154 - RNA, 17 nt, Human
aggcagguaagaguuau

SEQ ID NO: 235155 - RNA, 22 nt, Human
uccaggcagggcagccaucaag

SEQ ID NO: 235156 - RNA, 21 nt, Human
ucucuucccaucaggacacua

SEQ ID NO: 235157 - RNA, 22 nt, Human
gaguccuuuugugccacaggga

SEQ ID NO: 235158 - RNA, 21 nt, Human
caaggcuuaaacauuaaucua

SEQ ID NO: 235159 - RNA, 22 nt, Human
ucagaauauauucauguuguca

SEQ ID NO: 235160 - RNA, 22 nt, Human
gagcugguucuguccagggaau

SEQ ID NO: 235161 - RNA, 22 nt, Human
cauuuuacgacauagggcaggc

SEQ ID NO: 235162 - RNA, 22 nt, Human
uucucugugagggugcuggauu

SEQ ID NO: 235163 - RNA, 22 nt, Human
cugcaucaguggauaugauggu

SEQ ID NO: 235164 - RNA, 22 nt, Human
acugggauuacaggugggaguc

SEQ ID NO: 235165 - RNA, 22 nt, Human
ucagcagggcauacugagccua

SEQ ID NO: 235166 - RNA, 22 nt, Human
uguuuagaggaacuggaaucag

SEQ ID NO: 235167 - RNA, 22 nt, Human
ugcagggaugcuagagguaaga

SEQ ID NO: 235168 - RNA, 22 nt, Human
guuccacaaaauguacccaguu

SEQ ID NO: 235169 - RNA, 22 nt, Human
ccugaggcuccaccuccagaga

SEQ ID NO: 235170 - RNA, 22 nt, Human
ccucgagcagcgaccccuccac

SEQ ID NO: 235171 - RNA, 22 nt, Human
agggcucuguuggggucagcac

SEQ ID NO: 235172 - RNA, 20 nt, Human
cagagcuaucccuuuauuua

SEQ ID NO: 235173 - RNA, 22 nt, Human
gcucugagagcuacacagggua

SEQ ID NO: 235174 - RNA, 22 nt, Human
cucuccagccacagaagcugcu

SEQ ID NO: 235175 - RNA, 22 nt, Human
aaggugucggcagagccgcuuc

SEQ ID NO: 235176 - RNA, 22 nt, Human
acaggccauaaaggcaggcccu

SEQ ID NO: 235177 - RNA, 22 nt, Human
caguccugggagacuuacccag

SEQ ID NO: 235178 - RNA, 22 nt, Human
uucuguuacuguuggucauaac

SEQ ID NO: 235179 - RNA, 22 nt, Human
gagcucccuggagguucagaua

SEQ ID NO: 235180 - RNA, 22 nt, Human
gucacuguauccagguuccagc

SEQ ID NO: 235181 - RNA, 20 nt, Human
accugggaaaaccuuuuccu

SEQ ID NO: 235182 - RNA, 22 nt, Human
agagggcugcugcacagugcuc

SEQ ID NO: 235183 - RNA, 23 nt, Human
ucucuguacagaugaggacacac

SEQ ID NO: 235184 - RNA, 22 nt, Human
agugcauguccaguaguuuaug

SEQ ID NO: 235185 - RNA, 20 nt, Human
uuacaaguuucuaauaacca

SEQ ID NO: 235186 - RNA, 22 nt, Human
uggccaugggauagugcagggg

SEQ ID NO: 235187 - RNA, 22 nt, Human
auaacuuauuagauuggagcug

SEQ ID NO: 235188 - RNA, 22 nt, Human
ccagguguggccacauggcugg

SEQ ID NO: 235189 - RNA, 22 nt, Human
uggcucaggggucuggcucugu

SEQ ID NO: 235190 - RNA, 22 nt, Human
gccuugccaaggggcagcagag

SEQ ID NO: 235191 - RNA, 22 nt, Human
uugcagggaaacaguuuaggaa

SEQ ID NO: 235192 - RNA, 22 nt, Human
gugaacaggagaaagugaugga

SEQ ID NO: 235193 - RNA, 22 nt, Human
uuccugggacuggagcagccca

SEQ ID NO: 235194 - RNA, 22 nt, Human
ugcccuccacaguggcuccacc

SEQ ID NO: 235195 - RNA, 22 nt, Human
uguguguguuucugcucauaca

SEQ ID NO: 235196 - RNA, 22 nt, Human
uaagacuucauuaguaauaugg

SEQ ID NO: 235197 - RNA, 22 nt, Human
aggucaagggagcugagggcca

SEQ ID NO: 235198 - RNA, 22 nt, Human
ugaggugacaauucauucucca

SEQ ID NO: 235199 - RNA, 22 nt, Human
ggcuaggcgggcacauggugga

SEQ ID NO: 235200 - RNA, 20 nt, Human
uugaagaggauauaucgcuc

SEQ ID NO: 235201 - RNA, 22 nt, Human
auuauauaggacuugcccuucc

SEQ ID NO: 235202 - RNA, 22 nt, Human
cagagcugguaagugguagagg

SEQ ID NO: 235203 - RNA, 19 nt, Human
agguggucuaggcuggaga

SEQ ID NO: 235204 - RNA, 22 nt, Human
accacagcuuugcaccaggugu

SEQ ID NO: 235205 - RNA, 23 nt, Human
ugcuguagucucuacagcugguc

SEQ ID NO: 235206 - RNA, 22 nt, Human
gagauuuaauuggauuaacuua

SEQ ID NO: 235207 - RNA, 23 nt, Human
gguccaggaaaggcagcagcacc

SEQ ID NO: 235208 - RNA, 22 nt, Human
uagcacaguucacuaugauaca

SEQ ID NO: 235209 - RNA, 19 nt, Human
cugagccucaguuuccuag

SEQ ID NO: 235210 - RNA, 21 nt, Human
agucucucuaauaaaugcuug

SEQ ID NO: 235211 - RNA, 23 nt, Human
uguauuacagaugcaucagugau

SEQ ID NO: 235212 - RNA, 22 nt, Human
cucugaggcuuguucuauguau

SEQ ID NO: 235213 - RNA, 22 nt, Human
gagugguaaugagcagauuagg

SEQ ID NO: 235214 - RNA, 22 nt, Human
cgaggcaggcaggcggaggaua

SEQ ID NO: 235215 - RNA, 22 nt, Human
cagggcaguuugugccuaugag

SEQ ID NO: 235216 - RNA, 22 nt, Human
ggagggaaugucuagcauucuu

SEQ ID NO: 235217 - RNA, 22 nt, Human
gagaugagugggggaucucuca

SEQ ID NO: 235218 - RNA, 22 nt, Human
ugaaggcuuuuuaaagcauuug

SEQ ID NO: 235219 - RNA, 22 nt, Human
cuauucaguugugggcaacaau

SEQ ID NO: 235220 - RNA, 22 nt, Human
gacaccagaagacauaagcaga

SEQ ID NO: 235221 - RNA, 22 nt, Human
uaacagcacuggcaggcacugu

SEQ ID NO: 235222 - RNA, 22 nt, Human
uccaagcucucuaugccaugau

SEQ ID NO: 235223 - RNA, 22 nt, Human
cacagagcuggaaaggcugggc

SEQ ID NO: 235224 - RNA, 22 nt, Human
gggcuggaccgcucgccucccu

SEQ ID NO: 235225 - RNA, 22 nt, Human
uugcagcucugauccagggacc

SEQ ID NO: 235226 - RNA, 22 nt, Human
agcaugaaagcauaggacaguc

SEQ ID NO: 235227 - RNA, 22 nt, Human
acccaggcagcaggagcuaaag

SEQ ID NO: 235228 - RNA, 22 nt, Human
gcuggcccagcgcccagggcag

SEQ ID NO: 235229 - RNA, 22 nt, Human
agaggaggcagcuuaacucagu

SEQ ID NO: 235230 - RNA, 22 nt, Human
uggcccugcacccagagcaguu

SEQ ID NO: 235231 - RNA, 22 nt, Human
aucccagauagugacccucagg

SEQ ID NO: 235232 - RNA, 22 nt, Human
agcaccagcgugggggccguug

SEQ ID NO: 235233 - RNA, 22 nt, Human
agcaacaggaaauagcugauua

SEQ ID NO: 235234 - RNA, 22 nt, Human
uuugucaaaucaaaccacauuc

SEQ ID NO: 235235 - RNA, 22 nt, Human
aguggcugccaagagcaaugcu

SEQ ID NO: 235236 - RNA, 22 nt, Human
gcucccugcacucugcagcccu

SEQ ID NO: 235237 - RNA, 22 nt, Human
ccuugggguguuggaggcagcc

SEQ ID NO: 235238 - RNA, 22 nt, Human
uucuucuuuccuauaauuaauu

SEQ ID NO: 235239 - RNA, 22 nt, Human
caucuuuaguagguucuggaga

SEQ ID NO: 235240 - RNA, 22 nt, Human
auuugcuuuaagguauaaaagg

SEQ ID NO: 235241 - RNA, 17 nt, Human
ugcucaaauacuuuuga

SEQ ID NO: 235242 - RNA, 22 nt, Human
gagcucagauucuggugucaga

SEQ ID NO: 235243 - RNA, 22 nt, Human
aaugucugccagaacugaucau

SEQ ID NO: 235244 - RNA, 22 nt, Human
aaaugcuguguuuuaacauaga

SEQ ID NO: 235245 - RNA, 22 nt, Human
acugucaugaucgaagauguca

SEQ ID NO: 235246 - RNA, 22 nt, Human
ggcuccuucaaagcaccuggcu

SEQ ID NO: 235247 - RNA, 22 nt, Human
uauuuuacaaaugggaaugcug

SEQ ID NO: 235248 - RNA, 22 nt, Human
guugacagugacccugaaagca

SEQ ID NO: 235249 - RNA, 22 nt, Human
cucugagguucccuggguccca

SEQ ID NO: 235250 - RNA, 22 nt, Human
aaauccuaaugacaaguuuagu

SEQ ID NO: 235251 - RNA, 22 nt, Human
gggaucugaguaggcagaagcu

SEQ ID NO: 235252 - RNA, 22 nt, Human
caggaagccacaggacagguag

SEQ ID NO: 235253 - RNA, 22 nt, Human
uucaugaagggugaauauaguc

SEQ ID NO: 235254 - RNA, 22 nt, Human
cuggcagcugcccgagaugccc

SEQ ID NO: 235255 - RNA, 22 nt, Human
agucugaguuaguggaaaugua

SEQ ID NO: 235256 - RNA, 21 nt, Human
ucuuuaugacuugcccauuug

SEQ ID NO: 235257 - RNA, 22 nt, Human
cuguccagucuuuagcaagcug

SEQ ID NO: 235258 - RNA, 22 nt, Human
ucugucaauauaugugcugcag

SEQ ID NO: 235259 - RNA, 22 nt, Human
guggccucugugcuccugccua

SEQ ID NO: 235260 - RNA, 22 nt, Human
accacaggaauugcucuguggu

SEQ ID NO: 235261 - RNA, 22 nt, Human
cucugggucaccaucggggauu

SEQ ID NO: 235262 - RNA, 22 nt, Human
ucccagagcagaugugcuaaag

SEQ ID NO: 235263 - RNA, 22 nt, Human
gccagcauuccuuggcuccugg

SEQ ID NO: 235264 - RNA, 22 nt, Human
caguuaaaugaugugcccuaga

SEQ ID NO: 235265 - RNA, 23 nt, Human
agguuaugauuauagagcgagga

SEQ ID NO: 235266 - RNA, 22 nt, Human
augggaaagaagccacugccca

SEQ ID NO: 235267 - RNA, 21 nt, Human
gcucagagaggguaauuaacc

SEQ ID NO: 235268 - RNA, 22 nt, Human
gugagucuguggaccgggcacu

SEQ ID NO: 235269 - RNA, 22 nt, Human
ccugaaauuugaagaccugaau

SEQ ID NO: 235270 - RNA, 22 nt, Human
aaucuugguugcaguauauccg

SEQ ID NO: 235271 - RNA, 22 nt, Human
uauauuuaaauccagguugaaa

SEQ ID NO: 235272 - RNA, 22 nt, Human
uuggcugaaugaggucaccuuu

SEQ ID NO: 235273 - RNA, 22 nt, Human
uuucucuuucaaucugcaguac

SEQ ID NO: 235274 - RNA, 19 nt, Human
auggcagcagcagcucucc

SEQ ID NO: 235275 - RNA, 22 nt, Human
agacacugaaucagagggacau

SEQ ID NO: 235276 - RNA, 22 nt, Human
gcucacagccggcuggcagggg

SEQ ID NO: 235277 - RNA, 22 nt, Human
uaagagcagagguugaauaaau

SEQ ID NO: 235278 - RNA, 22 nt, Human
gggcaaagugguggaggcaguu

SEQ ID NO: 235279 - RNA, 22 nt, Human
uagcccagcuuggccuauuucu

SEQ ID NO: 235280 - RNA, 22 nt, Human
cagcugucuuugcacaguuuag

SEQ ID NO: 235281 - RNA, 22 nt, Human
aauucacugaacuucucugaga

SEQ ID NO: 235282 - RNA, 22 nt, Human
agcugguuagcaaucuaaguga

SEQ ID NO: 235283 - RNA, 22 nt, Human
uagucagauauaugacuuacgu

SEQ ID NO: 235284 - RNA, 22 nt, Human
accuccagcuuuuuagagacau

SEQ ID NO: 235285 - RNA, 22 nt, Human
ccagagggcuugguuugggcca

SEQ ID NO: 235286 - RNA, 21 nt, Human
aacauuucugggagaacucac

SEQ ID NO: 235287 - RNA, 22 nt, Human
gaggcugauucggggaacagca

SEQ ID NO: 235288 - RNA, 22 nt, Human
agggcagccucucagccuaggu

SEQ ID NO: 235289 - RNA, 22 nt, Human
cugccaggggccucacaggcca

SEQ ID NO: 235290 - RNA, 22 nt, Human
aaaugcuuauuagugucacaaa

SEQ ID NO: 235291 - RNA, 22 nt, Human
uggaacugcuccaaaaccucca

SEQ ID NO: 235292 - RNA, 22 nt, Human
uauuucuugagacucgucuucc

SEQ ID NO: 235293 - RNA, 22 nt, Human
aagcaagccaaucuguuuuguu

SEQ ID NO: 235294 - RNA, 22 nt, Human
aauguacaaggguuccaguuuu

SEQ ID NO: 235295 - RNA, 22 nt, Human
gcucugggccauccuggccggg

SEQ ID NO: 235296 - RNA, 22 nt, Human
ccuggcagaauauuaaagugca

SEQ ID NO: 235297 - RNA, 22 nt, Human
gagcuggucaguuucagggcca

SEQ ID NO: 235298 - RNA, 22 nt, Human
uagggcuguuaguaauucucag

SEQ ID NO: 235299 - RNA, 22 nt, Human
ugacauuuaaucccuaaauauu

SEQ ID NO: 235300 - RNA, 22 nt, Human
ucacaucaacauuauagcauga

SEQ ID NO: 235301 - RNA, 22 nt, Human
uauuuauauucugccuucugcu

SEQ ID NO: 235302 - RNA, 22 nt, Human
gucuuagauuucaccgauaaug

SEQ ID NO: 235303 - RNA, 22 nt, Human
aauaauuuugagagccuggaaa

SEQ ID NO: 235304 - RNA, 22 nt, Human
ggccagaggccacagcuguguc

SEQ ID NO: 235305 - RNA, 22 nt, Human
ucaggccaagguagacaugacu

SEQ ID NO: 235306 - RNA, 22 nt, Human
ugccuugcacauaauauacauu

SEQ ID NO: 235307 - RNA, 22 nt, Human
cagauucuccaggggcugcaga

SEQ ID NO: 235308 - RNA, 22 nt, Human
auccaaagcccuaaguuaacug

SEQ ID NO: 235309 - RNA, 22 nt, Human
cagaggcauauaauugcugggg

SEQ ID NO: 235310 - RNA, 22 nt, Human
cuccaaguccgagggcucucaa

SEQ ID NO: 235311 - RNA, 22 nt, Human
aauuuguuacacagcaauauaa

SEQ ID NO: 235312 - RNA, 22 nt, Human
uccugcccagagcucuccacuc

SEQ ID NO: 235313 - RNA, 22 nt, Human
ugggggcacuucgaggucgccu

SEQ ID NO: 235314 - RNA, 22 nt, Human
ggaggagucaguugggcugcuu

SEQ ID NO: 235315 - RNA, 22 nt, Human
cacaucuacugauauuccagga

SEQ ID NO: 235316 - RNA, 22 nt, Human
cuuuacaaacuauaaagugcgg

SEQ ID NO: 235317 - RNA, 22 nt, Human
uucaaguuaccuuuaaacagcu

SEQ ID NO: 235318 - RNA, 23 nt, Human
aaggccagaauuucaauggugcc

SEQ ID NO: 235319 - RNA, 22 nt, Human
uacuuuggggacaauauggaau

SEQ ID NO: 235320 - RNA, 22 nt, Human
uguucauuaguggaaguaaguu

SEQ ID NO: 235321 - RNA, 22 nt, Human
gagcucuguucucguccugcug

SEQ ID NO: 235322 - RNA, 22 nt, Human
guauuucacauauggauaugcu

SEQ ID NO: 235323 - RNA, 22 nt, Human
cuggcccagguggucguugagg

SEQ ID NO: 235324 - RNA, 22 nt, Human
gauucuuuggccuuuauugaca

SEQ ID NO: 235325 - RNA, 22 nt, Human
ugaugaggggcucagaggucag

SEQ ID NO: 235326 - RNA, 22 nt, Human
ugcaggaguccaaucaggagac

SEQ ID NO: 235327 - RNA, 21 nt, Human
ugacccuucuagcagaacaca

SEQ ID NO: 235328 - RNA, 22 nt, Human
cauggaaagcacucagcccagu

SEQ ID NO: 235329 - RNA, 22 nt, Human
agaggcuuggaggugcaagguu

SEQ ID NO: 235330 - RNA, 22 nt, Human
agccuuccacccagauccccuu

SEQ ID NO: 235331 - RNA, 22 nt, Human
gcucaguguguucaagggcuca

SEQ ID NO: 235332 - RNA, 22 nt, Human
cguuuauuuugaagauuccacu

SEQ ID NO: 235333 - RNA, 22 nt, Human
agaaaaguuuaaaucuuggcac

SEQ ID NO: 235334 - RNA, 22 nt, Human
cucagaggggaugcuuggagaa

SEQ ID NO: 235335 - RNA, 22 nt, Human
uauucaugggaggucacaacuu

SEQ ID NO: 235336 - RNA, 18 nt, Human
auacagagaccucaagga

SEQ ID NO: 235337 - RNA, 22 nt, Human
cugaagcagggagugaugaagu

SEQ ID NO: 235338 - RNA, 22 nt, Human
cugucccucaguucugggcaaa

SEQ ID NO: 235339 - RNA, 22 nt, Human
uguccuagaguacauuccacug

SEQ ID NO: 235340 - RNA, 23 nt, Human
ggacccuguggagggugagaguc

SEQ ID NO: 235341 - RNA, 22 nt, Human
uugagcaggauggcuaugcaca

SEQ ID NO: 235342 - RNA, 22 nt, Human
uuucacagcuggguggcagagu

SEQ ID NO: 235343 - RNA, 22 nt, Human
uuuuagaaguucaugugggauu

SEQ ID NO: 235344 - RNA, 22 nt, Human
gugucccagcagcacauuggcu

SEQ ID NO: 235345 - RNA, 22 nt, Human
uuacagucagugaauggaaggg

SEQ ID NO: 235346 - RNA, 22 nt, Human
aagugguuugagcacagugcug

SEQ ID NO: 235347 - RNA, 22 nt, Human
ucuaggaauguucuuagggauu

SEQ ID NO: 235348 - RNA, 22 nt, Human
ugugugcuaauguaugcucuaa

SEQ ID NO: 235349 - RNA, 22 nt, Human
ucagccaguuuguuuauuccgg

SEQ ID NO: 235350 - RNA, 22 nt, Human
acugucugcuggccccugguua

SEQ ID NO: 235351 - RNA, 19 nt, Human
gguggcucagggcccagcc

SEQ ID NO: 235352 - RNA, 22 nt, Human
agguccugaagauuuuacuaga

SEQ ID NO: 235353 - RNA, 22 nt, Human
ggagcugagcagcgauggcgga

SEQ ID NO: 235354 - RNA, 22 nt, Human
cuauucagguguccauuaaucc

SEQ ID NO: 235355 - RNA, 22 nt, Human
gaaccugcuuccuuuuauauua

SEQ ID NO: 235356 - RNA, 22 nt, Human
ugugcaggugcaggaagggggc

SEQ ID NO: 235357 - RNA, 22 nt, Human
gcuuuauagcccuauuacauga

SEQ ID NO: 235358 - RNA, 22 nt, Human
uauuccaagcacagcaacccag

SEQ ID NO: 235359 - RNA, 22 nt, Human
uuaaggagcagaaugcuuggac

SEQ ID NO: 235360 - RNA, 22 nt, Human
acaggugguagaguggaaagag

SEQ ID NO: 235361 - RNA, 22 nt, Human
agcccagaggcugggcgugcau

SEQ ID NO: 235362 - RNA, 23 nt, Human
ugaaauauucuuuugcaugagcu

SEQ ID NO: 235363 - RNA, 20 nt, Human
ccugcugugcuuuccaugga

SEQ ID NO: 235364 - RNA, 19 nt, Human
ccugugugggguagagauc

SEQ ID NO: 235365 - RNA, 22 nt, Human
acauucaaggccuucugacaca

SEQ ID NO: 235366 - RNA, 22 nt, Human
ggaacauuuccuggcagagagg

SEQ ID NO: 235367 - RNA, 22 nt, Human
uuagaagcaucaccuguucugg

SEQ ID NO: 235368 - RNA, 22 nt, Human
caauuucuuguuaauucucagg

SEQ ID NO: 235369 - RNA, 22 nt, Human
aacacugaccucuacccucagu

SEQ ID NO: 235370 - RNA, 22 nt, Human
uguaggucacagucccuauccc

SEQ ID NO: 235371 - RNA, 22 nt, Human
gggccaccuggauuccaugugu

SEQ ID NO: 235372 - RNA, 22 nt, Human
agagcugggaccgucuggaagu

SEQ ID NO: 235373 - RNA, 19 nt, Human
cacagccacagccaaccuc

SEQ ID NO: 235374 - RNA, 22 nt, Human
gaauguuauguauccagucaca

SEQ ID NO: 235375 - RNA, 23 nt, Human
agccuucaggcaaugucaguaga

SEQ ID NO: 235376 - RNA, 22 nt, Human
uguuugcuauauccuacuucau

SEQ ID NO: 235377 - RNA, 22 nt, Human
aagcaguguucccagcuggccc

SEQ ID NO: 235378 - RNA, 22 nt, Human
agaagccuguugagagggccgu

SEQ ID NO: 235379 - RNA, 22 nt, Human
ucccugggcaucacguugcuuc

SEQ ID NO: 235380 - RNA, 22 nt, Human
acaggcuggaggaggaccaaga

SEQ ID NO: 235381 - RNA, 22 nt, Human
auagaugucauugucauccauc

SEQ ID NO: 235382 - RNA, 22 nt, Human
cagaaagcaguugucaaugggc

SEQ ID NO: 235383 - RNA, 22 nt, Human
uuaaaauuuccccaccauguau

SEQ ID NO: 235384 - RNA, 22 nt, Human
caguuucucucaauaagcaucg

SEQ ID NO: 235385 - RNA, 18 nt, Human
gcagagcugggauuccca

SEQ ID NO: 235386 - RNA, 22 nt, Human
acacauuaugagcaguugucuu

SEQ ID NO: 235387 - RNA, 22 nt, Human
agaugggccuucgagcaugccc

SEQ ID NO: 235388 - RNA, 22 nt, Human
ccuggccaggcuccaaguacug

SEQ ID NO: 235389 - RNA, 22 nt, Human
agauuucaaugugagcauuagu

SEQ ID NO: 235390 - RNA, 22 nt, Human
auuuaucaccaguuagcugacu

SEQ ID NO: 235391 - RNA, 20 nt, Human
uuacuugucucagcauggag

SEQ ID NO: 235392 - RNA, 22 nt, Human
uucauucagugcauuugggaga

SEQ ID NO: 235393 - RNA, 22 nt, Human
caguccagagcccaccagagga

SEQ ID NO: 235394 - RNA, 23 nt, Human
uccuccaaccagcagcugcauaa

SEQ ID NO: 235395 - RNA, 22 nt, Human
ucaaagcaauuucaccagugcc

SEQ ID NO: 235396 - RNA, 22 nt, Human
uaaaagacccucuagaguccca

SEQ ID NO: 235397 - RNA, 22 nt, Human
gaaguuuucugaggcuguagcu

SEQ ID NO: 235398 - RNA, 22 nt, Human
agccagccccugacuguguccu

SEQ ID NO: 235399 - RNA, 20 nt, Human
agcaucuugcaucuucaagu

SEQ ID NO: 235400 - RNA, 22 nt, Human
aagucuuuugcuaagaguaaug

SEQ ID NO: 235401 - RNA, 22 nt, Human
ccauuugugcuucuucaaagca

SEQ ID NO: 235402 - RNA, 22 nt, Human
ggcuccagaugucuccuggcaa

SEQ ID NO: 235403 - RNA, 22 nt, Human
caucaaaucugacuuuucuucc

SEQ ID NO: 235404 - RNA, 22 nt, Human
uuacacuuaggguuugucagag

SEQ ID NO: 235405 - RNA, 22 nt, Human
cugaggcucccucgggucugcu

SEQ ID NO: 235406 - RNA, 22 nt, Human
gcugccuuaacuucuucgcugu

SEQ ID NO: 235407 - RNA, 22 nt, Human
uaaaugcaguuaguacuugcca

SEQ ID NO: 235408 - RNA, 22 nt, Human
uaucuagaacuccagaauguag

SEQ ID NO: 235409 - RNA, 22 nt, Human
gagcuuuaagggauaaaaugau

SEQ ID NO: 235410 - RNA, 22 nt, Human
agcccagcggagcgggcccggg

SEQ ID NO: 235411 - RNA, 22 nt, Human
ucucucccaaaucugcagauag

SEQ ID NO: 235412 - RNA, 22 nt, Human
uagucagucuuacauauuugaa

SEQ ID NO: 235413 - RNA, 22 nt, Human
uaucuuuguaucaaucuccauu

SEQ ID NO: 235414 - RNA, 22 nt, Human
ucugggccugucucagagcugg

SEQ ID NO: 235415 - RNA, 22 nt, Human
aagcagggcucccuggggacuc

SEQ ID NO: 235416 - RNA, 22 nt, Human
uucugaaagccaauucauugaa

SEQ ID NO: 235417 - RNA, 22 nt, Human
uuguuucuucaggcuuuuagga

SEQ ID NO: 235418 - RNA, 22 nt, Human
cacaugcuagaauaaaucucca

SEQ ID NO: 235419 - RNA, 22 nt, Human
uuaauacagucuccagaaguaa

SEQ ID NO: 235420 - RNA, 22 nt, Human
auaccuguguauccacaagcgu

SEQ ID NO: 235421 - RNA, 22 nt, Human
uagcaucuguuucucuuuguga

SEQ ID NO: 235422 - RNA, 22 nt, Human
auuaaauacugcaggcuaagca

SEQ ID NO: 235423 - RNA, 22 nt, Human
acugaggagaaauuugagugaa

SEQ ID NO: 235424 - RNA, 22 nt, Human
aagaacagguucuagaaccauu

SEQ ID NO: 235425 - RNA, 22 nt, Human
gcagggcuugcagcagcuagac

SEQ ID NO: 235426 - RNA, 22 nt, Human
auucuaaagcuuguggagcuua

SEQ ID NO: 235427 - RNA, 20 nt, Human
ggccucugaggacaaggaga

SEQ ID NO: 235428 - RNA, 21 nt, Human
caguguggugaccagggucuc

SEQ ID NO: 235429 - RNA, 22 nt, Human
cuggcugggguaccaguugaac

SEQ ID NO: 235430 - RNA, 22 nt, Human
cuucuguguuaaaugagucuuu

SEQ ID NO: 235431 - RNA, 22 nt, Human
ucccagccaggcucuaccacuu

SEQ ID NO: 235432 - RNA, 22 nt, Human
gaggacagugugaucugccagc

SEQ ID NO: 235433 - RNA, 19 nt, Human
uucuuuccacaucuucucu

SEQ ID NO: 235434 - RNA, 22 nt, Human
cauuauguucaguagcuuaaaa

SEQ ID NO: 235435 - RNA, 22 nt, Human
auguuuaaaggguugagaaaua

SEQ ID NO: 235436 - RNA, 22 nt, Human
cagcugccccgcuggcugacca

SEQ ID NO: 235437 - RNA, 23 nt, Human
ugcaggugauuaauccaguuuca

SEQ ID NO: 235438 - RNA, 22 nt, Human
acagcucuucuucaagccuggc

SEQ ID NO: 235439 - RNA, 22 nt, Human
agauguggccuuugggagauua

SEQ ID NO: 235440 - RNA, 22 nt, Human
ugcuccagaaaaacuugagacu

SEQ ID NO: 235441 - RNA, 22 nt, Human
aguuacagcacucaaaguuuuc

SEQ ID NO: 235442 - RNA, 22 nt, Human
uaguuacauaaaguggacuguu

SEQ ID NO: 235443 - RNA, 22 nt, Human
agcaggugaucgcgugugcucc

SEQ ID NO: 235444 - RNA, 22 nt, Human
cuggcagcagcuucuggaucga

SEQ ID NO: 235445 - RNA, 22 nt, Human
uucuaaauuuuggaagaugcag

SEQ ID NO: 235446 - RNA, 22 nt, Human
agagucaaguagggcaugggcu

SEQ ID NO: 235447 - RNA, 22 nt, Human
uucuacagguacugaaguacau

SEQ ID NO: 235448 - RNA, 22 nt, Human
cagaguggugcaagggcagugu

SEQ ID NO: 235449 - RNA, 22 nt, Human
aucacaaaggguuuucucugag

SEQ ID NO: 235450 - RNA, 22 nt, Human
uggggucccacucagcuccccu

SEQ ID NO: 235451 - RNA, 21 nt, Human
cccaggaggcugagaagagca

SEQ ID NO: 235452 - RNA, 22 nt, Human
ggcccugcugaagccgggucua

SEQ ID NO: 235453 - RNA, 22 nt, Human
uucucuggacagugaagagagg

SEQ ID NO: 235454 - RNA, 22 nt, Human
aaggggcacaauuguacccaag

SEQ ID NO: 235455 - RNA, 22 nt, Human
cuguccugcaguugggggcagg

SEQ ID NO: 235456 - RNA, 22 nt, Human
cuacagcagagcuacacuaacu

SEQ ID NO: 235457 - RNA, 22 nt, Human
acacuguaaauugagugcguga

SEQ ID NO: 235458 - RNA, 22 nt, Human
gccucagggggagaggccagcu

SEQ ID NO: 235459 - RNA, 22 nt, Human
uaaaggcucacuggcuuggggu

SEQ ID NO: 235460 - RNA, 22 nt, Human
ugcaagaggaauucuagaagca

SEQ ID NO: 235461 - RNA, 22 nt, Human
gccacauccuucagaaagcuuu

SEQ ID NO: 235462 - RNA, 22 nt, Human
gcuggccauauauuuugcuguu

SEQ ID NO: 235463 - RNA, 22 nt, Human
ucagcaggcaggaggcaugcca

SEQ ID NO: 235464 - RNA, 22 nt, Human
gcuggagucuggaggugugcca

SEQ ID NO: 235465 - RNA, 22 nt, Human
agcccugaagcuggccaugucc

SEQ ID NO: 235466 - RNA, 22 nt, Human
guuuuucuagacugggaguuug

SEQ ID NO: 235467 - RNA, 22 nt, Human
agcaggcccaagcuggggggaa

SEQ ID NO: 235468 - RNA, 22 nt, Human
gcucagagaaauuauaggaauu

SEQ ID NO: 235469 - RNA, 22 nt, Human
cagguggcagaggucucuggaa

SEQ ID NO: 235470 - RNA, 22 nt, Human
gagcccaggcugggguucagag

SEQ ID NO: 235471 - RNA, 22 nt, Human
acaugaaugaagacuuuacaau

SEQ ID NO: 235472 - RNA, 22 nt, Human
gccuuccugcagcucugagcgu

SEQ ID NO: 235473 - RNA, 22 nt, Human
gggcccaguacccucugccaag

SEQ ID NO: 235474 - RNA, 22 nt, Human
ucagguggagaccuccuuggcc

SEQ ID NO: 235475 - RNA, 22 nt, Human
ggcccaucucuugcucuggguu

SEQ ID NO: 235476 - RNA, 22 nt, Human
aaagaaaccuaucagccacaug

SEQ ID NO: 235477 - RNA, 22 nt, Human
uggguagggagcuggaauccua

SEQ ID NO: 235478 - RNA, 22 nt, Human
ucuuagauggcagcuagagcuc

SEQ ID NO: 235479 - RNA, 22 nt, Human
gcaguggccacauggaggagga

SEQ ID NO: 235480 - RNA, 22 nt, Human
cccugugcauuggaggguguuu

SEQ ID NO: 235481 - RNA, 22 nt, Human
gauggaaugaauggcagauaca

SEQ ID NO: 235482 - RNA, 21 nt, Human
ugagucucccuuagcccacgc

SEQ ID NO: 235483 - RNA, 22 nt, Human
acaugagagaaaaguauucuga

SEQ ID NO: 235484 - RNA, 22 nt, Human
acaaaguauuuuuagguuugua

SEQ ID NO: 235485 - RNA, 21 nt, Human
guguggauaugugacaggugg

SEQ ID NO: 235486 - RNA, 22 nt, Human
aggaagcuagagccaccggacu

SEQ ID NO: 235487 - RNA, 22 nt, Human
ucagaggguggcugggagcauc

SEQ ID NO: 235488 - RNA, 22 nt, Human
gugcagagugucuguggacuga

SEQ ID NO: 235489 - RNA, 22 nt, Human
agagaacagacagaugcaauga

SEQ ID NO: 235490 - RNA, 22 nt, Human
ggcugcugggaauaugccagcu

SEQ ID NO: 235491 - RNA, 22 nt, Human
ucaugcuuuguuaauguggcac

SEQ ID NO: 235492 - RNA, 22 nt, Human
cauauauucugguuuucacugg

SEQ ID NO: 235493 - RNA, 22 nt, Human
gcugggagugggcaagaugaga

SEQ ID NO: 235494 - RNA, 22 nt, Human
aaauuccauuaugauaauuucg

SEQ ID NO: 235495 - RNA, 20 nt, Human
uggcagguggccucaguucc

SEQ ID NO: 235496 - RNA, 22 nt, Human
aggucccugcagcagacugcca

SEQ ID NO: 235497 - RNA, 22 nt, Human
uaguuuuacaucagccauuguu

SEQ ID NO: 235498 - RNA, 22 nt, Human
ucagggcaccaaaaaagaugcc

SEQ ID NO: 235499 - RNA, 17 nt, Human
ucauuuguugugacuag

SEQ ID NO: 235500 - RNA, 22 nt, Human
ucugggcuuuuccaugccugug

SEQ ID NO: 235501 - RNA, 22 nt, Human
uagcugugaaacagcagaagag

SEQ ID NO: 235502 - RNA, 22 nt, Human
cccagugucuccaacaucagau

SEQ ID NO: 235503 - RNA, 23 nt, Human
uaagugauuagaauuugcuguca

SEQ ID NO: 235504 - RNA, 22 nt, Human
gcucagcuaucaguguuccuga

SEQ ID NO: 235505 - RNA, 22 nt, Human
acaggcauugggauggagguug

SEQ ID NO: 235506 - RNA, 22 nt, Human
uggcagaauuucuagcagauuc

SEQ ID NO: 235507 - RNA, 22 nt, Human
ccuggcuccgugucacgugccc

SEQ ID NO: 235508 - RNA, 22 nt, Human
uucuuguuuauuaagauauaaa

SEQ ID NO: 235509 - RNA, 22 nt, Human
caaaugcuaugauuuugaguuu

SEQ ID NO: 235510 - RNA, 22 nt, Human
uauuucaccuaaaagugucaaa

SEQ ID NO: 235511 - RNA, 22 nt, Human
aagugcuguacaguguguaaau

SEQ ID NO: 235512 - RNA, 22 nt, Human
ggcacagcucaggucccagcuc

SEQ ID NO: 235513 - RNA, 22 nt, Human
gccacacuuauucucaugcaca

SEQ ID NO: 235514 - RNA, 22 nt, Human
cuggcugcaaaaucuauucacu

SEQ ID NO: 235515 - RNA, 22 nt, Human
aaguucaauggaaaagcuuuag

SEQ ID NO: 235516 - RNA, 22 nt, Human
ggcagccagcggguggacgcgc

SEQ ID NO: 235517 - RNA, 22 nt, Human
ggacagagggcaggagcccaga

SEQ ID NO: 235518 - RNA, 22 nt, Human
gaaacauuguguucuacagauu

SEQ ID NO: 235519 - RNA, 22 nt, Human
uggagaauucuauguugagggg

SEQ ID NO: 235520 - RNA, 22 nt, Human
uccuggaguugugcagugcaca

SEQ ID NO: 235521 - RNA, 22 nt, Human
gagcucagagccuauaguuggu

SEQ ID NO: 235522 - RNA, 22 nt, Human
gaauuacagccagaagaaugaa

SEQ ID NO: 235523 - RNA, 18 nt, Human
ccuggaccugucuccuuu

SEQ ID NO: 235524 - RNA, 22 nt, Human
caaggcaguuccccagagggcu

SEQ ID NO: 235525 - RNA, 22 nt, Human
cuccagugagcgcggggcaugg

SEQ ID NO: 235526 - RNA, 21 nt, Human
cauauuaaaucggugccuuua

SEQ ID NO: 235527 - RNA, 22 nt, Human
agugugggcccccagguuagcc

SEQ ID NO: 235528 - RNA, 22 nt, Human
agcaggugaugugagucuggaa

SEQ ID NO: 235529 - RNA, 22 nt, Human
cugugaaugcuaguaagagugc

SEQ ID NO: 235530 - RNA, 22 nt, Human
ggccucucuagcauccagccug

SEQ ID NO: 235531 - RNA, 20 nt, Human
guuaaaagaguaauuugagg

SEQ ID NO: 235532 - RNA, 17 nt, Human
uccauuccuaaggcccu

SEQ ID NO: 235533 - RNA, 22 nt, Human
acuuuagaccaucuuccacagu

SEQ ID NO: 235534 - RNA, 22 nt, Human
agcagcaguguguggucauguu

SEQ ID NO: 235535 - RNA, 21 nt, Human
uaauaauuccacuacagagua

SEQ ID NO: 235536 - RNA, 20 nt, Human
cuagaagugccucaucuaga

SEQ ID NO: 235537 - RNA, 22 nt, Human
aguuuguaaguucauuaugagu

SEQ ID NO: 235538 - RNA, 22 nt, Human
ggcugcaggcagaggcugucug

SEQ ID NO: 235539 - RNA, 18 nt, Human
uuauuggugcugcuguuc

SEQ ID NO: 235540 - RNA, 22 nt, Human
aggcaaaagaaugucauaaaug

SEQ ID NO: 235541 - RNA, 21 nt, Human
uaucuacuggugucuuucaga

SEQ ID NO: 235542 - RNA, 22 nt, Human
cagccucugagccuuggcagau

SEQ ID NO: 235543 - RNA, 22 nt, Human
aagcacaauuuaggacugaaau

SEQ ID NO: 235544 - RNA, 22 nt, Human
uuacaaguucagauuuucucau

SEQ ID NO: 235545 - RNA, 22 nt, Human
aagagcuggucacagguccauu

SEQ ID NO: 235546 - RNA, 22 nt, Human
cagcagaaaauaccuguaacuc

SEQ ID NO: 235547 - RNA, 22 nt, Human
gggagcucucccugaggccugg

SEQ ID NO: 235548 - RNA, 22 nt, Human
ugcagguguaaauuuucaagag

SEQ ID NO: 235549 - RNA, 22 nt, Human
cagagcugugauaaauagauau

SEQ ID NO: 235550 - RNA, 22 nt, Human
gaggcacagagcccuaggagcu

SEQ ID NO: 235551 - RNA, 22 nt, Human
gcagggcagggcaagaacuggg

SEQ ID NO: 235552 - RNA, 22 nt, Human
cauuugaagacuuagaagagga

SEQ ID NO: 235553 - RNA, 22 nt, Human
uaucuguauucugacagucacu

SEQ ID NO: 235554 - RNA, 22 nt, Human
gauugcugaagaaagugaguga

SEQ ID NO: 235555 - RNA, 22 nt, Human
aaggccugggaggccucucuuc

SEQ ID NO: 235556 - RNA, 22 nt, Human
gcaggcugagaguccaagaagg

SEQ ID NO: 235557 - RNA, 21 nt, Human
uucaguaugcgucaugcuguu

SEQ ID NO: 235558 - RNA, 22 nt, Human
aaggcuuuuaaacugucaagga

SEQ ID NO: 235559 - RNA, 22 nt, Human
acacagagcuucucaacuggga

SEQ ID NO: 235560 - RNA, 22 nt, Human
gaggcugggaaguccaagacca

SEQ ID NO: 235561 - RNA, 22 nt, Human
gugagcagagaucgcgugauug

SEQ ID NO: 235562 - RNA, 22 nt, Human
caucucuguguccccagagcuu

SEQ ID NO: 235563 - RNA, 22 nt, Human
uggcugagugaacauguccauu

SEQ ID NO: 235564 - RNA, 18 nt, Human
uggcuucuugagcuaaca

SEQ ID NO: 235565 - RNA, 22 nt, Human
caugaacauuuguuuacaucug

SEQ ID NO: 235566 - RNA, 22 nt, Human
gcagcagugucucccaucuugc

SEQ ID NO: 235567 - RNA, 22 nt, Human
ucacagaaaagcugagcaucag

SEQ ID NO: 235568 - RNA, 22 nt, Human
uggccaguagagcucagauagu

SEQ ID NO: 235569 - RNA, 20 nt, Human
ugcaggugggcccuucuggg

SEQ ID NO: 235570 - RNA, 22 nt, Human
aguacaaauuauagcgcuugga

SEQ ID NO: 235571 - RNA, 22 nt, Human
uugcaaauaauagccugaaacu

SEQ ID NO: 235572 - RNA, 22 nt, Human
cugagguguuuaguaggggcgg

SEQ ID NO: 235573 - RNA, 22 nt, Human
augagcaggaagagcacaaaga

SEQ ID NO: 235574 - RNA, 22 nt, Human
guguugacacagccaucuuguc

SEQ ID NO: 235575 - RNA, 22 nt, Human
ucauuuuuugcauaccuguguc

SEQ ID NO: 235576 - RNA, 22 nt, Human
cccugccuuguuggagccuaug

SEQ ID NO: 235577 - RNA, 22 nt, Human
uagaacuuucagaaauuccaaa

SEQ ID NO: 235578 - RNA, 22 nt, Human
agaggcggagguugcagugagc

SEQ ID NO: 235579 - RNA, 20 nt, Human
auacacauucauagaaaaau

SEQ ID NO: 235580 - RNA, 22 nt, Human
uccacagguauuucuccuugcu

SEQ ID NO: 235581 - RNA, 22 nt, Human
cuggcuccaucuuugcuuccug

SEQ ID NO: 235582 - RNA, 22 nt, Human
auacagcagugaauaagauaaa

SEQ ID NO: 235583 - RNA, 20 nt, Human
agcaaacaggcuccaccaga

SEQ ID NO: 235584 - RNA, 22 nt, Human
cacugcccaccaaguggcuggu

SEQ ID NO: 235585 - RNA, 19 nt, Human
acauucccaucagcaaugu

SEQ ID NO: 235586 - RNA, 22 nt, Human
ggaguguggagaggacaugggu

SEQ ID NO: 235587 - RNA, 22 nt, Human
ugcaaauucagaagaacugccc

SEQ ID NO: 235588 - RNA, 21 nt, Human
cagagccagacugcugaauuu

SEQ ID NO: 235589 - RNA, 21 nt, Human
ggcacagccugaaaugccuca

SEQ ID NO: 235590 - RNA, 22 nt, Human
gagagucuaggaaccucauaua

SEQ ID NO: 235591 - RNA, 22 nt, Human
gagucagaaaguagugugccua

SEQ ID NO: 235592 - RNA, 19 nt, Human
augauacaggugaaaauug

SEQ ID NO: 235593 - RNA, 22 nt, Human
ucuggcaggucaaucauucuuu

SEQ ID NO: 235594 - RNA, 22 nt, Human
gcagagucagguccaaggacug

SEQ ID NO: 235595 - RNA, 22 nt, Human
ugaaccaucuggcuccagaaga

SEQ ID NO: 235596 - RNA, 22 nt, Human
gggcugugcugaguaggaggug

SEQ ID NO: 235597 - RNA, 22 nt, Human
cugguuuauaaaucuguggcca

SEQ ID NO: 235598 - RNA, 22 nt, Human
aauuaaaaaaggagagcuugcu

SEQ ID NO: 235599 - RNA, 22 nt, Human
acuuguuucaacuguacucucc

SEQ ID NO: 235600 - RNA, 22 nt, Human
auagcaaauauuuuaaugagca

SEQ ID NO: 235601 - RNA, 22 nt, Human
uugcauggaggaacauggccca

SEQ ID NO: 235602 - RNA, 22 nt, Human
gcacauggcggccagcagguga

SEQ ID NO: 235603 - RNA, 22 nt, Human
ucuuugcaaauguuauuaucuu

SEQ ID NO: 235604 - RNA, 22 nt, Human
ccacaugaugaggaagcugaac

SEQ ID NO: 235605 - RNA, 17 nt, Human
uaaagccagucaaguca

SEQ ID NO: 235606 - RNA, 22 nt, Human
ucucuguagcagcuuccuuccu

SEQ ID NO: 235607 - RNA, 22 nt, Human
caacugccauacagcuccaugg

SEQ ID NO: 235608 - RNA, 22 nt, Human
guagcacaugauuuugauaugu

SEQ ID NO: 235609 - RNA, 22 nt, Human
uccauacauaaaauguuuaaug

SEQ ID NO: 235610 - RNA, 22 nt, Human
ggaggccuagaaaagugguucu

SEQ ID NO: 235611 - RNA, 22 nt, Human
aaggaagagcaaagaauuaugu

SEQ ID NO: 235612 - RNA, 22 nt, Human
caucuucugggacuucucaguu

SEQ ID NO: 235613 - RNA, 17 nt, Human
ugcauguccuuuguucc

SEQ ID NO: 235614 - RNA, 22 nt, Human
ggcccagccuggcaacaaugac

SEQ ID NO: 235615 - RNA, 22 nt, Human
uugguaaaaucauagugguaac

SEQ ID NO: 235616 - RNA, 22 nt, Human
ucauuauuuuggacuggagugu

SEQ ID NO: 235617 - RNA, 22 nt, Human
ggugcugauaguaacaauaaua

SEQ ID NO: 235618 - RNA, 22 nt, Human
uagguggugugcgaagagcgug

SEQ ID NO: 235619 - RNA, 22 nt, Human
gugaaaaaugauuuguuaacug

SEQ ID NO: 235620 - RNA, 22 nt, Human
aaaggcuuguuugaggacuggu

SEQ ID NO: 235621 - RNA, 22 nt, Human
gcuccaggagagggaagcagau

SEQ ID NO: 235622 - RNA, 22 nt, Human
cuggcuccacucccugccugac

SEQ ID NO: 235623 - RNA, 22 nt, Human
ggugggaaggggccagugugcg

SEQ ID NO: 235624 - RNA, 21 nt, Human
uuccuggggaaggagcugccu

SEQ ID NO: 235625 - RNA, 22 nt, Human
ucaaacugaauuaaacacuugu

SEQ ID NO: 235626 - RNA, 19 nt, Human
uaacugguuaaaaagcuug

SEQ ID NO: 235627 - RNA, 22 nt, Human
augguuauuacugcuguuccag

SEQ ID NO: 235628 - RNA, 22 nt, Human
gauaauuauaggcuaagccacu

SEQ ID NO: 235629 - RNA, 22 nt, Human
ugugcugggagauagagggagg

SEQ ID NO: 235630 - RNA, 22 nt, Human
uucacagugagcuaugucuugu

SEQ ID NO: 235631 - RNA, 22 nt, Human
cccaggugcugaaggaggccgc

SEQ ID NO: 235632 - RNA, 22 nt, Human
gcaaaauuuacacuccuucuuc

SEQ ID NO: 235633 - RNA, 22 nt, Human
ucuggaauaggacaaaaccaaa

SEQ ID NO: 235634 - RNA, 22 nt, Human
ggcccagagggguugagcaucu

SEQ ID NO: 235635 - RNA, 22 nt, Human
cugggccugugggcacacggac

SEQ ID NO: 235636 - RNA, 22 nt, Human
caagagcugaggcuggagaggu

SEQ ID NO: 235637 - RNA, 22 nt, Human
uaauaauuggcuaacccuggga

SEQ ID NO: 235638 - RNA, 22 nt, Human
uuacaaagaaaauuaggcauuu

SEQ ID NO: 235639 - RNA, 22 nt, Human
uuuguacauauaaaucuuguau

SEQ ID NO: 235640 - RNA, 22 nt, Human
acuggcuggccgcgcucuucgc

SEQ ID NO: 235641 - RNA, 22 nt, Human
uuucuacaugucaguaacugau

SEQ ID NO: 235642 - RNA, 22 nt, Human
ccucacccacuacacucaaggg

SEQ ID NO: 235643 - RNA, 22 nt, Human
ggcuguauauacuguauacagu

SEQ ID NO: 235644 - RNA, 22 nt, Human
uucucucugagagcaucuggaa

SEQ ID NO: 235645 - RNA, 23 nt, Human
ccaaaagcgagucuguuguuccc

SEQ ID NO: 235646 - RNA, 22 nt, Human
ugucagcuggagauggcauggg

SEQ ID NO: 235647 - RNA, 22 nt, Human
ccagggcaauaggaacacuuuu

SEQ ID NO: 235648 - RNA, 22 nt, Human
ugcuuucagauaucuguuucaa

SEQ ID NO: 235649 - RNA, 22 nt, Human
ugccagguacacaaguagccag

SEQ ID NO: 235650 - RNA, 22 nt, Human
ggccuugcggaacgcucaggcg

SEQ ID NO: 235651 - RNA, 22 nt, Human
auggaaauacacaagagguuuc

SEQ ID NO: 235652 - RNA, 21 nt, Human
uguucagaccaacuuggacug

SEQ ID NO: 235653 - RNA, 22 nt, Human
guacauguaugagauaugugua

SEQ ID NO: 235654 - RNA, 22 nt, Human
uggaaaacauugagauaccaag

SEQ ID NO: 235655 - RNA, 22 nt, Human
ugucacuuuggggagaguuuug

SEQ ID NO: 235656 - RNA, 22 nt, Human
ugcuuccuauccacacaaugcc

SEQ ID NO: 235657 - RNA, 22 nt, Human
gucugcagacaacuuagaagca

SEQ ID NO: 235658 - RNA, 22 nt, Human
aauuagggaaaacauuugcuuu

SEQ ID NO: 235659 - RNA, 22 nt, Human
uuacuacaagauucuguuuuau

SEQ ID NO: 235660 - RNA, 22 nt, Human
cuuauucagcaaguuuggguac

SEQ ID NO: 235661 - RNA, 22 nt, Human
aacaguaaagacagaauuuauc

SEQ ID NO: 235662 - RNA, 22 nt, Human
auugcuggcaucagugacaaua

SEQ ID NO: 235663 - RNA, 22 nt, Human
ccuccaggccuugcagguuaac

SEQ ID NO: 235664 - RNA, 18 nt, Human
cugccacuuaauguggug

SEQ ID NO: 235665 - RNA, 22 nt, Human
gacacaggauuccuggcucugc

SEQ ID NO: 235666 - RNA, 22 nt, Human
uagagguguucauucucuccau

SEQ ID NO: 235667 - RNA, 22 nt, Human
ucaggcuugucucuagagcaau

SEQ ID NO: 235668 - RNA, 22 nt, Human
guuuuggagucaggcuuagaug

SEQ ID NO: 235669 - RNA, 22 nt, Human
cuguacagaccuauuagcccag

SEQ ID NO: 235670 - RNA, 22 nt, Human
gcugaagguguguggagagagg

SEQ ID NO: 235671 - RNA, 22 nt, Human
uagacaggguggcuuagaaaca

SEQ ID NO: 235672 - RNA, 22 nt, Human
uucuuagaagaaacaucuaaaa

SEQ ID NO: 235673 - RNA, 23 nt, Human
acugagcauuaguauuuuuauaa

SEQ ID NO: 235674 - RNA, 22 nt, Human
aggcuccugcaggugaggugcu

SEQ ID NO: 235675 - RNA, 22 nt, Human
ugaaaucuuauacuuugguagu

SEQ ID NO: 235676 - RNA, 22 nt, Human
ucugagagauacaaggaggcaa

SEQ ID NO: 235677 - RNA, 22 nt, Human
gauguuuauaucuaacuuaagu

SEQ ID NO: 235678 - RNA, 22 nt, Human
agacauaggauuccacauagca

SEQ ID NO: 235679 - RNA, 18 nt, Human
cccuuagccuuuccucuc

SEQ ID NO: 235680 - RNA, 22 nt, Human
gcucagaggaggccuuuaccua

SEQ ID NO: 235681 - RNA, 22 nt, Human
ugcugaggaaagaggauaaaag

SEQ ID NO: 235682 - RNA, 22 nt, Human
acacagaugauguuccaggaac

SEQ ID NO: 235683 - RNA, 22 nt, Human
ugagcucucagggacagacuau

SEQ ID NO: 235684 - RNA, 22 nt, Human
uucugagaugugaaucugucaa

SEQ ID NO: 235685 - RNA, 22 nt, Human
agggaaggcuuuugacauuucc

SEQ ID NO: 235686 - RNA, 22 nt, Human
aacaagaacaccuacaguucua

SEQ ID NO: 235687 - RNA, 22 nt, Human
uuucuucuugauuuaaacaggg

SEQ ID NO: 235688 - RNA, 22 nt, Human
agggcaugcuggaggagagaca

SEQ ID NO: 235689 - RNA, 22 nt, Human
acauauauuuucacacaugguu

SEQ ID NO: 235690 - RNA, 22 nt, Human
agaggggaaggaugugauguga

SEQ ID NO: 235691 - RNA, 18 nt, Human
ccucagaggcaaauuguu

SEQ ID NO: 235692 - RNA, 21 nt, Human
agcugggccucagccugcagu

SEQ ID NO: 235693 - RNA, 22 nt, Human
uggcccuguucuguaccucaua

SEQ ID NO: 235694 - RNA, 22 nt, Human
cuucccuuuuuaugucuucagc

SEQ ID NO: 235695 - RNA, 22 nt, Human
ugagcuggaggacaggagggua

SEQ ID NO: 235696 - RNA, 22 nt, Human
aacugcauuuaacaaauacucu

SEQ ID NO: 235697 - RNA, 22 nt, Human
cuuugaaaaaugguuuccuaga

SEQ ID NO: 235698 - RNA, 19 nt, Human
ccaggccuggcgucuccgc

SEQ ID NO: 235699 - RNA, 22 nt, Human
cacagagcugaaccugggucau

SEQ ID NO: 235700 - RNA, 22 nt, Human
gagccaccuucaacucaggaau

SEQ ID NO: 235701 - RNA, 22 nt, Human
ucugaagagaaugcugcugaac

SEQ ID NO: 235702 - RNA, 22 nt, Human
ugagcagugaugcguuuuguuu

SEQ ID NO: 235703 - RNA, 22 nt, Human
cagcacugcugcuguacacaca

SEQ ID NO: 235704 - RNA, 22 nt, Human
uugaaugaccaugaugcaaggg

SEQ ID NO: 235705 - RNA, 22 nt, Human
gaugaugagauaaggauaacuu

SEQ ID NO: 235706 - RNA, 22 nt, Human
gccuuuaucccuguacaaggug

SEQ ID NO: 235707 - RNA, 22 nt, Human
uaauaagcguagaagguauauc

SEQ ID NO: 235708 - RNA, 22 nt, Human
ucuccagggcccccgagcguug

SEQ ID NO: 235709 - RNA, 22 nt, Human
uggcagauaaaauaauagggaa

SEQ ID NO: 235710 - RNA, 22 nt, Human
auuucccuccagggaaagcuua

SEQ ID NO: 235711 - RNA, 22 nt, Human
gcccaggaguuggaggcugcag

SEQ ID NO: 235712 - RNA, 23 nt, Human
acuugauuauuguugauagauuc

SEQ ID NO: 235713 - RNA, 22 nt, Human
gaggcgagaagcuggagauggu

SEQ ID NO: 235714 - RNA, 22 nt, Human
ccacaguuauucauuugugaca

SEQ ID NO: 235715 - RNA, 22 nt, Human
caggcuggagugcaauggugcu

SEQ ID NO: 235716 - RNA, 22 nt, Human
ugcugcaggaauucucaaggga

SEQ ID NO: 235717 - RNA, 22 nt, Human
uaacacugauuuguucucaggg

SEQ ID NO: 235718 - RNA, 22 nt, Human
aaaguguuaacacuggcuacuu

SEQ ID NO: 235719 - RNA, 22 nt, Human
auuccaguuggguucuaauaca

SEQ ID NO: 235720 - RNA, 22 nt, Human
gauaauuuuagucugaaaauug

SEQ ID NO: 235721 - RNA, 22 nt, Human
cagcuugggucaggugccugcu

SEQ ID NO: 235722 - RNA, 22 nt, Human
uaguguauguucagcuuauaug

SEQ ID NO: 235723 - RNA, 22 nt, Human
ugauuuacccguccaggcccua

SEQ ID NO: 235724 - RNA, 22 nt, Human
ucagucuucuaaagggaugcaa

SEQ ID NO: 235725 - RNA, 22 nt, Human
gagcugugaaaagugccugggg

SEQ ID NO: 235726 - RNA, 22 nt, Human
ugggcagcagcaaagccagacu

SEQ ID NO: 235727 - RNA, 22 nt, Human
agaacagaugugggcagaccug

SEQ ID NO: 235728 - RNA, 22 nt, Human
aaaguaguauaaaauucaugug

SEQ ID NO: 235729 - RNA, 22 nt, Human
uggcugagagucauccugugug

SEQ ID NO: 235730 - RNA, 22 nt, Human
aguggcuggaauugcaggugcg

SEQ ID NO: 235731 - RNA, 22 nt, Human
cagauaauaauaugacuucacu

SEQ ID NO: 235732 - RNA, 22 nt, Human
ccucaggcuuaacuugucuuga

SEQ ID NO: 235733 - RNA, 22 nt, Human
aagaaaugcagaaaugugcugg

SEQ ID NO: 235734 - RNA, 22 nt, Human
auugcugguagucagugucccu

SEQ ID NO: 235735 - RNA, 22 nt, Human
aaacugguuucugagauggaac

SEQ ID NO: 235736 - RNA, 18 nt, Human
agcuucccucugagaggg

SEQ ID NO: 235737 - RNA, 19 nt, Human
auggaaaaugccagacuga

SEQ ID NO: 235738 - RNA, 22 nt, Human
uucuaaaauaaguuuaucuggu

SEQ ID NO: 235739 - RNA, 22 nt, Human
uagcagcacauggugguuuuau

SEQ ID NO: 235740 - RNA, 22 nt, Human
caaggccacuccagagacuggu

SEQ ID NO: 235741 - RNA, 22 nt, Human
uuuuaauuuuagcccuucuggu

SEQ ID NO: 235742 - RNA, 22 nt, Human
ugcccugugugugcaagcacug

SEQ ID NO: 235743 - RNA, 22 nt, Human
aguccucugcugugcgucuuug

SEQ ID NO: 235744 - RNA, 22 nt, Human
cuggcaugcuaauacagccugu

SEQ ID NO: 235745 - RNA, 22 nt, Human
cuuguuaaauuauauaagcaga

SEQ ID NO: 235746 - RNA, 21 nt, Human
acugccuggggugcuggccaa

SEQ ID NO: 235747 - RNA, 22 nt, Human
ggcccagaauacuuuguaaaau

SEQ ID NO: 235748 - RNA, 22 nt, Human
gaggguccccaugcagagcuca

SEQ ID NO: 235749 - RNA, 19 nt, Human
cuggugaggguuauugaua

SEQ ID NO: 235750 - RNA, 22 nt, Human
ucuggagagcagaugccucugg

SEQ ID NO: 235751 - RNA, 22 nt, Human
cauaaucccccauuugugacau

SEQ ID NO: 235752 - RNA, 22 nt, Human
cucccugcuuguuucccuucag

SEQ ID NO: 235753 - RNA, 22 nt, Human
guguacagauaucucacguucu

SEQ ID NO: 235754 - RNA, 22 nt, Human
agguccagacuguguacccuag

SEQ ID NO: 235755 - RNA, 22 nt, Human
ccccuggguccaggcuucucug

SEQ ID NO: 235756 - RNA, 22 nt, Human
cccaggcuccuagaggcccaga

SEQ ID NO: 235757 - RNA, 22 nt, Human
auucagcauaaucaguagcuug

SEQ ID NO: 235758 - RNA, 22 nt, Human
ggcuguugacagacauagguuu

SEQ ID NO: 235759 - RNA, 22 nt, Human
uguucauuccggggagggcuaa

SEQ ID NO: 235760 - RNA, 22 nt, Human
auuuccuaauuuagggauagac

SEQ ID NO: 235761 - RNA, 22 nt, Human
caguuucuacgacuuaagcaca

SEQ ID NO: 235762 - RNA, 22 nt, Human
gccaggacuagagggaggugag

SEQ ID NO: 235763 - RNA, 18 nt, Human
cagagcaguaugaauguu

SEQ ID NO: 235764 - RNA, 22 nt, Human
aggcucuggaguuagccaggca

SEQ ID NO: 235765 - RNA, 22 nt, Human
auauuacacacgguaucacggg

SEQ ID NO: 235766 - RNA, 22 nt, Human
cacccccaccugugggcuccug

SEQ ID NO: 235767 - RNA, 22 nt, Human
augacagaugcuguggggaggu

SEQ ID NO: 235768 - RNA, 22 nt, Human
ugcuccuggcaucucugcgucc

SEQ ID NO: 235769 - RNA, 23 nt, Human
ggagaggggugugggcaucuuua

SEQ ID NO: 235770 - RNA, 22 nt, Human
gacaauuagguuaagagcaaga

SEQ ID NO: 235771 - RNA, 22 nt, Human
uaguuuagcauacaucuucagg

SEQ ID NO: 235772 - RNA, 22 nt, Human
cacauacauacguauguauaca

SEQ ID NO: 235773 - RNA, 22 nt, Human
cacuugaagugaauugcucacc

SEQ ID NO: 235774 - RNA, 22 nt, Human
auauuaaugagcaaguaaguga

SEQ ID NO: 235775 - RNA, 22 nt, Human
uucuucaauuuuccauauacug

SEQ ID NO: 235776 - RNA, 22 nt, Human
caucaguggauauagauuagcg

SEQ ID NO: 235777 - RNA, 22 nt, Human
acccugggaccuggagguggau

SEQ ID NO: 235778 - RNA, 22 nt, Human
cagggaugcuguuaaacauccu

SEQ ID NO: 235779 - RNA, 22 nt, Human
ugcacacacaugaaguagcaug

SEQ ID NO: 235780 - RNA, 22 nt, Human
auugacaaaucugaacauacgg

SEQ ID NO: 235781 - RNA, 22 nt, Human
gauacagcucuggccagaugug

SEQ ID NO: 235782 - RNA, 22 nt, Human
aaagucuuucucauuggccaug

SEQ ID NO: 235783 - RNA, 22 nt, Human
gcacaggaggccgaugcucaug

SEQ ID NO: 235784 - RNA, 22 nt, Human
ucaggaaagaguguauccauca

SEQ ID NO: 235785 - RNA, 22 nt, Human
agagcccaucaguggcagugga

SEQ ID NO: 235786 - RNA, 22 nt, Human
ccuuaauuucuguccuucagau

SEQ ID NO: 235787 - RNA, 22 nt, Human
uuccuucucuguggggaaggca

SEQ ID NO: 235788 - RNA, 21 nt, Human
guggagagugauuuugaugca

SEQ ID NO: 235789 - RNA, 22 nt, Human
ucauguguugcacugaggaccu

SEQ ID NO: 235790 - RNA, 22 nt, Human
gaagacacaauuggugggucca

SEQ ID NO: 235791 - RNA, 22 nt, Human
gacacagaugaucaggugugga

SEQ ID NO: 235792 - RNA, 22 nt, Human
gaacuguaguuaauacuacaca

SEQ ID NO: 235793 - RNA, 21 nt, Human
cggaaacucggcucugguucc

SEQ ID NO: 235794 - RNA, 22 nt, Human
ggaucaaagggaaccuguuagg

SEQ ID NO: 235795 - RNA, 22 nt, Human
acucaggcuguuuuuuccuugu

SEQ ID NO: 235796 - RNA, 22 nt, Human
ggcuggucucagugcuggguuc

SEQ ID NO: 235797 - RNA, 21 nt, Human
gacacaaaggguaguaauggu

SEQ ID NO: 235798 - RNA, 22 nt, Human
gagacucuugcuuuaauagccc

SEQ ID NO: 235799 - RNA, 22 nt, Human
auucagcaguuccugcuucagu

SEQ ID NO: 235800 - RNA, 22 nt, Human
acacagaguauuuagaaggggu

SEQ ID NO: 235801 - RNA, 22 nt, Human
ugcugaaaaugcguaucuucca

SEQ ID NO: 235802 - RNA, 22 nt, Human
uuaggaauauuuucugaguagu

SEQ ID NO: 235803 - RNA, 22 nt, Human
uaugcauaugaccccaagcuug

SEQ ID NO: 235804 - RNA, 22 nt, Human
aagcuguagcuuuucaaaacgu

SEQ ID NO: 235805 - RNA, 22 nt, Human
aagggugguguaggagaucaaa

SEQ ID NO: 235806 - RNA, 22 nt, Human
uagaaagugguugagaguuuag

SEQ ID NO: 235807 - RNA, 22 nt, Human
aucuccagcuggcugugauaaa

SEQ ID NO: 235808 - RNA, 22 nt, Human
uaccagccugacccugucugac

SEQ ID NO: 235809 - RNA, 22 nt, Human
uaguuaaagauucuguuaagag

SEQ ID NO: 235810 - RNA, 22 nt, Human
cuggaggccacuguacagauug

SEQ ID NO: 235811 - RNA, 22 nt, Human
gcccaagguauaucagagacag

SEQ ID NO: 235812 - RNA, 22 nt, Human
uacacaggggagcaugguugac

SEQ ID NO: 235813 - RNA, 22 nt, Human
gcugauagacugaauguuggga

SEQ ID NO: 235814 - RNA, 22 nt, Human
cagaggcugcucuggguggcau

SEQ ID NO: 235815 - RNA, 22 nt, Human
aauugcuugucuucuucccuac

SEQ ID NO: 235816 - RNA, 22 nt, Human
gggagugguugauggugaaaau

SEQ ID NO: 235817 - RNA, 22 nt, Human
uuuuacagucagucaaacucag

SEQ ID NO: 235818 - RNA, 22 nt, Human
cagagcaggaauaggguguuga

SEQ ID NO: 235819 - RNA, 22 nt, Human
uuugcagaagaaaacaugaaca

SEQ ID NO: 235820 - RNA, 22 nt, Human
ucuggguccccgaggaaggaga

SEQ ID NO: 235821 - RNA, 22 nt, Human
uaaucuaucaagcaacaaagug

SEQ ID NO: 235822 - RNA, 22 nt, Human
uggcagguggagacagcagagc

SEQ ID NO: 235823 - RNA, 22 nt, Human
acucuggcacuggguaccucag

SEQ ID NO: 235824 - RNA, 22 nt, Human
uggccucugggaaagcagauuc

SEQ ID NO: 235825 - RNA, 22 nt, Human
cagcccucagguccucagcagc

SEQ ID NO: 235826 - RNA, 22 nt, Human
ugugaggguuuuaagggaauga

SEQ ID NO: 235827 - RNA, 21 nt, Human
uccaggacuugagaauuccag

SEQ ID NO: 235828 - RNA, 22 nt, Human
uucacauuccgcggcuauuuuc

SEQ ID NO: 235829 - RNA, 22 nt, Human
caggcuucaugaauuaugcacc

SEQ ID NO: 235830 - RNA, 22 nt, Human
ccccacucucggccagauaggc

SEQ ID NO: 235831 - RNA, 22 nt, Human
acaaguauuuaagguuaguaua

SEQ ID NO: 235832 - RNA, 22 nt, Human
gaggccaggaggaucucucuaa

SEQ ID NO: 235833 - RNA, 22 nt, Human
uauguacacuuaaguuugagaa

SEQ ID NO: 235834 - RNA, 22 nt, Human
agagaccuuuguuauucuagga

SEQ ID NO: 235835 - RNA, 22 nt, Human
cuuccauaaucuuguuuauuua

SEQ ID NO: 235836 - RNA, 22 nt, Human
acacaugauaagaaaguuuaaa

SEQ ID NO: 235837 - RNA, 22 nt, Human
aacuuuaucggaacagguacuc

SEQ ID NO: 235838 - RNA, 22 nt, Human
ggggaaagugaauuguguagug

SEQ ID NO: 235839 - RNA, 19 nt, Human
ucagggccaugagcgccac

SEQ ID NO: 235840 - RNA, 22 nt, Human
auuggucuaaaguuaagaagau

SEQ ID NO: 235841 - RNA, 22 nt, Human
uugaaaggugaacaugaugcac

SEQ ID NO: 235842 - RNA, 22 nt, Human
uaguuacagugcauagcaagau

SEQ ID NO: 235843 - RNA, 22 nt, Human
ggggugggguuacucauugugc

SEQ ID NO: 235844 - RNA, 22 nt, Human
ugccuucaagacccauccucca

SEQ ID NO: 235845 - RNA, 22 nt, Human
agaggcuccgucaucccucuuu

SEQ ID NO: 235846 - RNA, 22 nt, Human
gucuucuguuuacuuugaaguu

SEQ ID NO: 235847 - RNA, 22 nt, Human
ucucuggcugauauuccucugc

SEQ ID NO: 235848 - RNA, 22 nt, Human
aucuagaagccugagccaagau

SEQ ID NO: 235849 - RNA, 21 nt, Human
uuggcugccugagauuagaau

SEQ ID NO: 235850 - RNA, 22 nt, Human
uuaacaugucuugacuucaucu

SEQ ID NO: 235851 - RNA, 21 nt, Human
aacagugcuuaguagauguuc

SEQ ID NO: 235852 - RNA, 22 nt, Human
ugaaacaauuagaauguaauga

SEQ ID NO: 235853 - RNA, 22 nt, Human
aguaggcagaaguggcauucgg

SEQ ID NO: 235854 - RNA, 20 nt, Human
uugcagcagugaggugaagg

SEQ ID NO: 235855 - RNA, 22 nt, Human
ugaaucuuuuuggaaauaaaga

SEQ ID NO: 235856 - RNA, 22 nt, Human
cccuucaagcucucuggguuuu

SEQ ID NO: 235857 - RNA, 22 nt, Human
uuguuucagcuguaugcuaugu

SEQ ID NO: 235858 - RNA, 22 nt, Human
gaggcccaaggacucugucccg

SEQ ID NO: 235859 - RNA, 22 nt, Human
gagcugggacuuggaauccaca

SEQ ID NO: 235860 - RNA, 22 nt, Human
uuucauguggcgaugucucugg

SEQ ID NO: 235861 - RNA, 22 nt, Human
uacaccagaaucucugugggga

SEQ ID NO: 235862 - RNA, 21 nt, Human
agagaagggacucuuccaguc

SEQ ID NO: 235863 - RNA, 22 nt, Human
agcccugcccugccauguggca

SEQ ID NO: 235864 - RNA, 22 nt, Human
cacagcaaagacacucucaacu

SEQ ID NO: 235865 - RNA, 22 nt, Human
uugguggagucauuggcauaug

SEQ ID NO: 235866 - RNA, 17 nt, Human
cugucugcgcaugaggu

SEQ ID NO: 235867 - RNA, 22 nt, Human
ugaggcagugauguuuaagcac

SEQ ID NO: 235868 - RNA, 22 nt, Human
caaaugaagguggugggucauu

SEQ ID NO: 235869 - RNA, 22 nt, Human
acaguguuuucuuaaggagaaa

SEQ ID NO: 235870 - RNA, 22 nt, Human
ggggugggagugccauccuuga

SEQ ID NO: 235871 - RNA, 22 nt, Human
caagauuuauauuuucacacaa

SEQ ID NO: 235872 - RNA, 22 nt, Human
gucuguagaauaaauaugagua

SEQ ID NO: 235873 - RNA, 20 nt, Human
gcccaggaucucugaggcau

SEQ ID NO: 235874 - RNA, 20 nt, Human
aauuuuaucuccauccuuug

SEQ ID NO: 235875 - RNA, 22 nt, Human
ggaaaggagauauuggagagug

SEQ ID NO: 235876 - RNA, 22 nt, Human
cuccccgagagagguuguccgc

SEQ ID NO: 235877 - RNA, 22 nt, Human
gaacaguagaugagaugcuaga

SEQ ID NO: 235878 - RNA, 22 nt, Human
gauggugcaggugaagugcugg

SEQ ID NO: 235879 - RNA, 22 nt, Human
gccucuggucccucaugcugug

SEQ ID NO: 235880 - RNA, 22 nt, Human
gucaaaaugagcuuuguuauug

SEQ ID NO: 235881 - RNA, 22 nt, Human
uguuacagugacuaauguuuua

SEQ ID NO: 235882 - RNA, 22 nt, Human
gggucuucugauauagguccag

SEQ ID NO: 235883 - RNA, 22 nt, Human
uacaacgugggacuuuguuucu

SEQ ID NO: 235884 - RNA, 22 nt, Human
aaacuggguuguggucaguggu

SEQ ID NO: 235885 - RNA, 22 nt, Human
guacucaguaauauaacauauu

SEQ ID NO: 235886 - RNA, 22 nt, Human
agauguggaaagaaguuagaag

SEQ ID NO: 235887 - RNA, 22 nt, Human
uucaauacaaagaaaggaauuu

SEQ ID NO: 235888 - RNA, 22 nt, Human
uccugggaugcauaaaauaugu

SEQ ID NO: 235889 - RNA, 22 nt, Human
uaaggcaaagaaccauaguaau

SEQ ID NO: 235890 - RNA, 22 nt, Human
uccaggcuacuuggauuccugg

SEQ ID NO: 235891 - RNA, 22 nt, Human
cagguggugccuccucccuucc

SEQ ID NO: 235892 - RNA, 22 nt, Human
uccuggcugucacucggguuga

SEQ ID NO: 235893 - RNA, 22 nt, Human
cuguccagcugaccagagcagc

SEQ ID NO: 235894 - RNA, 22 nt, Human
ugaggaggugggcacacagagu

SEQ ID NO: 235895 - RNA, 22 nt, Human
uuguaacagcugcuuaauagag

SEQ ID NO: 235896 - RNA, 18 nt, Human
uguuuccuccuggaggcu

SEQ ID NO: 235897 - RNA, 22 nt, Human
uucuguaggcauggaacaggga

SEQ ID NO: 235898 - RNA, 19 nt, Human
ugcuagaaauucugugacu

SEQ ID NO: 235899 - RNA, 22 nt, Human
uggcccugacagguccugggca

SEQ ID NO: 235900 - RNA, 22 nt, Human
gcagagcugggauuuguacugg

SEQ ID NO: 235901 - RNA, 22 nt, Human
aagcagcuuaaauuagagccug

SEQ ID NO: 235902 - RNA, 23 nt, Human
aacugcaagguugcugggaagua

SEQ ID NO: 235903 - RNA, 22 nt, Human
ccaggccccagggcuggcuuuc

SEQ ID NO: 235904 - RNA, 22 nt, Human
uauuacagcuuugauuaucugg

SEQ ID NO: 235905 - RNA, 22 nt, Human
acagcuuugggcaaugcuauga

SEQ ID NO: 235906 - RNA, 22 nt, Human
uuguggcaugugagaacuagaa

SEQ ID NO: 235907 - RNA, 22 nt, Human
cuggcucaggguggucuggguc

SEQ ID NO: 235908 - RNA, 22 nt, Human
agcaacaggaauauuauggcaa

SEQ ID NO: 235909 - RNA, 22 nt, Human
ugaucuuugguaguacgauaau

SEQ ID NO: 235910 - RNA, 22 nt, Human
gcuggggcugggcugaggaaga

SEQ ID NO: 235911 - RNA, 22 nt, Human
acccagggaccccgcugacgcc

SEQ ID NO: 235912 - RNA, 22 nt, Human
gucauuuuaugggaacagauuu

SEQ ID NO: 235913 - RNA, 22 nt, Human
cccagaugcagguucaagagua

SEQ ID NO: 235914 - RNA, 22 nt, Human
cagaagcaagggccaaagucuu

SEQ ID NO: 235915 - RNA, 22 nt, Human
cugggugaguauaggaaaggga

SEQ ID NO: 235916 - RNA, 22 nt, Human
caugaaggcugccagcaggcau

SEQ ID NO: 235917 - RNA, 22 nt, Human
cagagggcuguguaaggauguu

SEQ ID NO: 235918 - RNA, 22 nt, Human
aaacacauuagcccuguggaaa

SEQ ID NO: 235919 - RNA, 22 nt, Human
ugauuauauuaacuauguuccu

SEQ ID NO: 235920 - RNA, 22 nt, Human
acaauuagugaucagugaugcc

SEQ ID NO: 235921 - RNA, 22 nt, Human
gccaugaguaaacuggaaagcc

SEQ ID NO: 235922 - RNA, 22 nt, Human
gguaggaguauuuugcagcagu

SEQ ID NO: 235923 - RNA, 22 nt, Human
ggcuuugcuuaacgugcuucua

SEQ ID NO: 235924 - RNA, 22 nt, Human
ccuggcucccccaucauagcug

SEQ ID NO: 235925 - RNA, 22 nt, Human
uuggaggaaauugcuuuugugg

SEQ ID NO: 235926 - RNA, 22 nt, Human
ggccugagcuugggcagcguau

SEQ ID NO: 235927 - RNA, 22 nt, Human
agacaucuaccuuucauucaaa

SEQ ID NO: 235928 - RNA, 22 nt, Human
gcaggaguuaggcgucguggau

SEQ ID NO: 235929 - RNA, 22 nt, Human
agucuuuccuuuuggaagaaaa

SEQ ID NO: 235930 - RNA, 22 nt, Human
agaccacuuggauaagaaacag

SEQ ID NO: 235931 - RNA, 22 nt, Human
caggcacgguggcucaugccug

SEQ ID NO: 235932 - RNA, 18 nt, Human
ggcagccuggacaugcuc

SEQ ID NO: 235933 - RNA, 22 nt, Human
aaagcaaugcuuguggaaugua

SEQ ID NO: 235934 - RNA, 22 nt, Human
cuucuuuagggaucucuugcug

SEQ ID NO: 235935 - RNA, 22 nt, Human
cuagcacuuagggauuguuaug

SEQ ID NO: 235936 - RNA, 22 nt, Human
gggcucagccuccucacuucga

SEQ ID NO: 235937 - RNA, 22 nt, Human
guccagugacaaguagcuggcc

SEQ ID NO: 235938 - RNA, 22 nt, Human
cuggguguucaggagcugggcu

SEQ ID NO: 235939 - RNA, 22 nt, Human
caggcuccacaggggaauccgg

SEQ ID NO: 235940 - RNA, 22 nt, Human
uggauuugcuaccuucugauau

SEQ ID NO: 235941 - RNA, 22 nt, Human
ucugcuguuuacugugugauau

SEQ ID NO: 235942 - RNA, 22 nt, Human
uugguuuaucuguggaucucuu

SEQ ID NO: 235943 - RNA, 22 nt, Human
cuggugcauguggccuugcucu

SEQ ID NO: 235944 - RNA, 22 nt, Human
ucuuuccacagcauguccaugc

SEQ ID NO: 235945 - RNA, 22 nt, Human
gaaaggcaucuucagucucuga

SEQ ID NO: 235946 - RNA, 22 nt, Human
agucugucagucauucuaacaa

SEQ ID NO: 235947 - RNA, 22 nt, Human
uuggaggauaaggauauugauu

SEQ ID NO: 235948 - RNA, 20 nt, Human
agccugcuguagaaguuugg

SEQ ID NO: 235949 - RNA, 22 nt, Human
cauggaaugguugaaugacgaa

SEQ ID NO: 235950 - RNA, 22 nt, Human
aaccagcuaacauguggaauga

SEQ ID NO: 235951 - RNA, 22 nt, Human
ugcauaaacagauacuucaugu

SEQ ID NO: 235952 - RNA, 22 nt, Human
uuaagcauggaagugaaauaau

SEQ ID NO: 235953 - RNA, 22 nt, Human
agcaggcuccuuccuucucugg

SEQ ID NO: 235954 - RNA, 22 nt, Human
ggacacaaaagugaauaaaaua

SEQ ID NO: 235955 - RNA, 22 nt, Human
gcuuagcaaacaucuguagucc

SEQ ID NO: 235956 - RNA, 22 nt, Human
uugcaugcuagaaagauugauu

SEQ ID NO: 235957 - RNA, 22 nt, Human
cagcuggcagaaccugcaucca

SEQ ID NO: 235958 - RNA, 20 nt, Human
ucccaggcuccacccuagac

SEQ ID NO: 235959 - RNA, 23 nt, Human
gagcucugcacuaggcccuggga

SEQ ID NO: 235960 - RNA, 22 nt, Human
agccugugugcuuuggacaggg

SEQ ID NO: 235961 - RNA, 22 nt, Human
auuuuccuagucaugugcuucu

SEQ ID NO: 235962 - RNA, 17 nt, Human
gggugggcacugcuggc

SEQ ID NO: 235963 - RNA, 22 nt, Human
gaaaggcuugagacauugauga

SEQ ID NO: 235964 - RNA, 22 nt, Human
ugcuuuauagacaaggaaguag

SEQ ID NO: 235965 - RNA, 17 nt, Human
uuacagagguaauuaag

SEQ ID NO: 235966 - RNA, 22 nt, Human
guaucuuucccaccaaucacaa

SEQ ID NO: 235967 - RNA, 22 nt, Human
ugccuggcaaugccagaagcca

SEQ ID NO: 235968 - RNA, 23 nt, Human
ucagggcucacacguuuucuggc

SEQ ID NO: 235969 - RNA, 23 nt, Human
augcccugugcagaaauguggaa

SEQ ID NO: 235970 - RNA, 22 nt, Human
uugcaauuaguuacaaaagugg

SEQ ID NO: 235971 - RNA, 22 nt, Human
aguucgagaucugcugaugaga

SEQ ID NO: 235972 - RNA, 22 nt, Human
ucagaaccugcaagucuaaccu

SEQ ID NO: 235973 - RNA, 14 nt, Human
gcaggcagaucacc

SEQ ID NO: 235974 - RNA, 22 nt, Human
ucucccagaaguccucaguaca

SEQ ID NO: 235975 - RNA, 21 nt, Human
ugcaggcuguuuaagaggcaa

SEQ ID NO: 235976 - RNA, 22 nt, Human
augaaagcaagaagugaguuga

SEQ ID NO: 235977 - RNA, 22 nt, Human
gccuguuuccaucaacacaugc

SEQ ID NO: 235978 - RNA, 22 nt, Human
acauugaugugaugcagaagug

SEQ ID NO: 235979 - RNA, 22 nt, Human
uggaggcaggggauacagguca

SEQ ID NO: 235980 - RNA, 22 nt, Human
gacagcagcauaauacaugaac

SEQ ID NO: 235981 - RNA, 22 nt, Human
ccauucuuucagugucucaugu

SEQ ID NO: 235982 - RNA, 22 nt, Human
aggccuuuguggagcucauggc

SEQ ID NO: 235983 - RNA, 22 nt, Human
gaggccuggcugggaggaggug

SEQ ID NO: 235984 - RNA, 22 nt, Human
augguuuaaagaguaugacuuu

SEQ ID NO: 235985 - RNA, 20 nt, Human
aguggggagucaggagugcc

SEQ ID NO: 235986 - RNA, 22 nt, Human
cuuaggaauauccacagcaggu

SEQ ID NO: 235987 - RNA, 22 nt, Human
ucugcacccugaccucuguuuc

SEQ ID NO: 235988 - RNA, 19 nt, Human
agugcauuuuauguuucaa

SEQ ID NO: 235989 - RNA, 22 nt, Human
gagugucacuugaugcagggca

SEQ ID NO: 235990 - RNA, 22 nt, Human
uccugggcuugcuccuccagcu

SEQ ID NO: 235991 - RNA, 22 nt, Human
acagauauaaacuauaguagug

SEQ ID NO: 235992 - RNA, 22 nt, Human
ugaggcucaagaauagacagua

SEQ ID NO: 235993 - RNA, 22 nt, Human
aagaugcuuccacugcaguggc

SEQ ID NO: 235994 - RNA, 21 nt, Human
uucuagaaaaguaugggacug

SEQ ID NO: 235995 - RNA, 22 nt, Human
uccugccuugccugggacauca

SEQ ID NO: 235996 - RNA, 19 nt, Human
aaauaucagagagaugaua

SEQ ID NO: 235997 - RNA, 22 nt, Human
uggagguguggagucaaaggga

SEQ ID NO: 235998 - RNA, 22 nt, Human
ggacacaguggaagacagcuug

SEQ ID NO: 235999 - RNA, 22 nt, Human
aagucucucauggcugacagca

SEQ ID NO: 236000 - RNA, 22 nt, Human
gugguacagcugaaaggcuugc

SEQ ID NO: 236001 - RNA, 20 nt, Human
auaaaauaacugccacaaga

SEQ ID NO: 236002 - RNA, 22 nt, Human
aggaaacuaaggcucagugaag

SEQ ID NO: 236003 - RNA, 22 nt, Human
ccaggcccugccugugguuccu

SEQ ID NO: 236004 - RNA, 22 nt, Human
uucaaacuaguuaaaagucaga

SEQ ID NO: 236005 - RNA, 22 nt, Human
uguccuuuguucccugucucug

SEQ ID NO: 236006 - RNA, 22 nt, Human
gccacaugcaauugcagcacgu

SEQ ID NO: 236007 - RNA, 22 nt, Human
cagucuuuguucccauuacuga

SEQ ID NO: 236008 - RNA, 19 nt, Human
agagucugugcucuuccua

SEQ ID NO: 236009 - RNA, 22 nt, Human
cuggguguucacccgaggcgcu

SEQ ID NO: 236010 - RNA, 22 nt, Human
caguuacagcugcaccagagcc

SEQ ID NO: 236011 - RNA, 22 nt, Human
auuccacagccgauaccaugac

SEQ ID NO: 236012 - RNA, 22 nt, Human
uggagccuuuuacccacaggag

SEQ ID NO: 236013 - RNA, 22 nt, Human
aggccugggcaagaaggggcgu

SEQ ID NO: 236014 - RNA, 22 nt, Human
aggcauggauggauccagggcu

SEQ ID NO: 236015 - RNA, 22 nt, Human
uggcagagaacacacaugauuc

SEQ ID NO: 236016 - RNA, 22 nt, Human
gccugcuuccuagccuuccaag

SEQ ID NO: 236017 - RNA, 21 nt, Human
aaagagguuaauauuguaagu

SEQ ID NO: 236018 - RNA, 22 nt, Human
aucuaaaguguuucaugaaaga

SEQ ID NO: 236019 - RNA, 22 nt, Human
gucauaaagcuuguugcauuua

SEQ ID NO: 236020 - RNA, 22 nt, Human
uaguuugcgaaauuccugccuc

SEQ ID NO: 236021 - RNA, 22 nt, Human
uucugagaugcguuagaaauuu

SEQ ID NO: 236022 - RNA, 22 nt, Human
aauccauuuacucuuuacaaga

SEQ ID NO: 236023 - RNA, 22 nt, Human
augaggcaucuaacauugcaaa

SEQ ID NO: 236024 - RNA, 22 nt, Human
gccaggcuccaggcccuccuga

SEQ ID NO: 236025 - RNA, 22 nt, Human
gagagcacggucuugggcaugg

SEQ ID NO: 236026 - RNA, 22 nt, Human
gccuugguuggccagcaggucc

SEQ ID NO: 236027 - RNA, 22 nt, Human
guagggcaacaugggcacuagg

SEQ ID NO: 236028 - RNA, 22 nt, Human
cagcaucuaaucuucaugccgg

SEQ ID NO: 236029 - RNA, 20 nt, Human
ccagacagcaccugccuggu

SEQ ID NO: 236030 - RNA, 22 nt, Human
gggagggauuaguucugccugg

SEQ ID NO: 236031 - RNA, 22 nt, Human
gggcaagaagcuggaagcauuc

SEQ ID NO: 236032 - RNA, 22 nt, Human
ucugagcugcuagguaugcauu

SEQ ID NO: 236033 - RNA, 22 nt, Human
ucagcaggugaacaucaugcca

SEQ ID NO: 236034 - RNA, 22 nt, Human
aaagugcaaucaguuagaccau

SEQ ID NO: 236035 - RNA, 22 nt, Human
auuacagaaauauggucaaaga

SEQ ID NO: 236036 - RNA, 22 nt, Human
ucuggggugcagccuggacaua

SEQ ID NO: 236037 - RNA, 22 nt, Human
ccuuuccccgcgggaggugcca

SEQ ID NO: 236038 - RNA, 22 nt, Human
uuaugggagcaauuggggaggu

SEQ ID NO: 236039 - RNA, 22 nt, Human
gauccacagcccgcuugggccc

SEQ ID NO: 236040 - RNA, 18 nt, Human
ccuggagcuccacagcaa

SEQ ID NO: 236041 - RNA, 22 nt, Human
uauuacaauuuacauugcacuu

SEQ ID NO: 236042 - RNA, 22 nt, Human
ccugggucuguauugguaggua

SEQ ID NO: 236043 - RNA, 22 nt, Human
accauuugacucucuaaggaua

SEQ ID NO: 236044 - RNA, 23 nt, Human
agaguuuguuucuaaugagugag

SEQ ID NO: 236045 - RNA, 22 nt, Human
uuuauaucuuaugucauuucaa

SEQ ID NO: 236046 - RNA, 22 nt, Human
caaagcugauacucagcaagua

SEQ ID NO: 236047 - RNA, 22 nt, Human
uuagauauguuuuugcuaaugc

SEQ ID NO: 236048 - RNA, 22 nt, Human
aagcaguuacuauuuacuauua

SEQ ID NO: 236049 - RNA, 22 nt, Human
ugcaggguguccggaggaucac

SEQ ID NO: 236050 - RNA, 22 nt, Human
auguuaacugaagccauucucg

SEQ ID NO: 236051 - RNA, 22 nt, Human
uugauguacagaauuguucaca

SEQ ID NO: 236052 - RNA, 22 nt, Human
gcagagcuguuaauggagcuga

SEQ ID NO: 236053 - RNA, 22 nt, Human
ucaaugagguaaucagucaccc

SEQ ID NO: 236054 - RNA, 22 nt, Human
auuagguaaucuuuagauacac

SEQ ID NO: 236055 - RNA, 22 nt, Human
gagcagugaagacagaaguaca

SEQ ID NO: 236056 - RNA, 22 nt, Human
caaaagaagcucuuggggcuag

SEQ ID NO: 236057 - RNA, 22 nt, Human
ucaucuguuaugggaguuuuug

SEQ ID NO: 236058 - RNA, 22 nt, Human
aaaugcauguagaauaauagag

SEQ ID NO: 236059 - RNA, 22 nt, Human
gccaggcacugcucuaagcccu

SEQ ID NO: 236060 - RNA, 23 nt, Human
uucugucuugcugucagcuuucu

SEQ ID NO: 236061 - RNA, 22 nt, Human
uugcaaauuauuuuagucccuu

SEQ ID NO: 236062 - RNA, 22 nt, Human
uuuuauucucaagacaauggga

SEQ ID NO: 236063 - RNA, 22 nt, Human
acccaggggcagccuugcugug

SEQ ID NO: 236064 - RNA, 22 nt, Human
gggcccagcgugguuccaucug

SEQ ID NO: 236065 - RNA, 22 nt, Human
cagggccucgaagccucugggc

SEQ ID NO: 236066 - RNA, 22 nt, Human
gcaagcaguuguggcuucugag

SEQ ID NO: 236067 - RNA, 22 nt, Human
aaggcuggguaaccuguccacu

SEQ ID NO: 236068 - RNA, 22 nt, Human
agcaggggcuccuccacagcca

SEQ ID NO: 236069 - RNA, 22 nt, Human
ucuuuauguuugaaaguacaau

SEQ ID NO: 236070 - RNA, 22 nt, Human
augauauuuuaguaaagugaua

SEQ ID NO: 236071 - RNA, 22 nt, Human
agacauaagugcuaugacauug

SEQ ID NO: 236072 - RNA, 22 nt, Human
uucugcuccaccacuuccagca

SEQ ID NO: 236073 - RNA, 22 nt, Human
uuuagacagcggcucugaacca

SEQ ID NO: 236074 - RNA, 22 nt, Human
uuggaacuggauuucauguagc

SEQ ID NO: 236075 - RNA, 22 nt, Human
ucauugaagugacugaaagauu

SEQ ID NO: 236076 - RNA, 22 nt, Human
ccucucuguguggccucuccau

SEQ ID NO: 236077 - RNA, 19 nt, Human
uccugaaaacuucuggaau

SEQ ID NO: 236078 - RNA, 22 nt, Human
uuccuggcagaggccccgacag

SEQ ID NO: 236079 - RNA, 22 nt, Human
uaagugaugagcacaguaauua

SEQ ID NO: 236080 - RNA, 22 nt, Human
agaagcugcguuuauuuaaauc

SEQ ID NO: 236081 - RNA, 22 nt, Human
cuuaaaaucuggcaguuagcua

SEQ ID NO: 236082 - RNA, 22 nt, Human
agacccagagggcugcugggag

SEQ ID NO: 236083 - RNA, 22 nt, Human
uggaagccaggcccgcuccuaa

SEQ ID NO: 236084 - RNA, 22 nt, Human
augcacaauuaggauauagcuu

SEQ ID NO: 236085 - RNA, 22 nt, Human
guuacaaagcacuucaagugaa

SEQ ID NO: 236086 - RNA, 22 nt, Human
gcuccagggucagcucagaacu

SEQ ID NO: 236087 - RNA, 22 nt, Human
agagcagccucagcucccugug

SEQ ID NO: 236088 - RNA, 19 nt, Human
aagcuccagcagauccuuu

SEQ ID NO: 236089 - RNA, 22 nt, Human
cugcagguuaggagcacuccuu

SEQ ID NO: 236090 - RNA, 23 nt, Human
ggguccagccaauuccaaggaaa

SEQ ID NO: 236091 - RNA, 23 nt, Human
agguucccccgccaggacccugc

SEQ ID NO: 236092 - RNA, 22 nt, Human
caucccugacuucuaggugaca

SEQ ID NO: 236093 - RNA, 22 nt, Human
aaggcugguuccaucccuggug

SEQ ID NO: 236094 - RNA, 22 nt, Human
cacacagugggaaaaccugaag

SEQ ID NO: 236095 - RNA, 22 nt, Human
gugaaaagagagccugugucag

SEQ ID NO: 236096 - RNA, 22 nt, Human
agaaugauaaugccaugaugga

SEQ ID NO: 236097 - RNA, 22 nt, Human
ggcucccugccuguccucaguc

SEQ ID NO: 236098 - RNA, 22 nt, Human
caaagggcucuagacucagcag

SEQ ID NO: 236099 - RNA, 22 nt, Human
auaaugcauuuagaauaauuca

SEQ ID NO: 236100 - RNA, 23 nt, Human
guguguggaaagugcaugggccu

SEQ ID NO: 236101 - RNA, 22 nt, Human
gcuggggagcaagaguagugag

SEQ ID NO: 236102 - RNA, 22 nt, Human
uauauuaaacccucucuguagg

SEQ ID NO: 236103 - RNA, 22 nt, Human
uuauauuucugguagccuucag

SEQ ID NO: 236104 - RNA, 22 nt, Human
acugagguaauugugaggauua

SEQ ID NO: 236105 - RNA, 22 nt, Human
aauucaaagacuagaauuuugc

SEQ ID NO: 236106 - RNA, 22 nt, Human
gacaccaguaaauauucaaaag

SEQ ID NO: 236107 - RNA, 22 nt, Human
ugccuguguggggucugccgcc

SEQ ID NO: 236108 - RNA, 23 nt, Human
gaguggggagaaauugguuaaac

SEQ ID NO: 236109 - RNA, 22 nt, Human
gaguuaaaagcccucucagcag

SEQ ID NO: 236110 - RNA, 22 nt, Human
uaugcuaaugacacucuagaaa

SEQ ID NO: 236111 - RNA, 22 nt, Human
aauauucauuugcagaagaagu

SEQ ID NO: 236112 - RNA, 22 nt, Human
cugucucugauaagcucgaggg

SEQ ID NO: 236113 - RNA, 22 nt, Human
uggcugcagaucaagggcaggc

SEQ ID NO: 236114 - RNA, 22 nt, Human
auaauguagguauguguauuua

SEQ ID NO: 236115 - RNA, 22 nt, Human
gaaaggcucacuuuagaucaug

SEQ ID NO: 236116 - RNA, 22 nt, Human
cuuuuugucucuguccugauga

SEQ ID NO: 236117 - RNA, 22 nt, Human
caacuaauccuuugaaaagaag

SEQ ID NO: 236118 - RNA, 22 nt, Human
gcuccaggagcucacagcucgc

SEQ ID NO: 236119 - RNA, 22 nt, Human
guuaacaagaauuacucuggaa

SEQ ID NO: 236120 - RNA, 22 nt, Human
aguuaagagugugaaaauguua

SEQ ID NO: 236121 - RNA, 22 nt, Human
ugucuaaaugaaaagagaugcc

SEQ ID NO: 236122 - RNA, 22 nt, Human
caugugucuaaucuacuaauau

SEQ ID NO: 236123 - RNA, 22 nt, Human
ucugggcuggugcucaugaauu

SEQ ID NO: 236124 - RNA, 22 nt, Human
agaaagacaaaaugcaguggcu

SEQ ID NO: 236125 - RNA, 22 nt, Human
caucaagauggaagagcaaaua

SEQ ID NO: 236126 - RNA, 22 nt, Human
gcuggcagacugggggcagaac

SEQ ID NO: 236127 - RNA, 22 nt, Human
ccugucuggaacauggccuguu

SEQ ID NO: 236128 - RNA, 22 nt, Human
aaagccauugaacuguacuuua

SEQ ID NO: 236129 - RNA, 22 nt, Human
caggaggacauacuggcucaca

SEQ ID NO: 236130 - RNA, 23 nt, Human
gcuggcuggcaguaaagguuguu

SEQ ID NO: 236131 - RNA, 22 nt, Human
ccuguucuguggcucucaaagg

SEQ ID NO: 236132 - RNA, 18 nt, Human
uggagggcuugcugcagc

SEQ ID NO: 236133 - RNA, 22 nt, Human
auuaaauuggacgcugggggaa

SEQ ID NO: 236134 - RNA, 22 nt, Human
uggugagaccuuguuccuuaug

SEQ ID NO: 236135 - RNA, 22 nt, Human
cauuguuaauugguaucuuaca

SEQ ID NO: 236136 - RNA, 22 nt, Human
cugcacccugcagguaccccug

SEQ ID NO: 236137 - RNA, 22 nt, Human
ccucuggcaacuucacagccca

SEQ ID NO: 236138 - RNA, 22 nt, Human
uaucuguauccccaucuagcua

SEQ ID NO: 236139 - RNA, 20 nt, Human
acugacagggaacuaaggcu

SEQ ID NO: 236140 - RNA, 22 nt, Human
aaacagagagauguauguggag

SEQ ID NO: 236141 - RNA, 22 nt, Human
aagguugcuguuuugcuucaaa

SEQ ID NO: 236142 - RNA, 22 nt, Human
gcccuucaguuacuccuugaug

SEQ ID NO: 236143 - RNA, 22 nt, Human
gcuuguuugugccucugcagaa

SEQ ID NO: 236144 - RNA, 21 nt, Human
cuuugcauacagaugccaauu

SEQ ID NO: 236145 - RNA, 22 nt, Human
ucagcaaccaggggcacagucc

SEQ ID NO: 236146 - RNA, 22 nt, Human
uguguauucagcaagcgaaaca

SEQ ID NO: 236147 - RNA, 22 nt, Human
cagcagccacuagagggcucac

SEQ ID NO: 236148 - RNA, 22 nt, Human
ccaaggcuggagugcaguggcg

SEQ ID NO: 236149 - RNA, 22 nt, Human
uaccaaaagcuuguuucauaca

SEQ ID NO: 236150 - RNA, 22 nt, Human
auggcauuauagcaaugguuug

SEQ ID NO: 236151 - RNA, 22 nt, Human
uccaggccacgaccuccuggau

SEQ ID NO: 236152 - RNA, 22 nt, Human
gccacugcacuccagcccaggc

SEQ ID NO: 236153 - RNA, 22 nt, Human
uugauucuacuuaaaacauaug

SEQ ID NO: 236154 - RNA, 22 nt, Human
gcagugguggagcuuacauauc

SEQ ID NO: 236155 - RNA, 22 nt, Human
uuucugaaaucucuuuugagga

SEQ ID NO: 236156 - RNA, 22 nt, Human
gauuuucauuauagcuaguuuc

SEQ ID NO: 236157 - RNA, 22 nt, Human
gcccaggaguugaagggcugac

SEQ ID NO: 236158 - RNA, 22 nt, Human
uacuagaaauuaccuucucacu

SEQ ID NO: 236159 - RNA, 22 nt, Human
gucuccagcccacucuagauau

SEQ ID NO: 236160 - RNA, 22 nt, Human
ucacuugccuagcccaguucag

SEQ ID NO: 236161 - RNA, 22 nt, Human
ccuuucugguauuuaaccaaag

SEQ ID NO: 236162 - RNA, 22 nt, Human
uugggaucuacauagcuaugua

SEQ ID NO: 236163 - RNA, 22 nt, Human
gucuggaggaggaagaaggcac

SEQ ID NO: 236164 - RNA, 22 nt, Human
aaggucugugaggcuguuuguc

SEQ ID NO: 236165 - RNA, 22 nt, Human
aguggcaguaacauuccacaau

SEQ ID NO: 236166 - RNA, 22 nt, Human
gagacagaguuucacucuuguu

SEQ ID NO: 236167 - RNA, 22 nt, Human
ugcagaggagcuggaaggcugg

SEQ ID NO: 236168 - RNA, 23 nt, Human
cuggccuccgacacuggccaaga

SEQ ID NO: 236169 - RNA, 22 nt, Human
uagaacugcucucauacuugcu

SEQ ID NO: 236170 - RNA, 22 nt, Human
uccuggacucaggaccacagga

SEQ ID NO: 236171 - RNA, 23 nt, Human
aacuuuuagaguuuaacaguguu

SEQ ID NO: 236172 - RNA, 22 nt, Human
ucucuuaggagaaauucauaaa

SEQ ID NO: 236173 - RNA, 22 nt, Human
uggccaccccuuucucugcacu

SEQ ID NO: 236174 - RNA, 22 nt, Human
ugaaagcagcaccaauaccauu

SEQ ID NO: 236175 - RNA, 22 nt, Human
cuuuguugugccugagugcacc

SEQ ID NO: 236176 - RNA, 21 nt, Human
agaggaagugauuggucuggc

SEQ ID NO: 236177 - RNA, 22 nt, Human
uuuguuagagugugggaggcug

SEQ ID NO: 236178 - RNA, 22 nt, Human
acaaguuucauuguuuagaacc

SEQ ID NO: 236179 - RNA, 22 nt, Human
gccugaaguuucaugccucuau

SEQ ID NO: 236180 - RNA, 22 nt, Human
gcaggcuggucugaccaucccu

SEQ ID NO: 236181 - RNA, 22 nt, Human
uuauuauagauuaugcaagauu

SEQ ID NO: 236182 - RNA, 22 nt, Human
aacugcaauuacuuuugcacca

SEQ ID NO: 236183 - RNA, 22 nt, Human
gcaucugauccaauagauauau

SEQ ID NO: 236184 - RNA, 22 nt, Human
gcugcaggggggucuggacuug

SEQ ID NO: 236185 - RNA, 22 nt, Human
ucugcccucaggguaaugauca

SEQ ID NO: 236186 - RNA, 22 nt, Human
agcuaggggaccaagguggccc

SEQ ID NO: 236187 - RNA, 22 nt, Human
agggcacuuuacccauagcuug

SEQ ID NO: 236188 - RNA, 22 nt, Human
uuccucagcuguuugggcucau

SEQ ID NO: 236189 - RNA, 22 nt, Human
uccuuggagguguucaucugcc

SEQ ID NO: 236190 - RNA, 17 nt, Human
gcauccaguaacaugcc

SEQ ID NO: 236191 - RNA, 22 nt, Human
uggguucuagagggaccagaac

SEQ ID NO: 236192 - RNA, 22 nt, Human
gucuuuggaggcacuguugagu

SEQ ID NO: 236193 - RNA, 22 nt, Human
cugggcaauaugcugggccugg

SEQ ID NO: 236194 - RNA, 22 nt, Human
agaucuuuaaaaguuauuauua

SEQ ID NO: 236195 - RNA, 22 nt, Human
aaugcuuuaauugcauguagug

SEQ ID NO: 236196 - RNA, 22 nt, Human
uauggguguuaauggugagaga

SEQ ID NO: 236197 - RNA, 22 nt, Human
accuucaaugaaaauaauaguc

SEQ ID NO: 236198 - RNA, 22 nt, Human
gggagcuggcggauuccccagg

SEQ ID NO: 236199 - RNA, 22 nt, Human
ggccucugcccucacuccuguc

SEQ ID NO: 236200 - RNA, 22 nt, Human
uagauucuuaguuucauagaau

SEQ ID NO: 236201 - RNA, 22 nt, Human
aaguaguugucccugaggaacg

SEQ ID NO: 236202 - RNA, 22 nt, Human
cagugcuguugggcccagagag

SEQ ID NO: 236203 - RNA, 22 nt, Human
uucuuucccaguagaugugaaa

SEQ ID NO: 236204 - RNA, 22 nt, Human
aguucacagggaagguuauugu

SEQ ID NO: 236205 - RNA, 23 nt, Human
uuguuucuuuguauugucucuau

SEQ ID NO: 236206 - RNA, 22 nt, Human
aaugcuagugugauauguaagg

SEQ ID NO: 236207 - RNA, 22 nt, Human
aaucaagaggcgauggauggaa

SEQ ID NO: 236208 - RNA, 22 nt, Human
ggcaaaguuuucaucucauaac

SEQ ID NO: 236209 - RNA, 22 nt, Human
uauaaagaaaugauuuccagaa

SEQ ID NO: 236210 - RNA, 22 nt, Human
acauuucagugagcuauugaag

SEQ ID NO: 236211 - RNA, 23 nt, Human
uuagagaugauuaaaaaaucuug

SEQ ID NO: 236212 - RNA, 22 nt, Human
uaagaugaccuuauaaagagca

SEQ ID NO: 236213 - RNA, 20 nt, Human
cugagcccccagccugcagg

SEQ ID NO: 236214 - RNA, 22 nt, Human
gacuuuaaaaguuugugcuugg

SEQ ID NO: 236215 - RNA, 22 nt, Human
cagaagcagaacacuagauuua

SEQ ID NO: 236216 - RNA, 22 nt, Human
guguuuacagauaaagugagcu

SEQ ID NO: 236217 - RNA, 21 nt, Human
uccugcagggcagcagagugg

SEQ ID NO: 236218 - RNA, 22 nt, Human
gggcagcuagcccucuagccca

SEQ ID NO: 236219 - RNA, 22 nt, Human
ccagaaaaggagcugcaggaug

SEQ ID NO: 236220 - RNA, 22 nt, Human
ccugcuggacagggguguucau

SEQ ID NO: 236221 - RNA, 22 nt, Human
cuccauauguucaguuaugcag

SEQ ID NO: 236222 - RNA, 22 nt, Human
gaggcuaagcacuggcauuucu

SEQ ID NO: 236223 - RNA, 22 nt, Human
ggcaggcacauuugggggccgu

SEQ ID NO: 236224 - RNA, 22 nt, Human
uacacauccauguuuugacuuu

SEQ ID NO: 236225 - RNA, 22 nt, Human
uugcuuccucuaguuucuugaa

SEQ ID NO: 236226 - RNA, 22 nt, Human
cuguggcagggaagaggccaug

SEQ ID NO: 236227 - RNA, 22 nt, Human
ucuagaaaaaaacugcugugga

SEQ ID NO: 236228 - RNA, 22 nt, Human
aagggcucugugugccucccca

SEQ ID NO: 236229 - RNA, 22 nt, Human
aagcuuucagagcagaauguga

SEQ ID NO: 236230 - RNA, 22 nt, Human
aaagcaguaugaaaggcaauaa

SEQ ID NO: 236231 - RNA, 22 nt, Human
auccauuucaguguuccacuug

SEQ ID NO: 236232 - RNA, 17 nt, Human
cugcuuugugcaacgcu

SEQ ID NO: 236233 - RNA, 20 nt, Human
gcccucagucuugucuuuau

SEQ ID NO: 236234 - RNA, 23 nt, Human
uagagcaguagaucaccauggga

SEQ ID NO: 236235 - RNA, 22 nt, Human
agcuuguuagaaauguagacuc

SEQ ID NO: 236236 - RNA, 22 nt, Human
uagaaauaaaucugcagcuggg

SEQ ID NO: 236237 - RNA, 22 nt, Human
auauuauuuucccuggaguugu

SEQ ID NO: 236238 - RNA, 22 nt, Human
ccagaagucaggaaugagucuu

SEQ ID NO: 236239 - RNA, 22 nt, Human
auuuccaagaaagcuuuaggau

SEQ ID NO: 236240 - RNA, 22 nt, Human
agcugccauccgaggugucaga

SEQ ID NO: 236241 - RNA, 22 nt, Human
uagggcucagaguccaguuucu

SEQ ID NO: 236242 - RNA, 22 nt, Human
uaaugaugcaguuacugucuca

SEQ ID NO: 236243 - RNA, 22 nt, Human
gaugauuuugaugcaguaaaga

SEQ ID NO: 236244 - RNA, 22 nt, Human
ucuugggauugcccugcaguuc

SEQ ID NO: 236245 - RNA, 20 nt, Human
agcugcagaacccacuggac

SEQ ID NO: 236246 - RNA, 22 nt, Human
cagugcaggaagugagaugccu

SEQ ID NO: 236247 - RNA, 22 nt, Human
cucccugggccucaguuucucu

SEQ ID NO: 236248 - RNA, 20 nt, Human
uggguccugcuucuuccuga

SEQ ID NO: 236249 - RNA, 22 nt, Human
agcagacaauugccuggaugga

SEQ ID NO: 236250 - RNA, 22 nt, Human
gggaagcaggugcagcucgccu

SEQ ID NO: 236251 - RNA, 22 nt, Human
cacugugucagaguaugaugau

SEQ ID NO: 236252 - RNA, 22 nt, Human
cagcuggcuggucagugcacaa

SEQ ID NO: 236253 - RNA, 22 nt, Human
aaaugcauuucacuaauguuuc

SEQ ID NO: 236254 - RNA, 23 nt, Human
auaagccuuuucuuucugcccca

SEQ ID NO: 236255 - RNA, 22 nt, Human
ggcagccagagggcagcuggau

SEQ ID NO: 236256 - RNA, 22 nt, Human
gcuuagaaguuccuauaaaaug

SEQ ID NO: 236257 - RNA, 22 nt, Human
acaguuuacagggauuugagcu

SEQ ID NO: 236258 - RNA, 22 nt, Human
uagauauaagguccuuagaaca

SEQ ID NO: 236259 - RNA, 22 nt, Human
cugaguccagggacagaggcgu

SEQ ID NO: 236260 - RNA, 22 nt, Human
ugucucaguauacgaaacacuu

SEQ ID NO: 236261 - RNA, 22 nt, Human
aagcagcacagcaaugacucua

SEQ ID NO: 236262 - RNA, 22 nt, Human
cccaggagaugcacuccauugg

SEQ ID NO: 236263 - RNA, 20 nt, Human
ucaugcagguguucuagguu

SEQ ID NO: 236264 - RNA, 22 nt, Human
acuuuuaaggggccuugauuua

SEQ ID NO: 236265 - RNA, 22 nt, Human
acaugugugacaacagagguga

SEQ ID NO: 236266 - RNA, 22 nt, Human
aggcuccuugcucacaggcuca

SEQ ID NO: 236267 - RNA, 22 nt, Human
gaugagguguguggccacuaga

SEQ ID NO: 236268 - RNA, 23 nt, Human
ucugccagugugugccaggagcc

SEQ ID NO: 236269 - RNA, 18 nt, Human
aucaaggaggggaagguc

SEQ ID NO: 236270 - RNA, 22 nt, Human
auguaaaguaaucugucgauca

SEQ ID NO: 236271 - RNA, 22 nt, Human
gagcaaaauaaauucugacaaa

SEQ ID NO: 236272 - RNA, 22 nt, Human
ugagggcugcuuccagagcuag

SEQ ID NO: 236273 - RNA, 22 nt, Human
aguuucucuuugacaccaaaau

SEQ ID NO: 236274 - RNA, 22 nt, Human
uugagauggagccucagucuug

SEQ ID NO: 236275 - RNA, 22 nt, Human
acagucuuuaauuucuuugugg

SEQ ID NO: 236276 - RNA, 22 nt, Human
caacuucuuggcuuccuaaugg

SEQ ID NO: 236277 - RNA, 22 nt, Human
agcuuugugacuuugagcuagu

SEQ ID NO: 236278 - RNA, 23 nt, Human
gagauguggguuuguucaguguc

SEQ ID NO: 236279 - RNA, 22 nt, Human
aguaaggcauuuuucauguuua

SEQ ID NO: 236280 - RNA, 22 nt, Human
cuccaccacacaucuguccacc

SEQ ID NO: 236281 - RNA, 22 nt, Human
uuggcagaauuaaccacugaag

SEQ ID NO: 236282 - RNA, 22 nt, Human
uggcuccagaucugucuccugu

SEQ ID NO: 236283 - RNA, 22 nt, Human
gguuccagagugggcugggaaa

SEQ ID NO: 236284 - RNA, 22 nt, Human
ucuaaacacuaagucuugaugc

SEQ ID NO: 236285 - RNA, 22 nt, Human
uggaagcaaaauauccuuuaau

SEQ ID NO: 236286 - RNA, 22 nt, Human
aaauauuguuuugguaagcuuc

SEQ ID NO: 236287 - RNA, 22 nt, Human
agcaccagcucaaggugcaccu

SEQ ID NO: 236288 - RNA, 22 nt, Human
cacauccuucauacucagcucu

SEQ ID NO: 236289 - RNA, 22 nt, Human
ucagaacuacauggacauguua

SEQ ID NO: 236290 - RNA, 22 nt, Human
gagaguucuugccuggguauua

SEQ ID NO: 236291 - RNA, 22 nt, Human
gcaucucuuuagaaucagaugg

SEQ ID NO: 236292 - RNA, 22 nt, Human
aaaaggcauggagguugauagu

SEQ ID NO: 236293 - RNA, 22 nt, Human
ccaggagcagaguagguguuca

SEQ ID NO: 236294 - RNA, 22 nt, Human
cacaccucacaccucgcaugcu

SEQ ID NO: 236295 - RNA, 22 nt, Human
aauguuguuuuucugcaugucu

SEQ ID NO: 236296 - RNA, 22 nt, Human
acugggcuguggacacccagcg

SEQ ID NO: 236297 - RNA, 22 nt, Human
ccugcccuucuuuccccagcau

SEQ ID NO: 236298 - RNA, 23 nt, Human
aaagacugcugagaauuuuagga

SEQ ID NO: 236299 - RNA, 22 nt, Human
cuguugcugggaacgcauguca

SEQ ID NO: 236300 - RNA, 22 nt, Human
uaguauuuccuguaagcuauag

SEQ ID NO: 236301 - RNA, 22 nt, Human
auaugacagcggauucacauau

SEQ ID NO: 236302 - RNA, 22 nt, Human
auccucagcaucuagcaugaag

SEQ ID NO: 236303 - RNA, 22 nt, Human
ccagcccuugaggucuguccau

SEQ ID NO: 236304 - RNA, 22 nt, Human
cugaggcacccaucuucuccug

SEQ ID NO: 236305 - RNA, 22 nt, Human
auaauaaaccaggaugggucug

SEQ ID NO: 236306 - RNA, 23 nt, Human
auauuagggagauuagcccucua

SEQ ID NO: 236307 - RNA, 22 nt, Human
caggugcuguccugcacauguc

SEQ ID NO: 236308 - RNA, 17 nt, Human
cccaugagcccacuccc

SEQ ID NO: 236309 - RNA, 22 nt, Human
ugaguggagaacagaggcucuc

SEQ ID NO: 236310 - RNA, 22 nt, Human
uccuccaggucuaggguggcuu

SEQ ID NO: 236311 - RNA, 22 nt, Human
uuuaaauguguucuuaguagcu

SEQ ID NO: 236312 - RNA, 22 nt, Human
ucucugggcucaggagcccggc

SEQ ID NO: 236313 - RNA, 22 nt, Human
ugagacuuggcacugaggaacu

SEQ ID NO: 236314 - RNA, 22 nt, Human
augaugaagaguaacaggcuga

SEQ ID NO: 236315 - RNA, 22 nt, Human
ucaguuuaauacccagaugccu

SEQ ID NO: 236316 - RNA, 22 nt, Human
cguccuuugaauugaggucuuu

SEQ ID NO: 236317 - RNA, 22 nt, Human
acuugaauucaaagcgaaagca

SEQ ID NO: 236318 - RNA, 22 nt, Human
acaguuugcccugacauucucc

SEQ ID NO: 236319 - RNA, 22 nt, Human
cagcuuuccagagaccugcccc

SEQ ID NO: 236320 - RNA, 22 nt, Human
gccaggcaggccacgcuguguu

SEQ ID NO: 236321 - RNA, 22 nt, Human
cuuucugaaguuuaaguucuaa

SEQ ID NO: 236322 - RNA, 22 nt, Human
cuuggcccggagccccaugaag

SEQ ID NO: 236323 - RNA, 22 nt, Human
ggguggagaggcuaaguccagu

SEQ ID NO: 236324 - RNA, 22 nt, Human
ccucuggccuaggccgggagag

SEQ ID NO: 236325 - RNA, 22 nt, Human
gcaggugucaguccccaaggug

SEQ ID NO: 236326 - RNA, 22 nt, Human
aagccuugcucuugaaaaaguu

SEQ ID NO: 236327 - RNA, 22 nt, Human
auuccucagcaggccuuuuguu

SEQ ID NO: 236328 - RNA, 22 nt, Human
cugugccacugcccugccacgc

SEQ ID NO: 236329 - RNA, 22 nt, Human
augaggagcccucauuuagguu

SEQ ID NO: 236330 - RNA, 22 nt, Human
auuguuggguaguuuguucagc

SEQ ID NO: 236331 - RNA, 22 nt, Human
uagagacaccaguaccauucug

SEQ ID NO: 236332 - RNA, 22 nt, Human
acaaugcaccagcaucuucacc

SEQ ID NO: 236333 - RNA, 22 nt, Human
ucugcacccuucuggguuggaa

SEQ ID NO: 236334 - RNA, 22 nt, Human
uauucauaguaaacaaaagugg

SEQ ID NO: 236335 - RNA, 22 nt, Human
agaagucagccacagugggaga

SEQ ID NO: 236336 - RNA, 22 nt, Human
agggcugccugacuccagagcc

SEQ ID NO: 236337 - RNA, 21 nt, Human
agaaaaacacgauauaagccc

SEQ ID NO: 236338 - RNA, 22 nt, Human
uauauuaucauaaaaccauuca

SEQ ID NO: 236339 - RNA, 22 nt, Human
agccagagauccaucccuagga

SEQ ID NO: 236340 - RNA, 22 nt, Human
auauuuagauaaaaaugggcuu

SEQ ID NO: 236341 - RNA, 22 nt, Human
caacagaggaguggccugaucc

SEQ ID NO: 236342 - RNA, 22 nt, Human
ugcaggcuccaugaggacaggc

SEQ ID NO: 236343 - RNA, 22 nt, Human
cugcagcuccugagcucagaga

SEQ ID NO: 236344 - RNA, 22 nt, Human
aaguucuaauuuugcauucagg

SEQ ID NO: 236345 - RNA, 22 nt, Human
cagacagguagggacagaacau

SEQ ID NO: 236346 - RNA, 22 nt, Human
uccuggagcuuccuucauggua

SEQ ID NO: 236347 - RNA, 22 nt, Human
aaaucccacucagaaacugcca

SEQ ID NO: 236348 - RNA, 22 nt, Human
ugccaggggaccuagggauguc

SEQ ID NO: 236349 - RNA, 22 nt, Human
aacuagaaaaagacuuucugag

SEQ ID NO: 236350 - RNA, 22 nt, Human
ccugggcagggagaccaggcuc

SEQ ID NO: 236351 - RNA, 22 nt, Human
uaauuucaccguugcuagaaau

SEQ ID NO: 236352 - RNA, 22 nt, Human
ggccaugcuguugccugcuggu

SEQ ID NO: 236353 - RNA, 22 nt, Human
aaacagugacugguacauaaua

SEQ ID NO: 236354 - RNA, 22 nt, Human
ugugauauuugaguauugucaa

SEQ ID NO: 236355 - RNA, 22 nt, Human
ggcagcccaccagcccacgucu

SEQ ID NO: 236356 - RNA, 22 nt, Human
cauuguuauagcauuacacacc

SEQ ID NO: 236357 - RNA, 22 nt, Human
caggcuuuuucugcuguccucu

SEQ ID NO: 236358 - RNA, 22 nt, Human
guguuugugagcuaggugacau

SEQ ID NO: 236359 - RNA, 21 nt, Human
ucuggguguaaaucuuauuug

SEQ ID NO: 236360 - RNA, 22 nt, Human
ccugggcuucugucuagauguu

SEQ ID NO: 236361 - RNA, 22 nt, Human
ucuauuuuguuuccagcucuac

SEQ ID NO: 236362 - RNA, 22 nt, Human
ugcagcuguuacggacccuguc

SEQ ID NO: 236363 - RNA, 22 nt, Human
cagcagcuagaggaagggcaga

SEQ ID NO: 236364 - RNA, 18 nt, Human
cuuagaacaucauuccuu

SEQ ID NO: 236365 - RNA, 22 nt, Human
auuuccuauggauacaggcaga

SEQ ID NO: 236366 - RNA, 22 nt, Human
gcagggggucauucacgcuggc

SEQ ID NO: 236367 - RNA, 22 nt, Human
aggccagaugucgggcuagaag

SEQ ID NO: 236368 - RNA, 22 nt, Human
acaggugucuaaggcagacagc

SEQ ID NO: 236369 - RNA, 22 nt, Human
uuggaacacagcagcugauuuu

SEQ ID NO: 236370 - RNA, 22 nt, Human
gccuguguccuucccagugggg

SEQ ID NO: 236371 - RNA, 22 nt, Human
agaagccauagucugggaggca

SEQ ID NO: 236372 - RNA, 22 nt, Human
uugagcccuaccucagacuuuc

SEQ ID NO: 236373 - RNA, 22 nt, Human
aaaggcauuuuaauucuaaaga

SEQ ID NO: 236374 - RNA, 22 nt, Human
ucucuggcacauaauaaggucu

SEQ ID NO: 236375 - RNA, 21 nt, Human
guccagagagccggcuccuga

SEQ ID NO: 236376 - RNA, 22 nt, Human
aagaugaaucaguauguguccu

SEQ ID NO: 236377 - RNA, 23 nt, Human
gccugggacucaggaggagcuca

SEQ ID NO: 236378 - RNA, 22 nt, Human
uucacaaaaaugcugaacaguu

SEQ ID NO: 236379 - RNA, 22 nt, Human
cacugguaguuucagcaaccag

SEQ ID NO: 236380 - RNA, 22 nt, Human
aagagcaucgguggagccccca

SEQ ID NO: 236381 - RNA, 22 nt, Human
uuguauucuuccuuagcaguac

SEQ ID NO: 236382 - RNA, 22 nt, Human
ugcccagcuucuuacuuuuaaa

SEQ ID NO: 236383 - RNA, 22 nt, Human
cucuccaguuaccuaggucuga

SEQ ID NO: 236384 - RNA, 22 nt, Human
gaugcugacugaccaaaaggau

SEQ ID NO: 236385 - RNA, 23 nt, Human
ucagagaaguuguaggcugggga

SEQ ID NO: 236386 - RNA, 22 nt, Human
aaggcugacucaacagggggcc

SEQ ID NO: 236387 - RNA, 22 nt, Human
uucacauuggugauauguuucu

SEQ ID NO: 236388 - RNA, 22 nt, Human
caguuacagagccaguuagaga

SEQ ID NO: 236389 - RNA, 22 nt, Human
ugucacauaggcaaaauguuuu

SEQ ID NO: 236390 - RNA, 22 nt, Human
cuaugaaaugucagauucugca

SEQ ID NO: 236391 - RNA, 21 nt, Human
ggaauagcuuaaagugagggg

SEQ ID NO: 236392 - RNA, 22 nt, Human
ugacccauggucugaucauagg

SEQ ID NO: 236393 - RNA, 22 nt, Human
ugcaggagggaggguuacaguu

SEQ ID NO: 236394 - RNA, 22 nt, Human
guuuccuauaacucaggcacca

SEQ ID NO: 236395 - RNA, 22 nt, Human
uaucuagauaccaagaagcaca

SEQ ID NO: 236396 - RNA, 19 nt, Human
gggaccugacuaauuggca

SEQ ID NO: 236397 - RNA, 22 nt, Human
cugagggagacagugcggacua

SEQ ID NO: 236398 - RNA, 22 nt, Human
acauucaagaugcauucacuua

SEQ ID NO: 236399 - RNA, 22 nt, Human
guucaucuuccucccagugccu

SEQ ID NO: 236400 - RNA, 22 nt, Human
uaacucuagucccaggcaugaa

SEQ ID NO: 236401 - RNA, 22 nt, Human
ggcuggagugggcuccagaguu

SEQ ID NO: 236402 - RNA, 22 nt, Human
uucuuuaaaugaauucucugua

SEQ ID NO: 236403 - RNA, 22 nt, Human
agaaaacagaaagucauuggug

SEQ ID NO: 236404 - RNA, 22 nt, Human
ggcucucuggaggagcucaccc

SEQ ID NO: 236405 - RNA, 22 nt, Human
ugcagaguagugaggggacaga

SEQ ID NO: 236406 - RNA, 22 nt, Human
uuggaauuugcuucagcuaaua

SEQ ID NO: 236407 - RNA, 22 nt, Human
gcccugcuucuggcaugcagaa

SEQ ID NO: 236408 - RNA, 22 nt, Human
ccacccagccagaugcaggaag

SEQ ID NO: 236409 - RNA, 22 nt, Human
ugggagaaacugucucucccac

SEQ ID NO: 236410 - RNA, 22 nt, Human
auucgcacauuaacacucauau

SEQ ID NO: 236411 - RNA, 22 nt, Human
uuucuuuuacaguguggcuauu

SEQ ID NO: 236412 - RNA, 22 nt, Human
agugcuuuuauaucauuaaucc

SEQ ID NO: 236413 - RNA, 22 nt, Human
ccugggcucacagccaaggcuc

SEQ ID NO: 236414 - RNA, 22 nt, Human
aguuugaaggaguugaaucacc

SEQ ID NO: 236415 - RNA, 22 nt, Human
guaaauauaaaugcuagcugcc

SEQ ID NO: 236416 - RNA, 22 nt, Human
aggcugcuauaaacauucccgu

SEQ ID NO: 236417 - RNA, 22 nt, Human
uuccugagaacauggcagcuua

SEQ ID NO: 236418 - RNA, 22 nt, Human
uacacuuguucaaacagcaaaa

SEQ ID NO: 236419 - RNA, 22 nt, Human
uauaaagaaguguaaacaggaa

SEQ ID NO: 236420 - RNA, 19 nt, Human
auccuggguccuccagcug

SEQ ID NO: 236421 - RNA, 22 nt, Human
acauuguauaaugauuaucaca

SEQ ID NO: 236422 - RNA, 20 nt, Human
uauuuugcaauuaugguuca

SEQ ID NO: 236423 - RNA, 22 nt, Human
uucucuggggacugucucuauu

SEQ ID NO: 236424 - RNA, 22 nt, Human
uccaaaguaauuucacuucugu

SEQ ID NO: 236425 - RNA, 22 nt, Human
accacaucgggcggacacuggg

SEQ ID NO: 236426 - RNA, 22 nt, Human
ccagccccgggaaccuggccgu

SEQ ID NO: 236427 - RNA, 22 nt, Human
uggcccaggccaaagcccugga

SEQ ID NO: 236428 - RNA, 21 nt, Human
aaagcaucacgaacauuuggg

SEQ ID NO: 236429 - RNA, 22 nt, Human
uugugcaauaguuuucucauga

SEQ ID NO: 236430 - RNA, 22 nt, Human
cagggcucaggaaaucagacgu

SEQ ID NO: 236431 - RNA, 22 nt, Human
uuuccagauuaagauaccacuu

SEQ ID NO: 236432 - RNA, 22 nt, Human
gaacauaacuauugugaauagu

SEQ ID NO: 236433 - RNA, 18 nt, Human
uuuguuggguugccuuua

SEQ ID NO: 236434 - RNA, 22 nt, Human
gcaggucuggagggcacugggg

SEQ ID NO: 236435 - RNA, 22 nt, Human
uaggcugagcuaagagagcuua

SEQ ID NO: 236436 - RNA, 22 nt, Human
aguaaaaucuuaagcacagugg

SEQ ID NO: 236437 - RNA, 22 nt, Human
uacgugcacucauaccugaaau

SEQ ID NO: 236438 - RNA, 22 nt, Human
aucuguggcgcaaacaaaggcu

SEQ ID NO: 236439 - RNA, 22 nt, Human
cuagagaacaacauucauaugg

SEQ ID NO: 236440 - RNA, 22 nt, Human
gaacagaagaggcuggugccac

SEQ ID NO: 236441 - RNA, 22 nt, Human
ugugugcacgcugggagcugga

SEQ ID NO: 236442 - RNA, 22 nt, Human
auaagugacugcagggaauuca

SEQ ID NO: 236443 - RNA, 21 nt, Human
acacaggcagugucccgaggu

SEQ ID NO: 236444 - RNA, 22 nt, Human
uauaauuuggggaaaguggugu

SEQ ID NO: 236445 - RNA, 17 nt, Human
uggggaagcucagauuu

SEQ ID NO: 236446 - RNA, 22 nt, Human
cugggcccugaagacagucagg

SEQ ID NO: 236447 - RNA, 22 nt, Human
auacuuauacuaagaauguacu

SEQ ID NO: 236448 - RNA, 23 nt, Human
ggcaugcaauggacagagcugga

SEQ ID NO: 236449 - RNA, 22 nt, Human
cugcugugagugguucuugccu

SEQ ID NO: 236450 - RNA, 22 nt, Human
ggacccugcguguauccacacu

SEQ ID NO: 236451 - RNA, 23 nt, Human
aagugguuuugaacccggacccu

SEQ ID NO: 236452 - RNA, 22 nt, Human
ugugaggauguuaaggggauga

SEQ ID NO: 236453 - RNA, 22 nt, Human
gucuccuaaaccauccugguac

SEQ ID NO: 236454 - RNA, 22 nt, Human
aacaucuagguucucaucgaua

SEQ ID NO: 236455 - RNA, 22 nt, Human
aagaggaaaugauugacuauau

SEQ ID NO: 236456 - RNA, 22 nt, Human
cagaggcuaagaguguccaaag

SEQ ID NO: 236457 - RNA, 22 nt, Human
ugagcccuugacaucgcccacu

SEQ ID NO: 236458 - RNA, 19 nt, Human
augagcaauaguuuuaauc

SEQ ID NO: 236459 - RNA, 22 nt, Human
agcugcccccagggcugugcuu

SEQ ID NO: 236460 - RNA, 22 nt, Human
gcugaaggcccggaggacaggg

SEQ ID NO: 236461 - RNA, 22 nt, Human
agagcuggcugugggugacuuu

SEQ ID NO: 236462 - RNA, 22 nt, Human
cuggcugguuggggagaagaca

SEQ ID NO: 236463 - RNA, 22 nt, Human
agccuacagagggcagguggag

SEQ ID NO: 236464 - RNA, 22 nt, Human
ucugccagaagccagggucugg

SEQ ID NO: 236465 - RNA, 22 nt, Human
uucagaacaauaugaacagaac

SEQ ID NO: 236466 - RNA, 22 nt, Human
auacaugugugugcauacaugu

SEQ ID NO: 236467 - RNA, 22 nt, Human
gaagccucaacaucucugcguc

SEQ ID NO: 236468 - RNA, 22 nt, Human
gcagcaggacugccguuaaagu

SEQ ID NO: 236469 - RNA, 22 nt, Human
cuaucucuccacaaugccagug

SEQ ID NO: 236470 - RNA, 22 nt, Human
ggcucagaaaccucuggugucu

SEQ ID NO: 236471 - RNA, 22 nt, Human
cagcuucuucaguccuggagcu

SEQ ID NO: 236472 - RNA, 22 nt, Human
aaacaguucuccaggaagccag

SEQ ID NO: 236473 - RNA, 22 nt, Human
ucaguucuaacaguuuagaaca

SEQ ID NO: 236474 - RNA, 22 nt, Human
ugcuuucauugugauaggaagc

SEQ ID NO: 236475 - RNA, 22 nt, Human
gagcccucgggcgagcccgcgc

SEQ ID NO: 236476 - RNA, 22 nt, Human
cugugugagcaucacuucagau

SEQ ID NO: 236477 - RNA, 22 nt, Human
uguccucaggaccuggcacagu

SEQ ID NO: 236478 - RNA, 22 nt, Human
gccgggaccaaggccacggagc

SEQ ID NO: 236479 - RNA, 21 nt, Human
uaggaacuguucugagugguc

SEQ ID NO: 236480 - RNA, 22 nt, Human
uucugcugguaacuauguuuca

SEQ ID NO: 236481 - RNA, 22 nt, Human
auuuacagaugaugcuauuuga

SEQ ID NO: 236482 - RNA, 22 nt, Human
uacaugaagaugaauguauggc

SEQ ID NO: 236483 - RNA, 22 nt, Human
ucagugcaguagaacuuuaguu

SEQ ID NO: 236484 - RNA, 22 nt, Human
uacugucucugcccuggccagg

SEQ ID NO: 236485 - RNA, 22 nt, Human
uuccaaaguuauucaagcagua

SEQ ID NO: 236486 - RNA, 22 nt, Human
uuguacagggaaguaauacaag

SEQ ID NO: 236487 - RNA, 22 nt, Human
guaggucagacauaagaggaca

SEQ ID NO: 236488 - RNA, 22 nt, Human
guuauguacuuuuuaaaucuug

SEQ ID NO: 236489 - RNA, 19 nt, Human
uagaagcacuaggcaaacu

SEQ ID NO: 236490 - RNA, 22 nt, Human
aaugguuuaacauaugcuugag

SEQ ID NO: 236491 - RNA, 22 nt, Human
agcaccaggucgcuggcacgcu

SEQ ID NO: 236492 - RNA, 22 nt, Human
gacuauugcacacuucucucac

SEQ ID NO: 236493 - RNA, 22 nt, Human
auauuuacugcuguggugaagg

SEQ ID NO: 236494 - RNA, 22 nt, Human
aucuguagucacugcacagcuc

SEQ ID NO: 236495 - RNA, 22 nt, Human
ucacacagugagaaagugcgga

SEQ ID NO: 236496 - RNA, 18 nt, Human
ugaggccagagugggcau

SEQ ID NO: 236497 - RNA, 22 nt, Human
ucugugucugguugggccagua

SEQ ID NO: 236498 - RNA, 22 nt, Human
aacaagauguuuugauauaugu

SEQ ID NO: 236499 - RNA, 22 nt, Human
aagagggagggcaaaggcacug

SEQ ID NO: 236500 - RNA, 22 nt, Human
cugggugcgugagcgcaugcgu

SEQ ID NO: 236501 - RNA, 22 nt, Human
uuuuaauucaaagugaauagug

SEQ ID NO: 236502 - RNA, 22 nt, Human
ugucuguggcaauuguggguaa

SEQ ID NO: 236503 - RNA, 22 nt, Human
acagccaaggaauuaggaaggg

SEQ ID NO: 236504 - RNA, 22 nt, Human
caaagacugcauaacacaugaa

SEQ ID NO: 236505 - RNA, 22 nt, Human
ccacaggacggaggucuggccg

SEQ ID NO: 236506 - RNA, 22 nt, Human
uccuuggcaagcugcaauggga

SEQ ID NO: 236507 - RNA, 22 nt, Human
acaugacaccucuggcugggug

SEQ ID NO: 236508 - RNA, 22 nt, Human
acaagagauuaucuacagauga

SEQ ID NO: 236509 - RNA, 22 nt, Human
agcaguguuuaggcauucagua

SEQ ID NO: 236510 - RNA, 22 nt, Human
caccagcucuccaccagguuuc

SEQ ID NO: 236511 - RNA, 22 nt, Human
uauguguuugacacccugcaag

SEQ ID NO: 236512 - RNA, 22 nt, Human
uccuuucugucuuuacucugga

SEQ ID NO: 236513 - RNA, 22 nt, Human
aauugcuuaguugcaacuaugc

SEQ ID NO: 236514 - RNA, 19 nt, Human
ucagucuaggaaugagcua

SEQ ID NO: 236515 - RNA, 22 nt, Human
ugcaacaaggccucauuucuug

SEQ ID NO: 236516 - RNA, 22 nt, Human
gaggucaggcuugcagcagggu

SEQ ID NO: 236517 - RNA, 22 nt, Human
uagcaguggaaucuuuugucca

SEQ ID NO: 236518 - RNA, 20 nt, Human
auaauuauuuacuuuugugc

SEQ ID NO: 236519 - RNA, 22 nt, Human
ucuaccagggucacagaggccc

SEQ ID NO: 236520 - RNA, 22 nt, Human
acugcaggaugugcuccuauug

SEQ ID NO: 236521 - RNA, 22 nt, Human
caguuaaacagauugaguguua

SEQ ID NO: 236522 - RNA, 22 nt, Human
auuacagaagauaugcucaaca

SEQ ID NO: 236523 - RNA, 20 nt, Human
caccacagaauuggggacag

SEQ ID NO: 236524 - RNA, 22 nt, Human
cagcccagaacucacgucucca

SEQ ID NO: 236525 - RNA, 22 nt, Human
aucucagacauguuguccauga

SEQ ID NO: 236526 - RNA, 22 nt, Human
uuggcuucuuauaaugcaauag

SEQ ID NO: 236527 - RNA, 22 nt, Human
agcagcugauggggaaggaguu

SEQ ID NO: 236528 - RNA, 22 nt, Human
ugucccugguggaggcuggcag

SEQ ID NO: 236529 - RNA, 22 nt, Human
ccagggcucaggcucccagugg

SEQ ID NO: 236530 - RNA, 22 nt, Human
auacaacuuuacaugcaauucc

SEQ ID NO: 236531 - RNA, 22 nt, Human
uucucaggccccugccuggacu

SEQ ID NO: 236532 - RNA, 22 nt, Human
cuggcugguuuuuaaagcuagg

SEQ ID NO: 236533 - RNA, 22 nt, Human
agcacagggcccagccuaggcc

SEQ ID NO: 236534 - RNA, 22 nt, Human
uagguguccauauaugugugua

SEQ ID NO: 236535 - RNA, 22 nt, Human
cuucuuuucauggcuugggaag

SEQ ID NO: 236536 - RNA, 22 nt, Human
cuguugcucccagggagagggu

SEQ ID NO: 236537 - RNA, 22 nt, Human
cacaggcucuccagggccugga

SEQ ID NO: 236538 - RNA, 22 nt, Human
aaauuauucaaaaagcuguguu

SEQ ID NO: 236539 - RNA, 22 nt, Human
guguuacuaaaauuugauucuu

SEQ ID NO: 236540 - RNA, 20 nt, Human
uccaggagaacugggagccg

SEQ ID NO: 236541 - RNA, 22 nt, Human
gcucaaagaccagacagaggag

SEQ ID NO: 236542 - RNA, 22 nt, Human
ugcuacacucaaucagugcuau

SEQ ID NO: 236543 - RNA, 22 nt, Human
augcuauuuaccacacaucauu

SEQ ID NO: 236544 - RNA, 22 nt, Human
gcucccuggaauguuggcugcc

SEQ ID NO: 236545 - RNA, 22 nt, Human
gugagguagcagagacagugaa

SEQ ID NO: 236546 - RNA, 21 nt, Human
aagugccacccacagaugcau

SEQ ID NO: 236547 - RNA, 22 nt, Human
aaaucagaaaauauggagagga

SEQ ID NO: 236548 - RNA, 22 nt, Human
ggcucaggagaggggcuaaaag

SEQ ID NO: 236549 - RNA, 22 nt, Human
gacagcauggugucuguucagg

SEQ ID NO: 236550 - RNA, 22 nt, Human
auucaagagcuggcuuugaaau

SEQ ID NO: 236551 - RNA, 22 nt, Human
aaagccaguucuuuuauauugg

SEQ ID NO: 236552 - RNA, 19 nt, Human
agcucaggcccaucguccc

SEQ ID NO: 236553 - RNA, 22 nt, Human
agcugcugagccaggcugaugu

SEQ ID NO: 236554 - RNA, 22 nt, Human
cugagguguugaugaccuaugc

SEQ ID NO: 236555 - RNA, 22 nt, Human
agaaucaaagagaaauacuuug

SEQ ID NO: 236556 - RNA, 22 nt, Human
uacauucucuucccauugucuc

SEQ ID NO: 236557 - RNA, 21 nt, Human
uggcugaguggaugcaugaau

SEQ ID NO: 236558 - RNA, 22 nt, Human
ccuggcugcuuccucugccaug

SEQ ID NO: 236559 - RNA, 22 nt, Human
ugucuuuuaguuugugagaucu

SEQ ID NO: 236560 - RNA, 22 nt, Human
guccuaaucucuucuuauaagg

SEQ ID NO: 236561 - RNA, 22 nt, Human
gugcaagacuuccuaagcaaua

SEQ ID NO: 236562 - RNA, 22 nt, Human
agcaggccucaugcaccagcua

SEQ ID NO: 236563 - RNA, 22 nt, Human
aaggugguaggcuauaucagua

SEQ ID NO: 236564 - RNA, 22 nt, Human
uccugggagacccagcugugga

SEQ ID NO: 236565 - RNA, 22 nt, Human
uuauguaccugaauuaguaaag

SEQ ID NO: 236566 - RNA, 22 nt, Human
gggagccaugcuggucuucuuu

SEQ ID NO: 236567 - RNA, 22 nt, Human
cugcaaaagucauugugguuuu

SEQ ID NO: 236568 - RNA, 22 nt, Human
gagacagaugcugcuggagcau

SEQ ID NO: 236569 - RNA, 19 nt, Human
ggccccucucacaggaguu

SEQ ID NO: 236570 - RNA, 22 nt, Human
cucccaggggaacuaucaagua

SEQ ID NO: 236571 - RNA, 23 nt, Human
cucagaggccuguccaggguggu

SEQ ID NO: 236572 - RNA, 22 nt, Human
agcugaggcauggacaggcugc

SEQ ID NO: 236573 - RNA, 22 nt, Human
ugaaugauuugggugcauucag

SEQ ID NO: 236574 - RNA, 22 nt, Human
uucaaagugcuuuuaaccuuua

SEQ ID NO: 236575 - RNA, 17 nt, Human
aaucucaguggcuuaag

SEQ ID NO: 236576 - RNA, 22 nt, Human
caggauccuggcugcauggacg

SEQ ID NO: 236577 - RNA, 22 nt, Human
uuuaguagaaugauacagggca

SEQ ID NO: 236578 - RNA, 22 nt, Human
acccugagggguauagcagaag

SEQ ID NO: 236579 - RNA, 22 nt, Human
uagaugcuuauaaagagcauau

SEQ ID NO: 236580 - RNA, 22 nt, Human
ugggugcucugcuucccugcac

SEQ ID NO: 236581 - RNA, 22 nt, Human
guaaaggcucugauaaguacug

SEQ ID NO: 236582 - RNA, 22 nt, Human
aggcugucucagccugcuugca

SEQ ID NO: 236583 - RNA, 22 nt, Human
aucuuucagggccauuuguauu

SEQ ID NO: 236584 - RNA, 22 nt, Human
ucugucugccuugugagggcac

SEQ ID NO: 236585 - RNA, 22 nt, Human
gguguuaacuuguuuaugacaa

SEQ ID NO: 236586 - RNA, 22 nt, Human
ucccugggaauuaauauuugga

SEQ ID NO: 236587 - RNA, 23 nt, Human
aggcugagcucucccagcuucag

SEQ ID NO: 236588 - RNA, 22 nt, Human
caguggcugagaguggacacug

SEQ ID NO: 236589 - RNA, 22 nt, Human
gcuguagguucagucuccaugc

SEQ ID NO: 236590 - RNA, 22 nt, Human
uuccauauguauauagcuguua

SEQ ID NO: 236591 - RNA, 22 nt, Human
gcucuguaaagaagagaaaugc

SEQ ID NO: 236592 - RNA, 22 nt, Human
cagcaggauuugaaaggaagag

SEQ ID NO: 236593 - RNA, 22 nt, Human
agcuugauuucucugcagugug

SEQ ID NO: 236594 - RNA, 22 nt, Human
aguuaacucauuuuauaaugcc

SEQ ID NO: 236595 - RNA, 22 nt, Human
aacuugguuguuggcaauuugc

SEQ ID NO: 236596 - RNA, 22 nt, Human
ccaggccagccuggagcauggc

SEQ ID NO: 236597 - RNA, 22 nt, Human
aagucucuuuaccucuccaggc

SEQ ID NO: 236598 - RNA, 19 nt, Human
ucucuggggacacuuucac

SEQ ID NO: 236599 - RNA, 19 nt, Human
aagcauggugccucaccuc

SEQ ID NO: 236600 - RNA, 22 nt, Human
gaaauacagaaagggcugaaug

SEQ ID NO: 236601 - RNA, 22 nt, Human
cuccagauguauacuuuccaag

SEQ ID NO: 236602 - RNA, 22 nt, Human
uaauuuuaauaguauguggcau

SEQ ID NO: 236603 - RNA, 22 nt, Human
cuuagcccugagaguucugagc

SEQ ID NO: 236604 - RNA, 22 nt, Human
caggcccaucugcucccaggcu

SEQ ID NO: 236605 - RNA, 22 nt, Human
caggaagaaagaggugaggugu

SEQ ID NO: 236606 - RNA, 22 nt, Human
gcugccuucugagaaguuaaau

SEQ ID NO: 236607 - RNA, 22 nt, Human
caguggggaggccaggauagaa

SEQ ID NO: 236608 - RNA, 22 nt, Human
aagggcucugggcuacgcacug

SEQ ID NO: 236609 - RNA, 22 nt, Human
cuucacauguuggaguccuuug

SEQ ID NO: 236610 - RNA, 22 nt, Human
ggcaggcuccaagcauccuaug

SEQ ID NO: 236611 - RNA, 16 nt, Human
agcagguguauagugu

SEQ ID NO: 236612 - RNA, 22 nt, Human
cagcaucaacauucucagcucu

SEQ ID NO: 236613 - RNA, 18 nt, Human
gcuggcuugcuggguuug

SEQ ID NO: 236614 - RNA, 22 nt, Human
agacauuggcuaaaaguagugu

SEQ ID NO: 236615 - RNA, 22 nt, Human
ccugaggcucgcgcgccccugg

SEQ ID NO: 236616 - RNA, 22 nt, Human
ugucccagcacuuugggagucu

SEQ ID NO: 236617 - RNA, 22 nt, Human
ucugggucuaugaucucacuuc

SEQ ID NO: 236618 - RNA, 22 nt, Human
cuuagaaaugcagauucucagg

SEQ ID NO: 236619 - RNA, 22 nt, Human
agacaggcuuugcuguauauca

SEQ ID NO: 236620 - RNA, 22 nt, Human
aauuaguaaccuaauuccaucu

SEQ ID NO: 236621 - RNA, 22 nt, Human
ggccucgcggcuucugguggcu

SEQ ID NO: 236622 - RNA, 22 nt, Human
ucuuuacaucacaauuguaugg

SEQ ID NO: 236623 - RNA, 22 nt, Human
ucuccugcuucaacugauggac

SEQ ID NO: 236624 - RNA, 22 nt, Human
acagggcagaaauguugcaucu

SEQ ID NO: 236625 - RNA, 22 nt, Human
gaagccaacauuccaaguagaa

SEQ ID NO: 236626 - RNA, 22 nt, Human
auggcuucgaguauauacauag

SEQ ID NO: 236627 - RNA, 22 nt, Human
auguaauaggguaacauaacau

SEQ ID NO: 236628 - RNA, 22 nt, Human
ccuggggagagaaagcccagcc

SEQ ID NO: 236629 - RNA, 22 nt, Human
ccugcaagagcggagaagccag

SEQ ID NO: 236630 - RNA, 22 nt, Human
ugcuccagggccuccagugggg

SEQ ID NO: 236631 - RNA, 22 nt, Human
gcucaggcaccauaugaugugu

SEQ ID NO: 236632 - RNA, 22 nt, Human
aguaacaucuuugacauuuguu

SEQ ID NO: 236633 - RNA, 22 nt, Human
cagcccacgucagggccacuca

SEQ ID NO: 236634 - RNA, 22 nt, Human
caggagguugguagcaguagau

SEQ ID NO: 236635 - RNA, 17 nt, Human
ucagacccugugucagg

SEQ ID NO: 236636 - RNA, 19 nt, Human
cuggccuguguccugugcu

SEQ ID NO: 236637 - RNA, 23 nt, Human
cucugggcgggcaggucagccuc

SEQ ID NO: 236638 - RNA, 22 nt, Human
cauuuauucauuugcuagggcu

SEQ ID NO: 236639 - RNA, 22 nt, Human
ugucuccucaacucaugcucga

SEQ ID NO: 236640 - RNA, 22 nt, Human
ucuuuuauccuacauuuagcuc

SEQ ID NO: 236641 - RNA, 22 nt, Human
ccccagcccacaagcauauuaa

SEQ ID NO: 236642 - RNA, 23 nt, Human
auuuacagguuaaaugaaaucag

SEQ ID NO: 236643 - RNA, 22 nt, Human
gaaugacauugaaaagacauug

SEQ ID NO: 236644 - RNA, 21 nt, Human
gagcugggcgaggcuccgggg

SEQ ID NO: 236645 - RNA, 22 nt, Human
ugcugaaacaauaacauacugg

SEQ ID NO: 236646 - RNA, 22 nt, Human
cagaaagccgacuuacaaugga

SEQ ID NO: 236647 - RNA, 22 nt, Human
ucuuuccucugagcuccuguag

SEQ ID NO: 236648 - RNA, 22 nt, Human
caugacccauuuuucuugcugu

SEQ ID NO: 236649 - RNA, 22 nt, Human
acaguggcaguauuagggcaga

SEQ ID NO: 236650 - RNA, 22 nt, Human
agcugaaauucuuuguccucag

SEQ ID NO: 236651 - RNA, 22 nt, Human
ccauuagaagauguaauagaga

SEQ ID NO: 236652 - RNA, 19 nt, Human
gagaaaccccgucuuuagg

SEQ ID NO: 236653 - RNA, 22 nt, Human
ccauccagaccaguccaugggu

SEQ ID NO: 236654 - RNA, 22 nt, Human
ugcaauaacccaugagauagaa

SEQ ID NO: 236655 - RNA, 22 nt, Human
augcaggggccgccuggccagg

SEQ ID NO: 236656 - RNA, 22 nt, Human
gugagucugccuagcacaucac

SEQ ID NO: 236657 - RNA, 22 nt, Human
uugcagggcuggaacauggaau

SEQ ID NO: 236658 - RNA, 22 nt, Human
ugggaagaugaggugccauggg

SEQ ID NO: 236659 - RNA, 22 nt, Human
caggccugucugcacaugaggc

SEQ ID NO: 236660 - RNA, 22 nt, Human
gccagaagacuggagucagcug

SEQ ID NO: 236661 - RNA, 22 nt, Human
aacuuucuugugacauuugggg

SEQ ID NO: 236662 - RNA, 22 nt, Human
gcuggcugguccagcaggggcu

SEQ ID NO: 236663 - RNA, 22 nt, Human
cagcuuuuaggacugugagaaa

SEQ ID NO: 236664 - RNA, 22 nt, Human
gggcucuggggucagacagccu

SEQ ID NO: 236665 - RNA, 22 nt, Human
cagaggagaauugcgggaucau

SEQ ID NO: 236666 - RNA, 22 nt, Human
ucaacaguucuguccaauuaau

SEQ ID NO: 236667 - RNA, 22 nt, Human
gcaggcuucaagcacagcuuuu

SEQ ID NO: 236668 - RNA, 22 nt, Human
aaguauuauuuaacaaauuugu

SEQ ID NO: 236669 - RNA, 22 nt, Human
acuguucuuguaacacuuaaau

SEQ ID NO: 236670 - RNA, 22 nt, Human
ccaggcucaggccugcucguug

SEQ ID NO: 236671 - RNA, 22 nt, Human
ugaaaauucaucucauagcaga

SEQ ID NO: 236672 - RNA, 22 nt, Human
uuucuauaaucuaccaugccag

SEQ ID NO: 236673 - RNA, 22 nt, Human
gggucagagccguaacaggacu

SEQ ID NO: 236674 - RNA, 20 nt, Human
aucaaaauccuauugagguu

SEQ ID NO: 236675 - RNA, 22 nt, Human
uuuguacaauuagcagaggcua

SEQ ID NO: 236676 - RNA, 22 nt, Human
acaaugaugcagaugaguaaga

SEQ ID NO: 236677 - RNA, 22 nt, Human
uauauucauuuuaaagccaucu

SEQ ID NO: 236678 - RNA, 22 nt, Human
cccuccucaacucuggcuucca

SEQ ID NO: 236679 - RNA, 22 nt, Human
aggcuucuccuuccuaccuucc

SEQ ID NO: 236680 - RNA, 22 nt, Human
aggcugugcacagggcaccugc

SEQ ID NO: 236681 - RNA, 22 nt, Human
gacaacugccccauuuuaaaug

SEQ ID NO: 236682 - RNA, 22 nt, Human
aggccuuaccauagcuguagca

SEQ ID NO: 236683 - RNA, 22 nt, Human
uuuauagucgucucaguaauaa

SEQ ID NO: 236684 - RNA, 22 nt, Human
aacuccauuucccugccuccug

SEQ ID NO: 236685 - RNA, 22 nt, Human
aaauuucaguuaccuuuacguu

SEQ ID NO: 236686 - RNA, 22 nt, Human
cuaucuuuuguucauuuugagu

SEQ ID NO: 236687 - RNA, 22 nt, Human
ucagugucuugggcuugaaugc

SEQ ID NO: 236688 - RNA, 22 nt, Human
ugguacaagcagacucagcaga

SEQ ID NO: 236689 - RNA, 22 nt, Human
augucugguggucgaugcuaca

SEQ ID NO: 236690 - RNA, 22 nt, Human
agacaaaugaacaaauauguga

SEQ ID NO: 236691 - RNA, 22 nt, Human
uuaagagguggucgugucugug

SEQ ID NO: 236692 - RNA, 22 nt, Human
gaacugguuacagagggauguu

SEQ ID NO: 236693 - RNA, 18 nt, Human
uuugcaaaggaaguaugg

SEQ ID NO: 236694 - RNA, 22 nt, Human
uuacaaacaagaucuuauucuu

SEQ ID NO: 236695 - RNA, 22 nt, Human
acagaauauuuuauuuagauca

SEQ ID NO: 236696 - RNA, 22 nt, Human
cugaggagaaagaugguccaag

SEQ ID NO: 236697 - RNA, 22 nt, Human
uacauucacaguuguucaucuc

SEQ ID NO: 236698 - RNA, 22 nt, Human
guuccacagagucucacuauga

SEQ ID NO: 236699 - RNA, 22 nt, Human
cagcaugaauguguucguaggg

SEQ ID NO: 236700 - RNA, 22 nt, Human
accuguuuuccuaucuagauug

SEQ ID NO: 236701 - RNA, 22 nt, Human
cuguggaaaauuuguauguaau

SEQ ID NO: 236702 - RNA, 22 nt, Human
acagguguagaaaacagauuau

SEQ ID NO: 236703 - RNA, 22 nt, Human
uucuugaaucacuuuagagaua

SEQ ID NO: 236704 - RNA, 18 nt, Human
ccaggcuacuucuuggcc

SEQ ID NO: 236705 - RNA, 22 nt, Human
caaggcagucccuacucccugc

SEQ ID NO: 236706 - RNA, 22 nt, Human
cuccccaccuucgcggucccug

SEQ ID NO: 236707 - RNA, 22 nt, Human
agcuguguaagucauguaggug

SEQ ID NO: 236708 - RNA, 22 nt, Human
cucagugugaaugcucaguaaa

SEQ ID NO: 236709 - RNA, 22 nt, Human
acagcacuuuacuucucaguga

SEQ ID NO: 236710 - RNA, 22 nt, Human
uggcuucuaguuugaggaaaaa

SEQ ID NO: 236711 - RNA, 22 nt, Human
ugcauuggaaaacuauggcuca

SEQ ID NO: 236712 - RNA, 22 nt, Human
gccagccaagauugagaaggua

SEQ ID NO: 236713 - RNA, 23 nt, Human
aaaggcaggccuaggacauauug

SEQ ID NO: 236714 - RNA, 22 nt, Human
cucaggcugcccugacagcccc

SEQ ID NO: 236715 - RNA, 22 nt, Human
guuagagggaaaaaucauuugc

SEQ ID NO: 236716 - RNA, 22 nt, Human
agggcacaggcuggcaggaucu

SEQ ID NO: 236717 - RNA, 22 nt, Human
caggcuccuuaucuuacaacuu

SEQ ID NO: 236718 - RNA, 18 nt, Human
gcucugcaggugcucggu

SEQ ID NO: 236719 - RNA, 22 nt, Human
ccaaugauggugcccacgauga

SEQ ID NO: 236720 - RNA, 22 nt, Human
aggcccaguagugcugccuuua

SEQ ID NO: 236721 - RNA, 22 nt, Human
ucaacacuggcuacaguuaugc

SEQ ID NO: 236722 - RNA, 22 nt, Human
uaggcagcgcuuggcugugcuu

SEQ ID NO: 236723 - RNA, 22 nt, Human
ucugggcugucuacagguuggc

SEQ ID NO: 236724 - RNA, 22 nt, Human
agucacugaauaccuuaauguu

SEQ ID NO: 236725 - RNA, 22 nt, Human
gacaguuuugcugaaauugagc

SEQ ID NO: 236726 - RNA, 22 nt, Human
ugucugaguggugcaaggcuga

SEQ ID NO: 236727 - RNA, 22 nt, Human
ucagggcccuggacaacccucc

SEQ ID NO: 236728 - RNA, 22 nt, Human
ugcaguggaagagguggagauc

SEQ ID NO: 236729 - RNA, 22 nt, Human
aucaaaguaggcauauguuuuu

SEQ ID NO: 236730 - RNA, 22 nt, Human
ucaggaagugguaaaggauguu

SEQ ID NO: 236731 - RNA, 22 nt, Human
cugggcagagcuaacaccugag

SEQ ID NO: 236732 - RNA, 22 nt, Human
agggucagguuaagggagucau

SEQ ID NO: 236733 - RNA, 22 nt, Human
uaagaaucugcauuuuaacaag

SEQ ID NO: 236734 - RNA, 22 nt, Human
gcaccaugauggagccucauua

SEQ ID NO: 236735 - RNA, 22 nt, Human
aucagagacaaaaccagcacuu

SEQ ID NO: 236736 - RNA, 22 nt, Human
ugugacugagcugcagaguguc

SEQ ID NO: 236737 - RNA, 22 nt, Human
agaggcuccuucacucuggcac

SEQ ID NO: 236738 - RNA, 22 nt, Human
uuuacuucugcauuuccccuag

SEQ ID NO: 236739 - RNA, 22 nt, Human
uugccauuaaaacauguuaucu

SEQ ID NO: 236740 - RNA, 22 nt, Human
aauaucuguuguucuaagccac

SEQ ID NO: 236741 - RNA, 18 nt, Human
gcauuuuaaucugaggca

SEQ ID NO: 236742 - RNA, 22 nt, Human
cugaagcaugcguuuguaaacu

SEQ ID NO: 236743 - RNA, 22 nt, Human
ucuuagaauugaagucagaggg

SEQ ID NO: 236744 - RNA, 22 nt, Human
ucccuggggcaguggcucggag

SEQ ID NO: 236745 - RNA, 22 nt, Human
guccuggggaauacagaagccg

SEQ ID NO: 236746 - RNA, 22 nt, Human
agaagaaaugugaaggccacug

SEQ ID NO: 236747 - RNA, 22 nt, Human
uuucagugaaagcuacuguuag

SEQ ID NO: 236748 - RNA, 21 nt, Human
uuguguccuucuaaagggcca

SEQ ID NO: 236749 - RNA, 22 nt, Human
cuuggaggaaaggcagggagac

SEQ ID NO: 236750 - RNA, 22 nt, Human
gguggcagggagugucccuggg

SEQ ID NO: 236751 - RNA, 22 nt, Human
gcccaagggcaucaaguucuac

SEQ ID NO: 236752 - RNA, 22 nt, Human
uauuggucuucuguucccuauu

SEQ ID NO: 236753 - RNA, 22 nt, Human
agcccccucccuagugacugga

SEQ ID NO: 236754 - RNA, 22 nt, Human
acugccuugucucuugccuguu

SEQ ID NO: 236755 - RNA, 22 nt, Human
uccagccccgaggccggcgacg

SEQ ID NO: 236756 - RNA, 23 nt, Human
uuguccucuggaucgguuugguu

SEQ ID NO: 236757 - RNA, 22 nt, Human
uucuuuggaauaagucaagcug

SEQ ID NO: 236758 - RNA, 23 nt, Human
cauccaggagcugagucugacug

SEQ ID NO: 236759 - RNA, 22 nt, Human
cuccuggcacucaguguggaag

SEQ ID NO: 236760 - RNA, 22 nt, Human
cugauaggauuuaguuucuguu

SEQ ID NO: 236761 - RNA, 19 nt, Human
aggcaugggaagagaaguc

SEQ ID NO: 236762 - RNA, 22 nt, Human
gaaggcugcugggaaguguggu

SEQ ID NO: 236763 - RNA, 22 nt, Human
uuucauugaugggugauagaaa

SEQ ID NO: 236764 - RNA, 22 nt, Human
gagcugggccucagaacacagu

SEQ ID NO: 236765 - RNA, 22 nt, Human
cugcugagcaucagggcugccc

SEQ ID NO: 236766 - RNA, 22 nt, Human
gcagggugaaggucacauagaa

SEQ ID NO: 236767 - RNA, 22 nt, Human
aauuaugguauguucaacaacu

SEQ ID NO: 236768 - RNA, 21 nt, Human
ucagcagcuuuugcagucccu

SEQ ID NO: 236769 - RNA, 22 nt, Human
ucuuuucugccacagccugagc

SEQ ID NO: 236770 - RNA, 22 nt, Human
ugcagggaauccagucuagggu

SEQ ID NO: 236771 - RNA, 22 nt, Human
acagacugugaguaugcauagu

SEQ ID NO: 236772 - RNA, 22 nt, Human
acacauuaggcagugcuuaaau

SEQ ID NO: 236773 - RNA, 22 nt, Human
gcuuuuggccagauggggaaac

SEQ ID NO: 236774 - RNA, 22 nt, Human
ccaggggcucucagggugugug

SEQ ID NO: 236775 - RNA, 22 nt, Human
uucagagcaucucuaaagccag

SEQ ID NO: 236776 - RNA, 22 nt, Human
agccagcuaagggaagcaugau

SEQ ID NO: 236777 - RNA, 23 nt, Human
cuccccaguguccucaugcaucu

SEQ ID NO: 236778 - RNA, 22 nt, Human
guucugcugugucucagcaggu

SEQ ID NO: 236779 - RNA, 23 nt, Human
acugagggccacuuccaucguga

SEQ ID NO: 236780 - RNA, 22 nt, Human
ugacagacauggaagccagagu

SEQ ID NO: 236781 - RNA, 22 nt, Human
caguucuggaggauagaagucu

SEQ ID NO: 236782 - RNA, 22 nt, Human
aaguaaugguuaaauaauucua

SEQ ID NO: 236783 - RNA, 22 nt, Human
aggugaguccugggcacaggua

SEQ ID NO: 236784 - RNA, 22 nt, Human
cuucuuucuuuugaucacaggu

SEQ ID NO: 236785 - RNA, 22 nt, Human
auaaggcaagcugucaguuugu

SEQ ID NO: 236786 - RNA, 22 nt, Human
uuccaggaauucagcucucagu

SEQ ID NO: 236787 - RNA, 22 nt, Human
aaaaaugucauuauggaacuga

SEQ ID NO: 236788 - RNA, 22 nt, Human
cacuuuggaugccacuggucua

SEQ ID NO: 236789 - RNA, 22 nt, Human
cugcaaauaggggugugaauaa

SEQ ID NO: 236790 - RNA, 22 nt, Human
cucaggccauucuuccagcugc

SEQ ID NO: 236791 - RNA, 22 nt, Human
gauacacacccuugauaggacu

SEQ ID NO: 236792 - RNA, 22 nt, Human
uuucccacacaguccacugcag

SEQ ID NO: 236793 - RNA, 19 nt, Human
cuggggcuuugguacugcc

SEQ ID NO: 236794 - RNA, 22 nt, Human
caggagcuuucuucccaaacuu

SEQ ID NO: 236795 - RNA, 22 nt, Human
ucccugggaacaaaggaugaga

SEQ ID NO: 236796 - RNA, 22 nt, Human
uaacacuggagaguugguugug

SEQ ID NO: 236797 - RNA, 22 nt, Human
guuuacaguacucacuugcauu

SEQ ID NO: 236798 - RNA, 22 nt, Human
uguguacacacagauauauaca

SEQ ID NO: 236799 - RNA, 22 nt, Human
gccugcagcugcuuccacacac

SEQ ID NO: 236800 - RNA, 22 nt, Human
agugcaauagcaaagaacaaca

SEQ ID NO: 236801 - RNA, 22 nt, Human
ucuuuggcuuugccacacccaa

SEQ ID NO: 236802 - RNA, 22 nt, Human
cugcccugcuugaugacagcga

SEQ ID NO: 236803 - RNA, 22 nt, Human
cuggaggggcuggcaugguagc

SEQ ID NO: 236804 - RNA, 22 nt, Human
ccuccccaugacccggugcugg

SEQ ID NO: 236805 - RNA, 22 nt, Human
ccuggcuuauuuuuauagcagu

SEQ ID NO: 236806 - RNA, 17 nt, Human
aagcauuuaauuugcua

SEQ ID NO: 236807 - RNA, 22 nt, Human
caguaacauuucaagguagagg

SEQ ID NO: 236808 - RNA, 22 nt, Human
augguauuccuuuauguagaag

SEQ ID NO: 236809 - RNA, 23 nt, Human
aggguggcuugcuuugcuuccuu

SEQ ID NO: 236810 - RNA, 22 nt, Human
cuugaaucuucugaguauuugc

SEQ ID NO: 236811 - RNA, 22 nt, Human
gcuucuggaggagcugggcuga

SEQ ID NO: 236812 - RNA, 22 nt, Human
uaaggcuuggggaaaagugagg

SEQ ID NO: 236813 - RNA, 22 nt, Human
cuugaaagaagggucuuuuaau

SEQ ID NO: 236814 - RNA, 23 nt, Human
uggcugagguccagguaguuuca

SEQ ID NO: 236815 - RNA, 22 nt, Human
agagauuaagucacuuggucag

SEQ ID NO: 236816 - RNA, 22 nt, Human
guauaagcccauucucagagac

SEQ ID NO: 236817 - RNA, 22 nt, Human
cagcuuuuggcaggaugaccag

SEQ ID NO: 236818 - RNA, 18 nt, Human
ggcugcuuaaggagaucc

SEQ ID NO: 236819 - RNA, 19 nt, Human
aagaagcaauaagcuguga

SEQ ID NO: 236820 - RNA, 22 nt, Human
auguguccauuaucaguucugg

SEQ ID NO: 236821 - RNA, 22 nt, Human
uuucuacauguuuucuauugaa

SEQ ID NO: 236822 - RNA, 22 nt, Human
cagcaggcucugaguggcugcc

SEQ ID NO: 236823 - RNA, 22 nt, Human
ccagccugaaaugccucauccu

SEQ ID NO: 236824 - RNA, 22 nt, Human
aaucagaaccuugggucauaac

SEQ ID NO: 236825 - RNA, 22 nt, Human
agcuccaggugcaagucauggu

SEQ ID NO: 236826 - RNA, 22 nt, Human
gcugguucaccuggcuccuccc

SEQ ID NO: 236827 - RNA, 21 nt, Human
cuggacugaggagacagucgc

SEQ ID NO: 236828 - RNA, 22 nt, Human
gcaccauugcugggcuaguucc

SEQ ID NO: 236829 - RNA, 22 nt, Human
cuuauucaaugcuggaaauguu

SEQ ID NO: 236830 - RNA, 22 nt, Human
uauuucuuuucgugacuuauug

SEQ ID NO: 236831 - RNA, 22 nt, Human
aaacucuguagcuaaacauaau

SEQ ID NO: 236832 - RNA, 22 nt, Human
uucuggaaguguuagaaucugg

SEQ ID NO: 236833 - RNA, 19 nt, Human
agugcaugggcgaggugca

SEQ ID NO: 236834 - RNA, 22 nt, Human
aaaagcagguacucagcuuggg

SEQ ID NO: 236835 - RNA, 22 nt, Human
ccagggcugguggcugcagagg

SEQ ID NO: 236836 - RNA, 22 nt, Human
gaaggauuugagauuauccuag

SEQ ID NO: 236837 - RNA, 22 nt, Human
ccucuggggucuagcaauagca

SEQ ID NO: 236838 - RNA, 22 nt, Human
agaucuuuagugaagcuaaauc

SEQ ID NO: 236839 - RNA, 22 nt, Human
acuaaauauuugagagguguag

SEQ ID NO: 236840 - RNA, 22 nt, Human
auuucuguugcuuauaaauuac

SEQ ID NO: 236841 - RNA, 22 nt, Human
gcucagcuacuuacagguggcu

SEQ ID NO: 236842 - RNA, 22 nt, Human
gggccggagcugggucccgcgc

SEQ ID NO: 236843 - RNA, 22 nt, Human
ugcuuagaaucuggacuuguug

SEQ ID NO: 236844 - RNA, 22 nt, Human
aguccaaagcagaugagggcca

SEQ ID NO: 236845 - RNA, 22 nt, Human
guuauguaugggggccuuauga

SEQ ID NO: 236846 - RNA, 22 nt, Human
gagaggccugggcccgugagcu

SEQ ID NO: 236847 - RNA, 22 nt, Human
aagcugugcaggaacugcuugc

SEQ ID NO: 236848 - RNA, 22 nt, Human
uccaggccccacugaagccccu

SEQ ID NO: 236849 - RNA, 19 nt, Human
agaaucaggucaggugaca

SEQ ID NO: 236850 - RNA, 20 nt, Human
cuggguggcaagcaaggggg

SEQ ID NO: 236851 - RNA, 22 nt, Human
gagaaccuacuguauacuauau

SEQ ID NO: 236852 - RNA, 22 nt, Human
cuuucacacacauacauuugga

SEQ ID NO: 236853 - RNA, 18 nt, Human
cuuccucaucgcucuccc

SEQ ID NO: 236854 - RNA, 22 nt, Human
augaauugaggaaaacagucgu

SEQ ID NO: 236855 - RNA, 20 nt, Human
ucuguccuuucugcuaaggc

SEQ ID NO: 236856 - RNA, 17 nt, Human
ggcaggugacagacacc

SEQ ID NO: 236857 - RNA, 22 nt, Human
ugcucaggccagccggacagag

SEQ ID NO: 236858 - RNA, 22 nt, Human
ggagaaugauauauagcucagu

SEQ ID NO: 236859 - RNA, 22 nt, Human
caagauguggugggcugaguuu

SEQ ID NO: 236860 - RNA, 22 nt, Human
auucaugugccacuggugaaca

SEQ ID NO: 236861 - RNA, 22 nt, Human
guuauuuucauuggcucagacu

SEQ ID NO: 236862 - RNA, 22 nt, Human
ccaggugcucuugccagggcug

SEQ ID NO: 236863 - RNA, 22 nt, Human
ugaaauguuuggguccagaagu

SEQ ID NO: 236864 - RNA, 16 nt, Human
gcaggcagaucacaug

SEQ ID NO: 236865 - RNA, 19 nt, Human
gagggcucauuugaacaau

SEQ ID NO: 236866 - RNA, 21 nt, Human
agaaggcaaaagcagacaucu

SEQ ID NO: 236867 - RNA, 22 nt, Human
auuuucaugacuaccuuaaaua

SEQ ID NO: 236868 - RNA, 22 nt, Human
uggcccagcccugcucuagggc

SEQ ID NO: 236869 - RNA, 22 nt, Human
uagcccagaaagcaaaugucuc

SEQ ID NO: 236870 - RNA, 22 nt, Human
acagcugcauucuuaacaggaa

SEQ ID NO: 236871 - RNA, 22 nt, Human
uuuacaaggcagaacugauuaa

SEQ ID NO: 236872 - RNA, 22 nt, Human
aaacaccagucccaguauacac

SEQ ID NO: 236873 - RNA, 22 nt, Human
cagggagggaggaaaauuugcu

SEQ ID NO: 236874 - RNA, 22 nt, Human
uagcagaguaauacuuuggagc

SEQ ID NO: 236875 - RNA, 22 nt, Human
aacuuucuuggaugucucaaca

SEQ ID NO: 236876 - RNA, 22 nt, Human
auguuuauguugggcuauauuu

SEQ ID NO: 236877 - RNA, 22 nt, Human
uacaaaugaguuguaugaacca

SEQ ID NO: 236878 - RNA, 22 nt, Human
cuguuuaucuaggaguugcagg

SEQ ID NO: 236879 - RNA, 22 nt, Human
gacuucuucaugucuuuuccac

SEQ ID NO: 236880 - RNA, 22 nt, Human
aucuccagcucgcagagcuccu

SEQ ID NO: 236881 - RNA, 22 nt, Human
cagcaugagaaaaugaaucaga

SEQ ID NO: 236882 - RNA, 22 nt, Human
cucaugucggcaggacucgccc

SEQ ID NO: 236883 - RNA, 22 nt, Human
caagcuuuauccgccauguagg

SEQ ID NO: 236884 - RNA, 22 nt, Human
cagagccaucccagccuguggu

SEQ ID NO: 236885 - RNA, 22 nt, Human
uagcugaugaauaauuauucuu

SEQ ID NO: 236886 - RNA, 22 nt, Human
uucuauguggcaucaagcucag

SEQ ID NO: 236887 - RNA, 22 nt, Human
uaacagaguuguacaguuacgu

SEQ ID NO: 236888 - RNA, 22 nt, Human
ggucagaagugcaaaaucaguu

SEQ ID NO: 236889 - RNA, 22 nt, Human
gcccugcugaguccggcucaga

SEQ ID NO: 236890 - RNA, 22 nt, Human
caucuccagguuuagggagcac

SEQ ID NO: 236891 - RNA, 22 nt, Human
aagggcucccugccugaggugg

SEQ ID NO: 236892 - RNA, 22 nt, Human
acauaucuuuacucaucaucuc

SEQ ID NO: 236893 - RNA, 22 nt, Human
uuucuguuguuggugucuggcu

SEQ ID NO: 236894 - RNA, 22 nt, Human
gucuccagauauccuacacaac

SEQ ID NO: 236895 - RNA, 22 nt, Human
ugcaggcucaucucaagaguag

SEQ ID NO: 236896 - RNA, 22 nt, Human
cagcuguccuuccuggugggcg

SEQ ID NO: 236897 - RNA, 22 nt, Human
caaagcagagaacugucucauu

SEQ ID NO: 236898 - RNA, 22 nt, Human
cugcugggccuggucucugagg

SEQ ID NO: 236899 - RNA, 22 nt, Human
cacagguucaccucagguaggu

SEQ ID NO: 236900 - RNA, 22 nt, Human
aagggaugcaggaaagaagguu

SEQ ID NO: 236901 - RNA, 22 nt, Human
caggucucuuuugucacaccac

SEQ ID NO: 236902 - RNA, 22 nt, Human
gugggaguggggaagcagagug

SEQ ID NO: 236903 - RNA, 22 nt, Human
guuuguaugaauguuuuaugcu

SEQ ID NO: 236904 - RNA, 22 nt, Human
agacuggcuugcuuuacaagga

SEQ ID NO: 236905 - RNA, 20 nt, Human
cagcagagacccauggggag

SEQ ID NO: 236906 - RNA, 22 nt, Human
ccagcuggagccaagguggacu

SEQ ID NO: 236907 - RNA, 22 nt, Human
cuguggccuuggaccagcaucu

SEQ ID NO: 236908 - RNA, 22 nt, Human
ucugagaacuccggguuagauc

SEQ ID NO: 236909 - RNA, 22 nt, Human
gacauuuaaggcagucacuuaa

SEQ ID NO: 236910 - RNA, 22 nt, Human
cagcugaagaaagagugguuag

SEQ ID NO: 236911 - RNA, 22 nt, Human
uuaauuaaauucaugagcauug

SEQ ID NO: 236912 - RNA, 22 nt, Human
acagcuuuuaugggaccagcca

SEQ ID NO: 236913 - RNA, 19 nt, Human
ggcuccuguggcugcagcc

SEQ ID NO: 236914 - RNA, 22 nt, Human
uguguuucagaaccuucuuuca

SEQ ID NO: 236915 - RNA, 20 nt, Human
ccucugccuuucuagucuga

SEQ ID NO: 236916 - RNA, 22 nt, Human
guucauucugaaaagcagcuug

SEQ ID NO: 236917 - RNA, 22 nt, Human
caauguguuugcauauuaaaau

SEQ ID NO: 236918 - RNA, 22 nt, Human
gagaccccagcucagccuccag

SEQ ID NO: 236919 - RNA, 22 nt, Human
gcagugggaagguuggcacaug

SEQ ID NO: 236920 - RNA, 22 nt, Human
gggcugagagcuggaaucugag

SEQ ID NO: 236921 - RNA, 22 nt, Human
auauaauacaaccugcuaagug

SEQ ID NO: 236922 - RNA, 19 nt, Human
ugccuuggcugccaggaaa

SEQ ID NO: 236923 - RNA, 22 nt, Human
gcuuccuggagggagagagcug

SEQ ID NO: 236924 - RNA, 22 nt, Human
ggguacagagagaugagguaac

SEQ ID NO: 236925 - RNA, 22 nt, Human
ugaguacuuuauguuaguuauu

SEQ ID NO: 236926 - RNA, 22 nt, Human
guaggcagggcuguggggagaa

SEQ ID NO: 236927 - RNA, 22 nt, Human
cuccuucugaggcucuggguuc

SEQ ID NO: 236928 - RNA, 22 nt, Human
uugcaaauguuauacugccagu

SEQ ID NO: 236929 - RNA, 22 nt, Human
uuuggagagcagcuaggcccuu

SEQ ID NO: 236930 - RNA, 22 nt, Human
uguucuucuagauugccuuuua

SEQ ID NO: 236931 - RNA, 22 nt, Human
aaugggaaaagaguaugauuua

SEQ ID NO: 236932 - RNA, 22 nt, Human
uuguuucagcccagaucuuuac

SEQ ID NO: 236933 - RNA, 22 nt, Human
ucauuuguucucauucucuacu

SEQ ID NO: 236934 - RNA, 22 nt, Human
ugggcagugagaaaggucaggu

SEQ ID NO: 236935 - RNA, 22 nt, Human
uacagaauuagauuauuagaga

SEQ ID NO: 236936 - RNA, 22 nt, Human
uguccuauuucucugugcauga

SEQ ID NO: 236937 - RNA, 22 nt, Human
uuacagcagcagggacagacua

SEQ ID NO: 236938 - RNA, 22 nt, Human
ugcugggcacugucucugggga

SEQ ID NO: 236939 - RNA, 22 nt, Human
ugcagggaagcaaggguggcuc

SEQ ID NO: 236940 - RNA, 22 nt, Human
caggaaguggcugggcuggguu

SEQ ID NO: 236941 - RNA, 22 nt, Human
uccauagaaugcaguguaaauu

SEQ ID NO: 236942 - RNA, 22 nt, Human
accugcaggggugcucucuggg

SEQ ID NO: 236943 - RNA, 22 nt, Human
agcagaaagcuuauuuugacug

SEQ ID NO: 236944 - RNA, 22 nt, Human
aggcuacaauaauucccaugca

SEQ ID NO: 236945 - RNA, 22 nt, Human
aaguccagugauacuggcagga

SEQ ID NO: 236946 - RNA, 22 nt, Human
guuauaaauaccuaauaggauu

SEQ ID NO: 236947 - RNA, 22 nt, Human
uggucaggggcuucugagcugu

SEQ ID NO: 236948 - RNA, 19 nt, Human
guaacaguggacauuuuag

SEQ ID NO: 236949 - RNA, 22 nt, Human
cuguuuauacucaaaagauaca

SEQ ID NO: 236950 - RNA, 22 nt, Human
gcucuucuaaagaauguacagg

SEQ ID NO: 236951 - RNA, 22 nt, Human
cauuuuacugacucuugaauua

SEQ ID NO: 236952 - RNA, 22 nt, Human
cagcccugcagccauggccugu

SEQ ID NO: 236953 - RNA, 22 nt, Human
uuacuacauuguaacacaguac

SEQ ID NO: 236954 - RNA, 18 nt, Human
ggccucuggacuggcagc

SEQ ID NO: 236955 - RNA, 22 nt, Human
uggaggaaucagggcuuaggcu

SEQ ID NO: 236956 - RNA, 22 nt, Human
auugaaauugaugaaauucuug

SEQ ID NO: 236957 - RNA, 22 nt, Human
ugaggacauuggucaggacaug

SEQ ID NO: 236958 - RNA, 22 nt, Human
agcucccagggcugggcaaguu

SEQ ID NO: 236959 - RNA, 21 nt, Human
uucaguuucuuccucaucuau

SEQ ID NO: 236960 - RNA, 22 nt, Human
cuggauccaacagaguuggguu

SEQ ID NO: 236961 - RNA, 22 nt, Human
uugcucuguccagccagcaggu

SEQ ID NO: 236962 - RNA, 22 nt, Human
caaaguauauuggauugaaugg

SEQ ID NO: 236963 - RNA, 22 nt, Human
aggcugaguuucucauucucgc

SEQ ID NO: 236964 - RNA, 22 nt, Human
auguguccuuauaagaagaaga

SEQ ID NO: 236965 - RNA, 22 nt, Human
gcugaggcugggagcagccugu

SEQ ID NO: 236966 - RNA, 22 nt, Human
ugaggccugaagccugaaguga

SEQ ID NO: 236967 - RNA, 22 nt, Human
ccuguauucaauuuugugugau

SEQ ID NO: 236968 - RNA, 22 nt, Human
gguggccuccagggcauaggug

SEQ ID NO: 236969 - RNA, 22 nt, Human
cagggcuccccagagagccucu

SEQ ID NO: 236970 - RNA, 22 nt, Human
uaacaacaugcaauuuaaccuu

SEQ ID NO: 236971 - RNA, 22 nt, Human
uccugagagucaagaaugcagg

SEQ ID NO: 236972 - RNA, 22 nt, Human
cucaggcuccagacuuccgucc

SEQ ID NO: 236973 - RNA, 22 nt, Human
caaauacugaguuuauuuucaa

SEQ ID NO: 236974 - RNA, 22 nt, Human
aggccacagguggaagccagag

SEQ ID NO: 236975 - RNA, 22 nt, Human
ugaauuguggcuuuuuccaauu

SEQ ID NO: 236976 - RNA, 22 nt, Human
uguuuacuaugauguaaccuau

SEQ ID NO: 236977 - RNA, 22 nt, Human
gccucccuggcccacagcagcg

SEQ ID NO: 236978 - RNA, 23 nt, Human
ugguccugguugaggugggcccc

SEQ ID NO: 236979 - RNA, 22 nt, Human
uaaaugaaaggguuuaauuuau

SEQ ID NO: 236980 - RNA, 22 nt, Human
agauacacagcccugccaucac

SEQ ID NO: 236981 - RNA, 18 nt, Human
ugcuuuaugcuuauauaa

SEQ ID NO: 236982 - RNA, 22 nt, Human
cugugcucugagcgugggguug

SEQ ID NO: 236983 - RNA, 22 nt, Human
ccaaggcugucauucaguagcu

SEQ ID NO: 236984 - RNA, 23 nt, Human
acagggcuagcugacagugguau

SEQ ID NO: 236985 - RNA, 22 nt, Human
ggcaaaaaccauaauuacuuuu

SEQ ID NO: 236986 - RNA, 22 nt, Human
augauucagcccaauuuuucua

SEQ ID NO: 236987 - RNA, 22 nt, Human
guagaauuaccucucuaugucc

SEQ ID NO: 236988 - RNA, 22 nt, Human
aaaagaguguuucaacuuuggc

SEQ ID NO: 236989 - RNA, 22 nt, Human
gccaugcuugguaugcugugag

SEQ ID NO: 236990 - RNA, 22 nt, Human
ccacaagaugcaaacucuaaca

SEQ ID NO: 236991 - RNA, 22 nt, Human
uuacauuagacccacuuucaug

SEQ ID NO: 236992 - RNA, 22 nt, Human
aggaaaugcugaugcuccugga

SEQ ID NO: 236993 - RNA, 23 nt, Human
gggaaaggauaugauccuagggg

SEQ ID NO: 236994 - RNA, 22 nt, Human
aaggcuuccacuuuguuggguc

SEQ ID NO: 236995 - RNA, 22 nt, Human
uccucccuaaauccuagacugu

SEQ ID NO: 236996 - RNA, 22 nt, Human
ucugugcuaaugcuucacaaua

SEQ ID NO: 236997 - RNA, 22 nt, Human
ucucagcugccugcccugcucc

SEQ ID NO: 236998 - RNA, 21 nt, Human
cacaagacacauaggguguuu

SEQ ID NO: 236999 - RNA, 22 nt, Human
cuuuggcucaugguuuuaucca

SEQ ID NO: 237000 - RNA, 22 nt, Human
gaggcuggugguuaguuccauu

SEQ ID NO: 237001 - RNA, 22 nt, Human
ucugggcuugccugguugugca

SEQ ID NO: 237002 - RNA, 22 nt, Human
uuagugcaauucagagaacaau

SEQ ID NO: 237003 - RNA, 22 nt, Human
uuugggaagugggagcaaggug

SEQ ID NO: 237004 - RNA, 22 nt, Human
uuacaaagauuauauucaguua

SEQ ID NO: 237005 - RNA, 22 nt, Human
caggcccugaggauucggcggg

SEQ ID NO: 237006 - RNA, 22 nt, Human
uaagacagggucuauucuuagu

SEQ ID NO: 237007 - RNA, 22 nt, Human
uaaaacugcuugguauggucua

SEQ ID NO: 237008 - RNA, 22 nt, Human
gcaguaagaaagucaagcaguu

SEQ ID NO: 237009 - RNA, 22 nt, Human
gugaaacacccuccaaugcaca

SEQ ID NO: 237010 - RNA, 21 nt, Human
gcccagaguccucccacucca

SEQ ID NO: 237011 - RNA, 22 nt, Human
ggcuagggagacagagggcaug

SEQ ID NO: 237012 - RNA, 22 nt, Human
uuggguuuugauacaugucuaa

SEQ ID NO: 237013 - RNA, 22 nt, Human
cuacaacauagucuucuacaga

SEQ ID NO: 237014 - RNA, 22 nt, Human
cagguuuagguggacgugcagg

SEQ ID NO: 237015 - RNA, 22 nt, Human
auguuaaauagccauuuguuug

SEQ ID NO: 237016 - RNA, 22 nt, Human
aguguccuuaguuagcuuuggg

SEQ ID NO: 237017 - RNA, 22 nt, Human
gcaggcccagagucgcuggccu

SEQ ID NO: 237018 - RNA, 23 nt, Human
ucucaaaucuuugcguuguaucu

SEQ ID NO: 237019 - RNA, 22 nt, Human
aggcugcuggaggauuuaugcc

SEQ ID NO: 237020 - RNA, 19 nt, Human
cugguccugacugaggggu

SEQ ID NO: 237021 - RNA, 22 nt, Human
agcagguuuaaacucuaaugca

SEQ ID NO: 237022 - RNA, 22 nt, Human
ucuggguggugucuuccaagac

SEQ ID NO: 237023 - RNA, 22 nt, Human
uagcaacugcucuauucuagga

SEQ ID NO: 237024 - RNA, 22 nt, Human
accaggaaacucucgucuaguu

SEQ ID NO: 237025 - RNA, 22 nt, Human
auguucauuugacaaguaguga

SEQ ID NO: 237026 - RNA, 22 nt, Human
gcauucuuuuugacuccugguu

SEQ ID NO: 237027 - RNA, 22 nt, Human
cuaauacacccuauugcuuguu

SEQ ID NO: 237028 - RNA, 22 nt, Human
uacaaggcaaauccaugauguc

SEQ ID NO: 237029 - RNA, 22 nt, Human
agcuccuccugagugucuggga

SEQ ID NO: 237030 - RNA, 22 nt, Human
acuucuuuucaaaucaugcaaa

SEQ ID NO: 237031 - RNA, 22 nt, Human
agagaaacaggucagcugggag

SEQ ID NO: 237032 - RNA, 22 nt, Human
uguaaagauccuuagcaacauc

SEQ ID NO: 237033 - RNA, 18 nt, Human
caggaauggaugggauuu

SEQ ID NO: 237034 - RNA, 22 nt, Human
ggccacugccuccgccauggcu

SEQ ID NO: 237035 - RNA, 22 nt, Human
caaugacacucugcacagugcu

SEQ ID NO: 237036 - RNA, 22 nt, Human
aagccuuggggcuccucuguau

SEQ ID NO: 237037 - RNA, 22 nt, Human
agcagcagugugguuuggggaa

SEQ ID NO: 237038 - RNA, 22 nt, Human
accaggacuucauuagguucuu

SEQ ID NO: 237039 - RNA, 23 nt, Human
agcuccuguaagguggucgucac

SEQ ID NO: 237040 - RNA, 22 nt, Human
aagugcuguuucugaugaaugc

SEQ ID NO: 237041 - RNA, 22 nt, Human
uccuucuuugacaaguggcaga

SEQ ID NO: 237042 - RNA, 22 nt, Human
uccuuggagucaugauggaggu

SEQ ID NO: 237043 - RNA, 22 nt, Human
cucuggcacacuccuuccaggu

SEQ ID NO: 237044 - RNA, 22 nt, Human
agauguuaucauucagaguagc

SEQ ID NO: 237045 - RNA, 22 nt, Human
cuccaggaccagggcuccugga

SEQ ID NO: 237046 - RNA, 20 nt, Human
aggcucaggguguuuaggaa

SEQ ID NO: 237047 - RNA, 22 nt, Human
gaaacuuuggcuaaaagccaga

SEQ ID NO: 237048 - RNA, 22 nt, Human
auuaucuugauaaaauggcagu

SEQ ID NO: 237049 - RNA, 22 nt, Human
agaggaguuugcuggugugugc

SEQ ID NO: 237050 - RNA, 22 nt, Human
aucuagguuuggaagauagagu

SEQ ID NO: 237051 - RNA, 19 nt, Human
ggcugagcgccuuggcugc

SEQ ID NO: 237052 - RNA, 22 nt, Human
gucuucuuuucagucugcuugu

SEQ ID NO: 237053 - RNA, 22 nt, Human
uaggcuuccgagucuugguauc

SEQ ID NO: 237054 - RNA, 20 nt, Human
gcacagagaugagcaaagua

SEQ ID NO: 237055 - RNA, 22 nt, Human
cugagggaguuccugagcccac

SEQ ID NO: 237056 - RNA, 22 nt, Human
cugggccugucccugauugagg

SEQ ID NO: 237057 - RNA, 18 nt, Human
caguuacaccuucauuca

SEQ ID NO: 237058 - RNA, 22 nt, Human
gagggcugaaguguuuuaugag

SEQ ID NO: 237059 - RNA, 18 nt, Human
aaagcuguuauuccagaa

SEQ ID NO: 237060 - RNA, 22 nt, Human
aaauuccauuuugugacuauuc

SEQ ID NO: 237061 - RNA, 22 nt, Human
cacagaacugguuaauagcaga

SEQ ID NO: 237062 - RNA, 19 nt, Human
guguacagcucagugaauu

SEQ ID NO: 237063 - RNA, 22 nt, Human
uugguacauguuaaggaagagu

SEQ ID NO: 237064 - RNA, 19 nt, Human
uaggaauguagaauccuag

SEQ ID NO: 237065 - RNA, 22 nt, Human
aaucuucauaaaaaucuaguag

SEQ ID NO: 237066 - RNA, 22 nt, Human
ggcuggcuaucugugguugccu

SEQ ID NO: 237067 - RNA, 22 nt, Human
uuuuucaugagacuagaaguca

SEQ ID NO: 237068 - RNA, 17 nt, Human
gcccugccugcugcccu

SEQ ID NO: 237069 - RNA, 22 nt, Human
aauuguaagugcugaguuaagg

SEQ ID NO: 237070 - RNA, 22 nt, Human
uguggcucuccuccugcugccc

SEQ ID NO: 237071 - RNA, 22 nt, Human
cacugggucaggauagagccca

SEQ ID NO: 237072 - RNA, 22 nt, Human
ucagggacagggugcugcugcg

SEQ ID NO: 237073 - RNA, 22 nt, Human
ugcaugcugcacacaugcguag

SEQ ID NO: 237074 - RNA, 17 nt, Human
uagcauuuaucuuccuu

SEQ ID NO: 237075 - RNA, 22 nt, Human
acaagaaagguaggauucaggu

SEQ ID NO: 237076 - RNA, 21 nt, Human
aggagcucuccaaggacaaag

SEQ ID NO: 237077 - RNA, 22 nt, Human
cuggaggugggggcaagagugu

SEQ ID NO: 237078 - RNA, 23 nt, Human
ugguggggucuuggagacagcac

SEQ ID NO: 237079 - RNA, 21 nt, Human
agggucaggaaccaggguacc

SEQ ID NO: 237080 - RNA, 22 nt, Human
gcuccuggugcuguagagauuu

SEQ ID NO: 237081 - RNA, 22 nt, Human
uuacaugggcuugugaguccuu

SEQ ID NO: 237082 - RNA, 22 nt, Human
ggcuucccagcagagggcgcac

SEQ ID NO: 237083 - RNA, 22 nt, Human
cuuauuagaguuguguucuguu

SEQ ID NO: 237084 - RNA, 22 nt, Human
uccugggaacucggaaagcucu

SEQ ID NO: 237085 - RNA, 22 nt, Human
ggcaaaaaccgcaauaacuucu

SEQ ID NO: 237086 - RNA, 22 nt, Human
uuuauauaacagagacugcuau

SEQ ID NO: 237087 - RNA, 22 nt, Human
guguacaugagaaaucaacuuu

SEQ ID NO: 237088 - RNA, 22 nt, Human
ccaggacccugcaaacccuguu

SEQ ID NO: 237089 - RNA, 22 nt, Human
cuguaacagcugucagagcagg

SEQ ID NO: 237090 - RNA, 22 nt, Human
agggcagcuggaagguggcuuc

SEQ ID NO: 237091 - RNA, 22 nt, Human
guagcugccuuucuggcccagg

SEQ ID NO: 237092 - RNA, 22 nt, Human
aggucaggaggccucugccauu

SEQ ID NO: 237093 - RNA, 22 nt, Human
gaggcugaugcugccucacaga

SEQ ID NO: 237094 - RNA, 19 nt, Human
gggagcugaggucuuuggu

SEQ ID NO: 237095 - RNA, 22 nt, Human
augauucuggugagaaugagga

SEQ ID NO: 237096 - RNA, 22 nt, Human
cucuccagggaagcaguguacu

SEQ ID NO: 237097 - RNA, 22 nt, Human
gaaaaaugagcugaugucaggg

SEQ ID NO: 237098 - RNA, 22 nt, Human
uuccuggggggauagauuucac

SEQ ID NO: 237099 - RNA, 22 nt, Human
aauauugagaaccagcauguuu

SEQ ID NO: 237100 - RNA, 22 nt, Human
uagcacagcuucuugaugucac

SEQ ID NO: 237101 - RNA, 22 nt, Human
gaggcaagcccagugggucuaa

SEQ ID NO: 237102 - RNA, 22 nt, Human
uggccuagagaagccaaaagau

SEQ ID NO: 237103 - RNA, 22 nt, Human
gccaacuggcugaucucaaagc

SEQ ID NO: 237104 - RNA, 22 nt, Human
accccuuggaguccgcgcccag

SEQ ID NO: 237105 - RNA, 20 nt, Human
gggcuggcucaacuggaucc

SEQ ID NO: 237106 - RNA, 19 nt, Human
ggauucugcaguuuucaca

SEQ ID NO: 237107 - RNA, 22 nt, Human
acagaauugggguucuugggga

SEQ ID NO: 237108 - RNA, 22 nt, Human
agaggauguucuaggcacucau

SEQ ID NO: 237109 - RNA, 22 nt, Human
auaaugaggauuugcauauuag

SEQ ID NO: 237110 - RNA, 22 nt, Human
ugcuggcauuucaggacucacc

SEQ ID NO: 237111 - RNA, 22 nt, Human
ugagacuuaagaggucauguug

SEQ ID NO: 237112 - RNA, 22 nt, Human
uaggcuccaguguguggcgagu

SEQ ID NO: 237113 - RNA, 22 nt, Human
uccuagggauucaacacugaac

SEQ ID NO: 237114 - RNA, 22 nt, Human
aagcaucuauauuccacuguga

SEQ ID NO: 237115 - RNA, 22 nt, Human
gcuggcucccagaggccccagc

SEQ ID NO: 237116 - RNA, 23 nt, Human
ucucugaguuguacuuucccuug

SEQ ID NO: 237117 - RNA, 22 nt, Human
cucuguauagaaaggaaacauu

SEQ ID NO: 237118 - RNA, 22 nt, Human
agaggcaaggcaggauucuucu

SEQ ID NO: 237119 - RNA, 22 nt, Human
uccagcauucuuagaccucuau

SEQ ID NO: 237120 - RNA, 22 nt, Human
uccaggaggaggaaggcugcca

SEQ ID NO: 237121 - RNA, 22 nt, Human
uauugcuggaaaauggugugau

SEQ ID NO: 237122 - RNA, 22 nt, Human
aagggcagcuuaaauugguagc

SEQ ID NO: 237123 - RNA, 22 nt, Human
aguuuguaucaauuugcuuuau

SEQ ID NO: 237124 - RNA, 20 nt, Human
ugguggagagaagcuauuug

SEQ ID NO: 237125 - RNA, 22 nt, Human
gauuuuucaguauaaaauauau

SEQ ID NO: 237126 - RNA, 22 nt, Human
ugcuguuauacuuagcugguua

SEQ ID NO: 237127 - RNA, 20 nt, Human
uagacuuuucaucaaccuua

SEQ ID NO: 237128 - RNA, 22 nt, Human
ccagcacugcucucagacugag

SEQ ID NO: 237129 - RNA, 22 nt, Human
uaugaacacacuuuggaaguga

SEQ ID NO: 237130 - RNA, 22 nt, Human
uuauucagauuggcuacaggau

SEQ ID NO: 237131 - RNA, 22 nt, Human
gcacuucacaugccuuuuccug

SEQ ID NO: 237132 - RNA, 22 nt, Human
augccagaccauccaguuggga

SEQ ID NO: 237133 - RNA, 22 nt, Human
gggaaugugaaacaguaaggga

SEQ ID NO: 237134 - RNA, 22 nt, Human
ucucuguggguuucaccagcgc

SEQ ID NO: 237135 - RNA, 22 nt, Human
uguggcagauuuuauaaauugc

SEQ ID NO: 237136 - RNA, 22 nt, Human
ugcccauggaccaagcaagggg

SEQ ID NO: 237137 - RNA, 22 nt, Human
cucuuccuuucccuugagggug

SEQ ID NO: 237138 - RNA, 22 nt, Human
ugacugugccuguugaaugaau

SEQ ID NO: 237139 - RNA, 22 nt, Human
gcaaagcaagauucagauguag

SEQ ID NO: 237140 - RNA, 22 nt, Human
agccacagagcaggagaccuuu

SEQ ID NO: 237141 - RNA, 22 nt, Human
uggcagcaguggagguagaaag

SEQ ID NO: 237142 - RNA, 22 nt, Human
uuaucaguuguguguauacacg

SEQ ID NO: 237143 - RNA, 22 nt, Human
agugccaguuaauaagaaaugg

SEQ ID NO: 237144 - RNA, 22 nt, Human
gggggagaagauucugcugcuu

SEQ ID NO: 237145 - RNA, 22 nt, Human
agugauuuuaucaauuuacuca

SEQ ID NO: 237146 - RNA, 19 nt, Human
uguggcugagcacuccuua

SEQ ID NO: 237147 - RNA, 22 nt, Human
cugagcaggauauucacagcag

SEQ ID NO: 237148 - RNA, 22 nt, Human
uagcaggguuuugaagaggguu

SEQ ID NO: 237149 - RNA, 22 nt, Human
caaagcaguuuuaaucaaguag

SEQ ID NO: 237150 - RNA, 22 nt, Human
gggggcugaggcuguucugagg

SEQ ID NO: 237151 - RNA, 22 nt, Human
guggaggacaaaagaagccuuu

SEQ ID NO: 237152 - RNA, 22 nt, Human
ugcauguggaccccuggugccu

SEQ ID NO: 237153 - RNA, 22 nt, Human
cuguauuuaguuaaaaugcuaa

SEQ ID NO: 237154 - RNA, 22 nt, Human
acugaaguccacacauguagga

SEQ ID NO: 237155 - RNA, 22 nt, Human
uagcuacacugaggcugcuuaa

SEQ ID NO: 237156 - RNA, 22 nt, Human
gccuggaggggacagucucugg

SEQ ID NO: 237157 - RNA, 22 nt, Human
cugagguagccauggcccaagu

SEQ ID NO: 237158 - RNA, 22 nt, Human
aggcaggucacaugcuuggcga

SEQ ID NO: 237159 - RNA, 22 nt, Human
cagugucuacaguggcuggagg

SEQ ID NO: 237160 - RNA, 20 nt, Human
uuuggagagaaagaaguagu

SEQ ID NO: 237161 - RNA, 22 nt, Human
uuccaugacaccgagggaaguc

SEQ ID NO: 237162 - RNA, 22 nt, Human
uucagcacuguuauggauuugc

SEQ ID NO: 237163 - RNA, 21 nt, Human
ucaggcaggucccacugaaca

SEQ ID NO: 237164 - RNA, 22 nt, Human
agcaucugcuuaauggcuuaac

SEQ ID NO: 237165 - RNA, 22 nt, Human
agaugcugaagcugaggcaaca

SEQ ID NO: 237166 - RNA, 22 nt, Human
auacaaguuaaugagaaugaca

SEQ ID NO: 237167 - RNA, 22 nt, Human
cuguccagaaagggggcaacaa

SEQ ID NO: 237168 - RNA, 22 nt, Human
ggagacaggguugaaccacgca

SEQ ID NO: 237169 - RNA, 22 nt, Human
uagaaaugauuuugaugcuuca

SEQ ID NO: 237170 - RNA, 22 nt, Human
agcaggcaccagggcucguccu

SEQ ID NO: 237171 - RNA, 22 nt, Human
aauguguuuuaugagagaauau

SEQ ID NO: 237172 - RNA, 22 nt, Human
agcaaggccgagaggaugcuau

SEQ ID NO: 237173 - RNA, 22 nt, Human
cuucuugacuucugggugcccu

SEQ ID NO: 237174 - RNA, 22 nt, Human
cugccagggcauccuguggugg

SEQ ID NO: 237175 - RNA, 22 nt, Human
aauguacaaaccuucuuuguag

SEQ ID NO: 237176 - RNA, 22 nt, Human
ggaggagcacuugacggggucu

SEQ ID NO: 237177 - RNA, 22 nt, Human
agauuuacuggagucuuuggug

SEQ ID NO: 237178 - RNA, 22 nt, Human
guuuacaaauauuuuaaauggu

SEQ ID NO: 237179 - RNA, 22 nt, Human
ggaacugaaugucucgguauaa

SEQ ID NO: 237180 - RNA, 22 nt, Human
gagggaguaacguacuacagug

SEQ ID NO: 237181 - RNA, 22 nt, Human
gcugcccucccagggcaagcuu

SEQ ID NO: 237182 - RNA, 22 nt, Human
aggagcucagccugcagggagc

SEQ ID NO: 237183 - RNA, 22 nt, Human
uugacaggagccaaaauaggau

SEQ ID NO: 237184 - RNA, 22 nt, Human
aaguucuuagacaagcuugugg

SEQ ID NO: 237185 - RNA, 22 nt, Human
uggcuucucccuccccaucuag

SEQ ID NO: 237186 - RNA, 22 nt, Human
cuccugggcuaugucugcuugg

SEQ ID NO: 237187 - RNA, 22 nt, Human
agucaccuugaaaugucuugaa

SEQ ID NO: 237188 - RNA, 22 nt, Human
cuggaaguauaggggagaugau

SEQ ID NO: 237189 - RNA, 22 nt, Human
ggcuucuccuggaaguacagag

SEQ ID NO: 237190 - RNA, 22 nt, Human
ucagcagccgcagcugacucag

SEQ ID NO: 237191 - RNA, 22 nt, Human
ugcagacaagugcaucuaaccc

SEQ ID NO: 237192 - RNA, 22 nt, Human
aucauuucccuuuagaucacaa

SEQ ID NO: 237193 - RNA, 22 nt, Human
acucuggagauggaugucagga

SEQ ID NO: 237194 - RNA, 22 nt, Human
cggcugagcagugcugauggaa

SEQ ID NO: 237195 - RNA, 22 nt, Human
gagcuacagaguuugguguuca

SEQ ID NO: 237196 - RNA, 22 nt, Human
ucagggcaucaucaugaauaua

SEQ ID NO: 237197 - RNA, 22 nt, Human
caggaaauaucucaacacuuua

SEQ ID NO: 237198 - RNA, 22 nt, Human
accacuguacuauuugaguggc

SEQ ID NO: 237199 - RNA, 22 nt, Human
uggccucugaggcaccuuugcc

SEQ ID NO: 237200 - RNA, 22 nt, Human
gacugagaaacaguacauuacc

SEQ ID NO: 237201 - RNA, 22 nt, Human
gucugggaguuuggugcugccg

SEQ ID NO: 237202 - RNA, 22 nt, Human
uccaaaaaacguuugaauaguu

SEQ ID NO: 237203 - RNA, 22 nt, Human
caaagaguuuuuucauauaaug

SEQ ID NO: 237204 - RNA, 22 nt, Human
gcccacaggggaccugguggcu

SEQ ID NO: 237205 - RNA, 22 nt, Human
gucuauauauugcuugaauaau

SEQ ID NO: 237206 - RNA, 22 nt, Human
accagcucuggacaggcauuuc

SEQ ID NO: 237207 - RNA, 22 nt, Human
agccacagggggugagggacaa

SEQ ID NO: 237208 - RNA, 22 nt, Human
cucaacaugccuacucagucug

SEQ ID NO: 237209 - RNA, 22 nt, Human
aaauacauacacuguacguggc

SEQ ID NO: 237210 - RNA, 23 nt, Human
caugucugcuuucaugcuacaac

SEQ ID NO: 237211 - RNA, 23 nt, Human
gcagccaagagaccagggcaggc

SEQ ID NO: 237212 - RNA, 22 nt, Human
aacugucuuaauaacaaaagcu

SEQ ID NO: 237213 - RNA, 22 nt, Human
gcuccuggccagcacagggccc

SEQ ID NO: 237214 - RNA, 22 nt, Human
uuccaggcuauucccuuuggag

SEQ ID NO: 237215 - RNA, 22 nt, Human
cuguaggcuuagcuagaaguga

SEQ ID NO: 237216 - RNA, 22 nt, Human
acacaggcaaugugagugggag

SEQ ID NO: 237217 - RNA, 22 nt, Human
aauaacuucaucuucaggauag

SEQ ID NO: 237218 - RNA, 22 nt, Human
uccagcccucuggcccgcggug

SEQ ID NO: 237219 - RNA, 22 nt, Human
agagccaguuguuaagcacuua

SEQ ID NO: 237220 - RNA, 22 nt, Human
aguaaacauuuucauauuuucu

SEQ ID NO: 237221 - RNA, 22 nt, Human
uggccugggcaugaagcaucgu

SEQ ID NO: 237222 - RNA, 21 nt, Human
aggccaaguuggauuucuuca

SEQ ID NO: 237223 - RNA, 22 nt, Human
ucccaguguggcaggccaugga

SEQ ID NO: 237224 - RNA, 22 nt, Human
uccugggauacuaagaaauuuu

SEQ ID NO: 237225 - RNA, 22 nt, Human
cuucucagcaugguuacuguga

SEQ ID NO: 237226 - RNA, 22 nt, Human
gcagaaguggauucuacaauuu

SEQ ID NO: 237227 - RNA, 22 nt, Human
gggcugaccaaugccuugcuuu

SEQ ID NO: 237228 - RNA, 23 nt, Human
ugugggaauguuggagaggaaac

SEQ ID NO: 237229 - RNA, 19 nt, Human
cgguggcuugcagggaggu

SEQ ID NO: 237230 - RNA, 22 nt, Human
ugugugacacauugauaugugc

SEQ ID NO: 237231 - RNA, 22 nt, Human
cugggcagaguccggaagaugg

SEQ ID NO: 237232 - RNA, 22 nt, Human
acauacauguaaaggaaauuau

SEQ ID NO: 237233 - RNA, 22 nt, Human
caggggaagaugccaagggaga

SEQ ID NO: 237234 - RNA, 22 nt, Human
augacagaggagugcaggugau

SEQ ID NO: 237235 - RNA, 22 nt, Human
uccuucagggggccgccugcac

SEQ ID NO: 237236 - RNA, 22 nt, Human
gcaccagcugcuggguucuaga

SEQ ID NO: 237237 - RNA, 22 nt, Human
ccagaaagaaugaacugaaccc

SEQ ID NO: 237238 - RNA, 22 nt, Human
cuagaaccuaggaguacuaaag

SEQ ID NO: 237239 - RNA, 22 nt, Human
agcuccugucucaagggagccu

SEQ ID NO: 237240 - RNA, 22 nt, Human
uaggaacaguccuagaaaucug

SEQ ID NO: 237241 - RNA, 22 nt, Human
ucaggugucuaucuaaccuggu

SEQ ID NO: 237242 - RNA, 22 nt, Human
uucagagcuuagaauggacuac

SEQ ID NO: 237243 - RNA, 22 nt, Human
accugcagcugagaaaaugacu

SEQ ID NO: 237244 - RNA, 22 nt, Human
gcugggucucucccugguccug

SEQ ID NO: 237245 - RNA, 22 nt, Human
ccaguccugugugacccugcac

SEQ ID NO: 237246 - RNA, 22 nt, Human
uagaaacauguucuguucuguu

SEQ ID NO: 237247 - RNA, 22 nt, Human
gucugcuguagguaggacagca

SEQ ID NO: 237248 - RNA, 22 nt, Human
aagcacaugagcuauucaugcu

SEQ ID NO: 237249 - RNA, 22 nt, Human
cuuuuacaguggaccugccauu

SEQ ID NO: 237250 - RNA, 22 nt, Human
cugaaacuuuaguucugcaaca

SEQ ID NO: 237251 - RNA, 22 nt, Human
aagucugggccuccuucccaga

SEQ ID NO: 237252 - RNA, 22 nt, Human
cucucuggucccagauuccaga

SEQ ID NO: 237253 - RNA, 22 nt, Human
cacauguccuggcgcugagccc

SEQ ID NO: 237254 - RNA, 22 nt, Human
uccugcagcugauaaauacagu

SEQ ID NO: 237255 - RNA, 21 nt, Human
ucacguggucacaugagcuuu

SEQ ID NO: 237256 - RNA, 21 nt, Human
gcuggcugucccagggaagca

SEQ ID NO: 237257 - RNA, 19 nt, Human
uccugcugugugaagggga

SEQ ID NO: 237258 - RNA, 22 nt, Human
uuauucaccgcaggugcuuccc

SEQ ID NO: 237259 - RNA, 22 nt, Human
auguguucacgugcacaugugc

SEQ ID NO: 237260 - RNA, 22 nt, Human
agcugcaauucuggacauaguc

SEQ ID NO: 237261 - RNA, 22 nt, Human
cccccugcgcccggcacgucau

SEQ ID NO: 237262 - RNA, 22 nt, Human
aggguggcugaguagauggaag

SEQ ID NO: 237263 - RNA, 22 nt, Human
cugcccugcagcuccacggacu

SEQ ID NO: 237264 - RNA, 21 nt, Human
ggguccugggaugggauccag

SEQ ID NO: 237265 - RNA, 22 nt, Human
ucucagagauucagggagaagu

SEQ ID NO: 237266 - RNA, 22 nt, Human
aagcauuuggcaugaaacucuu

SEQ ID NO: 237267 - RNA, 22 nt, Human
gagggccaggcagcaagaaggc

SEQ ID NO: 237268 - RNA, 22 nt, Human
uggugagagcugaccgugcgag

SEQ ID NO: 237269 - RNA, 22 nt, Human
gucccuggagcugagcagugcu

SEQ ID NO: 237270 - RNA, 22 nt, Human
acucuggcaagcuuccacuucc

SEQ ID NO: 237271 - RNA, 22 nt, Human
agcccagcaguaagauuagaga

SEQ ID NO: 237272 - RNA, 22 nt, Human
auuagaaaaucuggaggugggg

SEQ ID NO: 237273 - RNA, 22 nt, Human
ccuggcugacagcuuaauucca

SEQ ID NO: 237274 - RNA, 22 nt, Human
ugaggaagccaaacagcuacac

SEQ ID NO: 237275 - RNA, 22 nt, Human
ugaggcucacgaacagaagacu

SEQ ID NO: 237276 - RNA, 22 nt, Human
gccuucaguaguauccucauga

SEQ ID NO: 237277 - RNA, 22 nt, Human
auguguuuaccaggggaacaug

SEQ ID NO: 237278 - RNA, 22 nt, Human
cucugggaaagauugugcaggc

SEQ ID NO: 237279 - RNA, 22 nt, Human
ucuuuauuuaagucuguuguaa

SEQ ID NO: 237280 - RNA, 22 nt, Human
uuuuaagaaauguaugacuguc

SEQ ID NO: 237281 - RNA, 22 nt, Human
agcaggcuaagggaccuguuua

SEQ ID NO: 237282 - RNA, 22 nt, Human
gagaggcugaaaucacaggagc

SEQ ID NO: 237283 - RNA, 22 nt, Human
cuccuggcuaugacuacauuuc

SEQ ID NO: 237284 - RNA, 22 nt, Human
aacuucauuccuuuuuaugacu

SEQ ID NO: 237285 - RNA, 22 nt, Human
uggcugagggcacuaugaagcc

SEQ ID NO: 237286 - RNA, 22 nt, Human
auauagaaggugcuauuuacau

SEQ ID NO: 237287 - RNA, 22 nt, Human
uuagaaaggaaucuucauuuca

SEQ ID NO: 237288 - RNA, 22 nt, Human
uccaguaugacugauguccuuc

SEQ ID NO: 237289 - RNA, 22 nt, Human
gcaggcauggucgcugccaggu

SEQ ID NO: 237290 - RNA, 22 nt, Human
cuuauuuugcugaugacccagg

SEQ ID NO: 237291 - RNA, 20 nt, Human
gauacacagcacagagggcc

SEQ ID NO: 237292 - RNA, 22 nt, Human
aaacacugugggacaucuuacu

SEQ ID NO: 237293 - RNA, 22 nt, Human
cagccagggagcaaagaguuga

SEQ ID NO: 237294 - RNA, 22 nt, Human
uaaaggcagccacugagcucaa

SEQ ID NO: 237295 - RNA, 22 nt, Human
gaacagugccagcacacaauaa

SEQ ID NO: 237296 - RNA, 22 nt, Human
caaaaaacaccugugugaguau

SEQ ID NO: 237297 - RNA, 22 nt, Human
uccauacacauuuauuuggccu

SEQ ID NO: 237298 - RNA, 22 nt, Human
uaugcagugguaucauuuuaaa

SEQ ID NO: 237299 - RNA, 22 nt, Human
gcuuugugaauuauuacucaca

SEQ ID NO: 237300 - RNA, 22 nt, Human
agccagucucucucccuggaga

SEQ ID NO: 237301 - RNA, 22 nt, Human
cccagugucaccaacaggacac

SEQ ID NO: 237302 - RNA, 21 nt, Human
ucaauacaggugcaugugucu

SEQ ID NO: 237303 - RNA, 22 nt, Human
gugcaaaaugauauccugaagc

SEQ ID NO: 237304 - RNA, 22 nt, Human
gagcucagccugaggccuggcu

SEQ ID NO: 237305 - RNA, 22 nt, Human
uaagcacuuuauaugcuuuauc

SEQ ID NO: 237306 - RNA, 22 nt, Human
cucaggccuugaagucuuuucu

SEQ ID NO: 237307 - RNA, 22 nt, Human
uaggcuccugaggacuccaugc

SEQ ID NO: 237308 - RNA, 22 nt, Human
aggagcugcauggauaccuggu

SEQ ID NO: 237309 - RNA, 22 nt, Human
ggugccaggcuguagucagggu

SEQ ID NO: 237310 - RNA, 22 nt, Human
caaauaguaugagcaaugauuc

SEQ ID NO: 237311 - RNA, 22 nt, Human
ggucacugagcuguaauucugu

SEQ ID NO: 237312 - RNA, 22 nt, Human
caugcaaaauguauuuuauuag

SEQ ID NO: 237313 - RNA, 20 nt, Human
ucucugagcuucucuugggg

SEQ ID NO: 237314 - RNA, 22 nt, Human
uccuggccuugcgucuugggag

SEQ ID NO: 237315 - RNA, 22 nt, Human
uucacauuuacugguuuguccg

SEQ ID NO: 237316 - RNA, 22 nt, Human
aggcccuguuaugagccacugu

SEQ ID NO: 237317 - RNA, 22 nt, Human
acugugcacaauucuaaguccu

SEQ ID NO: 237318 - RNA, 22 nt, Human
aagcaccugcaguugacaaaaa

SEQ ID NO: 237319 - RNA, 22 nt, Human
aaugcuuauaccuaaugaucuu

SEQ ID NO: 237320 - RNA, 22 nt, Human
gcugggagcaaguacucaucuu

SEQ ID NO: 237321 - RNA, 22 nt, Human
auagcaaaacccacugcauuac

SEQ ID NO: 237322 - RNA, 22 nt, Human
gcgugggcuggacugggaugaa

SEQ ID NO: 237323 - RNA, 21 nt, Human
uaggagcugauggggaaguag

SEQ ID NO: 237324 - RNA, 22 nt, Human
gugagagggcugggcucaugau

SEQ ID NO: 237325 - RNA, 22 nt, Human
uguccuuuguguaucuauagua

SEQ ID NO: 237326 - RNA, 22 nt, Human
uguagaaauuaguaagaucaac

SEQ ID NO: 237327 - RNA, 22 nt, Human
aagacauuggcauugacuguaa

SEQ ID NO: 237328 - RNA, 22 nt, Human
gaccuuuagugucauguuauau

SEQ ID NO: 237329 - RNA, 22 nt, Human
aaugucaaucucagagaacaca

SEQ ID NO: 237330 - RNA, 22 nt, Human
gcaccuuucuauauucaguggc

SEQ ID NO: 237331 - RNA, 22 nt, Human
gccaggcacaguucuaggugcu

SEQ ID NO: 237332 - RNA, 22 nt, Human
ugucacauucugaugugaggug

SEQ ID NO: 237333 - RNA, 19 nt, Human
aucugaggccucaucuggg

SEQ ID NO: 237334 - RNA, 22 nt, Human
uuuuguuuaaaauccuggaugg

SEQ ID NO: 237335 - RNA, 22 nt, Human
aguaccaugcuuccugacuggu

SEQ ID NO: 237336 - RNA, 22 nt, Human
ggaauaggauuuaccucuguaa

SEQ ID NO: 237337 - RNA, 22 nt, Human
cagaaagaccugggcucaagag

SEQ ID NO: 237338 - RNA, 22 nt, Human
auguggaucacagggguguguc

SEQ ID NO: 237339 - RNA, 22 nt, Human
cuucacagucuuuauuuccucc

SEQ ID NO: 237340 - RNA, 22 nt, Human
ugcucaggaaauaaugucugug

SEQ ID NO: 237341 - RNA, 22 nt, Human
gaggccaggggagucagcgucc

SEQ ID NO: 237342 - RNA, 22 nt, Human
auauggcauucuuuuuaagggu

SEQ ID NO: 237343 - RNA, 22 nt, Human
gcauaucaugacuucuaucuua

SEQ ID NO: 237344 - RNA, 22 nt, Human
uaccagcucacacaaucuuugu

SEQ ID NO: 237345 - RNA, 22 nt, Human
ugcugugagguugagaaggaag

SEQ ID NO: 237346 - RNA, 22 nt, Human
agcaggugggaucaagcuggca

SEQ ID NO: 237347 - RNA, 22 nt, Human
auacuacaaucauaauuguaca

SEQ ID NO: 237348 - RNA, 22 nt, Human
uggcagauuguaggcaguuagg

SEQ ID NO: 237349 - RNA, 22 nt, Human
gaaugcacacgugugugcaugc

SEQ ID NO: 237350 - RNA, 22 nt, Human
gcuggggacuccccaccauagc

SEQ ID NO: 237351 - RNA, 19 nt, Human
gugagcuucuuguaagagg

SEQ ID NO: 237352 - RNA, 22 nt, Human
gguguucuuaguggcacuggca

SEQ ID NO: 237353 - RNA, 22 nt, Human
gccaggcuggucuugaacuccu

SEQ ID NO: 237354 - RNA, 22 nt, Human
augcaaucauauggcauacagc

SEQ ID NO: 237355 - RNA, 22 nt, Human
ugcccuggggagcccagccagg

SEQ ID NO: 237356 - RNA, 22 nt, Human
ugugcuauuugacuguuugcua

SEQ ID NO: 237357 - RNA, 22 nt, Human
aggacagcaguuggugagguuc

SEQ ID NO: 237358 - RNA, 22 nt, Human
guacuaaacagagaaccaauau

SEQ ID NO: 237359 - RNA, 22 nt, Human
ugggcuucuggaguggggcaga

SEQ ID NO: 237360 - RNA, 22 nt, Human
agcugcagccgcagcuguggcc

SEQ ID NO: 237361 - RNA, 22 nt, Human
ggccagagucuauaugcagaca

SEQ ID NO: 237362 - RNA, 22 nt, Human
cuuaacaugggggguaagucug

SEQ ID NO: 237363 - RNA, 22 nt, Human
cagggacaauggcagagccuga

SEQ ID NO: 237364 - RNA, 22 nt, Human
acuguucaucucuuagaaagua

SEQ ID NO: 237365 - RNA, 18 nt, Human
aggagccuuugcacugga

SEQ ID NO: 237366 - RNA, 22 nt, Human
ucagugugaggucuuccacccg

SEQ ID NO: 237367 - RNA, 22 nt, Human
cuuuggaaaagcauaccaagga

SEQ ID NO: 237368 - RNA, 22 nt, Human
aauggcucugauguuguuguga

SEQ ID NO: 237369 - RNA, 22 nt, Human
gaaggcuuaugugugacuuucg

SEQ ID NO: 237370 - RNA, 22 nt, Human
uuauugagcaccuacuaugugu

SEQ ID NO: 237371 - RNA, 22 nt, Human
aggccucuucagggagcaugga

SEQ ID NO: 237372 - RNA, 22 nt, Human
cagacaucuuuuaucuucagga

SEQ ID NO: 237373 - RNA, 22 nt, Human
cuaggaaaugaauacaguacac

SEQ ID NO: 237374 - RNA, 22 nt, Human
gcgagaaacuaagugcccuuug

SEQ ID NO: 237375 - RNA, 22 nt, Human
acugugcaugaaccgaaacaaa

SEQ ID NO: 237376 - RNA, 22 nt, Human
aaguuacagucugcuugcugac

SEQ ID NO: 237377 - RNA, 20 nt, Human
uggagcuccagcguccaugu

SEQ ID NO: 237378 - RNA, 22 nt, Human
uguccuuuuccccaaauucacu

SEQ ID NO: 237379 - RNA, 22 nt, Human
ugcacaguaaacaugacuggag

SEQ ID NO: 237380 - RNA, 22 nt, Human
gccaggcucuuccauuuggguc

SEQ ID NO: 237381 - RNA, 22 nt, Human
ugcuucucagccugucuggaaa

SEQ ID NO: 237382 - RNA, 22 nt, Human
uagagcuuggacugcauuuucg

SEQ ID NO: 237383 - RNA, 20 nt, Human
acuaacauuugcaaggggcu

SEQ ID NO: 237384 - RNA, 22 nt, Human
aagggcaggagaagacggauau

SEQ ID NO: 237385 - RNA, 22 nt, Human
agugcagcucccucaccugcuu

SEQ ID NO: 237386 - RNA, 22 nt, Human
cugagccaugagccugcgccca

SEQ ID NO: 237387 - RNA, 22 nt, Human
ugcagcccaggcgucagguggu

SEQ ID NO: 237388 - RNA, 22 nt, Human
aacagucuuacagaaguagcca

SEQ ID NO: 237389 - RNA, 22 nt, Human
agaaugcuccagagcugaaaga

SEQ ID NO: 237390 - RNA, 22 nt, Human
uggguggaauaaaucaguucug

SEQ ID NO: 237391 - RNA, 22 nt, Human
cagucuggaucugugcugcugu

SEQ ID NO: 237392 - RNA, 22 nt, Human
ugaggccacaggaaagggcccg

SEQ ID NO: 237393 - RNA, 22 nt, Human
auuucccaugugaaucaauugg

SEQ ID NO: 237394 - RNA, 22 nt, Human
caaggccaguccauuuuggaag

SEQ ID NO: 237395 - RNA, 22 nt, Human
ggaauaaagaaucugguucccc

SEQ ID NO: 237396 - RNA, 22 nt, Human
caggaaugauauucgaggagau

SEQ ID NO: 237397 - RNA, 22 nt, Human
uucaugaaacuuaacuguuggg

SEQ ID NO: 237398 - RNA, 22 nt, Human
auuuccuguugcuuuugccacu

SEQ ID NO: 237399 - RNA, 22 nt, Human
aauuccucuaucuuucuucaag

SEQ ID NO: 237400 - RNA, 22 nt, Human
gaggacacaaaguggcugagau

SEQ ID NO: 237401 - RNA, 21 nt, Human
ugggagagcguugcuguccuc

SEQ ID NO: 237402 - RNA, 22 nt, Human
uccagccccggcuuccuuacag

SEQ ID NO: 237403 - RNA, 19 nt, Human
ggccaucucugccccagca

SEQ ID NO: 237404 - RNA, 22 nt, Human
uuugaaugcaggacauacagaa

SEQ ID NO: 237405 - RNA, 22 nt, Human
aaauauugguaggaugcuuguu

SEQ ID NO: 237406 - RNA, 22 nt, Human
aaaugcaucagcucauaagaga

SEQ ID NO: 237407 - RNA, 22 nt, Human
uuccuuuagugucauauacuuu

SEQ ID NO: 237408 - RNA, 22 nt, Human
ccagggugagugucauggguua

SEQ ID NO: 237409 - RNA, 22 nt, Human
ucaggacuucauuaccucaggu

SEQ ID NO: 237410 - RNA, 22 nt, Human
aggggcuggaguucgagguuac

SEQ ID NO: 237411 - RNA, 22 nt, Human
ucagggcucagcaucuggcauu

SEQ ID NO: 237412 - RNA, 22 nt, Human
ucccucucuagccuguucagua

SEQ ID NO: 237413 - RNA, 22 nt, Human
uucauguauuuaucauguaaau

SEQ ID NO: 237414 - RNA, 22 nt, Human
cuuuggcagccucugcuauuga

SEQ ID NO: 237415 - RNA, 22 nt, Human
agcccagcagaaaguccagccu

SEQ ID NO: 237416 - RNA, 17 nt, Human
aucugcauuucuaauga

SEQ ID NO: 237417 - RNA, 22 nt, Human
ucuccaggacugagcuccagcc

SEQ ID NO: 237418 - RNA, 22 nt, Human
cagagccauccaggugccuguu

SEQ ID NO: 237419 - RNA, 22 nt, Human
uucucuggccugaggcgaggcc

SEQ ID NO: 237420 - RNA, 22 nt, Human
caauucauguuaaacagaagca

SEQ ID NO: 237421 - RNA, 22 nt, Human
agcccuugcagacugucagcau

SEQ ID NO: 237422 - RNA, 22 nt, Human
gucugggguacuuucaucugau

SEQ ID NO: 237423 - RNA, 22 nt, Human
ggccugacuugaucggcucucu

SEQ ID NO: 237424 - RNA, 22 nt, Human
ggcaggcacaguaauacauguu

SEQ ID NO: 237425 - RNA, 22 nt, Human
agcgggucugcaagccuucccu

SEQ ID NO: 237426 - RNA, 22 nt, Human
uuugaaaaaggccuuugguaug

SEQ ID NO: 237427 - RNA, 22 nt, Human
gugcugggauuacaggugugag

SEQ ID NO: 237428 - RNA, 22 nt, Human
aagcucuuaugauauuuauuua

SEQ ID NO: 237429 - RNA, 22 nt, Human
uuuggaauagcauagaagcuca

SEQ ID NO: 237430 - RNA, 22 nt, Human
uuacagguuguguauucaguga

SEQ ID NO: 237431 - RNA, 22 nt, Human
aucuauuaugcugagaaacugu

SEQ ID NO: 237432 - RNA, 22 nt, Human
ucaagcugcaucagugcaguga

SEQ ID NO: 237433 - RNA, 22 nt, Human
ucaucugaagauugcuguucaa

SEQ ID NO: 237434 - RNA, 21 nt, Human
aggagggcacaaggccaggaa

SEQ ID NO: 237435 - RNA, 22 nt, Human
agcccuggcucccagcagcgcu

SEQ ID NO: 237436 - RNA, 22 nt, Human
agagcacugcugauuuacaguc

SEQ ID NO: 237437 - RNA, 22 nt, Human
cagcccuggccccagguggucu

SEQ ID NO: 237438 - RNA, 22 nt, Human
ccagagcccgggaccuggacuu

SEQ ID NO: 237439 - RNA, 22 nt, Human
cucaggcucuggccauccaagg

SEQ ID NO: 237440 - RNA, 22 nt, Human
ccugugggagcccaggcagaua

SEQ ID NO: 237441 - RNA, 22 nt, Human
ccagaugagaccacacugcugg

SEQ ID NO: 237442 - RNA, 22 nt, Human
cuaaaggcuaggucugaacuca

SEQ ID NO: 237443 - RNA, 19 nt, Human
uucacauuggaagaaguag

SEQ ID NO: 237444 - RNA, 22 nt, Human
caaguggggcagauucucuucc

SEQ ID NO: 237445 - RNA, 22 nt, Human
uuuccuacugcccuauacacac

SEQ ID NO: 237446 - RNA, 22 nt, Human
agggcacuggcuugcaaacuca

SEQ ID NO: 237447 - RNA, 22 nt, Human
gaaggcuaaaggggcagagguu

SEQ ID NO: 237448 - RNA, 22 nt, Human
ucccugggguuccuccagccac

SEQ ID NO: 237449 - RNA, 22 nt, Human
uauucacuuugggagagccauu

SEQ ID NO: 237450 - RNA, 22 nt, Human
aucuuauuuaacacagcaaaac

SEQ ID NO: 237451 - RNA, 18 nt, Human
aagcugcccucaggcagg

SEQ ID NO: 237452 - RNA, 22 nt, Human
aaggacuaaugaauagaugaau

SEQ ID NO: 237453 - RNA, 22 nt, Human
aauaacuugaagaucucuucca

SEQ ID NO: 237454 - RNA, 22 nt, Human
caaauacuaaacauaagauuuu

SEQ ID NO: 237455 - RNA, 22 nt, Human
uauuccuaagucccaacuacau

SEQ ID NO: 237456 - RNA, 20 nt, Human
uccaugaguuagagacuaua

SEQ ID NO: 237457 - RNA, 23 nt, Human
ucagagcaagaugauguaugagc

SEQ ID NO: 237458 - RNA, 22 nt, Human
cuggcuuuaaaaugcuccugga

SEQ ID NO: 237459 - RNA, 22 nt, Human
ugcaaauaaauuucuguucauu

SEQ ID NO: 237460 - RNA, 20 nt, Human
uagauacccaaugcucauca

SEQ ID NO: 237461 - RNA, 22 nt, Human
agauggcuuccuucucacugug

SEQ ID NO: 237462 - RNA, 22 nt, Human
guuaucuucuauuucucauacu

SEQ ID NO: 237463 - RNA, 20 nt, Human
uaagaugagcuauaagaagu

SEQ ID NO: 237464 - RNA, 22 nt, Human
ggaagagaauuucucucuuuuu

SEQ ID NO: 237465 - RNA, 22 nt, Human
ugcugaggucacggcggccaga

SEQ ID NO: 237466 - RNA, 22 nt, Human
gcugccuuugugagccaagggg

SEQ ID NO: 237467 - RNA, 22 nt, Human
gaacaaggauucccaaagaaga

SEQ ID NO: 237468 - RNA, 22 nt, Human
aauauccacacugugucccugc

SEQ ID NO: 237469 - RNA, 22 nt, Human
uuuccucugagugagcugggag

SEQ ID NO: 237470 - RNA, 22 nt, Human
gcucucccgcagccuggugggc

SEQ ID NO: 237471 - RNA, 22 nt, Human
uggcccagcucagggugggcgg

SEQ ID NO: 237472 - RNA, 22 nt, Human
acagguguagguacauuugcau

SEQ ID NO: 237473 - RNA, 22 nt, Human
uuuauucaagaugagguucaug

SEQ ID NO: 237474 - RNA, 22 nt, Human
aggacaguggacacuagucccu

SEQ ID NO: 237475 - RNA, 23 nt, Human
aacacauugcuaauuacauucaa

SEQ ID NO: 237476 - RNA, 22 nt, Human
ccuuggcugugcugcccuuugc

SEQ ID NO: 237477 - RNA, 22 nt, Human
caguccuuaaggaaacauuugu

SEQ ID NO: 237478 - RNA, 19 nt, Human
gcagagugggguggagggu

SEQ ID NO: 237479 - RNA, 22 nt, Human
agagccaaggccucagucucaa

SEQ ID NO: 237480 - RNA, 22 nt, Human
gaugaggaaaccaaggcucagg

SEQ ID NO: 237481 - RNA, 22 nt, Human
ucaggcuguauaucuugcacuc

SEQ ID NO: 237482 - RNA, 22 nt, Human
cuucucagucuugguuagagag

SEQ ID NO: 237483 - RNA, 22 nt, Human
gggucagggcugccugggcuca

SEQ ID NO: 237484 - RNA, 22 nt, Human
gcuugggagaggcuuccucuuu

SEQ ID NO: 237485 - RNA, 22 nt, Human
cacacaguaggcacucauuaau

SEQ ID NO: 237486 - RNA, 22 nt, Human
ggguggggcccaggaaaucuau

SEQ ID NO: 237487 - RNA, 22 nt, Human
ugacauguccugagaagauggc

SEQ ID NO: 237488 - RNA, 22 nt, Human
auaaagauuucuuuuucucuac

SEQ ID NO: 237489 - RNA, 22 nt, Human
acaaguuuuggaagucuuaagg

SEQ ID NO: 237490 - RNA, 22 nt, Human
guggcuauauuugaggauacgu

SEQ ID NO: 237491 - RNA, 22 nt, Human
ggugcccuguaaaagccaugca

SEQ ID NO: 237492 - RNA, 22 nt, Human
aguaucaaggaucuccagcacc

SEQ ID NO: 237493 - RNA, 22 nt, Human
ucaggagcuugguagugugauu

SEQ ID NO: 237494 - RNA, 22 nt, Human
accuuggaaaugcccauugccu

SEQ ID NO: 237495 - RNA, 21 nt, Human
cucugggacauuucuuagcag

SEQ ID NO: 237496 - RNA, 22 nt, Human
uccagagagaaaaacaagcuuu

SEQ ID NO: 237497 - RNA, 22 nt, Human
uaggccauucuuggagcuuacu

SEQ ID NO: 237498 - RNA, 22 nt, Human
agucucuuuugguuccaaaaau

SEQ ID NO: 237499 - RNA, 22 nt, Human
auaaauggcuuucauuccuagg

SEQ ID NO: 237500 - RNA, 22 nt, Human
uguguccucaugagguuugcag

SEQ ID NO: 237501 - RNA, 22 nt, Human
gggagcuggccuacuauuagau

SEQ ID NO: 237502 - RNA, 19 nt, Human
ggucagagagauccaggcu

SEQ ID NO: 237503 - RNA, 22 nt, Human
acagugucugacacguaggaag

SEQ ID NO: 237504 - RNA, 22 nt, Human
aagugugggacuagggcuccag

SEQ ID NO: 237505 - RNA, 22 nt, Human
gccaggaggggagaguguguca

SEQ ID NO: 237506 - RNA, 21 nt, Human
agcugccugcucuggaccugg

SEQ ID NO: 237507 - RNA, 22 nt, Human
aauggcugggaguguauuuugg

SEQ ID NO: 237508 - RNA, 22 nt, Human
uugcagcuuagugauguuaucu

SEQ ID NO: 237509 - RNA, 22 nt, Human
cuagugagucugaaugaguugc

SEQ ID NO: 237510 - RNA, 22 nt, Human
cuccuggcuucugaaaucgugg

SEQ ID NO: 237511 - RNA, 22 nt, Human
aaacugccacaagagggacauc

SEQ ID NO: 237512 - RNA, 22 nt, Human
uaugacaaaugauauauuuggc

SEQ ID NO: 237513 - RNA, 22 nt, Human
uaaauccagcuucuaauuuaga

SEQ ID NO: 237514 - RNA, 22 nt, Human
ccugggcagggcuggacucuca

SEQ ID NO: 237515 - RNA, 22 nt, Human
aggcaagcauugggaacagggc

SEQ ID NO: 237516 - RNA, 18 nt, Human
uuacuguuaucaaaacag

SEQ ID NO: 237517 - RNA, 22 nt, Human
uucaucuggaaguucccaaggc

SEQ ID NO: 237518 - RNA, 22 nt, Human
aaggcugguggauuaugagguc

SEQ ID NO: 237519 - RNA, 22 nt, Human
ugagcagaaaagaaugcugagc

SEQ ID NO: 237520 - RNA, 19 nt, Human
gcuuuuuguugucaaaggu

SEQ ID NO: 237521 - RNA, 22 nt, Human
caggccuuugcacgugcaguug

SEQ ID NO: 237522 - RNA, 22 nt, Human
gagcaccgccuccacgaugccc

SEQ ID NO: 237523 - RNA, 22 nt, Human
ucuucucuccugcuuggcagaa

SEQ ID NO: 237524 - RNA, 22 nt, Human
caggaaggggcucacucuggcc

SEQ ID NO: 237525 - RNA, 21 nt, Human
ggccucugccuugccccacuc

SEQ ID NO: 237526 - RNA, 22 nt, Human
ggcugugggugugacaggccuc

SEQ ID NO: 237527 - RNA, 22 nt, Human
auuucauugaaguuaauucuuc

SEQ ID NO: 237528 - RNA, 22 nt, Human
cugagggagagaauggggcaaa

SEQ ID NO: 237529 - RNA, 22 nt, Human
aaaugaguuuccucaauguccu

SEQ ID NO: 237530 - RNA, 22 nt, Human
uccuguuucaacccuuacacug

SEQ ID NO: 237531 - RNA, 22 nt, Human
ucucaggcaucuguguggcaca

SEQ ID NO: 237532 - RNA, 22 nt, Human
aagaaucucucuacuuuauuac

SEQ ID NO: 237533 - RNA, 22 nt, Human
cacaugugugcugaggacugug

SEQ ID NO: 237534 - RNA, 22 nt, Human
acuuuccuggcccuguccucug

SEQ ID NO: 237535 - RNA, 22 nt, Human
aauggcaguaguugcaugagag

SEQ ID NO: 237536 - RNA, 22 nt, Human
gaggcugacggcaccaucuucu

SEQ ID NO: 237537 - RNA, 22 nt, Human
gaggugccuggcgaugucucug

SEQ ID NO: 237538 - RNA, 22 nt, Human
gggcugacaccacccaggcgca

SEQ ID NO: 237539 - RNA, 22 nt, Human
uagcugaaugccuuggauuuuu

SEQ ID NO: 237540 - RNA, 21 nt, Human
ucauuuuuauugcuaccuugc

SEQ ID NO: 237541 - RNA, 22 nt, Human
cagcugcaggcugugcaggaag

SEQ ID NO: 237542 - RNA, 22 nt, Human
gcccugaggcaaaagaacaguc

SEQ ID NO: 237543 - RNA, 22 nt, Human
ucacuucuucccuugcacauau

SEQ ID NO: 237544 - RNA, 22 nt, Human
cugggaagcuucgagcaggaaa

SEQ ID NO: 237545 - RNA, 22 nt, Human
caauucuuggagaagaagcaua

SEQ ID NO: 237546 - RNA, 22 nt, Human
ggggagaauuaccaaaagcgcu

SEQ ID NO: 237547 - RNA, 22 nt, Human
ccuccuggcccugggccuggaa

SEQ ID NO: 237548 - RNA, 22 nt, Human
ccugugggcuugaguguagggu

SEQ ID NO: 237549 - RNA, 22 nt, Human
gccugaugagcuuccagcugag

SEQ ID NO: 237550 - RNA, 21 nt, Human
uauaacacacuucagcuucuc

SEQ ID NO: 237551 - RNA, 22 nt, Human
ugaaaguuacaggaaaacagau

SEQ ID NO: 237552 - RNA, 22 nt, Human
uucaaaccuucacuugcagagu

SEQ ID NO: 237553 - RNA, 22 nt, Human
ugcuggcuuccugugcacagca

SEQ ID NO: 237554 - RNA, 22 nt, Human
agcugagcauuugauccaccuc

SEQ ID NO: 237555 - RNA, 22 nt, Human
ugauacagucagcucacaauug

SEQ ID NO: 237556 - RNA, 22 nt, Human
ugccuggcacagagcagguggc

SEQ ID NO: 237557 - RNA, 22 nt, Human
uaaucguauguguaucaaauca

SEQ ID NO: 237558 - RNA, 22 nt, Human
gcaacaaguguaaacaugcauu

SEQ ID NO: 237559 - RNA, 22 nt, Human
ucagagucuuggcaauagguua

SEQ ID NO: 237560 - RNA, 22 nt, Human
guugugcagggcgaggaccuga

SEQ ID NO: 237561 - RNA, 22 nt, Human
uagauccagcuguuauguuaug

SEQ ID NO: 237562 - RNA, 22 nt, Human
uaauagaauaguggaaacauug

SEQ ID NO: 237563 - RNA, 22 nt, Human
cuacauuuguucaaauaagcug

SEQ ID NO: 237564 - RNA, 22 nt, Human
uccuuaccucaagcuugugguc

SEQ ID NO: 237565 - RNA, 22 nt, Human
ucagugcaaaaaaugggcuaga

SEQ ID NO: 237566 - RNA, 22 nt, Human
uaccaggcagcugcacagaggc

SEQ ID NO: 237567 - RNA, 22 nt, Human
ucugaauucaguauggucuuuc

SEQ ID NO: 237568 - RNA, 22 nt, Human
ugucugggauguaauuccugcc

SEQ ID NO: 237569 - RNA, 22 nt, Human
uauuccaaaauaguuaagcacu

SEQ ID NO: 237570 - RNA, 22 nt, Human
cagcaaauacuacuaguuuuua

SEQ ID NO: 237571 - RNA, 22 nt, Human
uccuucaaagcuccuagugagc

SEQ ID NO: 237572 - RNA, 22 nt, Human
guccacagagggcugggcaggc

SEQ ID NO: 237573 - RNA, 22 nt, Human
cuucugaagagguuaucauaga

SEQ ID NO: 237574 - RNA, 22 nt, Human
gcuggcugccugguuaugccuu

SEQ ID NO: 237575 - RNA, 22 nt, Human
aaggcauugcugauccucaggu

SEQ ID NO: 237576 - RNA, 22 nt, Human
aauaccuuuucagugcacaaaa

SEQ ID NO: 237577 - RNA, 22 nt, Human
uuuauaaaauagacugggucua

SEQ ID NO: 237578 - RNA, 22 nt, Human
agcccuggaagccacaguccua

SEQ ID NO: 237579 - RNA, 22 nt, Human
cagugagggcauucagugcugg

SEQ ID NO: 237580 - RNA, 22 nt, Human
guuguuuuauaauugauugcaa

SEQ ID NO: 237581 - RNA, 22 nt, Human
aagucagagcaacugagacauu

SEQ ID NO: 237582 - RNA, 23 nt, Human
aagguguucuguauuuaacucag

SEQ ID NO: 237583 - RNA, 19 nt, Human
acauuugucaagagaaggu

SEQ ID NO: 237584 - RNA, 22 nt, Human
ugcugggcacugucuagguacu

SEQ ID NO: 237585 - RNA, 22 nt, Human
gcuccuggcucucugagggcug

SEQ ID NO: 237586 - RNA, 20 nt, Human
ugcccagcaagagugcaguu

SEQ ID NO: 237587 - RNA, 19 nt, Human
ucucagagcccuagaggcc

SEQ ID NO: 237588 - RNA, 22 nt, Human
ucugcagauuuaucagcagcug

SEQ ID NO: 237589 - RNA, 22 nt, Human
uuauuucauugauuucuaagac

SEQ ID NO: 237590 - RNA, 22 nt, Human
caguauuuauggcuugaguauu

SEQ ID NO: 237591 - RNA, 22 nt, Human
gcagcugguuaaugggagaauu

SEQ ID NO: 237592 - RNA, 23 nt, Human
cggcugcucggccgaguccucgg

SEQ ID NO: 237593 - RNA, 22 nt, Human
uuaggaaagcauuguguaaaag

SEQ ID NO: 237594 - RNA, 22 nt, Human
gucaguuauucaauugguuuaa

SEQ ID NO: 237595 - RNA, 22 nt, Human
cccagcuggccagguggcuuug

SEQ ID NO: 237596 - RNA, 22 nt, Human
auuucuggauuuuggaugcugc

SEQ ID NO: 237597 - RNA, 22 nt, Human
uuauuagcugggcuucagggug

SEQ ID NO: 237598 - RNA, 22 nt, Human
acugagguuuacuugaaggaga

SEQ ID NO: 237599 - RNA, 22 nt, Human
ucugcccacaguccaauaguug

SEQ ID NO: 237600 - RNA, 22 nt, Human
gccugggacugcagauccccag

SEQ ID NO: 237601 - RNA, 22 nt, Human
aggccugccuggagccuggcug

SEQ ID NO: 237602 - RNA, 22 nt, Human
uucaauucugcucugaucuuag

SEQ ID NO: 237603 - RNA, 22 nt, Human
cagcuauuuucucauuaaggau

SEQ ID NO: 237604 - RNA, 22 nt, Human
cauagaaacuugcagcaagcac

SEQ ID NO: 237605 - RNA, 22 nt, Human
auauuuucacugaaccaaagua

SEQ ID NO: 237606 - RNA, 19 nt, Human
ugagacagggauucaggug

SEQ ID NO: 237607 - RNA, 22 nt, Human
cuggauguucuucugcaauuau

SEQ ID NO: 237608 - RNA, 22 nt, Human
ccauccuuggcucgcucucugu

SEQ ID NO: 237609 - RNA, 21 nt, Human
uuucuggguggcugcauagug

SEQ ID NO: 237610 - RNA, 22 nt, Human
guucacaucccagaaagagcau

SEQ ID NO: 237611 - RNA, 22 nt, Human
aucuagaaaguguugaagauca

SEQ ID NO: 237612 - RNA, 22 nt, Human
uucaaguaugagaaaggggacu

SEQ ID NO: 237613 - RNA, 22 nt, Human
gugcaauccucauagaacucau

SEQ ID NO: 237614 - RNA, 22 nt, Human
aagggcucucugcauugaaauu

SEQ ID NO: 237615 - RNA, 22 nt, Human
uugaggagcacuagucagguau

SEQ ID NO: 237616 - RNA, 22 nt, Human
uuacaaguuucuggcuucaucc

SEQ ID NO: 237617 - RNA, 22 nt, Human
cacacuguugaggacgagaugu

SEQ ID NO: 237618 - RNA, 22 nt, Human
ucuuugucugaacagggacauu

SEQ ID NO: 237619 - RNA, 22 nt, Human
auugaagagaagcuaaauagag

SEQ ID NO: 237620 - RNA, 22 nt, Human
acuuagauaacaaaccuguggu

SEQ ID NO: 237621 - RNA, 22 nt, Human
gaccucagugaauggucaugua

SEQ ID NO: 237622 - RNA, 22 nt, Human
cuuuggaaagugguucagguga

SEQ ID NO: 237623 - RNA, 22 nt, Human
uccagaauacucugaaaucauu

SEQ ID NO: 237624 - RNA, 22 nt, Human
augauacaucuuguuuauuuca

SEQ ID NO: 237625 - RNA, 22 nt, Human
ugcagaagugagucaugaggaa

SEQ ID NO: 237626 - RNA, 22 nt, Human
uucuccagagguggcuagaguu

SEQ ID NO: 237627 - RNA, 22 nt, Human
aaguguguauuguuuaugcugc

SEQ ID NO: 237628 - RNA, 22 nt, Human
gggagcaggacauaauagcaau

SEQ ID NO: 237629 - RNA, 22 nt, Human
uauuucuguaugcauaaaagga

SEQ ID NO: 237630 - RNA, 22 nt, Human
aaaggccaagcaugagguggac

SEQ ID NO: 237631 - RNA, 22 nt, Human
uuuagaguugaguauucauugg

SEQ ID NO: 237632 - RNA, 22 nt, Human
uaaugaaugagaauauaacaga

SEQ ID NO: 237633 - RNA, 21 nt, Human
augcaggcugcucagaagcaa

SEQ ID NO: 237634 - RNA, 21 nt, Human
uggcucugcucagagcagucc

SEQ ID NO: 237635 - RNA, 22 nt, Human
uaacacauaucuacaacaugug

SEQ ID NO: 237636 - RNA, 22 nt, Human
ccagauguuccccuggaggccu

SEQ ID NO: 237637 - RNA, 22 nt, Human
acagaauacucauaagaagggg

SEQ ID NO: 237638 - RNA, 22 nt, Human
uuuucauugagcaccugaguaa

SEQ ID NO: 237639 - RNA, 22 nt, Human
guggaauguccuugaucauaag

SEQ ID NO: 237640 - RNA, 22 nt, Human
ugcaggaguuccccucugccug

SEQ ID NO: 237641 - RNA, 22 nt, Human
cagguugguauucaucuccaca

SEQ ID NO: 237642 - RNA, 22 nt, Human
ucagguggaauuaauuaagaga

SEQ ID NO: 237643 - RNA, 22 nt, Human
augagggaggcaaggagaugcu

SEQ ID NO: 237644 - RNA, 22 nt, Human
aggcuggcauacauuuguucuu

SEQ ID NO: 237645 - RNA, 22 nt, Human
ucaggcugguggucagauggcu

SEQ ID NO: 237646 - RNA, 22 nt, Human
aaggugucaccagauuggcagg

SEQ ID NO: 237647 - RNA, 22 nt, Human
ccauguguugauucucugcaga

SEQ ID NO: 237648 - RNA, 22 nt, Human
auaauaaugaaagccacugugu

SEQ ID NO: 237649 - RNA, 22 nt, Human
aagauucacagagugaaugaaa

SEQ ID NO: 237650 - RNA, 22 nt, Human
ugauucaaauauuguguaugau

SEQ ID NO: 237651 - RNA, 22 nt, Human
cuaguuuaaagcagcugaaagg

SEQ ID NO: 237652 - RNA, 22 nt, Human
caguggcagagccguugccauc

SEQ ID NO: 237653 - RNA, 19 nt, Human
ccccaggguaggcuagggg

SEQ ID NO: 237654 - RNA, 22 nt, Human
aauucacaaaaccagauugcuu

SEQ ID NO: 237655 - RNA, 22 nt, Human
cuagaaggaagcccagcacuuc

SEQ ID NO: 237656 - RNA, 22 nt, Human
gccuggagaagauggaacuagc

SEQ ID NO: 237657 - RNA, 22 nt, Human
agagggggugucagcacugcag

SEQ ID NO: 237658 - RNA, 22 nt, Human
gcuuaaaucccaaugcuagacc

SEQ ID NO: 237659 - RNA, 22 nt, Human
auuuccaguccuaaugaucugg

SEQ ID NO: 237660 - RNA, 22 nt, Human
agggcaugugggagaggagccu

SEQ ID NO: 237661 - RNA, 22 nt, Human
auaugugugaugcauggacuaa

SEQ ID NO: 237662 - RNA, 22 nt, Human
guauuuucaagagcaguaguau

SEQ ID NO: 237663 - RNA, 22 nt, Human
aucccauuuccuaguacaucau

SEQ ID NO: 237664 - RNA, 22 nt, Human
cagugcagaggccagggaggau

SEQ ID NO: 237665 - RNA, 22 nt, Human
cauuguuucuggagggaucugu

SEQ ID NO: 237666 - RNA, 22 nt, Human
acguaauauaagaaaguguggu

SEQ ID NO: 237667 - RNA, 22 nt, Human
acagcuggaggucugugagcac

SEQ ID NO: 237668 - RNA, 22 nt, Human
gccucagaaucauuuaucaucu

SEQ ID NO: 237669 - RNA, 22 nt, Human
uggcuucucaaaauaacugguu

SEQ ID NO: 237670 - RNA, 22 nt, Human
ucauuugugugagugauuugac

SEQ ID NO: 237671 - RNA, 22 nt, Human
aucauacauguaacuaaguaaa

SEQ ID NO: 237672 - RNA, 22 nt, Human
ucagugcagaauagugaugcau

SEQ ID NO: 237673 - RNA, 22 nt, Human
ugagaugucauaguucaguuca

SEQ ID NO: 237674 - RNA, 22 nt, Human
acagggccucagccagggcaga

SEQ ID NO: 237675 - RNA, 22 nt, Human
uggcuucccauagcuugcuagu

SEQ ID NO: 237676 - RNA, 22 nt, Human
cacagagaauucccauauguga

SEQ ID NO: 237677 - RNA, 22 nt, Human
uguggcugaucaaagcgcucag

SEQ ID NO: 237678 - RNA, 22 nt, Human
uggcucaguaaucgagucuccu

SEQ ID NO: 237679 - RNA, 22 nt, Human
augguguagcaugugauaugac

SEQ ID NO: 237680 - RNA, 22 nt, Human
ggcaggugaccuggccucccag

SEQ ID NO: 237681 - RNA, 22 nt, Human
gcacagaauaacacucugggcu

SEQ ID NO: 237682 - RNA, 22 nt, Human
gugcucugccuggggucauggc

SEQ ID NO: 237683 - RNA, 22 nt, Human
ucuguuuaaugggaaugauacu

SEQ ID NO: 237684 - RNA, 22 nt, Human
agccaacaacucugagcccagu

SEQ ID NO: 237685 - RNA, 22 nt, Human
caggaaaugaacaggaaugaac

SEQ ID NO: 237686 - RNA, 23 nt, Human
uaaauuaccuuuccagugcaggg

SEQ ID NO: 237687 - RNA, 22 nt, Human
uacaucauaauaauacuuagaa

SEQ ID NO: 237688 - RNA, 22 nt, Human
uggcuucucgccugucaucccg

SEQ ID NO: 237689 - RNA, 22 nt, Human
auuuacuggaaaaacuaugagc

SEQ ID NO: 237690 - RNA, 22 nt, Human
uauuccagguauucuucaagag

SEQ ID NO: 237691 - RNA, 22 nt, Human
agcaggagcugugggaagaugg

SEQ ID NO: 237692 - RNA, 22 nt, Human
ucuaucagaguagaaggcaacg

SEQ ID NO: 237693 - RNA, 23 nt, Human
caggaaaucaauucuuccagcau

SEQ ID NO: 237694 - RNA, 22 nt, Human
acauacaucaaguaucacaaga

SEQ ID NO: 237695 - RNA, 22 nt, Human
ggacauuuuucuuccuacaaug

SEQ ID NO: 237696 - RNA, 22 nt, Human
guggauggacaugggcaagagg

SEQ ID NO: 237697 - RNA, 22 nt, Human
cuguaacuuaaugagaggcaga

SEQ ID NO: 237698 - RNA, 19 nt, Human
agcccagcuuauuugucag

SEQ ID NO: 237699 - RNA, 23 nt, Human
augguuuaugucacacuuuugau

SEQ ID NO: 237700 - RNA, 22 nt, Human
gccuugggggugaaagaggcua

SEQ ID NO: 237701 - RNA, 22 nt, Human
uucaguuucagucuugcaaaaa

SEQ ID NO: 237702 - RNA, 22 nt, Human
agacaaguucugugggucaccu

SEQ ID NO: 237703 - RNA, 22 nt, Human
cugcaggcuuccagggcugugg

SEQ ID NO: 237704 - RNA, 22 nt, Human
ggacugggaaucagggagaugc

SEQ ID NO: 237705 - RNA, 22 nt, Human
guguguggaaaguuuuccaugg

SEQ ID NO: 237706 - RNA, 22 nt, Human
cagggcuggcucaugaaaaguu

SEQ ID NO: 237707 - RNA, 22 nt, Human
ugaggccugcccuggggaaguu

SEQ ID NO: 237708 - RNA, 22 nt, Human
aggaggccugcagcugccauuc

SEQ ID NO: 237709 - RNA, 22 nt, Human
uuucaaauaccauaaaccuaau

SEQ ID NO: 237710 - RNA, 22 nt, Human
ucuucucuacaccagcagcccc

SEQ ID NO: 237711 - RNA, 22 nt, Human
aguauguugacuuauucuugga

SEQ ID NO: 237712 - RNA, 22 nt, Human
aucagagcccugaugacagacu

SEQ ID NO: 237713 - RNA, 22 nt, Human
cuuguauucugccuaaccuuca

SEQ ID NO: 237714 - RNA, 22 nt, Human
gcagcuggccccuuuccuuguu

SEQ ID NO: 237715 - RNA, 22 nt, Human
aguggcugaagcaucaaaggca

SEQ ID NO: 237716 - RNA, 22 nt, Human
auuuguagugaagugaaaauaa

SEQ ID NO: 237717 - RNA, 22 nt, Human
gugaccagugaugcugaggagu

SEQ ID NO: 237718 - RNA, 22 nt, Human
ugucuucagcaaaugccuuucu

SEQ ID NO: 237719 - RNA, 22 nt, Human
uggugcagguguugaugcagga

SEQ ID NO: 237720 - RNA, 22 nt, Human
gcuguaggaaugacauguaccu

SEQ ID NO: 237721 - RNA, 22 nt, Human
uccugcugccauuucaagugcu

SEQ ID NO: 237722 - RNA, 22 nt, Human
augcuaaauccagaagcaguca

SEQ ID NO: 237723 - RNA, 22 nt, Human
gccuguuuuccugcugugguug

SEQ ID NO: 237724 - RNA, 22 nt, Human
aggaguuauggcagaaucaaau

SEQ ID NO: 237725 - RNA, 22 nt, Human
aggagaggcaucaagaaaaucg

SEQ ID NO: 237726 - RNA, 18 nt, Human
aguguucucguuuuauaa

SEQ ID NO: 237727 - RNA, 22 nt, Human
uuucuuugagucucaguuugcu

SEQ ID NO: 237728 - RNA, 22 nt, Human
cagggggugguccaggcugcgc

SEQ ID NO: 237729 - RNA, 22 nt, Human
agccugccucagacucaggaua

SEQ ID NO: 237730 - RNA, 22 nt, Human
gggaaagaagaagagccauuuu

SEQ ID NO: 237731 - RNA, 22 nt, Human
gcuggaguccaguggcaugauc

SEQ ID NO: 237732 - RNA, 20 nt, Human
acaaagacuggaaaagcaag

SEQ ID NO: 237733 - RNA, 22 nt, Human
uguucuuucaguuagacacagu

SEQ ID NO: 237734 - RNA, 22 nt, Human
uccaggaccugacugggccugc

SEQ ID NO: 237735 - RNA, 22 nt, Human
uuccugggauuauugucaagca

SEQ ID NO: 237736 - RNA, 22 nt, Human
uuucuuuauccuccuuugcaca

SEQ ID NO: 237737 - RNA, 21 nt, Human
agcacagcauauccaauguca

SEQ ID NO: 237738 - RNA, 20 nt, Human
uuugagaccagucugcccaa

SEQ ID NO: 237739 - RNA, 22 nt, Human
ccuggcucugaaguccacauca

SEQ ID NO: 237740 - RNA, 22 nt, Human
uguggcagaggaggcagcgucc

SEQ ID NO: 237741 - RNA, 22 nt, Human
gagagacagcacacaguguggg

SEQ ID NO: 237742 - RNA, 22 nt, Human
uuuggcgucucucaggagcuca

SEQ ID NO: 237743 - RNA, 22 nt, Human
gagcccaggcagagguugcagu

SEQ ID NO: 237744 - RNA, 22 nt, Human
uuuaacagaugcuaugucuacc

SEQ ID NO: 237745 - RNA, 22 nt, Human
auauuaguuuggagacuacaau

SEQ ID NO: 237746 - RNA, 22 nt, Human
uugcuuauuugauuaaaugucu

SEQ ID NO: 237747 - RNA, 22 nt, Human
cugggagaucuccugagggcag

SEQ ID NO: 237748 - RNA, 22 nt, Human
uugcugagcuuuggcaaggaag

SEQ ID NO: 237749 - RNA, 22 nt, Human
aagcuacaguuuacccaugguu

SEQ ID NO: 237750 - RNA, 22 nt, Human
ugaaggcacuugccuaggggca

SEQ ID NO: 237751 - RNA, 22 nt, Human
uucaagucaaggaaagaggucu

SEQ ID NO: 237752 - RNA, 22 nt, Human
ggaaggcuccauacacaaagca

SEQ ID NO: 237753 - RNA, 22 nt, Human
ucaugugucugccaguguuuau

SEQ ID NO: 237754 - RNA, 22 nt, Human
gagaaggcuuccaaauucugug

SEQ ID NO: 237755 - RNA, 19 nt, Human
cugguuuagguagugaguc

SEQ ID NO: 237756 - RNA, 22 nt, Human
gaacacagucaagggcugcugu

SEQ ID NO: 237757 - RNA, 22 nt, Human
aaucuagaauuuuagggguaua

SEQ ID NO: 237758 - RNA, 22 nt, Human
ugagaauuuuuugucaugcauu

SEQ ID NO: 237759 - RNA, 22 nt, Human
ggccuuagcugucuuuccuuug

SEQ ID NO: 237760 - RNA, 22 nt, Human
guagggacccacagucuauauu

SEQ ID NO: 237761 - RNA, 22 nt, Human
cugcugggaaggucugcucagu

SEQ ID NO: 237762 - RNA, 22 nt, Human
gugcuucuuucuccucaagccu

SEQ ID NO: 237763 - RNA, 22 nt, Human
aaauuuuagaccaggcaaaacu

SEQ ID NO: 237764 - RNA, 22 nt, Human
aaguguuuggggaucauuuuaa

SEQ ID NO: 237765 - RNA, 22 nt, Human
aucuaacugggcuauuuuauug

SEQ ID NO: 237766 - RNA, 22 nt, Human
ucaaaaauaagauauucuggac

SEQ ID NO: 237767 - RNA, 22 nt, Human
uggaggacaggacuggacagcc

SEQ ID NO: 237768 - RNA, 21 nt, Human
ggcaucucuuaguaucaccau

SEQ ID NO: 237769 - RNA, 22 nt, Human
cccuuccucaaggagcuguguu

SEQ ID NO: 237770 - RNA, 22 nt, Human
gucugagcacccuggccuguca

SEQ ID NO: 237771 - RNA, 22 nt, Human
augcacauguaucuauauacaa

SEQ ID NO: 237772 - RNA, 22 nt, Human
agggagcuaggauccugaaggu

SEQ ID NO: 237773 - RNA, 22 nt, Human
gggcucugcgcucagcuccagc

SEQ ID NO: 237774 - RNA, 23 nt, Human
cucaacccuaguaagggaguagg

SEQ ID NO: 237775 - RNA, 22 nt, Human
uagggcaguuauaacauuagug

SEQ ID NO: 237776 - RNA, 22 nt, Human
agaaaguacagaugagacacuu

SEQ ID NO: 237777 - RNA, 21 nt, Human
ccagugcuacagcugccugac

SEQ ID NO: 237778 - RNA, 22 nt, Human
gugcaggggccuccccuugcug

SEQ ID NO: 237779 - RNA, 22 nt, Human
ccaggcagagugcuccagaaag

SEQ ID NO: 237780 - RNA, 22 nt, Human
agucaaauaucuuaaaaggcua

SEQ ID NO: 237781 - RNA, 22 nt, Human
ggcagccuccagggcacuggug

SEQ ID NO: 237782 - RNA, 22 nt, Human
cagagccaugguaugggcuugu

SEQ ID NO: 237783 - RNA, 22 nt, Human
aauuucaauuacuuuugcacca

SEQ ID NO: 237784 - RNA, 22 nt, Human
cuggcucauagagcagcuccaa

SEQ ID NO: 237785 - RNA, 22 nt, Human
aggaggccauucucucaguagc

SEQ ID NO: 237786 - RNA, 22 nt, Human
acaaggccaagcauucuagcaa

SEQ ID NO: 237787 - RNA, 22 nt, Human
caggcugccaaggcuggggagg

SEQ ID NO: 237788 - RNA, 22 nt, Human
ggccugagggugggcucucagu

SEQ ID NO: 237789 - RNA, 22 nt, Human
gccagacacuccccugggcagg

SEQ ID NO: 237790 - RNA, 22 nt, Human
agcucuuccugcaccuguggcu

SEQ ID NO: 237791 - RNA, 22 nt, Human
augaccccuaaaauuuacuguc

SEQ ID NO: 237792 - RNA, 22 nt, Human
acagggcagagggcaguuggua

SEQ ID NO: 237793 - RNA, 22 nt, Human
gcaaauacauguugagcaccua

SEQ ID NO: 237794 - RNA, 22 nt, Human
agggccaguucuaccucugaau

SEQ ID NO: 237795 - RNA, 21 nt, Human
ccuucuccauuacaguaagcu

SEQ ID NO: 237796 - RNA, 22 nt, Human
accagaaaggaauaauagaauu

SEQ ID NO: 237797 - RNA, 22 nt, Human
auauauacaacuagauuaaaag

SEQ ID NO: 237798 - RNA, 22 nt, Human
uucucaugaaacucgcuuccuc

SEQ ID NO: 237799 - RNA, 22 nt, Human
gcugccuugguagugaccaucu

SEQ ID NO: 237800 - RNA, 22 nt, Human
ugacagaggagcuggaaugauu

SEQ ID NO: 237801 - RNA, 22 nt, Human
cagaaauguuuauauguggugu

SEQ ID NO: 237802 - RNA, 22 nt, Human
uucaggaagguccuauagcaga

SEQ ID NO: 237803 - RNA, 22 nt, Human
uaucucagcuggaucaguggaa

SEQ ID NO: 237804 - RNA, 22 nt, Human
agccugagagccaagcugugca

SEQ ID NO: 237805 - RNA, 22 nt, Human
ugggagaggcugccaucuugca

SEQ ID NO: 237806 - RNA, 22 nt, Human
cagcaaaugaguggcagggcag

SEQ ID NO: 237807 - RNA, 22 nt, Human
ugacuucucuggccuggugcag

SEQ ID NO: 237808 - RNA, 23 nt, Human
ccuccucauaucuuugacuagug

SEQ ID NO: 237809 - RNA, 22 nt, Human
uuuauuggaacacagccaugac

SEQ ID NO: 237810 - RNA, 22 nt, Human
aggccuguuccuuccugggcac

SEQ ID NO: 237811 - RNA, 22 nt, Human
ugcucuggggagcuccucugcg

SEQ ID NO: 237812 - RNA, 22 nt, Human
uucagaaugcuauuucugaaau

SEQ ID NO: 237813 - RNA, 22 nt, Human
uggagcaggacggggaguggua

SEQ ID NO: 237814 - RNA, 22 nt, Human
uucuucaaauagcagggaguca

SEQ ID NO: 237815 - RNA, 22 nt, Human
aagucucugguugcuugcaugg

SEQ ID NO: 237816 - RNA, 21 nt, Human
aggcugcaugcaugagugugg

SEQ ID NO: 237817 - RNA, 22 nt, Human
acaggugguaaaauggacuguc

SEQ ID NO: 237818 - RNA, 22 nt, Human
gcuuuggaaggggcugguggag

SEQ ID NO: 237819 - RNA, 22 nt, Human
ucugacaggucauuuucuauag

SEQ ID NO: 237820 - RNA, 22 nt, Human
agucacagaaacccaggugugg

SEQ ID NO: 237821 - RNA, 22 nt, Human
ugcccuggagucaguggcuauu

SEQ ID NO: 237822 - RNA, 22 nt, Human
cuuauguaugcuacuuuguggu

SEQ ID NO: 237823 - RNA, 22 nt, Human
acauauguauauguacacaguc

SEQ ID NO: 237824 - RNA, 21 nt, Human
agagcuggccugccaggcccu

SEQ ID NO: 237825 - RNA, 22 nt, Human
acccucaguaaucgugcaguuu

SEQ ID NO: 237826 - RNA, 22 nt, Human
uaucuagaaauuucuuuuguug

SEQ ID NO: 237827 - RNA, 22 nt, Human
uagggcugcuuuguauucugcu

SEQ ID NO: 237828 - RNA, 22 nt, Human
aagcccucauccccaugggcgu

SEQ ID NO: 237829 - RNA, 22 nt, Human
cagcacuucagcauucagauuu

SEQ ID NO: 237830 - RNA, 19 nt, Human
gggcacagccuccccccag

SEQ ID NO: 237831 - RNA, 22 nt, Human
aagaguuucuuacuggcaucua

SEQ ID NO: 237832 - RNA, 22 nt, Human
augauucucauuuuauaaacuu

SEQ ID NO: 237833 - RNA, 22 nt, Human
aggcacaggaggugguaagaag

SEQ ID NO: 237834 - RNA, 22 nt, Human
uauacaguuaaguuucuucagu

SEQ ID NO: 237835 - RNA, 22 nt, Human
uucagcaaggcaugugcaggag

SEQ ID NO: 237836 - RNA, 22 nt, Human
uugcuuuaccugugguauauuu

SEQ ID NO: 237837 - RNA, 22 nt, Human
uauuucagggagaauaaauuug

SEQ ID NO: 237838 - RNA, 22 nt, Human
uuuagaacagauauuguaacuu

SEQ ID NO: 237839 - RNA, 22 nt, Human
cuucaguuaguuucaugugagc

SEQ ID NO: 237840 - RNA, 22 nt, Human
aguuagaauggauguugagagc

SEQ ID NO: 237841 - RNA, 22 nt, Human
uuggaacaaucacauccuugcu

SEQ ID NO: 237842 - RNA, 18 nt, Human
gauauauaggaggaaagu

SEQ ID NO: 237843 - RNA, 22 nt, Human
aagggcagcugacagaugcuua

SEQ ID NO: 237844 - RNA, 22 nt, Human
agggcagcaauuugguuccugg

SEQ ID NO: 237845 - RNA, 22 nt, Human
ugagccagauaagggcucacgc

SEQ ID NO: 237846 - RNA, 22 nt, Human
ggacagacuuuacagccccggg

SEQ ID NO: 237847 - RNA, 22 nt, Human
caauacuuccuuguuagaggca

SEQ ID NO: 237848 - RNA, 22 nt, Human
uuuagggaauagaagaucugaa

SEQ ID NO: 237849 - RNA, 22 nt, Human
uuggcugcucuguguuuaguau

SEQ ID NO: 237850 - RNA, 23 nt, Human
acagcuguugaaauuucaguggg

SEQ ID NO: 237851 - RNA, 22 nt, Human
cugccagcagaggccagcgcug

SEQ ID NO: 237852 - RNA, 22 nt, Human
uacagaaacagcgugguuagaa

SEQ ID NO: 237853 - RNA, 22 nt, Human
uccaagagaauacuggagagua

SEQ ID NO: 237854 - RNA, 22 nt, Human
uggcuucuugaucuuggacuug

SEQ ID NO: 237855 - RNA, 22 nt, Human
ucugagccaauuucugugucca

SEQ ID NO: 237856 - RNA, 22 nt, Human
uagacagauuuaaaggaaugga

SEQ ID NO: 237857 - RNA, 22 nt, Human
gugccugggguugagcuaugaa

SEQ ID NO: 237858 - RNA, 22 nt, Human
cugugggcauuugagugugggu

SEQ ID NO: 237859 - RNA, 22 nt, Human
uuucacaucagagguagauuag

SEQ ID NO: 237860 - RNA, 22 nt, Human
cacuguacuggguugaaggacg

SEQ ID NO: 237861 - RNA, 22 nt, Human
aaaauucauuccucagacugcc

SEQ ID NO: 237862 - RNA, 18 nt, Human
cuguugagauguggcuga

SEQ ID NO: 237863 - RNA, 22 nt, Human
ggcugcucggcagcuccugagc

SEQ ID NO: 237864 - RNA, 22 nt, Human
ucagggcaggcgagcagcugcu

SEQ ID NO: 237865 - RNA, 22 nt, Human
uugugaguagugccgcaauaaa

SEQ ID NO: 237866 - RNA, 22 nt, Human
guuuucuuccugcaauuggcau

SEQ ID NO: 237867 - RNA, 22 nt, Human
uugaaauacugcauuguucagu

SEQ ID NO: 237868 - RNA, 22 nt, Human
gcuuagaacauguggauugcaa

SEQ ID NO: 237869 - RNA, 22 nt, Human
cagagagcuuagugugcugcau

SEQ ID NO: 237870 - RNA, 22 nt, Human
aauaacaggcucaucagaugcu

SEQ ID NO: 237871 - RNA, 22 nt, Human
acaacauuauacauagaaagcu

SEQ ID NO: 237872 - RNA, 22 nt, Human
uagauucuuugcuagaucauug

SEQ ID NO: 237873 - RNA, 19 nt, Human
ccuuccuccccagggccau

SEQ ID NO: 237874 - RNA, 22 nt, Human
ugguggcacaagggagagaauc

SEQ ID NO: 237875 - RNA, 22 nt, Human
uccaggagucuagccucaggcc

SEQ ID NO: 237876 - RNA, 22 nt, Human
uggcaggaaccaggaggcucuc

SEQ ID NO: 237877 - RNA, 22 nt, Human
ugguacuuggaggcagaaaaau

SEQ ID NO: 237878 - RNA, 22 nt, Human
gcacaauaacagccaagguuau

SEQ ID NO: 237879 - RNA, 22 nt, Human
cagggcucaccacugggauccu

SEQ ID NO: 237880 - RNA, 22 nt, Human
ugcauuaucuuuaauguucuca

SEQ ID NO: 237881 - RNA, 22 nt, Human
augugcaaauccaaugugaaug

SEQ ID NO: 237882 - RNA, 19 nt, Human
gcugcucugggucucaucu

SEQ ID NO: 237883 - RNA, 22 nt, Human
aggcagugcucaagacagcagc

SEQ ID NO: 237884 - RNA, 22 nt, Human
ccaggucuuugacuaauaugcu

SEQ ID NO: 237885 - RNA, 22 nt, Human
ugauaaacuuagaaagaauguu

SEQ ID NO: 237886 - RNA, 22 nt, Human
cuucaguguccucucuaguaga

SEQ ID NO: 237887 - RNA, 22 nt, Human
uguuuucauggagaugguggcg

SEQ ID NO: 237888 - RNA, 22 nt, Human
ugacaggaggcuugaggccagg

SEQ ID NO: 237889 - RNA, 22 nt, Human
auuucuagcaaaggcucugcua

SEQ ID NO: 237890 - RNA, 22 nt, Human
ggccugagucacaucaggagag

SEQ ID NO: 237891 - RNA, 19 nt, Human
acaaauaguuacauauccu

SEQ ID NO: 237892 - RNA, 22 nt, Human
uaaugcuuuuccuucaaauaag

SEQ ID NO: 237893 - RNA, 22 nt, Human
gcugucuguggugucagcugac

SEQ ID NO: 237894 - RNA, 22 nt, Human
gaaaugcagaaccugagaccau

SEQ ID NO: 237895 - RNA, 22 nt, Human
ccuggccaggcucucagcacug

SEQ ID NO: 237896 - RNA, 22 nt, Human
auucugaguccaugggggcagg

SEQ ID NO: 237897 - RNA, 22 nt, Human
gcugccuucuggaggaagugaa

SEQ ID NO: 237898 - RNA, 22 nt, Human
uucuucuaaaugugcuuauuaa

SEQ ID NO: 237899 - RNA, 20 nt, Human
ucuggcucuuugcuccuccc

SEQ ID NO: 237900 - RNA, 22 nt, Human
ucaggcagaguuaauuugcucc

SEQ ID NO: 237901 - RNA, 22 nt, Human
uuaaaagggauguuaucuguaa

SEQ ID NO: 237902 - RNA, 18 nt, Human
ucauggcuuuagucccuc

SEQ ID NO: 237903 - RNA, 22 nt, Human
ccuggcaccuucacagacuacu

SEQ ID NO: 237904 - RNA, 16 nt, Human
gaccucagugcuggcu

SEQ ID NO: 237905 - RNA, 22 nt, Human
cugcaccauccuucaugcucug

SEQ ID NO: 237906 - RNA, 22 nt, Human
uaguaucuauuaguaacaagag

SEQ ID NO: 237907 - RNA, 22 nt, Human
uaaaugugucuauggacccgcc

SEQ ID NO: 237908 - RNA, 22 nt, Human
cagcuggccugaucccuguggc

SEQ ID NO: 237909 - RNA, 22 nt, Human
ccuucucuacuccugaugcaug

SEQ ID NO: 237910 - RNA, 22 nt, Human
ucauagaagcaccagaagauau

SEQ ID NO: 237911 - RNA, 22 nt, Human
uccuuaggcaauuugggagagu

SEQ ID NO: 237912 - RNA, 22 nt, Human
uccaggagacacaagguacaua

SEQ ID NO: 237913 - RNA, 22 nt, Human
ggggugugaguagagcugggga

SEQ ID NO: 237914 - RNA, 22 nt, Human
uacagaggguaauugaucaagg

SEQ ID NO: 237915 - RNA, 20 nt, Human
cuuccaccagggccgcugau

SEQ ID NO: 237916 - RNA, 22 nt, Human
uaucuauuccaaauaucagcgu

SEQ ID NO: 237917 - RNA, 22 nt, Human
ugccaggcuaaguggaggacuu

SEQ ID NO: 237918 - RNA, 22 nt, Human
ucugagacugcagugagccgcu

SEQ ID NO: 237919 - RNA, 22 nt, Human
uaccuucaccagcgaauguuug

SEQ ID NO: 237920 - RNA, 22 nt, Human
aaacucuguugagauaauauuu

SEQ ID NO: 237921 - RNA, 22 nt, Human
aguggcacaauuuugacucccc

SEQ ID NO: 237922 - RNA, 22 nt, Human
guagacagguuauaaaucagug

SEQ ID NO: 237923 - RNA, 22 nt, Human
gcaagcugaugugauagugaaa

SEQ ID NO: 237924 - RNA, 22 nt, Human
aacagacauauuuuuaauaugc

SEQ ID NO: 237925 - RNA, 22 nt, Human
ugugcacauucuaggacuagua

SEQ ID NO: 237926 - RNA, 22 nt, Human
agggcuccaggggaccaucagu

SEQ ID NO: 237927 - RNA, 22 nt, Human
ucagauauggagucuaaaacca

SEQ ID NO: 237928 - RNA, 22 nt, Human
ccugggagagucuguggucucc

SEQ ID NO: 237929 - RNA, 22 nt, Human
aacagauauaggcagaacuuug

SEQ ID NO: 237930 - RNA, 22 nt, Human
augaggcucucaggggagcugu

SEQ ID NO: 237931 - RNA, 22 nt, Human
accaugugaucaaaacaaaucc

SEQ ID NO: 237932 - RNA, 22 nt, Human
cugggccuuaugaguaccugga

SEQ ID NO: 237933 - RNA, 22 nt, Human
uguagaaggcuauagacuagga

SEQ ID NO: 237934 - RNA, 22 nt, Human
acucugugccaggcacuuuggg

SEQ ID NO: 237935 - RNA, 22 nt, Human
aucauguacuugacaaauaugu

SEQ ID NO: 237936 - RNA, 22 nt, Human
accaggaggaaguguuaaugau

SEQ ID NO: 237937 - RNA, 22 nt, Human
gugagggagguagauuucauca

SEQ ID NO: 237938 - RNA, 22 nt, Human
aagugagguuucugcuuucaga

SEQ ID NO: 237939 - RNA, 22 nt, Human
acagggagauaucuucaauauc

SEQ ID NO: 237940 - RNA, 22 nt, Human
caggagccagaggcggauggag

SEQ ID NO: 237941 - RNA, 22 nt, Human
gcucaggcuucuucuauaaaga

SEQ ID NO: 237942 - RNA, 22 nt, Human
cuguggcucuccaauggaggga

SEQ ID NO: 237943 - RNA, 19 nt, Human
uucugcuguuccuaggcug

SEQ ID NO: 237944 - RNA, 22 nt, Human
cacaguaucuuuugaguaagca

SEQ ID NO: 237945 - RNA, 22 nt, Human
agcuucucuggucuucugccaa

SEQ ID NO: 237946 - RNA, 22 nt, Human
uuggcagggcaucagacacgug

SEQ ID NO: 237947 - RNA, 22 nt, Human
gcaggcugauagaggauuccau

SEQ ID NO: 237948 - RNA, 22 nt, Human
aagagacuggaaacuaggguca

SEQ ID NO: 237949 - RNA, 22 nt, Human
gucuggcauucuuccuggagaa

SEQ ID NO: 237950 - RNA, 22 nt, Human
caggaaaaaugccaggagucag

SEQ ID NO: 237951 - RNA, 22 nt, Human
uaucacuacacuucagcuuuaa

SEQ ID NO: 237952 - RNA, 22 nt, Human
gcugcaccagcugcacccagua

SEQ ID NO: 237953 - RNA, 22 nt, Human
gcugggcucuuaucaccuguac

SEQ ID NO: 237954 - RNA, 22 nt, Human
auguguagaacuguaaugccca

SEQ ID NO: 237955 - RNA, 22 nt, Human
auugcuggcagcuggaucugca

SEQ ID NO: 237956 - RNA, 22 nt, Human
acucuggggugaugucucugag

SEQ ID NO: 237957 - RNA, 22 nt, Human
guuuauaauccaacucugcucc

SEQ ID NO: 237958 - RNA, 22 nt, Human
uucaguuucccuaaagccaauu

SEQ ID NO: 237959 - RNA, 21 nt, Human
cacagaggcgcuguauggcug

SEQ ID NO: 237960 - RNA, 22 nt, Human
ugaaaucauugccaaguauuga

SEQ ID NO: 237961 - RNA, 22 nt, Human
cagaggggauaacagguguaga

SEQ ID NO: 237962 - RNA, 22 nt, Human
gaggcagcauucgcauagacag

SEQ ID NO: 237963 - RNA, 22 nt, Human
aaaaacuguaauuacuuuugca

SEQ ID NO: 237964 - RNA, 22 nt, Human
uuugauuuacuggauauucuca

SEQ ID NO: 237965 - RNA, 22 nt, Human
ucuggacuaacagcagccucag

SEQ ID NO: 237966 - RNA, 22 nt, Human
ggaggccucaguaccuugcuuu

SEQ ID NO: 237967 - RNA, 20 nt, Human
auacacauauucuugcaacu

SEQ ID NO: 237968 - RNA, 23 nt, Human
uggggagaguuacccuggaagcg

SEQ ID NO: 237969 - RNA, 22 nt, Human
gcaggcagagaaggaacauuua

SEQ ID NO: 237970 - RNA, 22 nt, Human
gcagagccaggagagacccuug

SEQ ID NO: 237971 - RNA, 22 nt, Human
aaauauacggucccuaacaguc

SEQ ID NO: 237972 - RNA, 18 nt, Human
ucaagacaucaugaaaua

SEQ ID NO: 237973 - RNA, 22 nt, Human
aaaauccuuagccgagugaggu

SEQ ID NO: 237974 - RNA, 22 nt, Human
cuccugugcaccuccagcggca

SEQ ID NO: 237975 - RNA, 22 nt, Human
acuuucugccuuacaggagucc

SEQ ID NO: 237976 - RNA, 22 nt, Human
agagucugaaugcucagaguug

SEQ ID NO: 237977 - RNA, 22 nt, Human
cagacagaaggcuccuugaggu

SEQ ID NO: 237978 - RNA, 22 nt, Human
uccuuucuaucuuggguaucua

SEQ ID NO: 237979 - RNA, 23 nt, Human
acagacauuccauaauguacacc

SEQ ID NO: 237980 - RNA, 22 nt, Human
accuuucugcaaguucugggac

SEQ ID NO: 237981 - RNA, 22 nt, Human
acucaggccuccuucuguccuu

SEQ ID NO: 237982 - RNA, 22 nt, Human
gaacaguaaauuuaugcagcac

SEQ ID NO: 237983 - RNA, 22 nt, Human
cagcuuuaccaauauuuggaaa

SEQ ID NO: 237984 - RNA, 22 nt, Human
aguauucagcaaacgugaacag

SEQ ID NO: 237985 - RNA, 22 nt, Human
agaauccugaugaaaaggagag

SEQ ID NO: 237986 - RNA, 22 nt, Human
cucuggaaaauugugugggggu

SEQ ID NO: 237987 - RNA, 22 nt, Human
uggccacacugcccccacuggg

SEQ ID NO: 237988 - RNA, 22 nt, Human
uaaagugcuuaugauaaccaag

SEQ ID NO: 237989 - RNA, 22 nt, Human
ggcuggcugugcccuguacucu

SEQ ID NO: 237990 - RNA, 18 nt, Human
aucuuguuuuuggauuaa

SEQ ID NO: 237991 - RNA, 22 nt, Human
uugccagggccagugggggugu

SEQ ID NO: 237992 - RNA, 22 nt, Human
ucuccaggagaaauaugaagga

SEQ ID NO: 237993 - RNA, 22 nt, Human
guuccagguggucacagagcuc

SEQ ID NO: 237994 - RNA, 19 nt, Human
cuucuucuuggcagccaag

SEQ ID NO: 237995 - RNA, 22 nt, Human
gucuggaaggaggagauggagc

SEQ ID NO: 237996 - RNA, 22 nt, Human
aguguucucagcuacuagagag

SEQ ID NO: 237997 - RNA, 22 nt, Human
uggcagguggcacagccuggga

SEQ ID NO: 237998 - RNA, 22 nt, Human
guccagagagaucuucugauag

SEQ ID NO: 237999 - RNA, 22 nt, Human
ccacucagcacaguggaugcag

SEQ ID NO: 238000 - RNA, 22 nt, Human
ccucagucuugaauuagccaga

SEQ ID NO: 238001 - RNA, 22 nt, Human
gaggauggaggugugagcuaug

SEQ ID NO: 238002 - RNA, 22 nt, Human
aagauuuacuagcauaauagcu

SEQ ID NO: 238003 - RNA, 22 nt, Human
auccccuuaucccaggcugagc

SEQ ID NO: 238004 - RNA, 22 nt, Human
uagaaucugauggcccgucugg

SEQ ID NO: 238005 - RNA, 22 nt, Human
auggcugcccacguuggugcuu

SEQ ID NO: 238006 - RNA, 22 nt, Human
uggcuucagacuucugcuacgu

SEQ ID NO: 238007 - RNA, 22 nt, Human
uggcucaguuuagcagcucagu

SEQ ID NO: 238008 - RNA, 22 nt, Human
agugcuaaugugcaauauagag

SEQ ID NO: 238009 - RNA, 22 nt, Human
guggcccagcccuacagaggac

SEQ ID NO: 238010 - RNA, 22 nt, Human
gaaucuaaaaacgggcuugguu

SEQ ID NO: 238011 - RNA, 22 nt, Human
caguauguuugggagacaugac

SEQ ID NO: 238012 - RNA, 22 nt, Human
gaauugcuaaccaauucaaaau

SEQ ID NO: 238013 - RNA, 22 nt, Human
caucuccuggcagcuguuagga

SEQ ID NO: 238014 - RNA, 22 nt, Human
uuuuaauugcaauuaugguccc

SEQ ID NO: 238015 - RNA, 22 nt, Human
uuggaagcaguguacacuguac

SEQ ID NO: 238016 - RNA, 22 nt, Human
gagaguggauggagcugcgaag

SEQ ID NO: 238017 - RNA, 22 nt, Human
cugcuuuagguggaauguucua

SEQ ID NO: 238018 - RNA, 22 nt, Human
aaaauucauggcuugggaaaag

SEQ ID NO: 238019 - RNA, 22 nt, Human
ugcuggagugagugguuucuua

SEQ ID NO: 238020 - RNA, 22 nt, Human
cuccucagaacagccuuggcug

SEQ ID NO: 238021 - RNA, 22 nt, Human
aguccagaccccggcagcuggu

SEQ ID NO: 238022 - RNA, 22 nt, Human
aggaggcagaugcuuggcugua

SEQ ID NO: 238023 - RNA, 22 nt, Human
ucucagagcaucauuuucuuag

SEQ ID NO: 238024 - RNA, 22 nt, Human
aaauagcuacaugaucucuagg

SEQ ID NO: 238025 - RNA, 22 nt, Human
ugucaguuuggcucuaaaguuu

SEQ ID NO: 238026 - RNA, 22 nt, Human
gagucaggaugcaaggggaugg

SEQ ID NO: 238027 - RNA, 22 nt, Human
aggguggcuuaauuccaaaggg

SEQ ID NO: 238028 - RNA, 22 nt, Human
auuauuauuguugauguuaggg

SEQ ID NO: 238029 - RNA, 22 nt, Human
gggcaugccugcgcagugcaug

SEQ ID NO: 238030 - RNA, 22 nt, Human
ugaugaguaaauaagguugagu

SEQ ID NO: 238031 - RNA, 22 nt, Human
cagcuggccaaucagggcgccc

SEQ ID NO: 238032 - RNA, 22 nt, Human
cagcuggcgccuggggaccaga

SEQ ID NO: 238033 - RNA, 22 nt, Human
uagugucaucguugcagcugag

SEQ ID NO: 238034 - RNA, 22 nt, Human
ugggacacaaaccagaccagga

SEQ ID NO: 238035 - RNA, 22 nt, Human
auugcaaagcauugugagcgca

SEQ ID NO: 238036 - RNA, 22 nt, Human
cuguagcaguguuccagcauug

SEQ ID NO: 238037 - RNA, 22 nt, Human
agguagagcuccaguagaaaau

SEQ ID NO: 238038 - RNA, 22 nt, Human
ucauuugugcaauguagaugaa

SEQ ID NO: 238039 - RNA, 22 nt, Human
uucuguggguaauaccucauac

SEQ ID NO: 238040 - RNA, 22 nt, Human
gcuuuaaugaagucacgcaaag

SEQ ID NO: 238041 - RNA, 22 nt, Human
ggugugggcccugaugucagca

SEQ ID NO: 238042 - RNA, 22 nt, Human
acaaugcaauaggagcuagaaa

SEQ ID NO: 238043 - RNA, 22 nt, Human
gcucccagcaauugaggcagcc

SEQ ID NO: 238044 - RNA, 22 nt, Human
gcucugaggcugugaggugcug

SEQ ID NO: 238045 - RNA, 22 nt, Human
agcaaacaguuucuggggaucu

SEQ ID NO: 238046 - RNA, 19 nt, Human
augagcaggcaagacaagc

SEQ ID NO: 238047 - RNA, 23 nt, Human
uagaggaggaugugaugcauauu

SEQ ID NO: 238048 - RNA, 21 nt, Human
cccagggaagccgcagucacc

SEQ ID NO: 238049 - RNA, 22 nt, Human
ccauggcucuuaccuuguuaua

SEQ ID NO: 238050 - RNA, 21 nt, Human
gcagccagccgagaccaugcc

SEQ ID NO: 238051 - RNA, 16 nt, Human
ccugggcucuguugga

SEQ ID NO: 238052 - RNA, 22 nt, Human
acacauguauggcacuuacauu

SEQ ID NO: 238053 - RNA, 22 nt, Human
ggcuccuggggaggugagcuug

SEQ ID NO: 238054 - RNA, 22 nt, Human
uggugcagaugcaggucacugg

SEQ ID NO: 238055 - RNA, 22 nt, Human
auuugcugugugcuuuagagac

SEQ ID NO: 238056 - RNA, 22 nt, Human
uguggcaggcauucugaggcug

SEQ ID NO: 238057 - RNA, 22 nt, Human
ugucuccagaaagcaccaggag

SEQ ID NO: 238058 - RNA, 22 nt, Human
agaaagugaccuugaaaacugg

SEQ ID NO: 238059 - RNA, 17 nt, Human
ccugcccagagacagau

SEQ ID NO: 238060 - RNA, 22 nt, Human
cuggcaguuggcauuggcaucu

SEQ ID NO: 238061 - RNA, 22 nt, Human
uuaccaaaucccgugcacauuc

SEQ ID NO: 238062 - RNA, 19 nt, Human
acagagggcaacugagaaa

SEQ ID NO: 238063 - RNA, 22 nt, Human
ucccugaguguauguggugaac

SEQ ID NO: 238064 - RNA, 22 nt, Human
cccaggccuggucugggccagu

SEQ ID NO: 238065 - RNA, 22 nt, Human
ugguauguaaauuguaacucaa

SEQ ID NO: 238066 - RNA, 22 nt, Human
uguagaaagcucuucugaaauc

SEQ ID NO: 238067 - RNA, 22 nt, Human
ccuggcucuucagagguuccua

SEQ ID NO: 238068 - RNA, 22 nt, Human
auauguuacucuuucaagcaga

SEQ ID NO: 238069 - RNA, 22 nt, Human
cuuauauuugucaacuuuacaa

SEQ ID NO: 238070 - RNA, 22 nt, Human
gacaggguccaaaggcagggga

SEQ ID NO: 238071 - RNA, 22 nt, Human
ggcauauguagcguguguucug

SEQ ID NO: 238072 - RNA, 22 nt, Human
ccccuuccuuccucagacagcc

SEQ ID NO: 238073 - RNA, 22 nt, Human
ucugggaacacacgucacuuca

SEQ ID NO: 238074 - RNA, 22 nt, Human
gucucagaguccuacuuauucc

SEQ ID NO: 238075 - RNA, 22 nt, Human
uuaaaaaccaucuuccuuuccu

SEQ ID NO: 238076 - RNA, 22 nt, Human
auuauccagcaccaaugucaga

SEQ ID NO: 238077 - RNA, 22 nt, Human
agccacaggccaugagauacca

SEQ ID NO: 238078 - RNA, 22 nt, Human
cucuguaccuggcauagcaacc

SEQ ID NO: 238079 - RNA, 22 nt, Human
uccugagcccuguaggacccug

SEQ ID NO: 238080 - RNA, 22 nt, Human
ucucauuguagaaagacugauu

SEQ ID NO: 238081 - RNA, 22 nt, Human
ggaagcucuguggcuuggaguc

SEQ ID NO: 238082 - RNA, 22 nt, Human
ggcaggcaggagcgugcuuggg

SEQ ID NO: 238083 - RNA, 22 nt, Human
aaagcucuuauagcagagugug

SEQ ID NO: 238084 - RNA, 22 nt, Human
gccuggugcuaugagggccagc

SEQ ID NO: 238085 - RNA, 22 nt, Human
agaaccuuccaucacucccuac

SEQ ID NO: 238086 - RNA, 21 nt, Human
ucccugagcccaaggggcucc

SEQ ID NO: 238087 - RNA, 21 nt, Human
gggggaagaggaguugcuagu

SEQ ID NO: 238088 - RNA, 22 nt, Human
aucaaguuuucuuaguugacug

SEQ ID NO: 238089 - RNA, 22 nt, Human
aggacccugagcgggcaugccg

SEQ ID NO: 238090 - RNA, 22 nt, Human
cugcagagcuugucuggaugug

SEQ ID NO: 238091 - RNA, 22 nt, Human
aucugggccagccccaagagac

SEQ ID NO: 238092 - RNA, 22 nt, Human
gcuguggcuguacagagaccau

SEQ ID NO: 238093 - RNA, 22 nt, Human
cuggagagauccuccugaaaaa

SEQ ID NO: 238094 - RNA, 22 nt, Human
uaugaacugugagugugauggg

SEQ ID NO: 238095 - RNA, 22 nt, Human
caaaggcugccacuguggcugu

SEQ ID NO: 238096 - RNA, 22 nt, Human
ucacaggagucaaggaauagua

SEQ ID NO: 238097 - RNA, 22 nt, Human
acuuccuugucaggugcaucau

SEQ ID NO: 238098 - RNA, 22 nt, Human
uagaauaugugguguauacuuu

SEQ ID NO: 238099 - RNA, 20 nt, Human
aagcagaagcugcucucagc

SEQ ID NO: 238100 - RNA, 22 nt, Human
ccaggaggcggaagguacagug

SEQ ID NO: 238101 - RNA, 22 nt, Human
cuggacucagggugcuccagcg

SEQ ID NO: 238102 - RNA, 22 nt, Human
gcucugggugaacuuggagcaa

SEQ ID NO: 238103 - RNA, 22 nt, Human
ucaggaagcuacugccagcagc

SEQ ID NO: 238104 - RNA, 22 nt, Human
cuguacuaauugcuuuacaugu

SEQ ID NO: 238105 - RNA, 22 nt, Human
agggccagaugaagccacaagc

SEQ ID NO: 238106 - RNA, 22 nt, Human
ucacauucauggugcuaauaaa

SEQ ID NO: 238107 - RNA, 22 nt, Human
ggcugcuggggacgugggagag

SEQ ID NO: 238108 - RNA, 22 nt, Human
agcguaugaauauuugaagaga

SEQ ID NO: 238109 - RNA, 21 nt, Human
ggugcucgcugaugaggagug

SEQ ID NO: 238110 - RNA, 22 nt, Human
cuccugugguacucccagggcc

SEQ ID NO: 238111 - RNA, 22 nt, Human
agugcacagcgugauguauugg

SEQ ID NO: 238112 - RNA, 22 nt, Human
cuuggcaguuucggaaggauga

SEQ ID NO: 238113 - RNA, 22 nt, Human
uuuuucuugugcuggaucuaau

SEQ ID NO: 238114 - RNA, 22 nt, Human
cagagccaaaugcugugguuau

SEQ ID NO: 238115 - RNA, 22 nt, Human
ucccagccuggacccugccagu

SEQ ID NO: 238116 - RNA, 22 nt, Human
gacauaaaccuugagauauuaa

SEQ ID NO: 238117 - RNA, 22 nt, Human
ucaguuacucaacagaggugga

SEQ ID NO: 238118 - RNA, 21 nt, Human
aaaaugugagcgugaugcuua

SEQ ID NO: 238119 - RNA, 22 nt, Human
uggcugcaguucacaggagcaa

SEQ ID NO: 238120 - RNA, 22 nt, Human
ccugagagugagugccuccuua

SEQ ID NO: 238121 - RNA, 22 nt, Human
caccaggaugggcagguagguc

SEQ ID NO: 238122 - RNA, 19 nt, Human
agaaucuaaauuauuucug

SEQ ID NO: 238123 - RNA, 22 nt, Human
uaaacagaaagcagauguacuu

SEQ ID NO: 238124 - RNA, 22 nt, Human
ccagagcaauucucacagaacu

SEQ ID NO: 238125 - RNA, 22 nt, Human
uacuacaaggccgaagcucuca

SEQ ID NO: 238126 - RNA, 22 nt, Human
gcuggucccaauguguuuccuu

SEQ ID NO: 238127 - RNA, 22 nt, Human
uaucaucugcaaagcacaucua

SEQ ID NO: 238128 - RNA, 23 nt, Human
uccuugggccugcccagaguggu

SEQ ID NO: 238129 - RNA, 22 nt, Human
agggaccuugauggguuuggga

SEQ ID NO: 238130 - RNA, 22 nt, Human
cagugccuggauagcaacauga

SEQ ID NO: 238131 - RNA, 22 nt, Human
acagcugauaguuaccucuguc

SEQ ID NO: 238132 - RNA, 22 nt, Human
accucagaacggcguucuugaa

SEQ ID NO: 238133 - RNA, 22 nt, Human
ucacagugaugacgugggagca

SEQ ID NO: 238134 - RNA, 22 nt, Human
cuuuggaaugcacagaggugua

SEQ ID NO: 238135 - RNA, 22 nt, Human
aagguggucuuacugaugguau

SEQ ID NO: 238136 - RNA, 22 nt, Human
uguugacugguaacuuuaaaca

SEQ ID NO: 238137 - RNA, 22 nt, Human
acagaaaugauguuuggcaaua

SEQ ID NO: 238138 - RNA, 22 nt, Human
caggaugguggcaugaucagaa

SEQ ID NO: 238139 - RNA, 22 nt, Human
guggagcuggacccaggccucu

SEQ ID NO: 238140 - RNA, 22 nt, Human
agagccuggaccugagcuacaa

SEQ ID NO: 238141 - RNA, 22 nt, Human
gucugggcaucagacugcgggc

SEQ ID NO: 238142 - RNA, 22 nt, Human
uuucauugagaauauaagauuu

SEQ ID NO: 238143 - RNA, 22 nt, Human
uccuggcaggucagcaggagca

SEQ ID NO: 238144 - RNA, 21 nt, Human
auuuucauuaauucagugugg

SEQ ID NO: 238145 - RNA, 22 nt, Human
aacagcagcuuucaggaucauc

SEQ ID NO: 238146 - RNA, 22 nt, Human
uuguagaaaauuagaugcaugg

SEQ ID NO: 238147 - RNA, 22 nt, Human
guucuacaguuccuauuacuua

SEQ ID NO: 238148 - RNA, 23 nt, Human
agccccucauggugucuagacag

SEQ ID NO: 238149 - RNA, 22 nt, Human
uauaacaguuuaggugguguca

SEQ ID NO: 238150 - RNA, 22 nt, Human
ucccagcaagaaaggggguggc

SEQ ID NO: 238151 - RNA, 22 nt, Human
cugggccugggaggccaggucu

SEQ ID NO: 238152 - RNA, 22 nt, Human
ucucuggaauuggcugaggcaa

SEQ ID NO: 238153 - RNA, 22 nt, Human
ugcagcagguuccaaaggguua

SEQ ID NO: 238154 - RNA, 22 nt, Human
uggagaagauuggucaccauuc

SEQ ID NO: 238155 - RNA, 22 nt, Human
ugcuggguguuccgcacuugac

SEQ ID NO: 238156 - RNA, 22 nt, Human
ugcaaaaacugcaauugcuuuu

SEQ ID NO: 238157 - RNA, 22 nt, Human
ggaagggguuaggggucccuga

SEQ ID NO: 238158 - RNA, 22 nt, Human
uggcccaggugcaagagacaga

SEQ ID NO: 238159 - RNA, 22 nt, Human
gagguguccuagaaguauucag

SEQ ID NO: 238160 - RNA, 19 nt, Human
caguuacagcagcuaagac

SEQ ID NO: 238161 - RNA, 22 nt, Human
cugggccuagaggaagcugaca

SEQ ID NO: 238162 - RNA, 22 nt, Human
gaacaaacacaucccagcagug

SEQ ID NO: 238163 - RNA, 22 nt, Human
ugauuaaaauuuaacuuaguua

SEQ ID NO: 238164 - RNA, 22 nt, Human
uuuaauuuuccucuuccuggag

SEQ ID NO: 238165 - RNA, 22 nt, Human
agacuacauuaugacagcauuu

SEQ ID NO: 238166 - RNA, 22 nt, Human
uccacagucuauuuuuagucua

SEQ ID NO: 238167 - RNA, 19 nt, Human
aaaguugagaaacaaugga

SEQ ID NO: 238168 - RNA, 23 nt, Human
gucucuagaguguggagcaaaga

SEQ ID NO: 238169 - RNA, 22 nt, Human
augcacaaacccacaauuaguc

SEQ ID NO: 238170 - RNA, 22 nt, Human
uaucacaauuccuauaguuugu

SEQ ID NO: 238171 - RNA, 22 nt, Human
ggcuggcuuggugagcugucac

SEQ ID NO: 238172 - RNA, 22 nt, Human
ugucuagacaagaaguauugcc

SEQ ID NO: 238173 - RNA, 21 nt, Human
ccugucuuggacugaggcacc

SEQ ID NO: 238174 - RNA, 22 nt, Human
gcaucuaaaucacuuuaaugua

SEQ ID NO: 238175 - RNA, 22 nt, Human
cagcugaacauguagagcaucu

SEQ ID NO: 238176 - RNA, 22 nt, Human
ucaagagacaggacguguuuca

SEQ ID NO: 238177 - RNA, 22 nt, Human
ucuuagcauuucauaacaacug

SEQ ID NO: 238178 - RNA, 22 nt, Human
cuguuacuaaucuuuucugcua

SEQ ID NO: 238179 - RNA, 22 nt, Human
augucaaaugcugcaaacucau

SEQ ID NO: 238180 - RNA, 22 nt, Human
uuugaaaauuagacacaggcua

SEQ ID NO: 238181 - RNA, 22 nt, Human
uuggggaagcuuugaaauacuu

SEQ ID NO: 238182 - RNA, 19 nt, Human
ggcuggaguggccaucugu

SEQ ID NO: 238183 - RNA, 22 nt, Human
caagcagguuugcuauuuucuu

SEQ ID NO: 238184 - RNA, 22 nt, Human
ccuggcuccugcacagaucuuu

SEQ ID NO: 238185 - RNA, 22 nt, Human
guaaaugugcuucuuuuaacuu

SEQ ID NO: 238186 - RNA, 18 nt, Human
uccugguggagaaguggu

SEQ ID NO: 238187 - RNA, 22 nt, Human
cagaggcauuacugaaaaggug

SEQ ID NO: 238188 - RNA, 22 nt, Human
uuacaacaaaggcacgugcaug

SEQ ID NO: 238189 - RNA, 22 nt, Human
guguguccucuuaacuauuaug

SEQ ID NO: 238190 - RNA, 23 nt, Human
uaauuagauguugauuccugaga

SEQ ID NO: 238191 - RNA, 22 nt, Human
gagcccuguaggaaucucucaa

SEQ ID NO: 238192 - RNA, 22 nt, Human
agaaagaggaugcagaucucau

SEQ ID NO: 238193 - RNA, 22 nt, Human
cucacagcacuugugucauugg

SEQ ID NO: 238194 - RNA, 22 nt, Human
aagcagaaguugaucuaccaua

SEQ ID NO: 238195 - RNA, 22 nt, Human
uccaggucuuccuauuccaggu

SEQ ID NO: 238196 - RNA, 22 nt, Human
cagagacagcaaguugauuucc

SEQ ID NO: 238197 - RNA, 22 nt, Human
aucuggcucgcuaggcucuggg

SEQ ID NO: 238198 - RNA, 22 nt, Human
uuggcuucucuuaacccuaaag

SEQ ID NO: 238199 - RNA, 22 nt, Human
cccugagaagaucauugccacg

SEQ ID NO: 238200 - RNA, 17 nt, Human
ucugaagccagucugcu

SEQ ID NO: 238201 - RNA, 21 nt, Human
cucagacagggaggcucuggg

SEQ ID NO: 238202 - RNA, 22 nt, Human
aagcugaggucaaguagcuagu

SEQ ID NO: 238203 - RNA, 22 nt, Human
aucuccgccaucgcgaacgccu

SEQ ID NO: 238204 - RNA, 22 nt, Human
uguuuauaccugcaaccuguca

SEQ ID NO: 238205 - RNA, 22 nt, Human
auaugcuuaugaugucucaagu

SEQ ID NO: 238206 - RNA, 22 nt, Human
uuagaaaucugcugccaugcaa

SEQ ID NO: 238207 - RNA, 22 nt, Human
cugacaaaggcaaggcaggggg

SEQ ID NO: 238208 - RNA, 22 nt, Human
ccagccccuauccucgcuccac

SEQ ID NO: 238209 - RNA, 23 nt, Human
ucuccaggccuuacuccaggccu

SEQ ID NO: 238210 - RNA, 22 nt, Human
ccuuagaaggcugaauaauucu

SEQ ID NO: 238211 - RNA, 22 nt, Human
aauguuaaguuuagauuauaac

SEQ ID NO: 238212 - RNA, 19 nt, Human
guugaaaguaggugagggu

SEQ ID NO: 238213 - RNA, 22 nt, Human
acccuggagcaauaaucccugg

SEQ ID NO: 238214 - RNA, 22 nt, Human
acaggcaggcgggacagcccga

SEQ ID NO: 238215 - RNA, 23 nt, Human
ugagcugguauuguccaucucca

SEQ ID NO: 238216 - RNA, 22 nt, Human
aggaaggagggcagauauuaag

SEQ ID NO: 238217 - RNA, 22 nt, Human
uuauugaguaucugcuuggugu

SEQ ID NO: 238218 - RNA, 22 nt, Human
uugucaaguaaggcugacauuu

SEQ ID NO: 238219 - RNA, 22 nt, Human
uuccauauuagacuaugugggg

SEQ ID NO: 238220 - RNA, 22 nt, Human
gaaaucuacuuagugucuggau

SEQ ID NO: 238221 - RNA, 22 nt, Human
ggcuccucucuggccgcucccg

SEQ ID NO: 238222 - RNA, 22 nt, Human
uaacagaaguuguucauugugg

SEQ ID NO: 238223 - RNA, 22 nt, Human
uucuaguccuagaaacuacaug

SEQ ID NO: 238224 - RNA, 22 nt, Human
gaggagaaauuuggggaccuga

SEQ ID NO: 238225 - RNA, 22 nt, Human
aggcagugcagaguccucuucu

SEQ ID NO: 238226 - RNA, 22 nt, Human
uccucugggcucccugcaacag

SEQ ID NO: 238227 - RNA, 22 nt, Human
aagcugaaauaauaucuauguu

SEQ ID NO: 238228 - RNA, 23 nt, Human
ccaggaagaggccauccacaguc

SEQ ID NO: 238229 - RNA, 20 nt, Human
acaacaaacuugcuuaagga

SEQ ID NO: 238230 - RNA, 22 nt, Human
aagacacuuucuaaauagaagu

SEQ ID NO: 238231 - RNA, 22 nt, Human
caugaaugcuggguucauguaa

SEQ ID NO: 238232 - RNA, 22 nt, Human
gugaccaucagagaauaacaaa

SEQ ID NO: 238233 - RNA, 22 nt, Human
ugaaagcaggcgggcuacuuua

SEQ ID NO: 238234 - RNA, 22 nt, Human
cacagggagaggaacagcgcag

SEQ ID NO: 238235 - RNA, 23 nt, Human
uccaggcugaaggagcagauuuu

SEQ ID NO: 238236 - RNA, 22 nt, Human
aguggcaaugggaguggagaca

SEQ ID NO: 238237 - RNA, 22 nt, Human
ccaaaguccauaguuuacauua

SEQ ID NO: 238238 - RNA, 22 nt, Human
uuucuaaaugguggcugcauug

SEQ ID NO: 238239 - RNA, 22 nt, Human
uucacauaaugauacaaagcuu

SEQ ID NO: 238240 - RNA, 22 nt, Human
auaacauuuugacaacugguga

SEQ ID NO: 238241 - RNA, 22 nt, Human
uuugacucaagccuuucuuuag

SEQ ID NO: 238242 - RNA, 20 nt, Human
gcugaggucauuaugccuca

SEQ ID NO: 238243 - RNA, 22 nt, Human
guacaaauugauacagauuuga

SEQ ID NO: 238244 - RNA, 22 nt, Human
gacaggcuucauccucagaguu

SEQ ID NO: 238245 - RNA, 22 nt, Human
aagcugaggauacaugaagccu

SEQ ID NO: 238246 - RNA, 22 nt, Human
ugucagagcaaugagguucagc

SEQ ID NO: 238247 - RNA, 22 nt, Human
ggcccagaagccagaagccucc

SEQ ID NO: 238248 - RNA, 22 nt, Human
ucucuuccauguuucagcccca

SEQ ID NO: 238249 - RNA, 22 nt, Human
ugggcaaaugcuuuuuagucaa

SEQ ID NO: 238250 - RNA, 22 nt, Human
ccaggcucagggcagacuuuca

SEQ ID NO: 238251 - RNA, 19 nt, Human
ccaugcagccugggggcag

SEQ ID NO: 238252 - RNA, 22 nt, Human
uggguccuugccaucuuggagu

SEQ ID NO: 238253 - RNA, 22 nt, Human
ugggcugcacccucagccucug

SEQ ID NO: 238254 - RNA, 18 nt, Human
agagcagcggcaucacac

SEQ ID NO: 238255 - RNA, 20 nt, Human
gcucagguuugggcuuugug

SEQ ID NO: 238256 - RNA, 22 nt, Human
ggcagcaucacuugucuccagc

SEQ ID NO: 238257 - RNA, 22 nt, Human
auuacagauuauaaauuugagc

SEQ ID NO: 238258 - RNA, 22 nt, Human
gccacagcagggcccucucagg

SEQ ID NO: 238259 - RNA, 22 nt, Human
gaugucuuugccaugcaugugu

SEQ ID NO: 238260 - RNA, 20 nt, Human
ugcuuuuauaccuauaauga

SEQ ID NO: 238261 - RNA, 22 nt, Human
uggcuucaggguugucuucagc

SEQ ID NO: 238262 - RNA, 22 nt, Human
gcauggcuucugccaggcaccu

SEQ ID NO: 238263 - RNA, 22 nt, Human
acaauauaguccaugagcaugc

SEQ ID NO: 238264 - RNA, 22 nt, Human
uaguuacaggaguuucugaaau

SEQ ID NO: 238265 - RNA, 23 nt, Human
augaaaugcuggcucagggaggu

SEQ ID NO: 238266 - RNA, 22 nt, Human
gagcccagcuaaauuuauauaa

SEQ ID NO: 238267 - RNA, 22 nt, Human
gcacagguugcaaaaguucaca

SEQ ID NO: 238268 - RNA, 22 nt, Human
uaggugguagagccuggcuugc

SEQ ID NO: 238269 - RNA, 22 nt, Human
acauuucuuucuauucaguagc

SEQ ID NO: 238270 - RNA, 23 nt, Human
uggccaggcauaaaggugggugg

SEQ ID NO: 238271 - RNA, 22 nt, Human
auccuuuaguccuacaacucga

SEQ ID NO: 238272 - RNA, 22 nt, Human
acucugggaugagaaaaggguu

SEQ ID NO: 238273 - RNA, 22 nt, Human
cugggugaauuugaaggaaagg

SEQ ID NO: 238274 - RNA, 22 nt, Human
ggcagguggcacugcugcuccc

SEQ ID NO: 238275 - RNA, 22 nt, Human
gcucagaguuaauuggaugggu

SEQ ID NO: 238276 - RNA, 22 nt, Human
ucauucuuuaccaaguugucac

SEQ ID NO: 238277 - RNA, 22 nt, Human
gcuggccuugugucugaggaag

SEQ ID NO: 238278 - RNA, 22 nt, Human
gaagaaagauuggcaugcuuca

SEQ ID NO: 238279 - RNA, 22 nt, Human
gcaugcaacucccaguucugcc

SEQ ID NO: 238280 - RNA, 20 nt, Human
uggacacagcccuguugagu

SEQ ID NO: 238281 - RNA, 22 nt, Human
gccaggcugguuauuuaaugag

SEQ ID NO: 238282 - RNA, 22 nt, Human
cucucuguuaugcuuucaugaa

SEQ ID NO: 238283 - RNA, 21 nt, Human
cuuugcaucuauauguucuca

SEQ ID NO: 238284 - RNA, 22 nt, Human
aacauucugguucuaaaaaccu

SEQ ID NO: 238285 - RNA, 22 nt, Human
uacugaaauacuaagaaguuaa

SEQ ID NO: 238286 - RNA, 22 nt, Human
aucuuuuuaucuguuuggaaca

SEQ ID NO: 238287 - RNA, 22 nt, Human
aguggaugguauugggaccagg

SEQ ID NO: 238288 - RNA, 22 nt, Human
acuugguugcuucugaaaugac

SEQ ID NO: 238289 - RNA, 22 nt, Human
gggcugagugggccucuuacuu

SEQ ID NO: 238290 - RNA, 22 nt, Human
caauuuucaauuccuucagaua

SEQ ID NO: 238291 - RNA, 22 nt, Human
caucuucagguucauggucaua

SEQ ID NO: 238292 - RNA, 22 nt, Human
ucuagaucugcacuguuggaca

SEQ ID NO: 238293 - RNA, 22 nt, Human
ccagggcucuaugaggguggag

SEQ ID NO: 238294 - RNA, 22 nt, Human
aauagugaacaggaacaugcuu

SEQ ID NO: 238295 - RNA, 22 nt, Human
cccuagaacacgcagacacuga

SEQ ID NO: 238296 - RNA, 22 nt, Human
gagugcuggaggugugaguggg

SEQ ID NO: 238297 - RNA, 22 nt, Human
ugcucugcaagcaggagcaaga

SEQ ID NO: 238298 - RNA, 22 nt, Human
gagguccucuguguccgcgggc

SEQ ID NO: 238299 - RNA, 22 nt, Human
gggcagucacagugcuggagca

SEQ ID NO: 238300 - RNA, 22 nt, Human
ccuggcugagggaccucgggua

SEQ ID NO: 238301 - RNA, 22 nt, Human
aaaccauugcaucuuucuuaau

SEQ ID NO: 238302 - RNA, 22 nt, Human
agcuguguggugucugacagcu

SEQ ID NO: 238303 - RNA, 22 nt, Human
cuccuccacagaccuacugaau

SEQ ID NO: 238304 - RNA, 22 nt, Human
acuguguggaccacucugaggc

SEQ ID NO: 238305 - RNA, 22 nt, Human
uccaggaguuugaccugugggc

SEQ ID NO: 238306 - RNA, 22 nt, Human
acuugcaucuuagagacucacc

SEQ ID NO: 238307 - RNA, 22 nt, Human
gggcuucucugaucaauauuuc

SEQ ID NO: 238308 - RNA, 22 nt, Human
cauucuaaaguguuuuauaccu

SEQ ID NO: 238309 - RNA, 22 nt, Human
gcccucuggcacagagaugcag

SEQ ID NO: 238310 - RNA, 22 nt, Human
agcugcugggagaagugagcca

SEQ ID NO: 238311 - RNA, 22 nt, Human
uuuuauacuuaagacagaguuu

SEQ ID NO: 238312 - RNA, 20 nt, Human
uacauuguagaaauauucaa

SEQ ID NO: 238313 - RNA, 22 nt, Human
caggcugaucagggcugggaug

SEQ ID NO: 238314 - RNA, 22 nt, Human
uccagccaaucagagcugaggc

SEQ ID NO: 238315 - RNA, 22 nt, Human
uaggacaggaucaugaugcugg

SEQ ID NO: 238316 - RNA, 22 nt, Human
caccagcuacuccagggccgug

SEQ ID NO: 238317 - RNA, 22 nt, Human
ucaguguccugugcggugcagc

SEQ ID NO: 238318 - RNA, 22 nt, Human
uugaagaguuugauagaguuga

SEQ ID NO: 238319 - RNA, 22 nt, Human
ccuccugguccagcaucucuuu

SEQ ID NO: 238320 - RNA, 22 nt, Human
auguaaaagauuauuuuccugu

SEQ ID NO: 238321 - RNA, 23 nt, Human
cggggccagggucaggaccgguc

SEQ ID NO: 238322 - RNA, 21 nt, Human
uaagugcaaagagacagauac

SEQ ID NO: 238323 - RNA, 22 nt, Human
cuuaacagauacaucugugguu

SEQ ID NO: 238324 - RNA, 22 nt, Human
guaacacagaaaugaaauucca

SEQ ID NO: 238325 - RNA, 22 nt, Human
cuggcuggggaagucauuugau

SEQ ID NO: 238326 - RNA, 17 nt, Human
cuacuucuucuauucuu

SEQ ID NO: 238327 - RNA, 22 nt, Human
aguacacaagacacauuuaaaa

SEQ ID NO: 238328 - RNA, 22 nt, Human
ucagcauuccugaagacaagca

SEQ ID NO: 238329 - RNA, 22 nt, Human
cagcaacauauaugaaacugug

SEQ ID NO: 238330 - RNA, 22 nt, Human
gugcaaaaguaauugugguuuu

SEQ ID NO: 238331 - RNA, 22 nt, Human
uuuauuguuguuagucauaagu

SEQ ID NO: 238332 - RNA, 22 nt, Human
ugguccuggugcaagugcauuu

SEQ ID NO: 238333 - RNA, 22 nt, Human
gaaaguuuauagguuauauaau

SEQ ID NO: 238334 - RNA, 22 nt, Human
guuaacauucaauuaaacaguc

SEQ ID NO: 238335 - RNA, 22 nt, Human
guucuacuuucugugucuuuga

SEQ ID NO: 238336 - RNA, 22 nt, Human
uagggcucagagaaguggggcc

SEQ ID NO: 238337 - RNA, 22 nt, Human
uggcuucaaaaucuaguggucu

SEQ ID NO: 238338 - RNA, 22 nt, Human
uuuauucuugagagugagaaga

SEQ ID NO: 238339 - RNA, 22 nt, Human
gcuuucugccugggcuccauuu

SEQ ID NO: 238340 - RNA, 22 nt, Human
gggccuggugcuucugacuccu

SEQ ID NO: 238341 - RNA, 22 nt, Human
ggaggccaggguggguggaucg

SEQ ID NO: 238342 - RNA, 22 nt, Human
acaggacauguaccaggugguc

SEQ ID NO: 238343 - RNA, 20 nt, Human
cuggcccaucuaccgcucug

SEQ ID NO: 238344 - RNA, 22 nt, Human
guguccugccacccugggcuuu

SEQ ID NO: 238345 - RNA, 22 nt, Human
aaagacauugaagaaggacuua

SEQ ID NO: 238346 - RNA, 22 nt, Human
acagagcaguaagaacacagcu

SEQ ID NO: 238347 - RNA, 22 nt, Human
uuccugguaguaagacaucugg

SEQ ID NO: 238348 - RNA, 22 nt, Human
uagggcacagcuuagauaaaug

SEQ ID NO: 238349 - RNA, 22 nt, Human
acauaauaggugccugaauauu

SEQ ID NO: 238350 - RNA, 22 nt, Human
aguuuuuccguggcuacgauaa

SEQ ID NO: 238351 - RNA, 19 nt, Human
uggcagccuccacuuuugc

SEQ ID NO: 238352 - RNA, 22 nt, Human
aauuuggagagaaacaaguagg

SEQ ID NO: 238353 - RNA, 22 nt, Human
caguccagccaguagggugugg

SEQ ID NO: 238354 - RNA, 22 nt, Human
agauaauuauuuacuucaaagu

SEQ ID NO: 238355 - RNA, 22 nt, Human
cugcagggcuguggucuggagu

SEQ ID NO: 238356 - RNA, 22 nt, Human
aggccaggauagcauggaucag

SEQ ID NO: 238357 - RNA, 22 nt, Human
cagaaggcaaggccugccacgc

SEQ ID NO: 238358 - RNA, 22 nt, Human
ugaggcaaguacuuucccuuuu

SEQ ID NO: 238359 - RNA, 22 nt, Human
gcugcagagacagcugccgaug

SEQ ID NO: 238360 - RNA, 23 nt, Human
ugccguguuagaaauguuuuaca

SEQ ID NO: 238361 - RNA, 22 nt, Human
aagagacagagccauguuucua

SEQ ID NO: 238362 - RNA, 22 nt, Human
uaggaaacaaaccugccucuuc

SEQ ID NO: 238363 - RNA, 21 nt, Human
aagaugauauuuuaucuguag

SEQ ID NO: 238364 - RNA, 22 nt, Human
acagugugugggaaaugugacu

SEQ ID NO: 238365 - RNA, 22 nt, Human
ugauuuacuucccagcuggguu

SEQ ID NO: 238366 - RNA, 22 nt, Human
auggcuggcacuggccuggguu

SEQ ID NO: 238367 - RNA, 22 nt, Human
agcaggcugccuuccaaagccu

SEQ ID NO: 238368 - RNA, 22 nt, Human
gcugccucccagagcccugcag

SEQ ID NO: 238369 - RNA, 22 nt, Human
ggcucugggugugaccuugggu

SEQ ID NO: 238370 - RNA, 22 nt, Human
uguguccucauguggcagagag

SEQ ID NO: 238371 - RNA, 22 nt, Human
acauuacauaagauuguaaccu

SEQ ID NO: 238372 - RNA, 22 nt, Human
agucucuuuguauaaauaggca

SEQ ID NO: 238373 - RNA, 22 nt, Human
ggugaggcagagggaguaaccu

SEQ ID NO: 238374 - RNA, 22 nt, Human
uuuccuuugcccaauacauguc

SEQ ID NO: 238375 - RNA, 22 nt, Human
cucagcuccaggugugcaucuu

SEQ ID NO: 238376 - RNA, 22 nt, Human
cugcagggagaggggacagccu

SEQ ID NO: 238377 - RNA, 22 nt, Human
aaguccugugugcuuacacuug

SEQ ID NO: 238378 - RNA, 18 nt, Human
uggacacauggccugggu

SEQ ID NO: 238379 - RNA, 22 nt, Human
ugucuuuuuaccugugaugagu

SEQ ID NO: 238380 - RNA, 22 nt, Human
ucccagggacuggaugaugcag

SEQ ID NO: 238381 - RNA, 22 nt, Human
uaguuacagaagauaaggguau

SEQ ID NO: 238382 - RNA, 20 nt, Human
ucucccugcccaucucagau

SEQ ID NO: 238383 - RNA, 22 nt, Human
gguagggcaaaguagggcaccu

SEQ ID NO: 238384 - RNA, 22 nt, Human
ucaucuaagagucuuacauuua

SEQ ID NO: 238385 - RNA, 22 nt, Human
gccuguuuuagaugcauugaug

SEQ ID NO: 238386 - RNA, 22 nt, Human
agaccccauaccucagcaggua

SEQ ID NO: 238387 - RNA, 22 nt, Human
ugagucacacauuucuucauac

SEQ ID NO: 238388 - RNA, 22 nt, Human
ugaauagagcuuggcacuagaa

SEQ ID NO: 238389 - RNA, 22 nt, Human
cuuucuuuguccaccaacaaug

SEQ ID NO: 238390 - RNA, 17 nt, Human
acugucuuuuacacccu

SEQ ID NO: 238391 - RNA, 22 nt, Human
ugguacacauguccaaggucag

SEQ ID NO: 238392 - RNA, 22 nt, Human
gaauuuaaggaccaagcauuuu

SEQ ID NO: 238393 - RNA, 22 nt, Human
ccucucagcgauuccucuugga

SEQ ID NO: 238394 - RNA, 18 nt, Human
uaggagagaauuuauuua

SEQ ID NO: 238395 - RNA, 22 nt, Human
uuggaggaagcucaugggggau

SEQ ID NO: 238396 - RNA, 22 nt, Human
ugcaugaacggaggguaagcug

SEQ ID NO: 238397 - RNA, 22 nt, Human
gcucaggacuggaggagcgggg

SEQ ID NO: 238398 - RNA, 22 nt, Human
aaagagcuuuagaaaucucaga

SEQ ID NO: 238399 - RNA, 22 nt, Human
aggcaacugacaguuucugcuu

SEQ ID NO: 238400 - RNA, 22 nt, Human
ggagugacucacagcugggaca

SEQ ID NO: 238401 - RNA, 22 nt, Human
agcaacagguuuauuaucuuau

SEQ ID NO: 238402 - RNA, 22 nt, Human
aggcucuggcuacuacagagcu

SEQ ID NO: 238403 - RNA, 22 nt, Human
aaauagaauuaacuagcuacug

SEQ ID NO: 238404 - RNA, 22 nt, Human
cugggagacaagagagggcuga

SEQ ID NO: 238405 - RNA, 22 nt, Human
cagagacagggcagggagugug

SEQ ID NO: 238406 - RNA, 22 nt, Human
uuaauacaagcauaugcacaca

SEQ ID NO: 238407 - RNA, 22 nt, Human
ccuggccucuccgaguaaccug

SEQ ID NO: 238408 - RNA, 20 nt, Human
gcugaagauucccaugcaag

SEQ ID NO: 238409 - RNA, 22 nt, Human
aggauaacuuugaaaguaaauu

SEQ ID NO: 238410 - RNA, 22 nt, Human
ucucugaguuuuaaggaugaug

SEQ ID NO: 238411 - RNA, 22 nt, Human
acaauucuggguauuuauauag

SEQ ID NO: 238412 - RNA, 22 nt, Human
agauaucuccagugaugcucgu

SEQ ID NO: 238413 - RNA, 22 nt, Human
caggcuccuucccagggauggu

SEQ ID NO: 238414 - RNA, 22 nt, Human
cacccuggaaagaaggucuggg

SEQ ID NO: 238415 - RNA, 22 nt, Human
uuguacaaaugcauauuccugg

SEQ ID NO: 238416 - RNA, 22 nt, Human
gcagagauuaugccauggaaag

SEQ ID NO: 238417 - RNA, 22 nt, Human
ggaggcaaagcacuuugcuugg

SEQ ID NO: 238418 - RNA, 22 nt, Human
ucagaguccucacccugaggau

SEQ ID NO: 238419 - RNA, 22 nt, Human
ccaggucuggcacuggccaguc

SEQ ID NO: 238420 - RNA, 22 nt, Human
gcccaggaggucaaguagcuau

SEQ ID NO: 238421 - RNA, 22 nt, Human
ucuggcagcucaguucaggucu

SEQ ID NO: 238422 - RNA, 22 nt, Human
aguguuuuucaggagcagaaca

SEQ ID NO: 238423 - RNA, 22 nt, Human
auuacaaaagaagggagaaggu

SEQ ID NO: 238424 - RNA, 22 nt, Human
uaaaugaguaauauagcuguuu

SEQ ID NO: 238425 - RNA, 22 nt, Human
ggcucacacaugacugggcucu

SEQ ID NO: 238426 - RNA, 22 nt, Human
ccucuggcagccagccaguugu

SEQ ID NO: 238427 - RNA, 22 nt, Human
cacagaggauuuuuagggcagu

SEQ ID NO: 238428 - RNA, 22 nt, Human
caccugcaaggagcuuucauuu

SEQ ID NO: 238429 - RNA, 22 nt, Human
gucuuuaucuuugaaauuaguc

SEQ ID NO: 238430 - RNA, 22 nt, Human
ucuagagauacauuggucauuu

SEQ ID NO: 238431 - RNA, 22 nt, Human
ucagggaagaaaugggacuuua

SEQ ID NO: 238432 - RNA, 21 nt, Human
acaggcucacgauccauuucu

SEQ ID NO: 238433 - RNA, 22 nt, Human
uguauauucacugagcaagggg

SEQ ID NO: 238434 - RNA, 22 nt, Human
uguuacuauuaguuugagcaua

SEQ ID NO: 238435 - RNA, 22 nt, Human
cucugggcuuguugaccugcac

SEQ ID NO: 238436 - RNA, 22 nt, Human
uguuaacaucuuggacucguga

SEQ ID NO: 238437 - RNA, 23 nt, Human
cugugucuaugcagccauaucca

SEQ ID NO: 238438 - RNA, 22 nt, Human
uuggaaaccaggcuuugagacg

SEQ ID NO: 238439 - RNA, 22 nt, Human
gaacaaauuggagaaaucagga

SEQ ID NO: 238440 - RNA, 22 nt, Human
aagucuggaagucucaguuuuc

SEQ ID NO: 238441 - RNA, 22 nt, Human
aaaaaccauugucuucagucuc

SEQ ID NO: 238442 - RNA, 22 nt, Human
gaacuuuguggggcugagagga

SEQ ID NO: 238443 - RNA, 22 nt, Human
ugcagggcagauaugacuguag

SEQ ID NO: 238444 - RNA, 19 nt, Human
ugcuggagguugacagggu

SEQ ID NO: 238445 - RNA, 21 nt, Human
gacaggacuagaccagagcuc

SEQ ID NO: 238446 - RNA, 23 nt, Human
ccuggcagcaaacgaggagguua

SEQ ID NO: 238447 - RNA, 22 nt, Human
aggacugaaaaugaguucuucu

SEQ ID NO: 238448 - RNA, 22 nt, Human
gagcagcaaagggaggguaaau

SEQ ID NO: 238449 - RNA, 22 nt, Human
aaagacacacagugcuucaguu

SEQ ID NO: 238450 - RNA, 22 nt, Human
acagaaauaacuuuuuauguuu

SEQ ID NO: 238451 - RNA, 22 nt, Human
guuguauuugccugaaugcagu

SEQ ID NO: 238452 - RNA, 22 nt, Human
cacugagaguagggcacaagug

SEQ ID NO: 238453 - RNA, 22 nt, Human
gcagggcuccacuguggccaag

SEQ ID NO: 238454 - RNA, 22 nt, Human
agcagccaauuggaggaugaag

SEQ ID NO: 238455 - RNA, 21 nt, Human
cuuaacauuuuaaaugaaagg

SEQ ID NO: 238456 - RNA, 22 nt, Human
aagagucauagagacauugauu

SEQ ID NO: 238457 - RNA, 22 nt, Human
guuauuagaagugaaggauugu

SEQ ID NO: 238458 - RNA, 19 nt, Human
aucauacauguuacacucu

SEQ ID NO: 238459 - RNA, 18 nt, Human
aggcaggauccuggccuc

SEQ ID NO: 238460 - RNA, 22 nt, Human
acacugugcaugcauauacaca

SEQ ID NO: 238461 - RNA, 20 nt, Human
ggccacagggugcuggugga

SEQ ID NO: 238462 - RNA, 22 nt, Human
gcuaauaauuccuuugugaacu

SEQ ID NO: 238463 - RNA, 22 nt, Human
uuugaaaggugucgagaugugu

SEQ ID NO: 238464 - RNA, 22 nt, Human
uuagagaagaugaaccaucguu

SEQ ID NO: 238465 - RNA, 22 nt, Human
cauugauuauggaaagcagugg

SEQ ID NO: 238466 - RNA, 21 nt, Human
aucccagcacccaggagugca

SEQ ID NO: 238467 - RNA, 22 nt, Human
gggcugacucugcacugagcca

SEQ ID NO: 238468 - RNA, 22 nt, Human
aauuagggaaaauuuacuugua

SEQ ID NO: 238469 - RNA, 20 nt, Human
uuuauuggccuuucaggaac

SEQ ID NO: 238470 - RNA, 22 nt, Human
augugucucuaccaaugcaauu

SEQ ID NO: 238471 - RNA, 22 nt, Human
auguccuuuguaucccuaggca

SEQ ID NO: 238472 - RNA, 22 nt, Human
uagcaagaccaauauguagaua

SEQ ID NO: 238473 - RNA, 22 nt, Human
aaaguucuggagaaaauaauga

SEQ ID NO: 238474 - RNA, 22 nt, Human
ugcugcagauugcagauuaacu

SEQ ID NO: 238475 - RNA, 22 nt, Human
gcugaaaugggcacugaaggcc

SEQ ID NO: 238476 - RNA, 22 nt, Human
guuaaugugguagugcauaucu

SEQ ID NO: 238477 - RNA, 22 nt, Human
aacugagauuacaagagacauu

SEQ ID NO: 238478 - RNA, 23 nt, Human
ucuggcuccauccuuggggaucc

SEQ ID NO: 238479 - RNA, 22 nt, Human
accccccagauaaucccuugag

SEQ ID NO: 238480 - RNA, 22 nt, Human
cuggcagauaguaagugaucaa

SEQ ID NO: 238481 - RNA, 22 nt, Human
aaugcacauguuguaauaaaua

SEQ ID NO: 238482 - RNA, 22 nt, Human
guuauguaaucuaacacucagu

SEQ ID NO: 238483 - RNA, 22 nt, Human
aggguagggccguagggccaug

SEQ ID NO: 238484 - RNA, 22 nt, Human
acaaaugugucuaauugugccu

SEQ ID NO: 238485 - RNA, 22 nt, Human
cuggguguagauggaaguuugg

SEQ ID NO: 238486 - RNA, 22 nt, Human
ucucccauucagcuugcaguca

SEQ ID NO: 238487 - RNA, 22 nt, Human
uuaguguguuaaugaguauauc

SEQ ID NO: 238488 - RNA, 22 nt, Human
accucagagauacaaaccaugg

SEQ ID NO: 238489 - RNA, 22 nt, Human
auccugggccucagaggugugu

SEQ ID NO: 238490 - RNA, 22 nt, Human
ucuguccuguuuccuccugaca

SEQ ID NO: 238491 - RNA, 22 nt, Human
gaagcugaugaggaccagauug

SEQ ID NO: 238492 - RNA, 22 nt, Human
uaauuuacucagauguucaauc

SEQ ID NO: 238493 - RNA, 22 nt, Human
uuuccacacaggcucuacuacu

SEQ ID NO: 238494 - RNA, 20 nt, Human
uggcccuguuuucuccaggc

SEQ ID NO: 238495 - RNA, 22 nt, Human
gagggcucugaaaggaggucac

SEQ ID NO: 238496 - RNA, 22 nt, Human
agucacugucuugcaaagguca

SEQ ID NO: 238497 - RNA, 22 nt, Human
acaguuuuuucaacauuggaau

SEQ ID NO: 238498 - RNA, 22 nt, Human
cccugguguggaugugauuggc

SEQ ID NO: 238499 - RNA, 22 nt, Human
gcccucuggugggugagccccg

SEQ ID NO: 238500 - RNA, 22 nt, Human
auuaguagcuguaauaacuggg

SEQ ID NO: 238501 - RNA, 22 nt, Human
ccucagcugcuucccuggagcc

SEQ ID NO: 238502 - RNA, 22 nt, Human
aggcagagcuggguuuugaaau

SEQ ID NO: 238503 - RNA, 22 nt, Human
agucucagaaaauaugcuuuuu

SEQ ID NO: 238504 - RNA, 22 nt, Human
agugucugcaaaaugaaagagc

SEQ ID NO: 238505 - RNA, 22 nt, Human
aguccuagcccuggauccauca

SEQ ID NO: 238506 - RNA, 22 nt, Human
ggccagaggaccucucauagcc

SEQ ID NO: 238507 - RNA, 22 nt, Human
cagagccucccuccucugccau

SEQ ID NO: 238508 - RNA, 22 nt, Human
uuuagagcaggguguggcacau

SEQ ID NO: 238509 - RNA, 20 nt, Human
uuaagaaaagcacauccugc

SEQ ID NO: 238510 - RNA, 22 nt, Human
caugugugucuccaccagcugc

SEQ ID NO: 238511 - RNA, 22 nt, Human
agaggccagaaaguaugccacc

SEQ ID NO: 238512 - RNA, 20 nt, Human
aaaugaugggaauaaucuau

SEQ ID NO: 238513 - RNA, 22 nt, Human
uacacagacucuucaauucaga

SEQ ID NO: 238514 - RNA, 22 nt, Human
auuuccaacuaccccuccauuu

SEQ ID NO: 238515 - RNA, 22 nt, Human
uuaguucuugggugaacuuuug

SEQ ID NO: 238516 - RNA, 22 nt, Human
ucagcaggcacggacaggcugc

SEQ ID NO: 238517 - RNA, 22 nt, Human
aucaagaacuuauuuuggaaau

SEQ ID NO: 238518 - RNA, 21 nt, Human
uggaaaaauguggccuaguga

SEQ ID NO: 238519 - RNA, 22 nt, Human
uuuuggcacugcgucuacaugg

SEQ ID NO: 238520 - RNA, 22 nt, Human
agccucugauggcucccaagga

SEQ ID NO: 238521 - RNA, 22 nt, Human
cacugagcugauuucaggugcc

SEQ ID NO: 238522 - RNA, 22 nt, Human
caauuauucagugacuuaagag

SEQ ID NO: 238523 - RNA, 22 nt, Human
auugauaucaguuugcugauug

SEQ ID NO: 238524 - RNA, 22 nt, Human
aguucacagccauguucaugug

SEQ ID NO: 238525 - RNA, 19 nt, Human
guggccagggcaggggcug

SEQ ID NO: 238526 - RNA, 22 nt, Human
uguaucugacaguggagcggag

SEQ ID NO: 238527 - RNA, 22 nt, Human
ucuguagucucugauauaucug

SEQ ID NO: 238528 - RNA, 22 nt, Human
gauucuuuacucagauuuuguu

SEQ ID NO: 238529 - RNA, 22 nt, Human
uaugaaauuuaaacacagauca

SEQ ID NO: 238530 - RNA, 22 nt, Human
agucacuugauucuccugagcu

SEQ ID NO: 238531 - RNA, 22 nt, Human
aaugaucuacucucauuaucuc

SEQ ID NO: 238532 - RNA, 20 nt, Human
ugggguccuggaggggaucc

SEQ ID NO: 238533 - RNA, 22 nt, Human
ucagugcaucacagaacuuugu

SEQ ID NO: 238534 - RNA, 22 nt, Human
auugaguauuguaaauaaaaca

SEQ ID NO: 238535 - RNA, 22 nt, Human
caaagcuggaaaaggaggcugg

SEQ ID NO: 238536 - RNA, 22 nt, Human
cuuuccuagaaauauauacuua

SEQ ID NO: 238537 - RNA, 22 nt, Human
uuacaugcuuagagaugcaugc

SEQ ID NO: 238538 - RNA, 22 nt, Human
auacaucucuuugaagugcuuu

SEQ ID NO: 238539 - RNA, 22 nt, Human
uaaggccaauuacauauguuca

SEQ ID NO: 238540 - RNA, 22 nt, Human
aggcaauccccugaggauacuu

SEQ ID NO: 238541 - RNA, 22 nt, Human
gacacugugcuagcugggcuua

SEQ ID NO: 238542 - RNA, 22 nt, Human
ugcuguauuacuuuuacaaacu

SEQ ID NO: 238543 - RNA, 22 nt, Human
aacugguauggugagaagagag

SEQ ID NO: 238544 - RNA, 22 nt, Human
gacauaaaauucaauaauuugu

SEQ ID NO: 238545 - RNA, 22 nt, Human
acacaguugguggcucagucug

SEQ ID NO: 238546 - RNA, 22 nt, Human
guucccaugccuccaagcuuca

SEQ ID NO: 238547 - RNA, 22 nt, Human
uaagcaaauagcuagaucagag

SEQ ID NO: 238548 - RNA, 22 nt, Human
ugcaggaggauuuuguggagcu

SEQ ID NO: 238549 - RNA, 22 nt, Human
uuagcuaaacuguaacuagaau

SEQ ID NO: 238550 - RNA, 22 nt, Human
uggcaaggcugugggggcagag

SEQ ID NO: 238551 - RNA, 22 nt, Human
cuggagcagcagguggccaggg

SEQ ID NO: 238552 - RNA, 23 nt, Human
agcaggcaucuguggcacaaggc

SEQ ID NO: 238553 - RNA, 22 nt, Human
uggagcagaggaagaaggcuuu

SEQ ID NO: 238554 - RNA, 22 nt, Human
aacacuuuccugccuuucugau

SEQ ID NO: 238555 - RNA, 22 nt, Human
ucaguguccaaaaagaggcaag

SEQ ID NO: 238556 - RNA, 22 nt, Human
uaaggccaaacuauuauaguuc

SEQ ID NO: 238557 - RNA, 22 nt, Human
caucaucuggcuuuuagaaaaa

SEQ ID NO: 238558 - RNA, 22 nt, Human
uaaugacauuguauccacagag

SEQ ID NO: 238559 - RNA, 22 nt, Human
uauguagaagcugcucaaagaa

SEQ ID NO: 238560 - RNA, 22 nt, Human
gcucaggagcucuugguggcgc

SEQ ID NO: 238561 - RNA, 22 nt, Human
accaggagccacaggaggagcc

SEQ ID NO: 238562 - RNA, 22 nt, Human
aagucauagucgggaaagacau

SEQ ID NO: 238563 - RNA, 22 nt, Human
caugagugaguaucucaagaua

SEQ ID NO: 238564 - RNA, 22 nt, Human
aaaguucugggggagaagaacg

SEQ ID NO: 238565 - RNA, 22 nt, Human
ugagcacagcuuucacuagaaa

SEQ ID NO: 238566 - RNA, 22 nt, Human
ugcugaggaaaaaugugacucu

SEQ ID NO: 238567 - RNA, 22 nt, Human
uuucugcauuguccucuugguu

SEQ ID NO: 238568 - RNA, 22 nt, Human
acauucuggaugucugaugaga

SEQ ID NO: 238569 - RNA, 22 nt, Human
uguuccucugaacuucuuccaa

SEQ ID NO: 238570 - RNA, 22 nt, Human
aaacuuucauguaucucuuuca

SEQ ID NO: 238571 - RNA, 18 nt, Human
ucagggaaucuuggccuu

SEQ ID NO: 238572 - RNA, 22 nt, Human
uuaguagaauguuauagcaauu

SEQ ID NO: 238573 - RNA, 22 nt, Human
cugaggagcugaaggcccucca

SEQ ID NO: 238574 - RNA, 20 nt, Human
ggaaucaggguaauguacug

SEQ ID NO: 238575 - RNA, 22 nt, Human
gaugcauugcaucgaguagcuu

SEQ ID NO: 238576 - RNA, 22 nt, Human
aagcaauuguccugucucuaca

SEQ ID NO: 238577 - RNA, 22 nt, Human
uaaugucuccaggguugaccua

SEQ ID NO: 238578 - RNA, 22 nt, Human
guuugcauguauuaagucaaua

SEQ ID NO: 238579 - RNA, 22 nt, Human
acaggcugcugggcuccgugcu

SEQ ID NO: 238580 - RNA, 22 nt, Human
uacagagugguuguccaacucu

SEQ ID NO: 238581 - RNA, 22 nt, Human
gcaugcagucaaccaguaaggg

SEQ ID NO: 238582 - RNA, 22 nt, Human
ccagggcaauuauuuggagggu

SEQ ID NO: 238583 - RNA, 22 nt, Human
ucucagggaguugaggcugccu

SEQ ID NO: 238584 - RNA, 22 nt, Human
cuggcugcuggccugaggaugc

SEQ ID NO: 238585 - RNA, 22 nt, Human
gcacagcucgagcucaggaggg

SEQ ID NO: 238586 - RNA, 22 nt, Human
agucuuggcuaugcauagagcu

SEQ ID NO: 238587 - RNA, 22 nt, Human
uaucuacaguuaauaugucauc

SEQ ID NO: 238588 - RNA, 22 nt, Human
uagaaucugauuacccuaugaa

SEQ ID NO: 238589 - RNA, 23 nt, Human
aaugacagugugugauugaagaa

SEQ ID NO: 238590 - RNA, 22 nt, Human
guguggcuagaagugucuuguu

SEQ ID NO: 238591 - RNA, 22 nt, Human
gcagucuaucuugugauuuaac

SEQ ID NO: 238592 - RNA, 22 nt, Human
guccagccccugacucccaggc

SEQ ID NO: 238593 - RNA, 22 nt, Human
aaagacaguggauucaaaaucc

SEQ ID NO: 238594 - RNA, 22 nt, Human
caagggaagaggacagggaccu

SEQ ID NO: 238595 - RNA, 17 nt, Human
uguauuuaucaugucag

SEQ ID NO: 238596 - RNA, 22 nt, Human
auuguauaagucuauuuacaau

SEQ ID NO: 238597 - RNA, 22 nt, Human
gggagacacgcugcaggcauaa

SEQ ID NO: 238598 - RNA, 22 nt, Human
ucacaucuccauguguuguuca

SEQ ID NO: 238599 - RNA, 22 nt, Human
acaguuuagagcaugaugacca

SEQ ID NO: 238600 - RNA, 22 nt, Human
uuuaguucucccagucuugauu

SEQ ID NO: 238601 - RNA, 22 nt, Human
gcucagcacuuucuccaaccac

SEQ ID NO: 238602 - RNA, 22 nt, Human
auugacagaaaauuggauggca

SEQ ID NO: 238603 - RNA, 22 nt, Human
aggcagcuuuaacugguaguag

SEQ ID NO: 238604 - RNA, 22 nt, Human
aauuccaacagacaaaguuaga

SEQ ID NO: 238605 - RNA, 23 nt, Human
ccagcccuccaccagcucuaggc

SEQ ID NO: 238606 - RNA, 22 nt, Human
gcauuacagcaguucaacuugg

SEQ ID NO: 238607 - RNA, 22 nt, Human
uggucagaaggaagggcuccua

SEQ ID NO: 238608 - RNA, 22 nt, Human
ggaggccagccugaggcugagg

SEQ ID NO: 238609 - RNA, 18 nt, Human
aaugugaauauuuacuuc

SEQ ID NO: 238610 - RNA, 22 nt, Human
uggcuggagcauuccuugucuu

SEQ ID NO: 238611 - RNA, 22 nt, Human
caggugggcugccucuccagcu

SEQ ID NO: 238612 - RNA, 20 nt, Human
auuugcaucugaauaacuua

SEQ ID NO: 238613 - RNA, 22 nt, Human
ggaggccuugccugcaggcaca

SEQ ID NO: 238614 - RNA, 22 nt, Human
aggcacagagagguuaaaugca

SEQ ID NO: 238615 - RNA, 22 nt, Human
gaggugaguggaucacgagguc

SEQ ID NO: 238616 - RNA, 22 nt, Human
aggcacuugcauugaugagguc

SEQ ID NO: 238617 - RNA, 22 nt, Human
cagugaggcucugcugagcggu

SEQ ID NO: 238618 - RNA, 22 nt, Human
ccucuguaaugauucacugaau

SEQ ID NO: 238619 - RNA, 22 nt, Human
gaggcugaacagguucucauga

SEQ ID NO: 238620 - RNA, 22 nt, Human
ccucuggccauucuuugaugga

SEQ ID NO: 238621 - RNA, 20 nt, Human
aggaggaaaaaaugacgagc

SEQ ID NO: 238622 - RNA, 22 nt, Human
gaaaugauuuuaguuuaucaug

SEQ ID NO: 238623 - RNA, 22 nt, Human
agccaaaguccaaaugcagugu

SEQ ID NO: 238624 - RNA, 22 nt, Human
agucuucuguuuuucagcagcu

SEQ ID NO: 238625 - RNA, 20 nt, Human
uuacagugggaccuuccuga

SEQ ID NO: 238626 - RNA, 22 nt, Human
aggcuagggccauggcugguga

SEQ ID NO: 238627 - RNA, 18 nt, Human
ucaugucucacaggugau

SEQ ID NO: 238628 - RNA, 22 nt, Human
cuuuaauucucaggugcacaua

SEQ ID NO: 238629 - RNA, 22 nt, Human
cagaacugaccucugauucuag

SEQ ID NO: 238630 - RNA, 22 nt, Human
aaacaugagcaucucuucaagc

SEQ ID NO: 238631 - RNA, 22 nt, Human
ccucuuggagucuaucauucug

SEQ ID NO: 238632 - RNA, 22 nt, Human
gcacaauaauucuuguuuugcu

SEQ ID NO: 238633 - RNA, 22 nt, Human
cuauucagccucuaagacaagu

SEQ ID NO: 238634 - RNA, 22 nt, Human
aggagcuucagagagaaccugg

SEQ ID NO: 238635 - RNA, 22 nt, Human
aguguucaggaucugaggccag

SEQ ID NO: 238636 - RNA, 22 nt, Human
auacaaucaucauuauauuccc

SEQ ID NO: 238637 - RNA, 22 nt, Human
gugcaaccaucaccacugacuc

SEQ ID NO: 238638 - RNA, 22 nt, Human
acucaccacacccuugcacuug

SEQ ID NO: 238639 - RNA, 22 nt, Human
cuucucccgaagccgguucugc

SEQ ID NO: 238640 - RNA, 22 nt, Human
cauuuguagcuauuuacuguau

SEQ ID NO: 238641 - RNA, 21 nt, Human
cugcuuccucucuucauggca

SEQ ID NO: 238642 - RNA, 22 nt, Human
ugcaauauguugcauuguaugg

SEQ ID NO: 238643 - RNA, 22 nt, Human
gacaacaauaauguggagcuga

SEQ ID NO: 238644 - RNA, 22 nt, Human
gaguagcauucuagaguaugcu

SEQ ID NO: 238645 - RNA, 23 nt, Human
ggcuccugcuucaugucccaccu

SEQ ID NO: 238646 - RNA, 22 nt, Human
aagcuguuggcagauagcucug

SEQ ID NO: 238647 - RNA, 22 nt, Human
uuuguucaugccuauauucuca

SEQ ID NO: 238648 - RNA, 22 nt, Human
ugaggauggaaugcugugcaag

SEQ ID NO: 238649 - RNA, 22 nt, Human
guggcauuaggccaggugcaua

SEQ ID NO: 238650 - RNA, 22 nt, Human
augcaggggcuguguuuugggu

SEQ ID NO: 238651 - RNA, 22 nt, Human
guuagaaagugucugcuugggu

SEQ ID NO: 238652 - RNA, 22 nt, Human
uccuggggaggucgaggcugag

SEQ ID NO: 238653 - RNA, 22 nt, Human
uucucagauauuuguauggaac

SEQ ID NO: 238654 - RNA, 22 nt, Human
uauacacauuuuuaccuauagu

SEQ ID NO: 238655 - RNA, 22 nt, Human
gcagccagccccucugaccucu

SEQ ID NO: 238656 - RNA, 22 nt, Human
uccugggcgagguacuggggcu

SEQ ID NO: 238657 - RNA, 21 nt, Human
ucugagacuggguuagaaugu

SEQ ID NO: 238658 - RNA, 22 nt, Human
uccauuuucuaaguaucacuua

SEQ ID NO: 238659 - RNA, 20 nt, Human
aauuuacucacagaaugaau

SEQ ID NO: 238660 - RNA, 22 nt, Human
gaaagcacccaagauuuccuuc

SEQ ID NO: 238661 - RNA, 23 nt, Human
aggaagagagagugccucuuucu

SEQ ID NO: 238662 - RNA, 22 nt, Human
uaaaugugggggccacgggcuu

SEQ ID NO: 238663 - RNA, 23 nt, Human
uccaggcacgcauuucuucuagc

SEQ ID NO: 238664 - RNA, 22 nt, Human
aaucuagaguucccagcauaaa

SEQ ID NO: 238665 - RNA, 22 nt, Human
uggcucugucaaacugcacaca

SEQ ID NO: 238666 - RNA, 22 nt, Human
uucagugucacaagagcaagcc

SEQ ID NO: 238667 - RNA, 17 nt, Human
ccagagcuacugagacu

SEQ ID NO: 238668 - RNA, 22 nt, Human
uccugccuguuuaccuguacuu

SEQ ID NO: 238669 - RNA, 22 nt, Human
acagcagcugccuucaggcucu

SEQ ID NO: 238670 - RNA, 18 nt, Human
agcccagcggagugaauc

SEQ ID NO: 238671 - RNA, 22 nt, Human
uccuggccgcuggccccugaga

SEQ ID NO: 238672 - RNA, 22 nt, Human
aaagugguugcugucagccucu

SEQ ID NO: 238673 - RNA, 22 nt, Human
aucucugugccaucauugcccc

SEQ ID NO: 238674 - RNA, 22 nt, Human
cuucacugaugggacagcucaa

SEQ ID NO: 238675 - RNA, 22 nt, Human
cccugaggggcuuacuuugccc

SEQ ID NO: 238676 - RNA, 22 nt, Human
uaguauuuuagaaaaccaugaa

SEQ ID NO: 238677 - RNA, 22 nt, Human
aaaaggcuuggaaccuuucccu

SEQ ID NO: 238678 - RNA, 22 nt, Human
cuccagugucucagagcagaug

SEQ ID NO: 238679 - RNA, 22 nt, Human
uucuagaauguuuugaaaggga

SEQ ID NO: 238680 - RNA, 22 nt, Human
uuagaaguucaggucuguaauc

SEQ ID NO: 238681 - RNA, 22 nt, Human
augaaucaaaguucauuugauc

SEQ ID NO: 238682 - RNA, 22 nt, Human
uuagcugcauuaucaaaguuau

SEQ ID NO: 238683 - RNA, 19 nt, Human
ugcuauuugaagaagugua

SEQ ID NO: 238684 - RNA, 19 nt, Human
auacacguguauacauaca

SEQ ID NO: 238685 - RNA, 22 nt, Human
aguguccuggcaaggguuucag

SEQ ID NO: 238686 - RNA, 22 nt, Human
caaaacauucagagagcucacu

SEQ ID NO: 238687 - RNA, 22 nt, Human
ucuccugggaggacaaggaagg

SEQ ID NO: 238688 - RNA, 22 nt, Human
uuuguucugaaaacucaagucc

SEQ ID NO: 238689 - RNA, 22 nt, Human
ugggccagcaauugcugcucag

SEQ ID NO: 238690 - RNA, 22 nt, Human
uuuucauuguaaaucaggaaac

SEQ ID NO: 238691 - RNA, 18 nt, Human
uugagggaggggcagagu

SEQ ID NO: 238692 - RNA, 17 nt, Human
gagacagcaggagcccc

SEQ ID NO: 238693 - RNA, 22 nt, Human
uaucaauaucucagugugcuuc

SEQ ID NO: 238694 - RNA, 22 nt, Human
guuaacauuucuaggugcaggg

SEQ ID NO: 238695 - RNA, 22 nt, Human
cccagcagaaucugaugagggc

SEQ ID NO: 238696 - RNA, 22 nt, Human
ggcaggcuuugagaaagagcau

SEQ ID NO: 238697 - RNA, 22 nt, Human
uguaacaguaguuacuauucuu

SEQ ID NO: 238698 - RNA, 22 nt, Human
ugaagcuuuaggauggguucau

SEQ ID NO: 238699 - RNA, 22 nt, Human
ggaggggagucucccaaagccg

SEQ ID NO: 238700 - RNA, 22 nt, Human
cuggagcuggcccaggcuggcc

SEQ ID NO: 238701 - RNA, 22 nt, Human
gaggugucguagauuauucuca

SEQ ID NO: 238702 - RNA, 22 nt, Human
auaaauugugcuuuugacaucu

SEQ ID NO: 238703 - RNA, 22 nt, Human
ugaguucuuugcaaauaacaag

SEQ ID NO: 238704 - RNA, 22 nt, Human
aagucagacagcugagcugccu

SEQ ID NO: 238705 - RNA, 22 nt, Human
ucagccuacacuccaacagcau

SEQ ID NO: 238706 - RNA, 22 nt, Human
auccuucuaagagggacguaug

SEQ ID NO: 238707 - RNA, 23 nt, Human
uaugaacugcauugcuggugugu

SEQ ID NO: 238708 - RNA, 23 nt, Human
cucuccaccuucccacccaggga

SEQ ID NO: 238709 - RNA, 22 nt, Human
acuuaacagacauuauuuaccu

SEQ ID NO: 238710 - RNA, 16 nt, Human
uucucuguuccuugug

SEQ ID NO: 238711 - RNA, 22 nt, Human
ucugcaucucuuauaaaugaug

SEQ ID NO: 238712 - RNA, 22 nt, Human
gagcagugggaaggaacagggu

SEQ ID NO: 238713 - RNA, 22 nt, Human
cagcccaggacugcagguguuu

SEQ ID NO: 238714 - RNA, 18 nt, Human
uggcagugagguaggcau

SEQ ID NO: 238715 - RNA, 22 nt, Human
aaaccaucagauaauucauacu

SEQ ID NO: 238716 - RNA, 22 nt, Human
agauaucuggaaaaaauguaug

SEQ ID NO: 238717 - RNA, 22 nt, Human
cagugccaaggagaaggacagc

SEQ ID NO: 238718 - RNA, 22 nt, Human
cuacauuucccagcugccuucc

SEQ ID NO: 238719 - RNA, 19 nt, Human
gccacaucuguaccccuuu

SEQ ID NO: 238720 - RNA, 22 nt, Human
auacacagcuacauugaacaau

SEQ ID NO: 238721 - RNA, 22 nt, Human
ucucuuuaaaaauagugaaaua

SEQ ID NO: 238722 - RNA, 22 nt, Human
uuucauguacuuuuuugauaga

SEQ ID NO: 238723 - RNA, 22 nt, Human
ugugaaaggagccauagacagu

SEQ ID NO: 238724 - RNA, 22 nt, Human
uagucuuucauuuggagcauuu

SEQ ID NO: 238725 - RNA, 22 nt, Human
ugcacagcugccuccucucugc

SEQ ID NO: 238726 - RNA, 22 nt, Human
gcagugcugaucccauggcaga

SEQ ID NO: 238727 - RNA, 22 nt, Human
guucuucaguucaggcuguuca

SEQ ID NO: 238728 - RNA, 19 nt, Human
auagaaccugcaguuucaa

SEQ ID NO: 238729 - RNA, 22 nt, Human
uguuaggguccugugcaggggc

SEQ ID NO: 238730 - RNA, 22 nt, Human
uagauccugcauagguugugcu

SEQ ID NO: 238731 - RNA, 20 nt, Human
gcucugggugguaaaugacu

SEQ ID NO: 238732 - RNA, 22 nt, Human
aacagcuaguaccaauccacua

SEQ ID NO: 238733 - RNA, 22 nt, Human
uauguacaccggggaagguggg

SEQ ID NO: 238734 - RNA, 22 nt, Human
gaggaggcuaucagcaaucagg

SEQ ID NO: 238735 - RNA, 22 nt, Human
uggagagucucugagccagggc

SEQ ID NO: 238736 - RNA, 22 nt, Human
uuguaaaguucuuaggaagcuc

SEQ ID NO: 238737 - RNA, 22 nt, Human
gaaucaaugguagauuaaguaa

SEQ ID NO: 238738 - RNA, 22 nt, Human
uuccugguaaauuauguccagg

SEQ ID NO: 238739 - RNA, 21 nt, Human
auggaaauuggcaaaugcuac

SEQ ID NO: 238740 - RNA, 22 nt, Human
uggcagagagacucuccuugau

SEQ ID NO: 238741 - RNA, 22 nt, Human
caagcaggccuggcuggaccgu

SEQ ID NO: 238742 - RNA, 22 nt, Human
cuucuggcguuggaggucugag

SEQ ID NO: 238743 - RNA, 22 nt, Human
aggagggagaugcccauccugg

SEQ ID NO: 238744 - RNA, 18 nt, Human
ggcuccaggaccuaccca

SEQ ID NO: 238745 - RNA, 22 nt, Human
aaaugaguuugccucuagauag

SEQ ID NO: 238746 - RNA, 22 nt, Human
ucugcaggccucgacaaggcca

SEQ ID NO: 238747 - RNA, 22 nt, Human
uuauuccaguaaucucuguaau

SEQ ID NO: 238748 - RNA, 22 nt, Human
uucaacaaugaaagcuaaggaa

SEQ ID NO: 238749 - RNA, 21 nt, Human
ucuggcaggaagacggauggg

SEQ ID NO: 238750 - RNA, 15 nt, Human
gcaggcaggucaccu

SEQ ID NO: 238751 - RNA, 22 nt, Human
ccagagguuccaggcuagggag

SEQ ID NO: 238752 - RNA, 22 nt, Human
gagggcucugucuggaagggaa

SEQ ID NO: 238753 - RNA, 22 nt, Human
caaggcuuggagagaaugccau

SEQ ID NO: 238754 - RNA, 22 nt, Human
ccccagagagcaccaugaagcc

SEQ ID NO: 238755 - RNA, 22 nt, Human
uugagcuguauaccuaugacug

SEQ ID NO: 238756 - RNA, 22 nt, Human
acaggccuggugcugcugacag

SEQ ID NO: 238757 - RNA, 22 nt, Human
cacaggagguuaggaagugguc

SEQ ID NO: 238758 - RNA, 22 nt, Human
uuuagaauuggcuagugggaau

SEQ ID NO: 238759 - RNA, 22 nt, Human
auggaugaguccuugagacaca

SEQ ID NO: 238760 - RNA, 18 nt, Human
agcuccugaacucugugg

SEQ ID NO: 238761 - RNA, 22 nt, Human
cccagagcaugugcugccuuug

SEQ ID NO: 238762 - RNA, 22 nt, Human
uuucagaaacgauuaugaacac

SEQ ID NO: 238763 - RNA, 22 nt, Human
uccuggccucugagucaagaac

SEQ ID NO: 238764 - RNA, 22 nt, Human
gcaaaugaagguggugcuacag

SEQ ID NO: 238765 - RNA, 22 nt, Human
uccagccaaucaacuauuguuu

SEQ ID NO: 238766 - RNA, 22 nt, Human
auaugccauuagcuagaaauaa

SEQ ID NO: 238767 - RNA, 22 nt, Human
ugagggaguuggguguauagga

SEQ ID NO: 238768 - RNA, 22 nt, Human
gcagcuuucugcaaugucaucc

SEQ ID NO: 238769 - RNA, 22 nt, Human
ugcaggaauuuuuugcagaaag

SEQ ID NO: 238770 - RNA, 22 nt, Human
cgucuuccucuuacgaugcgcu

SEQ ID NO: 238771 - RNA, 22 nt, Human
gcccacagaggcaccaccaggc

SEQ ID NO: 238772 - RNA, 22 nt, Human
ugaugaggacccaucaccuggu

SEQ ID NO: 238773 - RNA, 22 nt, Human
uggaaggaagccaaggaagguu

SEQ ID NO: 238774 - RNA, 22 nt, Human
cauuuuaagaugaccugguuuc

SEQ ID NO: 238775 - RNA, 22 nt, Human
ugcaugcaugcuacugggaggu

SEQ ID NO: 238776 - RNA, 22 nt, Human
cgugagggcauggcagugagga

SEQ ID NO: 238777 - RNA, 20 nt, Human
aguggcugauggaaagaagc

SEQ ID NO: 238778 - RNA, 22 nt, Human
gcugccuugaacuuggccuggg

SEQ ID NO: 238779 - RNA, 22 nt, Human
agaaguuauccaccuuagaugc

SEQ ID NO: 238780 - RNA, 23 nt, Human
agaagcagcuucuggaguaucgg

SEQ ID NO: 238781 - RNA, 22 nt, Human
ggcucuggugaggguaggagau

SEQ ID NO: 238782 - RNA, 22 nt, Human
gcuccaggcagagccucuuucg

SEQ ID NO: 238783 - RNA, 22 nt, Human
gucucugagcucugagcuggcu

SEQ ID NO: 238784 - RNA, 22 nt, Human
uguuuacugcauucuauuugcu

SEQ ID NO: 238785 - RNA, 22 nt, Human
agaaucuaaauaugcaauuuga

SEQ ID NO: 238786 - RNA, 22 nt, Human
caggcccugcacuaggcccugg

SEQ ID NO: 238787 - RNA, 22 nt, Human
auuguaauuuuagagaaagugg

SEQ ID NO: 238788 - RNA, 22 nt, Human
cauccauucauuaauucuaaag

SEQ ID NO: 238789 - RNA, 22 nt, Human
ggcccagcgaggccaccuacag

SEQ ID NO: 238790 - RNA, 22 nt, Human
caugugucacagccuuuuauug

SEQ ID NO: 238791 - RNA, 22 nt, Human
ugccaggcacgugagaguggcc

SEQ ID NO: 238792 - RNA, 22 nt, Human
uacaguuauaugugauaaguaa

SEQ ID NO: 238793 - RNA, 22 nt, Human
uggccucaaccguccuaagcac

SEQ ID NO: 238794 - RNA, 22 nt, Human
agcccugcucaucuggaucccg

SEQ ID NO: 238795 - RNA, 22 nt, Human
guggcuuccaugugcaucugac

SEQ ID NO: 238796 - RNA, 20 nt, Human
agugucugggccucaggccc

SEQ ID NO: 238797 - RNA, 22 nt, Human
uagcagcccaguuucuggccaa

SEQ ID NO: 238798 - RNA, 22 nt, Human
acaagucuuuuucaugucuucu

SEQ ID NO: 238799 - RNA, 22 nt, Human
cagggcauccgugcuccaugcu

SEQ ID NO: 238800 - RNA, 19 nt, Human
aauacaguguuauagaauu

SEQ ID NO: 238801 - RNA, 22 nt, Human
ggugcaaacguaauugugguuu

SEQ ID NO: 238802 - RNA, 22 nt, Human
aagugaagaaauacaugagaau

SEQ ID NO: 238803 - RNA, 20 nt, Human
aagcaauauagugcaaaugu

SEQ ID NO: 238804 - RNA, 20 nt, Human
gugggcagcaggcauacugg

SEQ ID NO: 238805 - RNA, 22 nt, Human
ucaguucuuuauuucacaguga

SEQ ID NO: 238806 - RNA, 22 nt, Human
gacagaugagggaguauucuca

SEQ ID NO: 238807 - RNA, 22 nt, Human
uauuaucauuaacuguugaauu

SEQ ID NO: 238808 - RNA, 22 nt, Human
uaagaacaagcuggggguucca

SEQ ID NO: 238809 - RNA, 22 nt, Human
aucaucuugaaagucuauguuu

SEQ ID NO: 238810 - RNA, 22 nt, Human
agcugcugagccauguccugcu

SEQ ID NO: 238811 - RNA, 22 nt, Human
cuacauuucauccagggagagc

SEQ ID NO: 238812 - RNA, 17 nt, Human
ggcuucagggagcuggg

SEQ ID NO: 238813 - RNA, 22 nt, Human
gauuuuacugucuguguaucuc

SEQ ID NO: 238814 - RNA, 23 nt, Human
ugagaucuuuguaguaucaauga

SEQ ID NO: 238815 - RNA, 22 nt, Human
agggggugucucugauuggguu

SEQ ID NO: 238816 - RNA, 22 nt, Human
ggcccugggcccucuagcuugu

SEQ ID NO: 238817 - RNA, 22 nt, Human
cagcccugaaacaaccuccucu

SEQ ID NO: 238818 - RNA, 22 nt, Human
agagccacugggagacagagca

SEQ ID NO: 238819 - RNA, 22 nt, Human
agagcugaggauccagcugagc

SEQ ID NO: 238820 - RNA, 22 nt, Human
aauacuggcugucaaagaugga

SEQ ID NO: 238821 - RNA, 22 nt, Human
gcaggcuuugacuuggggcagc

SEQ ID NO: 238822 - RNA, 23 nt, Human
agucuuacugucccagaacaggg

SEQ ID NO: 238823 - RNA, 22 nt, Human
uaggcugaaaggagaggugaag

SEQ ID NO: 238824 - RNA, 17 nt, Human
gggcugacaguggccuc

SEQ ID NO: 238825 - RNA, 22 nt, Human
uaaauguuaugcccaucaucca

SEQ ID NO: 238826 - RNA, 23 nt, Human
gaggagggucugacaaguguagc

SEQ ID NO: 238827 - RNA, 22 nt, Human
ucagucuucaaaucugagucgu

SEQ ID NO: 238828 - RNA, 22 nt, Human
uuaggaacuucugucucagugu

SEQ ID NO: 238829 - RNA, 22 nt, Human
agcccugggaggccagcuugua

SEQ ID NO: 238830 - RNA, 22 nt, Human
ugugccuggagucccugaggag

SEQ ID NO: 238831 - RNA, 22 nt, Human
gaaauacuguaaaguuauuauu

SEQ ID NO: 238832 - RNA, 22 nt, Human
cugugggagcacaugacagaua

SEQ ID NO: 238833 - RNA, 20 nt, Human
gggaugagaguccuagcucu

SEQ ID NO: 238834 - RNA, 22 nt, Human
uccaugaguuugaggaaaagag

SEQ ID NO: 238835 - RNA, 22 nt, Human
ugaaaaacacuaauuggaaagc

SEQ ID NO: 238836 - RNA, 20 nt, Human
cucugcugcgcaucccacuu

SEQ ID NO: 238837 - RNA, 22 nt, Human
auguuacaauucaaaaugcugc

SEQ ID NO: 238838 - RNA, 22 nt, Human
cucuuuggagaagcacguauua

SEQ ID NO: 238839 - RNA, 22 nt, Human
aggaacugauuuauaacuuuag

SEQ ID NO: 238840 - RNA, 22 nt, Human
uaggcugggcauucuggccagg

SEQ ID NO: 238841 - RNA, 22 nt, Human
augggacagguacuagaaaggg

SEQ ID NO: 238842 - RNA, 22 nt, Human
acugggagggucuugaagaggg

SEQ ID NO: 238843 - RNA, 22 nt, Human
caugaccccccaaggccugcag

SEQ ID NO: 238844 - RNA, 22 nt, Human
caggagcaaauccaaaagaauu

SEQ ID NO: 238845 - RNA, 21 nt, Human
ucacagacuggucagugaggc

SEQ ID NO: 238846 - RNA, 22 nt, Human
aguggcagagucaggguuugga

SEQ ID NO: 238847 - RNA, 22 nt, Human
ccucaaaucuuuagaguuauuu

SEQ ID NO: 238848 - RNA, 23 nt, Human
accaugaugggagugcaaauaag

SEQ ID NO: 238849 - RNA, 22 nt, Human
ggccucuggcaggcaggcccuc

SEQ ID NO: 238850 - RNA, 22 nt, Human
uauuauugacauuuacuuggug

SEQ ID NO: 238851 - RNA, 22 nt, Human
augcaaaugcagccauugcaga

SEQ ID NO: 238852 - RNA, 22 nt, Human
acauaugucuauuucauguaaa

SEQ ID NO: 238853 - RNA, 22 nt, Human
guuccucacguggacagaugau

SEQ ID NO: 238854 - RNA, 22 nt, Human
uggagggauacaaagaugaaaa

SEQ ID NO: 238855 - RNA, 22 nt, Human
uuucuauaacuggacuggauug

SEQ ID NO: 238856 - RNA, 22 nt, Human
aaguacaugcuuuauucagagu

SEQ ID NO: 238857 - RNA, 22 nt, Human
aguacuuuacuucuuacaguuu

SEQ ID NO: 238858 - RNA, 22 nt, Human
cuggaagagugacuuugcauuu

SEQ ID NO: 238859 - RNA, 22 nt, Human
agagcuggcugguagcccugau

SEQ ID NO: 238860 - RNA, 21 nt, Human
ucuguuggaggccucucuucc

SEQ ID NO: 238861 - RNA, 22 nt, Human
cagcaucuccauggcuuuggag

SEQ ID NO: 238862 - RNA, 21 nt, Human
ucagagagucacagugaacug

SEQ ID NO: 238863 - RNA, 22 nt, Human
uccuuuaaacuccuuucaaguc

SEQ ID NO: 238864 - RNA, 22 nt, Human
cccugcagacgucuugaugccu

SEQ ID NO: 238865 - RNA, 22 nt, Human
ugcaauaaguauugcuuacaug

SEQ ID NO: 238866 - RNA, 22 nt, Human
uugaagacacagacauauagag

SEQ ID NO: 238867 - RNA, 22 nt, Human
caguguuugcuuaaguuauaug

SEQ ID NO: 238868 - RNA, 22 nt, Human
uuuuagaaggaaugcuauggug

SEQ ID NO: 238869 - RNA, 20 nt, Human
cacaggcuauaugagagcca

SEQ ID NO: 238870 - RNA, 22 nt, Human
gcaagacaauggagcauaaacg

SEQ ID NO: 238871 - RNA, 22 nt, Human
guauuucaguuccucuugugac

SEQ ID NO: 238872 - RNA, 22 nt, Human
cuccacagccccuccaguggca

SEQ ID NO: 238873 - RNA, 22 nt, Human
aggcugaggcaagaggaucacu

SEQ ID NO: 238874 - RNA, 22 nt, Human
acuuugcagagccagaagagaa

SEQ ID NO: 238875 - RNA, 23 nt, Human
gaggcagcuccugcagugcccug

SEQ ID NO: 238876 - RNA, 22 nt, Human
ucacuggggccaugugagggac

SEQ ID NO: 238877 - RNA, 22 nt, Human
uggcaggucaugaguggccacc

SEQ ID NO: 238878 - RNA, 19 nt, Human
uccugggcugcgucuugcc

SEQ ID NO: 238879 - RNA, 22 nt, Human
agccucuguagaaagcagugug

SEQ ID NO: 238880 - RNA, 22 nt, Human
uugacccagcuuuccccacaau

SEQ ID NO: 238881 - RNA, 20 nt, Human
acgggcugggacccaugcac

SEQ ID NO: 238882 - RNA, 22 nt, Human
augguacagugcacugaaugga

SEQ ID NO: 238883 - RNA, 21 nt, Human
aggcccagcuuuccucuugcu

SEQ ID NO: 238884 - RNA, 22 nt, Human
uuagcaauuccagguaaguuau

SEQ ID NO: 238885 - RNA, 22 nt, Human
gccaggcagcagcgaggauggu

SEQ ID NO: 238886 - RNA, 22 nt, Human
uacaaugcugugcauguaaugg

SEQ ID NO: 238887 - RNA, 22 nt, Human
ggcuccacccugcuuccagaag

SEQ ID NO: 238888 - RNA, 22 nt, Human
uaccacaguuuaucuauucagc

SEQ ID NO: 238889 - RNA, 22 nt, Human
acagcauucccuuuggcugcuu

SEQ ID NO: 238890 - RNA, 19 nt, Human
caguaucauugcacauagu

SEQ ID NO: 238891 - RNA, 22 nt, Human
uggggcagcuccaucuauucca

SEQ ID NO: 238892 - RNA, 22 nt, Human
uggcucagccauucguguugcc

SEQ ID NO: 238893 - RNA, 22 nt, Human
caagcagauauuuuagucaaga

SEQ ID NO: 238894 - RNA, 16 nt, Human
caugagucaguaagca

SEQ ID NO: 238895 - RNA, 20 nt, Human
agcaggugacggggccugcu

SEQ ID NO: 238896 - RNA, 22 nt, Human
cagccaggcccagaucaugcug

SEQ ID NO: 238897 - RNA, 22 nt, Human
uuaugcaaggacuuauuacagu

SEQ ID NO: 238898 - RNA, 22 nt, Human
ugcagggcacacgcacgggugu

SEQ ID NO: 238899 - RNA, 22 nt, Human
agcugcaggccucuccugggga

SEQ ID NO: 238900 - RNA, 22 nt, Human
agaggccagaucaucauagaug

SEQ ID NO: 238901 - RNA, 22 nt, Human
cagagcaguaaaucuggggcac

SEQ ID NO: 238902 - RNA, 22 nt, Human
uagaaaugcaguguacuguguc

SEQ ID NO: 238903 - RNA, 22 nt, Human
uuggcugcuaauggcugacagc

SEQ ID NO: 238904 - RNA, 22 nt, Human
ccagcuuuccaggguugacugg

SEQ ID NO: 238905 - RNA, 22 nt, Human
aguguauucagaauguagcaaa

SEQ ID NO: 238906 - RNA, 22 nt, Human
cugagcagcguggggagcuggc

SEQ ID NO: 238907 - RNA, 22 nt, Human
gucugucuguuguugagaagca

SEQ ID NO: 238908 - RNA, 22 nt, Human
uucaguguggcccaugaagagg

SEQ ID NO: 238909 - RNA, 22 nt, Human
aauuugauuuucuuaaaccaua

SEQ ID NO: 238910 - RNA, 22 nt, Human
guuuccugcccugucuuaucca

SEQ ID NO: 238911 - RNA, 22 nt, Human
aaggccacagagccucagagag

SEQ ID NO: 238912 - RNA, 22 nt, Human
uccucagacuucccuuugugua

SEQ ID NO: 238913 - RNA, 22 nt, Human
caauuuuuaaacuaugaaguug

SEQ ID NO: 238914 - RNA, 22 nt, Human
ccuggcacauaguaaguacuag

SEQ ID NO: 238915 - RNA, 23 nt, Human
aaauccugccucuuguauuuauc

SEQ ID NO: 238916 - RNA, 22 nt, Human
gagcugccuacauugccaagag

SEQ ID NO: 238917 - RNA, 22 nt, Human
gcagacucugagagugagugcc

SEQ ID NO: 238918 - RNA, 22 nt, Human
ugccuagccuucuucaugccau

SEQ ID NO: 238919 - RNA, 22 nt, Human
caaggcugaucauuuucccaua

SEQ ID NO: 238920 - RNA, 22 nt, Human
uaucagcaggccaaagcugcaa

SEQ ID NO: 238921 - RNA, 22 nt, Human
aggugcugugcuaugcacuugu

SEQ ID NO: 238922 - RNA, 22 nt, Human
gugcacagaaacauacaaugug

SEQ ID NO: 238923 - RNA, 22 nt, Human
cacaggugccaucucuucaugg

SEQ ID NO: 238924 - RNA, 22 nt, Human
uuugacucuugcuuugguggcu

SEQ ID NO: 238925 - RNA, 22 nt, Human
gaaaggcucagauucccccagg

SEQ ID NO: 238926 - RNA, 22 nt, Human
gcugggcucguucccacacgcg

SEQ ID NO: 238927 - RNA, 22 nt, Human
uucuggaguauuccuggcagcc

SEQ ID NO: 238928 - RNA, 22 nt, Human
ccagugcauaaucaauacagcc

SEQ ID NO: 238929 - RNA, 23 nt, Human
acauaaacagaaggugugcuucc

SEQ ID NO: 238930 - RNA, 22 nt, Human
ucacagcauucgcaauggacag

SEQ ID NO: 238931 - RNA, 22 nt, Human
accuucaagauugugggucaau

SEQ ID NO: 238932 - RNA, 22 nt, Human
uuucaaaauuuugcagugguaa

SEQ ID NO: 238933 - RNA, 22 nt, Human
cagagcagucuggagauccagc

SEQ ID NO: 238934 - RNA, 22 nt, Human
ggcaugcaaaugugggugaccu

SEQ ID NO: 238935 - RNA, 22 nt, Human
uaaacauuuguuauucuuguuu

SEQ ID NO: 238936 - RNA, 22 nt, Human
aagcaaggcccagagcaucagc

SEQ ID NO: 238937 - RNA, 22 nt, Human
guccugugccgaggugggaagc

SEQ ID NO: 238938 - RNA, 22 nt, Human
cuguggaagguuuagauaggua

SEQ ID NO: 238939 - RNA, 22 nt, Human
ucuuguuucuucuaagcagcag

SEQ ID NO: 238940 - RNA, 22 nt, Human
guccuguguaagccaggacaau

SEQ ID NO: 238941 - RNA, 22 nt, Human
aguguuuuauuagaacacagcc

SEQ ID NO: 238942 - RNA, 22 nt, Human
ggaaagaacccuggauggcugg

SEQ ID NO: 238943 - RNA, 22 nt, Human
gacagcagauaagaccucauca

SEQ ID NO: 238944 - RNA, 22 nt, Human
aaagccaugaauguuauagagg

SEQ ID NO: 238945 - RNA, 22 nt, Human
uaugauaaccuguuguaguuug

SEQ ID NO: 238946 - RNA, 22 nt, Human
aaggaacuugccacagaaaaga

SEQ ID NO: 238947 - RNA, 17 nt, Human
aaacuggggucaggagc

SEQ ID NO: 238948 - RNA, 23 nt, Human
auaucacacccaguacagucucc

SEQ ID NO: 238949 - RNA, 22 nt, Human
gcuucucuuguccaagggcagg

SEQ ID NO: 238950 - RNA, 22 nt, Human
gcuuaggaguuucaggcucuca

SEQ ID NO: 238951 - RNA, 22 nt, Human
gccuucucugugagcuccuagg

SEQ ID NO: 238952 - RNA, 22 nt, Human
ggccucaguuucuucaacugua

SEQ ID NO: 238953 - RNA, 21 nt, Human
uccaggcugaugaugucaacu

SEQ ID NO: 238954 - RNA, 22 nt, Human
gcucccagaaccaaggcugggg

SEQ ID NO: 238955 - RNA, 22 nt, Human
uauugcugccucguccaggcug

SEQ ID NO: 238956 - RNA, 22 nt, Human
cugcuccuguccagcagggcca

SEQ ID NO: 238957 - RNA, 18 nt, Human
aggaagcaggaggaaggc

SEQ ID NO: 238958 - RNA, 18 nt, Human
ucagguguuuucuguaua

SEQ ID NO: 238959 - RNA, 22 nt, Human
cugggccuggacgggcagaucu

SEQ ID NO: 238960 - RNA, 22 nt, Human
guuucuuaaaagaggaguuaga

SEQ ID NO: 238961 - RNA, 22 nt, Human
ccuggcucuggggcggacagcu

SEQ ID NO: 238962 - RNA, 22 nt, Human
aaaggauaagguuaucaauuuu

SEQ ID NO: 238963 - RNA, 18 nt, Human
ucuguccuuccauucuuc

SEQ ID NO: 238964 - RNA, 22 nt, Human
uaggaagcuuccagaacuuaag

SEQ ID NO: 238965 - RNA, 20 nt, Human
ucugggagggacaagucucc

SEQ ID NO: 238966 - RNA, 22 nt, Human
caauuuuauugguccaaauaca

SEQ ID NO: 238967 - RNA, 20 nt, Human
cuccaguguucaggggagug

SEQ ID NO: 238968 - RNA, 22 nt, Human
acccagccacagcauugaggga

SEQ ID NO: 238969 - RNA, 22 nt, Human
cuuccaguaguaucauucucau

SEQ ID NO: 238970 - RNA, 22 nt, Human
aggccccaaagcagugcaagua

SEQ ID NO: 238971 - RNA, 22 nt, Human
ccaugcccuugucaucuccagg

SEQ ID NO: 238972 - RNA, 22 nt, Human
ucuuaaaaguaugccaauugga

SEQ ID NO: 238973 - RNA, 18 nt, Human
uuuauauggauagagacc

SEQ ID NO: 238974 - RNA, 22 nt, Human
uuaaauagcucuuguagaagaa

SEQ ID NO: 238975 - RNA, 22 nt, Human
uguauucucucaauauuucaua

SEQ ID NO: 238976 - RNA, 22 nt, Human
agggccagaaucccucagucua

SEQ ID NO: 238977 - RNA, 22 nt, Human
aucagguagauuuaauauucug

SEQ ID NO: 238978 - RNA, 22 nt, Human
uuucuuuaucauagcaucuuug

SEQ ID NO: 238979 - RNA, 22 nt, Human
agcgcuggcuggcgcuccuucc

SEQ ID NO: 238980 - RNA, 22 nt, Human
uuagugcuuggcacacaauaca

SEQ ID NO: 238981 - RNA, 22 nt, Human
ucaucugucuguucaacagccu

SEQ ID NO: 238982 - RNA, 22 nt, Human
cuggcuucagcugccaucaaug

SEQ ID NO: 238983 - RNA, 22 nt, Human
ugcagagaucugggcgucggcu

SEQ ID NO: 238984 - RNA, 22 nt, Human
ccagaauagaaugaaagaaggg

SEQ ID NO: 238985 - RNA, 22 nt, Human
acaugugcucuugcuguacagc

SEQ ID NO: 238986 - RNA, 20 nt, Human
agaaucugacccagagagac

SEQ ID NO: 238987 - RNA, 22 nt, Human
ccacccuggacaggccucugag

SEQ ID NO: 238988 - RNA, 22 nt, Human
aacaugaaguuuucuauaguga

SEQ ID NO: 238989 - RNA, 22 nt, Human
gccaguguuuauagcagugagg

SEQ ID NO: 238990 - RNA, 22 nt, Human
augcuucagugcuaccuucaaa

SEQ ID NO: 238991 - RNA, 22 nt, Human
gagggcucaacuacuacuaggc

SEQ ID NO: 238992 - RNA, 22 nt, Human
uaggugguuauaaauucaaggc

SEQ ID NO: 238993 - RNA, 22 nt, Human
uccuaggcccagccugagcugu

SEQ ID NO: 238994 - RNA, 22 nt, Human
cucauuuacacuaugggaacua

SEQ ID NO: 238995 - RNA, 22 nt, Human
uuuuuauaugaaggauagugcg

SEQ ID NO: 238996 - RNA, 22 nt, Human
gugacuguaauuaccuuagcaa

SEQ ID NO: 238997 - RNA, 22 nt, Human
caacagagcaguugaucaggaa

SEQ ID NO: 238998 - RNA, 22 nt, Human
gcacugcuuuuaccuaggugag

SEQ ID NO: 238999 - RNA, 22 nt, Human
ugauuacaaaagauuguuugaa

SEQ ID NO: 239000 - RNA, 22 nt, Human
auguacagccacuucacaguua

SEQ ID NO: 239001 - RNA, 23 nt, Human
ugacacaggucaaaaauaagaug

SEQ ID NO: 239002 - RNA, 22 nt, Human
uucuuucuuuguaguccugaac

SEQ ID NO: 239003 - RNA, 22 nt, Human
ugcagagagauccucaggguuu

SEQ ID NO: 239004 - RNA, 22 nt, Human
uguccucacaugguggggagag

SEQ ID NO: 239005 - RNA, 22 nt, Human
uauuagguaugaacuggcaacc

SEQ ID NO: 239006 - RNA, 22 nt, Human
uuggguuuucccuugaaacuga

SEQ ID NO: 239007 - RNA, 22 nt, Human
aagacacacacauaugcugagu

SEQ ID NO: 239008 - RNA, 22 nt, Human
agucugggagaaggugagauua

SEQ ID NO: 239009 - RNA, 22 nt, Human
uacaagaauuucuuucugguug

SEQ ID NO: 239010 - RNA, 22 nt, Human
ugcccagcgcccacauucuguc

SEQ ID NO: 239011 - RNA, 22 nt, Human
agcagccaggaaucugcagagc

SEQ ID NO: 239012 - RNA, 22 nt, Human
aaggaaagacaggacggaauuc

SEQ ID NO: 239013 - RNA, 22 nt, Human
gccaggcuggccagcaccuucu

SEQ ID NO: 239014 - RNA, 22 nt, Human
ucugcucaauacugcucaugaa

SEQ ID NO: 239015 - RNA, 19 nt, Human
acccagggguuuaugugug

SEQ ID NO: 239016 - RNA, 22 nt, Human
acuuugcaauacuuaauacaaa

SEQ ID NO: 239017 - RNA, 21 nt, Human
cuguccaaauuucauaacuuu

SEQ ID NO: 239018 - RNA, 23 nt, Human
auccagccuggggguuuaaccac

SEQ ID NO: 239019 - RNA, 22 nt, Human
ugccuuagaggauagugaagcc

SEQ ID NO: 239020 - RNA, 22 nt, Human
gccagggaaacugcagaccagc

SEQ ID NO: 239021 - RNA, 21 nt, Human
ugcuggcugaaaggcacagag

SEQ ID NO: 239022 - RNA, 22 nt, Human
guccauacaguggcacacaucu

SEQ ID NO: 239023 - RNA, 22 nt, Human
uuuaaacauaucuguugaggga

SEQ ID NO: 239024 - RNA, 22 nt, Human
acauaacauaguugacauuuuu

SEQ ID NO: 239025 - RNA, 22 nt, Human
uccuccaggcaccucacuggcu

SEQ ID NO: 239026 - RNA, 22 nt, Human
aaaauucugucauuaaauugug

SEQ ID NO: 239027 - RNA, 22 nt, Human
ugccugugcccuucuuggcauu

SEQ ID NO: 239028 - RNA, 22 nt, Human
guccuguggaaagcuagccgcu

SEQ ID NO: 239029 - RNA, 22 nt, Human
uaaauguguguagccaucugug

SEQ ID NO: 239030 - RNA, 22 nt, Human
uggcagccuucucugagaaggu

SEQ ID NO: 239031 - RNA, 23 nt, Human
auugauucccucuuggaagggau

SEQ ID NO: 239032 - RNA, 22 nt, Human
ucuguucuugcuuuucuccaac

SEQ ID NO: 239033 - RNA, 22 nt, Human
caggcagcucugcuuuuccuaa

SEQ ID NO: 239034 - RNA, 22 nt, Human
ugagcaggucaagacuccagcu

SEQ ID NO: 239035 - RNA, 22 nt, Human
aaugcaaacuccacuggagcag

SEQ ID NO: 239036 - RNA, 20 nt, Human
gggaggcgagggcugagcag

SEQ ID NO: 239037 - RNA, 22 nt, Human
uccaaauauacagaaucuccuc

SEQ ID NO: 239038 - RNA, 22 nt, Human
uauuuccauguuagaacuaagu

SEQ ID NO: 239039 - RNA, 22 nt, Human
aagguacaccaaaguucaaguu

SEQ ID NO: 239040 - RNA, 22 nt, Human
aagugguugcuugugagucccc

SEQ ID NO: 239041 - RNA, 22 nt, Human
agcuuuaucagaggagucucua

SEQ ID NO: 239042 - RNA, 22 nt, Human
cugggagcccgcguccuggugg

SEQ ID NO: 239043 - RNA, 22 nt, Human
aguaccugauuucacagaccag

SEQ ID NO: 239044 - RNA, 22 nt, Human
aaguggcauguauaagaaagaa

SEQ ID NO: 239045 - RNA, 22 nt, Human
gcauaauauacaugcuugaucc

SEQ ID NO: 239046 - RNA, 22 nt, Human
uggugagaauugguuggauuua

SEQ ID NO: 239047 - RNA, 22 nt, Human
aggcucugucaggcggagcagc

SEQ ID NO: 239048 - RNA, 22 nt, Human
auacagauguuaaagcaauuuc

SEQ ID NO: 239049 - RNA, 22 nt, Human
ccucagucugucugaucugcca

SEQ ID NO: 239050 - RNA, 22 nt, Human
cuccucagacuuuccuuguccg

SEQ ID NO: 239051 - RNA, 22 nt, Human
aaguacaaucuuucuguaaagg

SEQ ID NO: 239052 - RNA, 22 nt, Human
auccacaggucauguaaugugg

SEQ ID NO: 239053 - RNA, 22 nt, Human
ugcucuggaguggcuugugcac

SEQ ID NO: 239054 - RNA, 21 nt, Human
uucaaaaugguguguuugucu

SEQ ID NO: 239055 - RNA, 22 nt, Human
uccaggcacgaggcccugugca

SEQ ID NO: 239056 - RNA, 22 nt, Human
guccagccaggcugcagcaccc

SEQ ID NO: 239057 - RNA, 22 nt, Human
auguguauacuugugcuuacuc

SEQ ID NO: 239058 - RNA, 22 nt, Human
uugaaugaaugguccauauaga

SEQ ID NO: 239059 - RNA, 22 nt, Human
aggcucugacgucacacguggc

SEQ ID NO: 239060 - RNA, 19 nt, Human
gcauuucucuuuacagcca

SEQ ID NO: 239061 - RNA, 22 nt, Human
uccaggauggugacgguggcca

SEQ ID NO: 239062 - RNA, 22 nt, Human
guggcccaggcacccugaugac

SEQ ID NO: 239063 - RNA, 22 nt, Human
ucccuuaaaacucauguguugu

SEQ ID NO: 239064 - RNA, 22 nt, Human
cagggcucaggcucugggauuc

SEQ ID NO: 239065 - RNA, 22 nt, Human
uuuuguuuguguccacugcagu

SEQ ID NO: 239066 - RNA, 22 nt, Human
acuuuuaaaugaguuucaguug

SEQ ID NO: 239067 - RNA, 22 nt, Human
ucuucuguccuaagucaaagca

SEQ ID NO: 239068 - RNA, 22 nt, Human
aaguucuugaagacuuuaaaua

SEQ ID NO: 239069 - RNA, 22 nt, Human
cugguuuaguaggggacugaag

SEQ ID NO: 239070 - RNA, 22 nt, Human
cuacacuuugguugacuuugug

SEQ ID NO: 239071 - RNA, 22 nt, Human
gcagguguucucagaggaggcu

SEQ ID NO: 239072 - RNA, 22 nt, Human
ucccacugagccccugcuggug

SEQ ID NO: 239073 - RNA, 22 nt, Human
uugggcagggaaaggacaggca

SEQ ID NO: 239074 - RNA, 19 nt, Human
caggccagugucagggggc

SEQ ID NO: 239075 - RNA, 22 nt, Human
ugaguuuuuucaacauaugaag

SEQ ID NO: 239076 - RNA, 22 nt, Human
uugcagcuucuaccacuguuuc

SEQ ID NO: 239077 - RNA, 22 nt, Human
auggaagacagauaaggcagaa

SEQ ID NO: 239078 - RNA, 22 nt, Human
uuuguaaaaggaggaagcaugg

SEQ ID NO: 239079 - RNA, 22 nt, Human
aggagcucuugaugcuugaggg

SEQ ID NO: 239080 - RNA, 22 nt, Human
gaggccaggagugcuguaaguu

SEQ ID NO: 239081 - RNA, 22 nt, Human
cagcucagucuugaagcacugg

SEQ ID NO: 239082 - RNA, 22 nt, Human
uccaucugguaaaauucauuga

SEQ ID NO: 239083 - RNA, 22 nt, Human
acuggaaaguauucuuucacug

SEQ ID NO: 239084 - RNA, 22 nt, Human
uucugggcagagcuggagcugc

SEQ ID NO: 239085 - RNA, 16 nt, Human
ucugccagggacaggc

SEQ ID NO: 239086 - RNA, 22 nt, Human
ccaggucugcgggcggcaggca

SEQ ID NO: 239087 - RNA, 22 nt, Human
cacagaggagugcacacucucu

SEQ ID NO: 239088 - RNA, 22 nt, Human
agcaggcaggcccagcggcugg

SEQ ID NO: 239089 - RNA, 22 nt, Human
guuucauuuacaucuguaggua

SEQ ID NO: 239090 - RNA, 22 nt, Human
cccagagagguaaaacagccuu

SEQ ID NO: 239091 - RNA, 22 nt, Human
uucuggcaugagagaugggggu

SEQ ID NO: 239092 - RNA, 22 nt, Human
uagcaagaggaaacaaggggcc

SEQ ID NO: 239093 - RNA, 22 nt, Human
acuccuggguugcaguccucaa

SEQ ID NO: 239094 - RNA, 22 nt, Human
caauaauauccugugcuguuug

SEQ ID NO: 239095 - RNA, 22 nt, Human
gucccauaaguagugcaacuug

SEQ ID NO: 239096 - RNA, 22 nt, Human
agacagaacagaauaauuguug

SEQ ID NO: 239097 - RNA, 22 nt, Human
cacaggcaggagguucuccagu

SEQ ID NO: 239098 - RNA, 22 nt, Human
cugccccuggcuggugaagcag

SEQ ID NO: 239099 - RNA, 22 nt, Human
guucuuuaaacugcugcucugu

SEQ ID NO: 239100 - RNA, 19 nt, Human
gccugggaugggcagaacu

SEQ ID NO: 239101 - RNA, 22 nt, Human
ucuggagaggaggauguggaca

SEQ ID NO: 239102 - RNA, 22 nt, Human
agcacagaaugagguggaagug

SEQ ID NO: 239103 - RNA, 22 nt, Human
aguguguuuaggcugcggguug

SEQ ID NO: 239104 - RNA, 22 nt, Human
aacauggcucaugagagauuug

SEQ ID NO: 239105 - RNA, 22 nt, Human
gagcaacacauugaaugaggau

SEQ ID NO: 239106 - RNA, 22 nt, Human
ucuuccagcuucuagaggaugc

SEQ ID NO: 239107 - RNA, 22 nt, Human
gguggcugcuuccucaagagga

SEQ ID NO: 239108 - RNA, 22 nt, Human
agcauguguggagaaauauuuu

SEQ ID NO: 239109 - RNA, 22 nt, Human
cugcagggcccaaggucaacgg

SEQ ID NO: 239110 - RNA, 22 nt, Human
ugaggcagugcugggaagccug

SEQ ID NO: 239111 - RNA, 20 nt, Human
cucucacagcucccucagcc

SEQ ID NO: 239112 - RNA, 22 nt, Human
ugggaagacuccucaggaggcg

SEQ ID NO: 239113 - RNA, 22 nt, Human
uuaaggcauugauauggugcua

SEQ ID NO: 239114 - RNA, 22 nt, Human
aaguucaaguguaaucuuuauu

SEQ ID NO: 239115 - RNA, 22 nt, Human
gucaccugaggggaggugacag

SEQ ID NO: 239116 - RNA, 22 nt, Human
cuuuacagaauaagaauacugg

SEQ ID NO: 239117 - RNA, 22 nt, Human
uagggcugaggcaacaagggag

SEQ ID NO: 239118 - RNA, 22 nt, Human
uugguacaaaaguaacuguggu

SEQ ID NO: 239119 - RNA, 22 nt, Human
ugguuagaugaggcugguuuca

SEQ ID NO: 239120 - RNA, 22 nt, Human
gcccucagaugggaaaggaggg

SEQ ID NO: 239121 - RNA, 22 nt, Human
accaggcccuccagcugcgugg

SEQ ID NO: 239122 - RNA, 22 nt, Human
cuggcuccaaauucugauguuc

SEQ ID NO: 239123 - RNA, 22 nt, Human
gcagugaaaaagugcacccugu

SEQ ID NO: 239124 - RNA, 22 nt, Human
augguuuacugaucuuuuuggu

SEQ ID NO: 239125 - RNA, 19 nt, Human
gcuaggguugguggcgugc

SEQ ID NO: 239126 - RNA, 22 nt, Human
aauugaugauucuuaugugaaa

SEQ ID NO: 239127 - RNA, 22 nt, Human
ccaggaaccgaugaucagaggg

SEQ ID NO: 239128 - RNA, 22 nt, Human
aagggaggggauguaagccugg

SEQ ID NO: 239129 - RNA, 21 nt, Human
uucucuggucaagcacacaua

SEQ ID NO: 239130 - RNA, 20 nt, Human
uccacaucuuuugagaugug

SEQ ID NO: 239131 - RNA, 22 nt, Human
gcaggccugcccagcaggaugg

SEQ ID NO: 239132 - RNA, 17 nt, Human
ggcuggaggggacccgg

SEQ ID NO: 239133 - RNA, 22 nt, Human
uguuauacuauuuagagguaca

SEQ ID NO: 239134 - RNA, 19 nt, Human
cugggacaaugaaagcauc

SEQ ID NO: 239135 - RNA, 22 nt, Human
ugugugcaugcuuggggcagca

SEQ ID NO: 239136 - RNA, 22 nt, Human
gucugcccucacgccagcuggg

SEQ ID NO: 239137 - RNA, 19 nt, Human
ugcuucagaaauagaaagc

SEQ ID NO: 239138 - RNA, 22 nt, Human
agugcugacucugggcacagug

SEQ ID NO: 239139 - RNA, 21 nt, Human
ugaggcaggggugcuuuuguc

SEQ ID NO: 239140 - RNA, 22 nt, Human
gauaaacauucuugcacaugug

SEQ ID NO: 239141 - RNA, 22 nt, Human
ucugcagacaggaagcugaggc

SEQ ID NO: 239142 - RNA, 22 nt, Human
caggaauguuugugcuccuuua

SEQ ID NO: 239143 - RNA, 22 nt, Human
uuuaagagcuaguaugucauuu

SEQ ID NO: 239144 - RNA, 22 nt, Human
uuccccaggcuggagugcagug

SEQ ID NO: 239145 - RNA, 19 nt, Human
uucacauuuugcucugagg

SEQ ID NO: 239146 - RNA, 22 nt, Human
ccugucugcaugaucccugcca

SEQ ID NO: 239147 - RNA, 22 nt, Human
acaauuugaggcuacucaauug

SEQ ID NO: 239148 - RNA, 22 nt, Human
gcugcaaaccugccaccuggug

SEQ ID NO: 239149 - RNA, 22 nt, Human
uguggggcugucaggcaacugg

SEQ ID NO: 239150 - RNA, 22 nt, Human
aguguccuugauuccuguuguu

SEQ ID NO: 239151 - RNA, 22 nt, Human
ucuggcagagugauaggauaag

SEQ ID NO: 239152 - RNA, 22 nt, Human
aaagacacaaauguagaccaaa

SEQ ID NO: 239153 - RNA, 22 nt, Human
uguguucaaugacuucaucuuu

SEQ ID NO: 239154 - RNA, 22 nt, Human
ggugagaaagggauuccuguuc

SEQ ID NO: 239155 - RNA, 22 nt, Human
ggugcaggcgguggggcaagua

SEQ ID NO: 239156 - RNA, 22 nt, Human
cucagcacauuccuaagggaug

SEQ ID NO: 239157 - RNA, 22 nt, Human
caagauuuguauugggccucug

SEQ ID NO: 239158 - RNA, 22 nt, Human
uuuguucuaacuucugcagaca

SEQ ID NO: 239159 - RNA, 22 nt, Human
aagcuugaaucaauggauaucc

SEQ ID NO: 239160 - RNA, 22 nt, Human
cuccucccaauugccaagugcu

SEQ ID NO: 239161 - RNA, 18 nt, Human
gccuucagacugcaugcu

SEQ ID NO: 239162 - RNA, 23 nt, Human
cagaaaguuugagaagauacauc

SEQ ID NO: 239163 - RNA, 22 nt, Human
ucagagaacacagaggugaugu

SEQ ID NO: 239164 - RNA, 22 nt, Human
ucacaucuauacccaauaauuu

SEQ ID NO: 239165 - RNA, 22 nt, Human
aggcuucugauaccaugagaga

SEQ ID NO: 239166 - RNA, 22 nt, Human
ugacuuuagaauuuuauccaga

SEQ ID NO: 239167 - RNA, 22 nt, Human
cugacuccuaugccccaugggc

SEQ ID NO: 239168 - RNA, 22 nt, Human
agggcugagaaugacagggccg

SEQ ID NO: 239169 - RNA, 22 nt, Human
aaccagcucugcaaaaugucau

SEQ ID NO: 239170 - RNA, 22 nt, Human
ccaggccagagugcaguggcac

SEQ ID NO: 239171 - RNA, 22 nt, Human
cucuuucucauugucagcagaa

SEQ ID NO: 239172 - RNA, 22 nt, Human
uucugagggaaccuuguucuug

SEQ ID NO: 239173 - RNA, 22 nt, Human
ucuggcagguucccauguuaug

SEQ ID NO: 239174 - RNA, 22 nt, Human
cagcaagaguugggguuguugg

SEQ ID NO: 239175 - RNA, 17 nt, Human
ccaggugggaggugggg

SEQ ID NO: 239176 - RNA, 21 nt, Human
uuaaugcuaugcagaaaaucu

SEQ ID NO: 239177 - RNA, 22 nt, Human
gauuuacagaucuaagggucac

SEQ ID NO: 239178 - RNA, 20 nt, Human
uuucuguaaggcauuaaucu

SEQ ID NO: 239179 - RNA, 22 nt, Human
uguacaauagcuauuaucucca

SEQ ID NO: 239180 - RNA, 22 nt, Human
guggcagucgcugacagauaca

SEQ ID NO: 239181 - RNA, 22 nt, Human
augauggaggccgugauggacg

SEQ ID NO: 239182 - RNA, 22 nt, Human
cauauuuauagaucuggcauuu

SEQ ID NO: 239183 - RNA, 22 nt, Human
guccuggcugucuuauguugaa

SEQ ID NO: 239184 - RNA, 22 nt, Human
auacagguggacuucaguuagu

SEQ ID NO: 239185 - RNA, 22 nt, Human
auggcugccuagaggugagaug

SEQ ID NO: 239186 - RNA, 22 nt, Human
uggagggcaucuguggucaggc

SEQ ID NO: 239187 - RNA, 22 nt, Human
cuggcagcuucaggacacucgg

SEQ ID NO: 239188 - RNA, 22 nt, Human
gcuggcuggaguaaggagggag

SEQ ID NO: 239189 - RNA, 22 nt, Human
ucugccuguugcuagaauguca

SEQ ID NO: 239190 - RNA, 22 nt, Human
aaacaaguuuguagacuagcca

SEQ ID NO: 239191 - RNA, 22 nt, Human
acagguggcuuccauuuucuaa

SEQ ID NO: 239192 - RNA, 22 nt, Human
aggggugugcauccuggaggau

SEQ ID NO: 239193 - RNA, 20 nt, Human
cugcccagccacugagggau

SEQ ID NO: 239194 - RNA, 22 nt, Human
gagcugcagcggcugacgcaac

SEQ ID NO: 239195 - RNA, 22 nt, Human
cuuguugcugaauucaggauuc

SEQ ID NO: 239196 - RNA, 22 nt, Human
aaugaacacagcccucuacuuu

SEQ ID NO: 239197 - RNA, 22 nt, Human
agccugcugggaagggaggcuu

SEQ ID NO: 239198 - RNA, 22 nt, Human
uuugcuuaaaguucuuucuggu

SEQ ID NO: 239199 - RNA, 22 nt, Human
aguuggagugaacaugagauug

SEQ ID NO: 239200 - RNA, 22 nt, Human
aagggcaggcacccacccucac

SEQ ID NO: 239201 - RNA, 22 nt, Human
ugucccugauccacuggacccc

SEQ ID NO: 239202 - RNA, 22 nt, Human
cuuguuaaaaugcagauuccaa

SEQ ID NO: 239203 - RNA, 22 nt, Human
cagaacagucgccugcauggau

SEQ ID NO: 239204 - RNA, 22 nt, Human
cugaaagaauaagauguuuaca

SEQ ID NO: 239205 - RNA, 19 nt, Human
uuuauuugagacaugccuu

SEQ ID NO: 239206 - RNA, 22 nt, Human
cagcagccagacaagauacauc

SEQ ID NO: 239207 - RNA, 22 nt, Human
ucuuuuaaaagcccugcugucu

SEQ ID NO: 239208 - RNA, 22 nt, Human
acaauuucuaauauagaucuua

SEQ ID NO: 239209 - RNA, 22 nt, Human
augaaaacggaccagagcuauu

SEQ ID NO: 239210 - RNA, 22 nt, Human
ccugugacaaacccgccuauuc

SEQ ID NO: 239211 - RNA, 20 nt, Human
agaggaggauuauuuuauuc

SEQ ID NO: 239212 - RNA, 22 nt, Human
ccuggccugcucggcucuuaag

SEQ ID NO: 239213 - RNA, 22 nt, Human
ucugggcuugguuagggcuguu

SEQ ID NO: 239214 - RNA, 22 nt, Human
ucuuuggggcaucugggagauu

SEQ ID NO: 239215 - RNA, 22 nt, Human
agcaugaaaacaugaaacagca

SEQ ID NO: 239216 - RNA, 22 nt, Human
agcccuaaauuaucuuuauuuu

SEQ ID NO: 239217 - RNA, 22 nt, Human
ucugaaauuguuaguaaaaaug

SEQ ID NO: 239218 - RNA, 22 nt, Human
augcuuuagugucaaguuuggg

SEQ ID NO: 239219 - RNA, 22 nt, Human
ggcacagcacuguaggccuggg

SEQ ID NO: 239220 - RNA, 23 nt, Human
aaugggugcaacuauccaugaca

SEQ ID NO: 239221 - RNA, 22 nt, Human
uggcaaagaugguucucaccau

SEQ ID NO: 239222 - RNA, 22 nt, Human
aagggcagaaagggacgcuuug

SEQ ID NO: 239223 - RNA, 22 nt, Human
ugccagggccauagggagucua

SEQ ID NO: 239224 - RNA, 22 nt, Human
gcuggcaguaaaggguuuggca

SEQ ID NO: 239225 - RNA, 22 nt, Human
acauucuauagcaagcugaucu

SEQ ID NO: 239226 - RNA, 22 nt, Human
agguggccggugccagccgggc

SEQ ID NO: 239227 - RNA, 22 nt, Human
auucucuuuguauaacaucuug

SEQ ID NO: 239228 - RNA, 22 nt, Human
cuguggcucuuuaguugagcac

SEQ ID NO: 239229 - RNA, 22 nt, Human
uggcucugugaacagacgacug

SEQ ID NO: 239230 - RNA, 22 nt, Human
ucuggacuugaaucagaguaga

SEQ ID NO: 239231 - RNA, 22 nt, Human
ugagcagagaugacugggcauu

SEQ ID NO: 239232 - RNA, 20 nt, Human
caucugagcccacagaaguc

SEQ ID NO: 239233 - RNA, 22 nt, Human
aaacuacacuuugggaccagca

SEQ ID NO: 239234 - RNA, 22 nt, Human
ggucagguagcucugacaggcc

SEQ ID NO: 239235 - RNA, 22 nt, Human
auucaagcugaauggugacaga

SEQ ID NO: 239236 - RNA, 22 nt, Human
uacaaguauguuuuaaaauguu

SEQ ID NO: 239237 - RNA, 22 nt, Human
cugcucucuguuccccuggauc

SEQ ID NO: 239238 - RNA, 17 nt, Human
ucaaagaaugcaugcag

SEQ ID NO: 239239 - RNA, 20 nt, Human
cuuuggcaaugagaacaggg

SEQ ID NO: 239240 - RNA, 22 nt, Human
gaaggcuuauuuucuuuguaaa

SEQ ID NO: 239241 - RNA, 22 nt, Human
aagugauucuagucaugauucu

SEQ ID NO: 239242 - RNA, 22 nt, Human
ucccgcaugccgccggugaaca

SEQ ID NO: 239243 - RNA, 22 nt, Human
ccagcuggcacuguggcugccc

SEQ ID NO: 239244 - RNA, 22 nt, Human
cugccuccucacguccacagug

SEQ ID NO: 239245 - RNA, 22 nt, Human
uagaaaugugauaauagcuuaa

SEQ ID NO: 239246 - RNA, 22 nt, Human
aauguugaggauaucagaaaau

SEQ ID NO: 239247 - RNA, 22 nt, Human
cuuccugcccacuuccugcugg

SEQ ID NO: 239248 - RNA, 22 nt, Human
gccaggcgggucucaaacuccu

SEQ ID NO: 239249 - RNA, 22 nt, Human
ccauggccucgcucuacguggg

SEQ ID NO: 239250 - RNA, 22 nt, Human
ggaacauuuuuuaaggcagaaa

SEQ ID NO: 239251 - RNA, 22 nt, Human
cccaggagaauauaauguucuu

SEQ ID NO: 239252 - RNA, 22 nt, Human
auaacagagagcuacugaacug

SEQ ID NO: 239253 - RNA, 22 nt, Human
uggggaaagacauucauacagu

SEQ ID NO: 239254 - RNA, 22 nt, Human
ggagaagggccaauuccaugua

SEQ ID NO: 239255 - RNA, 22 nt, Human
agccaugcaccuuacucuugcu

SEQ ID NO: 239256 - RNA, 22 nt, Human
gaacuugguauuccuuuuaaca

SEQ ID NO: 239257 - RNA, 22 nt, Human
guacaaaaguuauugcgguuuu

SEQ ID NO: 239258 - RNA, 22 nt, Human
uccaggcauaagccuugagugu

SEQ ID NO: 239259 - RNA, 22 nt, Human
caucagugcccuuggggaugcc

SEQ ID NO: 239260 - RNA, 22 nt, Human
aacaaacaguuaaguguggaug

SEQ ID NO: 239261 - RNA, 22 nt, Human
ccaucuccacugucccugucaa

SEQ ID NO: 239262 - RNA, 22 nt, Human
cuggacagugggcagaggagac

SEQ ID NO: 239263 - RNA, 22 nt, Human
gccuguuuacuuugccgcagga

SEQ ID NO: 239264 - RNA, 21 nt, Human
gcucaggcucagguucagguu

SEQ ID NO: 239265 - RNA, 22 nt, Human
ucucucuauaugucaacagggg

SEQ ID NO: 239266 - RNA, 22 nt, Human
uauucaugacauugcauaugca

SEQ ID NO: 239267 - RNA, 22 nt, Human
augcacaggugcugaugcacgc

SEQ ID NO: 239268 - RNA, 20 nt, Human
aggagcucugugcugggaag

SEQ ID NO: 239269 - RNA, 22 nt, Human
aaacacaagauggccucuucug

SEQ ID NO: 239270 - RNA, 23 nt, Human
uuccagaguccacaucugccacc

SEQ ID NO: 239271 - RNA, 22 nt, Human
ucucaggaaaaaucccuagcuu

SEQ ID NO: 239272 - RNA, 22 nt, Human
ucagcugaaguggagaagcaga

SEQ ID NO: 239273 - RNA, 22 nt, Human
guauuucaucuugaaaaccagu

SEQ ID NO: 239274 - RNA, 22 nt, Human
agaaucagugcuggcuauuagc

SEQ ID NO: 239275 - RNA, 22 nt, Human
ggaagcugaauccagagacagg

SEQ ID NO: 239276 - RNA, 22 nt, Human
uggcugaggcacagcugccgcc

SEQ ID NO: 239277 - RNA, 23 nt, Human
agagccugaaagacuucuggcac

SEQ ID NO: 239278 - RNA, 22 nt, Human
gagcucagacucgggccugggg

SEQ ID NO: 239279 - RNA, 22 nt, Human
auuuccaugaaguuuaguuaua

SEQ ID NO: 239280 - RNA, 22 nt, Human
aggcaaauagauaguccauaca

SEQ ID NO: 239281 - RNA, 22 nt, Human
gccaggcugcuggcugcugucc

SEQ ID NO: 239282 - RNA, 22 nt, Human
gccaggcagagccccgugcagc

SEQ ID NO: 239283 - RNA, 22 nt, Human
gugagagaauuugaguuaaauu

SEQ ID NO: 239284 - RNA, 22 nt, Human
cagcuauucucugaaaugaaua

SEQ ID NO: 239285 - RNA, 22 nt, Human
acaggcagggaccucuugaguu

SEQ ID NO: 239286 - RNA, 22 nt, Human
ugccugccaggcaaccugggag

SEQ ID NO: 239287 - RNA, 22 nt, Human
cugugucugccugggauccauu

SEQ ID NO: 239288 - RNA, 22 nt, Human
gugugcucaagggcaggaaccu

SEQ ID NO: 239289 - RNA, 22 nt, Human
ucucugggaaugggccugggua

SEQ ID NO: 239290 - RNA, 22 nt, Human
cucagcccggugcucgugccac

SEQ ID NO: 239291 - RNA, 22 nt, Human
ggcuguggggggagccugcccg

SEQ ID NO: 239292 - RNA, 22 nt, Human
acacugcucacuucuucccuug

SEQ ID NO: 239293 - RNA, 19 nt, Human
ucagggcaguccggucccc

SEQ ID NO: 239294 - RNA, 22 nt, Human
auggcagggcacagcucuaguu

SEQ ID NO: 239295 - RNA, 22 nt, Human
aaaagcacuacaauuucgcuuc

SEQ ID NO: 239296 - RNA, 22 nt, Human
agaaagcccacccagaagaugu

SEQ ID NO: 239297 - RNA, 22 nt, Human
accaggcuugaugauuugcuua

SEQ ID NO: 239298 - RNA, 22 nt, Human
uaagaaacaugauacuuuuccu

SEQ ID NO: 239299 - RNA, 22 nt, Human
aagggccauaacuugcaguguu

SEQ ID NO: 239300 - RNA, 22 nt, Human
agaucagaaauguaauggcagu

SEQ ID NO: 239301 - RNA, 22 nt, Human
gaugaaaaucuugagaugucga

SEQ ID NO: 239302 - RNA, 22 nt, Human
ugggcucugguuuccuggcugg

SEQ ID NO: 239303 - RNA, 22 nt, Human
uuaccuguuuuacaugcacaac

SEQ ID NO: 239304 - RNA, 22 nt, Human
uugguuuacuaggauucaaauu

SEQ ID NO: 239305 - RNA, 22 nt, Human
gacugucuuguuucuaagauga

SEQ ID NO: 239306 - RNA, 22 nt, Human
guccuucaagguccuuggugug

SEQ ID NO: 239307 - RNA, 22 nt, Human
acugccuugauugccaguuucc

SEQ ID NO: 239308 - RNA, 18 nt, Human
acuggagcauuagcagcu

SEQ ID NO: 239309 - RNA, 22 nt, Human
agcccaggaaguugaggcuugc

SEQ ID NO: 239310 - RNA, 22 nt, Human
ggcugagggccagggcuagucu

SEQ ID NO: 239311 - RNA, 22 nt, Human
uucagagagaaaccagugggaa

SEQ ID NO: 239312 - RNA, 22 nt, Human
ucuccaggcuuaaucucagcuu

SEQ ID NO: 239313 - RNA, 22 nt, Human
auagaauccugcagcaagccuu

SEQ ID NO: 239314 - RNA, 22 nt, Human
aaauugugcucacacugauauu

SEQ ID NO: 239315 - RNA, 22 nt, Human
agugaguugaacauugauaaug

SEQ ID NO: 239316 - RNA, 22 nt, Human
gcugcagggagcuggaaggcuc

SEQ ID NO: 239317 - RNA, 22 nt, Human
ugagcugcccccuggccugcuc

SEQ ID NO: 239318 - RNA, 22 nt, Human
accuuuauagcugauuaugaca

SEQ ID NO: 239319 - RNA, 22 nt, Human
aacucucauuuuagguguaagg

SEQ ID NO: 239320 - RNA, 20 nt, Human
cugccaugauugauagagug

SEQ ID NO: 239321 - RNA, 22 nt, Human
ggcacugacacuagcauggcac

SEQ ID NO: 239322 - RNA, 22 nt, Human
cagguccugcagggagaguaaa

SEQ ID NO: 239323 - RNA, 22 nt, Human
gcaggcuucccccacaccuacg

SEQ ID NO: 239324 - RNA, 22 nt, Human
uacauauguaaacauguauaaa

SEQ ID NO: 239325 - RNA, 22 nt, Human
cucucugguuucagcgaagggg

SEQ ID NO: 239326 - RNA, 22 nt, Human
ggacacaggcagcugggugggu

SEQ ID NO: 239327 - RNA, 22 nt, Human
uggcucaggagggaucuuugcu

SEQ ID NO: 239328 - RNA, 21 nt, Human
gaggggcagcucuuagcauua

SEQ ID NO: 239329 - RNA, 22 nt, Human
ugcuaucaccaacucugcuaag

SEQ ID NO: 239330 - RNA, 22 nt, Human
uuucacauacaguguauaguag

SEQ ID NO: 239331 - RNA, 22 nt, Human
ccagcuggcaggagagucaggg

SEQ ID NO: 239332 - RNA, 22 nt, Human
uggacaggauagugcaguacgc

SEQ ID NO: 239333 - RNA, 22 nt, Human
acagagagggagugauaaaucc

SEQ ID NO: 239334 - RNA, 22 nt, Human
gacuccagguguccaggccucc

SEQ ID NO: 239335 - RNA, 22 nt, Human
aaagacagacggaaaccugagg

SEQ ID NO: 239336 - RNA, 22 nt, Human
ccugagugaccugaggucuagu

SEQ ID NO: 239337 - RNA, 21 nt, Human
uccuccuguagaggguccugg

SEQ ID NO: 239338 - RNA, 23 nt, Human
ugaaagcaaugggucuauaguau

SEQ ID NO: 239339 - RNA, 22 nt, Human
cugugucccagccaggauaaug

SEQ ID NO: 239340 - RNA, 22 nt, Human
gccuggcaguggggcccuggga

SEQ ID NO: 239341 - RNA, 22 nt, Human
cacugugcuccuaacuagcugu

SEQ ID NO: 239342 - RNA, 22 nt, Human
gucucugugucugagagagccc

SEQ ID NO: 239343 - RNA, 22 nt, Human
cucagaggcaagcaaggagcug

SEQ ID NO: 239344 - RNA, 22 nt, Human
uaaggcauaaggccagaggcua

SEQ ID NO: 239345 - RNA, 22 nt, Human
aucugucuuuuauucaugagcu

SEQ ID NO: 239346 - RNA, 22 nt, Human
ugcccugcccaucuacccuguc

SEQ ID NO: 239347 - RNA, 22 nt, Human
ucgucugugaaauugggauaag

SEQ ID NO: 239348 - RNA, 22 nt, Human
ucacaaauauuuuaacaguagg

SEQ ID NO: 239349 - RNA, 22 nt, Human
cagcaagacaaggaacaaacug

SEQ ID NO: 239350 - RNA, 22 nt, Human
aaccugcauguuucuaaaagca

SEQ ID NO: 239351 - RNA, 22 nt, Human
ucugcucacauggcuccaugca

SEQ ID NO: 239352 - RNA, 22 nt, Human
gggagggaaggaggcgccgugu

SEQ ID NO: 239353 - RNA, 22 nt, Human
uacaauguuaaggaaagagaga

SEQ ID NO: 239354 - RNA, 21 nt, Human
uuacagcaauguuagcaggaa

SEQ ID NO: 239355 - RNA, 22 nt, Human
cacaaaugguuguagacauuaa

SEQ ID NO: 239356 - RNA, 22 nt, Human
aucuucugggcagugaaaauug

SEQ ID NO: 239357 - RNA, 22 nt, Human
ucauggaaacagcaaugcuaau

SEQ ID NO: 239358 - RNA, 23 nt, Human
uccuucaaguuaggaagugaaca

SEQ ID NO: 239359 - RNA, 22 nt, Human
aaaguguuuuugagcuguaguu

SEQ ID NO: 239360 - RNA, 22 nt, Human
ggcagggcagcgcugauuaggg

SEQ ID NO: 239361 - RNA, 22 nt, Human
acccugcccucuccagcucagg

SEQ ID NO: 239362 - RNA, 22 nt, Human
cguuuuucaguggucuuagguc

SEQ ID NO: 239363 - RNA, 18 nt, Human
augcuucugauagaagca

SEQ ID NO: 239364 - RNA, 22 nt, Human
uuacugaggagcauaucugagu

SEQ ID NO: 239365 - RNA, 22 nt, Human
agaagggaacucagagaugauu

SEQ ID NO: 239366 - RNA, 22 nt, Human
gcacauauguaaauagcugccu

SEQ ID NO: 239367 - RNA, 22 nt, Human
ugugugcagccucugucuuugg

SEQ ID NO: 239368 - RNA, 22 nt, Human
uccauaaaugaaauagaacgcu

SEQ ID NO: 239369 - RNA, 22 nt, Human
gccucuagggcuguugggaauu

SEQ ID NO: 239370 - RNA, 22 nt, Human
aguccuggguccagcagguccu

SEQ ID NO: 239371 - RNA, 21 nt, Human
aauacagugaagaauuucuuu

SEQ ID NO: 239372 - RNA, 22 nt, Human
acugcugauuuuaggacuguua

SEQ ID NO: 239373 - RNA, 22 nt, Human
gcucagagauggggaaugaaaa

SEQ ID NO: 239374 - RNA, 22 nt, Human
uuaaaugcucacauaaagguag

SEQ ID NO: 239375 - RNA, 22 nt, Human
ucuauauuuugaaagguauuua

SEQ ID NO: 239376 - RNA, 22 nt, Human
gcucugggcugcccucuggaca

SEQ ID NO: 239377 - RNA, 22 nt, Human
agggcucuuuaggccgaggcca

SEQ ID NO: 239378 - RNA, 22 nt, Human
ucugccuuguugcaggcgcuau

SEQ ID NO: 239379 - RNA, 22 nt, Human
gccaggcucaguagcgauuccu

SEQ ID NO: 239380 - RNA, 22 nt, Human
gggcagagagcuggaacuccuu

SEQ ID NO: 239381 - RNA, 21 nt, Human
ucuccuggguccaacccaugc

SEQ ID NO: 239382 - RNA, 22 nt, Human
aagacaugcaguuuguuccauu

SEQ ID NO: 239383 - RNA, 22 nt, Human
uggugcaguucccagggccggg

SEQ ID NO: 239384 - RNA, 22 nt, Human
cccugcagaucuaggguccuuc

SEQ ID NO: 239385 - RNA, 22 nt, Human
uagaucauggaguaaaauggaa

SEQ ID NO: 239386 - RNA, 22 nt, Human
uucacaagucuggaauaugcua

SEQ ID NO: 239387 - RNA, 22 nt, Human
cagguccuuguuuguaaagcag

SEQ ID NO: 239388 - RNA, 22 nt, Human
agggagccagaguugggagcuc

SEQ ID NO: 239389 - RNA, 22 nt, Human
ggcuccaggagaugcugggcag

SEQ ID NO: 239390 - RNA, 22 nt, Human
aaaagggaaagcagaaugacuu

SEQ ID NO: 239391 - RNA, 22 nt, Human
ggugagcaaagcuucaucugua

SEQ ID NO: 239392 - RNA, 22 nt, Human
gccagccagaguggcugugugu

SEQ ID NO: 239393 - RNA, 22 nt, Human
aggcagcuuucuggugcaccau

SEQ ID NO: 239394 - RNA, 22 nt, Human
ggaaaagacagguuaacuguga

SEQ ID NO: 239395 - RNA, 22 nt, Human
cuccaggaaaauagggaaugag

SEQ ID NO: 239396 - RNA, 21 nt, Human
accuuagagagaaagccauca

SEQ ID NO: 239397 - RNA, 22 nt, Human
gaugagguaagaauguaacacc

SEQ ID NO: 239398 - RNA, 22 nt, Human
gacuuuauuauaguggcaauag

SEQ ID NO: 239399 - RNA, 22 nt, Human
cagaggccuuucuacagugaua

SEQ ID NO: 239400 - RNA, 22 nt, Human
acuccugggugcauuucugauu

SEQ ID NO: 239401 - RNA, 22 nt, Human
aaauuauuacaagcuaguuggc

SEQ ID NO: 239402 - RNA, 22 nt, Human
aaacucuagcuacuaggauaac

SEQ ID NO: 239403 - RNA, 22 nt, Human
acacaagauuguguauugaauu

SEQ ID NO: 239404 - RNA, 17 nt, Human
cugccuggagucccauc

SEQ ID NO: 239405 - RNA, 18 nt, Human
aaaaugcaggcgacaugg

SEQ ID NO: 239406 - RNA, 22 nt, Human
cauuucacuauucacuaaaagg

SEQ ID NO: 239407 - RNA, 22 nt, Human
aggauguggguuuucacauugu

SEQ ID NO: 239408 - RNA, 22 nt, Human
agugcagggggaaagggugucu

SEQ ID NO: 239409 - RNA, 21 nt, Human
aaaaguuugacaggaaaggga

SEQ ID NO: 239410 - RNA, 22 nt, Human
cccugugcugucaugcugggcg

SEQ ID NO: 239411 - RNA, 22 nt, Human
auaugcuuugggauuagaucau

SEQ ID NO: 239412 - RNA, 22 nt, Human
aguaaaacagagaaaucacuca

SEQ ID NO: 239413 - RNA, 22 nt, Human
uuuuggaacacagacauuagaa

SEQ ID NO: 239414 - RNA, 22 nt, Human
ccagcccucgguagucccauag

SEQ ID NO: 239415 - RNA, 22 nt, Human
uguauguauguauguauuuggg

SEQ ID NO: 239416 - RNA, 22 nt, Human
cacaggcuuuucugacauaggc

SEQ ID NO: 239417 - RNA, 22 nt, Human
uuggcugcucagugauaugaga

SEQ ID NO: 239418 - RNA, 21 nt, Human
cagaggccucaugcucugugc

SEQ ID NO: 239419 - RNA, 22 nt, Human
uaggaaagcaguagagccagga

SEQ ID NO: 239420 - RNA, 22 nt, Human
ggcaccagcacuugggauggcu

SEQ ID NO: 239421 - RNA, 23 nt, Human
agacaguggccgagagguacuag

SEQ ID NO: 239422 - RNA, 22 nt, Human
agcccugcugccugaauuagcu

SEQ ID NO: 239423 - RNA, 22 nt, Human
ucuuuggaguguuaucaguaau

SEQ ID NO: 239424 - RNA, 22 nt, Human
ucagaaguuaauacgaggagaa

SEQ ID NO: 239425 - RNA, 22 nt, Human
cuuauucauaagucagacacac

SEQ ID NO: 239426 - RNA, 22 nt, Human
cugggccuuuaccuacggaguu

SEQ ID NO: 239427 - RNA, 22 nt, Human
ugcaccaguuucucagagaauc

SEQ ID NO: 239428 - RNA, 22 nt, Human
uaaaaguauacuuucaaaggag

SEQ ID NO: 239429 - RNA, 22 nt, Human
uccaugcagagaacugaaguac

SEQ ID NO: 239430 - RNA, 22 nt, Human
caggcaugaugggaagugccug

SEQ ID NO: 239431 - RNA, 22 nt, Human
ccauuaaaauggaauguaguga

SEQ ID NO: 239432 - RNA, 22 nt, Human
uuguacagaaaaaauucuuggu

SEQ ID NO: 239433 - RNA, 22 nt, Human
aguauuucugaauauuaucaua

SEQ ID NO: 239434 - RNA, 22 nt, Human
agcccugguagccugcugccau

SEQ ID NO: 239435 - RNA, 22 nt, Human
aggaaacugaagcccagagagg

SEQ ID NO: 239436 - RNA, 22 nt, Human
cucuagaacagugcugagccuu

SEQ ID NO: 239437 - RNA, 22 nt, Human
gcugguagaccucacugcacuc

SEQ ID NO: 239438 - RNA, 22 nt, Human
gccaggcugaggcucuggaaga

SEQ ID NO: 239439 - RNA, 22 nt, Human
agccaggccagcugucuugagu

SEQ ID NO: 239440 - RNA, 22 nt, Human
aggguccugggugcaguugcuu

SEQ ID NO: 239441 - RNA, 22 nt, Human
accagaaggaccagaggcaagg

SEQ ID NO: 239442 - RNA, 22 nt, Human
guacaggaaggagggaguuuca

SEQ ID NO: 239443 - RNA, 22 nt, Human
aggugcuguuugucagcaguuu

SEQ ID NO: 239444 - RNA, 22 nt, Human
uuauucaucagugcauuaauuu

SEQ ID NO: 239445 - RNA, 22 nt, Human
cuuucccacgcaguggaugaga

SEQ ID NO: 239446 - RNA, 22 nt, Human
uugcaaguuccuuaugagaauc

SEQ ID NO: 239447 - RNA, 22 nt, Human
ccuggccuccuggccuucucau

SEQ ID NO: 239448 - RNA, 20 nt, Human
aggauggcaagcaagugcau

SEQ ID NO: 239449 - RNA, 22 nt, Human
auugucagggguuguggaguuu

SEQ ID NO: 239450 - RNA, 22 nt, Human
uguuucuuuguagauauucuuu

SEQ ID NO: 239451 - RNA, 22 nt, Human
gaauucuaggguaaauauccua

SEQ ID NO: 239452 - RNA, 22 nt, Human
ucaggaagccacuccacagaga

SEQ ID NO: 239453 - RNA, 22 nt, Human
agacaaauuuccugcaaugaag

SEQ ID NO: 239454 - RNA, 22 nt, Human
gacagcagggacauguaggaag

SEQ ID NO: 239455 - RNA, 22 nt, Human
uauuaaauguuauuuggguugu

SEQ ID NO: 239456 - RNA, 22 nt, Human
ucauuucuccgaccugcugucc

SEQ ID NO: 239457 - RNA, 22 nt, Human
uguacaaauucaguucuagggu

SEQ ID NO: 239458 - RNA, 22 nt, Human
caggaguggugugagggacucc

SEQ ID NO: 239459 - RNA, 22 nt, Human
cuggaagacguuugaagccaug

SEQ ID NO: 239460 - RNA, 22 nt, Human
cugcuguguuccuccugcaucu

SEQ ID NO: 239461 - RNA, 22 nt, Human
acagcuacucugcagauaaauc

SEQ ID NO: 239462 - RNA, 19 nt, Human
gcuacugaggcccaggacc

SEQ ID NO: 239463 - RNA, 22 nt, Human
aagaaucauuguaaaguucugu

SEQ ID NO: 239464 - RNA, 22 nt, Human
uggcuucucaguuucauaauga

SEQ ID NO: 239465 - RNA, 22 nt, Human
ucaggagcaacaucuuugaauc

SEQ ID NO: 239466 - RNA, 22 nt, Human
ugagacagggucuugcucuguu

SEQ ID NO: 239467 - RNA, 22 nt, Human
uggcuuccaaauuaucccuaga

SEQ ID NO: 239468 - RNA, 22 nt, Human
auuguacauaugauguauguaa

SEQ ID NO: 239469 - RNA, 22 nt, Human
agugaaggaaacaauugguuga

SEQ ID NO: 239470 - RNA, 21 nt, Human
cugagcuggggugaagguugc

SEQ ID NO: 239471 - RNA, 22 nt, Human
aaugucugaggcucaucugagg

SEQ ID NO: 239472 - RNA, 22 nt, Human
ccuguucaagggaugauugacc

SEQ ID NO: 239473 - RNA, 22 nt, Human
auucuuugcaucucuggguggc

SEQ ID NO: 239474 - RNA, 22 nt, Human
gcccagaguucaaggcugcagu

SEQ ID NO: 239475 - RNA, 22 nt, Human
caaggcuaagcuuuggcuuucu

SEQ ID NO: 239476 - RNA, 22 nt, Human
gggucucucagaaggcugcaau

SEQ ID NO: 239477 - RNA, 22 nt, Human
uuucuaaguaagauuaacuucu

SEQ ID NO: 239478 - RNA, 22 nt, Human
ugguccaguagcagggauacca

SEQ ID NO: 239479 - RNA, 22 nt, Human
ccagcuccucuucccaguguca

SEQ ID NO: 239480 - RNA, 22 nt, Human
aggguggcaccuggaagggaug

SEQ ID NO: 239481 - RNA, 22 nt, Human
uacagggaaugggacauaaauc

SEQ ID NO: 239482 - RNA, 19 nt, Human
acccagagcccuuugcagg

SEQ ID NO: 239483 - RNA, 22 nt, Human
ggcuucccaaggagccaggaug

SEQ ID NO: 239484 - RNA, 22 nt, Human
guauuuuucauuccaagugaga

SEQ ID NO: 239485 - RNA, 22 nt, Human
ucuccagguucagucgauggaa

SEQ ID NO: 239486 - RNA, 22 nt, Human
uggacagcuugcagagccaccc

SEQ ID NO: 239487 - RNA, 22 nt, Human
uuuagcuauggauaacaaccac

SEQ ID NO: 239488 - RNA, 18 nt, Human
cucucuggucuggauccc

SEQ ID NO: 239489 - RNA, 22 nt, Human
gcuugccuaucugguggucguu

SEQ ID NO: 239490 - RNA, 22 nt, Human
gaguggcauaugugccugugaa

SEQ ID NO: 239491 - RNA, 22 nt, Human
ugguggggucaucgucagaugc

SEQ ID NO: 239492 - RNA, 22 nt, Human
gaggggcuggcacgauggcugc

SEQ ID NO: 239493 - RNA, 22 nt, Human
uccagcccuccugggaucacag

SEQ ID NO: 239494 - RNA, 22 nt, Human
cucagugguugagagccugggc

SEQ ID NO: 239495 - RNA, 22 nt, Human
ggcauccaguucugaucaacaa

SEQ ID NO: 239496 - RNA, 22 nt, Human
ucaccuaauugaagucaggagu

SEQ ID NO: 239497 - RNA, 19 nt, Human
cuguccugguuuggucccu

SEQ ID NO: 239498 - RNA, 20 nt, Human
ccuggcaggcggguuacuua

SEQ ID NO: 239499 - RNA, 22 nt, Human
cuggcagcccaaccuagagucu

SEQ ID NO: 239500 - RNA, 22 nt, Human
ucuccccuagugcauuaaagug

SEQ ID NO: 239501 - RNA, 22 nt, Human
gagguucacuuccugaaauagc

SEQ ID NO: 239502 - RNA, 22 nt, Human
aaagcuaugaggcaugcauuuc

SEQ ID NO: 239503 - RNA, 22 nt, Human
ugaauucuuaaugaaaucuacu

SEQ ID NO: 239504 - RNA, 22 nt, Human
ggaaggcugugcaguguuugca

SEQ ID NO: 239505 - RNA, 22 nt, Human
auggaaaucgaugucuaaguua

SEQ ID NO: 239506 - RNA, 22 nt, Human
gaugugucuggcuccccugcaa

SEQ ID NO: 239507 - RNA, 22 nt, Human
aggucaaaccacagcucuaggc

SEQ ID NO: 239508 - RNA, 22 nt, Human
ccuggcucucugcagauccugg

SEQ ID NO: 239509 - RNA, 22 nt, Human
aggaggcacucacucucagggu

SEQ ID NO: 239510 - RNA, 22 nt, Human
uggucucugcaggccaggcuca

SEQ ID NO: 239511 - RNA, 22 nt, Human
cugcacagcugggcaagauaua

SEQ ID NO: 239512 - RNA, 22 nt, Human
ugacagacagcuucucauuuua

SEQ ID NO: 239513 - RNA, 22 nt, Human
aagagaaagcagacuuugucau

SEQ ID NO: 239514 - RNA, 22 nt, Human
guagcuauuuaugauacucaug

SEQ ID NO: 239515 - RNA, 22 nt, Human
auuacacauagacauucguuca

SEQ ID NO: 239516 - RNA, 22 nt, Human
ccacugucugugacaucagaaa

SEQ ID NO: 239517 - RNA, 22 nt, Human
uuacugaacccuacuuuuacag

SEQ ID NO: 239518 - RNA, 22 nt, Human
ucugagggacaauuuugauggu

SEQ ID NO: 239519 - RNA, 22 nt, Human
uuuuauugucuguauugccuau

SEQ ID NO: 239520 - RNA, 22 nt, Human
caugauaauuguuaacaaagua

SEQ ID NO: 239521 - RNA, 19 nt, Human
ccucugugggagucaguga

SEQ ID NO: 239522 - RNA, 22 nt, Human
guggcauugacauguaaacagu

SEQ ID NO: 239523 - RNA, 22 nt, Human
ccucuggccacaugggacauag

SEQ ID NO: 239524 - RNA, 22 nt, Human
ggaggugaucagaguuuugagg

SEQ ID NO: 239525 - RNA, 22 nt, Human
gaaaggcucagaaguuuguauu

SEQ ID NO: 239526 - RNA, 22 nt, Human
agacacuguguacagaaaaaga

SEQ ID NO: 239527 - RNA, 22 nt, Human
auuccuucuauucucugugggu

SEQ ID NO: 239528 - RNA, 22 nt, Human
caucuguaggugacacaugagu

SEQ ID NO: 239529 - RNA, 22 nt, Human
uucuucuucaagugcugcauuc

SEQ ID NO: 239530 - RNA, 22 nt, Human
augaaauggugguuuuccauuu

SEQ ID NO: 239531 - RNA, 22 nt, Human
auaaacaguaaaugugagcagu

SEQ ID NO: 239532 - RNA, 22 nt, Human
aaguaugugugggaugcuggga

SEQ ID NO: 239533 - RNA, 22 nt, Human
auguagggaacuaaauucacug

SEQ ID NO: 239534 - RNA, 22 nt, Human
ggacuuggggaaggcacaguua

SEQ ID NO: 239535 - RNA, 22 nt, Human
uuccauauuuguguggcaaaag

SEQ ID NO: 239536 - RNA, 22 nt, Human
ugggaauguagaauguaaacca

SEQ ID NO: 239537 - RNA, 22 nt, Human
cuuuaagagaucaccaaucaca

SEQ ID NO: 239538 - RNA, 22 nt, Human
ucagagcuucaccuguuacauu

SEQ ID NO: 239539 - RNA, 22 nt, Human
aguuacaguguucuauuacucu

SEQ ID NO: 239540 - RNA, 22 nt, Human
cagucccacaagaucuccacaa

SEQ ID NO: 239541 - RNA, 22 nt, Human
gaaggccauuagagccugugcc

SEQ ID NO: 239542 - RNA, 22 nt, Human
ucuguaccucacaugcaccauc

SEQ ID NO: 239543 - RNA, 22 nt, Human
cuguuacugaaaugcaccgugc

SEQ ID NO: 239544 - RNA, 22 nt, Human
uacaguaucuucuggcaagcau

SEQ ID NO: 239545 - RNA, 22 nt, Human
cucauguagcucucaggccaca

SEQ ID NO: 239546 - RNA, 22 nt, Human
uaucuaaauggaauauuccaga

SEQ ID NO: 239547 - RNA, 22 nt, Human
guggcagagauagaacuggaau

SEQ ID NO: 239548 - RNA, 22 nt, Human
uccuggaggcacucgcuggggc

SEQ ID NO: 239549 - RNA, 22 nt, Human
ugcuggcucaguuugcagacuc

SEQ ID NO: 239550 - RNA, 20 nt, Human
uauugccuaaauaccagaau

SEQ ID NO: 239551 - RNA, 21 nt, Human
aggcagaaagagcccaggcug

SEQ ID NO: 239552 - RNA, 22 nt, Human
ccauuugugguuuauuugcucu

SEQ ID NO: 239553 - RNA, 22 nt, Human
ccaguucugacacaagcacagu

SEQ ID NO: 239554 - RNA, 22 nt, Human
uccugcagcugcagaccugggg

SEQ ID NO: 239555 - RNA, 22 nt, Human
acuuucaauuugcacuaaccua

SEQ ID NO: 239556 - RNA, 22 nt, Human
aaggcauguguccucagagaga

SEQ ID NO: 239557 - RNA, 21 nt, Human
ccaggucuugguccuuggacu

SEQ ID NO: 239558 - RNA, 22 nt, Human
uuauugaaauggaagcuauaac

SEQ ID NO: 239559 - RNA, 22 nt, Human
agcuggcuuuaugguuggcuaa

SEQ ID NO: 239560 - RNA, 22 nt, Human
ugcauuaaggccauugaaauuu

SEQ ID NO: 239561 - RNA, 22 nt, Human
aagacagugaucucugagagau

SEQ ID NO: 239562 - RNA, 20 nt, Human
cccaguguccagccuugcca

SEQ ID NO: 239563 - RNA, 22 nt, Human
ucuggggaauguucauuucuga

SEQ ID NO: 239564 - RNA, 22 nt, Human
uuugguuuuuaccugcugagag

SEQ ID NO: 239565 - RNA, 22 nt, Human
ugcugccaagcccgugcuccug

SEQ ID NO: 239566 - RNA, 22 nt, Human
aaugaacaaaauaugcuuugca

SEQ ID NO: 239567 - RNA, 22 nt, Human
aggcugaggcgggaggaucacu

SEQ ID NO: 239568 - RNA, 22 nt, Human
ccaggcuguaagagugauguug

SEQ ID NO: 239569 - RNA, 22 nt, Human
gguuucaacucagcuaguaagg

SEQ ID NO: 239570 - RNA, 22 nt, Human
uacaaggaaaaucuugaaguac

SEQ ID NO: 239571 - RNA, 22 nt, Human
ucaaaggguccuuaacaugaga

SEQ ID NO: 239572 - RNA, 22 nt, Human
uggguggauuaggauaggguau

SEQ ID NO: 239573 - RNA, 22 nt, Human
acugguuuuccagguuacuucu

SEQ ID NO: 239574 - RNA, 22 nt, Human
cgugcccugcgcaagugcugcu

SEQ ID NO: 239575 - RNA, 22 nt, Human
uguggggcucccuggcagccug

SEQ ID NO: 239576 - RNA, 22 nt, Human
aggccagcagcaugacggcauc

SEQ ID NO: 239577 - RNA, 22 nt, Human
cuggcagcaggucacacgcaga

SEQ ID NO: 239578 - RNA, 22 nt, Human
acaauguguuuuuauacauuug

SEQ ID NO: 239579 - RNA, 22 nt, Human
aagacacuaagcuuucaggaua

SEQ ID NO: 239580 - RNA, 22 nt, Human
aagcucagagguagauaauguu

SEQ ID NO: 239581 - RNA, 22 nt, Human
uccucuggcccagcugccucug

SEQ ID NO: 239582 - RNA, 22 nt, Human
uucaacauuugaaaugaaugaa

SEQ ID NO: 239583 - RNA, 22 nt, Human
ggcuuggaaaugguaaugagcu

SEQ ID NO: 239584 - RNA, 22 nt, Human
cugggccucacccuagaccaau

SEQ ID NO: 239585 - RNA, 22 nt, Human
gcagagaggaaugaagccaucc

SEQ ID NO: 239586 - RNA, 23 nt, Human
ucuaaugcaauuagaaauuaggg

SEQ ID NO: 239587 - RNA, 19 nt, Human
gcagagucaagagcugcug

SEQ ID NO: 239588 - RNA, 23 nt, Human
uggaaugagcugggaagcugagc

SEQ ID NO: 239589 - RNA, 22 nt, Human
aguuggcaaggucuggccagcg

SEQ ID NO: 239590 - RNA, 22 nt, Human
guguucucucuacaggaauuua

SEQ ID NO: 239591 - RNA, 22 nt, Human
cagcccugagagaaccaucuau

SEQ ID NO: 239592 - RNA, 22 nt, Human
aucuaaaaugugguuaguuggu

SEQ ID NO: 239593 - RNA, 22 nt, Human
cauaaaagccaccuauuuaaag

SEQ ID NO: 239594 - RNA, 22 nt, Human
uucuguuugugaacuggcugag

SEQ ID NO: 239595 - RNA, 22 nt, Human
ugcugggcucaaccuccagagc

SEQ ID NO: 239596 - RNA, 22 nt, Human
gcuggcagagagcuggugagga

SEQ ID NO: 239597 - RNA, 22 nt, Human
uaauaauuuuaaagaaggcuag

SEQ ID NO: 239598 - RNA, 22 nt, Human
caggaugccaucugcugcugcu

SEQ ID NO: 239599 - RNA, 22 nt, Human
ccaggcugcucacaagcugccc

SEQ ID NO: 239600 - RNA, 22 nt, Human
aagugaggccuaggcacugggu

SEQ ID NO: 239601 - RNA, 22 nt, Human
agucagacauaauucuaacauu

SEQ ID NO: 239602 - RNA, 22 nt, Human
aaguucaaggaagccuccaguu

SEQ ID NO: 239603 - RNA, 22 nt, Human
ggcaauuacguauuagucaugu

SEQ ID NO: 239604 - RNA, 22 nt, Human
auggcagcggagcuggaaauga

SEQ ID NO: 239605 - RNA, 22 nt, Human
augcucauuuuauugagaauga

SEQ ID NO: 239606 - RNA, 22 nt, Human
ucaggagcagggucuguuacca

SEQ ID NO: 239607 - RNA, 19 nt, Human
acagggcagcaauaggaua

SEQ ID NO: 239608 - RNA, 22 nt, Human
uauaaucugguuuuauuaagag

SEQ ID NO: 239609 - RNA, 22 nt, Human
acaggagcaacagacuaagaca

SEQ ID NO: 239610 - RNA, 22 nt, Human
acagaggacaacuaggcgcuca

SEQ ID NO: 239611 - RNA, 22 nt, Human
uagaguguuguaauugaaaagg

SEQ ID NO: 239612 - RNA, 22 nt, Human
gaccagcucucugaagaaagag

SEQ ID NO: 239613 - RNA, 22 nt, Human
ucaaggagcccacagucuaaug

SEQ ID NO: 239614 - RNA, 22 nt, Human
ugagggcuaaauuguggcaggu

SEQ ID NO: 239615 - RNA, 22 nt, Human
aaaaccacaauuacuuuugcac

SEQ ID NO: 239616 - RNA, 22 nt, Human
augaaaugaaguuggccuggcu

SEQ ID NO: 239617 - RNA, 22 nt, Human
augucuuuuauggagaugucau

SEQ ID NO: 239618 - RNA, 17 nt, Human
ggccagaggcggggcug

SEQ ID NO: 239619 - RNA, 22 nt, Human
augcauauugucauuuaguccu

SEQ ID NO: 239620 - RNA, 20 nt, Human
aagcacugugguggcaugga

SEQ ID NO: 239621 - RNA, 22 nt, Human
ggaaagaaucaagugauccugu

SEQ ID NO: 239622 - RNA, 22 nt, Human
ggucccagaauugguuagcaca

SEQ ID NO: 239623 - RNA, 22 nt, Human
caugacaaauaaaccuuugcca

SEQ ID NO: 239624 - RNA, 22 nt, Human
caggcugaggcaguaggguuug

SEQ ID NO: 239625 - RNA, 22 nt, Human
ucugggucaugacucagcguga

SEQ ID NO: 239626 - RNA, 22 nt, Human
aggcugugcgaggucucagagu

SEQ ID NO: 239627 - RNA, 22 nt, Human
uugcugggcaugucuuaauucu

SEQ ID NO: 239628 - RNA, 22 nt, Human
aucagagccuuaugcuucucau

SEQ ID NO: 239629 - RNA, 20 nt, Human
uauuugaaauggccaagugu

SEQ ID NO: 239630 - RNA, 22 nt, Human
acugaaagaaccuuccuguugc

SEQ ID NO: 239631 - RNA, 22 nt, Human
ugggccugggcuggacagccug

SEQ ID NO: 239632 - RNA, 22 nt, Human
ccucaggcuugugagccuucag

SEQ ID NO: 239633 - RNA, 22 nt, Human
cccuggccuacaggcccagaga

SEQ ID NO: 239634 - RNA, 22 nt, Human
uaacagaaacagauaaguguaa

SEQ ID NO: 239635 - RNA, 22 nt, Human
acagcagagacacucaggaggc

SEQ ID NO: 239636 - RNA, 22 nt, Human
ggaggaagggcccaggcuuuau

SEQ ID NO: 239637 - RNA, 22 nt, Human
uuuaacauguucaagaaacaua

SEQ ID NO: 239638 - RNA, 22 nt, Human
cagguagguauggugcagucuu

SEQ ID NO: 239639 - RNA, 22 nt, Human
accugggaacgcuuuguggagg

SEQ ID NO: 239640 - RNA, 22 nt, Human
uccuggccuuagcgaggcgguc

SEQ ID NO: 239641 - RNA, 22 nt, Human
ggccagccuggggcucccagac

SEQ ID NO: 239642 - RNA, 22 nt, Human
agccucagugucaccaucuacc

SEQ ID NO: 239643 - RNA, 20 nt, Human
ugguccucacaugccaucuu

SEQ ID NO: 239644 - RNA, 22 nt, Human
uuucuaguauauaacuagaucu

SEQ ID NO: 239645 - RNA, 22 nt, Human
uguacauugucacucaucaagu

SEQ ID NO: 239646 - RNA, 22 nt, Human
guacaaaugcagguuuguuaca

SEQ ID NO: 239647 - RNA, 22 nt, Human
gcugggagggaggcuauacccu

SEQ ID NO: 239648 - RNA, 22 nt, Human
cagggaugaccagagggaugug

SEQ ID NO: 239649 - RNA, 22 nt, Human
uagugucaugaaaaguacacua

SEQ ID NO: 239650 - RNA, 22 nt, Human
uugagucuucaguaaaagggua

SEQ ID NO: 239651 - RNA, 22 nt, Human
uguuuucagucauauagcaggu

SEQ ID NO: 239652 - RNA, 20 nt, Human
ccugucucacguuccgcccc

SEQ ID NO: 239653 - RNA, 22 nt, Human
ccagaaaguucagcugugaaug

SEQ ID NO: 239654 - RNA, 22 nt, Human
uccaggccuugacaggucaguu

SEQ ID NO: 239655 - RNA, 22 nt, Human
gaccucaguauuguucaggaug

SEQ ID NO: 239656 - RNA, 22 nt, Human
gcucaaugcucaaugcugcaaa

SEQ ID NO: 239657 - RNA, 22 nt, Human
cucugcccagugcccacaggag

SEQ ID NO: 239658 - RNA, 22 nt, Human
ccacagcugaaagcagaggcuc

SEQ ID NO: 239659 - RNA, 22 nt, Human
uccuugcauaucugaaaauguu

SEQ ID NO: 239660 - RNA, 19 nt, Human
uuagggacaugaauucuag

SEQ ID NO: 239661 - RNA, 22 nt, Human
gggagcugagcucugagccacg

SEQ ID NO: 239662 - RNA, 22 nt, Human
ggagccaguauuuaguggucuu

SEQ ID NO: 239663 - RNA, 22 nt, Human
aaacuucagacuccccacuucu

SEQ ID NO: 239664 - RNA, 22 nt, Human
agaaaaguuuucugagacugac

SEQ ID NO: 239665 - RNA, 22 nt, Human
uacaacaauuuccacauuagaa

SEQ ID NO: 239666 - RNA, 22 nt, Human
acuuuagaaaaggaacagagga

SEQ ID NO: 239667 - RNA, 22 nt, Human
ccugggucaccaggcccaggca

SEQ ID NO: 239668 - RNA, 22 nt, Human
ugaguucucaugaaaucuaguu

SEQ ID NO: 239669 - RNA, 19 nt, Human
gcagacagguccagagagg

SEQ ID NO: 239670 - RNA, 22 nt, Human
cucuagaaugaauuagcgcagg

SEQ ID NO: 239671 - RNA, 22 nt, Human
cucugcagaauuugagcugcuc

SEQ ID NO: 239672 - RNA, 22 nt, Human
uugcaaaucuuugccagaaggc

SEQ ID NO: 239673 - RNA, 22 nt, Human
cugagcuguuuaaucccagaua

SEQ ID NO: 239674 - RNA, 22 nt, Human
auaagaaacauuauucuuucca

SEQ ID NO: 239675 - RNA, 22 nt, Human
uuuggagauagggccuagcaau

SEQ ID NO: 239676 - RNA, 22 nt, Human
cagaacauucacucauaugugg

SEQ ID NO: 239677 - RNA, 21 nt, Human
cugcuuuacuucagaggaucu

SEQ ID NO: 239678 - RNA, 22 nt, Human
uacacaaucuguuuuuccauuu

SEQ ID NO: 239679 - RNA, 22 nt, Human
cuauuacauuucuggacauuca

SEQ ID NO: 239680 - RNA, 22 nt, Human
cagcucuuagagggagacagac

SEQ ID NO: 239681 - RNA, 20 nt, Human
ggcucaucuugucugcugac

SEQ ID NO: 239682 - RNA, 22 nt, Human
auggaguucuuuaaauucacag

SEQ ID NO: 239683 - RNA, 22 nt, Human
gcaggcuccaggccggccccuu

SEQ ID NO: 239684 - RNA, 22 nt, Human
acugcaccucagccugggcgac

SEQ ID NO: 239685 - RNA, 22 nt, Human
gcucucagaagagccaggcuac

SEQ ID NO: 239686 - RNA, 20 nt, Human
ugaagaggaagaggacggcc

SEQ ID NO: 239687 - RNA, 16 nt, Human
augcugcuauuagagg

SEQ ID NO: 239688 - RNA, 22 nt, Human
ucccucagaugagcuccuagca

SEQ ID NO: 239689 - RNA, 22 nt, Human
aguggcugcuaugaucaggaca

SEQ ID NO: 239690 - RNA, 22 nt, Human
uuauucuuggaucugagucucu

SEQ ID NO: 239691 - RNA, 22 nt, Human
aagaacauaacagaagcugugu

SEQ ID NO: 239692 - RNA, 22 nt, Human
uucagagacagcaaccaggaca

SEQ ID NO: 239693 - RNA, 22 nt, Human
cuuggaaucaaguuuuuggaga

SEQ ID NO: 239694 - RNA, 22 nt, Human
cuggguaccucaccgcugcugc

SEQ ID NO: 239695 - RNA, 22 nt, Human
augauugcagcccuacagcugu

SEQ ID NO: 239696 - RNA, 22 nt, Human
uuucuuuccauacauauugcua

SEQ ID NO: 239697 - RNA, 22 nt, Human
aggcucugggaagcagugaguu

SEQ ID NO: 239698 - RNA, 22 nt, Human
gauuauuuugugcaauaaucgg

SEQ ID NO: 239699 - RNA, 22 nt, Human
gcacagcuggacucugccuggc

SEQ ID NO: 239700 - RNA, 17 nt, Human
gcaaaggugaggagaga

SEQ ID NO: 239701 - RNA, 22 nt, Human
ucagugcagcggcagcagcucu

SEQ ID NO: 239702 - RNA, 22 nt, Human
ccagugcucauucaaguccuua

SEQ ID NO: 239703 - RNA, 22 nt, Human
aaaucaugaggacauuaugcca

SEQ ID NO: 239704 - RNA, 22 nt, Human
ucaggcagcuccaggaauggua

SEQ ID NO: 239705 - RNA, 21 nt, Human
ggagaaggacaauguugagua

SEQ ID NO: 239706 - RNA, 22 nt, Human
agggcuccuccccggccuccac

SEQ ID NO: 239707 - RNA, 22 nt, Human
acugugcaaaugacaggcacac

SEQ ID NO: 239708 - RNA, 22 nt, Human
ccucagagacaguaacuggaau

SEQ ID NO: 239709 - RNA, 22 nt, Human
cagcccugcugguuuugggcaa

SEQ ID NO: 239710 - RNA, 22 nt, Human
caggcacagcuaagacuggcca

SEQ ID NO: 239711 - RNA, 22 nt, Human
ucccugggguaucgcugaggca

SEQ ID NO: 239712 - RNA, 22 nt, Human
acacauuuuguuaaacccugug

SEQ ID NO: 239713 - RNA, 22 nt, Human
gagggaggugauacugaacgua

SEQ ID NO: 239714 - RNA, 22 nt, Human
cucuggguggucucacugagug

SEQ ID NO: 239715 - RNA, 22 nt, Human
agcagacauggcuuggaugugg

SEQ ID NO: 239716 - RNA, 23 nt, Human
uguuccagauacgccuuuuccuc

SEQ ID NO: 239717 - RNA, 22 nt, Human
ccagccagccuugaucugagua

SEQ ID NO: 239718 - RNA, 22 nt, Human
auauuuugaaguuaauaaugug

SEQ ID NO: 239719 - RNA, 22 nt, Human
agggagagaaguuauacaagau

SEQ ID NO: 239720 - RNA, 22 nt, Human
guggaaggugcuagaacaagga

SEQ ID NO: 239721 - RNA, 22 nt, Human
cugugcauugucuugucuguag

SEQ ID NO: 239722 - RNA, 22 nt, Human
ugccuggguugacucuuagcug

SEQ ID NO: 239723 - RNA, 22 nt, Human
aguuuauucugcuuggcccucc

SEQ ID NO: 239724 - RNA, 22 nt, Human
aagugguagacaaagauaauug

SEQ ID NO: 239725 - RNA, 22 nt, Human
ugcuuucugcucuggaaacagg

SEQ ID NO: 239726 - RNA, 22 nt, Human
gagacacaagaagacaugcaca

SEQ ID NO: 239727 - RNA, 22 nt, Human
aacucuauuuacccuacuaaac

SEQ ID NO: 239728 - RNA, 22 nt, Human
cugggcaguucgcuuucguuuu

SEQ ID NO: 239729 - RNA, 22 nt, Human
cuggcagguggagguugcagug

SEQ ID NO: 239730 - RNA, 21 nt, Human
aucugaaguuugagaggaaag

SEQ ID NO: 239731 - RNA, 22 nt, Human
auugacaaucuacuauguucug

SEQ ID NO: 239732 - RNA, 22 nt, Human
gcucagaggcacgaccucuugg

SEQ ID NO: 239733 - RNA, 22 nt, Human
ggcugaggguuaagaucagaca

SEQ ID NO: 239734 - RNA, 22 nt, Human
cagcacguugaaguagaguaag

SEQ ID NO: 239735 - RNA, 22 nt, Human
augacucuaagaauucuagaug

SEQ ID NO: 239736 - RNA, 22 nt, Human
cagggcagggagcuuagaauga

SEQ ID NO: 239737 - RNA, 22 nt, Human
agguccuggucuugagucuuaa

SEQ ID NO: 239738 - RNA, 22 nt, Human
gaguuacagagaggauuauggu

SEQ ID NO: 239739 - RNA, 22 nt, Human
cucagauguguuggauggaaaa

SEQ ID NO: 239740 - RNA, 22 nt, Human
aucuuuuacuacaaaucaggug

SEQ ID NO: 239741 - RNA, 22 nt, Human
gagcaagacuacaggcagauga

SEQ ID NO: 239742 - RNA, 19 nt, Human
cuggaauguggcuggugca

SEQ ID NO: 239743 - RNA, 22 nt, Human
guccagccacccuggaggcacg

SEQ ID NO: 239744 - RNA, 22 nt, Human
ccaggcaaagcccaugcaagag

SEQ ID NO: 239745 - RNA, 22 nt, Human
uacaguaaccagucuacuuaga

SEQ ID NO: 239746 - RNA, 22 nt, Human
uuuuauucaaauaguucacacu

SEQ ID NO: 239747 - RNA, 22 nt, Human
ugucagagagcaggcaguagaa

SEQ ID NO: 239748 - RNA, 22 nt, Human
ugaggauggucccgaggacacu

SEQ ID NO: 239749 - RNA, 22 nt, Human
aaaauagauucuaggaugucuu

SEQ ID NO: 239750 - RNA, 22 nt, Human
gagggagcuugauggauguuug

SEQ ID NO: 239751 - RNA, 22 nt, Human
aaguccaguuucauuugagguc

SEQ ID NO: 239752 - RNA, 22 nt, Human
cugugcaagcccaagauaaaac

SEQ ID NO: 239753 - RNA, 22 nt, Human
uccugagcaacacagcuaagug

SEQ ID NO: 239754 - RNA, 22 nt, Human
auauucacuggguacuaaaaag

SEQ ID NO: 239755 - RNA, 22 nt, Human
ugcaggccuaugguggggcccc

SEQ ID NO: 239756 - RNA, 22 nt, Human
uacuuucuuguuccuuucauaa

SEQ ID NO: 239757 - RNA, 19 nt, Human
uccagaacugcccuggccu

SEQ ID NO: 239758 - RNA, 22 nt, Human
cacauuccugagcuucgaccug

SEQ ID NO: 239759 - RNA, 17 nt, Human
aagaacacucaauagca

SEQ ID NO: 239760 - RNA, 22 nt, Human
uguggcuggauugauuuuaccu

SEQ ID NO: 239761 - RNA, 22 nt, Human
acuucagaguuaguuauagacc

SEQ ID NO: 239762 - RNA, 22 nt, Human
agaguuuguauuuuucagugaa

SEQ ID NO: 239763 - RNA, 22 nt, Human
acacaagaauaaugaugaaggu

SEQ ID NO: 239764 - RNA, 22 nt, Human
aauaguuaagcaacuuuuucca

SEQ ID NO: 239765 - RNA, 22 nt, Human
uccugaggagaagagugcuagg

SEQ ID NO: 239766 - RNA, 22 nt, Human
uuaacauccuguuuaaauuugg

SEQ ID NO: 239767 - RNA, 22 nt, Human
gcaggagaaaugaagauugggu

SEQ ID NO: 239768 - RNA, 22 nt, Human
ggcugccugaacuuuggggaaa

SEQ ID NO: 239769 - RNA, 23 nt, Human
acaaaugcccauacaucuaguuc

SEQ ID NO: 239770 - RNA, 22 nt, Human
gguguccugucagcuagaguga

SEQ ID NO: 239771 - RNA, 22 nt, Human
uuagccuuagaagcuuagcaaa

SEQ ID NO: 239772 - RNA, 22 nt, Human
ggcacagaguuggcagagcugc

SEQ ID NO: 239773 - RNA, 22 nt, Human
cuaauagagcuucggaacucug

SEQ ID NO: 239774 - RNA, 22 nt, Human
uuugcauuuguucaaguauuga

SEQ ID NO: 239775 - RNA, 22 nt, Human
ccugcaccugccaugugagaua

SEQ ID NO: 239776 - RNA, 22 nt, Human
gagucuaaguagaaugugaaaa

SEQ ID NO: 239777 - RNA, 22 nt, Human
aaaagcucuuucugcuguagau

SEQ ID NO: 239778 - RNA, 22 nt, Human
ugaggcuuagagaauuaaguga

SEQ ID NO: 239779 - RNA, 22 nt, Human
gcucugggaaggaucguaguga

SEQ ID NO: 239780 - RNA, 22 nt, Human
uuuaaaaggcagcuucuuuugu

SEQ ID NO: 239781 - RNA, 22 nt, Human
ggcaggcuguucaccugcuuuu

SEQ ID NO: 239782 - RNA, 22 nt, Human
cuguggcugcgcccugggggag

SEQ ID NO: 239783 - RNA, 22 nt, Human
ugacuuccugcacucaggugau

SEQ ID NO: 239784 - RNA, 23 nt, Human
acagagaucuugacuuguaugga

SEQ ID NO: 239785 - RNA, 22 nt, Human
uuuacagagaauguacauaaag

SEQ ID NO: 239786 - RNA, 22 nt, Human
gucccucaguagugcacagugg

SEQ ID NO: 239787 - RNA, 22 nt, Human
accaggcuugauaccaagaaau

SEQ ID NO: 239788 - RNA, 22 nt, Human
ccagguguuacacgaguguuaa

SEQ ID NO: 239789 - RNA, 22 nt, Human
uguugcugacaagagaggagca

SEQ ID NO: 239790 - RNA, 22 nt, Human
uguaaaaccaaaucaaucuagu

SEQ ID NO: 239791 - RNA, 22 nt, Human
agauacaaaggccuacagagca

SEQ ID NO: 239792 - RNA, 22 nt, Human
auucuguuacuuggugaucuuc

SEQ ID NO: 239793 - RNA, 21 nt, Human
gcaggcuggucaaaccucagu

SEQ ID NO: 239794 - RNA, 22 nt, Human
agacccagaaagcagcugcauu

SEQ ID NO: 239795 - RNA, 23 nt, Human
aggaaugugcccacccaucuccu

SEQ ID NO: 239796 - RNA, 23 nt, Human
acagcuugccaauuagccuuccg

SEQ ID NO: 239797 - RNA, 22 nt, Human
uuccagcuaacucacaucccuu

SEQ ID NO: 239798 - RNA, 22 nt, Human
gucuccagggacacacuagccg

SEQ ID NO: 239799 - RNA, 22 nt, Human
uccaggucccagacugggcagc

SEQ ID NO: 239800 - RNA, 22 nt, Human
uauguacauaacaugaaaugca

SEQ ID NO: 239801 - RNA, 22 nt, Human
gauccugugcauggggugaugg

SEQ ID NO: 239802 - RNA, 22 nt, Human
aaagaacagauguguggugcau

SEQ ID NO: 239803 - RNA, 22 nt, Human
uucuuuccucccagccuuugga

SEQ ID NO: 239804 - RNA, 22 nt, Human
gcucagggaaugagaagauguu

SEQ ID NO: 239805 - RNA, 22 nt, Human
cauuucuagagucccaagaggu

SEQ ID NO: 239806 - RNA, 22 nt, Human
ccaggccuuccaguacgcagaa

SEQ ID NO: 239807 - RNA, 22 nt, Human
uaauuacaaagcaagcacaggg

SEQ ID NO: 239808 - RNA, 22 nt, Human
aguuucacacaacauuugcaug

SEQ ID NO: 239809 - RNA, 22 nt, Human
ugaugagguggauucaaagcag

SEQ ID NO: 239810 - RNA, 22 nt, Human
uucugggcucacagagcagcag

SEQ ID NO: 239811 - RNA, 22 nt, Human
gcagcaguacucaauauccugg

SEQ ID NO: 239812 - RNA, 22 nt, Human
cuuauugaaagccccugugccu

SEQ ID NO: 239813 - RNA, 17 nt, Human
cagcuuuaugcuacugu

SEQ ID NO: 239814 - RNA, 22 nt, Human
gaaguuuagaguguuguaauuu

SEQ ID NO: 239815 - RNA, 19 nt, Human
ugaggagcagcugguugau

SEQ ID NO: 239816 - RNA, 22 nt, Human
ucugaagaauaggauguugugu

SEQ ID NO: 239817 - RNA, 22 nt, Human
ucccaaguacuaccaaucuaau

SEQ ID NO: 239818 - RNA, 22 nt, Human
ugcagggucccgaagggaagac

SEQ ID NO: 239819 - RNA, 19 nt, Human
ugggaugaugcagaaggua

SEQ ID NO: 239820 - RNA, 22 nt, Human
aaguaacaaugcuguugaauug

SEQ ID NO: 239821 - RNA, 22 nt, Human
uaacuguaccuagauaacgaac

SEQ ID NO: 239822 - RNA, 22 nt, Human
ggccuccaggccuacucagggc

SEQ ID NO: 239823 - RNA, 21 nt, Human
gugaauuaauuauaugccuua

SEQ ID NO: 239824 - RNA, 22 nt, Human
gggcuucuagaauuucugauau

SEQ ID NO: 239825 - RNA, 22 nt, Human
aacugaggaauaacugaguugc

SEQ ID NO: 239826 - RNA, 22 nt, Human
uucaccccaaauucccagugga

SEQ ID NO: 239827 - RNA, 22 nt, Human
ucagagcugcccaugcaagggg

SEQ ID NO: 239828 - RNA, 22 nt, Human
acuguccuuuuaaugcagccgu

SEQ ID NO: 239829 - RNA, 22 nt, Human
gccagcucaguuucaaaguagg

SEQ ID NO: 239830 - RNA, 22 nt, Human
acacauaugguugcugcaguga

SEQ ID NO: 239831 - RNA, 22 nt, Human
ugggucuccugugccugggagg

SEQ ID NO: 239832 - RNA, 22 nt, Human
uuuacagcagcaugauuuauaa

SEQ ID NO: 239833 - RNA, 22 nt, Human
ucacagccuggacaguugccug

SEQ ID NO: 239834 - RNA, 22 nt, Human
aaagugcauagaguagugccua

SEQ ID NO: 239835 - RNA, 22 nt, Human
ugcacuguaugguaucuggaca

SEQ ID NO: 239836 - RNA, 22 nt, Human
ugggccucaccuucuuggcagc

SEQ ID NO: 239837 - RNA, 21 nt, Human
agagagggagaugaaacaucc

SEQ ID NO: 239838 - RNA, 22 nt, Human
ccugcagguccccggaugcgca

SEQ ID NO: 239839 - RNA, 19 nt, Human
ggcuccuggggcucagccc

SEQ ID NO: 239840 - RNA, 22 nt, Human
augcaugugcauggcucuaucu

SEQ ID NO: 239841 - RNA, 22 nt, Human
ggaacacagugccuuacaaacu

SEQ ID NO: 239842 - RNA, 17 nt, Human
agcagcuggguugaucu

SEQ ID NO: 239843 - RNA, 22 nt, Human
uguguacaggccuugcuagacu

SEQ ID NO: 239844 - RNA, 22 nt, Human
agggcauuggcacagaucugcu

SEQ ID NO: 239845 - RNA, 22 nt, Human
acauauauuacuaguaaagaca

SEQ ID NO: 239846 - RNA, 22 nt, Human
auuucauauguaucaccuagcc

SEQ ID NO: 239847 - RNA, 17 nt, Human
uacaggagagcaggaac

SEQ ID NO: 239848 - RNA, 22 nt, Human
gccaggcugcuccagggaggcc

SEQ ID NO: 239849 - RNA, 22 nt, Human
agccaugggcucccaguccuuu

SEQ ID NO: 239850 - RNA, 22 nt, Human
cagcugccuguauuguccucau

SEQ ID NO: 239851 - RNA, 22 nt, Human
acuuccagccccugucagcaaa

SEQ ID NO: 239852 - RNA, 22 nt, Human
ugguacaacuguauuaggcaaa

SEQ ID NO: 239853 - RNA, 22 nt, Human
ucagggcugacugcuacucucc

SEQ ID NO: 239854 - RNA, 22 nt, Human
ggagggagcauccccuugcuga

SEQ ID NO: 239855 - RNA, 22 nt, Human
ggcaagauccaaggggcuagga

SEQ ID NO: 239856 - RNA, 22 nt, Human
uguaucagaucaaauacuggcu

SEQ ID NO: 239857 - RNA, 22 nt, Human
aaaggcuugagcauuuguugaa

SEQ ID NO: 239858 - RNA, 22 nt, Human
auguuacauaguccuuauuugu

SEQ ID NO: 239859 - RNA, 22 nt, Human
uaagccugcaugaaccaugaga

SEQ ID NO: 239860 - RNA, 19 nt, Human
auuucaagagguuuauugg

SEQ ID NO: 239861 - RNA, 22 nt, Human
gaagugaagagauuagaaauca

SEQ ID NO: 239862 - RNA, 22 nt, Human
cagacaaccaggucuuucaguu

SEQ ID NO: 239863 - RNA, 22 nt, Human
agagauggccuuaggugggaau

SEQ ID NO: 239864 - RNA, 22 nt, Human
uacacaucccagacucccagga

SEQ ID NO: 239865 - RNA, 22 nt, Human
uggaaacuauagucacaauaga

SEQ ID NO: 239866 - RNA, 22 nt, Human
gugagcuguuuuggacccaucu

SEQ ID NO: 239867 - RNA, 22 nt, Human
acauuuugcccuuauuugcuga

SEQ ID NO: 239868 - RNA, 22 nt, Human
ucuugaagucuuaugguuuaaa

SEQ ID NO: 239869 - RNA, 22 nt, Human
guauaucucuuacauacacaca

SEQ ID NO: 239870 - RNA, 22 nt, Human
ggaauguucuggucugguucau

SEQ ID NO: 239871 - RNA, 17 nt, Human
uuucuccuuccaucuca

SEQ ID NO: 239872 - RNA, 22 nt, Human
agcuguguagggaaucagagaa

SEQ ID NO: 239873 - RNA, 22 nt, Human
ucaauguucaaguaugacaaug

SEQ ID NO: 239874 - RNA, 22 nt, Human
aucuggcuuacgaagcacuggu

SEQ ID NO: 239875 - RNA, 22 nt, Human
uggcaaagaugaagcauuucgu

SEQ ID NO: 239876 - RNA, 22 nt, Human
uuuuacaaaugaggagcuggag

SEQ ID NO: 239877 - RNA, 22 nt, Human
aaagagcauggaaaguucagga

SEQ ID NO: 239878 - RNA, 22 nt, Human
aucagcaaucaaauugcagagu

SEQ ID NO: 239879 - RNA, 22 nt, Human
acagcucugguccuuuagagag

SEQ ID NO: 239880 - RNA, 23 nt, Human
ugagggacaugguggcuucugag

SEQ ID NO: 239881 - RNA, 22 nt, Human
cuggccuuguuccuccccaagu

SEQ ID NO: 239882 - RNA, 22 nt, Human
uagaguaacacaaacgaauugg

SEQ ID NO: 239883 - RNA, 22 nt, Human
uacauucccccaauuaccaaug

SEQ ID NO: 239884 - RNA, 22 nt, Human
ucuggcaggauaucgaagugaa

SEQ ID NO: 239885 - RNA, 22 nt, Human
uugcagggucccagaggccugg

SEQ ID NO: 239886 - RNA, 22 nt, Human
cuggggcccaucgagggcugag

SEQ ID NO: 239887 - RNA, 22 nt, Human
cagugucuccagaugcuccaau

SEQ ID NO: 239888 - RNA, 20 nt, Human
acaguuuauccaguuagcag

SEQ ID NO: 239889 - RNA, 22 nt, Human
aggcuggcuggcaggggacaca

SEQ ID NO: 239890 - RNA, 22 nt, Human
cccaggcucagacuggcuuguu

SEQ ID NO: 239891 - RNA, 22 nt, Human
ucuucagaggaagucagucuuu

SEQ ID NO: 239892 - RNA, 22 nt, Human
ccugccugaaggucagccaccc

SEQ ID NO: 239893 - RNA, 22 nt, Human
ugugugcauguuaaugagaaaa

SEQ ID NO: 239894 - RNA, 16 nt, Human
acccucagaaacugcu

SEQ ID NO: 239895 - RNA, 22 nt, Human
uggcagugugggaggaagguac

SEQ ID NO: 239896 - RNA, 22 nt, Human
aagaagaaguguuauuuuuaga

SEQ ID NO: 239897 - RNA, 22 nt, Human
ucugcaacauuccucuccccac

SEQ ID NO: 239898 - RNA, 22 nt, Human
cauaaacucuugagauucuugu

SEQ ID NO: 239899 - RNA, 22 nt, Human
uuccuacauuuguacaauaaga

SEQ ID NO: 239900 - RNA, 22 nt, Human
caguuaaagugcuuaucacaga

SEQ ID NO: 239901 - RNA, 22 nt, Human
aggcugugggaauggcugcuug

SEQ ID NO: 239902 - RNA, 22 nt, Human
agcccugccauucucuggagcu

SEQ ID NO: 239903 - RNA, 22 nt, Human
cuuccaggguccaggaagagcc

SEQ ID NO: 239904 - RNA, 22 nt, Human
ugagcugguucuugaggcauga

SEQ ID NO: 239905 - RNA, 21 nt, Human
ucccucagacagggugccuau

SEQ ID NO: 239906 - RNA, 22 nt, Human
uaggauuuggcuuuagucaggu

SEQ ID NO: 239907 - RNA, 22 nt, Human
aauacagcagauggagacaaau

SEQ ID NO: 239908 - RNA, 22 nt, Human
ucuggcaccacugagucugcag

SEQ ID NO: 239909 - RNA, 21 nt, Human
gggaucuuguacuggcgugga

SEQ ID NO: 239910 - RNA, 22 nt, Human
ucacacauuucucaaguguagg

SEQ ID NO: 239911 - RNA, 22 nt, Human
ugcagcucauugguguccuggu

SEQ ID NO: 239912 - RNA, 22 nt, Human
aaagcacaugaguaguguagua

SEQ ID NO: 239913 - RNA, 22 nt, Human
aaaaaucacuuuuauaggcagc

SEQ ID NO: 239914 - RNA, 22 nt, Human
gucagggcacagugacagcucc

SEQ ID NO: 239915 - RNA, 22 nt, Human
ggugccagugggucucaggaua

SEQ ID NO: 239916 - RNA, 22 nt, Human
gaaagauauuuauuggcaacag

SEQ ID NO: 239917 - RNA, 22 nt, Human
ucugggcucuuaguguacccuc

SEQ ID NO: 239918 - RNA, 22 nt, Human
ucagggcauguauguuucuuua

SEQ ID NO: 239919 - RNA, 22 nt, Human
agcuggccuccgggugccuggg

SEQ ID NO: 239920 - RNA, 20 nt, Human
gucuacacgggcaguguaga

SEQ ID NO: 239921 - RNA, 23 nt, Human
augcaggacuuauaagguaaggu

SEQ ID NO: 239922 - RNA, 22 nt, Human
ugauuacacuauuugggaauag

SEQ ID NO: 239923 - RNA, 22 nt, Human
cuuguagcugcuucuucugaag

SEQ ID NO: 239924 - RNA, 22 nt, Human
ggucagaauuaggucuagagua

SEQ ID NO: 239925 - RNA, 22 nt, Human
auuagcagcuuucuggucucua

SEQ ID NO: 239926 - RNA, 22 nt, Human
ugagugggaugaguuagaggug

SEQ ID NO: 239927 - RNA, 22 nt, Human
cucagcucaaaauucaccuuug

SEQ ID NO: 239928 - RNA, 23 nt, Human
agcuggaaauggccgagcucugc

SEQ ID NO: 239929 - RNA, 22 nt, Human
caaauaauuacuauccucacuu

SEQ ID NO: 239930 - RNA, 22 nt, Human
uggcucagagccuugagagcug

SEQ ID NO: 239931 - RNA, 21 nt, Human
uguguaauauguauaagaaua

SEQ ID NO: 239932 - RNA, 22 nt, Human
gcuggcagucccaucagcuggg

SEQ ID NO: 239933 - RNA, 22 nt, Human
auauacagggagaaacagcuua

SEQ ID NO: 239934 - RNA, 19 nt, Human
ucccugaguuccagcccag

SEQ ID NO: 239935 - RNA, 22 nt, Human
auacaaguugugauaauguaaa

SEQ ID NO: 239936 - RNA, 22 nt, Human
ugguggcaauucaaagacagca

SEQ ID NO: 239937 - RNA, 22 nt, Human
cagucucuaaaucaaucugaau

SEQ ID NO: 239938 - RNA, 22 nt, Human
acaaaauuguguuaaacuuuau

SEQ ID NO: 239939 - RNA, 22 nt, Human
cccaggaggaggaaaaagcucg

SEQ ID NO: 239940 - RNA, 22 nt, Human
ucaggcuugggaggcccagggc

SEQ ID NO: 239941 - RNA, 22 nt, Human
caggcccagugaucagggcucu

SEQ ID NO: 239942 - RNA, 22 nt, Human
auggcccacucuggucccggca

SEQ ID NO: 239943 - RNA, 22 nt, Human
cauauccagguuucuuugguuu

SEQ ID NO: 239944 - RNA, 22 nt, Human
cagagacaccccagaaaauaag

SEQ ID NO: 239945 - RNA, 22 nt, Human
ucuguuuuugaggcuaucuucu

SEQ ID NO: 239946 - RNA, 22 nt, Human
gauuguaaaacagaucauuauc

SEQ ID NO: 239947 - RNA, 22 nt, Human
gaucuagaaggcaaauauagug

SEQ ID NO: 239948 - RNA, 22 nt, Human
aaaaguauuuauggcuauguaa

SEQ ID NO: 239949 - RNA, 22 nt, Human
uucaguauuucaugacuuucuu

SEQ ID NO: 239950 - RNA, 22 nt, Human
aggcugaggagggauguugcuu

SEQ ID NO: 239951 - RNA, 22 nt, Human
uccucagaagaaccccuagauu

SEQ ID NO: 239952 - RNA, 22 nt, Human
uucuccaggccgcgcagggggc

SEQ ID NO: 239953 - RNA, 23 nt, Human
agaggcaggaguggcuugcccgg

SEQ ID NO: 239954 - RNA, 23 nt, Human
ugcagcucaaagauggguaaaug

SEQ ID NO: 239955 - RNA, 22 nt, Human
gaggggcucuuuaauaguaaca

SEQ ID NO: 239956 - RNA, 22 nt, Human
auuguggugucaguuauaggca

SEQ ID NO: 239957 - RNA, 22 nt, Human
agaggccggccgagcccauggg

SEQ ID NO: 239958 - RNA, 22 nt, Human
caggucuguauuaacagagggu

SEQ ID NO: 239959 - RNA, 22 nt, Human
cugggugucaggagacaugaug

SEQ ID NO: 239960 - RNA, 22 nt, Human
gagcucuugcuucuaguccagg

SEQ ID NO: 239961 - RNA, 22 nt, Human
gcugggaguuugauuugacugg

SEQ ID NO: 239962 - RNA, 22 nt, Human
ucuuagaaguuuauggcacgga

SEQ ID NO: 239963 - RNA, 22 nt, Human
aaauuagaccaguucaggucca

SEQ ID NO: 239964 - RNA, 18 nt, Human
cuaucccuggagcuuggg

SEQ ID NO: 239965 - RNA, 22 nt, Human
ccaggcuagagagcaguggcac

SEQ ID NO: 239966 - RNA, 22 nt, Human
gcaccagcugccuucugugccc

SEQ ID NO: 239967 - RNA, 22 nt, Human
aggcaggaaaaucgcuugaacc

SEQ ID NO: 239968 - RNA, 22 nt, Human
aaggaacuagcaugauguguag

SEQ ID NO: 239969 - RNA, 22 nt, Human
ucaagcaaauguccuuuuguuc

SEQ ID NO: 239970 - RNA, 22 nt, Human
uugaaaguccuucuugaguuac

SEQ ID NO: 239971 - RNA, 22 nt, Human
aaauuccauuaggaaacuucca

SEQ ID NO: 239972 - RNA, 23 nt, Human
gcagugcuuggcacagcuggguc

SEQ ID NO: 239973 - RNA, 22 nt, Human
aggccacggcggguggauuacu

SEQ ID NO: 239974 - RNA, 22 nt, Human
gcagagcucaugccugcaccuc

SEQ ID NO: 239975 - RNA, 22 nt, Human
aacaagucauuccauuugacag

SEQ ID NO: 239976 - RNA, 18 nt, Human
aguaguggguuuagcuuc

SEQ ID NO: 239977 - RNA, 22 nt, Human
uagggaugaaguugcuauuuac

SEQ ID NO: 239978 - RNA, 22 nt, Human
aguuugaaauguuggcaauauu

SEQ ID NO: 239979 - RNA, 22 nt, Human
ucagguguggucaccacagggu

SEQ ID NO: 239980 - RNA, 22 nt, Human
uuacaauaguuccuucuuuugu

SEQ ID NO: 239981 - RNA, 23 nt, Human
uuggcaaagccuaugaaguccuc

SEQ ID NO: 239982 - RNA, 22 nt, Human
ucauuauccuaguaucuugaau

SEQ ID NO: 239983 - RNA, 22 nt, Human
ucucuggguaaaguucucucau

SEQ ID NO: 239984 - RNA, 22 nt, Human
uuauuacaaugcagaaaauaga

SEQ ID NO: 239985 - RNA, 22 nt, Human
aagaugaagaacaugagcacac

SEQ ID NO: 239986 - RNA, 22 nt, Human
aggagccaugagcaggaggcaa

SEQ ID NO: 239987 - RNA, 22 nt, Human
aaggcagucaguuguuuugaaa

SEQ ID NO: 239988 - RNA, 22 nt, Human
cauuuguuaaccaguguggauu

SEQ ID NO: 239989 - RNA, 22 nt, Human
uauggcaguuacccuugaugau

SEQ ID NO: 239990 - RNA, 22 nt, Human
uggcccgaccucugcucaugca

SEQ ID NO: 239991 - RNA, 21 nt, Human
ggcagccugacccccagagag

SEQ ID NO: 239992 - RNA, 22 nt, Human
gaaagugcaugugcccaccauu

SEQ ID NO: 239993 - RNA, 22 nt, Human
cugugggagggaaggcgcggcc

SEQ ID NO: 239994 - RNA, 22 nt, Human
ugagacaguaauuguauaguuu

SEQ ID NO: 239995 - RNA, 22 nt, Human
ugagucuguauguccagauuua

SEQ ID NO: 239996 - RNA, 20 nt, Human
uucuaauuugauggaguagc

SEQ ID NO: 239997 - RNA, 20 nt, Human
ucucccaggcucagggaaga

SEQ ID NO: 239998 - RNA, 19 nt, Human
ccuggcugugaagccugca

SEQ ID NO: 239999 - RNA, 22 nt, Human
auggcccuggaaagagcuugag

SEQ ID NO: 240000 - RNA, 22 nt, Human
cagaagaaaguggggagacaag

SEQ ID NO: 240001 - RNA, 22 nt, Human
ugcuauuuuagacauacuuugu

SEQ ID NO: 240002 - RNA, 22 nt, Human
caaagcagaccuuuacccuuua

SEQ ID NO: 240003 - RNA, 22 nt, Human
ucaagucacuggcagggaugcu

SEQ ID NO: 240004 - RNA, 22 nt, Human
uucacaauuucccuucaucagg

SEQ ID NO: 240005 - RNA, 22 nt, Human
aguaaacacuaaaaugacugcg

SEQ ID NO: 240006 - RNA, 18 nt, Human
uccaaaaucauguauuuu

SEQ ID NO: 240007 - RNA, 22 nt, Human
ugagugcuaagaauaaucugca

SEQ ID NO: 240008 - RNA, 22 nt, Human
acuacauuaugaggaaagagug

SEQ ID NO: 240009 - RNA, 22 nt, Human
cagcuggggagagacauggcag

SEQ ID NO: 240010 - RNA, 22 nt, Human
ucuuggauuuuaauggaucaaa

SEQ ID NO: 240011 - RNA, 22 nt, Human
uucugcuuucaguucuucuggg

SEQ ID NO: 240012 - RNA, 22 nt, Human
cacugucuugauuacuaugggu

SEQ ID NO: 240013 - RNA, 22 nt, Human
gccuggcugcugguucugagga

SEQ ID NO: 240014 - RNA, 22 nt, Human
cugcacaguuugauuucuugcu

SEQ ID NO: 240015 - RNA, 22 nt, Human
ggauuuacuaucuugaaauaua

SEQ ID NO: 240016 - RNA, 22 nt, Human
cugcccugcuucugagggaagc

SEQ ID NO: 240017 - RNA, 22 nt, Human
gauggaagaaaaaugcaugucu

SEQ ID NO: 240018 - RNA, 22 nt, Human
gcagcuuuaaucugaauaagua

SEQ ID NO: 240019 - RNA, 22 nt, Human
aaguucaagucugcaucuuuuu

SEQ ID NO: 240020 - RNA, 22 nt, Human
ggagcagagcucuucaucugca

SEQ ID NO: 240021 - RNA, 20 nt, Human
uugggccugucagcacuccc

SEQ ID NO: 240022 - RNA, 22 nt, Human
aaaguguagagacuuuggaacc

SEQ ID NO: 240023 - RNA, 22 nt, Human
ccugcuggcggggacccaguga

SEQ ID NO: 240024 - RNA, 22 nt, Human
acuucccaacacuuuugagaug

SEQ ID NO: 240025 - RNA, 22 nt, Human
cuucccugauaagagccucaga

SEQ ID NO: 240026 - RNA, 22 nt, Human
aggcacagagaaugcccuccau

SEQ ID NO: 240027 - RNA, 22 nt, Human
uauaucuaaguguauguaagag

SEQ ID NO: 240028 - RNA, 19 nt, Human
gggcuuggggcugaagccu

SEQ ID NO: 240029 - RNA, 22 nt, Human
caaauaguuuuucauguauuau

SEQ ID NO: 240030 - RNA, 22 nt, Human
ucuuggagauagggucuuaaug

SEQ ID NO: 240031 - RNA, 22 nt, Human
cuuauucagauacagacucuug

SEQ ID NO: 240032 - RNA, 22 nt, Human
guacaaauuuugacaucuagga

SEQ ID NO: 240033 - RNA, 22 nt, Human
cagagguguacagagggaggcc

SEQ ID NO: 240034 - RNA, 22 nt, Human
uucaguguuuguagagauaacu

SEQ ID NO: 240035 - RNA, 22 nt, Human
gaauuacauaauaaaaugagag

SEQ ID NO: 240036 - RNA, 22 nt, Human
caggaguguugauugcucagga

SEQ ID NO: 240037 - RNA, 22 nt, Human
uagacauuucugguuauugaca

SEQ ID NO: 240038 - RNA, 22 nt, Human
agaaggcuagagacuugcccaa

SEQ ID NO: 240039 - RNA, 22 nt, Human
uagugucaaacagggauuagaa

SEQ ID NO: 240040 - RNA, 19 nt, Human
uaccauguugacuuuccug

SEQ ID NO: 240041 - RNA, 22 nt, Human
cucccucccuacgugagcucac

SEQ ID NO: 240042 - RNA, 22 nt, Human
aggcagguuacaaaaacuuuau

SEQ ID NO: 240043 - RNA, 22 nt, Human
ucucuacauaaccucaauacuc

SEQ ID NO: 240044 - RNA, 22 nt, Human
uuauuuaggaggaaacugaggu

SEQ ID NO: 240045 - RNA, 23 nt, Human
aaacuugcuauggcugaaaucau

SEQ ID NO: 240046 - RNA, 22 nt, Human
gcgcaagccacacagccugggg

SEQ ID NO: 240047 - RNA, 22 nt, Human
uugugaauggugccgcaauaaa

SEQ ID NO: 240048 - RNA, 22 nt, Human
acacccaggcuggcgugcagug

SEQ ID NO: 240049 - RNA, 22 nt, Human
auggccagcaaguucagaauuu

SEQ ID NO: 240050 - RNA, 22 nt, Human
aaucacaauuacuuuugcacca

SEQ ID NO: 240051 - RNA, 22 nt, Human
gcuggcuggaggugaggaagaa

SEQ ID NO: 240052 - RNA, 22 nt, Human
aagcaugucccuugugauucaa

SEQ ID NO: 240053 - RNA, 22 nt, Human
uaugcaauucucuuaauauucu

SEQ ID NO: 240054 - RNA, 22 nt, Human
uggggcuguccuuagucugaga

SEQ ID NO: 240055 - RNA, 22 nt, Human
gaggucuggaccaagucgcccc

SEQ ID NO: 240056 - RNA, 22 nt, Human
gauuacaaaacucaucuaugac

SEQ ID NO: 240057 - RNA, 22 nt, Human
ggcaguggguuccccaaggcac

SEQ ID NO: 240058 - RNA, 22 nt, Human
uagcuguuugaaguauuuuucu

SEQ ID NO: 240059 - RNA, 21 nt, Human
uguggcugacacccuuuggga

SEQ ID NO: 240060 - RNA, 22 nt, Human
ugugguuuugguucagaaacaa

SEQ ID NO: 240061 - RNA, 22 nt, Human
uagagaugaauucugcagucuu

SEQ ID NO: 240062 - RNA, 22 nt, Human
ccacugagguuuugugguuaug

SEQ ID NO: 240063 - RNA, 22 nt, Human
gcagcagggugccagcuuugca

SEQ ID NO: 240064 - RNA, 22 nt, Human
aagggacccuggaucaaaugga

SEQ ID NO: 240065 - RNA, 22 nt, Human
gcauacaaagguuuacaacuga

SEQ ID NO: 240066 - RNA, 22 nt, Human
aggccuccuggcuccaggccuu

SEQ ID NO: 240067 - RNA, 22 nt, Human
uagaggcauaagagggaagcag

SEQ ID NO: 240068 - RNA, 22 nt, Human
cuguccuccagacgacaguccc

SEQ ID NO: 240069 - RNA, 22 nt, Human
uccugcagagccgcccucaggu

SEQ ID NO: 240070 - RNA, 22 nt, Human
ugaaaugaaacagaacauauca

SEQ ID NO: 240071 - RNA, 22 nt, Human
agcaucagagagaaguuaacua

SEQ ID NO: 240072 - RNA, 22 nt, Human
auggcuucugucuuggaaauuu

SEQ ID NO: 240073 - RNA, 23 nt, Human
cgcccagccucagugaccugggc

SEQ ID NO: 240074 - RNA, 22 nt, Human
uucugaauggcaagcauuaggc

SEQ ID NO: 240075 - RNA, 22 nt, Human
agacaggaugcauacucuuggu

SEQ ID NO: 240076 - RNA, 22 nt, Human
acuaacauuuguguaugucuug

SEQ ID NO: 240077 - RNA, 22 nt, Human
aaauccuaccaagaaauucccu

SEQ ID NO: 240078 - RNA, 22 nt, Human
aggaaaugggaauagaugguau

SEQ ID NO: 240079 - RNA, 22 nt, Human
cagagccugcucacgucucugu

SEQ ID NO: 240080 - RNA, 22 nt, Human
ugccagccagggaagcucaccc

SEQ ID NO: 240081 - RNA, 22 nt, Human
aguugacauccauaacaggaag

SEQ ID NO: 240082 - RNA, 22 nt, Human
acauuucugcauguaggguaau

SEQ ID NO: 240083 - RNA, 22 nt, Human
caguaaguauucgagucuccau

SEQ ID NO: 240084 - RNA, 22 nt, Human
aaagccuuuucuguuuaacaca

SEQ ID NO: 240085 - RNA, 22 nt, Human
ucagaaguccaauaccauggga

SEQ ID NO: 240086 - RNA, 22 nt, Human
auccaauuacguuuuuugucau

SEQ ID NO: 240087 - RNA, 22 nt, Human
ccaccucucaggguuuccuaau

SEQ ID NO: 240088 - RNA, 22 nt, Human
cagaaacauguauaaaguugua

SEQ ID NO: 240089 - RNA, 22 nt, Human
ucuggguggcugccaaucugcc

SEQ ID NO: 240090 - RNA, 22 nt, Human
uugauucaucuucuaauaccca

SEQ ID NO: 240091 - RNA, 22 nt, Human
acaagaauguagauuaguuaag

SEQ ID NO: 240092 - RNA, 22 nt, Human
aacaggcuaaguauuugguagc

SEQ ID NO: 240093 - RNA, 22 nt, Human
gagguacagaguguuccaaugu

SEQ ID NO: 240094 - RNA, 23 nt, Human
aaguucuuagguugauacuaaug

SEQ ID NO: 240095 - RNA, 20 nt, Human
aaaggaauauaugaaguaua

SEQ ID NO: 240096 - RNA, 22 nt, Human
accugagaccuaaucugacugu

SEQ ID NO: 240097 - RNA, 22 nt, Human
gccuggagccucagcaaggagg

SEQ ID NO: 240098 - RNA, 22 nt, Human
acugucacuccaacugagucgu

SEQ ID NO: 240099 - RNA, 22 nt, Human
uuuaguguuugcguguacuccu

SEQ ID NO: 240100 - RNA, 22 nt, Human
gaaauaauuuagaagguauucc

SEQ ID NO: 240101 - RNA, 22 nt, Human
cacugucugagcuggugauuag

SEQ ID NO: 240102 - RNA, 22 nt, Human
cagcucugccacuuccuagcua

SEQ ID NO: 240103 - RNA, 17 nt, Human
aggcugcugggccaggg

SEQ ID NO: 240104 - RNA, 22 nt, Human
aauucucaggaauuucaucugu

SEQ ID NO: 240105 - RNA, 22 nt, Human
uaucauuuguuauuauuagugg

SEQ ID NO: 240106 - RNA, 22 nt, Human
acccaggcuggaaugcaguggu

SEQ ID NO: 240107 - RNA, 21 nt, Human
aggggacagaguagcuccagg

SEQ ID NO: 240108 - RNA, 22 nt, Human
ggccaggcugguuccuugaccu

SEQ ID NO: 240109 - RNA, 22 nt, Human
aggcugagggcuccugagggca

SEQ ID NO: 240110 - RNA, 22 nt, Human
agucaggguuguaggcucaccc

SEQ ID NO: 240111 - RNA, 20 nt, Human
aggcaugggaugcccagauu

SEQ ID NO: 240112 - RNA, 22 nt, Human
guguuacauauucuaaaaugcu

SEQ ID NO: 240113 - RNA, 22 nt, Human
aggcuucuucucuauguacaag

SEQ ID NO: 240114 - RNA, 22 nt, Human
acacagaguuugacacauggga

SEQ ID NO: 240115 - RNA, 22 nt, Human
aaagaggcucaaggugggccag

SEQ ID NO: 240116 - RNA, 22 nt, Human
agggaugaucaggguagaggcu

SEQ ID NO: 240117 - RNA, 22 nt, Human
gcuguguccucacacagccuuu

SEQ ID NO: 240118 - RNA, 22 nt, Human
aggagggagcuuaagccaggca

SEQ ID NO: 240119 - RNA, 22 nt, Human
gggcucugggauucagagcaag

SEQ ID NO: 240120 - RNA, 22 nt, Human
aggcagugccuggaccccagcu

SEQ ID NO: 240121 - RNA, 22 nt, Human
gaagccaagggcugcuuuuccu

SEQ ID NO: 240122 - RNA, 22 nt, Human
acagugucuccugguacccagu

SEQ ID NO: 240123 - RNA, 22 nt, Human
agcaacauuuuucaauuaacau

SEQ ID NO: 240124 - RNA, 22 nt, Human
uaaaaaguagugagaauggcgc

SEQ ID NO: 240125 - RNA, 22 nt, Human
uauucaggucgagcuaacugcu

SEQ ID NO: 240126 - RNA, 22 nt, Human
uugccaggagacaaagugggcc

SEQ ID NO: 240127 - RNA, 22 nt, Human
cagaaccugaacgugaggugga

SEQ ID NO: 240128 - RNA, 20 nt, Human
ucugcaccuccuuccaauca

SEQ ID NO: 240129 - RNA, 22 nt, Human
aaaugucaaagacguguuuuug

SEQ ID NO: 240130 - RNA, 22 nt, Human
cuucagcuaggaucccugcagc

SEQ ID NO: 240131 - RNA, 22 nt, Human
cacugucugggacauguggucu

SEQ ID NO: 240132 - RNA, 17 nt, Human
agacagaccucugcauc

SEQ ID NO: 240133 - RNA, 22 nt, Human
gauaaauuaucagggguuuaaa

SEQ ID NO: 240134 - RNA, 22 nt, Human
aagaauuuuccagcaugucagu

SEQ ID NO: 240135 - RNA, 22 nt, Human
caaaugaauuucccugcaaaug

SEQ ID NO: 240136 - RNA, 22 nt, Human
gccagguggagguugcagugag

SEQ ID NO: 240137 - RNA, 22 nt, Human
aaaggcuuaauguuguuguaau

SEQ ID NO: 240138 - RNA, 22 nt, Human
aguauacaaauaaauguguaau

SEQ ID NO: 240139 - RNA, 22 nt, Human
augacagacccucuaaagacaa

SEQ ID NO: 240140 - RNA, 22 nt, Human
uuuagaaauucaucuauggccu

SEQ ID NO: 240141 - RNA, 22 nt, Human
cuuuggaggucauagccaagag

SEQ ID NO: 240142 - RNA, 22 nt, Human
augccuuucccaacaggguggg

SEQ ID NO: 240143 - RNA, 17 nt, Human
agaacuguaguagcucc

SEQ ID NO: 240144 - RNA, 22 nt, Human
caaugcacauggacaucaggcu

SEQ ID NO: 240145 - RNA, 22 nt, Human
ggcuuugcuuuggcuguuucag

SEQ ID NO: 240146 - RNA, 22 nt, Human
ugcuuuauuuauaaaauagcaa

SEQ ID NO: 240147 - RNA, 22 nt, Human
uagaacuuauuagaaaggcuca

SEQ ID NO: 240148 - RNA, 22 nt, Human
auaguacacauccuacaauguu

SEQ ID NO: 240149 - RNA, 22 nt, Human
acuaaagcucacagaguugaac

SEQ ID NO: 240150 - RNA, 22 nt, Human
aaagugcaaggauuacaggcau

SEQ ID NO: 240151 - RNA, 22 nt, Human
guccauggcauuuccgucacau

SEQ ID NO: 240152 - RNA, 16 nt, Human
ccuggaggucacuuca

SEQ ID NO: 240153 - RNA, 22 nt, Human
uuugccugauucuaagagcuca

SEQ ID NO: 240154 - RNA, 22 nt, Human
auuaauuuccaggcacugugcu

SEQ ID NO: 240155 - RNA, 22 nt, Human
auucacaugugcuucuuaucac

SEQ ID NO: 240156 - RNA, 22 nt, Human
gacacugaccccaagcuguccu

SEQ ID NO: 240157 - RNA, 22 nt, Human
augaaguucucaauaaucaugu

SEQ ID NO: 240158 - RNA, 22 nt, Human
gcucuguguuuugcccaggaga

SEQ ID NO: 240159 - RNA, 22 nt, Human
aucuuuggaucgcucccccuuc

SEQ ID NO: 240160 - RNA, 22 nt, Human
gccagagagagucccugggccu

SEQ ID NO: 240161 - RNA, 22 nt, Human
ugugggaggaauuagaauggga

SEQ ID NO: 240162 - RNA, 22 nt, Human
agagguugggucugaggugaga

SEQ ID NO: 240163 - RNA, 22 nt, Human
aaauggaucuuuuuauaaugca

SEQ ID NO: 240164 - RNA, 18 nt, Human
uuggggugaggccaggaa

SEQ ID NO: 240165 - RNA, 22 nt, Human
agaggccaagccagacugugca

SEQ ID NO: 240166 - RNA, 22 nt, Human
uugcauuucccauugaguaaug

SEQ ID NO: 240167 - RNA, 22 nt, Human
aagcuguucucuaaguuucaug

SEQ ID NO: 240168 - RNA, 22 nt, Human
cauucccugucucuucaauccu

SEQ ID NO: 240169 - RNA, 19 nt, Human
uucucuggacuagaugcug

SEQ ID NO: 240170 - RNA, 19 nt, Human
uccaggagcaaagccaguu

SEQ ID NO: 240171 - RNA, 22 nt, Human
caagugucuauaucagugcuug

SEQ ID NO: 240172 - RNA, 22 nt, Human
ucccucagacagauguguuccu

SEQ ID NO: 240173 - RNA, 22 nt, Human
auggucuuuuuguuaugagaga

SEQ ID NO: 240174 - RNA, 22 nt, Human
uuguguccuauaugcauguucu

SEQ ID NO: 240175 - RNA, 22 nt, Human
acauagaacuucccagugagca

SEQ ID NO: 240176 - RNA, 22 nt, Human
gcucuggggaugcuucugccgu

SEQ ID NO: 240177 - RNA, 22 nt, Human
agggacacgagguccugcuggg

SEQ ID NO: 240178 - RNA, 22 nt, Human
uggcaggguggcaacuuuuggu

SEQ ID NO: 240179 - RNA, 22 nt, Human
uuuaucugcauucugaccaucu

SEQ ID NO: 240180 - RNA, 22 nt, Human
uccuuagaccuggcaaaugggg

SEQ ID NO: 240181 - RNA, 22 nt, Human
ugaaaucaauugcaauguuuau

SEQ ID NO: 240182 - RNA, 22 nt, Human
cagcugguguccagggaagugg

SEQ ID NO: 240183 - RNA, 22 nt, Human
uacuucauucaaguucgcuaua

SEQ ID NO: 240184 - RNA, 22 nt, Human
auguggaucuguuauucuagau

SEQ ID NO: 240185 - RNA, 22 nt, Human
cuccaggcccacgucgaggagg

SEQ ID NO: 240186 - RNA, 22 nt, Human
uacuguauuugauaagugaagu

SEQ ID NO: 240187 - RNA, 22 nt, Human
uagcagagcgggugcgaggcgg

SEQ ID NO: 240188 - RNA, 22 nt, Human
cugucucagcaggaagucauca

SEQ ID NO: 240189 - RNA, 22 nt, Human
aaugugucagcuugucgaucuu

SEQ ID NO: 240190 - RNA, 22 nt, Human
cuucuucaaccugaaaguuuca

SEQ ID NO: 240191 - RNA, 22 nt, Human
ucccaggguauccuguaguaaa

SEQ ID NO: 240192 - RNA, 22 nt, Human
ugacauuugagcauacauguaa

SEQ ID NO: 240193 - RNA, 22 nt, Human
ggccugcacagagguggcucua

SEQ ID NO: 240194 - RNA, 22 nt, Human
aaggcagcacagcaacugcuca

SEQ ID NO: 240195 - RNA, 22 nt, Human
gacaaacugaaguauauuuaga

SEQ ID NO: 240196 - RNA, 21 nt, Human
agcucccuguuuccucacucu

SEQ ID NO: 240197 - RNA, 22 nt, Human
acucagaaugacugaugcugug

SEQ ID NO: 240198 - RNA, 22 nt, Human
auucuucaaagagugucaaagu

SEQ ID NO: 240199 - RNA, 22 nt, Human
ugauucuguaagucauauuguu

SEQ ID NO: 240200 - RNA, 22 nt, Human
ggcaggcacuguguuuuguguu

SEQ ID NO: 240201 - RNA, 22 nt, Human
gggcuggcugauuuuccucucu

SEQ ID NO: 240202 - RNA, 22 nt, Human
gcagggagggccuuucaugaca

SEQ ID NO: 240203 - RNA, 22 nt, Human
uaugaaauuucuaguucugcuu

SEQ ID NO: 240204 - RNA, 22 nt, Human
ccucugggcggagaucugcugc

SEQ ID NO: 240205 - RNA, 22 nt, Human
gccuccuggauuuuagugccau

SEQ ID NO: 240206 - RNA, 22 nt, Human
acuggcagaacuggugauuguc

SEQ ID NO: 240207 - RNA, 22 nt, Human
uguggacuagagaauucuguug

SEQ ID NO: 240208 - RNA, 22 nt, Human
aaauuaagggugagaagaguug

SEQ ID NO: 240209 - RNA, 20 nt, Human
gaagauggguagaggcacag

SEQ ID NO: 240210 - RNA, 22 nt, Human
acauacagaccugcagggcagc

SEQ ID NO: 240211 - RNA, 22 nt, Human
uagaacuggaauuuugugguuu

SEQ ID NO: 240212 - RNA, 22 nt, Human
augcaacagcugggaauaugua

SEQ ID NO: 240213 - RNA, 22 nt, Human
uucagacaguaagaaagagguu

SEQ ID NO: 240214 - RNA, 22 nt, Human
ucacaucucuguuuucuaaauc

SEQ ID NO: 240215 - RNA, 22 nt, Human
augaacaguaugcaacaugauu

SEQ ID NO: 240216 - RNA, 22 nt, Human
cuuagcaguggguaccagggcu

SEQ ID NO: 240217 - RNA, 22 nt, Human
aaaacauucugugaacucucaa

SEQ ID NO: 240218 - RNA, 22 nt, Human
gucaguuauuuugagcaauugg

SEQ ID NO: 240219 - RNA, 23 nt, Human
cagaggugucagugcccaguguc

SEQ ID NO: 240220 - RNA, 22 nt, Human
agcuccugcagacuccugcuca

SEQ ID NO: 240221 - RNA, 20 nt, Human
gagugggccauggagugaga

SEQ ID NO: 240222 - RNA, 22 nt, Human
guagaagugaugucauguuaua

SEQ ID NO: 240223 - RNA, 22 nt, Human
gugcuucuccguucugcagcac

SEQ ID NO: 240224 - RNA, 22 nt, Human
uugaggaguuaggauguuuaua

SEQ ID NO: 240225 - RNA, 22 nt, Human
uaaaugcagcaguuucuguucu

SEQ ID NO: 240226 - RNA, 22 nt, Human
agggacaucucacaaacaacuu

SEQ ID NO: 240227 - RNA, 22 nt, Human
gagguaauuacuauguucagau

SEQ ID NO: 240228 - RNA, 22 nt, Human
agcugugugaccuagggcaagc

SEQ ID NO: 240229 - RNA, 22 nt, Human
acuggcagaauugaauaguugu

SEQ ID NO: 240230 - RNA, 22 nt, Human
gagugcuugcauauuuauuguc

SEQ ID NO: 240231 - RNA, 22 nt, Human
caucagagugguggccuggugu

SEQ ID NO: 240232 - RNA, 22 nt, Human
agcaucuguuaagugccuucaa

SEQ ID NO: 240233 - RNA, 22 nt, Human
cccaggauggggcugcaguuau

SEQ ID NO: 240234 - RNA, 22 nt, Human
cagaauuugaaguaauauucca

SEQ ID NO: 240235 - RNA, 18 nt, Human
uauauuucacacauauuc

SEQ ID NO: 240236 - RNA, 22 nt, Human
agcuucucucuuugcacucaca

SEQ ID NO: 240237 - RNA, 18 nt, Human
auacaagcucuguuacuu

SEQ ID NO: 240238 - RNA, 22 nt, Human
agcaugcaguaaagcccauguc

SEQ ID NO: 240239 - RNA, 22 nt, Human
agggccagccgacuuccagccu

SEQ ID NO: 240240 - RNA, 22 nt, Human
uccagaggcaaaaagguaugga

SEQ ID NO: 240241 - RNA, 22 nt, Human
uaccauuuugaggauggagaga

SEQ ID NO: 240242 - RNA, 22 nt, Human
cugggaggcggagguuguagug

SEQ ID NO: 240243 - RNA, 22 nt, Human
uaacuucuggaaaugcaucugc

SEQ ID NO: 240244 - RNA, 22 nt, Human
uuccuucuuguaaugaucugcc

SEQ ID NO: 240245 - RNA, 22 nt, Human
ucugggucuuuacccauggaau

SEQ ID NO: 240246 - RNA, 22 nt, Human
gagaacuugaacuuuuccucug

SEQ ID NO: 240247 - RNA, 22 nt, Human
ggcuccagggucucuccuugug

SEQ ID NO: 240248 - RNA, 22 nt, Human
uucuccagaccuugugacuaug

SEQ ID NO: 240249 - RNA, 22 nt, Human
agcuggcuuuugugaagguuuu

SEQ ID NO: 240250 - RNA, 22 nt, Human
gaauuacaugacccugaguaga

SEQ ID NO: 240251 - RNA, 22 nt, Human
gcuggugguaaggaggaaaaag

SEQ ID NO: 240252 - RNA, 22 nt, Human
cugauucuuugaagaugcaccc

SEQ ID NO: 240253 - RNA, 22 nt, Human
auugaauagaugcauuauacua

SEQ ID NO: 240254 - RNA, 22 nt, Human
uccagggaaggugugaggcugg

SEQ ID NO: 240255 - RNA, 22 nt, Human
uagcagcaagaaugggaugugu

SEQ ID NO: 240256 - RNA, 22 nt, Human
caggccaggguugagaagagaa

SEQ ID NO: 240257 - RNA, 22 nt, Human
ugacacaguugucgacucuaca

SEQ ID NO: 240258 - RNA, 22 nt, Human
cuggagcuggcuuccuuccacu

SEQ ID NO: 240259 - RNA, 22 nt, Human
uuuguguuuuagcuggugaggc

SEQ ID NO: 240260 - RNA, 22 nt, Human
uccuugggaaacaucauguaau

SEQ ID NO: 240261 - RNA, 22 nt, Human
cagucuccgccagcuccucaca

SEQ ID NO: 240262 - RNA, 22 nt, Human
gccaggaauuucaagagccacu

SEQ ID NO: 240263 - RNA, 21 nt, Human
cagcccagcccauugacagug

SEQ ID NO: 240264 - RNA, 22 nt, Human
cauggcucggggacaggaggua

SEQ ID NO: 240265 - RNA, 22 nt, Human
uauucagugacaggguauuaug

SEQ ID NO: 240266 - RNA, 22 nt, Human
uacaagcucacaaauuuuuaag

SEQ ID NO: 240267 - RNA, 22 nt, Human
ggcuccugagaaugggccauca

SEQ ID NO: 240268 - RNA, 22 nt, Human
aggaaacuaacuuaucuuuaua

SEQ ID NO: 240269 - RNA, 22 nt, Human
ucuuucaaugugaaaccaugua

SEQ ID NO: 240270 - RNA, 22 nt, Human
gauagaguguugccucucaauu

SEQ ID NO: 240271 - RNA, 22 nt, Human
gggcucugugguugugcuuugu

SEQ ID NO: 240272 - RNA, 22 nt, Human
uauaccaaaauaucagaaaggg

SEQ ID NO: 240273 - RNA, 22 nt, Human
ggagccuguggccgucacgacu

SEQ ID NO: 240274 - RNA, 22 nt, Human
ucuguagcauucaccagcccug

SEQ ID NO: 240275 - RNA, 19 nt, Human
ggcugucuacgaaccaguc

SEQ ID NO: 240276 - RNA, 22 nt, Human
ucagaaguccaauuuucgcacc

SEQ ID NO: 240277 - RNA, 22 nt, Human
ccucagaguuuaagaugucaga

SEQ ID NO: 240278 - RNA, 22 nt, Human
aaagacauauuucuaaguuuau

SEQ ID NO: 240279 - RNA, 22 nt, Human
cuggcuagcaccucagcucaga

SEQ ID NO: 240280 - RNA, 22 nt, Human
uucauacauuuuuacuaacagc

SEQ ID NO: 240281 - RNA, 22 nt, Human
guuacaaacucaggugccaaaa

SEQ ID NO: 240282 - RNA, 22 nt, Human
gugagcagcucaggguggucuc

SEQ ID NO: 240283 - RNA, 20 nt, Human
aggcaagguagaugucugcu

SEQ ID NO: 240284 - RNA, 22 nt, Human
aaaggcagagugcucagcuggc

SEQ ID NO: 240285 - RNA, 20 nt, Human
uacagacaugacaauaaugg

SEQ ID NO: 240286 - RNA, 22 nt, Human
cuugaaauccagauuucagagg

SEQ ID NO: 240287 - RNA, 22 nt, Human
ggcccagcuuucauuccuugcu

SEQ ID NO: 240288 - RNA, 22 nt, Human
uacugugguaacauuuuaaauu

SEQ ID NO: 240289 - RNA, 22 nt, Human
accuguuuguuaagaaagcuuc

SEQ ID NO: 240290 - RNA, 22 nt, Human
uggcugaggcuggagugcagug

SEQ ID NO: 240291 - RNA, 22 nt, Human
ccugagccugaguggugcaggg

SEQ ID NO: 240292 - RNA, 22 nt, Human
aagucauuaucucuucuaaucu

SEQ ID NO: 240293 - RNA, 22 nt, Human
ccaacacagauguguuaguguu

SEQ ID NO: 240294 - RNA, 22 nt, Human
accagcacggauuagaaugcuu

SEQ ID NO: 240295 - RNA, 21 nt, Human
aauaaccacuaauauaguggc

SEQ ID NO: 240296 - RNA, 22 nt, Human
aaggcugggaaacaugcaggcc

SEQ ID NO: 240297 - RNA, 22 nt, Human
caaaguauauuucauagucuca

SEQ ID NO: 240298 - RNA, 22 nt, Human
augucuuucucacagccaguuc

SEQ ID NO: 240299 - RNA, 22 nt, Human
gaagaagacauggaacaauagu

SEQ ID NO: 240300 - RNA, 22 nt, Human
gagcuuuaagggcacuggucuu

SEQ ID NO: 240301 - RNA, 21 nt, Human
uccugugaggaccugucagug

SEQ ID NO: 240302 - RNA, 19 nt, Human
aagcauuagccaaagcauu

SEQ ID NO: 240303 - RNA, 19 nt, Human
agggcacagggacagaagg

SEQ ID NO: 240304 - RNA, 22 nt, Human
caaauagugucacauugugagg

SEQ ID NO: 240305 - RNA, 22 nt, Human
gcacaugacuuugaggaaacca

SEQ ID NO: 240306 - RNA, 22 nt, Human
ucagaaaagaccacauuauucu

SEQ ID NO: 240307 - RNA, 22 nt, Human
acaugcaaagggaugcaauuau

SEQ ID NO: 240308 - RNA, 22 nt, Human
ccaccugugcuugguacuccau

SEQ ID NO: 240309 - RNA, 22 nt, Human
aguuuccuugggcauuuguuua

SEQ ID NO: 240310 - RNA, 22 nt, Human
aagggcuggcccugggaagagu

SEQ ID NO: 240311 - RNA, 22 nt, Human
ggcucugcagugacuugagggg

SEQ ID NO: 240312 - RNA, 22 nt, Human
gcugggucagaaucucccugug

SEQ ID NO: 240313 - RNA, 22 nt, Human
ugucauuuacuccauacccuca

SEQ ID NO: 240314 - RNA, 22 nt, Human
ugcauucaucauuugaaagccc

SEQ ID NO: 240315 - RNA, 22 nt, Human
aaaguguuuugauuuaguggua

SEQ ID NO: 240316 - RNA, 22 nt, Human
cugucagggggccuggccauca

SEQ ID NO: 240317 - RNA, 19 nt, Human
acuggcagggcugcggugg

SEQ ID NO: 240318 - RNA, 22 nt, Human
uggcucaguuugggggauugaa

SEQ ID NO: 240319 - RNA, 22 nt, Human
ugugucauauuaguauugagag

SEQ ID NO: 240320 - RNA, 22 nt, Human
auuguaucuugucauuaugcau

SEQ ID NO: 240321 - RNA, 22 nt, Human
uuuaaauguuuaaaacucguga

SEQ ID NO: 240322 - RNA, 22 nt, Human
cucuguacaggagacaucucua

SEQ ID NO: 240323 - RNA, 19 nt, Human
acugggcuuguccucgugg

SEQ ID NO: 240324 - RNA, 18 nt, Human
ugacucacccugucagug

SEQ ID NO: 240325 - RNA, 22 nt, Human
agcugggagcugaaggcugauu

SEQ ID NO: 240326 - RNA, 22 nt, Human
agagaucaguuaaaaucuuuuu

SEQ ID NO: 240327 - RNA, 22 nt, Human
acuagaaagcaaaagccauuuc

SEQ ID NO: 240328 - RNA, 22 nt, Human
uccugccuucauacugcuguau

SEQ ID NO: 240329 - RNA, 22 nt, Human
uuccuuguaagaccuauuuuug

SEQ ID NO: 240330 - RNA, 22 nt, Human
gccaggaaaaacguggugggag

SEQ ID NO: 240331 - RNA, 22 nt, Human
uggguaaacaauguuugccuaa

SEQ ID NO: 240332 - RNA, 22 nt, Human
gaaugcugagucuuaucucuua

SEQ ID NO: 240333 - RNA, 22 nt, Human
agcucaggcaacucugggcccc

SEQ ID NO: 240334 - RNA, 21 nt, Human
cuggagcuuggugagaagugu

SEQ ID NO: 240335 - RNA, 22 nt, Human
uaaggcaguuuugccugagaua

SEQ ID NO: 240336 - RNA, 21 nt, Human
agacuguggauuuugacaugu

SEQ ID NO: 240337 - RNA, 22 nt, Human
cucuuucucgccgcccgcaguc

SEQ ID NO: 240338 - RNA, 22 nt, Human
gggauccauccgugcagcagag

SEQ ID NO: 240339 - RNA, 22 nt, Human
uaguucuucaugaauucagcuu

SEQ ID NO: 240340 - RNA, 22 nt, Human
uacagacagacuucccacccuc

SEQ ID NO: 240341 - RNA, 22 nt, Human
ucuguggaccaggguauaagga

SEQ ID NO: 240342 - RNA, 22 nt, Human
gguccagguccugugacagcag

SEQ ID NO: 240343 - RNA, 23 nt, Human
ggggacaguucccacuggggucu

SEQ ID NO: 240344 - RNA, 22 nt, Human
caagauuaucuucuucuuguua

SEQ ID NO: 240345 - RNA, 23 nt, Human
uccagccaaaucuggcugacagu

SEQ ID NO: 240346 - RNA, 22 nt, Human
uugggaaagccacaaauuggag

SEQ ID NO: 240347 - RNA, 22 nt, Human
uuguuucuucauuuagaagcuu

SEQ ID NO: 240348 - RNA, 22 nt, Human
caauauauaaugaguacuuucc

SEQ ID NO: 240349 - RNA, 22 nt, Human
cagaggaguucaguacacagcc

SEQ ID NO: 240350 - RNA, 22 nt, Human
uuucuacaguacugauuucaua

SEQ ID NO: 240351 - RNA, 22 nt, Human
gacaggcuucaugauggcagga

SEQ ID NO: 240352 - RNA, 22 nt, Human
acaugcuuucuagguccuucug

SEQ ID NO: 240353 - RNA, 22 nt, Human
acuguacaugcaucuugucuau

SEQ ID NO: 240354 - RNA, 22 nt, Human
augaagaaacuguucugggugg

SEQ ID NO: 240355 - RNA, 19 nt, Human
ucuuuguacaagucucugc

SEQ ID NO: 240356 - RNA, 22 nt, Human
ugucacauuauaugugaggaua

SEQ ID NO: 240357 - RNA, 22 nt, Human
ucccagaguauuagcaauugcu

SEQ ID NO: 240358 - RNA, 22 nt, Human
uaucacuugcguuuuggcagag

SEQ ID NO: 240359 - RNA, 22 nt, Human
gagcccuccauggagccaggca

SEQ ID NO: 240360 - RNA, 22 nt, Human
ccagggcuggaccagugcuugg

SEQ ID NO: 240361 - RNA, 22 nt, Human
ggcagcuguuggcucucuagga

SEQ ID NO: 240362 - RNA, 20 nt, Human
ugcugggcaugcaguggaaa

SEQ ID NO: 240363 - RNA, 22 nt, Human
cuugagaacaggguuagguaac

SEQ ID NO: 240364 - RNA, 19 nt, Human
uggugcuggccucccaugg

SEQ ID NO: 240365 - RNA, 22 nt, Human
cugguucugauguucuuggcuu

SEQ ID NO: 240366 - RNA, 22 nt, Human
ugacugccgauuguccuucucu

SEQ ID NO: 240367 - RNA, 19 nt, Human
cuuauuagagugagagcuu

SEQ ID NO: 240368 - RNA, 22 nt, Human
ggaucuuuaaguucuuuuccau

SEQ ID NO: 240369 - RNA, 22 nt, Human
acagccuguuugaucuggugcu

SEQ ID NO: 240370 - RNA, 22 nt, Human
ugccugggacaugcuguggacu

SEQ ID NO: 240371 - RNA, 22 nt, Human
ucagggagauuuggggacucaa

SEQ ID NO: 240372 - RNA, 22 nt, Human
aauauaguucugguauuguuaa

SEQ ID NO: 240373 - RNA, 22 nt, Human
gacacaaaguuugucagaaauu

SEQ ID NO: 240374 - RNA, 22 nt, Human
gggcuucucugggaguccuggu

SEQ ID NO: 240375 - RNA, 22 nt, Human
aucuuagagagucguguuuugu

SEQ ID NO: 240376 - RNA, 22 nt, Human
gcaaagguagccaaggagcuca

SEQ ID NO: 240377 - RNA, 22 nt, Human
ccugggccucacccagcucuug

SEQ ID NO: 240378 - RNA, 22 nt, Human
cgggguccgggcaguaggcugc

SEQ ID NO: 240379 - RNA, 22 nt, Human
uuccuauagaaagcuguguaga

SEQ ID NO: 240380 - RNA, 21 nt, Human
caggcucugcuagaggagccu

SEQ ID NO: 240381 - RNA, 22 nt, Human
uuuucuucuaccugcuguccaa

SEQ ID NO: 240382 - RNA, 22 nt, Human
gggagccuugggagugccagcc

SEQ ID NO: 240383 - RNA, 22 nt, Human
agaggaaguaaucaggaccugc

SEQ ID NO: 240384 - RNA, 22 nt, Human
augugugguuuguaaaugauuu

SEQ ID NO: 240385 - RNA, 22 nt, Human
cagggccuccuaaggcaucuaa

SEQ ID NO: 240386 - RNA, 22 nt, Human
uggcagguagucagaggcgaca

SEQ ID NO: 240387 - RNA, 22 nt, Human
agguuccagguucgaaucccau

SEQ ID NO: 240388 - RNA, 22 nt, Human
gcauccagagguagccacugug

SEQ ID NO: 240389 - RNA, 22 nt, Human
ugauggaagagcuaacaauauc

SEQ ID NO: 240390 - RNA, 22 nt, Human
ggggagaauaaaucagauuuua

SEQ ID NO: 240391 - RNA, 22 nt, Human
agggugggcuagacucuucccc

SEQ ID NO: 240392 - RNA, 22 nt, Human
gguguccucggauucagggcag

SEQ ID NO: 240393 - RNA, 22 nt, Human
uccugggcacaagugagucucc

SEQ ID NO: 240394 - RNA, 22 nt, Human
uacuuuauucaggaaggcuggu

SEQ ID NO: 240395 - RNA, 22 nt, Human
gaggcaggcagauugcuugagg

SEQ ID NO: 240396 - RNA, 22 nt, Human
uagaaacauauguuugagacau

SEQ ID NO: 240397 - RNA, 22 nt, Human
ccugaguuaguugcugugucuc

SEQ ID NO: 240398 - RNA, 22 nt, Human
agcugagagccccugcccugug

SEQ ID NO: 240399 - RNA, 22 nt, Human
aguggacuuuuaguauccuuau

SEQ ID NO: 240400 - RNA, 22 nt, Human
gaggugagaagggggucagaug

SEQ ID NO: 240401 - RNA, 22 nt, Human
gggcagguguugucaaucuaau

SEQ ID NO: 240402 - RNA, 22 nt, Human
ccucagaguuggccacgagagc

SEQ ID NO: 240403 - RNA, 22 nt, Human
uccuggggaggguucuggcucc

SEQ ID NO: 240404 - RNA, 22 nt, Human
acugcccuuguccuggcacacc

SEQ ID NO: 240405 - RNA, 22 nt, Human
ucucugaagagcucagacuagu

SEQ ID NO: 240406 - RNA, 22 nt, Human
ugccaggcauguaguagacuug

SEQ ID NO: 240407 - RNA, 22 nt, Human
uuuagaagacagaugcacagcc

SEQ ID NO: 240408 - RNA, 22 nt, Human
guggcuucaugaacacugauga

SEQ ID NO: 240409 - RNA, 22 nt, Human
gaacagggaguacggcacauuu

SEQ ID NO: 240410 - RNA, 22 nt, Human
auauucaaauuacauuuacuaa

SEQ ID NO: 240411 - RNA, 22 nt, Human
caguuuugguccuuucuaggua

SEQ ID NO: 240412 - RNA, 22 nt, Human
cuggcccugguaaggacaccca

SEQ ID NO: 240413 - RNA, 22 nt, Human
gccauuuagggaggcaagguga

SEQ ID NO: 240414 - RNA, 22 nt, Human
gugcaaaagcaauugcaguuuu

SEQ ID NO: 240415 - RNA, 22 nt, Human
uuccaggaagauucaacaaaag

SEQ ID NO: 240416 - RNA, 22 nt, Human
ggcagccuggagacuuugugaa

SEQ ID NO: 240417 - RNA, 19 nt, Human
cugggucuuauucugugaa

SEQ ID NO: 240418 - RNA, 22 nt, Human
augguaaccagaagacuaugac

SEQ ID NO: 240419 - RNA, 22 nt, Human
gggggaagaggcaugaaguccu

SEQ ID NO: 240420 - RNA, 22 nt, Human
cagauauguggauucuauuagc

SEQ ID NO: 240421 - RNA, 22 nt, Human
gcauucuuuccacgaggaggua

SEQ ID NO: 240422 - RNA, 22 nt, Human
gccacagacagagagucuagug

SEQ ID NO: 240423 - RNA, 21 nt, Human
aguucuguuaugcuggacuca

SEQ ID NO: 240424 - RNA, 22 nt, Human
aagaaguuaaauaaauggacca

SEQ ID NO: 240425 - RNA, 22 nt, Human
gaggaagagagcucugccuugu

SEQ ID NO: 240426 - RNA, 20 nt, Human
caccaggcgcucugagaaca

SEQ ID NO: 240427 - RNA, 22 nt, Human
uguauacauuuaacuagauaga

SEQ ID NO: 240428 - RNA, 22 nt, Human
gagggcaguagccucguacccu

SEQ ID NO: 240429 - RNA, 22 nt, Human
agaucauagcacaaaagugaca

SEQ ID NO: 240430 - RNA, 22 nt, Human
cagggcucgcucgcucgcucgc

SEQ ID NO: 240431 - RNA, 22 nt, Human
aaacaggcaucacucagcaaag

SEQ ID NO: 240432 - RNA, 22 nt, Human
uccuggcuuccacaccugucau

SEQ ID NO: 240433 - RNA, 22 nt, Human
ucucaugugauucccgugcaug

SEQ ID NO: 240434 - RNA, 22 nt, Human
augcaaacaugaagagaaagag

SEQ ID NO: 240435 - RNA, 22 nt, Human
ucuucagaggagcugaauauau

SEQ ID NO: 240436 - RNA, 22 nt, Human
aucuuuaguagaggaauauauu

SEQ ID NO: 240437 - RNA, 22 nt, Human
aaugaugguuaaacacuggagg

SEQ ID NO: 240438 - RNA, 22 nt, Human
cagcagagcuuauuaacuaaaa

SEQ ID NO: 240439 - RNA, 22 nt, Human
cagcugaaagaaggaaguguca

SEQ ID NO: 240440 - RNA, 22 nt, Human
ccaggaucugauauugggcucc

SEQ ID NO: 240441 - RNA, 19 nt, Human
aaagcagugcauccucuuu

SEQ ID NO: 240442 - RNA, 22 nt, Human
uucuucagucccacuagccaca

SEQ ID NO: 240443 - RNA, 22 nt, Human
cuuccucacggugcaacaggaa

SEQ ID NO: 240444 - RNA, 22 nt, Human
gauagaaagaauauagauucca

SEQ ID NO: 240445 - RNA, 21 nt, Human
gcauguguggugugcuccaca

SEQ ID NO: 240446 - RNA, 22 nt, Human
uuuaauuuuccugguaggccug

SEQ ID NO: 240447 - RNA, 22 nt, Human
aacuuaaacccacucauguaga

SEQ ID NO: 240448 - RNA, 22 nt, Human
acagcugggaacucacacagca

SEQ ID NO: 240449 - RNA, 22 nt, Human
ugaaaacuugacaagugaggua

SEQ ID NO: 240450 - RNA, 22 nt, Human
caguccuuggcaaguucucagu

SEQ ID NO: 240451 - RNA, 22 nt, Human
uauacacaaggugugcauuugu

SEQ ID NO: 240452 - RNA, 22 nt, Human
cuauuuucccauaugguugaca

SEQ ID NO: 240453 - RNA, 22 nt, Human
ucccuccuggugagcaggggcu

SEQ ID NO: 240454 - RNA, 22 nt, Human
gaguggguccacagaggugaca

SEQ ID NO: 240455 - RNA, 22 nt, Human
agggugugcuguugggucuuuc

SEQ ID NO: 240456 - RNA, 22 nt, Human
uucugcauucaaauuaugugag

SEQ ID NO: 240457 - RNA, 22 nt, Human
guccaugcuuaaauaccuuaaa

SEQ ID NO: 240458 - RNA, 22 nt, Human
gcuuccuguccaggccccacau

SEQ ID NO: 240459 - RNA, 22 nt, Human
gauggucuguauuaaacagaug

SEQ ID NO: 240460 - RNA, 22 nt, Human
aagugugggaaguagguggcga

SEQ ID NO: 240461 - RNA, 22 nt, Human
uguggcuguggaugcuuuccag

SEQ ID NO: 240462 - RNA, 22 nt, Human
gaggagguggagucaugcagag

SEQ ID NO: 240463 - RNA, 21 nt, Human
guucaaauccugacacuacac

SEQ ID NO: 240464 - RNA, 22 nt, Human
gaguuagagccauagagcacgg

SEQ ID NO: 240465 - RNA, 22 nt, Human
aaagucauacauggugcuuacu

SEQ ID NO: 240466 - RNA, 22 nt, Human
aaggagagguuguccguguugu

SEQ ID NO: 240467 - RNA, 22 nt, Human
gaggccagaagugccucgggcu

SEQ ID NO: 240468 - RNA, 22 nt, Human
acccugggagggagaaaucaga

SEQ ID NO: 240469 - RNA, 22 nt, Human
aaaggcuauuuuuagauguuug

SEQ ID NO: 240470 - RNA, 20 nt, Human
uacaggaccuucuuuguauc

SEQ ID NO: 240471 - RNA, 22 nt, Human
ccugcucagccccagcucaccc

SEQ ID NO: 240472 - RNA, 22 nt, Human
cccugggaguccacugauguca

SEQ ID NO: 240473 - RNA, 22 nt, Human
agaaaccaucuuuauauaucug

SEQ ID NO: 240474 - RNA, 22 nt, Human
aauuaguucacguccugugcuu

SEQ ID NO: 240475 - RNA, 22 nt, Human
cuggguccugcucucccuaaga

SEQ ID NO: 240476 - RNA, 22 nt, Human
caauauauaggaacaacuuagg

SEQ ID NO: 240477 - RNA, 22 nt, Human
cagagccuggcgaugucaugga

SEQ ID NO: 240478 - RNA, 19 nt, Human
uccuucuccggccaccccg

SEQ ID NO: 240479 - RNA, 22 nt, Human
auacuucuggugacaaagucuu

SEQ ID NO: 240480 - RNA, 22 nt, Human
ggcuccagaggccuuaccugca

SEQ ID NO: 240481 - RNA, 22 nt, Human
uggcaaggccacaggugcaguu

SEQ ID NO: 240482 - RNA, 22 nt, Human
gucuuuaguugaaacauguggu

SEQ ID NO: 240483 - RNA, 22 nt, Human
ccagagcccagcacacggugcu

SEQ ID NO: 240484 - RNA, 22 nt, Human
agccccaguaagggagggccug

SEQ ID NO: 240485 - RNA, 22 nt, Human
uuaaagcaugcugcuuuuccau

SEQ ID NO: 240486 - RNA, 22 nt, Human
gaaucagccugaguuugcagcu

SEQ ID NO: 240487 - RNA, 22 nt, Human
acacuucauuuacauuauaggc

SEQ ID NO: 240488 - RNA, 22 nt, Human
ucugcaggaaaaaagugccugg

SEQ ID NO: 240489 - RNA, 22 nt, Human
aguauacauagugcuuccucuu

SEQ ID NO: 240490 - RNA, 22 nt, Human
uaaaucuccuguuuuucaucua

SEQ ID NO: 240491 - RNA, 22 nt, Human
acauucuacaguuaaccauuag

SEQ ID NO: 240492 - RNA, 22 nt, Human
ucugugcuggacugauuucaua

SEQ ID NO: 240493 - RNA, 23 nt, Human
gagaaaccucgguaagcaggagg

SEQ ID NO: 240494 - RNA, 22 nt, Human
uauuucuguuuauuuguacauc

SEQ ID NO: 240495 - RNA, 22 nt, Human
gccagcccugggagacuuaugg

SEQ ID NO: 240496 - RNA, 22 nt, Human
uggaagggguuacgcagcagga

SEQ ID NO: 240497 - RNA, 22 nt, Human
cuccuggcacugucuugaccca

SEQ ID NO: 240498 - RNA, 22 nt, Human
uuagaaaaauguucaguaguuu

SEQ ID NO: 240499 - RNA, 22 nt, Human
guggccugccgugugguauggg

SEQ ID NO: 240500 - RNA, 22 nt, Human
agcagguggauuuagacgggag

SEQ ID NO: 240501 - RNA, 22 nt, Human
ucuggcuccuggcuccacugcc

SEQ ID NO: 240502 - RNA, 22 nt, Human
agaaucaaggugaagcccacag

SEQ ID NO: 240503 - RNA, 22 nt, Human
ugcuccagcuggagaugggggc

SEQ ID NO: 240504 - RNA, 21 nt, Human
aggccucuucauggccaugau

SEQ ID NO: 240505 - RNA, 22 nt, Human
auggagcuguagggagcagugg

SEQ ID NO: 240506 - RNA, 22 nt, Human
gcccaagcuccgccuccugucg

SEQ ID NO: 240507 - RNA, 20 nt, Human
acaguguuuuugaguagagc

SEQ ID NO: 240508 - RNA, 16 nt, Human
uaggaaacugcaugug

SEQ ID NO: 240509 - RNA, 22 nt, Human
uucugagaaugcuucuggaauc

SEQ ID NO: 240510 - RNA, 22 nt, Human
gaggcacagucccgaggcaagg

SEQ ID NO: 240511 - RNA, 21 nt, Human
ucauuucucuauguauuucac

SEQ ID NO: 240512 - RNA, 22 nt, Human
ugauucuauggaaggcauaagg

SEQ ID NO: 240513 - RNA, 22 nt, Human
gaggaagaaagcauaggugggg

SEQ ID NO: 240514 - RNA, 22 nt, Human
uagaaucugaauauucuuauuu

SEQ ID NO: 240515 - RNA, 22 nt, Human
cugggcucaaauccuggcccug

SEQ ID NO: 240516 - RNA, 22 nt, Human
uuggaaagaccgaauuccuguu

SEQ ID NO: 240517 - RNA, 22 nt, Human
agcuucuugggcuuuacacaaa

SEQ ID NO: 240518 - RNA, 22 nt, Human
uugauuccuugaaauauccuug

SEQ ID NO: 240519 - RNA, 22 nt, Human
uaaagacauaggaucagggaga

SEQ ID NO: 240520 - RNA, 22 nt, Human
augcacccauguacauacacau

SEQ ID NO: 240521 - RNA, 22 nt, Human
gccuccuggccuuugcuccuca

SEQ ID NO: 240522 - RNA, 22 nt, Human
ucaggugucaagcagggagcug

SEQ ID NO: 240523 - RNA, 18 nt, Human
ggaagaaaaggaacucag

SEQ ID NO: 240524 - RNA, 22 nt, Human
uuucaggauuuuaugagauagu

SEQ ID NO: 240525 - RNA, 22 nt, Human
cgcaacagagcagguuugauga

SEQ ID NO: 240526 - RNA, 22 nt, Human
cacaaugugguuugucaucuuu

SEQ ID NO: 240527 - RNA, 23 nt, Human
cuucaucaaaaguuaacacuagu

SEQ ID NO: 240528 - RNA, 22 nt, Human
ugagucuucuuccgggauugcu

SEQ ID NO: 240529 - RNA, 22 nt, Human
uuuauauugggagucguuuuga

SEQ ID NO: 240530 - RNA, 22 nt, Human
ucucccacagucucccauggcu

SEQ ID NO: 240531 - RNA, 17 nt, Human
agacacugagccaagua

SEQ ID NO: 240532 - RNA, 22 nt, Human
cagucuuauccugaaaacaaca

SEQ ID NO: 240533 - RNA, 17 nt, Human
gcucccugaggacagcu

SEQ ID NO: 240534 - RNA, 22 nt, Human
uaagccacugagauuugggguu

SEQ ID NO: 240535 - RNA, 22 nt, Human
gaggcccaguccugcaagcacg

SEQ ID NO: 240536 - RNA, 20 nt, Human
acuuuacagagaagacugac

SEQ ID NO: 240537 - RNA, 22 nt, Human
aguguuagugaaagguguuuau

SEQ ID NO: 240538 - RNA, 20 nt, Human
uacaggagugaguggguggg

SEQ ID NO: 240539 - RNA, 22 nt, Human
gccugcagggugaugggcugcc

SEQ ID NO: 240540 - RNA, 22 nt, Human
ccucgugugcuaggauccaggu

SEQ ID NO: 240541 - RNA, 22 nt, Human
uuccuuucucuggacugcagcc

SEQ ID NO: 240542 - RNA, 22 nt, Human
aagggcugggucugguuaaccc

SEQ ID NO: 240543 - RNA, 22 nt, Human
aaugagucaaaacagcauauag

SEQ ID NO: 240544 - RNA, 22 nt, Human
uuggucagcuaauaaggacagg

SEQ ID NO: 240545 - RNA, 22 nt, Human
agggucagagucaggugcagua

SEQ ID NO: 240546 - RNA, 22 nt, Human
cagcuacacuucuggguguguc

SEQ ID NO: 240547 - RNA, 22 nt, Human
aaccuggaggcuguguagucuu

SEQ ID NO: 240548 - RNA, 22 nt, Human
cucuguugucaguggaagcagc

SEQ ID NO: 240549 - RNA, 22 nt, Human
ccaguguuuccgucaguacacg

SEQ ID NO: 240550 - RNA, 17 nt, Human
ugucuucugaagagagc

SEQ ID NO: 240551 - RNA, 23 nt, Human
gccaggcacaugguggacacgca

SEQ ID NO: 240552 - RNA, 22 nt, Human
cauccagggcagccauggccug

SEQ ID NO: 240553 - RNA, 22 nt, Human
ucuguacauuuguguugugaau

SEQ ID NO: 240554 - RNA, 22 nt, Human
aggcugaaaacgagauggcaau

SEQ ID NO: 240555 - RNA, 21 nt, Human
aauucccagaaacagcacaag

SEQ ID NO: 240556 - RNA, 22 nt, Human
uaauuucuaauucauuuucagu

SEQ ID NO: 240557 - RNA, 22 nt, Human
aggcuggcgucaggggcuguac

SEQ ID NO: 240558 - RNA, 22 nt, Human
augugucuaauuccaggagcac

SEQ ID NO: 240559 - RNA, 21 nt, Human
uugcaacaaccuauauauuuu

SEQ ID NO: 240560 - RNA, 22 nt, Human
uaaguguugguaauuacaauga

SEQ ID NO: 240561 - RNA, 22 nt, Human
uuucacuggaauuuuaacauuu

SEQ ID NO: 240562 - RNA, 22 nt, Human
ccaggccauucccagaguugcu

SEQ ID NO: 240563 - RNA, 22 nt, Human
agccuguccagaggacagggcu

SEQ ID NO: 240564 - RNA, 21 nt, Human
ugagcccuugccucagagccc

SEQ ID NO: 240565 - RNA, 22 nt, Human
ucugcagagccucaggagaaca

SEQ ID NO: 240566 - RNA, 22 nt, Human
uguuuucaucacagaauguaac

SEQ ID NO: 240567 - RNA, 22 nt, Human
uguuaaucaaucaacaguauua

SEQ ID NO: 240568 - RNA, 22 nt, Human
gagccuucaucgcagccuuguu

SEQ ID NO: 240569 - RNA, 22 nt, Human
ucuuuagacauccaguuucucu

SEQ ID NO: 240570 - RNA, 22 nt, Human
caggccaccagauacaugcccc

SEQ ID NO: 240571 - RNA, 22 nt, Human
uuauaacuuuggauaugacaag

SEQ ID NO: 240572 - RNA, 22 nt, Human
aggccaggacacuuaaguaaga

SEQ ID NO: 240573 - RNA, 22 nt, Human
gggagcugaugauguaaguccc

SEQ ID NO: 240574 - RNA, 22 nt, Human
ucagagcugugcuucaggaaag

SEQ ID NO: 240575 - RNA, 22 nt, Human
uccagggagauacuggcugcca

SEQ ID NO: 240576 - RNA, 22 nt, Human
gcagauuucuaauaagcaaugu

SEQ ID NO: 240577 - RNA, 22 nt, Human
uaagaaauuuaguuauagaaug

SEQ ID NO: 240578 - RNA, 22 nt, Human
gacaagaugagcagcucagugu

SEQ ID NO: 240579 - RNA, 22 nt, Human
ucaugaggauuuacuagacuag

SEQ ID NO: 240580 - RNA, 22 nt, Human
ucauuguauucagaacugaaga

SEQ ID NO: 240581 - RNA, 22 nt, Human
uaaaaguggauaagcuguagga

SEQ ID NO: 240582 - RNA, 22 nt, Human
ugcagaagcagagaguugccaa

SEQ ID NO: 240583 - RNA, 22 nt, Human
auauaguaagcagucuguaaau

SEQ ID NO: 240584 - RNA, 22 nt, Human
ucauuucucugagucugauaau

SEQ ID NO: 240585 - RNA, 22 nt, Human
uacaugugcuauuuguuuugua

SEQ ID NO: 240586 - RNA, 21 nt, Human
ucugggcugcugcugcccauc

SEQ ID NO: 240587 - RNA, 22 nt, Human
aggucuggagugggaucugaga

SEQ ID NO: 240588 - RNA, 18 nt, Human
agucuuuaaagauguuac

SEQ ID NO: 240589 - RNA, 22 nt, Human
guccugggaaggaagccaggga

SEQ ID NO: 240590 - RNA, 22 nt, Human
caucucauuuauuccaacucag

SEQ ID NO: 240591 - RNA, 22 nt, Human
agaauaauacugaaaugcugaa

SEQ ID NO: 240592 - RNA, 20 nt, Human
cugaacacagaauaagcaca

SEQ ID NO: 240593 - RNA, 22 nt, Human
uaacaucuaagggagagaaagu

SEQ ID NO: 240594 - RNA, 22 nt, Human
agcccagaaaugaaaggaugau

SEQ ID NO: 240595 - RNA, 22 nt, Human
aagaacaugguaggauaacaaa

SEQ ID NO: 240596 - RNA, 22 nt, Human
auggcuucugucuuggaaacuu

SEQ ID NO: 240597 - RNA, 19 nt, Human
aauaauguucaugagauug

SEQ ID NO: 240598 - RNA, 23 nt, Human
aaguuaguuucaauaaagcaauu

SEQ ID NO: 240599 - RNA, 21 nt, Human
agacagacugccugacccacg

SEQ ID NO: 240600 - RNA, 22 nt, Human
cagccagguuagugcuaauugu

SEQ ID NO: 240601 - RNA, 22 nt, Human
agcuggcugggugccagucucc

SEQ ID NO: 240602 - RNA, 22 nt, Human
ggagaagccaggugauaagcaa

SEQ ID NO: 240603 - RNA, 22 nt, Human
auucuaaaucagagagcucugu

SEQ ID NO: 240604 - RNA, 22 nt, Human
agcuggaagugcauuucucacu

SEQ ID NO: 240605 - RNA, 22 nt, Human
acuguauucuagucauguuugu

SEQ ID NO: 240606 - RNA, 22 nt, Human
ugcuuuaucugacuuggcgcug

SEQ ID NO: 240607 - RNA, 22 nt, Human
uggcccaggcgaggugggcaga

SEQ ID NO: 240608 - RNA, 22 nt, Human
uacauauucaacguucaguauu

SEQ ID NO: 240609 - RNA, 22 nt, Human
gagggcugauaacaggaauaca

SEQ ID NO: 240610 - RNA, 22 nt, Human
ccuuccuugagaagcaauuccu

SEQ ID NO: 240611 - RNA, 22 nt, Human
cuuacaaauacacuuaggagag

SEQ ID NO: 240612 - RNA, 22 nt, Human
aguggcugguaguuacugagca

SEQ ID NO: 240613 - RNA, 21 nt, Human
acaguucaugauaacuccauc

SEQ ID NO: 240614 - RNA, 22 nt, Human
uuucaauguaacauuuccaggc

SEQ ID NO: 240615 - RNA, 22 nt, Human
agagguggccaugggcgcugga

SEQ ID NO: 240616 - RNA, 22 nt, Human
uaaaauguguuucuguaugguu

SEQ ID NO: 240617 - RNA, 22 nt, Human
auuuacagguagaauuuuaagu

SEQ ID NO: 240618 - RNA, 22 nt, Human
ugucugggauguuggcagccac

SEQ ID NO: 240619 - RNA, 22 nt, Human
cugugggagaagcuagcacagg

SEQ ID NO: 240620 - RNA, 22 nt, Human
aauaaacugcucaauugcauca

SEQ ID NO: 240621 - RNA, 22 nt, Human
aggaguuuggggauuagucagg

SEQ ID NO: 240622 - RNA, 22 nt, Human
aaagcagucuguuuuaaccuga

SEQ ID NO: 240623 - RNA, 22 nt, Human
cugacuguugcuguugaugagg

SEQ ID NO: 240624 - RNA, 22 nt, Human
cucaggagguuuccugucuagg

SEQ ID NO: 240625 - RNA, 22 nt, Human
ucacaggcuaaauuuaugcagg

SEQ ID NO: 240626 - RNA, 22 nt, Human
acauuuuacaccaagacuucuu

SEQ ID NO: 240627 - RNA, 22 nt, Human
cugagacauuaugacaagugga

SEQ ID NO: 240628 - RNA, 22 nt, Human
caacauuauauagccacaugcc

SEQ ID NO: 240629 - RNA, 22 nt, Human
aguaacuaugcuugagaaucag

SEQ ID NO: 240630 - RNA, 22 nt, Human
aucucaaagcauggagcagaau

SEQ ID NO: 240631 - RNA, 22 nt, Human
uuuaucaucuuguuuuuaaagc

SEQ ID NO: 240632 - RNA, 22 nt, Human
uacuuacaugaauucaagagca

SEQ ID NO: 240633 - RNA, 22 nt, Human
cuuccucucuugcccauaagag

SEQ ID NO: 240634 - RNA, 22 nt, Human
aagcagaggaccgacggaggga

SEQ ID NO: 240635 - RNA, 22 nt, Human
gggcagcagcaggaggucucug

SEQ ID NO: 240636 - RNA, 22 nt, Human
aaccaaguuuauuccaaguuac

SEQ ID NO: 240637 - RNA, 22 nt, Human
aaauaaguaguuuaguguugug

SEQ ID NO: 240638 - RNA, 19 nt, Human
aaauacagcagcuguuucc

SEQ ID NO: 240639 - RNA, 18 nt, Human
guauuaguuuucagagag

SEQ ID NO: 240640 - RNA, 22 nt, Human
ggcaccaggggauguaaugucc

SEQ ID NO: 240641 - RNA, 22 nt, Human
gggaagcccugugcuugccugg

SEQ ID NO: 240642 - RNA, 22 nt, Human
gugcagggagcccagaaggucc

SEQ ID NO: 240643 - RNA, 22 nt, Human
uugaggaggaaaaggggguacc

SEQ ID NO: 240644 - RNA, 22 nt, Human
acacugaaugcuguuuagaaau

SEQ ID NO: 240645 - RNA, 22 nt, Human
gaccagaaaucaacacagaaug

SEQ ID NO: 240646 - RNA, 22 nt, Human
aguggcaucaaaucaagguuug

SEQ ID NO: 240647 - RNA, 22 nt, Human
gauaacuacacuuaagacaacc

SEQ ID NO: 240648 - RNA, 22 nt, Human
cugggggcagcaagaagccaug

SEQ ID NO: 240649 - RNA, 22 nt, Human
ucauuucagaugcauuuagaau

SEQ ID NO: 240650 - RNA, 22 nt, Human
aggugcaucucguagcucuucu

SEQ ID NO: 240651 - RNA, 22 nt, Human
agacauauuggcuugcuuuaau

SEQ ID NO: 240652 - RNA, 22 nt, Human
cauucaaauuaagauuuuguua

SEQ ID NO: 240653 - RNA, 22 nt, Human
ugcucuggacgcugagugguuu

SEQ ID NO: 240654 - RNA, 22 nt, Human
gggucaggccucaaggugggcu

SEQ ID NO: 240655 - RNA, 20 nt, Human
guccagaguaaugugcugac

SEQ ID NO: 240656 - RNA, 22 nt, Human
ggcugugggccagcuagacccu

SEQ ID NO: 240657 - RNA, 22 nt, Human
acgaugcucaacuauaugaauu

SEQ ID NO: 240658 - RNA, 23 nt, Human
ucuccuccuagauacagucaugg

SEQ ID NO: 240659 - RNA, 22 nt, Human
gcagagaggauauuauugucca

SEQ ID NO: 240660 - RNA, 21 nt, Human
gagaaucuguuuucuugucuu

SEQ ID NO: 240661 - RNA, 22 nt, Human
auaaaaguuuccaaucaugccu

SEQ ID NO: 240662 - RNA, 21 nt, Human
gcagugcagcuuggaggguag

SEQ ID NO: 240663 - RNA, 22 nt, Human
ucccuucaagauuuggggaaau

SEQ ID NO: 240664 - RNA, 22 nt, Human
guauucuuauacucagugagcu

SEQ ID NO: 240665 - RNA, 22 nt, Human
uguuugcucugacuaucuugcg

SEQ ID NO: 240666 - RNA, 22 nt, Human
aagggcugccagggggugccag

SEQ ID NO: 240667 - RNA, 22 nt, Human
guggcugguuuccugcaugcaa

SEQ ID NO: 240668 - RNA, 22 nt, Human
uagacucagacagaaaaugugu

SEQ ID NO: 240669 - RNA, 22 nt, Human
aggcuccaaauuaccaagcucu

SEQ ID NO: 240670 - RNA, 22 nt, Human
aaauuuucucucuaagacuuaa

SEQ ID NO: 240671 - RNA, 22 nt, Human
uaucaaaguuguccugugaagu

SEQ ID NO: 240672 - RNA, 22 nt, Human
guuauugagguggagucucacu

SEQ ID NO: 240673 - RNA, 22 nt, Human
auaaauaucacuguugucccuc

SEQ ID NO: 240674 - RNA, 22 nt, Human
uuugucuuggccucaguuuucu

SEQ ID NO: 240675 - RNA, 18 nt, Human
cuaaacugcaccuaauga

SEQ ID NO: 240676 - RNA, 22 nt, Human
gcaggcucuucuuucugcccag

SEQ ID NO: 240677 - RNA, 22 nt, Human
acuuuggaucugauguaaucag

SEQ ID NO: 240678 - RNA, 22 nt, Human
cauacaaucaaguucuuuauua

SEQ ID NO: 240679 - RNA, 22 nt, Human
acuucuauuggucaugauaaaa

SEQ ID NO: 240680 - RNA, 22 nt, Human
uccuucaacuuuuuacuugccc

SEQ ID NO: 240681 - RNA, 22 nt, Human
cucuuuggucgcaucauccauu

SEQ ID NO: 240682 - RNA, 22 nt, Human
ccagaggugguggugucuagaa

SEQ ID NO: 240683 - RNA, 22 nt, Human
guguggggccaggaucagggcu

SEQ ID NO: 240684 - RNA, 22 nt, Human
ucagaguuggccuuucuguauu

SEQ ID NO: 240685 - RNA, 22 nt, Human
aggagccccucuucaguccugg

SEQ ID NO: 240686 - RNA, 22 nt, Human
ggaggagagagguugcaaacac

SEQ ID NO: 240687 - RNA, 22 nt, Human
cugaagcaauugagagauguuu

SEQ ID NO: 240688 - RNA, 22 nt, Human
auccccagacuuuagauuucuc

SEQ ID NO: 240689 - RNA, 19 nt, Human
acagagcucucugcuucug

SEQ ID NO: 240690 - RNA, 22 nt, Human
aucucuggccuuccuuuuccaa

SEQ ID NO: 240691 - RNA, 22 nt, Human
ccugguggacagcagccagcag

SEQ ID NO: 240692 - RNA, 22 nt, Human
auauugagaugaggauauuaac

SEQ ID NO: 240693 - RNA, 22 nt, Human
aaugucaaacagagcagagcua

SEQ ID NO: 240694 - RNA, 22 nt, Human
uuuacugaacugcuaguacagg

SEQ ID NO: 240695 - RNA, 22 nt, Human
gagcugugacacgcagcccagg

SEQ ID NO: 240696 - RNA, 22 nt, Human
uacagugcuuuuugguggagaa

SEQ ID NO: 240697 - RNA, 22 nt, Human
uuaccaagcucugcauguuaag

SEQ ID NO: 240698 - RNA, 22 nt, Human
uauuuccuguggauacuuuuag

SEQ ID NO: 240699 - RNA, 22 nt, Human
ccuagaaugugcagacuuaggg

SEQ ID NO: 240700 - RNA, 22 nt, Human
uggccaggcuggucuggaacgc

SEQ ID NO: 240701 - RNA, 22 nt, Human
cacagcaggcacuauacagggc

SEQ ID NO: 240702 - RNA, 22 nt, Human
cugggaacuguacugccuugaa

SEQ ID NO: 240703 - RNA, 22 nt, Human
aggcagguguuaacccucugag

SEQ ID NO: 240704 - RNA, 22 nt, Human
aaacugaggaaugacagcauua

SEQ ID NO: 240705 - RNA, 22 nt, Human
aaggggauuuaagguaagaaga

SEQ ID NO: 240706 - RNA, 22 nt, Human
acuggcuggacucugaccucuu

SEQ ID NO: 240707 - RNA, 22 nt, Human
auggacagcaacuggaagcuuc

SEQ ID NO: 240708 - RNA, 22 nt, Human
caugugcagacggugggcugga

SEQ ID NO: 240709 - RNA, 22 nt, Human
uuggaggauggaguuagcaucu

SEQ ID NO: 240710 - RNA, 22 nt, Human
guguccagcguggaaugagggu

SEQ ID NO: 240711 - RNA, 22 nt, Human
cuccuucaugucauguguccgg

SEQ ID NO: 240712 - RNA, 22 nt, Human
uagcccucuccagcgaggucug

SEQ ID NO: 240713 - RNA, 22 nt, Human
uguggcugcagacacuggagcc

SEQ ID NO: 240714 - RNA, 22 nt, Human
auauaauuuuugguuagcucaa

SEQ ID NO: 240715 - RNA, 22 nt, Human
uaacaacuggacaauguugcuc

SEQ ID NO: 240716 - RNA, 22 nt, Human
guccaggcugaccccuagagga

SEQ ID NO: 240717 - RNA, 22 nt, Human
uauuuaauuagugauuguagag

SEQ ID NO: 240718 - RNA, 22 nt, Human
uuucaaggauguuauauaaaug

SEQ ID NO: 240719 - RNA, 22 nt, Human
guggaagggacugccuagagga

SEQ ID NO: 240720 - RNA, 22 nt, Human
cuccugaguaguagcauuguca

SEQ ID NO: 240721 - RNA, 22 nt, Human
aaaggcuuuaaagaaccagaac

SEQ ID NO: 240722 - RNA, 22 nt, Human
uacaugaauguuucaauauugu

SEQ ID NO: 240723 - RNA, 22 nt, Human
ugaauaaucuuggguauuaaua

SEQ ID NO: 240724 - RNA, 22 nt, Human
acagaaauugcuaauagcucau

SEQ ID NO: 240725 - RNA, 22 nt, Human
gcaaagcugggugugaaugcac

SEQ ID NO: 240726 - RNA, 22 nt, Human
agcuacagucggaaggacagac

SEQ ID NO: 240727 - RNA, 22 nt, Human
cagaacugagucucauggccau

SEQ ID NO: 240728 - RNA, 22 nt, Human
auccuggguaaguuccuuuuaa

SEQ ID NO: 240729 - RNA, 22 nt, Human
gaaaggcuucuuaagcuucacu

SEQ ID NO: 240730 - RNA, 22 nt, Human
cugaggagaugggcuuuuuagg

SEQ ID NO: 240731 - RNA, 22 nt, Human
uguacuuaugagauccuagucg

SEQ ID NO: 240732 - RNA, 21 nt, Human
cggcuucugcauuccagagcu

SEQ ID NO: 240733 - RNA, 22 nt, Human
gagugagggcagcaggggcugc

SEQ ID NO: 240734 - RNA, 18 nt, Human
ucagagguacagaaaagu

SEQ ID NO: 240735 - RNA, 21 nt, Human
cagcccagagcaguggggcca

SEQ ID NO: 240736 - RNA, 22 nt, Human
uggcuccugcauuugugcuaac

SEQ ID NO: 240737 - RNA, 18 nt, Human
ugcccaccagaagaggga

SEQ ID NO: 240738 - RNA, 22 nt, Human
uggcagggccuaccccaauauc

SEQ ID NO: 240739 - RNA, 21 nt, Human
ugacuuuauuugacagcccag

SEQ ID NO: 240740 - RNA, 22 nt, Human
acuuggcuuuaguaguaacuga

SEQ ID NO: 240741 - RNA, 22 nt, Human
ccaugcugacccugugcaggca

SEQ ID NO: 240742 - RNA, 19 nt, Human
ggccagcugucuccugcua

SEQ ID NO: 240743 - RNA, 22 nt, Human
ggcaugggguguauguggcacg

SEQ ID NO: 240744 - RNA, 19 nt, Human
uauugguaugugugaggca

SEQ ID NO: 240745 - RNA, 22 nt, Human
ccugcagagccacgugccagcg

SEQ ID NO: 240746 - RNA, 22 nt, Human
uuucugaagguuaaggaauuag

SEQ ID NO: 240747 - RNA, 22 nt, Human
ccagguggcuucugcccgaugu

SEQ ID NO: 240748 - RNA, 20 nt, Human
gcuggugggggcuugacaug

SEQ ID NO: 240749 - RNA, 20 nt, Human
uuuuccucguguuuguucua

SEQ ID NO: 240750 - RNA, 20 nt, Human
ggagcugcccugggcuggag

SEQ ID NO: 240751 - RNA, 22 nt, Human
acuugaauuauauuucuagaga

SEQ ID NO: 240752 - RNA, 22 nt, Human
gagaauguuaauguugaaguau

SEQ ID NO: 240753 - RNA, 22 nt, Human
uugguuuguucaccaucaagca

SEQ ID NO: 240754 - RNA, 22 nt, Human
cacacaugugggauccgcaggg

SEQ ID NO: 240755 - RNA, 22 nt, Human
ugcagagagccagcucucucgg

SEQ ID NO: 240756 - RNA, 22 nt, Human
gccagcugaagggaagcuccug

SEQ ID NO: 240757 - RNA, 22 nt, Human
guacaugucaaaaaaugcauaa

SEQ ID NO: 240758 - RNA, 22 nt, Human
uccaggagugauaaggccacug

SEQ ID NO: 240759 - RNA, 22 nt, Human
aucuuugggcaaugaugaggga

SEQ ID NO: 240760 - RNA, 22 nt, Human
ccucuguacagccucuuuauug

SEQ ID NO: 240761 - RNA, 23 nt, Human
uuuugacaggaggaagguguuga

SEQ ID NO: 240762 - RNA, 22 nt, Human
cagagacuggagugcaguggcg

SEQ ID NO: 240763 - RNA, 22 nt, Human
agugaggcaaagugagaggcag

SEQ ID NO: 240764 - RNA, 22 nt, Human
gcugugcuuuugguagauccca

SEQ ID NO: 240765 - RNA, 22 nt, Human
ucaauucuaguggagagaguuu

SEQ ID NO: 240766 - RNA, 22 nt, Human
ugacagacacaccuuaggaaag

SEQ ID NO: 240767 - RNA, 22 nt, Human
cugugacccaguuccuggcacc

SEQ ID NO: 240768 - RNA, 22 nt, Human
uguuuacuuaaauguuuucaua

SEQ ID NO: 240769 - RNA, 22 nt, Human
agguucucacacgucuacaccc

SEQ ID NO: 240770 - RNA, 22 nt, Human
uucagagcccaaauggagauua

SEQ ID NO: 240771 - RNA, 22 nt, Human
uggagccuguucugagaagccg

SEQ ID NO: 240772 - RNA, 22 nt, Human
guuuaacaucugugaagcugcu

SEQ ID NO: 240773 - RNA, 19 nt, Human
gcucagagggcccugugcu

SEQ ID NO: 240774 - RNA, 22 nt, Human
gaugaauucuggcuuggacaga

SEQ ID NO: 240775 - RNA, 22 nt, Human
ugauuugcgucucauuugaaau

SEQ ID NO: 240776 - RNA, 22 nt, Human
cugagcagucugacucaagcua

SEQ ID NO: 240777 - RNA, 22 nt, Human
aucuacaacaucacauggcauu

SEQ ID NO: 240778 - RNA, 23 nt, Human
uccuuccuuugagaggcuccauc

SEQ ID NO: 240779 - RNA, 22 nt, Human
gggcacugacagggucccaacu

SEQ ID NO: 240780 - RNA, 22 nt, Human
caguaacagugaucaccugugg

SEQ ID NO: 240781 - RNA, 22 nt, Human
ccccaggccuguuggauggcgc

SEQ ID NO: 240782 - RNA, 22 nt, Human
gugcaaacaucauagaguguac

SEQ ID NO: 240783 - RNA, 22 nt, Human
uagggcugcugcagaugacagg

SEQ ID NO: 240784 - RNA, 22 nt, Human
ggucugagugggcaggggccgg

SEQ ID NO: 240785 - RNA, 22 nt, Human
gcccuguguguuugcacugauu

SEQ ID NO: 240786 - RNA, 18 nt, Human
ccugaagccugugucuuu

SEQ ID NO: 240787 - RNA, 22 nt, Human
uaaauguguaaaccuccauuac

SEQ ID NO: 240788 - RNA, 22 nt, Human
agcugccugccaugccgcuggu

SEQ ID NO: 240789 - RNA, 22 nt, Human
ucuccaggugcuaagugugccu

SEQ ID NO: 240790 - RNA, 22 nt, Human
cugcaaggcugaauucagcuga

SEQ ID NO: 240791 - RNA, 22 nt, Human
aaggaagacacagaugaaguga

SEQ ID NO: 240792 - RNA, 22 nt, Human
acagauguacacucauauauaa

SEQ ID NO: 240793 - RNA, 22 nt, Human
uccaggccucuagcccucucuu

SEQ ID NO: 240794 - RNA, 22 nt, Human
ggcucuggcguccaauggagcg

SEQ ID NO: 240795 - RNA, 22 nt, Human
ggcuuccuggagaaggucugag

SEQ ID NO: 240796 - RNA, 22 nt, Human
acaauucugaugguuucccagu

SEQ ID NO: 240797 - RNA, 22 nt, Human
ucuccagaguaaccuuggagca

SEQ ID NO: 240798 - RNA, 22 nt, Human
gaacuuuaaaacaaaguacagu

SEQ ID NO: 240799 - RNA, 22 nt, Human
uuucacaaugcaauccuacuuc

SEQ ID NO: 240800 - RNA, 22 nt, Human
cuggcagguuuggugucuggug

SEQ ID NO: 240801 - RNA, 22 nt, Human
aagaaacuguugcgugacagcg

SEQ ID NO: 240802 - RNA, 22 nt, Human
gcucugaggcugggagcacucu

SEQ ID NO: 240803 - RNA, 22 nt, Human
acaaacuucccagacaagcucc

SEQ ID NO: 240804 - RNA, 22 nt, Human
agucuucagcagccuucucagg

SEQ ID NO: 240805 - RNA, 22 nt, Human
ucuguugacuccuagcagccau

SEQ ID NO: 240806 - RNA, 22 nt, Human
aaagcuauuuauuacagagaau

SEQ ID NO: 240807 - RNA, 22 nt, Human
gaagcaguagauuccuacucau

SEQ ID NO: 240808 - RNA, 16 nt, Human
cucuuuggcuuccaag

SEQ ID NO: 240809 - RNA, 22 nt, Human
uucugguuacauuguuacagcu

SEQ ID NO: 240810 - RNA, 22 nt, Human
accaggccuggcugggcagcca

SEQ ID NO: 240811 - RNA, 22 nt, Human
ugggagcacucuuugggaagca

SEQ ID NO: 240812 - RNA, 22 nt, Human
caggcucgguccaguggcaccc

SEQ ID NO: 240813 - RNA, 21 nt, Human
aaacugaggcuucaagcagug

SEQ ID NO: 240814 - RNA, 22 nt, Human
uuggcucugaaacccaagcucu

SEQ ID NO: 240815 - RNA, 22 nt, Human
uguaucauauggggaagcuuca

SEQ ID NO: 240816 - RNA, 22 nt, Human
aagucacagaacccauuguaac

SEQ ID NO: 240817 - RNA, 22 nt, Human
aagucuggggagaaaaggcuaa

SEQ ID NO: 240818 - RNA, 22 nt, Human
uacaaugagcuguacaucucca

SEQ ID NO: 240819 - RNA, 22 nt, Human
aguugcuggcaccugugaguau

SEQ ID NO: 240820 - RNA, 22 nt, Human
uuugacauuggcuuauucuguu

SEQ ID NO: 240821 - RNA, 21 nt, Human
ugacauuuaguagcauuguca

SEQ ID NO: 240822 - RNA, 22 nt, Human
uuacauuuugggguaaggauaa

SEQ ID NO: 240823 - RNA, 22 nt, Human
ccucagaggcagaugguaagaa

SEQ ID NO: 240824 - RNA, 22 nt, Human
agggaccagggguagcugagau

SEQ ID NO: 240825 - RNA, 22 nt, Human
gcuggaguuagaacuagccugg

SEQ ID NO: 240826 - RNA, 22 nt, Human
aagggcugagcacagugagcca

SEQ ID NO: 240827 - RNA, 22 nt, Human
cuggaggagcaauaugguuagg

SEQ ID NO: 240828 - RNA, 22 nt, Human
gagucaggcuagaggugagucu

SEQ ID NO: 240829 - RNA, 22 nt, Human
caaaucuaggaugcauguagug

SEQ ID NO: 240830 - RNA, 22 nt, Human
ccaggcuucccccauccuagga

SEQ ID NO: 240831 - RNA, 22 nt, Human
uuauuugaaugauggcacaauu

SEQ ID NO: 240832 - RNA, 22 nt, Human
ucuuuggaaugcuagcauucua

SEQ ID NO: 240833 - RNA, 22 nt, Human
ucugucugaggaguuuuugacc

SEQ ID NO: 240834 - RNA, 22 nt, Human
ugaccauuugaucuacauucca

SEQ ID NO: 240835 - RNA, 22 nt, Human
uacuuucaguuucagcugaagu

SEQ ID NO: 240836 - RNA, 22 nt, Human
ucauguuuggaguuugcucacu

SEQ ID NO: 240837 - RNA, 22 nt, Human
ucuggcccagccccugagguca

SEQ ID NO: 240838 - RNA, 22 nt, Human
agggccucuggaacacugaggg

SEQ ID NO: 240839 - RNA, 22 nt, Human
gucagagcuggaggcaaguucu

SEQ ID NO: 240840 - RNA, 22 nt, Human
gcugggucccaagccuggggag

SEQ ID NO: 240841 - RNA, 23 nt, Human
acagcaagaggaccagaugugag

SEQ ID NO: 240842 - RNA, 22 nt, Human
ugcuuuauaggggauugcaggc

SEQ ID NO: 240843 - RNA, 22 nt, Human
uggcaaagauuaccacaucuac

SEQ ID NO: 240844 - RNA, 22 nt, Human
uggcaaagaccgcaauuacuuu

SEQ ID NO: 240845 - RNA, 22 nt, Human
gcagcuuuguggagaggcccau

SEQ ID NO: 240846 - RNA, 22 nt, Human
cagaggaagggugcugcgaaag

SEQ ID NO: 240847 - RNA, 22 nt, Human
gaggcugaggguuagagaguca

SEQ ID NO: 240848 - RNA, 22 nt, Human
accuagaaacugacagaauauu

SEQ ID NO: 240849 - RNA, 22 nt, Human
aaaaguuagcuauuaguaggug

SEQ ID NO: 240850 - RNA, 22 nt, Human
ccagguggacggcgaguacagg

SEQ ID NO: 240851 - RNA, 22 nt, Human
ccagaauaggaguaauaaaacc

SEQ ID NO: 240852 - RNA, 22 nt, Human
cagggcucgcucuugcccuucg

SEQ ID NO: 240853 - RNA, 22 nt, Human
ggcucagaguuaggacccaugu

SEQ ID NO: 240854 - RNA, 22 nt, Human
ggaacagggauuuggccugguu

SEQ ID NO: 240855 - RNA, 21 nt, Human
aaguuuuauguugccauuugu

SEQ ID NO: 240856 - RNA, 22 nt, Human
acaguuauuuucccagcauuua

SEQ ID NO: 240857 - RNA, 22 nt, Human
gcuucacagaaucaauaguugg

SEQ ID NO: 240858 - RNA, 22 nt, Human
aaguacagaaauagcaggugca

SEQ ID NO: 240859 - RNA, 22 nt, Human
ucuuuauaaaagucauuauguc

SEQ ID NO: 240860 - RNA, 22 nt, Human
auaugcaagcacauagaauacu

SEQ ID NO: 240861 - RNA, 19 nt, Human
gcuuccagcacugcaggag

SEQ ID NO: 240862 - RNA, 22 nt, Human
ucagggaguguuggcaggauca

SEQ ID NO: 240863 - RNA, 22 nt, Human
ucugugcucaaguucugccucu

SEQ ID NO: 240864 - RNA, 22 nt, Human
aagacaauuuugaguaugcaca

SEQ ID NO: 240865 - RNA, 22 nt, Human
uagauggaggcuagaugcaggg

SEQ ID NO: 240866 - RNA, 22 nt, Human
ucacacauuguugcuuaaguug

SEQ ID NO: 240867 - RNA, 23 nt, Human
ugagcugggccugcaggggucuc

SEQ ID NO: 240868 - RNA, 22 nt, Human
ucugggcagcagcagcuaguag

SEQ ID NO: 240869 - RNA, 22 nt, Human
uaccauuauucacaugaucuuu

SEQ ID NO: 240870 - RNA, 22 nt, Human
aaauuacagccuuggguagcuu

SEQ ID NO: 240871 - RNA, 22 nt, Human
uggccagugccugccagugcag

SEQ ID NO: 240872 - RNA, 22 nt, Human
cagaugaacuaggcugcacuug

SEQ ID NO: 240873 - RNA, 22 nt, Human
agaggcaccaucuggaacagcc

SEQ ID NO: 240874 - RNA, 22 nt, Human
uccaggauugcaggugcacaac

SEQ ID NO: 240875 - RNA, 22 nt, Human
aggccacagccugggaggugac

SEQ ID NO: 240876 - RNA, 22 nt, Human
auauaacucuuguucuuauagu

SEQ ID NO: 240877 - RNA, 22 nt, Human
uuaaauauuuucagcaggguca

SEQ ID NO: 240878 - RNA, 22 nt, Human
uggaacuaagguagaaacuauu

SEQ ID NO: 240879 - RNA, 22 nt, Human
ucuuugaucagccuuucacuga

SEQ ID NO: 240880 - RNA, 22 nt, Human
acaguguggugauggcacuugc

SEQ ID NO: 240881 - RNA, 22 nt, Human
augggaggaagagaagaugucu

SEQ ID NO: 240882 - RNA, 22 nt, Human
agugcauuauauguuucaaugg

SEQ ID NO: 240883 - RNA, 22 nt, Human
aagagggcagcacagguggguc

SEQ ID NO: 240884 - RNA, 22 nt, Human
uacaggacagauguuuacagga

SEQ ID NO: 240885 - RNA, 22 nt, Human
aggucagaaaaggagagcauug

SEQ ID NO: 240886 - RNA, 22 nt, Human
caggcugcagaggccuuucaug

SEQ ID NO: 240887 - RNA, 22 nt, Human
uuuucuuccuggauuuuggcau

SEQ ID NO: 240888 - RNA, 22 nt, Human
cucuccaggggaacauuguucc

SEQ ID NO: 240889 - RNA, 22 nt, Human
acacugcagaugaaagcauaag

SEQ ID NO: 240890 - RNA, 22 nt, Human
ucugaaauaggcuucuuuuggu

SEQ ID NO: 240891 - RNA, 22 nt, Human
ugacaaaacugcaauuacuuuu

SEQ ID NO: 240892 - RNA, 22 nt, Human
acagacaucaucaacaucuucc

SEQ ID NO: 240893 - RNA, 22 nt, Human
uuaagacacauuucucagacgg

SEQ ID NO: 240894 - RNA, 22 nt, Human
uggcaguuauauugccuuaggg

SEQ ID NO: 240895 - RNA, 22 nt, Human
cugcagggugacguugcccacc

SEQ ID NO: 240896 - RNA, 22 nt, Human
caccagcuacagacuacugugu

SEQ ID NO: 240897 - RNA, 22 nt, Human
cuggagaguuggaagauggacu

SEQ ID NO: 240898 - RNA, 22 nt, Human
ugucuucaggaguaaauaucau

SEQ ID NO: 240899 - RNA, 22 nt, Human
cacccccaggagcuccagggac

SEQ ID NO: 240900 - RNA, 22 nt, Human
ugucgggcaugcauucugagaa

SEQ ID NO: 240901 - RNA, 22 nt, Human
ucuguuuuagauaagaaaggcu

SEQ ID NO: 240902 - RNA, 19 nt, Human
ucagcucuggggucagugg

SEQ ID NO: 240903 - RNA, 22 nt, Human
ggacagcucugccaggagcuca

SEQ ID NO: 240904 - RNA, 22 nt, Human
auuugcauaauagugauuugua

SEQ ID NO: 240905 - RNA, 22 nt, Human
aaugcuaaaacacagauuuuug

SEQ ID NO: 240906 - RNA, 22 nt, Human
ugucaucuuguccagccaggca

SEQ ID NO: 240907 - RNA, 22 nt, Human
gagggggcgaacagaagcaagg

SEQ ID NO: 240908 - RNA, 22 nt, Human
agaggccucccucccagcuggu

SEQ ID NO: 240909 - RNA, 22 nt, Human
aaguucaaggcucuagaguucc

SEQ ID NO: 240910 - RNA, 22 nt, Human
caugccauuuuucuagauugag

SEQ ID NO: 240911 - RNA, 20 nt, Human
aaacauucauguacaaguga

SEQ ID NO: 240912 - RNA, 22 nt, Human
uagggaugggagauucucaaac

SEQ ID NO: 240913 - RNA, 20 nt, Human
gaagacacagaguucaucuc

SEQ ID NO: 240914 - RNA, 22 nt, Human
caagggcagauagcugguccaa

SEQ ID NO: 240915 - RNA, 22 nt, Human
uggcacagacugggccaaggaa

SEQ ID NO: 240916 - RNA, 22 nt, Human
gagcuugguguuauuucugugg

SEQ ID NO: 240917 - RNA, 22 nt, Human
auauuucuggggguguguuucu

SEQ ID NO: 240918 - RNA, 22 nt, Human
uccuggcuccagcagcucuucc

SEQ ID NO: 240919 - RNA, 22 nt, Human
uggaaacuauaaaagcaccuuc

SEQ ID NO: 240920 - RNA, 22 nt, Human
ggaacaguagacgaucuccuuu

SEQ ID NO: 240921 - RNA, 22 nt, Human
gaaaugaacugauuaucauugc

SEQ ID NO: 240922 - RNA, 22 nt, Human
ucuguccucuuugaagcugcuc

SEQ ID NO: 240923 - RNA, 22 nt, Human
gaggaggcuaagugggcucugg

SEQ ID NO: 240924 - RNA, 22 nt, Human
uacauuccauguguguguauuc

SEQ ID NO: 240925 - RNA, 22 nt, Human
caggcaccccaggugagcacug

SEQ ID NO: 240926 - RNA, 20 nt, Human
cugcugcccugucagccucu

SEQ ID NO: 240927 - RNA, 22 nt, Human
uacagagaauaauaggacaggu

SEQ ID NO: 240928 - RNA, 22 nt, Human
gaacugaagacuuuuacuguac

SEQ ID NO: 240929 - RNA, 22 nt, Human
guucucugccggcaccuacccg

SEQ ID NO: 240930 - RNA, 22 nt, Human
auggcuggugauacuggaguga

SEQ ID NO: 240931 - RNA, 22 nt, Human
auggguuucccucugaaauuau

SEQ ID NO: 240932 - RNA, 22 nt, Human
gcaggcaguuugcuuuucccuc

SEQ ID NO: 240933 - RNA, 20 nt, Human
uguauuacuuggucuuacaa

SEQ ID NO: 240934 - RNA, 22 nt, Human
guaucuuuccacaucuucagua

SEQ ID NO: 240935 - RNA, 22 nt, Human
agcuggcauugcagggagcugc

SEQ ID NO: 240936 - RNA, 22 nt, Human
ccucaggauacaggagccacag

SEQ ID NO: 240937 - RNA, 22 nt, Human
cccagguccccaccugucugcu

SEQ ID NO: 240938 - RNA, 22 nt, Human
gcaggaguggagaccaugggga

SEQ ID NO: 240939 - RNA, 22 nt, Human
gcugaagauaggcauuucagca

SEQ ID NO: 240940 - RNA, 22 nt, Human
uagggcucagcucuagcuccug

SEQ ID NO: 240941 - RNA, 22 nt, Human
ggcuuuaugcagggauagaaau

SEQ ID NO: 240942 - RNA, 22 nt, Human
cagacucucuuccaugcaucac

SEQ ID NO: 240943 - RNA, 22 nt, Human
ucagaguauuucauucuuaggu

SEQ ID NO: 240944 - RNA, 20 nt, Human
agcuccucaucacuggaggu

SEQ ID NO: 240945 - RNA, 22 nt, Human
agcugaggaggaaugaugggua

SEQ ID NO: 240946 - RNA, 22 nt, Human
auucuucaccauggauaauuug

SEQ ID NO: 240947 - RNA, 22 nt, Human
gaggggaguguccuccgggccc

SEQ ID NO: 240948 - RNA, 20 nt, Human
ugagcuucagauaucgugca

SEQ ID NO: 240949 - RNA, 21 nt, Human
uucuccagggggagcucucuc

SEQ ID NO: 240950 - RNA, 22 nt, Human
guuggcaaguguuccuuccucu

SEQ ID NO: 240951 - RNA, 20 nt, Human
ggguccugacuuggucuccu

SEQ ID NO: 240952 - RNA, 21 nt, Human
gcagagcuggaaccaggaccc

SEQ ID NO: 240953 - RNA, 22 nt, Human
uugaaauuuuaggccuugcaau

SEQ ID NO: 240954 - RNA, 22 nt, Human
ucuaauccuugcuaccugggug

SEQ ID NO: 240955 - RNA, 22 nt, Human
uggcugugggaugagagccuca

SEQ ID NO: 240956 - RNA, 22 nt, Human
gagccagaaaagcugccugacu

SEQ ID NO: 240957 - RNA, 22 nt, Human
cuccccuuuggaagaagggucu

SEQ ID NO: 240958 - RNA, 22 nt, Human
uuccccuugggcuguggaggag

SEQ ID NO: 240959 - RNA, 22 nt, Human
aggcucugugauccacaaugag

SEQ ID NO: 240960 - RNA, 22 nt, Human
ugucuggcauaguugcucccug

SEQ ID NO: 240961 - RNA, 22 nt, Human
agcagcagagcucuggucugca

SEQ ID NO: 240962 - RNA, 21 nt, Human
gcucagcaaaggugaggugca

SEQ ID NO: 240963 - RNA, 22 nt, Human
ccugcaccuucaagaaaauaau

SEQ ID NO: 240964 - RNA, 22 nt, Human
caaauauuccagguacaucccu

SEQ ID NO: 240965 - RNA, 22 nt, Human
gcccgugugcagagugggagcu

SEQ ID NO: 240966 - RNA, 22 nt, Human
caggcugacaacugagcauuuu

SEQ ID NO: 240967 - RNA, 23 nt, Human
ucaaacagguuucagagcaucuu

SEQ ID NO: 240968 - RNA, 22 nt, Human
ugggccaguucuuuacucgucc

SEQ ID NO: 240969 - RNA, 22 nt, Human
gucucagggcugagggcagugg

SEQ ID NO: 240970 - RNA, 20 nt, Human
accagagacuggggacaagu

SEQ ID NO: 240971 - RNA, 22 nt, Human
gacauaauaaucugaccuagau

SEQ ID NO: 240972 - RNA, 22 nt, Human
caaaauuagggagugagcugga

SEQ ID NO: 240973 - RNA, 22 nt, Human
aauucuucaagugcuuuggaga

SEQ ID NO: 240974 - RNA, 22 nt, Human
acuaugauguauuuugcaucua

SEQ ID NO: 240975 - RNA, 22 nt, Human
augauguugauaaauuacuuua

SEQ ID NO: 240976 - RNA, 21 nt, Human
agcugcuuucagcuccuagag

SEQ ID NO: 240977 - RNA, 22 nt, Human
aucauuccacauguaccacuag

SEQ ID NO: 240978 - RNA, 22 nt, Human
acaacaaaaucacuagucuucc

SEQ ID NO: 240979 - RNA, 22 nt, Human
uggcugcugagaaggcagcugu

SEQ ID NO: 240980 - RNA, 22 nt, Human
auuuaauaccacuuggugcuuu

SEQ ID NO: 240981 - RNA, 22 nt, Human
uuacagugaagauucagguucc

SEQ ID NO: 240982 - RNA, 22 nt, Human
uucaaagcaagacacaauuccu

SEQ ID NO: 240983 - RNA, 22 nt, Human
acauguggguuuuauuuugcau

SEQ ID NO: 240984 - RNA, 22 nt, Human
ugcuccugcuggcccucgugcc

SEQ ID NO: 240985 - RNA, 22 nt, Human
uugcuagcugguguaugcauug

SEQ ID NO: 240986 - RNA, 22 nt, Human
gagucuggucauuuucucuccc

SEQ ID NO: 240987 - RNA, 22 nt, Human
gacaccauuaccuuucuauauu

SEQ ID NO: 240988 - RNA, 22 nt, Human
agaaggccaugucuugguacuu

SEQ ID NO: 240989 - RNA, 23 nt, Human
agcaccauuacaguuugauuggg

SEQ ID NO: 240990 - RNA, 22 nt, Human
ggugggugcagggggcuucuua

SEQ ID NO: 240991 - RNA, 22 nt, Human
agucuuuuauucaaggcuaagu

SEQ ID NO: 240992 - RNA, 17 nt, Human
guguucacaaugacugu

SEQ ID NO: 240993 - RNA, 19 nt, Human
accagcccacucccaguuu

SEQ ID NO: 240994 - RNA, 22 nt, Human
cugcugucaaaaaucacuccau

SEQ ID NO: 240995 - RNA, 22 nt, Human
uggcaguagauccagucucucu

SEQ ID NO: 240996 - RNA, 22 nt, Human
ucaggcugaaggaggccuaucu

SEQ ID NO: 240997 - RNA, 22 nt, Human
ggaccugcccuggcucagaugc

SEQ ID NO: 240998 - RNA, 22 nt, Human
agagucuuccaggcagccugag

SEQ ID NO: 240999 - RNA, 22 nt, Human
cucaggaggugguagaggcccu

SEQ ID NO: 241000 - RNA, 22 nt, Human
gcugagguuucaggaguggcag

SEQ ID NO: 241001 - RNA, 23 nt, Human
ccuggcugaccugaagguguagu

SEQ ID NO: 241002 - RNA, 22 nt, Human
ugaaggcacguggguggauacu

SEQ ID NO: 241003 - RNA, 22 nt, Human
gacagcagacagccuggccccu

SEQ ID NO: 241004 - RNA, 22 nt, Human
gugcucagggccuggcugggga

SEQ ID NO: 241005 - RNA, 22 nt, Human
ucuagagaaguuuccuuuugaa

SEQ ID NO: 241006 - RNA, 22 nt, Human
uuucucauggaacauagcuccu

SEQ ID NO: 241007 - RNA, 22 nt, Human
ucagaugcuagggcugagcuau

SEQ ID NO: 241008 - RNA, 22 nt, Human
gcugccagucuaaugggaaaca

SEQ ID NO: 241009 - RNA, 22 nt, Human
aggugcaccugagggugucauc

SEQ ID NO: 241010 - RNA, 22 nt, Human
uaguuugagaauugaaauagaa

SEQ ID NO: 241011 - RNA, 22 nt, Human
ccagaccuaaccagcuuuugua

SEQ ID NO: 241012 - RNA, 22 nt, Human
ggcugcugcuguguaggccugu

SEQ ID NO: 241013 - RNA, 22 nt, Human
auguagagcuccuugauccucc

SEQ ID NO: 241014 - RNA, 22 nt, Human
ucuguucagaauuguaacacuc

SEQ ID NO: 241015 - RNA, 22 nt, Human
gaacaccuggguccccuggggc

SEQ ID NO: 241016 - RNA, 22 nt, Human
caggugguuguuuggauucuaa

SEQ ID NO: 241017 - RNA, 19 nt, Human
ccuccugcuagauaugcaa

SEQ ID NO: 241018 - RNA, 22 nt, Human
uccaggagggauugggcugugg

SEQ ID NO: 241019 - RNA, 22 nt, Human
ggcacugagcugccuuggggca

SEQ ID NO: 241020 - RNA, 22 nt, Human
uacccagaagauugucagcaaa

SEQ ID NO: 241021 - RNA, 22 nt, Human
uagcagggagggccagugucaa

SEQ ID NO: 241022 - RNA, 22 nt, Human
cuccaguggugauggggaagaa

SEQ ID NO: 241023 - RNA, 22 nt, Human
gccacaggucggcuagaggguc

SEQ ID NO: 241024 - RNA, 22 nt, Human
uugaaaucaccacuagcauuug

SEQ ID NO: 241025 - RNA, 22 nt, Human
gcacccagggacuuggcuggcc

SEQ ID NO: 241026 - RNA, 22 nt, Human
acaagugugugcaguuuguaaa

SEQ ID NO: 241027 - RNA, 22 nt, Human
gcuacugauugaccuuggagag

SEQ ID NO: 241028 - RNA, 22 nt, Human
gccucagggauaggaugagcau

SEQ ID NO: 241029 - RNA, 22 nt, Human
uuucugaagauacagcuuugcu

SEQ ID NO: 241030 - RNA, 22 nt, Human
gggaugaggaucaaucagggag

SEQ ID NO: 241031 - RNA, 22 nt, Human
agaaagcacgggccccaggcuc

SEQ ID NO: 241032 - RNA, 22 nt, Human
cagugggaaagugaagagcauu

SEQ ID NO: 241033 - RNA, 22 nt, Human
gugggagcccucagggaggugc

SEQ ID NO: 241034 - RNA, 22 nt, Human
caagaagugucagcuuuuuaaa

SEQ ID NO: 241035 - RNA, 22 nt, Human
uaaaaucagccgaccauggugg

SEQ ID NO: 241036 - RNA, 22 nt, Human
uuugugcagauguauauuugug

SEQ ID NO: 241037 - RNA, 22 nt, Human
acucuuuagagguacaucucuu

SEQ ID NO: 241038 - RNA, 21 nt, Human
ccaggguccagcugccauggu

SEQ ID NO: 241039 - RNA, 22 nt, Human
acaguaauauugaugcucguca

SEQ ID NO: 241040 - RNA, 22 nt, Human
gcugccuuagagggagugguuc

SEQ ID NO: 241041 - RNA, 15 nt, Human
uacauucauuuccac

SEQ ID NO: 241042 - RNA, 22 nt, Human
cuucucuggcauagcaagcagg

SEQ ID NO: 241043 - RNA, 22 nt, Human
gucccaggugggcuccaccucu

SEQ ID NO: 241044 - RNA, 22 nt, Human
agaguggcagcaagucagguag

SEQ ID NO: 241045 - RNA, 22 nt, Human
acagugcaaacuuuugucuccu

SEQ ID NO: 241046 - RNA, 22 nt, Human
aucccccucuuggauggcggca

SEQ ID NO: 241047 - RNA, 22 nt, Human
uuuuggaugagcccagauuucu

SEQ ID NO: 241048 - RNA, 22 nt, Human
cugcuggggucagagcacuggg

SEQ ID NO: 241049 - RNA, 19 nt, Human
ggaagcccugggucagagc

SEQ ID NO: 241050 - RNA, 20 nt, Human
ucauggcagccacccacagg

SEQ ID NO: 241051 - RNA, 22 nt, Human
aguuuuauguucacagaaggau

SEQ ID NO: 241052 - RNA, 22 nt, Human
agcuuagaauguguuaggaaag

SEQ ID NO: 241053 - RNA, 22 nt, Human
aguguacauaguuaggaacauc

SEQ ID NO: 241054 - RNA, 22 nt, Human
ugguccagacuuugaccucuca

SEQ ID NO: 241055 - RNA, 22 nt, Human
aguagaaauguaagaaggauua

SEQ ID NO: 241056 - RNA, 22 nt, Human
uucucucuuacugccaugcugu

SEQ ID NO: 241057 - RNA, 22 nt, Human
cuggccacaacuagcccaggac

SEQ ID NO: 241058 - RNA, 22 nt, Human
aacaucacaauuucauuuaugc

SEQ ID NO: 241059 - RNA, 23 nt, Human
uggaccugaaccagugccucugu

SEQ ID NO: 241060 - RNA, 22 nt, Human
agacagacuguguuugaauccu

SEQ ID NO: 241061 - RNA, 22 nt, Human
gugcccaggugucccugagaag

SEQ ID NO: 241062 - RNA, 22 nt, Human
agaggccagguccagaguuugu

SEQ ID NO: 241063 - RNA, 22 nt, Human
ucuaaagaagaggguucugcgg

SEQ ID NO: 241064 - RNA, 22 nt, Human
caggaagugcucgcugugggga

SEQ ID NO: 241065 - RNA, 22 nt, Human
ugcuauuuggaaaagcauuugg

SEQ ID NO: 241066 - RNA, 22 nt, Human
uuacagaaggaacacuacucag

SEQ ID NO: 241067 - RNA, 22 nt, Human
ugggcaggcaagugaauaccuu

SEQ ID NO: 241068 - RNA, 22 nt, Human
uauauuaccugccugaucuaua

SEQ ID NO: 241069 - RNA, 22 nt, Human
agaaggcuggccauggugcccu

SEQ ID NO: 241070 - RNA, 22 nt, Human
cugagggcuggagcugaggccu

SEQ ID NO: 241071 - RNA, 22 nt, Human
uucuucuuaauguccugggaac

SEQ ID NO: 241072 - RNA, 22 nt, Human
cucacccauaucuccaugacuc

SEQ ID NO: 241073 - RNA, 22 nt, Human
acaacagagcuggacugagagg

SEQ ID NO: 241074 - RNA, 21 nt, Human
acucugaaaauuaauaguuau

SEQ ID NO: 241075 - RNA, 23 nt, Human
aagaguuuagagucuugcagagu

SEQ ID NO: 241076 - RNA, 22 nt, Human
acagggcagagaggcaggcuug

SEQ ID NO: 241077 - RNA, 22 nt, Human
ccagguguggggaggacucaca

SEQ ID NO: 241078 - RNA, 22 nt, Human
aggggcaggugcugcacuuaga

SEQ ID NO: 241079 - RNA, 22 nt, Human
cccuggcaaaaucccugguaca

SEQ ID NO: 241080 - RNA, 22 nt, Human
cugggagcaagucaggaaaggu

SEQ ID NO: 241081 - RNA, 22 nt, Human
cugucuggaaugcaguacauag

SEQ ID NO: 241082 - RNA, 22 nt, Human
aagcuugggaaccacgguaauc

SEQ ID NO: 241083 - RNA, 22 nt, Human
gaaggccacuuuguguugagaa

SEQ ID NO: 241084 - RNA, 22 nt, Human
aguguagaaggagaaauggauc

SEQ ID NO: 241085 - RNA, 22 nt, Human
gaauguaaaauugccuacaaga

SEQ ID NO: 241086 - RNA, 19 nt, Human
ccagcuggccugggaccuc

SEQ ID NO: 241087 - RNA, 22 nt, Human
cagagucuuguguguucagccc

SEQ ID NO: 241088 - RNA, 20 nt, Human
gccauccagccucccaggag

SEQ ID NO: 241089 - RNA, 20 nt, Human
cucuggcaaaggaugccuau

SEQ ID NO: 241090 - RNA, 17 nt, Human
guaaggcuugcagaugc

SEQ ID NO: 241091 - RNA, 22 nt, Human
cagcaucucugcacccuccccc

SEQ ID NO: 241092 - RNA, 22 nt, Human
cuguuggccuuucaucaguaau

SEQ ID NO: 241093 - RNA, 22 nt, Human
uugacacaguuuucucauuaag

SEQ ID NO: 241094 - RNA, 22 nt, Human
agucucuuggcauucugaaaca

SEQ ID NO: 241095 - RNA, 22 nt, Human
ugucccaacccugagaagauuc

SEQ ID NO: 241096 - RNA, 22 nt, Human
auaaaggcuggcugcugugagc

SEQ ID NO: 241097 - RNA, 22 nt, Human
cugaggcucaagggcagguggg

SEQ ID NO: 241098 - RNA, 22 nt, Human
aggaaacuguccccucauccua

SEQ ID NO: 241099 - RNA, 22 nt, Human
uuugacucccaaacugugauuu

SEQ ID NO: 241100 - RNA, 22 nt, Human
gcugcugugccuggcguccugu

SEQ ID NO: 241101 - RNA, 22 nt, Human
ucacauucuucccugacuucuu

SEQ ID NO: 241102 - RNA, 22 nt, Human
gugucuuuugaggcugaccagu

SEQ ID NO: 241103 - RNA, 22 nt, Human
aggaagagcauucacaugguag

SEQ ID NO: 241104 - RNA, 22 nt, Human
aaaggcuaauuaaccaccuggu

SEQ ID NO: 241105 - RNA, 22 nt, Human
uagacauuuucucaacaucucu

SEQ ID NO: 241106 - RNA, 22 nt, Human
gggaucugcuccagagggaaaa

SEQ ID NO: 241107 - RNA, 17 nt, Human
agguggcugcugcgccu

SEQ ID NO: 241108 - RNA, 22 nt, Human
agaggccagcagugccuaucug

SEQ ID NO: 241109 - RNA, 22 nt, Human
ugcaggugcagcgauacuguga

SEQ ID NO: 241110 - RNA, 22 nt, Human
uuggcuuuuaugcagcuuaggu

SEQ ID NO: 241111 - RNA, 22 nt, Human
aaucuuuugauucuagggcugu

SEQ ID NO: 241112 - RNA, 18 nt, Human
uuucucugucgucuucug

SEQ ID NO: 241113 - RNA, 21 nt, Human
ugcuuugcagguggauuuagu

SEQ ID NO: 241114 - RNA, 22 nt, Human
uccucagaauccaaacugcagu

SEQ ID NO: 241115 - RNA, 22 nt, Human
gaggcagcuuggggcugugggu

SEQ ID NO: 241116 - RNA, 22 nt, Human
cagcuccucacgagucuugaaa

SEQ ID NO: 241117 - RNA, 22 nt, Human
uuucacauauaggggaagcuac

SEQ ID NO: 241118 - RNA, 22 nt, Human
guagacaucuagauuuaugugu

SEQ ID NO: 241119 - RNA, 22 nt, Human
cuucccagaacaauguaggcuu

SEQ ID NO: 241120 - RNA, 19 nt, Human
uccaggaggcugccauuga

SEQ ID NO: 241121 - RNA, 22 nt, Human
aaugucugccugaacuuuauau

SEQ ID NO: 241122 - RNA, 22 nt, Human
cucagagcucagcuuuguuagu

SEQ ID NO: 241123 - RNA, 22 nt, Human
ucuuccagccaauagcguccuu

SEQ ID NO: 241124 - RNA, 22 nt, Human
gauggccuuguuuucucccuuc

SEQ ID NO: 241125 - RNA, 22 nt, Human
aaggucugaguuuugccaggcc

SEQ ID NO: 241126 - RNA, 22 nt, Human
augggaaguguuagaagauuuu

SEQ ID NO: 241127 - RNA, 22 nt, Human
ucagugucauaucaagaagaug

SEQ ID NO: 241128 - RNA, 22 nt, Human
uugcuuuagggcaaauauuuca

SEQ ID NO: 241129 - RNA, 22 nt, Human
ugcuuugugacagauuaguuuu

SEQ ID NO: 241130 - RNA, 22 nt, Human
gcuuccuguaggcagguccaag

SEQ ID NO: 241131 - RNA, 22 nt, Human
aagggggccacaccugguguga

SEQ ID NO: 241132 - RNA, 22 nt, Human
gagagccugccagugaguguau

SEQ ID NO: 241133 - RNA, 22 nt, Human
agcaucucugggagucauccgu

SEQ ID NO: 241134 - RNA, 22 nt, Human
ucacagaaggaccuuguuucau

SEQ ID NO: 241135 - RNA, 22 nt, Human
ccugagggcgccgagcucccag

SEQ ID NO: 241136 - RNA, 22 nt, Human
aacccuggggcagcugcuaggg

SEQ ID NO: 241137 - RNA, 22 nt, Human
cccuagaaaugaaagcauacgu

SEQ ID NO: 241138 - RNA, 23 nt, Human
uuuuagugacuccuuuaucugcc

SEQ ID NO: 241139 - RNA, 22 nt, Human
uggucaggauucucagcccuuc

SEQ ID NO: 241140 - RNA, 22 nt, Human
cccaggagagaggccaguuggc

SEQ ID NO: 241141 - RNA, 22 nt, Human
ucacaauuuggauacagcuaug

SEQ ID NO: 241142 - RNA, 22 nt, Human
uuucuggcagcgggacaggggu

SEQ ID NO: 241143 - RNA, 22 nt, Human
aagcagguuaugaaauauagaa

SEQ ID NO: 241144 - RNA, 22 nt, Human
augaggcaaggcuggccguguu

SEQ ID NO: 241145 - RNA, 22 nt, Human
cuggagaccucuccugagagug

SEQ ID NO: 241146 - RNA, 22 nt, Human
auccugggaagcugacauugaa

SEQ ID NO: 241147 - RNA, 23 nt, Human
uguaacaauuucauauacaugca

SEQ ID NO: 241148 - RNA, 22 nt, Human
ucaggcucuacacuugacacac

SEQ ID NO: 241149 - RNA, 22 nt, Human
guaacugguuuucuucccucuc

SEQ ID NO: 241150 - RNA, 22 nt, Human
ugcucagaaacgaggugcagcc

SEQ ID NO: 241151 - RNA, 22 nt, Human
uagcaccacuucaugcuuucag

SEQ ID NO: 241152 - RNA, 22 nt, Human
aaagcacugcacauauauuugc

SEQ ID NO: 241153 - RNA, 18 nt, Human
acacaguggaugccuggu

SEQ ID NO: 241154 - RNA, 22 nt, Human
agucugucuuuggcuucaccac

SEQ ID NO: 241155 - RNA, 22 nt, Human
gaauacaccaaggaaucagaau

SEQ ID NO: 241156 - RNA, 22 nt, Human
ucacagcaggguaacaggaaga

SEQ ID NO: 241157 - RNA, 22 nt, Human
uuucucagcuguggagccuauc

SEQ ID NO: 241158 - RNA, 22 nt, Human
ggcaggcagccuccauccacag

SEQ ID NO: 241159 - RNA, 22 nt, Human
ccugucuguccucucaugagcc

SEQ ID NO: 241160 - RNA, 22 nt, Human
aguccaggccucccucuccugc

SEQ ID NO: 241161 - RNA, 22 nt, Human
aaaguggggucuagagggccug

SEQ ID NO: 241162 - RNA, 22 nt, Human
gaucuugagcaaguuguguaac

SEQ ID NO: 241163 - RNA, 22 nt, Human
cugggugugggucaagcaacca

SEQ ID NO: 241164 - RNA, 22 nt, Human
gggcugacgaaggccaugugug

SEQ ID NO: 241165 - RNA, 22 nt, Human
ggggccagcuucgcgugcucuu

SEQ ID NO: 241166 - RNA, 22 nt, Human
uaguuuaccaaauugaucuucc

SEQ ID NO: 241167 - RNA, 22 nt, Human
uaauuauacaaaaaggcaugca

SEQ ID NO: 241168 - RNA, 22 nt, Human
ucccccacucuaaaggagccuu

SEQ ID NO: 241169 - RNA, 22 nt, Human
ucucuguaaaauguggaugaua

SEQ ID NO: 241170 - RNA, 22 nt, Human
uagguucagugucuuguucugc

SEQ ID NO: 241171 - RNA, 22 nt, Human
ggaguggcagagaggguauacu

SEQ ID NO: 241172 - RNA, 22 nt, Human
ugcaucuggccuuugcuggcua

SEQ ID NO: 241173 - RNA, 22 nt, Human
aagggggcacagucacuguaau

SEQ ID NO: 241174 - RNA, 22 nt, Human
aagacaauuugauacuaguugc

SEQ ID NO: 241175 - RNA, 22 nt, Human
gacaagauuuagagucugcuaa

SEQ ID NO: 241176 - RNA, 22 nt, Human
ccagaagcagagccugaggcag

SEQ ID NO: 241177 - RNA, 22 nt, Human
ucuauuuguucucaggaucauc

SEQ ID NO: 241178 - RNA, 22 nt, Human
aauaagcuggagcuauauugag

SEQ ID NO: 241179 - RNA, 22 nt, Human
uggcagagacuccuccugggag

SEQ ID NO: 241180 - RNA, 22 nt, Human
gagaaaccgauucugcauguca

SEQ ID NO: 241181 - RNA, 22 nt, Human
uguacagagguguacauaugau

SEQ ID NO: 241182 - RNA, 23 nt, Human
agggcccaagccuggacagcagg

SEQ ID NO: 241183 - RNA, 22 nt, Human
uggaggcauugugacugcugaa

SEQ ID NO: 241184 - RNA, 22 nt, Human
agauuauuuaagacaggaacca

SEQ ID NO: 241185 - RNA, 22 nt, Human
cccacccucaagggugucuaua

SEQ ID NO: 241186 - RNA, 22 nt, Human
gacccuggugggcacuggcacc

SEQ ID NO: 241187 - RNA, 22 nt, Human
ggucacauucugagguauuagg

SEQ ID NO: 241188 - RNA, 23 nt, Human
ugcugcccacucuuccagcccuc

SEQ ID NO: 241189 - RNA, 22 nt, Human
gccaccagccccaugcgcugug

SEQ ID NO: 241190 - RNA, 22 nt, Human
uaggauuuuuuggauucuggau

SEQ ID NO: 241191 - RNA, 22 nt, Human
ucugggcugguugugcuugcuu

SEQ ID NO: 241192 - RNA, 20 nt, Human
acuguucaagggccuggugg

SEQ ID NO: 241193 - RNA, 22 nt, Human
ggaaguuguaugaucggggaau

SEQ ID NO: 241194 - RNA, 22 nt, Human
cagccuguggcagaggucuaau

SEQ ID NO: 241195 - RNA, 22 nt, Human
acaucuggaaaguuacuugaga

SEQ ID NO: 241196 - RNA, 22 nt, Human
gggcccagcacuggcugggauc

SEQ ID NO: 241197 - RNA, 22 nt, Human
uuagaaagguuuugcucugaaa

SEQ ID NO: 241198 - RNA, 22 nt, Human
gccuguggccgacugagagccu

SEQ ID NO: 241199 - RNA, 22 nt, Human
uggcuucccaggaaaggagaag

SEQ ID NO: 241200 - RNA, 22 nt, Human
ugcucaggagcuuagagcacag

SEQ ID NO: 241201 - RNA, 22 nt, Human
ggcucugcagagggcccagcuu

SEQ ID NO: 241202 - RNA, 22 nt, Human
gcagccaggcuacagcgggcuu

SEQ ID NO: 241203 - RNA, 22 nt, Human
aggcuucuugggcuucauucug

SEQ ID NO: 241204 - RNA, 22 nt, Human
ucuuagaaauuccccaguggcu

SEQ ID NO: 241205 - RNA, 22 nt, Human
uucuagaaacacaugcaaacag

SEQ ID NO: 241206 - RNA, 22 nt, Human
gaacauacaagaauuaaguaca

SEQ ID NO: 241207 - RNA, 22 nt, Human
cucuguaccuuaaaagggcuuu

SEQ ID NO: 241208 - RNA, 22 nt, Human
cugugcccucuuugcuggccuu

SEQ ID NO: 241209 - RNA, 22 nt, Human
acagcugugaagcaagcacucu

SEQ ID NO: 241210 - RNA, 22 nt, Human
ggguaggaugguagaagggacc

SEQ ID NO: 241211 - RNA, 22 nt, Human
ccuguucacuuugacuucucca

SEQ ID NO: 241212 - RNA, 22 nt, Human
gugccaaaagcuauaauuuggu

SEQ ID NO: 241213 - RNA, 21 nt, Human
aaaguucaugcuuuaauauuc

SEQ ID NO: 241214 - RNA, 22 nt, Human
gaggcaguguuuacugcccugu

SEQ ID NO: 241215 - RNA, 21 nt, Human
uggagcugccacuugagcugc

SEQ ID NO: 241216 - RNA, 22 nt, Human
ugagauccccaggaaggacaac

SEQ ID NO: 241217 - RNA, 22 nt, Human
uagcaccaugauggaagagcug

SEQ ID NO: 241218 - RNA, 22 nt, Human
auugcuggcugccaucuugccc

SEQ ID NO: 241219 - RNA, 22 nt, Human
uuagggcaaaguuucaacaguu

SEQ ID NO: 241220 - RNA, 22 nt, Human
gggauugaauugggggaucaca

SEQ ID NO: 241221 - RNA, 22 nt, Human
agcuuuaugggagcuuagauaa

SEQ ID NO: 241222 - RNA, 22 nt, Human
auagucuuagaucagauaaagu

SEQ ID NO: 241223 - RNA, 22 nt, Human
gcaggagcccuggcauguucuu

SEQ ID NO: 241224 - RNA, 22 nt, Human
ucugccugagcagagggaggcc

SEQ ID NO: 241225 - RNA, 22 nt, Human
uucuggaaagcauuugaggccc

SEQ ID NO: 241226 - RNA, 22 nt, Human
cugggcagaauuuuaggauggc

SEQ ID NO: 241227 - RNA, 22 nt, Human
ucuggcagugaagucaugaggu

SEQ ID NO: 241228 - RNA, 22 nt, Human
agugcauuccuggggaagaagc

SEQ ID NO: 241229 - RNA, 22 nt, Human
uagcauaacagguaagagugag

SEQ ID NO: 241230 - RNA, 17 nt, Human
gacaagacagaauucau

SEQ ID NO: 241231 - RNA, 22 nt, Human
ucaagagaaggggaaauagacu

SEQ ID NO: 241232 - RNA, 22 nt, Human
uacauccaaaugaauuagaauu

SEQ ID NO: 241233 - RNA, 22 nt, Human
gaucugaaauagcuacugcaga

SEQ ID NO: 241234 - RNA, 22 nt, Human
uugaaucuggguacuuguaaua

SEQ ID NO: 241235 - RNA, 22 nt, Human
cacaggggcaaacuguagggga

SEQ ID NO: 241236 - RNA, 22 nt, Human
ucuucagagcauuucugaggua

SEQ ID NO: 241237 - RNA, 22 nt, Human
uccagccaggauggcccaggga

SEQ ID NO: 241238 - RNA, 22 nt, Human
guuuauaaggcccaauauuucu

SEQ ID NO: 241239 - RNA, 22 nt, Human
cauucauccacuguuggaaauu

SEQ ID NO: 241240 - RNA, 22 nt, Human
agcaguaagugaagacuaguuu

SEQ ID NO: 241241 - RNA, 22 nt, Human
aaagaaggaccuggaggaggau

SEQ ID NO: 241242 - RNA, 19 nt, Human
ggcugccuccugggagauu

SEQ ID NO: 241243 - RNA, 22 nt, Human
caguguggugagauuccaggug

SEQ ID NO: 241244 - RNA, 23 nt, Human
uuggaauauauuguuugacauag

SEQ ID NO: 241245 - RNA, 22 nt, Human
ucugaaauucacaguugaguca

SEQ ID NO: 241246 - RNA, 22 nt, Human
gaagaguauauuuagugaaauc

SEQ ID NO: 241247 - RNA, 22 nt, Human
cuuccuuccuuccccgaaaugc

SEQ ID NO: 241248 - RNA, 18 nt, Human
cuggauuaagacagugcu

SEQ ID NO: 241249 - RNA, 22 nt, Human
ugcuucugacugggucaguuga

SEQ ID NO: 241250 - RNA, 22 nt, Human
aagaacaugauggccaugugca

SEQ ID NO: 241251 - RNA, 22 nt, Human
ccuggggagaagagcuuccccc

SEQ ID NO: 241252 - RNA, 22 nt, Human
uguuuaaugaagaugguuuuuc

SEQ ID NO: 241253 - RNA, 22 nt, Human
gaaucucaaauuaagaauuuua

SEQ ID NO: 241254 - RNA, 22 nt, Human
agguauagaauugaaaggguuu

SEQ ID NO: 241255 - RNA, 22 nt, Human
cucucagaagcuuccaguaugg

SEQ ID NO: 241256 - RNA, 22 nt, Human
cucaggcugugaugugauggca

SEQ ID NO: 241257 - RNA, 20 nt, Human
aaaugcuguaauguuuggga

SEQ ID NO: 241258 - RNA, 22 nt, Human
gggcugagaaguugaucccaag

SEQ ID NO: 241259 - RNA, 22 nt, Human
guaucuuuaucccucguuggag

SEQ ID NO: 241260 - RNA, 22 nt, Human
aggacagcauuuucagcaucuc

SEQ ID NO: 241261 - RNA, 22 nt, Human
acccugggcuuggccugcucag

SEQ ID NO: 241262 - RNA, 22 nt, Human
cauccaaacucucauuaucugu

SEQ ID NO: 241263 - RNA, 22 nt, Human
uacuuccagcaaucugcauauu

SEQ ID NO: 241264 - RNA, 22 nt, Human
ucuuuggucaucaugggaagca

SEQ ID NO: 241265 - RNA, 19 nt, Human
gcgaggaagucacuguggc

SEQ ID NO: 241266 - RNA, 22 nt, Human
uuugauaauuaaaaauuguagu

SEQ ID NO: 241267 - RNA, 22 nt, Human
ccacaguaaagaaacaacuucg

SEQ ID NO: 241268 - RNA, 22 nt, Human
aagucagagaugccaaagauua

SEQ ID NO: 241269 - RNA, 22 nt, Human
aagcugaagaugccagugggag

SEQ ID NO: 241270 - RNA, 22 nt, Human
gugucaacagccgaagauaaau

SEQ ID NO: 241271 - RNA, 22 nt, Human
uuggcugcuagaugguguuaga

SEQ ID NO: 241272 - RNA, 22 nt, Human
agggccaggaucacagccaaga

SEQ ID NO: 241273 - RNA, 22 nt, Human
uccagccacuugcacaguuaaa

SEQ ID NO: 241274 - RNA, 22 nt, Human
caggagcuggaucuccuugcgg

SEQ ID NO: 241275 - RNA, 22 nt, Human
agcuacaguugcccucagcagg

SEQ ID NO: 241276 - RNA, 22 nt, Human
ucauaaaugcagugucauaaau

SEQ ID NO: 241277 - RNA, 22 nt, Human
agcauuuaauuacaguuuaauu

SEQ ID NO: 241278 - RNA, 22 nt, Human
acucagagaacuggauuagagg

SEQ ID NO: 241279 - RNA, 22 nt, Human
cugagggugcuauucuugccuu

SEQ ID NO: 241280 - RNA, 22 nt, Human
gagauggccagugccaggacaa

SEQ ID NO: 241281 - RNA, 22 nt, Human
ccaggagggaccgcggcauccc

SEQ ID NO: 241282 - RNA, 22 nt, Human
gcuuccggagccaaaaggcccc

SEQ ID NO: 241283 - RNA, 22 nt, Human
guggguggggagcucucuggag

SEQ ID NO: 241284 - RNA, 22 nt, Human
aggacagcagugcuggcacuug

SEQ ID NO: 241285 - RNA, 22 nt, Human
ucuguuaaaaguggaauaauag

SEQ ID NO: 241286 - RNA, 22 nt, Human
aaagugcaccugcuucuucuug

SEQ ID NO: 241287 - RNA, 22 nt, Human
aaacugcaaugacagguaggag

SEQ ID NO: 241288 - RNA, 22 nt, Human
uacuuuuuaugauaagaacuga

SEQ ID NO: 241289 - RNA, 22 nt, Human
uggcagguggcucuggcauucu

SEQ ID NO: 241290 - RNA, 22 nt, Human
ccucugcacuucaccuuagcuc

SEQ ID NO: 241291 - RNA, 22 nt, Human
auguccagccaaccacuggauu

SEQ ID NO: 241292 - RNA, 22 nt, Human
cugucuuuaguacaaaaaaugu

SEQ ID NO: 241293 - RNA, 22 nt, Human
gcuggcagguaaagccccgggg

SEQ ID NO: 241294 - RNA, 22 nt, Human
uccuggcaaagcaaguuaugaa

SEQ ID NO: 241295 - RNA, 22 nt, Human
agguggcugccuccccgcgcgg

SEQ ID NO: 241296 - RNA, 22 nt, Human
cuuccuggccauugccauggca

SEQ ID NO: 241297 - RNA, 22 nt, Human
gacagcagggaaaguccagacc

SEQ ID NO: 241298 - RNA, 22 nt, Human
gggugacauuaggaagauagac

SEQ ID NO: 241299 - RNA, 22 nt, Human
uuggccuuugucaucaagauca

SEQ ID NO: 241300 - RNA, 22 nt, Human
guggcaguucugugucucuugu

SEQ ID NO: 241301 - RNA, 19 nt, Human
uuagaaacuguugacacug

SEQ ID NO: 241302 - RNA, 22 nt, Human
ccauucauacaauuuuguucua

SEQ ID NO: 241303 - RNA, 22 nt, Human
uugcugggugcuauuaugaaca

SEQ ID NO: 241304 - RNA, 22 nt, Human
uuacaaagcaggucagcugaaa

SEQ ID NO: 241305 - RNA, 22 nt, Human
uguuugcuuacuuguaugcugc

SEQ ID NO: 241306 - RNA, 22 nt, Human
guucugggaagguggaccuguu

SEQ ID NO: 241307 - RNA, 22 nt, Human
aguuguacauugugaacauuca

SEQ ID NO: 241308 - RNA, 22 nt, Human
ggcuucucccauucuucagggg

SEQ ID NO: 241309 - RNA, 23 nt, Human
agcacuuguaucuuacuaaaaug

SEQ ID NO: 241310 - RNA, 22 nt, Human
augaggcuaugaauggggagau

SEQ ID NO: 241311 - RNA, 22 nt, Human
ggccucucugagagcagacguu

SEQ ID NO: 241312 - RNA, 22 nt, Human
gcugcaccagcuccaccagggc

SEQ ID NO: 241313 - RNA, 22 nt, Human
uggugcagauagugguguagua

SEQ ID NO: 241314 - RNA, 22 nt, Human
uucucauggugucuuuauacau

SEQ ID NO: 241315 - RNA, 22 nt, Human
ugcuucucuuuauuuguagguu

SEQ ID NO: 241316 - RNA, 22 nt, Human
cucucugggguuccagacgugg

SEQ ID NO: 241317 - RNA, 22 nt, Human
aaaggcuuuccagcgcgcggac

SEQ ID NO: 241318 - RNA, 22 nt, Human
gagcaagauuaaaaggcugggu

SEQ ID NO: 241319 - RNA, 22 nt, Human
caggcugccgugggguccaggc

SEQ ID NO: 241320 - RNA, 22 nt, Human
aaacugguauucaaauguuugg

SEQ ID NO: 241321 - RNA, 22 nt, Human
cugaggagauccccccagaagu

SEQ ID NO: 241322 - RNA, 22 nt, Human
augaacaugugacucagaccug

SEQ ID NO: 241323 - RNA, 22 nt, Human
ugcugccauggucgcugguguc

SEQ ID NO: 241324 - RNA, 22 nt, Human
guaaaguucuacuagaaucaac

SEQ ID NO: 241325 - RNA, 22 nt, Human
ccugacaguuaauuguccugua

SEQ ID NO: 241326 - RNA, 22 nt, Human
cacagguccuuccugcccuggg

SEQ ID NO: 241327 - RNA, 22 nt, Human
uggguccagugcagcugcgcgu

SEQ ID NO: 241328 - RNA, 22 nt, Human
cgucacuucuuagucuauuuuc

SEQ ID NO: 241329 - RNA, 22 nt, Human
gggcuucuguuccuuucacuug

SEQ ID NO: 241330 - RNA, 22 nt, Human
aaauccaggagaauuuccacuu

SEQ ID NO: 241331 - RNA, 22 nt, Human
aggcaguguggagggcuguugc

SEQ ID NO: 241332 - RNA, 22 nt, Human
uaucauuuuacugugacauuuu

SEQ ID NO: 241333 - RNA, 21 nt, Human
agcugcagcccaaaggccugu

SEQ ID NO: 241334 - RNA, 22 nt, Human
uccugccugcaaucccagcacu

SEQ ID NO: 241335 - RNA, 22 nt, Human
guggcagugaaggucauagcau

SEQ ID NO: 241336 - RNA, 22 nt, Human
gcuagggaucugauuugcuguu

SEQ ID NO: 241337 - RNA, 22 nt, Human
aagaguuucuuuauuaaccuuu

SEQ ID NO: 241338 - RNA, 22 nt, Human
cucuccagagcccuuccggccc

SEQ ID NO: 241339 - RNA, 22 nt, Human
cuuagaauuuugccuacuacaa

SEQ ID NO: 241340 - RNA, 22 nt, Human
uucacaaacuucaugauggcac

SEQ ID NO: 241341 - RNA, 22 nt, Human
cuuagaauaaaagggggcuaua

SEQ ID NO: 241342 - RNA, 23 nt, Human
uaugugcauauguguaagaauac

SEQ ID NO: 241343 - RNA, 22 nt, Human
uuccuggcauuaugggaggcug

SEQ ID NO: 241344 - RNA, 22 nt, Human
ugaaaugcaacaguuauuuuug

SEQ ID NO: 241345 - RNA, 17 nt, Human
gaaaggaggcaacacug

SEQ ID NO: 241346 - RNA, 22 nt, Human
cuccagucuaguagagccugcu

SEQ ID NO: 241347 - RNA, 19 nt, Human
uucuagaacuguucucuca

SEQ ID NO: 241348 - RNA, 22 nt, Human
agugucugcuagguucaucaac

SEQ ID NO: 241349 - RNA, 22 nt, Human
acaaagcuagagaagagaauug

SEQ ID NO: 241350 - RNA, 22 nt, Human
ugcuggaguucgacauugcaaa

SEQ ID NO: 241351 - RNA, 22 nt, Human
ugucacauccauuuugcaagua

SEQ ID NO: 241352 - RNA, 22 nt, Human
aguuuaugucuuuacuucagcu

SEQ ID NO: 241353 - RNA, 22 nt, Human
uccuggccacccgacagaaguc

SEQ ID NO: 241354 - RNA, 22 nt, Human
ugcccucagaauugcucccugc

SEQ ID NO: 241355 - RNA, 22 nt, Human
ucacugggagaugugggaaggg

SEQ ID NO: 241356 - RNA, 22 nt, Human
aggcccuauucaauggggccca

SEQ ID NO: 241357 - RNA, 22 nt, Human
cugccugcaugcugccauagcu

SEQ ID NO: 241358 - RNA, 22 nt, Human
uuuauaaccaaguucugcuugu

SEQ ID NO: 241359 - RNA, 22 nt, Human
ucuucacaugaccuucaugucu

SEQ ID NO: 241360 - RNA, 22 nt, Human
gcugucugccgcaggcugccac

SEQ ID NO: 241361 - RNA, 22 nt, Human
ccagagcuucggggcggcugua

SEQ ID NO: 241362 - RNA, 22 nt, Human
uacuaaauaguuuaauuccuca

SEQ ID NO: 241363 - RNA, 22 nt, Human
gcaaagcaagcugucagccuca

SEQ ID NO: 241364 - RNA, 22 nt, Human
gccuggcucacagagcagccuu

SEQ ID NO: 241365 - RNA, 22 nt, Human
aucaauaucagaucagacagga

SEQ ID NO: 241366 - RNA, 22 nt, Human
aucauucagucucugggacagu

SEQ ID NO: 241367 - RNA, 22 nt, Human
aggaaccagacagaacugaaug

SEQ ID NO: 241368 - RNA, 22 nt, Human
ucauuuacacuucacaaaugga

SEQ ID NO: 241369 - RNA, 22 nt, Human
auggccuggccagagcucugcu

SEQ ID NO: 241370 - RNA, 22 nt, Human
aagagaauacaagcaggcagga

SEQ ID NO: 241371 - RNA, 22 nt, Human
aauauucaaguuauucuuucuu

SEQ ID NO: 241372 - RNA, 22 nt, Human
caugaguuuuuuaguucaugca

SEQ ID NO: 241373 - RNA, 21 nt, Human
uuggccuuugucucagacacu

SEQ ID NO: 241374 - RNA, 22 nt, Human
auaauucagguuuucuggcaca

SEQ ID NO: 241375 - RNA, 22 nt, Human
ccugccaggcgagucuaggcca

SEQ ID NO: 241376 - RNA, 22 nt, Human
ucccacaggagccugaguccca

SEQ ID NO: 241377 - RNA, 22 nt, Human
caucacagggggcuagaagucu

SEQ ID NO: 241378 - RNA, 19 nt, Human
gcaugcagaguaagaaggu

SEQ ID NO: 241379 - RNA, 22 nt, Human
cugaccaggguagaggugagag

SEQ ID NO: 241380 - RNA, 22 nt, Human
caguggccgcggggcugugggu

SEQ ID NO: 241381 - RNA, 22 nt, Human
gucuggcucccacucuuacaaa

SEQ ID NO: 241382 - RNA, 22 nt, Human
cagggacugagauccagacugu

SEQ ID NO: 241383 - RNA, 22 nt, Human
ggugccacugcacucuggccug

SEQ ID NO: 241384 - RNA, 22 nt, Human
cuucaaauucgaggaguagaug

SEQ ID NO: 241385 - RNA, 19 nt, Human
cuggguccuguucuuuuac

SEQ ID NO: 241386 - RNA, 22 nt, Human
acccugggucucaaucauccua

SEQ ID NO: 241387 - RNA, 19 nt, Human
aagucacuugagggcagga

SEQ ID NO: 241388 - RNA, 22 nt, Human
ucagugucuauagauaagguuu

SEQ ID NO: 241389 - RNA, 22 nt, Human
gaggcuuugguuauaaaagauc

SEQ ID NO: 241390 - RNA, 22 nt, Human
uucccucccuggcugccauuuc

SEQ ID NO: 241391 - RNA, 22 nt, Human
gccuuggcuguuggagcuugau

SEQ ID NO: 241392 - RNA, 22 nt, Human
guuauucuaccacuauguacag

SEQ ID NO: 241393 - RNA, 17 nt, Human
gcucuggcacaggauug

SEQ ID NO: 241394 - RNA, 22 nt, Human
auucagaagcaaucacagugag

SEQ ID NO: 241395 - RNA, 22 nt, Human
ggagucugcucccagacaugau

SEQ ID NO: 241396 - RNA, 22 nt, Human
agcaggcuccaggcuggccauc

SEQ ID NO: 241397 - RNA, 20 nt, Human
uugauaggcagcuugucagg

SEQ ID NO: 241398 - RNA, 22 nt, Human
cagugaggugcccagccugccc

SEQ ID NO: 241399 - RNA, 23 nt, Human
gcccagagaggcucaccaggaau

SEQ ID NO: 241400 - RNA, 22 nt, Human
ggcuucucgugccgaagcaaga

SEQ ID NO: 241401 - RNA, 22 nt, Human
ggcugcuccuuuacccuggcag

SEQ ID NO: 241402 - RNA, 22 nt, Human
acugagaacucaagagaaaagg

SEQ ID NO: 241403 - RNA, 22 nt, Human
aggagaggucucccuuccccag

SEQ ID NO: 241404 - RNA, 22 nt, Human
ucuggguggcuucagaggccac

SEQ ID NO: 241405 - RNA, 22 nt, Human
ggauuuacaaguuuaacucuca

SEQ ID NO: 241406 - RNA, 22 nt, Human
uucuuguucugguucuguuagc

SEQ ID NO: 241407 - RNA, 22 nt, Human
aggagggcaggcuggcugccua

SEQ ID NO: 241408 - RNA, 22 nt, Human
cuguacagcaaguucaccuugg

SEQ ID NO: 241409 - RNA, 22 nt, Human
uaggguaguaccaugcugccag

SEQ ID NO: 241410 - RNA, 21 nt, Human
ucuuccuccacagcgugccac

SEQ ID NO: 241411 - RNA, 22 nt, Human
caccagcuucucauugcggguc

SEQ ID NO: 241412 - RNA, 22 nt, Human
auacacauguguaugugcaugc

SEQ ID NO: 241413 - RNA, 22 nt, Human
ucacagacaccuuggccacagu

SEQ ID NO: 241414 - RNA, 23 nt, Human
agagcuuuccaguuucuugguga

SEQ ID NO: 241415 - RNA, 21 nt, Human
agggcagauuagcuguaagag

SEQ ID NO: 241416 - RNA, 22 nt, Human
auuugaagucuucaugauuucu

SEQ ID NO: 241417 - RNA, 22 nt, Human
ggcagcuggccuccucgcccac

SEQ ID NO: 241418 - RNA, 22 nt, Human
gauuucucugcacccacucagg

SEQ ID NO: 241419 - RNA, 22 nt, Human
uggcucagaacuacuucuaguu

SEQ ID NO: 241420 - RNA, 22 nt, Human
uucucuuuugugaugugagaug

SEQ ID NO: 241421 - RNA, 22 nt, Human
caggaacagcaccaggagcuag

SEQ ID NO: 241422 - RNA, 22 nt, Human
agaacacugcuaguauaaucac

SEQ ID NO: 241423 - RNA, 22 nt, Human
uagggaugacgaaaggacagag

SEQ ID NO: 241424 - RNA, 21 nt, Human
caguuacagccaggacaaggc

SEQ ID NO: 241425 - RNA, 22 nt, Human
aggccccaucaggaaggaggcc

SEQ ID NO: 241426 - RNA, 23 nt, Human
uggccucuccccaccuggcagaa

SEQ ID NO: 241427 - RNA, 22 nt, Human
ggcaauuaaaguacugugaaug

SEQ ID NO: 241428 - RNA, 22 nt, Human
caggaaaugggguuuaguuauu

SEQ ID NO: 241429 - RNA, 22 nt, Human
ugccuuccuggagcugaaggcu

SEQ ID NO: 241430 - RNA, 22 nt, Human
cagggcuguggaaaacuggugc

SEQ ID NO: 241431 - RNA, 22 nt, Human
cacauggccuguguggccagac

SEQ ID NO: 241432 - RNA, 22 nt, Human
ccagcugguguuccuuaggacc

SEQ ID NO: 241433 - RNA, 22 nt, Human
auauacacuccacugauacagg

SEQ ID NO: 241434 - RNA, 22 nt, Human
ugcaaaauaaugaacgauuuuu

SEQ ID NO: 241435 - RNA, 22 nt, Human
aagcaaacaggagaagagcugu

SEQ ID NO: 241436 - RNA, 22 nt, Human
aguccugaugcucuggcaggag

SEQ ID NO: 241437 - RNA, 22 nt, Human
uaaagcaaggaauagaguaguc

SEQ ID NO: 241438 - RNA, 23 nt, Human
uccaguagggagucugcuuacuu

SEQ ID NO: 241439 - RNA, 22 nt, Human
ugaccaguuaagucauccuguc

SEQ ID NO: 241440 - RNA, 22 nt, Human
gcagcaguaggaaauaacacag

SEQ ID NO: 241441 - RNA, 22 nt, Human
uucaaaguugcaugacagcuua

SEQ ID NO: 241442 - RNA, 22 nt, Human
caaauucucacccuguuugauu

SEQ ID NO: 241443 - RNA, 22 nt, Human
aguggcagggcuggcugcugca

SEQ ID NO: 241444 - RNA, 22 nt, Human
uguauuuuuagaccuuuagacc

SEQ ID NO: 241445 - RNA, 22 nt, Human
agcagggcuccugaaagccgcg

SEQ ID NO: 241446 - RNA, 22 nt, Human
gacaggugaaacagcaagguaa

SEQ ID NO: 241447 - RNA, 22 nt, Human
cugggagauaugaggaucugga

SEQ ID NO: 241448 - RNA, 22 nt, Human
cugcccaggggagugcugucgg

SEQ ID NO: 241449 - RNA, 22 nt, Human
acagucuuugcaaaguccuggu

SEQ ID NO: 241450 - RNA, 19 nt, Human
ugggccucacaaugcuccc

SEQ ID NO: 241451 - RNA, 22 nt, Human
ugcaauuaauuuacaugcuuaa

SEQ ID NO: 241452 - RNA, 22 nt, Human
cacaggugugugccuuaucaaa

SEQ ID NO: 241453 - RNA, 22 nt, Human
agucuggugcucgcucugcuuc

SEQ ID NO: 241454 - RNA, 22 nt, Human
gagccuggccuccugccucagc

SEQ ID NO: 241455 - RNA, 17 nt, Human
uggcuuuccugacacag

SEQ ID NO: 241456 - RNA, 22 nt, Human
caagcuuuccauuacacacauu

SEQ ID NO: 241457 - RNA, 22 nt, Human
ugcuauuuaacuuuuaugugua

SEQ ID NO: 241458 - RNA, 22 nt, Human
uaauaugggcagucugaauaua

SEQ ID NO: 241459 - RNA, 22 nt, Human
acugggcucccaggcuugucau

SEQ ID NO: 241460 - RNA, 22 nt, Human
ccuuuucuggccaccaagcgcu

SEQ ID NO: 241461 - RNA, 22 nt, Human
augguuuuucaaguauucagaa

SEQ ID NO: 241462 - RNA, 22 nt, Human
cucggaauggaacaacagcggu

SEQ ID NO: 241463 - RNA, 22 nt, Human
auuagugucauguugaggacuu

SEQ ID NO: 241464 - RNA, 22 nt, Human
ucagaggugguaaaggacagca

SEQ ID NO: 241465 - RNA, 22 nt, Human
agcugaaauucacaaggaucca

SEQ ID NO: 241466 - RNA, 22 nt, Human
aguuaucagguguuuucaugga

SEQ ID NO: 241467 - RNA, 22 nt, Human
auuuuaauaagauucccaagua

SEQ ID NO: 241468 - RNA, 22 nt, Human
ccugcugucaguggggcaggca

SEQ ID NO: 241469 - RNA, 22 nt, Human
agauucaaagugaagaacuuaa

SEQ ID NO: 241470 - RNA, 22 nt, Human
aacauuguuuucccuauaucca

SEQ ID NO: 241471 - RNA, 22 nt, Human
uauguacagggauagaacuuga

SEQ ID NO: 241472 - RNA, 21 nt, Human
uuggaauuugggagcuaugug

SEQ ID NO: 241473 - RNA, 22 nt, Human
auauaucaugaguaaaacuuga

SEQ ID NO: 241474 - RNA, 22 nt, Human
acaaauuauagaaaauugagcu

SEQ ID NO: 241475 - RNA, 22 nt, Human
ugcagcagggcccaggcacaga

SEQ ID NO: 241476 - RNA, 23 nt, Human
uuaaguggucaguuuuagacaac

SEQ ID NO: 241477 - RNA, 21 nt, Human
aggcauggaaauggcacacug

SEQ ID NO: 241478 - RNA, 22 nt, Human
uuucaguuaaguggcuaguccc

SEQ ID NO: 241479 - RNA, 22 nt, Human
ucagguggccaaaugggagcgc

SEQ ID NO: 241480 - RNA, 23 nt, Human
aaauaccugaauuagauauuauc

SEQ ID NO: 241481 - RNA, 22 nt, Human
agggggugcccagaugaaggau

SEQ ID NO: 241482 - RNA, 22 nt, Human
ggagugaaagguaaguugagcu

SEQ ID NO: 241483 - RNA, 22 nt, Human
auguaucacagcaauguaguca

SEQ ID NO: 241484 - RNA, 19 nt, Human
ucaggcaguuauucacaaa

SEQ ID NO: 241485 - RNA, 22 nt, Human
caaggcauuguguaagcacuug

SEQ ID NO: 241486 - RNA, 22 nt, Human
aaucaggacccacucuacaguu

SEQ ID NO: 241487 - RNA, 22 nt, Human
acucaaauuugucaacugaagc

SEQ ID NO: 241488 - RNA, 23 nt, Human
cagcuuucagggcuuuagggaag

SEQ ID NO: 241489 - RNA, 22 nt, Human
agugucaacugucuacagggag

SEQ ID NO: 241490 - RNA, 20 nt, Human
aggcagagcgcacuuuuaga

SEQ ID NO: 241491 - RNA, 22 nt, Human
acaaacaucuugaccucagauu

SEQ ID NO: 241492 - RNA, 22 nt, Human
gggcuggaggagauccagaggc

SEQ ID NO: 241493 - RNA, 22 nt, Human
gaaaaugugccuuuggguauug

SEQ ID NO: 241494 - RNA, 22 nt, Human
cagugcugguguaggcugacca

SEQ ID NO: 241495 - RNA, 22 nt, Human
uccuggagggcucacaggcggc

SEQ ID NO: 241496 - RNA, 22 nt, Human
uagaugaacagaaagccacugu

SEQ ID NO: 241497 - RNA, 22 nt, Human
cugguuuaaaauuacugguuaa

SEQ ID NO: 241498 - RNA, 22 nt, Human
cagcucaggcacuggcgcggga

SEQ ID NO: 241499 - RNA, 22 nt, Human
aaaccuagaaggaagggucucu

SEQ ID NO: 241500 - RNA, 22 nt, Human
aucccauuuccuguuuugucaa

SEQ ID NO: 241501 - RNA, 20 nt, Human
uuucugugcccaggucuguu

SEQ ID NO: 241502 - RNA, 22 nt, Human
ugcuggaagaauuccaugcugg

SEQ ID NO: 241503 - RNA, 22 nt, Human
gaauacauguuguuucccugga

SEQ ID NO: 241504 - RNA, 22 nt, Human
aggucgaguuucggggcuacuu

SEQ ID NO: 241505 - RNA, 22 nt, Human
ucugccugaggacugacaccag

SEQ ID NO: 241506 - RNA, 22 nt, Human
gcaucuuuagccucuccguggc

SEQ ID NO: 241507 - RNA, 22 nt, Human
uuuccucuaaacgcauuugcuu

SEQ ID NO: 241508 - RNA, 22 nt, Human
uuuacagaagagaaggaugcuu

SEQ ID NO: 241509 - RNA, 22 nt, Human
cagugagcacggccagagggga

SEQ ID NO: 241510 - RNA, 22 nt, Human
aggcuucccagcugagcucagc

SEQ ID NO: 241511 - RNA, 20 nt, Human
agauggugaaggccagggag

SEQ ID NO: 241512 - RNA, 22 nt, Human
gcaggugaugugaugugagcau

SEQ ID NO: 241513 - RNA, 22 nt, Human
cugccuguuccugaucauucua

SEQ ID NO: 241514 - RNA, 22 nt, Human
aaggagaauuuggcuugugaug

SEQ ID NO: 241515 - RNA, 22 nt, Human
acuggggcagugggcagugguu

SEQ ID NO: 241516 - RNA, 23 nt, Human
gccagccagaauuucuccacugu

SEQ ID NO: 241517 - RNA, 22 nt, Human
uuuuguguugccauguuaagca

SEQ ID NO: 241518 - RNA, 22 nt, Human
cagcagguuaacagaggcuggu

SEQ ID NO: 241519 - RNA, 23 nt, Human
agacagcuuagaguuugccucuc

SEQ ID NO: 241520 - RNA, 22 nt, Human
gcccugugagucaugcggcaga

SEQ ID NO: 241521 - RNA, 22 nt, Human
agugucacagacccaaucagga

SEQ ID NO: 241522 - RNA, 22 nt, Human
uucuuuugcaagacuauugauu

SEQ ID NO: 241523 - RNA, 22 nt, Human
cccagcuccagagccagaaaca

SEQ ID NO: 241524 - RNA, 22 nt, Human
agcugggcaccccgcugcgucu

SEQ ID NO: 241525 - RNA, 22 nt, Human
uggcucucugggagguccuggc

SEQ ID NO: 241526 - RNA, 22 nt, Human
auguuuguagguaagugacacu

SEQ ID NO: 241527 - RNA, 22 nt, Human
ccaugccuggacuccacucuca

SEQ ID NO: 241528 - RNA, 22 nt, Human
ucauaaagugaaggaugauggg

SEQ ID NO: 241529 - RNA, 22 nt, Human
uuagaaaaaacgucuucuagug

SEQ ID NO: 241530 - RNA, 22 nt, Human
ucagcaggcucugguugaccau

SEQ ID NO: 241531 - RNA, 22 nt, Human
aagggcaggcagagaucauaua

SEQ ID NO: 241532 - RNA, 22 nt, Human
acugucaagagauucaaauuca

SEQ ID NO: 241533 - RNA, 22 nt, Human
ucugacaugagggcuguggaga

SEQ ID NO: 241534 - RNA, 22 nt, Human
agugcugggauuacaggcauaa

SEQ ID NO: 241535 - RNA, 22 nt, Human
agugcugggauugcaggcauga

SEQ ID NO: 241536 - RNA, 22 nt, Human
gcagguggaucaccacgucagg

SEQ ID NO: 241537 - RNA, 17 nt, Human
uuucaagguuacguucc

SEQ ID NO: 241538 - RNA, 22 nt, Human
aaggaggaauucugaguucaug

SEQ ID NO: 241539 - RNA, 22 nt, Human
agccauguuaaauggacuugau

SEQ ID NO: 241540 - RNA, 22 nt, Human
aaggggccucacagaugggcuu

SEQ ID NO: 241541 - RNA, 22 nt, Human
acacuguaaacaucucaagcac

SEQ ID NO: 241542 - RNA, 20 nt, Human
uuagaaagagcgugauaaga

SEQ ID NO: 241543 - RNA, 22 nt, Human
ccugagcugaacuaagcaguuu

SEQ ID NO: 241544 - RNA, 22 nt, Human
accagccagccacaguggcucc

SEQ ID NO: 241545 - RNA, 18 nt, Human
auggcagaugauaagugc

SEQ ID NO: 241546 - RNA, 22 nt, Human
uucaaagcagagggucaauaca

SEQ ID NO: 241547 - RNA, 22 nt, Human
auguucuucuaucuuuauuaaa

SEQ ID NO: 241548 - RNA, 22 nt, Human
cugggccucacacccaccaaau

SEQ ID NO: 241549 - RNA, 22 nt, Human
cagaacuguuauaacagcuguu

SEQ ID NO: 241550 - RNA, 22 nt, Human
aacagcuuuuuuggucagcauu

SEQ ID NO: 241551 - RNA, 22 nt, Human
gagcaacagggcgaggagaacu

SEQ ID NO: 241552 - RNA, 22 nt, Human
ucaucccucugccaggcccagg

SEQ ID NO: 241553 - RNA, 22 nt, Human
ccaguggaaauguggucaggau

SEQ ID NO: 241554 - RNA, 22 nt, Human
uacaagcucgggcagcucauua

SEQ ID NO: 241555 - RNA, 22 nt, Human
aacuaguuuuagcucuagcaac

SEQ ID NO: 241556 - RNA, 22 nt, Human
acauucuuaacaguuaaaaacu

SEQ ID NO: 241557 - RNA, 17 nt, Human
acacagggagagggagc

SEQ ID NO: 241558 - RNA, 22 nt, Human
uucucaggguuugugcaggcuu

SEQ ID NO: 241559 - RNA, 22 nt, Human
gcagggcacagacagugccaag

SEQ ID NO: 241560 - RNA, 22 nt, Human
uuggaacaggauucaauuaaag

SEQ ID NO: 241561 - RNA, 22 nt, Human
uggagcaggugcucaggguaau

SEQ ID NO: 241562 - RNA, 22 nt, Human
gcccaggaaagauagggccuca

SEQ ID NO: 241563 - RNA, 22 nt, Human
uggcagggaauacagauguuua

SEQ ID NO: 241564 - RNA, 22 nt, Human
accaggcccauguggauuacua

SEQ ID NO: 241565 - RNA, 22 nt, Human
uccuugggucagugagugaggu

SEQ ID NO: 241566 - RNA, 21 nt, Human
uccaaaucccauucuguaguc

SEQ ID NO: 241567 - RNA, 22 nt, Human
agccuggcggucgucggucagg

SEQ ID NO: 241568 - RNA, 22 nt, Human
uugcuuuauucacaucuauauu

SEQ ID NO: 241569 - RNA, 17 nt, Human
uuccuccucaccauguu

SEQ ID NO: 241570 - RNA, 22 nt, Human
ugccucugugggccuuccuggc

SEQ ID NO: 241571 - RNA, 22 nt, Human
aagaggagacuucagcaacuug

SEQ ID NO: 241572 - RNA, 22 nt, Human
gaagugaagguuacucuagauu

SEQ ID NO: 241573 - RNA, 22 nt, Human
uggccugcccagagcagcucug

SEQ ID NO: 241574 - RNA, 22 nt, Human
cugaggcuuggaggggucuggu

SEQ ID NO: 241575 - RNA, 22 nt, Human
gaauuugaaaagugaugggaau

SEQ ID NO: 241576 - RNA, 22 nt, Human
ugcccaggcuggagugcagagg

SEQ ID NO: 241577 - RNA, 22 nt, Human
cccagggagguagcaggagaaa

SEQ ID NO: 241578 - RNA, 22 nt, Human
caggcacaugggagcucaucau

SEQ ID NO: 241579 - RNA, 22 nt, Human
augagaaaguuaaucaucauga

SEQ ID NO: 241580 - RNA, 22 nt, Human
acccucugagaggcacacuuug

SEQ ID NO: 241581 - RNA, 22 nt, Human
cuuggcaggguggaggaugcag

SEQ ID NO: 241582 - RNA, 22 nt, Human
ccuguccuccaagagcacaucu

SEQ ID NO: 241583 - RNA, 21 nt, Human
uccuuccuugagguccuuucc

SEQ ID NO: 241584 - RNA, 22 nt, Human
ccaggcucacagcaucccagga

SEQ ID NO: 241585 - RNA, 22 nt, Human
auccuucuccagucguauuuuu

SEQ ID NO: 241586 - RNA, 22 nt, Human
gcugaggccaguuuaaugagga

SEQ ID NO: 241587 - RNA, 22 nt, Human
aucaaaguaucucaauauggua

SEQ ID NO: 241588 - RNA, 22 nt, Human
guccugguuuucacagaccuuu

SEQ ID NO: 241589 - RNA, 22 nt, Human
ggacaggugcaaagggcacaug

SEQ ID NO: 241590 - RNA, 22 nt, Human
ucaggaaggcaaauugcaugau

SEQ ID NO: 241591 - RNA, 22 nt, Human
uccugggccuguacuccauccg

SEQ ID NO: 241592 - RNA, 22 nt, Human
cauaaucccaggcuugcauuca

SEQ ID NO: 241593 - RNA, 22 nt, Human
ucagggaaucagacucugcagc

SEQ ID NO: 241594 - RNA, 22 nt, Human
gauagaaagguguugaaaucca

SEQ ID NO: 241595 - RNA, 22 nt, Human
uuuauguaguuacggacuauca

SEQ ID NO: 241596 - RNA, 22 nt, Human
ggcaggcauggggucugccauu

SEQ ID NO: 241597 - RNA, 22 nt, Human
ugaguggacaccugcuucuuua

SEQ ID NO: 241598 - RNA, 22 nt, Human
uuuaaauguucaugauacugaa

SEQ ID NO: 241599 - RNA, 22 nt, Human
cugaggcacuaacaaggacaag

SEQ ID NO: 241600 - RNA, 22 nt, Human
cccagcccugaccuauuggaaa

SEQ ID NO: 241601 - RNA, 22 nt, Human
ugaacuuuuauuugaugacagg

SEQ ID NO: 241602 - RNA, 22 nt, Human
uuccugguuggauucugauuaa

SEQ ID NO: 241603 - RNA, 22 nt, Human
gcaggcugaguugggaaaccaa

SEQ ID NO: 241604 - RNA, 22 nt, Human
gcugggcagcugaggccucuca

SEQ ID NO: 241605 - RNA, 22 nt, Human
ugcaaggguagaagugauggca

SEQ ID NO: 241606 - RNA, 22 nt, Human
uguggcagcugcugcaggagcu

SEQ ID NO: 241607 - RNA, 22 nt, Human
agccuccacagaugcaaagggc

SEQ ID NO: 241608 - RNA, 22 nt, Human
uucuuuuaaugucuggcuuuca

SEQ ID NO: 241609 - RNA, 22 nt, Human
agaaugcaucuaaaagcagaga

SEQ ID NO: 241610 - RNA, 22 nt, Human
gucccaggcaggccacuggcag

SEQ ID NO: 241611 - RNA, 22 nt, Human
cccuccaugagugugcugcugg

SEQ ID NO: 241612 - RNA, 22 nt, Human
uuuacaacuuucuguucuguau

SEQ ID NO: 241613 - RNA, 22 nt, Human
uuccuucugaagccuuuguguu

SEQ ID NO: 241614 - RNA, 22 nt, Human
cagaaaccucccugaauauuuu

SEQ ID NO: 241615 - RNA, 22 nt, Human
ccaggcacuucaucauuagggu

SEQ ID NO: 241616 - RNA, 22 nt, Human
auuucuguuugcuacuauaagu

SEQ ID NO: 241617 - RNA, 22 nt, Human
ucacugcucugaaaguacaggg

SEQ ID NO: 241618 - RNA, 22 nt, Human
ucauaaagcucuuccaaaugua

SEQ ID NO: 241619 - RNA, 22 nt, Human
uggcugaggucuggggcuucug

SEQ ID NO: 241620 - RNA, 22 nt, Human
ucaggugugggcagagaaacca

SEQ ID NO: 241621 - RNA, 22 nt, Human
auuuccauuaucaugacaaauu

SEQ ID NO: 241622 - RNA, 22 nt, Human
cugggaaauugacacugauaaa

SEQ ID NO: 241623 - RNA, 22 nt, Human
gcuucucuucgccuagguccuu

SEQ ID NO: 241624 - RNA, 22 nt, Human
agccaugugucuuuauucuguu

SEQ ID NO: 241625 - RNA, 22 nt, Human
caggaaauugcaacagucugag

SEQ ID NO: 241626 - RNA, 22 nt, Human
ucccugccaaugauuggagcaa

SEQ ID NO: 241627 - RNA, 22 nt, Human
agaaaguucacugguauauuuu

SEQ ID NO: 241628 - RNA, 22 nt, Human
acuaaaguccuguuguagcaua

SEQ ID NO: 241629 - RNA, 22 nt, Human
caaguuuuagcaaguggaaagg

SEQ ID NO: 241630 - RNA, 22 nt, Human
gagggaaagguuaauacaugau

SEQ ID NO: 241631 - RNA, 22 nt, Human
aaacuggauuaccaggcuggug

SEQ ID NO: 241632 - RNA, 20 nt, Human
uauuuguauuugggaaaguu

SEQ ID NO: 241633 - RNA, 22 nt, Human
ucagaaggaagaagucauggga

SEQ ID NO: 241634 - RNA, 22 nt, Human
aaguuacauauucuugggcuau

SEQ ID NO: 241635 - RNA, 22 nt, Human
uccugugucucagcgugaagca

SEQ ID NO: 241636 - RNA, 22 nt, Human
uucuucugccucccaccugaua

SEQ ID NO: 241637 - RNA, 17 nt, Human
cugaggggagugcugug

SEQ ID NO: 241638 - RNA, 22 nt, Human
agaggaagccauugcuuacuga

SEQ ID NO: 241639 - RNA, 22 nt, Human
gggggaagacugggcuagugau

SEQ ID NO: 241640 - RNA, 22 nt, Human
uugcaaggagccacucugccug

SEQ ID NO: 241641 - RNA, 22 nt, Human
ugcucccaaaccugacaggcuc

SEQ ID NO: 241642 - RNA, 22 nt, Human
ugcucagggacaauggagaggg

SEQ ID NO: 241643 - RNA, 21 nt, Human
aucuggaagaacugguaagug

SEQ ID NO: 241644 - RNA, 22 nt, Human
gaaaucaauuucuugguugaua

SEQ ID NO: 241645 - RNA, 22 nt, Human
gcaguggggcgcugggaguugg

SEQ ID NO: 241646 - RNA, 19 nt, Human
cucugggcaagucacuuaa

SEQ ID NO: 241647 - RNA, 22 nt, Human
acccagaggcggagguugcagu

SEQ ID NO: 241648 - RNA, 22 nt, Human
accuacauguuccacauaguug

SEQ ID NO: 241649 - RNA, 20 nt, Human
ugcagcugguuucacaggga

SEQ ID NO: 241650 - RNA, 22 nt, Human
ucugaaauaggaaagcaaaugg

SEQ ID NO: 241651 - RNA, 22 nt, Human
gaagacacucugcagaguuauc

SEQ ID NO: 241652 - RNA, 22 nt, Human
ucccuggguccugcuugcucuc

SEQ ID NO: 241653 - RNA, 22 nt, Human
aaguccagcucuaaauaucuga

SEQ ID NO: 241654 - RNA, 22 nt, Human
gaguuuuaaccucagcucucug

SEQ ID NO: 241655 - RNA, 22 nt, Human
uccugugauggcuugcgaugug

SEQ ID NO: 241656 - RNA, 22 nt, Human
guccagccugaagagugggggc

SEQ ID NO: 241657 - RNA, 22 nt, Human
uuucaacaucaccuagcaguuc

SEQ ID NO: 241658 - RNA, 22 nt, Human
ugcagggcaguuuguuucggca

SEQ ID NO: 241659 - RNA, 22 nt, Human
ucuucucucauguaggagggaa

SEQ ID NO: 241660 - RNA, 22 nt, Human
agacauuuauguuucucuagga

SEQ ID NO: 241661 - RNA, 22 nt, Human
ugauuuacacaccuaugauuua

SEQ ID NO: 241662 - RNA, 22 nt, Human
aacuucugggcuguccaaaacu

SEQ ID NO: 241663 - RNA, 22 nt, Human
ucugaagauuaccagcuaaaug

SEQ ID NO: 241664 - RNA, 22 nt, Human
gggcucuguggaugugagagcu

SEQ ID NO: 241665 - RNA, 22 nt, Human
gugcaguguguaauccaggaac

SEQ ID NO: 241666 - RNA, 22 nt, Human
acacaugcgauagagagguagg

SEQ ID NO: 241667 - RNA, 22 nt, Human
ugucuccaaaacaaucucagau

SEQ ID NO: 241668 - RNA, 22 nt, Human
uuaucuguuguuuuaguacaau

SEQ ID NO: 241669 - RNA, 22 nt, Human
aguggcugauuacaaacugagu

SEQ ID NO: 241670 - RNA, 22 nt, Human
ccacagcaccgcugccaguccc

SEQ ID NO: 241671 - RNA, 22 nt, Human
ucuccccagacccuggacauaa

SEQ ID NO: 241672 - RNA, 22 nt, Human
aaagugguuuaugauauuccaa

SEQ ID NO: 241673 - RNA, 19 nt, Human
ucugggcagggccagcacc

SEQ ID NO: 241674 - RNA, 22 nt, Human
ugggaccugcccuggccccauc

SEQ ID NO: 241675 - RNA, 22 nt, Human
uuuagcaaaaaagcucugcgua

SEQ ID NO: 241676 - RNA, 22 nt, Human
uguucaguuugcuaucauaauc

SEQ ID NO: 241677 - RNA, 22 nt, Human
ugagcagucagacaagcaucac

SEQ ID NO: 241678 - RNA, 17 nt, Human
uuccaaggagcauuuga

SEQ ID NO: 241679 - RNA, 22 nt, Human
gcacugaaugcuuuuacuguaa

SEQ ID NO: 241680 - RNA, 22 nt, Human
auuacaugagagaauguaaaua

SEQ ID NO: 241681 - RNA, 22 nt, Human
cagcugagaaauggggaaaggg

SEQ ID NO: 241682 - RNA, 22 nt, Human
uuaauuacuaagcacaaugcaa

SEQ ID NO: 241683 - RNA, 22 nt, Human
uagggcagcugcaucaggcacu

SEQ ID NO: 241684 - RNA, 22 nt, Human
uuagaagugaaauagcuguaca

SEQ ID NO: 241685 - RNA, 22 nt, Human
ugacccauuugcuuuuccugua

SEQ ID NO: 241686 - RNA, 22 nt, Human
cacugcaguuccccagugcgca

SEQ ID NO: 241687 - RNA, 22 nt, Human
aagagagggguugcauggaaau

SEQ ID NO: 241688 - RNA, 22 nt, Human
uccagcccgagggcgcugauga

SEQ ID NO: 241689 - RNA, 22 nt, Human
uaguuaaagcccuaaauugaua

SEQ ID NO: 241690 - RNA, 22 nt, Human
caggagaugacagggaagaacc

SEQ ID NO: 241691 - RNA, 20 nt, Human
ucguuuauuugaaauugcuc

SEQ ID NO: 241692 - RNA, 22 nt, Human
gccacuguccugugccugugcu

SEQ ID NO: 241693 - RNA, 22 nt, Human
agucuauugccuaacagagagg

SEQ ID NO: 241694 - RNA, 22 nt, Human
auaaagcaauagauuguguaau

SEQ ID NO: 241695 - RNA, 22 nt, Human
cuuagaagugggcuauaauuag

SEQ ID NO: 241696 - RNA, 22 nt, Human
ggucagugcgauuucccacucc

SEQ ID NO: 241697 - RNA, 22 nt, Human
uaguccacagacucuacagcau

SEQ ID NO: 241698 - RNA, 22 nt, Human
ugagaugaauaacuccugcuaa

SEQ ID NO: 241699 - RNA, 22 nt, Human
ggccugagcagacagcaugaug

SEQ ID NO: 241700 - RNA, 22 nt, Human
agcuuuauuugucauucacggc

SEQ ID NO: 241701 - RNA, 22 nt, Human
ugagcccuaagggucaagcagg

SEQ ID NO: 241702 - RNA, 22 nt, Human
ugccuugggagccagcaugcca

SEQ ID NO: 241703 - RNA, 22 nt, Human
ccagcuuuagguugccugccag

SEQ ID NO: 241704 - RNA, 22 nt, Human
aaggcagcuucaccacagcauu

SEQ ID NO: 241705 - RNA, 22 nt, Human
ugcauggaggaagaugaaugca

SEQ ID NO: 241706 - RNA, 20 nt, Human
acaugcaguggucauuucag

SEQ ID NO: 241707 - RNA, 22 nt, Human
gugcagcugcaggagucagguc

SEQ ID NO: 241708 - RNA, 22 nt, Human
augcuuuuaacuccuuuauccc

SEQ ID NO: 241709 - RNA, 22 nt, Human
uagccauuuuuauuaaugcugg

SEQ ID NO: 241710 - RNA, 22 nt, Human
ggcacagggaggcccuggugug

SEQ ID NO: 241711 - RNA, 22 nt, Human
cugggggucgcgccucugggca

SEQ ID NO: 241712 - RNA, 22 nt, Human
agugugagcuaauagcagagcc

SEQ ID NO: 241713 - RNA, 22 nt, Human
ugcuacauaccacgaugcagua

SEQ ID NO: 241714 - RNA, 22 nt, Human
gcaaucaaugauuuauauuugu

SEQ ID NO: 241715 - RNA, 22 nt, Human
auguuacaaauccuacagguag

SEQ ID NO: 241716 - RNA, 22 nt, Human
uuacacaaaaauaagauauggc

SEQ ID NO: 241717 - RNA, 22 nt, Human
uuaucagaguccccaaaagaaa

SEQ ID NO: 241718 - RNA, 22 nt, Human
cacaugagagcccccaagagca

SEQ ID NO: 241719 - RNA, 22 nt, Human
gcuggcucuuuuugccgggcuc

SEQ ID NO: 241720 - RNA, 22 nt, Human
caugcuuuaccaaagcagugau

SEQ ID NO: 241721 - RNA, 23 nt, Human
uuuguacauugaggaggcagaau

SEQ ID NO: 241722 - RNA, 22 nt, Human
gggcccuggcuuuccuguucuu

SEQ ID NO: 241723 - RNA, 19 nt, Human
acaguuugggaaaugagca

SEQ ID NO: 241724 - RNA, 22 nt, Human
ugcuggguuaccuaagccuaaa

SEQ ID NO: 241725 - RNA, 22 nt, Human
uagaaaucagcaggcauaugua

SEQ ID NO: 241726 - RNA, 22 nt, Human
gcaggaagaugagcucagguaa

SEQ ID NO: 241727 - RNA, 22 nt, Human
gcauagucaguaggauucucaa

SEQ ID NO: 241728 - RNA, 22 nt, Human
agacagacagagaauuuaaaua

SEQ ID NO: 241729 - RNA, 22 nt, Human
ccaggagcagauauggacauaa

SEQ ID NO: 241730 - RNA, 22 nt, Human
cucugugccucaguuuucuucu

SEQ ID NO: 241731 - RNA, 22 nt, Human
cacaggaaguggucagugccag

SEQ ID NO: 241732 - RNA, 22 nt, Human
ugucuuuagagucacaaaacca

SEQ ID NO: 241733 - RNA, 22 nt, Human
uuuucauuguuccucgagcauu

SEQ ID NO: 241734 - RNA, 20 nt, Human
ucaaccuacugugcucaagu

SEQ ID NO: 241735 - RNA, 22 nt, Human
cauaauuagucauguuaugcau

SEQ ID NO: 241736 - RNA, 22 nt, Human
ccuguucauuuuuugacucugc

SEQ ID NO: 241737 - RNA, 22 nt, Human
cccagcuugcccaggacugagg

SEQ ID NO: 241738 - RNA, 22 nt, Human
uccugggaggcaggaccccuuu

SEQ ID NO: 241739 - RNA, 22 nt, Human
ucuucccagaccuuacauguga

SEQ ID NO: 241740 - RNA, 22 nt, Human
ggcuugcuucaccuacccccag

SEQ ID NO: 241741 - RNA, 22 nt, Human
gucauuuaggucugucagaaau

SEQ ID NO: 241742 - RNA, 22 nt, Human
acuaacuucugagaaccaauug

SEQ ID NO: 241743 - RNA, 22 nt, Human
aaagccuugagauccuauaguu

SEQ ID NO: 241744 - RNA, 22 nt, Human
ucugcaggaggcuggcugcagg

SEQ ID NO: 241745 - RNA, 22 nt, Human
agguccagccugcccucucucc

SEQ ID NO: 241746 - RNA, 22 nt, Human
cucaggagcuuccucagcccau

SEQ ID NO: 241747 - RNA, 22 nt, Human
uugcacagaugagggugaugcu

SEQ ID NO: 241748 - RNA, 22 nt, Human
gguguccugggcaggcagcuga

SEQ ID NO: 241749 - RNA, 23 nt, Human
cuuuuaacuugaucugagaccag

SEQ ID NO: 241750 - RNA, 22 nt, Human
uucaucuugauggcuuccuaau

SEQ ID NO: 241751 - RNA, 22 nt, Human
cagaagggcagcacugggaagg

SEQ ID NO: 241752 - RNA, 22 nt, Human
ugggcucugugccagguuggug

SEQ ID NO: 241753 - RNA, 22 nt, Human
aaagagcaagcugagauuugaa

SEQ ID NO: 241754 - RNA, 22 nt, Human
guagccuagaggucacgucuuc

SEQ ID NO: 241755 - RNA, 19 nt, Human
acacauuugcacaauccac

SEQ ID NO: 241756 - RNA, 18 nt, Human
aguggucuguuauaucau

SEQ ID NO: 241757 - RNA, 19 nt, Human
uaacuggugccuucaguca

SEQ ID NO: 241758 - RNA, 22 nt, Human
cagagccuuccuagcagacucu

SEQ ID NO: 241759 - RNA, 22 nt, Human
auuagcugugacgaggcauugu

SEQ ID NO: 241760 - RNA, 22 nt, Human
uucaugcuuuuaccgcuguuaa

SEQ ID NO: 241761 - RNA, 22 nt, Human
uccucaggaucuaggagugcuu

SEQ ID NO: 241762 - RNA, 22 nt, Human
caggauggccccggggcugugc

SEQ ID NO: 241763 - RNA, 22 nt, Human
augcaaaucuuaaguaugugug

SEQ ID NO: 241764 - RNA, 22 nt, Human
uacaggcugaacucaaugauga

SEQ ID NO: 241765 - RNA, 22 nt, Human
aguggaauguagaaaaaagaug

SEQ ID NO: 241766 - RNA, 22 nt, Human
aaggccaggccagaugacaguc

SEQ ID NO: 241767 - RNA, 22 nt, Human
gaagcagcuagcccacuaguca

SEQ ID NO: 241768 - RNA, 22 nt, Human
uccugucugcucacagagcugg

SEQ ID NO: 241769 - RNA, 22 nt, Human
gcugggacugagacagugaccu

SEQ ID NO: 241770 - RNA, 22 nt, Human
gaaggcuuuuuggguaauugua

SEQ ID NO: 241771 - RNA, 19 nt, Human
ggcaccuuggcuaugccug

SEQ ID NO: 241772 - RNA, 22 nt, Human
uacagugcuugguaucuaguaa

SEQ ID NO: 241773 - RNA, 22 nt, Human
caugcuuuucaaucuaucuuaa

SEQ ID NO: 241774 - RNA, 22 nt, Human
cagcccugggucccugcccugg

SEQ ID NO: 241775 - RNA, 22 nt, Human
ucaagacagugugauacuggcc

SEQ ID NO: 241776 - RNA, 22 nt, Human
cuggcugccuggagugagggag

SEQ ID NO: 241777 - RNA, 22 nt, Human
agucacucugcuacaugacagc

SEQ ID NO: 241778 - RNA, 20 nt, Human
uagauuucauacuucucuuu

SEQ ID NO: 241779 - RNA, 22 nt, Human
acaucuucccacacuugcaaaa

SEQ ID NO: 241780 - RNA, 22 nt, Human
gaggcccagcauucagggcagg

SEQ ID NO: 241781 - RNA, 22 nt, Human
cagggcagagggaaacuccuuu

SEQ ID NO: 241782 - RNA, 22 nt, Human
ucagaaucucuggaggcuuggc

SEQ ID NO: 241783 - RNA, 22 nt, Human
ucucccaggucauacacagaga

SEQ ID NO: 241784 - RNA, 22 nt, Human
agggcugccauuucuggcccaa

SEQ ID NO: 241785 - RNA, 22 nt, Human
gcuagccugcaguggcuauggu

SEQ ID NO: 241786 - RNA, 22 nt, Human
aguguauuaaguuaugaaguua

SEQ ID NO: 241787 - RNA, 22 nt, Human
cugggccaguuaugucucaucu

SEQ ID NO: 241788 - RNA, 22 nt, Human
gccucugcaucaucacuccagc

SEQ ID NO: 241789 - RNA, 20 nt, Human
gucugcccaggccaccacgg

SEQ ID NO: 241790 - RNA, 22 nt, Human
aagcauuuuaguaaugaacuug

SEQ ID NO: 241791 - RNA, 22 nt, Human
aagucacagcuaaauagcuaag

SEQ ID NO: 241792 - RNA, 22 nt, Human
uguccccaagguucagcccaca

SEQ ID NO: 241793 - RNA, 22 nt, Human
gggcugaggaacauauuuuguu

SEQ ID NO: 241794 - RNA, 22 nt, Human
cuauugaggacauaaggacucu

SEQ ID NO: 241795 - RNA, 23 nt, Human
agcagucagggugguaagccauc

SEQ ID NO: 241796 - RNA, 22 nt, Human
cuggagcucuguguguuccuga

SEQ ID NO: 241797 - RNA, 22 nt, Human
ccaggcuagagugcaauggcau

SEQ ID NO: 241798 - RNA, 21 nt, Human
agccugggaggcggagguugc

SEQ ID NO: 241799 - RNA, 19 nt, Human
ggacagucucagccucaug

SEQ ID NO: 241800 - RNA, 22 nt, Human
cuggcagcaguuaugaaacaau

SEQ ID NO: 241801 - RNA, 22 nt, Human
auuuuccuuguggguuagcgaa

SEQ ID NO: 241802 - RNA, 22 nt, Human
gaauuucagaucagagaccauu

SEQ ID NO: 241803 - RNA, 22 nt, Human
ucucuggggauggaccugggag

SEQ ID NO: 241804 - RNA, 22 nt, Human
ccagcccuccuccaucagagga

SEQ ID NO: 241805 - RNA, 22 nt, Human
uccuggggcucugagcgagaca

SEQ ID NO: 241806 - RNA, 22 nt, Human
ccaggaagacacaugcucaucc

SEQ ID NO: 241807 - RNA, 22 nt, Human
gaggaagaaucaggguggugag

SEQ ID NO: 241808 - RNA, 22 nt, Human
ugagguaggugucgagagaggu

SEQ ID NO: 241809 - RNA, 18 nt, Human
agcugguggggagacagc

SEQ ID NO: 241810 - RNA, 22 nt, Human
acuuugcacuaaguuacucauu

SEQ ID NO: 241811 - RNA, 22 nt, Human
aaugccuuauaggcugaaaauu

SEQ ID NO: 241812 - RNA, 22 nt, Human
accaggcuggagugcaguggcg

SEQ ID NO: 241813 - RNA, 23 nt, Human
agaauuguaaauagaauauaccu

SEQ ID NO: 241814 - RNA, 22 nt, Human
cauuucaaugccuucaacauag

SEQ ID NO: 241815 - RNA, 22 nt, Human
accugcaggcacaggugugcgc

SEQ ID NO: 241816 - RNA, 19 nt, Human
ccuuucagaacagaagcca

SEQ ID NO: 241817 - RNA, 23 nt, Human
ccaucaggccuccguguccagcc

SEQ ID NO: 241818 - RNA, 17 nt, Human
uuccugugguuugaucu

SEQ ID NO: 241819 - RNA, 19 nt, Human
acuuccugcccgcuccuuu

SEQ ID NO: 241820 - RNA, 22 nt, Human
gcagguguccugggcuggcagu

SEQ ID NO: 241821 - RNA, 22 nt, Human
aggcuucugucuuuaggaguug

SEQ ID NO: 241822 - RNA, 22 nt, Human
auaagguaaggguauugucaga

SEQ ID NO: 241823 - RNA, 22 nt, Human
cagcccugugcuaagcacccuc

SEQ ID NO: 241824 - RNA, 22 nt, Human
ggagguggagcuggaaguucca

SEQ ID NO: 241825 - RNA, 22 nt, Human
uucuccaguuucucccuucagu

SEQ ID NO: 241826 - RNA, 22 nt, Human
ccugggcucaccaugccuugga

SEQ ID NO: 241827 - RNA, 22 nt, Human
gggcucuggaaaugggagcucc

SEQ ID NO: 241828 - RNA, 22 nt, Human
uggcucagugacauuccuccca

SEQ ID NO: 241829 - RNA, 22 nt, Human
uauuucagucacuucuucucug

SEQ ID NO: 241830 - RNA, 22 nt, Human
uggguuaacaguuuauaccaga

SEQ ID NO: 241831 - RNA, 22 nt, Human
caaaaggcaggggaaagagugc

SEQ ID NO: 241832 - RNA, 22 nt, Human
uauuugaagggagaaagugcca

SEQ ID NO: 241833 - RNA, 22 nt, Human
uucuaagaaauggaaaacgauu

SEQ ID NO: 241834 - RNA, 22 nt, Human
ggaaggaaguaaaugaugcuau

SEQ ID NO: 241835 - RNA, 22 nt, Human
gccuccggagucacagugucuu

SEQ ID NO: 241836 - RNA, 20 nt, Human
uguugauuggugucaucuca

SEQ ID NO: 241837 - RNA, 22 nt, Human
caaggcuugaauucugaugggu

SEQ ID NO: 241838 - RNA, 22 nt, Human
cagugggauugggauuggaacc

SEQ ID NO: 241839 - RNA, 22 nt, Human
ggaggcauuauggggaagacuu

SEQ ID NO: 241840 - RNA, 22 nt, Human
auccuucuucugcuagugucua

SEQ ID NO: 241841 - RNA, 22 nt, Human
aaagcauggcaugaagaacaug

SEQ ID NO: 241842 - RNA, 22 nt, Human
cuccagugagugagcaggcgac

SEQ ID NO: 241843 - RNA, 22 nt, Human
aagaguuuccaugcucugugcu

SEQ ID NO: 241844 - RNA, 22 nt, Human
agaaaaagaaaguggauuuguc

SEQ ID NO: 241845 - RNA, 22 nt, Human
cagagccacagccuccagauuu

SEQ ID NO: 241846 - RNA, 18 nt, Human
ucaggagacacagacgca

SEQ ID NO: 241847 - RNA, 20 nt, Human
ccugucaucccagcauuuug

SEQ ID NO: 241848 - RNA, 22 nt, Human
ugggcugaaaugcuguggacua

SEQ ID NO: 241849 - RNA, 22 nt, Human
cggcacagccgggcaaggcugg

SEQ ID NO: 241850 - RNA, 19 nt, Human
ccagugucuagcgcacagc

SEQ ID NO: 241851 - RNA, 22 nt, Human
uuucuuauacuauauugucauc

SEQ ID NO: 241852 - RNA, 18 nt, Human
agaauuauucuuguccuc

SEQ ID NO: 241853 - RNA, 22 nt, Human
guccaucuguaggagggacaca

SEQ ID NO: 241854 - RNA, 22 nt, Human
cagaaaaccugacucuagaacu

SEQ ID NO: 241855 - RNA, 22 nt, Human
cagaaaucuccaugucagacau

SEQ ID NO: 241856 - RNA, 22 nt, Human
cuacauuuguucuauagcuuuu

SEQ ID NO: 241857 - RNA, 22 nt, Human
aaaaucuugacuguuuuuagaa

SEQ ID NO: 241858 - RNA, 22 nt, Human
ggauuucuuccuuccucagaag

SEQ ID NO: 241859 - RNA, 22 nt, Human
ucaagaaacugugcuacagagu

SEQ ID NO: 241860 - RNA, 22 nt, Human
accaggcagcacuuuccuugca

SEQ ID NO: 241861 - RNA, 23 nt, Human
acucaaaauuuggcauuugagga

SEQ ID NO: 241862 - RNA, 23 nt, Human
ugucuccaucucauuacuugggg

SEQ ID NO: 241863 - RNA, 22 nt, Human
acaaguuuauuugauuagaaca

SEQ ID NO: 241864 - RNA, 22 nt, Human
cuucucaguugcaagugucaga

SEQ ID NO: 241865 - RNA, 21 nt, Human
uuuacugagcacuuacuaugu

SEQ ID NO: 241866 - RNA, 22 nt, Human
uauuuuacuauuuggcaaaguc

SEQ ID NO: 241867 - RNA, 21 nt, Human
ggcugggucaugcagcuggcc

SEQ ID NO: 241868 - RNA, 22 nt, Human
gcccuaccucaguccagaucug

SEQ ID NO: 241869 - RNA, 22 nt, Human
cccaggcuggccuccgcagugc

SEQ ID NO: 241870 - RNA, 22 nt, Human
uuacagagcuggguggagagag

SEQ ID NO: 241871 - RNA, 22 nt, Human
agugugggugagggaggcccuc

SEQ ID NO: 241872 - RNA, 22 nt, Human
uugguuuauuucuuccuaugag

SEQ ID NO: 241873 - RNA, 22 nt, Human
uauuucugagaaccaacuuacc

SEQ ID NO: 241874 - RNA, 22 nt, Human
gccacagggcgagcggaggcca

SEQ ID NO: 241875 - RNA, 22 nt, Human
agcugguucagaaauuagaugg

SEQ ID NO: 241876 - RNA, 22 nt, Human
ugucacagucucgugagcaucu

SEQ ID NO: 241877 - RNA, 22 nt, Human
uccaggcuccugacuuuuuggg

SEQ ID NO: 241878 - RNA, 22 nt, Human
uaacagaaauaguaggugaggg

SEQ ID NO: 241879 - RNA, 20 nt, Human
agcauuugaaauaugacuau

SEQ ID NO: 241880 - RNA, 19 nt, Human
ucagaacucagaaugugua

SEQ ID NO: 241881 - RNA, 22 nt, Human
ucaagaugcauggguggcauaa

SEQ ID NO: 241882 - RNA, 22 nt, Human
aaugucugagucucuguauccc

SEQ ID NO: 241883 - RNA, 22 nt, Human
uagacaggaaacauuaggaugg

SEQ ID NO: 241884 - RNA, 22 nt, Human
gcacagccugucccuguccugg

SEQ ID NO: 241885 - RNA, 22 nt, Human
uuuaauguuaaauuuguagaug

SEQ ID NO: 241886 - RNA, 22 nt, Human
ugcccuggcucuccacuaguuu

SEQ ID NO: 241887 - RNA, 22 nt, Human
agauguggauccuaggguagaa

SEQ ID NO: 241888 - RNA, 22 nt, Human
aaagacacauaugcuuaaccca

SEQ ID NO: 241889 - RNA, 22 nt, Human
agaugauuaugauagcacuguu

SEQ ID NO: 241890 - RNA, 22 nt, Human
ugccagacuuucuuaccagugu

SEQ ID NO: 241891 - RNA, 22 nt, Human
uggauuaguuucaaggcagcaa

SEQ ID NO: 241892 - RNA, 22 nt, Human
caguuacauuaauaaugcacau

SEQ ID NO: 241893 - RNA, 22 nt, Human
uauuguuucuggcuguggcagc

SEQ ID NO: 241894 - RNA, 22 nt, Human
ggaggaaaggcucccucccucu

SEQ ID NO: 241895 - RNA, 22 nt, Human
cuccagugcuucuagaaaauac

SEQ ID NO: 241896 - RNA, 22 nt, Human
uugcucuccagaggcucacagc

SEQ ID NO: 241897 - RNA, 22 nt, Human
cugagcagaagggugcacgugc

SEQ ID NO: 241898 - RNA, 22 nt, Human
ucccagggggaugaacacugcc

SEQ ID NO: 241899 - RNA, 22 nt, Human
acagcaucuaguacagucuagu

SEQ ID NO: 241900 - RNA, 22 nt, Human
gcaggccuuuaucccugccuca

SEQ ID NO: 241901 - RNA, 22 nt, Human
caggacauugauccauuggcac

SEQ ID NO: 241902 - RNA, 22 nt, Human
acacaacagaagagcaauugca

SEQ ID NO: 241903 - RNA, 22 nt, Human
cagggaugguugagaauuggua

SEQ ID NO: 241904 - RNA, 22 nt, Human
cugagcauggccgguccauggu

SEQ ID NO: 241905 - RNA, 22 nt, Human
guucauguuugagaacaaggag

SEQ ID NO: 241906 - RNA, 18 nt, Human
auaaagugcuaauaaugg

SEQ ID NO: 241907 - RNA, 22 nt, Human
ggaggccaaagugugggcggcu

SEQ ID NO: 241908 - RNA, 22 nt, Human
cuuuucugagagggccaagauu

SEQ ID NO: 241909 - RNA, 18 nt, Human
ugaggcagucagugaugg

SEQ ID NO: 241910 - RNA, 20 nt, Human
cuaauuacagauuuuggaca

SEQ ID NO: 241911 - RNA, 20 nt, Human
uuucagagugucuuuccauu

SEQ ID NO: 241912 - RNA, 22 nt, Human
ugauaaacuggagagguggagg

SEQ ID NO: 241913 - RNA, 22 nt, Human
ucaggaaaguguucucagagga

SEQ ID NO: 241914 - RNA, 22 nt, Human
ucauaaauucuggugcugugag

SEQ ID NO: 241915 - RNA, 22 nt, Human
uaacacugccaugcuggaguca

SEQ ID NO: 241916 - RNA, 22 nt, Human
acaggccugagauuuugcauuu

SEQ ID NO: 241917 - RNA, 22 nt, Human
aggaucuuauguaauaauuaug

SEQ ID NO: 241918 - RNA, 22 nt, Human
uguuacaauauuaucaacugag

SEQ ID NO: 241919 - RNA, 22 nt, Human
ugcuuaaaauaguucauuuuug

SEQ ID NO: 241920 - RNA, 22 nt, Human
gcuggaggaggaagugugaggg

SEQ ID NO: 241921 - RNA, 22 nt, Human
uaggaaauuugaaauauguggg

SEQ ID NO: 241922 - RNA, 22 nt, Human
aguuucuuuagauagaaaguuc

SEQ ID NO: 241923 - RNA, 22 nt, Human
ucccaggacaggccacauggaa

SEQ ID NO: 241924 - RNA, 22 nt, Human
augguuuagcaacuuagggaaa

SEQ ID NO: 241925 - RNA, 22 nt, Human
gcccuguggacccaggaacucu

SEQ ID NO: 241926 - RNA, 22 nt, Human
ucagaaaggccacauggugcag

SEQ ID NO: 241927 - RNA, 22 nt, Human
uccugaggucugaaaaaggagc

SEQ ID NO: 241928 - RNA, 22 nt, Human
uucuuacauauuuucauauggu

SEQ ID NO: 241929 - RNA, 22 nt, Human
ucaagaugaaccaggacauuca

SEQ ID NO: 241930 - RNA, 22 nt, Human
ugcaggugccucuugagcuugu

SEQ ID NO: 241931 - RNA, 22 nt, Human
aggcagggugaugauaaugauu

SEQ ID NO: 241932 - RNA, 22 nt, Human
uagcaggcaucucagagauaau

SEQ ID NO: 241933 - RNA, 22 nt, Human
agcagacauaucucaugucaca

SEQ ID NO: 241934 - RNA, 22 nt, Human
ucuuuuggaaaugaugugcagg

SEQ ID NO: 241935 - RNA, 22 nt, Human
uuucaguugccaagcuaauucu

SEQ ID NO: 241936 - RNA, 22 nt, Human
ccaaggggccuuuagacacuau

SEQ ID NO: 241937 - RNA, 19 nt, Human
ccaggagagcuuggagaag

SEQ ID NO: 241938 - RNA, 22 nt, Human
auaauggcaugacaguuauaua

SEQ ID NO: 241939 - RNA, 22 nt, Human
gccagggugugcagggacagga

SEQ ID NO: 241940 - RNA, 17 nt, Human
ucuucucuuccagucuu

SEQ ID NO: 241941 - RNA, 22 nt, Human
uugggucuuauggcuggaguag

SEQ ID NO: 241942 - RNA, 17 nt, Human
auaaaggcaaguauuau

SEQ ID NO: 241943 - RNA, 22 nt, Human
agguuccaggucuggguuaugu

SEQ ID NO: 241944 - RNA, 22 nt, Human
agcacuuuaagcaacagaucaa

SEQ ID NO: 241945 - RNA, 22 nt, Human
acuugaauaggugucaaggcca

SEQ ID NO: 241946 - RNA, 22 nt, Human
guuagguagaaguuuacuuuga

SEQ ID NO: 241947 - RNA, 22 nt, Human
ccugcagacacuuguccagcaa

SEQ ID NO: 241948 - RNA, 22 nt, Human
uauauuguagcugaugacaaau

SEQ ID NO: 241949 - RNA, 22 nt, Human
aggucugagcucagggccuggc

SEQ ID NO: 241950 - RNA, 22 nt, Human
ugguccuguguucuuccugccu

SEQ ID NO: 241951 - RNA, 22 nt, Human
cugcccucuagggaugcacugg

SEQ ID NO: 241952 - RNA, 22 nt, Human
acccucagacauauuccaucau

SEQ ID NO: 241953 - RNA, 19 nt, Human
acuuugcaugugugucuaa

SEQ ID NO: 241954 - RNA, 22 nt, Human
cucugggcacuguauggguucu

SEQ ID NO: 241955 - RNA, 22 nt, Human
agcucagcccuccugugcagcu

SEQ ID NO: 241956 - RNA, 22 nt, Human
ucagaaauacuaucagcuuuug

SEQ ID NO: 241957 - RNA, 22 nt, Human
caccaggagcaucuaggaggcg

SEQ ID NO: 241958 - RNA, 22 nt, Human
ccuggccacccagccuuggcca

SEQ ID NO: 241959 - RNA, 22 nt, Human
uuuuucuaauggcuuaggaugu

SEQ ID NO: 241960 - RNA, 22 nt, Human
gagcaggccuggggugaggccu

SEQ ID NO: 241961 - RNA, 22 nt, Human
cuaaaugccuuuccuaccuaac

SEQ ID NO: 241962 - RNA, 21 nt, Human
ggguguggaaauuacauccug

SEQ ID NO: 241963 - RNA, 22 nt, Human
aacaguguguacacaucauagg

SEQ ID NO: 241964 - RNA, 22 nt, Human
uuucaugaggcugcauaaggag

SEQ ID NO: 241965 - RNA, 22 nt, Human
ucagagagcuggugggcagagg

SEQ ID NO: 241966 - RNA, 22 nt, Human
agaagcuaauucaugucuuaug

SEQ ID NO: 241967 - RNA, 22 nt, Human
caugugugggacccuuagguug

SEQ ID NO: 241968 - RNA, 22 nt, Human
uuguaauuugcaaauguauugu

SEQ ID NO: 241969 - RNA, 22 nt, Human
ggcaauuucaugugguuuaaac

SEQ ID NO: 241970 - RNA, 22 nt, Human
agcaaacagaugucuccuuuag

SEQ ID NO: 241971 - RNA, 22 nt, Human
cugcuguuuggugagugagaaa

SEQ ID NO: 241972 - RNA, 22 nt, Human
cccagagccgguggugcucaca

SEQ ID NO: 241973 - RNA, 22 nt, Human
aaguuucauguggagguagacu

SEQ ID NO: 241974 - RNA, 20 nt, Human
ugcugcaguuucaugggacu

SEQ ID NO: 241975 - RNA, 22 nt, Human
ccaggcuuucuccugacucaca

SEQ ID NO: 241976 - RNA, 22 nt, Human
agaaauagucacauuggaggaa

SEQ ID NO: 241977 - RNA, 19 nt, Human
ggccuugaugaguggggag

SEQ ID NO: 241978 - RNA, 22 nt, Human
cuuuacuaucaggaauaaacaa

SEQ ID NO: 241979 - RNA, 22 nt, Human
cugcacagccugucugggggcc

SEQ ID NO: 241980 - RNA, 22 nt, Human
uugaggcaaaaucaacgggaag

SEQ ID NO: 241981 - RNA, 22 nt, Human
gcuuggcucuaagacaccuauu

SEQ ID NO: 241982 - RNA, 22 nt, Human
aggcugagcggggucccagagc

SEQ ID NO: 241983 - RNA, 18 nt, Human
ucagcuggggcugcagcc

SEQ ID NO: 241984 - RNA, 17 nt, Human
agcuggguucucaggaa

SEQ ID NO: 241985 - RNA, 22 nt, Human
augaagcagcguuguagaguga

SEQ ID NO: 241986 - RNA, 22 nt, Human
ggaggcaggaaagacagguuca

SEQ ID NO: 241987 - RNA, 22 nt, Human
aaggggaaguagcaccagaggu

SEQ ID NO: 241988 - RNA, 22 nt, Human
ugcuugaacccaggaaguggag

SEQ ID NO: 241989 - RNA, 22 nt, Human
ggcagagcuuguuccuucuguu

SEQ ID NO: 241990 - RNA, 17 nt, Human
ugcugucugcuucccua

SEQ ID NO: 241991 - RNA, 22 nt, Human
ucagacccaggugccaagcugu

SEQ ID NO: 241992 - RNA, 22 nt, Human
cuguccagugcagagaacagag

SEQ ID NO: 241993 - RNA, 22 nt, Human
caucaaaguugauauccaauua

SEQ ID NO: 241994 - RNA, 22 nt, Human
cuuuaguucuaaugcauugaaa

SEQ ID NO: 241995 - RNA, 22 nt, Human
cuauuucauguuccuauggccg

SEQ ID NO: 241996 - RNA, 22 nt, Human
guccagugucuucuacauaaca

SEQ ID NO: 241997 - RNA, 22 nt, Human
agcauccugcuugcugucugug

SEQ ID NO: 241998 - RNA, 22 nt, Human
caagcugcuuauucucugcucu

SEQ ID NO: 241999 - RNA, 22 nt, Human
gcaggcugaaacucggggucua

SEQ ID NO: 242000 - RNA, 22 nt, Human
ggcuccagaaacuucaguccau

SEQ ID NO: 242001 - RNA, 21 nt, Human
uagaucaugguauucuuuggc

SEQ ID NO: 242002 - RNA, 22 nt, Human
uuccuguggccuuacaucugug

SEQ ID NO: 242003 - RNA, 20 nt, Human
ucuguagucuaugaggcuua

SEQ ID NO: 242004 - RNA, 22 nt, Human
ucuaacuuguauguauaguuuu

SEQ ID NO: 242005 - RNA, 22 nt, Human
aauauaacacagauggccuguu

SEQ ID NO: 242006 - RNA, 22 nt, Human
cacuagagaaacgcccaggcuc

SEQ ID NO: 242007 - RNA, 22 nt, Human
uaagauuauacuuaaagagaaa

SEQ ID NO: 242008 - RNA, 22 nt, Human
auugagaagaaaaucuaauaua

SEQ ID NO: 242009 - RNA, 22 nt, Human
ucauuucugagccuuccaugau

SEQ ID NO: 242010 - RNA, 22 nt, Human
uuuauaccucauucuuagcaaa

SEQ ID NO: 242011 - RNA, 22 nt, Human
agggaaauaaucuauucugagg

SEQ ID NO: 242012 - RNA, 22 nt, Human
aagcuguguauuacagaauauu

SEQ ID NO: 242013 - RNA, 22 nt, Human
gcuccugcagagauguuccaug

SEQ ID NO: 242014 - RNA, 22 nt, Human
uccaugauuggucaucauagaa

SEQ ID NO: 242015 - RNA, 22 nt, Human
ucccagccuuccuuguggugaa

SEQ ID NO: 242016 - RNA, 22 nt, Human
agcuccugugugaagccucccu

SEQ ID NO: 242017 - RNA, 22 nt, Human
uuggaaagaagggcugagcaag

SEQ ID NO: 242018 - RNA, 22 nt, Human
guggcaggagugggccuugaag

SEQ ID NO: 242019 - RNA, 19 nt, Human
aggguccaggcccugugga

SEQ ID NO: 242020 - RNA, 22 nt, Human
auaagcaugauuaccgggagca

SEQ ID NO: 242021 - RNA, 22 nt, Human
aagcaacauucucuguggcauu

SEQ ID NO: 242022 - RNA, 22 nt, Human
gcccucucggcauagcaggggc

SEQ ID NO: 242023 - RNA, 22 nt, Human
uagggguguuucgagagagguu

SEQ ID NO: 242024 - RNA, 22 nt, Human
uccuggcagggucuaggucuag

SEQ ID NO: 242025 - RNA, 22 nt, Human
cucagugucacguuuugccuua

SEQ ID NO: 242026 - RNA, 22 nt, Human
aaggcuuuuguuccuauuuagu

SEQ ID NO: 242027 - RNA, 22 nt, Human
uuaaguccuugguaauuuucuu

SEQ ID NO: 242028 - RNA, 21 nt, Human
aucuuuagccauccaaucaga

SEQ ID NO: 242029 - RNA, 22 nt, Human
ggcugcugaaguguggcaaucu

SEQ ID NO: 242030 - RNA, 22 nt, Human
caggacaaagcccuuugagaaa

SEQ ID NO: 242031 - RNA, 22 nt, Human
gggaaacucaggcauuuccacu

SEQ ID NO: 242032 - RNA, 22 nt, Human
uuauuuucuccucagaaagugg

SEQ ID NO: 242033 - RNA, 22 nt, Human
uuuauuuggcaucucugccaag

SEQ ID NO: 242034 - RNA, 22 nt, Human
gaaugaauucagcacauggaau

SEQ ID NO: 242035 - RNA, 21 nt, Human
ugcuccaggagggggcagucc

SEQ ID NO: 242036 - RNA, 22 nt, Human
aaauguguauaugaaacaugau

SEQ ID NO: 242037 - RNA, 22 nt, Human
aaugaaugaaccacauauaaca

SEQ ID NO: 242038 - RNA, 22 nt, Human
ugggaaggacgugucaguggca

SEQ ID NO: 242039 - RNA, 22 nt, Human
acugaugaaaacuaauaaauua

SEQ ID NO: 242040 - RNA, 22 nt, Human
aagucuuucauaagucucuuau

SEQ ID NO: 242041 - RNA, 22 nt, Human
auguaguauuuggaaauguaaa

SEQ ID NO: 242042 - RNA, 22 nt, Human
uggugcugccaccuccucugcu

SEQ ID NO: 242043 - RNA, 22 nt, Human
ucaacuuugaaaccauagugaa

SEQ ID NO: 242044 - RNA, 22 nt, Human
gggcacagcccagugggguccc

SEQ ID NO: 242045 - RNA, 22 nt, Human
gcccaagcagcuucccgagcuu

SEQ ID NO: 242046 - RNA, 22 nt, Human
cuccaggaaagucaggcuuaga

SEQ ID NO: 242047 - RNA, 22 nt, Human
ccccuguguuguucaaggguca

SEQ ID NO: 242048 - RNA, 22 nt, Human
aagacauugucauuuuauaauu

SEQ ID NO: 242049 - RNA, 22 nt, Human
cugggagaggcugcuccgcucu

SEQ ID NO: 242050 - RNA, 22 nt, Human
uagcaagaugucacuccaaguu

SEQ ID NO: 242051 - RNA, 21 nt, Human
ucaccuggcuucugaccuggc

SEQ ID NO: 242052 - RNA, 22 nt, Human
ggcagcucgaugacuucugcau

SEQ ID NO: 242053 - RNA, 22 nt, Human
aucagagcacugagcaggacac

SEQ ID NO: 242054 - RNA, 22 nt, Human
uggugggagugagggcaugcca

SEQ ID NO: 242055 - RNA, 22 nt, Human
auuccaguuaguggcagcuuau

SEQ ID NO: 242056 - RNA, 22 nt, Human
cagauaugcugagacuccugug

SEQ ID NO: 242057 - RNA, 22 nt, Human
cuacccuugccugccaggugac

SEQ ID NO: 242058 - RNA, 22 nt, Human
cagacugaguggauuaaacaau

SEQ ID NO: 242059 - RNA, 22 nt, Human
gcccugagggguggugucugua

SEQ ID NO: 242060 - RNA, 22 nt, Human
gcauuaauguaagacccacucc

SEQ ID NO: 242061 - RNA, 19 nt, Human
ucucuugaauaggucaaac

SEQ ID NO: 242062 - RNA, 22 nt, Human
gcagggugauagugaggcucag

SEQ ID NO: 242063 - RNA, 22 nt, Human
caguguccucagccagcagcua

SEQ ID NO: 242064 - RNA, 22 nt, Human
caggucugaagagucacaugcc

SEQ ID NO: 242065 - RNA, 22 nt, Human
uagaaauucaaugcucugagua

SEQ ID NO: 242066 - RNA, 22 nt, Human
uccugaccucuugcucugaccu

SEQ ID NO: 242067 - RNA, 22 nt, Human
guccuguugugagcugccuucc

SEQ ID NO: 242068 - RNA, 22 nt, Human
acagagagguaaaauauauagu

SEQ ID NO: 242069 - RNA, 22 nt, Human
ggcaccagggaaggaaggcugg

SEQ ID NO: 242070 - RNA, 22 nt, Human
gcacugggcuccaggaaggagg

SEQ ID NO: 242071 - RNA, 22 nt, Human
ugacgucaacugcaaaggccuu

SEQ ID NO: 242072 - RNA, 22 nt, Human
cagcagcuccucugcggcuaug

SEQ ID NO: 242073 - RNA, 22 nt, Human
uucuuguuuugcccaaguugua

SEQ ID NO: 242074 - RNA, 22 nt, Human
ugugugucacugaaagaaaucu

SEQ ID NO: 242075 - RNA, 22 nt, Human
auggaguggggacugcagugga

SEQ ID NO: 242076 - RNA, 22 nt, Human
ggagaaggugcuggucacugug

SEQ ID NO: 242077 - RNA, 22 nt, Human
ugucauuuuauguauguggucu

SEQ ID NO: 242078 - RNA, 22 nt, Human
aggaccuggaucacagagaucu

SEQ ID NO: 242079 - RNA, 22 nt, Human
ucagacagcuugggauaacuga

SEQ ID NO: 242080 - RNA, 22 nt, Human
aaguuuuaacaaguacuuacua

SEQ ID NO: 242081 - RNA, 22 nt, Human
agcuaaugaugagauacagaua

SEQ ID NO: 242082 - RNA, 22 nt, Human
uguggcagagagagcuuccuug

SEQ ID NO: 242083 - RNA, 22 nt, Human
aucuuucuuauuugaagaaaga

SEQ ID NO: 242084 - RNA, 22 nt, Human
uucaacaaacuguucacgaaug

SEQ ID NO: 242085 - RNA, 22 nt, Human
ucauuuguggaagugauugugg

SEQ ID NO: 242086 - RNA, 22 nt, Human
aggucugguguugggccugaaa

SEQ ID NO: 242087 - RNA, 22 nt, Human
ugggccacaagccaugggacca

SEQ ID NO: 242088 - RNA, 22 nt, Human
gaugggggccagggccugcuuu

SEQ ID NO: 242089 - RNA, 18 nt, Human
caggugggucuccugccc

SEQ ID NO: 242090 - RNA, 20 nt, Human
auuguuucauuuaauguaca

SEQ ID NO: 242091 - RNA, 22 nt, Human
cugugggcucccagcuucucuc

SEQ ID NO: 242092 - RNA, 15 nt, Human
augaggcauuugggg

SEQ ID NO: 242093 - RNA, 22 nt, Human
cuuugcaauagaggcacacaug

SEQ ID NO: 242094 - RNA, 21 nt, Human
acaggcucuggggaugcuggg

SEQ ID NO: 242095 - RNA, 20 nt, Human
gggcuggcgcauggggaaag

SEQ ID NO: 242096 - RNA, 22 nt, Human
aagauuuacuuucuuuguaaua

SEQ ID NO: 242097 - RNA, 21 nt, Human
cucaggcuggcagcaggcuag

SEQ ID NO: 242098 - RNA, 22 nt, Human
acacauuaucucauuaaauacu

SEQ ID NO: 242099 - RNA, 22 nt, Human
acaggccugggguacaaguucu

SEQ ID NO: 242100 - RNA, 22 nt, Human
aguuucuagcaaggauuguuga

SEQ ID NO: 242101 - RNA, 22 nt, Human
guuuuauuggaacacagccaug

SEQ ID NO: 242102 - RNA, 18 nt, Human
ugagaaccauguucauuc

SEQ ID NO: 242103 - RNA, 22 nt, Human
auacaguagacaaucucaugaa

SEQ ID NO: 242104 - RNA, 22 nt, Human
uuugaaaggaauuaggaugaca

SEQ ID NO: 242105 - RNA, 22 nt, Human
cagcaacuccuguagcuuaugc

SEQ ID NO: 242106 - RNA, 22 nt, Human
uaaacucuucuguagaaucaga

SEQ ID NO: 242107 - RNA, 22 nt, Human
uauggcaagaugacauguucuc

SEQ ID NO: 242108 - RNA, 20 nt, Human
uucuagaaguuugcuaccca

SEQ ID NO: 242109 - RNA, 22 nt, Human
uguuucuugggugcucacauca

SEQ ID NO: 242110 - RNA, 22 nt, Human
aaacugcaauuacuuuugcacc

SEQ ID NO: 242111 - RNA, 19 nt, Human
uuucuaguuucagcuuguc

SEQ ID NO: 242112 - RNA, 18 nt, Human
ugaacagaugaguugaag

SEQ ID NO: 242113 - RNA, 20 nt, Human
agcuggucuuaaguaacuga

SEQ ID NO: 242114 - RNA, 22 nt, Human
auuacaacuacauaaucucaga

SEQ ID NO: 242115 - RNA, 22 nt, Human
cagugguuuccaaacuuguucc

SEQ ID NO: 242116 - RNA, 23 nt, Human
uucauucaaaaggaaaagucaug

SEQ ID NO: 242117 - RNA, 22 nt, Human
augcauauagaacauuugacau

SEQ ID NO: 242118 - RNA, 22 nt, Human
cccauggagugccugagggcca

SEQ ID NO: 242119 - RNA, 22 nt, Human
aaauucaguuuuaauaaucacu

SEQ ID NO: 242120 - RNA, 23 nt, Human
uccucagcauguuuugucaugua

SEQ ID NO: 242121 - RNA, 22 nt, Human
cugaaggaagcagguggccugu

SEQ ID NO: 242122 - RNA, 22 nt, Human
caggcuggagugcaauggcaca

SEQ ID NO: 242123 - RNA, 22 nt, Human
augagugcaacagaucagcaug

SEQ ID NO: 242124 - RNA, 19 nt, Human
acccucugccacaagccuc

SEQ ID NO: 242125 - RNA, 22 nt, Human
cuucauguacaguuauuggaga

SEQ ID NO: 242126 - RNA, 23 nt, Human
auguagaguacagcacaacagca

SEQ ID NO: 242127 - RNA, 22 nt, Human
aggcccaguguggcuuccugga

SEQ ID NO: 242128 - RNA, 22 nt, Human
agcuuuagaauuguucagcaag

SEQ ID NO: 242129 - RNA, 22 nt, Human
uacauguggguuaaaaacacuc

SEQ ID NO: 242130 - RNA, 22 nt, Human
cuggggggcuacugacagagga

SEQ ID NO: 242131 - RNA, 22 nt, Human
aauuaucagauauaaaacugca

SEQ ID NO: 242132 - RNA, 19 nt, Human
gccucugagggcaggacac

SEQ ID NO: 242133 - RNA, 19 nt, Human
uagucuuuauucuuaauuu

SEQ ID NO: 242134 - RNA, 22 nt, Human
agcaaagaaauggaggcucaga

SEQ ID NO: 242135 - RNA, 22 nt, Human
agugucuggucucugaacuaaa

SEQ ID NO: 242136 - RNA, 22 nt, Human
ugcuccaggagcaaccuuugag

SEQ ID NO: 242137 - RNA, 22 nt, Human
aggagacauggaauagugaggc

SEQ ID NO: 242138 - RNA, 23 nt, Human
uucugaaaauagauaguggcucc

SEQ ID NO: 242139 - RNA, 16 nt, Human
gccugggagggaacag

SEQ ID NO: 242140 - RNA, 22 nt, Human
aguaaguuccaguuucauuaug

SEQ ID NO: 242141 - RNA, 22 nt, Human
guggcaguuuugacaucacaaa

SEQ ID NO: 242142 - RNA, 22 nt, Human
ggggaccuaggcucugucucuu

SEQ ID NO: 242143 - RNA, 22 nt, Human
uucucuaauggugaugauuaga

SEQ ID NO: 242144 - RNA, 22 nt, Human
cagcacauaagccgaagacugu

SEQ ID NO: 242145 - RNA, 23 nt, Human
uauacacauguggcaguauagug

SEQ ID NO: 242146 - RNA, 22 nt, Human
aggcaauuguuuguguaauagg

SEQ ID NO: 242147 - RNA, 22 nt, Human
ucucaaacuaacaaugauuaua

SEQ ID NO: 242148 - RNA, 22 nt, Human
uacaagugugcaccaccauguc

SEQ ID NO: 242149 - RNA, 22 nt, Human
agucucagcaagcauggcuagu

SEQ ID NO: 242150 - RNA, 22 nt, Human
ugagcuucaaaauaugugaauc

SEQ ID NO: 242151 - RNA, 22 nt, Human
cuggagcuccagggucuccucu

SEQ ID NO: 242152 - RNA, 22 nt, Human
ugcagcugcugguggcugaaag

SEQ ID NO: 242153 - RNA, 22 nt, Human
auuucucagugugaucaggccu

SEQ ID NO: 242154 - RNA, 16 nt, Human
cuacccagugagaagg

SEQ ID NO: 242155 - RNA, 22 nt, Human
cgucccaguuccagccgcgcug

SEQ ID NO: 242156 - RNA, 22 nt, Human
gggaucugaguugucaggaagg

SEQ ID NO: 242157 - RNA, 22 nt, Human
augacaaggguugacacauguc

SEQ ID NO: 242158 - RNA, 22 nt, Human
uacagauauagagauuuauaga

SEQ ID NO: 242159 - RNA, 22 nt, Human
cagaggaaguuccuugaugaga

SEQ ID NO: 242160 - RNA, 21 nt, Human
gggaaacucugcuuaacagag

SEQ ID NO: 242161 - RNA, 22 nt, Human
acuugaauuuaguuuuuccuaa

SEQ ID NO: 242162 - RNA, 22 nt, Human
uggcauuuuccaaugauauguu

SEQ ID NO: 242163 - RNA, 22 nt, Human
uuugaacugauaaucuucuguu

SEQ ID NO: 242164 - RNA, 22 nt, Human
ugggaagcauuaaugauagggg

SEQ ID NO: 242165 - RNA, 22 nt, Human
ucccauauauguuuauauugga

SEQ ID NO: 242166 - RNA, 22 nt, Human
uggggacauagccagucuggcu

SEQ ID NO: 242167 - RNA, 22 nt, Human
aaauauguaagauuagcacuag

SEQ ID NO: 242168 - RNA, 22 nt, Human
aaguuacaguuacagaauggag

SEQ ID NO: 242169 - RNA, 22 nt, Human
gaugucuuuagggcaaaauauu

SEQ ID NO: 242170 - RNA, 22 nt, Human
caaaguuaucaacugcaacauu

SEQ ID NO: 242171 - RNA, 22 nt, Human
aucagcaaguccuguuaauucu

SEQ ID NO: 242172 - RNA, 22 nt, Human
uccuccagugguacuggccaau

SEQ ID NO: 242173 - RNA, 22 nt, Human
caggaaacaaagccuugcucau

SEQ ID NO: 242174 - RNA, 22 nt, Human
aacauuuacaaauccuucugca

SEQ ID NO: 242175 - RNA, 22 nt, Human
gucacagaucucuugagucaag

SEQ ID NO: 242176 - RNA, 22 nt, Human
agauuuaaauuugcuacaauuc

SEQ ID NO: 242177 - RNA, 22 nt, Human
gacuuucugaaggucucgcagu

SEQ ID NO: 242178 - RNA, 22 nt, Human
caaggacacugagcuuuguaaa

SEQ ID NO: 242179 - RNA, 22 nt, Human
ccucugcugcuguugagcaccg

SEQ ID NO: 242180 - RNA, 22 nt, Human
auuugccuuuuaaacucacaau

SEQ ID NO: 242181 - RNA, 22 nt, Human
aacucugauuagcucaaguuaa

SEQ ID NO: 242182 - RNA, 22 nt, Human
uuauuaagugcguacuguaugc

SEQ ID NO: 242183 - RNA, 22 nt, Human
ucaugauuuuucuuuacaguug

SEQ ID NO: 242184 - RNA, 20 nt, Human
ucagaaguuuccuggagcau

SEQ ID NO: 242185 - RNA, 22 nt, Human
uaggcagcuuagguuagaagug

SEQ ID NO: 242186 - RNA, 22 nt, Human
uuacagugaaguaccauuaaaa

SEQ ID NO: 242187 - RNA, 22 nt, Human
auauuuauaagcaagcaggacu

SEQ ID NO: 242188 - RNA, 22 nt, Human
uuuaacacuaguuucuuuaacu

SEQ ID NO: 242189 - RNA, 21 nt, Human
uggugccuucagcugucuuuu

SEQ ID NO: 242190 - RNA, 22 nt, Human
uguauuuaauuguaucaucaca

SEQ ID NO: 242191 - RNA, 22 nt, Human
agccuggcuaaauucucccaug

SEQ ID NO: 242192 - RNA, 20 nt, Human
ugcagggcugccucccagcu

SEQ ID NO: 242193 - RNA, 22 nt, Human
aguggcuaugcaugacuggaau

SEQ ID NO: 242194 - RNA, 22 nt, Human
gagagggcaagguagaugcuac

SEQ ID NO: 242195 - RNA, 22 nt, Human
cacagguguaugaauaugucca

SEQ ID NO: 242196 - RNA, 22 nt, Human
acaggcagauuaaggguaggca

SEQ ID NO: 242197 - RNA, 22 nt, Human
aaccuugaauacuuaaauacau

SEQ ID NO: 242198 - RNA, 22 nt, Human
cugggucccggcuucuauccac

SEQ ID NO: 242199 - RNA, 22 nt, Human
aaaggcauggaacagauucucc

SEQ ID NO: 242200 - RNA, 22 nt, Human
cuuccagaggaacucugcagug

SEQ ID NO: 242201 - RNA, 22 nt, Human
cugggcuccacuacuugcuaac

SEQ ID NO: 242202 - RNA, 23 nt, Human
uggaaucuucgauauugauucag

SEQ ID NO: 242203 - RNA, 22 nt, Human
caggugucuaauucucaccccc

SEQ ID NO: 242204 - RNA, 18 nt, Human
aaaauaacaaaguuggcu

SEQ ID NO: 242205 - RNA, 22 nt, Human
agaguuguuguacaaacuaaau

SEQ ID NO: 242206 - RNA, 22 nt, Human
ugagcaccaggcaccacagcuc

SEQ ID NO: 242207 - RNA, 22 nt, Human
uagauuuuacuucugucauuac

SEQ ID NO: 242208 - RNA, 22 nt, Human
uaccuguuuuaaagcuaaaagg

SEQ ID NO: 242209 - RNA, 22 nt, Human
gauauuuacaaauuugccaaua

SEQ ID NO: 242210 - RNA, 19 nt, Human
gccaggucuuggguccagg

SEQ ID NO: 242211 - RNA, 22 nt, Human
agcagagguuuguuggaaaccu

SEQ ID NO: 242212 - RNA, 22 nt, Human
gccugggauuguguaagugaau

SEQ ID NO: 242213 - RNA, 19 nt, Human
ucaggagcagcuucugaac

SEQ ID NO: 242214 - RNA, 22 nt, Human
gggcuccuggcagucaugcuca

SEQ ID NO: 242215 - RNA, 22 nt, Human
cuggccaggcucucacgugguc

SEQ ID NO: 242216 - RNA, 20 nt, Human
ugaguggccacugggucgca

SEQ ID NO: 242217 - RNA, 21 nt, Human
acagagcauaaugguguggca

SEQ ID NO: 242218 - RNA, 22 nt, Human
uggcaauaugcuuucaguggcc

SEQ ID NO: 242219 - RNA, 22 nt, Human
gaggaaaauaacaacuaagggc

SEQ ID NO: 242220 - RNA, 20 nt, Human
cugggucuccuucugcuuaa

SEQ ID NO: 242221 - RNA, 22 nt, Human
uauaucagaguuaaaagaaugu

SEQ ID NO: 242222 - RNA, 21 nt, Human
ucagcuuugcaacugcacauc

SEQ ID NO: 242223 - RNA, 22 nt, Human
guucuucaguaaaauuaaaugu

SEQ ID NO: 242224 - RNA, 22 nt, Human
aagaaguuggaaaugauugaga

SEQ ID NO: 242225 - RNA, 21 nt, Human
agccagauccauuuugcaugg

SEQ ID NO: 242226 - RNA, 22 nt, Human
cagguccuggcagcugacucag

SEQ ID NO: 242227 - RNA, 22 nt, Human
uucaaauacauucuuugccacu

SEQ ID NO: 242228 - RNA, 22 nt, Human
ccugggagcuguggaaaggcug

SEQ ID NO: 242229 - RNA, 22 nt, Human
uuuguggcaggagcggagaccg

SEQ ID NO: 242230 - RNA, 22 nt, Human
ugcauuggucauuuagaaaaua

SEQ ID NO: 242231 - RNA, 18 nt, Human
gggagcugggaagcuggu

SEQ ID NO: 242232 - RNA, 20 nt, Human
uuccuggcucuaggaccuug

SEQ ID NO: 242233 - RNA, 22 nt, Human
uauaucaccaaaaacaguucug

SEQ ID NO: 242234 - RNA, 18 nt, Human
agcagcugucagaaugcc

SEQ ID NO: 242235 - RNA, 22 nt, Human
guaauuacaugaguacuguaag

SEQ ID NO: 242236 - RNA, 22 nt, Human
gugugucagagcucagagaagu

SEQ ID NO: 242237 - RNA, 22 nt, Human
ggggcagaaagcccacagagug

SEQ ID NO: 242238 - RNA, 18 nt, Human
guccacagcccucacagc

SEQ ID NO: 242239 - RNA, 22 nt, Human
gaaacagcacguuuggagagau

SEQ ID NO: 242240 - RNA, 22 nt, Human
gcagggacgcagcacucuccgu

SEQ ID NO: 242241 - RNA, 22 nt, Human
aguuaacacagucaggaguaac

SEQ ID NO: 242242 - RNA, 21 nt, Human
cacuggaauuuucugugacau

SEQ ID NO: 242243 - RNA, 22 nt, Human
gccacaggcuuaggagggaggu

SEQ ID NO: 242244 - RNA, 22 nt, Human
gugcuucugccaacuaauuaac

SEQ ID NO: 242245 - RNA, 22 nt, Human
uuccugugguccagagucaucc

SEQ ID NO: 242246 - RNA, 22 nt, Human
uuggcugcuggucuuuggauau

SEQ ID NO: 242247 - RNA, 22 nt, Human
uuugggauuuuacauuguaugg

SEQ ID NO: 242248 - RNA, 22 nt, Human
guuucauuaccugacccaugag

SEQ ID NO: 242249 - RNA, 22 nt, Human
guccugggcggagggcugcugu

SEQ ID NO: 242250 - RNA, 22 nt, Human
cugguuuauucgucacaccgga

SEQ ID NO: 242251 - RNA, 22 nt, Human
uggcccgccggaagaagauguc

SEQ ID NO: 242252 - RNA, 22 nt, Human
gcucagggcuaaggcugagggg

SEQ ID NO: 242253 - RNA, 22 nt, Human
agcugcaauacccuucuuccuu

SEQ ID NO: 242254 - RNA, 22 nt, Human
agagagacgggggcugcugcuu

SEQ ID NO: 242255 - RNA, 22 nt, Human
gagcugagcuuaacuccuugaa

SEQ ID NO: 242256 - RNA, 22 nt, Human
uauuccaaaaucccaaacugcc

SEQ ID NO: 242257 - RNA, 22 nt, Human
ucugccuugauggcauugagaa

SEQ ID NO: 242258 - RNA, 22 nt, Human
uauuuucaccuucucuggauau

SEQ ID NO: 242259 - RNA, 22 nt, Human
aggugggguucagucucagccg

SEQ ID NO: 242260 - RNA, 23 nt, Human
acaugggagggacauggaggcug

SEQ ID NO: 242261 - RNA, 22 nt, Human
aguccugucucucccagggcca

SEQ ID NO: 242262 - RNA, 22 nt, Human
agcaccuccuuagcuaugacca

SEQ ID NO: 242263 - RNA, 22 nt, Human
ugaggcaguauuuuagugacuu

SEQ ID NO: 242264 - RNA, 22 nt, Human
auggcagacacaggcaggcaga

SEQ ID NO: 242265 - RNA, 22 nt, Human
uguguccuacugaggagcuccu

SEQ ID NO: 242266 - RNA, 22 nt, Human
gcauccagucuuggcuccugga

SEQ ID NO: 242267 - RNA, 22 nt, Human
guaagccucugcucuaucuggu

SEQ ID NO: 242268 - RNA, 22 nt, Human
auucucaguucacuaguuucuu

SEQ ID NO: 242269 - RNA, 22 nt, Human
uuguagaaucauuauuucuagu

SEQ ID NO: 242270 - RNA, 22 nt, Human
gcuguucaagacuaggaaauuu

SEQ ID NO: 242271 - RNA, 22 nt, Human
agaugaguaaauggagucuucc

SEQ ID NO: 242272 - RNA, 22 nt, Human
ucuuucuguaagcuccauggaa

SEQ ID NO: 242273 - RNA, 22 nt, Human
accaguuucugggggagguugg

SEQ ID NO: 242274 - RNA, 22 nt, Human
auaguacagauccauuaauuau

SEQ ID NO: 242275 - RNA, 22 nt, Human
aggaccagugagucuggcaagu

SEQ ID NO: 242276 - RNA, 22 nt, Human
aauucacauguugaaguccuaa

SEQ ID NO: 242277 - RNA, 22 nt, Human
gugccugcuaccugacuuguuu

SEQ ID NO: 242278 - RNA, 22 nt, Human
aaauagcugaaaguuccuagau

SEQ ID NO: 242279 - RNA, 22 nt, Human
acaccauacucauguugguucc

SEQ ID NO: 242280 - RNA, 22 nt, Human
ggccacagcagaugcuucagau

SEQ ID NO: 242281 - RNA, 22 nt, Human
guuuggaauagcaguaaacauu

SEQ ID NO: 242282 - RNA, 23 nt, Human
ugauuacaagggccaaagaaagg

SEQ ID NO: 242283 - RNA, 22 nt, Human
accucagaggccagggaucuag

SEQ ID NO: 242284 - RNA, 23 nt, Human
agccucagccgguggcagaagug

SEQ ID NO: 242285 - RNA, 22 nt, Human
gucugggcagcagcauuucuua

SEQ ID NO: 242286 - RNA, 22 nt, Human
guacacuugucuugaacagccu

SEQ ID NO: 242287 - RNA, 22 nt, Human
gcucccaggaugaggagccagg

SEQ ID NO: 242288 - RNA, 22 nt, Human
aagaggcagaaauaucgcugaa

SEQ ID NO: 242289 - RNA, 22 nt, Human
auugcuuuuagugaaauuauau

SEQ ID NO: 242290 - RNA, 22 nt, Human
gcuggcuguaucaccuggccag

SEQ ID NO: 242291 - RNA, 22 nt, Human
ggaggggcagccauggaacucc

SEQ ID NO: 242292 - RNA, 22 nt, Human
cccaggagguggaguucacagu

SEQ ID NO: 242293 - RNA, 22 nt, Human
ucagucuuugcuuaugacaaua

SEQ ID NO: 242294 - RNA, 22 nt, Human
ccugggcugaagucaagugugg

SEQ ID NO: 242295 - RNA, 22 nt, Human
gcuguucauuagaaauagaaug

SEQ ID NO: 242296 - RNA, 22 nt, Human
cagugcagguggcagaggacag

SEQ ID NO: 242297 - RNA, 22 nt, Human
ucgccucaucauccuaauuaca

SEQ ID NO: 242298 - RNA, 17 nt, Human
gguggccugcaguggcu

SEQ ID NO: 242299 - RNA, 22 nt, Human
gaucugguacaggccugcagcc

SEQ ID NO: 242300 - RNA, 22 nt, Human
ugucuuuuauaacugacauaua

SEQ ID NO: 242301 - RNA, 22 nt, Human
gcucucuggaggccauggacag

SEQ ID NO: 242302 - RNA, 22 nt, Human
gaggcuaaggugccagacgaau

SEQ ID NO: 242303 - RNA, 22 nt, Human
auguuauaguuauaaaaugagg

SEQ ID NO: 242304 - RNA, 22 nt, Human
uaggagaggugaauggcacacu

SEQ ID NO: 242305 - RNA, 22 nt, Human
ggagacagugacuuagagacug

SEQ ID NO: 242306 - RNA, 22 nt, Human
ucugggugcuacaaacaguauu

SEQ ID NO: 242307 - RNA, 22 nt, Human
gcuguaggucauuuaaucaccu

SEQ ID NO: 242308 - RNA, 23 nt, Human
gcccacccucagcguccucacgg

SEQ ID NO: 242309 - RNA, 22 nt, Human
cugggucccaauagcuuuuguu

SEQ ID NO: 242310 - RNA, 22 nt, Human
aggcccugcccagugccacaag

SEQ ID NO: 242311 - RNA, 21 nt, Human
acuuggcagaacgcagaaggc

SEQ ID NO: 242312 - RNA, 22 nt, Human
cucagcagcagggaagagguca

SEQ ID NO: 242313 - RNA, 22 nt, Human
agggccagccaggcccuacaaa

SEQ ID NO: 242314 - RNA, 22 nt, Human
cccaggcacacugaagugacau

SEQ ID NO: 242315 - RNA, 22 nt, Human
gagugcugcuugggauagugag

SEQ ID NO: 242316 - RNA, 22 nt, Human
auagcaacaccccaauuuucua

SEQ ID NO: 242317 - RNA, 22 nt, Human
ugaaagaaggguggaaaaugua

SEQ ID NO: 242318 - RNA, 22 nt, Human
aggcugagagcaacgugucaga

SEQ ID NO: 242319 - RNA, 22 nt, Human
cuugcugagauaaaugcugucu

SEQ ID NO: 242320 - RNA, 22 nt, Human
agacacugauguucagcucaau

SEQ ID NO: 242321 - RNA, 23 nt, Human
ucagaagugggauacaaagcuga

SEQ ID NO: 242322 - RNA, 22 nt, Human
uuuggaauguaguuuaaucauc

SEQ ID NO: 242323 - RNA, 22 nt, Human
cuacugaguccuucagcugcca

SEQ ID NO: 242324 - RNA, 22 nt, Human
uucagcacuggacagcgagucu

SEQ ID NO: 242325 - RNA, 22 nt, Human
uggacagguuugggugccuguu

SEQ ID NO: 242326 - RNA, 22 nt, Human
acacaguaggccaccaugucau

SEQ ID NO: 242327 - RNA, 17 nt, Human
aggugcuggagcaucag

SEQ ID NO: 242328 - RNA, 22 nt, Human
uucaugcuaguaugugcuguuc

SEQ ID NO: 242329 - RNA, 22 nt, Human
uagcacccauggaaucugcugg

SEQ ID NO: 242330 - RNA, 22 nt, Human
ugcagaagaaaacagcugugug

SEQ ID NO: 242331 - RNA, 22 nt, Human
acuguuuucuuagcucccugcu

SEQ ID NO: 242332 - RNA, 22 nt, Human
agcugcagucaagcugggccac

SEQ ID NO: 242333 - RNA, 18 nt, Human
agugaguuguugaaagaa

SEQ ID NO: 242334 - RNA, 22 nt, Human
cagacaggguccuguccgucac

SEQ ID NO: 242335 - RNA, 22 nt, Human
uggcccagaucucugaccuuga

SEQ ID NO: 242336 - RNA, 22 nt, Human
guuuagaacacggaaauacuga

SEQ ID NO: 242337 - RNA, 22 nt, Human
ccugggaagcccauagcagcuu

SEQ ID NO: 242338 - RNA, 22 nt, Human
uuguacuuuugucagguggaca

SEQ ID NO: 242339 - RNA, 22 nt, Human
cacgguggcccacaggugcaag

SEQ ID NO: 242340 - RNA, 22 nt, Human
ccugcuggcauucuugcucccu

SEQ ID NO: 242341 - RNA, 22 nt, Human
gucaaaacaaaguuaagaauuc

SEQ ID NO: 242342 - RNA, 22 nt, Human
uccagggagauggcagaggcug

SEQ ID NO: 242343 - RNA, 22 nt, Human
ccuggcuggauggagccccugg

SEQ ID NO: 242344 - RNA, 22 nt, Human
aagucugagugucagugcaagu

SEQ ID NO: 242345 - RNA, 22 nt, Human
auacuacacauugacuauauuu

SEQ ID NO: 242346 - RNA, 22 nt, Human
caggaggcauauuuaaauccaa

SEQ ID NO: 242347 - RNA, 22 nt, Human
acagugucaugucguguucccc

SEQ ID NO: 242348 - RNA, 22 nt, Human
gucaaaugcacagaaccauuaa

SEQ ID NO: 242349 - RNA, 22 nt, Human
ucaaugagaaagacacagucuu

SEQ ID NO: 242350 - RNA, 22 nt, Human
agacaaguguggugagagcagu

SEQ ID NO: 242351 - RNA, 22 nt, Human
ggagcccugcugacaugggugu

SEQ ID NO: 242352 - RNA, 22 nt, Human
agaaucucuacucaaguacuug

SEQ ID NO: 242353 - RNA, 22 nt, Human
gaggcuccuccuuacauuuacc

SEQ ID NO: 242354 - RNA, 22 nt, Human
uuugcaaauucuugucuagccu

SEQ ID NO: 242355 - RNA, 22 nt, Human
augcacaguauguagggucuau

SEQ ID NO: 242356 - RNA, 22 nt, Human
gauuuauugucccuguccugcu

SEQ ID NO: 242357 - RNA, 22 nt, Human
uucucugagucuugguuucuua

SEQ ID NO: 242358 - RNA, 22 nt, Human
aagggcucccaacucaucuuuu

SEQ ID NO: 242359 - RNA, 22 nt, Human
aaacacaccuuuggaacuguga

SEQ ID NO: 242360 - RNA, 22 nt, Human
aucugguaugagguuuugcuuu

SEQ ID NO: 242361 - RNA, 22 nt, Human
uccagcuccacagccucccugu

SEQ ID NO: 242362 - RNA, 22 nt, Human
uggcauuuuguucaguauaugg

SEQ ID NO: 242363 - RNA, 20 nt, Human
aaggcagaguggguuggagc

SEQ ID NO: 242364 - RNA, 22 nt, Human
ucucagagauguuagggaagag

SEQ ID NO: 242365 - RNA, 22 nt, Human
gcauucuuagggccuggggugu

SEQ ID NO: 242366 - RNA, 23 nt, Human
aguuuccacccaggguagaaggg

SEQ ID NO: 242367 - RNA, 22 nt, Human
uggaugcugcugucagggaugg

SEQ ID NO: 242368 - RNA, 22 nt, Human
ccugagauuggcuaguaugagu

SEQ ID NO: 242369 - RNA, 22 nt, Human
uacacaguaaaugguaaauaca

SEQ ID NO: 242370 - RNA, 22 nt, Human
uuuauauguauugacuuugaug

SEQ ID NO: 242371 - RNA, 22 nt, Human
ucagcuccacagcuccucugcc

SEQ ID NO: 242372 - RNA, 23 nt, Human
agucagagagugugagacaacug

SEQ ID NO: 242373 - RNA, 22 nt, Human
cuuauaaaguccaucugaacaa

SEQ ID NO: 242374 - RNA, 22 nt, Human
ugugucuuuggcgaugucugga

SEQ ID NO: 242375 - RNA, 22 nt, Human
uaguuaaagagauccacauucc

SEQ ID NO: 242376 - RNA, 23 nt, Human
ugcuggguaucagaaucacugag

SEQ ID NO: 242377 - RNA, 22 nt, Human
agcaguuaucgaagaaucaggu

SEQ ID NO: 242378 - RNA, 22 nt, Human
gcccagcuggcuuccagcacau

SEQ ID NO: 242379 - RNA, 22 nt, Human
aaugcuguauaucuuagcuaau

SEQ ID NO: 242380 - RNA, 20 nt, Human
agaaacauuucuugagaacu

SEQ ID NO: 242381 - RNA, 22 nt, Human
auucacauuuacaaagcacuca

SEQ ID NO: 242382 - RNA, 22 nt, Human
cagcagcagauucagcgucugg

SEQ ID NO: 242383 - RNA, 22 nt, Human
uaucuguagucagaauaauuuu

SEQ ID NO: 242384 - RNA, 22 nt, Human
agcugccagaugacagugcuau

SEQ ID NO: 242385 - RNA, 22 nt, Human
acaccuuugccccaagucauag

SEQ ID NO: 242386 - RNA, 22 nt, Human
augccacauaauuacaaauaga

SEQ ID NO: 242387 - RNA, 22 nt, Human
aggcuucugcuguauuaacacu

SEQ ID NO: 242388 - RNA, 22 nt, Human
gaaaggcuaugaguuugguaua

SEQ ID NO: 242389 - RNA, 22 nt, Human
ccugggugacagagugagaccu

SEQ ID NO: 242390 - RNA, 22 nt, Human
gcugggcucauuugugugucug

SEQ ID NO: 242391 - RNA, 22 nt, Human
ggcacagagcuuugucccaguu

SEQ ID NO: 242392 - RNA, 19 nt, Human
uuuggcucuggucagagag

SEQ ID NO: 242393 - RNA, 22 nt, Human
gcucugagaggaugcugagcag

SEQ ID NO: 242394 - RNA, 22 nt, Human
cagcuuugugcaaugcagucuc

SEQ ID NO: 242395 - RNA, 22 nt, Human
uagaaagucaaaacacuguguu

SEQ ID NO: 242396 - RNA, 22 nt, Human
ucccagggccgcaaacgaguuu

SEQ ID NO: 242397 - RNA, 22 nt, Human
agcagccuuagguauugugauu

SEQ ID NO: 242398 - RNA, 22 nt, Human
uagggcuguggucaguccucua

SEQ ID NO: 242399 - RNA, 20 nt, Human
aggagggaccuggauuggcg

SEQ ID NO: 242400 - RNA, 22 nt, Human
acaguaacagucuauuucucag

SEQ ID NO: 242401 - RNA, 22 nt, Human
cccaggcuccugcuguguugac

SEQ ID NO: 242402 - RNA, 23 nt, Human
ugaaugauuguacugagcuuuua

SEQ ID NO: 242403 - RNA, 22 nt, Human
gcccaggcuagcguagagugca

SEQ ID NO: 242404 - RNA, 22 nt, Human
uagguggugggauaugagcauc

SEQ ID NO: 242405 - RNA, 20 nt, Human
gauaaauugucucuuaagug

SEQ ID NO: 242406 - RNA, 22 nt, Human
aacagguagggacucuaacuug

SEQ ID NO: 242407 - RNA, 23 nt, Human
cacaaagguuccauucucucacc

SEQ ID NO: 242408 - RNA, 19 nt, Human
ccaggucuggggccagauu

SEQ ID NO: 242409 - RNA, 22 nt, Human
acagcagcaauagcagugacau

SEQ ID NO: 242410 - RNA, 22 nt, Human
cacuggugccagagaacagaau

SEQ ID NO: 242411 - RNA, 22 nt, Human
gcggcuccgaagccaggccgcg

SEQ ID NO: 242412 - RNA, 22 nt, Human
caugugggacuccugcuguuuu

SEQ ID NO: 242413 - RNA, 22 nt, Human
ucaggcugugggcacuggccau

SEQ ID NO: 242414 - RNA, 23 nt, Human
caugugugacaguaucacuguuu

SEQ ID NO: 242415 - RNA, 22 nt, Human
acugugcaguguuguaacccga

SEQ ID NO: 242416 - RNA, 22 nt, Human
acacagagccagggaauacagu

SEQ ID NO: 242417 - RNA, 22 nt, Human
cagucccaggguugguucagcu

SEQ ID NO: 242418 - RNA, 22 nt, Human
gaguugaucauuauuugguuuc

SEQ ID NO: 242419 - RNA, 22 nt, Human
uuugcuuugggagguugucugg

SEQ ID NO: 242420 - RNA, 22 nt, Human
caggcauaaguaauguuuuaug

SEQ ID NO: 242421 - RNA, 22 nt, Human
ucucagagcucacaccuccugg

SEQ ID NO: 242422 - RNA, 22 nt, Human
cccccaccguguuccugcucgg

SEQ ID NO: 242423 - RNA, 22 nt, Human
agaccugguuuaucaccagcau

SEQ ID NO: 242424 - RNA, 22 nt, Human
aagugcugggauuacaggcguc

SEQ ID NO: 242425 - RNA, 19 nt, Human
agaagcugugaaaugaagg

SEQ ID NO: 242426 - RNA, 22 nt, Human
augcaacaggucagccaggaag

SEQ ID NO: 242427 - RNA, 22 nt, Human
gguggggccugcuccagcggcc

SEQ ID NO: 242428 - RNA, 22 nt, Human
auucagaaaguugucauauuug

SEQ ID NO: 242429 - RNA, 22 nt, Human
uuugucaaagaucagaugcuuu

SEQ ID NO: 242430 - RNA, 22 nt, Human
augucuaaaagauaaaguuuaa

SEQ ID NO: 242431 - RNA, 22 nt, Human
cagaaaauaaacauuuguggaa

SEQ ID NO: 242432 - RNA, 22 nt, Human
uaauggcagagucaugcuuucu

SEQ ID NO: 242433 - RNA, 22 nt, Human
cuuagaaggaacaguuuagugc

SEQ ID NO: 242434 - RNA, 17 nt, Human
gauggggcugacaucag

SEQ ID NO: 242435 - RNA, 21 nt, Human
cucagagacaaaugccauccc

SEQ ID NO: 242436 - RNA, 22 nt, Human
augcaggagaccaauuggaugg

SEQ ID NO: 242437 - RNA, 22 nt, Human
cugggggucuugaaagggagag

SEQ ID NO: 242438 - RNA, 22 nt, Human
gcuccuggcuccaggcagccaa

SEQ ID NO: 242439 - RNA, 22 nt, Human
ccagaggggugggccugguuua

SEQ ID NO: 242440 - RNA, 22 nt, Human
cagagccugccucuggcugugg

SEQ ID NO: 242441 - RNA, 22 nt, Human
guacaaguucuacucuauaaau

SEQ ID NO: 242442 - RNA, 22 nt, Human
aacacuuuuuaguaaagauuga

SEQ ID NO: 242443 - RNA, 22 nt, Human
ucccugggccacagcugugagc

SEQ ID NO: 242444 - RNA, 21 nt, Human
cggagcugggcagggcauccc

SEQ ID NO: 242445 - RNA, 22 nt, Human
uagcuuuuaguacuuaauggcu

SEQ ID NO: 242446 - RNA, 22 nt, Human
uuccagauauuuuuauguggaa

SEQ ID NO: 242447 - RNA, 22 nt, Human
uggccuggcccugaggcccugu

SEQ ID NO: 242448 - RNA, 22 nt, Human
ucugggcugcugugcagugacc

SEQ ID NO: 242449 - RNA, 22 nt, Human
cugagccaaaaagcagagcuug

SEQ ID NO: 242450 - RNA, 22 nt, Human
acaggcagcgucauugcugcuc

SEQ ID NO: 242451 - RNA, 22 nt, Human
gucuucugaucugguuagccau

SEQ ID NO: 242452 - RNA, 22 nt, Human
auuauuaggugcucucugacaa

SEQ ID NO: 242453 - RNA, 22 nt, Human
uguuugcuaggguugguauuua

SEQ ID NO: 242454 - RNA, 22 nt, Human
auacagauugcuauacuuacaa

SEQ ID NO: 242455 - RNA, 22 nt, Human
caaauacuuuauauacuucaaa

SEQ ID NO: 242456 - RNA, 22 nt, Human
aaccuuuugcaagugccuugac

SEQ ID NO: 242457 - RNA, 18 nt, Human
ggcuucucacugaccuca

SEQ ID NO: 242458 - RNA, 22 nt, Human
acacaggaagcaauuucagagc

SEQ ID NO: 242459 - RNA, 22 nt, Human
aaaagauuguuagggagaaugu

SEQ ID NO: 242460 - RNA, 22 nt, Human
uggcugccuagucccucagccu

SEQ ID NO: 242461 - RNA, 20 nt, Human
ggcuucacucugcaccacca

SEQ ID NO: 242462 - RNA, 22 nt, Human
uuuagcauauuuaaggaaugau

SEQ ID NO: 242463 - RNA, 22 nt, Human
aauagacauuauuucucuauga

SEQ ID NO: 242464 - RNA, 22 nt, Human
ggcuuuauuuugcaugaaugcu

SEQ ID NO: 242465 - RNA, 22 nt, Human
ugcaccagagcagggugcccaa

SEQ ID NO: 242466 - RNA, 22 nt, Human
gccaccugccaacuugcuggaa

SEQ ID NO: 242467 - RNA, 22 nt, Human
agaagccaaucagcucucugcu

SEQ ID NO: 242468 - RNA, 22 nt, Human
auucaaguacaguuuucuucuu

SEQ ID NO: 242469 - RNA, 22 nt, Human
acuucuucuucagcugggggau

SEQ ID NO: 242470 - RNA, 22 nt, Human
cucuggcuucuaccuugcaguu

SEQ ID NO: 242471 - RNA, 22 nt, Human
ucucauucauacccuacaugcu

SEQ ID NO: 242472 - RNA, 22 nt, Human
uugaggaguguuuagggugagg

SEQ ID NO: 242473 - RNA, 22 nt, Human
gcugcaggcgccugcggucucu

SEQ ID NO: 242474 - RNA, 22 nt, Human
augcaauaaauacuuuccagcu

SEQ ID NO: 242475 - RNA, 22 nt, Human
ccaggcucugagccucacucuu

SEQ ID NO: 242476 - RNA, 22 nt, Human
auuagcauugcuacucucaaga

SEQ ID NO: 242477 - RNA, 22 nt, Human
ggcaguagccagggacuggcag

SEQ ID NO: 242478 - RNA, 22 nt, Human
uacuucuguaagugcgccaagg

SEQ ID NO: 242479 - RNA, 22 nt, Human
cuguaggugauugcuauguuau

SEQ ID NO: 242480 - RNA, 22 nt, Human
uggcaggagccugcggggaggu

SEQ ID NO: 242481 - RNA, 22 nt, Human
cagcugcuuucagcaggaggga

SEQ ID NO: 242482 - RNA, 22 nt, Human
aauuuucacagugcugugagau

SEQ ID NO: 242483 - RNA, 22 nt, Human
uuauucuuuucuccagaauccc

SEQ ID NO: 242484 - RNA, 22 nt, Human
uaauaauuaacagugauggguc

SEQ ID NO: 242485 - RNA, 22 nt, Human
ucucuaaagcacuuuaaccaca

SEQ ID NO: 242486 - RNA, 22 nt, Human
aggcagguguuaccucugguuu

SEQ ID NO: 242487 - RNA, 22 nt, Human
aaugcuuugucugcuccagacu

SEQ ID NO: 242488 - RNA, 22 nt, Human
aaugcaaacagcccagaaucca

SEQ ID NO: 242489 - RNA, 22 nt, Human
aauucagauggaagauucuggc

SEQ ID NO: 242490 - RNA, 22 nt, Human
uagguacagcuaaaaauuaucu

SEQ ID NO: 242491 - RNA, 22 nt, Human
ugaggauuuaaugggacucauu

SEQ ID NO: 242492 - RNA, 22 nt, Human
cauuucaccuuagagaauuauu

SEQ ID NO: 242493 - RNA, 22 nt, Human
aagauaaugugucugucuuugc

SEQ ID NO: 242494 - RNA, 22 nt, Human
uccuugggguaacuccagccug

SEQ ID NO: 242495 - RNA, 22 nt, Human
aaucucagaaacugguggauuu

SEQ ID NO: 242496 - RNA, 22 nt, Human
cccaggagaccugugaaaggac

SEQ ID NO: 242497 - RNA, 22 nt, Human
uggagcucuggaaguucuaagc

SEQ ID NO: 242498 - RNA, 22 nt, Human
cagcaggggaacugugggccag

SEQ ID NO: 242499 - RNA, 22 nt, Human
uuagugguaaggaugaaauuuc

SEQ ID NO: 242500 - RNA, 22 nt, Human
uggagcaggaaacaucuagagg

SEQ ID NO: 242501 - RNA, 22 nt, Human
gggcacaggagaaggaucuggc

SEQ ID NO: 242502 - RNA, 22 nt, Human
aucauuagaccaaacuagagcu

SEQ ID NO: 242503 - RNA, 22 nt, Human
ucaggaaguuuugaaucaacug

SEQ ID NO: 242504 - RNA, 22 nt, Human
aacaaacauuaccuggugcugg

SEQ ID NO: 242505 - RNA, 22 nt, Human
ccugggccuggcgggucggcuc

SEQ ID NO: 242506 - RNA, 22 nt, Human
aguacaacauuagaguaucuua

SEQ ID NO: 242507 - RNA, 22 nt, Human
ucugggaaugaauaagaccugu

SEQ ID NO: 242508 - RNA, 22 nt, Human
uccucccuguaccauuccucug

SEQ ID NO: 242509 - RNA, 22 nt, Human
uagggaugagcaacugguagug

SEQ ID NO: 242510 - RNA, 21 nt, Human
ugcuccuuuaccccacaagac

SEQ ID NO: 242511 - RNA, 22 nt, Human
ugacaagaauuugggacuguua

SEQ ID NO: 242512 - RNA, 22 nt, Human
cauucugugauucuaaaucccu

SEQ ID NO: 242513 - RNA, 19 nt, Human
agagaugcuaagagucuuu

SEQ ID NO: 242514 - RNA, 22 nt, Human
uuagaaccaggguuacgauucu

SEQ ID NO: 242515 - RNA, 22 nt, Human
acagagaccagcaucuucugcc

SEQ ID NO: 242516 - RNA, 22 nt, Human
cugauauggaugccucauuguc

SEQ ID NO: 242517 - RNA, 22 nt, Human
cagaguuuugugaacaacuugg

SEQ ID NO: 242518 - RNA, 22 nt, Human
aguggcagagccaaguagagcc

SEQ ID NO: 242519 - RNA, 22 nt, Human
uaaagacaugguguaggugaac

SEQ ID NO: 242520 - RNA, 22 nt, Human
gaaugcacucacccaucacuca

SEQ ID NO: 242521 - RNA, 22 nt, Human
augaaaugugaaugcuuuucau

SEQ ID NO: 242522 - RNA, 22 nt, Human
ggcugcagaggcgaucugaggu

SEQ ID NO: 242523 - RNA, 23 nt, Human
uacauucauuugcacagccagua

SEQ ID NO: 242524 - RNA, 22 nt, Human
agcccagcaaagggguuugaga

SEQ ID NO: 242525 - RNA, 22 nt, Human
cagcugguuuuagcacaguuag

SEQ ID NO: 242526 - RNA, 22 nt, Human
aaaauccugcugacucgagaug

SEQ ID NO: 242527 - RNA, 22 nt, Human
cauuuguaucugggcugcugug

SEQ ID NO: 242528 - RNA, 22 nt, Human
ugccaggcaggacccuagaacc

SEQ ID NO: 242529 - RNA, 22 nt, Human
auuagauuguaaauguuuucac

SEQ ID NO: 242530 - RNA, 22 nt, Human
aauaguaaaagauacagcuaau

SEQ ID NO: 242531 - RNA, 22 nt, Human
gacccugacucuaaugcuuggc

SEQ ID NO: 242532 - RNA, 22 nt, Human
aauggcuuugacauuuucaaau

SEQ ID NO: 242533 - RNA, 22 nt, Human
uaaggccagccagcaaaucugu

SEQ ID NO: 242534 - RNA, 22 nt, Human
acccagggcagccagcggggag

SEQ ID NO: 242535 - RNA, 22 nt, Human
gcugcagguugggcaacagagu

SEQ ID NO: 242536 - RNA, 22 nt, Human
uuccaagaguaaauucaaauug

SEQ ID NO: 242537 - RNA, 22 nt, Human
gaucaaaagcuggguucuaaaa

SEQ ID NO: 242538 - RNA, 22 nt, Human
aaucaguuguccaaaguucaca

SEQ ID NO: 242539 - RNA, 22 nt, Human
auaugauuccacuauuguaugg

SEQ ID NO: 242540 - RNA, 22 nt, Human
acaaaauuaccuaguuauuuuc

SEQ ID NO: 242541 - RNA, 22 nt, Human
gugagcaggauuucauggugua

SEQ ID NO: 242542 - RNA, 22 nt, Human
cugcuuugacuguuaagaacca

SEQ ID NO: 242543 - RNA, 22 nt, Human
gagcauggauagaaggugggau

SEQ ID NO: 242544 - RNA, 19 nt, Human
ggcuucgaggcuggggaag

SEQ ID NO: 242545 - RNA, 22 nt, Human
aaagauuuaagaauaauuugug

SEQ ID NO: 242546 - RNA, 22 nt, Human
uggcacugccaaccugcuaggu

SEQ ID NO: 242547 - RNA, 22 nt, Human
ccagagaaagcucacaggcagu

SEQ ID NO: 242548 - RNA, 22 nt, Human
uuuggccuuaguccagaagaag

SEQ ID NO: 242549 - RNA, 22 nt, Human
uuauuucaaaagagcuuggggu

SEQ ID NO: 242550 - RNA, 22 nt, Human
uucauaguguuuccuuccagug

SEQ ID NO: 242551 - RNA, 22 nt, Human
agaaauguugaauacacaaaau

SEQ ID NO: 242552 - RNA, 22 nt, Human
uuccaugaagggcagccucuca

SEQ ID NO: 242553 - RNA, 22 nt, Human
gagcugaacaucauggaaaggc

SEQ ID NO: 242554 - RNA, 22 nt, Human
caaauuuuguguguucucuagu

SEQ ID NO: 242555 - RNA, 22 nt, Human
auguacaggucuuggcaaaggg

SEQ ID NO: 242556 - RNA, 22 nt, Human
uuuagcuuuaccucauagauuu

SEQ ID NO: 242557 - RNA, 22 nt, Human
cugaguggaacauaggaugaua

SEQ ID NO: 242558 - RNA, 22 nt, Human
ugcauuuccagauuucuggagu

SEQ ID NO: 242559 - RNA, 22 nt, Human
ucacacauaaaaagaagacuag

SEQ ID NO: 242560 - RNA, 22 nt, Human
guugggguaccuugaggcuggg

SEQ ID NO: 242561 - RNA, 22 nt, Human
gcucagagaugucugcugccuu

SEQ ID NO: 242562 - RNA, 22 nt, Human
ucaggaaggcgccccaucagga

SEQ ID NO: 242563 - RNA, 22 nt, Human
caggcccagcccuuagccaggu

SEQ ID NO: 242564 - RNA, 22 nt, Human
uauugcugaggauugaggcuug

SEQ ID NO: 242565 - RNA, 22 nt, Human
caggagugaaaugaggcccagg

SEQ ID NO: 242566 - RNA, 22 nt, Human
ggcagcucugcuccacaugagu

SEQ ID NO: 242567 - RNA, 22 nt, Human
auugucuucuggucuuaucuuu

SEQ ID NO: 242568 - RNA, 22 nt, Human
uucaaaugauggcaguccuggc

SEQ ID NO: 242569 - RNA, 22 nt, Human
uuggaaaugauuucuauuauua

SEQ ID NO: 242570 - RNA, 22 nt, Human
uagaaaugucgucuccacauuu

SEQ ID NO: 242571 - RNA, 22 nt, Human
auagaagcugauaaacuacuuc

SEQ ID NO: 242572 - RNA, 22 nt, Human
cugcugguaccaguggccguca

SEQ ID NO: 242573 - RNA, 22 nt, Human
gccucaggccgcccugcugcuc

SEQ ID NO: 242574 - RNA, 22 nt, Human
uucugggucacccuucugcuca

SEQ ID NO: 242575 - RNA, 22 nt, Human
cugggccuugccuugcccacag

SEQ ID NO: 242576 - RNA, 22 nt, Human
cugagaggugcugguggcugca

SEQ ID NO: 242577 - RNA, 22 nt, Human
uauaucuggauggacugcagaa

SEQ ID NO: 242578 - RNA, 22 nt, Human
cccucacuucacgcucugcaga

SEQ ID NO: 242579 - RNA, 22 nt, Human
uacauaaugagcuaguuaaguu

SEQ ID NO: 242580 - RNA, 22 nt, Human
caguucucuugaucgucucuug

SEQ ID NO: 242581 - RNA, 22 nt, Human
uuagaaacaaaauaguuauuug

SEQ ID NO: 242582 - RNA, 22 nt, Human
acacauauguggcaacuguaga

SEQ ID NO: 242583 - RNA, 22 nt, Human
acagaauucuaguauguggcuu

SEQ ID NO: 242584 - RNA, 22 nt, Human
agcccuggcccggcugugcuuu

SEQ ID NO: 242585 - RNA, 22 nt, Human
ugcacaaagcauucuagacgca

SEQ ID NO: 242586 - RNA, 22 nt, Human
cugggugauuccuguccaggca

SEQ ID NO: 242587 - RNA, 22 nt, Human
cucuggcagagcuguagacuuc

SEQ ID NO: 242588 - RNA, 22 nt, Human
uaccuggcuggggaauagccag

SEQ ID NO: 242589 - RNA, 22 nt, Human
gccccaggauaaauuuguaaga

SEQ ID NO: 242590 - RNA, 22 nt, Human
aggagguguagauuuccuguca

SEQ ID NO: 242591 - RNA, 17 nt, Human
uuccagcauguuacuaa

SEQ ID NO: 242592 - RNA, 15 nt, Human
aaagugcacccaaua

SEQ ID NO: 242593 - RNA, 22 nt, Human
aagcccugccacccauucacug

SEQ ID NO: 242594 - RNA, 22 nt, Human
cacugggaaucugggaaagaga

SEQ ID NO: 242595 - RNA, 23 nt, Human
cagaaagcccuuuccccacagua

SEQ ID NO: 242596 - RNA, 22 nt, Human
gauuagaauaugucagucauaa

SEQ ID NO: 242597 - RNA, 22 nt, Human
uaacugguagauuuuaaaucgg

SEQ ID NO: 242598 - RNA, 22 nt, Human
uuccuggguucccucucauucu

SEQ ID NO: 242599 - RNA, 22 nt, Human
caggaagcugccggugagcgag

SEQ ID NO: 242600 - RNA, 22 nt, Human
aauaauuagugggacagagaac

SEQ ID NO: 242601 - RNA, 22 nt, Human
uaugcacacaucgcagcaggaa

SEQ ID NO: 242602 - RNA, 22 nt, Human
uccccaggagcaaugauucagu

SEQ ID NO: 242603 - RNA, 22 nt, Human
aaaugucugagacuucugaacu

SEQ ID NO: 242604 - RNA, 22 nt, Human
gccaggaaggcugaagccagaa

SEQ ID NO: 242605 - RNA, 22 nt, Human
ucugaaauacugcagguucucu

SEQ ID NO: 242606 - RNA, 21 nt, Human
cagagcagcguucugcugugg

SEQ ID NO: 242607 - RNA, 22 nt, Human
uacaaaaguaauuacgguuuuu

SEQ ID NO: 242608 - RNA, 22 nt, Human
ugaaugaugaggggagaauaau

SEQ ID NO: 242609 - RNA, 22 nt, Human
gaucuuuucagucuugguaguu

SEQ ID NO: 242610 - RNA, 22 nt, Human
uaugaauucuguucauugauga

SEQ ID NO: 242611 - RNA, 21 nt, Human
uagaauccuggacugggacuc

SEQ ID NO: 242612 - RNA, 22 nt, Human
uguggaaugcuccuaagugaau

SEQ ID NO: 242613 - RNA, 22 nt, Human
agaaccaguuuaagauuugggu

SEQ ID NO: 242614 - RNA, 22 nt, Human
ggccccagauucugggcugggu

SEQ ID NO: 242615 - RNA, 22 nt, Human
cccaguauugagcuacaggccu

SEQ ID NO: 242616 - RNA, 22 nt, Human
gccuggccgcuccgagcuccgc

SEQ ID NO: 242617 - RNA, 20 nt, Human
cugagccaacucucuucuug

SEQ ID NO: 242618 - RNA, 22 nt, Human
ggccccaaaugucaauaguacu

SEQ ID NO: 242619 - RNA, 22 nt, Human
cuaaauguuuuaucuuccuggc

SEQ ID NO: 242620 - RNA, 22 nt, Human
agcuucuggaaggcaaggcuug

SEQ ID NO: 242621 - RNA, 22 nt, Human
uugcauguguaauuuuucuaaa

SEQ ID NO: 242622 - RNA, 22 nt, Human
uagguagauacauguguuggcu

SEQ ID NO: 242623 - RNA, 21 nt, Human
augauucugcaaaugaguagu

SEQ ID NO: 242624 - RNA, 17 nt, Human
ugggguccccgauggug

SEQ ID NO: 242625 - RNA, 21 nt, Human
uggcuuugcccugcuugcccc

SEQ ID NO: 242626 - RNA, 22 nt, Human
ggacagacagugugagugaggc

SEQ ID NO: 242627 - RNA, 22 nt, Human
guaaaucccauccuuucucugg

SEQ ID NO: 242628 - RNA, 22 nt, Human
agagccuguacuuuucugugaa

SEQ ID NO: 242629 - RNA, 22 nt, Human
ucuuuugagggccagaggaaga

SEQ ID NO: 242630 - RNA, 22 nt, Human
acugcagccuugaacucugggc

SEQ ID NO: 242631 - RNA, 18 nt, Human
ggagccagucugucucug

SEQ ID NO: 242632 - RNA, 23 nt, Human
uucaggaaaugaauacagacaca

SEQ ID NO: 242633 - RNA, 22 nt, Human
aggcagcccugugcuggaugcu

SEQ ID NO: 242634 - RNA, 22 nt, Human
ugucaguuuaguugaagaaaga

SEQ ID NO: 242635 - RNA, 22 nt, Human
ucagccaguauuugagugcuca

SEQ ID NO: 242636 - RNA, 22 nt, Human
uggagcuggcuuguggaaguug

SEQ ID NO: 242637 - RNA, 22 nt, Human
gcagcauggagaaguagcuaga

SEQ ID NO: 242638 - RNA, 22 nt, Human
accugagaaugggggcaugugu

SEQ ID NO: 242639 - RNA, 22 nt, Human
ggcaggugcuugucgaaggccu

SEQ ID NO: 242640 - RNA, 22 nt, Human
cugguuuauguaucaucuagaa

SEQ ID NO: 242641 - RNA, 22 nt, Human
uuaucuuguagagauauuuucg

SEQ ID NO: 242642 - RNA, 22 nt, Human
uuucagauuaucucaacuuugg

SEQ ID NO: 242643 - RNA, 22 nt, Human
auaggcuuuguguuuuguuauc

SEQ ID NO: 242644 - RNA, 22 nt, Human
agaaaguuugagaacuguagau

SEQ ID NO: 242645 - RNA, 22 nt, Human
ggcaggcugcuugggucauguc

SEQ ID NO: 242646 - RNA, 22 nt, Human
auggcugggaugggguagagaa

SEQ ID NO: 242647 - RNA, 22 nt, Human
aacauuugugaaguacuuagau

SEQ ID NO: 242648 - RNA, 22 nt, Human
auagaaauggcagcuggugcua

SEQ ID NO: 242649 - RNA, 22 nt, Human
aauaugcaaagcguguuaucug

SEQ ID NO: 242650 - RNA, 22 nt, Human
agaaaauuagauuuuacugugu

SEQ ID NO: 242651 - RNA, 22 nt, Human
uguguccucuuaccucugaccc

SEQ ID NO: 242652 - RNA, 22 nt, Human
aacagucuacugaauaucugcg

SEQ ID NO: 242653 - RNA, 22 nt, Human
uucucaagaacauauguagggu

SEQ ID NO: 242654 - RNA, 20 nt, Human
cugagcugagcuccaugggu

SEQ ID NO: 242655 - RNA, 22 nt, Human
cagcccugucuaugacugauga

SEQ ID NO: 242656 - RNA, 22 nt, Human
accuggaaugggguugagagcu

SEQ ID NO: 242657 - RNA, 22 nt, Human
ccagcucccgcaggcugcacag

SEQ ID NO: 242658 - RNA, 22 nt, Human
acuugaauuaggccuugagaga

SEQ ID NO: 242659 - RNA, 22 nt, Human
uacaacauuuacguuaggcugu

SEQ ID NO: 242660 - RNA, 22 nt, Human
uauccaaaggaacaaucacagc

SEQ ID NO: 242661 - RNA, 22 nt, Human
ccaagcugagcaccaucugauc

SEQ ID NO: 242662 - RNA, 22 nt, Human
caggcagauuugcugcccucca

SEQ ID NO: 242663 - RNA, 22 nt, Human
auuauuagacuuauaugguagu

SEQ ID NO: 242664 - RNA, 22 nt, Human
aucacacuguuauuuuaguuaa

SEQ ID NO: 242665 - RNA, 22 nt, Human
aagggcucuucuauuuauggcc

SEQ ID NO: 242666 - RNA, 22 nt, Human
gaacucuugcagugaaagcuua

SEQ ID NO: 242667 - RNA, 22 nt, Human
gaauuccuuaggcucuugacug

SEQ ID NO: 242668 - RNA, 22 nt, Human
uccccaggaaggcccuuccugg

SEQ ID NO: 242669 - RNA, 22 nt, Human
augauuuuuucuaacacagucg

SEQ ID NO: 242670 - RNA, 22 nt, Human
uuguguccuaagcaccagaugg

SEQ ID NO: 242671 - RNA, 22 nt, Human
ccuggccauagggcccaggaaa

SEQ ID NO: 242672 - RNA, 21 nt, Human
agcugagguaaggcaagagag

SEQ ID NO: 242673 - RNA, 22 nt, Human
aaaucuaggcucauccuggucc

SEQ ID NO: 242674 - RNA, 21 nt, Human
uguuacaguccaaauguuugu

SEQ ID NO: 242675 - RNA, 22 nt, Human
cauuuacagugagaguuuuuac

SEQ ID NO: 242676 - RNA, 22 nt, Human
aagagccagcuagugaagaggc

SEQ ID NO: 242677 - RNA, 22 nt, Human
uuagugcucacguguuagaaag

SEQ ID NO: 242678 - RNA, 22 nt, Human
caaguauauuugaacauguaaa

SEQ ID NO: 242679 - RNA, 22 nt, Human
ucugggaggggcugccauugcu

SEQ ID NO: 242680 - RNA, 22 nt, Human
gcagcaggaauuuaaauuuaua

SEQ ID NO: 242681 - RNA, 22 nt, Human
ggacccugggcucugggccuau

SEQ ID NO: 242682 - RNA, 22 nt, Human
gcucugcucuaacauuccugac

SEQ ID NO: 242683 - RNA, 22 nt, Human
uagcagaggcaaggaugugaau

SEQ ID NO: 242684 - RNA, 22 nt, Human
gcugcccugccucagacuccuc

SEQ ID NO: 242685 - RNA, 22 nt, Human
uuagcuuuagagccauuacugg

SEQ ID NO: 242686 - RNA, 22 nt, Human
agcaaggaaaguaggcacggaa

SEQ ID NO: 242687 - RNA, 22 nt, Human
ugugauuucacuggugacaugu

SEQ ID NO: 242688 - RNA, 22 nt, Human
cagcuucuagcaucggcuuuga

SEQ ID NO: 242689 - RNA, 22 nt, Human
gguucucuaacuuugacuggag

SEQ ID NO: 242690 - RNA, 22 nt, Human
agaaucauuauauuuauuaagc

SEQ ID NO: 242691 - RNA, 22 nt, Human
ucugccaguuuauagacaagcc

SEQ ID NO: 242692 - RNA, 22 nt, Human
cucuccagucaggaacucugac

SEQ ID NO: 242693 - RNA, 22 nt, Human
uguccugggaaugggaugcagu

SEQ ID NO: 242694 - RNA, 22 nt, Human
aggaggcugaacuagggucugg

SEQ ID NO: 242695 - RNA, 22 nt, Human
gacacagggacgugcucugccu

SEQ ID NO: 242696 - RNA, 22 nt, Human
uggcuucuugucuaauuuguua

SEQ ID NO: 242697 - RNA, 21 nt, Human
gcugcccuggcucagcauuca

SEQ ID NO: 242698 - RNA, 22 nt, Human
aaugaucuggcucaggauauca

SEQ ID NO: 242699 - RNA, 22 nt, Human
cugccugugucuauuccuuuuu

SEQ ID NO: 242700 - RNA, 22 nt, Human
gaucucugaaucugaagccuuc

SEQ ID NO: 242701 - RNA, 22 nt, Human
cuguuuauggagguaaggcauc

SEQ ID NO: 242702 - RNA, 22 nt, Human
gcuaaauaaucuucuucugaca

SEQ ID NO: 242703 - RNA, 22 nt, Human
aguuauaugugaaaacacguau

SEQ ID NO: 242704 - RNA, 22 nt, Human
ucacucuguggcccaggcagug

SEQ ID NO: 242705 - RNA, 22 nt, Human
aauaucucaccaugacaaagca

SEQ ID NO: 242706 - RNA, 22 nt, Human
ggagggcaucaaucaggccugg

SEQ ID NO: 242707 - RNA, 22 nt, Human
ggcagggcaggaaagucaggaa

SEQ ID NO: 242708 - RNA, 22 nt, Human
augaggcaguacacacaaagcc

SEQ ID NO: 242709 - RNA, 22 nt, Human
uagaaguugcucaauaaauguu

SEQ ID NO: 242710 - RNA, 22 nt, Human
agauauguuacugcaucauggg

SEQ ID NO: 242711 - RNA, 22 nt, Human
gguggaugcugacuguucugcu

SEQ ID NO: 242712 - RNA, 22 nt, Human
uuuagcaaguauuuacugacua

SEQ ID NO: 242713 - RNA, 22 nt, Human
ucaucaguguccuuaucacuua

SEQ ID NO: 242714 - RNA, 19 nt, Human
uaaggccaaaaguaagugu

SEQ ID NO: 242715 - RNA, 22 nt, Human
gacaugugagagcucgguuuuc

SEQ ID NO: 242716 - RNA, 22 nt, Human
cugggcucugcaguugauguuu

SEQ ID NO: 242717 - RNA, 22 nt, Human
ccugccuucuaaagcgcccgcc

SEQ ID NO: 242718 - RNA, 22 nt, Human
uuuucucaggugcuuaucuaag

SEQ ID NO: 242719 - RNA, 22 nt, Human
cuaaacuucauauguugcuuua

SEQ ID NO: 242720 - RNA, 20 nt, Human
aacaguaccauuuaucucag

SEQ ID NO: 242721 - RNA, 22 nt, Human
ccagugccuuuuguggguuugu

SEQ ID NO: 242722 - RNA, 23 nt, Human
ggccacuuugugucaguaugugc

SEQ ID NO: 242723 - RNA, 22 nt, Human
cugggccuaggauggaagggcc

SEQ ID NO: 242724 - RNA, 22 nt, Human
cuggccacugguggucauaggc

SEQ ID NO: 242725 - RNA, 22 nt, Human
cugauuuacauauacaaaagau

SEQ ID NO: 242726 - RNA, 22 nt, Human
agggaacagugaaaggcaucag

SEQ ID NO: 242727 - RNA, 22 nt, Human
uuaauuacaaaacacauagguu

SEQ ID NO: 242728 - RNA, 22 nt, Human
uuugcuuuguuuaaaaguggua

SEQ ID NO: 242729 - RNA, 22 nt, Human
ugggaucuuuugagauacugug

SEQ ID NO: 242730 - RNA, 22 nt, Human
ugcagggcuuccucuuggaguu

SEQ ID NO: 242731 - RNA, 22 nt, Human
cauggcaggaggcugcuggcag

SEQ ID NO: 242732 - RNA, 22 nt, Human
caagauggacauaaggagagaa

SEQ ID NO: 242733 - RNA, 22 nt, Human
auucagcaaacauuuauugugu

SEQ ID NO: 242734 - RNA, 22 nt, Human
aacuuauugaacauucucgaau

SEQ ID NO: 242735 - RNA, 22 nt, Human
acuguaaagcuuuucucaugcg

SEQ ID NO: 242736 - RNA, 22 nt, Human
cugccacuuuggagugcucaga

SEQ ID NO: 242737 - RNA, 22 nt, Human
aggaccugagaguuggaaaucc

SEQ ID NO: 242738 - RNA, 22 nt, Human
agguuaggaaauagggcuguaa

SEQ ID NO: 242739 - RNA, 22 nt, Human
ucuagaaacaugacauugaucu

SEQ ID NO: 242740 - RNA, 22 nt, Human
uggcccagugcuuaugcucuga

SEQ ID NO: 242741 - RNA, 22 nt, Human
aaguuucaugauguaauuauug

SEQ ID NO: 242742 - RNA, 22 nt, Human
acccagggucaccccguagggu

SEQ ID NO: 242743 - RNA, 15 nt, Human
agacagacaguggga

SEQ ID NO: 242744 - RNA, 17 nt, Human
cauuuguugaucaguug

SEQ ID NO: 242745 - RNA, 22 nt, Human
ucagacaggccucuccagccuc

SEQ ID NO: 242746 - RNA, 22 nt, Human
uggcugcagugcuugagauguc

SEQ ID NO: 242747 - RNA, 19 nt, Human
uccagcugguaugcccaga

SEQ ID NO: 242748 - RNA, 22 nt, Human
gagaggcccugaagcccacaga

SEQ ID NO: 242749 - RNA, 22 nt, Human
gcagcaucuagggcacuggccu

SEQ ID NO: 242750 - RNA, 22 nt, Human
gacaggauauuaugauagauuc

SEQ ID NO: 242751 - RNA, 22 nt, Human
cucacugcccugaaguuggguu

SEQ ID NO: 242752 - RNA, 22 nt, Human
ccuggagggcgccgcacagucc

SEQ ID NO: 242753 - RNA, 22 nt, Human
aggcucagcaucugauucauau

SEQ ID NO: 242754 - RNA, 22 nt, Human
uugcagcagggugaauucacuc

SEQ ID NO: 242755 - RNA, 22 nt, Human
uggcucuggggacaguaagucc

SEQ ID NO: 242756 - RNA, 22 nt, Human
gccuggcuaguuagugucaggu

SEQ ID NO: 242757 - RNA, 22 nt, Human
ggaggcagaauagagugugggu

SEQ ID NO: 242758 - RNA, 22 nt, Human
ggccuugcugcuuccagaaggu

SEQ ID NO: 242759 - RNA, 22 nt, Human
cccaggagccaucugucuuggc

SEQ ID NO: 242760 - RNA, 22 nt, Human
uccugguggucugugcuucuuc

SEQ ID NO: 242761 - RNA, 22 nt, Human
uugcuuuauuccuagcccuugu

SEQ ID NO: 242762 - RNA, 22 nt, Human
ggcaagugcuuccccaaccaca

SEQ ID NO: 242763 - RNA, 22 nt, Human
ucuucaaguuccaaagugcagg

SEQ ID NO: 242764 - RNA, 22 nt, Human
ccaggaagcucugcuccacggg

SEQ ID NO: 242765 - RNA, 22 nt, Human
ccaggccucaccugcccaccua

SEQ ID NO: 242766 - RNA, 22 nt, Human
uccuguuuaggcuguggucugg

SEQ ID NO: 242767 - RNA, 22 nt, Human
cugguaguuugcaaaauggugu

SEQ ID NO: 242768 - RNA, 22 nt, Human
cauuuagagucuugcaauuuua

SEQ ID NO: 242769 - RNA, 22 nt, Human
uuacacaaacacauuccagaua

SEQ ID NO: 242770 - RNA, 22 nt, Human
uggcuuuacuuaaacugaauca

SEQ ID NO: 242771 - RNA, 22 nt, Human
ccagagcccagggucaugcagg

SEQ ID NO: 242772 - RNA, 22 nt, Human
ggagcuggucagccuugagcau

SEQ ID NO: 242773 - RNA, 22 nt, Human
ucucucaaccucggcacuauug

SEQ ID NO: 242774 - RNA, 22 nt, Human
ucuaggguggagcugggaaucc

SEQ ID NO: 242775 - RNA, 22 nt, Human
aagacauuguggagauguugcu

SEQ ID NO: 242776 - RNA, 22 nt, Human
gcacagaaaugucuacacaugu

SEQ ID NO: 242777 - RNA, 22 nt, Human
cuguccuccggccaccuacagu

SEQ ID NO: 242778 - RNA, 22 nt, Human
cagugcaguggcugagcuggag

SEQ ID NO: 242779 - RNA, 22 nt, Human
gcucuggcuuggggcacucguc

SEQ ID NO: 242780 - RNA, 22 nt, Human
uaaaguuuguagcaauugauau

SEQ ID NO: 242781 - RNA, 22 nt, Human
acacuaaucuuuuauuugguuu

SEQ ID NO: 242782 - RNA, 22 nt, Human
acuaaagaugucuaaauauauu

SEQ ID NO: 242783 - RNA, 22 nt, Human
ucaggauguccaaaauccagcc

SEQ ID NO: 242784 - RNA, 22 nt, Human
ugugccuacugauagagccaag

SEQ ID NO: 242785 - RNA, 22 nt, Human
guggcuucugcggugugcgcag

SEQ ID NO: 242786 - RNA, 22 nt, Human
ccaggucuuguuugacaucaau

SEQ ID NO: 242787 - RNA, 22 nt, Human
agcuccagcccuaguacagcug

SEQ ID NO: 242788 - RNA, 22 nt, Human
gaggcagcggcucacagagaaa

SEQ ID NO: 242789 - RNA, 22 nt, Human
caagggccaucugagggcacug

SEQ ID NO: 242790 - RNA, 22 nt, Human
ccuggcuuuagcugccuucccu

SEQ ID NO: 242791 - RNA, 22 nt, Human
ucaaugagccagaauguaguac

SEQ ID NO: 242792 - RNA, 22 nt, Human
uuucuuuccagagugauuggca

SEQ ID NO: 242793 - RNA, 22 nt, Human
gcagacagaagcuaaguagaca

SEQ ID NO: 242794 - RNA, 22 nt, Human
uggcccuguggcuucagaacag

SEQ ID NO: 242795 - RNA, 23 nt, Human
gcuuuuaaaccugugacugccgc

SEQ ID NO: 242796 - RNA, 22 nt, Human
cacaugaauaaggcuuuauugu

SEQ ID NO: 242797 - RNA, 22 nt, Human
uaaaggcuuuuagugaugguaa

SEQ ID NO: 242798 - RNA, 22 nt, Human
uucauuuauucagcagguauuu

SEQ ID NO: 242799 - RNA, 22 nt, Human
uuuucagaggccuaagagguuu

SEQ ID NO: 242800 - RNA, 22 nt, Human
uccugugcuuuggaggauguuc

SEQ ID NO: 242801 - RNA, 22 nt, Human
ugacaauugcagacacagaagu

SEQ ID NO: 242802 - RNA, 22 nt, Human
aaauauguuuuccaguugucau

SEQ ID NO: 242803 - RNA, 19 nt, Human
agacacuggauggaaaaug

SEQ ID NO: 242804 - RNA, 22 nt, Human
cauucugggucuggcucaggga

SEQ ID NO: 242805 - RNA, 22 nt, Human
agcuugaaccuaaaacaauaau

SEQ ID NO: 242806 - RNA, 22 nt, Human
ucuuggcucccuuguaggcccu

SEQ ID NO: 242807 - RNA, 22 nt, Human
uugcuguagcucauuucacucu

SEQ ID NO: 242808 - RNA, 22 nt, Human
uuguuuuaucuuucuacagacu

SEQ ID NO: 242809 - RNA, 22 nt, Human
guuuccucugcugguuuucauu

SEQ ID NO: 242810 - RNA, 22 nt, Human
agccacugucugaacuucugug

SEQ ID NO: 242811 - RNA, 22 nt, Human
cagggcucccaaauaucucuuc

SEQ ID NO: 242812 - RNA, 23 nt, Human
uuauugaggguguagauuggugu

SEQ ID NO: 242813 - RNA, 22 nt, Human
uauauaugggggaagcuggaug

SEQ ID NO: 242814 - RNA, 20 nt, Human
agggaggugcugggccugag

SEQ ID NO: 242815 - RNA, 22 nt, Human
gagcacaggcugcugugaacug

SEQ ID NO: 242816 - RNA, 22 nt, Human
ucuagagauuggacuuccuaga

SEQ ID NO: 242817 - RNA, 20 nt, Human
uugauucaagggcugaugga

SEQ ID NO: 242818 - RNA, 22 nt, Human
ggcccagccucagacaugcccu

SEQ ID NO: 242819 - RNA, 22 nt, Human
cacuguucaucaaaacugcucu

SEQ ID NO: 242820 - RNA, 21 nt, Human
ucagaacaauuccaugccucc

SEQ ID NO: 242821 - RNA, 22 nt, Human
agaaaacuugucacagcucuca

SEQ ID NO: 242822 - RNA, 22 nt, Human
gccaggcauguccucugcagaa

SEQ ID NO: 242823 - RNA, 19 nt, Human
uucucugugcuagacucug

SEQ ID NO: 242824 - RNA, 22 nt, Human
agucugguguucucacacuagu

SEQ ID NO: 242825 - RNA, 22 nt, Human
aaacagauugaaauucguagua

SEQ ID NO: 242826 - RNA, 22 nt, Human
gcugccuccugagauuugggca

SEQ ID NO: 242827 - RNA, 22 nt, Human
caguuugucuugauucagaaca

SEQ ID NO: 242828 - RNA, 22 nt, Human
aguccagguggaccuuggccag

SEQ ID NO: 242829 - RNA, 22 nt, Human
cugggaacaggcacugcuguca

SEQ ID NO: 242830 - RNA, 22 nt, Human
cauaauuauaaacgcaaguuca

SEQ ID NO: 242831 - RNA, 22 nt, Human
guccagagccggaagagugaca

SEQ ID NO: 242832 - RNA, 22 nt, Human
cuuuccagaccuccuuguagcu

SEQ ID NO: 242833 - RNA, 22 nt, Human
cugcagcugucucuacugggca

SEQ ID NO: 242834 - RNA, 22 nt, Human
agacaugcaauaaugugcacuc

SEQ ID NO: 242835 - RNA, 22 nt, Human
gcauucauguccuuccugaacg

SEQ ID NO: 242836 - RNA, 22 nt, Human
auuauuuauccucuuggucuau

SEQ ID NO: 242837 - RNA, 22 nt, Human
gagcuuggacaccuuggcaggu

SEQ ID NO: 242838 - RNA, 22 nt, Human
caaagguauucucauuuuggaa

SEQ ID NO: 242839 - RNA, 22 nt, Human
cacagggccuggggcagcugcu

SEQ ID NO: 242840 - RNA, 22 nt, Human
cggcagugggcgccaggucucc

SEQ ID NO: 242841 - RNA, 21 nt, Human
uuagaacacuugcucuuggaa

SEQ ID NO: 242842 - RNA, 22 nt, Human
cugaauuaagcauuacauacau

SEQ ID NO: 242843 - RNA, 22 nt, Human
acugucuguccugcucuccgug

SEQ ID NO: 242844 - RNA, 22 nt, Human
ccaggccagggcugcagcgagc

SEQ ID NO: 242845 - RNA, 22 nt, Human
cagacacuauuguguauaaauc

SEQ ID NO: 242846 - RNA, 20 nt, Human
cccuccagcaaccaggacuu

SEQ ID NO: 242847 - RNA, 18 nt, Human
ggugagggagcuggaagc

SEQ ID NO: 242848 - RNA, 22 nt, Human
ucaacaauaggauauagcaggu

SEQ ID NO: 242849 - RNA, 17 nt, Human
ggaaaaggaugauacag

SEQ ID NO: 242850 - RNA, 22 nt, Human
ggagaugacacaauuuauuuau

SEQ ID NO: 242851 - RNA, 22 nt, Human
cuacauuuugugauuaugaaau

SEQ ID NO: 242852 - RNA, 22 nt, Human
ggguccagcgacagcaggcuca

SEQ ID NO: 242853 - RNA, 22 nt, Human
ccagcuuuccugcgaguugauu

SEQ ID NO: 242854 - RNA, 22 nt, Human
gaggccugggagccuguccucc

SEQ ID NO: 242855 - RNA, 22 nt, Human
aggagccagcguuccucaggau

SEQ ID NO: 242856 - RNA, 22 nt, Human
ccuucuccugccuuggguucau

SEQ ID NO: 242857 - RNA, 22 nt, Human
guuuucugauuagcaaaucuga

SEQ ID NO: 242858 - RNA, 22 nt, Human
gggccuggggacaccaccauga

SEQ ID NO: 242859 - RNA, 22 nt, Human
ugcauuaaaaugauggagaaau

SEQ ID NO: 242860 - RNA, 22 nt, Human
ggaaucuuaauggcauggaguu

SEQ ID NO: 242861 - RNA, 22 nt, Human
uugagguaguacuuauuauugg

SEQ ID NO: 242862 - RNA, 22 nt, Human
uaugauauucuaaauugacacc

SEQ ID NO: 242863 - RNA, 22 nt, Human
cccaggcugaugggaugggcca

SEQ ID NO: 242864 - RNA, 22 nt, Human
gcuccaaaguacagugacuuac

SEQ ID NO: 242865 - RNA, 22 nt, Human
uuaacagagaacauagaaguag

SEQ ID NO: 242866 - RNA, 22 nt, Human
aucaaagugauuuguaaacagg

SEQ ID NO: 242867 - RNA, 22 nt, Human
ugagcaguucgacuucuucccc

SEQ ID NO: 242868 - RNA, 22 nt, Human
uuucuuuaggcuguguugccaa

SEQ ID NO: 242869 - RNA, 22 nt, Human
cacacaggagagugcuggaggu

SEQ ID NO: 242870 - RNA, 19 nt, Human
cuccggccagcaacugcau

SEQ ID NO: 242871 - RNA, 22 nt, Human
aucugcaucagacuuugcauga

SEQ ID NO: 242872 - RNA, 22 nt, Human
ccaggcugcuguugguguccgc

SEQ ID NO: 242873 - RNA, 22 nt, Human
aaggaacacuacaaggcuggga

SEQ ID NO: 242874 - RNA, 22 nt, Human
ucagaaaugaucguuauucauu

SEQ ID NO: 242875 - RNA, 22 nt, Human
uuauucuuuaaacauauauguu

SEQ ID NO: 242876 - RNA, 22 nt, Human
aacaccuaaaaaucauuguuga

SEQ ID NO: 242877 - RNA, 22 nt, Human
cacccuggcuggaggugcagug

SEQ ID NO: 242878 - RNA, 22 nt, Human
cccagaggugacaucccauucu

SEQ ID NO: 242879 - RNA, 22 nt, Human
acacaaacagucuauagcacca

SEQ ID NO: 242880 - RNA, 21 nt, Human
aaaaaugaaguuguucaggaa

SEQ ID NO: 242881 - RNA, 22 nt, Human
aacacacgccuccuccaugggg

SEQ ID NO: 242882 - RNA, 22 nt, Human
agcucccaauugacuugaacua

SEQ ID NO: 242883 - RNA, 22 nt, Human
agcugugguucugggcagcgac

SEQ ID NO: 242884 - RNA, 22 nt, Human
guuguacaggcagggaaacuga

SEQ ID NO: 242885 - RNA, 22 nt, Human
uggaggcauaggccugggcccu

SEQ ID NO: 242886 - RNA, 22 nt, Human
auauugaacccuacagacugua

SEQ ID NO: 242887 - RNA, 22 nt, Human
ugcuggguggacuuggcucuca

SEQ ID NO: 242888 - RNA, 22 nt, Human
agcuccugauacaugcaggaau

SEQ ID NO: 242889 - RNA, 20 nt, Human
acuccagguggcaugaggac

SEQ ID NO: 242890 - RNA, 22 nt, Human
cugugucccaguaccuugggua

SEQ ID NO: 242891 - RNA, 22 nt, Human
ccagggagcccacaggacaaug

SEQ ID NO: 242892 - RNA, 22 nt, Human
uauuuguuccagagauaaaaau

SEQ ID NO: 242893 - RNA, 22 nt, Human
gagcccagguucugcuuccagc

SEQ ID NO: 242894 - RNA, 22 nt, Human
aagccagguuccauggaggagc

SEQ ID NO: 242895 - RNA, 22 nt, Human
caggagugucuccacacagcaa

SEQ ID NO: 242896 - RNA, 22 nt, Human
agcuaugugauuuaaacaaggu

SEQ ID NO: 242897 - RNA, 22 nt, Human
uguuacaggaaauagaauuacc

SEQ ID NO: 242898 - RNA, 22 nt, Human
gaaauaacagcucuggaagagu

SEQ ID NO: 242899 - RNA, 23 nt, Human
acuuggaagcagugaacaacuuu

SEQ ID NO: 242900 - RNA, 22 nt, Human
uggagguggcacaagggagguc

SEQ ID NO: 242901 - RNA, 22 nt, Human
aaacauuguacauucuguagcu

SEQ ID NO: 242902 - RNA, 22 nt, Human
gcauugaguccacucugucuuu

SEQ ID NO: 242903 - RNA, 22 nt, Human
acugaugaagaguaccacuguu

SEQ ID NO: 242904 - RNA, 22 nt, Human
auuuauucuccagauggcgaga

SEQ ID NO: 242905 - RNA, 22 nt, Human
cagaaauacccagcauuuggag

SEQ ID NO: 242906 - RNA, 22 nt, Human
auuuccauacacccauuucuga

SEQ ID NO: 242907 - RNA, 22 nt, Human
gcuacccugggaaucucccuca

SEQ ID NO: 242908 - RNA, 22 nt, Human
aaauccuaaaaguuugacuuaa

SEQ ID NO: 242909 - RNA, 22 nt, Human
gagaugaauguaaacaaaggca

SEQ ID NO: 242910 - RNA, 22 nt, Human
uccaggcaaaaggaacugcuug

SEQ ID NO: 242911 - RNA, 22 nt, Human
caggccagcagggccuccgugg

SEQ ID NO: 242912 - RNA, 22 nt, Human
cacuuauuaugggcuaggaacu

SEQ ID NO: 242913 - RNA, 22 nt, Human
gagccuggguccuucccuggga

SEQ ID NO: 242914 - RNA, 20 nt, Human
cacaggcuuacaguuuagau

SEQ ID NO: 242915 - RNA, 22 nt, Human
uuaaugcagaaaucaaacugac

SEQ ID NO: 242916 - RNA, 22 nt, Human
ggcccuguuagagcucccacaa

SEQ ID NO: 242917 - RNA, 22 nt, Human
ccacaggaggauguucagacaa

SEQ ID NO: 242918 - RNA, 22 nt, Human
aggcacugacucaagggagcca

SEQ ID NO: 242919 - RNA, 22 nt, Human
cacaagucuguggucuccaaca

SEQ ID NO: 242920 - RNA, 22 nt, Human
auuuacagaaacuuaaucauag

SEQ ID NO: 242921 - RNA, 20 nt, Human
cagcaggaaaagugccucag

SEQ ID NO: 242922 - RNA, 22 nt, Human
uuacacuucugaaagccuaggu

SEQ ID NO: 242923 - RNA, 22 nt, Human
uuuuagaaagaucccuggcagg

SEQ ID NO: 242924 - RNA, 22 nt, Human
agugaguggagagcucuagguu

SEQ ID NO: 242925 - RNA, 23 nt, Human
aaaggcuaucaaaguuuugcuga

SEQ ID NO: 242926 - RNA, 22 nt, Human
aaggccagcuggagggaugagg

SEQ ID NO: 242927 - RNA, 22 nt, Human
ugaguacucggagugcuuugga

SEQ ID NO: 242928 - RNA, 22 nt, Human
aaugacaauaaucauuaacuuu

SEQ ID NO: 242929 - RNA, 22 nt, Human
ugguacaaucacagcucacugu

SEQ ID NO: 242930 - RNA, 22 nt, Human
uagaaagaacuucauguaaaac

SEQ ID NO: 242931 - RNA, 19 nt, Human
aauauuuuagccucuuccu

SEQ ID NO: 242932 - RNA, 22 nt, Human
gccagcaguauguccuggcagu

SEQ ID NO: 242933 - RNA, 22 nt, Human
caaagcagaagguucuguggua

SEQ ID NO: 242934 - RNA, 22 nt, Human
augaggcacagagauguuaaug

SEQ ID NO: 242935 - RNA, 22 nt, Human
ugcccuugggauuuagguaagg

SEQ ID NO: 242936 - RNA, 22 nt, Human
ggcucccuggaaaucccgaggc

SEQ ID NO: 242937 - RNA, 22 nt, Human
gcaaacauguugugagauacca

SEQ ID NO: 242938 - RNA, 22 nt, Human
agacuacauaugccacaugaag

SEQ ID NO: 242939 - RNA, 22 nt, Human
aaacugguaaucggcaagugag

SEQ ID NO: 242940 - RNA, 22 nt, Human
cgcaggcuccggggugcccugg

SEQ ID NO: 242941 - RNA, 22 nt, Human
ggcuguccuuggccaaggcacu

SEQ ID NO: 242942 - RNA, 22 nt, Human
agggccuggcgcguggccgccg

SEQ ID NO: 242943 - RNA, 22 nt, Human
cagggcacggagaagucacccc

SEQ ID NO: 242944 - RNA, 23 nt, Human
ccugugacacuguuugugguaag

SEQ ID NO: 242945 - RNA, 22 nt, Human
accucuuaauauugcaccuucu

SEQ ID NO: 242946 - RNA, 22 nt, Human
cugcugccggcgagccucccuu

SEQ ID NO: 242947 - RNA, 17 nt, Human
uucaaagcuuaucaagg

SEQ ID NO: 242948 - RNA, 20 nt, Human
agguccuguuccuugucucc

SEQ ID NO: 242949 - RNA, 22 nt, Human
gccagcugcuggaacagcgcga

SEQ ID NO: 242950 - RNA, 20 nt, Human
agacccucuggacugggccc

SEQ ID NO: 242951 - RNA, 22 nt, Human
aauaaugauaaugguuauagcu

SEQ ID NO: 242952 - RNA, 22 nt, Human
uacaaagucagaauaacaggug

SEQ ID NO: 242953 - RNA, 22 nt, Human
uugcuuuauauucaagagagga

SEQ ID NO: 242954 - RNA, 22 nt, Human
ggccagcuucucugcugccugu

SEQ ID NO: 242955 - RNA, 22 nt, Human
gcucaggccuggcuauccauug

SEQ ID NO: 242956 - RNA, 22 nt, Human
uucacuguaugagagggcuuga

SEQ ID NO: 242957 - RNA, 22 nt, Human
cagacuuucugacucccuugcc

SEQ ID NO: 242958 - RNA, 22 nt, Human
uaauaacaauuguaggacauga

SEQ ID NO: 242959 - RNA, 22 nt, Human
aagggcaggaaaagauggaugu

SEQ ID NO: 242960 - RNA, 22 nt, Human
gacagcaggugcuugggaaagg

SEQ ID NO: 242961 - RNA, 22 nt, Human
uagggaugcuuaguaggaccca

SEQ ID NO: 242962 - RNA, 18 nt, Human
cuuguucuucucuuggcg

SEQ ID NO: 242963 - RNA, 22 nt, Human
ccugggcucaggcuugggcagc

SEQ ID NO: 242964 - RNA, 22 nt, Human
agcagcuuaucuuggagaggca

SEQ ID NO: 242965 - RNA, 22 nt, Human
caaauagaacucacagacaaga

SEQ ID NO: 242966 - RNA, 22 nt, Human
acauuguuugagaauacagaug

SEQ ID NO: 242967 - RNA, 22 nt, Human
uucauguuuccucuugugcugc

SEQ ID NO: 242968 - RNA, 18 nt, Human
cucaguguuugcugaaaa

SEQ ID NO: 242969 - RNA, 22 nt, Human
augggacaggcaugggacuuag

SEQ ID NO: 242970 - RNA, 22 nt, Human
uuuccucugucaugacagcuga

SEQ ID NO: 242971 - RNA, 23 nt, Human
agugccauugacccuaugucuau

SEQ ID NO: 242972 - RNA, 22 nt, Human
agcaaaguagcugcuguucuua

SEQ ID NO: 242973 - RNA, 22 nt, Human
gcaggcucagagcagauuagca

SEQ ID NO: 242974 - RNA, 22 nt, Human
aggagcucaaagaugccaggag

SEQ ID NO: 242975 - RNA, 22 nt, Human
aucucuucugagcaauuccugu

SEQ ID NO: 242976 - RNA, 23 nt, Human
ccacuggagaaaguggcaggugg

SEQ ID NO: 242977 - RNA, 22 nt, Human
gcugucucucccaggauccaug

SEQ ID NO: 242978 - RNA, 22 nt, Human
aguggggccgcgguccugcccu

SEQ ID NO: 242979 - RNA, 22 nt, Human
cccaggaggcagagguuggagc

SEQ ID NO: 242980 - RNA, 22 nt, Human
agaaauuaugcaguaguuuuau

SEQ ID NO: 242981 - RNA, 22 nt, Human
uaugcauauagaugcacacaca

SEQ ID NO: 242982 - RNA, 22 nt, Human
augacacucgaaaaauugaugc

SEQ ID NO: 242983 - RNA, 22 nt, Human
gugggucccuaaacacauccca

SEQ ID NO: 242984 - RNA, 22 nt, Human
ucagaagccaccuuuuguuggg

SEQ ID NO: 242985 - RNA, 22 nt, Human
aggcucccaagcacugacccca

SEQ ID NO: 242986 - RNA, 22 nt, Human
aggccagcaccagagucaagaa

SEQ ID NO: 242987 - RNA, 22 nt, Human
ugcagcugaccagcaaguccug

SEQ ID NO: 242988 - RNA, 21 nt, Human
uucugggccaugcugcuucuc

SEQ ID NO: 242989 - RNA, 22 nt, Human
guacauuggcaacucucuuaga

SEQ ID NO: 242990 - RNA, 22 nt, Human
uaggcagagaggccauaagaau

SEQ ID NO: 242991 - RNA, 22 nt, Human
cauuugaacuaauaacugugcu

SEQ ID NO: 242992 - RNA, 22 nt, Human
gagaggcagaggccugaaaccg

SEQ ID NO: 242993 - RNA, 22 nt, Human
acuugauuuuuauaauaaaugg

SEQ ID NO: 242994 - RNA, 22 nt, Human
gaaaguuauugaaccuuauuua

SEQ ID NO: 242995 - RNA, 22 nt, Human
agcuccugggagcaggugguac

SEQ ID NO: 242996 - RNA, 22 nt, Human
acuuagauuuccuuacugggug

SEQ ID NO: 242997 - RNA, 22 nt, Human
ugcuggggauccguaccaaccc

SEQ ID NO: 242998 - RNA, 22 nt, Human
augagugucauguaugagauau

SEQ ID NO: 242999 - RNA, 22 nt, Human
ucuuccaggaccuggggcucca

SEQ ID NO: 243000 - RNA, 22 nt, Human
agcuacaguggacaagugaacu

SEQ ID NO: 243001 - RNA, 22 nt, Human
ucucagagaggggccgggccuu

SEQ ID NO: 243002 - RNA, 22 nt, Human
auguuucugaguguauauacau

SEQ ID NO: 243003 - RNA, 22 nt, Human
auuugggaguugcuagugaguu

SEQ ID NO: 243004 - RNA, 22 nt, Human
ggagggaguuucauuccugccc

SEQ ID NO: 243005 - RNA, 22 nt, Human
agauccugccaauggaagcagg

SEQ ID NO: 243006 - RNA, 20 nt, Human
aagucacuuaagaugggcag

SEQ ID NO: 243007 - RNA, 23 nt, Human
uuacuacacaaguaacgauuccc

SEQ ID NO: 243008 - RNA, 22 nt, Human
cugcaucauuuucagacaaugg

SEQ ID NO: 243009 - RNA, 22 nt, Human
auacugaugaugugaagaaaca

SEQ ID NO: 243010 - RNA, 22 nt, Human
cugaggccguuggugggccuua

SEQ ID NO: 243011 - RNA, 22 nt, Human
uuuuaguuuggauuucuaaagc

SEQ ID NO: 243012 - RNA, 22 nt, Human
ucucagugauggcccauuugga

SEQ ID NO: 243013 - RNA, 22 nt, Human
cucaggcaguucuguagccucc

SEQ ID NO: 243014 - RNA, 22 nt, Human
cugcagggcauuguaacucuuu

SEQ ID NO: 243015 - RNA, 23 nt, Human
agcaaaguuguugcuaaccucau

SEQ ID NO: 243016 - RNA, 22 nt, Human
aacauagagacaggaagugcuu

SEQ ID NO: 243017 - RNA, 22 nt, Human
acagaauaguagcuuaaaguca

SEQ ID NO: 243018 - RNA, 22 nt, Human
cagcuuuaccuuuaggaguaac

SEQ ID NO: 243019 - RNA, 22 nt, Human
ucucugagcgcauuccuccggc

SEQ ID NO: 243020 - RNA, 22 nt, Human
gccaaauuugugagcccccaag

SEQ ID NO: 243021 - RNA, 22 nt, Human
gaacucagagccugagcuagga

SEQ ID NO: 243022 - RNA, 22 nt, Human
aagugcaucacuacucauuaca

SEQ ID NO: 243023 - RNA, 22 nt, Human
ugcugcacgauaaauaauuucu

SEQ ID NO: 243024 - RNA, 22 nt, Human
cuugugcauuucauuccucagg

SEQ ID NO: 243025 - RNA, 22 nt, Human
acagaauauuguaagugccacu

SEQ ID NO: 243026 - RNA, 19 nt, Human
gcucagagccaugggggcu

SEQ ID NO: 243027 - RNA, 22 nt, Human
cuccagagucacacugccuggg

SEQ ID NO: 243028 - RNA, 22 nt, Human
ugcaggaccuugauccuggacu

SEQ ID NO: 243029 - RNA, 22 nt, Human
aaaaauacuucacuucugggug

SEQ ID NO: 243030 - RNA, 22 nt, Human
cagugucaggaucaguauauuu

SEQ ID NO: 243031 - RNA, 22 nt, Human
uuucauguuggauacuguuuca

SEQ ID NO: 243032 - RNA, 22 nt, Human
gaggcaguuccugagugacaag

SEQ ID NO: 243033 - RNA, 20 nt, Human
caaggcagaccagagugagu

SEQ ID NO: 243034 - RNA, 22 nt, Human
ccaagcugccugaggcaaauuu

SEQ ID NO: 243035 - RNA, 22 nt, Human
cccaggcagugugugcaugcgu

SEQ ID NO: 243036 - RNA, 22 nt, Human
acacaugaaagacauuaaggug

SEQ ID NO: 243037 - RNA, 22 nt, Human
ucacagaauuuuugcuuccagu

SEQ ID NO: 243038 - RNA, 22 nt, Human
cagcugagcaucacuagucugg

SEQ ID NO: 243039 - RNA, 22 nt, Human
aaguucuacuguggguaaaaug

SEQ ID NO: 243040 - RNA, 22 nt, Human
guggggcuggaagauggguacu

SEQ ID NO: 243041 - RNA, 20 nt, Human
gcagagccucacugcaaggg

SEQ ID NO: 243042 - RNA, 22 nt, Human
aaguauucuacaaagaaauuga

SEQ ID NO: 243043 - RNA, 22 nt, Human
uucucuggaacugaaacaagau

SEQ ID NO: 243044 - RNA, 22 nt, Human
cagugcaaugcagaugacacca

SEQ ID NO: 243045 - RNA, 22 nt, Human
acugaauuuuaauuagaucugc

SEQ ID NO: 243046 - RNA, 22 nt, Human
aaacacaauguuucuuuguucu

SEQ ID NO: 243047 - RNA, 20 nt, Human
uuugcgaggccaaggcgggc

SEQ ID NO: 243048 - RNA, 21 nt, Human
gaaaaccauuugcaucaugag

SEQ ID NO: 243049 - RNA, 22 nt, Human
ugaaacagcuaucaguagacug

SEQ ID NO: 243050 - RNA, 22 nt, Human
uuccuggcuugucacaucuacg

SEQ ID NO: 243051 - RNA, 22 nt, Human
aggcaucuaacagagaucuuua

SEQ ID NO: 243052 - RNA, 22 nt, Human
uuacaugaugauuucauaaaca

SEQ ID NO: 243053 - RNA, 23 nt, Human
uagauguauuaagugcauuuuca

SEQ ID NO: 243054 - RNA, 22 nt, Human
ggcugagcuuuucaugaugguu

SEQ ID NO: 243055 - RNA, 22 nt, Human
guagggacuguucucaccugag

SEQ ID NO: 243056 - RNA, 20 nt, Human
aagcuggguaggagaggagc

SEQ ID NO: 243057 - RNA, 21 nt, Human
ucaggaagagcuucucccacu

SEQ ID NO: 243058 - RNA, 22 nt, Human
ugcccugcccuugcuauuucua

SEQ ID NO: 243059 - RNA, 22 nt, Human
cugccuggaaggagcaagggga

SEQ ID NO: 243060 - RNA, 22 nt, Human
aacuucauguaauuuaaaacag

SEQ ID NO: 243061 - RNA, 22 nt, Human
accuacauaguuaaguaacaaa

SEQ ID NO: 243062 - RNA, 17 nt, Human
cacuugcuggucuaccu

SEQ ID NO: 243063 - RNA, 19 nt, Human
acuucuuuucaacacagga

SEQ ID NO: 243064 - RNA, 22 nt, Human
gggagacccccaaugccagguc

SEQ ID NO: 243065 - RNA, 19 nt, Human
ccaccagugugaucuaaga

SEQ ID NO: 243066 - RNA, 22 nt, Human
uguggcuguugaggaccccaag

SEQ ID NO: 243067 - RNA, 22 nt, Human
agucagcagugaaagcacagcc

SEQ ID NO: 243068 - RNA, 22 nt, Human
gggacaugaagcaucggaggca

SEQ ID NO: 243069 - RNA, 22 nt, Human
cuggaggaccacagaagcuggu

SEQ ID NO: 243070 - RNA, 22 nt, Human
cacagggcagagaccugggugc

SEQ ID NO: 243071 - RNA, 22 nt, Human
ugggugcucugcgaccguaggg

SEQ ID NO: 243072 - RNA, 22 nt, Human
uauacagauggaaagauacaca

SEQ ID NO: 243073 - RNA, 22 nt, Human
ugaaaucauugggguugaauaa

SEQ ID NO: 243074 - RNA, 22 nt, Human
uuuuuuguagcaagcgcagaua

SEQ ID NO: 243075 - RNA, 22 nt, Human
gaugcaaagaggaccuucagua

SEQ ID NO: 243076 - RNA, 22 nt, Human
uccucaguggggcauucauuau

SEQ ID NO: 243077 - RNA, 22 nt, Human
gcggggggaggaacaucuugca

SEQ ID NO: 243078 - RNA, 22 nt, Human
ggagaaggcgaagucauucuuu

SEQ ID NO: 243079 - RNA, 22 nt, Human
ucugagcuucccucugaggcag

SEQ ID NO: 243080 - RNA, 22 nt, Human
uuccucagcuguguccuggcga

SEQ ID NO: 243081 - RNA, 20 nt, Human
gugcagaggcagccuguggg

SEQ ID NO: 243082 - RNA, 22 nt, Human
aaucagaaauucuacaucacaa

SEQ ID NO: 243083 - RNA, 22 nt, Human
gaacauaauuaaauguccuggg

SEQ ID NO: 243084 - RNA, 22 nt, Human
uucaacaagucuuuuuucacug

SEQ ID NO: 243085 - RNA, 22 nt, Human
cagaggcuggauggacuugccu

SEQ ID NO: 243086 - RNA, 22 nt, Human
ccagcugacgaugccuggucuc

SEQ ID NO: 243087 - RNA, 22 nt, Human
cugcaaaucaaguucuuauaau

SEQ ID NO: 243088 - RNA, 22 nt, Human
agcugcaagauuucuuuuguau

SEQ ID NO: 243089 - RNA, 22 nt, Human
ggcccugcugaguggaguggag

SEQ ID NO: 243090 - RNA, 22 nt, Human
uaacugguccugaacagcccag

SEQ ID NO: 243091 - RNA, 22 nt, Human
ugcucuggcugggaugagugca

SEQ ID NO: 243092 - RNA, 20 nt, Human
gcuaccagaacaaggccauu

SEQ ID NO: 243093 - RNA, 22 nt, Human
uagcagcaauuucagaaguuug

SEQ ID NO: 243094 - RNA, 22 nt, Human
acagcuggugaauguucucugu

SEQ ID NO: 243095 - RNA, 22 nt, Human
guuugccugugauguacauuuc

SEQ ID NO: 243096 - RNA, 22 nt, Human
aagccaaggccugucuggggcu

SEQ ID NO: 243097 - RNA, 19 nt, Human
aagcuacagcccaggucug

SEQ ID NO: 243098 - RNA, 22 nt, Human
gggaagagauuuccacaucauu

SEQ ID NO: 243099 - RNA, 22 nt, Human
cauuaaaucuuccagaccucac

SEQ ID NO: 243100 - RNA, 22 nt, Human
aagagucuauuggaacuagaca

SEQ ID NO: 243101 - RNA, 22 nt, Human
cacuuuacccuuguuacucaug

SEQ ID NO: 243102 - RNA, 22 nt, Human
acagguggcagaagcauuuacu

SEQ ID NO: 243103 - RNA, 22 nt, Human
ccagggcagaaaaagagggaau

SEQ ID NO: 243104 - RNA, 22 nt, Human
agcaaauacauuuuuagcauaa

SEQ ID NO: 243105 - RNA, 20 nt, Human
gggugugugcagggccuggu

SEQ ID NO: 243106 - RNA, 22 nt, Human
uaguaaaaguuuaguugaaagu

SEQ ID NO: 243107 - RNA, 22 nt, Human
gauccacagcugcgguaggaga

SEQ ID NO: 243108 - RNA, 22 nt, Human
aagaugauguuguguuuucacu

SEQ ID NO: 243109 - RNA, 22 nt, Human
ggaaucagaauuacugaaugga

SEQ ID NO: 243110 - RNA, 22 nt, Human
aggcugagguaggaggaucgcu

SEQ ID NO: 243111 - RNA, 22 nt, Human
gcccggccaggaacagaguaua

SEQ ID NO: 243112 - RNA, 22 nt, Human
acuuagaauuaaauauuuuugg

SEQ ID NO: 243113 - RNA, 22 nt, Human
augucaaacacaacaccagugg

SEQ ID NO: 243114 - RNA, 22 nt, Human
gccuguccccaggagaguccgg

SEQ ID NO: 243115 - RNA, 22 nt, Human
uuuugaaagccagguuuguaug

SEQ ID NO: 243116 - RNA, 22 nt, Human
gauguacuugccuuaucuaucc

SEQ ID NO: 243117 - RNA, 22 nt, Human
cccugggcaccaggccugguaa

SEQ ID NO: 243118 - RNA, 22 nt, Human
gacaggccagacaggagacuga

SEQ ID NO: 243119 - RNA, 18 nt, Human
aacuguugaaauagcuug

SEQ ID NO: 243120 - RNA, 22 nt, Human
ugucuuuuaccuaaugagcugg

SEQ ID NO: 243121 - RNA, 22 nt, Human
ggaacaggaaaggagggaugcu

SEQ ID NO: 243122 - RNA, 22 nt, Human
acccagcuggaugcauggaggc

SEQ ID NO: 243123 - RNA, 22 nt, Human
gcagaugcagagauggcugggg

SEQ ID NO: 243124 - RNA, 22 nt, Human
caguggcaaguccgguauugaa

SEQ ID NO: 243125 - RNA, 22 nt, Human
acauguaaaaggaacaugcaug

SEQ ID NO: 243126 - RNA, 22 nt, Human
ucauggcacuuagcacaguccu

SEQ ID NO: 243127 - RNA, 22 nt, Human
cugagguguggucugggaguau

SEQ ID NO: 243128 - RNA, 22 nt, Human
ccccuccugcagcaccuuucuu

SEQ ID NO: 243129 - RNA, 22 nt, Human
acauuucuccuacuuguuauuu

SEQ ID NO: 243130 - RNA, 22 nt, Human
ucccaaaguauuagcauuucaa

SEQ ID NO: 243131 - RNA, 22 nt, Human
uguuagaaaggcuauuggacca

SEQ ID NO: 243132 - RNA, 22 nt, Human
aggcagaaaauagucauccaaa

SEQ ID NO: 243133 - RNA, 17 nt, Human
ucuccaggacgagcuca

SEQ ID NO: 243134 - RNA, 22 nt, Human
acaggcucuggggcaggauggc

SEQ ID NO: 243135 - RNA, 22 nt, Human
uaaaaccauaaggcuggaagga

SEQ ID NO: 243136 - RNA, 22 nt, Human
ucucagaaaagagcuucagaaa

SEQ ID NO: 243137 - RNA, 22 nt, Human
gaugcagcagccagcuucugaa

SEQ ID NO: 243138 - RNA, 23 nt, Human
ucagagaggcccccugcagagau

SEQ ID NO: 243139 - RNA, 22 nt, Human
gccccagauggaggaagcuggg

SEQ ID NO: 243140 - RNA, 22 nt, Human
uguaugcacauauauagguaca

SEQ ID NO: 243141 - RNA, 22 nt, Human
uucugcagugugcagggccugu

SEQ ID NO: 243142 - RNA, 22 nt, Human
cagucucucuccuugcaggcgu

SEQ ID NO: 243143 - RNA, 22 nt, Human
cagcaggucccacugagggccc

SEQ ID NO: 243144 - RNA, 22 nt, Human
aaacuuuuuuagguucauaggc

SEQ ID NO: 243145 - RNA, 22 nt, Human
gguccugucugacaucacugcu

SEQ ID NO: 243146 - RNA, 22 nt, Human
augcuuugauuugguuucucua

SEQ ID NO: 243147 - RNA, 22 nt, Human
ggccacagcaaugcugugaugu

SEQ ID NO: 243148 - RNA, 22 nt, Human
ccaagcuucuuuccuacuacag

SEQ ID NO: 243149 - RNA, 22 nt, Human
cuggaagaacuccaguucugug

SEQ ID NO: 243150 - RNA, 22 nt, Human
agacaauggagagcagaguacu

SEQ ID NO: 243151 - RNA, 22 nt, Human
auucaagguuggcucaggaauu

SEQ ID NO: 243152 - RNA, 22 nt, Human
ucauguuugcccuaagaaaaag

SEQ ID NO: 243153 - RNA, 21 nt, Human
uggaggaauaaagcacagaag

SEQ ID NO: 243154 - RNA, 22 nt, Human
guuuaauaauguugaauuacua

SEQ ID NO: 243155 - RNA, 22 nt, Human
ucaggucugggcacaugguaca

SEQ ID NO: 243156 - RNA, 22 nt, Human
cuggcuuuaaugucaucuuucu

SEQ ID NO: 243157 - RNA, 22 nt, Human
uggccugggugcugcugacauc

SEQ ID NO: 243158 - RNA, 22 nt, Human
uggcugugucccuguccagagu

SEQ ID NO: 243159 - RNA, 22 nt, Human
ccagcagacacacaggcguggg

SEQ ID NO: 243160 - RNA, 22 nt, Human
caggcauagaagggcaagaaua

SEQ ID NO: 243161 - RNA, 22 nt, Human
auucuuuucccaacugcuuuaa

SEQ ID NO: 243162 - RNA, 22 nt, Human
ucccagugggugacuggaggcu

SEQ ID NO: 243163 - RNA, 22 nt, Human
gagcugaauugcugccauuugc

SEQ ID NO: 243164 - RNA, 22 nt, Human
ccugugacuuggcaaaccucca

SEQ ID NO: 243165 - RNA, 22 nt, Human
ucauugccauggcauuugcaga

SEQ ID NO: 243166 - RNA, 22 nt, Human
ggagccagaggcugcugcugug

SEQ ID NO: 243167 - RNA, 21 nt, Human
agucuggggaagggaucccag

SEQ ID NO: 243168 - RNA, 22 nt, Human
uagcuuuacaaagugcugcacc

SEQ ID NO: 243169 - RNA, 22 nt, Human
gggcacaccuugucugagcaca

SEQ ID NO: 243170 - RNA, 22 nt, Human
auagauguucaaucagauauuu

SEQ ID NO: 243171 - RNA, 22 nt, Human
uaaauucugaucaaguuccuuc

SEQ ID NO: 243172 - RNA, 22 nt, Human
aguguguaagggaucaaagagu

SEQ ID NO: 243173 - RNA, 22 nt, Human
aaagcuaccuuuguguucauag

SEQ ID NO: 243174 - RNA, 22 nt, Human
augucauugccaagaugcuaau

SEQ ID NO: 243175 - RNA, 22 nt, Human
uuauuugcccauguuuagcaga

SEQ ID NO: 243176 - RNA, 19 nt, Human
caggccucuggucugcugu

SEQ ID NO: 243177 - RNA, 22 nt, Human
uccugggacaccccaauaugag

SEQ ID NO: 243178 - RNA, 22 nt, Human
cucuucccagcuccacgagagg

SEQ ID NO: 243179 - RNA, 22 nt, Human
cuucauaggguuguaaggauua

SEQ ID NO: 243180 - RNA, 22 nt, Human
aauagcuuuuguaugaugaaau

SEQ ID NO: 243181 - RNA, 22 nt, Human
acuuuauuuccuauugcaucca

SEQ ID NO: 243182 - RNA, 22 nt, Human
cuuaagauugucagcuucagcc

SEQ ID NO: 243183 - RNA, 22 nt, Human
cacugucugcuucgacucuuca

SEQ ID NO: 243184 - RNA, 22 nt, Human
ucuggcaguggaugagggcagc

SEQ ID NO: 243185 - RNA, 22 nt, Human
uacuguuuucuuuauaguacag

SEQ ID NO: 243186 - RNA, 22 nt, Human
gcugaccauuaggaggacgaua

SEQ ID NO: 243187 - RNA, 22 nt, Human
uuggggaagaguugacuuugga

SEQ ID NO: 243188 - RNA, 17 nt, Human
ugguccagguggagcca

SEQ ID NO: 243189 - RNA, 22 nt, Human
ugggaaccauguagcugagaug

SEQ ID NO: 243190 - RNA, 22 nt, Human
ccaggcuagagugcaguggcau

SEQ ID NO: 243191 - RNA, 22 nt, Human
agcagcugggcucagagcuggg

SEQ ID NO: 243192 - RNA, 22 nt, Human
acaggaggggcaugaaagacgg

SEQ ID NO: 243193 - RNA, 22 nt, Human
ucacagaauaaauguacuggcc

SEQ ID NO: 243194 - RNA, 22 nt, Human
acauuagaacauuaauauuggg

SEQ ID NO: 243195 - RNA, 22 nt, Human
guuuuauuuccaugagagaccg

SEQ ID NO: 243196 - RNA, 22 nt, Human
cuggcuguaugcuggccucaga

SEQ ID NO: 243197 - RNA, 22 nt, Human
ucuuccuucuuugaugacaagg

SEQ ID NO: 243198 - RNA, 22 nt, Human
agcauaaaggucaacguuuuag

SEQ ID NO: 243199 - RNA, 22 nt, Human
uucucaggcucugagacccuau

SEQ ID NO: 243200 - RNA, 22 nt, Human
ucaguuuaagaugacuaacaau

SEQ ID NO: 243201 - RNA, 22 nt, Human
gcuauuuuugagccauuuauaa

SEQ ID NO: 243202 - RNA, 22 nt, Human
agcacugcuuuagagccucugc

SEQ ID NO: 243203 - RNA, 19 nt, Human
cucugggcugcaucuuggu

SEQ ID NO: 243204 - RNA, 22 nt, Human
agaaauguuacaguuguuauuu

SEQ ID NO: 243205 - RNA, 22 nt, Human
ucaggaagucucaauuagcuac

SEQ ID NO: 243206 - RNA, 22 nt, Human
uggcacaugguuaaucauaauu

SEQ ID NO: 243207 - RNA, 22 nt, Human
cuggagucuuagguuaugguga

SEQ ID NO: 243208 - RNA, 23 nt, Human
gcaggugguucgaacagaaguuu

SEQ ID NO: 243209 - RNA, 22 nt, Human
ugggcaugaguggacagagaag

SEQ ID NO: 243210 - RNA, 22 nt, Human
cuggcucuaucuccaaggcugg

SEQ ID NO: 243211 - RNA, 22 nt, Human
uguccuggggacaagaggcccu

SEQ ID NO: 243212 - RNA, 22 nt, Human
aagggcucgguagcaguccuga

SEQ ID NO: 243213 - RNA, 22 nt, Human
cuggcugguugucucaauccag

SEQ ID NO: 243214 - RNA, 22 nt, Human
ccaggugccuccagucacagug

SEQ ID NO: 243215 - RNA, 22 nt, Human
aaaaaguauuggccaugguuga

SEQ ID NO: 243216 - RNA, 22 nt, Human
cuggcccuggcuggagcccagg

SEQ ID NO: 243217 - RNA, 22 nt, Human
uacaaucaggauaauaauagug

SEQ ID NO: 243218 - RNA, 22 nt, Human
ggagcugggaacuauguaguau

SEQ ID NO: 243219 - RNA, 22 nt, Human
uuucagaaagcugaacauauga

SEQ ID NO: 243220 - RNA, 22 nt, Human
uugaaaugagcaaacugucagc

SEQ ID NO: 243221 - RNA, 22 nt, Human
uggugcugccaggcuccugcca

SEQ ID NO: 243222 - RNA, 22 nt, Human
cagaaguugauccugcguuucc

SEQ ID NO: 243223 - RNA, 22 nt, Human
ugcaaauacaaaaugguacagc

SEQ ID NO: 243224 - RNA, 23 nt, Human
uugcagggauggaguucaaaaug

SEQ ID NO: 243225 - RNA, 22 nt, Human
ucuguugcaaugugcaugguga

SEQ ID NO: 243226 - RNA, 22 nt, Human
ccuugguccaacccugcacagc

SEQ ID NO: 243227 - RNA, 18 nt, Human
cugaauuaucucaucauu

SEQ ID NO: 243228 - RNA, 22 nt, Human
aggaccuguagggccugcaucc

SEQ ID NO: 243229 - RNA, 22 nt, Human
uugcaaaagccgaggcacucca

SEQ ID NO: 243230 - RNA, 22 nt, Human
uagggcugccauuugcuuuucu

SEQ ID NO: 243231 - RNA, 22 nt, Human
acagauuuuugguaaauaauuu

SEQ ID NO: 243232 - RNA, 14 nt, Human
gcagguggaucacc

SEQ ID NO: 243233 - RNA, 14 nt, Human
gcaggcggaucacu

SEQ ID NO: 243234 - RNA, 22 nt, Human
ccaucacaguccccaucgugau

SEQ ID NO: 243235 - RNA, 22 nt, Human
cugugcccagcucccugacugc

SEQ ID NO: 243236 - RNA, 22 nt, Human
agagccugucugccuuucuacc

SEQ ID NO: 243237 - RNA, 22 nt, Human
uaauauauaccuuuguuaggaa

SEQ ID NO: 243238 - RNA, 22 nt, Human
agccagcugugggcucaggcgg

SEQ ID NO: 243239 - RNA, 22 nt, Human
gcaggcugggguagccccacuu

SEQ ID NO: 243240 - RNA, 22 nt, Human
cagccacuacaauugguuccau

SEQ ID NO: 243241 - RNA, 23 nt, Human
agcaaugcugggagacucuguaa

SEQ ID NO: 243242 - RNA, 22 nt, Human
uccaggcccgagaugggcugga

SEQ ID NO: 243243 - RNA, 22 nt, Human
acaguggccucaaagaaagaga

SEQ ID NO: 243244 - RNA, 22 nt, Human
cggcaggguugguuuucucuga

SEQ ID NO: 243245 - RNA, 22 nt, Human
gagcaggucuuucauggugcau

SEQ ID NO: 243246 - RNA, 21 nt, Human
uuagaacaauauuugguauag

SEQ ID NO: 243247 - RNA, 22 nt, Human
uguccuggugcuccagguggcu

SEQ ID NO: 243248 - RNA, 22 nt, Human
uuagauaauguagagauaugag

SEQ ID NO: 243249 - RNA, 22 nt, Human
gaguuaaaguaccuuuguaugu

SEQ ID NO: 243250 - RNA, 23 nt, Human
agugccagggagaucaggacgga

SEQ ID NO: 243251 - RNA, 22 nt, Human
auuaacuguacuuucuaauuuu

SEQ ID NO: 243252 - RNA, 22 nt, Human
cagagccuuaguucuccuagaa

SEQ ID NO: 243253 - RNA, 22 nt, Human
uucaaaugguuagacuguuagc

SEQ ID NO: 243254 - RNA, 22 nt, Human
cacuguucuuuuuguaguccaa

SEQ ID NO: 243255 - RNA, 22 nt, Human
aucagcaaaaaugccuucagaa

SEQ ID NO: 243256 - RNA, 23 nt, Human
aucucucugguggucacagucag

SEQ ID NO: 243257 - RNA, 22 nt, Human
ugauucaagagaguugggguau

SEQ ID NO: 243258 - RNA, 22 nt, Human
aacaaaggccguuaauaaccac

SEQ ID NO: 243259 - RNA, 22 nt, Human
agaagccacugcucccagugag

SEQ ID NO: 243260 - RNA, 22 nt, Human
uuucagaaauggcacugaaauc

SEQ ID NO: 243261 - RNA, 22 nt, Human
cacaggccaguaagacuguguu

SEQ ID NO: 243262 - RNA, 22 nt, Human
aaauuagucgguuuaggaauuu

SEQ ID NO: 243263 - RNA, 22 nt, Human
uuccagcccgcgacuuguucag

SEQ ID NO: 243264 - RNA, 22 nt, Human
ccuggacaaugagaugucaggg

SEQ ID NO: 243265 - RNA, 22 nt, Human
ugccuugcuggaugucaguuuu

SEQ ID NO: 243266 - RNA, 22 nt, Human
ucuggggagggagccacagguc

SEQ ID NO: 243267 - RNA, 22 nt, Human
gccugugcuuaacugacgugag

SEQ ID NO: 243268 - RNA, 22 nt, Human
ugcugucugauucagggugauu

SEQ ID NO: 243269 - RNA, 22 nt, Human
aauuugauucccugcaccuguu

SEQ ID NO: 243270 - RNA, 23 nt, Human
acaagcagcccagugcucugccu

SEQ ID NO: 243271 - RNA, 22 nt, Human
caguucuuaauaccaugugguu

SEQ ID NO: 243272 - RNA, 22 nt, Human
acacaugcuccagucuccagga

SEQ ID NO: 243273 - RNA, 22 nt, Human
agucacauuugggggugucaaa

SEQ ID NO: 243274 - RNA, 22 nt, Human
ucuucacauggaacaugaagcu

SEQ ID NO: 243275 - RNA, 22 nt, Human
aaggcugagagucacaguccua

SEQ ID NO: 243276 - RNA, 22 nt, Human
ucaggagcugugaauacaaagg

SEQ ID NO: 243277 - RNA, 22 nt, Human
ucuugggcauguguuugauuuc

SEQ ID NO: 243278 - RNA, 22 nt, Human
ucuacagacuccuauguaacac

SEQ ID NO: 243279 - RNA, 22 nt, Human
cugcugguugcacagagcuagg

SEQ ID NO: 243280 - RNA, 22 nt, Human
auuggucuggggaaaugaagag

SEQ ID NO: 243281 - RNA, 22 nt, Human
uguuuuuuccuuaugcaaucug

SEQ ID NO: 243282 - RNA, 22 nt, Human
acaggaaaugaaaugguaucua

SEQ ID NO: 243283 - RNA, 22 nt, Human
agcuccuggucuuuguccagag

SEQ ID NO: 243284 - RNA, 22 nt, Human
gaaaaguauguuuauuuugacu

SEQ ID NO: 243285 - RNA, 22 nt, Human
uggccugccccgagauccuggc

SEQ ID NO: 243286 - RNA, 22 nt, Human
uggccagugggguugagcagga

SEQ ID NO: 243287 - RNA, 22 nt, Human
aagaagucuggagcaaugcaau

SEQ ID NO: 243288 - RNA, 22 nt, Human
uuuaugauuauuuuaaagcagc

SEQ ID NO: 243289 - RNA, 22 nt, Human
uuugaacaggaguaucuauagu

SEQ ID NO: 243290 - RNA, 20 nt, Human
ugcagggccuaaaaagggaa

SEQ ID NO: 243291 - RNA, 22 nt, Human
aacauauaaacucuuaaguuca

SEQ ID NO: 243292 - RNA, 22 nt, Human
gggugugucuuuugcuccugga

SEQ ID NO: 243293 - RNA, 22 nt, Human
augccacauaaccaguucacuu

SEQ ID NO: 243294 - RNA, 19 nt, Human
agcauccagucaugggauc

SEQ ID NO: 243295 - RNA, 22 nt, Human
uccagcacucgcccagggcuug

SEQ ID NO: 243296 - RNA, 22 nt, Human
ggguccaccugagcagcagccu

SEQ ID NO: 243297 - RNA, 21 nt, Human
augcagagaacuccagggaag

SEQ ID NO: 243298 - RNA, 22 nt, Human
cagagcugagucuucaagguug

SEQ ID NO: 243299 - RNA, 22 nt, Human
agggggugcuacuuccagaguu

SEQ ID NO: 243300 - RNA, 19 nt, Human
cucugccucuggcuguggc

SEQ ID NO: 243301 - RNA, 22 nt, Human
ccuggagcaggagcugcagagg

SEQ ID NO: 243302 - RNA, 22 nt, Human
aaacuugacaguagacagauua

SEQ ID NO: 243303 - RNA, 22 nt, Human
ucagcagagcgagaccaaguca

SEQ ID NO: 243304 - RNA, 22 nt, Human
agcccagcuccuccacagaaua

SEQ ID NO: 243305 - RNA, 22 nt, Human
gagcagggagacaacucuggug

SEQ ID NO: 243306 - RNA, 22 nt, Human
ggaggccaucagggagggcauu

SEQ ID NO: 243307 - RNA, 22 nt, Human
acaccugggucagugugacagu

SEQ ID NO: 243308 - RNA, 22 nt, Human
ucugaggaaaaguucuugucac

SEQ ID NO: 243309 - RNA, 22 nt, Human
cuuauucagaccuuggauucuu

SEQ ID NO: 243310 - RNA, 22 nt, Human
guugugcagucagacugccugg

SEQ ID NO: 243311 - RNA, 22 nt, Human
uggcccugcuggacacgccugc

SEQ ID NO: 243312 - RNA, 21 nt, Human
cauuucuauugaugagaaaag

SEQ ID NO: 243313 - RNA, 22 nt, Human
ugggcaggagagaagcuaaaga

SEQ ID NO: 243314 - RNA, 22 nt, Human
aggaccaccgguccauccaccc

SEQ ID NO: 243315 - RNA, 22 nt, Human
gaggaaaugguuguucaggugg

SEQ ID NO: 243316 - RNA, 20 nt, Human
gagggcaggcacccauuuca

SEQ ID NO: 243317 - RNA, 22 nt, Human
ggcacagcgacuaccaucgaaa

SEQ ID NO: 243318 - RNA, 21 nt, Human
cugcagagcaugcaaaauguu

SEQ ID NO: 243319 - RNA, 22 nt, Human
agaguuugaauuuugaaaagau

SEQ ID NO: 243320 - RNA, 22 nt, Human
cagccugcaggaggccgucagc

SEQ ID NO: 243321 - RNA, 22 nt, Human
ccaggagagcauugcacagagg

SEQ ID NO: 243322 - RNA, 22 nt, Human
gcaaagugcuucagugggagcu

SEQ ID NO: 243323 - RNA, 22 nt, Human
auccauuguggucuuguacauu

SEQ ID NO: 243324 - RNA, 22 nt, Human
cauuagaagguuuuaaaggaau

SEQ ID NO: 243325 - RNA, 20 nt, Human
auggaggaagggcaagagaa

SEQ ID NO: 243326 - RNA, 22 nt, Human
ucagcaaaggaccagcacaggc

SEQ ID NO: 243327 - RNA, 22 nt, Human
gcagcgcuacucacagcucuga

SEQ ID NO: 243328 - RNA, 22 nt, Human
cccuuccuggaguacccucugu

SEQ ID NO: 243329 - RNA, 18 nt, Human
gugugcucagagagugag

SEQ ID NO: 243330 - RNA, 22 nt, Human
uucauugaaauguuucuagcug

SEQ ID NO: 243331 - RNA, 22 nt, Human
cucuggucauuuggaagagcau

SEQ ID NO: 243332 - RNA, 22 nt, Human
ccaggcugugguuuagauagag

SEQ ID NO: 243333 - RNA, 22 nt, Human
aucaguuuuuauuaauguagcu

SEQ ID NO: 243334 - RNA, 22 nt, Human
aguccagggcucucugugggau

SEQ ID NO: 243335 - RNA, 22 nt, Human
gaauuuaagaggaugaaucugu

SEQ ID NO: 243336 - RNA, 22 nt, Human
gaagcaagugcaaggaagaggc

SEQ ID NO: 243337 - RNA, 22 nt, Human
aaaaaauuaucauaguuccuga

SEQ ID NO: 243338 - RNA, 22 nt, Human
cuggguggaaagugcugagaau

SEQ ID NO: 243339 - RNA, 22 nt, Human
ggcccugagucuagcugcucuu

SEQ ID NO: 243340 - RNA, 22 nt, Human
cagagcauaauugacaugaggu

SEQ ID NO: 243341 - RNA, 22 nt, Human
gacuacaacucccagaagacuu

SEQ ID NO: 243342 - RNA, 22 nt, Human
aaacucaaagucagaucagaga

SEQ ID NO: 243343 - RNA, 19 nt, Human
aggguggcaaaggagggug

SEQ ID NO: 243344 - RNA, 22 nt, Human
uuccaauggaaucaugucuuga

SEQ ID NO: 243345 - RNA, 22 nt, Human
agcaagaugcaaacauccgucc

SEQ ID NO: 243346 - RNA, 22 nt, Human
acaaauauuuacugaauccacu

SEQ ID NO: 243347 - RNA, 20 nt, Human
gggugugggcccggccaggc

SEQ ID NO: 243348 - RNA, 22 nt, Human
gccugggagcacaucggggucc

SEQ ID NO: 243349 - RNA, 22 nt, Human
gacagcaggaugugaggggaug

SEQ ID NO: 243350 - RNA, 19 nt, Human
cuucagcaucuccggagcu

SEQ ID NO: 243351 - RNA, 22 nt, Human
ccugccucccagagguccucua

SEQ ID NO: 243352 - RNA, 22 nt, Human
aggcaaggugcuacagacagug

SEQ ID NO: 243353 - RNA, 22 nt, Human
agugacuaaagguuuuaauggc

SEQ ID NO: 243354 - RNA, 22 nt, Human
caaaaguaauugcgguuuuugc

SEQ ID NO: 243355 - RNA, 22 nt, Human
ucccaggcgccugguggggagc

SEQ ID NO: 243356 - RNA, 22 nt, Human
uacacgugcaaauucaauguau

SEQ ID NO: 243357 - RNA, 22 nt, Human
agcucaagugcaagcauucuau

SEQ ID NO: 243358 - RNA, 20 nt, Human
ggcugcccacuccagaguac

SEQ ID NO: 243359 - RNA, 22 nt, Human
uagggugguuagaaggaguaug

SEQ ID NO: 243360 - RNA, 22 nt, Human
uaggcugacuuguuucauaaag

SEQ ID NO: 243361 - RNA, 22 nt, Human
uuucauuggcucccugaugaau

SEQ ID NO: 243362 - RNA, 22 nt, Human
cagcugaagcucuugucaaagg

SEQ ID NO: 243363 - RNA, 22 nt, Human
augaacaauaaucaugucuaug

SEQ ID NO: 243364 - RNA, 20 nt, Human
auugaaauuuuucugagauu

SEQ ID NO: 243365 - RNA, 22 nt, Human
gaaggcuucccaccugauauuu

SEQ ID NO: 243366 - RNA, 22 nt, Human
auguccucaaaacugauugcag

SEQ ID NO: 243367 - RNA, 22 nt, Human
ucacaugagucacuaucuuaau

SEQ ID NO: 243368 - RNA, 22 nt, Human
uccagagagccacggacagggg

SEQ ID NO: 243369 - RNA, 22 nt, Human
gcaguguuguuaaaagauuaga

SEQ ID NO: 243370 - RNA, 22 nt, Human
gaaggcuuuucuaccagaucuu

SEQ ID NO: 243371 - RNA, 22 nt, Human
uccaggcaaaaaccaacuacag

SEQ ID NO: 243372 - RNA, 22 nt, Human
gguccagcacaacacuggcaug

SEQ ID NO: 243373 - RNA, 22 nt, Human
auucugagacaauugccgucag

SEQ ID NO: 243374 - RNA, 22 nt, Human
auuaggaaauguguugcaagca

SEQ ID NO: 243375 - RNA, 21 nt, Human
uguggcugccucuggcccugg

SEQ ID NO: 243376 - RNA, 22 nt, Human
gcacauaugcuguaagcacaug

SEQ ID NO: 243377 - RNA, 21 nt, Human
gccugggaaaucugggaagcc

SEQ ID NO: 243378 - RNA, 22 nt, Human
cccacagguggaagccucggaa

SEQ ID NO: 243379 - RNA, 22 nt, Human
augauucuggggcaaaagcugg

SEQ ID NO: 243380 - RNA, 22 nt, Human
auggucuugauuuuccauaggu

SEQ ID NO: 243381 - RNA, 22 nt, Human
agaaagcacccugcacuuucug

SEQ ID NO: 243382 - RNA, 22 nt, Human
gcauuauuaauagcugcaugag

SEQ ID NO: 243383 - RNA, 23 nt, Human
uggccagguagaggagguaguga

SEQ ID NO: 243384 - RNA, 22 nt, Human
aaaugucagaggaacauauuga

SEQ ID NO: 243385 - RNA, 22 nt, Human
uuguauuaaaauguguuucugu

SEQ ID NO: 243386 - RNA, 22 nt, Human
cggagcugccugccaagccugc

SEQ ID NO: 243387 - RNA, 22 nt, Human
agugucugagcuaucauuaggg

SEQ ID NO: 243388 - RNA, 22 nt, Human
cagugagggcccccuuccaggu

SEQ ID NO: 243389 - RNA, 22 nt, Human
cgcugggggaacagcgagggug

SEQ ID NO: 243390 - RNA, 22 nt, Human
agcugcagguucagcauuccac

SEQ ID NO: 243391 - RNA, 22 nt, Human
cuugccaguguugcagaagcuc

SEQ ID NO: 243392 - RNA, 22 nt, Human
gccuggagcucuccacuugggg

SEQ ID NO: 243393 - RNA, 22 nt, Human
gcucccagguucuugggccuug

SEQ ID NO: 243394 - RNA, 22 nt, Human
uaguaaacccaugaggcuuaaa

SEQ ID NO: 243395 - RNA, 22 nt, Human
gugagcaggauaggggcucccu

SEQ ID NO: 243396 - RNA, 22 nt, Human
ucugagauuuguauggugagac

SEQ ID NO: 243397 - RNA, 22 nt, Human
ccuguggcugccacuuggguga

SEQ ID NO: 243398 - RNA, 22 nt, Human
agcaggcuaaucuugcugaaca

SEQ ID NO: 243399 - RNA, 22 nt, Human
ucaaaguuuguggcaauuuauu

SEQ ID NO: 243400 - RNA, 22 nt, Human
uguaaagagaaugguauaugga

SEQ ID NO: 243401 - RNA, 22 nt, Human
auggcucugcugggcaaagcaa

SEQ ID NO: 243402 - RNA, 22 nt, Human
ucuucagagugaaagucuguga

SEQ ID NO: 243403 - RNA, 21 nt, Human
aggaaaggccagcacguaggg

SEQ ID NO: 243404 - RNA, 22 nt, Human
ggcagcuggguuggccagaaac

SEQ ID NO: 243405 - RNA, 22 nt, Human
ucaaacagcaggucuuucauag

SEQ ID NO: 243406 - RNA, 22 nt, Human
gguggcugggauuaguagccca

SEQ ID NO: 243407 - RNA, 22 nt, Human
guauacagauacuuagacgugc

SEQ ID NO: 243408 - RNA, 22 nt, Human
uucucagggucuggauggccug

SEQ ID NO: 243409 - RNA, 22 nt, Human
cugugugucauuugucaauccu

SEQ ID NO: 243410 - RNA, 22 nt, Human
accucccagaaaguuuugcagg

SEQ ID NO: 243411 - RNA, 22 nt, Human
aggaggcagucugucccuuagc

SEQ ID NO: 243412 - RNA, 22 nt, Human
uagaaagagcuuugcuuccuuu

SEQ ID NO: 243413 - RNA, 22 nt, Human
ugaauuagcaguagacagacug

SEQ ID NO: 243414 - RNA, 22 nt, Human
aaugucugaaaaucagacugca

SEQ ID NO: 243415 - RNA, 18 nt, Human
uccuggcagucagagagg

SEQ ID NO: 243416 - RNA, 22 nt, Human
agcaguuuggaaaauacuagaa

SEQ ID NO: 243417 - RNA, 22 nt, Human
uggagcugguaaacagugacau

SEQ ID NO: 243418 - RNA, 22 nt, Human
uucugucacagugcugguauca

SEQ ID NO: 243419 - RNA, 22 nt, Human
cuauaaaucuacccagcauugg

SEQ ID NO: 243420 - RNA, 22 nt, Human
cuccagggaaaggggcguccgc

SEQ ID NO: 243421 - RNA, 22 nt, Human
uuuaguguagcauucagaguca

SEQ ID NO: 243422 - RNA, 22 nt, Human
gcagguguggagaguggucggg

SEQ ID NO: 243423 - RNA, 22 nt, Human
ccaggcugggcuacaaguugag

SEQ ID NO: 243424 - RNA, 22 nt, Human
aucugaaauagucuuaucugag

SEQ ID NO: 243425 - RNA, 22 nt, Human
uuuguuuacucauucauugaug

SEQ ID NO: 243426 - RNA, 22 nt, Human
ccuuagaggcaggaagaauugc

SEQ ID NO: 243427 - RNA, 23 nt, Human
uuuaccagaauagcaggggagag

SEQ ID NO: 243428 - RNA, 21 nt, Human
acaugucuggucauuuuuagc

SEQ ID NO: 243429 - RNA, 22 nt, Human
gugcaaaaguaaaugugguuuu

SEQ ID NO: 243430 - RNA, 22 nt, Human
agacagcuccaagugucucugu

SEQ ID NO: 243431 - RNA, 22 nt, Human
caaagauaaucacagaauaccc

SEQ ID NO: 243432 - RNA, 22 nt, Human
gagcucagcccaaagagcagug

SEQ ID NO: 243433 - RNA, 22 nt, Human
acauuucagauguaaugugaug

SEQ ID NO: 243434 - RNA, 22 nt, Human
acacauuuucaacacugucaag

SEQ ID NO: 243435 - RNA, 22 nt, Human
cccagcuugcgggcggcaggag

SEQ ID NO: 243436 - RNA, 22 nt, Human
agccuccuguagcccucaccca

SEQ ID NO: 243437 - RNA, 22 nt, Human
aagcccuggcucagcucaccag

SEQ ID NO: 243438 - RNA, 22 nt, Human
caagauuugacuucgugguuug

SEQ ID NO: 243439 - RNA, 20 nt, Human
uagaaucuguucugauucau

SEQ ID NO: 243440 - RNA, 22 nt, Human
acaguggcuuuugugucugcag

SEQ ID NO: 243441 - RNA, 22 nt, Human
auuuccuauagauauggugagu

SEQ ID NO: 243442 - RNA, 22 nt, Human
uuagagccaguuacaaggucaa

SEQ ID NO: 243443 - RNA, 22 nt, Human
aauccaauccuacucagaaagu

SEQ ID NO: 243444 - RNA, 22 nt, Human
cagaugaaggccugaaugucua

SEQ ID NO: 243445 - RNA, 18 nt, Human
agacagcugaaaggaaaa

SEQ ID NO: 243446 - RNA, 21 nt, Human
cucuugucuuugcucaguagc

SEQ ID NO: 243447 - RNA, 22 nt, Human
gcugcagagugaugaagugggg

SEQ ID NO: 243448 - RNA, 22 nt, Human
ucucuaaauacagaugucaugg

SEQ ID NO: 243449 - RNA, 22 nt, Human
uggaauggaaacaaacugagga

SEQ ID NO: 243450 - RNA, 22 nt, Human
ucacugugaauguuaucaucuu

SEQ ID NO: 243451 - RNA, 22 nt, Human
cucuggagggaggcugagcugg

SEQ ID NO: 243452 - RNA, 22 nt, Human
cuggggacuuugguucuccaug

SEQ ID NO: 243453 - RNA, 21 nt, Human
ugggauagaaauauggcugcu

SEQ ID NO: 243454 - RNA, 22 nt, Human
ucuggccccggucuucacagcu

SEQ ID NO: 243455 - RNA, 22 nt, Human
cagguggugccuccaggcuggu

SEQ ID NO: 243456 - RNA, 22 nt, Human
aaaugacacuaggcuuuuugca

SEQ ID NO: 243457 - RNA, 22 nt, Human
uuaaguacaggguuagugacgg

SEQ ID NO: 243458 - RNA, 22 nt, Human
uuccaugaaauguguuaugcuu

SEQ ID NO: 243459 - RNA, 22 nt, Human
ggcuuucuagaucuagcucugu

SEQ ID NO: 243460 - RNA, 22 nt, Human
aacaagaauaagugguuucugg

SEQ ID NO: 243461 - RNA, 22 nt, Human
uaaggcuuuuaaagguucacca

SEQ ID NO: 243462 - RNA, 22 nt, Human
aggucucugaguacugcuggac

SEQ ID NO: 243463 - RNA, 22 nt, Human
ucccaguggugggugcacauuu

SEQ ID NO: 243464 - RNA, 22 nt, Human
acucaggcuagggaaaaagugg

SEQ ID NO: 243465 - RNA, 21 nt, Human
acagcuggugcagggcgggga

SEQ ID NO: 243466 - RNA, 22 nt, Human
ggcacugggugagggucacugg

SEQ ID NO: 243467 - RNA, 23 nt, Human
agcagcaaaaauuuaucuuucug

SEQ ID NO: 243468 - RNA, 22 nt, Human
aggaguccucaugucugugcga

SEQ ID NO: 243469 - RNA, 22 nt, Human
cuuccugcaacaccuguguugc

SEQ ID NO: 243470 - RNA, 22 nt, Human
guacaaauguacacuuguauaa

SEQ ID NO: 243471 - RNA, 21 nt, Human
aacaggucccccacgggcuuu

SEQ ID NO: 243472 - RNA, 22 nt, Human
cuaguguuuggaagucauagcc

SEQ ID NO: 243473 - RNA, 21 nt, Human
cccaggaguccuauuuaaaug

SEQ ID NO: 243474 - RNA, 22 nt, Human
acugggcuucacuuggcacauc

SEQ ID NO: 243475 - RNA, 22 nt, Human
augucugcuuuccuuuuaauca

SEQ ID NO: 243476 - RNA, 22 nt, Human
acuuguuugaaucucucuagag

SEQ ID NO: 243477 - RNA, 22 nt, Human
cuggcaugguguauuuguucaa

SEQ ID NO: 243478 - RNA, 22 nt, Human
cuuuucugucagugcccaaauu

SEQ ID NO: 243479 - RNA, 22 nt, Human
acaugcauaagccuagccauca

SEQ ID NO: 243480 - RNA, 22 nt, Human
ugagccagcuccuugccuguca

SEQ ID NO: 243481 - RNA, 22 nt, Human
aagaggagggcagauucaaggc

SEQ ID NO: 243482 - RNA, 16 nt, Human
ccucugggccugcaag

SEQ ID NO: 243483 - RNA, 22 nt, Human
auucuucacauggauaggaucu

SEQ ID NO: 243484 - RNA, 22 nt, Human
gggcagcucucacagcagccaa

SEQ ID NO: 243485 - RNA, 21 nt, Human
auggcuucucaggugcacuga

SEQ ID NO: 243486 - RNA, 17 nt, Human
ucagggaaugagguugu

SEQ ID NO: 243487 - RNA, 18 nt, Human
gcugggguugagcucucc

SEQ ID NO: 243488 - RNA, 22 nt, Human
aagcacagauaaaacaggauuc

SEQ ID NO: 243489 - RNA, 22 nt, Human
ccacagaaucgcuaguggagca

SEQ ID NO: 243490 - RNA, 22 nt, Human
caucugcuguuccuuggacuca

SEQ ID NO: 243491 - RNA, 21 nt, Human
gggugcuguggucaugcagga

SEQ ID NO: 243492 - RNA, 22 nt, Human
auguuucagauacagaucaaau

SEQ ID NO: 243493 - RNA, 22 nt, Human
guuaauuugcagcuuucgagcu

SEQ ID NO: 243494 - RNA, 22 nt, Human
uuagcauuucaguacacauguu

SEQ ID NO: 243495 - RNA, 22 nt, Human
uagucagacccaagagagccau

SEQ ID NO: 243496 - RNA, 22 nt, Human
gcugcucuccauggccgugagu

SEQ ID NO: 243497 - RNA, 22 nt, Human
acuuaaaaagaaucuuuucacg

SEQ ID NO: 243498 - RNA, 22 nt, Human
aaccaccaccguaauuuaccca

SEQ ID NO: 243499 - RNA, 22 nt, Human
uggcugagccacuuguucagau

SEQ ID NO: 243500 - RNA, 19 nt, Human
guacaacaaugcugagcau

SEQ ID NO: 243501 - RNA, 22 nt, Human
gccagaggaacgcugcgcgccc

SEQ ID NO: 243502 - RNA, 22 nt, Human
gccacauccagguggaucaaau

SEQ ID NO: 243503 - RNA, 22 nt, Human
aggagauggagcucagugggca

SEQ ID NO: 243504 - RNA, 22 nt, Human
aggaccuguguuuuccuugaau

SEQ ID NO: 243505 - RNA, 22 nt, Human
auggagggaaaaguggagagcc

SEQ ID NO: 243506 - RNA, 22 nt, Human
acugagcacucacuuuuguuau

SEQ ID NO: 243507 - RNA, 22 nt, Human
aaaggccauuacuugcuuuuag

SEQ ID NO: 243508 - RNA, 22 nt, Human
auugucugaauccaaagcucug

SEQ ID NO: 243509 - RNA, 22 nt, Human
gcuggagugcuggagugcagug

SEQ ID NO: 243510 - RNA, 22 nt, Human
ugcagaaacagucauuaaugua

SEQ ID NO: 243511 - RNA, 22 nt, Human
gcacacaggcaguuuccagcca

SEQ ID NO: 243512 - RNA, 22 nt, Human
gagcugggcuggcuuccucccu

SEQ ID NO: 243513 - RNA, 22 nt, Human
uucugcauuucuaauaaguucc

SEQ ID NO: 243514 - RNA, 22 nt, Human
uguacauagaucuugaaaauua

SEQ ID NO: 243515 - RNA, 22 nt, Human
agguggggcccaccaauuugca

SEQ ID NO: 243516 - RNA, 22 nt, Human
uuucuaaggaaaguaccuggga

SEQ ID NO: 243517 - RNA, 22 nt, Human
caggcacaguguugcuguucaa

SEQ ID NO: 243518 - RNA, 22 nt, Human
aggucugguauuuuucuauacu

SEQ ID NO: 243519 - RNA, 22 nt, Human
ugcugccaggucuugcugucca

SEQ ID NO: 243520 - RNA, 22 nt, Human
cagggccugcaagagaccuggg

SEQ ID NO: 243521 - RNA, 22 nt, Human
aaauagcagcuuugacagcaca

SEQ ID NO: 243522 - RNA, 22 nt, Human
agcaguccuucuuuagagagcc

SEQ ID NO: 243523 - RNA, 22 nt, Human
aggcagcucuguggccucccag

SEQ ID NO: 243524 - RNA, 22 nt, Human
aggcugagacugugcauuagug

SEQ ID NO: 243525 - RNA, 22 nt, Human
uccugcagccacugcaggcaga

SEQ ID NO: 243526 - RNA, 22 nt, Human
gguccaggaucaaggcaucacc

SEQ ID NO: 243527 - RNA, 22 nt, Human
aagggcagcuauuaucgucauc

SEQ ID NO: 243528 - RNA, 21 nt, Human
uuauugagacauuuguggaaa

SEQ ID NO: 243529 - RNA, 22 nt, Human
ucaggcuguggcuucaguucuu

SEQ ID NO: 243530 - RNA, 22 nt, Human
aaguuuuauuggaacauagcca

SEQ ID NO: 243531 - RNA, 22 nt, Human
auguuguuuuuucauaaaguau

SEQ ID NO: 243532 - RNA, 22 nt, Human
uucagagaacuucauggaagag

SEQ ID NO: 243533 - RNA, 22 nt, Human
cacagcuagauggauagauaga

SEQ ID NO: 243534 - RNA, 22 nt, Human
acuuucugcaguguuggaaaug

SEQ ID NO: 243535 - RNA, 19 nt, Human
ggacacagaaagcugcauu

SEQ ID NO: 243536 - RNA, 20 nt, Human
ccuucuccagcuuguucuug

SEQ ID NO: 243537 - RNA, 22 nt, Human
ugguccugaggcuuguuuccac

SEQ ID NO: 243538 - RNA, 22 nt, Human
cagcauggcuugaguguuuccu

SEQ ID NO: 243539 - RNA, 22 nt, Human
aggccuugggccauagucuccu

SEQ ID NO: 243540 - RNA, 22 nt, Human
cagagagaggccacugcuauua

SEQ ID NO: 243541 - RNA, 22 nt, Human
aagggcugcaauccaaaacacu

SEQ ID NO: 243542 - RNA, 22 nt, Human
caguccuggggaccaggcugag

SEQ ID NO: 243543 - RNA, 22 nt, Human
cauaaauuguacccauuccaac

SEQ ID NO: 243544 - RNA, 22 nt, Human
cuacaugaacucuuaagucaca

SEQ ID NO: 243545 - RNA, 22 nt, Human
gagacacaggcacagaagaggc

SEQ ID NO: 243546 - RNA, 19 nt, Human
uuggaaggagccagagugg

SEQ ID NO: 243547 - RNA, 22 nt, Human
cgcaacucagcaacuuaacugc

SEQ ID NO: 243548 - RNA, 22 nt, Human
ccagguggauaagguuucugga

SEQ ID NO: 243549 - RNA, 22 nt, Human
gaaacuuucaugaauauaagau

SEQ ID NO: 243550 - RNA, 22 nt, Human
cagcaagacaggauucccgugg

SEQ ID NO: 243551 - RNA, 22 nt, Human
uucuuugcccuuaaugaaauaa

SEQ ID NO: 243552 - RNA, 22 nt, Human
gagggaugcagaaacagaggcc

SEQ ID NO: 243553 - RNA, 18 nt, Human
gccaguggguccaggugc

SEQ ID NO: 243554 - RNA, 22 nt, Human
uagagcagaacuuguuaacacc

SEQ ID NO: 243555 - RNA, 22 nt, Human
cagagcagggugcaccuugggc

SEQ ID NO: 243556 - RNA, 22 nt, Human
auucuagaaggcaaagcaaggg

SEQ ID NO: 243557 - RNA, 22 nt, Human
gcuguagggcugagcuggaccg

SEQ ID NO: 243558 - RNA, 22 nt, Human
aucuggcuuaccuagggugccu

SEQ ID NO: 243559 - RNA, 22 nt, Human
uucuaacucuguuauguguuuc

SEQ ID NO: 243560 - RNA, 22 nt, Human
cagcccuggcccaggugccuua

SEQ ID NO: 243561 - RNA, 22 nt, Human
agggagcucugggggcacacgg

SEQ ID NO: 243562 - RNA, 22 nt, Human
ugaaacugaaagguauuuauag

SEQ ID NO: 243563 - RNA, 22 nt, Human
gcagaggaucaggcucuggaaa

SEQ ID NO: 243564 - RNA, 21 nt, Human
ucuugaaaaguuagauucucu

SEQ ID NO: 243565 - RNA, 22 nt, Human
cagcuguugugauuuccaggag

SEQ ID NO: 243566 - RNA, 22 nt, Human
caaaaguaauuaugguuuuugc

SEQ ID NO: 243567 - RNA, 22 nt, Human
uaaguguuguuuucaagagaua

SEQ ID NO: 243568 - RNA, 22 nt, Human
agcagggggcauccuugcccuu

SEQ ID NO: 243569 - RNA, 22 nt, Human
acagccuggccugaguuaaggc

SEQ ID NO: 243570 - RNA, 22 nt, Human
gcagugcuugcucaggcuucau

SEQ ID NO: 243571 - RNA, 22 nt, Human
ccagcucugcuugcccagucag

SEQ ID NO: 243572 - RNA, 22 nt, Human
agggcccuccccgcucagggca

SEQ ID NO: 243573 - RNA, 22 nt, Human
ccucugggugacagacucuugg

SEQ ID NO: 243574 - RNA, 22 nt, Human
acaauuucuuauaguucaauuc

SEQ ID NO: 243575 - RNA, 17 nt, Human
ggcaggugcggggccgc

SEQ ID NO: 243576 - RNA, 22 nt, Human
acagaauauuuggcaugcgucu

SEQ ID NO: 243577 - RNA, 21 nt, Human
cugccaggauagcaugcaggc

SEQ ID NO: 243578 - RNA, 22 nt, Human
ugcuuuauaaccauuucugugg

SEQ ID NO: 243579 - RNA, 22 nt, Human
aacaguuugccugaaauguauu

SEQ ID NO: 243580 - RNA, 22 nt, Human
ggcaggaagcauuaaaacgauu

SEQ ID NO: 243581 - RNA, 22 nt, Human
aaagcagcagaaucucucaggg

SEQ ID NO: 243582 - RNA, 22 nt, Human
ugcauauuauguguaucugucu

SEQ ID NO: 243583 - RNA, 22 nt, Human
agaacagaagggaggaaggccu

SEQ ID NO: 243584 - RNA, 22 nt, Human
gcuggagggguaauaggauggg

SEQ ID NO: 243585 - RNA, 22 nt, Human
acaaguuagguuuuaauccaaa

SEQ ID NO: 243586 - RNA, 22 nt, Human
cccagaggguggagguugcagu

SEQ ID NO: 243587 - RNA, 22 nt, Human
auaugcuugggacugauacagu

SEQ ID NO: 243588 - RNA, 22 nt, Human
aggguagggcccggagacagac

SEQ ID NO: 243589 - RNA, 22 nt, Human
uggaccucacugucugcuggua

SEQ ID NO: 243590 - RNA, 18 nt, Human
ggaaggaagaaugcauuu

SEQ ID NO: 243591 - RNA, 22 nt, Human
ucuaaauuacuuugggcaguau

SEQ ID NO: 243592 - RNA, 22 nt, Human
acccugggaacuggaaacugga

SEQ ID NO: 243593 - RNA, 22 nt, Human
acacaucucaggggacacucuc

SEQ ID NO: 243594 - RNA, 22 nt, Human
acucugggcccacccucagagu

SEQ ID NO: 243595 - RNA, 22 nt, Human
ggagagggggcucccugcuugg

SEQ ID NO: 243596 - RNA, 22 nt, Human
cucaggcuugggaggaggccca

SEQ ID NO: 243597 - RNA, 22 nt, Human
ucuuugaugugguuaauuauga

SEQ ID NO: 243598 - RNA, 22 nt, Human
uaaaugagggcugacaugauug

SEQ ID NO: 243599 - RNA, 22 nt, Human
gacagauggucaguguugaagu

SEQ ID NO: 243600 - RNA, 19 nt, Human
ugaauuagaauuauccucu

SEQ ID NO: 243601 - RNA, 22 nt, Human
cagggcugguuugucgaagaaa

SEQ ID NO: 243602 - RNA, 22 nt, Human
agcuggaagcugaugagcacag

SEQ ID NO: 243603 - RNA, 22 nt, Human
cagcaagaaaauucacaugcuc

SEQ ID NO: 243604 - RNA, 22 nt, Human
gaccacagcuacaagggcaagg

SEQ ID NO: 243605 - RNA, 22 nt, Human
ggcugagacuagagugaggcau

SEQ ID NO: 243606 - RNA, 22 nt, Human
agccaggcagggcucucgcucu

SEQ ID NO: 243607 - RNA, 22 nt, Human
ucuugauuacaaauaacaucau

SEQ ID NO: 243608 - RNA, 22 nt, Human
ucuagaauguuccaccuuguuu

SEQ ID NO: 243609 - RNA, 22 nt, Human
auagggcccccgugggugcuca

SEQ ID NO: 243610 - RNA, 22 nt, Human
cccugcagggaggauucugaag

SEQ ID NO: 243611 - RNA, 23 nt, Human
acugcugucuuugaagugcuuga

SEQ ID NO: 243612 - RNA, 22 nt, Human
aagcccuuuucaagauacaaca

SEQ ID NO: 243613 - RNA, 22 nt, Human
uguauuuaagcuuuaccuaaaa

SEQ ID NO: 243614 - RNA, 22 nt, Human
acugcccucccaucuauugcaa

SEQ ID NO: 243615 - RNA, 22 nt, Human
cacugguagcaguuaaguuagg

SEQ ID NO: 243616 - RNA, 22 nt, Human
caggcacacaggcucccugggc

SEQ ID NO: 243617 - RNA, 22 nt, Human
uccacagggccuuucuggugug

SEQ ID NO: 243618 - RNA, 22 nt, Human
ggguaggcucugcaggcugggu

SEQ ID NO: 243619 - RNA, 22 nt, Human
ucugggcugugggaauucaaca

SEQ ID NO: 243620 - RNA, 19 nt, Human
cucaccuggaggugcugau

SEQ ID NO: 243621 - RNA, 22 nt, Human
caaugcaugauggaauugccuu

SEQ ID NO: 243622 - RNA, 22 nt, Human
ugcuggcuggagugccucugga

SEQ ID NO: 243623 - RNA, 22 nt, Human
ugucuauuaauuccacauaaaa

SEQ ID NO: 243624 - RNA, 22 nt, Human
aauaacuucauguaacauuuaa

SEQ ID NO: 243625 - RNA, 20 nt, Human
ucacauccucucccaacaug

SEQ ID NO: 243626 - RNA, 22 nt, Human
accaaccagggacuuggcuccc

SEQ ID NO: 243627 - RNA, 22 nt, Human
caauuauauuuagaaugauaca

SEQ ID NO: 243628 - RNA, 19 nt, Human
gcauaaaaugucaaugugu

SEQ ID NO: 243629 - RNA, 22 nt, Human
agcaagcauugcugguuagguc

SEQ ID NO: 243630 - RNA, 21 nt, Human
acagcauguuuguguguuugc

SEQ ID NO: 243631 - RNA, 22 nt, Human
caauuucaucuugugcuucaau

SEQ ID NO: 243632 - RNA, 22 nt, Human
ucugagaaaauaggaaacuuga

SEQ ID NO: 243633 - RNA, 22 nt, Human
ucaggcucaaagggccggauga

SEQ ID NO: 243634 - RNA, 22 nt, Human
caaggccacugcucagguuucc

SEQ ID NO: 243635 - RNA, 22 nt, Human
uuacaguuaaugugacuaacca

SEQ ID NO: 243636 - RNA, 19 nt, Human
uucuuacaacacccuggga

SEQ ID NO: 243637 - RNA, 22 nt, Human
accagccuccuagcugcuccug

SEQ ID NO: 243638 - RNA, 22 nt, Human
ucagugcaaucaagguauguuu

SEQ ID NO: 243639 - RNA, 22 nt, Human
auaaucaaaguccuaugacauc

SEQ ID NO: 243640 - RNA, 22 nt, Human
cuuggacuggacccgaggaaug

SEQ ID NO: 243641 - RNA, 22 nt, Human
uagagugguuaacaguuuagaa

SEQ ID NO: 243642 - RNA, 22 nt, Human
gcagggcuaggucuucuagggc

SEQ ID NO: 243643 - RNA, 22 nt, Human
uucugacagcaaaacucagccu

SEQ ID NO: 243644 - RNA, 22 nt, Human
agcuuuauauguuguuucucca

SEQ ID NO: 243645 - RNA, 22 nt, Human
uugcugauuuguuucuauucca

SEQ ID NO: 243646 - RNA, 22 nt, Human
caucuguagcuccaugacaauu

SEQ ID NO: 243647 - RNA, 22 nt, Human
ucauguuaucuuggcucuggga

SEQ ID NO: 243648 - RNA, 22 nt, Human
cuccauggaaccggggcugcuu

SEQ ID NO: 243649 - RNA, 22 nt, Human
agugcucauaaaaaugugaaac

SEQ ID NO: 243650 - RNA, 22 nt, Human
auauauaucgaguucaugucuc

SEQ ID NO: 243651 - RNA, 19 nt, Human
accugcaguaauaauuccu

SEQ ID NO: 243652 - RNA, 22 nt, Human
gcacaggucaggagaugagauu

SEQ ID NO: 243653 - RNA, 22 nt, Human
aaaggccuugagcugggugcca

SEQ ID NO: 243654 - RNA, 22 nt, Human
cagggcuguaaauuagugcuga

SEQ ID NO: 243655 - RNA, 22 nt, Human
ugccucagucuaaagucucuca

SEQ ID NO: 243656 - RNA, 22 nt, Human
cuucagagaguccagggacugc

SEQ ID NO: 243657 - RNA, 22 nt, Human
cugaggaaugagugaggagcca

SEQ ID NO: 243658 - RNA, 22 nt, Human
cacauuccuggugcucagcagc

SEQ ID NO: 243659 - RNA, 22 nt, Human
accuguuuagaaagcuuaugag

SEQ ID NO: 243660 - RNA, 22 nt, Human
uaacugaauguauuacaacaga

SEQ ID NO: 243661 - RNA, 22 nt, Human
cuuguauagggaaagauaaauc

SEQ ID NO: 243662 - RNA, 22 nt, Human
ggcugcugggucaugaugcaga

SEQ ID NO: 243663 - RNA, 22 nt, Human
cagugcaguuucccagaugcug

SEQ ID NO: 243664 - RNA, 22 nt, Human
aggguagcuacccaacuccaga

SEQ ID NO: 243665 - RNA, 22 nt, Human
cugugccuaagaugcaugucuc

SEQ ID NO: 243666 - RNA, 22 nt, Human
acagguggggaggcugagguuc

SEQ ID NO: 243667 - RNA, 22 nt, Human
guccugugagauucaugcucaa

SEQ ID NO: 243668 - RNA, 22 nt, Human
agcagggcagcuuuuuucagaa

SEQ ID NO: 243669 - RNA, 22 nt, Human
auccaauucuaauauuguguuu

SEQ ID NO: 243670 - RNA, 22 nt, Human
uguuuacaaggaguuuauauug

SEQ ID NO: 243671 - RNA, 22 nt, Human
cagaagaguagcugaacaaguu

SEQ ID NO: 243672 - RNA, 22 nt, Human
acauguaaaaauuaagguaaga

SEQ ID NO: 243673 - RNA, 22 nt, Human
ggcagccuucucucauagguga

SEQ ID NO: 243674 - RNA, 22 nt, Human
ucagggcugcauacaggagaua

SEQ ID NO: 243675 - RNA, 22 nt, Human
uaaggacauugguuuugaguaa

SEQ ID NO: 243676 - RNA, 23 nt, Human
uccaggagaauuccagggcccgg

SEQ ID NO: 243677 - RNA, 22 nt, Human
cuugauuucagccuugugauau

SEQ ID NO: 243678 - RNA, 22 nt, Human
uggcccagcugcagauggugga

SEQ ID NO: 243679 - RNA, 22 nt, Human
ggcuuucuccuugccuuagucu

SEQ ID NO: 243680 - RNA, 22 nt, Human
cucaggcacuuuugucacagac

SEQ ID NO: 243681 - RNA, 22 nt, Human
ugucuuuaauucuacauaucuc

SEQ ID NO: 243682 - RNA, 22 nt, Human
caauuuuacucuuccucuucca

SEQ ID NO: 243683 - RNA, 22 nt, Human
gagcuggcaaugacuuguguau

SEQ ID NO: 243684 - RNA, 22 nt, Human
ccagagcagauguggccuuggu

SEQ ID NO: 243685 - RNA, 22 nt, Human
caaaagauacuugcaucuaacu

SEQ ID NO: 243686 - RNA, 20 nt, Human
uguauauuuucugguguaaa

SEQ ID NO: 243687 - RNA, 22 nt, Human
gcaguggcagagacagcaccaa

SEQ ID NO: 243688 - RNA, 22 nt, Human
cugcaucugcauaaucaacuuc

SEQ ID NO: 243689 - RNA, 22 nt, Human
gcaaauauuucuaauuccugaa

SEQ ID NO: 243690 - RNA, 22 nt, Human
ggccugugcaagacagcacccc

SEQ ID NO: 243691 - RNA, 22 nt, Human
uccucaguuauaaauaggaaac

SEQ ID NO: 243692 - RNA, 22 nt, Human
ugcaggcccaguguagaggcuc

SEQ ID NO: 243693 - RNA, 22 nt, Human
ccagagaggccuuggcaagaca

SEQ ID NO: 243694 - RNA, 22 nt, Human
ccagcuuggaauaugccauugu

SEQ ID NO: 243695 - RNA, 22 nt, Human
aagccagauagaagaacucauu

SEQ ID NO: 243696 - RNA, 22 nt, Human
ugagggagcacacacugaagug

SEQ ID NO: 243697 - RNA, 22 nt, Human
auggcagggcccuuggcuccca

SEQ ID NO: 243698 - RNA, 23 nt, Human
uguguauguaucuaugcauaggu

SEQ ID NO: 243699 - RNA, 22 nt, Human
guugaaaaugacuuuauaccau

SEQ ID NO: 243700 - RNA, 22 nt, Human
ucauguuaucagacacagagua

SEQ ID NO: 243701 - RNA, 22 nt, Human
ucagcacuuuuuaaagcagcau

SEQ ID NO: 243702 - RNA, 22 nt, Human
auugcagcuggucaggguaauu

SEQ ID NO: 243703 - RNA, 22 nt, Human
ggaaugaauuuccagcuggguc

SEQ ID NO: 243704 - RNA, 22 nt, Human
ggguccaggcacuaugcuaagu

SEQ ID NO: 243705 - RNA, 22 nt, Human
ugccugccaaugaugcuugugu

SEQ ID NO: 243706 - RNA, 19 nt, Human
cugucccucccagguauga

SEQ ID NO: 243707 - RNA, 22 nt, Human
agauugaagacugguggagcug

SEQ ID NO: 243708 - RNA, 22 nt, Human
cgagagauggguuggcaggggc

SEQ ID NO: 243709 - RNA, 22 nt, Human
cacuguaauagcauuauaagug

SEQ ID NO: 243710 - RNA, 22 nt, Human
acaggccuagcuaaugcuuucc

SEQ ID NO: 243711 - RNA, 23 nt, Human
aaugauuucaugaugauagcagc

SEQ ID NO: 243712 - RNA, 22 nt, Human
uagcagaaacuguuacagaagg

SEQ ID NO: 243713 - RNA, 22 nt, Human
gacagcuguggagaggcaugug

SEQ ID NO: 243714 - RNA, 22 nt, Human
gggggcaguaaccucaaagugu

SEQ ID NO: 243715 - RNA, 22 nt, Human
uucugucaaaugccaguagaga

SEQ ID NO: 243716 - RNA, 22 nt, Human
agcuaacacauuccagcuauuu

SEQ ID NO: 243717 - RNA, 22 nt, Human
caaagcuggacugcucaguuca

SEQ ID NO: 243718 - RNA, 22 nt, Human
cccugcagagaccacugaccuu

SEQ ID NO: 243719 - RNA, 22 nt, Human
augcaauaccuucugaaaauaa

SEQ ID NO: 243720 - RNA, 22 nt, Human
ugguccgcuccuauucgccgca

SEQ ID NO: 243721 - RNA, 22 nt, Human
ucuucaaagaauuuuaguaauu

SEQ ID NO: 243722 - RNA, 22 nt, Human
agcaguuacuaguuaaaugcau

SEQ ID NO: 243723 - RNA, 22 nt, Human
gccaccagugggggccugggca

SEQ ID NO: 243724 - RNA, 22 nt, Human
gggguacuggcuggagccccac

SEQ ID NO: 243725 - RNA, 22 nt, Human
caguggcuucucaugucauuca

SEQ ID NO: 243726 - RNA, 22 nt, Human
ugcuuugugauaugcugugucu

SEQ ID NO: 243727 - RNA, 22 nt, Human
ccaggaagggcucuuuaaagac

SEQ ID NO: 243728 - RNA, 22 nt, Human
ggccccucagcaucugagucag

SEQ ID NO: 243729 - RNA, 22 nt, Human
agguggaaauggcuuuccuagg

SEQ ID NO: 243730 - RNA, 22 nt, Human
ugugaauaaugccgcaauaaac

SEQ ID NO: 243731 - RNA, 22 nt, Human
auuaagugugacaugcugcucu

SEQ ID NO: 243732 - RNA, 22 nt, Human
ggagggggaaacuuuggcugcc

SEQ ID NO: 243733 - RNA, 22 nt, Human
ccucagagacugcaucuucccu

SEQ ID NO: 243734 - RNA, 19 nt, Human
ccucugccagcccgccucu

SEQ ID NO: 243735 - RNA, 22 nt, Human
ugguggggccagacuucagcuc

SEQ ID NO: 243736 - RNA, 22 nt, Human
aucauucaaaugauuuggaggu

SEQ ID NO: 243737 - RNA, 22 nt, Human
gcuuggaaguaggauugggaga

SEQ ID NO: 243738 - RNA, 22 nt, Human
gugaagaugccucaggugaccc

SEQ ID NO: 243739 - RNA, 22 nt, Human
ugcaaauuugacuucacacauc

SEQ ID NO: 243740 - RNA, 22 nt, Human
ugaagagauuaaguugguuuug

SEQ ID NO: 243741 - RNA, 22 nt, Human
augcacaagguagauuauuauu

SEQ ID NO: 243742 - RNA, 19 nt, Human
agccagaguggcccagggg

SEQ ID NO: 243743 - RNA, 22 nt, Human
agaagccauucccuguaggcuc

SEQ ID NO: 243744 - RNA, 22 nt, Human
aaucaagaguuguguaauauuu

SEQ ID NO: 243745 - RNA, 22 nt, Human
auguauuugaaauuugagacau

SEQ ID NO: 243746 - RNA, 22 nt, Human
uacuucauaccugcuagaaugg

SEQ ID NO: 243747 - RNA, 22 nt, Human
augugcauaaacauauuguugg

SEQ ID NO: 243748 - RNA, 21 nt, Human
cagcagguggagccucuuguc

SEQ ID NO: 243749 - RNA, 22 nt, Human
auuucacagcugucaguguuac

SEQ ID NO: 243750 - RNA, 22 nt, Human
aagcugugaaaucucuagugca

SEQ ID NO: 243751 - RNA, 20 nt, Human
accuccuggaagcaggugcc

SEQ ID NO: 243752 - RNA, 22 nt, Human
cauucagagcuuucuuaucaua

SEQ ID NO: 243753 - RNA, 18 nt, Human
ccuagccuccaagcucau

SEQ ID NO: 243754 - RNA, 22 nt, Human
aagcaagaggaaauguggaccu

SEQ ID NO: 243755 - RNA, 19 nt, Human
agagaccacagagcugccu

SEQ ID NO: 243756 - RNA, 22 nt, Human
gcauuuuauaaagaguuauuug

SEQ ID NO: 243757 - RNA, 21 nt, Human
ccuggcuucagggugcacugg

SEQ ID NO: 243758 - RNA, 22 nt, Human
ucaggccugcagugccaaccca

SEQ ID NO: 243759 - RNA, 22 nt, Human
uccuggcagagggcggccucga

SEQ ID NO: 243760 - RNA, 19 nt, Human
uuuagaaguugaaacucug

SEQ ID NO: 243761 - RNA, 22 nt, Human
uuuaauguagcgugaaaugauu

SEQ ID NO: 243762 - RNA, 22 nt, Human
gugggggcagugggcuucgagc

SEQ ID NO: 243763 - RNA, 22 nt, Human
uuacuuuugcaccaaacuaaua

SEQ ID NO: 243764 - RNA, 22 nt, Human
aaagcacuuugagacugacagg

SEQ ID NO: 243765 - RNA, 22 nt, Human
augcaggagagcauguuuaaga

SEQ ID NO: 243766 - RNA, 22 nt, Human
caaagcuguaccccaaccuaug

SEQ ID NO: 243767 - RNA, 22 nt, Human
ucuuucccaguagcucucccag

SEQ ID NO: 243768 - RNA, 22 nt, Human
gaaugaauagguguccagaugg

SEQ ID NO: 243769 - RNA, 22 nt, Human
ggagccagugcccucuggugga

SEQ ID NO: 243770 - RNA, 22 nt, Human
acagaauagagacugccugcuc

SEQ ID NO: 243771 - RNA, 22 nt, Human
ugaaauacugagugaaagaauu

SEQ ID NO: 243772 - RNA, 22 nt, Human
aacucaguucuuuccacaaugc

SEQ ID NO: 243773 - RNA, 20 nt, Human
aaaaauugauaucgcuuccu

SEQ ID NO: 243774 - RNA, 22 nt, Human
gaaaguuauaucaugauuuuag

SEQ ID NO: 243775 - RNA, 22 nt, Human
ugagcagggacuuugaguguag

SEQ ID NO: 243776 - RNA, 22 nt, Human
uagugaauaguccaaucccgca

SEQ ID NO: 243777 - RNA, 22 nt, Human
gcuggguccuaugcugguagag

SEQ ID NO: 243778 - RNA, 22 nt, Human
agauggggcucaguguggaggc

SEQ ID NO: 243779 - RNA, 20 nt, Human
uggcccagcacgacgaggac

SEQ ID NO: 243780 - RNA, 22 nt, Human
aaggccaggagacuuggaguca

SEQ ID NO: 243781 - RNA, 22 nt, Human
ccugggcuguugcaucauccuu

SEQ ID NO: 243782 - RNA, 22 nt, Human
gaauagcuuagauuccuuagug

SEQ ID NO: 243783 - RNA, 22 nt, Human
aaauuguugaucuacaguaagg

SEQ ID NO: 243784 - RNA, 22 nt, Human
cugcccugacugaccuuuugaa

SEQ ID NO: 243785 - RNA, 22 nt, Human
gugacccagaggcugacuaaca

SEQ ID NO: 243786 - RNA, 22 nt, Human
augaauggauggggucaagaua

SEQ ID NO: 243787 - RNA, 22 nt, Human
acucagagucugagauaaaucu

SEQ ID NO: 243788 - RNA, 22 nt, Human
auaugaaaagaagucaccauug

SEQ ID NO: 243789 - RNA, 22 nt, Human
gaaauauuacaguggaggggau

SEQ ID NO: 243790 - RNA, 22 nt, Human
ucaagcaaacucugagaaauaa

SEQ ID NO: 243791 - RNA, 22 nt, Human
gcagcucaguaaaagaggagca

SEQ ID NO: 243792 - RNA, 22 nt, Human
gaagaauauauaaugauuuugu

SEQ ID NO: 243793 - RNA, 22 nt, Human
auacauauaugguacuuccugg

SEQ ID NO: 243794 - RNA, 22 nt, Human
gaaggcaucacagaggcugugg

SEQ ID NO: 243795 - RNA, 20 nt, Human
ccucagagcgcaggcccccu

SEQ ID NO: 243796 - RNA, 22 nt, Human
caagauuugggggcacggaauc

SEQ ID NO: 243797 - RNA, 22 nt, Human
gugggacagcggggugggacag

SEQ ID NO: 243798 - RNA, 22 nt, Human
ccuccaagcugguccucugugu

SEQ ID NO: 243799 - RNA, 22 nt, Human
cccuccagggagccaugcuggg

SEQ ID NO: 243800 - RNA, 22 nt, Human
ccugccuuucucaguaaucuuu

SEQ ID NO: 243801 - RNA, 21 nt, Human
cagaggcaggcucugugugug

SEQ ID NO: 243802 - RNA, 20 nt, Human
gaggaaaagcugccaggccu

SEQ ID NO: 243803 - RNA, 22 nt, Human
gucaucuuaaggacugcuauag

SEQ ID NO: 243804 - RNA, 18 nt, Human
agaagccugccucaaugc

SEQ ID NO: 243805 - RNA, 22 nt, Human
aaagucaucuaggagcagauuu

SEQ ID NO: 243806 - RNA, 22 nt, Human
ucacaccuugcuggcugagugc

SEQ ID NO: 243807 - RNA, 20 nt, Human
acuuuacugagcuguaauuc

SEQ ID NO: 243808 - RNA, 22 nt, Human
caccaggaagugguggccuggg

SEQ ID NO: 243809 - RNA, 22 nt, Human
guauuuuauggcaugcaguggc

SEQ ID NO: 243810 - RNA, 22 nt, Human
cugcagaaaccuuuccugauuu

SEQ ID NO: 243811 - RNA, 22 nt, Human
gucaguuacagccacggcgggu

SEQ ID NO: 243812 - RNA, 22 nt, Human
ugaggcucugcuucuguggcuc

SEQ ID NO: 243813 - RNA, 22 nt, Human
agcagggcugcagugugucuuu

SEQ ID NO: 243814 - RNA, 22 nt, Human
ggagccuuagacaucugauccu

SEQ ID NO: 243815 - RNA, 22 nt, Human
uucagagaagugcacaaaauca

SEQ ID NO: 243816 - RNA, 22 nt, Human
aauagauggguuaaacagcaaa

SEQ ID NO: 243817 - RNA, 22 nt, Human
auuuucauggcuucugcucagu

SEQ ID NO: 243818 - RNA, 22 nt, Human
ggccuuccugcugcuccgggcc

SEQ ID NO: 243819 - RNA, 22 nt, Human
ggaccaggagcucagagcccuc

SEQ ID NO: 243820 - RNA, 22 nt, Human
ucaugcagauaagaauaaguaa

SEQ ID NO: 243821 - RNA, 22 nt, Human
agugacauuugcaccagcugcu

SEQ ID NO: 243822 - RNA, 22 nt, Human
uacaaauuaaugggcauguuua

SEQ ID NO: 243823 - RNA, 22 nt, Human
uuuaugucccuucaaauguuua

SEQ ID NO: 243824 - RNA, 22 nt, Human
ccugagagcccuagccaggcgc

SEQ ID NO: 243825 - RNA, 22 nt, Human
gucaacauuuacugcccuggcc

SEQ ID NO: 243826 - RNA, 22 nt, Human
ucuguaggguaguaguggagau

SEQ ID NO: 243827 - RNA, 22 nt, Human
aaaugcuguagaucagugaguu

SEQ ID NO: 243828 - RNA, 22 nt, Human
gccuguuuaucuaucaugaacu

SEQ ID NO: 243829 - RNA, 22 nt, Human
ccaggaguuugaggcugcagug

SEQ ID NO: 243830 - RNA, 22 nt, Human
auuauauugaguauaaccagag

SEQ ID NO: 243831 - RNA, 22 nt, Human
ugcccugcuaaauauagguagc

SEQ ID NO: 243832 - RNA, 22 nt, Human
cuggggaggcagggcugccccu

SEQ ID NO: 243833 - RNA, 22 nt, Human
uccugggaagagaccugagcau

SEQ ID NO: 243834 - RNA, 22 nt, Human
cucagggcggcgggcagcccag

SEQ ID NO: 243835 - RNA, 22 nt, Human
guuguucucccuaacaauuacu

SEQ ID NO: 243836 - RNA, 22 nt, Human
ugggagagauaggcuucuggac

SEQ ID NO: 243837 - RNA, 23 nt, Human
ucccugagaugcugcucuguccc

SEQ ID NO: 243838 - RNA, 22 nt, Human
uccaguccuaucugcccuugga

SEQ ID NO: 243839 - RNA, 22 nt, Human
accuugaugccuuuccaagaug

SEQ ID NO: 243840 - RNA, 22 nt, Human
cuggagggcugcagcgaggcug

SEQ ID NO: 243841 - RNA, 22 nt, Human
aaagcagucacuccagugugau

SEQ ID NO: 243842 - RNA, 22 nt, Human
caggagucuguuccucauuugu

SEQ ID NO: 243843 - RNA, 22 nt, Human
aggcagcauccagaggagaaug

SEQ ID NO: 243844 - RNA, 22 nt, Human
uggcacugaccccaggccugug

SEQ ID NO: 243845 - RNA, 22 nt, Human
gcuguucacggaggaggauggg

SEQ ID NO: 243846 - RNA, 22 nt, Human
ucuccuggccgggcuguccccu

SEQ ID NO: 243847 - RNA, 22 nt, Human
ggacuggccggcgcugaggccc

SEQ ID NO: 243848 - RNA, 22 nt, Human
uucacagugugaucuaugggca

SEQ ID NO: 243849 - RNA, 22 nt, Human
gugcagauccugauugcaguuc

SEQ ID NO: 243850 - RNA, 22 nt, Human
ugguuccacuaaccugagagcc

SEQ ID NO: 243851 - RNA, 22 nt, Human
cucccaggccaugcucuagcca

SEQ ID NO: 243852 - RNA, 22 nt, Human
agaaaucacaggaggcagaagg

SEQ ID NO: 243853 - RNA, 22 nt, Human
uggcauugacgcugaccugcac

SEQ ID NO: 243854 - RNA, 22 nt, Human
gggaucuuguuuaauauuguuu

SEQ ID NO: 243855 - RNA, 22 nt, Human
ggccuuggugcucuguguugca

SEQ ID NO: 243856 - RNA, 22 nt, Human
ucagcugggugaguguucugca

SEQ ID NO: 243857 - RNA, 22 nt, Human
aagaacaugcuauaauuaucuu

SEQ ID NO: 243858 - RNA, 22 nt, Human
accugcuuuguaguguuugcug

SEQ ID NO: 243859 - RNA, 22 nt, Human
agcaccugcuaugugucaggga

SEQ ID NO: 243860 - RNA, 19 nt, Human
gaguccugugcuccuuguu

SEQ ID NO: 243861 - RNA, 22 nt, Human
cuugagaaaggaacaggaagcu

SEQ ID NO: 243862 - RNA, 19 nt, Human
acacugaauguagaauugg

SEQ ID NO: 243863 - RNA, 22 nt, Human
cacuggcccauaaaggccuggg

SEQ ID NO: 243864 - RNA, 22 nt, Human
auguguacacuggacuucugau

SEQ ID NO: 243865 - RNA, 22 nt, Human
ucuacacuguagaauuauaagg

SEQ ID NO: 243866 - RNA, 22 nt, Human
uuguaacagcuguuuauauagu

SEQ ID NO: 243867 - RNA, 22 nt, Human
cugggccuggcguuccaggcug

SEQ ID NO: 243868 - RNA, 21 nt, Human
cuuggcugcagugacaggcau

SEQ ID NO: 243869 - RNA, 22 nt, Human
caucacaucaaaccuacucuca

SEQ ID NO: 243870 - RNA, 22 nt, Human
ggagacucggguucuagccuug

SEQ ID NO: 243871 - RNA, 19 nt, Human
uagaacugaggacuugcau

SEQ ID NO: 243872 - RNA, 22 nt, Human
caaagugcuaggauuacaggcc

SEQ ID NO: 243873 - RNA, 22 nt, Human
cugaagggaugugauuucuaca

SEQ ID NO: 243874 - RNA, 22 nt, Human
uuuagcagcaaauaaguagugc

SEQ ID NO: 243875 - RNA, 20 nt, Human
ucugccuuagggggagccuc

SEQ ID NO: 243876 - RNA, 22 nt, Human
aaguaccuagaaauauuuuuga

SEQ ID NO: 243877 - RNA, 22 nt, Human
ccuggcagcuaagugcuuugag

SEQ ID NO: 243878 - RNA, 21 nt, Human
uagaaucacuaauaagaugua

SEQ ID NO: 243879 - RNA, 22 nt, Human
cagcucuuggagccuccaguaa

SEQ ID NO: 243880 - RNA, 22 nt, Human
cagaaucugagucgugauugua

SEQ ID NO: 243881 - RNA, 22 nt, Human
gaggccucaggaaugucgugug

SEQ ID NO: 243882 - RNA, 22 nt, Human
agggcugcccagugugagagcu

SEQ ID NO: 243883 - RNA, 21 nt, Human
gagauggcccaguagcgggcc

SEQ ID NO: 243884 - RNA, 22 nt, Human
uuccaaagcugcuuuauuuagu

SEQ ID NO: 243885 - RNA, 22 nt, Human
agcccugauuaaccuuggcuuu

SEQ ID NO: 243886 - RNA, 22 nt, Human
gaagugacaagaugcuaggauc

SEQ ID NO: 243887 - RNA, 22 nt, Human
cauaauccuguccuggauucuu

SEQ ID NO: 243888 - RNA, 22 nt, Human
caacaaguggguacuuuacagg

SEQ ID NO: 243889 - RNA, 22 nt, Human
ucaguuaacaacuauuuauuga

SEQ ID NO: 243890 - RNA, 22 nt, Human
ccagucagccaagcugcagcgg

SEQ ID NO: 243891 - RNA, 22 nt, Human
ccuagggagccugagagcagug

SEQ ID NO: 243892 - RNA, 22 nt, Human
ccuggcuccagcugccuguccu

SEQ ID NO: 243893 - RNA, 22 nt, Human
uuuguguuuucacuagcagugu

SEQ ID NO: 243894 - RNA, 22 nt, Human
ugggauaagguaugugaaguac

SEQ ID NO: 243895 - RNA, 22 nt, Human
aauugcuuguuucuuuaacuga

SEQ ID NO: 243896 - RNA, 19 nt, Human
ccuggcccugcugcgcggg

SEQ ID NO: 243897 - RNA, 22 nt, Human
ccugaggcuggcccuuccaucc

SEQ ID NO: 243898 - RNA, 22 nt, Human
uuacagaguagggaauugaagu

SEQ ID NO: 243899 - RNA, 22 nt, Human
agacuccaaaugaaagaggggg

SEQ ID NO: 243900 - RNA, 19 nt, Human
ccuggcucugagcccagcc

SEQ ID NO: 243901 - RNA, 22 nt, Human
cuuagcaaggcugccuggagaa

SEQ ID NO: 243902 - RNA, 22 nt, Human
uuauauguuucuguuuggaggc

SEQ ID NO: 243903 - RNA, 22 nt, Human
cacagguggcuccaaguuagag

SEQ ID NO: 243904 - RNA, 22 nt, Human
ggcuucucuaaagaucaugcgu

SEQ ID NO: 243905 - RNA, 22 nt, Human
agacagacaaaauuccugccug

SEQ ID NO: 243906 - RNA, 22 nt, Human
cuccugacacaguccacacuug

SEQ ID NO: 243907 - RNA, 22 nt, Human
uucaaacuguguaauuuauaaa

SEQ ID NO: 243908 - RNA, 22 nt, Human
agugauggcaucggguccagca

SEQ ID NO: 243909 - RNA, 21 nt, Human
ucuccaguugacagugucucc

SEQ ID NO: 243910 - RNA, 22 nt, Human
gccaaaucuggauuuagcaaga

SEQ ID NO: 243911 - RNA, 22 nt, Human
aaguuuuugguagagaaaagua

SEQ ID NO: 243912 - RNA, 22 nt, Human
gaggggagaggcuuauggauca

SEQ ID NO: 243913 - RNA, 22 nt, Human
uuuagaaguucacacauuuaaa

SEQ ID NO: 243914 - RNA, 22 nt, Human
ugaauacaggaaaauauacuga

SEQ ID NO: 243915 - RNA, 22 nt, Human
acuauucacagauucaguguuc

SEQ ID NO: 243916 - RNA, 22 nt, Human
uaaaagaucacuggcugcuuua

SEQ ID NO: 243917 - RNA, 22 nt, Human
aauucacaguucugcaccuuac

SEQ ID NO: 243918 - RNA, 22 nt, Human
cagcugagaccagaaugcaggu

SEQ ID NO: 243919 - RNA, 22 nt, Human
ugcacccacuuagcugaaguuc

SEQ ID NO: 243920 - RNA, 19 nt, Human
uuccaggugcuguggggag

SEQ ID NO: 243921 - RNA, 22 nt, Human
ucaaggaagauagcuauuauga

SEQ ID NO: 243922 - RNA, 22 nt, Human
ucacacuaagacaaaauaauuu

SEQ ID NO: 243923 - RNA, 21 nt, Human
aaagagacaaauggcauauac

SEQ ID NO: 243924 - RNA, 22 nt, Human
guguccugguuccuuguggcug

SEQ ID NO: 243925 - RNA, 19 nt, Human
agaggcaaggguggaagua

SEQ ID NO: 243926 - RNA, 22 nt, Human
ugacacaguaucaaacaugauu

SEQ ID NO: 243927 - RNA, 22 nt, Human
ggguaggaaauccagagguggc

SEQ ID NO: 243928 - RNA, 22 nt, Human
aacagcaauagcacuauucauu

SEQ ID NO: 243929 - RNA, 22 nt, Human
uucaguuucuucccugugaaau

SEQ ID NO: 243930 - RNA, 22 nt, Human
ucuacauuuuaacaagaugccc

SEQ ID NO: 243931 - RNA, 22 nt, Human
acggggcuagagaagguuucuu

SEQ ID NO: 243932 - RNA, 22 nt, Human
auguucuuguucaaaugucagu

SEQ ID NO: 243933 - RNA, 22 nt, Human
ccuggcaguuuugcccaggauu

SEQ ID NO: 243934 - RNA, 22 nt, Human
ccacugagaagggguugggguc

SEQ ID NO: 243935 - RNA, 22 nt, Human
agcugcuccuuuccugcaggcg

SEQ ID NO: 243936 - RNA, 22 nt, Human
gacuguacuugagagaggaacu

SEQ ID NO: 243937 - RNA, 20 nt, Human
aacacaggguuaccaucaga

SEQ ID NO: 243938 - RNA, 22 nt, Human
gccagguccccucauggcuccu

SEQ ID NO: 243939 - RNA, 23 nt, Human
cuccuggaggguccggcccugcc

SEQ ID NO: 243940 - RNA, 23 nt, Human
uaauacugcuucagaggcuuaga

SEQ ID NO: 243941 - RNA, 22 nt, Human
aacugcauguguguggcaugau

SEQ ID NO: 243942 - RNA, 22 nt, Human
gaauuuccucuaaaccccugag

SEQ ID NO: 243943 - RNA, 22 nt, Human
gccacagguacuaugggagaga

SEQ ID NO: 243944 - RNA, 19 nt, Human
uccaguuuggcaggaagac

SEQ ID NO: 243945 - RNA, 22 nt, Human
ugcagaauuauggugcuggcuu

SEQ ID NO: 243946 - RNA, 20 nt, Human
cagggccuaugauugagcuu

SEQ ID NO: 243947 - RNA, 19 nt, Human
uuagaacauccucuaggga

SEQ ID NO: 243948 - RNA, 22 nt, Human
ugguccugaucaccgcugggca

SEQ ID NO: 243949 - RNA, 23 nt, Human
agggcuccuuguugauuagcauu

SEQ ID NO: 243950 - RNA, 22 nt, Human
uuugaagacagaucaauauaag

SEQ ID NO: 243951 - RNA, 22 nt, Human
auggcagaguccuaagccuuua

SEQ ID NO: 243952 - RNA, 22 nt, Human
aaaguuuauuuucccugguuag

SEQ ID NO: 243953 - RNA, 22 nt, Human
auaauacaugguugaucuuuuc

SEQ ID NO: 243954 - RNA, 22 nt, Human
gagaacaggcucuggagucaga

SEQ ID NO: 243955 - RNA, 22 nt, Human
cucagagagugaauuccugccu

SEQ ID NO: 243956 - RNA, 22 nt, Human
auggaaauggagugugcuugcu

SEQ ID NO: 243957 - RNA, 22 nt, Human
uacacaacugacaaccauucug

SEQ ID NO: 243958 - RNA, 20 nt, Human
uccuggccuucucgggcagu

SEQ ID NO: 243959 - RNA, 21 nt, Human
uagggggcagugggaugcuua

SEQ ID NO: 243960 - RNA, 22 nt, Human
uccugggcccaggcugccaggg

SEQ ID NO: 243961 - RNA, 22 nt, Human
uuugcaaugguaguuguugcuc

SEQ ID NO: 243962 - RNA, 22 nt, Human
gcagaauauauuacugagccuc

SEQ ID NO: 243963 - RNA, 19 nt, Human
ccaguccucuuugggccug

SEQ ID NO: 243964 - RNA, 22 nt, Human
cagaggugcauacaggucauua

SEQ ID NO: 243965 - RNA, 22 nt, Human
aguguuuauugugugccacaca

SEQ ID NO: 243966 - RNA, 22 nt, Human
acagcagagccuagcuuaaucu

SEQ ID NO: 243967 - RNA, 22 nt, Human
uacuuguguucuacuagagaaa

SEQ ID NO: 243968 - RNA, 22 nt, Human
cauaauuucuguaucagcacca

SEQ ID NO: 243969 - RNA, 22 nt, Human
aaacagacugaagaguugaagc

SEQ ID NO: 243970 - RNA, 22 nt, Human
ugggcaaacugucaaccauguc

SEQ ID NO: 243971 - RNA, 22 nt, Human
ggaagagaaaugagucaagacu

SEQ ID NO: 243972 - RNA, 22 nt, Human
uggucucugugcucgggcaugg

SEQ ID NO: 243973 - RNA, 23 nt, Human
agcuaaugggacagauuccaugg

SEQ ID NO: 243974 - RNA, 22 nt, Human
aagacagugugucaggcaggug

SEQ ID NO: 243975 - RNA, 22 nt, Human
ggcccugggcagaggagugggc

SEQ ID NO: 243976 - RNA, 22 nt, Human
uccuguguuacugccuggagcg

SEQ ID NO: 243977 - RNA, 22 nt, Human
ggcucugcaaaaguagauacuu

SEQ ID NO: 243978 - RNA, 22 nt, Human
cuucugaaguguuugaugauug

SEQ ID NO: 243979 - RNA, 22 nt, Human
ccugccuugacguaacgcauga

SEQ ID NO: 243980 - RNA, 22 nt, Human
gccuguguguuuagcucugggg

SEQ ID NO: 243981 - RNA, 22 nt, Human
uggccugacuguccagccaggg

SEQ ID NO: 243982 - RNA, 22 nt, Human
ugggccacuaccuucucuggau

SEQ ID NO: 243983 - RNA, 22 nt, Human
aaacugcaauuauuuuugcaau

SEQ ID NO: 243984 - RNA, 22 nt, Human
cauuccugagggcccccuacuu

SEQ ID NO: 243985 - RNA, 22 nt, Human
ucagagagguuggugauaagaa

SEQ ID NO: 243986 - RNA, 18 nt, Human
acauuucucucugcguga

SEQ ID NO: 243987 - RNA, 22 nt, Human
agagcacacugacgucagucug

SEQ ID NO: 243988 - RNA, 22 nt, Human
uacaaagugaaauaauucugag

SEQ ID NO: 243989 - RNA, 22 nt, Human
augcaacagucaguacauccgg

SEQ ID NO: 243990 - RNA, 22 nt, Human
cccacacacauuuaugauagga

SEQ ID NO: 243991 - RNA, 22 nt, Human
cuguggcuuucucugccuccuu

SEQ ID NO: 243992 - RNA, 22 nt, Human
ggacagcauaucagcagggcag

SEQ ID NO: 243993 - RNA, 22 nt, Human
ucuucuuugaaucauagugacc

SEQ ID NO: 243994 - RNA, 22 nt, Human
agaggcaagauuaucagggcau

SEQ ID NO: 243995 - RNA, 22 nt, Human
ugguccugagaauccuguccuc

SEQ ID NO: 243996 - RNA, 22 nt, Human
gcacagagcuggcccuccaggc

SEQ ID NO: 243997 - RNA, 22 nt, Human
gggccugaggcccagacacugg

SEQ ID NO: 243998 - RNA, 22 nt, Human
ugucccugccugcccacucugu

SEQ ID NO: 243999 - RNA, 22 nt, Human
aaggugucaaacuagaagaugu

SEQ ID NO: 244000 - RNA, 22 nt, Human
gcucuggcucaaaccaccggcu

SEQ ID NO: 244001 - RNA, 22 nt, Human
gcagcagcccagggcucucaga

SEQ ID NO: 244002 - RNA, 23 nt, Human
agcuccagcugacgugggcagcc

SEQ ID NO: 244003 - RNA, 18 nt, Human
ugcagccuguagucuugu

SEQ ID NO: 244004 - RNA, 21 nt, Human
cagagcucuuucugcuugcug

SEQ ID NO: 244005 - RNA, 22 nt, Human
gcuggccugaccagccacaggc

SEQ ID NO: 244006 - RNA, 19 nt, Human
auuguacauugaguuuggc

SEQ ID NO: 244007 - RNA, 22 nt, Human
uucuuuccccauggaguucgga

SEQ ID NO: 244008 - RNA, 22 nt, Human
cucuggcuggcugggccucagu

SEQ ID NO: 244009 - RNA, 22 nt, Human
agggcuggagccacagcuggga

SEQ ID NO: 244010 - RNA, 22 nt, Human
uuuuauauggcacauugguugg

SEQ ID NO: 244011 - RNA, 22 nt, Human
gugguuuaggggaaagaacugu

SEQ ID NO: 244012 - RNA, 22 nt, Human
agguggggaaaccagcgauccc

SEQ ID NO: 244013 - RNA, 22 nt, Human
ucagggcuuuggcuuuuacucu

SEQ ID NO: 244014 - RNA, 22 nt, Human
guacaggaccgcggcccccugg

SEQ ID NO: 244015 - RNA, 22 nt, Human
gacagggaacuucauuagcugu

SEQ ID NO: 244016 - RNA, 22 nt, Human
uauuagggaacugcaagacuaa

SEQ ID NO: 244017 - RNA, 22 nt, Human
acacauauauuauuuguggcuc

SEQ ID NO: 244018 - RNA, 18 nt, Human
ggacacagauagguacag

SEQ ID NO: 244019 - RNA, 22 nt, Human
ucucugagcuggauuuguucuu

SEQ ID NO: 244020 - RNA, 22 nt, Human
ugaaaucuucacuaagucucuu

SEQ ID NO: 244021 - RNA, 22 nt, Human
uugcagcugaggaaauugaagc

SEQ ID NO: 244022 - RNA, 22 nt, Human
uaccauuucaguaaaaacuuag

SEQ ID NO: 244023 - RNA, 22 nt, Human
gaacaaacugggucccaaugau

SEQ ID NO: 244024 - RNA, 22 nt, Human
gcauucuugagguguggacuca

SEQ ID NO: 244025 - RNA, 19 nt, Human
ggucucagugcagcugcag

SEQ ID NO: 244026 - RNA, 22 nt, Human
ugggaggcccaggccuggcagg

SEQ ID NO: 244027 - RNA, 22 nt, Human
guccuggcugguucuguggggc

SEQ ID NO: 244028 - RNA, 22 nt, Human
acagaaaaugccagaagggugg

SEQ ID NO: 244029 - RNA, 22 nt, Human
ugguccauguccuccaucucuc

SEQ ID NO: 244030 - RNA, 22 nt, Human
aggaggcugggcacaguggccu

SEQ ID NO: 244031 - RNA, 22 nt, Human
cacuccuguuccacuaaaugag

SEQ ID NO: 244032 - RNA, 20 nt, Human
cuaacuaaccacuuucugau

SEQ ID NO: 244033 - RNA, 21 nt, Human
aacauuaguaauuugacuuuu

SEQ ID NO: 244034 - RNA, 22 nt, Human
gcaagcaaguaucuggcaggga

SEQ ID NO: 244035 - RNA, 22 nt, Human
uccacaucucucgccaaccaau

SEQ ID NO: 244036 - RNA, 22 nt, Human
gucagaagcauuuguggcugaa

SEQ ID NO: 244037 - RNA, 22 nt, Human
uggugcugccucagaugccuua

SEQ ID NO: 244038 - RNA, 22 nt, Human
cagacagggaccucgcuccaga

SEQ ID NO: 244039 - RNA, 22 nt, Human
cucccugguguccccuccagga

SEQ ID NO: 244040 - RNA, 22 nt, Human
gccaccucuuugucucugccgc

SEQ ID NO: 244041 - RNA, 22 nt, Human
uggcaggagagcgucagaucag

SEQ ID NO: 244042 - RNA, 22 nt, Human
aaugauguauuaguacaacaca

SEQ ID NO: 244043 - RNA, 22 nt, Human
ucuagaaagccaaauuaggaau

SEQ ID NO: 244044 - RNA, 22 nt, Human
uuucacauguauauaggcauua

SEQ ID NO: 244045 - RNA, 22 nt, Human
augcaacagagaaaauauugag

SEQ ID NO: 244046 - RNA, 22 nt, Human
gcccuggagagggauauggcau

SEQ ID NO: 244047 - RNA, 22 nt, Human
guauaacugcuaccaccugaug

SEQ ID NO: 244048 - RNA, 22 nt, Human
agagcccagguccuggagaggg

SEQ ID NO: 244049 - RNA, 22 nt, Human
ggcucugggguuggcccaucuc

SEQ ID NO: 244050 - RNA, 19 nt, Human
uacaggaggccugcaaucu

SEQ ID NO: 244051 - RNA, 22 nt, Human
cuagaaucuccaaguuuacuca

SEQ ID NO: 244052 - RNA, 22 nt, Human
uuuuccuacugauaaacaguua

SEQ ID NO: 244053 - RNA, 22 nt, Human
aacaggcuaaauuguccauuuc

SEQ ID NO: 244054 - RNA, 22 nt, Human
gaacuuggaacuggggcuacug

SEQ ID NO: 244055 - RNA, 22 nt, Human
gaaguacaguuuuaucuagcca

SEQ ID NO: 244056 - RNA, 22 nt, Human
ucucuguaagcugccuucucgu

SEQ ID NO: 244057 - RNA, 22 nt, Human
gcugcccugugguagagggugg

SEQ ID NO: 244058 - RNA, 22 nt, Human
uucuuucuuagcaaucuauggu

SEQ ID NO: 244059 - RNA, 22 nt, Human
acauucuuucucuucaggaaac

SEQ ID NO: 244060 - RNA, 22 nt, Human
agaaaauaauuucuuggcuggu

SEQ ID NO: 244061 - RNA, 22 nt, Human
aggcucugguucaucaugaugg

SEQ ID NO: 244062 - RNA, 22 nt, Human
auagaaucuuuguaaaacacuu

SEQ ID NO: 244063 - RNA, 22 nt, Human
uuauauuguguaauaagugaag

SEQ ID NO: 244064 - RNA, 22 nt, Human
aguguccucaucuguaaaauga

SEQ ID NO: 244065 - RNA, 17 nt, Human
cuuguuuuccacuggga

SEQ ID NO: 244066 - RNA, 22 nt, Human
cuacaucagaacauuuacccua

SEQ ID NO: 244067 - RNA, 22 nt, Human
ccagcuuuauagcuucaaagga

SEQ ID NO: 244068 - RNA, 22 nt, Human
cccagcagcuugcacagugcug

SEQ ID NO: 244069 - RNA, 22 nt, Human
aggccucagcucagugugacag

SEQ ID NO: 244070 - RNA, 22 nt, Human
ugagcacuuuaaaauauuccca

SEQ ID NO: 244071 - RNA, 22 nt, Human
ucgccauggaaguccuugcgga

SEQ ID NO: 244072 - RNA, 22 nt, Human
gaggcuggaggucaaagaugaa

SEQ ID NO: 244073 - RNA, 22 nt, Human
ucauucagagagaauguuccag

SEQ ID NO: 244074 - RNA, 22 nt, Human
gggacucugagagccugagggu

SEQ ID NO: 244075 - RNA, 22 nt, Human
ucgggcucgcucuccuagcgga

SEQ ID NO: 244076 - RNA, 22 nt, Human
aggcaggcacuccggaaguguc

SEQ ID NO: 244077 - RNA, 22 nt, Human
caucucuguguccccacaccca

SEQ ID NO: 244078 - RNA, 22 nt, Human
augguggauuugugauucagcu

SEQ ID NO: 244079 - RNA, 22 nt, Human
agccacagcacauuguaagaaa

SEQ ID NO: 244080 - RNA, 22 nt, Human
aggcugccucuuuugagagggu

SEQ ID NO: 244081 - RNA, 22 nt, Human
aaggcuucuuuaguguccuaau

SEQ ID NO: 244082 - RNA, 22 nt, Human
ugacaugugcucaucuuggcua

SEQ ID NO: 244083 - RNA, 22 nt, Human
aucagagaaauggagggcgcuu

SEQ ID NO: 244084 - RNA, 22 nt, Human
auucuacacaaagcaagaagac

SEQ ID NO: 244085 - RNA, 22 nt, Human
ccuggcagcuccuccccggcgg

SEQ ID NO: 244086 - RNA, 22 nt, Human
cugccuuugugaucaguucuuu

SEQ ID NO: 244087 - RNA, 22 nt, Human
uucauauauaugcacuacguac

SEQ ID NO: 244088 - RNA, 22 nt, Human
uaaagacaugcaaagucuaauu

SEQ ID NO: 244089 - RNA, 22 nt, Human
ccauucugacaccuaauucugu

SEQ ID NO: 244090 - RNA, 22 nt, Human
uuucugaagggcagcagacucu

SEQ ID NO: 244091 - RNA, 22 nt, Human
auauauuuugcggucacguggc

SEQ ID NO: 244092 - RNA, 22 nt, Human
acccaggcuagggugcaguggc

SEQ ID NO: 244093 - RNA, 22 nt, Human
ggccaggcuggucucagacuuc

SEQ ID NO: 244094 - RNA, 22 nt, Human
auugcugggaauauuuagccca

SEQ ID NO: 244095 - RNA, 22 nt, Human
aagaagcacuuuccuacauguu

SEQ ID NO: 244096 - RNA, 22 nt, Human
uuggcccacaguaccaugcugu

SEQ ID NO: 244097 - RNA, 22 nt, Human
auagcaaacuggagcuugcuuu

SEQ ID NO: 244098 - RNA, 22 nt, Human
gacuggagucaaugagcagcac

SEQ ID NO: 244099 - RNA, 22 nt, Human
cacagaaaggcucaaaucccaa

SEQ ID NO: 244100 - RNA, 22 nt, Human
cuucugggcagaaguuuugaga

SEQ ID NO: 244101 - RNA, 22 nt, Human
gacugagaaucauagaaggcaa

SEQ ID NO: 244102 - RNA, 21 nt, Human
ucagugacaggugcugaccuc

SEQ ID NO: 244103 - RNA, 22 nt, Human
ucucagaaaugacaggagguac

SEQ ID NO: 244104 - RNA, 22 nt, Human
aagcacugagcacaguggcuga

SEQ ID NO: 244105 - RNA, 22 nt, Human
uccaguuuccaaucacugcacg

SEQ ID NO: 244106 - RNA, 22 nt, Human
aaaucaugugcagagaucagga

SEQ ID NO: 244107 - RNA, 22 nt, Human
cugcugugcacccaggaaggcu

SEQ ID NO: 244108 - RNA, 22 nt, Human
ucuggcucaggagcuguguuca

SEQ ID NO: 244109 - RNA, 22 nt, Human
ggggugggcgugcagggacacc

SEQ ID NO: 244110 - RNA, 22 nt, Human
agcaggagaacacuguggcucu

SEQ ID NO: 244111 - RNA, 21 nt, Human
ucccagggucuuaugggaugu

SEQ ID NO: 244112 - RNA, 22 nt, Human
gcagcagcucugaaugggcccc

SEQ ID NO: 244113 - RNA, 22 nt, Human
aaagacauggaacuagagaugg

SEQ ID NO: 244114 - RNA, 22 nt, Human
ccuuuugcucucccauccagaa

SEQ ID NO: 244115 - RNA, 22 nt, Human
gaggccucaggcgugggaaggg

SEQ ID NO: 244116 - RNA, 22 nt, Human
ggccaggcugcccugggagcag

SEQ ID NO: 244117 - RNA, 22 nt, Human
caguuuaaccuauccauuaugu

SEQ ID NO: 244118 - RNA, 22 nt, Human
uaaacauguugacaucuuaccu

SEQ ID NO: 244119 - RNA, 22 nt, Human
accaucuuagcagacugcagug

SEQ ID NO: 244120 - RNA, 23 nt, Human
cccacaugucugagucagugcca

SEQ ID NO: 244121 - RNA, 21 nt, Human
ggugacacguggccccgcucu

SEQ ID NO: 244122 - RNA, 22 nt, Human
uagccauguguggaacacagcc

SEQ ID NO: 244123 - RNA, 22 nt, Human
auguguacaaccaagcacuaaa

SEQ ID NO: 244124 - RNA, 22 nt, Human
ugagcagagucgcuccagagug

SEQ ID NO: 244125 - RNA, 18 nt, Human
ggacccagggccucaccc

SEQ ID NO: 244126 - RNA, 23 nt, Human
ucacagagcauacugcauuuugc

SEQ ID NO: 244127 - RNA, 22 nt, Human
aacaggcuggccuugaagcagu

SEQ ID NO: 244128 - RNA, 20 nt, Human
ugcaaggaagcaggcaagug

SEQ ID NO: 244129 - RNA, 22 nt, Human
cagaugaggcaaccucauugcu

SEQ ID NO: 244130 - RNA, 22 nt, Human
caaaguaucaacucccacacug

SEQ ID NO: 244131 - RNA, 21 nt, Human
agggagcugcgucuugaaaga

SEQ ID NO: 244132 - RNA, 22 nt, Human
ucauuuggagccuuccuguuuu

SEQ ID NO: 244133 - RNA, 22 nt, Human
uggagcauucagguuucccuuu

SEQ ID NO: 244134 - RNA, 22 nt, Human
uaugaacuuuugaugugacaug

SEQ ID NO: 244135 - RNA, 22 nt, Human
cagugcugacagggaggaaccu

SEQ ID NO: 244136 - RNA, 22 nt, Human
gagcuggucgaaaugggcugac

SEQ ID NO: 244137 - RNA, 22 nt, Human
aggccagcgcugcuagcucccg

SEQ ID NO: 244138 - RNA, 22 nt, Human
uguccuuuucuuuagugcagcu

SEQ ID NO: 244139 - RNA, 22 nt, Human
ccaggaagcugugagauuccaa

SEQ ID NO: 244140 - RNA, 22 nt, Human
cucccuggcacagcgagagguu

SEQ ID NO: 244141 - RNA, 22 nt, Human
uguucacaggggagccauuuau

SEQ ID NO: 244142 - RNA, 22 nt, Human
ucucagaaaaaggagaaacugg

SEQ ID NO: 244143 - RNA, 22 nt, Human
auugucuuuccacugagaaguu

SEQ ID NO: 244144 - RNA, 22 nt, Human
caggcccagaggccucuuccca

SEQ ID NO: 244145 - RNA, 22 nt, Human
aaauuguaaugacuucacuuga

SEQ ID NO: 244146 - RNA, 22 nt, Human
ucaaaugcggucauggcuuuua

SEQ ID NO: 244147 - RNA, 22 nt, Human
gcugaagggagugcugagucug

SEQ ID NO: 244148 - RNA, 22 nt, Human
aauguuuuagauuacugcuggg

SEQ ID NO: 244149 - RNA, 22 nt, Human
agguccaguugccagaauggcc

SEQ ID NO: 244150 - RNA, 22 nt, Human
ccugaaaugacuccagcugagu

SEQ ID NO: 244151 - RNA, 22 nt, Human
auccugugcaaugacugcaucu

SEQ ID NO: 244152 - RNA, 22 nt, Human
gagcagcucugugccuggagac

SEQ ID NO: 244153 - RNA, 21 nt, Human
ggcuugucaccauagcuacug

SEQ ID NO: 244154 - RNA, 22 nt, Human
agagccaggaugucuucugggg

SEQ ID NO: 244155 - RNA, 20 nt, Human
cucagcagauucuucuagaa

SEQ ID NO: 244156 - RNA, 22 nt, Human
uaggagcuauaaugugaagucu

SEQ ID NO: 244157 - RNA, 22 nt, Human
caggcauggaaaagcccagagg

SEQ ID NO: 244158 - RNA, 18 nt, Human
agcuggggccucuggucc

SEQ ID NO: 244159 - RNA, 22 nt, Human
aucauaauugcuccagugauau

SEQ ID NO: 244160 - RNA, 22 nt, Human
ucuggcugucauuggaggcccc

SEQ ID NO: 244161 - RNA, 22 nt, Human
gccaggugggagacagacagca

SEQ ID NO: 244162 - RNA, 22 nt, Human
uccagagcugggucugugcuca

SEQ ID NO: 244163 - RNA, 22 nt, Human
uuccuccacgugacaggagcca

SEQ ID NO: 244164 - RNA, 15 nt, Human
aagaaucugaagcuu

SEQ ID NO: 244165 - RNA, 22 nt, Human
gaggagccauagauagugcugc

SEQ ID NO: 244166 - RNA, 22 nt, Human
uguguucugaaggagaagagug

SEQ ID NO: 244167 - RNA, 15 nt, Human
uuucaaaaugaggcc

SEQ ID NO: 244168 - RNA, 23 nt, Human
uuucacauuuacuguuagauggc

SEQ ID NO: 244169 - RNA, 22 nt, Human
aaucagaaucaguugacacagc

SEQ ID NO: 244170 - RNA, 22 nt, Human
uugggcuggcccuugucucugg

SEQ ID NO: 244171 - RNA, 22 nt, Human
cuacuuccagggguggggcuca

SEQ ID NO: 244172 - RNA, 21 nt, Human
cuucuuggggagcagcuagac

SEQ ID NO: 244173 - RNA, 22 nt, Human
cagcucagcuuccugggugugu

SEQ ID NO: 244174 - RNA, 22 nt, Human
gaggagcuugugagaagauguc

SEQ ID NO: 244175 - RNA, 22 nt, Human
uauugagaacccucaggaggca

SEQ ID NO: 244176 - RNA, 22 nt, Human
acaggcugccuaccaaguauca

SEQ ID NO: 244177 - RNA, 22 nt, Human
cagcaaagguagaagcacagga

SEQ ID NO: 244178 - RNA, 18 nt, Human
guggccagccuggucuug

SEQ ID NO: 244179 - RNA, 22 nt, Human
aaagugggaacaauggagagug

SEQ ID NO: 244180 - RNA, 20 nt, Human
ggaaggggcaaaguguguga

SEQ ID NO: 244181 - RNA, 22 nt, Human
auuuagaagcuaauuuuucaga

SEQ ID NO: 244182 - RNA, 22 nt, Human
ucagaggacaagcucccuggug

SEQ ID NO: 244183 - RNA, 22 nt, Human
agcacagagguggaaguguaua

SEQ ID NO: 244184 - RNA, 22 nt, Human
uccugggagcaugaagagggau

SEQ ID NO: 244185 - RNA, 22 nt, Human
caugcuaaaauaucugaagauu

SEQ ID NO: 244186 - RNA, 22 nt, Human
aggcugggaaauguagucuucc

SEQ ID NO: 244187 - RNA, 22 nt, Human
uuccuaaucacgaacauuauuu

SEQ ID NO: 244188 - RNA, 22 nt, Human
gauggcaggcaggugaguagag

SEQ ID NO: 244189 - RNA, 22 nt, Human
ugugcccagacugccucaguga

SEQ ID NO: 244190 - RNA, 22 nt, Human
uaagaacaagauguuccuguuu

SEQ ID NO: 244191 - RNA, 22 nt, Human
caguguacuuggaauguaacag

SEQ ID NO: 244192 - RNA, 22 nt, Human
acuggcuuugccucugccucuc

SEQ ID NO: 244193 - RNA, 22 nt, Human
cuccuccaguccuccaaggaca

SEQ ID NO: 244194 - RNA, 22 nt, Human
aguguuacuacagacugguuaa

SEQ ID NO: 244195 - RNA, 21 nt, Human
ggccuaggggcagauggugcu

SEQ ID NO: 244196 - RNA, 22 nt, Human
caggcuugggagcagagccacu

SEQ ID NO: 244197 - RNA, 22 nt, Human
gaauuuucagguagcaauuuca

SEQ ID NO: 244198 - RNA, 22 nt, Human
aggcaguggagcuggaauaggc

SEQ ID NO: 244199 - RNA, 22 nt, Human
cuaaagaagcuagcaaucuaua

SEQ ID NO: 244200 - RNA, 22 nt, Human
agcuggguggccucuccucggg

SEQ ID NO: 244201 - RNA, 22 nt, Human
ugggguccagugccaccccaag

SEQ ID NO: 244202 - RNA, 22 nt, Human
aggcuucuccacauaaaguuac

SEQ ID NO: 244203 - RNA, 22 nt, Human
uccuggauggagcugcccucgc

SEQ ID NO: 244204 - RNA, 23 nt, Human
auuccagagcuagagucaagugg

SEQ ID NO: 244205 - RNA, 22 nt, Human
gaaauaguacagcauaguucuu

SEQ ID NO: 244206 - RNA, 22 nt, Human
aucuaagacaaugagugagacu

SEQ ID NO: 244207 - RNA, 22 nt, Human
ugcagguggauaucucaucaga

SEQ ID NO: 244208 - RNA, 22 nt, Human
agcuggcuggccccuuccugcc

SEQ ID NO: 244209 - RNA, 22 nt, Human
ucaggcagguggcuggcuaugg

SEQ ID NO: 244210 - RNA, 22 nt, Human
accauuuaauaaguauuuccau

SEQ ID NO: 244211 - RNA, 22 nt, Human
ugcauauuuguaugauguuuag

SEQ ID NO: 244212 - RNA, 22 nt, Human
agggcugcugcuccgggcccag

SEQ ID NO: 244213 - RNA, 22 nt, Human
guccuucaagaguccccuacug

SEQ ID NO: 244214 - RNA, 22 nt, Human
ucacaagaauuuguagaugaaa

SEQ ID NO: 244215 - RNA, 22 nt, Human
acaggccugaugccuuggcugg

SEQ ID NO: 244216 - RNA, 18 nt, Human
uugagucuagccauggaa

SEQ ID NO: 244217 - RNA, 22 nt, Human
caagacauugauuuuguacaga

SEQ ID NO: 244218 - RNA, 22 nt, Human
ucagaagcaagcuucuacuucu

SEQ ID NO: 244219 - RNA, 22 nt, Human
agggacuugaugucagggagau

SEQ ID NO: 244220 - RNA, 22 nt, Human
cugccuguggacacccuggagg

SEQ ID NO: 244221 - RNA, 22 nt, Human
caaagugcugagauuacaggua

SEQ ID NO: 244222 - RNA, 22 nt, Human
aauuaaaugacaggggaagaug

SEQ ID NO: 244223 - RNA, 22 nt, Human
uccuagaacuccaggacagucc

SEQ ID NO: 244224 - RNA, 22 nt, Human
ccaggcacaggugggccucaga

SEQ ID NO: 244225 - RNA, 22 nt, Human
guguuacugggaggacggaggu

SEQ ID NO: 244226 - RNA, 22 nt, Human
ggcucugccacuucuuggcugu

SEQ ID NO: 244227 - RNA, 22 nt, Human
gagaaaaucuugggucaagaau

SEQ ID NO: 244228 - RNA, 19 nt, Human
uccagcuguuuugagucac

SEQ ID NO: 244229 - RNA, 22 nt, Human
ggaaguagaaguaaugaaauca

SEQ ID NO: 244230 - RNA, 21 nt, Human
uuuggcaguuucccaggaaau

SEQ ID NO: 244231 - RNA, 22 nt, Human
ugacaggcguuuuucucuagua

SEQ ID NO: 244232 - RNA, 22 nt, Human
ccagcccuuagauaaaccuggc

SEQ ID NO: 244233 - RNA, 22 nt, Human
uauuguauuaaggauucaagua

SEQ ID NO: 244234 - RNA, 22 nt, Human
aucuuucuauuucuaaaaacua

SEQ ID NO: 244235 - RNA, 22 nt, Human
ucgaggcagugcgcuggcuguu

SEQ ID NO: 244236 - RNA, 22 nt, Human
ugguccugcuacaggggauuag

SEQ ID NO: 244237 - RNA, 22 nt, Human
uguagcuauagaggcuguaccu

SEQ ID NO: 244238 - RNA, 22 nt, Human
aaagcagagaucauggcuugua

SEQ ID NO: 244239 - RNA, 22 nt, Human
uaggggaagucucagaaugcag

SEQ ID NO: 244240 - RNA, 22 nt, Human
auguguguguuuaauccucaaa

SEQ ID NO: 244241 - RNA, 22 nt, Human
caccuguuagcucuaauuuucu

SEQ ID NO: 244242 - RNA, 22 nt, Human
cagcuguugucaccucacaucc

SEQ ID NO: 244243 - RNA, 22 nt, Human
agagugggccuagcuguaaaag

SEQ ID NO: 244244 - RNA, 18 nt, Human
ugcuuggagcauuuacca

SEQ ID NO: 244245 - RNA, 22 nt, Human
aaaaucuaaguagcgaguaagg

SEQ ID NO: 244246 - RNA, 22 nt, Human
cugggccuuagggcacucccuu

SEQ ID NO: 244247 - RNA, 22 nt, Human
gaaggcuauaugacucagcccu

SEQ ID NO: 244248 - RNA, 20 nt, Human
uccagggcaaacucaucacc

SEQ ID NO: 244249 - RNA, 22 nt, Human
gagagcugggggacuguggaug

SEQ ID NO: 244250 - RNA, 22 nt, Human
uggaaucuugcgggcacauggc

SEQ ID NO: 244251 - RNA, 22 nt, Human
gccagggugagggcugagaggu

SEQ ID NO: 244252 - RNA, 22 nt, Human
aguucagcuucccaggucacug

SEQ ID NO: 244253 - RNA, 22 nt, Human
gcugagugagguccagagcuug

SEQ ID NO: 244254 - RNA, 22 nt, Human
uacauggugguggcacuugacu

SEQ ID NO: 244255 - RNA, 22 nt, Human
gcugcccugugguccagcaggu

SEQ ID NO: 244256 - RNA, 22 nt, Human
guucacaguguuuucuuugcau

SEQ ID NO: 244257 - RNA, 22 nt, Human
auguccagggcacacagcagug

SEQ ID NO: 244258 - RNA, 22 nt, Human
gcuuuuaauuaguugcuuccau

SEQ ID NO: 244259 - RNA, 22 nt, Human
uugaaaacuuucuagaccaaga

SEQ ID NO: 244260 - RNA, 20 nt, Human
cuguuugcuaucaugagcug

SEQ ID NO: 244261 - RNA, 22 nt, Human
agucugguaaacugaaaaauau

SEQ ID NO: 244262 - RNA, 22 nt, Human
cuucucugacagucuguuucac

SEQ ID NO: 244263 - RNA, 22 nt, Human
agucagugggcuuggcacagaa

SEQ ID NO: 244264 - RNA, 22 nt, Human
ugcauacacuucaaaugagcau

SEQ ID NO: 244265 - RNA, 22 nt, Human
ugaaggagaaauggaaaguggg

SEQ ID NO: 244266 - RNA, 22 nt, Human
uacacaaaggcacucuguuguu

SEQ ID NO: 244267 - RNA, 21 nt, Human
agagggagaguggcccuucca

SEQ ID NO: 244268 - RNA, 22 nt, Human
guacacauacuauucaaagaga

SEQ ID NO: 244269 - RNA, 22 nt, Human
ggugcugagugagcuagaggcu

SEQ ID NO: 244270 - RNA, 22 nt, Human
ugcagucucuaguuucugaaug

SEQ ID NO: 244271 - RNA, 21 nt, Human
uauugauucaauuucuugagu

SEQ ID NO: 244272 - RNA, 22 nt, Human
auuuauuggaugcuuacuuggg

SEQ ID NO: 244273 - RNA, 21 nt, Human
gcucagcugcuugguuccugu

SEQ ID NO: 244274 - RNA, 22 nt, Human
aagaguuugggcaagucauaaa

SEQ ID NO: 244275 - RNA, 22 nt, Human
uugggaagaauggaggugguua

SEQ ID NO: 244276 - RNA, 22 nt, Human
gccugggacccuuagcucuugg

SEQ ID NO: 244277 - RNA, 22 nt, Human
auggcuuccaaggcccuccgug

SEQ ID NO: 244278 - RNA, 22 nt, Human
cagggccagccgcagcauccac

SEQ ID NO: 244279 - RNA, 22 nt, Human
ugacaggugauugugaacuaag

SEQ ID NO: 244280 - RNA, 22 nt, Human
agugccaggagcaaggagcucc

SEQ ID NO: 244281 - RNA, 19 nt, Human
accaggagacagugagcuu

SEQ ID NO: 244282 - RNA, 22 nt, Human
acugugaugcaguugccaucca

SEQ ID NO: 244283 - RNA, 20 nt, Human
gaggaaccacugggaggaga

SEQ ID NO: 244284 - RNA, 22 nt, Human
gcagguggcagaggugggaucu

SEQ ID NO: 244285 - RNA, 22 nt, Human
gauguacaaguaaaauaugugu

SEQ ID NO: 244286 - RNA, 22 nt, Human
ccagccaguauauuccaaagcc

SEQ ID NO: 244287 - RNA, 22 nt, Human
gccugugcauagcagcggacuc

SEQ ID NO: 244288 - RNA, 22 nt, Human
aaagauuauggaacacacauga

SEQ ID NO: 244289 - RNA, 22 nt, Human
uauacagcuauggcaagacaaa

SEQ ID NO: 244290 - RNA, 19 nt, Human
cuguggcugaccucuggcc

SEQ ID NO: 244291 - RNA, 23 nt, Human
aggauguaggauguauggcagag

SEQ ID NO: 244292 - RNA, 22 nt, Human
aaccugcaguuuuuauucugag

SEQ ID NO: 244293 - RNA, 22 nt, Human
uuguccugcaaccucacauggc

SEQ ID NO: 244294 - RNA, 22 nt, Human
ucuagguggaugaggaacauag

SEQ ID NO: 244295 - RNA, 22 nt, Human
aggugcuguuaacauaugaggu

SEQ ID NO: 244296 - RNA, 22 nt, Human
ugaggcaggacugagcgggaug

SEQ ID NO: 244297 - RNA, 22 nt, Human
uuaguuuauaauucauuucugu

SEQ ID NO: 244298 - RNA, 22 nt, Human
gagggggcgugcaaggcuccgc

SEQ ID NO: 244299 - RNA, 17 nt, Human
agccugccccaugcugc

SEQ ID NO: 244300 - RNA, 22 nt, Human
cccaggcuggauuucgguggca

SEQ ID NO: 244301 - RNA, 19 nt, Human
ugacagagagcaggguggu

SEQ ID NO: 244302 - RNA, 22 nt, Human
augccaguaagucucagcuagg

SEQ ID NO: 244303 - RNA, 23 nt, Human
ggccacugaauuuucugcaucuu

SEQ ID NO: 244304 - RNA, 17 nt, Human
cagugcagauaagugag

SEQ ID NO: 244305 - RNA, 22 nt, Human
aucagugcugggagaugucaga

SEQ ID NO: 244306 - RNA, 22 nt, Human
agagggggcagcggaccaguga

SEQ ID NO: 244307 - RNA, 20 nt, Human
ugcagguguuggagaaggua

SEQ ID NO: 244308 - RNA, 22 nt, Human
uagcuguccagugagucccuuu

SEQ ID NO: 244309 - RNA, 22 nt, Human
uuaguucucaugaauuuuaagu

SEQ ID NO: 244310 - RNA, 22 nt, Human
uaagcucacuguaagaacugau

SEQ ID NO: 244311 - RNA, 22 nt, Human
uaauacuuaccuugcagagucu

SEQ ID NO: 244312 - RNA, 22 nt, Human
uguuuacagcugaucaggcauc

SEQ ID NO: 244313 - RNA, 23 nt, Human
uggacagcagcagcagugucacc

SEQ ID NO: 244314 - RNA, 22 nt, Human
uucugagcugcaacacuaacau

SEQ ID NO: 244315 - RNA, 22 nt, Human
aacuggaaccuuuuauucaguc

SEQ ID NO: 244316 - RNA, 22 nt, Human
uuaacagacauauauauuugua

SEQ ID NO: 244317 - RNA, 22 nt, Human
accuagaauccaucugcuuauu

SEQ ID NO: 244318 - RNA, 20 nt, Human
auuugggacgauuggccacc

SEQ ID NO: 244319 - RNA, 22 nt, Human
accaggccaacagcuaaguuaa

SEQ ID NO: 244320 - RNA, 22 nt, Human
gccaggccugcaagugcuggug

SEQ ID NO: 244321 - RNA, 22 nt, Human
uucuggaagccccagagucaga

SEQ ID NO: 244322 - RNA, 22 nt, Human
ggagcugcacgcucugaagccu

SEQ ID NO: 244323 - RNA, 22 nt, Human
caauguacuacaaagauuguca

SEQ ID NO: 244324 - RNA, 22 nt, Human
acaagcauaagugagaugaaua

SEQ ID NO: 244325 - RNA, 22 nt, Human
agacgcuauuuugaggggucua

SEQ ID NO: 244326 - RNA, 19 nt, Human
caucagagggcauaggaug

SEQ ID NO: 244327 - RNA, 22 nt, Human
gugcaaagcuuaacauucugca

SEQ ID NO: 244328 - RNA, 18 nt, Human
uaaaugcauguuaauaac

SEQ ID NO: 244329 - RNA, 22 nt, Human
ggaugcaggaacacagcgaccu

SEQ ID NO: 244330 - RNA, 22 nt, Human
cuaaaggcucagcauucuuuuc

SEQ ID NO: 244331 - RNA, 22 nt, Human
uagaagucucucaagaaacaua

SEQ ID NO: 244332 - RNA, 22 nt, Human
uccacuuuagcaaugauugaau

SEQ ID NO: 244333 - RNA, 22 nt, Human
aaaggcuucucagaaaggccuu

SEQ ID NO: 244334 - RNA, 22 nt, Human
acuucccaggugguguggaguu

SEQ ID NO: 244335 - RNA, 21 nt, Human
uucuccuccaaguugcuccug

SEQ ID NO: 244336 - RNA, 23 nt, Human
acaaguguuuccaauauggcugg

SEQ ID NO: 244337 - RNA, 22 nt, Human
aaagauuauggcauugaaauac

SEQ ID NO: 244338 - RNA, 22 nt, Human
agcagcuggguccggcggagca

SEQ ID NO: 244339 - RNA, 22 nt, Human
ugggaagcugcauuuuaacaag

SEQ ID NO: 244340 - RNA, 17 nt, Human
uggcuucccugggccac

SEQ ID NO: 244341 - RNA, 22 nt, Human
ucagugaaaugcauauucuucg

SEQ ID NO: 244342 - RNA, 22 nt, Human
acccuaauaaucacagacuagu

SEQ ID NO: 244343 - RNA, 22 nt, Human
gaggcucagggaaacagcgcag

SEQ ID NO: 244344 - RNA, 22 nt, Human
uuaugaacaauuucuaggaaug

SEQ ID NO: 244345 - RNA, 22 nt, Human
acugggcuguaaagagaggcaa

SEQ ID NO: 244346 - RNA, 20 nt, Human
aucuucuuggccagcuugcu

SEQ ID NO: 244347 - RNA, 22 nt, Human
uuuaucuguuccucuuggaggc

SEQ ID NO: 244348 - RNA, 22 nt, Human
agggcccugaguugcagcccug

SEQ ID NO: 244349 - RNA, 22 nt, Human
ccaggaggugcuggaagaaagc

SEQ ID NO: 244350 - RNA, 22 nt, Human
gcccacaguguagcagguacuc

SEQ ID NO: 244351 - RNA, 22 nt, Human
ggcccagcugugcuuccagccc

SEQ ID NO: 244352 - RNA, 22 nt, Human
uauauccagaaaaucaguucau

SEQ ID NO: 244353 - RNA, 22 nt, Human
uucugggccaaucucuuaaucu

SEQ ID NO: 244354 - RNA, 22 nt, Human
ucagagugaggcgucaacauga

SEQ ID NO: 244355 - RNA, 22 nt, Human
uccugggauucugcauuucuaa

SEQ ID NO: 244356 - RNA, 18 nt, Human
agcaacagaaacauaugg

SEQ ID NO: 244357 - RNA, 22 nt, Human
ugcuuuaagacacuaaguuuga

SEQ ID NO: 244358 - RNA, 22 nt, Human
aauaacuuuuaaaagacccugg

SEQ ID NO: 244359 - RNA, 22 nt, Human
uauugguagauggagagagaca

SEQ ID NO: 244360 - RNA, 22 nt, Human
agaggcaacauggggaacagau

SEQ ID NO: 244361 - RNA, 22 nt, Human
cacuggguaaauuugaggcuga

SEQ ID NO: 244362 - RNA, 22 nt, Human
augggcucggcgcugcugggau

SEQ ID NO: 244363 - RNA, 22 nt, Human
guuuacauguacucauuauacu

SEQ ID NO: 244364 - RNA, 22 nt, Human
aaacucuaagacacuguacaau

SEQ ID NO: 244365 - RNA, 22 nt, Human
uggacaacauagugagaccuca

SEQ ID NO: 244366 - RNA, 22 nt, Human
ccuuuggagaguuuguuagggg

SEQ ID NO: 244367 - RNA, 21 nt, Human
ccuccaggugauuccgugcuc

SEQ ID NO: 244368 - RNA, 22 nt, Human
aacacaggggguuacaaauugu

SEQ ID NO: 244369 - RNA, 22 nt, Human
cuguuuauucucaucuaaaaug

SEQ ID NO: 244370 - RNA, 22 nt, Human
acuggggccuccuccaugcucu

SEQ ID NO: 244371 - RNA, 22 nt, Human
uuccaggaggagguacuagagg

SEQ ID NO: 244372 - RNA, 22 nt, Human
uuuauuaauguagcauccaugg

SEQ ID NO: 244373 - RNA, 17 nt, Human
ccugggaggaguuauga

SEQ ID NO: 244374 - RNA, 22 nt, Human
acagaugauuuuuaugaaaaca

SEQ ID NO: 244375 - RNA, 22 nt, Human
cagaaucucgacuucuggcccc

SEQ ID NO: 244376 - RNA, 22 nt, Human
aaugaugaguucuaauagaccc

SEQ ID NO: 244377 - RNA, 22 nt, Human
cucccagggucuaggcugcugg

SEQ ID NO: 244378 - RNA, 22 nt, Human
auuuagcaagaguacaaaauaa

SEQ ID NO: 244379 - RNA, 22 nt, Human
caguauuuguucccuaucaaug

SEQ ID NO: 244380 - RNA, 22 nt, Human
cggggcugcucguccuccugug

SEQ ID NO: 244381 - RNA, 22 nt, Human
ucuuuaucaagucuguucuuug

SEQ ID NO: 244382 - RNA, 22 nt, Human
gugugcaggugucagugcagcu

SEQ ID NO: 244383 - RNA, 22 nt, Human
aacucagucauaaagcgaaugc

SEQ ID NO: 244384 - RNA, 22 nt, Human
aauuggcaagcagauuuccacu

SEQ ID NO: 244385 - RNA, 22 nt, Human
gauuucuguaacacuucagaua

SEQ ID NO: 244386 - RNA, 22 nt, Human
uaggggaaagcagaauccugga

SEQ ID NO: 244387 - RNA, 22 nt, Human
ucucugaguaagugacaguuca

SEQ ID NO: 244388 - RNA, 22 nt, Human
uggcucaggaucuaagcagaau

SEQ ID NO: 244389 - RNA, 22 nt, Human
agcauucaaguaauucacuugg

SEQ ID NO: 244390 - RNA, 22 nt, Human
uccucuggcucuuucccuagga

SEQ ID NO: 244391 - RNA, 22 nt, Human
uuaaagaauagugccccuauug

SEQ ID NO: 244392 - RNA, 20 nt, Human
uaaugucaaagucacaaggu

SEQ ID NO: 244393 - RNA, 22 nt, Human
aacacuguaacagcaucauuuu

SEQ ID NO: 244394 - RNA, 22 nt, Human
caugcuaagucauaaaagagua

SEQ ID NO: 244395 - RNA, 22 nt, Human
uaauguguccugaaagcuucug

SEQ ID NO: 244396 - RNA, 22 nt, Human
uggagcugagcaccuccagggc

SEQ ID NO: 244397 - RNA, 22 nt, Human
gcacagcaguggcauaaacaau

SEQ ID NO: 244398 - RNA, 22 nt, Human
acagguguacaaugcaugacag

SEQ ID NO: 244399 - RNA, 22 nt, Human
augcugaaaauuggauuugaau

SEQ ID NO: 244400 - RNA, 20 nt, Human
aacuuguucuaccuguuuca

SEQ ID NO: 244401 - RNA, 20 nt, Human
aggaaaaauggaaacuggag

SEQ ID NO: 244402 - RNA, 22 nt, Human
ggcucugggccuccaaggucug

SEQ ID NO: 244403 - RNA, 22 nt, Human
cugcuguuccaccucugaaugc

SEQ ID NO: 244404 - RNA, 22 nt, Human
cugugucccccucagccaggug

SEQ ID NO: 244405 - RNA, 19 nt, Human
gcuccuggaugaccugugg

SEQ ID NO: 244406 - RNA, 22 nt, Human
agcuugguggcccuccuggcug

SEQ ID NO: 244407 - RNA, 22 nt, Human
uugucaaggcuuuuaauauucu

SEQ ID NO: 244408 - RNA, 22 nt, Human
uuuaccacagaaaaaaguaacu

SEQ ID NO: 244409 - RNA, 18 nt, Human
gccucuguugcuugccug

SEQ ID NO: 244410 - RNA, 22 nt, Human
gggucuggagggcagcccuucu

SEQ ID NO: 244411 - RNA, 22 nt, Human
uuugagaagauaggggaauacu

SEQ ID NO: 244412 - RNA, 22 nt, Human
ugagguggccgaggagcaggac

SEQ ID NO: 244413 - RNA, 22 nt, Human
agcuucuuggcucagcacuugg

SEQ ID NO: 244414 - RNA, 22 nt, Human
gaggugugaugcagaguggugg

SEQ ID NO: 244415 - RNA, 21 nt, Human
cagcaagacauguuuaucaag

SEQ ID NO: 244416 - RNA, 22 nt, Human
gaguccagagauuaagcaccuc

SEQ ID NO: 244417 - RNA, 22 nt, Human
agaguuuggagagggugaggca

SEQ ID NO: 244418 - RNA, 22 nt, Human
uuggccagacugaggugcuggg

SEQ ID NO: 244419 - RNA, 22 nt, Human
cuguuuauuacguaauuaauau

SEQ ID NO: 244420 - RNA, 22 nt, Human
cccaggcucacuguccgcuucc

SEQ ID NO: 244421 - RNA, 22 nt, Human
uagaauauacacuacagcuuaa

SEQ ID NO: 244422 - RNA, 22 nt, Human
gcaugcaggauagguugagcuc

SEQ ID NO: 244423 - RNA, 22 nt, Human
gccuguucuccagcauccaggu

SEQ ID NO: 244424 - RNA, 22 nt, Human
agaaacucauccuggagaugac

SEQ ID NO: 244425 - RNA, 22 nt, Human
gcagaaguggugcugugccacu

SEQ ID NO: 244426 - RNA, 22 nt, Human
gacaggggucccucugggcugu

SEQ ID NO: 244427 - RNA, 22 nt, Human
ucauugaauuucacagcuuuau

SEQ ID NO: 244428 - RNA, 22 nt, Human
cagcugagcugccagacuacug

SEQ ID NO: 244429 - RNA, 17 nt, Human
gcuccuucuaacuucca

SEQ ID NO: 244430 - RNA, 22 nt, Human
aaggcugguuuccuugauguuu

SEQ ID NO: 244431 - RNA, 22 nt, Human
augaacaaugacuacauauuga

SEQ ID NO: 244432 - RNA, 17 nt, Human
guguaacuaugagccau

SEQ ID NO: 244433 - RNA, 22 nt, Human
uuauuuguuuucugagaaguau

SEQ ID NO: 244434 - RNA, 22 nt, Human
ugucucaggcccaagccaguaa

SEQ ID NO: 244435 - RNA, 22 nt, Human
ugcauuaagggccuggagauac

SEQ ID NO: 244436 - RNA, 22 nt, Human
uuuacuguuacaccuaccuucu

SEQ ID NO: 244437 - RNA, 22 nt, Human
ugauguccucaugucaagcucc

SEQ ID NO: 244438 - RNA, 22 nt, Human
ucuuuucuccagaccugggauc

SEQ ID NO: 244439 - RNA, 22 nt, Human
ugcucaaugucuuaugagacug

SEQ ID NO: 244440 - RNA, 22 nt, Human
ccaggccuggaccaugccaggg

SEQ ID NO: 244441 - RNA, 22 nt, Human
uaugagcaagaguuugugaagg

SEQ ID NO: 244442 - RNA, 22 nt, Human
ucaggcugaaucauccuagcuu

SEQ ID NO: 244443 - RNA, 22 nt, Human
gucagcagugucagcucugggg

SEQ ID NO: 244444 - RNA, 22 nt, Human
uggugggggaggcugucuagca

SEQ ID NO: 244445 - RNA, 22 nt, Human
ggccagcuuugagcugcaggaa

SEQ ID NO: 244446 - RNA, 22 nt, Human
cugcagggguguccuguauugg

SEQ ID NO: 244447 - RNA, 23 nt, Human
augcaacauugccaguaugggca

SEQ ID NO: 244448 - RNA, 22 nt, Human
uugggugguggggagaguucag

SEQ ID NO: 244449 - RNA, 22 nt, Human
auagggcagucaggccgccacu

SEQ ID NO: 244450 - RNA, 22 nt, Human
aaguccuucccaagcauguacc

SEQ ID NO: 244451 - RNA, 22 nt, Human
aguuauaaucugcuacugauau

SEQ ID NO: 244452 - RNA, 19 nt, Human
ccagaggacuguuaaugaa

SEQ ID NO: 244453 - RNA, 22 nt, Human
auauaaaguguuuagaaagcug

SEQ ID NO: 244454 - RNA, 22 nt, Human
gaggcugcuguuagcccugggc

SEQ ID NO: 244455 - RNA, 22 nt, Human
uacuuaaauaauugcugcuauu

SEQ ID NO: 244456 - RNA, 22 nt, Human
gggaaggacauucugggcucag

SEQ ID NO: 244457 - RNA, 22 nt, Human
ucaaagccuguggauaguuugg

SEQ ID NO: 244458 - RNA, 22 nt, Human
cuagagaaaccccaugagcuuu

SEQ ID NO: 244459 - RNA, 22 nt, Human
agcccuggggcuggucuuggaa

SEQ ID NO: 244460 - RNA, 23 nt, Human
agggaacaagcaagcugcuaguc

SEQ ID NO: 244461 - RNA, 18 nt, Human
aagcugggaaggagacag

SEQ ID NO: 244462 - RNA, 22 nt, Human
uaaagccaauauaccuagcaua

SEQ ID NO: 244463 - RNA, 22 nt, Human
agagggugcuggagagacauug

SEQ ID NO: 244464 - RNA, 22 nt, Human
gggcugagggguaucucauggg

SEQ ID NO: 244465 - RNA, 22 nt, Human
cugggagaggaaccucgagggu

SEQ ID NO: 244466 - RNA, 20 nt, Human
gucugaggagcagugggaaa

SEQ ID NO: 244467 - RNA, 22 nt, Human
ccaggucucgggucugcucgug

SEQ ID NO: 244468 - RNA, 22 nt, Human
agguccaggcauuuggguuggg

SEQ ID NO: 244469 - RNA, 22 nt, Human
uuugcauugcauuaaguauucu

SEQ ID NO: 244470 - RNA, 22 nt, Human
aguccaggcaaguuguugugua

SEQ ID NO: 244471 - RNA, 22 nt, Human
ugcagggcauaggguccaguuu

SEQ ID NO: 244472 - RNA, 22 nt, Human
aaacauuguaauuuuagcaugg

SEQ ID NO: 244473 - RNA, 22 nt, Human
ggcccagucuggggcccuguga

SEQ ID NO: 244474 - RNA, 22 nt, Human
aaggcaauguaaauuacagcuu

SEQ ID NO: 244475 - RNA, 22 nt, Human
ucagaacagaagcuggcuauaa

SEQ ID NO: 244476 - RNA, 22 nt, Human
ucugccaucuuaauucucuuuu

SEQ ID NO: 244477 - RNA, 23 nt, Human
ugucacauuuaguuggcauuguu

SEQ ID NO: 244478 - RNA, 22 nt, Human
agcccagaggguagcagaagaa

SEQ ID NO: 244479 - RNA, 22 nt, Human
uucugcugcgacccaggaguua

SEQ ID NO: 244480 - RNA, 22 nt, Human
uagucuuuuuaauaaauaaugc

SEQ ID NO: 244481 - RNA, 22 nt, Human
ugucauaaaacacaagcuguug

SEQ ID NO: 244482 - RNA, 21 nt, Human
agccagucugccagagaagcc

SEQ ID NO: 244483 - RNA, 20 nt, Human
ccaagagcaugcaugaggaa

SEQ ID NO: 244484 - RNA, 22 nt, Human
cugccugugccaaugcuccuuu

SEQ ID NO: 244485 - RNA, 18 nt, Human
gucagaggauggggaaau

SEQ ID NO: 244486 - RNA, 22 nt, Human
cugguuuagcuguaagguuccc

SEQ ID NO: 244487 - RNA, 22 nt, Human
ucucugggcuaaaaucaaggug

SEQ ID NO: 244488 - RNA, 22 nt, Human
gaaaaggcugcccacuuauuga

SEQ ID NO: 244489 - RNA, 22 nt, Human
aaguauauacuaaauguuaauc

SEQ ID NO: 244490 - RNA, 22 nt, Human
agauguggccggcuagggagag

SEQ ID NO: 244491 - RNA, 22 nt, Human
gagcuggcagugguagacaugg

SEQ ID NO: 244492 - RNA, 22 nt, Human
aguuauuuaaaaugauuguccu

SEQ ID NO: 244493 - RNA, 22 nt, Human
ucaguaacccugcuguucagag

SEQ ID NO: 244494 - RNA, 22 nt, Human
agauuacaacaugggacgcaua

SEQ ID NO: 244495 - RNA, 22 nt, Human
agcaggaacgaguucaugggga

SEQ ID NO: 244496 - RNA, 22 nt, Human
uacagaggcuggguuuucaggg

SEQ ID NO: 244497 - RNA, 22 nt, Human
augguauuggaguaggacuugc

SEQ ID NO: 244498 - RNA, 22 nt, Human
ucuggaugcucugagcccaagg

SEQ ID NO: 244499 - RNA, 22 nt, Human
ugauuuuuggaucugagcugca

SEQ ID NO: 244500 - RNA, 22 nt, Human
uucauuaauucauucagugacu

SEQ ID NO: 244501 - RNA, 22 nt, Human
uuucugaacuugguacuggagc

SEQ ID NO: 244502 - RNA, 22 nt, Human
caucuaccagaauugcuauaaa

SEQ ID NO: 244503 - RNA, 22 nt, Human
gagccuggauagccuuguucca

SEQ ID NO: 244504 - RNA, 22 nt, Human
agcaguguuuugauucugggag

SEQ ID NO: 244505 - RNA, 17 nt, Human
gcuccaggcgugaguga

SEQ ID NO: 244506 - RNA, 17 nt, Human
cuccuggcagccucagg

SEQ ID NO: 244507 - RNA, 22 nt, Human
uuugacuucuaucuaguaagaa

SEQ ID NO: 244508 - RNA, 22 nt, Human
uuauguuuuaaguguguaucuu

SEQ ID NO: 244509 - RNA, 22 nt, Human
aucugggcguauaggugcaagu

SEQ ID NO: 244510 - RNA, 22 nt, Human
uggcuucuucauaugugaucuu

SEQ ID NO: 244511 - RNA, 22 nt, Human
agaaagggcuauuuugagguag

SEQ ID NO: 244512 - RNA, 22 nt, Human
ccaggcuagagagcaguggcau

SEQ ID NO: 244513 - RNA, 22 nt, Human
aaguggcagaauaguggcagga

SEQ ID NO: 244514 - RNA, 22 nt, Human
uagugaaaugauaacagagcag

SEQ ID NO: 244515 - RNA, 21 nt, Human
aaauacugggcagugacuuga

SEQ ID NO: 244516 - RNA, 22 nt, Human
uggagcccagggugagaaggag

SEQ ID NO: 244517 - RNA, 22 nt, Human
uacauauagacaguuacucuag

SEQ ID NO: 244518 - RNA, 22 nt, Human
uuucaaagucaauaucauuacc

SEQ ID NO: 244519 - RNA, 22 nt, Human
aagcauguacucaagcaaaugu

SEQ ID NO: 244520 - RNA, 22 nt, Human
uaaaguauauuuuuucucaaua

SEQ ID NO: 244521 - RNA, 22 nt, Human
uugaaauggcagcagcugaccu

SEQ ID NO: 244522 - RNA, 22 nt, Human
ugggaccugcucuuggaaugag

SEQ ID NO: 244523 - RNA, 22 nt, Human
ggggcuccagucuucacauuuu

SEQ ID NO: 244524 - RNA, 22 nt, Human
aguccauaguuuacauuacagc

SEQ ID NO: 244525 - RNA, 22 nt, Human
gaucugaagauaugaaauauuu

SEQ ID NO: 244526 - RNA, 22 nt, Human
uugggucuguuuagcugagaag

SEQ ID NO: 244527 - RNA, 22 nt, Human
acaguaaugauaaccagcauuu

SEQ ID NO: 244528 - RNA, 22 nt, Human
acuuuagagaaauguagaagua

SEQ ID NO: 244529 - RNA, 22 nt, Human
ucauuuguugaacuuuagugcg

SEQ ID NO: 244530 - RNA, 22 nt, Human
ugguccagacauuucugaggua

SEQ ID NO: 244531 - RNA, 22 nt, Human
cugggucuccggcagccucggg

SEQ ID NO: 244532 - RNA, 22 nt, Human
agguggcugaagagugggugag

SEQ ID NO: 244533 - RNA, 20 nt, Human
cuucuucaguaguuuguucu

SEQ ID NO: 244534 - RNA, 18 nt, Human
ggcuucucuguuuauuuc

SEQ ID NO: 244535 - RNA, 22 nt, Human
aaggugguaauagugcaggauu

SEQ ID NO: 244536 - RNA, 22 nt, Human
cuucuuucaagaauggauuagg

SEQ ID NO: 244537 - RNA, 22 nt, Human
gcugagcacaccuaggguagag

SEQ ID NO: 244538 - RNA, 21 nt, Human
gccuccagccagauggccucc

SEQ ID NO: 244539 - RNA, 22 nt, Human
acaauuucugaucagugaauuu

SEQ ID NO: 244540 - RNA, 22 nt, Human
uuccaauaaaauguuauuugca

SEQ ID NO: 244541 - RNA, 22 nt, Human
cccaccucucagagagccuugc

SEQ ID NO: 244542 - RNA, 22 nt, Human
acacaccaugauuuauuuaccc

SEQ ID NO: 244543 - RNA, 22 nt, Human
ggcaggcucagcagccaaggag

SEQ ID NO: 244544 - RNA, 19 nt, Human
gcaggugugaauccguaga

SEQ ID NO: 244545 - RNA, 22 nt, Human
gcagcugagcgugaggaagagu

SEQ ID NO: 244546 - RNA, 22 nt, Human
agcucuggaacucccggcugcu

SEQ ID NO: 244547 - RNA, 22 nt, Human
cuguauaugugcauacacacac

SEQ ID NO: 244548 - RNA, 22 nt, Human
uugauuuuuccagcuucuagag

SEQ ID NO: 244549 - RNA, 22 nt, Human
ucagguggcuuggagggggacg

SEQ ID NO: 244550 - RNA, 22 nt, Human
cuucauuaacuauuggaaugca

SEQ ID NO: 244551 - RNA, 20 nt, Human
auacacaugcagacagaugc

SEQ ID NO: 244552 - RNA, 22 nt, Human
ucuggggugugaccugagcaug

SEQ ID NO: 244553 - RNA, 22 nt, Human
ugcuuuauuuuaaauaugccau

SEQ ID NO: 244554 - RNA, 18 nt, Human
aggcaggugcuggaaguc

SEQ ID NO: 244555 - RNA, 19 nt, Human
gcaugcuugguggcuucug

SEQ ID NO: 244556 - RNA, 22 nt, Human
aagaaaacaugaucuaauuuaa

SEQ ID NO: 244557 - RNA, 22 nt, Human
cuccugggagucuuccuggaug

SEQ ID NO: 244558 - RNA, 22 nt, Human
agaggcugggaaggguccccgg

SEQ ID NO: 244559 - RNA, 22 nt, Human
uccuuucuccagcuggcauugu

SEQ ID NO: 244560 - RNA, 22 nt, Human
ucagaaguugauaaaguaguug

SEQ ID NO: 244561 - RNA, 22 nt, Human
auauauuuacucuccuguugca

SEQ ID NO: 244562 - RNA, 22 nt, Human
uagaaacaugagagaaacucuu

SEQ ID NO: 244563 - RNA, 22 nt, Human
ucauacaucuguccuggagcuc

SEQ ID NO: 244564 - RNA, 22 nt, Human
aaaucuaggccgggugcggugg

SEQ ID NO: 244565 - RNA, 22 nt, Human
uucuucuugucugcccucacau

SEQ ID NO: 244566 - RNA, 22 nt, Human
aagaguuuaccagugcugcuuc

SEQ ID NO: 244567 - RNA, 22 nt, Human
guggcuggaguaugaggaaagg

SEQ ID NO: 244568 - RNA, 22 nt, Human
auucuucaccugagucagucua

SEQ ID NO: 244569 - RNA, 22 nt, Human
guguguccuguuuuaaaauagu

SEQ ID NO: 244570 - RNA, 22 nt, Human
aagugguaggaagagagcacug

SEQ ID NO: 244571 - RNA, 20 nt, Human
auuagcuuggagacaguggc

SEQ ID NO: 244572 - RNA, 22 nt, Human
gccugugacccagggcccagga

SEQ ID NO: 244573 - RNA, 22 nt, Human
cugccagccaggccagguaggc

SEQ ID NO: 244574 - RNA, 22 nt, Human
agagccagagaccuggguucac

SEQ ID NO: 244575 - RNA, 22 nt, Human
cccugcaggcucagacuggagu

SEQ ID NO: 244576 - RNA, 22 nt, Human
uuggcagagaguaugcugaaga

SEQ ID NO: 244577 - RNA, 22 nt, Human
auauuucagguuuugcaggccg

SEQ ID NO: 244578 - RNA, 22 nt, Human
ucaggccuagaacacagcagau

SEQ ID NO: 244579 - RNA, 22 nt, Human
uauguagguaaacacagacaua

SEQ ID NO: 244580 - RNA, 22 nt, Human
aauucaaauuugaguuugugau

SEQ ID NO: 244581 - RNA, 22 nt, Human
gaaucaaaucaaguucuuuuga

SEQ ID NO: 244582 - RNA, 22 nt, Human
cuggccuuuuguuucuggagaa

SEQ ID NO: 244583 - RNA, 22 nt, Human
aguaaaauuucugcugaggaga

SEQ ID NO: 244584 - RNA, 22 nt, Human
ugucauuuauucucuuauucua

SEQ ID NO: 244585 - RNA, 22 nt, Human
ccucaggcugggcugccccugg

SEQ ID NO: 244586 - RNA, 22 nt, Human
ucaaagcaucagucaauuuagg

SEQ ID NO: 244587 - RNA, 22 nt, Human
gaaaacacuuugaucugaaagu

SEQ ID NO: 244588 - RNA, 22 nt, Human
caggcugcggccgugugagcau

SEQ ID NO: 244589 - RNA, 22 nt, Human
auggaugaaggcgaggaugagg

SEQ ID NO: 244590 - RNA, 22 nt, Human
agccucugcuggcccuggcacu

SEQ ID NO: 244591 - RNA, 22 nt, Human
agaacaaaauuagaggagugca

SEQ ID NO: 244592 - RNA, 22 nt, Human
agggcuccaaggaaguguagcu

SEQ ID NO: 244593 - RNA, 22 nt, Human
gcagggcagaaggugcugagga

SEQ ID NO: 244594 - RNA, 22 nt, Human
agcugcugccucacuggucugu

SEQ ID NO: 244595 - RNA, 22 nt, Human
ccagagaccagaacauggggau

SEQ ID NO: 244596 - RNA, 22 nt, Human
auccauuuuuucagaaugcucu

SEQ ID NO: 244597 - RNA, 22 nt, Human
auuuguucacaaucagggcagg

SEQ ID NO: 244598 - RNA, 22 nt, Human
auuggccauuugcauguauuau

SEQ ID NO: 244599 - RNA, 22 nt, Human
guccaggccugccucugaggag

SEQ ID NO: 244600 - RNA, 21 nt, Human
uuuguucaggggcaaaguuaa

SEQ ID NO: 244601 - RNA, 22 nt, Human
aggccagggcacugcucuuuag

SEQ ID NO: 244602 - RNA, 22 nt, Human
auguucaaacuuuuuacacacc

SEQ ID NO: 244603 - RNA, 22 nt, Human
agaaucugcauuucuaauaagc

SEQ ID NO: 244604 - RNA, 22 nt, Human
agugucugccagcugccaggug

SEQ ID NO: 244605 - RNA, 22 nt, Human
ccucccuccauugccaucgucu

SEQ ID NO: 244606 - RNA, 22 nt, Human
gcagagccccucaagccagccu

SEQ ID NO: 244607 - RNA, 22 nt, Human
ucacacagcagccccggguguu

SEQ ID NO: 244608 - RNA, 22 nt, Human
augucacuccagggacacaggu

SEQ ID NO: 244609 - RNA, 22 nt, Human
cuuuaaauaauacaagguccag

SEQ ID NO: 244610 - RNA, 22 nt, Human
aaaagcaaguugccuagguuga

SEQ ID NO: 244611 - RNA, 22 nt, Human
uauugauucugucccaaguuga

SEQ ID NO: 244612 - RNA, 22 nt, Human
ugaggcuugauuugcccgagag

SEQ ID NO: 244613 - RNA, 22 nt, Human
cuguaucuguguuggaugaguu

SEQ ID NO: 244614 - RNA, 22 nt, Human
ccugccuggcugucagcagagc

SEQ ID NO: 244615 - RNA, 22 nt, Human
ggcaggugugagaucgaggcca

SEQ ID NO: 244616 - RNA, 22 nt, Human
caggaguguuugcuacaguuuc

SEQ ID NO: 244617 - RNA, 22 nt, Human
gugaaaagcaacauuguggacc

SEQ ID NO: 244618 - RNA, 22 nt, Human
gcagggcuguaauuugagccug

SEQ ID NO: 244619 - RNA, 22 nt, Human
uagaaagucaugaauuacacca

SEQ ID NO: 244620 - RNA, 22 nt, Human
ggccugacauuugcaucaacac

SEQ ID NO: 244621 - RNA, 22 nt, Human
agugagaguauuaaugugaacu

SEQ ID NO: 244622 - RNA, 22 nt, Human
guggcugcagcccagcggcacg

SEQ ID NO: 244623 - RNA, 22 nt, Human
agacaugccaagaaacccagug

SEQ ID NO: 244624 - RNA, 22 nt, Human
uccagccauaucuuguagcccu

SEQ ID NO: 244625 - RNA, 22 nt, Human
ggucuggcacucaugcagcagg

SEQ ID NO: 244626 - RNA, 22 nt, Human
agcagggcagugcuucagcucu

SEQ ID NO: 244627 - RNA, 22 nt, Human
uagaaaccucagggaaaucuuu

SEQ ID NO: 244628 - RNA, 22 nt, Human
cacagcugccaugcagucagug

SEQ ID NO: 244629 - RNA, 22 nt, Human
ugucaugguauuugugagcugc

SEQ ID NO: 244630 - RNA, 22 nt, Human
accuccuggcugcucauggaac

SEQ ID NO: 244631 - RNA, 22 nt, Human
gguaauaaaauugugucaaaca

SEQ ID NO: 244632 - RNA, 22 nt, Human
cucugugggccagagaggcccc

SEQ ID NO: 244633 - RNA, 22 nt, Human
acaguggcagucguguucucua

SEQ ID NO: 244634 - RNA, 22 nt, Human
aggaauguaguuugaguagaaa

SEQ ID NO: 244635 - RNA, 22 nt, Human
ugcagggauccuagcugaagag

SEQ ID NO: 244636 - RNA, 19 nt, Human
cccaguccuuguccugggc

SEQ ID NO: 244637 - RNA, 22 nt, Human
cagcacaguuugcuuggcagag

SEQ ID NO: 244638 - RNA, 22 nt, Human
agcaauuauggaguuguugacg

SEQ ID NO: 244639 - RNA, 22 nt, Human
ucagaggagaaguugggaaaau

SEQ ID NO: 244640 - RNA, 22 nt, Human
ucugggagaguagauaaaggaa

SEQ ID NO: 244641 - RNA, 22 nt, Human
cacccugggcugggccuguuaa

SEQ ID NO: 244642 - RNA, 22 nt, Human
ggcuguguuccaagugucagga

SEQ ID NO: 244643 - RNA, 20 nt, Human
gaaggcuuggacagugacag

SEQ ID NO: 244644 - RNA, 22 nt, Human
cuuauauuuuaggaacagacaa

SEQ ID NO: 244645 - RNA, 22 nt, Human
agaguuuggagguguuccugga

SEQ ID NO: 244646 - RNA, 23 nt, Human
ugggcuucugagaaagcaccuaa

SEQ ID NO: 244647 - RNA, 22 nt, Human
uuuaguauguauuuaauggacu

SEQ ID NO: 244648 - RNA, 22 nt, Human
ggagggggaauucagccccagc

SEQ ID NO: 244649 - RNA, 22 nt, Human
ggaagaggaggagccaggcuuu

SEQ ID NO: 244650 - RNA, 22 nt, Human
aaaaugagacacaugugacucc

SEQ ID NO: 244651 - RNA, 22 nt, Human
acugagcucccugagggcaggc

SEQ ID NO: 244652 - RNA, 22 nt, Human
caugccugccuggugggcgugg

SEQ ID NO: 244653 - RNA, 22 nt, Human
cauuuacauaacaguaacgcug

SEQ ID NO: 244654 - RNA, 22 nt, Human
cuuucuaguugacagcaugcca

SEQ ID NO: 244655 - RNA, 18 nt, Human
gggaagccgggaagccgg

SEQ ID NO: 244656 - RNA, 22 nt, Human
auauuuuuccaugugggacucu

SEQ ID NO: 244657 - RNA, 22 nt, Human
ucuguucaucaucuggacacau

SEQ ID NO: 244658 - RNA, 22 nt, Human
aaaguguuaugcaaaacucugu

SEQ ID NO: 244659 - RNA, 22 nt, Human
aaggugucauuguuuauggaga

SEQ ID NO: 244660 - RNA, 22 nt, Human
auaugaagucagacaaacuggg

SEQ ID NO: 244661 - RNA, 22 nt, Human
ucaggcuuuuucucaaccucuu

SEQ ID NO: 244662 - RNA, 22 nt, Human
gaggugguuuguggugacucau

SEQ ID NO: 244663 - RNA, 21 nt, Human
acuuucuguggguucaagcau

SEQ ID NO: 244664 - RNA, 22 nt, Human
ccaggcaggcagcguucucagg

SEQ ID NO: 244665 - RNA, 22 nt, Human
cagcugcagaucauguuuacag

SEQ ID NO: 244666 - RNA, 22 nt, Human
uaacuguagcuaaccgaugaga

SEQ ID NO: 244667 - RNA, 22 nt, Human
auaauagcuaacacagagugcu

SEQ ID NO: 244668 - RNA, 22 nt, Human
ucuccaggggcagggucuggag

SEQ ID NO: 244669 - RNA, 22 nt, Human
gguaacacaggugcaguuuuaa

SEQ ID NO: 244670 - RNA, 22 nt, Human
gaagcuggggugcugagggcaa

SEQ ID NO: 244671 - RNA, 17 nt, Human
cagugcagagcccuuuc

SEQ ID NO: 244672 - RNA, 22 nt, Human
ucaguauccacaaaugcucaaa

SEQ ID NO: 244673 - RNA, 22 nt, Human
uggcccugggcaucuuucguga

SEQ ID NO: 244674 - RNA, 22 nt, Human
aagucguggcaggcuugcacga

SEQ ID NO: 244675 - RNA, 22 nt, Human
agccuuagagacuuaaaacagg

SEQ ID NO: 244676 - RNA, 22 nt, Human
auggcaguugcccagccaaucc

SEQ ID NO: 244677 - RNA, 22 nt, Human
agguucuggcauugcucaguaa

SEQ ID NO: 244678 - RNA, 22 nt, Human
acuuuaaagcagaauggcuaug

SEQ ID NO: 244679 - RNA, 22 nt, Human
guggggaaaggaguggggcuca

SEQ ID NO: 244680 - RNA, 22 nt, Human
ggcuacuagacuuugauacuag

SEQ ID NO: 244681 - RNA, 22 nt, Human
agugcccugcuggggcaggaga

SEQ ID NO: 244682 - RNA, 22 nt, Human
ucucagggcgcagugaggcagu

SEQ ID NO: 244683 - RNA, 22 nt, Human
gagcacagaaucuucccaugca

SEQ ID NO: 244684 - RNA, 22 nt, Human
guauuaggugguggaauuguag

SEQ ID NO: 244685 - RNA, 22 nt, Human
aaauguauccuacuuccugagu

SEQ ID NO: 244686 - RNA, 22 nt, Human
ucugucuucuguagcuaauaau

SEQ ID NO: 244687 - RNA, 22 nt, Human
uacauucuacuuuuucacuccc

SEQ ID NO: 244688 - RNA, 22 nt, Human
uuccaaaguuaguuauuagaaa

SEQ ID NO: 244689 - RNA, 22 nt, Human
cauaauuagagaauucauguua

SEQ ID NO: 244690 - RNA, 19 nt, Human
auuaacaucaguguuggcc

SEQ ID NO: 244691 - RNA, 22 nt, Human
acaaaaagcuccauuacugucc

SEQ ID NO: 244692 - RNA, 22 nt, Human
gaauaacauuuuuuccuuuaca

SEQ ID NO: 244693 - RNA, 22 nt, Human
gaacauuugaugaugacauugg

SEQ ID NO: 244694 - RNA, 22 nt, Human
cagauggaaggcauagagguuu

SEQ ID NO: 244695 - RNA, 22 nt, Human
uuacugcaacauaauguagucu

SEQ ID NO: 244696 - RNA, 22 nt, Human
guuauauucaaaaugaggcugu

SEQ ID NO: 244697 - RNA, 22 nt, Human
acuuggcugggagaguugaaga

SEQ ID NO: 244698 - RNA, 22 nt, Human
uucugccaucugcagaagggga

SEQ ID NO: 244699 - RNA, 22 nt, Human
caguuuuugccauuaagaguaa

SEQ ID NO: 244700 - RNA, 22 nt, Human
ucuagagcuggaguagaaugug

SEQ ID NO: 244701 - RNA, 22 nt, Human
aauguacaauaagacaaagagg

SEQ ID NO: 244702 - RNA, 17 nt, Human
gaauuucuuggucaaaa

SEQ ID NO: 244703 - RNA, 22 nt, Human
cuggcagcauggagccugugcu

SEQ ID NO: 244704 - RNA, 19 nt, Human
ugagacagaagaugagccu

SEQ ID NO: 244705 - RNA, 22 nt, Human
uuacucugaauguuucuacuga

SEQ ID NO: 244706 - RNA, 22 nt, Human
ucugauuagagcauucuugagu

SEQ ID NO: 244707 - RNA, 14 nt, Human
uccacaucagcagu

SEQ ID NO: 244708 - RNA, 22 nt, Human
agguggcagcaggagaugugga

SEQ ID NO: 244709 - RNA, 22 nt, Human
auguggauguuuauaugaagaa

SEQ ID NO: 244710 - RNA, 22 nt, Human
cugccuggccacaacccagggu

SEQ ID NO: 244711 - RNA, 22 nt, Human
ucauaaacacacuaguaugauu

SEQ ID NO: 244712 - RNA, 22 nt, Human
uguguguguuccuccucagcua

SEQ ID NO: 244713 - RNA, 22 nt, Human
uacauucaaacgauuuauugau

SEQ ID NO: 244714 - RNA, 22 nt, Human
uguaaaauaccauuccuuguca

SEQ ID NO: 244715 - RNA, 22 nt, Human
ugggacagugugccuugcuccu

SEQ ID NO: 244716 - RNA, 22 nt, Human
ccagguggugccucuguucgca

SEQ ID NO: 244717 - RNA, 22 nt, Human
augcuuucucuuaguucauuga

SEQ ID NO: 244718 - RNA, 21 nt, Human
gaaagcacagaaaggacucuu

SEQ ID NO: 244719 - RNA, 21 nt, Human
acuguucaucuguucagaagc

SEQ ID NO: 244720 - RNA, 17 nt, Human
ugcuccuguggcagccu

SEQ ID NO: 244721 - RNA, 18 nt, Human
uaugagaagauuagcaau

SEQ ID NO: 244722 - RNA, 22 nt, Human
gauauuuacauuaagcacauug

SEQ ID NO: 244723 - RNA, 22 nt, Human
ucuuguuuggauuuugggcagu

SEQ ID NO: 244724 - RNA, 22 nt, Human
agagcuguucaacguagcaaug

SEQ ID NO: 244725 - RNA, 22 nt, Human
guugaauaucccguaucuuaaa

SEQ ID NO: 244726 - RNA, 22 nt, Human
aauuuuauuaacuggauguagc

SEQ ID NO: 244727 - RNA, 22 nt, Human
gucugggcuuagggacauggca

SEQ ID NO: 244728 - RNA, 22 nt, Human
ucagggcacguuucugcaaugc

SEQ ID NO: 244729 - RNA, 22 nt, Human
ugggaugagcuauauagaaagu

SEQ ID NO: 244730 - RNA, 22 nt, Human
cauuuccacucugggagucaga

SEQ ID NO: 244731 - RNA, 22 nt, Human
acuuauuucauggaucauaaug

SEQ ID NO: 244732 - RNA, 22 nt, Human
gucuuucuuaaacaacagaaca

SEQ ID NO: 244733 - RNA, 22 nt, Human
caguaccagucaccacauugau

SEQ ID NO: 244734 - RNA, 22 nt, Human
uagcuucugggaguguuuacua

SEQ ID NO: 244735 - RNA, 22 nt, Human
guauuaggagguggagccuuug

SEQ ID NO: 244736 - RNA, 22 nt, Human
ucacaauauuuaucuuccaauu

SEQ ID NO: 244737 - RNA, 22 nt, Human
ucuccugggugcuuuaucagaa

SEQ ID NO: 244738 - RNA, 22 nt, Human
aaagugguuucccaguucagua

SEQ ID NO: 244739 - RNA, 22 nt, Human
ccuguucagagcuaagcaucau

SEQ ID NO: 244740 - RNA, 22 nt, Human
cacagcaggcagaacgugggca

SEQ ID NO: 244741 - RNA, 22 nt, Human
gggcagcaggcuccacguuccu

SEQ ID NO: 244742 - RNA, 22 nt, Human
cauauauuauggacugcagaau

SEQ ID NO: 244743 - RNA, 19 nt, Human
ucucuggcuugucugccug

SEQ ID NO: 244744 - RNA, 20 nt, Human
gugcagauguccuuucacac

SEQ ID NO: 244745 - RNA, 22 nt, Human
cauuuauucaugaucuguagcu

SEQ ID NO: 244746 - RNA, 22 nt, Human
aguaacaaaugcaucugggcau

SEQ ID NO: 244747 - RNA, 18 nt, Human
guucaaggucaagagaga

SEQ ID NO: 244748 - RNA, 22 nt, Human
uagaacuagaacaaggauuuga

SEQ ID NO: 244749 - RNA, 20 nt, Human
uagauccuggggauuuauug

SEQ ID NO: 244750 - RNA, 22 nt, Human
gguggcagcgucuaucugacau

SEQ ID NO: 244751 - RNA, 22 nt, Human
agaaagggaugagguagcugcu

SEQ ID NO: 244752 - RNA, 22 nt, Human
augauuuguuaacagacuuaau

SEQ ID NO: 244753 - RNA, 22 nt, Human
uuugaacuucuccauucugaug

SEQ ID NO: 244754 - RNA, 22 nt, Human
gcugugugaaaacugggccugg

SEQ ID NO: 244755 - RNA, 22 nt, Human
ucaggcaaucugacagcuggag

SEQ ID NO: 244756 - RNA, 17 nt, Human
gcagaaaagucaaggga

SEQ ID NO: 244757 - RNA, 22 nt, Human
uugcagggcuuggggauuacag

SEQ ID NO: 244758 - RNA, 22 nt, Human
ccuggcccacauggcuucuccc

SEQ ID NO: 244759 - RNA, 22 nt, Human
gcaggcugugaggcucagaugg

SEQ ID NO: 244760 - RNA, 22 nt, Human
cugaggacauugaugaggcaau

SEQ ID NO: 244761 - RNA, 23 nt, Human
gccuggccaccccagggcugcuu

SEQ ID NO: 244762 - RNA, 22 nt, Human
ggugggucuugcggggcagcuu

SEQ ID NO: 244763 - RNA, 22 nt, Human
aacaugaaaaccuccacagcaa

SEQ ID NO: 244764 - RNA, 22 nt, Human
cuuucucuuacccaaggaucug

SEQ ID NO: 244765 - RNA, 22 nt, Human
aggucugaguagagaaaaggca

SEQ ID NO: 244766 - RNA, 22 nt, Human
uacaauguaauucugauuaugu

SEQ ID NO: 244767 - RNA, 22 nt, Human
cuauagaaaauuguaucacacg

SEQ ID NO: 244768 - RNA, 22 nt, Human
uauuucuugaguggucaguuuc

SEQ ID NO: 244769 - RNA, 22 nt, Human
gcgcaccaccuccagguggccg

SEQ ID NO: 244770 - RNA, 22 nt, Human
uccccagauucaugucugcugu

SEQ ID NO: 244771 - RNA, 22 nt, Human
uaacaauaguguuugcuaguca

SEQ ID NO: 244772 - RNA, 22 nt, Human
uauauuaaaugaccaguuuuaa

SEQ ID NO: 244773 - RNA, 22 nt, Human
gagggcuccacacgggcccagc

SEQ ID NO: 244774 - RNA, 23 nt, Human
ggcacucggccgugaacucgugc

SEQ ID NO: 244775 - RNA, 19 nt, Human
ggcaccuuggucuuggacu

SEQ ID NO: 244776 - RNA, 22 nt, Human
gugucccaggccucuggaauua

SEQ ID NO: 244777 - RNA, 22 nt, Human
acccuccacaccagucuuauuu

SEQ ID NO: 244778 - RNA, 22 nt, Human
cugcaggggcuggaguuggcuu

SEQ ID NO: 244779 - RNA, 22 nt, Human
uagaaagcagaaaccaucagag

SEQ ID NO: 244780 - RNA, 23 nt, Human
uuuggacuugugacucuucuccu

SEQ ID NO: 244781 - RNA, 22 nt, Human
gcugccuuuagggggugcucag

SEQ ID NO: 244782 - RNA, 22 nt, Human
acagaauaguuggcccugcuau

SEQ ID NO: 244783 - RNA, 22 nt, Human
accugggaggcggagguugcag

SEQ ID NO: 244784 - RNA, 22 nt, Human
ggucacagggaagggcucucaa

SEQ ID NO: 244785 - RNA, 22 nt, Human
uuugacucuugucucuuguuag

SEQ ID NO: 244786 - RNA, 22 nt, Human
aggcuucccaagcagcugcaaa

SEQ ID NO: 244787 - RNA, 22 nt, Human
aagguacagaaauuaacaagga

SEQ ID NO: 244788 - RNA, 22 nt, Human
cuuuuguuaggagaaaacauca

SEQ ID NO: 244789 - RNA, 23 nt, Human
ucucaggguggcugggcccaucc

SEQ ID NO: 244790 - RNA, 22 nt, Human
agaaggcacagugcugcuaaga

SEQ ID NO: 244791 - RNA, 22 nt, Human
ccucaggaaaugaauaaauggc

SEQ ID NO: 244792 - RNA, 22 nt, Human
ggcucagcuuggugcgcagaaa

SEQ ID NO: 244793 - RNA, 22 nt, Human
uccaggccaauguagcaggccc

SEQ ID NO: 244794 - RNA, 22 nt, Human
ggagacagcaggaagaaauauc

SEQ ID NO: 244795 - RNA, 22 nt, Human
acuggcaguggcagcagaaaga

SEQ ID NO: 244796 - RNA, 22 nt, Human
gggcugagugucccaggccgaa

SEQ ID NO: 244797 - RNA, 22 nt, Human
uuuucauuuacauuagggaaga

SEQ ID NO: 244798 - RNA, 22 nt, Human
caggagacuauggcccaaggcc

SEQ ID NO: 244799 - RNA, 22 nt, Human
uggcuugcuacugaggugucag

SEQ ID NO: 244800 - RNA, 22 nt, Human
gagggcucuaccaaguaacucu

SEQ ID NO: 244801 - RNA, 22 nt, Human
acccagcuguuucccgugucau

SEQ ID NO: 244802 - RNA, 23 nt, Human
gucuuuauaguggggcacuuugu

SEQ ID NO: 244803 - RNA, 22 nt, Human
cccaggcuccugacucauucua

SEQ ID NO: 244804 - RNA, 22 nt, Human
uaaggccaccguuauagaacca

SEQ ID NO: 244805 - RNA, 22 nt, Human
caguggugaagagcaggggcuc

SEQ ID NO: 244806 - RNA, 22 nt, Human
uccuggagagaggccuggaaga

SEQ ID NO: 244807 - RNA, 22 nt, Human
gcagguguggaguggggugagc

SEQ ID NO: 244808 - RNA, 23 nt, Human
acagagacaaugguuucaucuug

SEQ ID NO: 244809 - RNA, 22 nt, Human
aagcagccaccucaucuccacu

SEQ ID NO: 244810 - RNA, 22 nt, Human
gggagccagccuuugccuauaa

SEQ ID NO: 244811 - RNA, 22 nt, Human
aaagccaucugcugguucgcau

SEQ ID NO: 244812 - RNA, 22 nt, Human
ggcuggcuacauuggaggaagg

SEQ ID NO: 244813 - RNA, 22 nt, Human
uucuuuuagucauucagggaag

SEQ ID NO: 244814 - RNA, 22 nt, Human
agcaucugcauauugggagacc

SEQ ID NO: 244815 - RNA, 19 nt, Human
cccagaggaaugccuggaa

SEQ ID NO: 244816 - RNA, 18 nt, Human
agcaggugugcagaaugu

SEQ ID NO: 244817 - RNA, 22 nt, Human
ggucuagaucaagaacagaacu

SEQ ID NO: 244818 - RNA, 22 nt, Human
ccaggcugccgaggaaagaaag

SEQ ID NO: 244819 - RNA, 22 nt, Human
uuaauaaguaguaguuauuguu

SEQ ID NO: 244820 - RNA, 22 nt, Human
gcuccugcaggacccaggagac

SEQ ID NO: 244821 - RNA, 20 nt, Human
ucacaucuggcagcugauga

SEQ ID NO: 244822 - RNA, 22 nt, Human
ugcccuccuccugagcccaugu

SEQ ID NO: 244823 - RNA, 22 nt, Human
auuuuucucucacacuuaccag

SEQ ID NO: 244824 - RNA, 22 nt, Human
acacuuuaucucaucucagaca

SEQ ID NO: 244825 - RNA, 22 nt, Human
uagaaagcaaaauccuaccaag

SEQ ID NO: 244826 - RNA, 22 nt, Human
uggcucagcuuuccccaucugg

SEQ ID NO: 244827 - RNA, 22 nt, Human
ucaagcaaucucugugucccug

SEQ ID NO: 244828 - RNA, 22 nt, Human
auucuaacacaugcucuaagaa

SEQ ID NO: 244829 - RNA, 22 nt, Human
aaagaagauggagaccugacua

SEQ ID NO: 244830 - RNA, 22 nt, Human
aaagaauacuccuuuugccuug

SEQ ID NO: 244831 - RNA, 22 nt, Human
ccaggaggugaaacuucaccag

SEQ ID NO: 244832 - RNA, 22 nt, Human
agucucuccacauuguuauaaa

SEQ ID NO: 244833 - RNA, 22 nt, Human
cagcuuuauuaaugauugucuu

SEQ ID NO: 244834 - RNA, 22 nt, Human
auggcagggacuguggcccuug

SEQ ID NO: 244835 - RNA, 21 nt, Human
gccuggcuagaagcuccuagc

SEQ ID NO: 244836 - RNA, 19 nt, Human
ccuacaugaguaagcuugg

SEQ ID NO: 244837 - RNA, 22 nt, Human
gcagacacauccacuccuacag

SEQ ID NO: 244838 - RNA, 22 nt, Human
gggugggagaaaugaguaucua

SEQ ID NO: 244839 - RNA, 22 nt, Human
aacugcaaaaaugguagucuua

SEQ ID NO: 244840 - RNA, 22 nt, Human
ggccuugaucucucuaacugcu

SEQ ID NO: 244841 - RNA, 22 nt, Human
ugguccuggggugcaggcugac

SEQ ID NO: 244842 - RNA, 22 nt, Human
agcuuaaagccgccaucuagua

SEQ ID NO: 244843 - RNA, 22 nt, Human
uccaggagauucauuaggucau

SEQ ID NO: 244844 - RNA, 22 nt, Human
acacagggcagagagcuggcuc

SEQ ID NO: 244845 - RNA, 22 nt, Human
gguacaaggagugaagguuugg

SEQ ID NO: 244846 - RNA, 21 nt, Human
ggaaggcuaugguguauuuuu

SEQ ID NO: 244847 - RNA, 20 nt, Human
ggauuuacaggggaaaagug

SEQ ID NO: 244848 - RNA, 22 nt, Human
uccaggcucuaggcugcucucc

SEQ ID NO: 244849 - RNA, 19 nt, Human
ccuccuguggcgggugggg

SEQ ID NO: 244850 - RNA, 22 nt, Human
ugggucuguagggcuguccaau

SEQ ID NO: 244851 - RNA, 22 nt, Human
uaaguuuucuggaauaacuugg

SEQ ID NO: 244852 - RNA, 22 nt, Human
gaccacagguaugggcuuggca

SEQ ID NO: 244853 - RNA, 22 nt, Human
cucucuggcccauccuguugcc

SEQ ID NO: 244854 - RNA, 22 nt, Human
ccagugcaccauuucccucugu

SEQ ID NO: 244855 - RNA, 22 nt, Human
gucucuguuauuuccaggguca

SEQ ID NO: 244856 - RNA, 22 nt, Human
uagaaacucaggauacucuucc

SEQ ID NO: 244857 - RNA, 22 nt, Human
ggcucuggcggcucuuucaaua

SEQ ID NO: 244858 - RNA, 22 nt, Human
guuccuaaccagcagagaaaca

SEQ ID NO: 244859 - RNA, 22 nt, Human
gccugcagccucagagaauuuu

SEQ ID NO: 244860 - RNA, 22 nt, Human
augacaugaccugguagagaca

SEQ ID NO: 244861 - RNA, 22 nt, Human
uugaacauuaacuucagucuau

SEQ ID NO: 244862 - RNA, 21 nt, Human
aaugcauuaacauaaagcuga

SEQ ID NO: 244863 - RNA, 22 nt, Human
uaugcaaaguccuaagaaagaa

SEQ ID NO: 244864 - RNA, 22 nt, Human
acugaauauauuccauugcaug

SEQ ID NO: 244865 - RNA, 22 nt, Human
agcuucccggcaggcacguccu

SEQ ID NO: 244866 - RNA, 22 nt, Human
ugugggaggaacacagccagaa

SEQ ID NO: 244867 - RNA, 22 nt, Human
agucagaauucgaucccagguc

SEQ ID NO: 244868 - RNA, 22 nt, Human
agccuucagcaguucaggugcc

SEQ ID NO: 244869 - RNA, 22 nt, Human
ggaauguugucauuuacauuau

SEQ ID NO: 244870 - RNA, 22 nt, Human
aauacagaggcuuccaguaaaa

SEQ ID NO: 244871 - RNA, 22 nt, Human
gcagagcagugcuugcccagcg

SEQ ID NO: 244872 - RNA, 22 nt, Human
uuggaacacuagaaucuguacu

SEQ ID NO: 244873 - RNA, 22 nt, Human
ucugggcucugggaauuaggga

SEQ ID NO: 244874 - RNA, 21 nt, Human
agacagagugcagucuacaua

SEQ ID NO: 244875 - RNA, 22 nt, Human
ggagacccagguuaggaaguaa

SEQ ID NO: 244876 - RNA, 22 nt, Human
auaagagcuacagccaguucug

SEQ ID NO: 244877 - RNA, 22 nt, Human
auuuuaauaagauccauuuggu

SEQ ID NO: 244878 - RNA, 22 nt, Human
uugcugaugcccuuguccaggc

SEQ ID NO: 244879 - RNA, 22 nt, Human
cugugggaacacugaggacuuc

SEQ ID NO: 244880 - RNA, 22 nt, Human
cuucuucauaggcaguccuguu

SEQ ID NO: 244881 - RNA, 22 nt, Human
uagcagggauacaaggucgccu

SEQ ID NO: 244882 - RNA, 22 nt, Human
cagucuuugaugcauccuagcc

SEQ ID NO: 244883 - RNA, 22 nt, Human
ucugggcagccaugugccuggc

SEQ ID NO: 244884 - RNA, 22 nt, Human
gccauccucugagcacuaggca

SEQ ID NO: 244885 - RNA, 22 nt, Human
acagugucugacacauuguagc

SEQ ID NO: 244886 - RNA, 22 nt, Human
gagguucacaggcuaucacagu

SEQ ID NO: 244887 - RNA, 20 nt, Human
uauuuagauucaaguaugga

SEQ ID NO: 244888 - RNA, 22 nt, Human
aacacauauuuauauaugcaca

SEQ ID NO: 244889 - RNA, 22 nt, Human
acaugaaguggucagaucaaac

SEQ ID NO: 244890 - RNA, 22 nt, Human
uugguuuacucuggggauaucu

SEQ ID NO: 244891 - RNA, 22 nt, Human
acaguucuuuggauggaagaau

SEQ ID NO: 244892 - RNA, 22 nt, Human
aacaaauguaaaaugcagaugc

SEQ ID NO: 244893 - RNA, 23 nt, Human
caggaaaugaauccaggaggaug

SEQ ID NO: 244894 - RNA, 22 nt, Human
ggaggguggcagcguccugggc

SEQ ID NO: 244895 - RNA, 22 nt, Human
ucacaggagucauaauuacagu

SEQ ID NO: 244896 - RNA, 22 nt, Human
aaaaagguugauccagauuagg

SEQ ID NO: 244897 - RNA, 22 nt, Human
ccaugggcgcacaggccuggag

SEQ ID NO: 244898 - RNA, 22 nt, Human
uucaggaaauuggaguccuucu

SEQ ID NO: 244899 - RNA, 22 nt, Human
ugagcuggucacuccuucugaa

SEQ ID NO: 244900 - RNA, 22 nt, Human
ucccagcccagauuugugugac

SEQ ID NO: 244901 - RNA, 22 nt, Human
aaggcagucaaagcagacuucu

SEQ ID NO: 244902 - RNA, 22 nt, Human
cucaggagaugacagaagguau

SEQ ID NO: 244903 - RNA, 22 nt, Human
agcuguguguuuccacugagcu

SEQ ID NO: 244904 - RNA, 22 nt, Human
agcagcagaagggagacccagg

SEQ ID NO: 244905 - RNA, 22 nt, Human
aaauuuguucaaugucuauuug

SEQ ID NO: 244906 - RNA, 22 nt, Human
ggcaccuguguaagaucuggaa

SEQ ID NO: 244907 - RNA, 22 nt, Human
ucacaggguuuggaagccuccu

SEQ ID NO: 244908 - RNA, 20 nt, Human
aggcugagggugauuguguc

SEQ ID NO: 244909 - RNA, 22 nt, Human
caggacaggaguggggucaaag

SEQ ID NO: 244910 - RNA, 22 nt, Human
acaguaacaccuacucuguccc

SEQ ID NO: 244911 - RNA, 18 nt, Human
gcaacaguaucagcaggc

SEQ ID NO: 244912 - RNA, 22 nt, Human
agggcagcggugcuuguguuau

SEQ ID NO: 244913 - RNA, 22 nt, Human
aucuuagaaguuugauaaaauc

SEQ ID NO: 244914 - RNA, 22 nt, Human
gaggagcugagccacguccugg

SEQ ID NO: 244915 - RNA, 22 nt, Human
ugacugaggcagccugaguuau

SEQ ID NO: 244916 - RNA, 22 nt, Human
uuuauucacuucagugccaaag

SEQ ID NO: 244917 - RNA, 22 nt, Human
guggggugcagcaguacugugu

SEQ ID NO: 244918 - RNA, 22 nt, Human
aagucucuggugaugcaggaaa

SEQ ID NO: 244919 - RNA, 22 nt, Human
aggccugggucucgugccuacc

SEQ ID NO: 244920 - RNA, 22 nt, Human
aagcaauaggguaaucuacuca

SEQ ID NO: 244921 - RNA, 19 nt, Human
aaggaauggcuuuaaguag

SEQ ID NO: 244922 - RNA, 22 nt, Human
aagaauguucuuguagucauga

SEQ ID NO: 244923 - RNA, 22 nt, Human
aagugcugggauuacaagcgug

SEQ ID NO: 244924 - RNA, 22 nt, Human
ugaggcaagcugggcccaugga

SEQ ID NO: 244925 - RNA, 19 nt, Human
ugugauaguugaaccugcc

SEQ ID NO: 244926 - RNA, 20 nt, Human
uuuaucaggcacuuacuauu

SEQ ID NO: 244927 - RNA, 22 nt, Human
uuaggaaucaccugcagaucuu

SEQ ID NO: 244928 - RNA, 23 nt, Human
uccucaguauauaaaggcagaug

SEQ ID NO: 244929 - RNA, 22 nt, Human
uugcuuugccaccagaagucua

SEQ ID NO: 244930 - RNA, 22 nt, Human
aucuuucucugcacuauacaau

SEQ ID NO: 244931 - RNA, 19 nt, Human
agacacaucacauuucucc

SEQ ID NO: 244932 - RNA, 21 nt, Human
uggcggggacuuguggcugcc

SEQ ID NO: 244933 - RNA, 22 nt, Human
uugcagcugcaguaaauguuca

SEQ ID NO: 244934 - RNA, 22 nt, Human
cagcugaagagaggugcugagu

SEQ ID NO: 244935 - RNA, 22 nt, Human
uggauuaguuaagaaauguuag

SEQ ID NO: 244936 - RNA, 22 nt, Human
auccuggguuugugaguuuaug

SEQ ID NO: 244937 - RNA, 23 nt, Human
augggcuuagaaagcaaguggga

SEQ ID NO: 244938 - RNA, 22 nt, Human
aacaugcugccuuucuacgagu

SEQ ID NO: 244939 - RNA, 22 nt, Human
cucugcccucacuuggggccug

SEQ ID NO: 244940 - RNA, 21 nt, Human
ugcuggguuugcccaucaggc

SEQ ID NO: 244941 - RNA, 22 nt, Human
cagagacaggagugcucccagu

SEQ ID NO: 244942 - RNA, 22 nt, Human
uugugucccugcggcugaggag

SEQ ID NO: 244943 - RNA, 22 nt, Human
uuguguccuaacaucuaguuaa

SEQ ID NO: 244944 - RNA, 22 nt, Human
cagggccuuguucaggagugaa

SEQ ID NO: 244945 - RNA, 20 nt, Human
cagagcagugcccaggcggc

SEQ ID NO: 244946 - RNA, 22 nt, Human
agcagagaccauauagcccaga

SEQ ID NO: 244947 - RNA, 22 nt, Human
cauacauauguggaugucauau

SEQ ID NO: 244948 - RNA, 22 nt, Human
ggccaagauggaaggagagaug

SEQ ID NO: 244949 - RNA, 22 nt, Human
uuuaucagaaguuagagaaaga

SEQ ID NO: 244950 - RNA, 22 nt, Human
guggccagaaucuugaggccuu

SEQ ID NO: 244951 - RNA, 22 nt, Human
uucugggagagaaagggccuug

SEQ ID NO: 244952 - RNA, 22 nt, Human
uccaccccugggaaugucaaua

SEQ ID NO: 244953 - RNA, 22 nt, Human
gcucuguaugagggugagagau

SEQ ID NO: 244954 - RNA, 22 nt, Human
cugaacuuauugagugcuugcu

SEQ ID NO: 244955 - RNA, 22 nt, Human
acaaugcuugguuuuucuagaa

SEQ ID NO: 244956 - RNA, 22 nt, Human
cugucccacaagcagugugcac

SEQ ID NO: 244957 - RNA, 22 nt, Human
ucccugggacggccuuuuggag

SEQ ID NO: 244958 - RNA, 22 nt, Human
gcuggccauagaagccaaagag

SEQ ID NO: 244959 - RNA, 22 nt, Human
ugggccaguuucucauugaaau

SEQ ID NO: 244960 - RNA, 18 nt, Human
gcaaggcucaggccaggc

SEQ ID NO: 244961 - RNA, 22 nt, Human
uugcaaaugugguuagggcuuu

SEQ ID NO: 244962 - RNA, 22 nt, Human
cuuggaauggggcagaaaaugg

SEQ ID NO: 244963 - RNA, 22 nt, Human
ucuuuccccuacauuugguuaa

SEQ ID NO: 244964 - RNA, 22 nt, Human
uccaaauucuagggccuugguu

SEQ ID NO: 244965 - RNA, 22 nt, Human
aggaggaaaaaggccacagcaa

SEQ ID NO: 244966 - RNA, 22 nt, Human
caauagaaggcacagauaggua

SEQ ID NO: 244967 - RNA, 19 nt, Human
ggccagccaccucgccugg

SEQ ID NO: 244968 - RNA, 22 nt, Human
cuugcaugcauuugaagaucau

SEQ ID NO: 244969 - RNA, 22 nt, Human
acagcugcacacugaacuuggu

SEQ ID NO: 244970 - RNA, 22 nt, Human
ggugggacagguaggaguggcu

SEQ ID NO: 244971 - RNA, 22 nt, Human
cacauuuaagcagauguggacc

SEQ ID NO: 244972 - RNA, 22 nt, Human
uuagcuuuccuacuaauaaaua

SEQ ID NO: 244973 - RNA, 23 nt, Human
gcugugcacgagccacugccugu

SEQ ID NO: 244974 - RNA, 22 nt, Human
ugauacagaauugauaucugag

SEQ ID NO: 244975 - RNA, 22 nt, Human
gacuuuauuuuaacggagauuc

SEQ ID NO: 244976 - RNA, 22 nt, Human
ccuucaggucauauaugucaga

SEQ ID NO: 244977 - RNA, 22 nt, Human
gucaucuucucucagcccaggc

SEQ ID NO: 244978 - RNA, 22 nt, Human
gagcuucccucugcagucccug

SEQ ID NO: 244979 - RNA, 22 nt, Human
aaguaaaauucaaucuucacug

SEQ ID NO: 244980 - RNA, 22 nt, Human
aggcagauuuucuuuacucagu

SEQ ID NO: 244981 - RNA, 22 nt, Human
ugccugaacaugaauaguuuau

SEQ ID NO: 244982 - RNA, 22 nt, Human
aggcugcccugccgccaguggg

SEQ ID NO: 244983 - RNA, 22 nt, Human
guuauguaugagggaaugauua

SEQ ID NO: 244984 - RNA, 22 nt, Human
uuguguccaaggcuauggugau

SEQ ID NO: 244985 - RNA, 22 nt, Human
ugugcugggaaauggcaggaua

SEQ ID NO: 244986 - RNA, 21 nt, Human
acuuuacaauuuacauaguga

SEQ ID NO: 244987 - RNA, 22 nt, Human
ugggugggagcgcccugucugg

SEQ ID NO: 244988 - RNA, 22 nt, Human
gcaggugggggagaaguuguga

SEQ ID NO: 244989 - RNA, 22 nt, Human
gagcagugagugaauguugccu

SEQ ID NO: 244990 - RNA, 22 nt, Human
cagagggcuucagguucaggau

SEQ ID NO: 244991 - RNA, 22 nt, Human
caggaacagaguggcauugucu

SEQ ID NO: 244992 - RNA, 22 nt, Human
auuuuaguuuuagcauccaugc

SEQ ID NO: 244993 - RNA, 22 nt, Human
gcagccaggggcugugaccugu

SEQ ID NO: 244994 - RNA, 22 nt, Human
uggaccacucuggugcccaugu

SEQ ID NO: 244995 - RNA, 22 nt, Human
gcaggugucugacugccuucuu

SEQ ID NO: 244996 - RNA, 22 nt, Human
ugcaaauagccugaugaaagaa

SEQ ID NO: 244997 - RNA, 22 nt, Human
aaucagaaaauucaguggaauu

SEQ ID NO: 244998 - RNA, 22 nt, Human
ucugugcacuaacauuccuggu

SEQ ID NO: 244999 - RNA, 20 nt, Human
gaauuuuaugaacacuacca

SEQ ID NO: 245000 - RNA, 22 nt, Human
gugucugcuugcugagcauuua

SEQ ID NO: 245001 - RNA, 22 nt, Human
gcuuuagauagauuuagucuuu

SEQ ID NO: 245002 - RNA, 22 nt, Human
gaugagucauucacagucguga

SEQ ID NO: 245003 - RNA, 22 nt, Human
aaauuaacuaucacuuuuguga

SEQ ID NO: 245004 - RNA, 22 nt, Human
gaauguuagagauucuuagguu

SEQ ID NO: 245005 - RNA, 22 nt, Human
gccucagugauaugugggacaa

SEQ ID NO: 245006 - RNA, 22 nt, Human
gucaggaaaaauugauaauuuu

SEQ ID NO: 245007 - RNA, 22 nt, Human
uaagcccacauuuuucugaaga

SEQ ID NO: 245008 - RNA, 22 nt, Human
aggcucugaguagagcugccag

SEQ ID NO: 245009 - RNA, 22 nt, Human
ucaaauaccagcaauuucaugu

SEQ ID NO: 245010 - RNA, 22 nt, Human
cccaggccccagggcuugucag

SEQ ID NO: 245011 - RNA, 22 nt, Human
uguacagacuguauuuacaagu

SEQ ID NO: 245012 - RNA, 22 nt, Human
ucuuuaaaguuggagcuugcaa

SEQ ID NO: 245013 - RNA, 22 nt, Human
ucucuucuuguguuuuccugcc

SEQ ID NO: 245014 - RNA, 22 nt, Human
ugagagccaggaucugcucuau

SEQ ID NO: 245015 - RNA, 22 nt, Human
augaugucuaucuuuguaguau

SEQ ID NO: 245016 - RNA, 22 nt, Human
cagagacccuucucaguggcca

SEQ ID NO: 245017 - RNA, 22 nt, Human
gcuggcagaauuucuucuugcu

SEQ ID NO: 245018 - RNA, 22 nt, Human
auaauggcuucugaguauuagg

SEQ ID NO: 245019 - RNA, 19 nt, Human
acucugagcuugcucuauc

SEQ ID NO: 245020 - RNA, 22 nt, Human
ccuggcugugcauugccggccc

SEQ ID NO: 245021 - RNA, 22 nt, Human
agaugcugggaggcugagugca

SEQ ID NO: 245022 - RNA, 22 nt, Human
uauacaaugaguacauucuggg

SEQ ID NO: 245023 - RNA, 22 nt, Human
uccugacucugguguccucuac

SEQ ID NO: 245024 - RNA, 22 nt, Human
cuuuaauuaggaaguauaauga

SEQ ID NO: 245025 - RNA, 22 nt, Human
aaguucaagcucugccuaaaau

SEQ ID NO: 245026 - RNA, 22 nt, Human
uuuaucugaaaaaacucuugga

SEQ ID NO: 245027 - RNA, 22 nt, Human
agaggugacauaggagaggcuc

SEQ ID NO: 245028 - RNA, 22 nt, Human
gacagcaguuuuucucuagggu

SEQ ID NO: 245029 - RNA, 22 nt, Human
ugaucugguccuacugugggca

SEQ ID NO: 245030 - RNA, 22 nt, Human
ccugaggaugccagcaugggug

SEQ ID NO: 245031 - RNA, 22 nt, Human
aaagauacuuaauaguugucug

SEQ ID NO: 245032 - RNA, 22 nt, Human
uguaauuaacguucuuguuaga

SEQ ID NO: 245033 - RNA, 22 nt, Human
gcugcuccgucugagcucuggu

SEQ ID NO: 245034 - RNA, 22 nt, Human
uaacagagugaaaaucagcaca

SEQ ID NO: 245035 - RNA, 23 nt, Human
ggcugggagcuccgggugcacgu

SEQ ID NO: 245036 - RNA, 22 nt, Human
caucuugaagguuucuuuagcu

SEQ ID NO: 245037 - RNA, 21 nt, Human
uaucaagauguuaugguugaa

SEQ ID NO: 245038 - RNA, 22 nt, Human
uauguguacaucugguugagca

SEQ ID NO: 245039 - RNA, 22 nt, Human
uaaaguguuguacaaauguaug

SEQ ID NO: 245040 - RNA, 22 nt, Human
uagaaucugaauguagagcuga

SEQ ID NO: 245041 - RNA, 22 nt, Human
gcuggcagagcucugggcuggg

SEQ ID NO: 245042 - RNA, 22 nt, Human
acagaucucaaagccuggaccc

SEQ ID NO: 245043 - RNA, 22 nt, Human
ccagagcugagggagccugagc

SEQ ID NO: 245044 - RNA, 22 nt, Human
ucuccagugaaucuccuccugg

SEQ ID NO: 245045 - RNA, 22 nt, Human
uucagagagaccaaguggcgug

SEQ ID NO: 245046 - RNA, 22 nt, Human
gcacacacaugugaguacaugc

SEQ ID NO: 245047 - RNA, 22 nt, Human
agcagggcuugccgcuuguccu

SEQ ID NO: 245048 - RNA, 22 nt, Human
ugcagaauguggacaguggguu

SEQ ID NO: 245049 - RNA, 22 nt, Human
ucuggcucaaaauacguacucu

SEQ ID NO: 245050 - RNA, 22 nt, Human
gccuucaguagugucagcugua

SEQ ID NO: 245051 - RNA, 21 nt, Human
ugagcaggugcugcuuuuaug

SEQ ID NO: 245052 - RNA, 21 nt, Human
ugagucuuuuaauaggugcac

SEQ ID NO: 245053 - RNA, 22 nt, Human
uagacagauuucuuguuagaca

SEQ ID NO: 245054 - RNA, 22 nt, Human
cugccuguuagucuagcaguua

SEQ ID NO: 245055 - RNA, 22 nt, Human
uauguauucucagauuuacuaa

SEQ ID NO: 245056 - RNA, 22 nt, Human
cuuaaacugggcauucagagaa

SEQ ID NO: 245057 - RNA, 22 nt, Human
uacaggugguaaaaauauuguu

SEQ ID NO: 245058 - RNA, 22 nt, Human
gugcagcugagggccucuucua

SEQ ID NO: 245059 - RNA, 22 nt, Human
cagaugcuaaguuaucagcagg

SEQ ID NO: 245060 - RNA, 22 nt, Human
uccugguggcuuucccugccuu

SEQ ID NO: 245061 - RNA, 22 nt, Human
acaauuccugagaauacuuguu

SEQ ID NO: 245062 - RNA, 22 nt, Human
ggaggccaucuggcuggaggcu

SEQ ID NO: 245063 - RNA, 22 nt, Human
cagcuggcugcaugaugccaaa

SEQ ID NO: 245064 - RNA, 22 nt, Human
cagagggugugaaggggaugaa

SEQ ID NO: 245065 - RNA, 22 nt, Human
ucagggcugcagaagaggcagg

SEQ ID NO: 245066 - RNA, 22 nt, Human
cagauucuucauucauucuaca

SEQ ID NO: 245067 - RNA, 22 nt, Human
augccuuuuuaucauggaugau

SEQ ID NO: 245068 - RNA, 22 nt, Human
agguaggauggguggagaugau

SEQ ID NO: 245069 - RNA, 19 nt, Human
cguccaggugcuggaagau

SEQ ID NO: 245070 - RNA, 22 nt, Human
ucuuugcagaauuuaacuuugc

SEQ ID NO: 245071 - RNA, 21 nt, Human
guucaaauggguagauucaca

SEQ ID NO: 245072 - RNA, 22 nt, Human
uagggcuguuuaaaagugaggu

SEQ ID NO: 245073 - RNA, 22 nt, Human
gacuuuggagcagaaagaaauu

SEQ ID NO: 245074 - RNA, 22 nt, Human
ccuggcaguucaucaaauggca

SEQ ID NO: 245075 - RNA, 22 nt, Human
aaagugcaguaacuugcccaag

SEQ ID NO: 245076 - RNA, 22 nt, Human
uaagaacaucuguccccagauu

SEQ ID NO: 245077 - RNA, 23 nt, Human
uacuacagggucuugcuaugaau

SEQ ID NO: 245078 - RNA, 22 nt, Human
ggagccaggcaaucuguacuuu

SEQ ID NO: 245079 - RNA, 22 nt, Human
uacacuauuuuacugauacaaa

SEQ ID NO: 245080 - RNA, 22 nt, Human
uccaggagugugugcuaauggg

SEQ ID NO: 245081 - RNA, 22 nt, Human
uuguguacuacaguaugccaca

SEQ ID NO: 245082 - RNA, 22 nt, Human
aaaguguacuaugucaugaaca

SEQ ID NO: 245083 - RNA, 22 nt, Human
ggccugcugcuaugacuuccug

SEQ ID NO: 245084 - RNA, 21 nt, Human
uuuagcauuuacauauuucca

SEQ ID NO: 245085 - RNA, 22 nt, Human
cacauuguagagauuagaaaga

SEQ ID NO: 245086 - RNA, 22 nt, Human
agagucuguuacuuguccccua

SEQ ID NO: 245087 - RNA, 22 nt, Human
gccagccacaagggaggcuugu

SEQ ID NO: 245088 - RNA, 22 nt, Human
cuuggcugcuuuugugcacauu

SEQ ID NO: 245089 - RNA, 22 nt, Human
uuacaaagaguguucuuuucca

SEQ ID NO: 245090 - RNA, 22 nt, Human
ccagacugagggucccugagcu

SEQ ID NO: 245091 - RNA, 22 nt, Human
ugggggugcccuaugaggaagc

SEQ ID NO: 245092 - RNA, 22 nt, Human
aucuuagacccuugguagaaaa

SEQ ID NO: 245093 - RNA, 22 nt, Human
cuguccucaacccauccuucuc

SEQ ID NO: 245094 - RNA, 22 nt, Human
uuccuggcugaacugaacuccu

SEQ ID NO: 245095 - RNA, 21 nt, Human
ggaagggcucugaggacggcu

SEQ ID NO: 245096 - RNA, 22 nt, Human
cagagcugcucaugguggccag

SEQ ID NO: 245097 - RNA, 20 nt, Human
acacuugacaccagaaaugg

SEQ ID NO: 245098 - RNA, 22 nt, Human
aucuuuagauuagaaacucuaa

SEQ ID NO: 245099 - RNA, 19 nt, Human
aaucuagaaauauguguuc

SEQ ID NO: 245100 - RNA, 22 nt, Human
gaaaaggccuccccauaggaau

SEQ ID NO: 245101 - RNA, 22 nt, Human
caaagucagggaagaguggcug

SEQ ID NO: 245102 - RNA, 22 nt, Human
uuggaaaguuuuuacugaagac

SEQ ID NO: 245103 - RNA, 22 nt, Human
agcacugauuuaaacuggauuu

SEQ ID NO: 245104 - RNA, 22 nt, Human
aaaugcacagaaaggaugugga

SEQ ID NO: 245105 - RNA, 22 nt, Human
gagugucaaggcucucuuuggc

SEQ ID NO: 245106 - RNA, 22 nt, Human
caguuacucaauaauucuugcg

SEQ ID NO: 245107 - RNA, 22 nt, Human
augaggcagcccuucccuucuc

SEQ ID NO: 245108 - RNA, 21 nt, Human
ccaggcuggccaugguauuga

SEQ ID NO: 245109 - RNA, 22 nt, Human
acauguguacauauauaugugc

SEQ ID NO: 245110 - RNA, 22 nt, Human
uugagggagauguugacuucag

SEQ ID NO: 245111 - RNA, 22 nt, Human
cuucguuuuuaguagcaauguu

SEQ ID NO: 245112 - RNA, 21 nt, Human
uuucuuaucuguaaaguggga

SEQ ID NO: 245113 - RNA, 21 nt, Human
agcagcagggaagccucaucc

SEQ ID NO: 245114 - RNA, 22 nt, Human
cucagagcacaguuuaugacag

SEQ ID NO: 245115 - RNA, 22 nt, Human
uaaaugaagcucaugggccaca

SEQ ID NO: 245116 - RNA, 22 nt, Human
gcccagcaggacagagugguuu

SEQ ID NO: 245117 - RNA, 22 nt, Human
uuccuggccccauccaucuuca

SEQ ID NO: 245118 - RNA, 22 nt, Human
gagugggugacagaaggaggua

SEQ ID NO: 245119 - RNA, 22 nt, Human
ugaggcucauucugcaugccaa

SEQ ID NO: 245120 - RNA, 22 nt, Human
ggccgugcuccaaagucaucgu

SEQ ID NO: 245121 - RNA, 22 nt, Human
caacugagcaguagcgucugga

SEQ ID NO: 245122 - RNA, 22 nt, Human
cuggaggagagucugaaugaca

SEQ ID NO: 245123 - RNA, 19 nt, Human
gcaggguggcagagcucuu

SEQ ID NO: 245124 - RNA, 21 nt, Human
aggcccagagucuugggggga

SEQ ID NO: 245125 - RNA, 22 nt, Human
aauuuaagagcauagcuccaac

SEQ ID NO: 245126 - RNA, 19 nt, Human
uggaggagaggaaaaguca

SEQ ID NO: 245127 - RNA, 22 nt, Human
uuguacagaaacugcauuugga

SEQ ID NO: 245128 - RNA, 22 nt, Human
uccucagcauggaaucuggacu

SEQ ID NO: 245129 - RNA, 22 nt, Human
gaggaaaucauuccagaaaagg

SEQ ID NO: 245130 - RNA, 22 nt, Human
aagacccuucucugaggaggaa

SEQ ID NO: 245131 - RNA, 20 nt, Human
aguggccacugcagagaugc

SEQ ID NO: 245132 - RNA, 22 nt, Human
gagaagccgagucagcugagcc

SEQ ID NO: 245133 - RNA, 22 nt, Human
ucugagaggugaauucagcaaa

SEQ ID NO: 245134 - RNA, 22 nt, Human
accaucugaguagagagaagua

SEQ ID NO: 245135 - RNA, 22 nt, Human
gauggcuuccuucucacugugu

SEQ ID NO: 245136 - RNA, 22 nt, Human
acagauggagcuacuagguaaa

SEQ ID NO: 245137 - RNA, 22 nt, Human
acuacauuugcagagaagcaau

SEQ ID NO: 245138 - RNA, 23 nt, Human
aacugagauaauguauguaaagc

SEQ ID NO: 245139 - RNA, 22 nt, Human
caggcaugcuucugucugggca

SEQ ID NO: 245140 - RNA, 22 nt, Human
auaguugguccaugaaaaaagu

SEQ ID NO: 245141 - RNA, 22 nt, Human
aggcuccugcaggccuuguagg

SEQ ID NO: 245142 - RNA, 22 nt, Human
cuuuacuucagcaagcuuuccu

SEQ ID NO: 245143 - RNA, 22 nt, Human
uuuccucacuucaugagaguuu

SEQ ID NO: 245144 - RNA, 22 nt, Human
uccuucagaaccugugauggaa

SEQ ID NO: 245145 - RNA, 22 nt, Human
cugagcugguguuucaggguca

SEQ ID NO: 245146 - RNA, 22 nt, Human
ccuugcaguuguuacuguagcc

SEQ ID NO: 245147 - RNA, 22 nt, Human
uugcuaauuuaacuaccuuguu

SEQ ID NO: 245148 - RNA, 22 nt, Human
uauugguaucugagacagaguu

SEQ ID NO: 245149 - RNA, 22 nt, Human
gcaagaacugcaauuacuuuug

SEQ ID NO: 245150 - RNA, 22 nt, Human
aggcucagaggugagcaucugc

SEQ ID NO: 245151 - RNA, 22 nt, Human
caaauacaaauacgggcagcuu

SEQ ID NO: 245152 - RNA, 22 nt, Human
auucuuucauauaaaggcucag

SEQ ID NO: 245153 - RNA, 22 nt, Human
acaucuuuuuucucuaauugug

SEQ ID NO: 245154 - RNA, 22 nt, Human
cauuucacgcacacucauuacu

SEQ ID NO: 245155 - RNA, 22 nt, Human
ucugaggauagaggcaauagga

SEQ ID NO: 245156 - RNA, 22 nt, Human
caggcagagugagaagcccuug

SEQ ID NO: 245157 - RNA, 22 nt, Human
ccugucuguccuuugcauucuu

SEQ ID NO: 245158 - RNA, 22 nt, Human
aaguucaagagugacauauuag

SEQ ID NO: 245159 - RNA, 20 nt, Human
aauuagauguuuaaucaaua

SEQ ID NO: 245160 - RNA, 18 nt, Human
ugccagccgacuggccug

SEQ ID NO: 245161 - RNA, 22 nt, Human
aaaauagcaugaaaggccuuug

SEQ ID NO: 245162 - RNA, 22 nt, Human
uguguccugugcaaggggauga

SEQ ID NO: 245163 - RNA, 22 nt, Human
cuccaggccauggcugcggagg

SEQ ID NO: 245164 - RNA, 22 nt, Human
agcugcuccaacccagcgggcu

SEQ ID NO: 245165 - RNA, 22 nt, Human
acauuucaguaaguguuaauuu

SEQ ID NO: 245166 - RNA, 22 nt, Human
ugggaaggggagcuggaaagga

SEQ ID NO: 245167 - RNA, 22 nt, Human
ggccucugccccagccacaccu

SEQ ID NO: 245168 - RNA, 22 nt, Human
guguacauagaauugugcuuug

SEQ ID NO: 245169 - RNA, 22 nt, Human
acagcaacuccugcuucugagu

SEQ ID NO: 245170 - RNA, 22 nt, Human
uggcuucugcucccagaaugau

SEQ ID NO: 245171 - RNA, 22 nt, Human
ggugggcaacauuuggccugag

SEQ ID NO: 245172 - RNA, 22 nt, Human
gacaagacauugguaaagauau

SEQ ID NO: 245173 - RNA, 22 nt, Human
gaggauggaggcaguuagggcc

SEQ ID NO: 245174 - RNA, 22 nt, Human
caggcacacugucuacacugag

SEQ ID NO: 245175 - RNA, 22 nt, Human
auacacuucauguuuucaucug

SEQ ID NO: 245176 - RNA, 20 nt, Human
acagccagaggaggcagaca

SEQ ID NO: 245177 - RNA, 22 nt, Human
uagagaaaagcagggaucagga

SEQ ID NO: 245178 - RNA, 22 nt, Human
cuacaaaaguaauugugguuuu

SEQ ID NO: 245179 - RNA, 22 nt, Human
agcccaggugagggguucgaaa

SEQ ID NO: 245180 - RNA, 22 nt, Human
caggcugcaagaaaggcauuca

SEQ ID NO: 245181 - RNA, 22 nt, Human
uuacaagauaaccugaugcugu

SEQ ID NO: 245182 - RNA, 22 nt, Human
uagugaaacaguuaucaaucug

SEQ ID NO: 245183 - RNA, 18 nt, Human
uuaguauaacugccugug

SEQ ID NO: 245184 - RNA, 22 nt, Human
gaacaacuccaagggacaucau

SEQ ID NO: 245185 - RNA, 22 nt, Human
ccaggccuguguuguguggagg

SEQ ID NO: 245186 - RNA, 22 nt, Human
gaagcuuugagagcagaagccc

SEQ ID NO: 245187 - RNA, 22 nt, Human
cacagaggaugcccaagcgauc

SEQ ID NO: 245188 - RNA, 22 nt, Human
uuucuucagccuucacaaccug

SEQ ID NO: 245189 - RNA, 22 nt, Human
ccugggcuggaguacagcagug

SEQ ID NO: 245190 - RNA, 22 nt, Human
cagggcagaaggcacucuacuc

SEQ ID NO: 245191 - RNA, 22 nt, Human
agugucagccugggcaaggaac

SEQ ID NO: 245192 - RNA, 22 nt, Human
ucaucuguucauacacaugcgu

SEQ ID NO: 245193 - RNA, 22 nt, Human
uauaucugggaaccaaaggggg

SEQ ID NO: 245194 - RNA, 22 nt, Human
aagagcauuuuguaaaauccuu

SEQ ID NO: 245195 - RNA, 20 nt, Human
agcaccagugggggcagccc

SEQ ID NO: 245196 - RNA, 22 nt, Human
ggcagcugugaagugccucaca

SEQ ID NO: 245197 - RNA, 21 nt, Human
aggcaggauucaaacacagag

SEQ ID NO: 245198 - RNA, 22 nt, Human
aaagcaaugaugguagacacgu

SEQ ID NO: 245199 - RNA, 22 nt, Human
uggcuucuagcaguguugauuu

SEQ ID NO: 245200 - RNA, 22 nt, Human
cugggggccuuacggaacucca

SEQ ID NO: 245201 - RNA, 22 nt, Human
ccugggcuuuggaacaguacuu

SEQ ID NO: 245202 - RNA, 22 nt, Human
ccagcugucugguuccagagcc

SEQ ID NO: 245203 - RNA, 22 nt, Human
cucugcugcaggaaggcgugca

SEQ ID NO: 245204 - RNA, 22 nt, Human
ucuccaggcacuaccuggguaa

SEQ ID NO: 245205 - RNA, 22 nt, Human
uacugaaaguggucaacagugg

SEQ ID NO: 245206 - RNA, 22 nt, Human
ugcuuuauucagucucugccau

SEQ ID NO: 245207 - RNA, 22 nt, Human
uuggagucagaugacuguagga

SEQ ID NO: 245208 - RNA, 22 nt, Human
agaggccaggcugcagagggau

SEQ ID NO: 245209 - RNA, 17 nt, Human
uuuauaauuggccucuu

SEQ ID NO: 245210 - RNA, 22 nt, Human
ugagcuuucauguaugaaaaga

SEQ ID NO: 245211 - RNA, 22 nt, Human
ggaagaaaugcucuucuaugcg

SEQ ID NO: 245212 - RNA, 17 nt, Human
uccaggcauaucuccua

SEQ ID NO: 245213 - RNA, 22 nt, Human
gcuuucuguggugauguaaagg

SEQ ID NO: 245214 - RNA, 22 nt, Human
cucuggagugcagccugguggc

SEQ ID NO: 245215 - RNA, 23 nt, Human
uucugggcuguggaagccucggg

SEQ ID NO: 245216 - RNA, 22 nt, Human
uuucaaagcaacugaaaaggaa

SEQ ID NO: 245217 - RNA, 22 nt, Human
ccaugagccaggcugaggaagc

SEQ ID NO: 245218 - RNA, 22 nt, Human
aagaugugcaguucauggcagg

SEQ ID NO: 245219 - RNA, 22 nt, Human
cuucccacuaaagcccuuguug

SEQ ID NO: 245220 - RNA, 22 nt, Human
caguuaaaggcccaauaucugg

SEQ ID NO: 245221 - RNA, 22 nt, Human
gcccagcacaucuggccuugaa

SEQ ID NO: 245222 - RNA, 22 nt, Human
agagacagacacaucgggcugc

SEQ ID NO: 245223 - RNA, 23 nt, Human
cacaugaccugaccuaggcuagg

SEQ ID NO: 245224 - RNA, 22 nt, Human
gaucugaaucaauagaauaacu

SEQ ID NO: 245225 - RNA, 22 nt, Human
acacauaucuaagauagaugac

SEQ ID NO: 245226 - RNA, 22 nt, Human
ggagcagagcugggcuuggcug

SEQ ID NO: 245227 - RNA, 22 nt, Human
uuggcucauuaaagaugauaau

SEQ ID NO: 245228 - RNA, 22 nt, Human
aagaaacuggaauauagagagc

SEQ ID NO: 245229 - RNA, 23 nt, Human
ggaggcacuuaggcagagcagag

SEQ ID NO: 245230 - RNA, 22 nt, Human
cagcucugaggaacacuccuuu

SEQ ID NO: 245231 - RNA, 22 nt, Human
agguguccaauccugguuggau

SEQ ID NO: 245232 - RNA, 22 nt, Human
ccuggccagcgccggcugcucg

SEQ ID NO: 245233 - RNA, 22 nt, Human
cugggaggacaacuuggagcuc

SEQ ID NO: 245234 - RNA, 22 nt, Human
cugccccagugccaggcaggug

SEQ ID NO: 245235 - RNA, 22 nt, Human
gcugcccugcaucugugccuuc

SEQ ID NO: 245236 - RNA, 22 nt, Human
uacauuuacagagccuucucug

SEQ ID NO: 245237 - RNA, 22 nt, Human
ccagggcaggggcuggaguuca

SEQ ID NO: 245238 - RNA, 22 nt, Human
gagccaggguuugaaacuagac

SEQ ID NO: 245239 - RNA, 22 nt, Human
guauaucagacacucauaugua

SEQ ID NO: 245240 - RNA, 22 nt, Human
agacacagaaguugcuguuggg

SEQ ID NO: 245241 - RNA, 22 nt, Human
agguccaggauuuguggggucu

SEQ ID NO: 245242 - RNA, 22 nt, Human
ucaccugggagggcugugguag

SEQ ID NO: 245243 - RNA, 22 nt, Human
uauagacaagcguaacaagaag

SEQ ID NO: 245244 - RNA, 23 nt, Human
uaagaacagacaagcauuuacau

SEQ ID NO: 245245 - RNA, 22 nt, Human
gaaggccauugcguccugggau

SEQ ID NO: 245246 - RNA, 22 nt, Human
uuugacauggaauaacucauuu

SEQ ID NO: 245247 - RNA, 22 nt, Human
ucaagacaggguuuaagguuga

SEQ ID NO: 245248 - RNA, 22 nt, Human
cagaaaccugucuggaguggga

SEQ ID NO: 245249 - RNA, 22 nt, Human
agcuucaggaacaggcagccug

SEQ ID NO: 245250 - RNA, 22 nt, Human
uuuauucuagcucagaauaguu

SEQ ID NO: 245251 - RNA, 22 nt, Human
ucacagacauggugagguaaca

SEQ ID NO: 245252 - RNA, 21 nt, Human
acaaauuguuuauauaggaag

SEQ ID NO: 245253 - RNA, 22 nt, Human
ccacauuuuugauacucucacu

SEQ ID NO: 245254 - RNA, 22 nt, Human
uuccuagggcagagccgcuggg

SEQ ID NO: 245255 - RNA, 19 nt, Human
auucauuggccaggguggu

SEQ ID NO: 245256 - RNA, 23 nt, Human
ccauucccacugugccuucccug

SEQ ID NO: 245257 - RNA, 22 nt, Human
uuucucuggcauuagguauaaa

SEQ ID NO: 245258 - RNA, 22 nt, Human
aaaagcagaucuccaaagucua

SEQ ID NO: 245259 - RNA, 22 nt, Human
agacccuugcagucugguuguc

SEQ ID NO: 245260 - RNA, 22 nt, Human
ucuccaaacucagacuaaguau

SEQ ID NO: 245261 - RNA, 22 nt, Human
agcugcaaaccaggccggcgcg

SEQ ID NO: 245262 - RNA, 22 nt, Human
uauuugauagagauaaaugaua

SEQ ID NO: 245263 - RNA, 22 nt, Human
auauauuguaucuuucaugggg

SEQ ID NO: 245264 - RNA, 21 nt, Human
uguuuacucccugcaagcacg

SEQ ID NO: 245265 - RNA, 22 nt, Human
uaaagacaaaugacauuacggc

SEQ ID NO: 245266 - RNA, 22 nt, Human
cugaagggucuggggcugugcc

SEQ ID NO: 245267 - RNA, 22 nt, Human
agucuccuuggccucaaugccu

SEQ ID NO: 245268 - RNA, 22 nt, Human
ugccugccacgcuugcuaccac

SEQ ID NO: 245269 - RNA, 22 nt, Human
uaagauguuuugguuugauaag

SEQ ID NO: 245270 - RNA, 22 nt, Human
uagagcaguuggcagcuguauu

SEQ ID NO: 245271 - RNA, 22 nt, Human
caguggcacccacgggcugggc

SEQ ID NO: 245272 - RNA, 22 nt, Human
cuccucagaagaggguaacaca

SEQ ID NO: 245273 - RNA, 22 nt, Human
ugauuucucuccguuauuucag

SEQ ID NO: 245274 - RNA, 22 nt, Human
ugcuuaaaaugaugauuauuuu

SEQ ID NO: 245275 - RNA, 22 nt, Human
caucuuugagacagcauuaccc

SEQ ID NO: 245276 - RNA, 22 nt, Human
cuucuuaacuguauauacuaug

SEQ ID NO: 245277 - RNA, 22 nt, Human
uggcuucuggcuggugagaaau

SEQ ID NO: 245278 - RNA, 22 nt, Human
uaucuauaaguacuaacauggu

SEQ ID NO: 245279 - RNA, 22 nt, Human
caggguccaucuuucaucacug

SEQ ID NO: 245280 - RNA, 22 nt, Human
uccuggacaagcccuucacccu

SEQ ID NO: 245281 - RNA, 20 nt, Human
cuguuuauuagaaguggauu

SEQ ID NO: 245282 - RNA, 22 nt, Human
guggaggaagggauucagacca

SEQ ID NO: 245283 - RNA, 22 nt, Human
cccagcugauuuuugcagagau

SEQ ID NO: 245284 - RNA, 22 nt, Human
cuccaggaaagccugaggcccg

SEQ ID NO: 245285 - RNA, 22 nt, Human
gggaucuugaaacagcuggauu

SEQ ID NO: 245286 - RNA, 22 nt, Human
cucacauucacaggacagaagg

SEQ ID NO: 245287 - RNA, 22 nt, Human
cagcccuguccaaugucugcuc

SEQ ID NO: 245288 - RNA, 22 nt, Human
agcucagaacugcagacaugug

SEQ ID NO: 245289 - RNA, 22 nt, Human
acaggaaauuggcauaucaguu

SEQ ID NO: 245290 - RNA, 22 nt, Human
gcaggaagccuuaccaagccca

SEQ ID NO: 245291 - RNA, 22 nt, Human
aaaggcuucacuuauuuauuuu

SEQ ID NO: 245292 - RNA, 22 nt, Human
caagagacuuauguggaaaccu

SEQ ID NO: 245293 - RNA, 22 nt, Human
ugagaacugaggauuugaauuc

SEQ ID NO: 245294 - RNA, 19 nt, Human
cuggucugcugcuuccagg

SEQ ID NO: 245295 - RNA, 22 nt, Human
aggguggcacugguggcucuau

SEQ ID NO: 245296 - RNA, 22 nt, Human
uggucucuucuuccaagauggc

SEQ ID NO: 245297 - RNA, 22 nt, Human
ugccugccuaggaagcugugaa

SEQ ID NO: 245298 - RNA, 22 nt, Human
gucaggccaauacucuccagca

SEQ ID NO: 245299 - RNA, 22 nt, Human
aauugcuuuucaaggguacagc

SEQ ID NO: 245300 - RNA, 22 nt, Human
aacugcaauuacuuuugcacua

SEQ ID NO: 245301 - RNA, 19 nt, Human
uagugucaaggaggagggu

SEQ ID NO: 245302 - RNA, 22 nt, Human
uugugcagaguugccuuuauuu

SEQ ID NO: 245303 - RNA, 22 nt, Human
uugugcaugacugugaauagcu

SEQ ID NO: 245304 - RNA, 22 nt, Human
ucaggauggagggaagcacaga

SEQ ID NO: 245305 - RNA, 22 nt, Human
cuacagaaacacuggacaugug

SEQ ID NO: 245306 - RNA, 22 nt, Human
acagaauugaaaguauaaucug

SEQ ID NO: 245307 - RNA, 22 nt, Human
gacauguugaagaauauuugga

SEQ ID NO: 245308 - RNA, 22 nt, Human
agguaaagacagugaaagaggg

SEQ ID NO: 245309 - RNA, 22 nt, Human
ucuuugcauuccugugugcuuu

SEQ ID NO: 245310 - RNA, 22 nt, Human
auaaacucaugcugaaaaccca

SEQ ID NO: 245311 - RNA, 22 nt, Human
ggcaggugccuucugugcuagc

SEQ ID NO: 245312 - RNA, 22 nt, Human
gaaagucauggaugaacacuac

SEQ ID NO: 245313 - RNA, 22 nt, Human
ugcugccaccugguggcugaag

SEQ ID NO: 245314 - RNA, 22 nt, Human
guucaaauggcugcaguuacca

SEQ ID NO: 245315 - RNA, 22 nt, Human
acaaauuucauaggcaaauuuu

SEQ ID NO: 245316 - RNA, 22 nt, Human
cccaggcagcccuucugacgca

SEQ ID NO: 245317 - RNA, 22 nt, Human
auacacauuacuuucugucuga

SEQ ID NO: 245318 - RNA, 19 nt, Human
cuucuggcccugagccacc

SEQ ID NO: 245319 - RNA, 22 nt, Human
uacacagugaguccucucugcc

SEQ ID NO: 245320 - RNA, 22 nt, Human
acaugcaaagccacaggacccg

SEQ ID NO: 245321 - RNA, 20 nt, Human
cuggcccaggaugauggcgc

SEQ ID NO: 245322 - RNA, 22 nt, Human
uugaaugauuaaagucaucuga

SEQ ID NO: 245323 - RNA, 22 nt, Human
agggccaguauuaagguaauua

SEQ ID NO: 245324 - RNA, 22 nt, Human
ugaggcaggagguugagaacug

SEQ ID NO: 245325 - RNA, 22 nt, Human
ugccuucuugaauaugguucuu

SEQ ID NO: 245326 - RNA, 22 nt, Human
uaacagaguaacagguauguaa

SEQ ID NO: 245327 - RNA, 22 nt, Human
cuuucaaagaccuuggcauggg

SEQ ID NO: 245328 - RNA, 23 nt, Human
cagagcugauuaaacuuaaucuc

SEQ ID NO: 245329 - RNA, 22 nt, Human
uacauucagagaaaguuuccau

SEQ ID NO: 245330 - RNA, 22 nt, Human
agagccuugcucuaaauuucuc

SEQ ID NO: 245331 - RNA, 22 nt, Human
aggcucagccccugggaggaga

SEQ ID NO: 245332 - RNA, 22 nt, Human
aaaugcacucugcuucugugac

SEQ ID NO: 245333 - RNA, 22 nt, Human
ccucagagguguggcaucucug

SEQ ID NO: 245334 - RNA, 22 nt, Human
cucugggugucuuaggagcuca

SEQ ID NO: 245335 - RNA, 22 nt, Human
cugcccaccacaccugcuccug

SEQ ID NO: 245336 - RNA, 22 nt, Human
aguccugguucugauucugaca

SEQ ID NO: 245337 - RNA, 22 nt, Human
ggugacauaguuacuucaggcu

SEQ ID NO: 245338 - RNA, 22 nt, Human
uuugucuucccccuuuaaucag

SEQ ID NO: 245339 - RNA, 22 nt, Human
uucuuaagucaguaagaugcaa

SEQ ID NO: 245340 - RNA, 23 nt, Human
ucugggcugagacuuggaagguc

SEQ ID NO: 245341 - RNA, 22 nt, Human
uaugccagggacuguuucacca

SEQ ID NO: 245342 - RNA, 22 nt, Human
ccuggcagucaggggaguccuu

SEQ ID NO: 245343 - RNA, 22 nt, Human
aguggaaggucaggggacagug

SEQ ID NO: 245344 - RNA, 22 nt, Human
gagacaggauuuaaccaaagcu

SEQ ID NO: 245345 - RNA, 22 nt, Human
ucaucucucaggauaccagcag

SEQ ID NO: 245346 - RNA, 22 nt, Human
aggcuugguuaauucuguguga

SEQ ID NO: 245347 - RNA, 22 nt, Human
uaagaugagguagguaagacuu

SEQ ID NO: 245348 - RNA, 22 nt, Human
cagguugaaaguggaggagcua

SEQ ID NO: 245349 - RNA, 22 nt, Human
cagcucuuuacucugcaaugau

SEQ ID NO: 245350 - RNA, 23 nt, Human
agggguggucaguacccgcagug

SEQ ID NO: 245351 - RNA, 22 nt, Human
ccugugaguuuacauucuggcc

SEQ ID NO: 245352 - RNA, 22 nt, Human
aacaucucagaagugacccuga

SEQ ID NO: 245353 - RNA, 22 nt, Human
cauggcagcaauuuuccugacu

SEQ ID NO: 245354 - RNA, 22 nt, Human
uucucagagcacugcugacaaa

SEQ ID NO: 245355 - RNA, 22 nt, Human
cuacauuaaauuggcuuacuua

SEQ ID NO: 245356 - RNA, 22 nt, Human
ugucaaacugugacuucuaaug

SEQ ID NO: 245357 - RNA, 22 nt, Human
accagagcuuacaugcuagaaa

SEQ ID NO: 245358 - RNA, 22 nt, Human
gacuggggcucuagccaggccu

SEQ ID NO: 245359 - RNA, 22 nt, Human
acucagagcagagcagccugag

SEQ ID NO: 245360 - RNA, 22 nt, Human
cccaaagguugaggcugcagug

SEQ ID NO: 245361 - RNA, 22 nt, Human
aguuagagacacaugcacaugc

SEQ ID NO: 245362 - RNA, 22 nt, Human
agguuaaaaaggauucaguuaa

SEQ ID NO: 245363 - RNA, 22 nt, Human
uggcuucuuacuagggcucagu

SEQ ID NO: 245364 - RNA, 22 nt, Human
gcccagcuuuucacuuccacac

SEQ ID NO: 245365 - RNA, 19 nt, Human
ccaugccaucauuuuaaag

SEQ ID NO: 245366 - RNA, 22 nt, Human
agcaguggcauacauuuugagu

SEQ ID NO: 245367 - RNA, 22 nt, Human
uucauugagugguuuauucuaa

SEQ ID NO: 245368 - RNA, 22 nt, Human
auauuuaaacaggguaccaaua

SEQ ID NO: 245369 - RNA, 21 nt, Human
ggcaacagauauuuugcuuag

SEQ ID NO: 245370 - RNA, 22 nt, Human
agagaugcuguggguagaggca

SEQ ID NO: 245371 - RNA, 22 nt, Human
cauuucaauuauuugcucuucu

SEQ ID NO: 245372 - RNA, 22 nt, Human
uaagaggcaaaagauacucaga

SEQ ID NO: 245373 - RNA, 20 nt, Human
gggguuggcuggcacaggga

SEQ ID NO: 245374 - RNA, 22 nt, Human
gaggugucaucaggcagcucug

SEQ ID NO: 245375 - RNA, 22 nt, Human
gugugacuuuauuuggaaauag

SEQ ID NO: 245376 - RNA, 22 nt, Human
uggaugaguucaaugaggcaga

SEQ ID NO: 245377 - RNA, 22 nt, Human
cugggccuggagcccacgagcc

SEQ ID NO: 245378 - RNA, 22 nt, Human
agcauucaugaugacaacagga

SEQ ID NO: 245379 - RNA, 22 nt, Human
agcaagauuuuccuugaauguu

SEQ ID NO: 245380 - RNA, 20 nt, Human
acauggcauucccacguggu

SEQ ID NO: 245381 - RNA, 22 nt, Human
augaagucugccaaggaaaggc

SEQ ID NO: 245382 - RNA, 22 nt, Human
ucuccaggaaagacacuggacu

SEQ ID NO: 245383 - RNA, 15 nt, Human
uuggaggauguagua

SEQ ID NO: 245384 - RNA, 22 nt, Human
agcugcuguccuaggcacugua

SEQ ID NO: 245385 - RNA, 22 nt, Human
aggggacauuuagcaaugacua

SEQ ID NO: 245386 - RNA, 22 nt, Human
uuuaauuuguauuucuagaggg

SEQ ID NO: 245387 - RNA, 22 nt, Human
cuagggaaugagagacuggauc

SEQ ID NO: 245388 - RNA, 22 nt, Human
auggggagagccucugucccca

SEQ ID NO: 245389 - RNA, 22 nt, Human
augacaauacuucaauaagcug

SEQ ID NO: 245390 - RNA, 22 nt, Human
aagcucaggcuggaccuggcuu

SEQ ID NO: 245391 - RNA, 22 nt, Human
agaaaucaauaucuauauguug

SEQ ID NO: 245392 - RNA, 22 nt, Human
cugcuguggaugcaggaccuca

SEQ ID NO: 245393 - RNA, 21 nt, Human
uuacuucugcuuguuauuguc

SEQ ID NO: 245394 - RNA, 22 nt, Human
gauguuucaugcuagcaugugu

SEQ ID NO: 245395 - RNA, 22 nt, Human
agucucuugcuagaaucagcca

SEQ ID NO: 245396 - RNA, 23 nt, Human
agcaguuagggauacaaguuauc

SEQ ID NO: 245397 - RNA, 22 nt, Human
ugcauaaaacaugauuucugcu

SEQ ID NO: 245398 - RNA, 22 nt, Human
cuggccucacagaggcuaagcc

SEQ ID NO: 245399 - RNA, 22 nt, Human
uggaaacuagagugugggaagc

SEQ ID NO: 245400 - RNA, 21 nt, Human
ugcacuucaguggcuaaauuc

SEQ ID NO: 245401 - RNA, 22 nt, Human
uugcaaaugugaguuuagacug

SEQ ID NO: 245402 - RNA, 22 nt, Human
cagggagaggcaucauagggaa

SEQ ID NO: 245403 - RNA, 22 nt, Human
gauaaauugcacuuuuucuuac

SEQ ID NO: 245404 - RNA, 22 nt, Human
gcagcuuuaaacauuggaaaua

SEQ ID NO: 245405 - RNA, 22 nt, Human
gugcuggggguuucuguagguc

SEQ ID NO: 245406 - RNA, 22 nt, Human
ucuuuggcuugucuccucaguu

SEQ ID NO: 245407 - RNA, 22 nt, Human
uauauaacuacuauuuugcuca

SEQ ID NO: 245408 - RNA, 22 nt, Human
uggacaguuacugagcuugagu

SEQ ID NO: 245409 - RNA, 21 nt, Human
aaacugaccuugccugagaca

SEQ ID NO: 245410 - RNA, 22 nt, Human
agcuccucuagaucugccacuu

SEQ ID NO: 245411 - RNA, 22 nt, Human
ugcagcugggucugcccuggcu

SEQ ID NO: 245412 - RNA, 22 nt, Human
uguguccuuucuuaagagugag

SEQ ID NO: 245413 - RNA, 22 nt, Human
gucugcccuggggcaucaguuu

SEQ ID NO: 245414 - RNA, 22 nt, Human
aaaauccucuaauucuagaaua

SEQ ID NO: 245415 - RNA, 22 nt, Human
uggcauuuggcuuacuuauguu

SEQ ID NO: 245416 - RNA, 22 nt, Human
aggaagcuuguguguauugguc

SEQ ID NO: 245417 - RNA, 22 nt, Human
cagccagagaaagggcacugcc

SEQ ID NO: 245418 - RNA, 22 nt, Human
ugcaaaaaggcagacuggugau

SEQ ID NO: 245419 - RNA, 22 nt, Human
cgggaggaaaggcgaggcucug

SEQ ID NO: 245420 - RNA, 22 nt, Human
gagccagcagccggcaccacca

SEQ ID NO: 245421 - RNA, 22 nt, Human
uuucuuuguaguagcauaauca

SEQ ID NO: 245422 - RNA, 22 nt, Human
gagcuggaggaccaggacuggg

SEQ ID NO: 245423 - RNA, 22 nt, Human
gcccaggaagugacucagaugu

SEQ ID NO: 245424 - RNA, 22 nt, Human
ugacaggugaaauguccuuauu

SEQ ID NO: 245425 - RNA, 22 nt, Human
gccuggcaaggcccuguugacu

SEQ ID NO: 245426 - RNA, 22 nt, Human
uucagauaaacuacaaauaauu

SEQ ID NO: 245427 - RNA, 22 nt, Human
aagggcagaauagagaagaugg

SEQ ID NO: 245428 - RNA, 22 nt, Human
cugcagagaguaacugaaauau

SEQ ID NO: 245429 - RNA, 22 nt, Human
uagggcucugcucaucaguugu

SEQ ID NO: 245430 - RNA, 22 nt, Human
uggggacaggagacuuacagcu

SEQ ID NO: 245431 - RNA, 23 nt, Human
ucugguacuauugcuguugagca

SEQ ID NO: 245432 - RNA, 22 nt, Human
cuucucaaaguugugaaucagg

SEQ ID NO: 245433 - RNA, 22 nt, Human
gguggcauaagaacacuaaaga

SEQ ID NO: 245434 - RNA, 22 nt, Human
augacaggaggcagcugggcag

SEQ ID NO: 245435 - RNA, 22 nt, Human
agagcacagaagaauaggugcu

SEQ ID NO: 245436 - RNA, 22 nt, Human
cugccuggaccggcagcccucc

SEQ ID NO: 245437 - RNA, 21 nt, Human
uagaagcacauagguucaaag

SEQ ID NO: 245438 - RNA, 22 nt, Human
uugcacccaguaguuuaaauuc

SEQ ID NO: 245439 - RNA, 22 nt, Human
ucucugguuaugucauuaagca

SEQ ID NO: 245440 - RNA, 22 nt, Human
cuuugcaaacgauuaccacaug

SEQ ID NO: 245441 - RNA, 22 nt, Human
cugcugagagccacguggcaca

SEQ ID NO: 245442 - RNA, 22 nt, Human
uagggaugacuaugauucccac

SEQ ID NO: 245443 - RNA, 22 nt, Human
guugucuuagucagaaauaugc

SEQ ID NO: 245444 - RNA, 22 nt, Human
uacauaauuaaucuuuaaguuc

SEQ ID NO: 245445 - RNA, 17 nt, Human
uaugaggcaguuuguga

SEQ ID NO: 245446 - RNA, 22 nt, Human
uguuuauaaauuuucuugccau

SEQ ID NO: 245447 - RNA, 22 nt, Human
ccucuggcauagcaaguggccu

SEQ ID NO: 245448 - RNA, 22 nt, Human
ugcauuaagguaauuguauaau

SEQ ID NO: 245449 - RNA, 22 nt, Human
gcugcccuagaaguacagagag

SEQ ID NO: 245450 - RNA, 22 nt, Human
gcacacaugcaugugugcaucc

SEQ ID NO: 245451 - RNA, 22 nt, Human
gcuagaaaucgacuucagaauu

SEQ ID NO: 245452 - RNA, 22 nt, Human
uaaagguagugugacauauugu

SEQ ID NO: 245453 - RNA, 20 nt, Human
aaugaguccugcuggaucac

SEQ ID NO: 245454 - RNA, 22 nt, Human
ccugccacuucuugcuauggag

SEQ ID NO: 245455 - RNA, 22 nt, Human
cuccucagcugggaggaguccc

SEQ ID NO: 245456 - RNA, 22 nt, Human
uuuaauugauucacagucugua

SEQ ID NO: 245457 - RNA, 23 nt, Human
uggacccugcacaccagcucuac

SEQ ID NO: 245458 - RNA, 22 nt, Human
gagguaacacuguucagugggc

SEQ ID NO: 245459 - RNA, 22 nt, Human
agcaaugcuuauugcugacuau

SEQ ID NO: 245460 - RNA, 22 nt, Human
ucacauuuuaucuauuuuaagu

SEQ ID NO: 245461 - RNA, 21 nt, Human
acagcagggcuggcaugacag

SEQ ID NO: 245462 - RNA, 18 nt, Human
ucugcccugccauucacu

SEQ ID NO: 245463 - RNA, 22 nt, Human
augagcucauccgagucacacu

SEQ ID NO: 245464 - RNA, 22 nt, Human
gaggcagcugggauacaaggga

SEQ ID NO: 245465 - RNA, 22 nt, Human
ugugggaaucagccaggggggc

SEQ ID NO: 245466 - RNA, 22 nt, Human
aacaugugagcagguuuuuuau

SEQ ID NO: 245467 - RNA, 20 nt, Human
gaggccucagccucagcucc

SEQ ID NO: 245468 - RNA, 23 nt, Human
uucagacugccuucagcauuguc

SEQ ID NO: 245469 - RNA, 22 nt, Human
agcuguugucugcaggagaagc

SEQ ID NO: 245470 - RNA, 22 nt, Human
ucugugaaugugaccuuauuug

SEQ ID NO: 245471 - RNA, 18 nt, Human
gggcucacacaggucauc

SEQ ID NO: 245472 - RNA, 22 nt, Human
uuacaaugcacucaccuuuaga

SEQ ID NO: 245473 - RNA, 22 nt, Human
ccagcacuccugucucaagucu

SEQ ID NO: 245474 - RNA, 22 nt, Human
cauggcagagccugcagguggg

SEQ ID NO: 245475 - RNA, 22 nt, Human
acuucucuccacccaagucccu

SEQ ID NO: 245476 - RNA, 22 nt, Human
ucauuuauaaggaugcaauuaa

SEQ ID NO: 245477 - RNA, 22 nt, Human
ccaggcuuucccagccucucca

SEQ ID NO: 245478 - RNA, 19 nt, Human
uagugaguagugaauuaga

SEQ ID NO: 245479 - RNA, 17 nt, Human
uccagcccugcccgacg

SEQ ID NO: 245480 - RNA, 22 nt, Human
uugagaaaccuggcaguagaga

SEQ ID NO: 245481 - RNA, 22 nt, Human
ugcucagcuucagaggaucccc

SEQ ID NO: 245482 - RNA, 22 nt, Human
accuucugaccaguuaucuuga

SEQ ID NO: 245483 - RNA, 22 nt, Human
cagcuacaggaccugaugcacc

SEQ ID NO: 245484 - RNA, 22 nt, Human
ucaagagauugaauaauaacug

SEQ ID NO: 245485 - RNA, 22 nt, Human
gcugccugcccugggucaucug

SEQ ID NO: 245486 - RNA, 22 nt, Human
uaugcacauugguuuccucauu

SEQ ID NO: 245487 - RNA, 22 nt, Human
acacugugacggaaauaaagaa

SEQ ID NO: 245488 - RNA, 22 nt, Human
auguuuguugaacaucuacugc

SEQ ID NO: 245489 - RNA, 22 nt, Human
ggaaggcuaauaaugcaagaaa

SEQ ID NO: 245490 - RNA, 22 nt, Human
ugcuggcuauuuaaagaagaaa

SEQ ID NO: 245491 - RNA, 22 nt, Human
gguaggaagauagagcaaaguu

SEQ ID NO: 245492 - RNA, 22 nt, Human
guccccagcugugacgagagcc

SEQ ID NO: 245493 - RNA, 22 nt, Human
auaguaacuggcauguuuauga

SEQ ID NO: 245494 - RNA, 22 nt, Human
uuagaaaggggugaaucaaugg

SEQ ID NO: 245495 - RNA, 18 nt, Human
ucaugagguagaggcugg

SEQ ID NO: 245496 - RNA, 22 nt, Human
aucuucaucaaguucacagugg

SEQ ID NO: 245497 - RNA, 22 nt, Human
uuuauagaugucuguauuauaa

SEQ ID NO: 245498 - RNA, 22 nt, Human
ggcucuugagaggcacagguuu

SEQ ID NO: 245499 - RNA, 22 nt, Human
uauacacauaucuucuaggccu

SEQ ID NO: 245500 - RNA, 21 nt, Human
uauacagaggggaacaggaga

SEQ ID NO: 245501 - RNA, 22 nt, Human
aagugauacguguuuauuucca

SEQ ID NO: 245502 - RNA, 22 nt, Human
guguccauguuguucaggguga

SEQ ID NO: 245503 - RNA, 22 nt, Human
uaaugucuaugggccagauaau

SEQ ID NO: 245504 - RNA, 22 nt, Human
ccugggugaaaucucuccugca

SEQ ID NO: 245505 - RNA, 22 nt, Human
cugauacacucccuaaaauaua

SEQ ID NO: 245506 - RNA, 22 nt, Human
aagccugcuuuguuccacagca

SEQ ID NO: 245507 - RNA, 22 nt, Human
uuauguauggauggcugaaagu

SEQ ID NO: 245508 - RNA, 22 nt, Human
auucucuggguuccaguaaaug

SEQ ID NO: 245509 - RNA, 22 nt, Human
uagaaucuuuaaaauucauagu

SEQ ID NO: 245510 - RNA, 21 nt, Human
gcaggugugguaucagcuucc

SEQ ID NO: 245511 - RNA, 19 nt, Human
ugacagguuuuauguguuu

SEQ ID NO: 245512 - RNA, 22 nt, Human
ccugcagagcaggagaggcauc

SEQ ID NO: 245513 - RNA, 22 nt, Human
ucugaggguuacuuuauuaggc

SEQ ID NO: 245514 - RNA, 22 nt, Human
gccucucuccuuggcuugcagu

SEQ ID NO: 245515 - RNA, 22 nt, Human
uguguauuaauguuuguauaug

SEQ ID NO: 245516 - RNA, 22 nt, Human
gcauuuuaauaagauucauagg

SEQ ID NO: 245517 - RNA, 22 nt, Human
ugcaacuuguuuggagagaaag

SEQ ID NO: 245518 - RNA, 22 nt, Human
ccacuguuggcccgaagggguc

SEQ ID NO: 245519 - RNA, 19 nt, Human
auuccucaaggacagaaau

SEQ ID NO: 245520 - RNA, 22 nt, Human
agcugccaaguuggaguagcaa

SEQ ID NO: 245521 - RNA, 22 nt, Human
uagaaacauauaggauggcagg

SEQ ID NO: 245522 - RNA, 21 nt, Human
caaagccaggcaacucucucc

SEQ ID NO: 245523 - RNA, 22 nt, Human
caauaauuuacauuggauacca

SEQ ID NO: 245524 - RNA, 22 nt, Human
acaugacaaaaugcacaggauu

SEQ ID NO: 245525 - RNA, 22 nt, Human
gaauuguaaguaccagcaugcu

SEQ ID NO: 245526 - RNA, 22 nt, Human
uccaggaguggggcagaggucu

SEQ ID NO: 245527 - RNA, 22 nt, Human
ugggcucucacacauguucuga

SEQ ID NO: 245528 - RNA, 22 nt, Human
cccugcagagggaugggggcag

SEQ ID NO: 245529 - RNA, 22 nt, Human
gagcaacaguuuaugguuuuuc

SEQ ID NO: 245530 - RNA, 22 nt, Human
auggcuggauaguugaagcucu

SEQ ID NO: 245531 - RNA, 22 nt, Human
aaggagaaaugguagaugugca

SEQ ID NO: 245532 - RNA, 22 nt, Human
ucagugucuucucuuuccuacc

SEQ ID NO: 245533 - RNA, 22 nt, Human
uacaaagccugguagauaucug

SEQ ID NO: 245534 - RNA, 22 nt, Human
uuccugcuuccuggccucacaa

SEQ ID NO: 245535 - RNA, 22 nt, Human
ugauggaauggaggacaugugg

SEQ ID NO: 245536 - RNA, 22 nt, Human
uguuuucugaugguuaaugagu

SEQ ID NO: 245537 - RNA, 22 nt, Human
gcagccucagggcacucagaug

SEQ ID NO: 245538 - RNA, 22 nt, Human
cugagcuguuacucuguccucg

SEQ ID NO: 245539 - RNA, 22 nt, Human
guccuuggcauucugagucuug

SEQ ID NO: 245540 - RNA, 22 nt, Human
aagcagccuggcaugaugcuuu

SEQ ID NO: 245541 - RNA, 22 nt, Human
aagucucuggcaaaugaucuug

SEQ ID NO: 245542 - RNA, 22 nt, Human
uggaaugacagagagucugaau

SEQ ID NO: 245543 - RNA, 22 nt, Human
agucccuguacuuuccacugcc

SEQ ID NO: 245544 - RNA, 16 nt, Human
aaggcugauuuucccu

SEQ ID NO: 245545 - RNA, 22 nt, Human
gcagcuuugucacggagugucg

SEQ ID NO: 245546 - RNA, 22 nt, Human
uguggauaaugcacuauccaua

SEQ ID NO: 245547 - RNA, 22 nt, Human
ucaaauuauuuaggauagugcu

SEQ ID NO: 245548 - RNA, 21 nt, Human
agaagggauugugguaaagau

SEQ ID NO: 245549 - RNA, 22 nt, Human
uggggaaagggauggcucccgc

SEQ ID NO: 245550 - RNA, 22 nt, Human
aagucacuggcaaaagcugcag

SEQ ID NO: 245551 - RNA, 22 nt, Human
uacuacauacagaauuuagaga

SEQ ID NO: 245552 - RNA, 22 nt, Human
gugcacccccaaggagguggag

SEQ ID NO: 245553 - RNA, 22 nt, Human
uuauauccaaaggcaaggagga

SEQ ID NO: 245554 - RNA, 22 nt, Human
guuuuuguccauggaggcaaac

SEQ ID NO: 245555 - RNA, 23 nt, Human
ucauaaauauuagcacaguagga

SEQ ID NO: 245556 - RNA, 22 nt, Human
uucugggugcaacucuguucug

SEQ ID NO: 245557 - RNA, 22 nt, Human
caguguuucugaguuccagcuc

SEQ ID NO: 245558 - RNA, 22 nt, Human
ccaggacaggaguuggcuucgc

SEQ ID NO: 245559 - RNA, 22 nt, Human
gcaaauucaacagcacauucuc

SEQ ID NO: 245560 - RNA, 20 nt, Human
ucuggggaugaggucuagga

SEQ ID NO: 245561 - RNA, 22 nt, Human
ugagccaggaguuugaggcugu

SEQ ID NO: 245562 - RNA, 22 nt, Human
uccugcugagcgucugucauuu

SEQ ID NO: 245563 - RNA, 22 nt, Human
ccugaggcccuggcugugcuga

SEQ ID NO: 245564 - RNA, 22 nt, Human
uggccuggcugcccugucugga

SEQ ID NO: 245565 - RNA, 22 nt, Human
uauuuaagaugugucauaaaga

SEQ ID NO: 245566 - RNA, 22 nt, Human
auacaaugauugguucucaccc

SEQ ID NO: 245567 - RNA, 22 nt, Human
uaguguucuaagaacauccaug

SEQ ID NO: 245568 - RNA, 22 nt, Human
accaggcucugccaguguuuac

SEQ ID NO: 245569 - RNA, 22 nt, Human
acaagauuuagcuuaaagggcu

SEQ ID NO: 245570 - RNA, 22 nt, Human
uccaggcauagaaggcacgcac

SEQ ID NO: 245571 - RNA, 22 nt, Human
uaaggcuuuauuuuuacaaugc

SEQ ID NO: 245572 - RNA, 22 nt, Human
cagcuguggggagcuugggcca

SEQ ID NO: 245573 - RNA, 22 nt, Human
uccuggccauaggcuauuucag

SEQ ID NO: 245574 - RNA, 22 nt, Human
uguuacaguggcuuuuuaaaca

SEQ ID NO: 245575 - RNA, 22 nt, Human
ugggcacaggggaauggaugaa

SEQ ID NO: 245576 - RNA, 22 nt, Human
uacauguacaugcauagguaga

SEQ ID NO: 245577 - RNA, 22 nt, Human
ggcaaaaacagcaaugacuuuu

SEQ ID NO: 245578 - RNA, 22 nt, Human
cagucuggaggucagcuggcuu

SEQ ID NO: 245579 - RNA, 22 nt, Human
ucuuuggcauuuaggagcagga

SEQ ID NO: 245580 - RNA, 22 nt, Human
auaucuggggacugaauuuaga

SEQ ID NO: 245581 - RNA, 20 nt, Human
guuuuucucucuugccacua

SEQ ID NO: 245582 - RNA, 22 nt, Human
gaaaccuuugccgauggggucc

SEQ ID NO: 245583 - RNA, 22 nt, Human
caaaguaugaaccaguuucucu

SEQ ID NO: 245584 - RNA, 22 nt, Human
ggagagcugacaucaugauguu

SEQ ID NO: 245585 - RNA, 22 nt, Human
agcagcugguucccgagggcgu

SEQ ID NO: 245586 - RNA, 22 nt, Human
acaggacaggcugggcuagacu

SEQ ID NO: 245587 - RNA, 22 nt, Human
agcccaugcaacaggccuagcg

SEQ ID NO: 245588 - RNA, 22 nt, Human
aucagagauuguaguaugugca

SEQ ID NO: 245589 - RNA, 21 nt, Human
guuuagaaguagucuggcuca

SEQ ID NO: 245590 - RNA, 22 nt, Human
ccuaaagaauuuucauagagcu

SEQ ID NO: 245591 - RNA, 22 nt, Human
ucaugacaggugaguuuuuagg

SEQ ID NO: 245592 - RNA, 22 nt, Human
gaaauauuguacuggagauguu

SEQ ID NO: 245593 - RNA, 22 nt, Human
gcagagccaggcuggggcaggu

SEQ ID NO: 245594 - RNA, 22 nt, Human
uuauuccaauuucuccuacaaa

SEQ ID NO: 245595 - RNA, 22 nt, Human
ucaaagagcucuaucuucaaaa

SEQ ID NO: 245596 - RNA, 20 nt, Human
aagaaacuugaaaguacaag

SEQ ID NO: 245597 - RNA, 22 nt, Human
ggcagcuguuuguccuccuguu

SEQ ID NO: 245598 - RNA, 22 nt, Human
ucacagaagagauauugacaga

SEQ ID NO: 245599 - RNA, 22 nt, Human
cacaucugaaaagaugcacaag

SEQ ID NO: 245600 - RNA, 22 nt, Human
cagcgucucguugugggccucg

SEQ ID NO: 245601 - RNA, 23 nt, Human
gaauucuuaaggucacuaaaguc

SEQ ID NO: 245602 - RNA, 22 nt, Human
uaccugcaaaguuccuuuugcc

SEQ ID NO: 245603 - RNA, 22 nt, Human
gucucagggacugcuucugggg

SEQ ID NO: 245604 - RNA, 22 nt, Human
agggggugaaugucugucuaca

SEQ ID NO: 245605 - RNA, 22 nt, Human
cuucagaagaaaagcagugugu

SEQ ID NO: 245606 - RNA, 22 nt, Human
uggaagaaggcagagaggcauu

SEQ ID NO: 245607 - RNA, 22 nt, Human
cuuccaggugcuggccuggccu

SEQ ID NO: 245608 - RNA, 22 nt, Human
aagagcaucaaugacucgcagu

SEQ ID NO: 245609 - RNA, 22 nt, Human
uucugauaacaaacaccaauuu

SEQ ID NO: 245610 - RNA, 22 nt, Human
caugccaacaacaagcaaugag

SEQ ID NO: 245611 - RNA, 22 nt, Human
uuucuugucuuuaguaucuggc

SEQ ID NO: 245612 - RNA, 22 nt, Human
cuuuuuuccuaaggcaacauga

SEQ ID NO: 245613 - RNA, 22 nt, Human
caguggcagagaacagagaccu

SEQ ID NO: 245614 - RNA, 23 nt, Human
uccuuugucuuugcauagauggu

SEQ ID NO: 245615 - RNA, 22 nt, Human
uucccugcaaccuuucccuggg

SEQ ID NO: 245616 - RNA, 22 nt, Human
uguuaaaaccacaggugaggac

SEQ ID NO: 245617 - RNA, 22 nt, Human
ggcuggcuggaugaauggauua

SEQ ID NO: 245618 - RNA, 22 nt, Human
caugaggauccaggugacaggc

SEQ ID NO: 245619 - RNA, 20 nt, Human
ugcugggugggcagcuguaa

SEQ ID NO: 245620 - RNA, 20 nt, Human
cugcucagaccaacucuucu

SEQ ID NO: 245621 - RNA, 22 nt, Human
ugcuggagcccaggcggccuuu

SEQ ID NO: 245622 - RNA, 22 nt, Human
ugaaauguuaaucacacaaagg

SEQ ID NO: 245623 - RNA, 22 nt, Human
ugagcagucauccauuucuccu

SEQ ID NO: 245624 - RNA, 22 nt, Human
guuuuauaauugcuucauaaga

SEQ ID NO: 245625 - RNA, 20 nt, Human
uggcagaguugucccaccca

SEQ ID NO: 245626 - RNA, 22 nt, Human
uugccaggggacaucuggagcc

SEQ ID NO: 245627 - RNA, 22 nt, Human
agggccuggaacugugggcagg

SEQ ID NO: 245628 - RNA, 22 nt, Human
gcaaauauucaagacuuuucca

SEQ ID NO: 245629 - RNA, 22 nt, Human
ucucacugggucacagcagagg

SEQ ID NO: 245630 - RNA, 22 nt, Human
agcaaucagcuucuuuguguuu

SEQ ID NO: 245631 - RNA, 22 nt, Human
uuguuuuuaaacaugugacuga

SEQ ID NO: 245632 - RNA, 22 nt, Human
cuuuggaagccaggcaguucac

SEQ ID NO: 245633 - RNA, 22 nt, Human
gaaucucaggaagaucucugca

SEQ ID NO: 245634 - RNA, 22 nt, Human
aaacaucauaggcaugcaugau

SEQ ID NO: 245635 - RNA, 22 nt, Human
acuguauuuuguacuuucgugu

SEQ ID NO: 245636 - RNA, 22 nt, Human
aagcccuguccggggggaagaa

SEQ ID NO: 245637 - RNA, 22 nt, Human
gcagagugaggaagagcuucca

SEQ ID NO: 245638 - RNA, 22 nt, Human
aucuuugacugccauucuugac

SEQ ID NO: 245639 - RNA, 22 nt, Human
aaacucuauuucuguuggcuua

SEQ ID NO: 245640 - RNA, 22 nt, Human
acuaaaguaucuccuauuucau

SEQ ID NO: 245641 - RNA, 22 nt, Human
cagcccugcuggcaaugaugag

SEQ ID NO: 245642 - RNA, 21 nt, Human
agaaaaaccagcauguuuuca

SEQ ID NO: 245643 - RNA, 22 nt, Human
gaagucuucauucucucugaga

SEQ ID NO: 245644 - RNA, 22 nt, Human
gaccagcuggugaaaaccaauu

SEQ ID NO: 245645 - RNA, 22 nt, Human
uuacagagaggugauugugaag

SEQ ID NO: 245646 - RNA, 22 nt, Human
uggcagcugaauggcuggaugg

SEQ ID NO: 245647 - RNA, 22 nt, Human
gcucugcuaauauuguaguacc

SEQ ID NO: 245648 - RNA, 22 nt, Human
uucaaaguuucaaucuguauca

SEQ ID NO: 245649 - RNA, 22 nt, Human
gucuucuguucugugaggcuuc

SEQ ID NO: 245650 - RNA, 22 nt, Human
cugagggaggagaauugcuuga

SEQ ID NO: 245651 - RNA, 22 nt, Human
agcuucuguucaucuuccaggc

SEQ ID NO: 245652 - RNA, 22 nt, Human
gguguccuacagggccgcaggc

SEQ ID NO: 245653 - RNA, 22 nt, Human
ucccucagcucauauuuaugcc

SEQ ID NO: 245654 - RNA, 22 nt, Human
auuucaaggacuacuuuucaau

SEQ ID NO: 245655 - RNA, 22 nt, Human
cagacagguugcaaaacuucaa

SEQ ID NO: 245656 - RNA, 22 nt, Human
aagucagaauaauguuucuuuu

SEQ ID NO: 245657 - RNA, 22 nt, Human
aaggagaguacaggaguuggua

SEQ ID NO: 245658 - RNA, 22 nt, Human
aggaaugucauagaauaaucau

SEQ ID NO: 245659 - RNA, 22 nt, Human
ugggagagagaauucccagugg

SEQ ID NO: 245660 - RNA, 22 nt, Human
agccauuuugguaaugauaaca

SEQ ID NO: 245661 - RNA, 19 nt, Human
aaaauugcguauuuugagg

SEQ ID NO: 245662 - RNA, 22 nt, Human
gcugcccuucgucaucuauaaa

SEQ ID NO: 245663 - RNA, 22 nt, Human
ucacaugcuacugagccagacc

SEQ ID NO: 245664 - RNA, 22 nt, Human
ucugcauauuguuaauggaaug

SEQ ID NO: 245665 - RNA, 22 nt, Human
gauucaaaaguuugagcuccaa

SEQ ID NO: 245666 - RNA, 22 nt, Human
aagcaaaugugggugcagaauu

SEQ ID NO: 245667 - RNA, 22 nt, Human
ggcagaggaagcuggaaguggg

SEQ ID NO: 245668 - RNA, 22 nt, Human
accaugaugggaagcucagggc

SEQ ID NO: 245669 - RNA, 19 nt, Human
aggcaggugcagagguccc

SEQ ID NO: 245670 - RNA, 22 nt, Human
acacagagcuggaacugcuuca

SEQ ID NO: 245671 - RNA, 22 nt, Human
uuauucugcacuuuuaaaauau

SEQ ID NO: 245672 - RNA, 22 nt, Human
cagagccucugcccugggcacu

SEQ ID NO: 245673 - RNA, 22 nt, Human
cagguuuacaaaguaaagugug

SEQ ID NO: 245674 - RNA, 21 nt, Human
ugggacagugauggcuccucc

SEQ ID NO: 245675 - RNA, 22 nt, Human
gacaggcuuccuaagugccaga

SEQ ID NO: 245676 - RNA, 22 nt, Human
auacaauccagccauugccaca

SEQ ID NO: 245677 - RNA, 22 nt, Human
uaacaaagguugccaaacuaag

SEQ ID NO: 245678 - RNA, 22 nt, Human
aauuucagagguagagauucua

SEQ ID NO: 245679 - RNA, 22 nt, Human
ccccacaguccgugaggagcca

SEQ ID NO: 245680 - RNA, 22 nt, Human
cauggcuuuuagcccuacauga

SEQ ID NO: 245681 - RNA, 22 nt, Human
acugccuguagcucuucaucuc

SEQ ID NO: 245682 - RNA, 22 nt, Human
cuggcuaugugguuagacauaa

SEQ ID NO: 245683 - RNA, 22 nt, Human
uuucucugcuguguuggcagcu

SEQ ID NO: 245684 - RNA, 22 nt, Human
uugcaggguacauucuuagaau

SEQ ID NO: 245685 - RNA, 22 nt, Human
agcaaacagugugcuaagaaau

SEQ ID NO: 245686 - RNA, 22 nt, Human
gcaggggaguggcaggcccgga

SEQ ID NO: 245687 - RNA, 22 nt, Human
uuuugagauggagucuugcucu

SEQ ID NO: 245688 - RNA, 22 nt, Human
aaggcagcaccgccuccugaaa

SEQ ID NO: 245689 - RNA, 22 nt, Human
ugcagguucugaccagccaacu

SEQ ID NO: 245690 - RNA, 22 nt, Human
gcuuaggaaaaugguggaguug

SEQ ID NO: 245691 - RNA, 22 nt, Human
cagucagaggucuucuaaaaca

SEQ ID NO: 245692 - RNA, 22 nt, Human
uaauuuugcugugaccauugaa

SEQ ID NO: 245693 - RNA, 22 nt, Human
ugggaggaaugucacugagcca

SEQ ID NO: 245694 - RNA, 22 nt, Human
uacauugugauguuucaauaca

SEQ ID NO: 245695 - RNA, 22 nt, Human
uaugacaagaaauacagaggua

SEQ ID NO: 245696 - RNA, 17 nt, Human
cugguuuaugggcagug

SEQ ID NO: 245697 - RNA, 22 nt, Human
uggcuucucugugugagggaga

SEQ ID NO: 245698 - RNA, 22 nt, Human
aggcagugagaaauagcaagau

SEQ ID NO: 245699 - RNA, 22 nt, Human
cccaggcagugcugaucccuca

SEQ ID NO: 245700 - RNA, 22 nt, Human
uguagcacagagcuuugacacu

SEQ ID NO: 245701 - RNA, 21 nt, Human
ucagagucucaggagcaaggg

SEQ ID NO: 245702 - RNA, 22 nt, Human
uauguacaucuugagcaaugaa

SEQ ID NO: 245703 - RNA, 22 nt, Human
guuugcuaauuuaaagcuauuu

SEQ ID NO: 245704 - RNA, 22 nt, Human
cugccuggggaaugugaggauu

SEQ ID NO: 245705 - RNA, 22 nt, Human
uuacauuaagccaauggauucu

SEQ ID NO: 245706 - RNA, 22 nt, Human
cuagggacagaaagaggguaga

SEQ ID NO: 245707 - RNA, 22 nt, Human
cccaggacucuucacugcagcc

SEQ ID NO: 245708 - RNA, 22 nt, Human
auuggcuccuucuaacaugucu

SEQ ID NO: 245709 - RNA, 22 nt, Human
ccagaggugcugggagaggucu

SEQ ID NO: 245710 - RNA, 22 nt, Human
ugggcuccagcaccugugcucu

SEQ ID NO: 245711 - RNA, 17 nt, Human
uggcagcugaaagcucu

SEQ ID NO: 245712 - RNA, 22 nt, Human
gcuccagggaguacauuuauca

SEQ ID NO: 245713 - RNA, 22 nt, Human
cauuuguucaaccauucucgcu

SEQ ID NO: 245714 - RNA, 22 nt, Human
ucuggaauuuuauugaucaaaa

SEQ ID NO: 245715 - RNA, 19 nt, Human
ugcauugagggcugucuca

SEQ ID NO: 245716 - RNA, 21 nt, Human
aucaggcucaaaucaucccaa

SEQ ID NO: 245717 - RNA, 22 nt, Human
uaggugaguuuggggaagauag

SEQ ID NO: 245718 - RNA, 22 nt, Human
uugcuugcagacuuagcaaauu

SEQ ID NO: 245719 - RNA, 22 nt, Human
agggucucuugccaugccucag

SEQ ID NO: 245720 - RNA, 22 nt, Human
cuggauucaugccaggccaccc

SEQ ID NO: 245721 - RNA, 22 nt, Human
uuguguacacgccuuuaaauga

SEQ ID NO: 245722 - RNA, 22 nt, Human
uaccagcuuccuucaagaugug

SEQ ID NO: 245723 - RNA, 22 nt, Human
uacagagagauaaguguaaaag

SEQ ID NO: 245724 - RNA, 22 nt, Human
accaugaugcauccuuaaggaa

SEQ ID NO: 245725 - RNA, 20 nt, Human
ugcccacaucacucaggagu

SEQ ID NO: 245726 - RNA, 22 nt, Human
agguggcugagcugugccccug

SEQ ID NO: 245727 - RNA, 22 nt, Human
agugcucaccugucaggucaag

SEQ ID NO: 245728 - RNA, 22 nt, Human
agcuccugaaaauccagacugg

SEQ ID NO: 245729 - RNA, 22 nt, Human
aagaagagaaaugugcugcugg

SEQ ID NO: 245730 - RNA, 20 nt, Human
gcugucugacaguucccaga

SEQ ID NO: 245731 - RNA, 22 nt, Human
gcaaggaggcugguggaggaag

SEQ ID NO: 245732 - RNA, 22 nt, Human
acguuagaaaagcaggagcuca

SEQ ID NO: 245733 - RNA, 22 nt, Human
ccagcuguuggaguuucacugc

SEQ ID NO: 245734 - RNA, 22 nt, Human
gcugcccucuguguuuguccuu

SEQ ID NO: 245735 - RNA, 22 nt, Human
ugacaaauucauauuucagagg

SEQ ID NO: 245736 - RNA, 22 nt, Human
cugaggcuaaccucgagagaca

SEQ ID NO: 245737 - RNA, 22 nt, Human
gcuccuggguguggcugccccu

SEQ ID NO: 245738 - RNA, 20 nt, Human
uccagcccucaugucgcuca

SEQ ID NO: 245739 - RNA, 22 nt, Human
uaggccagaggagcagcuuugg

SEQ ID NO: 245740 - RNA, 18 nt, Human
gcucuggcucaccuccag

SEQ ID NO: 245741 - RNA, 22 nt, Human
uuuaacagauaguuucuucugu

SEQ ID NO: 245742 - RNA, 22 nt, Human
ucucugggagcaauuguuugcu

SEQ ID NO: 245743 - RNA, 22 nt, Human
aucauucagccuaagcaaguac

SEQ ID NO: 245744 - RNA, 22 nt, Human
cagcagcucacucagguggcuc

SEQ ID NO: 245745 - RNA, 22 nt, Human
aaugcuuuagcagugauuagug

SEQ ID NO: 245746 - RNA, 22 nt, Human
uucacuguacugacugucuuau

SEQ ID NO: 245747 - RNA, 19 nt, Human
acauguuuugcagaacagc

SEQ ID NO: 245748 - RNA, 22 nt, Human
caugaaggaauuaagguaagga

SEQ ID NO: 245749 - RNA, 20 nt, Human
uacaggaaucaagacugcau

SEQ ID NO: 245750 - RNA, 22 nt, Human
guucugaguccuccuuugaagg

SEQ ID NO: 245751 - RNA, 22 nt, Human
aagggggcggcagccaguggaa

SEQ ID NO: 245752 - RNA, 22 nt, Human
ggcagcugcugcauuacguugu

SEQ ID NO: 245753 - RNA, 22 nt, Human
gaguuaaaaaugccuccaugga

SEQ ID NO: 245754 - RNA, 22 nt, Human
ugucugucugcacagcucaugg

SEQ ID NO: 245755 - RNA, 22 nt, Human
gcagacagggcuacagagguac

SEQ ID NO: 245756 - RNA, 22 nt, Human
augaggucuggcaaucagaaac

SEQ ID NO: 245757 - RNA, 22 nt, Human
uuuaaaauuuagaccucuccac

SEQ ID NO: 245758 - RNA, 22 nt, Human
ccacauuucuucacuuguccca

SEQ ID NO: 245759 - RNA, 22 nt, Human
aucuaaagugucauaaguagcu

SEQ ID NO: 245760 - RNA, 22 nt, Human
agaggucagcugcaugccacau

SEQ ID NO: 245761 - RNA, 22 nt, Human
aaccagcuaaacuuugcucgaa

SEQ ID NO: 245762 - RNA, 22 nt, Human
ggcugagcaauuuugaugacau

SEQ ID NO: 245763 - RNA, 19 nt, Human
augcagagaauggcaguag

SEQ ID NO: 245764 - RNA, 22 nt, Human
ucacaucugcaaaaucccuuuu

SEQ ID NO: 245765 - RNA, 22 nt, Human
ucuuucugcagcacaggggcag

SEQ ID NO: 245766 - RNA, 23 nt, Human
ugauucagcaaguccacuucugg

SEQ ID NO: 245767 - RNA, 22 nt, Human
guucuguacuccaagcucuucc

SEQ ID NO: 245768 - RNA, 18 nt, Human
agaccagacaagaauggu

SEQ ID NO: 245769 - RNA, 22 nt, Human
cuugucagccaauuguggauuu

SEQ ID NO: 245770 - RNA, 22 nt, Human
ggcucccaggagggccuggagg

SEQ ID NO: 245771 - RNA, 22 nt, Human
uauucucugcagcugaauguuu

SEQ ID NO: 245772 - RNA, 22 nt, Human
agucuggggucugguagaacga

SEQ ID NO: 245773 - RNA, 22 nt, Human
uccuggccaaguagauguggcg

SEQ ID NO: 245774 - RNA, 22 nt, Human
cacagcuggaaugggguaccug

SEQ ID NO: 245775 - RNA, 22 nt, Human
uggcaaaggcgcucacaugccu

SEQ ID NO: 245776 - RNA, 21 nt, Human
agcaggugaaccuccaguaca

SEQ ID NO: 245777 - RNA, 18 nt, Human
ucagggaagagaauauga

SEQ ID NO: 245778 - RNA, 22 nt, Human
uaaaaguuagcuaggacaaagu

SEQ ID NO: 245779 - RNA, 22 nt, Human
ggucacaugugauuugagccaa

SEQ ID NO: 245780 - RNA, 22 nt, Human
ccugauuagggucuuucaaaug

SEQ ID NO: 245781 - RNA, 22 nt, Human
cuggucuguccgcaggucaccu

SEQ ID NO: 245782 - RNA, 21 nt, Human
gaaucuuugauuuacauggga

SEQ ID NO: 245783 - RNA, 22 nt, Human
acaggcagcccucucccugguu

SEQ ID NO: 245784 - RNA, 22 nt, Human
cugccauguuaccugcacaggu

SEQ ID NO: 245785 - RNA, 22 nt, Human
cuuggugagacucccacccacc

SEQ ID NO: 245786 - RNA, 22 nt, Human
ugcagucuguacauuuuaagaa

SEQ ID NO: 245787 - RNA, 21 nt, Human
ugcaccuguucacugcaguuc

SEQ ID NO: 245788 - RNA, 22 nt, Human
ugacauuucuuguugauauaaa

SEQ ID NO: 245789 - RNA, 22 nt, Human
uaaggaaagugccaugauuucu

SEQ ID NO: 245790 - RNA, 21 nt, Human
ucagugcaauucuauggggaa

SEQ ID NO: 245791 - RNA, 22 nt, Human
acugugagugauuuccuucugg

SEQ ID NO: 245792 - RNA, 22 nt, Human
ggcauuuuugacaaagagcaau

SEQ ID NO: 245793 - RNA, 22 nt, Human
uguauucaacuucuuaaaaauu

SEQ ID NO: 245794 - RNA, 22 nt, Human
acuucagaaaauguugaauguu

SEQ ID NO: 245795 - RNA, 22 nt, Human
uaaagguagcaugaaacugcaa

SEQ ID NO: 245796 - RNA, 22 nt, Human
aauucagagacucauucuggag

SEQ ID NO: 245797 - RNA, 22 nt, Human
gggagggaggugaugcuuggcu

SEQ ID NO: 245798 - RNA, 22 nt, Human
cagcagccuggccccuccucgg

SEQ ID NO: 245799 - RNA, 22 nt, Human
cagagccucucagaggucagac

SEQ ID NO: 245800 - RNA, 22 nt, Human
gccugcagacguguuuuccuca

SEQ ID NO: 245801 - RNA, 22 nt, Human
agguggcaguuguggaaccauc

SEQ ID NO: 245802 - RNA, 18 nt, Human
ucaggcugcccugugucu

SEQ ID NO: 245803 - RNA, 22 nt, Human
uuuauugggccuggaggaucua

SEQ ID NO: 245804 - RNA, 22 nt, Human
acauaaugagcucuuuauaaau

SEQ ID NO: 245805 - RNA, 23 nt, Human
uggagcugggcucagacccuggg

SEQ ID NO: 245806 - RNA, 22 nt, Human
gcacaucuggagcucuguggaa

SEQ ID NO: 245807 - RNA, 22 nt, Human
gcuguagggugucauaugaagc

SEQ ID NO: 245808 - RNA, 18 nt, Human
aauguccaguguucauau

SEQ ID NO: 245809 - RNA, 22 nt, Human
uuuacacaaaagauagcacacc

SEQ ID NO: 245810 - RNA, 22 nt, Human
agugacuggugugaaguuaaau

SEQ ID NO: 245811 - RNA, 22 nt, Human
gaagcaguauccugacagcacc

SEQ ID NO: 245812 - RNA, 22 nt, Human
gccacauuagcccucaccaucu

SEQ ID NO: 245813 - RNA, 22 nt, Human
accagcaagauuuugcuuugca

SEQ ID NO: 245814 - RNA, 22 nt, Human
aucucagagaaauuugaaugca

SEQ ID NO: 245815 - RNA, 22 nt, Human
aagacgcacccuuugagggcac

SEQ ID NO: 245816 - RNA, 22 nt, Human
aagagucagcuucuguaugggu

SEQ ID NO: 245817 - RNA, 22 nt, Human
ucuggcucccagccugcucuca

SEQ ID NO: 245818 - RNA, 22 nt, Human
gaggugucuagaucuaccagua

SEQ ID NO: 245819 - RNA, 22 nt, Human
gaacacaacucagaaugcuggu

SEQ ID NO: 245820 - RNA, 22 nt, Human
uugccugggcuaguaagccaga

SEQ ID NO: 245821 - RNA, 22 nt, Human
ccagggcauguaacuaauggug

SEQ ID NO: 245822 - RNA, 22 nt, Human
ucagugucuagggacaguaauc

SEQ ID NO: 245823 - RNA, 22 nt, Human
acuguucauauucuuagaaauu

SEQ ID NO: 245824 - RNA, 23 nt, Human
acccaucucuccugucaugcaga

SEQ ID NO: 245825 - RNA, 22 nt, Human
uggcagaggaaaaagucacugg

SEQ ID NO: 245826 - RNA, 22 nt, Human
uuucaaguacuguaaacaugcu

SEQ ID NO: 245827 - RNA, 22 nt, Human
gagcugaagcgcuacagcaucc

SEQ ID NO: 245828 - RNA, 22 nt, Human
gggugcagggucuccagcagcu

SEQ ID NO: 245829 - RNA, 22 nt, Human
gcagcugccccgacugugaguc

SEQ ID NO: 245830 - RNA, 22 nt, Human
gaggcuucuguucacucacgcu

SEQ ID NO: 245831 - RNA, 22 nt, Human
uacuuucaugucuauacauauu

SEQ ID NO: 245832 - RNA, 22 nt, Human
cagcuuuagagaaaacauauuu

SEQ ID NO: 245833 - RNA, 22 nt, Human
uguggcugugccgucacacgug

SEQ ID NO: 245834 - RNA, 22 nt, Human
aaguguuuaaauuauuugcagg

SEQ ID NO: 245835 - RNA, 21 nt, Human
ugucuucauaugagauggugu

SEQ ID NO: 245836 - RNA, 22 nt, Human
uuagaggacuguaggugggaau

SEQ ID NO: 245837 - RNA, 22 nt, Human
aacuggauuuugaugagcaguu

SEQ ID NO: 245838 - RNA, 22 nt, Human
uucuguuuuagaaauaaguagu

SEQ ID NO: 245839 - RNA, 22 nt, Human
agaauuguaauaauaauagcau

SEQ ID NO: 245840 - RNA, 22 nt, Human
gcccaggagguugggcugugca

SEQ ID NO: 245841 - RNA, 22 nt, Human
ucccugcacccuugcugggccc

SEQ ID NO: 245842 - RNA, 22 nt, Human
uccugggacccugggugcagag

SEQ ID NO: 245843 - RNA, 21 nt, Human
gcccagagggagccaagccca

SEQ ID NO: 245844 - RNA, 22 nt, Human
uuauagaauccaguuguuguau

SEQ ID NO: 245845 - RNA, 22 nt, Human
cucucaguccugcgcgccucug

SEQ ID NO: 245846 - RNA, 22 nt, Human
uuggaacauccaggacagauau

SEQ ID NO: 245847 - RNA, 22 nt, Human
ucccagccuuucuuuucugcug

SEQ ID NO: 245848 - RNA, 22 nt, Human
agagucagcuuaugacacaguc

SEQ ID NO: 245849 - RNA, 22 nt, Human
agcccagcugccugccugcugu

SEQ ID NO: 245850 - RNA, 22 nt, Human
ccugagucuuucccauugcgcu

SEQ ID NO: 245851 - RNA, 22 nt, Human
caccagcuacucggguuuccug

SEQ ID NO: 245852 - RNA, 22 nt, Human
ucagaaguccccagucaaggag

SEQ ID NO: 245853 - RNA, 22 nt, Human
agcagauggugucaugggaugg

SEQ ID NO: 245854 - RNA, 22 nt, Human
caaaaccaagaacauucauuuc

SEQ ID NO: 245855 - RNA, 22 nt, Human
gagauuuagcugcuuaacuccu

SEQ ID NO: 245856 - RNA, 22 nt, Human
aauguauucucuuuauaagaua

SEQ ID NO: 245857 - RNA, 22 nt, Human
cucuccagccaggggcuuccug

SEQ ID NO: 245858 - RNA, 22 nt, Human
ccucuggccagagaaaggccag

SEQ ID NO: 245859 - RNA, 22 nt, Human
gguggcaccuuacccugcgcag

SEQ ID NO: 245860 - RNA, 22 nt, Human
ggccugacugaccugauucuaa

SEQ ID NO: 245861 - RNA, 22 nt, Human
caccugaagauuuagagauuga

SEQ ID NO: 245862 - RNA, 22 nt, Human
aaauuagaaauacuuucaaagc

SEQ ID NO: 245863 - RNA, 22 nt, Human
ugcacacauuaaggauacacag

SEQ ID NO: 245864 - RNA, 22 nt, Human
uucugugcccauuuuaaaaugg

SEQ ID NO: 245865 - RNA, 22 nt, Human
gcccugcagugcggagguggca

SEQ ID NO: 245866 - RNA, 22 nt, Human
augcaacauacauucugaagcu

SEQ ID NO: 245867 - RNA, 19 nt, Human
ucuccaaaaccaaucacua

SEQ ID NO: 245868 - RNA, 22 nt, Human
cauucucuugacaggacagccc

SEQ ID NO: 245869 - RNA, 22 nt, Human
uuggcuuccaggaucucagcag

SEQ ID NO: 245870 - RNA, 22 nt, Human
uuucagacugcugugugaaacu

SEQ ID NO: 245871 - RNA, 22 nt, Human
ccauggccaauugcaccuugcu

SEQ ID NO: 245872 - RNA, 17 nt, Human
agucagaggaguaucug

SEQ ID NO: 245873 - RNA, 22 nt, Human
agcuaaugggagacccuuucac

SEQ ID NO: 245874 - RNA, 22 nt, Human
auacaugacucacacauucugc

SEQ ID NO: 245875 - RNA, 22 nt, Human
gcaggcucccuugcagagcagg

SEQ ID NO: 245876 - RNA, 21 nt, Human
uuuuuucuugcgugaggccug

SEQ ID NO: 245877 - RNA, 23 nt, Human
ucagaauaauaaccuaguaacug

SEQ ID NO: 245878 - RNA, 22 nt, Human
acucaaauagcugccccuagug

SEQ ID NO: 245879 - RNA, 22 nt, Human
ugagagcacacagaaauauuuu

SEQ ID NO: 245880 - RNA, 22 nt, Human
ggacgcagccgagggagcaggg

SEQ ID NO: 245881 - RNA, 21 nt, Human
ucuuucugaaaucucagucug

SEQ ID NO: 245882 - RNA, 22 nt, Human
ugaaggcuguuggauggggaag

SEQ ID NO: 245883 - RNA, 22 nt, Human
caaagcagagccagagcuuguc

SEQ ID NO: 245884 - RNA, 22 nt, Human
cgggagccucugggucacacug

SEQ ID NO: 245885 - RNA, 22 nt, Human
ggcaguuucucaggcaggggua

SEQ ID NO: 245886 - RNA, 22 nt, Human
auucucuggcuaaaaccugaag

SEQ ID NO: 245887 - RNA, 22 nt, Human
aauuacaaauguagacucucau

SEQ ID NO: 245888 - RNA, 20 nt, Human
cuacauguucugcuucucuc

SEQ ID NO: 245889 - RNA, 22 nt, Human
uagaggagaguugcuggaugga

SEQ ID NO: 245890 - RNA, 22 nt, Human
ucauuuaugcaggaauggcaua

SEQ ID NO: 245891 - RNA, 22 nt, Human
agacagguaaauagagaugcug

SEQ ID NO: 245892 - RNA, 22 nt, Human
agugggacaguguagagcguca

SEQ ID NO: 245893 - RNA, 22 nt, Human
uugcuuuugugugcucucugga

SEQ ID NO: 245894 - RNA, 22 nt, Human
cugcccacaguucucugccaug

SEQ ID NO: 245895 - RNA, 22 nt, Human
agauuuacucccugcuuccgcc

SEQ ID NO: 245896 - RNA, 22 nt, Human
gggcugagggccaauuccuacu

SEQ ID NO: 245897 - RNA, 22 nt, Human
uauugcuggugcuguucugaau

SEQ ID NO: 245898 - RNA, 22 nt, Human
uacaaugcaaaauacugucugc

SEQ ID NO: 245899 - RNA, 22 nt, Human
cccaggaccgcgcggcugagcg

SEQ ID NO: 245900 - RNA, 22 nt, Human
ucaggccaggagaucagauuga

SEQ ID NO: 245901 - RNA, 22 nt, Human
ggcugggcuccgggagcaugcg

SEQ ID NO: 245902 - RNA, 22 nt, Human
gcuggaagaaugagugccucgu

SEQ ID NO: 245903 - RNA, 22 nt, Human
ucuggccucuugggaugcuccc

SEQ ID NO: 245904 - RNA, 22 nt, Human
uuauuaggaaaaggucagaugu

SEQ ID NO: 245905 - RNA, 22 nt, Human
cacuuaucucauuuaaucacca

SEQ ID NO: 245906 - RNA, 18 nt, Human
uugaggaguucacugucu

SEQ ID NO: 245907 - RNA, 22 nt, Human
uuucucagagcacggggaguga

SEQ ID NO: 245908 - RNA, 22 nt, Human
cuccccuucuugccagauccuu

SEQ ID NO: 245909 - RNA, 22 nt, Human
ugauauuuaagcaaaaauaugg

SEQ ID NO: 245910 - RNA, 22 nt, Human
ugaggaauguuuugagugccga

SEQ ID NO: 245911 - RNA, 19 nt, Human
ggcucucccuugagagagc

SEQ ID NO: 245912 - RNA, 22 nt, Human
gcuuucugauugcgaaaacaaa

SEQ ID NO: 245913 - RNA, 22 nt, Human
ucucuguaguugggcagcugcu

SEQ ID NO: 245914 - RNA, 22 nt, Human
gacagucugggcacacaugaaa

SEQ ID NO: 245915 - RNA, 22 nt, Human
ggguggggccaggcaauuugca

SEQ ID NO: 245916 - RNA, 22 nt, Human
ugccugcauuuuguggcuggcu

SEQ ID NO: 245917 - RNA, 22 nt, Human
uucuuuccuugccucagugaag

SEQ ID NO: 245918 - RNA, 22 nt, Human
agcugugugugcuugggauuau

SEQ ID NO: 245919 - RNA, 22 nt, Human
uggccugaguugucugcaggcc

SEQ ID NO: 245920 - RNA, 22 nt, Human
aagucuggugcuguccucaccc

SEQ ID NO: 245921 - RNA, 22 nt, Human
gaacuuuaauuagcuuuugucu

SEQ ID NO: 245922 - RNA, 22 nt, Human
caagaaucuugcagcuuagacu

SEQ ID NO: 245923 - RNA, 22 nt, Human
aucuuggacuacagaagagagg

SEQ ID NO: 245924 - RNA, 22 nt, Human
uucucugggaacauaaaugaag

SEQ ID NO: 245925 - RNA, 22 nt, Human
uguucagagacagaaauucuaa

SEQ ID NO: 245926 - RNA, 22 nt, Human
ccuggcucagaccccaguucug

SEQ ID NO: 245927 - RNA, 22 nt, Human
ccugggccuauccuagaaccaa

SEQ ID NO: 245928 - RNA, 22 nt, Human
gaagcaaagagcuagugccgcu

SEQ ID NO: 245929 - RNA, 22 nt, Human
ggagaggguagggguccugccc

SEQ ID NO: 245930 - RNA, 22 nt, Human
cucuuuggggugccccacuggu

SEQ ID NO: 245931 - RNA, 22 nt, Human
cuguucaugcugauucuguaug

SEQ ID NO: 245932 - RNA, 22 nt, Human
ccugcaccaggcccagcauggu

SEQ ID NO: 245933 - RNA, 22 nt, Human
gcucugagcccccagaagcaga

SEQ ID NO: 245934 - RNA, 22 nt, Human
agaacuuaggaacaacagcuua

SEQ ID NO: 245935 - RNA, 22 nt, Human
gcagugcaugucggaacucauu

SEQ ID NO: 245936 - RNA, 22 nt, Human
aagcagaaggggaauaauauuu

SEQ ID NO: 245937 - RNA, 18 nt, Human
acccaggcucaugguccu

SEQ ID NO: 245938 - RNA, 21 nt, Human
aaguaaugugucucuucuacc

SEQ ID NO: 245939 - RNA, 22 nt, Human
aguccaggcauuccagccauuc

SEQ ID NO: 245940 - RNA, 22 nt, Human
ugcugcucacacacagugaaug

SEQ ID NO: 245941 - RNA, 22 nt, Human
guuagaauaaaaggucagagag

SEQ ID NO: 245942 - RNA, 22 nt, Human
auucacaugcccaagcagcacc

SEQ ID NO: 245943 - RNA, 16 nt, Human
agagguuuacagccug

SEQ ID NO: 245944 - RNA, 20 nt, Human
gcuucucagggcuucucuga

SEQ ID NO: 245945 - RNA, 22 nt, Human
acacaaaaucaaaguccuaggc

SEQ ID NO: 245946 - RNA, 22 nt, Human
auuucuucagguucuucuagga

SEQ ID NO: 245947 - RNA, 22 nt, Human
acagugcacauccugagugauu

SEQ ID NO: 245948 - RNA, 22 nt, Human
ucugagacuuuaaccuggggcc

SEQ ID NO: 245949 - RNA, 22 nt, Human
cuuugcugagcugguuguucaa

SEQ ID NO: 245950 - RNA, 22 nt, Human
gacagguggguaccuuuaugga

SEQ ID NO: 245951 - RNA, 22 nt, Human
caggcaggagacauuugguugg

SEQ ID NO: 245952 - RNA, 23 nt, Human
gaagucagcccuacagagagcag

SEQ ID NO: 245953 - RNA, 22 nt, Human
uguauuuuuaggaaugcgcuau

SEQ ID NO: 245954 - RNA, 22 nt, Human
cagggcugucuccaaaggcccc

SEQ ID NO: 245955 - RNA, 22 nt, Human
agcuggguucagaggcacaugg

SEQ ID NO: 245956 - RNA, 22 nt, Human
ugagacaguuggugaaaucuaa

SEQ ID NO: 245957 - RNA, 22 nt, Human
gcugguuuccuuaucuauaaag

SEQ ID NO: 245958 - RNA, 22 nt, Human
aagguuaaauagguauuuucca

SEQ ID NO: 245959 - RNA, 22 nt, Human
ucuaagaauacucauaucuucu

SEQ ID NO: 245960 - RNA, 22 nt, Human
uccuacaucagcucucaguagc

SEQ ID NO: 245961 - RNA, 22 nt, Human
cuggggcucacuccagcccugg

SEQ ID NO: 245962 - RNA, 22 nt, Human
gcacacaugugaguguccuuuc

SEQ ID NO: 245963 - RNA, 22 nt, Human
ugcccuggcacacacacagcug

SEQ ID NO: 245964 - RNA, 22 nt, Human
aaugggcuuucuuggacaggag

SEQ ID NO: 245965 - RNA, 22 nt, Human
acuucauguuguuuacaacuua

SEQ ID NO: 245966 - RNA, 22 nt, Human
ugauccauauguguuacuucuc

SEQ ID NO: 245967 - RNA, 22 nt, Human
aagcugauucuaaaauuuauua

SEQ ID NO: 245968 - RNA, 22 nt, Human
aagugcaggucucagcuacucu

SEQ ID NO: 245969 - RNA, 22 nt, Human
gucugggcaggaaucugcauuc

SEQ ID NO: 245970 - RNA, 20 nt, Human
uaggcaauuaguagauaaca

SEQ ID NO: 245971 - RNA, 22 nt, Human
agugucugcuuaucaguucuug

SEQ ID NO: 245972 - RNA, 22 nt, Human
gcacacaucuuguaauccugag

SEQ ID NO: 245973 - RNA, 22 nt, Human
gagggcugcugccagauaugcc

SEQ ID NO: 245974 - RNA, 22 nt, Human
cccugggagaaguugagggcug

SEQ ID NO: 245975 - RNA, 22 nt, Human
cuauuucuaaaccuauaaguga

SEQ ID NO: 245976 - RNA, 22 nt, Human
ccacaggcugcugcaggucccg

SEQ ID NO: 245977 - RNA, 22 nt, Human
gcauuucuuccuggugugagcc

SEQ ID NO: 245978 - RNA, 22 nt, Human
gcuuuugucauucaaaugcucu

SEQ ID NO: 245979 - RNA, 18 nt, Human
cugugcagcaaacugagc

SEQ ID NO: 245980 - RNA, 22 nt, Human
ucccugcauuugggagaguguc

SEQ ID NO: 245981 - RNA, 22 nt, Human
cuaaaugacuuccagugguuau

SEQ ID NO: 245982 - RNA, 22 nt, Human
cacaugcauaaggauaauuacu

SEQ ID NO: 245983 - RNA, 22 nt, Human
ccuuggcccuagccucaggcaa

SEQ ID NO: 245984 - RNA, 22 nt, Human
cauuauauuacagcacuguuaa

SEQ ID NO: 245985 - RNA, 20 nt, Human
ucccaaggaugccugggugu

SEQ ID NO: 245986 - RNA, 22 nt, Human
uauucuuguauacuacaaucuu

SEQ ID NO: 245987 - RNA, 22 nt, Human
gauuuucugagccuucaaauuu

SEQ ID NO: 245988 - RNA, 22 nt, Human
ucuccuggauagauacuaucca

SEQ ID NO: 245989 - RNA, 22 nt, Human
auacaguauuaccuguucagga

SEQ ID NO: 245990 - RNA, 22 nt, Human
ggagcagcuugcaugcucaggg

SEQ ID NO: 245991 - RNA, 22 nt, Human
uccuggggccagcacuggugga

SEQ ID NO: 245992 - RNA, 23 nt, Human
aucugggcaucuggagugguccu

SEQ ID NO: 245993 - RNA, 22 nt, Human
ugcagggcagcuagggagcuuu

SEQ ID NO: 245994 - RNA, 16 nt, Human
aauugcuucuugcugc

SEQ ID NO: 245995 - RNA, 18 nt, Human
ucccucagaauuauagaa

SEQ ID NO: 245996 - RNA, 22 nt, Human
cauuuagagaagauuacaagga

SEQ ID NO: 245997 - RNA, 22 nt, Human
ugugacagaauuggucuguucu

SEQ ID NO: 245998 - RNA, 22 nt, Human
gcacacagaacauuuggauccu

SEQ ID NO: 245999 - RNA, 22 nt, Human
ccaggguuuaaauucugacuau

SEQ ID NO: 246000 - RNA, 22 nt, Human
caaggccaagucucugugaaga

SEQ ID NO: 246001 - RNA, 21 nt, Human
agcagcagaucuggugagggc

SEQ ID NO: 246002 - RNA, 22 nt, Human
cugggcucaguggcucauggcu

SEQ ID NO: 246003 - RNA, 22 nt, Human
ugcucugggcucaauggcagcu

SEQ ID NO: 246004 - RNA, 22 nt, Human
guggcuucaucaacugugcuua

SEQ ID NO: 246005 - RNA, 22 nt, Human
ucacacgugagguucuauccug

SEQ ID NO: 246006 - RNA, 18 nt, Human
cugcccagagcauuucau

SEQ ID NO: 246007 - RNA, 22 nt, Human
ucucuggcuuagguugagugca

SEQ ID NO: 246008 - RNA, 22 nt, Human
ccuccaggaacuugagagacac

SEQ ID NO: 246009 - RNA, 22 nt, Human
ucugaagagcuuuggaaguaug

SEQ ID NO: 246010 - RNA, 17 nt, Human
cacaugucuacauggau

SEQ ID NO: 246011 - RNA, 22 nt, Human
guucuguagucauagagcaauu

SEQ ID NO: 246012 - RNA, 22 nt, Human
cacauaauacauguuccacuua

SEQ ID NO: 246013 - RNA, 19 nt, Human
gcaggcaguggcauucgga

SEQ ID NO: 246014 - RNA, 22 nt, Human
gauucuuuacaucucugcugac

SEQ ID NO: 246015 - RNA, 22 nt, Human
uugugaaauguuucaaaauagu

SEQ ID NO: 246016 - RNA, 21 nt, Human
cugaauuaugugcuuaccuuu

SEQ ID NO: 246017 - RNA, 22 nt, Human
aaaaggauguuuucaugaaaca

SEQ ID NO: 246018 - RNA, 22 nt, Human
auaucuuuguuuuugccaagau

SEQ ID NO: 246019 - RNA, 22 nt, Human
cuggcugggagcgagcugcuca

SEQ ID NO: 246020 - RNA, 22 nt, Human
aacugcuuagugauggaugacc

SEQ ID NO: 246021 - RNA, 22 nt, Human
aagaguuucugauucaguaggu

SEQ ID NO: 246022 - RNA, 18 nt, Human
gacaaaaguacagacaga

SEQ ID NO: 246023 - RNA, 22 nt, Human
aaguaaaccacagagaagccac

SEQ ID NO: 246024 - RNA, 22 nt, Human
guacuucccugggaggcaagca

SEQ ID NO: 246025 - RNA, 22 nt, Human
gggaucugaugcacugcugaaa

SEQ ID NO: 246026 - RNA, 22 nt, Human
aaacugaggaacaaggaaggau

SEQ ID NO: 246027 - RNA, 22 nt, Human
gaguggggcuuuaaaggcucag

SEQ ID NO: 246028 - RNA, 22 nt, Human
gcagaaggauccgcaggugcaa

SEQ ID NO: 246029 - RNA, 22 nt, Human
ugagggacaccagggcuggagc

SEQ ID NO: 246030 - RNA, 22 nt, Human
aaagccuuugucucaggcucug

SEQ ID NO: 246031 - RNA, 23 nt, Human
ccauaaucaggguuguggggucc

SEQ ID NO: 246032 - RNA, 22 nt, Human
uuuuaaaggauagcucugguug

SEQ ID NO: 246033 - RNA, 22 nt, Human
aauaaagacucagaggcccagg

SEQ ID NO: 246034 - RNA, 22 nt, Human
uaauuccuagaaauuauucuca

SEQ ID NO: 246035 - RNA, 22 nt, Human
ggaaagagcccagcagugcuug

SEQ ID NO: 246036 - RNA, 22 nt, Human
aaaaugaggucaauauccuuuu

SEQ ID NO: 246037 - RNA, 22 nt, Human
uucugggcuaccuucccggcag

SEQ ID NO: 246038 - RNA, 22 nt, Human
cagcauuuggaggagaggcuuu

SEQ ID NO: 246039 - RNA, 22 nt, Human
cagcuuuaguaacccacugcuc

SEQ ID NO: 246040 - RNA, 22 nt, Human
gagcuucauauguugcagagaa

SEQ ID NO: 246041 - RNA, 22 nt, Human
uguccuuugggagggcacagcu

SEQ ID NO: 246042 - RNA, 22 nt, Human
uugcaacuucucccaucacucu

SEQ ID NO: 246043 - RNA, 20 nt, Human
guaaaauauggucuuugggu

SEQ ID NO: 246044 - RNA, 22 nt, Human
ucucuggaagcgcagaucuguu

SEQ ID NO: 246045 - RNA, 22 nt, Human
uugcaauugcuauggagagcgu

SEQ ID NO: 246046 - RNA, 22 nt, Human
aaauggaauguguuuauaauuc

SEQ ID NO: 246047 - RNA, 22 nt, Human
agaggccaucugcucugugggg

SEQ ID NO: 246048 - RNA, 22 nt, Human
acccaggagguggaggcugcag

SEQ ID NO: 246049 - RNA, 22 nt, Human
uccuucccaggugucgccgccu

SEQ ID NO: 246050 - RNA, 23 nt, Human
ucagaaugcacugaauuuacccu

SEQ ID NO: 246051 - RNA, 22 nt, Human
ugggcuauuaggaccaggccau

SEQ ID NO: 246052 - RNA, 22 nt, Human
acagugcagggcgggaagaagg

SEQ ID NO: 246053 - RNA, 16 nt, Human
ucuuuguaaucagcag

SEQ ID NO: 246054 - RNA, 22 nt, Human
aguguggcaggaaugacuagaa

SEQ ID NO: 246055 - RNA, 22 nt, Human
cauaauuuuuuuaagucagaac

SEQ ID NO: 246056 - RNA, 22 nt, Human
gaggcagugcauugucuagggg

SEQ ID NO: 246057 - RNA, 22 nt, Human
ucaauuucauucuauuaguuaa

SEQ ID NO: 246058 - RNA, 22 nt, Human
aaagaauuuguacacccuacua

SEQ ID NO: 246059 - RNA, 22 nt, Human
gcugucugucuucacaucucgc

SEQ ID NO: 246060 - RNA, 22 nt, Human
gagggaggcaucaugaauccag

SEQ ID NO: 246061 - RNA, 22 nt, Human
ggcugcucggagccuccuguga

SEQ ID NO: 246062 - RNA, 22 nt, Human
gccugcagaggugcugcuagcu

SEQ ID NO: 246063 - RNA, 22 nt, Human
cucuccagaauuauuacuauua

SEQ ID NO: 246064 - RNA, 22 nt, Human
acccagccuacaaagcucaccu

SEQ ID NO: 246065 - RNA, 22 nt, Human
uucauugaaccacuuuauucuu

SEQ ID NO: 246066 - RNA, 22 nt, Human
uggcucuggagcuggcggcuga

SEQ ID NO: 246067 - RNA, 22 nt, Human
guucauauucuaaguaacuggc

SEQ ID NO: 246068 - RNA, 22 nt, Human
acuacacuccaauuuucuaggu

SEQ ID NO: 246069 - RNA, 22 nt, Human
uauuuccaaaagccuauuauga

SEQ ID NO: 246070 - RNA, 21 nt, Human
auauuguagguaaagugcagg

SEQ ID NO: 246071 - RNA, 22 nt, Human
uguuucaggaccuaucuuuuag

SEQ ID NO: 246072 - RNA, 22 nt, Human
aguuuacucuggugacaauuua

SEQ ID NO: 246073 - RNA, 22 nt, Human
cagggacaggggagaaaagaug

SEQ ID NO: 246074 - RNA, 23 nt, Human
ugaaacauuuaggguagaauuuc

SEQ ID NO: 246075 - RNA, 22 nt, Human
ucugucagccccucagcuguca

SEQ ID NO: 246076 - RNA, 21 nt, Human
cuguccuggucuagaggcaca

SEQ ID NO: 246077 - RNA, 22 nt, Human
gcacugguaucaccugagagcu

SEQ ID NO: 246078 - RNA, 18 nt, Human
ucccuccugccugcuucc

SEQ ID NO: 246079 - RNA, 22 nt, Human
cucuggaauguuuacaugcccu

SEQ ID NO: 246080 - RNA, 19 nt, Human
ucuccaguugcuuucaggg

SEQ ID NO: 246081 - RNA, 22 nt, Human
uguggccucuaagcucacgaag

SEQ ID NO: 246082 - RNA, 21 nt, Human
ucauguguaacuuuugaccac

SEQ ID NO: 246083 - RNA, 22 nt, Human
agaaagaacgcacuugugcugc

SEQ ID NO: 246084 - RNA, 22 nt, Human
agaaugcauuuuguguagcuau

SEQ ID NO: 246085 - RNA, 22 nt, Human
gaaaaggauugguaaaauaucu

SEQ ID NO: 246086 - RNA, 22 nt, Human
gaggccaggggucagcaauugg

SEQ ID NO: 246087 - RNA, 17 nt, Human
uaucaagaagucuggcc

SEQ ID NO: 246088 - RNA, 22 nt, Human
uccagagggcgauggcuggggg

SEQ ID NO: 246089 - RNA, 22 nt, Human
agauccaucaucauauuuucua

SEQ ID NO: 246090 - RNA, 22 nt, Human
agugcugaggccauacuccaua

SEQ ID NO: 246091 - RNA, 22 nt, Human
ucuaaagauguuuauugacaua

SEQ ID NO: 246092 - RNA, 23 nt, Human
gccugugccuaugcccagcucug

SEQ ID NO: 246093 - RNA, 22 nt, Human
gguguccuuugggggcuccgag

SEQ ID NO: 246094 - RNA, 22 nt, Human
gaagcugggucgcugggauccu

SEQ ID NO: 246095 - RNA, 22 nt, Human
accauuacaugauccuuaccca

SEQ ID NO: 246096 - RNA, 22 nt, Human
caacaagcgcucagagcaaagc

SEQ ID NO: 246097 - RNA, 22 nt, Human
uucagcaaauggacuguucagg

SEQ ID NO: 246098 - RNA, 22 nt, Human
aguugaauaauuagacauaucu

SEQ ID NO: 246099 - RNA, 21 nt, Human
uccaggagcacgggacuagga

SEQ ID NO: 246100 - RNA, 22 nt, Human
aggcuucugcugauauuucauu

SEQ ID NO: 246101 - RNA, 22 nt, Human
agauccacuauggugcugauga

SEQ ID NO: 246102 - RNA, 19 nt, Human
aggcagucauuggaauaua

SEQ ID NO: 246103 - RNA, 22 nt, Human
guggaggagaggcgccuugcgg

SEQ ID NO: 246104 - RNA, 22 nt, Human
gaacaggguugggugagagagg

SEQ ID NO: 246105 - RNA, 22 nt, Human
uuuaugcaucucuaggaagggc

SEQ ID NO: 246106 - RNA, 22 nt, Human
ccugaagaugcuguggccuggu

SEQ ID NO: 246107 - RNA, 22 nt, Human
aauguguagggugccuguuuuu

SEQ ID NO: 246108 - RNA, 22 nt, Human
uaggcuccucucacauucuauu

SEQ ID NO: 246109 - RNA, 22 nt, Human
cugccuuugcccuugacacugu

SEQ ID NO: 246110 - RNA, 22 nt, Human
accugggauggggccagguuua

SEQ ID NO: 246111 - RNA, 22 nt, Human
acagguggcacugcuguuacuc

SEQ ID NO: 246112 - RNA, 22 nt, Human
gagagaaaagggggaauugauu

SEQ ID NO: 246113 - RNA, 22 nt, Human
uguuaugaacuucuagaaaaca

SEQ ID NO: 246114 - RNA, 22 nt, Human
gcugagcucccagcaguaucug

SEQ ID NO: 246115 - RNA, 22 nt, Human
aagacauuuaugaaaagugcug

SEQ ID NO: 246116 - RNA, 22 nt, Human
ccugggugaugugcugcccucg

SEQ ID NO: 246117 - RNA, 22 nt, Human
augacugcucugggcucccaug

SEQ ID NO: 246118 - RNA, 22 nt, Human
uuugacaaaggaaaaaugcaca

SEQ ID NO: 246119 - RNA, 22 nt, Human
aggcacuuaauaaggauucaau

SEQ ID NO: 246120 - RNA, 22 nt, Human
uggaggagaccgcauuuuauuu

SEQ ID NO: 246121 - RNA, 22 nt, Human
uuagcucagaaaauuuaaacuu

SEQ ID NO: 246122 - RNA, 22 nt, Human
guucucccuguccccugagcuu

SEQ ID NO: 246123 - RNA, 22 nt, Human
cauccauuaacucauuuguuuc

SEQ ID NO: 246124 - RNA, 22 nt, Human
aacaugauggggaagaacaaga

SEQ ID NO: 246125 - RNA, 22 nt, Human
aggcuggcugagcugcagccug

SEQ ID NO: 246126 - RNA, 22 nt, Human
guuacagucaggagauauuuug

SEQ ID NO: 246127 - RNA, 22 nt, Human
caggcuuggcagggaggcuggu

SEQ ID NO: 246128 - RNA, 22 nt, Human
acucagaggcuggaaaucaaag

SEQ ID NO: 246129 - RNA, 22 nt, Human
cuggucccugcagugugcuggg

SEQ ID NO: 246130 - RNA, 22 nt, Human
caggcugcagugcaguggcuau

SEQ ID NO: 246131 - RNA, 22 nt, Human
cccucucugacuucugaacuug

SEQ ID NO: 246132 - RNA, 22 nt, Human
aucauaagacccagccaguauu

SEQ ID NO: 246133 - RNA, 22 nt, Human
aagaguuuuuggagugugaguu

SEQ ID NO: 246134 - RNA, 22 nt, Human
uccauauaaugggauuccuuau

SEQ ID NO: 246135 - RNA, 22 nt, Human
gugcaugguaagaugcuucaca

SEQ ID NO: 246136 - RNA, 20 nt, Human
cccucccagaugcuucccaa

SEQ ID NO: 246137 - RNA, 22 nt, Human
ugagcaggcgcagcaggagguc

SEQ ID NO: 246138 - RNA, 22 nt, Human
uccuggcauugugcagggugug

SEQ ID NO: 246139 - RNA, 22 nt, Human
caggggcagucugugugcgugg

SEQ ID NO: 246140 - RNA, 22 nt, Human
ggagucugacucugacccugga

SEQ ID NO: 246141 - RNA, 22 nt, Human
uggagcuggaauuugagcugga

SEQ ID NO: 246142 - RNA, 22 nt, Human
ucuucuuuuauuucaagggugu

SEQ ID NO: 246143 - RNA, 22 nt, Human
uucacuuaacaucauaucauga

SEQ ID NO: 246144 - RNA, 22 nt, Human
uuaaggaaagccaaaaugaauu

SEQ ID NO: 246145 - RNA, 22 nt, Human
ggagggggacugacacugauuu

SEQ ID NO: 246146 - RNA, 22 nt, Human
aagcccaguuucacacugagac

SEQ ID NO: 246147 - RNA, 22 nt, Human
uacagguaaaauuaucagaaac

SEQ ID NO: 246148 - RNA, 22 nt, Human
gcugucuuggguagaaagaggu

SEQ ID NO: 246149 - RNA, 22 nt, Human
ccucccagaugugcccaaugga

SEQ ID NO: 246150 - RNA, 19 nt, Human
gcuggcuggaggagggaca

SEQ ID NO: 246151 - RNA, 22 nt, Human
aaaugcaccuugcugugagacu

SEQ ID NO: 246152 - RNA, 22 nt, Human
uuacaaagugcugcaccauuuu

SEQ ID NO: 246153 - RNA, 22 nt, Human
ugguaacuuucagcauggugac

SEQ ID NO: 246154 - RNA, 22 nt, Human
agagagcauggcacagaggggu

SEQ ID NO: 246155 - RNA, 22 nt, Human
ucacugugcucucuagauaggc

SEQ ID NO: 246156 - RNA, 22 nt, Human
ccuacaguuauauucuugauug

SEQ ID NO: 246157 - RNA, 22 nt, Human
gacaagauaaugaagugcaauu

SEQ ID NO: 246158 - RNA, 22 nt, Human
gcuuccagaccccagucccuca

SEQ ID NO: 246159 - RNA, 22 nt, Human
uccaggccacauggauggcgau

SEQ ID NO: 246160 - RNA, 22 nt, Human
caaggccaagguuuugugaacu

SEQ ID NO: 246161 - RNA, 22 nt, Human
ggagaccuuaaggugcuuccua

SEQ ID NO: 246162 - RNA, 22 nt, Human
gagcuauaauagagcuucagug

SEQ ID NO: 246163 - RNA, 22 nt, Human
uuguacagacccugaaaagcuc

SEQ ID NO: 246164 - RNA, 22 nt, Human
ucuguucagacacuuuacaugu

SEQ ID NO: 246165 - RNA, 19 nt, Human
uccuggcacaguggaacca

SEQ ID NO: 246166 - RNA, 22 nt, Human
cccauuuaaacacaagcuuuca

SEQ ID NO: 246167 - RNA, 22 nt, Human
gcaagaugguuauaaaaaaugu

SEQ ID NO: 246168 - RNA, 22 nt, Human
gcacuggggucauagccuccag

SEQ ID NO: 246169 - RNA, 23 nt, Human
guguguccauucgcacucuuagg

SEQ ID NO: 246170 - RNA, 19 nt, Human
uagcccagagccuggcuac

SEQ ID NO: 246171 - RNA, 23 nt, Human
gggcagguuuuuauaggcuucag

SEQ ID NO: 246172 - RNA, 22 nt, Human
gcccucagcaggaaagaucaac

SEQ ID NO: 246173 - RNA, 22 nt, Human
cugcagggccauggguucuaua

SEQ ID NO: 246174 - RNA, 22 nt, Human
ucugaggcccugcaggcagugu

SEQ ID NO: 246175 - RNA, 22 nt, Human
ugcacuccaggcugggugacag

SEQ ID NO: 246176 - RNA, 22 nt, Human
aggccagccucaggcagggacc

SEQ ID NO: 246177 - RNA, 22 nt, Human
agcugcaguucguuccagcucu

SEQ ID NO: 246178 - RNA, 22 nt, Human
ccaggcacgguggcucaugccu

SEQ ID NO: 246179 - RNA, 19 nt, Human
gaacuuggccaggcacagu

SEQ ID NO: 246180 - RNA, 22 nt, Human
acuauucaagugcucauucaga

SEQ ID NO: 246181 - RNA, 22 nt, Human
aaugucaauuaccagaacagaa

SEQ ID NO: 246182 - RNA, 22 nt, Human
cugggacagcugagacaggaga

SEQ ID NO: 246183 - RNA, 22 nt, Human
uucuucaguuugguaaauguaa

SEQ ID NO: 246184 - RNA, 22 nt, Human
agagcuguguuaagaacaggcc

SEQ ID NO: 246185 - RNA, 22 nt, Human
gggguugguuuaaaugcuugag

SEQ ID NO: 246186 - RNA, 22 nt, Human
ugaguauuccuuaucugaaaug

SEQ ID NO: 246187 - RNA, 20 nt, Human
caucuuuggcaggacuccuu

SEQ ID NO: 246188 - RNA, 22 nt, Human
auccuggcccucaugaccccuu

SEQ ID NO: 246189 - RNA, 22 nt, Human
uuacuaguauaugucaagcaac

SEQ ID NO: 246190 - RNA, 22 nt, Human
gccuggcacaguagggacccaa

SEQ ID NO: 246191 - RNA, 18 nt, Human
ccugagcccugcuuacuu

SEQ ID NO: 246192 - RNA, 22 nt, Human
uaacuguauagcuuggacuaaa

SEQ ID NO: 246193 - RNA, 22 nt, Human
cucuugggagugcucuggagaa

SEQ ID NO: 246194 - RNA, 22 nt, Human
aagucuuuuugaaucuauaacu

SEQ ID NO: 246195 - RNA, 22 nt, Human
aucucagucagguugaauuugg

SEQ ID NO: 246196 - RNA, 22 nt, Human
uccugugaccagcuuccaugcu

SEQ ID NO: 246197 - RNA, 22 nt, Human
ggaagaaagcacacaaacuuga

SEQ ID NO: 246198 - RNA, 22 nt, Human
aaggccuccgccaauggcagag

SEQ ID NO: 246199 - RNA, 22 nt, Human
uccaggaggugaggggaccaaa

SEQ ID NO: 246200 - RNA, 19 nt, Human
uuuggaacuuuuugaugcc

SEQ ID NO: 246201 - RNA, 22 nt, Human
acagcagcuuccugacuguacu

SEQ ID NO: 246202 - RNA, 22 nt, Human
aggcgaagggaccagacgguag

SEQ ID NO: 246203 - RNA, 22 nt, Human
aggguccugagccuggggcgca

SEQ ID NO: 246204 - RNA, 22 nt, Human
gcuucccaaacuuguggauaga

SEQ ID NO: 246205 - RNA, 22 nt, Human
agcugaggcaugaugcuaucag

SEQ ID NO: 246206 - RNA, 17 nt, Human
ugccugccagcauugga

SEQ ID NO: 246207 - RNA, 22 nt, Human
gugggcagcaccagggaagugu

SEQ ID NO: 246208 - RNA, 22 nt, Human
agcugguauuucugaaggaaag

SEQ ID NO: 246209 - RNA, 22 nt, Human
ugacauuuuaucaauaucacag

SEQ ID NO: 246210 - RNA, 22 nt, Human
acuuucaaauaucaugauucua

SEQ ID NO: 246211 - RNA, 22 nt, Human
accucuaaaaaauuagaagccu

SEQ ID NO: 246212 - RNA, 22 nt, Human
gggguccuggaggccagcugga

SEQ ID NO: 246213 - RNA, 22 nt, Human
agcacaauauaaagugaacgca

SEQ ID NO: 246214 - RNA, 22 nt, Human
auaguuugaaggcuguucuacu

SEQ ID NO: 246215 - RNA, 22 nt, Human
uuccuggcacauaguuagugcu

SEQ ID NO: 246216 - RNA, 22 nt, Human
ucauauaagagcuuuagaguca

SEQ ID NO: 246217 - RNA, 22 nt, Human
acagucauuagauacaaugucu

SEQ ID NO: 246218 - RNA, 22 nt, Human
gggaagagugucgguugaagug

SEQ ID NO: 246219 - RNA, 22 nt, Human
uaggccaguaaaauguuucagu

SEQ ID NO: 246220 - RNA, 22 nt, Human
gcagagcauguccucaggacag

SEQ ID NO: 246221 - RNA, 22 nt, Human
uugaaugauccuaucuagcaca

SEQ ID NO: 246222 - RNA, 22 nt, Human
ucugggcugugccaaagcucuu

SEQ ID NO: 246223 - RNA, 19 nt, Human
acauggcaucccaggaggu

SEQ ID NO: 246224 - RNA, 22 nt, Human
ccaugcagugcuggagcugauu

SEQ ID NO: 246225 - RNA, 22 nt, Human
uggccugguaccacauagauuu

SEQ ID NO: 246226 - RNA, 22 nt, Human
aaaguucaugguguuauagaaa

SEQ ID NO: 246227 - RNA, 22 nt, Human
uacagagggauuaucuaagggu

SEQ ID NO: 246228 - RNA, 22 nt, Human
gggagccagcagggcauggagc

SEQ ID NO: 246229 - RNA, 22 nt, Human
ugagguggugcuaaucucugcu

SEQ ID NO: 246230 - RNA, 22 nt, Human
aauacaguagguaauaguucau

SEQ ID NO: 246231 - RNA, 22 nt, Human
aagcuguucugaaucaguaagu

SEQ ID NO: 246232 - RNA, 22 nt, Human
aaguauaagcuauucuucauga

SEQ ID NO: 246233 - RNA, 22 nt, Human
cagggaugucucuggaagggag

SEQ ID NO: 246234 - RNA, 22 nt, Human
ugcaggugucugggggcaacag

SEQ ID NO: 246235 - RNA, 22 nt, Human
agcucagggcuccaggaccgcu

SEQ ID NO: 246236 - RNA, 22 nt, Human
ucuggcccuauggcauguaccu

SEQ ID NO: 246237 - RNA, 22 nt, Human
ggacugggauucuggaucugcu

SEQ ID NO: 246238 - RNA, 22 nt, Human
uuacuuuaucuccuagauucca

SEQ ID NO: 246239 - RNA, 22 nt, Human
ugucgauucagcucuucagaga

SEQ ID NO: 246240 - RNA, 22 nt, Human
aagaagcauggcuguagauucc

SEQ ID NO: 246241 - RNA, 22 nt, Human
ccugggcccucaccgccggugg

SEQ ID NO: 246242 - RNA, 22 nt, Human
uaagcaagauuuauugaauuuu

SEQ ID NO: 246243 - RNA, 22 nt, Human
ggacaggcaggugauuuccaga

SEQ ID NO: 246244 - RNA, 22 nt, Human
gacaaaaguguuuugaacaagg

SEQ ID NO: 246245 - RNA, 22 nt, Human
aagagucuuauaguguaauuaa

SEQ ID NO: 246246 - RNA, 22 nt, Human
cagcccuggccucuucgcuuuc

SEQ ID NO: 246247 - RNA, 22 nt, Human
ccuuuggucuugaugaacuguu

SEQ ID NO: 246248 - RNA, 21 nt, Human
ucuggggaagacaucuaggau

SEQ ID NO: 246249 - RNA, 22 nt, Human
ccugggaguggcacucacagca

SEQ ID NO: 246250 - RNA, 22 nt, Human
ggcccucugcucacuuccuauu

SEQ ID NO: 246251 - RNA, 22 nt, Human
cuccagggcagcauggcagugg

SEQ ID NO: 246252 - RNA, 22 nt, Human
agaaugcucuucaaaaucuagc

SEQ ID NO: 246253 - RNA, 22 nt, Human
agagucagacuaagccauggug

SEQ ID NO: 246254 - RNA, 22 nt, Human
ggagucuuaaaaaucaaaugga

SEQ ID NO: 246255 - RNA, 22 nt, Human
gagucuucuacgcucacacaaa

SEQ ID NO: 246256 - RNA, 19 nt, Human
acaugacaacaggggaggc

SEQ ID NO: 246257 - RNA, 22 nt, Human
cuucuugugcugggccagcuuc

SEQ ID NO: 246258 - RNA, 22 nt, Human
caggguccggcugccuggcugu

SEQ ID NO: 246259 - RNA, 22 nt, Human
ucccugcuuggaaugacccuua

SEQ ID NO: 246260 - RNA, 22 nt, Human
gcacaguaccugucacagaggc

SEQ ID NO: 246261 - RNA, 22 nt, Human
auucuucacauaagugcuguac

SEQ ID NO: 246262 - RNA, 22 nt, Human
aaacugucauuuuauauaguua

SEQ ID NO: 246263 - RNA, 22 nt, Human
uuguacagguuccuagggugga

SEQ ID NO: 246264 - RNA, 22 nt, Human
gcugugcacuaccuauacaucc

SEQ ID NO: 246265 - RNA, 19 nt, Human
aguguguacugaaagcacu

SEQ ID NO: 246266 - RNA, 22 nt, Human
agggagcugacuggcugccauu

SEQ ID NO: 246267 - RNA, 22 nt, Human
gaggagcugaggcugaggccuc

SEQ ID NO: 246268 - RNA, 22 nt, Human
cccuggugcccugggucagccu

SEQ ID NO: 246269 - RNA, 20 nt, Human
ucuuggaaaaaguucagaau

SEQ ID NO: 246270 - RNA, 20 nt, Human
auacaaagagauugauguau

SEQ ID NO: 246271 - RNA, 22 nt, Human
cagugcaggcugggggcccugc

SEQ ID NO: 246272 - RNA, 22 nt, Human
uauucacuguaacucagcaaua

SEQ ID NO: 246273 - RNA, 22 nt, Human
agguccagcucuauugaaaaga

SEQ ID NO: 246274 - RNA, 18 nt, Human
auuuacccagcaacgugg

SEQ ID NO: 246275 - RNA, 23 nt, Human
acuacagauacuccugcuguuug

SEQ ID NO: 246276 - RNA, 22 nt, Human
gccucuuguuuccuuacaugga

SEQ ID NO: 246277 - RNA, 18 nt, Human
gcaggccuagaacuuggu

SEQ ID NO: 246278 - RNA, 22 nt, Human
uugugaauagugccgcuauaaa

SEQ ID NO: 246279 - RNA, 23 nt, Human
uggaggcaggaugcuaaggaguc

SEQ ID NO: 246280 - RNA, 22 nt, Human
ucacaaaugaggaaaucgagca

SEQ ID NO: 246281 - RNA, 22 nt, Human
uccaggcaagggaggagcaugg

SEQ ID NO: 246282 - RNA, 22 nt, Human
cccugaggcacaggccacguau

SEQ ID NO: 246283 - RNA, 22 nt, Human
ucaaaggguagcccagggaaga

SEQ ID NO: 246284 - RNA, 22 nt, Human
acagaauuaaaguguuugugga

SEQ ID NO: 246285 - RNA, 22 nt, Human
aaacaugcuggauuuagaauau

SEQ ID NO: 246286 - RNA, 23 nt, Human
ugcuguggauggcagguccuugc

SEQ ID NO: 246287 - RNA, 22 nt, Human
gggugggaaggcuaagggauug

SEQ ID NO: 246288 - RNA, 22 nt, Human
uuccaggcuccugcaguuucua

SEQ ID NO: 246289 - RNA, 22 nt, Human
ucuuagaaacuguaucgauuag

SEQ ID NO: 246290 - RNA, 22 nt, Human
uucuuuauccuauuuguaggug

SEQ ID NO: 246291 - RNA, 22 nt, Human
ugcuuuaacauaagauaucuuu

SEQ ID NO: 246292 - RNA, 22 nt, Human
ucacagaaggagggaagcuagu

SEQ ID NO: 246293 - RNA, 22 nt, Human
cuccuccagcucucccuggggg

SEQ ID NO: 246294 - RNA, 22 nt, Human
ggggagcaggcugggcugucug

SEQ ID NO: 246295 - RNA, 22 nt, Human
ggucuggauaauuccaguaccu

SEQ ID NO: 246296 - RNA, 22 nt, Human
gcugccugcucggcuccuggga

SEQ ID NO: 246297 - RNA, 23 nt, Human
uucuuucaagaaguucacagugc

SEQ ID NO: 246298 - RNA, 22 nt, Human
ugucaucuucacugggucacaa

SEQ ID NO: 246299 - RNA, 22 nt, Human
aacaugcauauagguaaaugga

SEQ ID NO: 246300 - RNA, 23 nt, Human
aggcaaggguguaaaggaaauga

SEQ ID NO: 246301 - RNA, 22 nt, Human
cugcaacucucuccagaggcug

SEQ ID NO: 246302 - RNA, 22 nt, Human
uccugagggcugcagucauagg

SEQ ID NO: 246303 - RNA, 22 nt, Human
ucagugcauucauggguggcug

SEQ ID NO: 246304 - RNA, 22 nt, Human
aagagcuucccuguuguagagg

SEQ ID NO: 246305 - RNA, 22 nt, Human
gagggggacguauccugguaug

SEQ ID NO: 246306 - RNA, 19 nt, Human
ucucccggcacuccugccc

SEQ ID NO: 246307 - RNA, 22 nt, Human
cagagcaccagugggagacaag

SEQ ID NO: 246308 - RNA, 22 nt, Human
cuggagagaauguggaaugauu

SEQ ID NO: 246309 - RNA, 19 nt, Human
ucuguaacacucuagccuu

SEQ ID NO: 246310 - RNA, 22 nt, Human
gaaccucuuuagugcauccuuc

SEQ ID NO: 246311 - RNA, 18 nt, Human
ccucugccauagccagca

SEQ ID NO: 246312 - RNA, 22 nt, Human
ucauuccauuuccagcucugaa

SEQ ID NO: 246313 - RNA, 20 nt, Human
acugguggacuguucauuga

SEQ ID NO: 246314 - RNA, 22 nt, Human
uccccaccuacacacugcuccu

SEQ ID NO: 246315 - RNA, 22 nt, Human
aggucuggcucuucuccacaga

SEQ ID NO: 246316 - RNA, 22 nt, Human
aaaaaaucagaucuuugguuaa

SEQ ID NO: 246317 - RNA, 22 nt, Human
cauuugugugggaacccaucag

SEQ ID NO: 246318 - RNA, 22 nt, Human
auggacuuaagagucagaagcu

SEQ ID NO: 246319 - RNA, 22 nt, Human
accucagaggaggcuccuggcu

SEQ ID NO: 246320 - RNA, 22 nt, Human
caguuaaacgaugaugggguca

SEQ ID NO: 246321 - RNA, 22 nt, Human
ugcauuuuuaacaaggcuaauu

SEQ ID NO: 246322 - RNA, 22 nt, Human
gauugcugccagcguguccgug

SEQ ID NO: 246323 - RNA, 22 nt, Human
gaugugucccuuucaacucaga

SEQ ID NO: 246324 - RNA, 22 nt, Human
cacaauuauagaagaaagcaua

SEQ ID NO: 246325 - RNA, 22 nt, Human
agaaaaacuaagaguggguggu

SEQ ID NO: 246326 - RNA, 23 nt, Human
agcucugaaauagggaaagagga

SEQ ID NO: 246327 - RNA, 22 nt, Human
agguggcagagugacaggcuga

SEQ ID NO: 246328 - RNA, 22 nt, Human
agcugagcacauucaaacaggu

SEQ ID NO: 246329 - RNA, 22 nt, Human
ggagucugauacugaguuccuc

SEQ ID NO: 246330 - RNA, 22 nt, Human
uaguccaguaaaacagcuaacg

SEQ ID NO: 246331 - RNA, 23 nt, Human
cagucugcagcccacuugggcag

SEQ ID NO: 246332 - RNA, 22 nt, Human
auaagcauguuagaauauuuga

SEQ ID NO: 246333 - RNA, 22 nt, Human
aggcagagcuaggaagaauugu

SEQ ID NO: 246334 - RNA, 22 nt, Human
cagcccuggcgcccccagaucu

SEQ ID NO: 246335 - RNA, 22 nt, Human
gaaucaauugugaagacuauga

SEQ ID NO: 246336 - RNA, 22 nt, Human
agguggggccaaaugcuacagu

SEQ ID NO: 246337 - RNA, 22 nt, Human
uucaugaauauauugaauuagc

SEQ ID NO: 246338 - RNA, 22 nt, Human
acaggcagagaguggcggacuc

SEQ ID NO: 246339 - RNA, 21 nt, Human
uggcugacucuuccuaucauu

SEQ ID NO: 246340 - RNA, 22 nt, Human
aaagauaauguuuccuuauucu

SEQ ID NO: 246341 - RNA, 21 nt, Human
aauagcauucaggaugggcuc

SEQ ID NO: 246342 - RNA, 22 nt, Human
uacagggauuccugccgcucgc

SEQ ID NO: 246343 - RNA, 22 nt, Human
ccuuuucuacaagcaaaugugc

SEQ ID NO: 246344 - RNA, 22 nt, Human
aggcagcuuuguaguaaagcua

SEQ ID NO: 246345 - RNA, 22 nt, Human
aagauggcugcagcaauuccaa

SEQ ID NO: 246346 - RNA, 22 nt, Human
gcagaggccugaagguggcggg

SEQ ID NO: 246347 - RNA, 22 nt, Human
ugagaccucuggguucugagcu

SEQ ID NO: 246348 - RNA, 22 nt, Human
uauauauucuuaaguaguguag

SEQ ID NO: 246349 - RNA, 22 nt, Human
cuagggaaggacaaccucuucc

SEQ ID NO: 246350 - RNA, 22 nt, Human
agaagccagcuucagcugcccg

SEQ ID NO: 246351 - RNA, 22 nt, Human
acuuccagguuccacccaagac

SEQ ID NO: 246352 - RNA, 18 nt, Human
ugggccugcauccuaguc

SEQ ID NO: 246353 - RNA, 22 nt, Human
acaagaaccaaagaaggauauu

SEQ ID NO: 246354 - RNA, 22 nt, Human
uuccaggaccaggaagagggga

SEQ ID NO: 246355 - RNA, 22 nt, Human
cagcaacugugccugacacaca

SEQ ID NO: 246356 - RNA, 22 nt, Human
gacauaaaugaaguuugacuau

SEQ ID NO: 246357 - RNA, 20 nt, Human
agcugguuaucuuaauucuu

SEQ ID NO: 246358 - RNA, 22 nt, Human
uaauauacuucccauaguuuga

SEQ ID NO: 246359 - RNA, 18 nt, Human
augcaagcuauggauuug

SEQ ID NO: 246360 - RNA, 22 nt, Human
uaggugucuuucuguccuuguu

SEQ ID NO: 246361 - RNA, 22 nt, Human
ucugugcaggaagucauuauga

SEQ ID NO: 246362 - RNA, 22 nt, Human
caggaaaauggaaucaccugua

SEQ ID NO: 246363 - RNA, 22 nt, Human
cagacagaaggaaggccaacau

SEQ ID NO: 246364 - RNA, 22 nt, Human
ucagaacagguuguacuauguc

SEQ ID NO: 246365 - RNA, 22 nt, Human
auggcaguguuucaguuuuugg

SEQ ID NO: 246366 - RNA, 22 nt, Human
agcccagcuuccuucugucucu

SEQ ID NO: 246367 - RNA, 22 nt, Human
ugguccuuuaagucuuucucug

SEQ ID NO: 246368 - RNA, 23 nt, Human
uuacaugugugcacacauucugg

SEQ ID NO: 246369 - RNA, 22 nt, Human
ggagccugguuacuagagccug

SEQ ID NO: 246370 - RNA, 22 nt, Human
uggcccaaagcagcccagcagg

SEQ ID NO: 246371 - RNA, 22 nt, Human
auuuauuauugugguuacuucu

SEQ ID NO: 246372 - RNA, 22 nt, Human
caauacaauuaccaguuaauca

SEQ ID NO: 246373 - RNA, 20 nt, Human
agcuguuuacauggauuucu

SEQ ID NO: 246374 - RNA, 22 nt, Human
cccaguuucaacuuuccagugg

SEQ ID NO: 246375 - RNA, 22 nt, Human
ugaggaaacugaggcacagaug

SEQ ID NO: 246376 - RNA, 22 nt, Human
gcagggcacaaggacgcacagg

SEQ ID NO: 246377 - RNA, 22 nt, Human
uuuaaucaggcaaagcauaaua

SEQ ID NO: 246378 - RNA, 22 nt, Human
gguccuuugaaagggguguguc

SEQ ID NO: 246379 - RNA, 22 nt, Human
gagucagaaacucacucuauag

SEQ ID NO: 246380 - RNA, 23 nt, Human
acagggcuuaucugucacucauc

SEQ ID NO: 246381 - RNA, 21 nt, Human
cuggcucuguugucacccggc

SEQ ID NO: 246382 - RNA, 22 nt, Human
gguccagguuugcucuacuugu

SEQ ID NO: 246383 - RNA, 22 nt, Human
gcccccacaggcgggcucgggu

SEQ ID NO: 246384 - RNA, 21 nt, Human
ucugugguauggccaucuucc

SEQ ID NO: 246385 - RNA, 22 nt, Human
cauggccuugagugacugcacu

SEQ ID NO: 246386 - RNA, 19 nt, Human
uccuuucuguuccugagau

SEQ ID NO: 246387 - RNA, 18 nt, Human
aggcuugggcccagcagc

SEQ ID NO: 246388 - RNA, 22 nt, Human
gccuggcaggccugggccagca

SEQ ID NO: 246389 - RNA, 22 nt, Human
cagcaugccugggcugccugcc

SEQ ID NO: 246390 - RNA, 22 nt, Human
acaguguggaaagucaacuuga

SEQ ID NO: 246391 - RNA, 22 nt, Human
aucaaaaugcuccagugauggu

SEQ ID NO: 246392 - RNA, 22 nt, Human
gccugugaugcccccauaagua

SEQ ID NO: 246393 - RNA, 22 nt, Human
gucuggagggaagagaugucag

SEQ ID NO: 246394 - RNA, 22 nt, Human
gggccagcaguaucggaggcau

SEQ ID NO: 246395 - RNA, 22 nt, Human
cagcugaguuuccaagucugcc

SEQ ID NO: 246396 - RNA, 22 nt, Human
cuccuggcccugagcucccagg

SEQ ID NO: 246397 - RNA, 23 nt, Human
gagguacagcaccagugaauagg

SEQ ID NO: 246398 - RNA, 22 nt, Human
cuggccacugcgggccucugcc

SEQ ID NO: 246399 - RNA, 22 nt, Human
uucagagaagcaaaggcagauu

SEQ ID NO: 246400 - RNA, 22 nt, Human
cuuaagcaaaauauucuuucac

SEQ ID NO: 246401 - RNA, 22 nt, Human
ugcccugcaugcagggagcugu

SEQ ID NO: 246402 - RNA, 22 nt, Human
uccuggguaaacacugaccuuu

SEQ ID NO: 246403 - RNA, 22 nt, Human
ugaggucaagcccagagcagca

SEQ ID NO: 246404 - RNA, 22 nt, Human
ugccuuuuccaguuccuagaag

SEQ ID NO: 246405 - RNA, 22 nt, Human
gaugauuuaaguggccaaagua

SEQ ID NO: 246406 - RNA, 22 nt, Human
ucucagugguguuuugagucca

SEQ ID NO: 246407 - RNA, 22 nt, Human
acuucauuguaauauuauagca

SEQ ID NO: 246408 - RNA, 22 nt, Human
aauauccauugggagcaaaugg

SEQ ID NO: 246409 - RNA, 22 nt, Human
caguucaaaauuuugaagaagg

SEQ ID NO: 246410 - RNA, 22 nt, Human
uccaggccacugcagaggcucu

SEQ ID NO: 246411 - RNA, 22 nt, Human
agacacaguuugggauggguug

SEQ ID NO: 246412 - RNA, 22 nt, Human
uucugagauacaaaauuuacuu

SEQ ID NO: 246413 - RNA, 22 nt, Human
ugcaaaggggacagaguccacu

SEQ ID NO: 246414 - RNA, 22 nt, Human
ucuagggugugcggcagggcua

SEQ ID NO: 246415 - RNA, 22 nt, Human
aauuaacagagggcuuauuacu

SEQ ID NO: 246416 - RNA, 20 nt, Human
ugugucuuccuuucuuuaug

SEQ ID NO: 246417 - RNA, 22 nt, Human
ucauuuaucgcugccuuuuaaa

SEQ ID NO: 246418 - RNA, 22 nt, Human
aggaagaacagauaauggacgc

SEQ ID NO: 246419 - RNA, 23 nt, Human
gggcccagcacaggaccuggcag

SEQ ID NO: 246420 - RNA, 22 nt, Human
ucugaaauuccuuccagacuuu

SEQ ID NO: 246421 - RNA, 22 nt, Human
uugagaaaauaguucgaauguu

SEQ ID NO: 246422 - RNA, 22 nt, Human
acuuagcagguggugacucgaa

SEQ ID NO: 246423 - RNA, 22 nt, Human
ccaggcuguaaacaccuucaaa

SEQ ID NO: 246424 - RNA, 22 nt, Human
gaagacauguuuuuaauaugua

SEQ ID NO: 246425 - RNA, 22 nt, Human
agaaaugcucuuccugaccaga

SEQ ID NO: 246426 - RNA, 22 nt, Human
uagauguuaagcuucuagaagg

SEQ ID NO: 246427 - RNA, 19 nt, Human
agcacaguuuccacaugca

SEQ ID NO: 246428 - RNA, 22 nt, Human
cagcuucagaagaagccgugag

SEQ ID NO: 246429 - RNA, 22 nt, Human
uuucucuuuggaggggcugaau

SEQ ID NO: 246430 - RNA, 22 nt, Human
uccauacuggaguccacaguuc

SEQ ID NO: 246431 - RNA, 22 nt, Human
aaaugcuugcucuugauuauuu

SEQ ID NO: 246432 - RNA, 22 nt, Human
ucuuucaaagcaaaaugaggcu

SEQ ID NO: 246433 - RNA, 18 nt, Human
uucggcagauacgcuugg

SEQ ID NO: 246434 - RNA, 22 nt, Human
uccucagagaugggcaucuaag

SEQ ID NO: 246435 - RNA, 17 nt, Human
uccuuucuuuaccuguu

SEQ ID NO: 246436 - RNA, 22 nt, Human
uuguauuugauugucauaucgu

SEQ ID NO: 246437 - RNA, 22 nt, Human
uacuuguggcaguuugaauuua

SEQ ID NO: 246438 - RNA, 22 nt, Human
uccugggcugugugccacucug

SEQ ID NO: 246439 - RNA, 22 nt, Human
cacccagcauuggcuaagagag

SEQ ID NO: 246440 - RNA, 21 nt, Human
aguccaggccugcccacuucc

SEQ ID NO: 246441 - RNA, 22 nt, Human
cccagcaucuccaggcauggcc

SEQ ID NO: 246442 - RNA, 23 nt, Human
uuuuauugauauguagcuguugu

SEQ ID NO: 246443 - RNA, 22 nt, Human
agggagaaugaccaagguauau

SEQ ID NO: 246444 - RNA, 22 nt, Human
augcuuuuaugucacaugguca

SEQ ID NO: 246445 - RNA, 22 nt, Human
aaagacuuucaccuagcaaaga

SEQ ID NO: 246446 - RNA, 22 nt, Human
uuucucucuggcccugauuguc

SEQ ID NO: 246447 - RNA, 22 nt, Human
uggcaauguaggcaagaacauu

SEQ ID NO: 246448 - RNA, 22 nt, Human
uggucagaacucagcgugcuug

SEQ ID NO: 246449 - RNA, 22 nt, Human
ugggccuggacaaggccacuag

SEQ ID NO: 246450 - RNA, 23 nt, Human
uuccaggcagagcagggauuaga

SEQ ID NO: 246451 - RNA, 22 nt, Human
aaaagacauaugugggcauucu

SEQ ID NO: 246452 - RNA, 22 nt, Human
aaaguggugggcgaacucauca

SEQ ID NO: 246453 - RNA, 22 nt, Human
gcagggugccgacuucagggau

SEQ ID NO: 246454 - RNA, 18 nt, Human
gcacagagcccaggcucu

SEQ ID NO: 246455 - RNA, 21 nt, Human
auacauucuauuaagcauuua

SEQ ID NO: 246456 - RNA, 22 nt, Human
acaauagaguucucauaggaca

SEQ ID NO: 246457 - RNA, 22 nt, Human
aacugcaagaguaaaugucuag

SEQ ID NO: 246458 - RNA, 22 nt, Human
uaaaugcagauuccugagccua

SEQ ID NO: 246459 - RNA, 22 nt, Human
uugugcauuagggaaaggaacu

SEQ ID NO: 246460 - RNA, 22 nt, Human
uagaaacuagauugauagcgga

SEQ ID NO: 246461 - RNA, 22 nt, Human
aggcagggcugggauuagacuc

SEQ ID NO: 246462 - RNA, 22 nt, Human
ucaagacauauuaaaugugcga

SEQ ID NO: 246463 - RNA, 22 nt, Human
aguguccuuucuguuccagcca

SEQ ID NO: 246464 - RNA, 22 nt, Human
ugucuucaaauauugaaauccu

SEQ ID NO: 246465 - RNA, 22 nt, Human
gcacccaggcuugggcagcaac

SEQ ID NO: 246466 - RNA, 22 nt, Human
ucaggcccagagucacggaucc

SEQ ID NO: 246467 - RNA, 22 nt, Human
ccugagagagugagcccugaca

SEQ ID NO: 246468 - RNA, 22 nt, Human
aaggcauaugcauagaagacag

SEQ ID NO: 246469 - RNA, 17 nt, Human
uccuuggcaaccaguuc

SEQ ID NO: 246470 - RNA, 22 nt, Human
uuacaguaaucgaguguugugg

SEQ ID NO: 246471 - RNA, 22 nt, Human
ugagucucauuaauuaugaaug

SEQ ID NO: 246472 - RNA, 22 nt, Human
gaguccaguucuuuccagcagu

SEQ ID NO: 246473 - RNA, 22 nt, Human
uaaagcacauaucuuacaauaa

SEQ ID NO: 246474 - RNA, 22 nt, Human
caggaacuggaacccuggccga

SEQ ID NO: 246475 - RNA, 22 nt, Human
aagcugaaucugaaauagaauu

SEQ ID NO: 246476 - RNA, 22 nt, Human
ugcuuauuugaauuuauucuca

SEQ ID NO: 246477 - RNA, 22 nt, Human
agcuggagccagugugaggcuu

SEQ ID NO: 246478 - RNA, 22 nt, Human
gacagcaaagcagagccaaggc

SEQ ID NO: 246479 - RNA, 22 nt, Human
gauucauguuauagagagucag

SEQ ID NO: 246480 - RNA, 22 nt, Human
uucugggcaggacuggggaccc

SEQ ID NO: 246481 - RNA, 22 nt, Human
uugaauuauaagugugucuacu

SEQ ID NO: 246482 - RNA, 22 nt, Human
uggucacacauguaucucaaug

SEQ ID NO: 246483 - RNA, 23 nt, Human
agcuccugaggccagccucuccu

SEQ ID NO: 246484 - RNA, 22 nt, Human
uccaauguuccugcuuucagcu

SEQ ID NO: 246485 - RNA, 22 nt, Human
uucccucucuagcuuuccccaa

SEQ ID NO: 246486 - RNA, 22 nt, Human
auaauaacuccuguugaagaac

SEQ ID NO: 246487 - RNA, 22 nt, Human
aagaucagaacuuuauacagga

SEQ ID NO: 246488 - RNA, 20 nt, Human
ccagagcagccacugaaguu

SEQ ID NO: 246489 - RNA, 22 nt, Human
ugccaggcuuagagcaggggcu

SEQ ID NO: 246490 - RNA, 22 nt, Human
cugagguaccuggagcaggucc

SEQ ID NO: 246491 - RNA, 21 nt, Human
agcagccauggaugguaugua

SEQ ID NO: 246492 - RNA, 22 nt, Human
guguacauauugagucugcuga

SEQ ID NO: 246493 - RNA, 22 nt, Human
cagcccuccuuucacucccagg

SEQ ID NO: 246494 - RNA, 22 nt, Human
caggagaggcuguacguuucuc

SEQ ID NO: 246495 - RNA, 22 nt, Human
uaucuagagccuggaagucuug

SEQ ID NO: 246496 - RNA, 22 nt, Human
ugggagagaauaaucaauaggu

SEQ ID NO: 246497 - RNA, 22 nt, Human
gccuggcagccuccaaccuuca

SEQ ID NO: 246498 - RNA, 22 nt, Human
ucuagggaaccuauccuaugau

SEQ ID NO: 246499 - RNA, 21 nt, Human
aacugcuggucuuuucugucu

SEQ ID NO: 246500 - RNA, 22 nt, Human
gaucuuugcaaacuuugucacu

SEQ ID NO: 246501 - RNA, 23 nt, Human
uaagugauuccaaguuucaggga

SEQ ID NO: 246502 - RNA, 22 nt, Human
acccaggcuagagugcaguggu

SEQ ID NO: 246503 - RNA, 22 nt, Human
caggacagacagaaugccuaac

SEQ ID NO: 246504 - RNA, 22 nt, Human
aaugcacauaaauauggucuua

SEQ ID NO: 246505 - RNA, 22 nt, Human
ggaggugacuggaucaugggca

SEQ ID NO: 246506 - RNA, 22 nt, Human
guuggcuaugagagcuuuagug

SEQ ID NO: 246507 - RNA, 22 nt, Human
agcuauggaacagaguggcugu

SEQ ID NO: 246508 - RNA, 22 nt, Human
guuucaaaagucaggcuauucu

SEQ ID NO: 246509 - RNA, 22 nt, Human
gaggccucaugaggugagcauu

SEQ ID NO: 246510 - RNA, 22 nt, Human
ucauaaaaugcuccugauauug

SEQ ID NO: 246511 - RNA, 17 nt, Human
gagagucuaaugggaga

SEQ ID NO: 246512 - RNA, 22 nt, Human
gaaagcagcuaagucuuaugau

SEQ ID NO: 246513 - RNA, 22 nt, Human
cucaaaauccauaaaaucaggu

SEQ ID NO: 246514 - RNA, 22 nt, Human
agaggccagcacugcagggaag

SEQ ID NO: 246515 - RNA, 22 nt, Human
aagccuuccugagugcaaggcc

SEQ ID NO: 246516 - RNA, 22 nt, Human
ucuguaggacagagaaaugggg

SEQ ID NO: 246517 - RNA, 22 nt, Human
auucaagguauuuaaaacauaa

SEQ ID NO: 246518 - RNA, 22 nt, Human
gagcuggugaucagcuggagga

SEQ ID NO: 246519 - RNA, 22 nt, Human
gccagucucccucaguccucug

SEQ ID NO: 246520 - RNA, 20 nt, Human
ggcaccaggcuaggauugga

SEQ ID NO: 246521 - RNA, 22 nt, Human
uauguuacucacauguucuugc

SEQ ID NO: 246522 - RNA, 22 nt, Human
ggcucuggagcacagacgucug

SEQ ID NO: 246523 - RNA, 22 nt, Human
ucucugggaauucacaagcccu

SEQ ID NO: 246524 - RNA, 22 nt, Human
acaaaugcaaguuuuaugucaa

SEQ ID NO: 246525 - RNA, 22 nt, Human
uuagugcucauccagauggggg

SEQ ID NO: 246526 - RNA, 22 nt, Human
uucuccaguuauauuauguuaa

SEQ ID NO: 246527 - RNA, 22 nt, Human
ucaucuguggcugcuuuugugc

SEQ ID NO: 246528 - RNA, 22 nt, Human
gaaggccacggaauggagcugg

SEQ ID NO: 246529 - RNA, 22 nt, Human
ccagagucuaugaguccucauu

SEQ ID NO: 246530 - RNA, 22 nt, Human
cugaggggauguuuuugacgga

SEQ ID NO: 246531 - RNA, 22 nt, Human
aaauagaauuggaagcagaguu

SEQ ID NO: 246532 - RNA, 22 nt, Human
agcaaacacaagagguaauuuc

SEQ ID NO: 246533 - RNA, 22 nt, Human
cucucugugguggcugucccau

SEQ ID NO: 246534 - RNA, 22 nt, Human
gugggccugaugcugccaugag

SEQ ID NO: 246535 - RNA, 22 nt, Human
gaagucuuuuagcaaaacgaac

SEQ ID NO: 246536 - RNA, 22 nt, Human
cugggccuugaucacacaggug

SEQ ID NO: 246537 - RNA, 22 nt, Human
uacaguauuaugagugauugaa

SEQ ID NO: 246538 - RNA, 23 nt, Human
ucaguaccacagcugcaugaccu

SEQ ID NO: 246539 - RNA, 22 nt, Human
uuggucagcucaauggagaggg

SEQ ID NO: 246540 - RNA, 22 nt, Human
gaccuagauuaacauucuguga

SEQ ID NO: 246541 - RNA, 22 nt, Human
ucugggaacugagcuccccuag

SEQ ID NO: 246542 - RNA, 22 nt, Human
augcuuuacaguuuuccaaaca

SEQ ID NO: 246543 - RNA, 22 nt, Human
cuuucuuucgaagacgugauua

SEQ ID NO: 246544 - RNA, 22 nt, Human
cuucuuccugcugcagccucca

SEQ ID NO: 246545 - RNA, 22 nt, Human
augauuuaaagucauugugaac

SEQ ID NO: 246546 - RNA, 22 nt, Human
ggcuaggccucaggccugccug

SEQ ID NO: 246547 - RNA, 19 nt, Human
ccaaaagcaauuccaagua

SEQ ID NO: 246548 - RNA, 22 nt, Human
ugggacucacucuuuuggccag

SEQ ID NO: 246549 - RNA, 23 nt, Human
ucagagaaugguaugcuuuuccu

SEQ ID NO: 246550 - RNA, 19 nt, Human
ccugaguguuucagagaca

SEQ ID NO: 246551 - RNA, 22 nt, Human
gacaagcucgccugccccggaa

SEQ ID NO: 246552 - RNA, 22 nt, Human
acagaagcaaagacucaggcaa

SEQ ID NO: 246553 - RNA, 22 nt, Human
uucacauuucauaccacagcuu

SEQ ID NO: 246554 - RNA, 22 nt, Human
cugagucuccuggggaggugaa

SEQ ID NO: 246555 - RNA, 22 nt, Human
ucugggaaguccucugucaugc

SEQ ID NO: 246556 - RNA, 22 nt, Human
aaaugcuguaacugauauucug

SEQ ID NO: 246557 - RNA, 22 nt, Human
aaggcuuuaugugaccaaaaga

SEQ ID NO: 246558 - RNA, 22 nt, Human
gcacaggaaaugacucauguua

SEQ ID NO: 246559 - RNA, 22 nt, Human
cagcuucuccggccuggugcgg

SEQ ID NO: 246560 - RNA, 22 nt, Human
aaagcuggcuuuuacaggggcu

SEQ ID NO: 246561 - RNA, 22 nt, Human
agaaaucagaacccugaaguuc

SEQ ID NO: 246562 - RNA, 22 nt, Human
cguguccuuuuagcuucagguc

SEQ ID NO: 246563 - RNA, 22 nt, Human
acuuggugaagucaggugauua

SEQ ID NO: 246564 - RNA, 19 nt, Human
uggcauugguccagauaaa

SEQ ID NO: 246565 - RNA, 22 nt, Human
aagcuguagaggcaguacauuu

SEQ ID NO: 246566 - RNA, 22 nt, Human
aguacaaaugcagccagaguag

SEQ ID NO: 246567 - RNA, 22 nt, Human
gagcucuucuaaagauggcaau

SEQ ID NO: 246568 - RNA, 21 nt, Human
ugaggcaaguccuuuuauagc

SEQ ID NO: 246569 - RNA, 22 nt, Human
guccuggcuguguuugguuucu

SEQ ID NO: 246570 - RNA, 22 nt, Human
uggaggcaucagagugcuuggc

SEQ ID NO: 246571 - RNA, 22 nt, Human
caccuagcauuccucuuccuca

SEQ ID NO: 246572 - RNA, 22 nt, Human
cccagcaguacccaagcccuug

SEQ ID NO: 246573 - RNA, 22 nt, Human
cacaauguauauguauaucaaa

SEQ ID NO: 246574 - RNA, 22 nt, Human
aucuggagugggacacagaaau

SEQ ID NO: 246575 - RNA, 22 nt, Human
auucacauuuagacaucaggua

SEQ ID NO: 246576 - RNA, 22 nt, Human
uugcaaauuaaagaggauagca

SEQ ID NO: 246577 - RNA, 22 nt, Human
aagacauucaugaagaagggau

SEQ ID NO: 246578 - RNA, 22 nt, Human
ucaaauaccagcuuuuccagaa

SEQ ID NO: 246579 - RNA, 22 nt, Human
guuauauugccaaguauauugu

SEQ ID NO: 246580 - RNA, 22 nt, Human
acaggagccaaacacaugccag

SEQ ID NO: 246581 - RNA, 22 nt, Human
uuggccuucccuaccugggcca

SEQ ID NO: 246582 - RNA, 22 nt, Human
aagcacagggugucugcauuca

SEQ ID NO: 246583 - RNA, 22 nt, Human
ggugggagagcucugucuccag

SEQ ID NO: 246584 - RNA, 22 nt, Human
acaggcagagaacucagccaga

SEQ ID NO: 246585 - RNA, 22 nt, Human
aagcugaaaaugagacucuaca

SEQ ID NO: 246586 - RNA, 22 nt, Human
ucuggugucaguauucuuugaa

SEQ ID NO: 246587 - RNA, 23 nt, Human
agguccuggacauaugugcauca

SEQ ID NO: 246588 - RNA, 22 nt, Human
agagccaggcucuaccuggguu

SEQ ID NO: 246589 - RNA, 22 nt, Human
ugucuccuacugccuguggauc

SEQ ID NO: 246590 - RNA, 22 nt, Human
ugaggggcggccugcagaggcc

SEQ ID NO: 246591 - RNA, 22 nt, Human
aaagggcagaguucacuagaaa

SEQ ID NO: 246592 - RNA, 22 nt, Human
augcagcugucagggagaacau

SEQ ID NO: 246593 - RNA, 22 nt, Human
guggccuuuccugaagaaauga

SEQ ID NO: 246594 - RNA, 22 nt, Human
aaucuggacuugucugugaaga

SEQ ID NO: 246595 - RNA, 22 nt, Human
aauuucagaccauuugcaauua

SEQ ID NO: 246596 - RNA, 22 nt, Human
cuuauucuacuccacaagcucu

SEQ ID NO: 246597 - RNA, 20 nt, Human
ucuaauuaaaauugucuagu

SEQ ID NO: 246598 - RNA, 22 nt, Human
auuucuaguccuuguguaguca

SEQ ID NO: 246599 - RNA, 22 nt, Human
agcccugagccagccuggucag

SEQ ID NO: 246600 - RNA, 22 nt, Human
ugcaggucuccauuggcagacu

SEQ ID NO: 246601 - RNA, 22 nt, Human
accaggcaugauguggagcaca

SEQ ID NO: 246602 - RNA, 22 nt, Human
aaaagccuggauacuaucauua

SEQ ID NO: 246603 - RNA, 22 nt, Human
ccuggcugcuuucacuauggag

SEQ ID NO: 246604 - RNA, 22 nt, Human
ucacccagaaaagacagcagau

SEQ ID NO: 246605 - RNA, 22 nt, Human
uuugaaacccgucacuuugagu

SEQ ID NO: 246606 - RNA, 22 nt, Human
uauuuguugcgggaauugcuau

SEQ ID NO: 246607 - RNA, 22 nt, Human
ugguccugccccgugcacagag

SEQ ID NO: 246608 - RNA, 22 nt, Human
aucuaagauguauugagcacuu

SEQ ID NO: 246609 - RNA, 22 nt, Human
aaaccugauagauuuucagaau

SEQ ID NO: 246610 - RNA, 22 nt, Human
ccagguggugaaagugggcccu

SEQ ID NO: 246611 - RNA, 22 nt, Human
uacaguuuagaaccauagaugg

SEQ ID NO: 246612 - RNA, 22 nt, Human
caaauguuaaauguguuaagac

SEQ ID NO: 246613 - RNA, 22 nt, Human
agcugggucuugggccaggaga

SEQ ID NO: 246614 - RNA, 22 nt, Human
agguauauauucugguccuuau

SEQ ID NO: 246615 - RNA, 22 nt, Human
gcugggagccccgagccagcgc

SEQ ID NO: 246616 - RNA, 22 nt, Human
gucauuuaaaagggaacacaug

SEQ ID NO: 246617 - RNA, 22 nt, Human
ggagggaagugaguucucagcu

SEQ ID NO: 246618 - RNA, 18 nt, Human
cccagcuccacuucccuc

SEQ ID NO: 246619 - RNA, 22 nt, Human
gaaauuaaccaccuuuggcuuu

SEQ ID NO: 246620 - RNA, 22 nt, Human
ucucugggccucaguuuucuca

SEQ ID NO: 246621 - RNA, 22 nt, Human
gcuccagcaccuagagcagguc

SEQ ID NO: 246622 - RNA, 22 nt, Human
cugggagggguagccaauccua

SEQ ID NO: 246623 - RNA, 22 nt, Human
gacucuuucccugugacagagu

SEQ ID NO: 246624 - RNA, 22 nt, Human
uguguucauuuaacuguucuuu

SEQ ID NO: 246625 - RNA, 22 nt, Human
accuagaacugcaggcuauuuu

SEQ ID NO: 246626 - RNA, 22 nt, Human
cacugagccuugccagcuuggu

SEQ ID NO: 246627 - RNA, 22 nt, Human
acuaaauaguuuugacagaaca

SEQ ID NO: 246628 - RNA, 22 nt, Human
uguuuacuggcuccugugguuc

SEQ ID NO: 246629 - RNA, 22 nt, Human
auguuaaaagugaggauggcca

SEQ ID NO: 246630 - RNA, 22 nt, Human
aaagccugucuggucauagcua

SEQ ID NO: 246631 - RNA, 22 nt, Human
uuccucagggcggaugggcagg

SEQ ID NO: 246632 - RNA, 22 nt, Human
ugagucugggcauguucacuuu

SEQ ID NO: 246633 - RNA, 22 nt, Human
ugcauauaucuuauuuuucugu

SEQ ID NO: 246634 - RNA, 22 nt, Human
ucugaggaauaagaaggaagug

SEQ ID NO: 246635 - RNA, 22 nt, Human
ggcccucuguggcugccaugga

SEQ ID NO: 246636 - RNA, 22 nt, Human
aggacagagggaccagagccca

SEQ ID NO: 246637 - RNA, 22 nt, Human
guugccuucuaugauucucagu

SEQ ID NO: 246638 - RNA, 22 nt, Human
augaggcuauuucauagauuuu

SEQ ID NO: 246639 - RNA, 22 nt, Human
acuauacaguauguacgugcac

SEQ ID NO: 246640 - RNA, 23 nt, Human
acuuugcagagccccuugaaaca

SEQ ID NO: 246641 - RNA, 20 nt, Human
cagaaagaagguagauuuuu

SEQ ID NO: 246642 - RNA, 22 nt, Human
ucuuugcaugcauuuucccuua

SEQ ID NO: 246643 - RNA, 22 nt, Human
acauguguaaggucucucaguc

SEQ ID NO: 246644 - RNA, 22 nt, Human
auauuucagcuuuacuuaggaa

SEQ ID NO: 246645 - RNA, 22 nt, Human
acaacaaucuacccuagcuucu

SEQ ID NO: 246646 - RNA, 22 nt, Human
gagccuccuccuggugugccga

SEQ ID NO: 246647 - RNA, 22 nt, Human
gaacauuccuggaagagugcuu

SEQ ID NO: 246648 - RNA, 22 nt, Human
ugagcuuauacaugugaaguca

SEQ ID NO: 246649 - RNA, 22 nt, Human
uauuuagugauagaagcaagga

SEQ ID NO: 246650 - RNA, 23 nt, Human
ugcauuauccucucugaagacca

SEQ ID NO: 246651 - RNA, 22 nt, Human
auguuauuaaaguacagauucu

SEQ ID NO: 246652 - RNA, 22 nt, Human
caugcuguugaauaugacauug

SEQ ID NO: 246653 - RNA, 22 nt, Human
ugcuagaauuugcagaagcaua

SEQ ID NO: 246654 - RNA, 22 nt, Human
agugcuuuauguuguugugcaa

SEQ ID NO: 246655 - RNA, 23 nt, Human
uaggcuucugcuguccccgacgc

SEQ ID NO: 246656 - RNA, 22 nt, Human
ccuggcucagcagcucuuucuc

SEQ ID NO: 246657 - RNA, 22 nt, Human
auucuuguuuaauuugcauccc

SEQ ID NO: 246658 - RNA, 22 nt, Human
aagcaaaagguuacacuucugg

SEQ ID NO: 246659 - RNA, 22 nt, Human
caggcugcauggagggguacag

SEQ ID NO: 246660 - RNA, 22 nt, Human
uuuguaaagucuguucugaguu

SEQ ID NO: 246661 - RNA, 22 nt, Human
ucugugugaccauaagccagcu

SEQ ID NO: 246662 - RNA, 22 nt, Human
auacaugugucccugauuuauu

SEQ ID NO: 246663 - RNA, 22 nt, Human
agucugggagggaugccagugu

SEQ ID NO: 246664 - RNA, 20 nt, Human
uuuaagaaguuucugaggaa

SEQ ID NO: 246665 - RNA, 23 nt, Human
auaguuuucccugguucuugcca

SEQ ID NO: 246666 - RNA, 22 nt, Human
uacaagucacuuccuuucuaaa

SEQ ID NO: 246667 - RNA, 22 nt, Human
aaaaucugcuuccuuuuacaga

SEQ ID NO: 246668 - RNA, 22 nt, Human
uugauucaaccacuuaauaauc

SEQ ID NO: 246669 - RNA, 22 nt, Human
caggcagcugacugucagauau

SEQ ID NO: 246670 - RNA, 20 nt, Human
gcaacuagggagacacagcu

SEQ ID NO: 246671 - RNA, 22 nt, Human
cauuagaauuagguuguuuacc

SEQ ID NO: 246672 - RNA, 22 nt, Human
gccuguucugcccugagagccu

SEQ ID NO: 246673 - RNA, 22 nt, Human
ccuugaaagccaggcagaggaa

SEQ ID NO: 246674 - RNA, 22 nt, Human
uggcaggugaaguuguuaggga

SEQ ID NO: 246675 - RNA, 22 nt, Human
uguggaagugccaaugacaaau

SEQ ID NO: 246676 - RNA, 22 nt, Human
gacacagaauuccccuccaagu

SEQ ID NO: 246677 - RNA, 22 nt, Human
cagcaugcuugggggagggagc

SEQ ID NO: 246678 - RNA, 22 nt, Human
cugccugcugcccuccagagcc

SEQ ID NO: 246679 - RNA, 18 nt, Human
acucugcggaggccccag

SEQ ID NO: 246680 - RNA, 22 nt, Human
uuggaauccugagaugagaauu

SEQ ID NO: 246681 - RNA, 22 nt, Human
cuguucuaucauuaaaagcuau

SEQ ID NO: 246682 - RNA, 22 nt, Human
cugagucuguacguuagccaua

SEQ ID NO: 246683 - RNA, 22 nt, Human
agagggcaaguguaguccagua

SEQ ID NO: 246684 - RNA, 22 nt, Human
uguaaauugaaggaaauuugug

SEQ ID NO: 246685 - RNA, 22 nt, Human
gugcaggcuagauccuuccuac

SEQ ID NO: 246686 - RNA, 22 nt, Human
aaguggacuaauacaaggacua

SEQ ID NO: 246687 - RNA, 22 nt, Human
uggguaggaaucgaguguaugg

SEQ ID NO: 246688 - RNA, 22 nt, Human
aggugcuuggcucgugcacaca

SEQ ID NO: 246689 - RNA, 22 nt, Human
ggcuagggaucuagaccaggac

SEQ ID NO: 246690 - RNA, 22 nt, Human
ucuguuuagaugcuuuaucugu

SEQ ID NO: 246691 - RNA, 22 nt, Human
gggaaacugaauucaggacucu

SEQ ID NO: 246692 - RNA, 22 nt, Human
auccaggccugagucugguccu

SEQ ID NO: 246693 - RNA, 22 nt, Human
gcuggagguggugagaaaaggu

SEQ ID NO: 246694 - RNA, 22 nt, Human
cuguuacuggacgcacgcagcu

SEQ ID NO: 246695 - RNA, 22 nt, Human
gagauguacaauguguauuaau

SEQ ID NO: 246696 - RNA, 22 nt, Human
cuguccuguagcuccaucaguc

SEQ ID NO: 246697 - RNA, 22 nt, Human
aggaucuugcuguagaggauag

SEQ ID NO: 246698 - RNA, 22 nt, Human
uccaggagguuuggaggaagca

SEQ ID NO: 246699 - RNA, 22 nt, Human
gcaggcuguagacaccaaacua

SEQ ID NO: 246700 - RNA, 22 nt, Human
uccaggucagacuucugugccc

SEQ ID NO: 246701 - RNA, 22 nt, Human
uggccaggcauucagauaagac

SEQ ID NO: 246702 - RNA, 22 nt, Human
gaagggaacugggucuccuugu

SEQ ID NO: 246703 - RNA, 22 nt, Human
ccucccacauugaggacaugcu

SEQ ID NO: 246704 - RNA, 22 nt, Human
aaggaagaggcagguuuugcug

SEQ ID NO: 246705 - RNA, 22 nt, Human
ugaaacagugcuucacucagcc

SEQ ID NO: 246706 - RNA, 19 nt, Human
auacagauguauccaugau

SEQ ID NO: 246707 - RNA, 22 nt, Human
uccaggcugugcaugaguuuag

SEQ ID NO: 246708 - RNA, 22 nt, Human
uggugaggucauagagaacugu

SEQ ID NO: 246709 - RNA, 22 nt, Human
ggcagugccacuaagcucugcu

SEQ ID NO: 246710 - RNA, 22 nt, Human
aauauaugacuccacugcauga

SEQ ID NO: 246711 - RNA, 22 nt, Human
uuguuuaauaucgugaaguacu

SEQ ID NO: 246712 - RNA, 22 nt, Human
uuaagaagguacucaaagaucu

SEQ ID NO: 246713 - RNA, 22 nt, Human
gcuggcuggcacguucgcacgu

SEQ ID NO: 246714 - RNA, 18 nt, Human
aagucuggcagcuuuccc

SEQ ID NO: 246715 - RNA, 22 nt, Human
uccaauauuucucacauaugga

SEQ ID NO: 246716 - RNA, 22 nt, Human
gaagcaaguggccugauucaga

SEQ ID NO: 246717 - RNA, 22 nt, Human
cucugggcggcccaggccaacc

SEQ ID NO: 246718 - RNA, 21 nt, Human
uucaaaguuugccuaaagauu

SEQ ID NO: 246719 - RNA, 22 nt, Human
auuuuaguaccucaaguaucca

SEQ ID NO: 246720 - RNA, 17 nt, Human
ucuguucaagugagagg

SEQ ID NO: 246721 - RNA, 21 nt, Human
agagaaagucauggcuguggc

SEQ ID NO: 246722 - RNA, 20 nt, Human
guccaggacccagcaggagg

SEQ ID NO: 246723 - RNA, 23 nt, Human
ugugaccccuaggaguggggacc

SEQ ID NO: 246724 - RNA, 22 nt, Human
uuccugggggcagcagucuuga

SEQ ID NO: 246725 - RNA, 22 nt, Human
ucugccuucgcugcucccugaa

SEQ ID NO: 246726 - RNA, 22 nt, Human
agcagcuggaacauaugaagaa

SEQ ID NO: 246727 - RNA, 21 nt, Human
uggagcucccugcaucccacu

SEQ ID NO: 246728 - RNA, 22 nt, Human
uuguaacagguacuaaauaacu

SEQ ID NO: 246729 - RNA, 22 nt, Human
aaauaucauucuggugcacaga

SEQ ID NO: 246730 - RNA, 22 nt, Human
ugcuuucaugaagucuauagag

SEQ ID NO: 246731 - RNA, 22 nt, Human
uuuauucacuggggucugcccg

SEQ ID NO: 246732 - RNA, 22 nt, Human
uggaggaguagauuuucagagg

SEQ ID NO: 246733 - RNA, 22 nt, Human
gcaguuugagguuuucugaugu

SEQ ID NO: 246734 - RNA, 22 nt, Human
gaguucuuaggcaaacaacucu

SEQ ID NO: 246735 - RNA, 22 nt, Human
caagcagguccugaaucugguc

SEQ ID NO: 246736 - RNA, 22 nt, Human
aacuuucuggcuuuggggagag

SEQ ID NO: 246737 - RNA, 22 nt, Human
uuucauuauacagcuucauaaa

SEQ ID NO: 246738 - RNA, 22 nt, Human
cuguccugguacuuugagguuc

SEQ ID NO: 246739 - RNA, 22 nt, Human
ugcaagagacagacaugacuca

SEQ ID NO: 246740 - RNA, 22 nt, Human
agucuccacuugacaucagcag

SEQ ID NO: 246741 - RNA, 22 nt, Human
aaggaacuuugcagaggugauu

SEQ ID NO: 246742 - RNA, 22 nt, Human
cuugcugggguaagucugugcu

SEQ ID NO: 246743 - RNA, 22 nt, Human
ugccaggcagugucagauugag

SEQ ID NO: 246744 - RNA, 22 nt, Human
cagggcccagucccugcuguca

SEQ ID NO: 246745 - RNA, 22 nt, Human
caguggcaaugggacagagcac

SEQ ID NO: 246746 - RNA, 22 nt, Human
accuucaagaaacauuuccuug

SEQ ID NO: 246747 - RNA, 22 nt, Human
cagaaagcaaaauggaucucug

SEQ ID NO: 246748 - RNA, 22 nt, Human
gccucugcugcaagccugguug

SEQ ID NO: 246749 - RNA, 22 nt, Human
ggaaagaggauaguggguaggu

SEQ ID NO: 246750 - RNA, 22 nt, Human
acuagauuuuggccauuauaca

SEQ ID NO: 246751 - RNA, 22 nt, Human
uuccccaggcggcuuuuucagc

SEQ ID NO: 246752 - RNA, 22 nt, Human
uacaguuuguauggucaggaau

SEQ ID NO: 246753 - RNA, 22 nt, Human
ugggggugguucuugccuccag

SEQ ID NO: 246754 - RNA, 22 nt, Human
cacuggaaccauccacauagug

SEQ ID NO: 246755 - RNA, 22 nt, Human
cauuugaaaauacucuuuucca

SEQ ID NO: 246756 - RNA, 22 nt, Human
guucacauccuugugaggauuu

SEQ ID NO: 246757 - RNA, 18 nt, Human
cugagugaugauggggug

SEQ ID NO: 246758 - RNA, 22 nt, Human
gugcagcagggggaagacagug

SEQ ID NO: 246759 - RNA, 22 nt, Human
aggccagugcagcuggaacaga

SEQ ID NO: 246760 - RNA, 22 nt, Human
aacagguacaguuucccucugg

SEQ ID NO: 246761 - RNA, 20 nt, Human
uccucccccaccuuugcagc

SEQ ID NO: 246762 - RNA, 22 nt, Human
ccaggggcuggugcugagcugg

SEQ ID NO: 246763 - RNA, 22 nt, Human
augguacaauuuucauuugugg

SEQ ID NO: 246764 - RNA, 22 nt, Human
cucugagggucuaaggagucac

SEQ ID NO: 246765 - RNA, 22 nt, Human
gaguguauggaaggaagagauu

SEQ ID NO: 246766 - RNA, 22 nt, Human
gcugcucuggcucugcaguguc

SEQ ID NO: 246767 - RNA, 22 nt, Human
gcugcgguggcuggcgauggga

SEQ ID NO: 246768 - RNA, 22 nt, Human
acaucuuugcucuuauagagcu

SEQ ID NO: 246769 - RNA, 16 nt, Human
agcaccagaucauauc

SEQ ID NO: 246770 - RNA, 23 nt, Human
uuucacagcuuuuauucugcauc

SEQ ID NO: 246771 - RNA, 22 nt, Human
uggcagcuuccugcucauagga

SEQ ID NO: 246772 - RNA, 22 nt, Human
aaauguguuuagaugguuuauu

SEQ ID NO: 246773 - RNA, 22 nt, Human
acacauucuuuaaaugucuguu

SEQ ID NO: 246774 - RNA, 22 nt, Human
uucuccagaccacugccucugu

SEQ ID NO: 246775 - RNA, 22 nt, Human
ggcaucagagguguguucugcu

SEQ ID NO: 246776 - RNA, 22 nt, Human
cagagugauggcaccugcuggg

SEQ ID NO: 246777 - RNA, 22 nt, Human
cacuggugaguccagaagucau

SEQ ID NO: 246778 - RNA, 22 nt, Human
ucuccacaagcugaugcuagga

SEQ ID NO: 246779 - RNA, 22 nt, Human
ucuggcaguuugagaaaggcua

SEQ ID NO: 246780 - RNA, 22 nt, Human
gccucagcucccagcccaggcu

SEQ ID NO: 246781 - RNA, 22 nt, Human
aagacagaccacgugacagggc

SEQ ID NO: 246782 - RNA, 22 nt, Human
auuuggaacuuauaauaaguuu

SEQ ID NO: 246783 - RNA, 22 nt, Human
aaaacaggugucagcaaacuau

SEQ ID NO: 246784 - RNA, 22 nt, Human
guguguccuugggccucugcag

SEQ ID NO: 246785 - RNA, 22 nt, Human
uugcagggaaauagaaauaaac

SEQ ID NO: 246786 - RNA, 22 nt, Human
uuucacagcuagugagcuucua

SEQ ID NO: 246787 - RNA, 22 nt, Human
uuuucuuuaaucugguggggug

SEQ ID NO: 246788 - RNA, 22 nt, Human
uuaacauacaucaugaacaaug

SEQ ID NO: 246789 - RNA, 22 nt, Human
uggggccugaaagguucucgcc

SEQ ID NO: 246790 - RNA, 22 nt, Human
acuggcagagguuggacaccau

SEQ ID NO: 246791 - RNA, 22 nt, Human
ucucuggagggcuccaggcggg

SEQ ID NO: 246792 - RNA, 22 nt, Human
gcccaggauucuuucuuccuua

SEQ ID NO: 246793 - RNA, 22 nt, Human
uccugaggccucugugauguga

SEQ ID NO: 246794 - RNA, 22 nt, Human
gaaaguauucucccugaauuuu

SEQ ID NO: 246795 - RNA, 22 nt, Human
cacaaugauuugguucaaaaau

SEQ ID NO: 246796 - RNA, 22 nt, Human
caggcuucuuuucuuuccagac

SEQ ID NO: 246797 - RNA, 20 nt, Human
cauggcugugagcccacagg

SEQ ID NO: 246798 - RNA, 23 nt, Human
ccaccuggacucugggcaggugc

SEQ ID NO: 246799 - RNA, 22 nt, Human
agcuuccuugaauucuguagaa

SEQ ID NO: 246800 - RNA, 22 nt, Human
ugucagcaguaucucuaucuca

SEQ ID NO: 246801 - RNA, 22 nt, Human
gagugucagcagggcagagcac

SEQ ID NO: 246802 - RNA, 22 nt, Human
agagggugagcagguacacaug

SEQ ID NO: 246803 - RNA, 22 nt, Human
gcagggacaucuucagaucacu

SEQ ID NO: 246804 - RNA, 22 nt, Human
aaacuugacagugagacaguuu

SEQ ID NO: 246805 - RNA, 22 nt, Human
agagggggaaaauagagguguu

SEQ ID NO: 246806 - RNA, 22 nt, Human
gccugagcccaggugugcagag

SEQ ID NO: 246807 - RNA, 22 nt, Human
cagagcaggcccacugcccucc

SEQ ID NO: 246808 - RNA, 22 nt, Human
ucugggcacacaccaugcccac

SEQ ID NO: 246809 - RNA, 22 nt, Human
ugcucagcgccaaagcugaugg

SEQ ID NO: 246810 - RNA, 22 nt, Human
ggcaggcuugguggcaccgguu

SEQ ID NO: 246811 - RNA, 22 nt, Human
uagcacaagcaacuacugaagu

SEQ ID NO: 246812 - RNA, 22 nt, Human
gagggggagaugugcacacacu

SEQ ID NO: 246813 - RNA, 19 nt, Human
ccuacuuguuugagggaag

SEQ ID NO: 246814 - RNA, 19 nt, Human
aucuaagagaugggggaaa

SEQ ID NO: 246815 - RNA, 22 nt, Human
ccaaaauuaagccucuuauguu

SEQ ID NO: 246816 - RNA, 22 nt, Human
gaggcacaguguuuggucagug

SEQ ID NO: 246817 - RNA, 22 nt, Human
gagcugaaauaugaagccaauu

SEQ ID NO: 246818 - RNA, 22 nt, Human
uaugagaacaagaacaaucucc

SEQ ID NO: 246819 - RNA, 22 nt, Human
agacaaauaacuuuuuaugucc

SEQ ID NO: 246820 - RNA, 22 nt, Human
acuguuuaggaggcuuauaugc

SEQ ID NO: 246821 - RNA, 22 nt, Human
ccuggcacagauccuucauaca

SEQ ID NO: 246822 - RNA, 22 nt, Human
agggccugggccagcacccuuu

SEQ ID NO: 246823 - RNA, 22 nt, Human
uauuuacuuuuaaauugagaac

SEQ ID NO: 246824 - RNA, 22 nt, Human
aggcuuggugccaaggagccug

SEQ ID NO: 246825 - RNA, 22 nt, Human
aaggcuggggugcagacggccu

SEQ ID NO: 246826 - RNA, 22 nt, Human
gggggacaggaugaauaucugu

SEQ ID NO: 246827 - RNA, 22 nt, Human
ggccaggccaagaggguuggaa

SEQ ID NO: 246828 - RNA, 22 nt, Human
uacauguucaaauuugucuuuc

SEQ ID NO: 246829 - RNA, 22 nt, Human
acugucuugcuaugagcuccca

SEQ ID NO: 246830 - RNA, 22 nt, Human
agcugaaucucaggcauccuuu

SEQ ID NO: 246831 - RNA, 22 nt, Human
aggcuucuacguggucccaggg

SEQ ID NO: 246832 - RNA, 22 nt, Human
gcugggcugagaaguuaagcaa

SEQ ID NO: 246833 - RNA, 22 nt, Human
ccucagcauccucaugcucagu

SEQ ID NO: 246834 - RNA, 23 nt, Human
auuuccuaaaagauaaucauuac

SEQ ID NO: 246835 - RNA, 22 nt, Human
guuccugaagggacuggugcag

SEQ ID NO: 246836 - RNA, 23 nt, Human
uuuugugugacuuaauaucucuu

SEQ ID NO: 246837 - RNA, 22 nt, Human
uacuaggaagcagcugcauugg

SEQ ID NO: 246838 - RNA, 22 nt, Human
cucucagcaggaaagcaugcaa

SEQ ID NO: 246839 - RNA, 22 nt, Human
aagcaguagaaugcauugcuuu

SEQ ID NO: 246840 - RNA, 22 nt, Human
caaaguuuuaguaaacauauau

SEQ ID NO: 246841 - RNA, 22 nt, Human
uggucugggcaaauccuucuga

SEQ ID NO: 246842 - RNA, 22 nt, Human
caggucccgccccgggcugacc

SEQ ID NO: 246843 - RNA, 22 nt, Human
gugcaaagugcauggggaaggg

SEQ ID NO: 246844 - RNA, 23 nt, Human
ugacagaccuucccagacaguca

SEQ ID NO: 246845 - RNA, 22 nt, Human
aucuuguuaaaaugcagaaacu

SEQ ID NO: 246846 - RNA, 22 nt, Human
cacagggaggcggucacuggcu

SEQ ID NO: 246847 - RNA, 22 nt, Human
ucuuugcaucccuuccauaguu

SEQ ID NO: 246848 - RNA, 22 nt, Human
aaauucaauuaacuuucaugcu

SEQ ID NO: 246849 - RNA, 22 nt, Human
gcuuccugaguacacccucauc

SEQ ID NO: 246850 - RNA, 22 nt, Human
aauguaaagcucaggucaggag

SEQ ID NO: 246851 - RNA, 22 nt, Human
gcagguguuuuaagacauugaa

SEQ ID NO: 246852 - RNA, 22 nt, Human
acacauaugucauugaaaaauc

SEQ ID NO: 246853 - RNA, 22 nt, Human
agcacaggugaaacagucaggu

SEQ ID NO: 246854 - RNA, 20 nt, Human
ggagagccacauagucuccc

SEQ ID NO: 246855 - RNA, 22 nt, Human
uuuuucauauuccccucucugg

SEQ ID NO: 246856 - RNA, 22 nt, Human
aagaaaacaaugacuugccagc

SEQ ID NO: 246857 - RNA, 22 nt, Human
uguuucugucuguuuucuacau

SEQ ID NO: 246858 - RNA, 22 nt, Human
accagcucuucugcucuaguug

SEQ ID NO: 246859 - RNA, 22 nt, Human
uucacacuguuuuucauagugg

SEQ ID NO: 246860 - RNA, 22 nt, Human
cccagacccagagggaggcagg

SEQ ID NO: 246861 - RNA, 22 nt, Human
aaugcuuugagggaagaugaaa

SEQ ID NO: 246862 - RNA, 22 nt, Human
uguguccucacuguaugcaagg

SEQ ID NO: 246863 - RNA, 22 nt, Human
agaagcuaggcuagacaaguga

SEQ ID NO: 246864 - RNA, 22 nt, Human
ccaggguuggcaagcaaggcuu

SEQ ID NO: 246865 - RNA, 22 nt, Human
cuucucuguguagagauucaga

SEQ ID NO: 246866 - RNA, 22 nt, Human
gaggcucacuaggcauccuggg

SEQ ID NO: 246867 - RNA, 22 nt, Human
cauaauuacugauaugcugauu

SEQ ID NO: 246868 - RNA, 22 nt, Human
uucugacauauccagucucagu

SEQ ID NO: 246869 - RNA, 22 nt, Human
ugucagugguagacccagaggu

SEQ ID NO: 246870 - RNA, 22 nt, Human
ccugggcagccugcucaaggac

SEQ ID NO: 246871 - RNA, 22 nt, Human
uccuucaagaugccacagcuuu

SEQ ID NO: 246872 - RNA, 22 nt, Human
uugacaaguggagauauuuaag

SEQ ID NO: 246873 - RNA, 22 nt, Human
ucaagcaaaguuuagcugguua

SEQ ID NO: 246874 - RNA, 22 nt, Human
uuucuguuuagcauaaaguggc

SEQ ID NO: 246875 - RNA, 22 nt, Human
uccuggccuccguucucugcau

SEQ ID NO: 246876 - RNA, 22 nt, Human
uuuucuaacaucuaguaauuug

SEQ ID NO: 246877 - RNA, 22 nt, Human
uggcagcacuugaacuugagcc

SEQ ID NO: 246878 - RNA, 22 nt, Human
ucugggaugagaucagagacac

SEQ ID NO: 246879 - RNA, 19 nt, Human
ugcccagaguguaugcgca

SEQ ID NO: 246880 - RNA, 21 nt, Human
uguggcagauguugggaggca

SEQ ID NO: 246881 - RNA, 22 nt, Human
agcccugcauaaaucaguuggu

SEQ ID NO: 246882 - RNA, 20 nt, Human
agaagucagcucagaaguga

SEQ ID NO: 246883 - RNA, 22 nt, Human
gagacugggggcuuggccuuuu

SEQ ID NO: 246884 - RNA, 22 nt, Human
aucuuuaccaccaaagaaugcu

SEQ ID NO: 246885 - RNA, 22 nt, Human
uagagcuggaauuugcagcaag

SEQ ID NO: 246886 - RNA, 21 nt, Human
cugugggaccaagcacuggga

SEQ ID NO: 246887 - RNA, 21 nt, Human
ggagggcagcccagacuggcu

SEQ ID NO: 246888 - RNA, 22 nt, Human
uccuggggccaggcaccucugg

SEQ ID NO: 246889 - RNA, 20 nt, Human
agcauacaucauaagaaacc

SEQ ID NO: 246890 - RNA, 21 nt, Human
aguugcugcugcugcagguga

SEQ ID NO: 246891 - RNA, 22 nt, Human
aguauuuagcugacucgcuaca

SEQ ID NO: 246892 - RNA, 17 nt, Human
uggccaggccccgccag

SEQ ID NO: 246893 - RNA, 20 nt, Human
cagcaggcuauggggcaccc

SEQ ID NO: 246894 - RNA, 20 nt, Human
ugucuucauuauggugcccu

SEQ ID NO: 246895 - RNA, 22 nt, Human
uuagaaaacauaagugguaaag

SEQ ID NO: 246896 - RNA, 22 nt, Human
cuguggcauugugaggacugca

SEQ ID NO: 246897 - RNA, 22 nt, Human
aagcuguacuuagcauugacuc

SEQ ID NO: 246898 - RNA, 22 nt, Human
agcuuccuuggcgcugaggccu

SEQ ID NO: 246899 - RNA, 22 nt, Human
ucugccccugcugggcacagag

SEQ ID NO: 246900 - RNA, 22 nt, Human
auaacagaauaagucauuaccg

SEQ ID NO: 246901 - RNA, 20 nt, Human
ugcugcugugagcgucccug

SEQ ID NO: 246902 - RNA, 22 nt, Human
uuuaccuucuuuuaacuacagu

SEQ ID NO: 246903 - RNA, 22 nt, Human
uuuguagcagcaugauuuauaa

SEQ ID NO: 246904 - RNA, 22 nt, Human
ucugagcaccuuauauucuuga

SEQ ID NO: 246905 - RNA, 22 nt, Human
agucuagaugauccuaggaaua

SEQ ID NO: 246906 - RNA, 22 nt, Human
gagcuggcugugguugagugca

SEQ ID NO: 246907 - RNA, 22 nt, Human
caucuuugguuuucuauaugcc

SEQ ID NO: 246908 - RNA, 22 nt, Human
ugccaauucgcagugaguauuu

SEQ ID NO: 246909 - RNA, 22 nt, Human
aucuuuuuugucuuggucacug

SEQ ID NO: 246910 - RNA, 22 nt, Human
uuuacacaaaauguuaguagau

SEQ ID NO: 246911 - RNA, 22 nt, Human
agccuucucugaaauucuguuu

SEQ ID NO: 246912 - RNA, 22 nt, Human
gaaagaagcuuuagauggcuau

SEQ ID NO: 246913 - RNA, 19 nt, Human
ccuguucaugacucugucc

SEQ ID NO: 246914 - RNA, 22 nt, Human
uuugugauuaauuuucaaccuc

SEQ ID NO: 246915 - RNA, 22 nt, Human
ggugggagccaacacccuucug

SEQ ID NO: 246916 - RNA, 23 nt, Human
ugccuuaguuagcacauuucuaa

SEQ ID NO: 246917 - RNA, 22 nt, Human
uggcagggucuugcuguguugc

SEQ ID NO: 246918 - RNA, 22 nt, Human
gagagccaugguggagaugggg

SEQ ID NO: 246919 - RNA, 22 nt, Human
uuagggacaaauuugcagaacc

SEQ ID NO: 246920 - RNA, 22 nt, Human
auugcaaagaaauacaugcuua

SEQ ID NO: 246921 - RNA, 22 nt, Human
ccaggcucuguuccccgaggag

SEQ ID NO: 246922 - RNA, 22 nt, Human
ccuccuggaggcucuagggaaa

SEQ ID NO: 246923 - RNA, 22 nt, Human
ccccacagcuuguggagagaau

SEQ ID NO: 246924 - RNA, 22 nt, Human
cuuugcaagggauuucaugucu

SEQ ID NO: 246925 - RNA, 22 nt, Human
ucagcuguguaucccagggccu

SEQ ID NO: 246926 - RNA, 22 nt, Human
gggacauggcuaggauuccaau

SEQ ID NO: 246927 - RNA, 22 nt, Human
uggcagggaguugcaggauuuc

SEQ ID NO: 246928 - RNA, 19 nt, Human
aggcugcaagguggugggc

SEQ ID NO: 246929 - RNA, 22 nt, Human
uucagucucaagugcugcucac

SEQ ID NO: 246930 - RNA, 22 nt, Human
ugcauguuaagaaaauauugag

SEQ ID NO: 246931 - RNA, 22 nt, Human
guuggugaugccacacauauuu

SEQ ID NO: 246932 - RNA, 22 nt, Human
ucuucaaaugcuaguaauauca

SEQ ID NO: 246933 - RNA, 17 nt, Human
auuucacuuagcaugag

SEQ ID NO: 246934 - RNA, 22 nt, Human
auuucuagguucacauguguuu

SEQ ID NO: 246935 - RNA, 22 nt, Human
uuauuccauucaguucaacaag

SEQ ID NO: 246936 - RNA, 22 nt, Human
cuagggaaaguggacauggcuu

SEQ ID NO: 246937 - RNA, 22 nt, Human
uccuuagagugguugugcuaug

SEQ ID NO: 246938 - RNA, 18 nt, Human
ggcugcucgcucuccccg

SEQ ID NO: 246939 - RNA, 22 nt, Human
ugagcaggggagagcgaaugug

SEQ ID NO: 246940 - RNA, 22 nt, Human
ucaugcaguuacuguuaugcaa

SEQ ID NO: 246941 - RNA, 22 nt, Human
ugcuucuuuaugauguaugauu

SEQ ID NO: 246942 - RNA, 22 nt, Human
uaucaaaaggaguugaaagggg

SEQ ID NO: 246943 - RNA, 19 nt, Human
ugcucaggccaaggagccc

SEQ ID NO: 246944 - RNA, 22 nt, Human
uguuuuaguucugucuugcaug

SEQ ID NO: 246945 - RNA, 19 nt, Human
cuaaacuuaugugaccaca

SEQ ID NO: 246946 - RNA, 22 nt, Human
cccugcaggggaccugcagccu

SEQ ID NO: 246947 - RNA, 22 nt, Human
aaauccuuuucuauacagcaua

SEQ ID NO: 246948 - RNA, 22 nt, Human
aaguuugcauagauuaagcauu

SEQ ID NO: 246949 - RNA, 22 nt, Human
uuuagaauguuagcguuaaagg

SEQ ID NO: 246950 - RNA, 22 nt, Human
uugcuuuaggauuuaaguggca

SEQ ID NO: 246951 - RNA, 21 nt, Human
aguguccuugaucuugccuug

SEQ ID NO: 246952 - RNA, 22 nt, Human
cuucucugcaccccacuuuugc

SEQ ID NO: 246953 - RNA, 22 nt, Human
ucuauaaaacucaagagcaauu

SEQ ID NO: 246954 - RNA, 22 nt, Human
cugucuccgcccucuugguagg

SEQ ID NO: 246955 - RNA, 22 nt, Human
uaaggcuuaugaucagaagguu

SEQ ID NO: 246956 - RNA, 22 nt, Human
aaggcugccucugccagaggag

SEQ ID NO: 246957 - RNA, 22 nt, Human
uggcgaggccaggccagggccu

SEQ ID NO: 246958 - RNA, 22 nt, Human
uaugcauaauuggauaaguaga

SEQ ID NO: 246959 - RNA, 22 nt, Human
cugccaggcgauggauuggcug

SEQ ID NO: 246960 - RNA, 22 nt, Human
gguucccggaucuccgaguccc

SEQ ID NO: 246961 - RNA, 22 nt, Human
gcucagaggccaagugcccgcc

SEQ ID NO: 246962 - RNA, 22 nt, Human
gguacaaaguuagauuuaacuu

SEQ ID NO: 246963 - RNA, 22 nt, Human
gaggccagaguuccccgaguca

SEQ ID NO: 246964 - RNA, 20 nt, Human
aacagcacacauucgcauua

SEQ ID NO: 246965 - RNA, 22 nt, Human
auuacaguucuacacauccuuu

SEQ ID NO: 246966 - RNA, 22 nt, Human
ucuauuuuuauaguugaagugc

SEQ ID NO: 246967 - RNA, 22 nt, Human
ccagagguccccugccaggagg

SEQ ID NO: 246968 - RNA, 22 nt, Human
gaggccaggguaccaucaacau

SEQ ID NO: 246969 - RNA, 22 nt, Human
uuuaugaacuacagauauaacu

SEQ ID NO: 246970 - RNA, 22 nt, Human
cagugcugagagccuggccagg

SEQ ID NO: 246971 - RNA, 22 nt, Human
uuaauuacuggcauggugguug

SEQ ID NO: 246972 - RNA, 22 nt, Human
uuacaucacuuuacuuaauaau

SEQ ID NO: 246973 - RNA, 21 nt, Human
gccaagaacaagacagacaug

SEQ ID NO: 246974 - RNA, 22 nt, Human
ucuuuugugauucuuuaguuac

SEQ ID NO: 246975 - RNA, 22 nt, Human
ccuggcucugcagccacuccag

SEQ ID NO: 246976 - RNA, 22 nt, Human
uaaguucaguuggucgaaguag

SEQ ID NO: 246977 - RNA, 22 nt, Human
uuccuguggcugucacuccugg

SEQ ID NO: 246978 - RNA, 22 nt, Human
aacacaggggcguggcucuuac

SEQ ID NO: 246979 - RNA, 22 nt, Human
cuuaaaggucauucuguugaua

SEQ ID NO: 246980 - RNA, 22 nt, Human
gucaucugugcuuuugguagga

SEQ ID NO: 246981 - RNA, 22 nt, Human
acagaaauucugggacagaaaa

SEQ ID NO: 246982 - RNA, 22 nt, Human
aaucucaagcuguaaauaccuc

SEQ ID NO: 246983 - RNA, 22 nt, Human
ccacacuaaacugcucaaacca

SEQ ID NO: 246984 - RNA, 22 nt, Human
caugggggucuggacaacaggc

SEQ ID NO: 246985 - RNA, 22 nt, Human
auacagguguacacacaugcaa

SEQ ID NO: 246986 - RNA, 22 nt, Human
agcccugcaggaugagggaggu

SEQ ID NO: 246987 - RNA, 22 nt, Human
acaaggcuggcugggaaaaacu

SEQ ID NO: 246988 - RNA, 22 nt, Human
cuguggugagcaacugacugaa

SEQ ID NO: 246989 - RNA, 22 nt, Human
aacuacauuuuacagaagauga

SEQ ID NO: 246990 - RNA, 15 nt, Human
uguggcuggcuccug

SEQ ID NO: 246991 - RNA, 22 nt, Human
aaguguauauaugacuuauaaa

SEQ ID NO: 246992 - RNA, 22 nt, Human
gcuuccagcaaacacuggcugc

SEQ ID NO: 246993 - RNA, 23 nt, Human
acaggcucuuaaucagugcuccu

SEQ ID NO: 246994 - RNA, 22 nt, Human
aacagaauuguacaccagggag

SEQ ID NO: 246995 - RNA, 22 nt, Human
auauacacagagcuuaugguga

SEQ ID NO: 246996 - RNA, 22 nt, Human
cuguggcaagucugccugucac

SEQ ID NO: 246997 - RNA, 22 nt, Human
uguagcauguaaauugguuauu

SEQ ID NO: 246998 - RNA, 22 nt, Human
ugcugaaauuagaacauugagg

SEQ ID NO: 246999 - RNA, 21 nt, Human
uggaccuguccuucucgcugu

SEQ ID NO: 247000 - RNA, 22 nt, Human
gcuccaggcgagcuggaccaga

SEQ ID NO: 247001 - RNA, 22 nt, Human
cauuucaagcauugacuucuau

SEQ ID NO: 247002 - RNA, 22 nt, Human
gcugggagaggcagcuuucgga

SEQ ID NO: 247003 - RNA, 22 nt, Human
ucagcaggggccguugggugga

SEQ ID NO: 247004 - RNA, 22 nt, Human
gcagacagcauguugggcuauu

SEQ ID NO: 247005 - RNA, 22 nt, Human
aaugagauggaggacucuuaau

SEQ ID NO: 247006 - RNA, 22 nt, Human
gacauauacuauggaugguucu

SEQ ID NO: 247007 - RNA, 22 nt, Human
uggagaaggccggccaggagug

SEQ ID NO: 247008 - RNA, 22 nt, Human
cuuguuuuggcuaguaugaugu

SEQ ID NO: 247009 - RNA, 22 nt, Human
cugacaagguugaauuguccca

SEQ ID NO: 247010 - RNA, 22 nt, Human
ugaaggcuugguggcagccucu

SEQ ID NO: 247011 - RNA, 22 nt, Human
acagaugguuauugucauuucu

SEQ ID NO: 247012 - RNA, 22 nt, Human
ucaggcagagggagaagccaag

SEQ ID NO: 247013 - RNA, 22 nt, Human
uuuacagucaccaaacuuugcu

SEQ ID NO: 247014 - RNA, 22 nt, Human
uucuaacuuucaagguccuuuc

SEQ ID NO: 247015 - RNA, 22 nt, Human
augaggcaugggaucaaaauga

SEQ ID NO: 247016 - RNA, 23 nt, Human
acagugucugcugcaagauaucu

SEQ ID NO: 247017 - RNA, 20 nt, Human
gauggauuucaacaccuuuc

SEQ ID NO: 247018 - RNA, 22 nt, Human
gccaggguugccaaugggggca

SEQ ID NO: 247019 - RNA, 22 nt, Human
uauuccagguuucuuguuguau

SEQ ID NO: 247020 - RNA, 22 nt, Human
auaaguaggaaaauuugaauau

SEQ ID NO: 247021 - RNA, 20 nt, Human
ucaggaugugcugagugaag

SEQ ID NO: 247022 - RNA, 22 nt, Human
gagcaguuuuauuucaugagac

SEQ ID NO: 247023 - RNA, 22 nt, Human
gcucagagcccgaggcuugcau

SEQ ID NO: 247024 - RNA, 22 nt, Human
uggcucccgcuugcaccuaaga

SEQ ID NO: 247025 - RNA, 22 nt, Human
auguuuugcuggauguuggcua

SEQ ID NO: 247026 - RNA, 22 nt, Human
aagcaggugugagccagugggc

SEQ ID NO: 247027 - RNA, 22 nt, Human
gugaggcagggaaagaggauaa

SEQ ID NO: 247028 - RNA, 22 nt, Human
ugaagggggagauauaugugug

SEQ ID NO: 247029 - RNA, 22 nt, Human
gagggaugguaguugacacuga

SEQ ID NO: 247030 - RNA, 22 nt, Human
acugcauuugucugucucaauu

SEQ ID NO: 247031 - RNA, 22 nt, Human
caggccuugcgucccauggccu

SEQ ID NO: 247032 - RNA, 22 nt, Human
caguggaaaucagagugagagu

SEQ ID NO: 247033 - RNA, 22 nt, Human
gauggcuuugccugcugugagg

SEQ ID NO: 247034 - RNA, 22 nt, Human
aacaucaucaugaacaacuaau

SEQ ID NO: 247035 - RNA, 22 nt, Human
cacauuuaagugcuuguucaga

SEQ ID NO: 247036 - RNA, 22 nt, Human
cccagccaagugaucugaccgc

SEQ ID NO: 247037 - RNA, 22 nt, Human
uagaaaucuuguuacuaugugu

SEQ ID NO: 247038 - RNA, 22 nt, Human
uugagguauugauauuuuauga

SEQ ID NO: 247039 - RNA, 22 nt, Human
gucugaaaauaugauuuugccu

SEQ ID NO: 247040 - RNA, 21 nt, Human
agcaugucucagucaacaagg

SEQ ID NO: 247041 - RNA, 22 nt, Human
ucauagaugugcugugcacaaa

SEQ ID NO: 247042 - RNA, 22 nt, Human
ggcuuuaugcacagcagauggu

SEQ ID NO: 247043 - RNA, 22 nt, Human
ccuuucucuuugcugaucaugu

SEQ ID NO: 247044 - RNA, 22 nt, Human
ucuuuuaagccucuggcauagg

SEQ ID NO: 247045 - RNA, 22 nt, Human
acagaagagcacauuuaguaug

SEQ ID NO: 247046 - RNA, 22 nt, Human
ugagugcuggcuaaauagaaaa

SEQ ID NO: 247047 - RNA, 22 nt, Human
ggagagucugagccugcuggag

SEQ ID NO: 247048 - RNA, 22 nt, Human
acacaucuccagaagugggcug

SEQ ID NO: 247049 - RNA, 22 nt, Human
ucugcaggcuguacaggaagca

SEQ ID NO: 247050 - RNA, 22 nt, Human
uaaaagauuuuauaggaacaag

SEQ ID NO: 247051 - RNA, 22 nt, Human
aagucucuuaguaauauccaac

SEQ ID NO: 247052 - RNA, 22 nt, Human
agcacagugcugggcacacagu

SEQ ID NO: 247053 - RNA, 22 nt, Human
acagcuguauucaaguugcaag

SEQ ID NO: 247054 - RNA, 22 nt, Human
cuggaugugguaaugacuuuga

SEQ ID NO: 247055 - RNA, 22 nt, Human
ucuugaaagcaugagauggaca

SEQ ID NO: 247056 - RNA, 22 nt, Human
uggaaauguauuugggcaugcc

SEQ ID NO: 247057 - RNA, 22 nt, Human
agagguagagguugcagugagc

SEQ ID NO: 247058 - RNA, 22 nt, Human
uagaaccaccuucuccuuuacc

SEQ ID NO: 247059 - RNA, 22 nt, Human
uaaagcaauuugagcaaguucu

SEQ ID NO: 247060 - RNA, 22 nt, Human
acagggcagugucuugaaaaau

SEQ ID NO: 247061 - RNA, 20 nt, Human
acauaugaaugauagagcca

SEQ ID NO: 247062 - RNA, 22 nt, Human
auguuaaaaaccaguacaguug

SEQ ID NO: 247063 - RNA, 20 nt, Human
agcccaucucccacagcuac

SEQ ID NO: 247064 - RNA, 22 nt, Human
uaaaauguagcuucuaggcugg

SEQ ID NO: 247065 - RNA, 22 nt, Human
ggcugaggggcccagaggaaca

SEQ ID NO: 247066 - RNA, 22 nt, Human
ggaggagacggagugauuagug

SEQ ID NO: 247067 - RNA, 22 nt, Human
gggcucuggaguucuagaaaga

SEQ ID NO: 247068 - RNA, 22 nt, Human
uuggcucagugugagggagaug

SEQ ID NO: 247069 - RNA, 22 nt, Human
aagagggguggucugugaggau

SEQ ID NO: 247070 - RNA, 22 nt, Human
uuaccugugucaguauaugaga

SEQ ID NO: 247071 - RNA, 22 nt, Human
agcugcaggcccaugcucaguc

SEQ ID NO: 247072 - RNA, 22 nt, Human
aacauucaaguucugguuuaug

SEQ ID NO: 247073 - RNA, 22 nt, Human
aauaggcagcuuagcaggggcu

SEQ ID NO: 247074 - RNA, 22 nt, Human
uugcuguaguguucugauguca

SEQ ID NO: 247075 - RNA, 22 nt, Human
aggcugcuuccuuacguggcug

SEQ ID NO: 247076 - RNA, 22 nt, Human
ugggaugucuuuaggggaagag

SEQ ID NO: 247077 - RNA, 22 nt, Human
ggugaccucaccuggucccacc

SEQ ID NO: 247078 - RNA, 22 nt, Human
agcuuuaucuucaccugggaau

SEQ ID NO: 247079 - RNA, 22 nt, Human
ggucugaggcuccaaggaggug

SEQ ID NO: 247080 - RNA, 22 nt, Human
cuuagcuagugcucagcuguca

SEQ ID NO: 247081 - RNA, 22 nt, Human
uucauucauucaugaauguuaa

SEQ ID NO: 247082 - RNA, 22 nt, Human
ccuccuggugacaaggcaaagc

SEQ ID NO: 247083 - RNA, 22 nt, Human
agcacaauauggguuuuauagu

SEQ ID NO: 247084 - RNA, 22 nt, Human
uuaauuaauuaguuaagcaugu

SEQ ID NO: 247085 - RNA, 22 nt, Human
gcuggcaguguauuguuagcug

SEQ ID NO: 247086 - RNA, 22 nt, Human
agggagcugggccacacugauc

SEQ ID NO: 247087 - RNA, 22 nt, Human
ugauaacucucaguuucucaug

SEQ ID NO: 247088 - RNA, 21 nt, Human
agcucagcaagauggaggcuc

SEQ ID NO: 247089 - RNA, 20 nt, Human
acuagaaagucacugggggg

SEQ ID NO: 247090 - RNA, 19 nt, Human
gggcccagcauggaggguu

SEQ ID NO: 247091 - RNA, 22 nt, Human
acauuaaaaaauguugcaugaa

SEQ ID NO: 247092 - RNA, 22 nt, Human
cugaaggacuuggugauaguug

SEQ ID NO: 247093 - RNA, 21 nt, Human
auugugaccaucauuuuggaa

SEQ ID NO: 247094 - RNA, 22 nt, Human
augcaguuagguaauagucuca

SEQ ID NO: 247095 - RNA, 22 nt, Human
agggaagaaucacugggauguu

SEQ ID NO: 247096 - RNA, 22 nt, Human
caggccucuauggucagcugag

SEQ ID NO: 247097 - RNA, 22 nt, Human
aaggugucacuguuucuggccu

SEQ ID NO: 247098 - RNA, 22 nt, Human
gcaguggcuaagcucgcaugca

SEQ ID NO: 247099 - RNA, 22 nt, Human
cuucccaggugcucuuagcaug

SEQ ID NO: 247100 - RNA, 22 nt, Human
agguaaacaggagaaaaugaga

SEQ ID NO: 247101 - RNA, 22 nt, Human
acacacagaguuuauacaggca

SEQ ID NO: 247102 - RNA, 22 nt, Human
ugugagacaauugcaucagggc

SEQ ID NO: 247103 - RNA, 22 nt, Human
aucucugcguccccagcaucga

SEQ ID NO: 247104 - RNA, 22 nt, Human
gauuagaagaacuuguuagccu

SEQ ID NO: 247105 - RNA, 22 nt, Human
gggagaagaaugugucaauugu

SEQ ID NO: 247106 - RNA, 22 nt, Human
agaaucuucagucuaauuccua

SEQ ID NO: 247107 - RNA, 22 nt, Human
uauuacagggcuaguuaugagu

SEQ ID NO: 247108 - RNA, 22 nt, Human
ugcacagguaugcaaagcaugu

SEQ ID NO: 247109 - RNA, 22 nt, Human
gcucucagggugauggcauacu

SEQ ID NO: 247110 - RNA, 22 nt, Human
cagaggccucacuuccagccag

SEQ ID NO: 247111 - RNA, 22 nt, Human
aaaaacacaacugucuuucucu

SEQ ID NO: 247112 - RNA, 22 nt, Human
aauguacagcugcugcugaagg

SEQ ID NO: 247113 - RNA, 21 nt, Human
uggcugccuggcucugugguu

SEQ ID NO: 247114 - RNA, 22 nt, Human
cuuauuuuaagucaguuugggu

SEQ ID NO: 247115 - RNA, 22 nt, Human
cauguaaagcauccuucuaggg

SEQ ID NO: 247116 - RNA, 22 nt, Human
ccagaagaggacacagugugga

SEQ ID NO: 247117 - RNA, 22 nt, Human
ucacaagacugagcuugcuuga

SEQ ID NO: 247118 - RNA, 22 nt, Human
acaccaaaguagaauuaaugua

SEQ ID NO: 247119 - RNA, 22 nt, Human
cuccuacauuccaccuuggacu

SEQ ID NO: 247120 - RNA, 22 nt, Human
gcccucugcucagcuccucagc

SEQ ID NO: 247121 - RNA, 22 nt, Human
ucuggagaggggccuagaauuu

SEQ ID NO: 247122 - RNA, 22 nt, Human
aaguucaaucagaugaaaaagc

SEQ ID NO: 247123 - RNA, 22 nt, Human
ucaguaucaggcuggaauuaag

SEQ ID NO: 247124 - RNA, 22 nt, Human
gcugagggaccauguuucagga

SEQ ID NO: 247125 - RNA, 22 nt, Human
ggccaggaagggaagaucagca

SEQ ID NO: 247126 - RNA, 20 nt, Human
uuccaaggucuaugcuucuu

SEQ ID NO: 247127 - RNA, 22 nt, Human
cugccaggccuggggugcuguc

SEQ ID NO: 247128 - RNA, 22 nt, Human
ugaggaugacgauggcaauggc

SEQ ID NO: 247129 - RNA, 22 nt, Human
ugcuggcuguguaccaucucaa

SEQ ID NO: 247130 - RNA, 22 nt, Human
aggacauguaaauggagaggga

SEQ ID NO: 247131 - RNA, 22 nt, Human
aauaacuuaagaaauuucccca

SEQ ID NO: 247132 - RNA, 22 nt, Human
aucuggcugacuuugugggaca

SEQ ID NO: 247133 - RNA, 22 nt, Human
acaguccuagcugcaaagaagu

SEQ ID NO: 247134 - RNA, 22 nt, Human
auaucuguguuucccuuuugcu

SEQ ID NO: 247135 - RNA, 21 nt, Human
cugcaaauaccuaguuaucug

SEQ ID NO: 247136 - RNA, 22 nt, Human
agcugccugugcugggagccca

SEQ ID NO: 247137 - RNA, 22 nt, Human
uuauugagcacauaguaugugg

SEQ ID NO: 247138 - RNA, 22 nt, Human
guuuuucugugagcgguaaagg

SEQ ID NO: 247139 - RNA, 22 nt, Human
acaguuuagaaugccacauagu

SEQ ID NO: 247140 - RNA, 22 nt, Human
caguggcuuaaauaagauuagg

SEQ ID NO: 247141 - RNA, 22 nt, Human
ggcugccugaggcagugagaga

SEQ ID NO: 247142 - RNA, 22 nt, Human
ccuggcagaaagaguuacaccu

SEQ ID NO: 247143 - RNA, 22 nt, Human
uuguguggauaauauuacuuga

SEQ ID NO: 247144 - RNA, 22 nt, Human
agcugggaggcuccucugugac

SEQ ID NO: 247145 - RNA, 17 nt, Human
ccccuaccuccguuuga

SEQ ID NO: 247146 - RNA, 22 nt, Human
acuccugugggcauggcacccc

SEQ ID NO: 247147 - RNA, 22 nt, Human
aacaguuugagcuuugaauuuc

SEQ ID NO: 247148 - RNA, 22 nt, Human
gcagcuuuaaaggaggcucuga

SEQ ID NO: 247149 - RNA, 18 nt, Human
gcucugguuccuucaacc

SEQ ID NO: 247150 - RNA, 19 nt, Human
aaaguguuuucuuuucugu

SEQ ID NO: 247151 - RNA, 22 nt, Human
ugucuucagaauuaagaguaug

SEQ ID NO: 247152 - RNA, 22 nt, Human
ugcagugccucggcagugcagc

SEQ ID NO: 247153 - RNA, 22 nt, Human
cuugucuugcacacgguugcca

SEQ ID NO: 247154 - RNA, 19 nt, Human
gucacauuugucucccagg

SEQ ID NO: 247155 - RNA, 22 nt, Human
uuuagcaucgaaguaaauuuag

SEQ ID NO: 247156 - RNA, 22 nt, Human
guuuccauggcucuguuaaugg

SEQ ID NO: 247157 - RNA, 22 nt, Human
ugcaguucaagguuguacagcu

SEQ ID NO: 247158 - RNA, 22 nt, Human
uugguacauuacaguuugauug

SEQ ID NO: 247159 - RNA, 22 nt, Human
caaaggcucaguaaaucuuugu

SEQ ID NO: 247160 - RNA, 22 nt, Human
aaaagguagauucuccuucuau

SEQ ID NO: 247161 - RNA, 22 nt, Human
aaaaacugcaauuacuuuuguc

SEQ ID NO: 247162 - RNA, 22 nt, Human
uucuggcuucaucugacaagcc

SEQ ID NO: 247163 - RNA, 22 nt, Human
aaugcaaugcagcaccuccuug

SEQ ID NO: 247164 - RNA, 19 nt, Human
ugcccugcccgcagccuug

SEQ ID NO: 247165 - RNA, 22 nt, Human
ugcugaggcagaugucugugac

SEQ ID NO: 247166 - RNA, 22 nt, Human
cuucacugugcuucaagcagcu

SEQ ID NO: 247167 - RNA, 22 nt, Human
ccuuuauacuaaggcauacaau

SEQ ID NO: 247168 - RNA, 22 nt, Human
gggauaggagauugggaguguu

SEQ ID NO: 247169 - RNA, 22 nt, Human
ucuccagaaauggggcugggga

SEQ ID NO: 247170 - RNA, 22 nt, Human
acuuuguucuaauaguaucucu

SEQ ID NO: 247171 - RNA, 22 nt, Human
guuaagaaucaagacuuaucuu

SEQ ID NO: 247172 - RNA, 21 nt, Human
ugagaugcuagaaggcaggga

SEQ ID NO: 247173 - RNA, 22 nt, Human
cuggcccuguaggaugugaguu

SEQ ID NO: 247174 - RNA, 22 nt, Human
gcugcugggauccugggucuca

SEQ ID NO: 247175 - RNA, 22 nt, Human
cagagguagccgagugcaaucg

SEQ ID NO: 247176 - RNA, 22 nt, Human
aggaagccuggggcugcccucg

SEQ ID NO: 247177 - RNA, 22 nt, Human
cuacaucacuuaauucuuagaa

SEQ ID NO: 247178 - RNA, 22 nt, Human
acaggcagguaauuuacauauu

SEQ ID NO: 247179 - RNA, 18 nt, Human
cggcuucugucaccuugc

SEQ ID NO: 247180 - RNA, 22 nt, Human
auuaauuuuaccuuuguaaaca

SEQ ID NO: 247181 - RNA, 22 nt, Human
uauacacacaugcuccggccuu

SEQ ID NO: 247182 - RNA, 22 nt, Human
ccuggaggggaccaggaccagg

SEQ ID NO: 247183 - RNA, 22 nt, Human
cugagcugucaggaauggaaag

SEQ ID NO: 247184 - RNA, 22 nt, Human
agauaaaaugauuuucuggauc

SEQ ID NO: 247185 - RNA, 22 nt, Human
uauauugaccaguacaauuggu

SEQ ID NO: 247186 - RNA, 22 nt, Human
gcuuccucccugcugcucacua

SEQ ID NO: 247187 - RNA, 22 nt, Human
aaaggcuuguacagcagccuuc

SEQ ID NO: 247188 - RNA, 21 nt, Human
agcagacacuugugaccuucc

SEQ ID NO: 247189 - RNA, 22 nt, Human
auguucuauaucauuauuguga

SEQ ID NO: 247190 - RNA, 22 nt, Human
gucaggauuauaauccccaugg

SEQ ID NO: 247191 - RNA, 23 nt, Human
gagagcccauuggcagggguacc

SEQ ID NO: 247192 - RNA, 22 nt, Human
uggcugaggagggucuucuggu

SEQ ID NO: 247193 - RNA, 22 nt, Human
uggccugaggcucggcaugggu

SEQ ID NO: 247194 - RNA, 22 nt, Human
uauuggaagugaacaccaggcu

SEQ ID NO: 247195 - RNA, 23 nt, Human
augaggcauuaaacaggcuuuuu

SEQ ID NO: 247196 - RNA, 22 nt, Human
augguuuuagaaucaggaaaaa

SEQ ID NO: 247197 - RNA, 22 nt, Human
gauauagguucauaguguuaca

SEQ ID NO: 247198 - RNA, 22 nt, Human
aggacacagcucuucaguaaga

SEQ ID NO: 247199 - RNA, 22 nt, Human
ucagacacagaugagacaagga

SEQ ID NO: 247200 - RNA, 22 nt, Human
ccaggcauccauugcuuccucu

SEQ ID NO: 247201 - RNA, 22 nt, Human
aagcuggaacaucuugaggaag

SEQ ID NO: 247202 - RNA, 22 nt, Human
acaguguggggugagauggaac

SEQ ID NO: 247203 - RNA, 22 nt, Human
gaauacauuggaaaucagaaua

SEQ ID NO: 247204 - RNA, 22 nt, Human
cuucuucacacuggucugaagc

SEQ ID NO: 247205 - RNA, 15 nt, Human
gcucuggguauuuga

SEQ ID NO: 247206 - RNA, 22 nt, Human
gucuccuguccugcaggaugga

SEQ ID NO: 247207 - RNA, 22 nt, Human
gcacagagagucccgggugccc

SEQ ID NO: 247208 - RNA, 22 nt, Human
ggucuucucuaugagcuggucu

SEQ ID NO: 247209 - RNA, 22 nt, Human
ccucucagccggacugucaggc

SEQ ID NO: 247210 - RNA, 22 nt, Human
ggccacuguccucuagcccaga

SEQ ID NO: 247211 - RNA, 22 nt, Human
ggagacaguauggcuuguagcu

SEQ ID NO: 247212 - RNA, 22 nt, Human
uccuuggcagcagggagcauga

SEQ ID NO: 247213 - RNA, 22 nt, Human
ucacagaaugucuagcauaauu

SEQ ID NO: 247214 - RNA, 22 nt, Human
ccugucagccccacuucugccu

SEQ ID NO: 247215 - RNA, 22 nt, Human
uucuuuuaauuucugucugcag

SEQ ID NO: 247216 - RNA, 22 nt, Human
agcuggguuucuggcaggcuua

SEQ ID NO: 247217 - RNA, 20 nt, Human
aagagucuuuacugagcuaa

SEQ ID NO: 247218 - RNA, 18 nt, Human
ggccagcuccugaggcag

SEQ ID NO: 247219 - RNA, 22 nt, Human
uggucuaagagccuaacugcug

SEQ ID NO: 247220 - RNA, 20 nt, Human
caauagaauguggagauaag

SEQ ID NO: 247221 - RNA, 22 nt, Human
aaaugcacaauaaaguaaaggc

SEQ ID NO: 247222 - RNA, 22 nt, Human
acaaaacaguguuccugccccu

SEQ ID NO: 247223 - RNA, 22 nt, Human
agagcuggggccagagucaagg

SEQ ID NO: 247224 - RNA, 19 nt, Human
caucuuggaguacuccuuu

SEQ ID NO: 247225 - RNA, 22 nt, Human
ggcaccagggcaagggucuuuc

SEQ ID NO: 247226 - RNA, 22 nt, Human
gccuaauaacuagcuguguaac

SEQ ID NO: 247227 - RNA, 20 nt, Human
acugugugaucuggaaagcu

SEQ ID NO: 247228 - RNA, 22 nt, Human
auugcagauucuucucagggag

SEQ ID NO: 247229 - RNA, 22 nt, Human
ucagaggucccuagcaggagug

SEQ ID NO: 247230 - RNA, 22 nt, Human
ucaccauacauaaauuacauug

SEQ ID NO: 247231 - RNA, 17 nt, Human
guggcugcacacacaug

SEQ ID NO: 247232 - RNA, 22 nt, Human
gucugcucaugcuaccgcgggc

SEQ ID NO: 247233 - RNA, 22 nt, Human
gcagagcugguacuugagccug

SEQ ID NO: 247234 - RNA, 22 nt, Human
ccaggccagcgcuggcuggagg

SEQ ID NO: 247235 - RNA, 19 nt, Human
accaggaacuucccuaggc

SEQ ID NO: 247236 - RNA, 22 nt, Human
aacauuucugagaauaucaguu

SEQ ID NO: 247237 - RNA, 22 nt, Human
ggagccagagcacuggggagcc

SEQ ID NO: 247238 - RNA, 22 nt, Human
cacuaaauguuucaauguggga

SEQ ID NO: 247239 - RNA, 22 nt, Human
caaggcuuagucagagggugcu

SEQ ID NO: 247240 - RNA, 22 nt, Human
uccaggcucagucaagcacuuc

SEQ ID NO: 247241 - RNA, 23 nt, Human
acuagaaaaugacuuucucccug

SEQ ID NO: 247242 - RNA, 22 nt, Human
uuccagaaaacucugccuggua

SEQ ID NO: 247243 - RNA, 22 nt, Human
auccugagguacugcagggccg

SEQ ID NO: 247244 - RNA, 22 nt, Human
ucacagaagggaaagaugccaa

SEQ ID NO: 247245 - RNA, 22 nt, Human
cagaaauuggaauagagaaaua

SEQ ID NO: 247246 - RNA, 22 nt, Human
aggcaggcaaguucauaugagg

SEQ ID NO: 247247 - RNA, 22 nt, Human
acuccaggauguagaaucagag

SEQ ID NO: 247248 - RNA, 22 nt, Human
caggucuguuuccaucagugcu

SEQ ID NO: 247249 - RNA, 23 nt, Human
auccaugugagaauagacuagca

SEQ ID NO: 247250 - RNA, 22 nt, Human
uccccaggggcaucucucugcu

SEQ ID NO: 247251 - RNA, 22 nt, Human
ucccugagcucacauggcagga

SEQ ID NO: 247252 - RNA, 22 nt, Human
aguccaauaaccucuuuccuuc

SEQ ID NO: 247253 - RNA, 22 nt, Human
uauugcuggggugggccauguu

SEQ ID NO: 247254 - RNA, 22 nt, Human
ugcauauacccgcauuuacaua

SEQ ID NO: 247255 - RNA, 22 nt, Human
aaagcugggcuggccaacccag

SEQ ID NO: 247256 - RNA, 22 nt, Human
ucugggagccaugccuuggagu

SEQ ID NO: 247257 - RNA, 22 nt, Human
gccuuagaaaaauaagauuuua

SEQ ID NO: 247258 - RNA, 22 nt, Human
auaucaaagcuaguggaaauuu

SEQ ID NO: 247259 - RNA, 17 nt, Human
agguggguggaucaccu

SEQ ID NO: 247260 - RNA, 22 nt, Human
ccagugucuagucacagguacu

SEQ ID NO: 247261 - RNA, 21 nt, Human
uccugccuuaguccagagcag

SEQ ID NO: 247262 - RNA, 22 nt, Human
uguugauuaguguuuagacuua

SEQ ID NO: 247263 - RNA, 22 nt, Human
cucccuggucuuucccaucauu

SEQ ID NO: 247264 - RNA, 22 nt, Human
agucacaugaggaaggggaagg

SEQ ID NO: 247265 - RNA, 22 nt, Human
ggaaggcuguucacuaacaugu

SEQ ID NO: 247266 - RNA, 22 nt, Human
uguggcagaacugggacucaaa

SEQ ID NO: 247267 - RNA, 22 nt, Human
auucucuguuuccaagaugaaa

SEQ ID NO: 247268 - RNA, 22 nt, Human
cagaggcuaagaugagugggug

SEQ ID NO: 247269 - RNA, 20 nt, Human
uagaaucuggugauguaucg

SEQ ID NO: 247270 - RNA, 22 nt, Human
ccuugaaaccacaucuuagaaa

SEQ ID NO: 247271 - RNA, 22 nt, Human
cauuugcugaggccuucagagg

SEQ ID NO: 247272 - RNA, 22 nt, Human
uggcuucaagucuagguucuac

SEQ ID NO: 247273 - RNA, 22 nt, Human
cagcccucaucucagcuucuuu

SEQ ID NO: 247274 - RNA, 22 nt, Human
auuguacagaugaaccucacuc

SEQ ID NO: 247275 - RNA, 22 nt, Human
ggagccagagggaugcaguuga

SEQ ID NO: 247276 - RNA, 22 nt, Human
ucuguguuuaaaagauaugucc

SEQ ID NO: 247277 - RNA, 21 nt, Human
cucuuuauauaguaaagauau

SEQ ID NO: 247278 - RNA, 22 nt, Human
cuuagagcuuaggcuagccauu

SEQ ID NO: 247279 - RNA, 22 nt, Human
acaguuaauaugugacagaacu

SEQ ID NO: 247280 - RNA, 17 nt, Human
agggucaggugaaguuc

SEQ ID NO: 247281 - RNA, 22 nt, Human
ugaaacaggcaaaacugcagau

SEQ ID NO: 247282 - RNA, 22 nt, Human
gccuagagaaaaagccucugca

SEQ ID NO: 247283 - RNA, 22 nt, Human
accuuagaaaaucaaaauuaga

SEQ ID NO: 247284 - RNA, 22 nt, Human
agcauuuaauccuacauagauc

SEQ ID NO: 247285 - RNA, 22 nt, Human
aauucacauauacauuauuccu

SEQ ID NO: 247286 - RNA, 22 nt, Human
uccugggagcacaugguccugc

SEQ ID NO: 247287 - RNA, 22 nt, Human
gcugccuuaugucuauuaguau

SEQ ID NO: 247288 - RNA, 22 nt, Human
agcagcugucccuuaacaucag

SEQ ID NO: 247289 - RNA, 22 nt, Human
uuucucucugacugggagcuga

SEQ ID NO: 247290 - RNA, 22 nt, Human
uccccagcauugagggucucuc

SEQ ID NO: 247291 - RNA, 22 nt, Human
cacagggaggacaucaacagug

SEQ ID NO: 247292 - RNA, 22 nt, Human
agcuggugcugaagcucuugag

SEQ ID NO: 247293 - RNA, 22 nt, Human
gggagcuccacugccucucauu

SEQ ID NO: 247294 - RNA, 21 nt, Human
uuacaugguuuaucauaugga

SEQ ID NO: 247295 - RNA, 22 nt, Human
uuccuucuauucagcuccaaga

SEQ ID NO: 247296 - RNA, 22 nt, Human
gucuagaauaucuagaaagauc

SEQ ID NO: 247297 - RNA, 22 nt, Human
gaucugagaucuaaaccagagg

SEQ ID NO: 247298 - RNA, 23 nt, Human
guguuacucugauaggugcuuuu

SEQ ID NO: 247299 - RNA, 22 nt, Human
gcaggugguuaaggucccaugu

SEQ ID NO: 247300 - RNA, 22 nt, Human
uacauacacaaauauacuguuu

SEQ ID NO: 247301 - RNA, 22 nt, Human
gcagaauauuauggaaaaagua

SEQ ID NO: 247302 - RNA, 23 nt, Human
gugacccaaggaccuuccagaau

SEQ ID NO: 247303 - RNA, 22 nt, Human
uucuuacauuacuuuacaugug

SEQ ID NO: 247304 - RNA, 22 nt, Human
uauggaaaaauguaucuuguca

SEQ ID NO: 247305 - RNA, 22 nt, Human
gcuuccaguccucagaggcugg

SEQ ID NO: 247306 - RNA, 22 nt, Human
agaguugcuaccaagaugcuag

SEQ ID NO: 247307 - RNA, 22 nt, Human
aaucuggaauauuugcauugua

SEQ ID NO: 247308 - RNA, 22 nt, Human
aaugccaucccucugucaccaa

SEQ ID NO: 247309 - RNA, 22 nt, Human
ggaaggaaauuggggcaguugu

SEQ ID NO: 247310 - RNA, 22 nt, Human
gaaacaauacuuguccucacua

SEQ ID NO: 247311 - RNA, 22 nt, Human
cacccucccgucagccccuggg

SEQ ID NO: 247312 - RNA, 22 nt, Human
auacuucuuuagcauauugaac

SEQ ID NO: 247313 - RNA, 22 nt, Human
uggcauuucuggccauuugugu

SEQ ID NO: 247314 - RNA, 22 nt, Human
aagaguuuccaguuguggcuca

SEQ ID NO: 247315 - RNA, 22 nt, Human
auccauuuuaacuguuagugca

SEQ ID NO: 247316 - RNA, 22 nt, Human
uuauguguguacaugcauaugu

SEQ ID NO: 247317 - RNA, 22 nt, Human
uccucuccagcaaacuggcuau

SEQ ID NO: 247318 - RNA, 22 nt, Human
uuuauugucuucguggugccua

SEQ ID NO: 247319 - RNA, 22 nt, Human
cauucuuauauuuacucauuca

SEQ ID NO: 247320 - RNA, 22 nt, Human
aaucuagagacaauuugaauau

SEQ ID NO: 247321 - RNA, 21 nt, Human
agccugcaauguagguaccgg

SEQ ID NO: 247322 - RNA, 21 nt, Human
cccugggaugggcuuggacuu

SEQ ID NO: 247323 - RNA, 22 nt, Human
aaugcuguaaagaugcuaucug

SEQ ID NO: 247324 - RNA, 22 nt, Human
uccuguguguggccuuucccag

SEQ ID NO: 247325 - RNA, 22 nt, Human
gagcccuguagcaagucauguc

SEQ ID NO: 247326 - RNA, 22 nt, Human
ucucucucagccauuacagaac

SEQ ID NO: 247327 - RNA, 17 nt, Human
uccagagcacagagcuc

SEQ ID NO: 247328 - RNA, 22 nt, Human
uuacaacuugcagaggauguug

SEQ ID NO: 247329 - RNA, 22 nt, Human
uuccuggcugucaugcccuagu

SEQ ID NO: 247330 - RNA, 17 nt, Human
agauggcaggaggcaga

SEQ ID NO: 247331 - RNA, 22 nt, Human
ccugccagacgcaccagggggc

SEQ ID NO: 247332 - RNA, 22 nt, Human
ccagggugagaaaaggcuggau

SEQ ID NO: 247333 - RNA, 22 nt, Human
gguggcucguuuuucuugaaag

SEQ ID NO: 247334 - RNA, 22 nt, Human
aguuuauuuuugauaagucuug

SEQ ID NO: 247335 - RNA, 22 nt, Human
ucuuuggaucucaagguggcag

SEQ ID NO: 247336 - RNA, 22 nt, Human
acagcaaucugagagacauagu

SEQ ID NO: 247337 - RNA, 22 nt, Human
uuccagaaaguucuggaacugg

SEQ ID NO: 247338 - RNA, 20 nt, Human
uccaggcccacucagcugaa

SEQ ID NO: 247339 - RNA, 22 nt, Human
ucuggcagaagugcugucagua

SEQ ID NO: 247340 - RNA, 22 nt, Human
ucacagaacacaaaugccacuu

SEQ ID NO: 247341 - RNA, 22 nt, Human
aucuguuuaauucauuuucaca

SEQ ID NO: 247342 - RNA, 22 nt, Human
agaaucaggaccuguggcuguc

SEQ ID NO: 247343 - RNA, 22 nt, Human
ugaugaaaauguucagcaauua

SEQ ID NO: 247344 - RNA, 22 nt, Human
aaggcagaggaaggucuaguuu

SEQ ID NO: 247345 - RNA, 22 nt, Human
aauuucagaugucauaaauaua

SEQ ID NO: 247346 - RNA, 22 nt, Human
acugccuucugcucaggguuca

SEQ ID NO: 247347 - RNA, 22 nt, Human
guaguucugcagugucaccuga

SEQ ID NO: 247348 - RNA, 22 nt, Human
cacugccuggaaggagagacau

SEQ ID NO: 247349 - RNA, 17 nt, Human
gcacaaaucaauuacua

SEQ ID NO: 247350 - RNA, 22 nt, Human
uuccagagguagcaaugacuug

SEQ ID NO: 247351 - RNA, 22 nt, Human
ucugagcucuaucugugggaau

SEQ ID NO: 247352 - RNA, 22 nt, Human
augucacagcucccauuccucc

SEQ ID NO: 247353 - RNA, 22 nt, Human
uuccaguugguagaauguaagg

SEQ ID NO: 247354 - RNA, 22 nt, Human
agaaauucaauucuaauuagcu

SEQ ID NO: 247355 - RNA, 22 nt, Human
cuguauuaguccauuugagcug

SEQ ID NO: 247356 - RNA, 22 nt, Human
gccgugucaucugcggguggca

SEQ ID NO: 247357 - RNA, 22 nt, Human
ccaggaguuggaagcugccaug

SEQ ID NO: 247358 - RNA, 18 nt, Human
uggcuccugccuccugca

SEQ ID NO: 247359 - RNA, 22 nt, Human
uuaagucacuuaucuaaagaca

SEQ ID NO: 247360 - RNA, 22 nt, Human
aaugcaguuucauuuguagaau

SEQ ID NO: 247361 - RNA, 22 nt, Human
aauuuccagaccccauccacag

SEQ ID NO: 247362 - RNA, 22 nt, Human
gagaggggaccugugugucuag

SEQ ID NO: 247363 - RNA, 22 nt, Human
cagggccagagagggcuggcug

SEQ ID NO: 247364 - RNA, 22 nt, Human
ugcuucucuguucuaacccuug

SEQ ID NO: 247365 - RNA, 22 nt, Human
aaagaugucaguuugaaauaac

SEQ ID NO: 247366 - RNA, 22 nt, Human
ucaggcuuugggaaugccacuu

SEQ ID NO: 247367 - RNA, 23 nt, Human
ugcugcccgcuuggcacgcuccc

SEQ ID NO: 247368 - RNA, 22 nt, Human
ugcucccaaacgaccuacugug

SEQ ID NO: 247369 - RNA, 22 nt, Human
gcagcucacagucuccgccauc

SEQ ID NO: 247370 - RNA, 22 nt, Human
gccugccucaaaaucccaguuc

SEQ ID NO: 247371 - RNA, 22 nt, Human
auuuaguguguauugcuauuau

SEQ ID NO: 247372 - RNA, 22 nt, Human
uccagcccucagccaaguggaa

SEQ ID NO: 247373 - RNA, 22 nt, Human
gcacagcccugagcgcaugucu

SEQ ID NO: 247374 - RNA, 22 nt, Human
ucucugcaucccagggcucagc

SEQ ID NO: 247375 - RNA, 22 nt, Human
gcucucugcagccuccuuggag

SEQ ID NO: 247376 - RNA, 22 nt, Human
guuucuuagguaaauucuuuga

SEQ ID NO: 247377 - RNA, 22 nt, Human
gaugccuggcacccagcaagga

SEQ ID NO: 247378 - RNA, 22 nt, Human
gauucccaugucugaggaggug

SEQ ID NO: 247379 - RNA, 18 nt, Human
ggccagccccaggccagc

SEQ ID NO: 247380 - RNA, 22 nt, Human
uucugaaggucagcagcuuggu

SEQ ID NO: 247381 - RNA, 22 nt, Human
accacaggaggauggcugcugg

SEQ ID NO: 247382 - RNA, 20 nt, Human
uggugagagcaccugauggg

SEQ ID NO: 247383 - RNA, 22 nt, Human
uagcugaagggcauuuaauaaa

SEQ ID NO: 247384 - RNA, 22 nt, Human
augguggagguguauucuggau

SEQ ID NO: 247385 - RNA, 22 nt, Human
aacuuguauauguuauucagag

SEQ ID NO: 247386 - RNA, 22 nt, Human
ucagacagucaucagagcuugu

SEQ ID NO: 247387 - RNA, 22 nt, Human
uuacacuuuugacaaaccugag

SEQ ID NO: 247388 - RNA, 21 nt, Human
aaugaugaaagaugacagagu

SEQ ID NO: 247389 - RNA, 22 nt, Human
cagcugugauuccugcugucca

SEQ ID NO: 247390 - RNA, 19 nt, Human
ccuggaggugaagguucuc

SEQ ID NO: 247391 - RNA, 22 nt, Human
uggcugcaguugggcccucaga

SEQ ID NO: 247392 - RNA, 22 nt, Human
accuguuuguguccauuaguga

SEQ ID NO: 247393 - RNA, 22 nt, Human
uguggcuggucuccgagcgucg

SEQ ID NO: 247394 - RNA, 22 nt, Human
uguagaaagaauauguuucaua

SEQ ID NO: 247395 - RNA, 22 nt, Human
uacagucucuuugagugauugu

SEQ ID NO: 247396 - RNA, 22 nt, Human
cucagccaugggguggaucagc

SEQ ID NO: 247397 - RNA, 22 nt, Human
aggugcaugaugcagagugcag

SEQ ID NO: 247398 - RNA, 22 nt, Human
aguucuaaguaaauauuuuaua

SEQ ID NO: 247399 - RNA, 22 nt, Human
acacaugaguucucaucuugug

SEQ ID NO: 247400 - RNA, 22 nt, Human
ugagaaggaaacaauggcuuuu

SEQ ID NO: 247401 - RNA, 22 nt, Human
aggcagcuggaaaacuccaggc

SEQ ID NO: 247402 - RNA, 22 nt, Human
aaacugaggaguuagacuaggg

SEQ ID NO: 247403 - RNA, 22 nt, Human
cagccagaucaaacucagaugu

SEQ ID NO: 247404 - RNA, 22 nt, Human
aagugauuuagucuuauaaagg

SEQ ID NO: 247405 - RNA, 22 nt, Human
aauagauacuacuuagauguag

SEQ ID NO: 247406 - RNA, 22 nt, Human
ccugggacucggccaggacaga

SEQ ID NO: 247407 - RNA, 17 nt, Human
ugagcuucaaucaggug

SEQ ID NO: 247408 - RNA, 22 nt, Human
gcccuguggauuaaugagcagg

SEQ ID NO: 247409 - RNA, 22 nt, Human
acaaacagcuaacauauguuaa

SEQ ID NO: 247410 - RNA, 22 nt, Human
acugguuugucuauugucauuc

SEQ ID NO: 247411 - RNA, 22 nt, Human
aucuaacuuauguuuuaccaaa

SEQ ID NO: 247412 - RNA, 22 nt, Human
gcuccaggccccagcguuccgc

SEQ ID NO: 247413 - RNA, 22 nt, Human
gagggcugaagauuguggcccc

SEQ ID NO: 247414 - RNA, 22 nt, Human
ugaaauacacaaauuuaguaag

SEQ ID NO: 247415 - RNA, 22 nt, Human
gugacagagcugggauuugaag

SEQ ID NO: 247416 - RNA, 22 nt, Human
ugcagagucacccagauaauua

SEQ ID NO: 247417 - RNA, 22 nt, Human
cuugacuucuucuagaaauaag

SEQ ID NO: 247418 - RNA, 22 nt, Human
aggcaguguauugcuagcggcu

SEQ ID NO: 247419 - RNA, 22 nt, Human
gcucagagagaggcucaccauu

SEQ ID NO: 247420 - RNA, 22 nt, Human
uuggcucccacuaacuccagca

SEQ ID NO: 247421 - RNA, 22 nt, Human
aguggcagcugucaugcccuag

SEQ ID NO: 247422 - RNA, 22 nt, Human
uuuggaauuacuuacucaagcc

SEQ ID NO: 247423 - RNA, 22 nt, Human
gaauauauuucucuuaccuuua

SEQ ID NO: 247424 - RNA, 22 nt, Human
ucugggugagcugccucggguc

SEQ ID NO: 247425 - RNA, 22 nt, Human
gccacuggcgcugugcagagug

SEQ ID NO: 247426 - RNA, 22 nt, Human
uggauaaaugugcagaugacau

SEQ ID NO: 247427 - RNA, 22 nt, Human
aaugacaagacauagucucuga

SEQ ID NO: 247428 - RNA, 22 nt, Human
ugggaccucucuugagagagca

SEQ ID NO: 247429 - RNA, 22 nt, Human
gagggagggccaggucccaacc

SEQ ID NO: 247430 - RNA, 22 nt, Human
uuccagugaaacaugaggugug

SEQ ID NO: 247431 - RNA, 22 nt, Human
cugccaccaugccccagcagag

SEQ ID NO: 247432 - RNA, 18 nt, Human
cccacacagcaguagcuc

SEQ ID NO: 247433 - RNA, 22 nt, Human
gcuuagcacagaaugagaguuc

SEQ ID NO: 247434 - RNA, 22 nt, Human
ucuguucaugaaauaucuuuuu

SEQ ID NO: 247435 - RNA, 22 nt, Human
cccaguggggaaauagcuagcu

SEQ ID NO: 247436 - RNA, 22 nt, Human
uacuguacauuccguuuguugc

SEQ ID NO: 247437 - RNA, 22 nt, Human
gggcaggugcccagggccagag

SEQ ID NO: 247438 - RNA, 22 nt, Human
agagcacggccaccauuuacaa

SEQ ID NO: 247439 - RNA, 22 nt, Human
gcugccugguuucucagcugca

SEQ ID NO: 247440 - RNA, 22 nt, Human
uucagaaaaagaccauugcaau

SEQ ID NO: 247441 - RNA, 22 nt, Human
caaauacuggguaaguuaauuu

SEQ ID NO: 247442 - RNA, 22 nt, Human
acuauacaccaaaauauuaagg

SEQ ID NO: 247443 - RNA, 22 nt, Human
ucagguguucuccacucaguuu

SEQ ID NO: 247444 - RNA, 22 nt, Human
uguguccuaugaaagaggguua

SEQ ID NO: 247445 - RNA, 22 nt, Human
cuggccuaggaaugguuuuccg

SEQ ID NO: 247446 - RNA, 22 nt, Human
agaguuaaggccacugucagua

SEQ ID NO: 247447 - RNA, 22 nt, Human
agaaggcuaaagaaacagauug

SEQ ID NO: 247448 - RNA, 22 nt, Human
guugcugggagcagggauccug

SEQ ID NO: 247449 - RNA, 20 nt, Human
uauuucugggcaaccauuua

SEQ ID NO: 247450 - RNA, 22 nt, Human
caggcuaaagcuuugagcaugu

SEQ ID NO: 247451 - RNA, 22 nt, Human
ggcuccaggguaccccuggaug

SEQ ID NO: 247452 - RNA, 22 nt, Human
auuugaauggcuuaacacaacg

SEQ ID NO: 247453 - RNA, 22 nt, Human
gugcauuaggcuggaauguuga

SEQ ID NO: 247454 - RNA, 22 nt, Human
uuuuacaagcugagucguuaaa

SEQ ID NO: 247455 - RNA, 22 nt, Human
aaagcugguuauucugaggcag

SEQ ID NO: 247456 - RNA, 21 nt, Human
uaaaugugagcagggcugggc

SEQ ID NO: 247457 - RNA, 22 nt, Human
aauaacuucaguucuuacauua

SEQ ID NO: 247458 - RNA, 22 nt, Human
uaugugucuuuaucuggcucuu

SEQ ID NO: 247459 - RNA, 22 nt, Human
uggaagaaugcuccacagggaa

SEQ ID NO: 247460 - RNA, 22 nt, Human
uuccagcacagaaguauacauu

SEQ ID NO: 247461 - RNA, 19 nt, Human
gguguccuagagauaagag

SEQ ID NO: 247462 - RNA, 22 nt, Human
gaaugaaucuguaagugacaag

SEQ ID NO: 247463 - RNA, 22 nt, Human
uuucaaaugcaugucuuuccuc

SEQ ID NO: 247464 - RNA, 22 nt, Human
agacuucacucccagagauucu

SEQ ID NO: 247465 - RNA, 22 nt, Human
cagcacuggggccacuggaguu

SEQ ID NO: 247466 - RNA, 22 nt, Human
cagcccucaucccgccugcguu

SEQ ID NO: 247467 - RNA, 21 nt, Human
aggagcuguguuagcuggucg

SEQ ID NO: 247468 - RNA, 22 nt, Human
uccuggacagauccccaucauc

SEQ ID NO: 247469 - RNA, 22 nt, Human
uggguggagaaguggaccugcu

SEQ ID NO: 247470 - RNA, 20 nt, Human
uuccaacucacaucucuaca

SEQ ID NO: 247471 - RNA, 22 nt, Human
aaguuauaucaucucauugacg

SEQ ID NO: 247472 - RNA, 23 nt, Human
gugucauuacuguaauuauugug

SEQ ID NO: 247473 - RNA, 23 nt, Human
uugcaaaaugagucuugagugaa

SEQ ID NO: 247474 - RNA, 22 nt, Human
agccuugcaugauuucauucau

SEQ ID NO: 247475 - RNA, 22 nt, Human
cucaaggccaguucuucugacu

SEQ ID NO: 247476 - RNA, 22 nt, Human
uuaaugacaucauaggugaagu

SEQ ID NO: 247477 - RNA, 22 nt, Human
cagagccagcaguggggacagg

SEQ ID NO: 247478 - RNA, 22 nt, Human
caggccagcggcccgcgcguuc

SEQ ID NO: 247479 - RNA, 22 nt, Human
cuggaucuucagagaucaccag

SEQ ID NO: 247480 - RNA, 22 nt, Human
aggacauguuuguaucuuccuu

SEQ ID NO: 247481 - RNA, 22 nt, Human
ugggagcaaaugacugggagau

SEQ ID NO: 247482 - RNA, 22 nt, Human
gaaccacaaugugaagaaggag

SEQ ID NO: 247483 - RNA, 22 nt, Human
gaggagagccugcacuuugacc

SEQ ID NO: 247484 - RNA, 22 nt, Human
augauacaagcaaaacuaauca

SEQ ID NO: 247485 - RNA, 22 nt, Human
agagucagaaccaagaugaggc

SEQ ID NO: 247486 - RNA, 22 nt, Human
augcaucuaugacuuagacauu

SEQ ID NO: 247487 - RNA, 22 nt, Human
augcauucauucauucuuucua

SEQ ID NO: 247488 - RNA, 22 nt, Human
agaaacauuuagauuauauguc

SEQ ID NO: 247489 - RNA, 22 nt, Human
aaaauaugacugugcuccuuaa

SEQ ID NO: 247490 - RNA, 22 nt, Human
agaugcugcuccacaggccagg

SEQ ID NO: 247491 - RNA, 22 nt, Human
ggcagcucacugauuagcaauu

SEQ ID NO: 247492 - RNA, 22 nt, Human
ggacccagaggggagucuggca

SEQ ID NO: 247493 - RNA, 22 nt, Human
uuaagauuuguagagaaaaagc

SEQ ID NO: 247494 - RNA, 22 nt, Human
auugaguaccuccagauucaua

SEQ ID NO: 247495 - RNA, 22 nt, Human
gguuuauuaaugugaacuguau

SEQ ID NO: 247496 - RNA, 22 nt, Human
ucuuaaguaccuccuuuaucac

SEQ ID NO: 247497 - RNA, 22 nt, Human
ucacaucuuuaggcuuacaggu

SEQ ID NO: 247498 - RNA, 22 nt, Human
aggggcaguuccaaguuuugug

SEQ ID NO: 247499 - RNA, 23 nt, Human
ugauuacaggaaguucaaguguu

SEQ ID NO: 247500 - RNA, 22 nt, Human
caggcauugccauuccuccaga

SEQ ID NO: 247501 - RNA, 22 nt, Human
caucugcucugucugccauguu

SEQ ID NO: 247502 - RNA, 22 nt, Human
ucuggcucugacacuacuguua

SEQ ID NO: 247503 - RNA, 22 nt, Human
ggucuuuucacagugguuugag

SEQ ID NO: 247504 - RNA, 22 nt, Human
gggcugacaguuuccccugaaa

SEQ ID NO: 247505 - RNA, 22 nt, Human
acagugcuuuuguuccucuccu

SEQ ID NO: 247506 - RNA, 19 nt, Human
gcccuccucacugagcucu

SEQ ID NO: 247507 - RNA, 22 nt, Human
cucugggcccacuuaaaucugg

SEQ ID NO: 247508 - RNA, 22 nt, Human
ggucccaaggaggaugaggcua

SEQ ID NO: 247509 - RNA, 22 nt, Human
gcaggaagaggcucgaagcccc

SEQ ID NO: 247510 - RNA, 23 nt, Human
ugauuuuaaaaaguaaguuauca

SEQ ID NO: 247511 - RNA, 22 nt, Human
acauguguauagccuguauaga

SEQ ID NO: 247512 - RNA, 22 nt, Human
uaaagcuguucagugcagaaag

SEQ ID NO: 247513 - RNA, 22 nt, Human
uagcaggguccaaugugaggca

SEQ ID NO: 247514 - RNA, 22 nt, Human
uaauuauaaacugcaguaggua

SEQ ID NO: 247515 - RNA, 22 nt, Human
ggcucugccauuuccuagcugc

SEQ ID NO: 247516 - RNA, 22 nt, Human
ggcauuugagccauuggccugu

SEQ ID NO: 247517 - RNA, 22 nt, Human
ggucucugcucagaugccacuu

SEQ ID NO: 247518 - RNA, 22 nt, Human
caguuucccugcuugaaaacgu

SEQ ID NO: 247519 - RNA, 22 nt, Human
ucugggaauuuauuggcacuuu

SEQ ID NO: 247520 - RNA, 22 nt, Human
agaaucaacugaaaauugguga

SEQ ID NO: 247521 - RNA, 17 nt, Human
gcuuccucaugcaguuc

SEQ ID NO: 247522 - RNA, 22 nt, Human
aagugaauucauuguguuauau

SEQ ID NO: 247523 - RNA, 22 nt, Human
ucucugggagccaggaugacac

SEQ ID NO: 247524 - RNA, 22 nt, Human
auggaaagugcauggaagucau

SEQ ID NO: 247525 - RNA, 22 nt, Human
gguggcagucuuaagagaucuu

SEQ ID NO: 247526 - RNA, 22 nt, Human
guggucagcagcagugggagug

SEQ ID NO: 247527 - RNA, 22 nt, Human
cauccauagccucaauaaauag

SEQ ID NO: 247528 - RNA, 22 nt, Human
ucaaauggguaugcuuuauaau

SEQ ID NO: 247529 - RNA, 22 nt, Human
acauguaaacauuuacaguauu

SEQ ID NO: 247530 - RNA, 22 nt, Human
cagcagguucuacgggugagau

SEQ ID NO: 247531 - RNA, 22 nt, Human
uuugucaucccuuuugaaacug

SEQ ID NO: 247532 - RNA, 22 nt, Human
auucaaauuaaguuaauucagc

SEQ ID NO: 247533 - RNA, 22 nt, Human
aggcaggccgugucccuccuca

SEQ ID NO: 247534 - RNA, 22 nt, Human
auugagaauccauuugagauga

SEQ ID NO: 247535 - RNA, 22 nt, Human
aaauuucaagcaaaguagcuau

SEQ ID NO: 247536 - RNA, 22 nt, Human
aggaagaaccuaagaaagucuc

SEQ ID NO: 247537 - RNA, 21 nt, Human
ugucuuuaggaccuguuaaau

SEQ ID NO: 247538 - RNA, 22 nt, Human
acugggcuggggcucauucucc

SEQ ID NO: 247539 - RNA, 22 nt, Human
guguacaggaugacuguacuua

SEQ ID NO: 247540 - RNA, 22 nt, Human
cuuggcugucuauaggaaagag

SEQ ID NO: 247541 - RNA, 22 nt, Human
uggccuccccuaacagccucuu

SEQ ID NO: 247542 - RNA, 22 nt, Human
cuugccugccacuacagcugaa

SEQ ID NO: 247543 - RNA, 22 nt, Human
uauuccagugugaucuuuguag

SEQ ID NO: 247544 - RNA, 22 nt, Human
ccugggcaacauagggagaccc

SEQ ID NO: 247545 - RNA, 22 nt, Human
ugaggcaggaauggggaaaagu

SEQ ID NO: 247546 - RNA, 19 nt, Human
aaacucugaaggccacugg

SEQ ID NO: 247547 - RNA, 19 nt, Human
ugcugcaggaugcugcugg

SEQ ID NO: 247548 - RNA, 22 nt, Human
agugggggcuggcucugucugu

SEQ ID NO: 247549 - RNA, 22 nt, Human
caggugagcucuaucuagggag

SEQ ID NO: 247550 - RNA, 19 nt, Human
ccucccacggauuccuucc

SEQ ID NO: 247551 - RNA, 22 nt, Human
uaaaggcaaacucuccaaggau

SEQ ID NO: 247552 - RNA, 22 nt, Human
gguuucaacuuuugugaggaau

SEQ ID NO: 247553 - RNA, 22 nt, Human
acugccuuauaauaugucaaca

SEQ ID NO: 247554 - RNA, 22 nt, Human
agguggggcugggaaagauucc

SEQ ID NO: 247555 - RNA, 22 nt, Human
uccaggcccagacggggugagg

SEQ ID NO: 247556 - RNA, 22 nt, Human
ugcucaggucguucugccccuu

SEQ ID NO: 247557 - RNA, 22 nt, Human
agcugcaagaagaggucccuga

SEQ ID NO: 247558 - RNA, 22 nt, Human
cagaaauggagcccaggaaucu

SEQ ID NO: 247559 - RNA, 22 nt, Human
gcuucauuucucucuguagacc

SEQ ID NO: 247560 - RNA, 22 nt, Human
uccaugaggaccaaauucguag

SEQ ID NO: 247561 - RNA, 22 nt, Human
gauaggaccagguaaccucuaa

SEQ ID NO: 247562 - RNA, 22 nt, Human
gccauugagauugaaguaagca

SEQ ID NO: 247563 - RNA, 22 nt, Human
cuugacucuugcuucccaugga

SEQ ID NO: 247564 - RNA, 20 nt, Human
cagaugggacguggaggagu

SEQ ID NO: 247565 - RNA, 22 nt, Human
cuuugcugccagaacccagcag

SEQ ID NO: 247566 - RNA, 22 nt, Human
gggguggauuccuacaggucca

SEQ ID NO: 247567 - RNA, 22 nt, Human
uugcacucaccacauuucaggu

SEQ ID NO: 247568 - RNA, 22 nt, Human
aaaguacuuacaguaugcuugg

SEQ ID NO: 247569 - RNA, 22 nt, Human
uuggcccuuuaugggaugggca

SEQ ID NO: 247570 - RNA, 22 nt, Human
gcccugagacugagcauggguu

SEQ ID NO: 247571 - RNA, 22 nt, Human
ucccuuggaaaguagccucaca

SEQ ID NO: 247572 - RNA, 22 nt, Human
uguuuuauuucuccaagaggga

SEQ ID NO: 247573 - RNA, 22 nt, Human
uggggagagguaucauugagau

SEQ ID NO: 247574 - RNA, 22 nt, Human
ucccugggaccggcagcucaca

SEQ ID NO: 247575 - RNA, 22 nt, Human
cuucccugguguuagcccaaug

SEQ ID NO: 247576 - RNA, 22 nt, Human
uuggcucagcugggacuguuga

SEQ ID NO: 247577 - RNA, 22 nt, Human
gaggccuggagccgccuaggcg

SEQ ID NO: 247578 - RNA, 22 nt, Human
agcugaagcaacaacaggaugg

SEQ ID NO: 247579 - RNA, 22 nt, Human
accccagggcugccagccuccu

SEQ ID NO: 247580 - RNA, 22 nt, Human
uaguacuacguuuucuacuauc

SEQ ID NO: 247581 - RNA, 22 nt, Human
ggggaccuggccacccauccuu

SEQ ID NO: 247582 - RNA, 22 nt, Human
uaguauaauuguucuggaauca

SEQ ID NO: 247583 - RNA, 22 nt, Human
ucuuuccuagaggcugaugagu

SEQ ID NO: 247584 - RNA, 22 nt, Human
uuguacaaauaggaaccucuga

SEQ ID NO: 247585 - RNA, 22 nt, Human
uccccagaggugaggcagcuuu

SEQ ID NO: 247586 - RNA, 22 nt, Human
cuccagaggaaagcacauagug

SEQ ID NO: 247587 - RNA, 22 nt, Human
agcuucucaaguguuugcgggg

SEQ ID NO: 247588 - RNA, 22 nt, Human
ucucauugaaaugugacugagu

SEQ ID NO: 247589 - RNA, 22 nt, Human
gccaaaggauucuauggagaua

SEQ ID NO: 247590 - RNA, 22 nt, Human
gcagugggccugaggaagggug

SEQ ID NO: 247591 - RNA, 22 nt, Human
aaggcauagucuuuaaguucug

SEQ ID NO: 247592 - RNA, 22 nt, Human
caaagggcggcugucggagggu

SEQ ID NO: 247593 - RNA, 22 nt, Human
ugccuucauccauguuauagug

SEQ ID NO: 247594 - RNA, 22 nt, Human
aagcaaaggcaggagcuuguga

SEQ ID NO: 247595 - RNA, 22 nt, Human
uagaacuuauuuggcauuauuu

SEQ ID NO: 247596 - RNA, 23 nt, Human
uccugugaagccauguuuguugu

SEQ ID NO: 247597 - RNA, 22 nt, Human
acuguauuuuggguguauuuuc

SEQ ID NO: 247598 - RNA, 22 nt, Human
ggcacagauagaucaagugucu

SEQ ID NO: 247599 - RNA, 21 nt, Human
ccugugugugucccuuuaaga

SEQ ID NO: 247600 - RNA, 22 nt, Human
cagcucuuuuuugcagcagcug

SEQ ID NO: 247601 - RNA, 22 nt, Human
ccagaggucuccugcacgggau

SEQ ID NO: 247602 - RNA, 22 nt, Human
cagagaaaaaauccugcucuca

SEQ ID NO: 247603 - RNA, 22 nt, Human
aguccuuugcugaacugucaca

SEQ ID NO: 247604 - RNA, 22 nt, Human
accacccccuuggguguggaag

SEQ ID NO: 247605 - RNA, 22 nt, Human
guuuauaugugugccacucuua

SEQ ID NO: 247606 - RNA, 23 nt, Human
uccuuuaaugcuggaauggcuag

SEQ ID NO: 247607 - RNA, 22 nt, Human
aagucccugugggguggaggcu

SEQ ID NO: 247608 - RNA, 22 nt, Human
agacaaauggaguaugagcaac

SEQ ID NO: 247609 - RNA, 22 nt, Human
aauagcuuaguccugauucugu

SEQ ID NO: 247610 - RNA, 22 nt, Human
uugagggauugcaccagaagag

SEQ ID NO: 247611 - RNA, 22 nt, Human
uaggaagaucaaguuuaucuca

SEQ ID NO: 247612 - RNA, 22 nt, Human
acucuguacuuucuuguugugu

SEQ ID NO: 247613 - RNA, 18 nt, Human
uucuuuaauucaguuuga

SEQ ID NO: 247614 - RNA, 22 nt, Human
acauguguuuuccuacuuauga

SEQ ID NO: 247615 - RNA, 22 nt, Human
ccugccagauccccugagcuga

SEQ ID NO: 247616 - RNA, 22 nt, Human
gggagccacaguagcagcuacu

SEQ ID NO: 247617 - RNA, 20 nt, Human
aauauaauucucugaauuua

SEQ ID NO: 247618 - RNA, 22 nt, Human
cugggcagcacaucaucguauc

SEQ ID NO: 247619 - RNA, 22 nt, Human
ucuacgaagccaccauggagac

SEQ ID NO: 247620 - RNA, 22 nt, Human
ucacagugcaccagugugaagc

SEQ ID NO: 247621 - RNA, 22 nt, Human
uagaacuaagaguuaucauuua

SEQ ID NO: 247622 - RNA, 22 nt, Human
aguuacauauaagaagacagac

SEQ ID NO: 247623 - RNA, 22 nt, Human
aggggcugccuggcuuggcacu

SEQ ID NO: 247624 - RNA, 22 nt, Human
gcuccccagcuuagcccuggcu

SEQ ID NO: 247625 - RNA, 22 nt, Human
agcccuggcagagccagguagu

SEQ ID NO: 247626 - RNA, 22 nt, Human
aauuccaagagcuuccuaagug

SEQ ID NO: 247627 - RNA, 22 nt, Human
uacagugagacuggcucaggga

SEQ ID NO: 247628 - RNA, 22 nt, Human
acagaggaagcauauagcacaa

SEQ ID NO: 247629 - RNA, 22 nt, Human
agaagcuacugggauauuaauu

SEQ ID NO: 247630 - RNA, 22 nt, Human
auguuucaucaguaagguuuug

SEQ ID NO: 247631 - RNA, 21 nt, Human
aaagagcccgcugagagguuc

SEQ ID NO: 247632 - RNA, 22 nt, Human
aggcaugaugugcaguggcaaa

SEQ ID NO: 247633 - RNA, 22 nt, Human
uggagcugccuggcaccuacag

SEQ ID NO: 247634 - RNA, 22 nt, Human
gcucugggccgggcaccagccu

SEQ ID NO: 247635 - RNA, 22 nt, Human
aauccauuaaaaacaagcgcau

SEQ ID NO: 247636 - RNA, 22 nt, Human
agacaugugguauaaucagggg

SEQ ID NO: 247637 - RNA, 22 nt, Human
ucaggcugaccagguuuugcuc

SEQ ID NO: 247638 - RNA, 22 nt, Human
ugcccuguggguaucugauggc

SEQ ID NO: 247639 - RNA, 22 nt, Human
uagaacuugaaugugaaaucag

SEQ ID NO: 247640 - RNA, 16 nt, Human
cagaguguaaacagga

SEQ ID NO: 247641 - RNA, 22 nt, Human
aagauuuauuagaugcuuaccu

SEQ ID NO: 247642 - RNA, 22 nt, Human
guuaggaauuuguuacugugua

SEQ ID NO: 247643 - RNA, 19 nt, Human
uuugacuccucauuuuuau

SEQ ID NO: 247644 - RNA, 20 nt, Human
aggaggcaauguagauaagc

SEQ ID NO: 247645 - RNA, 22 nt, Human
aaaaugaagcaaaggcauucag

SEQ ID NO: 247646 - RNA, 22 nt, Human
gcagaggccuagguggaaggcc

SEQ ID NO: 247647 - RNA, 17 nt, Human
ugaggcaaccaucacua

SEQ ID NO: 247648 - RNA, 22 nt, Human
gguggcagaggugcaucagccc

SEQ ID NO: 247649 - RNA, 22 nt, Human
gaggcagccucaguggaccucg

SEQ ID NO: 247650 - RNA, 22 nt, Human
aagugcugaaugaagacacaaa

SEQ ID NO: 247651 - RNA, 22 nt, Human
aggccucugggucuccucugac

SEQ ID NO: 247652 - RNA, 22 nt, Human
ugcacagaucugguggcaagga

SEQ ID NO: 247653 - RNA, 22 nt, Human
ucucagcaaggaaagaggcagg

SEQ ID NO: 247654 - RNA, 22 nt, Human
gagaguccuuaguuugcaggua

SEQ ID NO: 247655 - RNA, 22 nt, Human
caacagaagguguacuacugaa

SEQ ID NO: 247656 - RNA, 22 nt, Human
cuguccugaaguuuucaugaga

SEQ ID NO: 247657 - RNA, 22 nt, Human
ccacagagcauuagauuucaga

SEQ ID NO: 247658 - RNA, 22 nt, Human
ugaaauucaaaacacauuuguc

SEQ ID NO: 247659 - RNA, 22 nt, Human
aagugaccucaugguuucuccu

SEQ ID NO: 247660 - RNA, 22 nt, Human
aaagcagggaugaggcuagagg

SEQ ID NO: 247661 - RNA, 22 nt, Human
aauggcaaggaaaccguuacca

SEQ ID NO: 247662 - RNA, 22 nt, Human
guagaaaaagcaguaagucuca

SEQ ID NO: 247663 - RNA, 22 nt, Human
aaagcugcuuuaaacaucuaug

SEQ ID NO: 247664 - RNA, 22 nt, Human
cugaaauuauuguuuaaucaaa

SEQ ID NO: 247665 - RNA, 22 nt, Human
uacacuuuucaauguagucugu

SEQ ID NO: 247666 - RNA, 19 nt, Human
ugagacagagaccaguucu

SEQ ID NO: 247667 - RNA, 20 nt, Human
ucucuggcaagaagcugcag

SEQ ID NO: 247668 - RNA, 22 nt, Human
auguuucauuuagauaucaggc

SEQ ID NO: 247669 - RNA, 22 nt, Human
auuugcauuuagaaagaucacu

SEQ ID NO: 247670 - RNA, 21 nt, Human
auuucacacccuccuuuuucu

SEQ ID NO: 247671 - RNA, 22 nt, Human
ggagcugggacccugucaucug

SEQ ID NO: 247672 - RNA, 22 nt, Human
ugagccagguuuuccaucauuc

SEQ ID NO: 247673 - RNA, 22 nt, Human
uuaagacaguguauuuguuuuc

SEQ ID NO: 247674 - RNA, 19 nt, Human
ggguuguguggaagguauc

SEQ ID NO: 247675 - RNA, 22 nt, Human
ucugucugacuaccaugaggca

SEQ ID NO: 247676 - RNA, 22 nt, Human
guauuagguuggugcaaaauug

SEQ ID NO: 247677 - RNA, 22 nt, Human
gagaugguugcaauaguuuaaa

SEQ ID NO: 247678 - RNA, 22 nt, Human
ucaggugugugguggaaggcag

SEQ ID NO: 247679 - RNA, 22 nt, Human
uaacugguccucggauguugug

SEQ ID NO: 247680 - RNA, 22 nt, Human
ccagcuuucauaucaugaggua

SEQ ID NO: 247681 - RNA, 22 nt, Human
ugguccuggggaucugcaguga

SEQ ID NO: 247682 - RNA, 20 nt, Human
uaccaacagcaggaagcaua

SEQ ID NO: 247683 - RNA, 22 nt, Human
aaaccauuagguuuuaucuacu

SEQ ID NO: 247684 - RNA, 22 nt, Human
agggcagugggaaagccugcuc

SEQ ID NO: 247685 - RNA, 22 nt, Human
agcagguggaaaauucuuauca

SEQ ID NO: 247686 - RNA, 22 nt, Human
ucaaagcuuagauaauuucuuu

SEQ ID NO: 247687 - RNA, 22 nt, Human
agaugcagaguuugcuguggac

SEQ ID NO: 247688 - RNA, 22 nt, Human
uuugugaucuccucccucuaga

SEQ ID NO: 247689 - RNA, 22 nt, Human
uagggauguggugagaacugag

SEQ ID NO: 247690 - RNA, 22 nt, Human
cgguccuguacuugaugagaua

SEQ ID NO: 247691 - RNA, 22 nt, Human
ucuagaacuccaguuaggcaau

SEQ ID NO: 247692 - RNA, 22 nt, Human
ucucaagcuaguguuuauagua

SEQ ID NO: 247693 - RNA, 22 nt, Human
aucuucaaggaaaaaauacagu

SEQ ID NO: 247694 - RNA, 22 nt, Human
gggugcagcagagcuccucugu

SEQ ID NO: 247695 - RNA, 22 nt, Human
uuaaacaguguuucaugugggg

SEQ ID NO: 247696 - RNA, 22 nt, Human
agagcagauuucaaauauuggc

SEQ ID NO: 247697 - RNA, 18 nt, Human
gccuuugcacaagcagcu

SEQ ID NO: 247698 - RNA, 22 nt, Human
ucauucauaaaaauuaguuggc

SEQ ID NO: 247699 - RNA, 22 nt, Human
caugcagcggcguuugguuuaa

SEQ ID NO: 247700 - RNA, 22 nt, Human
cugggcugauuuagucacguuu

SEQ ID NO: 247701 - RNA, 22 nt, Human
aaggcuggaguacagugcagug

SEQ ID NO: 247702 - RNA, 22 nt, Human
aaaugagguuaauacagugcuu

SEQ ID NO: 247703 - RNA, 22 nt, Human
uuuaaccugucaauuugcaugc

SEQ ID NO: 247704 - RNA, 21 nt, Human
agcuggcuauaguuagugaug

SEQ ID NO: 247705 - RNA, 22 nt, Human
auuguacaaugccuggaacauu

SEQ ID NO: 247706 - RNA, 17 nt, Human
cugucugcugcuuccuc

SEQ ID NO: 247707 - RNA, 22 nt, Human
uucauuaaguauaaaauguggu

SEQ ID NO: 247708 - RNA, 22 nt, Human
acagagcuucccagccugagca

SEQ ID NO: 247709 - RNA, 22 nt, Human
gaggccagcgcgcagcacuuuu

SEQ ID NO: 247710 - RNA, 22 nt, Human
agagggugggcacgugauggau

SEQ ID NO: 247711 - RNA, 22 nt, Human
gcuuccuuccuuacauuggugg

SEQ ID NO: 247712 - RNA, 18 nt, Human
cccauguugccagucagc

SEQ ID NO: 247713 - RNA, 22 nt, Human
ccuuccagugacuaaggaggaa

SEQ ID NO: 247714 - RNA, 22 nt, Human
gaggcagagaccuucaggaccu

SEQ ID NO: 247715 - RNA, 22 nt, Human
cacccaggcuggagugcauugg

SEQ ID NO: 247716 - RNA, 22 nt, Human
gcaggagccacuucagggaugc

SEQ ID NO: 247717 - RNA, 22 nt, Human
cucuggaaauggccauagucau

SEQ ID NO: 247718 - RNA, 22 nt, Human
gaccucaucugaacauaugcaa

SEQ ID NO: 247719 - RNA, 22 nt, Human
ccaguuuagguacuaggcucua

SEQ ID NO: 247720 - RNA, 22 nt, Human
caggaaugaguucuggugcucu

SEQ ID NO: 247721 - RNA, 22 nt, Human
uguuuuucaaauauugcucugu

SEQ ID NO: 247722 - RNA, 22 nt, Human
auuguauucaguuacaggucuu

SEQ ID NO: 247723 - RNA, 22 nt, Human
ugcacacaggucuaggacaugg

SEQ ID NO: 247724 - RNA, 22 nt, Human
auugagaaugcaaucuacuaug

SEQ ID NO: 247725 - RNA, 22 nt, Human
ggcagugucaaaauaggcagaa

SEQ ID NO: 247726 - RNA, 22 nt, Human
agcaaacuaauugcaguucugg

SEQ ID NO: 247727 - RNA, 22 nt, Human
agcugcagcccuccugcauggc

SEQ ID NO: 247728 - RNA, 20 nt, Human
ugggccucuggugccucugg

SEQ ID NO: 247729 - RNA, 22 nt, Human
cucuggaauggguguuucuaac

SEQ ID NO: 247730 - RNA, 22 nt, Human
ucucugugaauggcgucaccug

SEQ ID NO: 247731 - RNA, 22 nt, Human
uugaauuuagauuguauguuga

SEQ ID NO: 247732 - RNA, 22 nt, Human
cauuuccuuccugcugcuccuc

SEQ ID NO: 247733 - RNA, 22 nt, Human
auggauaaucaugaacuuugag

SEQ ID NO: 247734 - RNA, 22 nt, Human
cucucugguacauagaguuugg

SEQ ID NO: 247735 - RNA, 22 nt, Human
gccaacagcugggugcaugucc

SEQ ID NO: 247736 - RNA, 22 nt, Human
uuauucaccucuauuagacuca

SEQ ID NO: 247737 - RNA, 22 nt, Human
uaggaaacagugcauauauagu

SEQ ID NO: 247738 - RNA, 22 nt, Human
ucuucccagaggaggugccagc

SEQ ID NO: 247739 - RNA, 22 nt, Human
aagaggcgccggguacguggcg

SEQ ID NO: 247740 - RNA, 22 nt, Human
gugcagcugguggagucugggg

SEQ ID NO: 247741 - RNA, 21 nt, Human
aguaguuuagcacaggguuug

SEQ ID NO: 247742 - RNA, 22 nt, Human
cucaggaggaugacugccuugg

SEQ ID NO: 247743 - RNA, 22 nt, Human
uuucuucauucaccuucacccc

SEQ ID NO: 247744 - RNA, 22 nt, Human
ggcugcagggcagcuggugugg

SEQ ID NO: 247745 - RNA, 20 nt, Human
gcauggcuaaucuguacuga

SEQ ID NO: 247746 - RNA, 22 nt, Human
aaacagcuaaguacauucaagg

SEQ ID NO: 247747 - RNA, 22 nt, Human
ucagcaggugccucagauucuu

SEQ ID NO: 247748 - RNA, 22 nt, Human
gggagcuggggcauuuauaccc

SEQ ID NO: 247749 - RNA, 22 nt, Human
ccagggcuccauugcucauccu

SEQ ID NO: 247750 - RNA, 20 nt, Human
ucacucugaugcuagggugg

SEQ ID NO: 247751 - RNA, 23 nt, Human
gggcugcuccaggccaaggcugg

SEQ ID NO: 247752 - RNA, 22 nt, Human
gcaaggauguacugcaauagga

SEQ ID NO: 247753 - RNA, 22 nt, Human
agucaguuucccuggaaagcag

SEQ ID NO: 247754 - RNA, 22 nt, Human
uagaggguuauuaggacagaag

SEQ ID NO: 247755 - RNA, 22 nt, Human
cugcucugagaggcucuuccua

SEQ ID NO: 247756 - RNA, 22 nt, Human
cuggccugccugccgguugucg

SEQ ID NO: 247757 - RNA, 22 nt, Human
gaugcucaucuguccuuugaug

SEQ ID NO: 247758 - RNA, 22 nt, Human
uccugaagaacgaagucaugua

SEQ ID NO: 247759 - RNA, 22 nt, Human
cccagccuuccacccuggacua

SEQ ID NO: 247760 - RNA, 22 nt, Human
ugggcccaagagagucuccaac

SEQ ID NO: 247761 - RNA, 22 nt, Human
uuccucagagggcgcuggggaa

SEQ ID NO: 247762 - RNA, 19 nt, Human
uggggccuccugucccugg

SEQ ID NO: 247763 - RNA, 22 nt, Human
aaagcuggccucucaggcuuua

SEQ ID NO: 247764 - RNA, 22 nt, Human
gacccuggcagauaccgucaca

SEQ ID NO: 247765 - RNA, 22 nt, Human
ugucaacagauacuagagagcu

SEQ ID NO: 247766 - RNA, 22 nt, Human
uccauuauacuucugauucaaa

SEQ ID NO: 247767 - RNA, 23 nt, Human
auagucauguaaaauauuugaag

SEQ ID NO: 247768 - RNA, 22 nt, Human
agacauuuuacauucuuccauu

SEQ ID NO: 247769 - RNA, 22 nt, Human
aagucccuuuaaucagugccuu

SEQ ID NO: 247770 - RNA, 22 nt, Human
aaaaguucccugguuagaaaag

SEQ ID NO: 247771 - RNA, 22 nt, Human
cagccuucaaggcuuagcucag

SEQ ID NO: 247772 - RNA, 22 nt, Human
aagcaggcuugguguggccgcu

SEQ ID NO: 247773 - RNA, 22 nt, Human
gagaggcucugaggacuggggu

SEQ ID NO: 247774 - RNA, 22 nt, Human
ugguuuaccccuguccuauauc

SEQ ID NO: 247775 - RNA, 22 nt, Human
ggaaucagaugaggggcagagc

SEQ ID NO: 247776 - RNA, 22 nt, Human
cccucagggaccacugacuuca

SEQ ID NO: 247777 - RNA, 22 nt, Human
agaggcugaaugaugucaucau

SEQ ID NO: 247778 - RNA, 22 nt, Human
ugagcaguaacagcucacaggg

SEQ ID NO: 247779 - RNA, 22 nt, Human
gggagccacucagcugagaguu

SEQ ID NO: 247780 - RNA, 22 nt, Human
ugcugcagaucagcugaguccu

SEQ ID NO: 247781 - RNA, 22 nt, Human
ugccaggcucaggaugucccug

SEQ ID NO: 247782 - RNA, 22 nt, Human
agcgacagaaaccaaggacaag

SEQ ID NO: 247783 - RNA, 18 nt, Human
ccugugacagaggcauca

SEQ ID NO: 247784 - RNA, 22 nt, Human
cacagguguuuguuauacucag

SEQ ID NO: 247785 - RNA, 22 nt, Human
acacauauaugucgaaguccuc

SEQ ID NO: 247786 - RNA, 21 nt, Human
aaaugcuuuguauauaucugu

SEQ ID NO: 247787 - RNA, 19 nt, Human
agcaguuauaugcauggga

SEQ ID NO: 247788 - RNA, 23 nt, Human
agguggucuuguggaugcugcaa

SEQ ID NO: 247789 - RNA, 22 nt, Human
agcacauuaagugaguucaugu

SEQ ID NO: 247790 - RNA, 22 nt, Human
uggcagugccccuugaccagug

SEQ ID NO: 247791 - RNA, 22 nt, Human
caauuucagguggauagguuuu

SEQ ID NO: 247792 - RNA, 22 nt, Human
uucaaugccuagaacuuagcau

SEQ ID NO: 247793 - RNA, 23 nt, Human
aagaacugcgaauggagaaagua

SEQ ID NO: 247794 - RNA, 21 nt, Human
agcagagugcuuugacuuugu

SEQ ID NO: 247795 - RNA, 22 nt, Human
cagagggacaguaugaugaaag

SEQ ID NO: 247796 - RNA, 22 nt, Human
ccuuagcagggagucuguccag

SEQ ID NO: 247797 - RNA, 22 nt, Human
ucacuuauugcucaucucaugc

SEQ ID NO: 247798 - RNA, 22 nt, Human
ggucuggccuggcauucuaugg

SEQ ID NO: 247799 - RNA, 22 nt, Human
ucuguucagcugccucagggua

SEQ ID NO: 247800 - RNA, 22 nt, Human
acugggccuacccagauuggca

SEQ ID NO: 247801 - RNA, 22 nt, Human
gugacccaggacacuguguauc

SEQ ID NO: 247802 - RNA, 22 nt, Human
gaaagaaucaacuaugucucug

SEQ ID NO: 247803 - RNA, 20 nt, Human
ccuucagaacuuacauagua

SEQ ID NO: 247804 - RNA, 17 nt, Human
uccuggcucugccacug

SEQ ID NO: 247805 - RNA, 22 nt, Human
cacaaggaccucagauggauga

SEQ ID NO: 247806 - RNA, 20 nt, Human
gaacauggcagguggagggg

SEQ ID NO: 247807 - RNA, 22 nt, Human
ucuggaugaaagggcuauauau

SEQ ID NO: 247808 - RNA, 22 nt, Human
ccaaaaaguacauuuaggugug

SEQ ID NO: 247809 - RNA, 22 nt, Human
ucagaggagccaaaguucugag

SEQ ID NO: 247810 - RNA, 22 nt, Human
uguaugcuuguguauaauauaa

SEQ ID NO: 247811 - RNA, 22 nt, Human
cuggcaggaaguuagaugguaa

SEQ ID NO: 247812 - RNA, 22 nt, Human
cuacugaugauguugguugugg

SEQ ID NO: 247813 - RNA, 22 nt, Human
gugcuuccuguauugauuccau

SEQ ID NO: 247814 - RNA, 22 nt, Human
ggagagcaggguccugagauac

SEQ ID NO: 247815 - RNA, 22 nt, Human
gucuuuggauguaagauaaagu

SEQ ID NO: 247816 - RNA, 22 nt, Human
caaagacacgggaaacaacguu

SEQ ID NO: 247817 - RNA, 22 nt, Human
accaggcuuaauccuuugcuau

SEQ ID NO: 247818 - RNA, 22 nt, Human
cacgcuuggcuuauacagagaa

SEQ ID NO: 247819 - RNA, 22 nt, Human
uggagcagaaauuugaagccau

SEQ ID NO: 247820 - RNA, 22 nt, Human
ucuggagaagcccagggagcug

SEQ ID NO: 247821 - RNA, 22 nt, Human
auuugccuuggugauuuguaaa

SEQ ID NO: 247822 - RNA, 22 nt, Human
ucugggaacucugucauuuccc

SEQ ID NO: 247823 - RNA, 22 nt, Human
cagcauggccauuucucgcugc

SEQ ID NO: 247824 - RNA, 22 nt, Human
acagccagcagagcuguuuccu

SEQ ID NO: 247825 - RNA, 22 nt, Human
gcuggccucgcaggcaggaugu

SEQ ID NO: 247826 - RNA, 23 nt, Human
ggaagcucacguaguccugcacu

SEQ ID NO: 247827 - RNA, 22 nt, Human
acuguauuggaaauauagcaaa

SEQ ID NO: 247828 - RNA, 22 nt, Human
cugacccuugcucgggcccugu

SEQ ID NO: 247829 - RNA, 22 nt, Human
ggggcagauggaacagagcaca

SEQ ID NO: 247830 - RNA, 22 nt, Human
uccaggacuauaggaaagacac

SEQ ID NO: 247831 - RNA, 22 nt, Human
acuugguuggucucacccuguu

SEQ ID NO: 247832 - RNA, 22 nt, Human
agcuucuugaccaagccuguaa

SEQ ID NO: 247833 - RNA, 22 nt, Human
ucucuggaguauaaccagggau

SEQ ID NO: 247834 - RNA, 22 nt, Human
cucugggcaaguaugauagaaa

SEQ ID NO: 247835 - RNA, 22 nt, Human
uacaaaugguugaauggaugaa

SEQ ID NO: 247836 - RNA, 18 nt, Human
aaaggcugaauauagaag

SEQ ID NO: 247837 - RNA, 22 nt, Human
uggcagcuggcucugcgcaggc

SEQ ID NO: 247838 - RNA, 22 nt, Human
gcuguucagaugcgauucagga

SEQ ID NO: 247839 - RNA, 22 nt, Human
uagguucucuauugcccccaaa

SEQ ID NO: 247840 - RNA, 22 nt, Human
auguagaggaguuucuggucug

SEQ ID NO: 247841 - RNA, 22 nt, Human
agucccagcuucccccaugcag

SEQ ID NO: 247842 - RNA, 22 nt, Human
aggaggguacaauggguggaaa

SEQ ID NO: 247843 - RNA, 22 nt, Human
ucugccuuucccaggcuacugu

SEQ ID NO: 247844 - RNA, 22 nt, Human
ugccucuguggaaauggugguc

SEQ ID NO: 247845 - RNA, 22 nt, Human
gagugugguaugcucugaggcu

SEQ ID NO: 247846 - RNA, 22 nt, Human
aaguggcuuugagcuucugcca

SEQ ID NO: 247847 - RNA, 22 nt, Human
uugucugaaucuggagcucucu

SEQ ID NO: 247848 - RNA, 22 nt, Human
gcaaaucaccaccuagcuggau

SEQ ID NO: 247849 - RNA, 22 nt, Human
auccuucuaccuaggacuauuu

SEQ ID NO: 247850 - RNA, 22 nt, Human
aacugucuuauuuauauuucug

SEQ ID NO: 247851 - RNA, 22 nt, Human
ucuccagguagauaugucagga

SEQ ID NO: 247852 - RNA, 22 nt, Human
uuuccuuccagguuccuaaggc

SEQ ID NO: 247853 - RNA, 22 nt, Human
uuucuagggcucuugucuucug

SEQ ID NO: 247854 - RNA, 22 nt, Human
cccuuccuugugacuggugggg

SEQ ID NO: 247855 - RNA, 22 nt, Human
agcacugugguggaagcaucaa

SEQ ID NO: 247856 - RNA, 22 nt, Human
ggcaggugcccagagagcacga

SEQ ID NO: 247857 - RNA, 22 nt, Human
agcagacaccaggaguaaagaa

SEQ ID NO: 247858 - RNA, 22 nt, Human
aggcccuggcccccagagauuc

SEQ ID NO: 247859 - RNA, 22 nt, Human
cacgcauguggaucagaugaag

SEQ ID NO: 247860 - RNA, 21 nt, Human
ugcuauuuaauuuuucuguuc

SEQ ID NO: 247861 - RNA, 22 nt, Human
guugcuuuucuccaucacaugg

SEQ ID NO: 247862 - RNA, 22 nt, Human
auuugucuagugguauucacgu

SEQ ID NO: 247863 - RNA, 22 nt, Human
ucugcagggaugugagggguga

SEQ ID NO: 247864 - RNA, 22 nt, Human
caagaggcuaaacugggcuauu

SEQ ID NO: 247865 - RNA, 22 nt, Human
cagggcucuuccggagcaggga

SEQ ID NO: 247866 - RNA, 22 nt, Human
ccuuaaacucugauaugauauu

SEQ ID NO: 247867 - RNA, 22 nt, Human
ggagccagagucugcaguguaa

SEQ ID NO: 247868 - RNA, 22 nt, Human
uggguccacggaagacuuaggg

SEQ ID NO: 247869 - RNA, 22 nt, Human
uggcugagggggcucugcucag

SEQ ID NO: 247870 - RNA, 22 nt, Human
cugaaggcugaggcuguguugu

SEQ ID NO: 247871 - RNA, 22 nt, Human
acagagagaauuggguuuacag

SEQ ID NO: 247872 - RNA, 22 nt, Human
cccaggagacagaaacagaggu

SEQ ID NO: 247873 - RNA, 22 nt, Human
augcaaauaagugcaggcgugg

SEQ ID NO: 247874 - RNA, 22 nt, Human
ugaugacaauguugcugcaaua

SEQ ID NO: 247875 - RNA, 22 nt, Human
agggccugguucuguguaggga

SEQ ID NO: 247876 - RNA, 22 nt, Human
aacugaaaucaaucagugauuc

SEQ ID NO: 247877 - RNA, 22 nt, Human
uuacaaagcgcuuuaccucuga

SEQ ID NO: 247878 - RNA, 22 nt, Human
cuguguccuuuuaguugcugug

SEQ ID NO: 247879 - RNA, 22 nt, Human
gagcuuccugaugccgaccagu

SEQ ID NO: 247880 - RNA, 22 nt, Human
ggacagcccauacacaugucug

SEQ ID NO: 247881 - RNA, 22 nt, Human
ccccacccucgcuccauuucgg

SEQ ID NO: 247882 - RNA, 22 nt, Human
acacuguaugaaaacaggaaau

SEQ ID NO: 247883 - RNA, 22 nt, Human
aagaaauguagagccuaguaaa

SEQ ID NO: 247884 - RNA, 22 nt, Human
uccccaguaagccugcacugug

SEQ ID NO: 247885 - RNA, 22 nt, Human
agcaguccuccaguguguuuua

SEQ ID NO: 247886 - RNA, 22 nt, Human
agucaguucauggcucuguccu

SEQ ID NO: 247887 - RNA, 22 nt, Human
ucuggcucacuucaggcuucac

SEQ ID NO: 247888 - RNA, 22 nt, Human
ucuggcagagucagugcacaca

SEQ ID NO: 247889 - RNA, 17 nt, Human
gaaaguuucucucucuu

SEQ ID NO: 247890 - RNA, 22 nt, Human
ucucuggggccuuucuacauca

SEQ ID NO: 247891 - RNA, 22 nt, Human
uuuagguucuuggaaucagucu

SEQ ID NO: 247892 - RNA, 22 nt, Human
uucuacagaauaaauguuuaca

SEQ ID NO: 247893 - RNA, 22 nt, Human
uccuggagauaauugcagugaa

SEQ ID NO: 247894 - RNA, 22 nt, Human
ccagugcccagcugcccaggca

SEQ ID NO: 247895 - RNA, 22 nt, Human
cugaggagaccaucaacuaauu

SEQ ID NO: 247896 - RNA, 22 nt, Human
gccugggagaugcguuguggcc

SEQ ID NO: 247897 - RNA, 22 nt, Human
auucucuguacagaagguaccg

SEQ ID NO: 247898 - RNA, 22 nt, Human
cccagaggcugaguugggagca

SEQ ID NO: 247899 - RNA, 22 nt, Human
gcaguguuuguguucucacaug

SEQ ID NO: 247900 - RNA, 22 nt, Human
aggcugcucaccucccugucug

SEQ ID NO: 247901 - RNA, 22 nt, Human
agaccuggaaguucaagagaaa

SEQ ID NO: 247902 - RNA, 22 nt, Human
ucaggcucaggaauguguuuau

SEQ ID NO: 247903 - RNA, 22 nt, Human
ccaggagaugggaaaguagcag

SEQ ID NO: 247904 - RNA, 22 nt, Human
uuauauauauguagaggucacg

SEQ ID NO: 247905 - RNA, 22 nt, Human
agucuagaaacaagguagagcu

SEQ ID NO: 247906 - RNA, 22 nt, Human
ccaggcuuuuagcugcauggca

SEQ ID NO: 247907 - RNA, 22 nt, Human
ucucccucauuccugcuuccau

SEQ ID NO: 247908 - RNA, 22 nt, Human
guccuucuuuucaucccugguu

SEQ ID NO: 247909 - RNA, 22 nt, Human
uucucaguauuacaugcuaaug

SEQ ID NO: 247910 - RNA, 22 nt, Human
agugcuuugagcguuugaaaag

SEQ ID NO: 247911 - RNA, 22 nt, Human
cugcugucgccacggucgccgc

SEQ ID NO: 247912 - RNA, 22 nt, Human
agcuuucguuccuuagacacau

SEQ ID NO: 247913 - RNA, 22 nt, Human
uucuguggaauaugaacuagca

SEQ ID NO: 247914 - RNA, 22 nt, Human
ccaggcucaccuggagccccug

SEQ ID NO: 247915 - RNA, 20 nt, Human
ugcucuggggguggagagac

SEQ ID NO: 247916 - RNA, 22 nt, Human
gucucugucauuucaccuuccc

SEQ ID NO: 247917 - RNA, 22 nt, Human
cauaacuugcuuuggagcccgg

SEQ ID NO: 247918 - RNA, 22 nt, Human
uaggaacaacugcagguacaag

SEQ ID NO: 247919 - RNA, 22 nt, Human
cuggugcacguggcugcagucg

SEQ ID NO: 247920 - RNA, 22 nt, Human
ugagcccugaggaucuguucgg

SEQ ID NO: 247921 - RNA, 23 nt, Human
cugagcacagcucugugggccuc

SEQ ID NO: 247922 - RNA, 22 nt, Human
uaugccuggaaccuuucucuuu

SEQ ID NO: 247923 - RNA, 22 nt, Human
uagcacaagaaguacacauaga

SEQ ID NO: 247924 - RNA, 22 nt, Human
aacuaaaacugguuuguucucu

SEQ ID NO: 247925 - RNA, 22 nt, Human
agugugcuauugcaccaucaua

SEQ ID NO: 247926 - RNA, 20 nt, Human
caggagggacauuucagcau

SEQ ID NO: 247927 - RNA, 19 nt, Human
aguccaugaauggaggaug

SEQ ID NO: 247928 - RNA, 22 nt, Human
uguuucaaagaaagaaaauaua

SEQ ID NO: 247929 - RNA, 22 nt, Human
aaggcagauauaaagacuagag

SEQ ID NO: 247930 - RNA, 22 nt, Human
caguucugagcuuucccagaag

SEQ ID NO: 247931 - RNA, 23 nt, Human
uuuauuuauuuaggcugagggau

SEQ ID NO: 247932 - RNA, 22 nt, Human
cagagucaguauugaauugaaa

SEQ ID NO: 247933 - RNA, 22 nt, Human
agacugaaauagugcacaccaa

SEQ ID NO: 247934 - RNA, 22 nt, Human
acuguucacccagcacuagcag

SEQ ID NO: 247935 - RNA, 22 nt, Human
aauauuuuaggcuuuccaggcu

SEQ ID NO: 247936 - RNA, 22 nt, Human
gaauucugguuuugaaaugaau

SEQ ID NO: 247937 - RNA, 22 nt, Human
gucauuuuuuucguaauagugg

SEQ ID NO: 247938 - RNA, 22 nt, Human
acuucuaugcacagagcuugga

SEQ ID NO: 247939 - RNA, 22 nt, Human
cucuguggcuugccuuucuguc

SEQ ID NO: 247940 - RNA, 22 nt, Human
acauggcucagucucaugacag

SEQ ID NO: 247941 - RNA, 22 nt, Human
uaggcuguaagagagggcagag

SEQ ID NO: 247942 - RNA, 22 nt, Human
aggaagccugcaggugacugcu

SEQ ID NO: 247943 - RNA, 22 nt, Human
uuucccaaguguaaacauggca

SEQ ID NO: 247944 - RNA, 23 nt, Human
aaaugacauaugguuucugaagg

SEQ ID NO: 247945 - RNA, 22 nt, Human
cuuuggaacacaugggcauggu

SEQ ID NO: 247946 - RNA, 22 nt, Human
cucugggcuucaagucagauuu

SEQ ID NO: 247947 - RNA, 22 nt, Human
aggccucauaguagaccugccc

SEQ ID NO: 247948 - RNA, 22 nt, Human
aaagcagagcagggcacuuaug

SEQ ID NO: 247949 - RNA, 22 nt, Human
aagcuauugaauuuauagcaua

SEQ ID NO: 247950 - RNA, 22 nt, Human
gcacugaaauuauaugcauuug

SEQ ID NO: 247951 - RNA, 22 nt, Human
caggcugcccuagcuuggacau

SEQ ID NO: 247952 - RNA, 20 nt, Human
agggccuggaguacagcagg

SEQ ID NO: 247953 - RNA, 22 nt, Human
acaaauagagauucaaauaaag

SEQ ID NO: 247954 - RNA, 21 nt, Human
ugcaauuuagacuugaacauu

SEQ ID NO: 247955 - RNA, 21 nt, Human
gcucuguacguuggugccuuc

SEQ ID NO: 247956 - RNA, 22 nt, Human
ugggacagagugagcuuuggcc

SEQ ID NO: 247957 - RNA, 22 nt, Human
ucugagcuguaaguagacaagg

SEQ ID NO: 247958 - RNA, 22 nt, Human
ugcauaaagugccauaguauua

SEQ ID NO: 247959 - RNA, 22 nt, Human
gggcagguggcaaagccagagg

SEQ ID NO: 247960 - RNA, 22 nt, Human
gaaaaggccacuccuaggagcu

SEQ ID NO: 247961 - RNA, 22 nt, Human
ggcuccuguccccucagcugcu

SEQ ID NO: 247962 - RNA, 22 nt, Human
gccugggagggcagcagugugg

SEQ ID NO: 247963 - RNA, 22 nt, Human
uucaugaacgaacauauguaua

SEQ ID NO: 247964 - RNA, 22 nt, Human
aagcugcaaggaagugugccag

SEQ ID NO: 247965 - RNA, 21 nt, Human
gggaggaagcugcuucucucu

SEQ ID NO: 247966 - RNA, 22 nt, Human
gagacagagagguacucaacau

SEQ ID NO: 247967 - RNA, 22 nt, Human
caaaugaauauuuccauggguu

SEQ ID NO: 247968 - RNA, 22 nt, Human
aagggagaaagaaugaguuuag

SEQ ID NO: 247969 - RNA, 22 nt, Human
uaugaauucucuuguguauagu

SEQ ID NO: 247970 - RNA, 22 nt, Human
uccaucuggguggggagaagga

SEQ ID NO: 247971 - RNA, 22 nt, Human
ucacucugaaugguacugagga

SEQ ID NO: 247972 - RNA, 22 nt, Human
uugaaagacuucuccugugaaa

SEQ ID NO: 247973 - RNA, 22 nt, Human
ucuccuccagaggcugugggga

SEQ ID NO: 247974 - RNA, 22 nt, Human
uggggcuaaacacgccuggccu

SEQ ID NO: 247975 - RNA, 22 nt, Human
gagcaagacucacugcaucuug

SEQ ID NO: 247976 - RNA, 22 nt, Human
caggcacacauccgugagagau

SEQ ID NO: 247977 - RNA, 22 nt, Human
gaaggaggucugcauucuacag

SEQ ID NO: 247978 - RNA, 22 nt, Human
gcaaggcugugcacuuugcauu

SEQ ID NO: 247979 - RNA, 22 nt, Human
ugcacacacucugcauauacuu

SEQ ID NO: 247980 - RNA, 20 nt, Human
ugugagcagaugcugaguga

SEQ ID NO: 247981 - RNA, 22 nt, Human
cccucucagucagagccagaua

SEQ ID NO: 247982 - RNA, 22 nt, Human
gcgggccaccuuggagagcgcu

SEQ ID NO: 247983 - RNA, 22 nt, Human
auacuacauuugaaaauugcag

SEQ ID NO: 247984 - RNA, 22 nt, Human
cacuuagucucaccaguucagu

SEQ ID NO: 247985 - RNA, 22 nt, Human
aucagucuguguuagaaaagag

SEQ ID NO: 247986 - RNA, 22 nt, Human
gaggcucagagagguccacaua

SEQ ID NO: 247987 - RNA, 16 nt, Human
ugcagagagcauggug

SEQ ID NO: 247988 - RNA, 23 nt, Human
aaacuacauuuauaguuuuucuc

SEQ ID NO: 247989 - RNA, 22 nt, Human
cagagcccuaguccugauggcc

SEQ ID NO: 247990 - RNA, 22 nt, Human
aucaccaggcaaaaugucagag

SEQ ID NO: 247991 - RNA, 22 nt, Human
augcauugucugguuucauuuu

SEQ ID NO: 247992 - RNA, 22 nt, Human
aaaugcaaggcacauuccuuuu

SEQ ID NO: 247993 - RNA, 22 nt, Human
gggcugagauuggugcccuguc

SEQ ID NO: 247994 - RNA, 22 nt, Human
agaagcagcuuucaaggugauu

SEQ ID NO: 247995 - RNA, 22 nt, Human
gcucaggauuucauccaugugu

SEQ ID NO: 247996 - RNA, 20 nt, Human
guuuuucuugggcgagcuau

SEQ ID NO: 247997 - RNA, 22 nt, Human
cccagcuugucugauucagccu

SEQ ID NO: 247998 - RNA, 22 nt, Human
cuuuggaagugaccacaauccu

SEQ ID NO: 247999 - RNA, 22 nt, Human
guucccaggcccugggcucucc

SEQ ID NO: 248000 - RNA, 22 nt, Human
ugauaggcuuaauuuuccuguc

SEQ ID NO: 248001 - RNA, 22 nt, Human
auucaagaggaacaaugaagau

SEQ ID NO: 248002 - RNA, 22 nt, Human
gacauaaaguucuugcuugaau

SEQ ID NO: 248003 - RNA, 22 nt, Human
uccaggaaaaggcuugcagggg

SEQ ID NO: 248004 - RNA, 22 nt, Human
caaggcugugcaggguccauau

SEQ ID NO: 248005 - RNA, 22 nt, Human
augggcucuaugucuaggagau

SEQ ID NO: 248006 - RNA, 22 nt, Human
aagugaguucagcauucacucg

SEQ ID NO: 248007 - RNA, 22 nt, Human
ugcuggcuuuagugauuggggu

SEQ ID NO: 248008 - RNA, 22 nt, Human
ggcuuggaaauugcaggacaca

SEQ ID NO: 248009 - RNA, 22 nt, Human
auacaugugugagcgaagaugu

SEQ ID NO: 248010 - RNA, 22 nt, Human
cagucacuggaauagcugagga

SEQ ID NO: 248011 - RNA, 17 nt, Human
uuucaucugggaccacc

SEQ ID NO: 248012 - RNA, 22 nt, Human
aauuuagaauucgcuagcuaau

SEQ ID NO: 248013 - RNA, 18 nt, Human
uccugggaacuugcuagc

SEQ ID NO: 248014 - RNA, 22 nt, Human
cagaggcagccgggggagaacg

SEQ ID NO: 248015 - RNA, 22 nt, Human
cagaggcagugggguugcuccu

SEQ ID NO: 248016 - RNA, 22 nt, Human
acuuccuguauuuauccauagc

SEQ ID NO: 248017 - RNA, 22 nt, Human
acugguggcuuucagacagaaa

SEQ ID NO: 248018 - RNA, 22 nt, Human
acagcaaaggacgaacacucug

SEQ ID NO: 248019 - RNA, 22 nt, Human
ucuuagauguuagcucugugug

SEQ ID NO: 248020 - RNA, 22 nt, Human
uaagaaacauuuuuaugacagu

SEQ ID NO: 248021 - RNA, 22 nt, Human
ugcuuuauucgacaucugguag

SEQ ID NO: 248022 - RNA, 22 nt, Human
gcacagagacaguccugagauc

SEQ ID NO: 248023 - RNA, 22 nt, Human
ucuggagccacaaaccucagcu

SEQ ID NO: 248024 - RNA, 22 nt, Human
acucacagucccuguaggagug

SEQ ID NO: 248025 - RNA, 22 nt, Human
uuaggaauuuaucacagacugg

SEQ ID NO: 248026 - RNA, 19 nt, Human
acccaggguugauguccag

SEQ ID NO: 248027 - RNA, 22 nt, Human
cagggagaggccucuguugccc

SEQ ID NO: 248028 - RNA, 22 nt, Human
uacagauauuguacaguuauag

SEQ ID NO: 248029 - RNA, 21 nt, Human
agagcucaaggcaaaaauaau

SEQ ID NO: 248030 - RNA, 22 nt, Human
ccugugucuuugccucaggguc

SEQ ID NO: 248031 - RNA, 22 nt, Human
cagaaauucccauuucagauuc

SEQ ID NO: 248032 - RNA, 22 nt, Human
aauuagggagagguagcuaggu

SEQ ID NO: 248033 - RNA, 22 nt, Human
aaaaguauaggguuuggaguca

SEQ ID NO: 248034 - RNA, 22 nt, Human
ucaaagcacacuuagugguaga

SEQ ID NO: 248035 - RNA, 22 nt, Human
ggcuggcuugcggagucacaga

SEQ ID NO: 248036 - RNA, 21 nt, Human
agcugcaggccucccagggau

SEQ ID NO: 248037 - RNA, 22 nt, Human
uccugagcacagagacaaggaa

SEQ ID NO: 248038 - RNA, 22 nt, Human
caggugguugagagcuguaggc

SEQ ID NO: 248039 - RNA, 22 nt, Human
uuccaugcaagaaguauggcuc

SEQ ID NO: 248040 - RNA, 20 nt, Human
uggaguuguucugcuagguc

SEQ ID NO: 248041 - RNA, 22 nt, Human
cagcuccugaggacugcuggga

SEQ ID NO: 248042 - RNA, 22 nt, Human
auuuuagauuuaagaauaaggu

SEQ ID NO: 248043 - RNA, 22 nt, Human
gcuucuauuauuuggagcugag

SEQ ID NO: 248044 - RNA, 22 nt, Human
gcagagccugugucugagcaaa

SEQ ID NO: 248045 - RNA, 22 nt, Human
agcuucugcccguguuugcucu

SEQ ID NO: 248046 - RNA, 22 nt, Human
guuuccugacccuggcccagca

SEQ ID NO: 248047 - RNA, 18 nt, Human
uguagcuggaggccaggc

SEQ ID NO: 248048 - RNA, 22 nt, Human
uuacaguaugaucaacuuuuca

SEQ ID NO: 248049 - RNA, 22 nt, Human
ccuguaaauaguuucuucugac

SEQ ID NO: 248050 - RNA, 21 nt, Human
ccaggacuccauggggucucu

SEQ ID NO: 248051 - RNA, 22 nt, Human
uucuccagacaacagaggguga

SEQ ID NO: 248052 - RNA, 22 nt, Human
acagugcugaucuagacugacc

SEQ ID NO: 248053 - RNA, 22 nt, Human
guuuuucucugaaauaguugac

SEQ ID NO: 248054 - RNA, 22 nt, Human
aagucagaaaacagagcaauua

SEQ ID NO: 248055 - RNA, 22 nt, Human
ccuggcugaggggccaaggacc

SEQ ID NO: 248056 - RNA, 22 nt, Human
cgcaggcugcagccaagaagag

SEQ ID NO: 248057 - RNA, 22 nt, Human
uuucucagucacaugaaccaau

SEQ ID NO: 248058 - RNA, 22 nt, Human
ggcuucuuccugugaacauguu

SEQ ID NO: 248059 - RNA, 22 nt, Human
ugcuuucuccugucugaaagau

SEQ ID NO: 248060 - RNA, 22 nt, Human
ccuuccuuucagggcuaugccu

SEQ ID NO: 248061 - RNA, 22 nt, Human
ugguuccaagauggcugccaca

SEQ ID NO: 248062 - RNA, 17 nt, Human
ugaacuuuagguggagc

SEQ ID NO: 248063 - RNA, 22 nt, Human
ggcugcaggcuucccuccagca

SEQ ID NO: 248064 - RNA, 22 nt, Human
uggaaacuuggaacgucuucag

SEQ ID NO: 248065 - RNA, 22 nt, Human
agaguguggaacuugaggagcu

SEQ ID NO: 248066 - RNA, 22 nt, Human
ucaugcuaguuaagaacacaau

SEQ ID NO: 248067 - RNA, 22 nt, Human
uggagaaggggcagggucucca

SEQ ID NO: 248068 - RNA, 22 nt, Human
acaucuuuuacucugguucggg

SEQ ID NO: 248069 - RNA, 22 nt, Human
agccagagggaucuuucuaaga

SEQ ID NO: 248070 - RNA, 22 nt, Human
augugucugguuauugacaugc

SEQ ID NO: 248071 - RNA, 22 nt, Human
auugcuuuugagcuagaauuuu

SEQ ID NO: 248072 - RNA, 22 nt, Human
uggggaaaggaaaguuaaccug

SEQ ID NO: 248073 - RNA, 22 nt, Human
ccucaggcagugguauggaugg

SEQ ID NO: 248074 - RNA, 22 nt, Human
agagcggggauaguuaauauuc

SEQ ID NO: 248075 - RNA, 22 nt, Human
agggccucugagccaguucugg

SEQ ID NO: 248076 - RNA, 22 nt, Human
uugccaugcagccaggaaggag

SEQ ID NO: 248077 - RNA, 22 nt, Human
augcagaagcagaacuuacaca

SEQ ID NO: 248078 - RNA, 22 nt, Human
cugaauaauuuucuguuguaug

SEQ ID NO: 248079 - RNA, 15 nt, Human
cuccaugauuuugca

SEQ ID NO: 248080 - RNA, 22 nt, Human
aggaaaggauuggcuucucugu

SEQ ID NO: 248081 - RNA, 22 nt, Human
uucuagacaaauguguucauuc

SEQ ID NO: 248082 - RNA, 22 nt, Human
ccauuuggaggucauuaggaca

SEQ ID NO: 248083 - RNA, 19 nt, Human
ucacuucuguuagcaugga

SEQ ID NO: 248084 - RNA, 19 nt, Human
ggccugaggccacagaucc

SEQ ID NO: 248085 - RNA, 22 nt, Human
aguuauuacucuuuaacauauu

SEQ ID NO: 248086 - RNA, 22 nt, Human
ggcaggcacugugauagauucu

SEQ ID NO: 248087 - RNA, 22 nt, Human
ucugaaucacagucauucagcu

SEQ ID NO: 248088 - RNA, 22 nt, Human
ucagagaguuagugucuuagcu

SEQ ID NO: 248089 - RNA, 23 nt, Human
ucaucaaacagcugcucaagaaa

SEQ ID NO: 248090 - RNA, 22 nt, Human
aaagccaggcagccaagccagu

SEQ ID NO: 248091 - RNA, 22 nt, Human
uagcugaauauaggcacaacag

SEQ ID NO: 248092 - RNA, 22 nt, Human
cuggcugcauuggcaagucaau

SEQ ID NO: 248093 - RNA, 22 nt, Human
ucagaaauguaagcugaugacu

SEQ ID NO: 248094 - RNA, 22 nt, Human
auuguuaugaaaauaagauguu

SEQ ID NO: 248095 - RNA, 22 nt, Human
guucuucagauuccauuucagu

SEQ ID NO: 248096 - RNA, 22 nt, Human
gucauuccuuauguugauucag

SEQ ID NO: 248097 - RNA, 22 nt, Human
acuguaaauuuugguugcaggu

SEQ ID NO: 248098 - RNA, 22 nt, Human
aaaaugaacagaacaaugggga

SEQ ID NO: 248099 - RNA, 22 nt, Human
uuuuuagaguguuaccaguaua

SEQ ID NO: 248100 - RNA, 22 nt, Human
uagaaucuccagcauugguugu

SEQ ID NO: 248101 - RNA, 22 nt, Human
cuggaucugucuuuuggauccc

SEQ ID NO: 248102 - RNA, 22 nt, Human
ugcugggcuaggguggagcucu

SEQ ID NO: 248103 - RNA, 22 nt, Human
ugaggcaaaaguuaugugguag

SEQ ID NO: 248104 - RNA, 22 nt, Human
cugccuggacagcucuuaccuu

SEQ ID NO: 248105 - RNA, 22 nt, Human
aagagccaggacagauccagcu

SEQ ID NO: 248106 - RNA, 22 nt, Human
aguaaucaauuuuucgguggau

SEQ ID NO: 248107 - RNA, 22 nt, Human
cagcugcugcccuuggcugcag

SEQ ID NO: 248108 - RNA, 22 nt, Human
cugggccacaagccugugugau

SEQ ID NO: 248109 - RNA, 22 nt, Human
uuagagccccagaaaacagugg

SEQ ID NO: 248110 - RNA, 22 nt, Human
aguggcagacagagacaguacc

SEQ ID NO: 248111 - RNA, 22 nt, Human
uacauagugaacauuuacagag

SEQ ID NO: 248112 - RNA, 18 nt, Human
aagaggaggagcagguug

SEQ ID NO: 248113 - RNA, 22 nt, Human
uucaguaaaacacugcaauguc

SEQ ID NO: 248114 - RNA, 22 nt, Human
aaaaggcucuucaaaauggaag

SEQ ID NO: 248115 - RNA, 22 nt, Human
gccacaggaaagcacccuggag

SEQ ID NO: 248116 - RNA, 22 nt, Human
cccaggcacucuuggucauuuu

SEQ ID NO: 248117 - RNA, 22 nt, Human
gggagagguuacccgagcaacu

SEQ ID NO: 248118 - RNA, 22 nt, Human
gagguggcccuugcucagccuu

SEQ ID NO: 248119 - RNA, 22 nt, Human
gccugcagcaugcuaggucuug

SEQ ID NO: 248120 - RNA, 22 nt, Human
ccccagcagcaccuggggcagu

SEQ ID NO: 248121 - RNA, 22 nt, Human
aagguacaaaguauuauuuaaa

SEQ ID NO: 248122 - RNA, 22 nt, Human
agcccugcauagaagggaacac

SEQ ID NO: 248123 - RNA, 22 nt, Human
ugcaggugugguuccucagcca

SEQ ID NO: 248124 - RNA, 22 nt, Human
cacaugcucauuggcacuguuc

SEQ ID NO: 248125 - RNA, 22 nt, Human
ucucuggcuggcaccccaggga

SEQ ID NO: 248126 - RNA, 22 nt, Human
augcuguagaucuuagccucua

SEQ ID NO: 248127 - RNA, 22 nt, Human
guggccagccagggugcugaug

SEQ ID NO: 248128 - RNA, 22 nt, Human
acaguacauaauccugagucug

SEQ ID NO: 248129 - RNA, 22 nt, Human
gggagccagccauccagaaccu

SEQ ID NO: 248130 - RNA, 22 nt, Human
aagcccuggcggguggagggcc

SEQ ID NO: 248131 - RNA, 22 nt, Human
auggucaguugcagcuaauguu

SEQ ID NO: 248132 - RNA, 22 nt, Human
aagcuuagguacagaaguuaag

SEQ ID NO: 248133 - RNA, 22 nt, Human
gccagcugucuaagagaguaaa

SEQ ID NO: 248134 - RNA, 22 nt, Human
aggguggggugcuacaucuuua

SEQ ID NO: 248135 - RNA, 22 nt, Human
augaggcauauccuccuauggu

SEQ ID NO: 248136 - RNA, 22 nt, Human
gagcccucauugaaucugcauu

SEQ ID NO: 248137 - RNA, 22 nt, Human
agaaaccucacagcaauucuga

SEQ ID NO: 248138 - RNA, 22 nt, Human
ggacagagcagacgagcagcgg

SEQ ID NO: 248139 - RNA, 22 nt, Human
aacagcagcaugacagcugggu

SEQ ID NO: 248140 - RNA, 22 nt, Human
uuuguucuugcaacaguuauua

SEQ ID NO: 248141 - RNA, 23 nt, Human
agaugaaagcuucccaucacagu

SEQ ID NO: 248142 - RNA, 22 nt, Human
uauguacacauacacuuguaau

SEQ ID NO: 248143 - RNA, 22 nt, Human
ggcuucuccagguacugagcau

SEQ ID NO: 248144 - RNA, 22 nt, Human
cucugugauuuugugagccaga

SEQ ID NO: 248145 - RNA, 22 nt, Human
acagcaggauuuggcgauguug

SEQ ID NO: 248146 - RNA, 22 nt, Human
uccagugcuguuuccaauguaa

SEQ ID NO: 248147 - RNA, 22 nt, Human
acucucugucuaaaugcaguuu

SEQ ID NO: 248148 - RNA, 22 nt, Human
ucuuucccuguguuagccugua

SEQ ID NO: 248149 - RNA, 22 nt, Human
uccauuuggccucuguauugua

SEQ ID NO: 248150 - RNA, 22 nt, Human
agagaaaagaguucaggcuuug

SEQ ID NO: 248151 - RNA, 22 nt, Human
auaguacagcauuuuuccugag

SEQ ID NO: 248152 - RNA, 22 nt, Human
ggcucccuguucuauucccugg

SEQ ID NO: 248153 - RNA, 22 nt, Human
uuuuucuacugguguuggugua

SEQ ID NO: 248154 - RNA, 22 nt, Human
gcugggucuggaugcucaggug

SEQ ID NO: 248155 - RNA, 22 nt, Human
uaucuacauucuuguaucuucu

SEQ ID NO: 248156 - RNA, 22 nt, Human
acaugcaauauugagacuuucu

SEQ ID NO: 248157 - RNA, 22 nt, Human
gaggaaugucagcacaggccuc

SEQ ID NO: 248158 - RNA, 22 nt, Human
cucuguggcuacacaaaccucc

SEQ ID NO: 248159 - RNA, 22 nt, Human
ggcuaccagauaaauuacagag

SEQ ID NO: 248160 - RNA, 22 nt, Human
agcaggaaggcuuuggggguuc

SEQ ID NO: 248161 - RNA, 22 nt, Human
aacaaccaaaaagaugaaugua

SEQ ID NO: 248162 - RNA, 22 nt, Human
ccuggcuuugaccuugcuguuu

SEQ ID NO: 248163 - RNA, 22 nt, Human
acuguauugguuuucuauugcu

SEQ ID NO: 248164 - RNA, 22 nt, Human
ugucuagacauuagcuucagcu

SEQ ID NO: 248165 - RNA, 22 nt, Human
ucacaaugaaaaacacuacaua

SEQ ID NO: 248166 - RNA, 22 nt, Human
guggagggaaugaaucuucucu

SEQ ID NO: 248167 - RNA, 22 nt, Human
uaaugcuuuguuuugaucuaac

SEQ ID NO: 248168 - RNA, 22 nt, Human
cuggucagggcucuuugggagc

SEQ ID NO: 248169 - RNA, 23 nt, Human
aggcugccagaaauuggguaagg

SEQ ID NO: 248170 - RNA, 22 nt, Human
aucagagaccggucaagucaug

SEQ ID NO: 248171 - RNA, 18 nt, Human
gcuagggcaugcauggug

SEQ ID NO: 248172 - RNA, 22 nt, Human
gucaucuugcuguuuuagaucu

SEQ ID NO: 248173 - RNA, 22 nt, Human
ugugggaagagcaguggcagca

SEQ ID NO: 248174 - RNA, 22 nt, Human
ucauguuauugacucauaauau

SEQ ID NO: 248175 - RNA, 22 nt, Human
uuucccagagguaugaauaagu

SEQ ID NO: 248176 - RNA, 22 nt, Human
ugcauuaugcuugugcuguaua

SEQ ID NO: 248177 - RNA, 22 nt, Human
uuauuguuaggcuuuuggaauu

SEQ ID NO: 248178 - RNA, 22 nt, Human
uuccccaggggcuccugccuuu

SEQ ID NO: 248179 - RNA, 22 nt, Human
uucucugggguucaguaucucu

SEQ ID NO: 248180 - RNA, 22 nt, Human
aggucagaugggagaugggaug

SEQ ID NO: 248181 - RNA, 22 nt, Human
uuacaaugagacguucuuaucu

SEQ ID NO: 248182 - RNA, 22 nt, Human
ucaguaaaugaaugaauauaug

SEQ ID NO: 248183 - RNA, 22 nt, Human
ucugccaggccacacagggcac

SEQ ID NO: 248184 - RNA, 16 nt, Human
auaauuacugcuacuu

SEQ ID NO: 248185 - RNA, 22 nt, Human
uuaccuaaaauagcucaauuua

SEQ ID NO: 248186 - RNA, 22 nt, Human
aggcuccucggggcugacggcg

SEQ ID NO: 248187 - RNA, 22 nt, Human
cacaguuauauguucacaagga

SEQ ID NO: 248188 - RNA, 22 nt, Human
uggagguacauaaugagagggu

SEQ ID NO: 248189 - RNA, 22 nt, Human
ggugcugaugaagauguagccu

SEQ ID NO: 248190 - RNA, 22 nt, Human
uaauuucuucaucucugcagcu

SEQ ID NO: 248191 - RNA, 22 nt, Human
agacaugacagauaguugcuag

SEQ ID NO: 248192 - RNA, 21 nt, Human
ccaggcuccugaggcugguca

SEQ ID NO: 248193 - RNA, 22 nt, Human
ugcccuggcuccucccacgcug

SEQ ID NO: 248194 - RNA, 22 nt, Human
uuagcuuucaugaaccuggucg

SEQ ID NO: 248195 - RNA, 22 nt, Human
uucccacaguguugaauccucu

SEQ ID NO: 248196 - RNA, 22 nt, Human
gggagcugccuuagaccggagg

SEQ ID NO: 248197 - RNA, 22 nt, Human
cugggucucuuuagggugccgu

SEQ ID NO: 248198 - RNA, 22 nt, Human
ugacggcugggggcagugguca

SEQ ID NO: 248199 - RNA, 22 nt, Human
acccuggggguggccagugcca

SEQ ID NO: 248200 - RNA, 17 nt, Human
aguuuugauauaauggc

SEQ ID NO: 248201 - RNA, 22 nt, Human
uggaaggccuguuguguccuag

SEQ ID NO: 248202 - RNA, 22 nt, Human
gggucucucaugcaguugcugu

SEQ ID NO: 248203 - RNA, 22 nt, Human
gccagagcugagacacgagucc

SEQ ID NO: 248204 - RNA, 22 nt, Human
guccugguccugccuccccaug

SEQ ID NO: 248205 - RNA, 22 nt, Human
ucagagucuaugcaacagaauu

SEQ ID NO: 248206 - RNA, 22 nt, Human
gagcagguuucaaugcugaugc

SEQ ID NO: 248207 - RNA, 23 nt, Human
ucucucuggcaaauuucacauau

SEQ ID NO: 248208 - RNA, 22 nt, Human
accuucaauuauuuuuguucca

SEQ ID NO: 248209 - RNA, 22 nt, Human
acugucaugugcuaacugucca

SEQ ID NO: 248210 - RNA, 22 nt, Human
ugcugcagacgaagcccaugcc

SEQ ID NO: 248211 - RNA, 22 nt, Human
aagugcaaauuuaagaaggcau

SEQ ID NO: 248212 - RNA, 22 nt, Human
ccaaagguguuggccuucagug

SEQ ID NO: 248213 - RNA, 22 nt, Human
aggcugggaagguaaaguugua

SEQ ID NO: 248214 - RNA, 22 nt, Human
aagaacuguuuacaauuuucac

SEQ ID NO: 248215 - RNA, 22 nt, Human
ugcuccuggaugagguacucca

SEQ ID NO: 248216 - RNA, 22 nt, Human
uucaaauuaccacauuugcuua

SEQ ID NO: 248217 - RNA, 19 nt, Human
gccuuggcauucucugcuu

SEQ ID NO: 248218 - RNA, 22 nt, Human
cagcaagaggguaagguugaag

SEQ ID NO: 248219 - RNA, 22 nt, Human
aggcacaguggcucacaccugu

SEQ ID NO: 248220 - RNA, 20 nt, Human
cuccucaguuccaugggagg

SEQ ID NO: 248221 - RNA, 22 nt, Human
gaggcuguuaggagggacucug

SEQ ID NO: 248222 - RNA, 22 nt, Human
augaggcaauagaauauugaau

SEQ ID NO: 248223 - RNA, 22 nt, Human
gcacaugugagaguagaggccu

SEQ ID NO: 248224 - RNA, 22 nt, Human
aaagugaugccaggagucuggu

SEQ ID NO: 248225 - RNA, 22 nt, Human
uuucauggcuaggacuagagug

SEQ ID NO: 248226 - RNA, 22 nt, Human
cuccugggagcuguggcagagc

SEQ ID NO: 248227 - RNA, 22 nt, Human
ucacauucuuuauuugccaucc

SEQ ID NO: 248228 - RNA, 22 nt, Human
caggcccuuuccugggcauagg

SEQ ID NO: 248229 - RNA, 22 nt, Human
aaugucaguguuacugcuauug

SEQ ID NO: 248230 - RNA, 22 nt, Human
ucuaugaaguucagagaucuau

SEQ ID NO: 248231 - RNA, 22 nt, Human
auaguauuuccagaaauagucu

SEQ ID NO: 248232 - RNA, 22 nt, Human
gggugggaucuguggagccuca

SEQ ID NO: 248233 - RNA, 22 nt, Human
caggaaugacugcagauggggc

SEQ ID NO: 248234 - RNA, 22 nt, Human
aaugaugaacucagagggaacc

SEQ ID NO: 248235 - RNA, 22 nt, Human
aaguggcagccuuagaaggaga

SEQ ID NO: 248236 - RNA, 19 nt, Human
aggcuuggauuguggccaa

SEQ ID NO: 248237 - RNA, 22 nt, Human
uagaaaguacuaaauuuaacug

SEQ ID NO: 248238 - RNA, 22 nt, Human
ucucauuguccaauugaauuua

SEQ ID NO: 248239 - RNA, 22 nt, Human
ggccagcuccuuggcagugccu

SEQ ID NO: 248240 - RNA, 22 nt, Human
cuccagcugcuggucugagacu

SEQ ID NO: 248241 - RNA, 19 nt, Human
ugaucuggaaggaaccagg

SEQ ID NO: 248242 - RNA, 22 nt, Human
aagaguggagcuggaaaguggg

SEQ ID NO: 248243 - RNA, 22 nt, Human
ccauucugagucuuaugucuuu

SEQ ID NO: 248244 - RNA, 22 nt, Human
aacuggaaggauugcagauguc

SEQ ID NO: 248245 - RNA, 22 nt, Human
auuuucagaacauucauucacu

SEQ ID NO: 248246 - RNA, 22 nt, Human
uguuuaugcaucguuaauacca

SEQ ID NO: 248247 - RNA, 22 nt, Human
acaggcugccacuugcauccaa

SEQ ID NO: 248248 - RNA, 22 nt, Human
aucacaucgaggagcaaucaga

SEQ ID NO: 248249 - RNA, 22 nt, Human
uuuugcuuuuguaacacagugu

SEQ ID NO: 248250 - RNA, 22 nt, Human
aggaaacuucagaguuuugguc

SEQ ID NO: 248251 - RNA, 22 nt, Human
ugcugcagggccuucccugcau

SEQ ID NO: 248252 - RNA, 22 nt, Human
acuguacacauucgucaagacu

SEQ ID NO: 248253 - RNA, 22 nt, Human
gccugcagaacugugaggcaau

SEQ ID NO: 248254 - RNA, 22 nt, Human
agcugagccagcagcaacagga

SEQ ID NO: 248255 - RNA, 22 nt, Human
uucuucaaacaaaaguggcaug

SEQ ID NO: 248256 - RNA, 22 nt, Human
agugcaacagcaguucucuuua

SEQ ID NO: 248257 - RNA, 21 nt, Human
aaaaggaggcaggugaacagc

SEQ ID NO: 248258 - RNA, 22 nt, Human
gcugggcaaggcugaagcuacc

SEQ ID NO: 248259 - RNA, 22 nt, Human
aggugccaccucuggugcuguc

SEQ ID NO: 248260 - RNA, 22 nt, Human
agggcugaggcgagggagaugc

SEQ ID NO: 248261 - RNA, 22 nt, Human
cauuuggaccaaaauagccaac

SEQ ID NO: 248262 - RNA, 22 nt, Human
ggcuggcuggcugguagacaag

SEQ ID NO: 248263 - RNA, 22 nt, Human
gcuccaggugaauccucucacc

SEQ ID NO: 248264 - RNA, 22 nt, Human
auggcugcuuucccuuagcacc

SEQ ID NO: 248265 - RNA, 19 nt, Human
gccacaucuuuuccagagu

SEQ ID NO: 248266 - RNA, 22 nt, Human
agucugugugaaugugggcuuu

SEQ ID NO: 248267 - RNA, 22 nt, Human
gaugagguuuuugaaaugugga

SEQ ID NO: 248268 - RNA, 22 nt, Human
acuuucuuggucccauguuuga

SEQ ID NO: 248269 - RNA, 22 nt, Human
aagaagcuaagacuaucugggu

SEQ ID NO: 248270 - RNA, 22 nt, Human
uguaucuucaguuugucuuucc

SEQ ID NO: 248271 - RNA, 22 nt, Human
ucugggcuuuugcacuggccau

SEQ ID NO: 248272 - RNA, 22 nt, Human
ucaaaacaacacucagguguaa

SEQ ID NO: 248273 - RNA, 22 nt, Human
ggaccugccagaacucaggcua

SEQ ID NO: 248274 - RNA, 22 nt, Human
ccagguggacuugauuugaaua

SEQ ID NO: 248275 - RNA, 22 nt, Human
uuuacuacuucauugacuuacg

SEQ ID NO: 248276 - RNA, 19 nt, Human
acaggcagaauugggugug

SEQ ID NO: 248277 - RNA, 18 nt, Human
uccuggccacacuaccuu

SEQ ID NO: 248278 - RNA, 22 nt, Human
gaaggcuuccugaugccaacca

SEQ ID NO: 248279 - RNA, 22 nt, Human
ucugagaauggagcuaaaaauc

SEQ ID NO: 248280 - RNA, 22 nt, Human
caguuucuguuuuaaauagcag

SEQ ID NO: 248281 - RNA, 22 nt, Human
agaagcaaggucugucaguaua

SEQ ID NO: 248282 - RNA, 17 nt, Human
uuaagguggaucagcac

SEQ ID NO: 248283 - RNA, 22 nt, Human
auagaaucaucugugcacuagu

SEQ ID NO: 248284 - RNA, 22 nt, Human
agggcagcaaugcagcugcugc

SEQ ID NO: 248285 - RNA, 22 nt, Human
agcaucagcagacucucagcua

SEQ ID NO: 248286 - RNA, 22 nt, Human
ugucugugugagcaaaugacuu

SEQ ID NO: 248287 - RNA, 22 nt, Human
uucuccauuuaacuuccuuaug

SEQ ID NO: 248288 - RNA, 23 nt, Human
cagggaggagauacuguguaucu

SEQ ID NO: 248289 - RNA, 22 nt, Human
uagucagagucuucucuguugu

SEQ ID NO: 248290 - RNA, 22 nt, Human
accaggcagucaccguccagga

SEQ ID NO: 248291 - RNA, 22 nt, Human
ucccagcagcauagcucagaau

SEQ ID NO: 248292 - RNA, 20 nt, Human
uucucuagccuuccccuggg

SEQ ID NO: 248293 - RNA, 22 nt, Human
gaaugaguauucuuuauaggau

SEQ ID NO: 248294 - RNA, 22 nt, Human
aauauggcuuguuacuauguuu

SEQ ID NO: 248295 - RNA, 22 nt, Human
ggugggcagcucuuggcaggca

SEQ ID NO: 248296 - RNA, 22 nt, Human
auggcagcaaagaggccuucuu

SEQ ID NO: 248297 - RNA, 22 nt, Human
gacauucagccaauuacuuucu

SEQ ID NO: 248298 - RNA, 22 nt, Human
aucugagacugaguuuggauuu

SEQ ID NO: 248299 - RNA, 22 nt, Human
gguucaguuuacauuaaaaucu

SEQ ID NO: 248300 - RNA, 22 nt, Human
ugauuuuauugaaacuucacuu

SEQ ID NO: 248301 - RNA, 22 nt, Human
ucuagauguacugcugaagagu

SEQ ID NO: 248302 - RNA, 22 nt, Human
cuucagagcaucacuucagcug

SEQ ID NO: 248303 - RNA, 22 nt, Human
gucccuuccucauuccacuuua

SEQ ID NO: 248304 - RNA, 22 nt, Human
gaaguauuauagcauauuagcc

SEQ ID NO: 248305 - RNA, 22 nt, Human
cggcuuccaacaagcuuugcug

SEQ ID NO: 248306 - RNA, 22 nt, Human
uucuuuuaauagagauccugug

SEQ ID NO: 248307 - RNA, 22 nt, Human
uaggccaguugguggcccugga

SEQ ID NO: 248308 - RNA, 22 nt, Human
ugcccugcugugccuggagcca

SEQ ID NO: 248309 - RNA, 22 nt, Human
aacaggcaggagaauucugccu

SEQ ID NO: 248310 - RNA, 22 nt, Human
uuuucuguauuauugugcuuca

SEQ ID NO: 248311 - RNA, 18 nt, Human
gccugccuagagcuugcc

SEQ ID NO: 248312 - RNA, 22 nt, Human
cagggagcuggugccagccgac

SEQ ID NO: 248313 - RNA, 22 nt, Human
gcuuuacauuuuggaaagguga

SEQ ID NO: 248314 - RNA, 23 nt, Human
agcucugcucgggcaugcccugc

SEQ ID NO: 248315 - RNA, 22 nt, Human
ugcagagaaaguguagacaggc

SEQ ID NO: 248316 - RNA, 22 nt, Human
auuagcauauuaaauagucauu

SEQ ID NO: 248317 - RNA, 22 nt, Human
cuguuuaucccuuuggucagca

SEQ ID NO: 248318 - RNA, 21 nt, Human
gacaggugauucagagcaggg

SEQ ID NO: 248319 - RNA, 22 nt, Human
cguggggcggguggacacuugc

SEQ ID NO: 248320 - RNA, 22 nt, Human
cucuguaugaaucauauggagu

SEQ ID NO: 248321 - RNA, 22 nt, Human
agcagagcggggccuccggaag

SEQ ID NO: 248322 - RNA, 22 nt, Human
aguccagggagcccaggcuuug

SEQ ID NO: 248323 - RNA, 22 nt, Human
agcagaugggagauggagcugc

SEQ ID NO: 248324 - RNA, 22 nt, Human
uuuuuuggauaauaaacgaucu

SEQ ID NO: 248325 - RNA, 22 nt, Human
aaagacacaugucucuuagauu

SEQ ID NO: 248326 - RNA, 22 nt, Human
uaaggcagauguggaaucaauu

SEQ ID NO: 248327 - RNA, 22 nt, Human
aagugcuugaucauaguucuca

SEQ ID NO: 248328 - RNA, 22 nt, Human
cuagaacaaauuaggaggcaua

SEQ ID NO: 248329 - RNA, 22 nt, Human
agcauugucuccaagcaggucu

SEQ ID NO: 248330 - RNA, 22 nt, Human
gucuggaggcccgucagcccua

SEQ ID NO: 248331 - RNA, 22 nt, Human
agggaaauuaaugugagcaaug

SEQ ID NO: 248332 - RNA, 22 nt, Human
ugccuugcugcuuuggaguccu

SEQ ID NO: 248333 - RNA, 22 nt, Human
uccagggaagagcagaggcuac

SEQ ID NO: 248334 - RNA, 22 nt, Human
agaagcagggcagggaaaagca

SEQ ID NO: 248335 - RNA, 22 nt, Human
gccucuccuggagaaggcaggg

SEQ ID NO: 248336 - RNA, 22 nt, Human
uugcaaaagcaauugcaguuuu

SEQ ID NO: 248337 - RNA, 22 nt, Human
auuuccuaggguagaugucaca

SEQ ID NO: 248338 - RNA, 22 nt, Human
uucuauaaugcaagccacugca

SEQ ID NO: 248339 - RNA, 22 nt, Human
ccagcucuaaacggcucugugg

SEQ ID NO: 248340 - RNA, 22 nt, Human
aaggccaugaccacuugcugug

SEQ ID NO: 248341 - RNA, 22 nt, Human
agacagacguagugugagagua

SEQ ID NO: 248342 - RNA, 22 nt, Human
gccuccugaaaggaagagcucc

SEQ ID NO: 248343 - RNA, 22 nt, Human
augugcaaaguaaaguaauuuu

SEQ ID NO: 248344 - RNA, 22 nt, Human
agcacaguuucuuuuccuuguc

SEQ ID NO: 248345 - RNA, 22 nt, Human
ugagcuucuuuauuuggccaga

SEQ ID NO: 248346 - RNA, 22 nt, Human
ucagcagaggagugucuugccc

SEQ ID NO: 248347 - RNA, 20 nt, Human
gauuacaaaaugaaaugcau

SEQ ID NO: 248348 - RNA, 19 nt, Human
agcaauuaagacugugggc

SEQ ID NO: 248349 - RNA, 22 nt, Human
uuuaaagugcugcuccuauccu

SEQ ID NO: 248350 - RNA, 22 nt, Human
cuccugguucagagagcugaga

SEQ ID NO: 248351 - RNA, 22 nt, Human
caggagccccaggcugacaaua

SEQ ID NO: 248352 - RNA, 22 nt, Human
uuagagaaccaaugaauagucu

SEQ ID NO: 248353 - RNA, 22 nt, Human
uuggaauaaaaacaacucacag

SEQ ID NO: 248354 - RNA, 22 nt, Human
agacacagcagugccugccuca

SEQ ID NO: 248355 - RNA, 22 nt, Human
cagagcuggcucugcauguaca

SEQ ID NO: 248356 - RNA, 22 nt, Human
caugauguuaucuaaaucuggu

SEQ ID NO: 248357 - RNA, 22 nt, Human
cuccagguuuuacaaggucuau

SEQ ID NO: 248358 - RNA, 22 nt, Human
ugaggaauggcuuaauguggga

SEQ ID NO: 248359 - RNA, 22 nt, Human
ggcaggcuuucagcaucaaguc

SEQ ID NO: 248360 - RNA, 21 nt, Human
gccugcuguucacccugccac

SEQ ID NO: 248361 - RNA, 22 nt, Human
uucuaaagccuguccuaucaga

SEQ ID NO: 248362 - RNA, 18 nt, Human
uuugggauccucuuuucu

SEQ ID NO: 248363 - RNA, 22 nt, Human
ggccuuccuucccagccuacug

SEQ ID NO: 248364 - RNA, 22 nt, Human
gaugagcugugauuaauaagua

SEQ ID NO: 248365 - RNA, 22 nt, Human
uuccuggggcuuagcaauggag

SEQ ID NO: 248366 - RNA, 22 nt, Human
auaauaucgcuccuuuuuuuga

SEQ ID NO: 248367 - RNA, 22 nt, Human
ucagacagaaggacuauuugaa

SEQ ID NO: 248368 - RNA, 20 nt, Human
aggagccauugacugcagca

SEQ ID NO: 248369 - RNA, 22 nt, Human
uacacaugcauguacuccagga

SEQ ID NO: 248370 - RNA, 22 nt, Human
acugccuguuuggcauggcccc

SEQ ID NO: 248371 - RNA, 22 nt, Human
ugguccuggagaucaauaugca

SEQ ID NO: 248372 - RNA, 22 nt, Human
uagaaaagaauuuuauuugaua

SEQ ID NO: 248373 - RNA, 22 nt, Human
uuccugugaaauauagguccau

SEQ ID NO: 248374 - RNA, 22 nt, Human
uaaaccuuauuugaauaccaac

SEQ ID NO: 248375 - RNA, 21 nt, Human
gcaaggcaaugccaugauuuc

SEQ ID NO: 248376 - RNA, 22 nt, Human
aagugcauauuuuuguuguaga

SEQ ID NO: 248377 - RNA, 22 nt, Human
aagugguuugauucaguuuaug

SEQ ID NO: 248378 - RNA, 22 nt, Human
gguccagguauguggugugaau

SEQ ID NO: 248379 - RNA, 22 nt, Human
ggcugccagcacugguguagag

SEQ ID NO: 248380 - RNA, 22 nt, Human
auaguuuacaaaaaugaugcau

SEQ ID NO: 248381 - RNA, 22 nt, Human
aaagugguuuuucagacuuuga

SEQ ID NO: 248382 - RNA, 22 nt, Human
uuguguuucuggccaagaugga

SEQ ID NO: 248383 - RNA, 22 nt, Human
gccagggggucagcaggcacuu

SEQ ID NO: 248384 - RNA, 22 nt, Human
uggcugaggcuuuucuuaaaga

SEQ ID NO: 248385 - RNA, 22 nt, Human
aauugacaaaucauacuuguau

SEQ ID NO: 248386 - RNA, 22 nt, Human
aucugcaggaaugugugcagag

SEQ ID NO: 248387 - RNA, 22 nt, Human
gcagggcugcagagggcacugu

SEQ ID NO: 248388 - RNA, 22 nt, Human
agucuuagauuuuauuuugguc

SEQ ID NO: 248389 - RNA, 22 nt, Human
guuauucaacuugugucucuua

SEQ ID NO: 248390 - RNA, 22 nt, Human
cauucauucuguaaguaacuau

SEQ ID NO: 248391 - RNA, 20 nt, Human
ugguccaggaccuggugucc

SEQ ID NO: 248392 - RNA, 22 nt, Human
cugggacauuauaagaaacauu

SEQ ID NO: 248393 - RNA, 22 nt, Human
uacugucuuuuccuaaaugggu

SEQ ID NO: 248394 - RNA, 22 nt, Human
gccacugugguccucccaugau

SEQ ID NO: 248395 - RNA, 22 nt, Human
gcaacacagaucuucuuuguug

SEQ ID NO: 248396 - RNA, 23 nt, Human
uauucagcagugggauuuguugu

SEQ ID NO: 248397 - RNA, 22 nt, Human
guggcugcuguccucucugguu

SEQ ID NO: 248398 - RNA, 22 nt, Human
ucagcucuuaacccucuggccu

SEQ ID NO: 248399 - RNA, 22 nt, Human
ugggagagugcucaaugugcaa

SEQ ID NO: 248400 - RNA, 22 nt, Human
caaauggcuggcauccuucuac

SEQ ID NO: 248401 - RNA, 22 nt, Human
uucuucaaaauccagcaugauu

SEQ ID NO: 248402 - RNA, 23 nt, Human
ucacuugaagcuagaaucugccc

SEQ ID NO: 248403 - RNA, 22 nt, Human
uaaagucaagguacuguuucac

SEQ ID NO: 248404 - RNA, 22 nt, Human
agcaaaguggcuuuccaaacca

SEQ ID NO: 248405 - RNA, 22 nt, Human
aaggggcucuugucaggcgcag

SEQ ID NO: 248406 - RNA, 22 nt, Human
uucuguccacugcuggggccuc

SEQ ID NO: 248407 - RNA, 21 nt, Human
cugguguagcacucaggugcu

SEQ ID NO: 248408 - RNA, 22 nt, Human
uuagaacauuccaucacugggu

SEQ ID NO: 248409 - RNA, 22 nt, Human
auacgccauaggcuccucacuu

SEQ ID NO: 248410 - RNA, 20 nt, Human
uggggucuaguuggccuggg

SEQ ID NO: 248411 - RNA, 22 nt, Human
agccagagacugugucuguaau

SEQ ID NO: 248412 - RNA, 22 nt, Human
aaagcaugauuagauagaugau

SEQ ID NO: 248413 - RNA, 22 nt, Human
cauguccuucucauugccucau

SEQ ID NO: 248414 - RNA, 22 nt, Human
ucuguuaugcauaagcaucagu

SEQ ID NO: 248415 - RNA, 22 nt, Human
caguaauuccaagugcuuauac

SEQ ID NO: 248416 - RNA, 22 nt, Human
guauccucaccuauacaaugga

SEQ ID NO: 248417 - RNA, 22 nt, Human
ucucagaguuuacggggcugaa

SEQ ID NO: 248418 - RNA, 22 nt, Human
uaagaugaucaccaaaugcugg

SEQ ID NO: 248419 - RNA, 22 nt, Human
uccuggcauccgugggucugug

SEQ ID NO: 248420 - RNA, 22 nt, Human
uuugacuccugccuucuccugu

SEQ ID NO: 248421 - RNA, 22 nt, Human
gaagcaguuucuguaaugaaau

SEQ ID NO: 248422 - RNA, 22 nt, Human
ccaggagauuuuuccauagcac

SEQ ID NO: 248423 - RNA, 22 nt, Human
caaguuuaaggcacugauaagu

SEQ ID NO: 248424 - RNA, 22 nt, Human
aauuggaaaaugcuacauauca

SEQ ID NO: 248425 - RNA, 22 nt, Human
caucaaagcuuuuuucuguguu

SEQ ID NO: 248426 - RNA, 23 nt, Human
gaauacaaagcagaugguccagc

SEQ ID NO: 248427 - RNA, 18 nt, Human
cacaauagacaccgauaa

SEQ ID NO: 248428 - RNA, 22 nt, Human
agagaacacgugcaucugcaau

SEQ ID NO: 248429 - RNA, 23 nt, Human
ucaaacauauugugagacacagg

SEQ ID NO: 248430 - RNA, 22 nt, Human
ccugguggagaggggcggagcg

SEQ ID NO: 248431 - RNA, 22 nt, Human
cucuccuggggagcacacacac

SEQ ID NO: 248432 - RNA, 22 nt, Human
cuucuucagcacaauauugaug

SEQ ID NO: 248433 - RNA, 22 nt, Human
guuucaaauagguuucagcaaa

SEQ ID NO: 248434 - RNA, 22 nt, Human
ucucacaucugcccugugcugg

SEQ ID NO: 248435 - RNA, 22 nt, Human
cagggcucagaagacagaccuc

SEQ ID NO: 248436 - RNA, 22 nt, Human
acacauuauaggcaaucaaaag

SEQ ID NO: 248437 - RNA, 22 nt, Human
gaaaggcuacugucaucaauua

SEQ ID NO: 248438 - RNA, 22 nt, Human
uuucaugcacaaaugagcaagg

SEQ ID NO: 248439 - RNA, 22 nt, Human
guauuagucaauuacagugggg

SEQ ID NO: 248440 - RNA, 22 nt, Human
gugcauauaugcacauaugugu

SEQ ID NO: 248441 - RNA, 22 nt, Human
agcagcugcagggagggucugc

SEQ ID NO: 248442 - RNA, 22 nt, Human
ggcugaaaggugggaggauggc

SEQ ID NO: 248443 - RNA, 22 nt, Human
ucagaggugcaagaaguucuga

SEQ ID NO: 248444 - RNA, 22 nt, Human
ccagguguaagacaugguccua

SEQ ID NO: 248445 - RNA, 22 nt, Human
cauaacauguacauauaaaugc

SEQ ID NO: 248446 - RNA, 21 nt, Human
uuaugucucuuuggugacugg

SEQ ID NO: 248447 - RNA, 22 nt, Human
caugcaaagcguuuugaccagc

SEQ ID NO: 248448 - RNA, 22 nt, Human
gguuccagaguauuucauuuca

SEQ ID NO: 248449 - RNA, 22 nt, Human
uuacaguuuaguccaagccaga

SEQ ID NO: 248450 - RNA, 22 nt, Human
uggcuucagagacagaaucuau

SEQ ID NO: 248451 - RNA, 22 nt, Human
gacaagugcugauuuaucuccc

SEQ ID NO: 248452 - RNA, 22 nt, Human
auagaaaacagauguccuuaaa

SEQ ID NO: 248453 - RNA, 22 nt, Human
cccaggaggucgaagcugcagu

SEQ ID NO: 248454 - RNA, 22 nt, Human
cccagaaggucgaggcugcagu

SEQ ID NO: 248455 - RNA, 22 nt, Human
caguucuuuguggggaguucuc

SEQ ID NO: 248456 - RNA, 22 nt, Human
acagagacuuggagcaggcuga

SEQ ID NO: 248457 - RNA, 22 nt, Human
caguagucuuuuuccuccuaga

SEQ ID NO: 248458 - RNA, 22 nt, Human
gacaaugcagaaguacuuguuc

SEQ ID NO: 248459 - RNA, 22 nt, Human
ggccagggaggagaggccccug

SEQ ID NO: 248460 - RNA, 22 nt, Human
acaucuguccucugcagagcuc

SEQ ID NO: 248461 - RNA, 22 nt, Human
auucagugauucauuuguacaa

SEQ ID NO: 248462 - RNA, 19 nt, Human
auguuuuaugcugauggga

SEQ ID NO: 248463 - RNA, 22 nt, Human
gcucccagggaccgcagggcag

SEQ ID NO: 248464 - RNA, 22 nt, Human
gcugggcucaccaggccacuag

SEQ ID NO: 248465 - RNA, 22 nt, Human
agcagaggacaguucuuaggaa

SEQ ID NO: 248466 - RNA, 22 nt, Human
gcccagguuggagagcaguggc

SEQ ID NO: 248467 - RNA, 22 nt, Human
caggccuugucaagaaaaugcc

SEQ ID NO: 248468 - RNA, 23 nt, Human
cauguacagaguuugauaaagug

SEQ ID NO: 248469 - RNA, 22 nt, Human
gaggugggaugugugugcuacu

SEQ ID NO: 248470 - RNA, 22 nt, Human
aagcugucagugucaggcuaaa

SEQ ID NO: 248471 - RNA, 21 nt, Human
gagaggccugggcccgugagc

SEQ ID NO: 248472 - RNA, 22 nt, Human
ccagggcaacgcugucucagag

SEQ ID NO: 248473 - RNA, 22 nt, Human
uaaauggcaaccccuagagcug

SEQ ID NO: 248474 - RNA, 22 nt, Human
aauagaacaauaauuguaaacu

SEQ ID NO: 248475 - RNA, 22 nt, Human
aauagcauguucaugauaaaau

SEQ ID NO: 248476 - RNA, 22 nt, Human
gucuccagggcugcuggcgccu

SEQ ID NO: 248477 - RNA, 23 nt, Human
uguagcaucucuuauuucucagc

SEQ ID NO: 248478 - RNA, 22 nt, Human
gcuuccuggaacaacuguugcu

SEQ ID NO: 248479 - RNA, 22 nt, Human
ccugguggaaggugagugaggc

SEQ ID NO: 248480 - RNA, 22 nt, Human
agcccagcuuugaaccauauca

SEQ ID NO: 248481 - RNA, 22 nt, Human
agcaguuaccaaggaaccuggu

SEQ ID NO: 248482 - RNA, 22 nt, Human
agcauacaguugaaaguggcuu

SEQ ID NO: 248483 - RNA, 22 nt, Human
cagcacucuggcuucguuaagu

SEQ ID NO: 248484 - RNA, 22 nt, Human
aucuguagaagauacucugaga

SEQ ID NO: 248485 - RNA, 22 nt, Human
cucaggaguaguucagcagcug

SEQ ID NO: 248486 - RNA, 22 nt, Human
auuuguuaauuaugaggcauac

SEQ ID NO: 248487 - RNA, 22 nt, Human
agcaccaucggguucuugcuuu

SEQ ID NO: 248488 - RNA, 22 nt, Human
acacaucucucuuugaggagug

SEQ ID NO: 248489 - RNA, 22 nt, Human
aaaagagaguugccagucugua

SEQ ID NO: 248490 - RNA, 22 nt, Human
agacaggugcucgcccaagucc

SEQ ID NO: 248491 - RNA, 22 nt, Human
aucaaaucauugcauuaauguu

SEQ ID NO: 248492 - RNA, 22 nt, Human
cuccugggucauugccagcaaa

SEQ ID NO: 248493 - RNA, 22 nt, Human
ggaggccaagucacugaccugg

SEQ ID NO: 248494 - RNA, 22 nt, Human
uucuuuuggacucaaagagaac

SEQ ID NO: 248495 - RNA, 22 nt, Human
gagucuggaaacuuugacaaaa

SEQ ID NO: 248496 - RNA, 22 nt, Human
guuauucaauggcuuauaagga

SEQ ID NO: 248497 - RNA, 22 nt, Human
auuucuagcagggcaggaaaga

SEQ ID NO: 248498 - RNA, 22 nt, Human
gcuguguguucaauaaugugau

SEQ ID NO: 248499 - RNA, 22 nt, Human
gccagcucucauuguauaggcu

SEQ ID NO: 248500 - RNA, 22 nt, Human
agguggcucugacagcucuggu

SEQ ID NO: 248501 - RNA, 22 nt, Human
ucuggcaggccuugucaaucug

SEQ ID NO: 248502 - RNA, 22 nt, Human
ggcccaggaugcaagaacugaa

SEQ ID NO: 248503 - RNA, 20 nt, Human
cagugaggaggugcuggggg

SEQ ID NO: 248504 - RNA, 22 nt, Human
ccagccuucaccugcucugguc

SEQ ID NO: 248505 - RNA, 22 nt, Human
caagauaauuuauucugaguuu

SEQ ID NO: 248506 - RNA, 22 nt, Human
gcaggagcugcucuccugacga

SEQ ID NO: 248507 - RNA, 22 nt, Human
cuuuggaaggaagaccuuucag

SEQ ID NO: 248508 - RNA, 22 nt, Human
uggcagcugccauguccacgug

SEQ ID NO: 248509 - RNA, 22 nt, Human
caugugucaaaugauguagcug

SEQ ID NO: 248510 - RNA, 22 nt, Human
aggccagcugccacccgguccg

SEQ ID NO: 248511 - RNA, 22 nt, Human
augaguguuuagaaaacacugg

SEQ ID NO: 248512 - RNA, 22 nt, Human
cuucuguggauauguucucucu

SEQ ID NO: 248513 - RNA, 22 nt, Human
cuugucugggcagcuugggagu

SEQ ID NO: 248514 - RNA, 22 nt, Human
gcagaagcugggcagcgaggug

SEQ ID NO: 248515 - RNA, 22 nt, Human
agaugguuuugucuuuaugauu

SEQ ID NO: 248516 - RNA, 22 nt, Human
cuggaaagacagagggcauggg

SEQ ID NO: 248517 - RNA, 22 nt, Human
gaacagcagcucguucucgaug

SEQ ID NO: 248518 - RNA, 22 nt, Human
ccagccuggacugggucuugug

SEQ ID NO: 248519 - RNA, 22 nt, Human
ucaggcuggggugcuaaggugu

SEQ ID NO: 248520 - RNA, 22 nt, Human
auguccagaguaaagcacauuc

SEQ ID NO: 248521 - RNA, 22 nt, Human
uucuuaaagaggcaaaacacag

SEQ ID NO: 248522 - RNA, 22 nt, Human
agggaugauuucagugucugcc

SEQ ID NO: 248523 - RNA, 22 nt, Human
cagggagcucugggccggacuc

SEQ ID NO: 248524 - RNA, 22 nt, Human
ggcuccuguccuccuggagcuc

SEQ ID NO: 248525 - RNA, 22 nt, Human
gccaccagcagaaaaggggcca

SEQ ID NO: 248526 - RNA, 22 nt, Human
acauucaugucccacuucuagc

SEQ ID NO: 248527 - RNA, 22 nt, Human
ucagcuuuuuacaugugaaaua

SEQ ID NO: 248528 - RNA, 22 nt, Human
ucacagugcaggaucaguuaau

SEQ ID NO: 248529 - RNA, 22 nt, Human
ucugggcuuuacacugugcuua

SEQ ID NO: 248530 - RNA, 23 nt, Human
ugucuuugaaugggcuguagaca

SEQ ID NO: 248531 - RNA, 22 nt, Human
caugguuuggucuuuguagugg

SEQ ID NO: 248532 - RNA, 22 nt, Human
ggaguggccucuccugugcagg

SEQ ID NO: 248533 - RNA, 23 nt, Human
auuagaaaggcuuucuggugaaa

SEQ ID NO: 248534 - RNA, 22 nt, Human
ggcaggcagaggcugagacagg

SEQ ID NO: 248535 - RNA, 22 nt, Human
ucugcucagggagggucacuac

SEQ ID NO: 248536 - RNA, 22 nt, Human
acuucauguaguccaucagguu

SEQ ID NO: 248537 - RNA, 22 nt, Human
acaaaugcagcauaaagugaac

SEQ ID NO: 248538 - RNA, 22 nt, Human
caggccugacccugagcuucac

SEQ ID NO: 248539 - RNA, 19 nt, Human
agacuuuuguaaguugaga

SEQ ID NO: 248540 - RNA, 21 nt, Human
ucaggaggcucagacuccugc

SEQ ID NO: 248541 - RNA, 20 nt, Human
uuacagaaaugauguuauuu

SEQ ID NO: 248542 - RNA, 22 nt, Human
aucaagcagugaaaaaugcuag

SEQ ID NO: 248543 - RNA, 22 nt, Human
gacugaggagguaagguuugaa

SEQ ID NO: 248544 - RNA, 22 nt, Human
cauguucaucagaucaauugua

SEQ ID NO: 248545 - RNA, 22 nt, Human
ccucaggcuuacgggcaaugga

SEQ ID NO: 248546 - RNA, 22 nt, Human
augcuuuuccaggagaaauaua

SEQ ID NO: 248547 - RNA, 22 nt, Human
ugucauggcacugguaggagug

SEQ ID NO: 248548 - RNA, 22 nt, Human
aacagauaauuucuaaguuacu

SEQ ID NO: 248549 - RNA, 22 nt, Human
cuuuuacauuuguugaagagua

SEQ ID NO: 248550 - RNA, 22 nt, Human
aacaaugaggaucuguucugag

SEQ ID NO: 248551 - RNA, 22 nt, Human
aaaugcuguucuuuuagguaga

SEQ ID NO: 248552 - RNA, 22 nt, Human
cucugggcaaagaugccucauc

SEQ ID NO: 248553 - RNA, 22 nt, Human
agucauuuugcuaaaugagggu

SEQ ID NO: 248554 - RNA, 22 nt, Human
ucagaacagcaggguguggcug

SEQ ID NO: 248555 - RNA, 22 nt, Human
ucaugccagcuuugcuuguccc

SEQ ID NO: 248556 - RNA, 22 nt, Human
aaaaaugcugugguagcugugu

SEQ ID NO: 248557 - RNA, 22 nt, Human
uuggaauuccuguuguuucguc

SEQ ID NO: 248558 - RNA, 20 nt, Human
gcugggggugugcugaguga

SEQ ID NO: 248559 - RNA, 22 nt, Human
cugcagggauugcuucuguaua

SEQ ID NO: 248560 - RNA, 22 nt, Human
ugcuggagagccuuggccaagg

SEQ ID NO: 248561 - RNA, 22 nt, Human
auaucuuuuagagcaagcuugu

SEQ ID NO: 248562 - RNA, 22 nt, Human
agcagaagugccuuagcaauca

SEQ ID NO: 248563 - RNA, 22 nt, Human
caaaugugguuucucagcauuc

SEQ ID NO: 248564 - RNA, 22 nt, Human
gaaagcacaguucaugagacaa

SEQ ID NO: 248565 - RNA, 22 nt, Human
ccacaucuguucuuaguucuga

SEQ ID NO: 248566 - RNA, 22 nt, Human
acccugagucagacagccugac

SEQ ID NO: 248567 - RNA, 22 nt, Human
gccuggcugagguggggaggca

SEQ ID NO: 248568 - RNA, 21 nt, Human
auggugagauacugggugugg

SEQ ID NO: 248569 - RNA, 22 nt, Human
acagcagccagccacugugagc

SEQ ID NO: 248570 - RNA, 22 nt, Human
uccacaucaagggcagagaggu

SEQ ID NO: 248571 - RNA, 22 nt, Human
auuccaaagguuaaugcccauu

SEQ ID NO: 248572 - RNA, 22 nt, Human
uuuaguguggcacugauguuca

SEQ ID NO: 248573 - RNA, 22 nt, Human
aacuuagacuuguuucuuggua

SEQ ID NO: 248574 - RNA, 22 nt, Human
aucaaauacaaagggcauaagg

SEQ ID NO: 248575 - RNA, 22 nt, Human
cugggaagauggugacagaauu

SEQ ID NO: 248576 - RNA, 22 nt, Human
uaagugaugaagaccuguuugg

SEQ ID NO: 248577 - RNA, 22 nt, Human
augucacuguuuaccagcucca

SEQ ID NO: 248578 - RNA, 22 nt, Human
uucuggcuacccuccuaauguu

SEQ ID NO: 248579 - RNA, 22 nt, Human
ucuuucaaagcuguaguagauu

SEQ ID NO: 248580 - RNA, 22 nt, Human
agcuaggacagguagagauggg

SEQ ID NO: 248581 - RNA, 22 nt, Human
ccaucagacaauucuuucucuu

SEQ ID NO: 248582 - RNA, 22 nt, Human
aucuuuauauaucuccucugaa

SEQ ID NO: 248583 - RNA, 22 nt, Human
uuucugcauauguauguaugga

SEQ ID NO: 248584 - RNA, 22 nt, Human
gucauagaggccuauauaauuu

SEQ ID NO: 248585 - RNA, 22 nt, Human
uuucacauuuguuuuaagaagu

SEQ ID NO: 248586 - RNA, 22 nt, Human
auggaaugugaacaugauggca

SEQ ID NO: 248587 - RNA, 22 nt, Human
auccugggcaaaguaugcuguc

SEQ ID NO: 248588 - RNA, 22 nt, Human
uggaggcaccacuggcugcccg

SEQ ID NO: 248589 - RNA, 22 nt, Human
aggaagaggguggcagauaauc

SEQ ID NO: 248590 - RNA, 22 nt, Human
cacauguguauaugugaggggg

SEQ ID NO: 248591 - RNA, 22 nt, Human
gaggugucccgcaguccccaag

SEQ ID NO: 248592 - RNA, 21 nt, Human
ccucagucucccugcuccacu

SEQ ID NO: 248593 - RNA, 22 nt, Human
uugaggagguaugacuagguac

SEQ ID NO: 248594 - RNA, 22 nt, Human
uaauacaaggcaggaagcagua

SEQ ID NO: 248595 - RNA, 22 nt, Human
aaaggccaugguuggaguguuu

SEQ ID NO: 248596 - RNA, 19 nt, Human
aggugugggggcugcagac

SEQ ID NO: 248597 - RNA, 22 nt, Human
guggcugcuacagagcuggagg

SEQ ID NO: 248598 - RNA, 22 nt, Human
ggcagguggacgugcuaaagcu

SEQ ID NO: 248599 - RNA, 22 nt, Human
cgagcaugaugacggcuguggc

SEQ ID NO: 248600 - RNA, 19 nt, Human
uguggggagucagggggcu

SEQ ID NO: 248601 - RNA, 22 nt, Human
cauuucauuccuuugaaagugg

SEQ ID NO: 248602 - RNA, 22 nt, Human
uccuggucagugccaaacuggu

SEQ ID NO: 248603 - RNA, 22 nt, Human
gaugcaaaccuuacauggaccu

SEQ ID NO: 248604 - RNA, 22 nt, Human
agguggcagaugggggugcucg

SEQ ID NO: 248605 - RNA, 22 nt, Human
acagauuauggauauaugugga

SEQ ID NO: 248606 - RNA, 22 nt, Human
uuggcuucuuuagucaguuugg

SEQ ID NO: 248607 - RNA, 22 nt, Human
aacaggcucuucauuuccagag

SEQ ID NO: 248608 - RNA, 22 nt, Human
aggaagcccuugucauuucugu

SEQ ID NO: 248609 - RNA, 22 nt, Human
agccagaggccagccugccuca

SEQ ID NO: 248610 - RNA, 22 nt, Human
cuuguaaaugcagauucugauu

SEQ ID NO: 248611 - RNA, 22 nt, Human
gaggcccaggguacaggccgcu

SEQ ID NO: 248612 - RNA, 22 nt, Human
aucuguggauaugaccuuccug

SEQ ID NO: 248613 - RNA, 22 nt, Human
ggcaaacacaccucggugagaa

SEQ ID NO: 248614 - RNA, 22 nt, Human
aggacaguauaggcuuuaggag

SEQ ID NO: 248615 - RNA, 22 nt, Human
cuuagauacaguagaaagacuc

SEQ ID NO: 248616 - RNA, 18 nt, Human
aagaaguuggccaaagag

SEQ ID NO: 248617 - RNA, 22 nt, Human
ugaggcaagggauggccccgug

SEQ ID NO: 248618 - RNA, 22 nt, Human
caacuauagaucaaaugaguuu

SEQ ID NO: 248619 - RNA, 22 nt, Human
ugauuuacucccacuuagagcc

SEQ ID NO: 248620 - RNA, 22 nt, Human
caacagaaggaagcagggucag

SEQ ID NO: 248621 - RNA, 22 nt, Human
uuuauuuggcauccagggagaa

SEQ ID NO: 248622 - RNA, 22 nt, Human
uugagcaaagcagccauucauu

SEQ ID NO: 248623 - RNA, 22 nt, Human
guccucuccaggaggcucugau

SEQ ID NO: 248624 - RNA, 22 nt, Human
gcucagagauguucaguagcuu

SEQ ID NO: 248625 - RNA, 22 nt, Human
cugccaggugccagggcgcggc

SEQ ID NO: 248626 - RNA, 22 nt, Human
gcagguggauauugcuacuuga

SEQ ID NO: 248627 - RNA, 20 nt, Human
aggucugaaugucagggcug

SEQ ID NO: 248628 - RNA, 22 nt, Human
uucuuucaauagcuggcauaug

SEQ ID NO: 248629 - RNA, 22 nt, Human
gcuucucuuaaugccuggcuuu

SEQ ID NO: 248630 - RNA, 22 nt, Human
agaguaaaguacuuggaauacc

SEQ ID NO: 248631 - RNA, 22 nt, Human
aaguaugucuuuggguauuauu

SEQ ID NO: 248632 - RNA, 22 nt, Human
ugggccaggcaugugaucagca

SEQ ID NO: 248633 - RNA, 22 nt, Human
ugcuauuuuggucuacagcacu

SEQ ID NO: 248634 - RNA, 22 nt, Human
cuggggaaggcggugacugcgc

SEQ ID NO: 248635 - RNA, 22 nt, Human
gucaaauauacuaagagguaaa

SEQ ID NO: 248636 - RNA, 22 nt, Human
uagaauaugauuaauuuucuua

SEQ ID NO: 248637 - RNA, 22 nt, Human
uauacacaaacaagggguuaag

SEQ ID NO: 248638 - RNA, 22 nt, Human
aaaaaauuccauucugugccuu

SEQ ID NO: 248639 - RNA, 22 nt, Human
aaagaucacgucccaggacucg

SEQ ID NO: 248640 - RNA, 22 nt, Human
uugaggcagguccggguccuuc

SEQ ID NO: 248641 - RNA, 19 nt, Human
uccagccccucugugugug

SEQ ID NO: 248642 - RNA, 22 nt, Human
acauuccugaaugggcacauuu

SEQ ID NO: 248643 - RNA, 22 nt, Human
acaaugucucauauucguguuc

SEQ ID NO: 248644 - RNA, 22 nt, Human
uagaaaauguuccacugccauu

SEQ ID NO: 248645 - RNA, 22 nt, Human
ugccagaguuacaugaggguca

SEQ ID NO: 248646 - RNA, 22 nt, Human
aggucuuaggagcauggugcug

SEQ ID NO: 248647 - RNA, 22 nt, Human
uggaaucuuuaggaagcacaua

SEQ ID NO: 248648 - RNA, 22 nt, Human
aguccaggucucugagucacaa

SEQ ID NO: 248649 - RNA, 22 nt, Human
ugcaaacaccacagagacaauu

SEQ ID NO: 248650 - RNA, 22 nt, Human
acugcaauuauuuguucaccaa

SEQ ID NO: 248651 - RNA, 22 nt, Human
aaacucuuuccacgauuacuuu

SEQ ID NO: 248652 - RNA, 22 nt, Human
acccuggguauuucccaaacuu

SEQ ID NO: 248653 - RNA, 23 nt, Human
gugcaaagauauaccacauggcu

SEQ ID NO: 248654 - RNA, 22 nt, Human
gccugagccgccugagcggcgg

SEQ ID NO: 248655 - RNA, 22 nt, Human
gcagaggaggacccaggaauua

SEQ ID NO: 248656 - RNA, 22 nt, Human
aucuuugugaaucucaacuugg

SEQ ID NO: 248657 - RNA, 22 nt, Human
acagcagggaauaugggaauug

SEQ ID NO: 248658 - RNA, 17 nt, Human
aggcuccuccuaagguc

SEQ ID NO: 248659 - RNA, 22 nt, Human
gccuccugagaagccacaggcu

SEQ ID NO: 248660 - RNA, 22 nt, Human
ucucauugcacaaugcagagug

SEQ ID NO: 248661 - RNA, 22 nt, Human
acaguauaaacuccuaaaagcc

SEQ ID NO: 248662 - RNA, 22 nt, Human
uuguucaggccugggacaguuu

SEQ ID NO: 248663 - RNA, 22 nt, Human
ugcagagauagaacuacuuucu

SEQ ID NO: 248664 - RNA, 22 nt, Human
uggcaguggauaggggagcggu

SEQ ID NO: 248665 - RNA, 22 nt, Human
ggaccugcauuuuaacaagauc

SEQ ID NO: 248666 - RNA, 22 nt, Human
uucuagauugccuguaaguaaa

SEQ ID NO: 248667 - RNA, 22 nt, Human
aaagccaggguccaggccugcc

SEQ ID NO: 248668 - RNA, 22 nt, Human
agggcucuguccccagaggccc

SEQ ID NO: 248669 - RNA, 22 nt, Human
gcugguccagggccucuguggg

SEQ ID NO: 248670 - RNA, 22 nt, Human
cccugaggggaguggugaggug

SEQ ID NO: 248671 - RNA, 22 nt, Human
cucaggucacaggauggccagg

SEQ ID NO: 248672 - RNA, 22 nt, Human
cuaggcucagucucuggucugu

SEQ ID NO: 248673 - RNA, 22 nt, Human
ucaguuuagaguuauuuaaucu

SEQ ID NO: 248674 - RNA, 22 nt, Human
ggacaguagucacuaaacuaga

SEQ ID NO: 248675 - RNA, 22 nt, Human
acuucccacugcagugacugag

SEQ ID NO: 248676 - RNA, 22 nt, Human
augguggaagagcaucagaaag

SEQ ID NO: 248677 - RNA, 22 nt, Human
uuaaaugagauguucagauauu

SEQ ID NO: 248678 - RNA, 22 nt, Human
agaauauugaaaguucuugaca

SEQ ID NO: 248679 - RNA, 22 nt, Human
aagauucuuaccuauacccagu

SEQ ID NO: 248680 - RNA, 22 nt, Human
uaauccacaauagagauuaucu

SEQ ID NO: 248681 - RNA, 20 nt, Human
agaggccaguuaggagucua

SEQ ID NO: 248682 - RNA, 22 nt, Human
cauccaaagcaaauaucuuaaa

SEQ ID NO: 248683 - RNA, 22 nt, Human
ugcauaacuagaguaauuacag

SEQ ID NO: 248684 - RNA, 22 nt, Human
ugcuguguaaaaggugauugaa

SEQ ID NO: 248685 - RNA, 22 nt, Human
uaacacuugaagccauuuuugc

SEQ ID NO: 248686 - RNA, 22 nt, Human
aaaguaguuagucaugugaaaa

SEQ ID NO: 248687 - RNA, 22 nt, Human
agucacagggggccccugcaac

SEQ ID NO: 248688 - RNA, 22 nt, Human
ugagauucccugaaugauauau

SEQ ID NO: 248689 - RNA, 22 nt, Human
ggucccaagugcuuuuccugca

SEQ ID NO: 248690 - RNA, 22 nt, Human
guucugggagaucuugagcuuc

SEQ ID NO: 248691 - RNA, 22 nt, Human
ugagucuucugccuaaagaagu

SEQ ID NO: 248692 - RNA, 22 nt, Human
uagcacugagucuagcuuugga

SEQ ID NO: 248693 - RNA, 22 nt, Human
agaaagcuuaugaaugggcaag

SEQ ID NO: 248694 - RNA, 22 nt, Human
aaagucaagguuuagacuagag

SEQ ID NO: 248695 - RNA, 22 nt, Human
acagccagucaucucagcaggg

SEQ ID NO: 248696 - RNA, 22 nt, Human
cuggaaggcucugcugccuguc

SEQ ID NO: 248697 - RNA, 22 nt, Human
auuuugaaaccaaguuauuucc

SEQ ID NO: 248698 - RNA, 20 nt, Human
cugggucacuuggcugcucu

SEQ ID NO: 248699 - RNA, 22 nt, Human
uggcugagagcaauugacucug

SEQ ID NO: 248700 - RNA, 22 nt, Human
gacagcuggcaguggaaaggug

SEQ ID NO: 248701 - RNA, 22 nt, Human
aagcauaaaacguuacaacaug

SEQ ID NO: 248702 - RNA, 17 nt, Human
cucugggcagccugggg

SEQ ID NO: 248703 - RNA, 22 nt, Human
gcucuggggcccagggaucaca

SEQ ID NO: 248704 - RNA, 22 nt, Human
gacacagcuugaugagggcuuu

SEQ ID NO: 248705 - RNA, 22 nt, Human
ucagaggaugcuguucuuuaau

SEQ ID NO: 248706 - RNA, 19 nt, Human
cugggagguguucagagaa

SEQ ID NO: 248707 - RNA, 22 nt, Human
augcacagcagugaguucagug

SEQ ID NO: 248708 - RNA, 22 nt, Human
agaaccucacgagauuccuuca

SEQ ID NO: 248709 - RNA, 22 nt, Human
cuagagaagagguuaagcauga

SEQ ID NO: 248710 - RNA, 22 nt, Human
ugucccuggacuccaggagcca

SEQ ID NO: 248711 - RNA, 20 nt, Human
cuggcuucgggaacuaguuu

SEQ ID NO: 248712 - RNA, 21 nt, Human
gcacuucugcagggcugcugg

SEQ ID NO: 248713 - RNA, 22 nt, Human
gagcuuggaugucuuuuguuca

SEQ ID NO: 248714 - RNA, 22 nt, Human
ggaggugguuugauuucuauau

SEQ ID NO: 248715 - RNA, 22 nt, Human
acacugaauauacaaugaauau

SEQ ID NO: 248716 - RNA, 22 nt, Human
cacugcagcaccaugcagggcu

SEQ ID NO: 248717 - RNA, 22 nt, Human
agcugcccugggucuugcugcu

SEQ ID NO: 248718 - RNA, 22 nt, Human
gaagccagauuuggggcauauc

SEQ ID NO: 248719 - RNA, 22 nt, Human
acucaaauagcaacggugagaa

SEQ ID NO: 248720 - RNA, 23 nt, Human
ccugggcauuggcugcagcuucu

SEQ ID NO: 248721 - RNA, 20 nt, Human
ucccuggggcccuacuuccu

SEQ ID NO: 248722 - RNA, 22 nt, Human
uacuuagagcgauaauuuauac

SEQ ID NO: 248723 - RNA, 22 nt, Human
augaaaguaccuguaauauguu

SEQ ID NO: 248724 - RNA, 22 nt, Human
guccuggcuagucguccgcgac

SEQ ID NO: 248725 - RNA, 22 nt, Human
agagaagcagggagucaucugu

SEQ ID NO: 248726 - RNA, 22 nt, Human
ucaguaauauucuuuaaaauac

SEQ ID NO: 248727 - RNA, 22 nt, Human
gacacuguuauggugagguaag

SEQ ID NO: 248728 - RNA, 22 nt, Human
agugauauuagcaaaugguuau

SEQ ID NO: 248729 - RNA, 22 nt, Human
cauggcccucuucuggagcaau

SEQ ID NO: 248730 - RNA, 22 nt, Human
caaagcaaggcucaguuugaac

SEQ ID NO: 248731 - RNA, 19 nt, Human
cuggucugucaugcucccc

SEQ ID NO: 248732 - RNA, 22 nt, Human
agugcgugggcaggcauggaag

SEQ ID NO: 248733 - RNA, 22 nt, Human
uaacugguauaucaguguacac

SEQ ID NO: 248734 - RNA, 22 nt, Human
gcucuggguagccacugccugg

SEQ ID NO: 248735 - RNA, 22 nt, Human
gugcauuucucauacacuaaau

SEQ ID NO: 248736 - RNA, 22 nt, Human
agcagguggugggccagauuug

SEQ ID NO: 248737 - RNA, 22 nt, Human
uuguaaagcugauuagaaagcc

SEQ ID NO: 248738 - RNA, 22 nt, Human
ucagagguaaaaacucacugua

SEQ ID NO: 248739 - RNA, 22 nt, Human
uguucucuuuuccugcugagcc

SEQ ID NO: 248740 - RNA, 22 nt, Human
augaauguaaguggauuucuuu

SEQ ID NO: 248741 - RNA, 22 nt, Human
aguuguauacacuuaggcagau

SEQ ID NO: 248742 - RNA, 22 nt, Human
ugagcccuaauuuacaacaucu

SEQ ID NO: 248743 - RNA, 22 nt, Human
ucuuauugguaaugauggcauu

SEQ ID NO: 248744 - RNA, 22 nt, Human
cugguuuaagcuuauauaguug

SEQ ID NO: 248745 - RNA, 21 nt, Human
uaagaacauuaucuucuuccu

SEQ ID NO: 248746 - RNA, 22 nt, Human
ggcaagucaggaaguugacauu

SEQ ID NO: 248747 - RNA, 22 nt, Human
augcaucuuuucaagguauuuc

SEQ ID NO: 248748 - RNA, 22 nt, Human
cccaguggggagcuucugccuu

SEQ ID NO: 248749 - RNA, 22 nt, Human
caugacaauaagccagcagaaa

SEQ ID NO: 248750 - RNA, 23 nt, Human
agaggccaacuucuugccccucc

SEQ ID NO: 248751 - RNA, 22 nt, Human
ggccuucugccuuucagcaaug

SEQ ID NO: 248752 - RNA, 22 nt, Human
aaauacuagaauucagaguuga

SEQ ID NO: 248753 - RNA, 22 nt, Human
ccaggccaaauucagucagcag

SEQ ID NO: 248754 - RNA, 22 nt, Human
ugagcagaacacgggauccaug

SEQ ID NO: 248755 - RNA, 22 nt, Human
agaauccuggagaagcuguacc

SEQ ID NO: 248756 - RNA, 23 nt, Human
acuaaauggggcuuugcuuaaag

SEQ ID NO: 248757 - RNA, 22 nt, Human
aguggcuaauaacagcuaaaca

SEQ ID NO: 248758 - RNA, 22 nt, Human
agauuucucuuucccuggcuga

SEQ ID NO: 248759 - RNA, 22 nt, Human
caaggcuuagguggcucccugu

SEQ ID NO: 248760 - RNA, 22 nt, Human
augcaaaugucaccacuucuaa

SEQ ID NO: 248761 - RNA, 22 nt, Human
uaccauuuacuugaaaauaaaa

SEQ ID NO: 248762 - RNA, 22 nt, Human
ccagcagagucuaggaaggagg

SEQ ID NO: 248763 - RNA, 22 nt, Human
caggcccauucuaggcuugcua

SEQ ID NO: 248764 - RNA, 22 nt, Human
auggccaguguuucccucaguu

SEQ ID NO: 248765 - RNA, 22 nt, Human
ucagugcagugaaagguuuacu

SEQ ID NO: 248766 - RNA, 22 nt, Human
cucugcccucgcacaucugcca

SEQ ID NO: 248767 - RNA, 22 nt, Human
uuucuacagaagauacacugcu

SEQ ID NO: 248768 - RNA, 22 nt, Human
cgccugggaguccacaccugcu

SEQ ID NO: 248769 - RNA, 22 nt, Human
aggcuguguucugcccucuccc

SEQ ID NO: 248770 - RNA, 22 nt, Human
uuuagggacaagggucuggggu

SEQ ID NO: 248771 - RNA, 22 nt, Human
cuccugaggacuucuauugggu

SEQ ID NO: 248772 - RNA, 22 nt, Human
ggggucugggcuuagcuggaau

SEQ ID NO: 248773 - RNA, 22 nt, Human
uacaguucacaguaucauaaau

SEQ ID NO: 248774 - RNA, 22 nt, Human
auacauacauguacacauaaau

SEQ ID NO: 248775 - RNA, 22 nt, Human
ucacaucucccuggaggacaca

SEQ ID NO: 248776 - RNA, 22 nt, Human
gggucucucucggcuccacgcg

SEQ ID NO: 248777 - RNA, 22 nt, Human
cccagccaaggugcugguguug

SEQ ID NO: 248778 - RNA, 22 nt, Human
aacugucaucuuucaaggaaga

SEQ ID NO: 248779 - RNA, 22 nt, Human
cacuugaaguuugggggacucu

SEQ ID NO: 248780 - RNA, 22 nt, Human
ucagggcauacucuucaagguc

SEQ ID NO: 248781 - RNA, 22 nt, Human
uugggaaauauggauuguuauu

SEQ ID NO: 248782 - RNA, 22 nt, Human
augcagcuucaggauuaugaug

SEQ ID NO: 248783 - RNA, 22 nt, Human
aaugauaccgccaauauuacca

SEQ ID NO: 248784 - RNA, 22 nt, Human
gagaggcuccgccacugcucag

SEQ ID NO: 248785 - RNA, 22 nt, Human
uuugcaaauuagccacccuguu

SEQ ID NO: 248786 - RNA, 22 nt, Human
acuuccaaagaagugauuacag

SEQ ID NO: 248787 - RNA, 22 nt, Human
auggcccaggccuccuguggcu

SEQ ID NO: 248788 - RNA, 22 nt, Human
agcaacagcccugagguucaug

SEQ ID NO: 248789 - RNA, 22 nt, Human
cagcuucuauuuaucuuugugu

SEQ ID NO: 248790 - RNA, 21 nt, Human
uggcaggcagcuggaagcuug

SEQ ID NO: 248791 - RNA, 22 nt, Human
aggcugaggcagguggaucacc

SEQ ID NO: 248792 - RNA, 22 nt, Human
uucaggaauaauuaucauauga

SEQ ID NO: 248793 - RNA, 22 nt, Human
cuucuuaaucccuuauauauuu

SEQ ID NO: 248794 - RNA, 20 nt, Human
aaagcaguaugcaaguagag

SEQ ID NO: 248795 - RNA, 18 nt, Human
uuucacaaccuccagagg

SEQ ID NO: 248796 - RNA, 22 nt, Human
gagacugguguuugcugggcug

SEQ ID NO: 248797 - RNA, 22 nt, Human
uuauucagcagggacuuccuuu

SEQ ID NO: 248798 - RNA, 23 nt, Human
ucuaaaauucaucauuuacguuc

SEQ ID NO: 248799 - RNA, 22 nt, Human
ggacaggugacugcccagagug

SEQ ID NO: 248800 - RNA, 22 nt, Human
auuuaauuuauagauguggaua

SEQ ID NO: 248801 - RNA, 22 nt, Human
cucagggccaaggaugcuguug

SEQ ID NO: 248802 - RNA, 22 nt, Human
aguccuuugggaaaaaugacua

SEQ ID NO: 248803 - RNA, 20 nt, Human
cuugcccagggucuccugcc

SEQ ID NO: 248804 - RNA, 22 nt, Human
gcucaggagcugacagccucaa

SEQ ID NO: 248805 - RNA, 19 nt, Human
cuggccacaccugcugguu

SEQ ID NO: 248806 - RNA, 22 nt, Human
agggcagaccacgugcaaggau

SEQ ID NO: 248807 - RNA, 22 nt, Human
ccccugccagcuaucccugaac

SEQ ID NO: 248808 - RNA, 22 nt, Human
cacaagauggucacauaagugc

SEQ ID NO: 248809 - RNA, 22 nt, Human
auucacacacauuuagagcaga

SEQ ID NO: 248810 - RNA, 22 nt, Human
uccacagaauguaagauccaca

SEQ ID NO: 248811 - RNA, 22 nt, Human
cuccuuccccuacucagcaucc

SEQ ID NO: 248812 - RNA, 22 nt, Human
cuggccuggggccucagcugcu

SEQ ID NO: 248813 - RNA, 22 nt, Human
caaaacauucucugcagcaggg

SEQ ID NO: 248814 - RNA, 22 nt, Human
uguauuuucagaguggcauuuc

SEQ ID NO: 248815 - RNA, 22 nt, Human
aaaggcuugguucuuugaugac

SEQ ID NO: 248816 - RNA, 21 nt, Human
agcaggcaaaggugaagucuu

SEQ ID NO: 248817 - RNA, 22 nt, Human
ucuggcuucuccuagagcaaug

SEQ ID NO: 248818 - RNA, 22 nt, Human
uagaggagcggcgagcugagcu

SEQ ID NO: 248819 - RNA, 22 nt, Human
uugggggcagagggagcaucug

SEQ ID NO: 248820 - RNA, 22 nt, Human
aguuacucaaggcugauauaag

SEQ ID NO: 248821 - RNA, 22 nt, Human
auaaacagaguaguugcuacug

SEQ ID NO: 248822 - RNA, 22 nt, Human
ccuggcucaaggcgaggacucc

SEQ ID NO: 248823 - RNA, 23 nt, Human
uaggggaaaaaucuucugcaauu

SEQ ID NO: 248824 - RNA, 22 nt, Human
ugggucccaggaaggaccagca

SEQ ID NO: 248825 - RNA, 22 nt, Human
cacaccagagguuaccugcaaa

SEQ ID NO: 248826 - RNA, 22 nt, Human
aggcaggcccugggccaucccg

SEQ ID NO: 248827 - RNA, 22 nt, Human
agcagggcaguuaaaggguccu

SEQ ID NO: 248828 - RNA, 22 nt, Human
ugugacccagacucaucuucuu

SEQ ID NO: 248829 - RNA, 22 nt, Human
cuuaucagauuaucugggcugu

SEQ ID NO: 248830 - RNA, 22 nt, Human
agacagugauguaagcaggagu

SEQ ID NO: 248831 - RNA, 22 nt, Human
gggcaggugaccucuuguccug

SEQ ID NO: 248832 - RNA, 21 nt, Human
cccaggcugaauuaaaaauau

SEQ ID NO: 248833 - RNA, 22 nt, Human
gccuucccucucauccugcugg

SEQ ID NO: 248834 - RNA, 22 nt, Human
ggagacacauauacagaaagag

SEQ ID NO: 248835 - RNA, 22 nt, Human
cugguuuagugaaauaggccag

SEQ ID NO: 248836 - RNA, 22 nt, Human
aggcucuggaguguggugcugg

SEQ ID NO: 248837 - RNA, 22 nt, Human
uccagcagacucaucagcaagg

SEQ ID NO: 248838 - RNA, 22 nt, Human
cagucagaaggaagaugcuuaa

SEQ ID NO: 248839 - RNA, 22 nt, Human
caguuaaaagguaugcuaccaa

SEQ ID NO: 248840 - RNA, 22 nt, Human
cucagccaugucaugccuaccu

SEQ ID NO: 248841 - RNA, 22 nt, Human
caggaaaccgcaucccaguggg

SEQ ID NO: 248842 - RNA, 22 nt, Human
uagauaucagaaauagaauuua

SEQ ID NO: 248843 - RNA, 22 nt, Human
cauucauucagcaacuguuauu

SEQ ID NO: 248844 - RNA, 22 nt, Human
uauuucacagcagcucauuuaa

SEQ ID NO: 248845 - RNA, 22 nt, Human
gagaaggcugauccuuggaguu

SEQ ID NO: 248846 - RNA, 22 nt, Human
uccaggcuggacaugaggcggg

SEQ ID NO: 248847 - RNA, 22 nt, Human
auuugagaugguaaauaacuuu

SEQ ID NO: 248848 - RNA, 22 nt, Human
ucagcuuugcaaguuagaaaau

SEQ ID NO: 248849 - RNA, 22 nt, Human
gaaugauauauuagcagauuuu

SEQ ID NO: 248850 - RNA, 22 nt, Human
ugucagaggcucagggucucag

SEQ ID NO: 248851 - RNA, 22 nt, Human
aaagacauuagcuuagauguca

SEQ ID NO: 248852 - RNA, 22 nt, Human
cauacuuucuuuuucacgcaua

SEQ ID NO: 248853 - RNA, 21 nt, Human
cacucaggguaugugccaggc

SEQ ID NO: 248854 - RNA, 22 nt, Human
uuuaaaaguuaucaucugucca

SEQ ID NO: 248855 - RNA, 20 nt, Human
gcuuccagaggaggccccgu

SEQ ID NO: 248856 - RNA, 19 nt, Human
uauuuacuucuugauugca

SEQ ID NO: 248857 - RNA, 22 nt, Human
uuucauaaucugucaagugggg

SEQ ID NO: 248858 - RNA, 22 nt, Human
uccaggaugcccgcuuuugcuu

SEQ ID NO: 248859 - RNA, 19 nt, Human
ugguggaggugcaccugac

SEQ ID NO: 248860 - RNA, 18 nt, Human
cugaaggauccaggugua

SEQ ID NO: 248861 - RNA, 22 nt, Human
aaaacaguuuaggcaucacagu

SEQ ID NO: 248862 - RNA, 23 nt, Human
ucucaugucuuuccuacaagcau

SEQ ID NO: 248863 - RNA, 22 nt, Human
ucacgugagggaccugugucug

SEQ ID NO: 248864 - RNA, 22 nt, Human
uggaagggaaaguuuggggucc

SEQ ID NO: 248865 - RNA, 20 nt, Human
uuucuggguacucucccucu

SEQ ID NO: 248866 - RNA, 19 nt, Human
aagggcugggcaccucacu

SEQ ID NO: 248867 - RNA, 22 nt, Human
cacagguguccaauaccugcuu

SEQ ID NO: 248868 - RNA, 22 nt, Human
cuggugagacgguugacaggag

SEQ ID NO: 248869 - RNA, 22 nt, Human
uauuggugggggcagagagaga

SEQ ID NO: 248870 - RNA, 23 nt, Human
ucauuucauccagccuugagagu

SEQ ID NO: 248871 - RNA, 22 nt, Human
ugcaucaaauucugaaauuagc

SEQ ID NO: 248872 - RNA, 22 nt, Human
ggucagggcucuuccaguggcu

SEQ ID NO: 248873 - RNA, 23 nt, Human
ugggagcucaagggaggcugccc

SEQ ID NO: 248874 - RNA, 22 nt, Human
ugggaagauggagugacaggca

SEQ ID NO: 248875 - RNA, 22 nt, Human
gagucucugcuauguuuucucu

SEQ ID NO: 248876 - RNA, 22 nt, Human
ggcugcuggcauugagguaggu

SEQ ID NO: 248877 - RNA, 22 nt, Human
uucuggaaguuggaaauagcag

SEQ ID NO: 248878 - RNA, 22 nt, Human
aagcccucagagccucuuugac

SEQ ID NO: 248879 - RNA, 22 nt, Human
agccuggguuaggguucuuccc

SEQ ID NO: 248880 - RNA, 22 nt, Human
ucagacauauuuuuaacaaagu

SEQ ID NO: 248881 - RNA, 22 nt, Human
caucauuuuauuaaccaagaaa

SEQ ID NO: 248882 - RNA, 22 nt, Human
agucugucuaauauuauucagg

SEQ ID NO: 248883 - RNA, 22 nt, Human
gcuuugcuggcuugaaaugcug

SEQ ID NO: 248884 - RNA, 22 nt, Human
gcaggggcugagcaccagcggg

SEQ ID NO: 248885 - RNA, 22 nt, Human
gugaauuaggcuauggcagagg

SEQ ID NO: 248886 - RNA, 22 nt, Human
gguccuuugccaucucuccacc

SEQ ID NO: 248887 - RNA, 22 nt, Human
uaaagaauaauacccauggagc

SEQ ID NO: 248888 - RNA, 22 nt, Human
cagggcaaagucuucuagaacc

SEQ ID NO: 248889 - RNA, 22 nt, Human
aauauauuugaaucaggaacaa

SEQ ID NO: 248890 - RNA, 22 nt, Human
ggcacugcccacccucacaggg

SEQ ID NO: 248891 - RNA, 22 nt, Human
ucuuuuagaaaaguugaaugua

SEQ ID NO: 248892 - RNA, 22 nt, Human
ccugggcagguguggcuucccc

SEQ ID NO: 248893 - RNA, 22 nt, Human
ugcuucaaguugaaauauucuu

SEQ ID NO: 248894 - RNA, 22 nt, Human
ggccaggagauggacaccacau

SEQ ID NO: 248895 - RNA, 22 nt, Human
acauaaguuauggauaaaaugu

SEQ ID NO: 248896 - RNA, 22 nt, Human
ugccugcaagaguuggggcuac

SEQ ID NO: 248897 - RNA, 22 nt, Human
auaucugguugguaauauaaca

SEQ ID NO: 248898 - RNA, 22 nt, Human
aggcuucacgaugggugaggug

SEQ ID NO: 248899 - RNA, 22 nt, Human
uggucuuugagagaaguugauu

SEQ ID NO: 248900 - RNA, 22 nt, Human
aagggcugagaaguggggcugg

SEQ ID NO: 248901 - RNA, 22 nt, Human
acccagagcccuuagcacagac

SEQ ID NO: 248902 - RNA, 22 nt, Human
cagaggaaaguauuucuggaag

SEQ ID NO: 248903 - RNA, 18 nt, Human
agcugcagaccaggaggu

SEQ ID NO: 248904 - RNA, 22 nt, Human
cucuuuggauguuuaugauaag

SEQ ID NO: 248905 - RNA, 22 nt, Human
cuggauggucccaugagcagcu

SEQ ID NO: 248906 - RNA, 17 nt, Human
gcuggcuucuccuugcu

SEQ ID NO: 248907 - RNA, 22 nt, Human
uccuggcugaguucccaagucg

SEQ ID NO: 248908 - RNA, 22 nt, Human
accuccccacaugguagugagu

SEQ ID NO: 248909 - RNA, 22 nt, Human
gcagggaggaagagaugcuucc

SEQ ID NO: 248910 - RNA, 22 nt, Human
aaaaagauguccugaaguuuag

SEQ ID NO: 248911 - RNA, 22 nt, Human
auuuugauaaucauguuagaga

SEQ ID NO: 248912 - RNA, 20 nt, Human
ccuuuauuauuuguaugaug

SEQ ID NO: 248913 - RNA, 22 nt, Human
uuaacacugauuguagagacac

SEQ ID NO: 248914 - RNA, 19 nt, Human
ugcaggaggacugagcaga

SEQ ID NO: 248915 - RNA, 22 nt, Human
ucagcaggcugucagcaggggc

SEQ ID NO: 248916 - RNA, 22 nt, Human
auggggggaugaaggaguccaa

SEQ ID NO: 248917 - RNA, 22 nt, Human
aggguagguguaagauagcccu

SEQ ID NO: 248918 - RNA, 22 nt, Human
aagaaucuuuccaguuuugaug

SEQ ID NO: 248919 - RNA, 22 nt, Human
guccaucuagaauuuauuucua

SEQ ID NO: 248920 - RNA, 22 nt, Human
ccugccugccugcuggccggga

SEQ ID NO: 248921 - RNA, 22 nt, Human
cuauuguuucuaugcucugagg

SEQ ID NO: 248922 - RNA, 22 nt, Human
uucaugaauggaaucaaugcuc

SEQ ID NO: 248923 - RNA, 22 nt, Human
uccagggagagccgcugcucca

SEQ ID NO: 248924 - RNA, 22 nt, Human
cagcagagaaauuaaacuucug

SEQ ID NO: 248925 - RNA, 22 nt, Human
gcuccuguuuguuuguuccuga

SEQ ID NO: 248926 - RNA, 22 nt, Human
aggggaagauuauacuuuugaa

SEQ ID NO: 248927 - RNA, 22 nt, Human
acagucucuugcuugaauacua

SEQ ID NO: 248928 - RNA, 20 nt, Human
ucucugaguuuccuaauuug

SEQ ID NO: 248929 - RNA, 22 nt, Human
uugcagggauaaaacaagugaa

SEQ ID NO: 248930 - RNA, 22 nt, Human
ggagcugugcugggugaucagg

SEQ ID NO: 248931 - RNA, 22 nt, Human
aagugacauaccuuacauaugu

SEQ ID NO: 248932 - RNA, 17 nt, Human
ggccacagagcuugggg

SEQ ID NO: 248933 - RNA, 20 nt, Human
auccaucauguccaugacuu

SEQ ID NO: 248934 - RNA, 19 nt, Human
uuccugugcugcugugucc

SEQ ID NO: 248935 - RNA, 22 nt, Human
cagagcacugcuuggaggauuu

SEQ ID NO: 248936 - RNA, 22 nt, Human
cagcucuucagugccugagaua

SEQ ID NO: 248937 - RNA, 23 nt, Human
ugcuucucugcuugacaguucug

SEQ ID NO: 248938 - RNA, 22 nt, Human
uugagaaauaagcaugucuaga

SEQ ID NO: 248939 - RNA, 22 nt, Human
auugauucuguaagucaacaau

SEQ ID NO: 248940 - RNA, 22 nt, Human
gugcaggggaucagguugcagc

SEQ ID NO: 248941 - RNA, 22 nt, Human
accugcugugauucuaauuggc

SEQ ID NO: 248942 - RNA, 19 nt, Human
uggucccauacugcuggcc

SEQ ID NO: 248943 - RNA, 22 nt, Human
uaaagcugcaggcucagaaaac

SEQ ID NO: 248944 - RNA, 22 nt, Human
auauccaagaaacaauuaauuc

SEQ ID NO: 248945 - RNA, 22 nt, Human
aggaagcuuuaugaccagcuaa

SEQ ID NO: 248946 - RNA, 22 nt, Human
gccuggcugggcaccaggggag

SEQ ID NO: 248947 - RNA, 23 nt, Human
uagagcagggaaaucugucagag

SEQ ID NO: 248948 - RNA, 22 nt, Human
uuagauguggacuuauguuauu

SEQ ID NO: 248949 - RNA, 22 nt, Human
acauuucucccugcaugccugc

SEQ ID NO: 248950 - RNA, 22 nt, Human
acaggcuugcacuaggguggca

SEQ ID NO: 248951 - RNA, 22 nt, Human
agucugguaauguagcucaacc

SEQ ID NO: 248952 - RNA, 19 nt, Human
ggccaggcugacugugguc

SEQ ID NO: 248953 - RNA, 22 nt, Human
ccauuuaguaaggaagaacagc

SEQ ID NO: 248954 - RNA, 22 nt, Human
aaaggcuugcgauuccuuguaa

SEQ ID NO: 248955 - RNA, 22 nt, Human
agaaaaagucaaggaauuggac

SEQ ID NO: 248956 - RNA, 22 nt, Human
aagcacauuaaggaacauugaa

SEQ ID NO: 248957 - RNA, 22 nt, Human
cuuucuuaauuuuuaaggacac

SEQ ID NO: 248958 - RNA, 22 nt, Human
ucaggcccuuugcugcugcccc

SEQ ID NO: 248959 - RNA, 21 nt, Human
agguuccagcagccagagaau

SEQ ID NO: 248960 - RNA, 19 nt, Human
cuguacagguugcuucugg

SEQ ID NO: 248961 - RNA, 22 nt, Human
ccucuggcuguaccacuggcac

SEQ ID NO: 248962 - RNA, 22 nt, Human
guaacacuuggcugcaaccugg

SEQ ID NO: 248963 - RNA, 22 nt, Human
gagaggcccuguggucccagcu

SEQ ID NO: 248964 - RNA, 22 nt, Human
agagcugguuuacucaggaauu

SEQ ID NO: 248965 - RNA, 22 nt, Human
aggggcugggacagagccaagc

SEQ ID NO: 248966 - RNA, 22 nt, Human
ucuggcaggaccaugaagcgua

SEQ ID NO: 248967 - RNA, 22 nt, Human
uagaaucuggaaggggcuauuc

SEQ ID NO: 248968 - RNA, 22 nt, Human
ucauccaguaugacuggugucu

SEQ ID NO: 248969 - RNA, 22 nt, Human
aagcaagcaguguggaauuuua

SEQ ID NO: 248970 - RNA, 18 nt, Human
gacagcuguccugagccc

SEQ ID NO: 248971 - RNA, 22 nt, Human
aaauuagauaugugugagacuc

SEQ ID NO: 248972 - RNA, 23 nt, Human
ccagagcucuuucaugcuuccau

SEQ ID NO: 248973 - RNA, 20 nt, Human
acuccugguaacuuuuguga

SEQ ID NO: 248974 - RNA, 22 nt, Human
uuugcuuucuugauucagauua

SEQ ID NO: 248975 - RNA, 22 nt, Human
cacccaggacaggccagaugug

SEQ ID NO: 248976 - RNA, 22 nt, Human
uuuguacauauauaaaaucugu

SEQ ID NO: 248977 - RNA, 22 nt, Human
cugggccugguguggcaccugc

SEQ ID NO: 248978 - RNA, 22 nt, Human
aagagauguggaaucauuuaca

SEQ ID NO: 248979 - RNA, 22 nt, Human
gggcagcucagccaccaugcag

SEQ ID NO: 248980 - RNA, 22 nt, Human
ggcucugaacauggggaggagu

SEQ ID NO: 248981 - RNA, 22 nt, Human
agaauaaaugcuaccuaucaca

SEQ ID NO: 248982 - RNA, 22 nt, Human
aagaacaugggugugggcauuc

SEQ ID NO: 248983 - RNA, 22 nt, Human
aagugaauuucauuccaauucu

SEQ ID NO: 248984 - RNA, 22 nt, Human
cagaggacuucccacucaucug

SEQ ID NO: 248985 - RNA, 17 nt, Human
ucuggccuuccugaacu

SEQ ID NO: 248986 - RNA, 22 nt, Human
gcaggcucaaaagcugguagga

SEQ ID NO: 248987 - RNA, 22 nt, Human
agccuggccaggccugcccagg

SEQ ID NO: 248988 - RNA, 22 nt, Human
ccugccaggccagugagcuucc

SEQ ID NO: 248989 - RNA, 23 nt, Human
ugacaggcugcuucuggcugagg

SEQ ID NO: 248990 - RNA, 22 nt, Human
gaggccuggaccagccacagag

SEQ ID NO: 248991 - RNA, 22 nt, Human
uacagggaccaauaauaacuau

SEQ ID NO: 248992 - RNA, 22 nt, Human
uacccucucccgguccagcuuu

SEQ ID NO: 248993 - RNA, 22 nt, Human
guaggguuggagagcacaacca

SEQ ID NO: 248994 - RNA, 22 nt, Human
auuagugucugugaauaauucu

SEQ ID NO: 248995 - RNA, 22 nt, Human
ugagccagccuugcagcugugc

SEQ ID NO: 248996 - RNA, 23 nt, Human
guuccuucauguggucauugguu

SEQ ID NO: 248997 - RNA, 22 nt, Human
ggguggcaggauuggcaggagu

SEQ ID NO: 248998 - RNA, 22 nt, Human
ggaaucuuugaaggauuuuaag

SEQ ID NO: 248999 - RNA, 22 nt, Human
ugggccucuggguuagucccua

SEQ ID NO: 249000 - RNA, 22 nt, Human
guccuggccucuggggguaugg

SEQ ID NO: 249001 - RNA, 22 nt, Human
uagauuuguuuccuucucucca

SEQ ID NO: 249002 - RNA, 22 nt, Human
uccaggacuuggcaggagauga

SEQ ID NO: 249003 - RNA, 22 nt, Human
acacaguggugagucuggaccu

SEQ ID NO: 249004 - RNA, 22 nt, Human
ggagggcacaggaccagaaauc

SEQ ID NO: 249005 - RNA, 22 nt, Human
gagcuguggaaggcagggacca

SEQ ID NO: 249006 - RNA, 22 nt, Human
cuggcugucuuggaggaaggag

SEQ ID NO: 249007 - RNA, 22 nt, Human
uucacauuauaaucaguucugc

SEQ ID NO: 249008 - RNA, 22 nt, Human
aguuuaacuuuggaaaacuaua

SEQ ID NO: 249009 - RNA, 22 nt, Human
agcagccagagaaugaugcagu

SEQ ID NO: 249010 - RNA, 22 nt, Human
acagaauacuacagacugguua

SEQ ID NO: 249011 - RNA, 22 nt, Human
ggaagacugcauggcauaguga

SEQ ID NO: 249012 - RNA, 22 nt, Human
aucaccaguaaguuuucaguuu

SEQ ID NO: 249013 - RNA, 22 nt, Human
cucccuccaaauaagacucggg

SEQ ID NO: 249014 - RNA, 22 nt, Human
cuguccauggugcuggacgguc

SEQ ID NO: 249015 - RNA, 22 nt, Human
acagaaguggcuucaaagagca

SEQ ID NO: 249016 - RNA, 22 nt, Human
uuuucuguaagaggacuuuaau

SEQ ID NO: 249017 - RNA, 22 nt, Human
aucugaagggaaguggaaggca

SEQ ID NO: 249018 - RNA, 22 nt, Human
ccuggagggacccuggcccugu

SEQ ID NO: 249019 - RNA, 22 nt, Human
ucaggcagcauuaaacuucagc

SEQ ID NO: 249020 - RNA, 22 nt, Human
agaagcagacucugaggcaagg

SEQ ID NO: 249021 - RNA, 22 nt, Human
gguguucaaaugaacacaugca

SEQ ID NO: 249022 - RNA, 21 nt, Human
gcuuccaagauggcaccuuga

SEQ ID NO: 249023 - RNA, 22 nt, Human
auguaccucugcauuccugccu

SEQ ID NO: 249024 - RNA, 18 nt, Human
cugauagggguggcagcu

SEQ ID NO: 249025 - RNA, 17 nt, Human
caguuggagacaagucc

SEQ ID NO: 249026 - RNA, 18 nt, Human
ccagggagcuuauuagga

SEQ ID NO: 249027 - RNA, 22 nt, Human
aagccaauggauugguugcuuu

SEQ ID NO: 249028 - RNA, 22 nt, Human
agauggucugguuauuuuuagu

SEQ ID NO: 249029 - RNA, 22 nt, Human
acugguuuuggaaaucaguaca

SEQ ID NO: 249030 - RNA, 22 nt, Human
ucuuccagcuccccacgguguc

SEQ ID NO: 249031 - RNA, 20 nt, Human
cugagcccagaucccagguc

SEQ ID NO: 249032 - RNA, 22 nt, Human
guccaugguugcuuucauguaa

SEQ ID NO: 249033 - RNA, 22 nt, Human
cugagaggcagccagagaaaau

SEQ ID NO: 249034 - RNA, 22 nt, Human
uacagaggagaccaaggcucag

SEQ ID NO: 249035 - RNA, 22 nt, Human
caaaugaaaauggcgucuugga

SEQ ID NO: 249036 - RNA, 22 nt, Human
ccucaaauuggcauuaauuaag

SEQ ID NO: 249037 - RNA, 22 nt, Human
uggcccagagcacugcugggca

SEQ ID NO: 249038 - RNA, 22 nt, Human
agcuacagcuguacucugcagg

SEQ ID NO: 249039 - RNA, 21 nt, Human
ggcugcucaccuaggucccaa

SEQ ID NO: 249040 - RNA, 22 nt, Human
gcauucuucacuaggugagagc

SEQ ID NO: 249041 - RNA, 22 nt, Human
uaggcugggccugccuuccagg

SEQ ID NO: 249042 - RNA, 22 nt, Human
aaggccuugccgaaggaugcca

SEQ ID NO: 249043 - RNA, 22 nt, Human
accugccagaauccaagccaca

SEQ ID NO: 249044 - RNA, 22 nt, Human
ucaggagcuauggacugucaaa

SEQ ID NO: 249045 - RNA, 22 nt, Human
uugaaugaaauugcuguguuau

SEQ ID NO: 249046 - RNA, 22 nt, Human
agcaggcugaugggcaugcuug

SEQ ID NO: 249047 - RNA, 22 nt, Human
gugaacaguucauuuuaucaug

SEQ ID NO: 249048 - RNA, 22 nt, Human
guggcugcaucggggugaccag

SEQ ID NO: 249049 - RNA, 22 nt, Human
aguuuuguaauucucaaaaaua

SEQ ID NO: 249050 - RNA, 22 nt, Human
uugagcucccgcuucuucuuug

SEQ ID NO: 249051 - RNA, 22 nt, Human
agcugccaucugaagaacugca

SEQ ID NO: 249052 - RNA, 22 nt, Human
acugaaugaggggugaucuggg

SEQ ID NO: 249053 - RNA, 22 nt, Human
uggaggcagguggaggagugaa

SEQ ID NO: 249054 - RNA, 22 nt, Human
cagggccucauggccggggugc

SEQ ID NO: 249055 - RNA, 22 nt, Human
uacaaaugaaccaacuuugaug

SEQ ID NO: 249056 - RNA, 22 nt, Human
aaagcagcagcacguggaagag

SEQ ID NO: 249057 - RNA, 19 nt, Human
aggagccuugagcagugag

SEQ ID NO: 249058 - RNA, 22 nt, Human
acuuagaaauucaguuuuguca

SEQ ID NO: 249059 - RNA, 22 nt, Human
agaggggcucaagcaguggucu

SEQ ID NO: 249060 - RNA, 22 nt, Human
ugagaaaacucaaagacagauc

SEQ ID NO: 249061 - RNA, 22 nt, Human
cacucugagcccaagcaggcug

SEQ ID NO: 249062 - RNA, 22 nt, Human
cagugcugccaaagggaccuug

SEQ ID NO: 249063 - RNA, 20 nt, Human
gaacuugggcaaguggcuua

SEQ ID NO: 249064 - RNA, 22 nt, Human
cuugccucugcuaaugguuucu

SEQ ID NO: 249065 - RNA, 23 nt, Human
gagugcagaauagacaugcagug

SEQ ID NO: 249066 - RNA, 21 nt, Human
gcucucagcugccugcugguu

SEQ ID NO: 249067 - RNA, 22 nt, Human
aaguacauguuguucaaaagcc

SEQ ID NO: 249068 - RNA, 22 nt, Human
uaaaaugccagaccaguucacg

SEQ ID NO: 249069 - RNA, 22 nt, Human
ugggagcaguucagguguggcu

SEQ ID NO: 249070 - RNA, 22 nt, Human
aauauuauacagucaaccucuu

SEQ ID NO: 249071 - RNA, 23 nt, Human
ccagucucacguauacaggauuu

SEQ ID NO: 249072 - RNA, 22 nt, Human
gcucaugugugauuacaguuuu

SEQ ID NO: 249073 - RNA, 22 nt, Human
uuacaaagagaaguuguagaau

SEQ ID NO: 249074 - RNA, 22 nt, Human
uaacuacuaauugaugauaaug

SEQ ID NO: 249075 - RNA, 22 nt, Human
cuuuagaauuucauguuugguc

SEQ ID NO: 249076 - RNA, 22 nt, Human
cagagcucagagcugccaggca

SEQ ID NO: 249077 - RNA, 22 nt, Human
uuuuaauccaucugguaaaccu

SEQ ID NO: 249078 - RNA, 22 nt, Human
ucagcuccucagagccucaguu

SEQ ID NO: 249079 - RNA, 22 nt, Human
ucugccagugccagaguacaua

SEQ ID NO: 249080 - RNA, 22 nt, Human
cacaaauggccguguucaaaga

SEQ ID NO: 249081 - RNA, 22 nt, Human
gcccagaguggccacuuggcuc

SEQ ID NO: 249082 - RNA, 22 nt, Human
agccaugucacauauggucauc

SEQ ID NO: 249083 - RNA, 22 nt, Human
acuauacauaaaacauuugggu

SEQ ID NO: 249084 - RNA, 22 nt, Human
uuagagcugggauggauuuucc

SEQ ID NO: 249085 - RNA, 22 nt, Human
cagacaggaauucuggcguggu

SEQ ID NO: 249086 - RNA, 22 nt, Human
gagguugggaugagggauacag

SEQ ID NO: 249087 - RNA, 22 nt, Human
guccagccagcugguccuugcc

SEQ ID NO: 249088 - RNA, 22 nt, Human
auggcuggucucccauggaaaa

SEQ ID NO: 249089 - RNA, 22 nt, Human
gcugucuucacuuccugguuuc

SEQ ID NO: 249090 - RNA, 22 nt, Human
cuccuggacauggagcggagga

SEQ ID NO: 249091 - RNA, 20 nt, Human
aggggucuagcagcagugcu

SEQ ID NO: 249092 - RNA, 22 nt, Human
cagcacauuuacucagcccuca

SEQ ID NO: 249093 - RNA, 21 nt, Human
caggccccaggccuggggugc

SEQ ID NO: 249094 - RNA, 22 nt, Human
ugauucaauuaucugaugcuuu

SEQ ID NO: 249095 - RNA, 22 nt, Human
gccacagcucacguuccccauu

SEQ ID NO: 249096 - RNA, 21 nt, Human
aguucauacugaguaacaaaa

SEQ ID NO: 249097 - RNA, 22 nt, Human
uggggcugugagacuacaggau

SEQ ID NO: 249098 - RNA, 22 nt, Human
gcagcugcuguggcaucaagcu

SEQ ID NO: 249099 - RNA, 22 nt, Human
caggacaagagggaaucgauaa

SEQ ID NO: 249100 - RNA, 22 nt, Human
cagcuucuguuuauugugugcc

SEQ ID NO: 249101 - RNA, 22 nt, Human
uggcuggcugucaguaggcugu

SEQ ID NO: 249102 - RNA, 22 nt, Human
guccacagcuggccagggccuc

SEQ ID NO: 249103 - RNA, 22 nt, Human
uagcaggcuugugaauggagcc

SEQ ID NO: 249104 - RNA, 22 nt, Human
ggcucugaauuauuccugaguc

SEQ ID NO: 249105 - RNA, 22 nt, Human
aaacuucagugaaugacuuaug

SEQ ID NO: 249106 - RNA, 22 nt, Human
uuccugugccucaggucucagc

SEQ ID NO: 249107 - RNA, 22 nt, Human
cacagcagagggagccauugaa

SEQ ID NO: 249108 - RNA, 22 nt, Human
ucuuuggaugcguuacuuuuac

SEQ ID NO: 249109 - RNA, 22 nt, Human
cugcuuuauagggcuuccaugu

SEQ ID NO: 249110 - RNA, 22 nt, Human
gcaauaaacauguuugaugcgc

SEQ ID NO: 249111 - RNA, 22 nt, Human
ggacaaaauccaaacuucuuag

SEQ ID NO: 249112 - RNA, 22 nt, Human
auccacagugcagcaagggccc

SEQ ID NO: 249113 - RNA, 19 nt, Human
gcacaggacaucugaugga

SEQ ID NO: 249114 - RNA, 22 nt, Human
gcugucuugcucacucuugcag

SEQ ID NO: 249115 - RNA, 20 nt, Human
ugcagcagaagcccaugcuc

SEQ ID NO: 249116 - RNA, 22 nt, Human
auuuucauuuugcagggugaga

SEQ ID NO: 249117 - RNA, 22 nt, Human
cuggccaggcggccccugcaug

SEQ ID NO: 249118 - RNA, 22 nt, Human
aggcaguuguugcugagcagcu

SEQ ID NO: 249119 - RNA, 22 nt, Human
gaggcugguuugccuuuuggca

SEQ ID NO: 249120 - RNA, 22 nt, Human
acacauuuauuacaugcaugug

SEQ ID NO: 249121 - RNA, 22 nt, Human
caggcaaggaggcacugaggga

SEQ ID NO: 249122 - RNA, 22 nt, Human
cuccugaggggacaggacucau

SEQ ID NO: 249123 - RNA, 22 nt, Human
uccaggccaggguaagaggaga

SEQ ID NO: 249124 - RNA, 22 nt, Human
caccagcuaauuaaaacagcag

SEQ ID NO: 249125 - RNA, 22 nt, Human
caucuuugggcugcauggaagg

SEQ ID NO: 249126 - RNA, 22 nt, Human
gagggugucugcguaacuggca

SEQ ID NO: 249127 - RNA, 22 nt, Human
uuaaauuauugagggauuguca

SEQ ID NO: 249128 - RNA, 22 nt, Human
uucuuagagaugguuaaaaaua

SEQ ID NO: 249129 - RNA, 22 nt, Human
aaacaccaagagcuagcuauua

SEQ ID NO: 249130 - RNA, 22 nt, Human
aggcaucuauacauuauguuca

SEQ ID NO: 249131 - RNA, 20 nt, Human
gagcuacacaaaugcugcuu

SEQ ID NO: 249132 - RNA, 18 nt, Human
uaggccaguauacuuuuc

SEQ ID NO: 249133 - RNA, 22 nt, Human
acaugucucuucugaaagacaa

SEQ ID NO: 249134 - RNA, 22 nt, Human
aaaauaugaaguugucaguaug

SEQ ID NO: 249135 - RNA, 22 nt, Human
ucugagaacaugcuuugaucau

SEQ ID NO: 249136 - RNA, 22 nt, Human
uuuccuuccuaaggugaagcaa

SEQ ID NO: 249137 - RNA, 22 nt, Human
uucccucuuucacugugauuuu

SEQ ID NO: 249138 - RNA, 22 nt, Human
acagguggcuuauuggcugauu

SEQ ID NO: 249139 - RNA, 22 nt, Human
gucaaacaaauuaacauaucca

SEQ ID NO: 249140 - RNA, 22 nt, Human
ggaugucucccagcaccaaagu

SEQ ID NO: 249141 - RNA, 22 nt, Human
uggcucagaugcucuuccagug

SEQ ID NO: 249142 - RNA, 21 nt, Human
uacagaaugcgcuucagucug

SEQ ID NO: 249143 - RNA, 22 nt, Human
gagcugagggucuaggaggguu

SEQ ID NO: 249144 - RNA, 22 nt, Human
gauuucuacuugaacuugcuaa

SEQ ID NO: 249145 - RNA, 22 nt, Human
acagggagccccagcauuucca

SEQ ID NO: 249146 - RNA, 22 nt, Human
ccugaggucaugguccaguguu

SEQ ID NO: 249147 - RNA, 22 nt, Human
uacacauucuagggcacaguua

SEQ ID NO: 249148 - RNA, 22 nt, Human
aaaagccaagguccucuucaga

SEQ ID NO: 249149 - RNA, 22 nt, Human
agcagcauuaugauauaucuua

SEQ ID NO: 249150 - RNA, 22 nt, Human
guucuuuugguagagugugcau

SEQ ID NO: 249151 - RNA, 22 nt, Human
uaucuagaaacagaguuuuacu

SEQ ID NO: 249152 - RNA, 22 nt, Human
ccuagagcucugcuuuaucuaa

SEQ ID NO: 249153 - RNA, 22 nt, Human
uccaguuucauagcuaaggaac

SEQ ID NO: 249154 - RNA, 22 nt, Human
cuucuucaagagaaugggagac

SEQ ID NO: 249155 - RNA, 22 nt, Human
gcagccagggcuaagcugggga

SEQ ID NO: 249156 - RNA, 22 nt, Human
cuucuucuuuuaauaaaugucu

SEQ ID NO: 249157 - RNA, 23 nt, Human
aggaggccugaaacugaggcuga

SEQ ID NO: 249158 - RNA, 22 nt, Human
auaaaugaacauucacagagcu

SEQ ID NO: 249159 - RNA, 22 nt, Human
aguauuugauacagucuucuag

SEQ ID NO: 249160 - RNA, 22 nt, Human
aguucuuuuaccaaggcaaaug

SEQ ID NO: 249161 - RNA, 22 nt, Human
guuauaaaggugauaaugguca

SEQ ID NO: 249162 - RNA, 22 nt, Human
ccuuccaaaggagccacaucug

SEQ ID NO: 249163 - RNA, 22 nt, Human
cuggacccuguuucccuagguc

SEQ ID NO: 249164 - RNA, 22 nt, Human
auuacaaguagacuaacuuuca

SEQ ID NO: 249165 - RNA, 22 nt, Human
ugacaugugucuccuuccgucu

SEQ ID NO: 249166 - RNA, 22 nt, Human
aggcacagccucccuucacaug

SEQ ID NO: 249167 - RNA, 22 nt, Human
aaagguuaagguguucaagaaa

SEQ ID NO: 249168 - RNA, 22 nt, Human
caaggcuagaaguccaacauca

SEQ ID NO: 249169 - RNA, 22 nt, Human
ccauggccaggaaagccaaggu

SEQ ID NO: 249170 - RNA, 22 nt, Human
auguaauuuauguuauccauaa

SEQ ID NO: 249171 - RNA, 22 nt, Human
aagaugauagaucugucaaugu

SEQ ID NO: 249172 - RNA, 22 nt, Human
acagcugugagggucacuugua

SEQ ID NO: 249173 - RNA, 22 nt, Human
cccagggaggcccaggcucugc

SEQ ID NO: 249174 - RNA, 20 nt, Human
ccucaggccaguuuuaaagu

SEQ ID NO: 249175 - RNA, 22 nt, Human
ugcuggaggagaagguugcuca

SEQ ID NO: 249176 - RNA, 22 nt, Human
cuccuggccacguucuugcugg

SEQ ID NO: 249177 - RNA, 22 nt, Human
ucuccuggccuuuagguuaagg

SEQ ID NO: 249178 - RNA, 22 nt, Human
ugagacaguaucgccccaaggc

SEQ ID NO: 249179 - RNA, 22 nt, Human
cuguuauuuuccucugaacucu

SEQ ID NO: 249180 - RNA, 22 nt, Human
ugugugugacaaccuaguucag

SEQ ID NO: 249181 - RNA, 22 nt, Human
caaguguccaugauagucuuag

SEQ ID NO: 249182 - RNA, 23 nt, Human
cugggcugcuugagucccuggcu

SEQ ID NO: 249183 - RNA, 22 nt, Human
gccaagagaaugugagagaaau

SEQ ID NO: 249184 - RNA, 22 nt, Human
cccugggauaccagacaccaga

SEQ ID NO: 249185 - RNA, 22 nt, Human
uggcccuguccucauuucaucu

SEQ ID NO: 249186 - RNA, 22 nt, Human
aaugcacauauauguguauaca

SEQ ID NO: 249187 - RNA, 22 nt, Human
cuguaacuuagcaugguuacua

SEQ ID NO: 249188 - RNA, 22 nt, Human
uggcagagugcagaagaggcau

SEQ ID NO: 249189 - RNA, 22 nt, Human
uuugacucuuaaguggcucaau

SEQ ID NO: 249190 - RNA, 22 nt, Human
uccaggcauaaugcccaguggu

SEQ ID NO: 249191 - RNA, 20 nt, Human
cugcuugggacacugccaga

SEQ ID NO: 249192 - RNA, 19 nt, Human
ggaccagguccugggcagc

SEQ ID NO: 249193 - RNA, 22 nt, Human
gccaggagugucccacucauuu

SEQ ID NO: 249194 - RNA, 22 nt, Human
gaaaauguuuccuguuauuugc

SEQ ID NO: 249195 - RNA, 22 nt, Human
cccugugccagagaggcaggag

SEQ ID NO: 249196 - RNA, 22 nt, Human
uaagcuggagcuucccccgucc

SEQ ID NO: 249197 - RNA, 19 nt, Human
ccuuuggauuuguuuaguc

SEQ ID NO: 249198 - RNA, 22 nt, Human
gcucuguagugggcaugugauu

SEQ ID NO: 249199 - RNA, 22 nt, Human
ggagggagguuagauucaagcu

SEQ ID NO: 249200 - RNA, 22 nt, Human
uuggagggacugagcuucaguc

SEQ ID NO: 249201 - RNA, 22 nt, Human
cacagccuuacugagauccacu

SEQ ID NO: 249202 - RNA, 22 nt, Human
gcuuucuugguucugcaggggc

SEQ ID NO: 249203 - RNA, 20 nt, Human
uuucaguuaucuugaccuuc

SEQ ID NO: 249204 - RNA, 22 nt, Human
auuuggcuguaguaacuggauc

SEQ ID NO: 249205 - RNA, 22 nt, Human
accuuagaccagcaagauauuu

SEQ ID NO: 249206 - RNA, 22 nt, Human
acuggcagcagcagcccuuggg

SEQ ID NO: 249207 - RNA, 22 nt, Human
ccuccagcugccucagucucuu

SEQ ID NO: 249208 - RNA, 22 nt, Human
uacacaggcugccucuuugcau

SEQ ID NO: 249209 - RNA, 22 nt, Human
cuucuggagcucaccaacuucc

SEQ ID NO: 249210 - RNA, 23 nt, Human
ugaggaccucucaggggccaggc

SEQ ID NO: 249211 - RNA, 22 nt, Human
uuuggcuaauuaggugcugauu

SEQ ID NO: 249212 - RNA, 21 nt, Human
gaugauggcaggcagcacugg

SEQ ID NO: 249213 - RNA, 22 nt, Human
cagcccuuuccuucucagcuuu

SEQ ID NO: 249214 - RNA, 22 nt, Human
gcuuccagcaccagcagagggg

SEQ ID NO: 249215 - RNA, 22 nt, Human
guccaugacugugacucacaug

SEQ ID NO: 249216 - RNA, 22 nt, Human
uacacagggagagauuggaaac

SEQ ID NO: 249217 - RNA, 22 nt, Human
ugaguuuuggaagacaacacaa

SEQ ID NO: 249218 - RNA, 22 nt, Human
ggcuuucaaggaaaggccucau

SEQ ID NO: 249219 - RNA, 22 nt, Human
gcgagugccgagagggcagggc

SEQ ID NO: 249220 - RNA, 23 nt, Human
ugcuggcuuccagcugcucccuc

SEQ ID NO: 249221 - RNA, 22 nt, Human
uguguucaaucccuagucucag

SEQ ID NO: 249222 - RNA, 22 nt, Human
acuuagcaauuugauuaaaaga

SEQ ID NO: 249223 - RNA, 22 nt, Human
auguuucuguccuacgagauaa

SEQ ID NO: 249224 - RNA, 22 nt, Human
uccugggguguguuuugcugcu

SEQ ID NO: 249225 - RNA, 19 nt, Human
ccagagcccgccagauggg

SEQ ID NO: 249226 - RNA, 22 nt, Human
cugcucaguaauaguccuaucu

SEQ ID NO: 249227 - RNA, 22 nt, Human
gugcagcuuccuggucucagcc

SEQ ID NO: 249228 - RNA, 23 nt, Human
uuucacauuaauguuuagcagga

SEQ ID NO: 249229 - RNA, 22 nt, Human
gagaggccugagaggcugcgga

SEQ ID NO: 249230 - RNA, 22 nt, Human
acauucuuggacuccacucuag

SEQ ID NO: 249231 - RNA, 18 nt, Human
gugcaaugaauagcagag

SEQ ID NO: 249232 - RNA, 22 nt, Human
cuuauagaauuagagagauuuu

SEQ ID NO: 249233 - RNA, 22 nt, Human
cucuuagauauggagaauuacc

SEQ ID NO: 249234 - RNA, 22 nt, Human
gcuaggagauugagcucugaag

SEQ ID NO: 249235 - RNA, 22 nt, Human
aauuucaaguggcaucuuugau

SEQ ID NO: 249236 - RNA, 22 nt, Human
aaaguaacaauaagguucuauu

SEQ ID NO: 249237 - RNA, 20 nt, Human
ucuguaauuaugccaucacu

SEQ ID NO: 249238 - RNA, 22 nt, Human
augcuucugguauaagaaaaau

SEQ ID NO: 249239 - RNA, 22 nt, Human
agcccagcccgggcugcgcuuu

SEQ ID NO: 249240 - RNA, 22 nt, Human
ucccaagugucuuggaccaggg

SEQ ID NO: 249241 - RNA, 22 nt, Human
aggaaacaugaaucugccuuga

SEQ ID NO: 249242 - RNA, 20 nt, Human
uagaaaucuuauaaaagacu

SEQ ID NO: 249243 - RNA, 22 nt, Human
aaguaacaugggaacaucugaa

SEQ ID NO: 249244 - RNA, 22 nt, Human
ugccugggugcuggcuggucac

SEQ ID NO: 249245 - RNA, 22 nt, Human
acccagcaaagauaaacuuaug

SEQ ID NO: 249246 - RNA, 22 nt, Human
uuagaacauagcaacagaauua

SEQ ID NO: 249247 - RNA, 22 nt, Human
gagcagcucgagaaggaagcag

SEQ ID NO: 249248 - RNA, 22 nt, Human
aaaugcugcagcuaguguguuu

SEQ ID NO: 249249 - RNA, 22 nt, Human
caccuagcaugaaauucagcag

SEQ ID NO: 249250 - RNA, 22 nt, Human
cccagcccacgguccugggugg

SEQ ID NO: 249251 - RNA, 22 nt, Human
agugcaugcgcuugggaggggu

SEQ ID NO: 249252 - RNA, 22 nt, Human
ccaccagcuuuggcggugacag

SEQ ID NO: 249253 - RNA, 22 nt, Human
agaguuugggugggacagcuug

SEQ ID NO: 249254 - RNA, 21 nt, Human
acccccacaccuccuuaguuc

SEQ ID NO: 249255 - RNA, 22 nt, Human
aaauugcugaccaaguauauuc

SEQ ID NO: 249256 - RNA, 22 nt, Human
gcugcuggaacaaaucacccca

SEQ ID NO: 249257 - RNA, 22 nt, Human
caaugucaugauuuuccauuag

SEQ ID NO: 249258 - RNA, 22 nt, Human
ucagaagucacuuaggaaaggg

SEQ ID NO: 249259 - RNA, 22 nt, Human
acugccucuuggugcugagaga

SEQ ID NO: 249260 - RNA, 22 nt, Human
caagcagccccaacaugaggau

SEQ ID NO: 249261 - RNA, 22 nt, Human
gugaauuuaguuuguaagaagg

SEQ ID NO: 249262 - RNA, 22 nt, Human
gcuggcaggguucucacugaaa

SEQ ID NO: 249263 - RNA, 22 nt, Human
auccugaggaaggugcagagau

SEQ ID NO: 249264 - RNA, 22 nt, Human
ucagggcaucucuuaaguggug

SEQ ID NO: 249265 - RNA, 22 nt, Human
acuguuucugccacaauagccc

SEQ ID NO: 249266 - RNA, 22 nt, Human
guccuggcccaggaguacacau

SEQ ID NO: 249267 - RNA, 22 nt, Human
ucugcuggaaaaccagggaauu

SEQ ID NO: 249268 - RNA, 22 nt, Human
uggagggcuaagcugagggaua

SEQ ID NO: 249269 - RNA, 18 nt, Human
cuguccaguagacucugc

SEQ ID NO: 249270 - RNA, 22 nt, Human
aaagugcacucucagugcugcu

SEQ ID NO: 249271 - RNA, 22 nt, Human
gacaucugaggcccucagagcc

SEQ ID NO: 249272 - RNA, 22 nt, Human
cacacuuuuggcauguuugguu

SEQ ID NO: 249273 - RNA, 21 nt, Human
aacuuguauuucuccuuauuc

SEQ ID NO: 249274 - RNA, 22 nt, Human
ugucacaugacacaaauaucua

SEQ ID NO: 249275 - RNA, 22 nt, Human
uaaggaaugcuugaauguuccu

SEQ ID NO: 249276 - RNA, 22 nt, Human
guggcccucagcaguugccaag

SEQ ID NO: 249277 - RNA, 22 nt, Human
agcacagagcucggggaaugga

SEQ ID NO: 249278 - RNA, 22 nt, Human
agggagcucuaaguagagggac

SEQ ID NO: 249279 - RNA, 22 nt, Human
gcucagggaaggccacgugaga

SEQ ID NO: 249280 - RNA, 22 nt, Human
gauucaaaaauaagcuccuauu

SEQ ID NO: 249281 - RNA, 22 nt, Human
cagaaucuacacccucagaaau

SEQ ID NO: 249282 - RNA, 22 nt, Human
gcugccaguuccuucuuacucc

SEQ ID NO: 249283 - RNA, 22 nt, Human
aauacacuauuuugugcucagu

SEQ ID NO: 249284 - RNA, 22 nt, Human
cacacauuaauaucaaaggcuc

SEQ ID NO: 249285 - RNA, 22 nt, Human
agcacaggcuuuggugugaggg

SEQ ID NO: 249286 - RNA, 22 nt, Human
cagugauuaaaacaugacagcc

SEQ ID NO: 249287 - RNA, 19 nt, Human
cucgugcacccaucaccug

SEQ ID NO: 249288 - RNA, 22 nt, Human
uucugcuuagagggcauuugca

SEQ ID NO: 249289 - RNA, 22 nt, Human
aaaguaugauuggggauuauuu

SEQ ID NO: 249290 - RNA, 22 nt, Human
gucugcccugcagacaugccuc

SEQ ID NO: 249291 - RNA, 21 nt, Human
auucuagacaacacugaaauc

SEQ ID NO: 249292 - RNA, 22 nt, Human
ccugggcucgcgcacuucaccc

SEQ ID NO: 249293 - RNA, 22 nt, Human
augucagaagcuggaugacagc

SEQ ID NO: 249294 - RNA, 22 nt, Human
augcaguaaauguuaagaaaaa

SEQ ID NO: 249295 - RNA, 22 nt, Human
auauuccauugguuucccuucu

SEQ ID NO: 249296 - RNA, 22 nt, Human
uuaaaaggcaucauaggugaau

SEQ ID NO: 249297 - RNA, 23 nt, Human
aggcaguggugguaacaugucaa

SEQ ID NO: 249298 - RNA, 22 nt, Human
ucccuuucacuuaacuagccca

SEQ ID NO: 249299 - RNA, 22 nt, Human
cuuucauuugauaagaaugcca

SEQ ID NO: 249300 - RNA, 22 nt, Human
ugauacagagcaagcaucuuuu

SEQ ID NO: 249301 - RNA, 22 nt, Human
gaggagcuugaggcuaggagcc

SEQ ID NO: 249302 - RNA, 22 nt, Human
acagacaaguaguucagacaag

SEQ ID NO: 249303 - RNA, 22 nt, Human
uagaaccuccagaguggccccc

SEQ ID NO: 249304 - RNA, 21 nt, Human
cuccucaggaccagccacagg

SEQ ID NO: 249305 - RNA, 22 nt, Human
uugccauuuauacugcaaguca

SEQ ID NO: 249306 - RNA, 22 nt, Human
ggaggcugagaaguccaagauc

SEQ ID NO: 249307 - RNA, 22 nt, Human
agaagaggggugucccuguggc

SEQ ID NO: 249308 - RNA, 18 nt, Human
uuuuacucauagcaggcc

SEQ ID NO: 249309 - RNA, 22 nt, Human
ccaggagccugggccaggcugg

SEQ ID NO: 249310 - RNA, 22 nt, Human
uauauguaagcuauguaagagu

SEQ ID NO: 249311 - RNA, 22 nt, Human
uagccagugagacccagaaaua

SEQ ID NO: 249312 - RNA, 22 nt, Human
aagccauuuguuguccuucagg

SEQ ID NO: 249313 - RNA, 22 nt, Human
acccuggagcuuuucuggcccu

SEQ ID NO: 249314 - RNA, 22 nt, Human
ugccagcccaccuuggggccuc

SEQ ID NO: 249315 - RNA, 22 nt, Human
uggcagaauuuuaaagacagau

SEQ ID NO: 249316 - RNA, 22 nt, Human
uaguuuuacuugcgaugauaau

SEQ ID NO: 249317 - RNA, 22 nt, Human
aagaguuucugggucaaggauu

SEQ ID NO: 249318 - RNA, 22 nt, Human
cugcacacauauggcuucucuc

SEQ ID NO: 249319 - RNA, 22 nt, Human
caucuuuaaaaugggaacaaca

SEQ ID NO: 249320 - RNA, 22 nt, Human
gcacaguugugacaaccaucgc

SEQ ID NO: 249321 - RNA, 22 nt, Human
ugaggggccgcccaagcacuuc

SEQ ID NO: 249322 - RNA, 22 nt, Human
cagggacagcgggacucugaca

SEQ ID NO: 249323 - RNA, 22 nt, Human
auggagacugcgucugccaucc

SEQ ID NO: 249324 - RNA, 22 nt, Human
uuggaaaauguauuucuagaag

SEQ ID NO: 249325 - RNA, 22 nt, Human
guuaacauaggcuuagggguuu

SEQ ID NO: 249326 - RNA, 22 nt, Human
agaaggaagccaggagggugca

SEQ ID NO: 249327 - RNA, 22 nt, Human
uagaauguuaagaauauguaua

SEQ ID NO: 249328 - RNA, 18 nt, Human
ccauguguuccuuuuggg

SEQ ID NO: 249329 - RNA, 22 nt, Human
cagagcagugaggaguugugua

SEQ ID NO: 249330 - RNA, 22 nt, Human
uuguaaauaguaguaagaugcc

SEQ ID NO: 249331 - RNA, 22 nt, Human
aucuuucagagcuccaucaggg

SEQ ID NO: 249332 - RNA, 22 nt, Human
augaggcauuccacucaaacuc

SEQ ID NO: 249333 - RNA, 22 nt, Human
ccuuucugacagugaugggggg

SEQ ID NO: 249334 - RNA, 22 nt, Human
ggucucagcuggaguccuuggu

SEQ ID NO: 249335 - RNA, 22 nt, Human
ccaggcuagagugcaguggcgu

SEQ ID NO: 249336 - RNA, 22 nt, Human
ucacagagaaaagcuaucacaa

SEQ ID NO: 249337 - RNA, 22 nt, Human
auuucuagauauggagaguggu

SEQ ID NO: 249338 - RNA, 22 nt, Human
uuacaacagacacauauucuaa

SEQ ID NO: 249339 - RNA, 22 nt, Human
agagaccugaagagcuuccuca

SEQ ID NO: 249340 - RNA, 22 nt, Human
cccaggaugucgaggcugcagu

SEQ ID NO: 249341 - RNA, 22 nt, Human
aaccauuugccauuaucuuaag

SEQ ID NO: 249342 - RNA, 22 nt, Human
acccuuucuuacucacacgcuc

SEQ ID NO: 249343 - RNA, 22 nt, Human
gaggagcuguucccucaccucu

SEQ ID NO: 249344 - RNA, 22 nt, Human
acagcuuuguuuucccugcuga

SEQ ID NO: 249345 - RNA, 18 nt, Human
uggcuucugaacaacugc

SEQ ID NO: 249346 - RNA, 22 nt, Human
aauguggcauugucauuauugg

SEQ ID NO: 249347 - RNA, 22 nt, Human
gugacccagguagguaagcaau

SEQ ID NO: 249348 - RNA, 22 nt, Human
cccaggcuggggcuccuccagc

SEQ ID NO: 249349 - RNA, 23 nt, Human
gagcagagcgggcggggguccug

SEQ ID NO: 249350 - RNA, 17 nt, Human
aggccucugccggugcc

SEQ ID NO: 249351 - RNA, 22 nt, Human
aaacggaaugaguaagaguauc

SEQ ID NO: 249352 - RNA, 22 nt, Human
ccuggcucuucugugucagccc

SEQ ID NO: 249353 - RNA, 22 nt, Human
cagccacuguggucuagcugca

SEQ ID NO: 249354 - RNA, 22 nt, Human
auauauuacaaaagaggaagga

SEQ ID NO: 249355 - RNA, 22 nt, Human
acaguucacuuuuuauaucaaa

SEQ ID NO: 249356 - RNA, 22 nt, Human
uucuguggcaguuugggaggug

SEQ ID NO: 249357 - RNA, 22 nt, Human
ccaggccucccuuuuccagcca

SEQ ID NO: 249358 - RNA, 22 nt, Human
uuaguacagaaucaaaagcaau

SEQ ID NO: 249359 - RNA, 22 nt, Human
agcaccaguuucgucgugacaa

SEQ ID NO: 249360 - RNA, 22 nt, Human
auucaacuuacaaaggagaaga

SEQ ID NO: 249361 - RNA, 21 nt, Human
aggagccauguggucugaugg

SEQ ID NO: 249362 - RNA, 22 nt, Human
ucacagaacaagccugguggag

SEQ ID NO: 249363 - RNA, 22 nt, Human
aguacaauuauauuuagauggu

SEQ ID NO: 249364 - RNA, 20 nt, Human
uccugcagucgcuagcgccc

SEQ ID NO: 249365 - RNA, 22 nt, Human
uucuuuaaaauagugagaaaga

SEQ ID NO: 249366 - RNA, 22 nt, Human
auugucuucugucuuauaguuc

SEQ ID NO: 249367 - RNA, 22 nt, Human
cuuuauguacuguguauuugaa

SEQ ID NO: 249368 - RNA, 22 nt, Human
ugguuucucugaacucuacgac

SEQ ID NO: 249369 - RNA, 19 nt, Human
uagagcuuguuuuaggaag

SEQ ID NO: 249370 - RNA, 22 nt, Human
aaugcuguccaauaggaacaua

SEQ ID NO: 249371 - RNA, 22 nt, Human
ucugagcuuucuugugcucaag

SEQ ID NO: 249372 - RNA, 22 nt, Human
ucccucagcaggaacuggccug

SEQ ID NO: 249373 - RNA, 22 nt, Human
auuuuccucugguuuccccaga

SEQ ID NO: 249374 - RNA, 22 nt, Human
gagccaggggucagcuccgagg

SEQ ID NO: 249375 - RNA, 21 nt, Human
uccucagggccccagagcacu

SEQ ID NO: 249376 - RNA, 22 nt, Human
ucagcauguucuuaggucacag

SEQ ID NO: 249377 - RNA, 22 nt, Human
aacuuaguuggggacaccaugg

SEQ ID NO: 249378 - RNA, 23 nt, Human
ucaagcaauaauugguaauagug

SEQ ID NO: 249379 - RNA, 22 nt, Human
uguuauugagguuacuuauaag

SEQ ID NO: 249380 - RNA, 22 nt, Human
gaagacaccuacugucauuucu

SEQ ID NO: 249381 - RNA, 22 nt, Human
ugagucuuuccaaagccgucau

SEQ ID NO: 249382 - RNA, 22 nt, Human
uuccagucuaguaccuggaugc

SEQ ID NO: 249383 - RNA, 22 nt, Human
gcuugaugauaccuaggagaug

SEQ ID NO: 249384 - RNA, 23 nt, Human
acaaugucuguucauaaaauacc

SEQ ID NO: 249385 - RNA, 22 nt, Human
acaggacuuaagucauuuauaa

SEQ ID NO: 249386 - RNA, 22 nt, Human
uugcaaaaucauuucucaggau

SEQ ID NO: 249387 - RNA, 22 nt, Human
aagaggaccaguagauaaauuu

SEQ ID NO: 249388 - RNA, 22 nt, Human
agaagcacaccugaccucuagc

SEQ ID NO: 249389 - RNA, 19 nt, Human
acagaaauuaguuauuuuc

SEQ ID NO: 249390 - RNA, 22 nt, Human
uugccaggcucugguuccagcc

SEQ ID NO: 249391 - RNA, 22 nt, Human
aagaaacaaccacugcucuccu

SEQ ID NO: 249392 - RNA, 22 nt, Human
auuuauugagagggaggggaau

SEQ ID NO: 249393 - RNA, 22 nt, Human
aaagguaguacuucuagaaggg

SEQ ID NO: 249394 - RNA, 22 nt, Human
guaaauaacugguaauuggggu

SEQ ID NO: 249395 - RNA, 22 nt, Human
uggcaaagugacuccuuggggc

SEQ ID NO: 249396 - RNA, 22 nt, Human
ccagugugguagguccacaggu

SEQ ID NO: 249397 - RNA, 22 nt, Human
auaucaaacgaaguuauuuuaa

SEQ ID NO: 249398 - RNA, 22 nt, Human
aacaaguguauuaauggaaaua

SEQ ID NO: 249399 - RNA, 22 nt, Human
auaagaggaauuacagaagagg

SEQ ID NO: 249400 - RNA, 22 nt, Human
gcuccugugaggacacagccgc

SEQ ID NO: 249401 - RNA, 22 nt, Human
aaagaagguagggcuggugacu

SEQ ID NO: 249402 - RNA, 22 nt, Human
uggcuucucuguuuuaguauuu

SEQ ID NO: 249403 - RNA, 22 nt, Human
augggcaguaacaguggcaguc

SEQ ID NO: 249404 - RNA, 22 nt, Human
ucuguuaucucaagucacaaga

SEQ ID NO: 249405 - RNA, 19 nt, Human
uccagggcuuuauggcuuu

SEQ ID NO: 249406 - RNA, 22 nt, Human
uuuaggaaauacuguccuauga

SEQ ID NO: 249407 - RNA, 22 nt, Human
agagaaaguaaagauucuaccu

SEQ ID NO: 249408 - RNA, 22 nt, Human
ugugagguaacgcugcucuguu

SEQ ID NO: 249409 - RNA, 22 nt, Human
cugcugaggccuucccuguccu

SEQ ID NO: 249410 - RNA, 20 nt, Human
uuucuugucggcuguugcug

SEQ ID NO: 249411 - RNA, 22 nt, Human
gaggaauguuauuaaaggagcu

SEQ ID NO: 249412 - RNA, 22 nt, Human
uagcaauccguugaucccuugc

SEQ ID NO: 249413 - RNA, 22 nt, Human
ucuauuaugguacuuaucauga

SEQ ID NO: 249414 - RNA, 22 nt, Human
acaaaauagaguucuccccugg

SEQ ID NO: 249415 - RNA, 22 nt, Human
ugccugucuuaauaucuggaaa

SEQ ID NO: 249416 - RNA, 22 nt, Human
gcuucucucucagacugcaagc

SEQ ID NO: 249417 - RNA, 18 nt, Human
gagggaguagcugagguu

SEQ ID NO: 249418 - RNA, 22 nt, Human
acugggcugcuugagugccuuc

SEQ ID NO: 249419 - RNA, 22 nt, Human
aggucaaggccaaaagaguggu

SEQ ID NO: 249420 - RNA, 22 nt, Human
aaagcugcuuugguuucuggaa

SEQ ID NO: 249421 - RNA, 22 nt, Human
agucucuuacccaagcagaaug

SEQ ID NO: 249422 - RNA, 22 nt, Human
uugccuuacugcauucaguaaa

SEQ ID NO: 249423 - RNA, 22 nt, Human
aagccuugccuauuugaugaca

SEQ ID NO: 249424 - RNA, 22 nt, Human
aggcuucugggauucccuuggu

SEQ ID NO: 249425 - RNA, 22 nt, Human
uucaguuuucuuuagaauguag

SEQ ID NO: 249426 - RNA, 22 nt, Human
uccugggaaguggcuggcugag

SEQ ID NO: 249427 - RNA, 22 nt, Human
ucugaaauaggagccauguaga

SEQ ID NO: 249428 - RNA, 22 nt, Human
aaauguauugcauaggauauuu

SEQ ID NO: 249429 - RNA, 22 nt, Human
cuccagcuucugcccagagacu

SEQ ID NO: 249430 - RNA, 23 nt, Human
cugcuuucccacuccaugcucuu

SEQ ID NO: 249431 - RNA, 23 nt, Human
gcuuuauaguucucccaacauua

SEQ ID NO: 249432 - RNA, 22 nt, Human
gugaccauuugacauauccuug

SEQ ID NO: 249433 - RNA, 22 nt, Human
uccuuuaugugaguuguuuccc

SEQ ID NO: 249434 - RNA, 22 nt, Human
uaaaggcuucugcagggacuga

SEQ ID NO: 249435 - RNA, 22 nt, Human
ucauuugucuggcacagggaau

SEQ ID NO: 249436 - RNA, 22 nt, Human
acaaugaauaucaugaaguacu

SEQ ID NO: 249437 - RNA, 22 nt, Human
aauugcuuguuuucggucauaa

SEQ ID NO: 249438 - RNA, 21 nt, Human
ugcaggaaguauggugccuau

SEQ ID NO: 249439 - RNA, 22 nt, Human
ucauuucucccggccaaaaacu

SEQ ID NO: 249440 - RNA, 22 nt, Human
agggauguugucaaggaugugg

SEQ ID NO: 249441 - RNA, 22 nt, Human
cuuacaaaggagaggagauagg

SEQ ID NO: 249442 - RNA, 22 nt, Human
uccuucuccuccuugagugaca

SEQ ID NO: 249443 - RNA, 22 nt, Human
aguguuuaccccaaucaguuua

SEQ ID NO: 249444 - RNA, 22 nt, Human
acuccugggugcugaccagcgu

SEQ ID NO: 249445 - RNA, 22 nt, Human
uuguuauaaagacuaaauaugu

SEQ ID NO: 249446 - RNA, 22 nt, Human
aagucagugaaaaggcaucauc

SEQ ID NO: 249447 - RNA, 22 nt, Human
ugaggcaauguccuucauccuu

SEQ ID NO: 249448 - RNA, 22 nt, Human
auagacaaugguuugccaagaa

SEQ ID NO: 249449 - RNA, 22 nt, Human
agugaucugacucccaguuaga

SEQ ID NO: 249450 - RNA, 22 nt, Human
caggagggcccgagacucuucc

SEQ ID NO: 249451 - RNA, 22 nt, Human
aggcucugcuuuucuggauaua

SEQ ID NO: 249452 - RNA, 22 nt, Human
ucccccucauuaccucauucaa

SEQ ID NO: 249453 - RNA, 22 nt, Human
ccugugaggucaucugugguaa

SEQ ID NO: 249454 - RNA, 22 nt, Human
uaaauguggagacucaggaguc

SEQ ID NO: 249455 - RNA, 16 nt, Human
caggugucagucaccu

SEQ ID NO: 249456 - RNA, 22 nt, Human
ucacaugucaaaaacuacauaa

SEQ ID NO: 249457 - RNA, 19 nt, Human
ccugugcuaggagcugacc

SEQ ID NO: 249458 - RNA, 22 nt, Human
gaaggcuguuucugguagugau

SEQ ID NO: 249459 - RNA, 22 nt, Human
uaacaggguaggagggcaugaa

SEQ ID NO: 249460 - RNA, 22 nt, Human
ggagcucauaacaagguagcca

SEQ ID NO: 249461 - RNA, 22 nt, Human
ccugagagugagugccaccuua

SEQ ID NO: 249462 - RNA, 21 nt, Human
cagaaacuugcuuugccuucu

SEQ ID NO: 249463 - RNA, 22 nt, Human
gcagguggagcaguagucuggu

SEQ ID NO: 249464 - RNA, 22 nt, Human
agccaugggagacugugggaga

SEQ ID NO: 249465 - RNA, 22 nt, Human
ugcugugggauauauguucaaa

SEQ ID NO: 249466 - RNA, 22 nt, Human
uacagauacagaucuagauaca

SEQ ID NO: 249467 - RNA, 22 nt, Human
acagaacuuccugcuggagugg

SEQ ID NO: 249468 - RNA, 22 nt, Human
ggaggccaggugggagucaucu

SEQ ID NO: 249469 - RNA, 18 nt, Human
uggggggcuugucugaag

SEQ ID NO: 249470 - RNA, 22 nt, Human
agucaguuuucuccagggggcu

SEQ ID NO: 249471 - RNA, 22 nt, Human
gcccaggacucagggugucgcg

SEQ ID NO: 249472 - RNA, 20 nt, Human
gcagggcaucuuggccccca

SEQ ID NO: 249473 - RNA, 22 nt, Human
gacuaaauuccuguucgcgaug

SEQ ID NO: 249474 - RNA, 22 nt, Human
agacacagcaauaacuacuguu

SEQ ID NO: 249475 - RNA, 22 nt, Human
gaggcuccgguaguagccuuga

SEQ ID NO: 249476 - RNA, 20 nt, Human
uauuccaaggguagagaaaa

SEQ ID NO: 249477 - RNA, 22 nt, Human
cuuuucuggccaggaacuugcc

SEQ ID NO: 249478 - RNA, 22 nt, Human
ugcuggcuccaaccuggcaucu

SEQ ID NO: 249479 - RNA, 22 nt, Human
ccuggcagcccagagcgccgcu

SEQ ID NO: 249480 - RNA, 22 nt, Human
uaacucugaauccucacagcag

SEQ ID NO: 249481 - RNA, 22 nt, Human
uccagcaugacuaguuccccau

SEQ ID NO: 249482 - RNA, 16 nt, Human
aucuaagaauguagag

SEQ ID NO: 249483 - RNA, 22 nt, Human
uauauggauagugaucauaaga

SEQ ID NO: 249484 - RNA, 20 nt, Human
acucuggggcucauuagggg

SEQ ID NO: 249485 - RNA, 22 nt, Human
augcugaagaguucaugauuau

SEQ ID NO: 249486 - RNA, 22 nt, Human
agaggccacuuugccugugaug

SEQ ID NO: 249487 - RNA, 22 nt, Human
gacccagugacucgucucugug

SEQ ID NO: 249488 - RNA, 22 nt, Human
gucauuuucuagaauuauuuga

SEQ ID NO: 249489 - RNA, 22 nt, Human
aguaugaauacagauuuucucu

SEQ ID NO: 249490 - RNA, 23 nt, Human
cacaggcagaaaucaagacggua

SEQ ID NO: 249491 - RNA, 21 nt, Human
ucuuuucucagcuuugugguu

SEQ ID NO: 249492 - RNA, 22 nt, Human
aggagggugauccgggcugguc

SEQ ID NO: 249493 - RNA, 22 nt, Human
agcuggugaggguugaggggua

SEQ ID NO: 249494 - RNA, 22 nt, Human
uccuguuuccaauuuguugggu

SEQ ID NO: 249495 - RNA, 22 nt, Human
uuuacagugagagcuuagugag

SEQ ID NO: 249496 - RNA, 22 nt, Human
augguuuauaaucuagguguga

SEQ ID NO: 249497 - RNA, 22 nt, Human
ugguccuggccuugaccccagg

SEQ ID NO: 249498 - RNA, 19 nt, Human
aggguccagggagcggcuc

SEQ ID NO: 249499 - RNA, 22 nt, Human
uccuggagaagaggggcuugga

SEQ ID NO: 249500 - RNA, 22 nt, Human
uugauuaaacaggcauauucaa

SEQ ID NO: 249501 - RNA, 22 nt, Human
agcagcuguuuguugaauuggu

SEQ ID NO: 249502 - RNA, 22 nt, Human
cagccacuguggaauagccccc

SEQ ID NO: 249503 - RNA, 22 nt, Human
aaugcaaauucuagggcccuau

SEQ ID NO: 249504 - RNA, 22 nt, Human
auuagggaaacugacuugucuc

SEQ ID NO: 249505 - RNA, 22 nt, Human
gaaaagcuuacugccacuuggc

SEQ ID NO: 249506 - RNA, 22 nt, Human
gcaggugucuucauggaacucu

SEQ ID NO: 249507 - RNA, 22 nt, Human
aaaggccacacugcucuuucuc

SEQ ID NO: 249508 - RNA, 22 nt, Human
uaaagcauaaugaauaucuaga

SEQ ID NO: 249509 - RNA, 22 nt, Human
ucugcugcacaaauucaucucu

SEQ ID NO: 249510 - RNA, 22 nt, Human
cuucauguucugccuguggaag

SEQ ID NO: 249511 - RNA, 22 nt, Human
gaggcucuggaguagguacaca

SEQ ID NO: 249512 - RNA, 22 nt, Human
caccagcuccaccagggcaggu

SEQ ID NO: 249513 - RNA, 20 nt, Human
acuguuggaaguggagaaug

SEQ ID NO: 249514 - RNA, 23 nt, Human
agggugagcaagcuauggagacc

SEQ ID NO: 249515 - RNA, 22 nt, Human
cuguccuuacugcuucuggcuu

SEQ ID NO: 249516 - RNA, 18 nt, Human
uggcuggcagugggcagc

SEQ ID NO: 249517 - RNA, 22 nt, Human
uucucuuuauguauuuaguggg

SEQ ID NO: 249518 - RNA, 22 nt, Human
cuacuucuugaucugucgaccu

SEQ ID NO: 249519 - RNA, 14 nt, Human
acaggcagauuucu

SEQ ID NO: 249520 - RNA, 22 nt, Human
acaugccagcacugcuuuucag

SEQ ID NO: 249521 - RNA, 22 nt, Human
agcucaggucauuccagggaug

SEQ ID NO: 249522 - RNA, 22 nt, Human
gucaggggccaugggccaagga

SEQ ID NO: 249523 - RNA, 22 nt, Human
gcgucuuuuagauuuuacaucu

SEQ ID NO: 249524 - RNA, 22 nt, Human
gcuuaauucuggcucaguuucc

SEQ ID NO: 249525 - RNA, 22 nt, Human
gcaguccucucauuggccuccu

SEQ ID NO: 249526 - RNA, 22 nt, Human
guuccucaugaguaccccuuaa

SEQ ID NO: 249527 - RNA, 22 nt, Human
uaagaugacuacuuaccacuga

SEQ ID NO: 249528 - RNA, 22 nt, Human
cucaccacagagccuguccagc

SEQ ID NO: 249529 - RNA, 22 nt, Human
ggaugaggaaaccacagugucc

SEQ ID NO: 249530 - RNA, 22 nt, Human
cuuuuuguguaugcuacaguug

SEQ ID NO: 249531 - RNA, 22 nt, Human
acaguguguuggaggagacugu

SEQ ID NO: 249532 - RNA, 22 nt, Human
cccaggccagaacuugguugcu

SEQ ID NO: 249533 - RNA, 22 nt, Human
cuuuuagcugcaaguguucaca

SEQ ID NO: 249534 - RNA, 22 nt, Human
auaaugguagauguccacgcag

SEQ ID NO: 249535 - RNA, 22 nt, Human
cugucuguucagauucauuacu

SEQ ID NO: 249536 - RNA, 22 nt, Human
uuuucuguuacaaaguacagcg

SEQ ID NO: 249537 - RNA, 22 nt, Human
gcccuuggaacagccuccugcu

SEQ ID NO: 249538 - RNA, 22 nt, Human
cagauauauuuuauuuggucaa

SEQ ID NO: 249539 - RNA, 22 nt, Human
uguuuacuucuuuccauggcuu

SEQ ID NO: 249540 - RNA, 22 nt, Human
agaacaaaucgauggaagccug

SEQ ID NO: 249541 - RNA, 23 nt, Human
ccaggccucucagagggugugcc

SEQ ID NO: 249542 - RNA, 22 nt, Human
gccuggcaauggccucaggaag

SEQ ID NO: 249543 - RNA, 22 nt, Human
cuccaaguauguuaaaaucuaa

SEQ ID NO: 249544 - RNA, 22 nt, Human
caggaagcaccagcccggcccc

SEQ ID NO: 249545 - RNA, 22 nt, Human
ucacagacuggucagucaacuu

SEQ ID NO: 249546 - RNA, 22 nt, Human
ccuuuauucaauuaguccuaau

SEQ ID NO: 249547 - RNA, 22 nt, Human
uccugggaaguugcaucaccgu

SEQ ID NO: 249548 - RNA, 22 nt, Human
uacaaggcuucagcucagcuau

SEQ ID NO: 249549 - RNA, 22 nt, Human
cuggcugguuacuauuucuggu

SEQ ID NO: 249550 - RNA, 22 nt, Human
ggguguagacacauguucaucu

SEQ ID NO: 249551 - RNA, 22 nt, Human
guuauguaucuugauugggugg

SEQ ID NO: 249552 - RNA, 22 nt, Human
acuuuguuuucaugaaacagcu

SEQ ID NO: 249553 - RNA, 18 nt, Human
gcauucaguagugaacaa

SEQ ID NO: 249554 - RNA, 22 nt, Human
gcauacagagaggauguggcau

SEQ ID NO: 249555 - RNA, 22 nt, Human
auuucaguguuuuaagaguuca

SEQ ID NO: 249556 - RNA, 22 nt, Human
cgcuggucaccauggcguccug

SEQ ID NO: 249557 - RNA, 22 nt, Human
uccuccaagccuuugugaagug

SEQ ID NO: 249558 - RNA, 22 nt, Human
uauuuucaccauguaucccugu

SEQ ID NO: 249559 - RNA, 22 nt, Human
aucuggaacaaagcuuaggaau

SEQ ID NO: 249560 - RNA, 22 nt, Human
auaucaaaauaaacagcaugca

SEQ ID NO: 249561 - RNA, 22 nt, Human
ugcccugguuacacuggagucc

SEQ ID NO: 249562 - RNA, 22 nt, Human
gaaguacaaaggacauggaaac

SEQ ID NO: 249563 - RNA, 18 nt, Human
ugagagccugcuuguccc

SEQ ID NO: 249564 - RNA, 22 nt, Human
gaauuuuaauaaagguuuauca

SEQ ID NO: 249565 - RNA, 22 nt, Human
ucuguucagaagaggugaaagu

SEQ ID NO: 249566 - RNA, 19 nt, Human
aaaugcuguggagggcucc

SEQ ID NO: 249567 - RNA, 22 nt, Human
guauuaguuaucuacugcugug

SEQ ID NO: 249568 - RNA, 22 nt, Human
uuuuuauaggucagggcaaguc

SEQ ID NO: 249569 - RNA, 22 nt, Human
uguggcaggcaagauguacaga

SEQ ID NO: 249570 - RNA, 22 nt, Human
ugucugaugauagugucucucc

SEQ ID NO: 249571 - RNA, 22 nt, Human
gugaauaauuuuuuaguauaag

SEQ ID NO: 249572 - RNA, 22 nt, Human
guucuauuccccuuaucuguga

SEQ ID NO: 249573 - RNA, 23 nt, Human
aggccagcgcagacaccgagcac

SEQ ID NO: 249574 - RNA, 22 nt, Human
gcucaggcccagcggcuggugu

SEQ ID NO: 249575 - RNA, 22 nt, Human
acagauggccauauuacuauau

SEQ ID NO: 249576 - RNA, 22 nt, Human
guucuuuaaccuagucucauuu

SEQ ID NO: 249577 - RNA, 22 nt, Human
ccauuguaaagaguauacuuug

SEQ ID NO: 249578 - RNA, 23 nt, Human
uuucucugagaagcaguucucua

SEQ ID NO: 249579 - RNA, 22 nt, Human
uucauauuugaaacagaaguua

SEQ ID NO: 249580 - RNA, 22 nt, Human
cucggcagguggagguuguagu

SEQ ID NO: 249581 - RNA, 22 nt, Human
ggccuugauccuccagagcacu

SEQ ID NO: 249582 - RNA, 22 nt, Human
ucugggugucacuccugccugc

SEQ ID NO: 249583 - RNA, 22 nt, Human
gccaggaggcugcuguguaggc

SEQ ID NO: 249584 - RNA, 22 nt, Human
gauauauuuggaccagagcauu

SEQ ID NO: 249585 - RNA, 22 nt, Human
cucagcaggucuuggguagggg

SEQ ID NO: 249586 - RNA, 22 nt, Human
caaggccaaagggccacuguca

SEQ ID NO: 249587 - RNA, 22 nt, Human
aaaucuguaagcaauugcucag

SEQ ID NO: 249588 - RNA, 22 nt, Human
uuuguacacaggauguuauaau

SEQ ID NO: 249589 - RNA, 22 nt, Human
gccuuccaccuaggccucugcu

SEQ ID NO: 249590 - RNA, 22 nt, Human
cauguguccuagcuauucuccu

SEQ ID NO: 249591 - RNA, 20 nt, Human
uccaggagguuaguguggcu

SEQ ID NO: 249592 - RNA, 22 nt, Human
uuuuucucuaugccaggggccu

SEQ ID NO: 249593 - RNA, 22 nt, Human
ccagcauggcaccugagaugag

SEQ ID NO: 249594 - RNA, 21 nt, Human
gcccucaggggaggauggccu

SEQ ID NO: 249595 - RNA, 22 nt, Human
ggccugaucuuugacccucauc

SEQ ID NO: 249596 - RNA, 22 nt, Human
ucugaagacauaugauauggug

SEQ ID NO: 249597 - RNA, 22 nt, Human
gggaaggcugccugagggaugg

SEQ ID NO: 249598 - RNA, 22 nt, Human
gccugccuguuggcugaggugc

SEQ ID NO: 249599 - RNA, 22 nt, Human
ucugaaauaacugaugccagau

SEQ ID NO: 249600 - RNA, 22 nt, Human
cccuggcagagggggcaggugc

SEQ ID NO: 249601 - RNA, 22 nt, Human
cauacuguaagugcaaaagugu

SEQ ID NO: 249602 - RNA, 22 nt, Human
ugccagugcuugugucugagca

SEQ ID NO: 249603 - RNA, 22 nt, Human
gaggcucuucaauaggucaaug

SEQ ID NO: 249604 - RNA, 22 nt, Human
ccuuuuucccuggagggacagc

SEQ ID NO: 249605 - RNA, 22 nt, Human
auucuucagcaggggacacuau

SEQ ID NO: 249606 - RNA, 22 nt, Human
cuucuucaauagcaagcgcaua

SEQ ID NO: 249607 - RNA, 22 nt, Human
uuacaauggguauacuuccauu

SEQ ID NO: 249608 - RNA, 22 nt, Human
gccugagauucugcauuucuaa

SEQ ID NO: 249609 - RNA, 22 nt, Human
auuuccauuuucagccauuacu

SEQ ID NO: 249610 - RNA, 22 nt, Human
aaagcaucagaucugacacuuc

SEQ ID NO: 249611 - RNA, 22 nt, Human
gggcuggcucccagguguugaa

SEQ ID NO: 249612 - RNA, 22 nt, Human
cagcagaguaggugcuacuucu

SEQ ID NO: 249613 - RNA, 18 nt, Human
aagaaucucugacucuuu

SEQ ID NO: 249614 - RNA, 22 nt, Human
cagcugguugaagaggagcugg

SEQ ID NO: 249615 - RNA, 19 nt, Human
aggaaacugucuuuuccag

SEQ ID NO: 249616 - RNA, 22 nt, Human
cuauuugggguagaagauggau

SEQ ID NO: 249617 - RNA, 19 nt, Human
cuggccaggccaggggccc

SEQ ID NO: 249618 - RNA, 22 nt, Human
cuggaagggucuacuuagcaga

SEQ ID NO: 249619 - RNA, 23 nt, Human
uuauaaauauuuucagguguguu

SEQ ID NO: 249620 - RNA, 18 nt, Human
cugggucuccaggcugcc

SEQ ID NO: 249621 - RNA, 22 nt, Human
ggccugagucccaccuggcugu

SEQ ID NO: 249622 - RNA, 15 nt, Human
ucccugggagauggu

SEQ ID NO: 249623 - RNA, 22 nt, Human
ccagggcugagcugugaccaug

SEQ ID NO: 249624 - RNA, 23 nt, Human
uacuauaacgcugugucagcucc

SEQ ID NO: 249625 - RNA, 22 nt, Human
uggaagaauaggauagaagaac

SEQ ID NO: 249626 - RNA, 20 nt, Human
cugggcucaagugagccucc

SEQ ID NO: 249627 - RNA, 19 nt, Human
gggcaaagugaucguccug

SEQ ID NO: 249628 - RNA, 22 nt, Human
caucuuuggagaaacuuccguu

SEQ ID NO: 249629 - RNA, 22 nt, Human
gacacaggaaaagcuccagccc

SEQ ID NO: 249630 - RNA, 21 nt, Human
acucauuugucugcaucuaau

SEQ ID NO: 249631 - RNA, 21 nt, Human
ggcccugguuacgccuccucu

SEQ ID NO: 249632 - RNA, 22 nt, Human
cagcccuggcuagggcgagggc

SEQ ID NO: 249633 - RNA, 17 nt, Human
uuuaaacuacuacaagg

SEQ ID NO: 249634 - RNA, 22 nt, Human
auuagcaacauggugaauaugu

SEQ ID NO: 249635 - RNA, 22 nt, Human
aauugcuuaucuuguugaauag

SEQ ID NO: 249636 - RNA, 22 nt, Human
uccaggacuuucuuaaggcacu

SEQ ID NO: 249637 - RNA, 22 nt, Human
cugggucccacagccugcuggg

SEQ ID NO: 249638 - RNA, 22 nt, Human
cagccagugugaccgaggagga

SEQ ID NO: 249639 - RNA, 22 nt, Human
uugccagggcuuugguggcauc

SEQ ID NO: 249640 - RNA, 22 nt, Human
acagagcuaauguugcauaggc

SEQ ID NO: 249641 - RNA, 22 nt, Human
cuauuucugccuaaugaccugu

SEQ ID NO: 249642 - RNA, 22 nt, Human
agccuguguugcucuggcgaua

SEQ ID NO: 249643 - RNA, 22 nt, Human
augacauaaagcuaugcuaggu

SEQ ID NO: 249644 - RNA, 22 nt, Human
cugagccagcuggcaugugcua

SEQ ID NO: 249645 - RNA, 22 nt, Human
gcugggcugcccaaccucugac

SEQ ID NO: 249646 - RNA, 22 nt, Human
ggccugugcugucagcccuagu

SEQ ID NO: 249647 - RNA, 19 nt, Human
cacuuuauuucuguuuugu

SEQ ID NO: 249648 - RNA, 22 nt, Human
caucucuucauuagcauuauug

SEQ ID NO: 249649 - RNA, 22 nt, Human
cagcaugaugcucacacaaaac

SEQ ID NO: 249650 - RNA, 22 nt, Human
uaaauucccaacucugcucuuc

SEQ ID NO: 249651 - RNA, 22 nt, Human
ucucaguggcuuccucacuuuu

SEQ ID NO: 249652 - RNA, 22 nt, Human
uuugcaauuugugcugcaaaug

SEQ ID NO: 249653 - RNA, 22 nt, Human
uccugcaggggcugaggaacca

SEQ ID NO: 249654 - RNA, 22 nt, Human
aagaacuagucuuacagccuca

SEQ ID NO: 249655 - RNA, 19 nt, Human
agcagguggguaagaaaau

SEQ ID NO: 249656 - RNA, 22 nt, Human
uuuggcuagccaagaaacaaaa

SEQ ID NO: 249657 - RNA, 22 nt, Human
ucugagcugggucuugacagcu

SEQ ID NO: 249658 - RNA, 22 nt, Human
ccuccugggacaggcuggcaca

SEQ ID NO: 249659 - RNA, 22 nt, Human
ccaggagcgggaaaaggaagaa

SEQ ID NO: 249660 - RNA, 22 nt, Human
uucucagaggagucgggagcug

SEQ ID NO: 249661 - RNA, 22 nt, Human
ugagcuucaaaguuggaucuga

SEQ ID NO: 249662 - RNA, 22 nt, Human
ucagagagugcaaaauauagcu

SEQ ID NO: 249663 - RNA, 19 nt, Human
ucccagagucuagagguug

SEQ ID NO: 249664 - RNA, 23 nt, Human
gcucuggcagcuugugucagcac

SEQ ID NO: 249665 - RNA, 22 nt, Human
uucuuugggauuguagcugucu

SEQ ID NO: 249666 - RNA, 22 nt, Human
caggcagcucaaccuugggagc

SEQ ID NO: 249667 - RNA, 22 nt, Human
uggcaggguuggccaccuuacc

SEQ ID NO: 249668 - RNA, 22 nt, Human
guucuacaugacacucaacauu

SEQ ID NO: 249669 - RNA, 17 nt, Human
uuuagaauacaauguuu

SEQ ID NO: 249670 - RNA, 22 nt, Human
gcagcucugacaaugccuggaa

SEQ ID NO: 249671 - RNA, 22 nt, Human
aggcuggcuucccaagcguccu

SEQ ID NO: 249672 - RNA, 22 nt, Human
caggcagaugcugacaagaguu

SEQ ID NO: 249673 - RNA, 22 nt, Human
ucagagaaauaauugcugaguu

SEQ ID NO: 249674 - RNA, 22 nt, Human
uagaaggcccauucauuuguuc

SEQ ID NO: 249675 - RNA, 22 nt, Human
cuacaguacuggaugcucagcc

SEQ ID NO: 249676 - RNA, 22 nt, Human
gcaggguaggugacagguaguc

SEQ ID NO: 249677 - RNA, 22 nt, Human
uucuggaucugagggggaagau

SEQ ID NO: 249678 - RNA, 22 nt, Human
aguagcagugacagcugaggua

SEQ ID NO: 249679 - RNA, 22 nt, Human
uuuguuuucuguaggccuuucc

SEQ ID NO: 249680 - RNA, 22 nt, Human
acucugccuuggugucacaaga

SEQ ID NO: 249681 - RNA, 22 nt, Human
uucucugaaggccaugcucacu

SEQ ID NO: 249682 - RNA, 22 nt, Human
cgcaggcacagaguggacagcg

SEQ ID NO: 249683 - RNA, 22 nt, Human
uugcaaauucauggaucugaau

SEQ ID NO: 249684 - RNA, 17 nt, Human
aggagcuggggguggug

SEQ ID NO: 249685 - RNA, 22 nt, Human
gcaggcuuauggggagacagag

SEQ ID NO: 249686 - RNA, 22 nt, Human
ccuuccagaggcgugacacccu

SEQ ID NO: 249687 - RNA, 22 nt, Human
cugaggccagcugcagagcucu

SEQ ID NO: 249688 - RNA, 22 nt, Human
acaguaacucuuuuacccuccu

SEQ ID NO: 249689 - RNA, 21 nt, Human
acaugucucuaaucucaguga

SEQ ID NO: 249690 - RNA, 22 nt, Human
ucagugcauuaauaauaucagu

SEQ ID NO: 249691 - RNA, 22 nt, Human
aguuggugggugugagcuggac

SEQ ID NO: 249692 - RNA, 22 nt, Human
auggaacaugaauuaauauggu

SEQ ID NO: 249693 - RNA, 22 nt, Human
guucuucagcccucagguccua

SEQ ID NO: 249694 - RNA, 22 nt, Human
cauuucugggagacaugcuaga

SEQ ID NO: 249695 - RNA, 22 nt, Human
ugucuuucugacccaagguagu

SEQ ID NO: 249696 - RNA, 22 nt, Human
uaagagcuuagcuaaggaugug

SEQ ID NO: 249697 - RNA, 22 nt, Human
cugcacagggauauggggagcu

SEQ ID NO: 249698 - RNA, 22 nt, Human
uuuuauaaagagagucaguugg

SEQ ID NO: 249699 - RNA, 22 nt, Human
uuacaagacacagugcugaagg

SEQ ID NO: 249700 - RNA, 20 nt, Human
gcucuuuguaagggaauuug

SEQ ID NO: 249701 - RNA, 22 nt, Human
cuccaggccaagauuaaguaau

SEQ ID NO: 249702 - RNA, 22 nt, Human
aaccaagcccauuacuuuacuu

SEQ ID NO: 249703 - RNA, 22 nt, Human
agcaacagaagauagagugaau

SEQ ID NO: 249704 - RNA, 23 nt, Human
ggccucuguguucugcccacaug

SEQ ID NO: 249705 - RNA, 22 nt, Human
gaaccuguaaguauagaugugg

SEQ ID NO: 249706 - RNA, 22 nt, Human
uuucaaaguugggaauuguaau

SEQ ID NO: 249707 - RNA, 19 nt, Human
ggcaggugugcuuaugcuu

SEQ ID NO: 249708 - RNA, 22 nt, Human
caugaauuauuuuucacaagau

SEQ ID NO: 249709 - RNA, 22 nt, Human
uauauuauaagcccuuucagaa

SEQ ID NO: 249710 - RNA, 22 nt, Human
uuaaaacagcgugaaucuggca

SEQ ID NO: 249711 - RNA, 22 nt, Human
acaauuagcugugugucuaucu

SEQ ID NO: 249712 - RNA, 22 nt, Human
uuccaucugcuagguaaaugaa

SEQ ID NO: 249713 - RNA, 22 nt, Human
agugcuccugaagcuugaggca

SEQ ID NO: 249714 - RNA, 22 nt, Human
aggcuggcugaaaaacacccuu

SEQ ID NO: 249715 - RNA, 22 nt, Human
cuugaaugguaugagaguaauu

SEQ ID NO: 249716 - RNA, 22 nt, Human
ucugggcugcuaugaggcagag

SEQ ID NO: 249717 - RNA, 21 nt, Human
gcaugugugggacuggauccu

SEQ ID NO: 249718 - RNA, 22 nt, Human
ugacugaaauggcgacagugaa

SEQ ID NO: 249719 - RNA, 22 nt, Human
uucuguggagguuuggaacauu

SEQ ID NO: 249720 - RNA, 22 nt, Human
auucaaacaggccaauugaccu

SEQ ID NO: 249721 - RNA, 22 nt, Human
ccaaagcaagucacaugaucaa

SEQ ID NO: 249722 - RNA, 22 nt, Human
uucugggugccaccuaagacau

SEQ ID NO: 249723 - RNA, 22 nt, Human
cugagagaaacaugacucagga

SEQ ID NO: 249724 - RNA, 22 nt, Human
ucaggcugaggucaucugcauc

SEQ ID NO: 249725 - RNA, 22 nt, Human
cagccugacuauggcugcaggu

SEQ ID NO: 249726 - RNA, 22 nt, Human
gccuccucuugagggucaggga

SEQ ID NO: 249727 - RNA, 22 nt, Human
uggugcagagagggaucuaggg

SEQ ID NO: 249728 - RNA, 22 nt, Human
uacaugcuccuuaugagaaucu

SEQ ID NO: 249729 - RNA, 22 nt, Human
gugucccaaagauuagaaauca

SEQ ID NO: 249730 - RNA, 22 nt, Human
aaacaugaauagauauuaaaca

SEQ ID NO: 249731 - RNA, 18 nt, Human
agcaugagagaggcugug

SEQ ID NO: 249732 - RNA, 22 nt, Human
caaauuuaaguuagaaagcaau

SEQ ID NO: 249733 - RNA, 22 nt, Human
aucagagcugugauucccacuc

SEQ ID NO: 249734 - RNA, 22 nt, Human
gagcucagaggcgucuuugucc

SEQ ID NO: 249735 - RNA, 22 nt, Human
uaggcuggaacuuaggcagagg

SEQ ID NO: 249736 - RNA, 16 nt, Human
uuuuauugugacagcc

SEQ ID NO: 249737 - RNA, 22 nt, Human
uacaguaccagaaaugcuaaga

SEQ ID NO: 249738 - RNA, 22 nt, Human
gacacagaauuuacucccgaua

SEQ ID NO: 249739 - RNA, 22 nt, Human
cucuuaaagaauguuccagcug

SEQ ID NO: 249740 - RNA, 22 nt, Human
uuccugggcaggacgagagucu

SEQ ID NO: 249741 - RNA, 22 nt, Human
ugcacccaugucuccacguaca

SEQ ID NO: 249742 - RNA, 22 nt, Human
ggguuccaaacauagucuuccu

SEQ ID NO: 249743 - RNA, 22 nt, Human
ggacaugauauuucaggaagac

SEQ ID NO: 249744 - RNA, 20 nt, Human
uggguccugugggagaagaa

SEQ ID NO: 249745 - RNA, 22 nt, Human
ccagcaugagacgaugaugaag

SEQ ID NO: 249746 - RNA, 23 nt, Human
gugcacagucaagcccagcuuag

SEQ ID NO: 249747 - RNA, 22 nt, Human
acugccauuuugaauaauuacu

SEQ ID NO: 249748 - RNA, 22 nt, Human
aacuucugaccucaagaacugu

SEQ ID NO: 249749 - RNA, 22 nt, Human
augaggcaaucaugguccaguu

SEQ ID NO: 249750 - RNA, 22 nt, Human
aggcuucacauuuucuaggccu

SEQ ID NO: 249751 - RNA, 22 nt, Human
ugcaggugaaaauuaugaggau

SEQ ID NO: 249752 - RNA, 22 nt, Human
aauaauaagauacuaagggagu

SEQ ID NO: 249753 - RNA, 22 nt, Human
ugaaauagaaaaacaggcuucu

SEQ ID NO: 249754 - RNA, 22 nt, Human
cccagcccccgagugucuggaa

SEQ ID NO: 249755 - RNA, 22 nt, Human
gcacaguguaccacagucccua

SEQ ID NO: 249756 - RNA, 22 nt, Human
aguccuggugacacuccucuuc

SEQ ID NO: 249757 - RNA, 22 nt, Human
cccucagcuccacccucagcag

SEQ ID NO: 249758 - RNA, 22 nt, Human
ucuggcuguuaggccugaccuu

SEQ ID NO: 249759 - RNA, 22 nt, Human
ugcaggguagaugcaggcugug

SEQ ID NO: 249760 - RNA, 22 nt, Human
uaucuuugcaaauaucucuaag

SEQ ID NO: 249761 - RNA, 22 nt, Human
aggacagugguguucuggagug

SEQ ID NO: 249762 - RNA, 22 nt, Human
acagaaacccagaaaaccucuc

SEQ ID NO: 249763 - RNA, 22 nt, Human
aauguuaauucacagccaaaua

SEQ ID NO: 249764 - RNA, 22 nt, Human
aaagaacaucggagugggcggg

SEQ ID NO: 249765 - RNA, 22 nt, Human
agaagccacaggccucgucugg

SEQ ID NO: 249766 - RNA, 22 nt, Human
gcacuuucagcaggcagacaga

SEQ ID NO: 249767 - RNA, 21 nt, Human
ugucacauguggaugguauuu

SEQ ID NO: 249768 - RNA, 22 nt, Human
gugcaguaucucugggaguggg

SEQ ID NO: 249769 - RNA, 22 nt, Human
auaggacagcagacaauuagua

SEQ ID NO: 249770 - RNA, 22 nt, Human
cugugaaacuggacagcacuug

SEQ ID NO: 249771 - RNA, 22 nt, Human
ucaaagcaugguuuugaaagac

SEQ ID NO: 249772 - RNA, 22 nt, Human
uguugccugacuuuaaaaugug

SEQ ID NO: 249773 - RNA, 22 nt, Human
uuccaauuuguggugaguuaau

SEQ ID NO: 249774 - RNA, 22 nt, Human
cagcugaggucaaagaagcagg

SEQ ID NO: 249775 - RNA, 22 nt, Human
auggcagccuguggacagucaa

SEQ ID NO: 249776 - RNA, 21 nt, Human
gccagccuguuuaccuguggu

SEQ ID NO: 249777 - RNA, 20 nt, Human
uguaaauaggcauuguaguu

SEQ ID NO: 249778 - RNA, 22 nt, Human
agcagguguuuguaucauaagg

SEQ ID NO: 249779 - RNA, 22 nt, Human
uggcauuuccucagugcucaga

SEQ ID NO: 249780 - RNA, 19 nt, Human
aagagggaaagugcuaugc

SEQ ID NO: 249781 - RNA, 22 nt, Human
accaggaagcugugagaccuuu

SEQ ID NO: 249782 - RNA, 22 nt, Human
uggcuuccagagcugcuccacc

SEQ ID NO: 249783 - RNA, 22 nt, Human
cugcuccuccccaucaggcagc

SEQ ID NO: 249784 - RNA, 22 nt, Human
cccaggguugccugccucugcu

SEQ ID NO: 249785 - RNA, 22 nt, Human
ugucagguugguuuucagagaa

SEQ ID NO: 249786 - RNA, 22 nt, Human
gauggccaaggaccacgcaucg

SEQ ID NO: 249787 - RNA, 22 nt, Human
ucuccccaguauggauucucug

SEQ ID NO: 249788 - RNA, 22 nt, Human
gcucuggcagcugauauuagga

SEQ ID NO: 249789 - RNA, 22 nt, Human
cuauuaggcuuccauuucaugc

SEQ ID NO: 249790 - RNA, 22 nt, Human
ccaggcacugcucgaggugcua

SEQ ID NO: 249791 - RNA, 22 nt, Human
augucccugagggucucucuga

SEQ ID NO: 249792 - RNA, 22 nt, Human
uuagaaaauuugcuucuuugga

SEQ ID NO: 249793 - RNA, 22 nt, Human
gagauauguuggcagcugguau

SEQ ID NO: 249794 - RNA, 22 nt, Human
uauccaaacauauagucucucu

SEQ ID NO: 249795 - RNA, 22 nt, Human
uuacaguauuguuaaacucuuu

SEQ ID NO: 249796 - RNA, 22 nt, Human
acuguguugccuucccccagcc

SEQ ID NO: 249797 - RNA, 22 nt, Human
cuccaggagguugcugcuuccu

SEQ ID NO: 249798 - RNA, 22 nt, Human
cuagggacugggaccuuaguua

SEQ ID NO: 249799 - RNA, 22 nt, Human
gccucccuguucuuccacaaua

SEQ ID NO: 249800 - RNA, 22 nt, Human
cucacuggcaagacuacaggug

SEQ ID NO: 249801 - RNA, 22 nt, Human
gagaagguggaccugaaggagc

SEQ ID NO: 249802 - RNA, 21 nt, Human
cauugagauaggagagauugu

SEQ ID NO: 249803 - RNA, 19 nt, Human
agaggcagucuccaacagg

SEQ ID NO: 249804 - RNA, 22 nt, Human
uagagcuuagagaaugaguuug

SEQ ID NO: 249805 - RNA, 22 nt, Human
cucugugcuuaugcuccauggg

SEQ ID NO: 249806 - RNA, 22 nt, Human
aacaguauugguugaacucaag

SEQ ID NO: 249807 - RNA, 22 nt, Human
agaugauauacuacauggcuuc

SEQ ID NO: 249808 - RNA, 22 nt, Human
uuuugagauggugucucgcucc

SEQ ID NO: 249809 - RNA, 20 nt, Human
gcugccuuggauggcuacac

SEQ ID NO: 249810 - RNA, 22 nt, Human
guggauggcuaguugagaaggg

SEQ ID NO: 249811 - RNA, 22 nt, Human
ucccucucuggcuggggugcgg

SEQ ID NO: 249812 - RNA, 22 nt, Human
uuaugcuaguauaguccuuaga

SEQ ID NO: 249813 - RNA, 22 nt, Human
agcacacaggccaccuccacuu

SEQ ID NO: 249814 - RNA, 19 nt, Human
cacaauuaugagacacuua

SEQ ID NO: 249815 - RNA, 22 nt, Human
cagagacaacaaguuuaacuau

SEQ ID NO: 249816 - RNA, 22 nt, Human
guguucauugcuagugaggugu

SEQ ID NO: 249817 - RNA, 22 nt, Human
ugccaucuucucuggggauguu

SEQ ID NO: 249818 - RNA, 22 nt, Human
auuugggaaugugcauuauacu

SEQ ID NO: 249819 - RNA, 22 nt, Human
uagguucagagaacugaaaaua

SEQ ID NO: 249820 - RNA, 22 nt, Human
gcaccagcugcaggguggcuga

SEQ ID NO: 249821 - RNA, 22 nt, Human
uuuaucugaggaaagcagacaa

SEQ ID NO: 249822 - RNA, 22 nt, Human
cacaggaaugaacagggaaaga

SEQ ID NO: 249823 - RNA, 22 nt, Human
agaguaaauaggagaugacagc

SEQ ID NO: 249824 - RNA, 17 nt, Human
caggucugaggccaggc

SEQ ID NO: 249825 - RNA, 22 nt, Human
ggcagugaaugaaacagaggcu

SEQ ID NO: 249826 - RNA, 19 nt, Human
ugaggcaagcuuuuucuug

SEQ ID NO: 249827 - RNA, 22 nt, Human
caugacaaaucagaggggcuug

SEQ ID NO: 249828 - RNA, 22 nt, Human
gagggcacgaaacaaccacuuc

SEQ ID NO: 249829 - RNA, 22 nt, Human
ggagucuucagauagaguauuu

SEQ ID NO: 249830 - RNA, 16 nt, Human
ugccuugcugucaguc

SEQ ID NO: 249831 - RNA, 22 nt, Human
auaagcuuugcuggagagaccu

SEQ ID NO: 249832 - RNA, 22 nt, Human
uucccugguuaaccauuuucug

SEQ ID NO: 249833 - RNA, 22 nt, Human
gguuuaaaagccaugcaugggg

SEQ ID NO: 249834 - RNA, 23 nt, Human
ugucuggggcgccagaagagaga

SEQ ID NO: 249835 - RNA, 22 nt, Human
cugggcucuaggaaccauuccu

SEQ ID NO: 249836 - RNA, 22 nt, Human
uguuacaguacuacaauucugc

SEQ ID NO: 249837 - RNA, 22 nt, Human
uggcacacagagaagacacuug

SEQ ID NO: 249838 - RNA, 21 nt, Human
agcugcaagagcaacaucuuu

SEQ ID NO: 249839 - RNA, 22 nt, Human
aagaaaacguuuugaggaguuu

SEQ ID NO: 249840 - RNA, 22 nt, Human
ggacagacaaaaauaguaagca

SEQ ID NO: 249841 - RNA, 22 nt, Human
cucucccagucaggcucaggau

SEQ ID NO: 249842 - RNA, 22 nt, Human
ugcaggaauauugaugaacuua

SEQ ID NO: 249843 - RNA, 22 nt, Human
gauauaaauuaaucaagugcaa

SEQ ID NO: 249844 - RNA, 22 nt, Human
uaguuuuaugaauugguauaau

SEQ ID NO: 249845 - RNA, 22 nt, Human
cacagguggcuucuuucaucuu

SEQ ID NO: 249846 - RNA, 22 nt, Human
ggagggcaacuuuucaguaggu

SEQ ID NO: 249847 - RNA, 22 nt, Human
cagcaucauacuaccuaaauga

SEQ ID NO: 249848 - RNA, 22 nt, Human
ucugcaggacugaggccuguuu

SEQ ID NO: 249849 - RNA, 19 nt, Human
auuuuucuuccucugugca

SEQ ID NO: 249850 - RNA, 22 nt, Human
uuuaauguauucuuuggaacca

SEQ ID NO: 249851 - RNA, 22 nt, Human
agagcacuuucgagagccggag

SEQ ID NO: 249852 - RNA, 22 nt, Human
uucacacugucccggguggaaa

SEQ ID NO: 249853 - RNA, 22 nt, Human
uggggugguaauacaccguucu

SEQ ID NO: 249854 - RNA, 22 nt, Human
aaaguguggagauugaacuaaa

SEQ ID NO: 249855 - RNA, 22 nt, Human
gcucagccgaacuucagagcag

SEQ ID NO: 249856 - RNA, 22 nt, Human
uucugaaaggcagguuguuugc

SEQ ID NO: 249857 - RNA, 22 nt, Human
gcucuggguucugauuuaugag

SEQ ID NO: 249858 - RNA, 22 nt, Human
gaccauuuccaccaugggcaca

SEQ ID NO: 249859 - RNA, 22 nt, Human
cuucauuaaccaaaaugcaaua

SEQ ID NO: 249860 - RNA, 18 nt, Human
cuuuaugugcagagcuuu

SEQ ID NO: 249861 - RNA, 22 nt, Human
acaugaaaugcagccuguaacc

SEQ ID NO: 249862 - RNA, 22 nt, Human
uucucugguuugcuguuucuga

SEQ ID NO: 249863 - RNA, 20 nt, Human
aucagcaacugccacucagu

SEQ ID NO: 249864 - RNA, 22 nt, Human
gggaaaauauuaagcaggacuu

SEQ ID NO: 249865 - RNA, 22 nt, Human
ccugagccuggcucaugcacuc

SEQ ID NO: 249866 - RNA, 22 nt, Human
ucccaggcagcuucuuucauca

SEQ ID NO: 249867 - RNA, 22 nt, Human
cauuaaaauaucucaugguguu

SEQ ID NO: 249868 - RNA, 18 nt, Human
agagaugguguagaguuu

SEQ ID NO: 249869 - RNA, 22 nt, Human
cacauuuaauccuuuauaagua

SEQ ID NO: 249870 - RNA, 22 nt, Human
ggcugggaggccgugcugaccu

SEQ ID NO: 249871 - RNA, 22 nt, Human
gaccuggccugcacagcccuua

SEQ ID NO: 249872 - RNA, 22 nt, Human
uaagaaucuauuaggaauaugu

SEQ ID NO: 249873 - RNA, 22 nt, Human
gggaggaaugcaacuuauuuag

SEQ ID NO: 249874 - RNA, 22 nt, Human
uucucauguaaaugccaucauc

SEQ ID NO: 249875 - RNA, 22 nt, Human
cagaauaaagguacaauugagu

SEQ ID NO: 249876 - RNA, 22 nt, Human
uucuaauugaccuuaggcugug

SEQ ID NO: 249877 - RNA, 22 nt, Human
caguuccuugagaaugguugcu

SEQ ID NO: 249878 - RNA, 21 nt, Human
ugucagagcuuguaggacauu

SEQ ID NO: 249879 - RNA, 22 nt, Human
ccaggcugaauauguuccaggg

SEQ ID NO: 249880 - RNA, 22 nt, Human
gguccaucucuugagcccacau

SEQ ID NO: 249881 - RNA, 22 nt, Human
agcaaucaccaccucuauauuu

SEQ ID NO: 249882 - RNA, 22 nt, Human
acagcagauuucccugggcucc

SEQ ID NO: 249883 - RNA, 18 nt, Human
aggcaggcuggagugacu

SEQ ID NO: 249884 - RNA, 19 nt, Human
uggcuucuguuuucauguu

SEQ ID NO: 249885 - RNA, 22 nt, Human
uuuacagugucuuguugacugu

SEQ ID NO: 249886 - RNA, 22 nt, Human
agccucugcacuucuuacaggu

SEQ ID NO: 249887 - RNA, 22 nt, Human
guuccguuuauaugcuggauua

SEQ ID NO: 249888 - RNA, 20 nt, Human
gcaaaauaggcucuguuggu

SEQ ID NO: 249889 - RNA, 22 nt, Human
agagcucucuucauaacggccu

SEQ ID NO: 249890 - RNA, 22 nt, Human
gguggggcugcaagcaguucgg

SEQ ID NO: 249891 - RNA, 22 nt, Human
ggagaugguggaagcuggugca

SEQ ID NO: 249892 - RNA, 22 nt, Human
agaauaaauguuggacuuagga

SEQ ID NO: 249893 - RNA, 20 nt, Human
uuguauuccuugaaucaggu

SEQ ID NO: 249894 - RNA, 22 nt, Human
uccaggcuccccugcgugcucc

SEQ ID NO: 249895 - RNA, 22 nt, Human
uucuuaaaacuuauggacaggu

SEQ ID NO: 249896 - RNA, 22 nt, Human
augcugaagagagaacuacuca

SEQ ID NO: 249897 - RNA, 23 nt, Human
ugccagcagggaaugggaaggac

SEQ ID NO: 249898 - RNA, 22 nt, Human
uggcugcacuucaacacauccu

SEQ ID NO: 249899 - RNA, 22 nt, Human
gaagcaugcuaaggauucucag

SEQ ID NO: 249900 - RNA, 20 nt, Human
ccuggcuuugcagcaugaga

SEQ ID NO: 249901 - RNA, 22 nt, Human
gcuuccagaucccaugcucuua

SEQ ID NO: 249902 - RNA, 22 nt, Human
caggacagagcccagacugugu

SEQ ID NO: 249903 - RNA, 16 nt, Human
uggcuucccagagaua

SEQ ID NO: 249904 - RNA, 22 nt, Human
gagaaaaugucagacuuggucg

SEQ ID NO: 249905 - RNA, 22 nt, Human
aggagccagaauccagacucgg

SEQ ID NO: 249906 - RNA, 22 nt, Human
aaauuauuauaggcagagcuga

SEQ ID NO: 249907 - RNA, 18 nt, Human
ggcagugcagucucaggg

SEQ ID NO: 249908 - RNA, 22 nt, Human
ugcagagagcccugccuuccuc

SEQ ID NO: 249909 - RNA, 22 nt, Human
gucugcccagaagacauccccu

SEQ ID NO: 249910 - RNA, 19 nt, Human
acagaaauguaagugagac

SEQ ID NO: 249911 - RNA, 22 nt, Human
aaagacauuagauuaacguaca

SEQ ID NO: 249912 - RNA, 22 nt, Human
aggaagccugggagguuuggga

SEQ ID NO: 249913 - RNA, 22 nt, Human
aguuacaaacacuaucaguucu

SEQ ID NO: 249914 - RNA, 22 nt, Human
uaaaagacauauaacuguagga

SEQ ID NO: 249915 - RNA, 22 nt, Human
ucaaguauuuauuucugcuggc

SEQ ID NO: 249916 - RNA, 22 nt, Human
aguuacucacugaggguuuauu

SEQ ID NO: 249917 - RNA, 20 nt, Human
agucucuguagugccugaga

SEQ ID NO: 249918 - RNA, 22 nt, Human
acacagaaccucauagccucuc

SEQ ID NO: 249919 - RNA, 20 nt, Human
auauaauaaauuuugguuac

SEQ ID NO: 249920 - RNA, 22 nt, Human
cuccuucccaugagugugggca

SEQ ID NO: 249921 - RNA, 22 nt, Human
gcagcccaauggacugagacag

SEQ ID NO: 249922 - RNA, 22 nt, Human
aaucaauguuagucaugaauuu

SEQ ID NO: 249923 - RNA, 22 nt, Human
agugucuguugaguuucaaaag

SEQ ID NO: 249924 - RNA, 22 nt, Human
aguuucagaauuuaugcagaca

SEQ ID NO: 249925 - RNA, 22 nt, Human
accacuguacagcagauauagu

SEQ ID NO: 249926 - RNA, 20 nt, Human
uccccagggcaucaggagca

SEQ ID NO: 249927 - RNA, 22 nt, Human
ggaugucugucauuaugcuuuc

SEQ ID NO: 249928 - RNA, 22 nt, Human
agggccucgaaggcagagggau

SEQ ID NO: 249929 - RNA, 22 nt, Human
gaaaugcaaauucucucucgcu

SEQ ID NO: 249930 - RNA, 22 nt, Human
gcuuuugccuacaucuuggucu

SEQ ID NO: 249931 - RNA, 18 nt, Human
acugugguuuauguguag

SEQ ID NO: 249932 - RNA, 22 nt, Human
ugucuuuagccagcagucuucu

SEQ ID NO: 249933 - RNA, 22 nt, Human
uugaaugaggaagagcacuggc

SEQ ID NO: 249934 - RNA, 22 nt, Human
auucaacuauguauagucuucu

SEQ ID NO: 249935 - RNA, 22 nt, Human
gaugaucugcaagaacuacaug

SEQ ID NO: 249936 - RNA, 22 nt, Human
uccaugagagguaacuuuacaa

SEQ ID NO: 249937 - RNA, 22 nt, Human
gacccuccuacuacccuggaaa

SEQ ID NO: 249938 - RNA, 22 nt, Human
ggcuucugagugcucugcuguu

SEQ ID NO: 249939 - RNA, 22 nt, Human
aagaguuuaugauauaacaugu

SEQ ID NO: 249940 - RNA, 22 nt, Human
auccugggcaagucaauguccc

SEQ ID NO: 249941 - RNA, 20 nt, Human
uggcaggacuggcuccaccc

SEQ ID NO: 249942 - RNA, 23 nt, Human
agugcucagggcauuaggcuaga

SEQ ID NO: 249943 - RNA, 22 nt, Human
gucuuauuagguuaacccugcu

SEQ ID NO: 249944 - RNA, 22 nt, Human
cuccagcuuuuucccaguuggc

SEQ ID NO: 249945 - RNA, 22 nt, Human
gcccugagcuagugugggcagg

SEQ ID NO: 249946 - RNA, 22 nt, Human
acccagcccagaaucuggggcc

SEQ ID NO: 249947 - RNA, 22 nt, Human
uguguccuuaugaaaauacugu

SEQ ID NO: 249948 - RNA, 22 nt, Human
ugugccuggcauucugggcuuc

SEQ ID NO: 249949 - RNA, 20 nt, Human
ugaggcaggagaauggcaug

SEQ ID NO: 249950 - RNA, 22 nt, Human
cccagcaucccagugggcagca

SEQ ID NO: 249951 - RNA, 22 nt, Human
gacaaggaaauuacuagcugga

SEQ ID NO: 249952 - RNA, 22 nt, Human
aaaguucagugccuucuauaca

SEQ ID NO: 249953 - RNA, 22 nt, Human
gacccugccaugagugacaggg

SEQ ID NO: 249954 - RNA, 22 nt, Human
acugaaaguccagcaugguaca

SEQ ID NO: 249955 - RNA, 22 nt, Human
uucauguaauuccauaagguaa

SEQ ID NO: 249956 - RNA, 22 nt, Human
ggaggccagggacccagucagc

SEQ ID NO: 249957 - RNA, 22 nt, Human
augaaagaugauuuaaaguacu

SEQ ID NO: 249958 - RNA, 22 nt, Human
ccccugaagacaauggagaggu

SEQ ID NO: 249959 - RNA, 22 nt, Human
agaguacugcugcuggguacug

SEQ ID NO: 249960 - RNA, 22 nt, Human
ggccugaggcgucccagcugug

SEQ ID NO: 249961 - RNA, 22 nt, Human
ucagaacaguucuuaauauugc

SEQ ID NO: 249962 - RNA, 22 nt, Human
uagcuuuaaaaaucaucaaagc

SEQ ID NO: 249963 - RNA, 22 nt, Human
gcugguccauuggcacugcuca

SEQ ID NO: 249964 - RNA, 22 nt, Human
uuguguguagacucagccauug

SEQ ID NO: 249965 - RNA, 22 nt, Human
agcuccugaaaagcgcuugcuu

SEQ ID NO: 249966 - RNA, 21 nt, Human
uggaaacuucuagcuuacgua

SEQ ID NO: 249967 - RNA, 22 nt, Human
uugagcccaggaggccugggug

SEQ ID NO: 249968 - RNA, 22 nt, Human
uugaggagugugaggucuccca

SEQ ID NO: 249969 - RNA, 22 nt, Human
cccuaggcugggcucuuggcuu

SEQ ID NO: 249970 - RNA, 22 nt, Human
gcagggcucaacaggacacccc

SEQ ID NO: 249971 - RNA, 22 nt, Human
acuucuaagcucaaauugguau

SEQ ID NO: 249972 - RNA, 22 nt, Human
augcaugaugaacuugcuuuca

SEQ ID NO: 249973 - RNA, 22 nt, Human
ccugaggucagccauucuugcc

SEQ ID NO: 249974 - RNA, 22 nt, Human
agggucugaccaccaguaggga

SEQ ID NO: 249975 - RNA, 17 nt, Human
gcccuggagccaggcua

SEQ ID NO: 249976 - RNA, 22 nt, Human
uccauccauaccacuuggagac

SEQ ID NO: 249977 - RNA, 22 nt, Human
ggcucugcggcgugugcgcagg

SEQ ID NO: 249978 - RNA, 22 nt, Human
aacauuucuucugaaacugagu

SEQ ID NO: 249979 - RNA, 22 nt, Human
gggaccuggucuagcacugagc

SEQ ID NO: 249980 - RNA, 22 nt, Human
guuauauuggcagaagagaaga

SEQ ID NO: 249981 - RNA, 23 nt, Human
uagugucaagagggaguguaauu

SEQ ID NO: 249982 - RNA, 22 nt, Human
caauuucuaacauuccauggau

SEQ ID NO: 249983 - RNA, 22 nt, Human
ucagucuuuuucucuuaaguac

SEQ ID NO: 249984 - RNA, 22 nt, Human
ucucuaaaguagaaaagacccc

SEQ ID NO: 249985 - RNA, 22 nt, Human
uuuuagcuguugauuguucccc

SEQ ID NO: 249986 - RNA, 18 nt, Human
ucuccuggguaggggccu

SEQ ID NO: 249987 - RNA, 22 nt, Human
gacaagauuaaccauaguuaag

SEQ ID NO: 249988 - RNA, 22 nt, Human
uuacuguuuuuaacuaauugug

SEQ ID NO: 249989 - RNA, 22 nt, Human
ugggaaggugauuuuccaaaag

SEQ ID NO: 249990 - RNA, 22 nt, Human
gccuccuguuaugccaugugcc

SEQ ID NO: 249991 - RNA, 20 nt, Human
ggcugucccgcggcugccgg

SEQ ID NO: 249992 - RNA, 22 nt, Human
uaggacuugguuugaagauuuu

SEQ ID NO: 249993 - RNA, 22 nt, Human
ucuaaguaaaauuugucauuuc

SEQ ID NO: 249994 - RNA, 22 nt, Human
aggacccacgcacaggaacccc

SEQ ID NO: 249995 - RNA, 22 nt, Human
cagaccucaguccucaguagga

SEQ ID NO: 249996 - RNA, 22 nt, Human
uguuugaacugaauaacauagu

SEQ ID NO: 249997 - RNA, 22 nt, Human
aucagagauggcuccagugcuc

SEQ ID NO: 249998 - RNA, 22 nt, Human
gucagcugggcaucugcagaug

SEQ ID NO: 249999 - RNA, 22 nt, Human
uccccucccuuccaacagagcu

SEQ ID NO: 250000 - RNA, 22 nt, Human
ggcugucuugggagcucccccg

SEQ ID NO: 250001 - RNA, 22 nt, Human
uauaggaaauaggucuucugug

SEQ ID NO: 250002 - RNA, 22 nt, Human
aggagcugaagucucugcacuc

SEQ ID NO: 250003 - RNA, 22 nt, Human
ucaggaaggcuucacacgagug

SEQ ID NO: 250004 - RNA, 20 nt, Human
cagagccaagagcagcaucu

SEQ ID NO: 250005 - RNA, 22 nt, Human
agcccaggagguggagguugca

SEQ ID NO: 250006 - RNA, 22 nt, Human
uaugcacgucuauuuaugaaga

SEQ ID NO: 250007 - RNA, 22 nt, Human
gaggcugaauggccagaagcca

SEQ ID NO: 250008 - RNA, 22 nt, Human
aguuugaauugaaaugcagaug

SEQ ID NO: 250009 - RNA, 22 nt, Human
cagggagcuuucccaggacccu

SEQ ID NO: 250010 - RNA, 22 nt, Human
uggaggaaaauuacuggggucu

SEQ ID NO: 250011 - RNA, 22 nt, Human
ucuuggcuacuuaggaggauuc

SEQ ID NO: 250012 - RNA, 22 nt, Human
gacagcuguacacuccugguua

SEQ ID NO: 250013 - RNA, 22 nt, Human
cugagugauagcgauggggaac

SEQ ID NO: 250014 - RNA, 22 nt, Human
ugguuaaguccagaaaggaagc

SEQ ID NO: 250015 - RNA, 22 nt, Human
cagaggcagaggucaucucugg

SEQ ID NO: 250016 - RNA, 22 nt, Human
auacaaagacaaaucucaaucu

SEQ ID NO: 250017 - RNA, 22 nt, Human
aggguaggguaaaugaugcauc

SEQ ID NO: 250018 - RNA, 22 nt, Human
ucuggcucuuugggugauugua

SEQ ID NO: 250019 - RNA, 22 nt, Human
uaugcacagaaguuugcugaau

SEQ ID NO: 250020 - RNA, 22 nt, Human
cacagcaauagcuaacugauac

SEQ ID NO: 250021 - RNA, 22 nt, Human
aggaugaggcuggcaggucuug

SEQ ID NO: 250022 - RNA, 22 nt, Human
ccauuuuauuagugacauuuag

SEQ ID NO: 250023 - RNA, 22 nt, Human
ggcuuccuggggccuccugcaa

SEQ ID NO: 250024 - RNA, 22 nt, Human
cugugggauucaugacauuaau

SEQ ID NO: 250025 - RNA, 22 nt, Human
cagguggucaggcagaugggcu

SEQ ID NO: 250026 - RNA, 22 nt, Human
ucaucuuuccucaaaagaucca

SEQ ID NO: 250027 - RNA, 19 nt, Human
ugggugugaccaucucugc

SEQ ID NO: 250028 - RNA, 22 nt, Human
ucuuuuccuucccuacagaucu

SEQ ID NO: 250029 - RNA, 22 nt, Human
uuacaugguuuauuuaccuaag

SEQ ID NO: 250030 - RNA, 22 nt, Human
gagcuucagagaccacuuaacu

SEQ ID NO: 250031 - RNA, 22 nt, Human
ccagagagagaggucaauggca

SEQ ID NO: 250032 - RNA, 22 nt, Human
uagagaaauaagcuuugccuug

SEQ ID NO: 250033 - RNA, 22 nt, Human
acauagaaauuuauuucuuaca

SEQ ID NO: 250034 - RNA, 22 nt, Human
ucugguuagccaauaaugccaa

SEQ ID NO: 250035 - RNA, 22 nt, Human
gcccugagccuaugagccucuc

SEQ ID NO: 250036 - RNA, 22 nt, Human
caaaggcuuccacugcauccuu

SEQ ID NO: 250037 - RNA, 22 nt, Human
ucucuggguugagaacuaggac

SEQ ID NO: 250038 - RNA, 22 nt, Human
aggaaauguaguccucaucucc

SEQ ID NO: 250039 - RNA, 22 nt, Human
cugagagguaagcagcgcagug

SEQ ID NO: 250040 - RNA, 22 nt, Human
ugcaggguggagcggaagcgga

SEQ ID NO: 250041 - RNA, 22 nt, Human
uuccuccagccuggagcacuuc

SEQ ID NO: 250042 - RNA, 22 nt, Human
acagaauaacucuugcuugagu

SEQ ID NO: 250043 - RNA, 22 nt, Human
cagcaagucauccaggaugaug

SEQ ID NO: 250044 - RNA, 22 nt, Human
aggaaggacuccaugguccguc

SEQ ID NO: 250045 - RNA, 22 nt, Human
uccaguuuacaggguugcuuuu

SEQ ID NO: 250046 - RNA, 22 nt, Human
uaacauauuguguggcacuagg

SEQ ID NO: 250047 - RNA, 22 nt, Human
agggccuguccgcucccgcccg

SEQ ID NO: 250048 - RNA, 22 nt, Human
ucucucagaacugcagcugcag

SEQ ID NO: 250049 - RNA, 22 nt, Human
aauaauacaugagauuaauguu

SEQ ID NO: 250050 - RNA, 22 nt, Human
uauuucuguaacucagggucug

SEQ ID NO: 250051 - RNA, 19 nt, Human
cacaugagggcugagggac

SEQ ID NO: 250052 - RNA, 22 nt, Human
uggcuucugcauauuuuuagag

SEQ ID NO: 250053 - RNA, 22 nt, Human
uugugcugagcuucuagcugug

SEQ ID NO: 250054 - RNA, 22 nt, Human
ccucugggugggaggccgggcg

SEQ ID NO: 250055 - RNA, 22 nt, Human
guggccagcaagugcugccucu

SEQ ID NO: 250056 - RNA, 22 nt, Human
ugaguuauauauacuggcucug

SEQ ID NO: 250057 - RNA, 22 nt, Human
uccugggagcauggugccguga

SEQ ID NO: 250058 - RNA, 22 nt, Human
ucuccacaccagaaggagcuga

SEQ ID NO: 250059 - RNA, 22 nt, Human
aaagacuugggagcaguaugcu

SEQ ID NO: 250060 - RNA, 22 nt, Human
uucuucagauggugagaccucc

SEQ ID NO: 250061 - RNA, 22 nt, Human
cagcaggugcaggugcggccgc

SEQ ID NO: 250062 - RNA, 22 nt, Human
gcacacagggauuuuugaaugg

SEQ ID NO: 250063 - RNA, 22 nt, Human
aaaccacacuuagcaguuucgu

SEQ ID NO: 250064 - RNA, 21 nt, Human
accaguuuggggggcuuccug

SEQ ID NO: 250065 - RNA, 22 nt, Human
uaauuauuaugacaacaauugc

SEQ ID NO: 250066 - RNA, 22 nt, Human
auuagaaugcaggguucauugu

SEQ ID NO: 250067 - RNA, 22 nt, Human
uggcaggaggaugaggcggcua

SEQ ID NO: 250068 - RNA, 21 nt, Human
ccuaggaggcuuaauuaggcu

SEQ ID NO: 250069 - RNA, 22 nt, Human
caaaugauagagccgauuauca

SEQ ID NO: 250070 - RNA, 22 nt, Human
uguggcugggaagaagguaacu

SEQ ID NO: 250071 - RNA, 22 nt, Human
uuucugggacuggggagauucu

SEQ ID NO: 250072 - RNA, 22 nt, Human
aaggcagauaagaauucagcaa

SEQ ID NO: 250073 - RNA, 22 nt, Human
acaguauacauugauuaggacc

SEQ ID NO: 250074 - RNA, 22 nt, Human
guucaagguuuuacagagugua

SEQ ID NO: 250075 - RNA, 22 nt, Human
cucugcaggcacccaggguggg

SEQ ID NO: 250076 - RNA, 22 nt, Human
gcagguggucacucauccccag

SEQ ID NO: 250077 - RNA, 22 nt, Human
uucauguaccguguaccaggca

SEQ ID NO: 250078 - RNA, 22 nt, Human
ggcagcaguccauggcccaagg

SEQ ID NO: 250079 - RNA, 22 nt, Human
cuccugggaaaugaaggggcag

SEQ ID NO: 250080 - RNA, 22 nt, Human
cacagcagggaugaauggagug

SEQ ID NO: 250081 - RNA, 22 nt, Human
caggccacgccccggcguguga

SEQ ID NO: 250082 - RNA, 22 nt, Human
caggcucccacaagcucccagc

SEQ ID NO: 250083 - RNA, 22 nt, Human
ucccagagacagagccuccucc

SEQ ID NO: 250084 - RNA, 21 nt, Human
cagcccagcuucuuccccagu

SEQ ID NO: 250085 - RNA, 22 nt, Human
gaagcagugugaacccauguaa

SEQ ID NO: 250086 - RNA, 22 nt, Human
ugaguauuuucccuaucaaugu

SEQ ID NO: 250087 - RNA, 22 nt, Human
caaaguccuagaacagugcuug

SEQ ID NO: 250088 - RNA, 22 nt, Human
gcagcccaggacccuggacaga

SEQ ID NO: 250089 - RNA, 22 nt, Human
uggaaaacaaagcucucauuau

SEQ ID NO: 250090 - RNA, 22 nt, Human
uuccacggggcuccccgcucuu

SEQ ID NO: 250091 - RNA, 22 nt, Human
auuuaagaggcugcuagaguau

SEQ ID NO: 250092 - RNA, 22 nt, Human
uuauugccugauugaggucauu

SEQ ID NO: 250093 - RNA, 22 nt, Human
ggagccugaaaagucugcauuu

SEQ ID NO: 250094 - RNA, 22 nt, Human
acugggcuguuccuuauuucua

SEQ ID NO: 250095 - RNA, 22 nt, Human
acaggucuacuggcaagcagug

SEQ ID NO: 250096 - RNA, 22 nt, Human
cccacagggcugcugauggcag

SEQ ID NO: 250097 - RNA, 22 nt, Human
uuacagauacuuuguaggcaag

SEQ ID NO: 250098 - RNA, 22 nt, Human
caugugaauuccaaagcuaggu

SEQ ID NO: 250099 - RNA, 18 nt, Human
uaagagcagacuguaggc

SEQ ID NO: 250100 - RNA, 22 nt, Human
ccucagagcgcguggcauuauu

SEQ ID NO: 250101 - RNA, 22 nt, Human
ugccucagagugggcuugcuau

SEQ ID NO: 250102 - RNA, 22 nt, Human
gguagcugcagcaggcuggcaa

SEQ ID NO: 250103 - RNA, 22 nt, Human
ugggagagcagagaacccucuu

SEQ ID NO: 250104 - RNA, 22 nt, Human
ccagguaacuugagaacaugag

SEQ ID NO: 250105 - RNA, 22 nt, Human
uuagagaauuccaaaugacuac

SEQ ID NO: 250106 - RNA, 22 nt, Human
uugcaacacaaaguuugauucc

SEQ ID NO: 250107 - RNA, 22 nt, Human
aaauuuaaggaggugcucacuu

SEQ ID NO: 250108 - RNA, 22 nt, Human
guaucuuuuacaccaggaaauu

SEQ ID NO: 250109 - RNA, 22 nt, Human
aaggagcucuuaaaaucagaga

SEQ ID NO: 250110 - RNA, 22 nt, Human
cuggauccaucgggucccgagu

SEQ ID NO: 250111 - RNA, 20 nt, Human
uugagcuuccaagucuuugu

SEQ ID NO: 250112 - RNA, 22 nt, Human
ucucagggcucagagcucaggc

SEQ ID NO: 250113 - RNA, 22 nt, Human
cuuaauuuaagccuagaaugca

SEQ ID NO: 250114 - RNA, 22 nt, Human
uucaguuucuaaagauguuccu

SEQ ID NO: 250115 - RNA, 22 nt, Human
cacaguuuuaucuuauacugau

SEQ ID NO: 250116 - RNA, 22 nt, Human
gugugcagcagagacaggacuc

SEQ ID NO: 250117 - RNA, 22 nt, Human
ugcuucaggagaugucaccaug

SEQ ID NO: 250118 - RNA, 22 nt, Human
uacagacaaagugcuauagggu

SEQ ID NO: 250119 - RNA, 22 nt, Human
gacuggccuggggcugggcaca

SEQ ID NO: 250120 - RNA, 22 nt, Human
aaaacacugcaaagcugauugg

SEQ ID NO: 250121 - RNA, 22 nt, Human
caagugucuucaaaggcuaaaa

SEQ ID NO: 250122 - RNA, 22 nt, Human
cugggacagagcagcagugggg

SEQ ID NO: 250123 - RNA, 22 nt, Human
aggacacaccagguccagcugu

SEQ ID NO: 250124 - RNA, 22 nt, Human
cugcaccaucuggagcaccucc

SEQ ID NO: 250125 - RNA, 22 nt, Human
ccauggcuuacagauggagcau

SEQ ID NO: 250126 - RNA, 22 nt, Human
gggcuucugggcaccacucccu

SEQ ID NO: 250127 - RNA, 22 nt, Human
uugccuggcuuguagauggggg

SEQ ID NO: 250128 - RNA, 22 nt, Human
caagaacauugugaucacuuca

SEQ ID NO: 250129 - RNA, 22 nt, Human
guggagcuggcccaagaagcug

SEQ ID NO: 250130 - RNA, 22 nt, Human
augccuuauuguaaucuuucca

SEQ ID NO: 250131 - RNA, 22 nt, Human
uaaagccaacacuuuacugcuc

SEQ ID NO: 250132 - RNA, 22 nt, Human
uaugaaacauucauacaaauaa

SEQ ID NO: 250133 - RNA, 22 nt, Human
auaaagcauuuccccugugugg

SEQ ID NO: 250134 - RNA, 23 nt, Human
agaggcacuaauuauucagagau

SEQ ID NO: 250135 - RNA, 22 nt, Human
gacagguggguucucguaucug

SEQ ID NO: 250136 - RNA, 22 nt, Human
agagcuggagcagccccacugg

SEQ ID NO: 250137 - RNA, 22 nt, Human
agcugcaaccuuagcuauaggc

SEQ ID NO: 250138 - RNA, 17 nt, Human
uacaaugugauucaauc

SEQ ID NO: 250139 - RNA, 22 nt, Human
acaugggaucaaugaggcaggc

SEQ ID NO: 250140 - RNA, 22 nt, Human
guauacaugugguaaaaugcac

SEQ ID NO: 250141 - RNA, 22 nt, Human
cagggcaggacagauacauuac

SEQ ID NO: 250142 - RNA, 22 nt, Human
aaacaccagcacuguuuacaaa

SEQ ID NO: 250143 - RNA, 22 nt, Human
uccaggacuuagugaccuaaaa

SEQ ID NO: 250144 - RNA, 22 nt, Human
aaacaaacaauuaguugugugg

SEQ ID NO: 250145 - RNA, 22 nt, Human
acacaguauugugacuauaacu

SEQ ID NO: 250146 - RNA, 22 nt, Human
uguaaugauguacuuagaagga

SEQ ID NO: 250147 - RNA, 22 nt, Human
ugugcugagugaucccauuccu

SEQ ID NO: 250148 - RNA, 22 nt, Human
uguaccuuuuucugugcaugcu

SEQ ID NO: 250149 - RNA, 22 nt, Human
gaggagcuggcagcgucuccgc

SEQ ID NO: 250150 - RNA, 22 nt, Human
aacgucuucucuccaaguaaau

SEQ ID NO: 250151 - RNA, 22 nt, Human
aauacauguuuucuacuauucu

SEQ ID NO: 250152 - RNA, 22 nt, Human
acaacaguagccuuuacaaggc

SEQ ID NO: 250153 - RNA, 22 nt, Human
agccucugacugucagcaaggu

SEQ ID NO: 250154 - RNA, 22 nt, Human
uuccucaguuagugccugaggc

SEQ ID NO: 250155 - RNA, 22 nt, Human
acagaagaccagagagcuaacu

SEQ ID NO: 250156 - RNA, 22 nt, Human
gcacacagagaggugguauguc

SEQ ID NO: 250157 - RNA, 22 nt, Human
ucuuagcaaauacuacuuagaa

SEQ ID NO: 250158 - RNA, 22 nt, Human
ccaccagcagugugcaaggauu

SEQ ID NO: 250159 - RNA, 22 nt, Human
uuaauacauuucagacuguuau

SEQ ID NO: 250160 - RNA, 22 nt, Human
ucucagaggcccgacguucucc

SEQ ID NO: 250161 - RNA, 22 nt, Human
cagagcugauuggauccagaga

SEQ ID NO: 250162 - RNA, 22 nt, Human
uauguuacuucuguaucugcuu

SEQ ID NO: 250163 - RNA, 21 nt, Human
ggcugccugggaagaagaaga

SEQ ID NO: 250164 - RNA, 22 nt, Human
uugcucauacucauguugugau

SEQ ID NO: 250165 - RNA, 22 nt, Human
uuggaagcauucugaaugucca

SEQ ID NO: 250166 - RNA, 22 nt, Human
acauuuaaauaugccuuauauu

SEQ ID NO: 250167 - RNA, 22 nt, Human
cucuggaguucucaugaggaac

SEQ ID NO: 250168 - RNA, 23 nt, Human
aggcccagguauguuuguuuugg

SEQ ID NO: 250169 - RNA, 22 nt, Human
uacagacaguuuuucagauauu

SEQ ID NO: 250170 - RNA, 22 nt, Human
ccagcugucacucagaaaggcc

SEQ ID NO: 250171 - RNA, 22 nt, Human
acccauuccuuuacuucaucug

SEQ ID NO: 250172 - RNA, 22 nt, Human
ugccuuagagcacucaagagug

SEQ ID NO: 250173 - RNA, 22 nt, Human
acaggcugaggaugauugcauc

SEQ ID NO: 250174 - RNA, 22 nt, Human
uccagcagccacaccucuggac

SEQ ID NO: 250175 - RNA, 22 nt, Human
ucagagcauucgggugacaaau

SEQ ID NO: 250176 - RNA, 22 nt, Human
cagcuguguaaacacaugugua

SEQ ID NO: 250177 - RNA, 22 nt, Human
uuuauucugugcuacaugaaga

SEQ ID NO: 250178 - RNA, 22 nt, Human
guuuuauaugucucugcugaca

SEQ ID NO: 250179 - RNA, 22 nt, Human
cagggaugggauggagucaguu

SEQ ID NO: 250180 - RNA, 22 nt, Human
agcuagaauguuccuuuucauu

SEQ ID NO: 250181 - RNA, 22 nt, Human
uacagagacccacaagagacug

SEQ ID NO: 250182 - RNA, 19 nt, Human
ucagcagcacugugauuuc

SEQ ID NO: 250183 - RNA, 22 nt, Human
auuucugugcaguaaaugguga

SEQ ID NO: 250184 - RNA, 22 nt, Human
aaagcacauuacaagcucaguc

SEQ ID NO: 250185 - RNA, 22 nt, Human
uuggcuacaucgaggcuccagc

SEQ ID NO: 250186 - RNA, 22 nt, Human
uggcucagugcauucacaguaa

SEQ ID NO: 250187 - RNA, 22 nt, Human
uucaagugaggcugucuuuaga

SEQ ID NO: 250188 - RNA, 22 nt, Human
aggaagccaggcccuugggugg

SEQ ID NO: 250189 - RNA, 22 nt, Human
ccuaguuuucauucagcagccu

SEQ ID NO: 250190 - RNA, 18 nt, Human
gagcuugaaauggcuuuu

SEQ ID NO: 250191 - RNA, 22 nt, Human
uuuagcagugaagugaagugaa

SEQ ID NO: 250192 - RNA, 22 nt, Human
acaagguuugguccuauauuuu

SEQ ID NO: 250193 - RNA, 22 nt, Human
aacugcaacuuguuugauucuu

SEQ ID NO: 250194 - RNA, 22 nt, Human
auuuuucucuuuccacugagau

SEQ ID NO: 250195 - RNA, 22 nt, Human
aaagccauaucuauucuauucu

SEQ ID NO: 250196 - RNA, 22 nt, Human
aaaguguugggauuacaggcau

SEQ ID NO: 250197 - RNA, 22 nt, Human
ugcccugcagacccugcagugu

SEQ ID NO: 250198 - RNA, 18 nt, Human
ggagcccagaggacagga

SEQ ID NO: 250199 - RNA, 22 nt, Human
uuauuucauguaaaauuuaugu

SEQ ID NO: 250200 - RNA, 22 nt, Human
aaaaauguuaucuacuguccga

SEQ ID NO: 250201 - RNA, 22 nt, Human
auguccagagccggccugcuga

SEQ ID NO: 250202 - RNA, 22 nt, Human
uguggcuguguccaccugcugc

SEQ ID NO: 250203 - RNA, 22 nt, Human
acuguauuuccaacagacaaau

SEQ ID NO: 250204 - RNA, 22 nt, Human
uuugcuuuugugcucuaguggu

SEQ ID NO: 250205 - RNA, 22 nt, Human
ugcuccagcaccaagagcucca

SEQ ID NO: 250206 - RNA, 22 nt, Human
agcagggcuuugucucugugaa

SEQ ID NO: 250207 - RNA, 22 nt, Human
ugcuacagagccaggaagagug

SEQ ID NO: 250208 - RNA, 22 nt, Human
caaguacaaaaugauauuuagu

SEQ ID NO: 250209 - RNA, 22 nt, Human
cucuggaaaaccacuagcagga

SEQ ID NO: 250210 - RNA, 22 nt, Human
ucuagaaucuaaacuauaguuu

SEQ ID NO: 250211 - RNA, 22 nt, Human
ucugucuucuucauugccuaua

SEQ ID NO: 250212 - RNA, 22 nt, Human
gcugcuaagcguuucuguucca

SEQ ID NO: 250213 - RNA, 22 nt, Human
ggcuuucugagucaaacacuga

SEQ ID NO: 250214 - RNA, 18 nt, Human
cuagagaagguuacuaug

SEQ ID NO: 250215 - RNA, 22 nt, Human
augagggagggguggugccgca

SEQ ID NO: 250216 - RNA, 22 nt, Human
cagccacucggccauaaaggcu

SEQ ID NO: 250217 - RNA, 22 nt, Human
cuucccacuaguaucacagagc

SEQ ID NO: 250218 - RNA, 17 nt, Human
gcucugccccagccucu

SEQ ID NO: 250219 - RNA, 22 nt, Human
cguggcugguggaccugagggc

SEQ ID NO: 250220 - RNA, 22 nt, Human
auuucuuuucaagagggugcuu

SEQ ID NO: 250221 - RNA, 22 nt, Human
uuauugagagcuguuuuauggc

SEQ ID NO: 250222 - RNA, 22 nt, Human
aaaaugauauccugacuuuuau

SEQ ID NO: 250223 - RNA, 22 nt, Human
agcugccuggccggagccacug

SEQ ID NO: 250224 - RNA, 22 nt, Human
acauguuuaaguuuguuauaug

SEQ ID NO: 250225 - RNA, 22 nt, Human
gcaaggcagcauccuuuugagg

SEQ ID NO: 250226 - RNA, 22 nt, Human
auaugugugccauuucagcagu

SEQ ID NO: 250227 - RNA, 22 nt, Human
agguuucaugggagacaacuca

SEQ ID NO: 250228 - RNA, 20 nt, Human
uuggaacaguggaucagcag

SEQ ID NO: 250229 - RNA, 22 nt, Human
gaggaccacagaugagccugca

SEQ ID NO: 250230 - RNA, 22 nt, Human
uucuuugguguuacccagcuca

SEQ ID NO: 250231 - RNA, 22 nt, Human
ucuccagggagguagcccagug

SEQ ID NO: 250232 - RNA, 22 nt, Human
uugguuacaaguuugcucugcc

SEQ ID NO: 250233 - RNA, 23 nt, Human
gccugcugucacagcgggcccag

SEQ ID NO: 250234 - RNA, 22 nt, Human
agaaaguuuugugcuauauaug

SEQ ID NO: 250235 - RNA, 22 nt, Human
uuucauucauuauacaguagag

SEQ ID NO: 250236 - RNA, 22 nt, Human
caagugggaccugucugauucc

SEQ ID NO: 250237 - RNA, 22 nt, Human
ucuucccacugcccaugggcag

SEQ ID NO: 250238 - RNA, 22 nt, Human
gcaacaguuggauuccagagga

SEQ ID NO: 250239 - RNA, 22 nt, Human
acuggcagguccaucgcccuuu

SEQ ID NO: 250240 - RNA, 22 nt, Human
accugggagucacaccugagaa

SEQ ID NO: 250241 - RNA, 22 nt, Human
ccuugagaugagcuaauuuuuu

SEQ ID NO: 250242 - RNA, 22 nt, Human
cccacugcugcucuccauggca

SEQ ID NO: 250243 - RNA, 22 nt, Human
uggaaccuggugauguacaagu

SEQ ID NO: 250244 - RNA, 22 nt, Human
uccaauauuucucauauaugga

SEQ ID NO: 250245 - RNA, 22 nt, Human
gcugggcucagaccuagugaac

SEQ ID NO: 250246 - RNA, 22 nt, Human
uguucauuaaacuacugugugg

SEQ ID NO: 250247 - RNA, 22 nt, Human
uaagguuucuaguuucuaaacu

SEQ ID NO: 250248 - RNA, 21 nt, Human
aagcuuggcugauguuauugg

SEQ ID NO: 250249 - RNA, 22 nt, Human
gucugcccuuccucuccacgau

SEQ ID NO: 250250 - RNA, 22 nt, Human
cuccucugucuaccacgagggu

SEQ ID NO: 250251 - RNA, 22 nt, Human
uugcugauuuccccuugagugu

SEQ ID NO: 250252 - RNA, 22 nt, Human
cacuguauuauuaggaaugaca

SEQ ID NO: 250253 - RNA, 21 nt, Human
agcaggugcuguuggaggaaa

SEQ ID NO: 250254 - RNA, 22 nt, Human
uuacaauugagucuauuguaug

SEQ ID NO: 250255 - RNA, 22 nt, Human
accugcaguggccacuccuaau

SEQ ID NO: 250256 - RNA, 22 nt, Human
uucucuggcgcgcugugcuaug

SEQ ID NO: 250257 - RNA, 22 nt, Human
aggguauguuuuaggcugaguu

SEQ ID NO: 250258 - RNA, 22 nt, Human
aguguacaucagaacauaucaa

SEQ ID NO: 250259 - RNA, 22 nt, Human
ggccccaguucacuccuggccg

SEQ ID NO: 250260 - RNA, 22 nt, Human
aaagcaggcagcaggcuggauu

SEQ ID NO: 250261 - RNA, 22 nt, Human
augaaucuguuuuuugucaaua

SEQ ID NO: 250262 - RNA, 20 nt, Human
ucagugcucaggcaccaggu

SEQ ID NO: 250263 - RNA, 22 nt, Human
agagcagccugugaugaugcac

SEQ ID NO: 250264 - RNA, 22 nt, Human
acuugguugcaaaugaauuauu

SEQ ID NO: 250265 - RNA, 22 nt, Human
aauacauaauaaguuuugucug

SEQ ID NO: 250266 - RNA, 22 nt, Human
cagcugucugaagcaggagucc

SEQ ID NO: 250267 - RNA, 22 nt, Human
uauugcugacuuguucaguguu

SEQ ID NO: 250268 - RNA, 22 nt, Human
ucuggucccugcucacuucuug

SEQ ID NO: 250269 - RNA, 22 nt, Human
uauggaaagcucuuuuugauug

SEQ ID NO: 250270 - RNA, 22 nt, Human
gagaaggcuucuuuuccucuga

SEQ ID NO: 250271 - RNA, 22 nt, Human
uccauucuaugcuuacauuuau

SEQ ID NO: 250272 - RNA, 22 nt, Human
aguccaggcggguauagaggcu

SEQ ID NO: 250273 - RNA, 22 nt, Human
ucagcagggccaugcucucucu

SEQ ID NO: 250274 - RNA, 22 nt, Human
cuccuggaucuuagccagauuc

SEQ ID NO: 250275 - RNA, 22 nt, Human
auuaguaguaguuagcagccuc

SEQ ID NO: 250276 - RNA, 22 nt, Human
uccagcugcaaggggcacagcu

SEQ ID NO: 250277 - RNA, 20 nt, Human
ugugugcaucuguauguauu

SEQ ID NO: 250278 - RNA, 22 nt, Human
ggaaaauacugauucaugccau

SEQ ID NO: 250279 - RNA, 22 nt, Human
ggagucugauuuuuuaugggug

SEQ ID NO: 250280 - RNA, 22 nt, Human
cccuggugguacggcacuggca

SEQ ID NO: 250281 - RNA, 22 nt, Human
uagcaaagaaccugauacccca

SEQ ID NO: 250282 - RNA, 22 nt, Human
uguggcugugguuuucauaaau

SEQ ID NO: 250283 - RNA, 22 nt, Human
ucugggaagcugguccuguucu

SEQ ID NO: 250284 - RNA, 22 nt, Human
caguuaaauucuccaguuacca

SEQ ID NO: 250285 - RNA, 18 nt, Human
auuuugaacugggaauau

SEQ ID NO: 250286 - RNA, 22 nt, Human
agaagccagccuugccuccuuu

SEQ ID NO: 250287 - RNA, 22 nt, Human
gccagcagcugugggguggcca

SEQ ID NO: 250288 - RNA, 22 nt, Human
uuuacagauguggaaagugagc

SEQ ID NO: 250289 - RNA, 22 nt, Human
gugaagcaguugcguggguucc

SEQ ID NO: 250290 - RNA, 21 nt, Human
ccuggacuaaaaccaggccac

SEQ ID NO: 250291 - RNA, 22 nt, Human
cuccugggagcagggauggaug

SEQ ID NO: 250292 - RNA, 22 nt, Human
ucagaacauggcauguuccauc

SEQ ID NO: 250293 - RNA, 22 nt, Human
auaaaggcagaguagggaggaa

SEQ ID NO: 250294 - RNA, 22 nt, Human
cuccaggcuggauccaagucaa

SEQ ID NO: 250295 - RNA, 22 nt, Human
cauagaacagcuccuagcacau

SEQ ID NO: 250296 - RNA, 22 nt, Human
cuugccucccucagcucacagc

SEQ ID NO: 250297 - RNA, 22 nt, Human
acacaugcauaagccuucccuu

SEQ ID NO: 250298 - RNA, 22 nt, Human
cuccagugcgucuuaguaaacc

SEQ ID NO: 250299 - RNA, 22 nt, Human
ggcuucacaguuguagcagcuc

SEQ ID NO: 250300 - RNA, 22 nt, Human
uauguuuuaggaauuaauuguu

SEQ ID NO: 250301 - RNA, 22 nt, Human
uaguauagauugaagcagauca

SEQ ID NO: 250302 - RNA, 22 nt, Human
uggcuucucagaauacucugga

SEQ ID NO: 250303 - RNA, 22 nt, Human
ggccagaguugauggcaucuug

SEQ ID NO: 250304 - RNA, 22 nt, Human
uuaagacauuuuuggagauuau

SEQ ID NO: 250305 - RNA, 22 nt, Human
agcuggccggccuccaggugga

SEQ ID NO: 250306 - RNA, 22 nt, Human
guucuucaggccauccucccag

SEQ ID NO: 250307 - RNA, 23 nt, Human
cacugggcccaggguguggaggc

SEQ ID NO: 250308 - RNA, 22 nt, Human
acguuuuauucccaugcagcau

SEQ ID NO: 250309 - RNA, 22 nt, Human
cugggccucauccucagaguuu

SEQ ID NO: 250310 - RNA, 22 nt, Human
uguccugcaagcccuaaugaau

SEQ ID NO: 250311 - RNA, 22 nt, Human
agccucagcacgcagcucugug

SEQ ID NO: 250312 - RNA, 22 nt, Human
auucaguggauaucuucacuuu

SEQ ID NO: 250313 - RNA, 22 nt, Human
ccugggcuugguuguugagaac

SEQ ID NO: 250314 - RNA, 22 nt, Human
agucucagggccacccggggaa

SEQ ID NO: 250315 - RNA, 22 nt, Human
gcuuccugucccucagccauga

SEQ ID NO: 250316 - RNA, 22 nt, Human
cagggccucugugggcucucuc

SEQ ID NO: 250317 - RNA, 22 nt, Human
acagaugaaacccagcuaguug

SEQ ID NO: 250318 - RNA, 22 nt, Human
gucuuuggagaggugccauuuc

SEQ ID NO: 250319 - RNA, 22 nt, Human
ucuuuuauagugaauuuucuug

SEQ ID NO: 250320 - RNA, 22 nt, Human
gaaagugcagucagacaaggca

SEQ ID NO: 250321 - RNA, 22 nt, Human
ucuguucaugucuuuuuaagug

SEQ ID NO: 250322 - RNA, 22 nt, Human
ugcuauuugugagugucuucgu

SEQ ID NO: 250323 - RNA, 22 nt, Human
caaguuuugcauaguucuguau

SEQ ID NO: 250324 - RNA, 22 nt, Human
uuuucaguuccaucucugcucu

SEQ ID NO: 250325 - RNA, 22 nt, Human
aggcaagccgugccugucucaa

SEQ ID NO: 250326 - RNA, 22 nt, Human
uuugagaagauguaauguuaag

SEQ ID NO: 250327 - RNA, 22 nt, Human
agggcucugugacuaucacugc

SEQ ID NO: 250328 - RNA, 21 nt, Human
uggccaaacuggagcauuuga

SEQ ID NO: 250329 - RNA, 22 nt, Human
aaaacuaaauacgcuuugccuc

SEQ ID NO: 250330 - RNA, 22 nt, Human
caugcaugccgggcugacagag

SEQ ID NO: 250331 - RNA, 22 nt, Human
ucaguuaaucaauguggucuaa

SEQ ID NO: 250332 - RNA, 22 nt, Human
aacugguagcugauuaaguaua

SEQ ID NO: 250333 - RNA, 22 nt, Human
ugagaucugugcauguuaguua

SEQ ID NO: 250334 - RNA, 22 nt, Human
uuguuuauuagcaauuauccug

SEQ ID NO: 250335 - RNA, 21 nt, Human
aggggaaguagaguuuugauu

SEQ ID NO: 250336 - RNA, 22 nt, Human
ggacaggccauauggaauacau

SEQ ID NO: 250337 - RNA, 22 nt, Human
uggagcugauacagcuggcuuu

SEQ ID NO: 250338 - RNA, 22 nt, Human
auuucacagcugcuguucaggu

SEQ ID NO: 250339 - RNA, 22 nt, Human
agccaagggucagcugcacaga

SEQ ID NO: 250340 - RNA, 22 nt, Human
gagaccuggaggauguggaugg

SEQ ID NO: 250341 - RNA, 22 nt, Human
aaggcugaggagggccugcagg

SEQ ID NO: 250342 - RNA, 22 nt, Human
ccaguggguaggccauggugag

SEQ ID NO: 250343 - RNA, 23 nt, Human
aucugaaaagcauuugcaguuug

SEQ ID NO: 250344 - RNA, 22 nt, Human
aagacaggaacauagcaaaucc

SEQ ID NO: 250345 - RNA, 22 nt, Human
gaagccuuaucagucacuuaua

SEQ ID NO: 250346 - RNA, 22 nt, Human
ggcccugcaugagauuaagguu

SEQ ID NO: 250347 - RNA, 22 nt, Human
aaggaaagauucucucucuaga

SEQ ID NO: 250348 - RNA, 22 nt, Human
cuggcuggcagaugcucuugcu

SEQ ID NO: 250349 - RNA, 22 nt, Human
cugugugugucugcagcauacu

SEQ ID NO: 250350 - RNA, 22 nt, Human
uacaauacuuaaccuauuuugc

SEQ ID NO: 250351 - RNA, 22 nt, Human
aaaugaucauguaauuucagaa

SEQ ID NO: 250352 - RNA, 22 nt, Human
acacaugauuaaugccaagcau

SEQ ID NO: 250353 - RNA, 22 nt, Human
ucuccagguaaauggcauccug

SEQ ID NO: 250354 - RNA, 22 nt, Human
gcaggucuugaaggugugauuu

SEQ ID NO: 250355 - RNA, 22 nt, Human
uuggagguuugaaaauaugugu

SEQ ID NO: 250356 - RNA, 22 nt, Human
aaauaaguuagcagauuccagu

SEQ ID NO: 250357 - RNA, 22 nt, Human
cacuggaauauggcguugaacc

SEQ ID NO: 250358 - RNA, 18 nt, Human
ccucuggguuuuguuccc

SEQ ID NO: 250359 - RNA, 22 nt, Human
gugacagucaaagacaugacuu

SEQ ID NO: 250360 - RNA, 22 nt, Human
uuuguuuucaaugugucauuca

SEQ ID NO: 250361 - RNA, 22 nt, Human
gagacaggcagcuaguggguca

SEQ ID NO: 250362 - RNA, 22 nt, Human
uacauuacaggaaagauaaaga

SEQ ID NO: 250363 - RNA, 15 nt, Human
ucugggcugugagca

SEQ ID NO: 250364 - RNA, 22 nt, Human
aucugggcagggcagcaaggcg

SEQ ID NO: 250365 - RNA, 22 nt, Human
auugguuaacucugugugucaa

SEQ ID NO: 250366 - RNA, 22 nt, Human
auguucuacagauggaaagggg

SEQ ID NO: 250367 - RNA, 22 nt, Human
uccuucuggaggcucuaagggg

SEQ ID NO: 250368 - RNA, 22 nt, Human
uucugagggcuaauguacugua

SEQ ID NO: 250369 - RNA, 22 nt, Human
aaagugcagggugcucugguau

SEQ ID NO: 250370 - RNA, 20 nt, Human
agacucaguuucuaugcucu

SEQ ID NO: 250371 - RNA, 22 nt, Human
uugauucauauagauaugcgug

SEQ ID NO: 250372 - RNA, 22 nt, Human
gcuuugcuagcacugcgcuucc

SEQ ID NO: 250373 - RNA, 22 nt, Human
uucuuuuaaaagagagcagaaa

SEQ ID NO: 250374 - RNA, 21 nt, Human
ugcaaagcugcugaaguggua

SEQ ID NO: 250375 - RNA, 22 nt, Human
uuauacaguuuauacuuagaau

SEQ ID NO: 250376 - RNA, 22 nt, Human
ucugcuuucaaauucacuuagu

SEQ ID NO: 250377 - RNA, 22 nt, Human
uuuauugcccuguaguacagga

SEQ ID NO: 250378 - RNA, 22 nt, Human
uguggcugggcuaauaggcaaa

SEQ ID NO: 250379 - RNA, 22 nt, Human
agggagcuuccgaacuacagcu

SEQ ID NO: 250380 - RNA, 18 nt, Human
agagggaaagcaggcuga

SEQ ID NO: 250381 - RNA, 21 nt, Human
ugacagguauuuaucuggaaa

SEQ ID NO: 250382 - RNA, 22 nt, Human
aacaguaacgagauguccuaac

SEQ ID NO: 250383 - RNA, 18 nt, Human
ugggcugccuggccucug

SEQ ID NO: 250384 - RNA, 22 nt, Human
gcagggcagcuuagucccuguc

SEQ ID NO: 250385 - RNA, 22 nt, Human
aacccagccguguagcugccgc

SEQ ID NO: 250386 - RNA, 22 nt, Human
guauuuuacugcucaaagcucu

SEQ ID NO: 250387 - RNA, 22 nt, Human
aauguguuaguauugauuuguc

SEQ ID NO: 250388 - RNA, 21 nt, Human
cuggagucauuuucugaguag

SEQ ID NO: 250389 - RNA, 22 nt, Human
aaaggcaagcauuuauauagga

SEQ ID NO: 250390 - RNA, 22 nt, Human
auggacauuugaguuauuucca

SEQ ID NO: 250391 - RNA, 22 nt, Human
aggaaagccaaucucucuugac

SEQ ID NO: 250392 - RNA, 22 nt, Human
gagggaaaauaaaauugcagua

SEQ ID NO: 250393 - RNA, 22 nt, Human
acauauaagggaucagugacag

SEQ ID NO: 250394 - RNA, 22 nt, Human
aaguuugagaagcuuauagaua

SEQ ID NO: 250395 - RNA, 22 nt, Human
gccugggauucucaaaggggug

SEQ ID NO: 250396 - RNA, 22 nt, Human
gcaggagcagucaggggcagcu

SEQ ID NO: 250397 - RNA, 22 nt, Human
gugcagggcuggcaccggaggc

SEQ ID NO: 250398 - RNA, 22 nt, Human
agagccaggacugugucucacu

SEQ ID NO: 250399 - RNA, 22 nt, Human
aucagagcccggcaauuuauuu

SEQ ID NO: 250400 - RNA, 22 nt, Human
uacacuguguaaaaugcacuuu

SEQ ID NO: 250401 - RNA, 22 nt, Human
ggaugcccacuaucugcuggcu

SEQ ID NO: 250402 - RNA, 22 nt, Human
aaggccaugcacauccuaggca

SEQ ID NO: 250403 - RNA, 22 nt, Human
cuguguccauguucuaauuugg

SEQ ID NO: 250404 - RNA, 22 nt, Human
aaugaacaggugaaugucagau

SEQ ID NO: 250405 - RNA, 22 nt, Human
acagugcuaaugaugccaagau

SEQ ID NO: 250406 - RNA, 22 nt, Human
ccuccaucaccaucugcccuca

SEQ ID NO: 250407 - RNA, 22 nt, Human
auaugcagagagcaugaauagg

SEQ ID NO: 250408 - RNA, 21 nt, Human
aggcauuauaaauuucaccug

SEQ ID NO: 250409 - RNA, 19 nt, Human
gcaggcuugggucucccca

SEQ ID NO: 250410 - RNA, 22 nt, Human
acagaaauucaaacuggaauuu

SEQ ID NO: 250411 - RNA, 22 nt, Human
aauacuuaugugaccucauuuu

SEQ ID NO: 250412 - RNA, 22 nt, Human
ccugaguccccucauucacucu

SEQ ID NO: 250413 - RNA, 22 nt, Human
acacccagcugggccaccucca

SEQ ID NO: 250414 - RNA, 22 nt, Human
agucuuauguuugugaagaacu

SEQ ID NO: 250415 - RNA, 22 nt, Human
aucucuggcaaugcagcaucgu

SEQ ID NO: 250416 - RNA, 22 nt, Human
ucccaggacaugggcucugcuc

SEQ ID NO: 250417 - RNA, 22 nt, Human
uuagagaaauucugguaaugua

SEQ ID NO: 250418 - RNA, 22 nt, Human
uggcaguggcgggacucagggc

SEQ ID NO: 250419 - RNA, 22 nt, Human
gaggagagaagcuaacggugcu

SEQ ID NO: 250420 - RNA, 21 nt, Human
gguguccagaggaguccccag

SEQ ID NO: 250421 - RNA, 22 nt, Human
cagagcagccuccagggggagc

SEQ ID NO: 250422 - RNA, 22 nt, Human
acauaauagcauuucuaauuug

SEQ ID NO: 250423 - RNA, 22 nt, Human
gagaaagaugaagaguggcguu

SEQ ID NO: 250424 - RNA, 22 nt, Human
ucucagaguuuuuuuccaggac

SEQ ID NO: 250425 - RNA, 22 nt, Human
ugcuccugaauuacacuacuac

SEQ ID NO: 250426 - RNA, 22 nt, Human
agucaguuuucuuaaagggaag

SEQ ID NO: 250427 - RNA, 22 nt, Human
gugcccagcuccaccucacaga

SEQ ID NO: 250428 - RNA, 22 nt, Human
aauauuuguuaguguuuuaaug

SEQ ID NO: 250429 - RNA, 23 nt, Human
ucagucuuggcuucugauuuucc

SEQ ID NO: 250430 - RNA, 19 nt, Human
gcaggcagcugggguaucc

SEQ ID NO: 250431 - RNA, 22 nt, Human
augcaaacauguuuccucuaag

SEQ ID NO: 250432 - RNA, 22 nt, Human
acugucuuugagcuggaggagg

SEQ ID NO: 250433 - RNA, 22 nt, Human
gccaggcuggaaagaacagaca

SEQ ID NO: 250434 - RNA, 22 nt, Human
cuuucauucuuagauauuagug

SEQ ID NO: 250435 - RNA, 22 nt, Human
gagagcccugcuccuaucccag

SEQ ID NO: 250436 - RNA, 22 nt, Human
ucaaaguuuuugagaauuacau

SEQ ID NO: 250437 - RNA, 20 nt, Human
ggcaggugcucgcuuggucu

SEQ ID NO: 250438 - RNA, 22 nt, Human
uagggauggaaacccguuuucu

SEQ ID NO: 250439 - RNA, 22 nt, Human
acagugcugugcagucugcccu

SEQ ID NO: 250440 - RNA, 22 nt, Human
uucugggccuccuaggacaggc

SEQ ID NO: 250441 - RNA, 22 nt, Human
uucucugagauagacuaagugg

SEQ ID NO: 250442 - RNA, 22 nt, Human
agccuggccacucagggccuga

SEQ ID NO: 250443 - RNA, 22 nt, Human
uaacacuguccaaagaauucca

SEQ ID NO: 250444 - RNA, 22 nt, Human
ccacccagaccagggaucuggg

SEQ ID NO: 250445 - RNA, 22 nt, Human
ugcucaggacaguggaaccuaa

SEQ ID NO: 250446 - RNA, 22 nt, Human
aaauagcuuuucauaauucuca

SEQ ID NO: 250447 - RNA, 22 nt, Human
ggaaucuagaaagggagcaagg

SEQ ID NO: 250448 - RNA, 22 nt, Human
ugcacauuuguuauuuugaggu

SEQ ID NO: 250449 - RNA, 22 nt, Human
ggcugguccuuucucuguccua

SEQ ID NO: 250450 - RNA, 22 nt, Human
caggucagaggcgcagccccca

SEQ ID NO: 250451 - RNA, 22 nt, Human
agugggugauaagaccaaggag

SEQ ID NO: 250452 - RNA, 22 nt, Human
cagggacagggaucauuugcuu

SEQ ID NO: 250453 - RNA, 18 nt, Human
ggcaccucucuugccuua

SEQ ID NO: 250454 - RNA, 22 nt, Human
aaagacuagcauuuauauguac

SEQ ID NO: 250455 - RNA, 22 nt, Human
agcugguucauucauucauggu

SEQ ID NO: 250456 - RNA, 22 nt, Human
acaauucucucauaucuuauua

SEQ ID NO: 250457 - RNA, 16 nt, Human
acuuccaggggagccc

SEQ ID NO: 250458 - RNA, 22 nt, Human
uuuugcuguguccuugagccgg

SEQ ID NO: 250459 - RNA, 22 nt, Human
aucugaagaggucauggcugac

SEQ ID NO: 250460 - RNA, 22 nt, Human
ucccagagcaguacuccaggag

SEQ ID NO: 250461 - RNA, 22 nt, Human
gagcaggaugggagcuggggcc

SEQ ID NO: 250462 - RNA, 22 nt, Human
ccucagaguuggaaucacauuu

SEQ ID NO: 250463 - RNA, 22 nt, Human
gcuauguucccuuuugcuauaa

SEQ ID NO: 250464 - RNA, 22 nt, Human
cucugggcaaguuucuucauga

SEQ ID NO: 250465 - RNA, 22 nt, Human
uucccaguauuaccuucaggaa

SEQ ID NO: 250466 - RNA, 22 nt, Human
gggaggcgccgaggguagcuaa

SEQ ID NO: 250467 - RNA, 22 nt, Human
aagcuguuagggagugguaggu

SEQ ID NO: 250468 - RNA, 22 nt, Human
ugccucaguuucuccauaugaa

SEQ ID NO: 250469 - RNA, 22 nt, Human
aagagacaaugucuuuuggaua

SEQ ID NO: 250470 - RNA, 22 nt, Human
aaagugcagaacuguucucacu

SEQ ID NO: 250471 - RNA, 22 nt, Human
ucugucuuagcaucuuugcuca

SEQ ID NO: 250472 - RNA, 22 nt, Human
uucaauucaauucuaaauauau

SEQ ID NO: 250473 - RNA, 22 nt, Human
ugggagauauugcuguggcugu

SEQ ID NO: 250474 - RNA, 19 nt, Human
gucuuguaacacauaagug

SEQ ID NO: 250475 - RNA, 22 nt, Human
guuggccauuaauuggaggaca

SEQ ID NO: 250476 - RNA, 22 nt, Human
gaggaacagcagccacaugucc

SEQ ID NO: 250477 - RNA, 22 nt, Human
ugcauauccacaccuuaucucu

SEQ ID NO: 250478 - RNA, 22 nt, Human
cccacaucucacaucuuggaac

SEQ ID NO: 250479 - RNA, 18 nt, Human
ucucuuuccucaguggag

SEQ ID NO: 250480 - RNA, 22 nt, Human
gucagaucuuuggggaugcugu

SEQ ID NO: 250481 - RNA, 22 nt, Human
gcagggcaucccugagcgggug

SEQ ID NO: 250482 - RNA, 22 nt, Human
cacaugagacaauuaaagacuu

SEQ ID NO: 250483 - RNA, 22 nt, Human
cauuuguaucauauguaucuua

SEQ ID NO: 250484 - RNA, 22 nt, Human
auuagaucagaucggcaguaau

SEQ ID NO: 250485 - RNA, 22 nt, Human
cacaucuauagggacagcaaca

SEQ ID NO: 250486 - RNA, 22 nt, Human
ugggccuccuccgacagccggg

SEQ ID NO: 250487 - RNA, 22 nt, Human
ggccuuggauccaagcugcggc

SEQ ID NO: 250488 - RNA, 22 nt, Human
ccagggcauguccaagacuuag

SEQ ID NO: 250489 - RNA, 22 nt, Human
cacuaauuccaucuccuuuucc

SEQ ID NO: 250490 - RNA, 22 nt, Human
uucuucagagaguagaagcaag

SEQ ID NO: 250491 - RNA, 22 nt, Human
gcuguccagagcaugggagcaa

SEQ ID NO: 250492 - RNA, 22 nt, Human
auuuugaagggaauugaaguuc

SEQ ID NO: 250493 - RNA, 21 nt, Human
ccuuuacaauuuugcauuccu

SEQ ID NO: 250494 - RNA, 22 nt, Human
aggagccaaauuacuagcucug

SEQ ID NO: 250495 - RNA, 22 nt, Human
agaggcaaugaaagcagucucu

SEQ ID NO: 250496 - RNA, 22 nt, Human
ugaggcaauuggaaauuuuaac

SEQ ID NO: 250497 - RNA, 22 nt, Human
auguuuccgugagcauccuuga

SEQ ID NO: 250498 - RNA, 22 nt, Human
aacucuuuguggacauuaaauu

SEQ ID NO: 250499 - RNA, 22 nt, Human
aauaauuauuugagagcagacc

SEQ ID NO: 250500 - RNA, 22 nt, Human
uccugcagcugaagcucaugug

SEQ ID NO: 250501 - RNA, 22 nt, Human
auuugcaugcuucuauugugaa

SEQ ID NO: 250502 - RNA, 22 nt, Human
agauggcuuugcuuuuagaagc

SEQ ID NO: 250503 - RNA, 22 nt, Human
uggcauggcauuuagagaauua

SEQ ID NO: 250504 - RNA, 20 nt, Human
ggcaggaccccaguggcauc

SEQ ID NO: 250505 - RNA, 22 nt, Human
gccugggaagacuaagugggag

SEQ ID NO: 250506 - RNA, 22 nt, Human
acauuguaguuguucugcagca

SEQ ID NO: 250507 - RNA, 22 nt, Human
ggccuagggaguggccaugccu

SEQ ID NO: 250508 - RNA, 22 nt, Human
uauuggugaugacuugaggcca

SEQ ID NO: 250509 - RNA, 20 nt, Human
agucucucccagaaugagca

SEQ ID NO: 250510 - RNA, 22 nt, Human
ugggagcaccuugagggcagaa

SEQ ID NO: 250511 - RNA, 21 nt, Human
ugcacagccauacccuccuug

SEQ ID NO: 250512 - RNA, 18 nt, Human
uggagcugagggcaaugc

SEQ ID NO: 250513 - RNA, 22 nt, Human
uccagcccaguuuggugaauug

SEQ ID NO: 250514 - RNA, 22 nt, Human
caaguaaugguuuuauaauagu

SEQ ID NO: 250515 - RNA, 21 nt, Human
aaucaguacauacugcacauc

SEQ ID NO: 250516 - RNA, 22 nt, Human
uauuccaagugccuagaagagu

SEQ ID NO: 250517 - RNA, 21 nt, Human
acuguucauuugaugaacugg

SEQ ID NO: 250518 - RNA, 22 nt, Human
cccacagaaugccaaugagacc

SEQ ID NO: 250519 - RNA, 22 nt, Human
ugacucaagagccugacucauc

SEQ ID NO: 250520 - RNA, 22 nt, Human
cugaagagcaaaccaacuggac

SEQ ID NO: 250521 - RNA, 22 nt, Human
accaugacgucacagaggcuuc

SEQ ID NO: 250522 - RNA, 22 nt, Human
ugggaagaguuagagacagcug

SEQ ID NO: 250523 - RNA, 22 nt, Human
gacaagacuauguagaaaguau

SEQ ID NO: 250524 - RNA, 20 nt, Human
ucagagaagggacugagauu

SEQ ID NO: 250525 - RNA, 22 nt, Human
aaacucuggauuggaguccagc

SEQ ID NO: 250526 - RNA, 22 nt, Human
uauccauuuauuuucuaggcaa

SEQ ID NO: 250527 - RNA, 22 nt, Human
uagaugaaaggucuagcacagu

SEQ ID NO: 250528 - RNA, 22 nt, Human
agcagggccucuggcacugguc

SEQ ID NO: 250529 - RNA, 22 nt, Human
cuuuauucugcaaauugccuug

SEQ ID NO: 250530 - RNA, 22 nt, Human
auucaccuguuaguaaaaaucu

SEQ ID NO: 250531 - RNA, 22 nt, Human
aucauucugauggucaaugcua

SEQ ID NO: 250532 - RNA, 22 nt, Human
guauccaugggggauugguucc

SEQ ID NO: 250533 - RNA, 22 nt, Human
ugccaggcuccggaacgacagu

SEQ ID NO: 250534 - RNA, 22 nt, Human
aucugucuaugauauagucugu

SEQ ID NO: 250535 - RNA, 18 nt, Human
acccucuggcuucugagc

SEQ ID NO: 250536 - RNA, 22 nt, Human
ucucacagccauuucucccucu

SEQ ID NO: 250537 - RNA, 20 nt, Human
ugugcaggagagugaggcug

SEQ ID NO: 250538 - RNA, 22 nt, Human
ccaugacauuuuaauuuucacu

SEQ ID NO: 250539 - RNA, 22 nt, Human
gggaagagggagcuggaaugau

SEQ ID NO: 250540 - RNA, 22 nt, Human
aaccucuacauccaggaaagga

SEQ ID NO: 250541 - RNA, 22 nt, Human
acagaauuugcuugggcaaugg

SEQ ID NO: 250542 - RNA, 22 nt, Human
uucucuggacuauuugcacucc

SEQ ID NO: 250543 - RNA, 22 nt, Human
uuugucauaucacacaauuuug

SEQ ID NO: 250544 - RNA, 22 nt, Human
aacuuguaaugaaaggcaauag

SEQ ID NO: 250545 - RNA, 22 nt, Human
aggcagggaccaguuguuuucu

SEQ ID NO: 250546 - RNA, 22 nt, Human
ccagugcacaauggaacaacuc

SEQ ID NO: 250547 - RNA, 22 nt, Human
cagcugguagguagcagauuug

SEQ ID NO: 250548 - RNA, 22 nt, Human
acuaauugagugcaugaucuuu

SEQ ID NO: 250549 - RNA, 19 nt, Human
aagaggcaacccucgagcc

SEQ ID NO: 250550 - RNA, 22 nt, Human
gcuuuagaaauaucacugugga

SEQ ID NO: 250551 - RNA, 22 nt, Human
agccagcuggagaccacuguuu

SEQ ID NO: 250552 - RNA, 22 nt, Human
uauucuugucuuuuccagaaau

SEQ ID NO: 250553 - RNA, 22 nt, Human
acucagaggggacugguguggu

SEQ ID NO: 250554 - RNA, 22 nt, Human
agagccaggugcugcuguuuga

SEQ ID NO: 250555 - RNA, 22 nt, Human
aaugaguucugacacuucacga

SEQ ID NO: 250556 - RNA, 22 nt, Human
gcuuuaaugcaauuucaccuca

SEQ ID NO: 250557 - RNA, 19 nt, Human
uuugaauccagcugguaac

SEQ ID NO: 250558 - RNA, 22 nt, Human
uguucucuaagaaaagaagcau

SEQ ID NO: 250559 - RNA, 22 nt, Human
aggaggugacagccugcaucug

SEQ ID NO: 250560 - RNA, 22 nt, Human
aaacugcacaagggugcauagc

SEQ ID NO: 250561 - RNA, 22 nt, Human
uagcaacaauggaaguaacuuc

SEQ ID NO: 250562 - RNA, 22 nt, Human
ggcuguggcagcuggaaguggu

SEQ ID NO: 250563 - RNA, 22 nt, Human
uuaaaucuguucucaugucugu

SEQ ID NO: 250564 - RNA, 22 nt, Human
augcaguuuuaaaucauuucag

SEQ ID NO: 250565 - RNA, 22 nt, Human
uucuggguaacaaggcaagaau

SEQ ID NO: 250566 - RNA, 23 nt, Human
uugcacaguuucggaaacugagg

SEQ ID NO: 250567 - RNA, 22 nt, Human
uauuucuuucagguauguguug

SEQ ID NO: 250568 - RNA, 22 nt, Human
aaugcugcaagaggugaaaaga

SEQ ID NO: 250569 - RNA, 22 nt, Human
cacauucuuucacaguucugaa

SEQ ID NO: 250570 - RNA, 22 nt, Human
aacacaggcauacuggcuccag

SEQ ID NO: 250571 - RNA, 22 nt, Human
cccagagcugagucugauauau

SEQ ID NO: 250572 - RNA, 22 nt, Human
gagcacugagcuggaauuggag

SEQ ID NO: 250573 - RNA, 22 nt, Human
cagaaaaggguguuuguucagg

SEQ ID NO: 250574 - RNA, 22 nt, Human
aaaaguuauugaugcaggacaa

SEQ ID NO: 250575 - RNA, 22 nt, Human
ugacucucccaaguuugaggga

SEQ ID NO: 250576 - RNA, 19 nt, Human
ugaggcaagauggcucugg

SEQ ID NO: 250577 - RNA, 22 nt, Human
cauggcagggcugugggcaggu

SEQ ID NO: 250578 - RNA, 22 nt, Human
agccuucaaccuagcuagagca

SEQ ID NO: 250579 - RNA, 22 nt, Human
gugcccuggcucacagugucuc

SEQ ID NO: 250580 - RNA, 22 nt, Human
agccccaggaugggccgcagga

SEQ ID NO: 250581 - RNA, 22 nt, Human
ggcuggcgcucucccagcgcug

SEQ ID NO: 250582 - RNA, 20 nt, Human
ugcucccuugcgagucgcug

SEQ ID NO: 250583 - RNA, 22 nt, Human
agccagagauugagaugcaggc

SEQ ID NO: 250584 - RNA, 22 nt, Human
aagcacagcuggaacagcagga

SEQ ID NO: 250585 - RNA, 22 nt, Human
acagcuccuggggcuuuaaugg

SEQ ID NO: 250586 - RNA, 21 nt, Human
uccuggccagggcacuaggca

SEQ ID NO: 250587 - RNA, 22 nt, Human
ccccaugaaguagggucucuga

SEQ ID NO: 250588 - RNA, 22 nt, Human
aaucuaaggacuuagcauugcu

SEQ ID NO: 250589 - RNA, 22 nt, Human
agcccuagagaaccagccugug

SEQ ID NO: 250590 - RNA, 22 nt, Human
agguccagaacgugccuacucu

SEQ ID NO: 250591 - RNA, 22 nt, Human
aaguuacaagacuaaauggaag

SEQ ID NO: 250592 - RNA, 20 nt, Human
acugagguuagauaacaggu

SEQ ID NO: 250593 - RNA, 19 nt, Human
uggcagaggacaaggacuu

SEQ ID NO: 250594 - RNA, 22 nt, Human
aguggcuguaggcuaugagaga

SEQ ID NO: 250595 - RNA, 22 nt, Human
gcagcauccugggccacagucc

SEQ ID NO: 250596 - RNA, 22 nt, Human
ucugcagggcccuuggcuccug

SEQ ID NO: 250597 - RNA, 22 nt, Human
gaaaagaacugcaugggauuaa

SEQ ID NO: 250598 - RNA, 17 nt, Human
acacaucuuggcuuugc

SEQ ID NO: 250599 - RNA, 20 nt, Human
agagagaccuaggccuaguc

SEQ ID NO: 250600 - RNA, 22 nt, Human
aggaaaaagaguugcugccuuc

SEQ ID NO: 250601 - RNA, 22 nt, Human
ucacagaagagcauuaagauga

SEQ ID NO: 250602 - RNA, 22 nt, Human
ucugggcucacgagucuggaca

SEQ ID NO: 250603 - RNA, 22 nt, Human
uaaaggcuuuuacaggagugca

SEQ ID NO: 250604 - RNA, 22 nt, Human
acagaaugcguagugcauguug

SEQ ID NO: 250605 - RNA, 22 nt, Human
caaggcagugggcuaggaaccu

SEQ ID NO: 250606 - RNA, 21 nt, Human
cuuuuacauucagucaugaug

SEQ ID NO: 250607 - RNA, 22 nt, Human
ggucacaugagaugcugcccuc

SEQ ID NO: 250608 - RNA, 22 nt, Human
ugggguccagugccuggcaagg

SEQ ID NO: 250609 - RNA, 22 nt, Human
guucuauucauugcuccacgag

SEQ ID NO: 250610 - RNA, 22 nt, Human
uucaacuuuaggcaaagaaaac

SEQ ID NO: 250611 - RNA, 22 nt, Human
gcuggccugaccugaggcuggg

SEQ ID NO: 250612 - RNA, 22 nt, Human
ucccagaggcuccagucucuau

SEQ ID NO: 250613 - RNA, 22 nt, Human
ccagggaugcuuucccaggacu

SEQ ID NO: 250614 - RNA, 22 nt, Human
agaggguaacaagaggccugga

SEQ ID NO: 250615 - RNA, 22 nt, Human
auagacaacacuuauuauuccu

SEQ ID NO: 250616 - RNA, 22 nt, Human
guguguguacucuguauauaaa

SEQ ID NO: 250617 - RNA, 21 nt, Human
uguggcagagacaaugcuagu

SEQ ID NO: 250618 - RNA, 22 nt, Human
agcugcaauuaaagacugugaa

SEQ ID NO: 250619 - RNA, 22 nt, Human
uucacaguggcugugccauuug

SEQ ID NO: 250620 - RNA, 22 nt, Human
ucuucagugcaccugaugucuu

SEQ ID NO: 250621 - RNA, 19 nt, Human
ccagagagcuagguacaga

SEQ ID NO: 250622 - RNA, 22 nt, Human
ccaggcagagggaauagcaagu

SEQ ID NO: 250623 - RNA, 22 nt, Human
uucuccagcucaucagggaggg

SEQ ID NO: 250624 - RNA, 22 nt, Human
gagcccugcuuccaagggggca

SEQ ID NO: 250625 - RNA, 22 nt, Human
uuugauauccuauacaaguaaa

SEQ ID NO: 250626 - RNA, 22 nt, Human
ggcagccaugugggcagcgagu

SEQ ID NO: 250627 - RNA, 22 nt, Human
gcuuucugugcagugaacacua

SEQ ID NO: 250628 - RNA, 20 nt, Human
agcaaaaugcaagauuuuca

SEQ ID NO: 250629 - RNA, 22 nt, Human
ucacuaaguuacauuuaguauu

SEQ ID NO: 250630 - RNA, 20 nt, Human
auaauuacauagagauugcc

SEQ ID NO: 250631 - RNA, 22 nt, Human
ucagcuuuccuugcuuuagauu

SEQ ID NO: 250632 - RNA, 22 nt, Human
aucacgugguuugagaguacgc

SEQ ID NO: 250633 - RNA, 22 nt, Human
uccugggguccugacugcuucc

SEQ ID NO: 250634 - RNA, 22 nt, Human
uuacuugaaugcugugaucuca

SEQ ID NO: 250635 - RNA, 22 nt, Human
gcucugugguggggcagaguuu

SEQ ID NO: 250636 - RNA, 22 nt, Human
cccaggcugucuguccuuugcu

SEQ ID NO: 250637 - RNA, 22 nt, Human
gaugagggccugguggcugugc

SEQ ID NO: 250638 - RNA, 22 nt, Human
caggugcaaugagacagcucug

SEQ ID NO: 250639 - RNA, 22 nt, Human
aauagcauccuaaaacauacuu

SEQ ID NO: 250640 - RNA, 22 nt, Human
auaucuuuguaugguucagcag

SEQ ID NO: 250641 - RNA, 22 nt, Human
uuagauaaagugauguaggcua

SEQ ID NO: 250642 - RNA, 22 nt, Human
auacuguuuugugacuuaucuu

SEQ ID NO: 250643 - RNA, 22 nt, Human
guuaaagaagaauaguuccuuu

SEQ ID NO: 250644 - RNA, 22 nt, Human
ucuggcuccacucugugcaugc

SEQ ID NO: 250645 - RNA, 21 nt, Human
guagauaaagcauuuucauua

SEQ ID NO: 250646 - RNA, 22 nt, Human
acacauaagccuaaucaucucc

SEQ ID NO: 250647 - RNA, 20 nt, Human
cuuaaacacagagauagauu

SEQ ID NO: 250648 - RNA, 22 nt, Human
agcacagaaaguauugacugaa

SEQ ID NO: 250649 - RNA, 22 nt, Human
ccuggccaaucuagggcuguua

SEQ ID NO: 250650 - RNA, 22 nt, Human
ccuuggagaccugggucugugc

SEQ ID NO: 250651 - RNA, 22 nt, Human
aggcaggcccucuggaaaggua

SEQ ID NO: 250652 - RNA, 22 nt, Human
acagaauaagguuuaucucucc

SEQ ID NO: 250653 - RNA, 18 nt, Human
guucccagauggugcuga

SEQ ID NO: 250654 - RNA, 22 nt, Human
uuucuguuaggcaucauuuuaa

SEQ ID NO: 250655 - RNA, 22 nt, Human
aaugaggucauuaaugguggga

SEQ ID NO: 250656 - RNA, 22 nt, Human
uucaggaagugcugccuggugu

SEQ ID NO: 250657 - RNA, 19 nt, Human
acuccagggaugacagaag

SEQ ID NO: 250658 - RNA, 22 nt, Human
ucaaaucccagcucagccucuc

SEQ ID NO: 250659 - RNA, 22 nt, Human
aaagaccugugguagcucuaaa

SEQ ID NO: 250660 - RNA, 22 nt, Human
gguaauaagaucuguuacaugg

SEQ ID NO: 250661 - RNA, 22 nt, Human
acauggagaccagauggaagua

SEQ ID NO: 250662 - RNA, 18 nt, Human
gcagagugcgucucugug

SEQ ID NO: 250663 - RNA, 22 nt, Human
ugcuuauuaacauguauaucuc

SEQ ID NO: 250664 - RNA, 22 nt, Human
auguggauuguaggaaacugau

SEQ ID NO: 250665 - RNA, 22 nt, Human
guauauaucggcacuauuuuaa

SEQ ID NO: 250666 - RNA, 22 nt, Human
cacugagcugauagaauuccag

SEQ ID NO: 250667 - RNA, 22 nt, Human
gaggcuaagguucugccagaag

SEQ ID NO: 250668 - RNA, 22 nt, Human
caauuucuggaacuaauucuga

SEQ ID NO: 250669 - RNA, 22 nt, Human
gccugcagccccucugcaguag

SEQ ID NO: 250670 - RNA, 22 nt, Human
cugugcucuggcaucgcugcaa

SEQ ID NO: 250671 - RNA, 19 nt, Human
cacuuugcugaacucuucu

SEQ ID NO: 250672 - RNA, 22 nt, Human
aucccaccucaaucugaagcuc

SEQ ID NO: 250673 - RNA, 22 nt, Human
cccagcaggcauguugggagga

SEQ ID NO: 250674 - RNA, 22 nt, Human
accucagcuauuucaaaacaga

SEQ ID NO: 250675 - RNA, 22 nt, Human
acuucucuuuaguacuaaaugu

SEQ ID NO: 250676 - RNA, 19 nt, Human
gauaggcagccaugagccc

SEQ ID NO: 250677 - RNA, 22 nt, Human
aguguucagugauugucaaccg

SEQ ID NO: 250678 - RNA, 22 nt, Human
gccccucccagucaggagcacu

SEQ ID NO: 250679 - RNA, 22 nt, Human
gcacagacauauccauauuuac

SEQ ID NO: 250680 - RNA, 22 nt, Human
uuuguacuucauugguucuacu

SEQ ID NO: 250681 - RNA, 22 nt, Human
ugcuggcucccaggagccgcug

SEQ ID NO: 250682 - RNA, 22 nt, Human
uuagaaguacauuuagaacaua

SEQ ID NO: 250683 - RNA, 22 nt, Human
gugcugcucaagggacaggaca

SEQ ID NO: 250684 - RNA, 22 nt, Human
uggauugauaagagacaaguga

SEQ ID NO: 250685 - RNA, 21 nt, Human
ggccuuccccugcagucuccg

SEQ ID NO: 250686 - RNA, 22 nt, Human
ggcaguugcgugcaucaguggu

SEQ ID NO: 250687 - RNA, 22 nt, Human
ccugagucccauaauguugcca

SEQ ID NO: 250688 - RNA, 22 nt, Human
gcuguucacagacucugcucug

SEQ ID NO: 250689 - RNA, 22 nt, Human
aggcugccagaagccuucagga

SEQ ID NO: 250690 - RNA, 22 nt, Human
guucucucugcuuccaagaugg

SEQ ID NO: 250691 - RNA, 23 nt, Human
gacacaggagcacccagcugagc

SEQ ID NO: 250692 - RNA, 22 nt, Human
uacaguaauaaaaugagcuaca

SEQ ID NO: 250693 - RNA, 22 nt, Human
ugccaggcgauugcuaucagca

SEQ ID NO: 250694 - RNA, 22 nt, Human
gccugggugagggucuccuuca

SEQ ID NO: 250695 - RNA, 22 nt, Human
cuuguauugcaaacuggccagg

SEQ ID NO: 250696 - RNA, 22 nt, Human
cauguugaauggccuugauuuu

SEQ ID NO: 250697 - RNA, 22 nt, Human
acacaucuaucucuacacaagg

SEQ ID NO: 250698 - RNA, 22 nt, Human
aucucagggguuccuucuagag

SEQ ID NO: 250699 - RNA, 22 nt, Human
aggaagccaagccugacacuca

SEQ ID NO: 250700 - RNA, 23 nt, Human
aaauggguuucuguuuuguggac

SEQ ID NO: 250701 - RNA, 22 nt, Human
agugaauucuccacccaguagg

SEQ ID NO: 250702 - RNA, 22 nt, Human
ccugcuguccccugagccugga

SEQ ID NO: 250703 - RNA, 22 nt, Human
aggcuggagcaagggggcauau

SEQ ID NO: 250704 - RNA, 22 nt, Human
aggagcucagccauucauuuga

SEQ ID NO: 250705 - RNA, 22 nt, Human
ucugggugggcccgagaaaucu

SEQ ID NO: 250706 - RNA, 22 nt, Human
cagugugaggaauuagugucca

SEQ ID NO: 250707 - RNA, 22 nt, Human
agcagcagggugauagugccca

SEQ ID NO: 250708 - RNA, 20 nt, Human
ucucaggguucagcaaagua

SEQ ID NO: 250709 - RNA, 22 nt, Human
acccucagaguaggcacugcug

SEQ ID NO: 250710 - RNA, 22 nt, Human
cccacgucgaacuugcuccaga

SEQ ID NO: 250711 - RNA, 22 nt, Human
caauucaaguugaguacagcuu

SEQ ID NO: 250712 - RNA, 22 nt, Human
cagcaggaggugaguagcaggu

SEQ ID NO: 250713 - RNA, 22 nt, Human
gugcacaggugggaaaaugagu

SEQ ID NO: 250714 - RNA, 19 nt, Human
uucauucucuuauuguugu

SEQ ID NO: 250715 - RNA, 22 nt, Human
ucacuuuccucaucacgacuag

SEQ ID NO: 250716 - RNA, 22 nt, Human
acuguacucuuauagccaucug

SEQ ID NO: 250717 - RNA, 22 nt, Human
ggucuccauuccuucaucucac

SEQ ID NO: 250718 - RNA, 22 nt, Human
aguuauuuacuccuuugucucu

SEQ ID NO: 250719 - RNA, 23 nt, Human
uuuuaauuuggacauaagaagau

SEQ ID NO: 250720 - RNA, 22 nt, Human
acccucagacagcuguggccag

SEQ ID NO: 250721 - RNA, 22 nt, Human
cagcucuguucauagauggugc

SEQ ID NO: 250722 - RNA, 22 nt, Human
uacaucuuugucuaugaccagc

SEQ ID NO: 250723 - RNA, 22 nt, Human
cuuugcuuuacucccacugugu

SEQ ID NO: 250724 - RNA, 22 nt, Human
augaggcacaucacagccaaug

SEQ ID NO: 250725 - RNA, 22 nt, Human
auccuuagguggugcaucaggg

SEQ ID NO: 250726 - RNA, 22 nt, Human
gggcucugagcucugggaauua

SEQ ID NO: 250727 - RNA, 19 nt, Human
agcauuaggcaaauuuuga

SEQ ID NO: 250728 - RNA, 22 nt, Human
uggcugcaggggugucugacau

SEQ ID NO: 250729 - RNA, 22 nt, Human
cauggaggccaggaaacagccu

SEQ ID NO: 250730 - RNA, 22 nt, Human
uguuuaauucaccaucauguuc

SEQ ID NO: 250731 - RNA, 22 nt, Human
uauuuaaccaguuaaauuucca

SEQ ID NO: 250732 - RNA, 22 nt, Human
gcugaggcucaauccccuucug

SEQ ID NO: 250733 - RNA, 22 nt, Human
caugauuuacuaaaauuuguuu

SEQ ID NO: 250734 - RNA, 22 nt, Human
guucagcccacagagggggccg

SEQ ID NO: 250735 - RNA, 18 nt, Human
cccagccucuccuuucua

SEQ ID NO: 250736 - RNA, 22 nt, Human
ggcuggaggagaauggguguga

SEQ ID NO: 250737 - RNA, 22 nt, Human
uuucaguuuagacuaaagguag

SEQ ID NO: 250738 - RNA, 22 nt, Human
caggaggagggcagccgccucc

SEQ ID NO: 250739 - RNA, 22 nt, Human
uagaaacacagaucugguguca

SEQ ID NO: 250740 - RNA, 22 nt, Human
aaaugcagguaguauuuauuuu

SEQ ID NO: 250741 - RNA, 22 nt, Human
cugcugugaguuuggaggucua

SEQ ID NO: 250742 - RNA, 20 nt, Human
gccuccacacucaccccuua

SEQ ID NO: 250743 - RNA, 22 nt, Human
cggggucccugcccacccauac

SEQ ID NO: 250744 - RNA, 23 nt, Human
acauacauggagauaaagugaug

SEQ ID NO: 250745 - RNA, 22 nt, Human
uagaacaugugaaaauauagcc

SEQ ID NO: 250746 - RNA, 22 nt, Human
uguuaacauacugcuuucuaau

SEQ ID NO: 250747 - RNA, 22 nt, Human
cucugagguuccuuugcccucg

SEQ ID NO: 250748 - RNA, 20 nt, Human
gaugagacccaugcaugaga

SEQ ID NO: 250749 - RNA, 22 nt, Human
caugaauuuauauuauuaguga

SEQ ID NO: 250750 - RNA, 22 nt, Human
uucuuaacucaaauauauaucc

SEQ ID NO: 250751 - RNA, 22 nt, Human
ugcuagaagauagcuagaagau

SEQ ID NO: 250752 - RNA, 22 nt, Human
gcagcucuucacuuacuccuuu

SEQ ID NO: 250753 - RNA, 22 nt, Human
agcuuugggcagaagaggauuc

SEQ ID NO: 250754 - RNA, 22 nt, Human
agguuucugcacugucacuggu

SEQ ID NO: 250755 - RNA, 22 nt, Human
cauuucacaguaaagugauuuc

SEQ ID NO: 250756 - RNA, 22 nt, Human
aaacaauguugucuccaagagg

SEQ ID NO: 250757 - RNA, 22 nt, Human
aagauguaaaggcaauauaaag

SEQ ID NO: 250758 - RNA, 18 nt, Human
ugcuggcaacuacuauug

SEQ ID NO: 250759 - RNA, 22 nt, Human
aacuugguaaauugugucagau

SEQ ID NO: 250760 - RNA, 22 nt, Human
ugcagccuagacauucugguca

SEQ ID NO: 250761 - RNA, 20 nt, Human
gcccucugccucccucagcg

SEQ ID NO: 250762 - RNA, 22 nt, Human
uuuuggcuuuuccucagcaagc

SEQ ID NO: 250763 - RNA, 19 nt, Human
gggagcaggaaagcugugg

SEQ ID NO: 250764 - RNA, 22 nt, Human
agcaggcagccauuuggaaggc

SEQ ID NO: 250765 - RNA, 23 nt, Human
cauaaaauauuaguaugguagca

SEQ ID NO: 250766 - RNA, 22 nt, Human
gucuucuuuaaccuacuaaagc

SEQ ID NO: 250767 - RNA, 22 nt, Human
augggggcggcugaagcccagg

SEQ ID NO: 250768 - RNA, 22 nt, Human
auggcagcuggcuugggcaccu

SEQ ID NO: 250769 - RNA, 22 nt, Human
caccagcccccucacgcuguca

SEQ ID NO: 250770 - RNA, 22 nt, Human
ccaggcuggaaucaauauucug

SEQ ID NO: 250771 - RNA, 22 nt, Human
cggggcagaaaguugucuuuug

SEQ ID NO: 250772 - RNA, 22 nt, Human
ucuuuaaucauaaccaagaugg

SEQ ID NO: 250773 - RNA, 22 nt, Human
uagucagugcacagacacuugu

SEQ ID NO: 250774 - RNA, 21 nt, Human
ucagagggcccuggaggcuca

SEQ ID NO: 250775 - RNA, 22 nt, Human
uucucugaucuugcuagacuga

SEQ ID NO: 250776 - RNA, 19 nt, Human
uauauauuuugggguugug

SEQ ID NO: 250777 - RNA, 22 nt, Human
cuuccucugccucccgugcuca

SEQ ID NO: 250778 - RNA, 22 nt, Human
uuaaaauagccagugccccucu

SEQ ID NO: 250779 - RNA, 22 nt, Human
ugcccugugccagacuuccugg

SEQ ID NO: 250780 - RNA, 22 nt, Human
gggcuucuaagugaaaguguaa

SEQ ID NO: 250781 - RNA, 22 nt, Human
ugucugcagaagauggcauggg

SEQ ID NO: 250782 - RNA, 22 nt, Human
accaggaagcaucccuuuguaa

SEQ ID NO: 250783 - RNA, 22 nt, Human
ccaggcuccucaugaucuuguu

SEQ ID NO: 250784 - RNA, 22 nt, Human
ucgcuugaacccaggaagugga

SEQ ID NO: 250785 - RNA, 22 nt, Human
ucauguacauguaagucagaaa

SEQ ID NO: 250786 - RNA, 22 nt, Human
cucuggcuuaguaugcuccaaa

SEQ ID NO: 250787 - RNA, 22 nt, Human
uccaucauggcagcagcaguga

SEQ ID NO: 250788 - RNA, 22 nt, Human
cagagccaggccugcccucuuu

SEQ ID NO: 250789 - RNA, 22 nt, Human
ccucagagguucugugugggaa

SEQ ID NO: 250790 - RNA, 22 nt, Human
aaggcuagagagguauucaagu

SEQ ID NO: 250791 - RNA, 21 nt, Human
cagacaugagucucagcuuug

SEQ ID NO: 250792 - RNA, 22 nt, Human
auguuuuauguuccacucaagg

SEQ ID NO: 250793 - RNA, 22 nt, Human
cagcccugcagcuggaucucac

SEQ ID NO: 250794 - RNA, 22 nt, Human
aggaggccgcugaugggcuccc

SEQ ID NO: 250795 - RNA, 22 nt, Human
aguuuacaugacguguauuuca

SEQ ID NO: 250796 - RNA, 22 nt, Human
auaaauuaggaucugggguucc

SEQ ID NO: 250797 - RNA, 22 nt, Human
cuauuuggauguuagccucagu

SEQ ID NO: 250798 - RNA, 22 nt, Human
cuccuucagcugaaucccugcu

SEQ ID NO: 250799 - RNA, 22 nt, Human
aaggagugauauaugggugcua

SEQ ID NO: 250800 - RNA, 22 nt, Human
ugcagaguaaaagcagaugcua

SEQ ID NO: 250801 - RNA, 22 nt, Human
gcauggcuccugucuuacuccc

SEQ ID NO: 250802 - RNA, 22 nt, Human
guaacauuuacaguuccuagag

SEQ ID NO: 250803 - RNA, 20 nt, Human
aguguacagacacuagaaau

SEQ ID NO: 250804 - RNA, 22 nt, Human
uucucaggguagaggugacacu

SEQ ID NO: 250805 - RNA, 22 nt, Human
ccucaggcuucgucuuccaccc

SEQ ID NO: 250806 - RNA, 22 nt, Human
aauagcauagaguuaaaaugca

SEQ ID NO: 250807 - RNA, 22 nt, Human
caggucugagucacauguucau

SEQ ID NO: 250808 - RNA, 22 nt, Human
uucaaaauuguucuaagcucug

SEQ ID NO: 250809 - RNA, 22 nt, Human
acaggacaaaaaucuggauggc

SEQ ID NO: 250810 - RNA, 22 nt, Human
gcagagugaagcauuucuuucu

SEQ ID NO: 250811 - RNA, 22 nt, Human
cugagggagcugcuggccuugg

SEQ ID NO: 250812 - RNA, 22 nt, Human
cagcuggguuuaguggggugug

SEQ ID NO: 250813 - RNA, 22 nt, Human
caggaugcggccugacucuaag

SEQ ID NO: 250814 - RNA, 22 nt, Human
ugguccuguagcucucuaaguu

SEQ ID NO: 250815 - RNA, 22 nt, Human
uucuugaaggggauauaaauag

SEQ ID NO: 250816 - RNA, 22 nt, Human
ggcucugaagggugacagguuu

SEQ ID NO: 250817 - RNA, 22 nt, Human
cucucuggacuugaguaucagc

SEQ ID NO: 250818 - RNA, 22 nt, Human
auagaaccacccagagccuuuu

SEQ ID NO: 250819 - RNA, 22 nt, Human
ucuucagauugcacugagcaag

SEQ ID NO: 250820 - RNA, 22 nt, Human
ugggagaacccagggucaggcu

SEQ ID NO: 250821 - RNA, 22 nt, Human
cuacagucuggcaggaauguua

SEQ ID NO: 250822 - RNA, 22 nt, Human
auguggauuugggagugaucag

SEQ ID NO: 250823 - RNA, 22 nt, Human
gaagccaagccagcugauggag

SEQ ID NO: 250824 - RNA, 22 nt, Human
ugcaucagugacugaauaugag

SEQ ID NO: 250825 - RNA, 22 nt, Human
cagcagcaugaauucgagccac

SEQ ID NO: 250826 - RNA, 18 nt, Human
ucaggcuuugagagaauc

SEQ ID NO: 250827 - RNA, 22 nt, Human
ucuugggaggagcaccugccug

SEQ ID NO: 250828 - RNA, 22 nt, Human
uaguuaggguucugcagagaca

SEQ ID NO: 250829 - RNA, 22 nt, Human
agcuuuacaucgaaguucaguc

SEQ ID NO: 250830 - RNA, 22 nt, Human
aggagcuggccuagaaaggaga

SEQ ID NO: 250831 - RNA, 22 nt, Human
cuggguuuuauuacagugagcu

SEQ ID NO: 250832 - RNA, 22 nt, Human
ccagacaggggcuguuccugcu

SEQ ID NO: 250833 - RNA, 22 nt, Human
uagucuuuugagaaguauaucu

SEQ ID NO: 250834 - RNA, 21 nt, Human
ugcugggcugcaggggaugca

SEQ ID NO: 250835 - RNA, 22 nt, Human
uuagcaauccuaggcuggauca

SEQ ID NO: 250836 - RNA, 22 nt, Human
augaggaggucaggccuuacaa

SEQ ID NO: 250837 - RNA, 22 nt, Human
ugagaaaacaguuuguaauaau

SEQ ID NO: 250838 - RNA, 22 nt, Human
uugagggauuuuaaaugaacaa

SEQ ID NO: 250839 - RNA, 22 nt, Human
ugccaguguggaacuaggaaga

SEQ ID NO: 250840 - RNA, 22 nt, Human
uguuacaagucuugagguacuu

SEQ ID NO: 250841 - RNA, 22 nt, Human
aggggaaggccagccuguagag

SEQ ID NO: 250842 - RNA, 22 nt, Human
aagacucaaggaacaacacagu

SEQ ID NO: 250843 - RNA, 22 nt, Human
gccuggagugguccugcugccc

SEQ ID NO: 250844 - RNA, 22 nt, Human
ucauaaagcuugccugcagugu

SEQ ID NO: 250845 - RNA, 15 nt, Human
uccaggcauucauuc

SEQ ID NO: 250846 - RNA, 22 nt, Human
aagcucugguuaaaaggccugg

SEQ ID NO: 250847 - RNA, 22 nt, Human
ugcaugcaacaauucuucuaua

SEQ ID NO: 250848 - RNA, 22 nt, Human
agcucaaagcuguuacauugua

SEQ ID NO: 250849 - RNA, 22 nt, Human
agggcuccgggcaggcgaugga

SEQ ID NO: 250850 - RNA, 22 nt, Human
auaauauuugcauuacugugau

SEQ ID NO: 250851 - RNA, 22 nt, Human
uuaugcuaaaugaaucaaguca

SEQ ID NO: 250852 - RNA, 22 nt, Human
cucuguuacagcccccugccuc

SEQ ID NO: 250853 - RNA, 19 nt, Human
ggaagcccuaaaggaccua

SEQ ID NO: 250854 - RNA, 22 nt, Human
uucaaaucagaccgaaggcaac

SEQ ID NO: 250855 - RNA, 19 nt, Human
gcagugucaugguaggagc

SEQ ID NO: 250856 - RNA, 22 nt, Human
agaagcccagcauggaaccagc

SEQ ID NO: 250857 - RNA, 22 nt, Human
aaggccagaguacuagaggcug

SEQ ID NO: 250858 - RNA, 22 nt, Human
gaccuggguaaggggcugacaa

SEQ ID NO: 250859 - RNA, 22 nt, Human
cauuuaauagaugcuguuucag

SEQ ID NO: 250860 - RNA, 22 nt, Human
auuacaguggacagcuaugcac

SEQ ID NO: 250861 - RNA, 22 nt, Human
uucagcaacucaaaccuauuag

SEQ ID NO: 250862 - RNA, 22 nt, Human
gcugugcaguaguagguacagu

SEQ ID NO: 250863 - RNA, 22 nt, Human
agcagcugguaggaguggccac

SEQ ID NO: 250864 - RNA, 20 nt, Human
ucccucagcacuucuaccuc

SEQ ID NO: 250865 - RNA, 22 nt, Human
agcagcagaggucagaaaggua

SEQ ID NO: 250866 - RNA, 20 nt, Human
ucugagacuuguagugugga

SEQ ID NO: 250867 - RNA, 22 nt, Human
gggaggagggugcuggcuaaac

SEQ ID NO: 250868 - RNA, 22 nt, Human
augcuuuauuauuuugcaggga

SEQ ID NO: 250869 - RNA, 19 nt, Human
cuggcugcaaugccagggu

SEQ ID NO: 250870 - RNA, 22 nt, Human
aaagauucgagcgauguauaaa

SEQ ID NO: 250871 - RNA, 22 nt, Human
uuuggaaacugccucagcucuu

SEQ ID NO: 250872 - RNA, 22 nt, Human
acagucucuuggaauuuucaga

SEQ ID NO: 250873 - RNA, 22 nt, Human
auucucugccauugcgguggau

SEQ ID NO: 250874 - RNA, 22 nt, Human
acacaugagaaacaucaguugu

SEQ ID NO: 250875 - RNA, 22 nt, Human
cagcugcccugccuugcccuua

SEQ ID NO: 250876 - RNA, 22 nt, Human
uuccucagagagacagaaacua

SEQ ID NO: 250877 - RNA, 22 nt, Human
uuccucagcucagcgagagaga

SEQ ID NO: 250878 - RNA, 22 nt, Human
gagacagagaucuugcugaguc

SEQ ID NO: 250879 - RNA, 22 nt, Human
uauuauuaaauggcagaauuuu

SEQ ID NO: 250880 - RNA, 22 nt, Human
aggaaucugugguuuuaacagg

SEQ ID NO: 250881 - RNA, 22 nt, Human
gccuggcagauugacauagcca

SEQ ID NO: 250882 - RNA, 17 nt, Human
aguguuuccuuaucauu

SEQ ID NO: 250883 - RNA, 22 nt, Human
accaauuucuuggcuuccaaau

SEQ ID NO: 250884 - RNA, 22 nt, Human
cucugggcaggaccaguggacc

SEQ ID NO: 250885 - RNA, 22 nt, Human
ugcagguggcagcggggcacca

SEQ ID NO: 250886 - RNA, 22 nt, Human
aaacugaaacaucaucauguug

SEQ ID NO: 250887 - RNA, 22 nt, Human
aaagccacugcauguguaguau

SEQ ID NO: 250888 - RNA, 22 nt, Human
ugaaggcuugacugaggcagga

SEQ ID NO: 250889 - RNA, 22 nt, Human
gaaagggucuuugauuucccuc

SEQ ID NO: 250890 - RNA, 22 nt, Human
acuuccuuguacugacuccauu

SEQ ID NO: 250891 - RNA, 19 nt, Human
gaucuuugccaauuuaagc

SEQ ID NO: 250892 - RNA, 22 nt, Human
agcugcaggagucgccuaggau

SEQ ID NO: 250893 - RNA, 21 nt, Human
ucucugggaggacuugugaga

SEQ ID NO: 250894 - RNA, 22 nt, Human
ugggacacagaaaaggcagguu

SEQ ID NO: 250895 - RNA, 22 nt, Human
uggcuggcaaggcuggagucag

SEQ ID NO: 250896 - RNA, 22 nt, Human
ugcugagggagggguuuuccag

SEQ ID NO: 250897 - RNA, 22 nt, Human
cucugggugggcagcagaugga

SEQ ID NO: 250898 - RNA, 22 nt, Human
uggggcucaccuaggcuggaag

SEQ ID NO: 250899 - RNA, 22 nt, Human
agcacuuaacugacaguacuau

SEQ ID NO: 250900 - RNA, 22 nt, Human
uccagagccugcgcacuggcug

SEQ ID NO: 250901 - RNA, 22 nt, Human
cugaccagaccccaggaggcug

SEQ ID NO: 250902 - RNA, 22 nt, Human
ggagguggccugaaaauguggc

SEQ ID NO: 250903 - RNA, 20 nt, Human
cccaggagcugugccccauc

SEQ ID NO: 250904 - RNA, 22 nt, Human
ugggggcuccaggcuccaggga

SEQ ID NO: 250905 - RNA, 22 nt, Human
uuguuaaaaugaggucauucug

SEQ ID NO: 250906 - RNA, 22 nt, Human
uugucuaaugagcuccacuuca

SEQ ID NO: 250907 - RNA, 23 nt, Human
uugaauaggguggcaacaaacug

SEQ ID NO: 250908 - RNA, 22 nt, Human
cauuguuuguaaaauuccagua

SEQ ID NO: 250909 - RNA, 19 nt, Human
uucuaccuuacuguaggcu

SEQ ID NO: 250910 - RNA, 22 nt, Human
gcacugagcaccagccacagau

SEQ ID NO: 250911 - RNA, 22 nt, Human
ggcaugcuugccaugggccagu

SEQ ID NO: 250912 - RNA, 22 nt, Human
cccugaggaugucuccuuccug

SEQ ID NO: 250913 - RNA, 22 nt, Human
cuggcagugcccucagccccca

SEQ ID NO: 250914 - RNA, 22 nt, Human
ggcucuggugggaagguuagau

SEQ ID NO: 250915 - RNA, 22 nt, Human
agcugucucucugguguccaua

SEQ ID NO: 250916 - RNA, 22 nt, Human
aggccauguggccccagagucu

SEQ ID NO: 250917 - RNA, 22 nt, Human
caacuuuaauuugggugucaga

SEQ ID NO: 250918 - RNA, 22 nt, Human
aaagguuuauuuaaucagggag

SEQ ID NO: 250919 - RNA, 22 nt, Human
gccuugggauucuuggaugcuc

SEQ ID NO: 250920 - RNA, 22 nt, Human
gcccaguaguucaagguugcag

SEQ ID NO: 250921 - RNA, 22 nt, Human
acaggaucgcccuguugcccag

SEQ ID NO: 250922 - RNA, 22 nt, Human
cccaggacuaaugagcucuacg

SEQ ID NO: 250923 - RNA, 21 nt, Human
aacugagaccagcuaaagugg

SEQ ID NO: 250924 - RNA, 22 nt, Human
aaggaagcagcaaugcaugauu

SEQ ID NO: 250925 - RNA, 17 nt, Human
ucacaucacacaagcaa

SEQ ID NO: 250926 - RNA, 22 nt, Human
uuguacaaguauuaugugaaca

SEQ ID NO: 250927 - RNA, 21 nt, Human
cagaggcagguccugggacgg

SEQ ID NO: 250928 - RNA, 22 nt, Human
uucugacacauuacuacaugga

SEQ ID NO: 250929 - RNA, 23 nt, Human
ggcucugaggauggagcuggugg

SEQ ID NO: 250930 - RNA, 22 nt, Human
agacacauuuucagcucugcca

SEQ ID NO: 250931 - RNA, 18 nt, Human
aauuucuuugacaacuua

SEQ ID NO: 250932 - RNA, 22 nt, Human
aucagaaaggugggcaagcaga

SEQ ID NO: 250933 - RNA, 22 nt, Human
cccagugggucacugcaucuca

SEQ ID NO: 250934 - RNA, 22 nt, Human
agguuuauguuuggugcaggag

SEQ ID NO: 250935 - RNA, 22 nt, Human
agaggccagcccaggccaccga

SEQ ID NO: 250936 - RNA, 22 nt, Human
ccauucaauaccuuagagaaaa

SEQ ID NO: 250937 - RNA, 22 nt, Human
uuagaagucaucuagucuaaaa

SEQ ID NO: 250938 - RNA, 22 nt, Human
gugaauaugaucuuauuuggaa

SEQ ID NO: 250939 - RNA, 22 nt, Human
gguuucaacuucaaccucucca

SEQ ID NO: 250940 - RNA, 19 nt, Human
caccccaguccucuuuccc

SEQ ID NO: 250941 - RNA, 20 nt, Human
ugagauuuguauuauaaguc

SEQ ID NO: 250942 - RNA, 17 nt, Human
gagcucuguggcacaag

SEQ ID NO: 250943 - RNA, 22 nt, Human
uaguuaaaccaccauucuggua

SEQ ID NO: 250944 - RNA, 20 nt, Human
uguacacaguacuuuacaau

SEQ ID NO: 250945 - RNA, 22 nt, Human
aucugaaagcuaggaguucuca

SEQ ID NO: 250946 - RNA, 22 nt, Human
ucagaaauuuucucaguaguuc

SEQ ID NO: 250947 - RNA, 22 nt, Human
guguccucuuauugcucuuggc

SEQ ID NO: 250948 - RNA, 22 nt, Human
aguggcuguacuauuuuuucau

SEQ ID NO: 250949 - RNA, 22 nt, Human
ggcagcagaacuggcccuguau

SEQ ID NO: 250950 - RNA, 22 nt, Human
uccuccuuguucuuuugccuac

SEQ ID NO: 250951 - RNA, 22 nt, Human
cuaaacaaugaacaaagcacug

SEQ ID NO: 250952 - RNA, 20 nt, Human
uguccaggggaucguuggcc

SEQ ID NO: 250953 - RNA, 22 nt, Human
cucuagaaggucucccugccag

SEQ ID NO: 250954 - RNA, 22 nt, Human
uaaagcauguguuagaagugca

SEQ ID NO: 250955 - RNA, 22 nt, Human
agccuccaguagcugaagagac

SEQ ID NO: 250956 - RNA, 22 nt, Human
ucaagcaaguugcauauugcua

SEQ ID NO: 250957 - RNA, 22 nt, Human
uuuccucauuuaucugcuggga

SEQ ID NO: 250958 - RNA, 22 nt, Human
ugauucaagauugguuagcugu

SEQ ID NO: 250959 - RNA, 22 nt, Human
ggcagccagcaaugagaaguuu

SEQ ID NO: 250960 - RNA, 22 nt, Human
uucuauguucuaagucucaagg

SEQ ID NO: 250961 - RNA, 22 nt, Human
uggcaccaccagacaccaggag

SEQ ID NO: 250962 - RNA, 22 nt, Human
gggccaggaguggagauauggg

SEQ ID NO: 250963 - RNA, 22 nt, Human
acagaggguguggaggaagacg

SEQ ID NO: 250964 - RNA, 22 nt, Human
uaauuuuccacucuguuuaucu

SEQ ID NO: 250965 - RNA, 22 nt, Human
aagaaaccaacccugccagcac

SEQ ID NO: 250966 - RNA, 22 nt, Human
cugagcccgggugcucuacccc

SEQ ID NO: 250967 - RNA, 21 nt, Human
agcugccuccacuucugaggc

SEQ ID NO: 250968 - RNA, 22 nt, Human
gccucagcuguugcaggggccc

SEQ ID NO: 250969 - RNA, 22 nt, Human
agauccauuuuggugucaacuc

SEQ ID NO: 250970 - RNA, 22 nt, Human
aacaguacaacuccacaagacu

SEQ ID NO: 250971 - RNA, 22 nt, Human
auuuaauuuucucaacagugcu

SEQ ID NO: 250972 - RNA, 22 nt, Human
ccugguugugaguugaguugag

SEQ ID NO: 250973 - RNA, 22 nt, Human
aagguugcagcaguguugauga

SEQ ID NO: 250974 - RNA, 22 nt, Human
ucucuggucccaccuggccauu

SEQ ID NO: 250975 - RNA, 22 nt, Human
gaaaccagcuagaggcagaggg

SEQ ID NO: 250976 - RNA, 22 nt, Human
uuugcaaaugcucugcagagcu

SEQ ID NO: 250977 - RNA, 22 nt, Human
agggagccuuccuggcuguggu

SEQ ID NO: 250978 - RNA, 22 nt, Human
gggaagggacuuguuuaagguc

SEQ ID NO: 250979 - RNA, 22 nt, Human
ucccaccccggucaagggcuga

SEQ ID NO: 250980 - RNA, 22 nt, Human
auaucacagguguuuaccugau

SEQ ID NO: 250981 - RNA, 22 nt, Human
ugagugcuuuaaauguuauuuu

SEQ ID NO: 250982 - RNA, 22 nt, Human
ucucuuggggaaagagaagaau

SEQ ID NO: 250983 - RNA, 23 nt, Human
uccagcagagccuuccaggaggg

SEQ ID NO: 250984 - RNA, 22 nt, Human
cugcugcauuccucuuuaugag

SEQ ID NO: 250985 - RNA, 22 nt, Human
augucuuucgcaucaguagcua

SEQ ID NO: 250986 - RNA, 22 nt, Human
ucugccagaaguucugagagua

SEQ ID NO: 250987 - RNA, 22 nt, Human
ucacaggccuggggcagagggc

SEQ ID NO: 250988 - RNA, 22 nt, Human
cagggagcugacaaccaaggag

SEQ ID NO: 250989 - RNA, 22 nt, Human
aaacugaauucaaguauccagu

SEQ ID NO: 250990 - RNA, 22 nt, Human
auacagauguugaauguuauau

SEQ ID NO: 250991 - RNA, 22 nt, Human
guaaauuauuucaagaucaucu

SEQ ID NO: 250992 - RNA, 22 nt, Human
cugggguggauggguccaaguu

SEQ ID NO: 250993 - RNA, 22 nt, Human
cuggcccuugacuuacagcagg

SEQ ID NO: 250994 - RNA, 22 nt, Human
uaugucacauuguaacagugug

SEQ ID NO: 250995 - RNA, 22 nt, Human
cucugcccgugccuuucccagu

SEQ ID NO: 250996 - RNA, 22 nt, Human
cugccuuccaaccccagacucc

SEQ ID NO: 250997 - RNA, 18 nt, Human
cugggccagaguuucugc

SEQ ID NO: 250998 - RNA, 22 nt, Human
acagagacugggagcaagaggc

SEQ ID NO: 250999 - RNA, 22 nt, Human
uuucucaguuacuagcuguggu

SEQ ID NO: 251000 - RNA, 22 nt, Human
uuccuggccccaccccuggaga

SEQ ID NO: 251001 - RNA, 20 nt, Human
cccaggcagagcuagcggca

SEQ ID NO: 251002 - RNA, 22 nt, Human
uuucaugagauuccuccacauc

SEQ ID NO: 251003 - RNA, 18 nt, Human
cauuuguuauugugugug

SEQ ID NO: 251004 - RNA, 22 nt, Human
caggggaguuuuaugcaacaga

SEQ ID NO: 251005 - RNA, 22 nt, Human
ccugccagcugugggccagccu

SEQ ID NO: 251006 - RNA, 22 nt, Human
aggaagcucaaagccaugaugu

SEQ ID NO: 251007 - RNA, 22 nt, Human
auucaaacacuuugagaaguuc

SEQ ID NO: 251008 - RNA, 22 nt, Human
ucucugguggcuccaucaguag

SEQ ID NO: 251009 - RNA, 22 nt, Human
aggcugcagaacagucaggugc

SEQ ID NO: 251010 - RNA, 22 nt, Human
aucuccagaacauuuauaaacg

SEQ ID NO: 251011 - RNA, 20 nt, Human
cuuagaagggacauccuggg

SEQ ID NO: 251012 - RNA, 22 nt, Human
uugugucccuguaagacaaagc

SEQ ID NO: 251013 - RNA, 22 nt, Human
uggaauguaaaccucagguggg

SEQ ID NO: 251014 - RNA, 22 nt, Human
acacuaaugagaaaggaauuaa

SEQ ID NO: 251015 - RNA, 19 nt, Human
ucugucauuucuucuguac

SEQ ID NO: 251016 - RNA, 22 nt, Human
aguguauugauuggaacagccu

SEQ ID NO: 251017 - RNA, 22 nt, Human
caaggccagggaauuuuucugg

SEQ ID NO: 251018 - RNA, 22 nt, Human
uacaagaugacaggugcaugau

SEQ ID NO: 251019 - RNA, 22 nt, Human
uaguuuugauuaguauugucuu

SEQ ID NO: 251020 - RNA, 22 nt, Human
ucuguuuucucuguauuuugac

SEQ ID NO: 251021 - RNA, 22 nt, Human
uuguuucucuggucuugaguga

SEQ ID NO: 251022 - RNA, 22 nt, Human
cuuuuacacucaucugggaggg

SEQ ID NO: 251023 - RNA, 22 nt, Human
ggaagagagggcugggccucaa

SEQ ID NO: 251024 - RNA, 22 nt, Human
ccagcccugccucucagggccc

SEQ ID NO: 251025 - RNA, 22 nt, Human
ugcugcaggccuuggcugggaa

SEQ ID NO: 251026 - RNA, 22 nt, Human
cagauguaguagcuuuauugca

SEQ ID NO: 251027 - RNA, 22 nt, Human
ucuguauuuuaagaugcuguuu

SEQ ID NO: 251028 - RNA, 22 nt, Human
ugggcucaaucugcuucuguuu

SEQ ID NO: 251029 - RNA, 22 nt, Human
agugcuccacauugcacuauuc

SEQ ID NO: 251030 - RNA, 22 nt, Human
ccuuccuugucuacaaaagcuc

SEQ ID NO: 251031 - RNA, 22 nt, Human
caggaugagaggcccagggaag

SEQ ID NO: 251032 - RNA, 22 nt, Human
cagacagacagccguggccacc

SEQ ID NO: 251033 - RNA, 22 nt, Human
cauguucaccuguggcacuagu

SEQ ID NO: 251034 - RNA, 18 nt, Human
uggugccuuucacucuuc

SEQ ID NO: 251035 - RNA, 22 nt, Human
ccugagacaugaaccaggcucc

SEQ ID NO: 251036 - RNA, 22 nt, Human
agggcuuucuuuguaaaagaag

SEQ ID NO: 251037 - RNA, 22 nt, Human
gagguggccucaagcagucuuc

SEQ ID NO: 251038 - RNA, 22 nt, Human
uugagggacagaggugcugucu

SEQ ID NO: 251039 - RNA, 18 nt, Human
cuccaaggucucuggcuu

SEQ ID NO: 251040 - RNA, 22 nt, Human
augucaaaucaguuuuaucaga

SEQ ID NO: 251041 - RNA, 22 nt, Human
uaucuuuauuaugucuaucugc

SEQ ID NO: 251042 - RNA, 22 nt, Human
auuuccaucaucauuaggccua

SEQ ID NO: 251043 - RNA, 22 nt, Human
cuggcucaugugaugagggcaa

SEQ ID NO: 251044 - RNA, 22 nt, Human
uggagccagcgagccgaggcgg

SEQ ID NO: 251045 - RNA, 22 nt, Human
aggcuccuagccuguggcuggu

SEQ ID NO: 251046 - RNA, 22 nt, Human
cuggaggcaaagcagaggcaug

SEQ ID NO: 251047 - RNA, 22 nt, Human
uaaagcauguacugugugcuag

SEQ ID NO: 251048 - RNA, 20 nt, Human
caauaauuuacuucccuauu

SEQ ID NO: 251049 - RNA, 22 nt, Human
uuggaaggauuuagagaugucu

SEQ ID NO: 251050 - RNA, 21 nt, Human
agcagaggcugccuggugacu

SEQ ID NO: 251051 - RNA, 22 nt, Human
gcagaauugauggagaacuuaa

SEQ ID NO: 251052 - RNA, 22 nt, Human
ggccagcucaggguccuugggc

SEQ ID NO: 251053 - RNA, 19 nt, Human
ccaccccuuugcugggccc

SEQ ID NO: 251054 - RNA, 22 nt, Human
aguuugaagcacaugaauggca

SEQ ID NO: 251055 - RNA, 22 nt, Human
aaggcauuaccuaaguuuggga

SEQ ID NO: 251056 - RNA, 19 nt, Human
ucagggaguuuacagcaug

SEQ ID NO: 251057 - RNA, 22 nt, Human
gccagagccggcuucacaggau

SEQ ID NO: 251058 - RNA, 22 nt, Human
aauuaagaaaauguuuuaugau

SEQ ID NO: 251059 - RNA, 22 nt, Human
gaggagaagggcacggagaaaa

SEQ ID NO: 251060 - RNA, 22 nt, Human
uucauauuaugauuugaaaugc

SEQ ID NO: 251061 - RNA, 22 nt, Human
gacacaggggggcgcuagaaga

SEQ ID NO: 251062 - RNA, 22 nt, Human
uuccagagcaguuuucagauca

SEQ ID NO: 251063 - RNA, 22 nt, Human
ucccuguaaaccucaaguugau

SEQ ID NO: 251064 - RNA, 23 nt, Human
cucagcaggucaggccccuuccu

SEQ ID NO: 251065 - RNA, 22 nt, Human
cccaggcaggagugugguggcu

SEQ ID NO: 251066 - RNA, 22 nt, Human
aaaggcuggggacugaggaagg

SEQ ID NO: 251067 - RNA, 22 nt, Human
acagaggaaggcugagcugccc

SEQ ID NO: 251068 - RNA, 22 nt, Human
uucuguacccaacauuuuuacu

SEQ ID NO: 251069 - RNA, 22 nt, Human
uaaaugcaguacaaauuguucu

SEQ ID NO: 251070 - RNA, 22 nt, Human
cuccacagagaugcugauugua

SEQ ID NO: 251071 - RNA, 22 nt, Human
gacagacaggaggcauucaggg

SEQ ID NO: 251072 - RNA, 22 nt, Human
cuccucuggaaauuccucugcc

SEQ ID NO: 251073 - RNA, 22 nt, Human
acaauuuuccccauagguuauc

SEQ ID NO: 251074 - RNA, 22 nt, Human
aagccagugugacaggaaacuu

SEQ ID NO: 251075 - RNA, 22 nt, Human
cuuuaagacucugcucuuggug

SEQ ID NO: 251076 - RNA, 22 nt, Human
gcaggucucaaucugagcaggc

SEQ ID NO: 251077 - RNA, 22 nt, Human
ggcugcugcccaccccugcaug

SEQ ID NO: 251078 - RNA, 19 nt, Human
agucuuguauuuuucaagc

SEQ ID NO: 251079 - RNA, 22 nt, Human
gaaagcaguaaaugggucccau

SEQ ID NO: 251080 - RNA, 22 nt, Human
aaagccuucuuguaucgagcca

SEQ ID NO: 251081 - RNA, 22 nt, Human
acuucacuuguaaaugcagccu

SEQ ID NO: 251082 - RNA, 22 nt, Human
ucucugaggacuugggguugcc

SEQ ID NO: 251083 - RNA, 22 nt, Human
cagggauggccuggcgggccac

SEQ ID NO: 251084 - RNA, 17 nt, Human
gaugaaaugaugcacac

SEQ ID NO: 251085 - RNA, 22 nt, Human
gaccacuggggugagggccauc

SEQ ID NO: 251086 - RNA, 18 nt, Human
guuaauuuugaaguucau

SEQ ID NO: 251087 - RNA, 22 nt, Human
cuguguccaauggccuuagcag

SEQ ID NO: 251088 - RNA, 22 nt, Human
uguccaggcuaaagugcagugg

SEQ ID NO: 251089 - RNA, 22 nt, Human
ccugggcucuauccugacccag

SEQ ID NO: 251090 - RNA, 22 nt, Human
ccaggcaagcucugcugugccc

SEQ ID NO: 251091 - RNA, 22 nt, Human
cuggggcaucauccauucuuuc

SEQ ID NO: 251092 - RNA, 22 nt, Human
ugugggaggucuggaaggcucc

SEQ ID NO: 251093 - RNA, 22 nt, Human
agcacauucugccuugcuuugc

SEQ ID NO: 251094 - RNA, 22 nt, Human
cacaggcucuucucacuugauu

SEQ ID NO: 251095 - RNA, 22 nt, Human
ucucuccuguguucugauguuu

SEQ ID NO: 251096 - RNA, 22 nt, Human
gcucugagaggugcagcaguaa

SEQ ID NO: 251097 - RNA, 22 nt, Human
uccuaguucucugccagucgcu

SEQ ID NO: 251098 - RNA, 22 nt, Human
aucaaagugguuuucugugcuu

SEQ ID NO: 251099 - RNA, 22 nt, Human
caucuaauaccucauuuaaucu

SEQ ID NO: 251100 - RNA, 22 nt, Human
gaacuacaggugcagcaaguga

SEQ ID NO: 251101 - RNA, 22 nt, Human
aggaccagccuccaggucucuu

SEQ ID NO: 251102 - RNA, 22 nt, Human
gcuccagcuccggcuccgaagc

SEQ ID NO: 251103 - RNA, 22 nt, Human
ugcccagcuauuccuuucuuag

SEQ ID NO: 251104 - RNA, 22 nt, Human
ccaggagucaauaaaggaagcu

SEQ ID NO: 251105 - RNA, 22 nt, Human
ugacaggggcugguggauaaau

SEQ ID NO: 251106 - RNA, 22 nt, Human
gcagcuuucuaagcuuuauugc

SEQ ID NO: 251107 - RNA, 22 nt, Human
caaagagguuuugagggcagcu

SEQ ID NO: 251108 - RNA, 22 nt, Human
gccacagccucugggaaaacuc

SEQ ID NO: 251109 - RNA, 22 nt, Human
uaaaaguuuuaguuguacauaa

SEQ ID NO: 251110 - RNA, 22 nt, Human
agacagacggcuuuauacacag

SEQ ID NO: 251111 - RNA, 17 nt, Human
ugcugacagcugugugu

SEQ ID NO: 251112 - RNA, 22 nt, Human
auucaaagcccaguaaacauug

SEQ ID NO: 251113 - RNA, 22 nt, Human
auuuccaggagaaaggauuuua

SEQ ID NO: 251114 - RNA, 22 nt, Human
uggguagaguggagggauaaga

SEQ ID NO: 251115 - RNA, 22 nt, Human
agcaggagacauggggguggug

SEQ ID NO: 251116 - RNA, 19 nt, Human
uguagcaguuuaaaacaac

SEQ ID NO: 251117 - RNA, 20 nt, Human
uucacauuucuguagugauu

SEQ ID NO: 251118 - RNA, 22 nt, Human
acacucugcucugagcuucagg

SEQ ID NO: 251119 - RNA, 22 nt, Human
guacccagaggcaugaucccag

SEQ ID NO: 251120 - RNA, 22 nt, Human
acaggacaaggggaagaagaua

SEQ ID NO: 251121 - RNA, 22 nt, Human
caggacaguuggcaucugcugc

SEQ ID NO: 251122 - RNA, 22 nt, Human
uggcagggugccaguugcgagu

SEQ ID NO: 251123 - RNA, 22 nt, Human
aucugggucacaguggcaucua

SEQ ID NO: 251124 - RNA, 22 nt, Human
agggcugccccaguccagccgg

SEQ ID NO: 251125 - RNA, 22 nt, Human
acauugcaauaauaauucucuu

SEQ ID NO: 251126 - RNA, 22 nt, Human
uuuugccugugaauacuaucuu

SEQ ID NO: 251127 - RNA, 21 nt, Human
gaggaaaugcucugguguuca

SEQ ID NO: 251128 - RNA, 22 nt, Human
cugccucuauucacugaggcag

SEQ ID NO: 251129 - RNA, 22 nt, Human
uuguuuuggagaugagcuaaaa

SEQ ID NO: 251130 - RNA, 22 nt, Human
cuuguugcuaacauaugcuucu

SEQ ID NO: 251131 - RNA, 22 nt, Human
caguguggguuugggaggagua

SEQ ID NO: 251132 - RNA, 23 nt, Human
uggcaggugguuagauguuuugu

SEQ ID NO: 251133 - RNA, 22 nt, Human
cauuguuugagcaucugggauc

SEQ ID NO: 251134 - RNA, 22 nt, Human
cucugagguccuacagugaccc

SEQ ID NO: 251135 - RNA, 22 nt, Human
ccaggugugucaccauugccca

SEQ ID NO: 251136 - RNA, 22 nt, Human
ugucucuccacacagccagugc

SEQ ID NO: 251137 - RNA, 23 nt, Human
gugcgccaggacaaccugacgga

SEQ ID NO: 251138 - RNA, 22 nt, Human
aggcuacaggagacgccaggag

SEQ ID NO: 251139 - RNA, 22 nt, Human
acauuguagacuuuucauaugu

SEQ ID NO: 251140 - RNA, 21 nt, Human
ucuuguauuggaucugugugu

SEQ ID NO: 251141 - RNA, 22 nt, Human
auaagcauuucacagguguguu

SEQ ID NO: 251142 - RNA, 22 nt, Human
uccauuuucaucucauguauaa

SEQ ID NO: 251143 - RNA, 22 nt, Human
uuggaggaaagaagguugauau

SEQ ID NO: 251144 - RNA, 22 nt, Human
uugagggauuuacagagguggg

SEQ ID NO: 251145 - RNA, 22 nt, Human
ugagcaguggcaccaggucacc

SEQ ID NO: 251146 - RNA, 22 nt, Human
ucugagcugggcacagaaggcg

SEQ ID NO: 251147 - RNA, 22 nt, Human
agcaguuuuagggagacacauu

SEQ ID NO: 251148 - RNA, 22 nt, Human
uacauacauguauguguguauu

SEQ ID NO: 251149 - RNA, 22 nt, Human
ccccucagguacccgugcagca

SEQ ID NO: 251150 - RNA, 22 nt, Human
aacuaaaucuggcauuuagagc

SEQ ID NO: 251151 - RNA, 22 nt, Human
uggggccagguggcugcagguc

SEQ ID NO: 251152 - RNA, 22 nt, Human
guccugagaugucacaagguuu

SEQ ID NO: 251153 - RNA, 22 nt, Human
augacaaauucagaccauagca

SEQ ID NO: 251154 - RNA, 22 nt, Human
ucaacacucuuuggcacaguua

SEQ ID NO: 251155 - RNA, 22 nt, Human
ggggggugcugaucaguggagc

SEQ ID NO: 251156 - RNA, 22 nt, Human
cuggccagugccugugggcccc

SEQ ID NO: 251157 - RNA, 22 nt, Human
aaaugcuucaccucauuaaacu

SEQ ID NO: 251158 - RNA, 22 nt, Human
ccuugaaauguucucacugggg

SEQ ID NO: 251159 - RNA, 22 nt, Human
aaggaagcagccagagacccuc

SEQ ID NO: 251160 - RNA, 22 nt, Human
ccagcucuuuuggcugagugag

SEQ ID NO: 251161 - RNA, 22 nt, Human
uugaaucuauguauucagugua

SEQ ID NO: 251162 - RNA, 22 nt, Human
uagaaccucugauuauguuacu

SEQ ID NO: 251163 - RNA, 22 nt, Human
uuugaagacauauuguuacaua

SEQ ID NO: 251164 - RNA, 22 nt, Human
gcccaggccggagagcagugcu

SEQ ID NO: 251165 - RNA, 22 nt, Human
cugggcuuagcagcuccugguc

SEQ ID NO: 251166 - RNA, 22 nt, Human
ugaaugauaugugaaaaggaac

SEQ ID NO: 251167 - RNA, 22 nt, Human
ccuggaggcucugggagggcag

SEQ ID NO: 251168 - RNA, 22 nt, Human
ccuccagccuuccugaagagcc

SEQ ID NO: 251169 - RNA, 22 nt, Human
caaaaggccaguacuuuguuug

SEQ ID NO: 251170 - RNA, 22 nt, Human
cugguuuacucugcacugcuca

SEQ ID NO: 251171 - RNA, 22 nt, Human
agaaaucucaguaucucaggga

SEQ ID NO: 251172 - RNA, 22 nt, Human
uagaggugacacugagaccaua

SEQ ID NO: 251173 - RNA, 22 nt, Human
cagaggcucagauggcccuggc

SEQ ID NO: 251174 - RNA, 22 nt, Human
uuggaucacucugaagccuuac

SEQ ID NO: 251175 - RNA, 23 nt, Human
aggaaguuaaggcagacagacag

SEQ ID NO: 251176 - RNA, 19 nt, Human
ugaggccagcuggcauuuu

SEQ ID NO: 251177 - RNA, 20 nt, Human
agagcugggaagcucccuau

SEQ ID NO: 251178 - RNA, 22 nt, Human
uccaggcucucaggugucagca

SEQ ID NO: 251179 - RNA, 22 nt, Human
ugcugcauuuaucuucucaaac

SEQ ID NO: 251180 - RNA, 22 nt, Human
cacauucagguggcauguuaga

SEQ ID NO: 251181 - RNA, 20 nt, Human
gcucagagccugaacuucau

SEQ ID NO: 251182 - RNA, 22 nt, Human
gcuccuguaauuuuuaaaaguc

SEQ ID NO: 251183 - RNA, 22 nt, Human
cccuccagugucccagugggga

SEQ ID NO: 251184 - RNA, 22 nt, Human
aaaugguguuucuaaugcuaga

SEQ ID NO: 251185 - RNA, 22 nt, Human
ucucagguaaaaggguaucuac

SEQ ID NO: 251186 - RNA, 22 nt, Human
aagcauuuauagauaagaauuu

SEQ ID NO: 251187 - RNA, 22 nt, Human
uuguguuaaggugcaucuagug

SEQ ID NO: 251188 - RNA, 21 nt, Human
guucuauuuugcaaacuucug

SEQ ID NO: 251189 - RNA, 22 nt, Human
agacacuggugaagaaaucagg

SEQ ID NO: 251190 - RNA, 19 nt, Human
cagcucaggacucagcccc

SEQ ID NO: 251191 - RNA, 22 nt, Human
cacagcagaacuuaauuucaaa

SEQ ID NO: 251192 - RNA, 22 nt, Human
auggcagcuuucauuguccaca

SEQ ID NO: 251193 - RNA, 22 nt, Human
uuauacauguuuauaagguuga

SEQ ID NO: 251194 - RNA, 22 nt, Human
agucuagauccccagugcuguc

SEQ ID NO: 251195 - RNA, 22 nt, Human
ccugaguggugcuaagcagaua

SEQ ID NO: 251196 - RNA, 22 nt, Human
ugggcaucguucccuuggcuau

SEQ ID NO: 251197 - RNA, 22 nt, Human
cucacagcauggaauuuucugg

SEQ ID NO: 251198 - RNA, 22 nt, Human
cagcucagacgcaggucgagca

SEQ ID NO: 251199 - RNA, 22 nt, Human
uccugcagugugucuccugcac

SEQ ID NO: 251200 - RNA, 22 nt, Human
cauaauuaggcaguugaucauu

SEQ ID NO: 251201 - RNA, 22 nt, Human
uuucugaggaauuaauacagaa

SEQ ID NO: 251202 - RNA, 22 nt, Human
ugcaggcucacccuggagcuga

SEQ ID NO: 251203 - RNA, 22 nt, Human
agaaaugcauuagcacauauag

SEQ ID NO: 251204 - RNA, 22 nt, Human
ucagugucacaggaugcuaugc

SEQ ID NO: 251205 - RNA, 22 nt, Human
aaacuuuguucguccagacuca

SEQ ID NO: 251206 - RNA, 22 nt, Human
aucugguuuuggcugugucccu

SEQ ID NO: 251207 - RNA, 22 nt, Human
ucucuguacaguacaugccgug

SEQ ID NO: 251208 - RNA, 22 nt, Human
gagggcuggggcuuaggcuuag

SEQ ID NO: 251209 - RNA, 19 nt, Human
ucugaggguccagaugcau

SEQ ID NO: 251210 - RNA, 22 nt, Human
guaacugaggcagcuuuuaaga

SEQ ID NO: 251211 - RNA, 22 nt, Human
uaauucagggccagaaucccca

SEQ ID NO: 251212 - RNA, 22 nt, Human
aucuuuggggcauccaggaaaa

SEQ ID NO: 251213 - RNA, 22 nt, Human
gggggcucugacucccucagcu

SEQ ID NO: 251214 - RNA, 22 nt, Human
gagaggcugauccugcagagaa

SEQ ID NO: 251215 - RNA, 22 nt, Human
gagagguuccucccugcuuuac

SEQ ID NO: 251216 - RNA, 22 nt, Human
caguggggggacugaggccuga

SEQ ID NO: 251217 - RNA, 22 nt, Human
acuagaaauuacucagaauaaa

SEQ ID NO: 251218 - RNA, 22 nt, Human
caguucugguuugcagauauau

SEQ ID NO: 251219 - RNA, 22 nt, Human
gaucaugugauuugaaguaaug

SEQ ID NO: 251220 - RNA, 22 nt, Human
augaggagucaaggagucggag

SEQ ID NO: 251221 - RNA, 22 nt, Human
uacuuaaaaauuaucaaagugg

SEQ ID NO: 251222 - RNA, 22 nt, Human
auguuuccauagaagucacagu

SEQ ID NO: 251223 - RNA, 22 nt, Human
cagucuuugacaagcccuuuca

SEQ ID NO: 251224 - RNA, 22 nt, Human
ucuccuggcaugugggucaucu

SEQ ID NO: 251225 - RNA, 22 nt, Human
uuucauugucuacauaugacau

SEQ ID NO: 251226 - RNA, 22 nt, Human
uggaaagguguaaagcagaacc

SEQ ID NO: 251227 - RNA, 21 nt, Human
uuauuucacauggacuuccag

SEQ ID NO: 251228 - RNA, 18 nt, Human
gaguguggcacugggccc

SEQ ID NO: 251229 - RNA, 22 nt, Human
agcaccagcaacuaugggcugc

SEQ ID NO: 251230 - RNA, 22 nt, Human
uucccucuccuacucaggaaag

SEQ ID NO: 251231 - RNA, 22 nt, Human
acucacuuuccauucaagcacc

SEQ ID NO: 251232 - RNA, 22 nt, Human
cacaggccugucucuuucuaac

SEQ ID NO: 251233 - RNA, 22 nt, Human
gcagauggugggggaggaguac

SEQ ID NO: 251234 - RNA, 22 nt, Human
gugcauuccaccgugcagguug

SEQ ID NO: 251235 - RNA, 22 nt, Human
ucuucugugagaauucaagcaa

SEQ ID NO: 251236 - RNA, 22 nt, Human
ggcaucagcccgguccugggcu

SEQ ID NO: 251237 - RNA, 22 nt, Human
aagccuucaguccguugcagag

SEQ ID NO: 251238 - RNA, 19 nt, Human
gcugggcuuggguuuguag

SEQ ID NO: 251239 - RNA, 18 nt, Human
cugucccauccucagguu

SEQ ID NO: 251240 - RNA, 22 nt, Human
cugugaccuccaggaaggggug

SEQ ID NO: 251241 - RNA, 22 nt, Human
uuuccuuccauguugggcaaaa

SEQ ID NO: 251242 - RNA, 22 nt, Human
acaaaauuaugaagaggccuug

SEQ ID NO: 251243 - RNA, 22 nt, Human
ggcuccaguuugugccuucagc

SEQ ID NO: 251244 - RNA, 22 nt, Human
cagcccugcuuccccgcuaguu

SEQ ID NO: 251245 - RNA, 23 nt, Human
agcccagcagagaaccuaggucc

SEQ ID NO: 251246 - RNA, 22 nt, Human
cagggaugagcagauggagcaa

SEQ ID NO: 251247 - RNA, 22 nt, Human
ugggggugacuaucucgggaau

SEQ ID NO: 251248 - RNA, 22 nt, Human
acuggcaguagagggagcgcau

SEQ ID NO: 251249 - RNA, 22 nt, Human
ucaaaauuagugaccaaaggca

SEQ ID NO: 251250 - RNA, 22 nt, Human
ugaagcuuuccuguggucagga

SEQ ID NO: 251251 - RNA, 22 nt, Human
gcugucugggaggccuccacuu

SEQ ID NO: 251252 - RNA, 22 nt, Human
ucagggcuggcuuuugcagagc

SEQ ID NO: 251253 - RNA, 22 nt, Human
cccaggagguggagcuugcagu

SEQ ID NO: 251254 - RNA, 22 nt, Human
cucaggaaaauauugaagaagu

SEQ ID NO: 251255 - RNA, 22 nt, Human
cuggagaggcugggaacagguu

SEQ ID NO: 251256 - RNA, 22 nt, Human
gcccugagugccuguguaagaa

SEQ ID NO: 251257 - RNA, 22 nt, Human
ucaggcuuuuccugccuccuac

SEQ ID NO: 251258 - RNA, 22 nt, Human
gaagugucuccguuuuuaaagg

SEQ ID NO: 251259 - RNA, 22 nt, Human
ugaacaugcuguugauggccug

SEQ ID NO: 251260 - RNA, 22 nt, Human
gagcuuuaggagaaggagguca

SEQ ID NO: 251261 - RNA, 22 nt, Human
uucaaacucugaguaguucugc

SEQ ID NO: 251262 - RNA, 20 nt, Human
ucauccaguugguuuauggu

SEQ ID NO: 251263 - RNA, 22 nt, Human
gggcugcuugcuggagacagac

SEQ ID NO: 251264 - RNA, 22 nt, Human
ugugcuuuucucugcuccugga

SEQ ID NO: 251265 - RNA, 22 nt, Human
uagaauguagugcuucaagauu

SEQ ID NO: 251266 - RNA, 22 nt, Human
uuaaaaggguaagcagcaacuu

SEQ ID NO: 251267 - RNA, 22 nt, Human
ugcugggcuugaaagcugcuaa

SEQ ID NO: 251268 - RNA, 22 nt, Human
auguauuaugguuuuccuuaag

SEQ ID NO: 251269 - RNA, 17 nt, Human
cccuggcucuaggugga

SEQ ID NO: 251270 - RNA, 22 nt, Human
uccaguguguguccagcugcug

SEQ ID NO: 251271 - RNA, 22 nt, Human
ugacugaaggacuagauugauu

SEQ ID NO: 251272 - RNA, 22 nt, Human
ccagugccuaucuccucuggga

SEQ ID NO: 251273 - RNA, 22 nt, Human
acugugugcuggacaugauguu

SEQ ID NO: 251274 - RNA, 22 nt, Human
agauggcugggccccaccccag

SEQ ID NO: 251275 - RNA, 22 nt, Human
ggggaagggaguccaaguguua

SEQ ID NO: 251276 - RNA, 23 nt, Human
uagucaguauguaagucuaauug

SEQ ID NO: 251277 - RNA, 20 nt, Human
acaauacagguugugucuga

SEQ ID NO: 251278 - RNA, 22 nt, Human
aggcccuggcacugccugggag

SEQ ID NO: 251279 - RNA, 22 nt, Human
gcuagaaacuguuuaaucucuu

SEQ ID NO: 251280 - RNA, 22 nt, Human
uuuuccucuguaugcgugagau

SEQ ID NO: 251281 - RNA, 22 nt, Human
gaggucugggauggggccugaa

SEQ ID NO: 251282 - RNA, 22 nt, Human
ccaggugguucaggucaccaua

SEQ ID NO: 251283 - RNA, 22 nt, Human
gaugaaaaaagacgagcauaua

SEQ ID NO: 251284 - RNA, 22 nt, Human
uuuagacacacuuuguauauuu

SEQ ID NO: 251285 - RNA, 23 nt, Human
uuguccugccgaucucugagaau

SEQ ID NO: 251286 - RNA, 22 nt, Human
agccucugaugaucacaggggg

SEQ ID NO: 251287 - RNA, 20 nt, Human
cccaggagugagcagcuuua

SEQ ID NO: 251288 - RNA, 22 nt, Human
ccuggcucuucgggaguuuguu

SEQ ID NO: 251289 - RNA, 22 nt, Human
gcccuggccuccuggaacaggc

SEQ ID NO: 251290 - RNA, 22 nt, Human
ugcccuggaggggcuuacaguc

SEQ ID NO: 251291 - RNA, 22 nt, Human
gaaucauuuauuuuugacagca

SEQ ID NO: 251292 - RNA, 22 nt, Human
uaggaggcuuaaagcugcucag

SEQ ID NO: 251293 - RNA, 22 nt, Human
auucuuuggacaauaaguggug

SEQ ID NO: 251294 - RNA, 21 nt, Human
aaagcaguucuuccugccucu

SEQ ID NO: 251295 - RNA, 22 nt, Human
uagcugaaugugaccuuaaaga

SEQ ID NO: 251296 - RNA, 23 nt, Human
agggcaugaagcagaggacgugg

SEQ ID NO: 251297 - RNA, 17 nt, Human
uggucuggaagaacuga

SEQ ID NO: 251298 - RNA, 21 nt, Human
uacagaugaggagaccaaggc

SEQ ID NO: 251299 - RNA, 22 nt, Human
aaagcuuagaggccaguggagg

SEQ ID NO: 251300 - RNA, 22 nt, Human
aggcuucuugcuuccaaaugca

SEQ ID NO: 251301 - RNA, 18 nt, Human
gcugccuucccagucaag

SEQ ID NO: 251302 - RNA, 19 nt, Human
ucccucagucugccaggcc

SEQ ID NO: 251303 - RNA, 22 nt, Human
uugugagaugauuugaaagugu

SEQ ID NO: 251304 - RNA, 22 nt, Human
ucaggaagacaaucuuuggcuc

SEQ ID NO: 251305 - RNA, 20 nt, Human
agucacauugagcuuuugga

SEQ ID NO: 251306 - RNA, 22 nt, Human
uuuuaaugggcgacuauuaugg

SEQ ID NO: 251307 - RNA, 22 nt, Human
cagcaagauuuuuaaagcaagg

SEQ ID NO: 251308 - RNA, 23 nt, Human
gcucuuuguucauguggaugccu

SEQ ID NO: 251309 - RNA, 22 nt, Human
ugcugaggaauaauuguuccug

SEQ ID NO: 251310 - RNA, 22 nt, Human
uuccugggugguccugguagag

SEQ ID NO: 251311 - RNA, 22 nt, Human
cagcaggcccaggugcugguga

SEQ ID NO: 251312 - RNA, 22 nt, Human
aggauuuacaaugauucuaggu

SEQ ID NO: 251313 - RNA, 22 nt, Human
gccugccugcugucaucugccu

SEQ ID NO: 251314 - RNA, 22 nt, Human
ugcucuggaaauaaaugauuua

SEQ ID NO: 251315 - RNA, 22 nt, Human
ccugccagggccagaggccagc

SEQ ID NO: 251316 - RNA, 22 nt, Human
ugcaggcuggcagugcugaaau

SEQ ID NO: 251317 - RNA, 22 nt, Human
uuggagggacagauggcuaggc

SEQ ID NO: 251318 - RNA, 22 nt, Human
ggaagacagaagccuacagcuu

SEQ ID NO: 251319 - RNA, 22 nt, Human
auucuuuagccagcagguauau

SEQ ID NO: 251320 - RNA, 22 nt, Human
uggcugcugcucacucagccuc

SEQ ID NO: 251321 - RNA, 22 nt, Human
ucaaauuaguggaauaauaaug

SEQ ID NO: 251322 - RNA, 22 nt, Human
cuuuauauccagauguuuggug

SEQ ID NO: 251323 - RNA, 18 nt, Human
gaggagccgucccuacua

SEQ ID NO: 251324 - RNA, 22 nt, Human
aggaugagagauacauggagca

SEQ ID NO: 251325 - RNA, 22 nt, Human
uccugcaggcuugaguccucag

SEQ ID NO: 251326 - RNA, 22 nt, Human
ccucaggccucugccucauugg

SEQ ID NO: 251327 - RNA, 22 nt, Human
ggcucugcccgcggcugcccac

SEQ ID NO: 251328 - RNA, 22 nt, Human
acuuuaaaaagagccuucuaac

SEQ ID NO: 251329 - RNA, 22 nt, Human
uugaauuagacuuugcuacagg

SEQ ID NO: 251330 - RNA, 22 nt, Human
cugcuuuaacucugggaagcca

SEQ ID NO: 251331 - RNA, 22 nt, Human
caucuugugaauuucugauucu

SEQ ID NO: 251332 - RNA, 22 nt, Human
augagagccaccaugcuucugu

SEQ ID NO: 251333 - RNA, 22 nt, Human
agcuuuaucacaauauuggcua

SEQ ID NO: 251334 - RNA, 19 nt, Human
ggaaccuuagagcuucagc

SEQ ID NO: 251335 - RNA, 22 nt, Human
auaacagaugugaagugcuaau

SEQ ID NO: 251336 - RNA, 22 nt, Human
gcaacuguuuugagcacccagu

SEQ ID NO: 251337 - RNA, 22 nt, Human
ugggagaagacguacuuuagac

SEQ ID NO: 251338 - RNA, 18 nt, Human
gcagcuagccaggggggc

SEQ ID NO: 251339 - RNA, 22 nt, Human
ucucaggcucuuggaaccuguu

SEQ ID NO: 251340 - RNA, 22 nt, Human
uccuguuuuuguaaucgacucu

SEQ ID NO: 251341 - RNA, 23 nt, Human
cagcugaagcagccugggcugga

SEQ ID NO: 251342 - RNA, 22 nt, Human
aguggcugaauauauuuuacua

SEQ ID NO: 251343 - RNA, 22 nt, Human
uuuccugguuugaagcagcagc

SEQ ID NO: 251344 - RNA, 23 nt, Human
cguguccuucagggagagugugg

SEQ ID NO: 251345 - RNA, 22 nt, Human
cagaaaauaaaguuucuacgca

SEQ ID NO: 251346 - RNA, 22 nt, Human
ccagggucucugcugccugaga

SEQ ID NO: 251347 - RNA, 22 nt, Human
acaaaaauuagcugggcauggu

SEQ ID NO: 251348 - RNA, 22 nt, Human
gcagggcugacucagccacccu

SEQ ID NO: 251349 - RNA, 22 nt, Human
ucaagacaucacugugcauuuu

SEQ ID NO: 251350 - RNA, 22 nt, Human
ucagggcaaagggcagaguuug

SEQ ID NO: 251351 - RNA, 18 nt, Human
cucucuuuccacucuuug

SEQ ID NO: 251352 - RNA, 22 nt, Human
uugacaauguccuuugaauuuc

SEQ ID NO: 251353 - RNA, 22 nt, Human
acauguuagaaaugcagaaucu

SEQ ID NO: 251354 - RNA, 22 nt, Human
agguccagugcucuuggugguu

SEQ ID NO: 251355 - RNA, 22 nt, Human
ucuggggguuaagugaggacaa

SEQ ID NO: 251356 - RNA, 22 nt, Human
acagccaggcccagcacgcagg

SEQ ID NO: 251357 - RNA, 22 nt, Human
uggugagcucuggcagucugug

SEQ ID NO: 251358 - RNA, 22 nt, Human
uuagcaggaagaguuggcugga

SEQ ID NO: 251359 - RNA, 22 nt, Human
gauggcuuacagacaguuagga

SEQ ID NO: 251360 - RNA, 22 nt, Human
uucugaaauaggagauagcugu

SEQ ID NO: 251361 - RNA, 22 nt, Human
caguuuccugaagagaaagaau

SEQ ID NO: 251362 - RNA, 22 nt, Human
agaacucuaggauuggcuggau

SEQ ID NO: 251363 - RNA, 22 nt, Human
aauauuuauauuucucuucccu

SEQ ID NO: 251364 - RNA, 21 nt, Human
auauuucucauaagguuaugg

SEQ ID NO: 251365 - RNA, 22 nt, Human
uccuuucugggccucagugacu

SEQ ID NO: 251366 - RNA, 22 nt, Human
aaauuccagaaacucaguauau

SEQ ID NO: 251367 - RNA, 22 nt, Human
caaggccaugagcagcgagugu

SEQ ID NO: 251368 - RNA, 22 nt, Human
aauaagauaagauuucugcucu

SEQ ID NO: 251369 - RNA, 22 nt, Human
gaaacauuuguugaguacuugc

SEQ ID NO: 251370 - RNA, 22 nt, Human
uugccagggucaggaugagauc

SEQ ID NO: 251371 - RNA, 22 nt, Human
gagcuuggugcacagugguuaa

SEQ ID NO: 251372 - RNA, 22 nt, Human
ucucaucauuccuucaaagccc

SEQ ID NO: 251373 - RNA, 22 nt, Human
auguccuuuuauuuaaagcagg

SEQ ID NO: 251374 - RNA, 22 nt, Human
agaaauguuguggguuuuguua

SEQ ID NO: 251375 - RNA, 23 nt, Human
caguuggagguacagagacacug

SEQ ID NO: 251376 - RNA, 22 nt, Human
caccaccaggcaggacaccgaa

SEQ ID NO: 251377 - RNA, 22 nt, Human
ucaggcagagcuguggagcucu

SEQ ID NO: 251378 - RNA, 17 nt, Human
ggaaaagaagaguagga

SEQ ID NO: 251379 - RNA, 22 nt, Human
gauaaagggggaccaaaugacu

SEQ ID NO: 251380 - RNA, 21 nt, Human
ucagcaggcaccagaaggcug

SEQ ID NO: 251381 - RNA, 22 nt, Human
uuggcuaugcuuguguucaguu

SEQ ID NO: 251382 - RNA, 22 nt, Human
acugcaggagacacagcugcug

SEQ ID NO: 251383 - RNA, 22 nt, Human
aaggcagcaagaauuccagguu

SEQ ID NO: 251384 - RNA, 22 nt, Human
ggcuuuauauuguuugagcaga

SEQ ID NO: 251385 - RNA, 19 nt, Human
cucuggagaacaauagugc

SEQ ID NO: 251386 - RNA, 22 nt, Human
ucuccacauucuauuggcuaua

SEQ ID NO: 251387 - RNA, 22 nt, Human
gucccaggugcccagugggcag

SEQ ID NO: 251388 - RNA, 22 nt, Human
augcagcagccccuugaggugc

SEQ ID NO: 251389 - RNA, 22 nt, Human
aagauauacuauuaaguaccau

SEQ ID NO: 251390 - RNA, 22 nt, Human
uacagaaaaacuggcauugaag

SEQ ID NO: 251391 - RNA, 22 nt, Human
cagaagcauuccagcaaauagu

SEQ ID NO: 251392 - RNA, 22 nt, Human
uggguagaaacaaggcuggacu

SEQ ID NO: 251393 - RNA, 23 nt, Human
gcucagaggugaaauguuuuggg

SEQ ID NO: 251394 - RNA, 22 nt, Human
gaaauacugcacacccuguaag

SEQ ID NO: 251395 - RNA, 22 nt, Human
acagacagacagauugcauaug

SEQ ID NO: 251396 - RNA, 22 nt, Human
uucaaaaagguauguucaaguc

SEQ ID NO: 251397 - RNA, 22 nt, Human
guuuauuaacugucaagugauu

SEQ ID NO: 251398 - RNA, 22 nt, Human
uuacaagcuaauuguuucagcu

SEQ ID NO: 251399 - RNA, 22 nt, Human
gucugcagagggaaggcuucag

SEQ ID NO: 251400 - RNA, 22 nt, Human
gccuggcaggggccugggagug

SEQ ID NO: 251401 - RNA, 20 nt, Human
acaguuuauuuuacuugguu

SEQ ID NO: 251402 - RNA, 22 nt, Human
ugaugacaaacuuuccugaugc

SEQ ID NO: 251403 - RNA, 22 nt, Human
aggcuccuucacagcacucgcc

SEQ ID NO: 251404 - RNA, 22 nt, Human
aaagguuugcauggaauuuacc

SEQ ID NO: 251405 - RNA, 22 nt, Human
uggaaacucuaccucucuaaga

SEQ ID NO: 251406 - RNA, 22 nt, Human
uauggcuucugggccaaauuua

SEQ ID NO: 251407 - RNA, 22 nt, Human
ggaccugcucucccaguucucu

SEQ ID NO: 251408 - RNA, 22 nt, Human
ucacagugauaacuaaguccug

SEQ ID NO: 251409 - RNA, 19 nt, Human
aagagcagggaaagaauug

SEQ ID NO: 251410 - RNA, 22 nt, Human
cuaaaauuaccuaccaguuuag

SEQ ID NO: 251411 - RNA, 18 nt, Human
aggcuucccaggcaggcc

SEQ ID NO: 251412 - RNA, 22 nt, Human
caggcagcaucagucugcugua

SEQ ID NO: 251413 - RNA, 22 nt, Human
cuccauggaaaaggcuguuguu

SEQ ID NO: 251414 - RNA, 22 nt, Human
aagucucuuuucuuccuguauu

SEQ ID NO: 251415 - RNA, 22 nt, Human
aagguggugaguacaguuaggu

SEQ ID NO: 251416 - RNA, 22 nt, Human
ugcauguguuugccacagugag

SEQ ID NO: 251417 - RNA, 22 nt, Human
ucuuccaagguugcacacuauc

SEQ ID NO: 251418 - RNA, 22 nt, Human
ugagguucaguucuuggccaca

SEQ ID NO: 251419 - RNA, 22 nt, Human
cuugggucacaacucugaggug

SEQ ID NO: 251420 - RNA, 22 nt, Human
aguggggaagauuuugcaguca

SEQ ID NO: 251421 - RNA, 22 nt, Human
uuuugccugagagugaaaauaa

SEQ ID NO: 251422 - RNA, 22 nt, Human
uauagagcuuuggcauugauua

SEQ ID NO: 251423 - RNA, 22 nt, Human
uggcaggauuugcccggaagga

SEQ ID NO: 251424 - RNA, 22 nt, Human
uccaggcuggcucuucaaaauu

SEQ ID NO: 251425 - RNA, 22 nt, Human
gagcacagcuggagguagcauu

SEQ ID NO: 251426 - RNA, 22 nt, Human
aggagaaggaagugcaucacua

SEQ ID NO: 251427 - RNA, 22 nt, Human
caguggaauacgagcagauguc

SEQ ID NO: 251428 - RNA, 22 nt, Human
cagagacauccauguuaguugg

SEQ ID NO: 251429 - RNA, 23 nt, Human
ggagccuccggugugugagaggc

SEQ ID NO: 251430 - RNA, 23 nt, Human
guuaauaaugaacacuuucuccc

SEQ ID NO: 251431 - RNA, 22 nt, Human
augccugcuuacuccaggugcu

SEQ ID NO: 251432 - RNA, 22 nt, Human
cuuacauacugagaaaauaucc

SEQ ID NO: 251433 - RNA, 22 nt, Human
ucugaggguuguagagagggac

SEQ ID NO: 251434 - RNA, 22 nt, Human
uggcacaggaucucagcggcca

SEQ ID NO: 251435 - RNA, 22 nt, Human
ggcaggcuccagagcccucucc

SEQ ID NO: 251436 - RNA, 18 nt, Human
agcuccuggucucaggga

SEQ ID NO: 251437 - RNA, 22 nt, Human
uguaaacaaaugcauucuugcu

SEQ ID NO: 251438 - RNA, 22 nt, Human
aaguaccaaguuuguuugacgc

SEQ ID NO: 251439 - RNA, 22 nt, Human
ugccucucuaacccaugcccaa

SEQ ID NO: 251440 - RNA, 22 nt, Human
ggcugcagagcuggugcccugg

SEQ ID NO: 251441 - RNA, 22 nt, Human
guccagcccuugcagcuucuuu

SEQ ID NO: 251442 - RNA, 22 nt, Human
acagauuuuauuauucagguau

SEQ ID NO: 251443 - RNA, 22 nt, Human
uaacaucuuauuggcaaagaua

SEQ ID NO: 251444 - RNA, 22 nt, Human
uauuucuaagcuguaagucuga

SEQ ID NO: 251445 - RNA, 22 nt, Human
uggggucuggaguugcccauga

SEQ ID NO: 251446 - RNA, 22 nt, Human
ccuguucuguuaauuaaacuuu

SEQ ID NO: 251447 - RNA, 22 nt, Human
ggucuggaagcgcaguaggcug

SEQ ID NO: 251448 - RNA, 22 nt, Human
acagauuuggcccagccaaugc

SEQ ID NO: 251449 - RNA, 22 nt, Human
cugcuacaccggaauagugaca

SEQ ID NO: 251450 - RNA, 22 nt, Human
gccuccaccgaacgcucucuug

SEQ ID NO: 251451 - RNA, 22 nt, Human
ccuggcagguggcgcccucggc

SEQ ID NO: 251452 - RNA, 19 nt, Human
ucauugaacauaauuacuu

SEQ ID NO: 251453 - RNA, 22 nt, Human
cuuuagaaggguaacggaauua

SEQ ID NO: 251454 - RNA, 22 nt, Human
accuuggaacugaaguguuuuu

SEQ ID NO: 251455 - RNA, 22 nt, Human
auacuuuuaauuccuucugagu

SEQ ID NO: 251456 - RNA, 22 nt, Human
gaaccuuaugguaaaucuagag

SEQ ID NO: 251457 - RNA, 22 nt, Human
cuggagaguaaucucuguguua

SEQ ID NO: 251458 - RNA, 22 nt, Human
ugggagccauuuuagaggcugc

SEQ ID NO: 251459 - RNA, 22 nt, Human
ugggggugaaagucuggacagu

SEQ ID NO: 251460 - RNA, 22 nt, Human
cuggcuuccaugcuguaguggc

SEQ ID NO: 251461 - RNA, 22 nt, Human
caguggccuugaugccucauuc

SEQ ID NO: 251462 - RNA, 22 nt, Human
cacagaggucugggcccagcag

SEQ ID NO: 251463 - RNA, 22 nt, Human
aaagccuugggauuugugauca

SEQ ID NO: 251464 - RNA, 22 nt, Human
auugcugaaaugaaaggauaug

SEQ ID NO: 251465 - RNA, 22 nt, Human
gaguuaauucgaauauucuagc

SEQ ID NO: 251466 - RNA, 22 nt, Human
aacuuagagcucuccuaaauga

SEQ ID NO: 251467 - RNA, 22 nt, Human
uucuuagugguagucaucuuug

SEQ ID NO: 251468 - RNA, 22 nt, Human
aggcugaggaucguacuuucca

SEQ ID NO: 251469 - RNA, 22 nt, Human
aaaugcauuaagucagaacaau

SEQ ID NO: 251470 - RNA, 22 nt, Human
gagccagccuucuucugagguc

SEQ ID NO: 251471 - RNA, 22 nt, Human
agauaagauaguccagcacaau

SEQ ID NO: 251472 - RNA, 22 nt, Human
ucagccaagcagccaucaucug

SEQ ID NO: 251473 - RNA, 22 nt, Human
acauuugagaugccuuuuaggu

SEQ ID NO: 251474 - RNA, 22 nt, Human
ucucagagaaaugugucaccau

SEQ ID NO: 251475 - RNA, 22 nt, Human
cuucucugcccauaggaaaugc

SEQ ID NO: 251476 - RNA, 22 nt, Human
aggguggcugugaagugcuugg

SEQ ID NO: 251477 - RNA, 22 nt, Human
gggcuuggguauugugagaggu

SEQ ID NO: 251478 - RNA, 22 nt, Human
uagggauguaaacauaguaauu

SEQ ID NO: 251479 - RNA, 22 nt, Human
ucaguuaagaggccacggcagu

SEQ ID NO: 251480 - RNA, 22 nt, Human
ugacaaguacauaauuucaugu

SEQ ID NO: 251481 - RNA, 22 nt, Human
ccuugaaacccugacacucugu

SEQ ID NO: 251482 - RNA, 16 nt, Human
agcagggcgggaagga

SEQ ID NO: 251483 - RNA, 22 nt, Human
agaggcuguuacacucccagau

SEQ ID NO: 251484 - RNA, 22 nt, Human
ucugauauaaaagugacauuca

SEQ ID NO: 251485 - RNA, 22 nt, Human
uacacauguuuggcaaguaugu

SEQ ID NO: 251486 - RNA, 22 nt, Human
cuggaugcugagagguaccaag

SEQ ID NO: 251487 - RNA, 22 nt, Human
auuagcaauugugcaucuagua

SEQ ID NO: 251488 - RNA, 22 nt, Human
ugcuuucaaaggcuuucuagau

SEQ ID NO: 251489 - RNA, 22 nt, Human
agguuccagggauuaggaugug

SEQ ID NO: 251490 - RNA, 22 nt, Human
ggggcagggagguuaucgccga

SEQ ID NO: 251491 - RNA, 22 nt, Human
ugcacaccucuccaccacucuc

SEQ ID NO: 251492 - RNA, 22 nt, Human
uggggggcaugaaccuccacgg

SEQ ID NO: 251493 - RNA, 22 nt, Human
uggccaggcagguagaacggcc

SEQ ID NO: 251494 - RNA, 22 nt, Human
agauaaaaugguucaaaggcua

SEQ ID NO: 251495 - RNA, 22 nt, Human
aguacaaaggcccuugauuacu

SEQ ID NO: 251496 - RNA, 22 nt, Human
auuuccaagguaauuuugagua

SEQ ID NO: 251497 - RNA, 22 nt, Human
ucuggccccgcaugcacuuuau

SEQ ID NO: 251498 - RNA, 22 nt, Human
gacuuuauaaaugagaggcgga

SEQ ID NO: 251499 - RNA, 22 nt, Human
cagcugagagacaaugagucau

SEQ ID NO: 251500 - RNA, 22 nt, Human
ugaaggagauuuuuagggaggc

SEQ ID NO: 251501 - RNA, 22 nt, Human
acagcagguuauuguuauggca

SEQ ID NO: 251502 - RNA, 22 nt, Human
uuacuuuagaucauacugugug

SEQ ID NO: 251503 - RNA, 21 nt, Human
acucaggagacuaacuauguc

SEQ ID NO: 251504 - RNA, 22 nt, Human
uccuggcauuuacaaacccacc

SEQ ID NO: 251505 - RNA, 22 nt, Human
acacaugugucugcaugcagug

SEQ ID NO: 251506 - RNA, 22 nt, Human
gaggacaccucacagccucaca

SEQ ID NO: 251507 - RNA, 22 nt, Human
cugggacacccaaggaaagagc

SEQ ID NO: 251508 - RNA, 22 nt, Human
cccugagcgugaggaggaagua

SEQ ID NO: 251509 - RNA, 22 nt, Human
uuuuuccuaagcaguggagcug

SEQ ID NO: 251510 - RNA, 22 nt, Human
cagugagguggauggauggccu

SEQ ID NO: 251511 - RNA, 22 nt, Human
agagucagaaagcagacagggg

SEQ ID NO: 251512 - RNA, 22 nt, Human
cuccugguuccugucuuaaaua

SEQ ID NO: 251513 - RNA, 22 nt, Human
cagugcagguuuagggcugggg

SEQ ID NO: 251514 - RNA, 22 nt, Human
aucacaaucccucucucugaua

SEQ ID NO: 251515 - RNA, 22 nt, Human
aauagcaauuacccuucaacuc

SEQ ID NO: 251516 - RNA, 22 nt, Human
aauguugagcuugaaaguaggu

SEQ ID NO: 251517 - RNA, 17 nt, Human
cuuuuaauuuacuuccc

SEQ ID NO: 251518 - RNA, 22 nt, Human
ucuccccuacucuaaaucugca

SEQ ID NO: 251519 - RNA, 22 nt, Human
ucuuuguguucaggagccacgu

SEQ ID NO: 251520 - RNA, 22 nt, Human
aagagcagccuccaggggugga

SEQ ID NO: 251521 - RNA, 22 nt, Human
acugucuuguuccaagacuaaa

SEQ ID NO: 251522 - RNA, 23 nt, Human
ugcagcaggguggucuacuucuc

SEQ ID NO: 251523 - RNA, 22 nt, Human
ggagagaggagcccacugcugu

SEQ ID NO: 251524 - RNA, 22 nt, Human
uccuucaagugcaguaccugag

SEQ ID NO: 251525 - RNA, 22 nt, Human
aaguaugucaaucauacuucaa

SEQ ID NO: 251526 - RNA, 22 nt, Human
aacuucuuugagcuccaguuuu

SEQ ID NO: 251527 - RNA, 22 nt, Human
uuacuguuuugguaccucauug

SEQ ID NO: 251528 - RNA, 22 nt, Human
ccacagaaccucagcuuugagc

SEQ ID NO: 251529 - RNA, 22 nt, Human
acaugcacacgauucagucugg

SEQ ID NO: 251530 - RNA, 20 nt, Human
ucaauguaaucauaucauca

SEQ ID NO: 251531 - RNA, 22 nt, Human
cauguaaagcacuucauaacag

SEQ ID NO: 251532 - RNA, 22 nt, Human
cagccagguucaaguccuuaua

SEQ ID NO: 251533 - RNA, 22 nt, Human
gcacagccacugagugagaacc

SEQ ID NO: 251534 - RNA, 22 nt, Human
cauuaaauaucaaccuagacua

SEQ ID NO: 251535 - RNA, 22 nt, Human
aaauaucauuuauaacuuuuaa

SEQ ID NO: 251536 - RNA, 22 nt, Human
gcuuuguguagaaggaggaugg

SEQ ID NO: 251537 - RNA, 22 nt, Human
ugucucugauaaguaguucagu

SEQ ID NO: 251538 - RNA, 22 nt, Human
guacuuuagaguaaaauagacc

SEQ ID NO: 251539 - RNA, 22 nt, Human
gggcagcaaaucugagucuggu

SEQ ID NO: 251540 - RNA, 22 nt, Human
guccagaaagggcagugauuug

SEQ ID NO: 251541 - RNA, 22 nt, Human
ucuccuggcauuugguugagua

SEQ ID NO: 251542 - RNA, 22 nt, Human
uagaaagcguuaaaucuacaga

SEQ ID NO: 251543 - RNA, 22 nt, Human
uggcaguuggggaugaagugag

SEQ ID NO: 251544 - RNA, 22 nt, Human
cacaggugucucuaguagcguu

SEQ ID NO: 251545 - RNA, 22 nt, Human
cucuccagcagauguagucugu

SEQ ID NO: 251546 - RNA, 22 nt, Human
ucugcaggcuuggaguggcagc

SEQ ID NO: 251547 - RNA, 22 nt, Human
gcagaauuuaggaauuaggaaa

SEQ ID NO: 251548 - RNA, 22 nt, Human
ucagacagggagucagaaaaua

SEQ ID NO: 251549 - RNA, 22 nt, Human
aagacaauaauuuuugggcagg

SEQ ID NO: 251550 - RNA, 22 nt, Human
ucccugcugagagugcucuccc

SEQ ID NO: 251551 - RNA, 22 nt, Human
aggggcucaguuacuuuggcag

SEQ ID NO: 251552 - RNA, 16 nt, Human
ucucuggguugcacag

SEQ ID NO: 251553 - RNA, 22 nt, Human
gggcuucuguaccuaccuggaa

SEQ ID NO: 251554 - RNA, 22 nt, Human
gcuuugcuggaaucaacgaaug

SEQ ID NO: 251555 - RNA, 22 nt, Human
ucacuuuggauuauguaauuuc

SEQ ID NO: 251556 - RNA, 22 nt, Human
uuucuagcuguaggaagcugag

SEQ ID NO: 251557 - RNA, 22 nt, Human
cagagucagagcuccauggagu

SEQ ID NO: 251558 - RNA, 22 nt, Human
acccaggcuggaaugcaguggc

SEQ ID NO: 251559 - RNA, 22 nt, Human
acccaggcuggagugcagugac

SEQ ID NO: 251560 - RNA, 22 nt, Human
uggcucaguuucaguccugguu

SEQ ID NO: 251561 - RNA, 22 nt, Human
uuacauuuuaguuaaccuguga

SEQ ID NO: 251562 - RNA, 22 nt, Human
agaggucauaucucagaagaga

SEQ ID NO: 251563 - RNA, 22 nt, Human
ugaggcaggaguuaaugugcuc

SEQ ID NO: 251564 - RNA, 19 nt, Human
cagagccaggccuuuggcc

SEQ ID NO: 251565 - RNA, 22 nt, Human
cuguaaaaugaaccuagucauc

SEQ ID NO: 251566 - RNA, 22 nt, Human
uguuaacacaauucuggagaga

SEQ ID NO: 251567 - RNA, 22 nt, Human
ggcuggcuggcuuagcagagga

SEQ ID NO: 251568 - RNA, 22 nt, Human
uacauuuauaaggcuucucugu

SEQ ID NO: 251569 - RNA, 21 nt, Human
guuugcaugaacaagucagcc

SEQ ID NO: 251570 - RNA, 23 nt, Human
ccucuccagacacugggccuugu

SEQ ID NO: 251571 - RNA, 22 nt, Human
ccucagaagaaguggaauugau

SEQ ID NO: 251572 - RNA, 22 nt, Human
ugccauuuaaaaaugaccaaau

SEQ ID NO: 251573 - RNA, 22 nt, Human
ugucuucgcuacaaugaaaagg

SEQ ID NO: 251574 - RNA, 22 nt, Human
ggcaggguggcccuccagugag

SEQ ID NO: 251575 - RNA, 22 nt, Human
cauaacauuaagccucuauuuc

SEQ ID NO: 251576 - RNA, 22 nt, Human
uacaguaagaugaaauagcaau

SEQ ID NO: 251577 - RNA, 22 nt, Human
aaucacaaaugcaaguugucac

SEQ ID NO: 251578 - RNA, 22 nt, Human
gcaugugucuccccaguggagg

SEQ ID NO: 251579 - RNA, 22 nt, Human
gagcugcaugcaacucgaaaau

SEQ ID NO: 251580 - RNA, 22 nt, Human
caaggcagaauucagacucagg

SEQ ID NO: 251581 - RNA, 22 nt, Human
ugaagcaguucucagaaguggg

SEQ ID NO: 251582 - RNA, 22 nt, Human
ucugcaaacuggcucuuacugc

SEQ ID NO: 251583 - RNA, 22 nt, Human
aauucuuaaucccauaaaguga

SEQ ID NO: 251584 - RNA, 22 nt, Human
augucugucuuuguacuccaca

SEQ ID NO: 251585 - RNA, 22 nt, Human
aacuuugagucauugccucuuu

SEQ ID NO: 251586 - RNA, 22 nt, Human
ucccuccccacuucugagcuuu

SEQ ID NO: 251587 - RNA, 22 nt, Human
uucauguaacuuuucuucucca

SEQ ID NO: 251588 - RNA, 22 nt, Human
cagagcugggcauggugaaagg

SEQ ID NO: 251589 - RNA, 21 nt, Human
uagggcucuauuuuuauuuca

SEQ ID NO: 251590 - RNA, 20 nt, Human
uugaggagauauugaauacu

SEQ ID NO: 251591 - RNA, 22 nt, Human
uuuagucuaauaaaaguggagu

SEQ ID NO: 251592 - RNA, 22 nt, Human
ugaaaucuuagccauucugccu

SEQ ID NO: 251593 - RNA, 22 nt, Human
ggcugagaaucaacaaccugcu

SEQ ID NO: 251594 - RNA, 22 nt, Human
gaaaagcuaggccaguucagcu

SEQ ID NO: 251595 - RNA, 22 nt, Human
agauuuacucagcuccuggaaa

SEQ ID NO: 251596 - RNA, 22 nt, Human
uccaauauucauuaaaaugcag

SEQ ID NO: 251597 - RNA, 22 nt, Human
cuucagaauccagaaucagaau

SEQ ID NO: 251598 - RNA, 22 nt, Human
aguucaguaguccuucauugua

SEQ ID NO: 251599 - RNA, 22 nt, Human
uguucacuuauguucucccauu

SEQ ID NO: 251600 - RNA, 21 nt, Human
auaucacaaacauauggucug

SEQ ID NO: 251601 - RNA, 22 nt, Human
gaaguuuuagucaaaauguaga

SEQ ID NO: 251602 - RNA, 22 nt, Human
uucuuuucuuuaggcauugugu

SEQ ID NO: 251603 - RNA, 19 nt, Human
agcugcaaaagguggaacu

SEQ ID NO: 251604 - RNA, 22 nt, Human
gauuuuauuagcccaaacuuug

SEQ ID NO: 251605 - RNA, 22 nt, Human
cagcugaagguaggaaccagga

SEQ ID NO: 251606 - RNA, 22 nt, Human
cagcaguggaacuacccaggga

SEQ ID NO: 251607 - RNA, 19 nt, Human
agugaaauggaguauucaa

SEQ ID NO: 251608 - RNA, 22 nt, Human
caccugccugcaggggcuccac

SEQ ID NO: 251609 - RNA, 22 nt, Human
aagccugaggguguugcuagau

SEQ ID NO: 251610 - RNA, 22 nt, Human
uuccugguuugccuggaaucca

SEQ ID NO: 251611 - RNA, 22 nt, Human
uggaaggggccaggcgcggagu

SEQ ID NO: 251612 - RNA, 23 nt, Human
uguggcugagaaauugacaacuu

SEQ ID NO: 251613 - RNA, 22 nt, Human
aauagacuccagggucuauuuu

SEQ ID NO: 251614 - RNA, 22 nt, Human
aaguguccucauucaacaugca

SEQ ID NO: 251615 - RNA, 22 nt, Human
guuacaaaggucauaaaagugu

SEQ ID NO: 251616 - RNA, 22 nt, Human
ucagaaucuuucuagagucuag

SEQ ID NO: 251617 - RNA, 22 nt, Human
auauauaauacuugcugugggc

SEQ ID NO: 251618 - RNA, 22 nt, Human
auggcagcaguccauugccuca

SEQ ID NO: 251619 - RNA, 22 nt, Human
aggcuucuucugccugucuuug

SEQ ID NO: 251620 - RNA, 22 nt, Human
acacaugugauucuaagacagc

SEQ ID NO: 251621 - RNA, 22 nt, Human
caugcugaugaacuucuacuug

SEQ ID NO: 251622 - RNA, 22 nt, Human
gcuggcugccaauuucagagcu

SEQ ID NO: 251623 - RNA, 22 nt, Human
ccaggcuggaguguagucgcau

SEQ ID NO: 251624 - RNA, 22 nt, Human
ugcuccuguuucaucagcuaua

SEQ ID NO: 251625 - RNA, 20 nt, Human
ccacccugcuaagaauacac

SEQ ID NO: 251626 - RNA, 22 nt, Human
ggccuuagcggucauagcaaag

SEQ ID NO: 251627 - RNA, 22 nt, Human
ugucagggcuggacacagcugc

SEQ ID NO: 251628 - RNA, 22 nt, Human
ccugggcauaaaucacuccaag

SEQ ID NO: 251629 - RNA, 23 nt, Human
ucuccuguccuaauuaccacccc

SEQ ID NO: 251630 - RNA, 22 nt, Human
ucuguacaguaccagauaguaa

SEQ ID NO: 251631 - RNA, 22 nt, Human
aagugcuuggcuaaugguuaug

SEQ ID NO: 251632 - RNA, 22 nt, Human
acugggcucauaaugucauaga

SEQ ID NO: 251633 - RNA, 22 nt, Human
uaccaaauguaaucauucuaau

SEQ ID NO: 251634 - RNA, 22 nt, Human
ugucagaccugugauuucagca

SEQ ID NO: 251635 - RNA, 22 nt, Human
aaaguucauugaugacugaggu

SEQ ID NO: 251636 - RNA, 22 nt, Human
ggauggcagacagugaguggcu

SEQ ID NO: 251637 - RNA, 22 nt, Human
agcauccaacuuugauuagaga

SEQ ID NO: 251638 - RNA, 22 nt, Human
aaagugguucuuacauccgugg

SEQ ID NO: 251639 - RNA, 22 nt, Human
cuggcccugccuaauguacuug

SEQ ID NO: 251640 - RNA, 22 nt, Human
ggucaggaaaagacuccccaga

SEQ ID NO: 251641 - RNA, 22 nt, Human
caggacaauuuccacuugguaa

SEQ ID NO: 251642 - RNA, 22 nt, Human
gcaguggcaccgcuggcucugg

SEQ ID NO: 251643 - RNA, 22 nt, Human
cagaacugggcagggagcagag

SEQ ID NO: 251644 - RNA, 22 nt, Human
cagaggcugggaccucaggcau

SEQ ID NO: 251645 - RNA, 22 nt, Human
aaaugccuguguaaauucuagc

SEQ ID NO: 251646 - RNA, 22 nt, Human
cugcccugggaguaccuguccu

SEQ ID NO: 251647 - RNA, 22 nt, Human
ugagcugggcugggcugagcug

SEQ ID NO: 251648 - RNA, 22 nt, Human
uuuacagcauugcugaaaguuc

SEQ ID NO: 251649 - RNA, 19 nt, Human
gugaggaguguuuacagaa

SEQ ID NO: 251650 - RNA, 22 nt, Human
ccuguauuugcuuccuucugca

SEQ ID NO: 251651 - RNA, 22 nt, Human
uggcaggaaggagacucagccc

SEQ ID NO: 251652 - RNA, 22 nt, Human
gauuaaguaacugaacacuuug

SEQ ID NO: 251653 - RNA, 22 nt, Human
uuccuucuaauuuuacaccuga

SEQ ID NO: 251654 - RNA, 22 nt, Human
uuuuuccuagugcuuucuggua

SEQ ID NO: 251655 - RNA, 22 nt, Human
gaguuacauggacauucucucc

SEQ ID NO: 251656 - RNA, 22 nt, Human
ccaggcuggucugaauuucuag

SEQ ID NO: 251657 - RNA, 22 nt, Human
aacaagucuaagagaauggcag

SEQ ID NO: 251658 - RNA, 22 nt, Human
aagagguggguuggacagauac

SEQ ID NO: 251659 - RNA, 18 nt, Human
ggagaagaacagaugugg

SEQ ID NO: 251660 - RNA, 22 nt, Human
uggcaggcaaguucagcuccac

SEQ ID NO: 251661 - RNA, 22 nt, Human
aagugaauagccuauuuacuag

SEQ ID NO: 251662 - RNA, 22 nt, Human
cacaucuauggagacagagagu

SEQ ID NO: 251663 - RNA, 22 nt, Human
ucaaauaaggagucaugaccau

SEQ ID NO: 251664 - RNA, 16 nt, Human
uuauugaggccaagga

SEQ ID NO: 251665 - RNA, 22 nt, Human
uacagggacauggaacaggcuc

SEQ ID NO: 251666 - RNA, 22 nt, Human
acuacuuugggccauuuguuua

SEQ ID NO: 251667 - RNA, 22 nt, Human
gagucuggcccugaugcaucau

SEQ ID NO: 251668 - RNA, 20 nt, Human
aauccauuggucuauauguc

SEQ ID NO: 251669 - RNA, 22 nt, Human
acauccaccacaugccaggcuc

SEQ ID NO: 251670 - RNA, 18 nt, Human
gagucuuuguuacugcug

SEQ ID NO: 251671 - RNA, 22 nt, Human
accuuggaaaguuuaauugagg

SEQ ID NO: 251672 - RNA, 22 nt, Human
uggagucugugaugcucugggu

SEQ ID NO: 251673 - RNA, 22 nt, Human
gcugggagucgcgucuguggcc

SEQ ID NO: 251674 - RNA, 22 nt, Human
ugugucagaauuuuuguggcaa

SEQ ID NO: 251675 - RNA, 22 nt, Human
gcccuucauuuauaguuggaau

SEQ ID NO: 251676 - RNA, 22 nt, Human
uugcugcucccaagaggcagcu

SEQ ID NO: 251677 - RNA, 22 nt, Human
aguuucaauucuuuucacaaag

SEQ ID NO: 251678 - RNA, 22 nt, Human
ccuggucaccccucucucugca

SEQ ID NO: 251679 - RNA, 22 nt, Human
auuucuugugggaaaugcagca

SEQ ID NO: 251680 - RNA, 22 nt, Human
uaaagcagccagggucuaagcc

SEQ ID NO: 251681 - RNA, 22 nt, Human
ggcauagcggcucagcguccag

SEQ ID NO: 251682 - RNA, 22 nt, Human
ccuuggcuguguugccugcccu

SEQ ID NO: 251683 - RNA, 22 nt, Human
ccucuguaagccucaguuucuu

SEQ ID NO: 251684 - RNA, 22 nt, Human
ugcaugcauaaauguacacaca

SEQ ID NO: 251685 - RNA, 22 nt, Human
uguguacacaaguauauauaca

SEQ ID NO: 251686 - RNA, 22 nt, Human
ugcuggcucugggccaagcagg

SEQ ID NO: 251687 - RNA, 22 nt, Human
aaaagaaccuagcuccucaguc

SEQ ID NO: 251688 - RNA, 22 nt, Human
ccacucccuuccgguccagggc

SEQ ID NO: 251689 - RNA, 22 nt, Human
caaagcguccugccuccauuug

SEQ ID NO: 251690 - RNA, 22 nt, Human
uaaucuacuguuuauaugaaau

SEQ ID NO: 251691 - RNA, 22 nt, Human
ugagcccaggaggcagagguug

SEQ ID NO: 251692 - RNA, 22 nt, Human
uagcaaccuauggauagagaag

SEQ ID NO: 251693 - RNA, 22 nt, Human
cccauucauccucgcuuccuuc

SEQ ID NO: 251694 - RNA, 22 nt, Human
cagugaggaagcugucuggacc

SEQ ID NO: 251695 - RNA, 22 nt, Human
gcuuuucuccuuagugucccug

SEQ ID NO: 251696 - RNA, 22 nt, Human
uacaaaaggaagagggaucuua

SEQ ID NO: 251697 - RNA, 22 nt, Human
ucagagugaggcccagcaaucu

SEQ ID NO: 251698 - RNA, 22 nt, Human
uagaaacagcauauauuagccc

SEQ ID NO: 251699 - RNA, 22 nt, Human
ucaggccccuugucagcucugu

SEQ ID NO: 251700 - RNA, 18 nt, Human
ucugggcuucccgaggcu

SEQ ID NO: 251701 - RNA, 22 nt, Human
ucacagugucguccuugggugu

SEQ ID NO: 251702 - RNA, 22 nt, Human
cuggaaggggcagucuuugggc

SEQ ID NO: 251703 - RNA, 22 nt, Human
cuugacuuugccuuuuaaaugu

SEQ ID NO: 251704 - RNA, 22 nt, Human
caguaugucuacuggacaaagu

SEQ ID NO: 251705 - RNA, 21 nt, Human
uccagggcuuugauucucuca

SEQ ID NO: 251706 - RNA, 22 nt, Human
ccugugcauccgguggucauug

SEQ ID NO: 251707 - RNA, 22 nt, Human
auguguccucuggcagguuuag

SEQ ID NO: 251708 - RNA, 22 nt, Human
aggagugggggcgagaaguuaa

SEQ ID NO: 251709 - RNA, 22 nt, Human
ugucuaacccaguggcaggagg

SEQ ID NO: 251710 - RNA, 22 nt, Human
accagggccgcgggcgacuagc

SEQ ID NO: 251711 - RNA, 22 nt, Human
aaugucaauaacuuuaucccuc

SEQ ID NO: 251712 - RNA, 22 nt, Human
gucagcaggguccccuugagug

SEQ ID NO: 251713 - RNA, 22 nt, Human
gugccagggaguggaggagcuu

SEQ ID NO: 251714 - RNA, 22 nt, Human
uuccuggggcgacuguaucuga

SEQ ID NO: 251715 - RNA, 22 nt, Human
aauuagggagccaucauaaggu

SEQ ID NO: 251716 - RNA, 22 nt, Human
aaggcaguuaccgcaauggagg

SEQ ID NO: 251717 - RNA, 22 nt, Human
gcuuuagauacucccaaugucc

SEQ ID NO: 251718 - RNA, 16 nt, Human
uggcugagagaggguu

SEQ ID NO: 251719 - RNA, 22 nt, Human
auugaagaaacccaaauaaugg

SEQ ID NO: 251720 - RNA, 22 nt, Human
ccaccaagucccacuauaauuu

SEQ ID NO: 251721 - RNA, 22 nt, Human
ggcagcccuguggagaggccca

SEQ ID NO: 251722 - RNA, 22 nt, Human
uuccaaugacuaguggcauccu

SEQ ID NO: 251723 - RNA, 22 nt, Human
agggacccauagagagaccagu

SEQ ID NO: 251724 - RNA, 22 nt, Human
agggcagcccuucugggagggc

SEQ ID NO: 251725 - RNA, 22 nt, Human
gcaacaugaagaaaacagaacc

SEQ ID NO: 251726 - RNA, 22 nt, Human
caagcagggauacugcagggag

SEQ ID NO: 251727 - RNA, 22 nt, Human
ucugggcuggcuuuaugcugac

SEQ ID NO: 251728 - RNA, 22 nt, Human
auuuccuguaggggcuugcgaa

SEQ ID NO: 251729 - RNA, 22 nt, Human
caggaaaggugugucaugaugg

SEQ ID NO: 251730 - RNA, 22 nt, Human
aaugucuuuaaagugcaauaga

SEQ ID NO: 251731 - RNA, 20 nt, Human
uagggcucauuaugaucucc

SEQ ID NO: 251732 - RNA, 22 nt, Human
agccucugcuuaugcaaaggua

SEQ ID NO: 251733 - RNA, 22 nt, Human
augaggcauucacagaaggcac

SEQ ID NO: 251734 - RNA, 22 nt, Human
aacaaauguguuuuguaauuaa

SEQ ID NO: 251735 - RNA, 21 nt, Human
ucacaucuauguuaagcaaac

SEQ ID NO: 251736 - RNA, 22 nt, Human
accuucaaguaugugggcugaa

SEQ ID NO: 251737 - RNA, 22 nt, Human
gccagcucuguggcuguacuug

SEQ ID NO: 251738 - RNA, 22 nt, Human
gcugccugcaguguuuucccag

SEQ ID NO: 251739 - RNA, 22 nt, Human
gcccugcuguuuagagagcuac

SEQ ID NO: 251740 - RNA, 22 nt, Human
cacaucauagagacucaaucca

SEQ ID NO: 251741 - RNA, 22 nt, Human
agagacaggguuuugccauguu

SEQ ID NO: 251742 - RNA, 22 nt, Human
gcccauggcuucccuaggcaca

SEQ ID NO: 251743 - RNA, 22 nt, Human
aauuaagagagaguugaagcaa

SEQ ID NO: 251744 - RNA, 22 nt, Human
gugaggcaagggcauacuaggc

SEQ ID NO: 251745 - RNA, 22 nt, Human
uggcucaaguaacaaaaauaua

SEQ ID NO: 251746 - RNA, 22 nt, Human
auucuuaauugccaugcuguau

SEQ ID NO: 251747 - RNA, 22 nt, Human
gucugugggccaaauacagccc

SEQ ID NO: 251748 - RNA, 22 nt, Human
gcauucuucacaguauuccucc

SEQ ID NO: 251749 - RNA, 22 nt, Human
auuagaaaccaagaggcaggcu

SEQ ID NO: 251750 - RNA, 22 nt, Human
guuacagugcauguggcuucug

SEQ ID NO: 251751 - RNA, 22 nt, Human
uuguguccugauuugacacaau

SEQ ID NO: 251752 - RNA, 18 nt, Human
cacaggagccacacucac

SEQ ID NO: 251753 - RNA, 22 nt, Human
ucuccucaccaccagcagcaga

SEQ ID NO: 251754 - RNA, 22 nt, Human
uguaaacaugcugaggcuggag

SEQ ID NO: 251755 - RNA, 22 nt, Human
gaaggaaaucugugauuuaugc

SEQ ID NO: 251756 - RNA, 22 nt, Human
aagaguuagcucaauaacuuga

SEQ ID NO: 251757 - RNA, 22 nt, Human
ucaggcucccugcugggcucug

SEQ ID NO: 251758 - RNA, 22 nt, Human
cucugccaguuucuggccucag

SEQ ID NO: 251759 - RNA, 22 nt, Human
aacagugaggugaauaugcucc

SEQ ID NO: 251760 - RNA, 22 nt, Human
ccagaugucugagccacacucc

SEQ ID NO: 251761 - RNA, 22 nt, Human
guaaaguucuauuugaauuuag

SEQ ID NO: 251762 - RNA, 22 nt, Human
gucagauuaauagcaauaauaa

SEQ ID NO: 251763 - RNA, 22 nt, Human
ucagaggaaacaaucuuuagua

SEQ ID NO: 251764 - RNA, 22 nt, Human
auucagagucugcacaacagca

SEQ ID NO: 251765 - RNA, 22 nt, Human
cagaaugcaaauuuuauaauau

SEQ ID NO: 251766 - RNA, 22 nt, Human
aaagccagagcaagcugucaca

SEQ ID NO: 251767 - RNA, 23 nt, Human
gauacacucccugcugggcacug

SEQ ID NO: 251768 - RNA, 22 nt, Human
uuguuucaaauauuucagaaua

SEQ ID NO: 251769 - RNA, 22 nt, Human
caugaauuagcaauggugugca

SEQ ID NO: 251770 - RNA, 22 nt, Human
ccagguggacaaggcuuucaca

SEQ ID NO: 251771 - RNA, 22 nt, Human
uacagcacggugcauuuacuac

SEQ ID NO: 251772 - RNA, 22 nt, Human
uugugcuccuaugagaaucuaa

SEQ ID NO: 251773 - RNA, 22 nt, Human
uugugcucuuauugugcaggga

SEQ ID NO: 251774 - RNA, 22 nt, Human
ucuagaaauuuugccuuguauu

SEQ ID NO: 251775 - RNA, 22 nt, Human
acagauuuuaaaugacacuccc

SEQ ID NO: 251776 - RNA, 22 nt, Human
uuagcgcacaucacagggggaa

SEQ ID NO: 251777 - RNA, 22 nt, Human
uugauauucugagaagcugaag

SEQ ID NO: 251778 - RNA, 22 nt, Human
auucaaaugucaaauccaccag

SEQ ID NO: 251779 - RNA, 22 nt, Human
gagcugugcuuauaccaauuca

SEQ ID NO: 251780 - RNA, 22 nt, Human
uaugagaaaggagaaugacuuu

SEQ ID NO: 251781 - RNA, 17 nt, Human
agugucagaagacaguu

SEQ ID NO: 251782 - RNA, 22 nt, Human
gaaggacccacgaagucacugg

SEQ ID NO: 251783 - RNA, 22 nt, Human
ccaggcaggcgauggugcagug

SEQ ID NO: 251784 - RNA, 19 nt, Human
uccuucagucagaucuggg

SEQ ID NO: 251785 - RNA, 22 nt, Human
aauaauguaggaugauaaauga

SEQ ID NO: 251786 - RNA, 22 nt, Human
acaguugagaugcaacuuuggg

SEQ ID NO: 251787 - RNA, 22 nt, Human
agcccugggucccaguccuggc

SEQ ID NO: 251788 - RNA, 22 nt, Human
cauugcuguuaauugucucuag

SEQ ID NO: 251789 - RNA, 19 nt, Human
auagggcacccuaaggagu

SEQ ID NO: 251790 - RNA, 22 nt, Human
cuggacacaaacaucuccucug

SEQ ID NO: 251791 - RNA, 22 nt, Human
cacaguuucugaacacuuugca

SEQ ID NO: 251792 - RNA, 22 nt, Human
agcaaggcagcuuucacugcuu

SEQ ID NO: 251793 - RNA, 22 nt, Human
cagcagaaguccgacuccaguc

SEQ ID NO: 251794 - RNA, 22 nt, Human
aucacaucucaccacugcaacc

SEQ ID NO: 251795 - RNA, 22 nt, Human
cuguacaaguccuucaucaggg

SEQ ID NO: 251796 - RNA, 22 nt, Human
ugguggcagcugagugucaggu

SEQ ID NO: 251797 - RNA, 23 nt, Human
agauuuggaaagcugaguggcgu

SEQ ID NO: 251798 - RNA, 22 nt, Human
uagauccugagcccuaucuacu

SEQ ID NO: 251799 - RNA, 19 nt, Human
agucaguucugaggaggaa

SEQ ID NO: 251800 - RNA, 22 nt, Human
ggcucuggguucugcaaugcgu

SEQ ID NO: 251801 - RNA, 22 nt, Human
uggcagugaugcggcaggacau

SEQ ID NO: 251802 - RNA, 19 nt, Human
agauggggaagagugugag

SEQ ID NO: 251803 - RNA, 22 nt, Human
auacaucaugcuccauauauuu

SEQ ID NO: 251804 - RNA, 22 nt, Human
guguggcuguuuagugacuuuc

SEQ ID NO: 251805 - RNA, 21 nt, Human
uggccagcuggagucuccaca

SEQ ID NO: 251806 - RNA, 22 nt, Human
caguuuauuuccaagaugacaa

SEQ ID NO: 251807 - RNA, 22 nt, Human
agcagcagauucagcaggaaug

SEQ ID NO: 251808 - RNA, 22 nt, Human
ggccaaggaugguggcucuggu

SEQ ID NO: 251809 - RNA, 22 nt, Human
acauuucucagguaagucauuu

SEQ ID NO: 251810 - RNA, 22 nt, Human
cccuuccugggugucccggagu

SEQ ID NO: 251811 - RNA, 22 nt, Human
cagggucccaggagcugcuuuc

SEQ ID NO: 251812 - RNA, 22 nt, Human
aaagccaguuucuggaaguacc

SEQ ID NO: 251813 - RNA, 23 nt, Human
agcugaggugcagauccaaagaa

SEQ ID NO: 251814 - RNA, 22 nt, Human
gcagagaaaguuuuguccucag

SEQ ID NO: 251815 - RNA, 22 nt, Human
acaguuuaugccucugagccug

SEQ ID NO: 251816 - RNA, 22 nt, Human
aggagccuccauggucacauuc

SEQ ID NO: 251817 - RNA, 22 nt, Human
cagggaugcugcuuaggcaguu

SEQ ID NO: 251818 - RNA, 22 nt, Human
uuaaguacuucccuguuggaca

SEQ ID NO: 251819 - RNA, 22 nt, Human
ggcuccagguuuaaggguaugu

SEQ ID NO: 251820 - RNA, 22 nt, Human
gagacacacccaagguuaugag

SEQ ID NO: 251821 - RNA, 22 nt, Human
caaaggcaacauauacuuguuu

SEQ ID NO: 251822 - RNA, 22 nt, Human
gccaggagaaugcuagcagagg

SEQ ID NO: 251823 - RNA, 22 nt, Human
gaaaggcuaaaauuauaagggu

SEQ ID NO: 251824 - RNA, 22 nt, Human
cugaaauaaaguugcuaaaauu

SEQ ID NO: 251825 - RNA, 22 nt, Human
cccagagcugauuguuggagcc

SEQ ID NO: 251826 - RNA, 22 nt, Human
cucucagacacccauuuggaaa

SEQ ID NO: 251827 - RNA, 22 nt, Human
ucacucugcugcccgagggcug

SEQ ID NO: 251828 - RNA, 22 nt, Human
cacuguggcaaccugugcccaa

SEQ ID NO: 251829 - RNA, 22 nt, Human
gauuuguuucaaguuagcaucu

SEQ ID NO: 251830 - RNA, 22 nt, Human
cagcuuugcaggcuggucagug

SEQ ID NO: 251831 - RNA, 22 nt, Human
uucacauugugcagauuauggu

SEQ ID NO: 251832 - RNA, 22 nt, Human
ugagaggcgcucacucucaggu

SEQ ID NO: 251833 - RNA, 22 nt, Human
caagcugguaucagcuagagcg

SEQ ID NO: 251834 - RNA, 19 nt, Human
auggcugcugauuggggau

SEQ ID NO: 251835 - RNA, 22 nt, Human
cugagaucuuuauacgaggcac

SEQ ID NO: 251836 - RNA, 20 nt, Human
uccagcacccucacagagaa

SEQ ID NO: 251837 - RNA, 22 nt, Human
cacugagagaugugucacagca

SEQ ID NO: 251838 - RNA, 22 nt, Human
gacccagcuuaagucacauguu

SEQ ID NO: 251839 - RNA, 22 nt, Human
ucuuucaaaguaacaaccacga

SEQ ID NO: 251840 - RNA, 23 nt, Human
cuggcuucuggggccucuguuuc

SEQ ID NO: 251841 - RNA, 21 nt, Human
ggaaaacuuuccuugucugaa

SEQ ID NO: 251842 - RNA, 22 nt, Human
aaagugcuuucccacauuuguu

SEQ ID NO: 251843 - RNA, 22 nt, Human
gucucagauucagacaucuaca

SEQ ID NO: 251844 - RNA, 22 nt, Human
uccccagguccugucggcuccu

SEQ ID NO: 251845 - RNA, 22 nt, Human
uaguccuugcugggcacagagu

SEQ ID NO: 251846 - RNA, 22 nt, Human
aagaggaggacgguucccagaa

SEQ ID NO: 251847 - RNA, 22 nt, Human
acagauauuaugguuucuccuu

SEQ ID NO: 251848 - RNA, 22 nt, Human
gcucuagcuggcgcugaccugg

SEQ ID NO: 251849 - RNA, 22 nt, Human
cuggcugcuugggacagccaug

SEQ ID NO: 251850 - RNA, 22 nt, Human
aucaaaguggaaguuuacuagg

SEQ ID NO: 251851 - RNA, 22 nt, Human
cugacagguugguagcuuugga

SEQ ID NO: 251852 - RNA, 22 nt, Human
aggcuuggagguucuguagcca

SEQ ID NO: 251853 - RNA, 22 nt, Human
gcucagggaguuucacagugua

SEQ ID NO: 251854 - RNA, 22 nt, Human
uagggcugugucuccaggacca

SEQ ID NO: 251855 - RNA, 22 nt, Human
gagacacaaucucauuuacauu

SEQ ID NO: 251856 - RNA, 22 nt, Human
gcuggcuggaacuagcaguugg

SEQ ID NO: 251857 - RNA, 22 nt, Human
gccaggcauucuagaaguagug

SEQ ID NO: 251858 - RNA, 22 nt, Human
gagggaccccaggcuggcccuu

SEQ ID NO: 251859 - RNA, 21 nt, Human
agccagucauuaugagcggga

SEQ ID NO: 251860 - RNA, 22 nt, Human
ucugugcagaaucaaggagcuu

SEQ ID NO: 251861 - RNA, 22 nt, Human
uggaauguugauaaacauaggc

SEQ ID NO: 251862 - RNA, 22 nt, Human
auuuucaucauggguuuaacau

SEQ ID NO: 251863 - RNA, 22 nt, Human
ccugguuuguauuuuuaacacc

SEQ ID NO: 251864 - RNA, 22 nt, Human
gcaagagcgcucucuuucauua

SEQ ID NO: 251865 - RNA, 22 nt, Human
gaauaucccgcuaugcaaagua

SEQ ID NO: 251866 - RNA, 22 nt, Human
cugggaaauggcuucgagcuca

SEQ ID NO: 251867 - RNA, 22 nt, Human
uuauugcucuauuauggccuaa

SEQ ID NO: 251868 - RNA, 22 nt, Human
cucaaauagaacugaucuauaa

SEQ ID NO: 251869 - RNA, 22 nt, Human
auacucuuuaugacauuccagc

SEQ ID NO: 251870 - RNA, 22 nt, Human
augcaugucugccaguugcuua

SEQ ID NO: 251871 - RNA, 22 nt, Human
gcacccagagggcagggucucc

SEQ ID NO: 251872 - RNA, 22 nt, Human
uacagaaagggaugauugaucu

SEQ ID NO: 251873 - RNA, 22 nt, Human
caggguggccagguagauaaua

SEQ ID NO: 251874 - RNA, 22 nt, Human
uauagaacaaguuauuuaugcu

SEQ ID NO: 251875 - RNA, 22 nt, Human
uguugauuugugggcugcaaaa

SEQ ID NO: 251876 - RNA, 22 nt, Human
gcagggcuauuggaaggagaug

SEQ ID NO: 251877 - RNA, 22 nt, Human
aaucacaucucauucaacagcc

SEQ ID NO: 251878 - RNA, 22 nt, Human
acagcuaacuuaaacuaaccua

SEQ ID NO: 251879 - RNA, 22 nt, Human
gucccuggaauggacucugcgc

SEQ ID NO: 251880 - RNA, 22 nt, Human
agcaggcugagcacccaggggg

SEQ ID NO: 251881 - RNA, 22 nt, Human
uuuuauguuccucuuuaugcga

SEQ ID NO: 251882 - RNA, 22 nt, Human
gagaaucuuuccccacagaagg

SEQ ID NO: 251883 - RNA, 22 nt, Human
auuuggcaacauuaauugaauc

SEQ ID NO: 251884 - RNA, 22 nt, Human
gcacaugacaguaaguagagca

SEQ ID NO: 251885 - RNA, 22 nt, Human
agcccagcacugggggcccagc

SEQ ID NO: 251886 - RNA, 22 nt, Human
ucacaugucacaaaacacugcc

SEQ ID NO: 251887 - RNA, 22 nt, Human
aucaucaucaacaagaaacauu

SEQ ID NO: 251888 - RNA, 22 nt, Human
acucuguaauucuauaugcagu

SEQ ID NO: 251889 - RNA, 20 nt, Human
cccagagguugcggcaggag

SEQ ID NO: 251890 - RNA, 22 nt, Human
gcuccccauugaucugcaggcu

SEQ ID NO: 251891 - RNA, 22 nt, Human
cuguggaaauaaacaaugcuaa

SEQ ID NO: 251892 - RNA, 22 nt, Human
aaguaccucauaggguuauuuu

SEQ ID NO: 251893 - RNA, 22 nt, Human
acuguuugcugauagauauuua

SEQ ID NO: 251894 - RNA, 22 nt, Human
ggaagaaaucugguuaagagau

SEQ ID NO: 251895 - RNA, 22 nt, Human
cugagccuuauucaccagcccu

SEQ ID NO: 251896 - RNA, 22 nt, Human
aaaguauuuuugacaggcauua

SEQ ID NO: 251897 - RNA, 22 nt, Human
ggucuccuugggaaagcaggaa

SEQ ID NO: 251898 - RNA, 22 nt, Human
cugggcucuucucacccuguuu

SEQ ID NO: 251899 - RNA, 23 nt, Human
ucucugcauguccugagcacauc

SEQ ID NO: 251900 - RNA, 22 nt, Human
uuccuucuaauauucugccugu

SEQ ID NO: 251901 - RNA, 21 nt, Human
ugagagccuccaaccggcuac

SEQ ID NO: 251902 - RNA, 22 nt, Human
uaaugucaaggugauagauuug

SEQ ID NO: 251903 - RNA, 22 nt, Human
uuucuuuugaauaguguguggu

SEQ ID NO: 251904 - RNA, 22 nt, Human
ucagguguagguuguucaguuu

SEQ ID NO: 251905 - RNA, 22 nt, Human
ucccagggacaccaagcuguuu

SEQ ID NO: 251906 - RNA, 22 nt, Human
aaaauuauagaucuagugccug

SEQ ID NO: 251907 - RNA, 19 nt, Human
gcucaggcugugugugggg

SEQ ID NO: 251908 - RNA, 22 nt, Human
uucacaaaacacuauuuucugg

SEQ ID NO: 251909 - RNA, 22 nt, Human
gcugacaaacaaggugguguca

SEQ ID NO: 251910 - RNA, 22 nt, Human
ggugucagauacauaggaagua

SEQ ID NO: 251911 - RNA, 22 nt, Human
agugcagauuuuuagucagcuu

SEQ ID NO: 251912 - RNA, 22 nt, Human
aaagaaguguugaauuugcaag

SEQ ID NO: 251913 - RNA, 22 nt, Human
ugcuuugccagacaguucccuu

SEQ ID NO: 251914 - RNA, 22 nt, Human
aauuuccaaauuucugucacac

SEQ ID NO: 251915 - RNA, 22 nt, Human
cccccauccaugucaggagagg

SEQ ID NO: 251916 - RNA, 22 nt, Human
ccuagggauacagcagaguaca

SEQ ID NO: 251917 - RNA, 22 nt, Human
ugaaggcugucaccugcaccuu

SEQ ID NO: 251918 - RNA, 22 nt, Human
ccaggcccugcuccucacacca

SEQ ID NO: 251919 - RNA, 22 nt, Human
gaaccauuguugaaaagaauag

SEQ ID NO: 251920 - RNA, 22 nt, Human
aaggccuuugccccgauacagg

SEQ ID NO: 251921 - RNA, 22 nt, Human
caguguucccugaacauauguu

SEQ ID NO: 251922 - RNA, 16 nt, Human
ucaggugugacuuuuu

SEQ ID NO: 251923 - RNA, 22 nt, Human
ugcauuaagcacacuuuugaau

SEQ ID NO: 251924 - RNA, 22 nt, Human
aaucuucacucauucagaguug

SEQ ID NO: 251925 - RNA, 22 nt, Human
gggcaggucugggucagccuga

SEQ ID NO: 251926 - RNA, 22 nt, Human
gugggcuuuugacagugccugg

SEQ ID NO: 251927 - RNA, 22 nt, Human
auaugagagaggaaagauuuua

SEQ ID NO: 251928 - RNA, 22 nt, Human
uaauacaucauucaucuaagga

SEQ ID NO: 251929 - RNA, 22 nt, Human
ugcagcuguaacagaggccuca

SEQ ID NO: 251930 - RNA, 22 nt, Human
ggagaaggaauauuggaguagg

SEQ ID NO: 251931 - RNA, 20 nt, Human
auccaugagagucuggauuc

SEQ ID NO: 251932 - RNA, 22 nt, Human
ggugagggaguggaacgaggug

SEQ ID NO: 251933 - RNA, 22 nt, Human
cuuagaguuauggaaauguuga

SEQ ID NO: 251934 - RNA, 22 nt, Human
aggacagcccuugagagcacau

SEQ ID NO: 251935 - RNA, 19 nt, Human
ggaagagaggaaaggugga

SEQ ID NO: 251936 - RNA, 22 nt, Human
uuuuaaacugcagaauuuagaa

SEQ ID NO: 251937 - RNA, 22 nt, Human
ucugcccugccauucacuggaa

SEQ ID NO: 251938 - RNA, 22 nt, Human
uucugaauucaugagauuuggg

SEQ ID NO: 251939 - RNA, 22 nt, Human
auacacuuccaaauauugauua

SEQ ID NO: 251940 - RNA, 22 nt, Human
agcugagcugcagaugacugua

SEQ ID NO: 251941 - RNA, 22 nt, Human
acagagguguguguaggacagu

SEQ ID NO: 251942 - RNA, 22 nt, Human
ucuggcagggucagggcccagg

SEQ ID NO: 251943 - RNA, 22 nt, Human
uuacauguggagucugauugca

SEQ ID NO: 251944 - RNA, 22 nt, Human
ggcuggguacccuguuuccccu

SEQ ID NO: 251945 - RNA, 22 nt, Human
cugcagggaugugaggcccguu

SEQ ID NO: 251946 - RNA, 22 nt, Human
agucugggcauuuaggauguug

SEQ ID NO: 251947 - RNA, 22 nt, Human
cccugaggagagcgcuucccga

SEQ ID NO: 251948 - RNA, 23 nt, Human
uuuauauuccuaaugucuugagc

SEQ ID NO: 251949 - RNA, 22 nt, Human
agcuggguguucuugggccuaa

SEQ ID NO: 251950 - RNA, 22 nt, Human
auuauuuacagugugcucgaag

SEQ ID NO: 251951 - RNA, 22 nt, Human
ucccagggacucucugccuucc

SEQ ID NO: 251952 - RNA, 22 nt, Human
aauagcuuuggucaccaucugg

SEQ ID NO: 251953 - RNA, 22 nt, Human
uggcccaggugcacccagaggc

SEQ ID NO: 251954 - RNA, 23 nt, Human
ugcuggcugaaacagccaaagga

SEQ ID NO: 251955 - RNA, 22 nt, Human
agggugagggucuggccuugag

SEQ ID NO: 251956 - RNA, 22 nt, Human
guggcagaguugcugacuagaa

SEQ ID NO: 251957 - RNA, 22 nt, Human
cucucagaaguuuaugucagaa

SEQ ID NO: 251958 - RNA, 22 nt, Human
ggaccaggggcgcacucccugc

SEQ ID NO: 251959 - RNA, 22 nt, Human
ucucagugcagagaggcuaucu

SEQ ID NO: 251960 - RNA, 23 nt, Human
cugcuccaggacagcauggaggu

SEQ ID NO: 251961 - RNA, 22 nt, Human
acagccaggagccaugggcagg

SEQ ID NO: 251962 - RNA, 22 nt, Human
ugagcaguggcuccugcuggac

SEQ ID NO: 251963 - RNA, 16 nt, Human
gucuuuauucacuuag

SEQ ID NO: 251964 - RNA, 22 nt, Human
ucugauaucgcacuaaacucug

SEQ ID NO: 251965 - RNA, 22 nt, Human
gagaaagcuucagaaauggccu

SEQ ID NO: 251966 - RNA, 22 nt, Human
cugccauguagucuauggggcg

SEQ ID NO: 251967 - RNA, 22 nt, Human
gguuacauggaagaaauauaau

SEQ ID NO: 251968 - RNA, 22 nt, Human
ggauuuacccaauggauagaug

SEQ ID NO: 251969 - RNA, 22 nt, Human
ccaggcucuaucccuccuucuu

SEQ ID NO: 251970 - RNA, 22 nt, Human
uauugaggaucuccugcuaauu

SEQ ID NO: 251971 - RNA, 22 nt, Human
ccagcagggcagugcccuggac

SEQ ID NO: 251972 - RNA, 22 nt, Human
ucuaaugagggugaaggcccag

SEQ ID NO: 251973 - RNA, 22 nt, Human
agguggcuguggcuucccuugu

SEQ ID NO: 251974 - RNA, 22 nt, Human
acagguggcauaggcaguuuga

SEQ ID NO: 251975 - RNA, 22 nt, Human
ccuauuuguaggcugggccagu

SEQ ID NO: 251976 - RNA, 22 nt, Human
agcagcaggcuuaaggaaaagu

SEQ ID NO: 251977 - RNA, 22 nt, Human
ucucaaauggacaauauugugg

SEQ ID NO: 251978 - RNA, 22 nt, Human
caggcugggcagccuccccggc

SEQ ID NO: 251979 - RNA, 22 nt, Human
ucaggagacuggcagugcccac

SEQ ID NO: 251980 - RNA, 22 nt, Human
uguuacagaaaguuuaugaaug

SEQ ID NO: 251981 - RNA, 20 nt, Human
agacaaugagugacagaguu

SEQ ID NO: 251982 - RNA, 22 nt, Human
accuggcauaagggcuugaguc

SEQ ID NO: 251983 - RNA, 21 nt, Human
aaauccaaacacuaguccaca

SEQ ID NO: 251984 - RNA, 22 nt, Human
gcagagaguugggcugcgccag

SEQ ID NO: 251985 - RNA, 22 nt, Human
ugagaggagugauuguaaaauu

SEQ ID NO: 251986 - RNA, 22 nt, Human
ugucuugacuuuagagccagga

SEQ ID NO: 251987 - RNA, 22 nt, Human
caucacuguccucagcauucca

SEQ ID NO: 251988 - RNA, 22 nt, Human
cacagcgugaugaauguagcgu

SEQ ID NO: 251989 - RNA, 22 nt, Human
caggcuugagggcaggcccagu

SEQ ID NO: 251990 - RNA, 22 nt, Human
uucccucuccaggagcccugag

SEQ ID NO: 251991 - RNA, 22 nt, Human
aggaaaaugaaacagcaacugu

SEQ ID NO: 251992 - RNA, 22 nt, Human
cugggccugugacucccauccu

SEQ ID NO: 251993 - RNA, 22 nt, Human
aucuguggaaagguaaccagua

SEQ ID NO: 251994 - RNA, 22 nt, Human
caggcugugaaacugagaugcg

SEQ ID NO: 251995 - RNA, 22 nt, Human
ucccacagugguacagcccuga

SEQ ID NO: 251996 - RNA, 21 nt, Human
ugguccuucuuuacugccucc

SEQ ID NO: 251997 - RNA, 22 nt, Human
gguggggcccaggcaucugaug

SEQ ID NO: 251998 - RNA, 22 nt, Human
aagcaaagaguuuaguggguga

SEQ ID NO: 251999 - RNA, 22 nt, Human
augauuacauguguuaauauac

SEQ ID NO: 252000 - RNA, 20 nt, Human
ugggugagaguguuugcucu

SEQ ID NO: 252001 - RNA, 22 nt, Human
aaguucaagaucaagguuccag

SEQ ID NO: 252002 - RNA, 22 nt, Human
ggcccagagcucccuggcaccu

SEQ ID NO: 252003 - RNA, 22 nt, Human
agcagggcuuugcagacuuggg

SEQ ID NO: 252004 - RNA, 22 nt, Human
acccagcaugacaccugcacau

SEQ ID NO: 252005 - RNA, 22 nt, Human
agucugcuuccuggagaacuca

SEQ ID NO: 252006 - RNA, 22 nt, Human
ucaggacaacauguugcuaauc

SEQ ID NO: 252007 - RNA, 22 nt, Human
uuucccaggcuggaaugcagug

SEQ ID NO: 252008 - RNA, 22 nt, Human
acacagcucagugccuccaaga

SEQ ID NO: 252009 - RNA, 22 nt, Human
gcugcugggguggagaaacgcu

SEQ ID NO: 252010 - RNA, 22 nt, Human
gccuuggagaucacugcucaug

SEQ ID NO: 252011 - RNA, 22 nt, Human
caaucugaguugggaauguauu

SEQ ID NO: 252012 - RNA, 23 nt, Human
ccccucugguggcucagcuccug

SEQ ID NO: 252013 - RNA, 22 nt, Human
accaguuuguaaccuguuuuca

SEQ ID NO: 252014 - RNA, 22 nt, Human
gaacaguaucaguagugccagu

SEQ ID NO: 252015 - RNA, 22 nt, Human
aagauaauguucuagcugucag

SEQ ID NO: 252016 - RNA, 22 nt, Human
gagguacaugaggauacacagg

SEQ ID NO: 252017 - RNA, 22 nt, Human
agggaaggaggccauguguccc

SEQ ID NO: 252018 - RNA, 22 nt, Human
ucagucauaguuuggagagaau

SEQ ID NO: 252019 - RNA, 22 nt, Human
uacccaggaggaaacugaggcu

SEQ ID NO: 252020 - RNA, 22 nt, Human
ccucagaguaggucucagcugu

SEQ ID NO: 252021 - RNA, 22 nt, Human
auagaauuacaguguguuugga

SEQ ID NO: 252022 - RNA, 22 nt, Human
cucagggauggugaagcaccca

SEQ ID NO: 252023 - RNA, 22 nt, Human
gagucuucugaguuauuggaua

SEQ ID NO: 252024 - RNA, 22 nt, Human
uuuaacauguaauugcugcuuu

SEQ ID NO: 252025 - RNA, 22 nt, Human
ucuuuagaguuaacaauaauga

SEQ ID NO: 252026 - RNA, 19 nt, Human
ugggcagguucaguaaugg

SEQ ID NO: 252027 - RNA, 22 nt, Human
aucuaucaccuuuagguuuguu

SEQ ID NO: 252028 - RNA, 22 nt, Human
caggacagugcagguccauccu

SEQ ID NO: 252029 - RNA, 22 nt, Human
uuugaacuaccucuccuuagca

SEQ ID NO: 252030 - RNA, 22 nt, Human
uuuguuuagaaagagauuggug

SEQ ID NO: 252031 - RNA, 22 nt, Human
aggcacaguggcccuguuuggg

SEQ ID NO: 252032 - RNA, 19 nt, Human
gaaggggaagguggguacc

SEQ ID NO: 252033 - RNA, 22 nt, Human
cagcuugggggcgcuggccuca

SEQ ID NO: 252034 - RNA, 22 nt, Human
cccuguuuauuuuuggagagaa

SEQ ID NO: 252035 - RNA, 22 nt, Human
uaacaguugguguaauuucuug

SEQ ID NO: 252036 - RNA, 22 nt, Human
agcagguguuggcugggccauc

SEQ ID NO: 252037 - RNA, 22 nt, Human
ccagcagcucccucaggguccg

SEQ ID NO: 252038 - RNA, 22 nt, Human
gggaguggguuuggccuaggcc

SEQ ID NO: 252039 - RNA, 22 nt, Human
uacaggguauagguacagauga

SEQ ID NO: 252040 - RNA, 22 nt, Human
ggccugagaauguaccagaucu

SEQ ID NO: 252041 - RNA, 22 nt, Human
aaaaugugaucuacaaaugcaa

SEQ ID NO: 252042 - RNA, 22 nt, Human
aauggcuuuuaaaaauagcauu

SEQ ID NO: 252043 - RNA, 22 nt, Human
ccucaggcucugggugccuacc

SEQ ID NO: 252044 - RNA, 22 nt, Human
cucuggaagaugaccuggguaa

SEQ ID NO: 252045 - RNA, 22 nt, Human
accuccccugacucgaaaccca

SEQ ID NO: 252046 - RNA, 22 nt, Human
uucuucaaaacaacacuggccu

SEQ ID NO: 252047 - RNA, 22 nt, Human
ucaguguuuccuagagcauaua

SEQ ID NO: 252048 - RNA, 22 nt, Human
ccagccacugggccacugccag

SEQ ID NO: 252049 - RNA, 22 nt, Human
cuggcccagagagcagagcuua

SEQ ID NO: 252050 - RNA, 23 nt, Human
aacaccaaggcucagagagauaa

SEQ ID NO: 252051 - RNA, 22 nt, Human
aucuguaacaucaguagcagaa

SEQ ID NO: 252052 - RNA, 22 nt, Human
uggagcagaguucagcggggag

SEQ ID NO: 252053 - RNA, 22 nt, Human
aggacacacaaagagugagaac

SEQ ID NO: 252054 - RNA, 22 nt, Human
ucaagcaaagauacaaauggaa

SEQ ID NO: 252055 - RNA, 22 nt, Human
ugcuuaaaggauaguuuaaacu

SEQ ID NO: 252056 - RNA, 22 nt, Human
cccuucaggguuaaguagaggg

SEQ ID NO: 252057 - RNA, 22 nt, Human
accuguuuguguuuggacugca

SEQ ID NO: 252058 - RNA, 22 nt, Human
uagcuucuaauacuuaccaauu

SEQ ID NO: 252059 - RNA, 22 nt, Human
uucuccugggagggguugccca

SEQ ID NO: 252060 - RNA, 22 nt, Human
caggcucccgaaaucacccaug

SEQ ID NO: 252061 - RNA, 22 nt, Human
ggccugggcccacugucaagag

SEQ ID NO: 252062 - RNA, 22 nt, Human
cacugccuccccaggcuccaca

SEQ ID NO: 252063 - RNA, 22 nt, Human
ggugggagagcuugcuuugaug

SEQ ID NO: 252064 - RNA, 23 nt, Human
acuauaaaguuguucugauuuac

SEQ ID NO: 252065 - RNA, 22 nt, Human
aaggaccugauuuugagcaucu

SEQ ID NO: 252066 - RNA, 22 nt, Human
aacaaacucaaauggaagagug

SEQ ID NO: 252067 - RNA, 22 nt, Human
auccaggccccaagaccccgac

SEQ ID NO: 252068 - RNA, 22 nt, Human
aaaguuugagugauuugacaca

SEQ ID NO: 252069 - RNA, 22 nt, Human
cucucugggaauauuuuauucu

SEQ ID NO: 252070 - RNA, 22 nt, Human
gagugggcaaaagaaaguaggc

SEQ ID NO: 252071 - RNA, 22 nt, Human
ccuggaucuaaggaagcuggga

SEQ ID NO: 252072 - RNA, 22 nt, Human
gcagggcaugggcccugucugc

SEQ ID NO: 252073 - RNA, 22 nt, Human
uccagagguauguagagaguau

SEQ ID NO: 252074 - RNA, 21 nt, Human
uaugugucuguggaaaacuag

SEQ ID NO: 252075 - RNA, 23 nt, Human
uccugaggguuucccagccuugg

SEQ ID NO: 252076 - RNA, 22 nt, Human
agugaugucacaaacuauggug

SEQ ID NO: 252077 - RNA, 22 nt, Human
gcagcugggacacugaggccag

SEQ ID NO: 252078 - RNA, 22 nt, Human
cagauuuaccuaacuccaaguu

SEQ ID NO: 252079 - RNA, 22 nt, Human
ccucuuugacucucaggucuuu

SEQ ID NO: 252080 - RNA, 22 nt, Human
cugggagauugcuagagaugca

SEQ ID NO: 252081 - RNA, 22 nt, Human
cuggaugucuuggggacuccug

SEQ ID NO: 252082 - RNA, 22 nt, Human
caguguuuaaucauugugaauu

SEQ ID NO: 252083 - RNA, 22 nt, Human
aauaagacucugcuagaaauuc

SEQ ID NO: 252084 - RNA, 22 nt, Human
gcuggagugaugccugugucuc

SEQ ID NO: 252085 - RNA, 22 nt, Human
gcagggcagagggagaaucucu

SEQ ID NO: 252086 - RNA, 22 nt, Human
uuaucuguugcuuaaugcgcau

SEQ ID NO: 252087 - RNA, 22 nt, Human
cacugguauuugaaaauagaug

SEQ ID NO: 252088 - RNA, 22 nt, Human
uuuacugaccuccaaucccacu

SEQ ID NO: 252089 - RNA, 22 nt, Human
gucacaggccuggaugaggggc

SEQ ID NO: 252090 - RNA, 22 nt, Human
gcugcucugcuguguaagcagg

SEQ ID NO: 252091 - RNA, 22 nt, Human
ugaacaacugcaaaaaucucca

SEQ ID NO: 252092 - RNA, 22 nt, Human
gcuggccaaaguguaccuggag

SEQ ID NO: 252093 - RNA, 22 nt, Human
aggccagcuucuacccucuguu

SEQ ID NO: 252094 - RNA, 22 nt, Human
ggccuugguggcuuugcugaug

SEQ ID NO: 252095 - RNA, 22 nt, Human
ucuuagcauuuguuaauaccca

SEQ ID NO: 252096 - RNA, 22 nt, Human
augacuucguuuucucucugca

SEQ ID NO: 252097 - RNA, 22 nt, Human
uggauucugggagaguucuaua

SEQ ID NO: 252098 - RNA, 22 nt, Human
augaacagcauugaaauccagc

SEQ ID NO: 252099 - RNA, 22 nt, Human
acaugaaugcagccauaacacu

SEQ ID NO: 252100 - RNA, 22 nt, Human
caggccucaggggcucaggcug

SEQ ID NO: 252101 - RNA, 22 nt, Human
ugaucuuuucaaagacaagcuu

SEQ ID NO: 252102 - RNA, 20 nt, Human
caugccagaaugugagguag

SEQ ID NO: 252103 - RNA, 22 nt, Human
gcuccugugcaggucucgguug

SEQ ID NO: 252104 - RNA, 22 nt, Human
uuuggccucguuuagaaauggc

SEQ ID NO: 252105 - RNA, 22 nt, Human
gcuggcucugaugggcuccagg

SEQ ID NO: 252106 - RNA, 22 nt, Human
uagcuuuaccauagaagaguau

SEQ ID NO: 252107 - RNA, 22 nt, Human
aguaaugauuauguacagaaug

SEQ ID NO: 252108 - RNA, 22 nt, Human
ggagucugaguccucauagaca

SEQ ID NO: 252109 - RNA, 22 nt, Human
guucaaagcuccugguacagua

SEQ ID NO: 252110 - RNA, 20 nt, Human
ugguccugucccacccacuc

SEQ ID NO: 252111 - RNA, 22 nt, Human
ccugcccuaauccagagacuag

SEQ ID NO: 252112 - RNA, 22 nt, Human
ucagaggauagaaauacuuauu

SEQ ID NO: 252113 - RNA, 22 nt, Human
gauaagcacuauauaaguauuu

SEQ ID NO: 252114 - RNA, 22 nt, Human
uugcuggggugugaaaucugau

SEQ ID NO: 252115 - RNA, 22 nt, Human
gagagggccgggggccagcucc

SEQ ID NO: 252116 - RNA, 20 nt, Human
aaagagcccuuggagcaggc

SEQ ID NO: 252117 - RNA, 21 nt, Human
gggagcugacagcagcacggc

SEQ ID NO: 252118 - RNA, 22 nt, Human
aaguugaaugcguacgugacau

SEQ ID NO: 252119 - RNA, 22 nt, Human
gagcugaaggagaaagcagggg

SEQ ID NO: 252120 - RNA, 22 nt, Human
caggcccugcacagugguccug

SEQ ID NO: 252121 - RNA, 22 nt, Human
augcuaaauucagacaggguua

SEQ ID NO: 252122 - RNA, 22 nt, Human
guuugucccacuucuggcagaa

SEQ ID NO: 252123 - RNA, 22 nt, Human
gugucuuuauuccucuauguuu

SEQ ID NO: 252124 - RNA, 22 nt, Human
uuggcuucaaugucagagacag

SEQ ID NO: 252125 - RNA, 22 nt, Human
ugaucacaagucugaagaauga

SEQ ID NO: 252126 - RNA, 22 nt, Human
aacuuucuaauuuuggcugagc

SEQ ID NO: 252127 - RNA, 22 nt, Human
gaaauacaauuuugucccagcu

SEQ ID NO: 252128 - RNA, 22 nt, Human
gugcagagaggaccuuggggag

SEQ ID NO: 252129 - RNA, 22 nt, Human
uuuacugucucagagagacaaa

SEQ ID NO: 252130 - RNA, 22 nt, Human
ugaaacauugcacuguaugaau

SEQ ID NO: 252131 - RNA, 22 nt, Human
cugggcuuaggaccuggugcgg

SEQ ID NO: 252132 - RNA, 22 nt, Human
aauuuccugggauaaaaagcca

SEQ ID NO: 252133 - RNA, 22 nt, Human
uggaaggagacugggaagugug

SEQ ID NO: 252134 - RNA, 22 nt, Human
aaugaaauguagcuuauccaua

SEQ ID NO: 252135 - RNA, 22 nt, Human
agcaggcugggcaauaugggca

SEQ ID NO: 252136 - RNA, 22 nt, Human
ucugagcugugaguugcuuagg

SEQ ID NO: 252137 - RNA, 22 nt, Human
gcaggcagccacgauucccuug

SEQ ID NO: 252138 - RNA, 22 nt, Human
aagcacagcagagccuugcuug

SEQ ID NO: 252139 - RNA, 22 nt, Human
auuugcauaaggaugcuacugu

SEQ ID NO: 252140 - RNA, 22 nt, Human
cccacaggcccugcugccuuga

SEQ ID NO: 252141 - RNA, 22 nt, Human
aggagcucauguggcugccugu

SEQ ID NO: 252142 - RNA, 22 nt, Human
auccacccugugguggcuuucu

SEQ ID NO: 252143 - RNA, 22 nt, Human
agaauccuauugucagauucuu

SEQ ID NO: 252144 - RNA, 22 nt, Human
caccagcuuugcccacugccca

SEQ ID NO: 252145 - RNA, 22 nt, Human
caugaaaaauuuacuguuaaca

SEQ ID NO: 252146 - RNA, 22 nt, Human
cucugagggcugucaggaaagg

SEQ ID NO: 252147 - RNA, 22 nt, Human
ggcuucaccugugcacucuacc

SEQ ID NO: 252148 - RNA, 22 nt, Human
ucucagagauuuauggaaaacu

SEQ ID NO: 252149 - RNA, 22 nt, Human
uuugacucuucuagcaagugug

SEQ ID NO: 252150 - RNA, 18 nt, Human
ggacaucaucaggugcuu

SEQ ID NO: 252151 - RNA, 22 nt, Human
uggaggaauaacagcaaccuua

SEQ ID NO: 252152 - RNA, 18 nt, Human
aagagcuucgcauauaca

SEQ ID NO: 252153 - RNA, 20 nt, Human
uacauucaaaacaaacucug

SEQ ID NO: 252154 - RNA, 22 nt, Human
acaggcagauguuuuaguugua

SEQ ID NO: 252155 - RNA, 22 nt, Human
uguguacacgagagguuauaua

SEQ ID NO: 252156 - RNA, 22 nt, Human
uggauuuccagacagcuuaauu

SEQ ID NO: 252157 - RNA, 22 nt, Human
gcccugggauuggguggaggcu

SEQ ID NO: 252158 - RNA, 22 nt, Human
cuccccacgccuggacuaagag

SEQ ID NO: 252159 - RNA, 22 nt, Human
gcaggaguaugcagcuaugguu

SEQ ID NO: 252160 - RNA, 22 nt, Human
cuggccucuguguucaccauag

SEQ ID NO: 252161 - RNA, 22 nt, Human
gagcaguggucacagggaggga

SEQ ID NO: 252162 - RNA, 22 nt, Human
gccuccggaguugcagugucuu

SEQ ID NO: 252163 - RNA, 22 nt, Human
ucuuagaaguucauguuccagc

SEQ ID NO: 252164 - RNA, 22 nt, Human
cugggugacagagugagauggu

SEQ ID NO: 252165 - RNA, 23 nt, Human
uucuacagcuucuucaguuaagg

SEQ ID NO: 252166 - RNA, 22 nt, Human
aagaacaugaacacaauguuua

SEQ ID NO: 252167 - RNA, 22 nt, Human
uaugugucugucgugcauaaau

SEQ ID NO: 252168 - RNA, 22 nt, Human
uagaaacagauguuuuugaaga

SEQ ID NO: 252169 - RNA, 22 nt, Human
ugaaaaaacaaguuggcccauu

SEQ ID NO: 252170 - RNA, 22 nt, Human
ucugucauuuuguaucuacaug

SEQ ID NO: 252171 - RNA, 22 nt, Human
ugcauuuaguuaugagaaaaac

SEQ ID NO: 252172 - RNA, 22 nt, Human
uguaauggaaaaacauuagcau

SEQ ID NO: 252173 - RNA, 22 nt, Human
aaacugaaguagauucugaaau

SEQ ID NO: 252174 - RNA, 22 nt, Human
gugauaacucaggcagagaaua

SEQ ID NO: 252175 - RNA, 22 nt, Human
aagugauuugcaugcuuaauuc

SEQ ID NO: 252176 - RNA, 22 nt, Human
uagaaaguagggaagguaggau

SEQ ID NO: 252177 - RNA, 22 nt, Human
uggcagcagccauggaaggccc

SEQ ID NO: 252178 - RNA, 22 nt, Human
acauuucugagcagggagcugu

SEQ ID NO: 252179 - RNA, 22 nt, Human
ugugacuuauaacauagaauuu

SEQ ID NO: 252180 - RNA, 22 nt, Human
ccucugggaagccaguccugcu

SEQ ID NO: 252181 - RNA, 23 nt, Human
uucucuuuagauuuacauuacuc

SEQ ID NO: 252182 - RNA, 22 nt, Human
cacuugaaugaaagagacuccu

SEQ ID NO: 252183 - RNA, 22 nt, Human
cauuacauuucaaaauguuucc

SEQ ID NO: 252184 - RNA, 22 nt, Human
ucaggccuuguccugaccuccu

SEQ ID NO: 252185 - RNA, 22 nt, Human
ucgaaauacuguuuccccuuua

SEQ ID NO: 252186 - RNA, 22 nt, Human
acucuuugucuguugccgcuua

SEQ ID NO: 252187 - RNA, 23 nt, Human
uugauuuagcugggauugcaugc

SEQ ID NO: 252188 - RNA, 22 nt, Human
ucucugcucaggcaccagcccu

SEQ ID NO: 252189 - RNA, 20 nt, Human
auauuucagguagugugccc

SEQ ID NO: 252190 - RNA, 22 nt, Human
gaucaacaacuuuugaauagcu

SEQ ID NO: 252191 - RNA, 20 nt, Human
aaucagaaagugugagcucu

SEQ ID NO: 252192 - RNA, 20 nt, Human
agugaguuaucagcuacagu

SEQ ID NO: 252193 - RNA, 22 nt, Human
aaugccuucccauuuauacuuu

SEQ ID NO: 252194 - RNA, 22 nt, Human
ucuaggguccacagggucagcc

SEQ ID NO: 252195 - RNA, 22 nt, Human
cugaugaggauauagauacaca

SEQ ID NO: 252196 - RNA, 22 nt, Human
acagugaaaauaauaucuucaa

SEQ ID NO: 252197 - RNA, 22 nt, Human
auccaguuaagaugaggucaua

SEQ ID NO: 252198 - RNA, 23 nt, Human
uagacugcaggcuccuugagggc

SEQ ID NO: 252199 - RNA, 20 nt, Human
cagagaccugucuucacaga

SEQ ID NO: 252200 - RNA, 22 nt, Human
ccuggccugugaaucugagagc

SEQ ID NO: 252201 - RNA, 22 nt, Human
uguuccugaggcaugugucaau

SEQ ID NO: 252202 - RNA, 22 nt, Human
ugcuuugcucugucucuagcua

SEQ ID NO: 252203 - RNA, 22 nt, Human
gaaaaaggauaaauacaguguu

SEQ ID NO: 252204 - RNA, 22 nt, Human
aggagacucagagaccuggccg

SEQ ID NO: 252205 - RNA, 22 nt, Human
gccucucugggcugccgaggcu

SEQ ID NO: 252206 - RNA, 23 nt, Human
uucaaagaucuucugaaaucugu

SEQ ID NO: 252207 - RNA, 22 nt, Human
auacauguaacugcauuguaau

SEQ ID NO: 252208 - RNA, 22 nt, Human
guacaauuaagugcacaaauag

SEQ ID NO: 252209 - RNA, 22 nt, Human
aauggaggugucuggccuggua

SEQ ID NO: 252210 - RNA, 22 nt, Human
cuuucuucaucaagugccacgu

SEQ ID NO: 252211 - RNA, 22 nt, Human
uggcugagcugcagcguggcuu

SEQ ID NO: 252212 - RNA, 22 nt, Human
ucucugaauaaugcuauucuuu

SEQ ID NO: 252213 - RNA, 22 nt, Human
ugagcagacuugaugaggcagc

SEQ ID NO: 252214 - RNA, 22 nt, Human
gcagggaagaucuuggagcugc

SEQ ID NO: 252215 - RNA, 22 nt, Human
gaggcuggggucugccuuucug

SEQ ID NO: 252216 - RNA, 22 nt, Human
cucugcaguguaacagcgcuug

SEQ ID NO: 252217 - RNA, 22 nt, Human
uuugauaucuugguauacagau

SEQ ID NO: 252218 - RNA, 22 nt, Human
uggguccucuggagcagcagca

SEQ ID NO: 252219 - RNA, 22 nt, Human
cuauaauuaugcucaaaaugua

SEQ ID NO: 252220 - RNA, 22 nt, Human
cacuggcuugauggguaaugcc

SEQ ID NO: 252221 - RNA, 22 nt, Human
cucuguguucagccuagcagaa

SEQ ID NO: 252222 - RNA, 22 nt, Human
acgcgcaaccaggcaugcacau

SEQ ID NO: 252223 - RNA, 20 nt, Human
ucuucagaugcuuuuggagu

SEQ ID NO: 252224 - RNA, 22 nt, Human
uagagaaacagaaccaacaggg

SEQ ID NO: 252225 - RNA, 22 nt, Human
gugaauuaaauauagccagguc

SEQ ID NO: 252226 - RNA, 22 nt, Human
cugaagagaaagggagcucuuc

SEQ ID NO: 252227 - RNA, 22 nt, Human
agaaaauauucauugagaggcu

SEQ ID NO: 252228 - RNA, 22 nt, Human
gccuccacuuuugcuggcuucu

SEQ ID NO: 252229 - RNA, 22 nt, Human
gccugaagaacagcugugagga

SEQ ID NO: 252230 - RNA, 22 nt, Human
agacagcagaaacuagagcacu

SEQ ID NO: 252231 - RNA, 22 nt, Human
gccagaggggcucgaaggcgcg

SEQ ID NO: 252232 - RNA, 22 nt, Human
cugggcuccacucccacagugu

SEQ ID NO: 252233 - RNA, 22 nt, Human
caggcccugccuuggcaugugu

SEQ ID NO: 252234 - RNA, 22 nt, Human
ugcagguguagaguugggcucc

SEQ ID NO: 252235 - RNA, 22 nt, Human
gcugucugacuccaaguuggag

SEQ ID NO: 252236 - RNA, 22 nt, Human
cucuuuaagcuccuaacagcca

SEQ ID NO: 252237 - RNA, 22 nt, Human
ugccagggucagcugcagcucu

SEQ ID NO: 252238 - RNA, 22 nt, Human
uaaaucaagaauaucagcuugu

SEQ ID NO: 252239 - RNA, 22 nt, Human
uaccauuucauucuuuccucau

SEQ ID NO: 252240 - RNA, 22 nt, Human
acacagaagaucucuuaaugcu

SEQ ID NO: 252241 - RNA, 22 nt, Human
cucgcaggacagugcuaggacu

SEQ ID NO: 252242 - RNA, 23 nt, Human
guauuucagcauucucaguuaaa

SEQ ID NO: 252243 - RNA, 22 nt, Human
aauguacaaaagucagccaacu

SEQ ID NO: 252244 - RNA, 22 nt, Human
guaacauaguuugugcuucauc

SEQ ID NO: 252245 - RNA, 22 nt, Human
auuucucauuaagaucuuccaa

SEQ ID NO: 252246 - RNA, 21 nt, Human
aagugguuuacauccagcugu

SEQ ID NO: 252247 - RNA, 20 nt, Human
cagaaagcauguuccagggc

SEQ ID NO: 252248 - RNA, 22 nt, Human
uuacaacagcgauuuaccuguc

SEQ ID NO: 252249 - RNA, 22 nt, Human
ccaggagcauuaagagaacaua

SEQ ID NO: 252250 - RNA, 22 nt, Human
uguggccuugcagccuggaggu

SEQ ID NO: 252251 - RNA, 22 nt, Human
agcugcaguaugaggcuggugg

SEQ ID NO: 252252 - RNA, 22 nt, Human
aauaaucuugacuacugaauca

SEQ ID NO: 252253 - RNA, 18 nt, Human
guuucaugcaugugaaac

SEQ ID NO: 252254 - RNA, 22 nt, Human
acacauauauuugcauauacac

SEQ ID NO: 252255 - RNA, 22 nt, Human
cucccucauauacccagcgaga

SEQ ID NO: 252256 - RNA, 22 nt, Human
uugguuuaccagagggaacgug

SEQ ID NO: 252257 - RNA, 22 nt, Human
acuuggcuuaaaguagugaucg

SEQ ID NO: 252258 - RNA, 22 nt, Human
aucuccuaaaguuuccagaaga

SEQ ID NO: 252259 - RNA, 22 nt, Human
aacugcauucagaaagcucacu

SEQ ID NO: 252260 - RNA, 22 nt, Human
auuuccugaucuguaaaauagc

SEQ ID NO: 252261 - RNA, 22 nt, Human
uaacaauacccauucuaauuac

SEQ ID NO: 252262 - RNA, 22 nt, Human
uuaaagcccagcauauacuagg

SEQ ID NO: 252263 - RNA, 22 nt, Human
ggucuacauugagagagcugcu

SEQ ID NO: 252264 - RNA, 22 nt, Human
auucucuggaagaagauaaaaa

SEQ ID NO: 252265 - RNA, 22 nt, Human
gagcuagcuucuuccagguuuc

SEQ ID NO: 252266 - RNA, 22 nt, Human
uuaguagaagacagauaacaaa

SEQ ID NO: 252267 - RNA, 20 nt, Human
agucugucaauuuacagugg

SEQ ID NO: 252268 - RNA, 22 nt, Human
gguguccuugcuccuucagcuu

SEQ ID NO: 252269 - RNA, 22 nt, Human
uaacagagauagaaauguaaag

SEQ ID NO: 252270 - RNA, 21 nt, Human
uuugaauagaaauagugcuua

SEQ ID NO: 252271 - RNA, 22 nt, Human
uguaaagacagauaaaacagca

SEQ ID NO: 252272 - RNA, 18 nt, Human
uuuuaauuucaggggugg

SEQ ID NO: 252273 - RNA, 20 nt, Human
ucucuguaaaucuucuuuua

SEQ ID NO: 252274 - RNA, 22 nt, Human
acaguucaagucuuagacaaca

SEQ ID NO: 252275 - RNA, 22 nt, Human
aaagagucaaaggcaugucucu

SEQ ID NO: 252276 - RNA, 22 nt, Human
gcagucccauaucuuuaacaua

SEQ ID NO: 252277 - RNA, 22 nt, Human
ccucagcuugauuucugcagag

SEQ ID NO: 252278 - RNA, 22 nt, Human
acucugugaagaugcaggcuug

SEQ ID NO: 252279 - RNA, 17 nt, Human
ucugagaaugcuggagg

SEQ ID NO: 252280 - RNA, 22 nt, Human
ucaaggcacuucaugucucagu

SEQ ID NO: 252281 - RNA, 22 nt, Human
agucuagaaugugcaccaagcu

SEQ ID NO: 252282 - RNA, 22 nt, Human
aacagcugcaaaagguugccug

SEQ ID NO: 252283 - RNA, 22 nt, Human
caggaugagguagaggcagaua

SEQ ID NO: 252284 - RNA, 22 nt, Human
aaaguuuuagcuguccaguucc

SEQ ID NO: 252285 - RNA, 22 nt, Human
cagcuguggagggaggaaaugc

SEQ ID NO: 252286 - RNA, 23 nt, Human
aaucuagaaugaccuacucaucu

SEQ ID NO: 252287 - RNA, 20 nt, Human
gaguccuuaugggcugaggu

SEQ ID NO: 252288 - RNA, 22 nt, Human
caccaggcugcccaggacaggg

SEQ ID NO: 252289 - RNA, 22 nt, Human
uuguuuacaaguuacucagucu

SEQ ID NO: 252290 - RNA, 22 nt, Human
acuccugguucccaguugagau

SEQ ID NO: 252291 - RNA, 22 nt, Human
auacagccuauucuuaccauug

SEQ ID NO: 252292 - RNA, 22 nt, Human
agcacugugagcaccagcacgc

SEQ ID NO: 252293 - RNA, 22 nt, Human
uggcugcagaucugugggacac

SEQ ID NO: 252294 - RNA, 22 nt, Human
agaaugucaacagccucucaag

SEQ ID NO: 252295 - RNA, 22 nt, Human
auacuaaaguauagaacuuagu

SEQ ID NO: 252296 - RNA, 22 nt, Human
uguacaguaggaacuuguuauu

SEQ ID NO: 252297 - RNA, 21 nt, Human
gcagagaaugaacuuuggcuu

SEQ ID NO: 252298 - RNA, 20 nt, Human
auucucugacaccgcccccg

SEQ ID NO: 252299 - RNA, 22 nt, Human
gcucagaggagcaucauaagga

SEQ ID NO: 252300 - RNA, 22 nt, Human
aggcugugcaauuaggguaaga

SEQ ID NO: 252301 - RNA, 22 nt, Human
agaaccuugaucuuggacuucu

SEQ ID NO: 252302 - RNA, 22 nt, Human
ugcagagauuuggcucuuaaag

SEQ ID NO: 252303 - RNA, 22 nt, Human
cagaggugcuggagugaguccu

SEQ ID NO: 252304 - RNA, 22 nt, Human
auucucuggucauugaguauaa

SEQ ID NO: 252305 - RNA, 22 nt, Human
ucucuggcagaggcccuauccc

SEQ ID NO: 252306 - RNA, 21 nt, Human
aacucccagugccuucccagc

SEQ ID NO: 252307 - RNA, 22 nt, Human
gagcucuguguagccugagggu

SEQ ID NO: 252308 - RNA, 18 nt, Human
ucagaggagauaccuaaa

SEQ ID NO: 252309 - RNA, 22 nt, Human
ucucucagauggggcacuagua

SEQ ID NO: 252310 - RNA, 22 nt, Human
gcuuuggaaauauagacucaag

SEQ ID NO: 252311 - RNA, 18 nt, Human
ucagagagaauaguaauu

SEQ ID NO: 252312 - RNA, 22 nt, Human
uagcaaacucauacaugugggu

SEQ ID NO: 252313 - RNA, 18 nt, Human
agccucuggcagagagaa

SEQ ID NO: 252314 - RNA, 22 nt, Human
acuucauucauuuucacgaaug

SEQ ID NO: 252315 - RNA, 22 nt, Human
acuugaaacaucuuuaaaugua

SEQ ID NO: 252316 - RNA, 22 nt, Human
auguguuuguccugcagaaaua

SEQ ID NO: 252317 - RNA, 22 nt, Human
gguuugguuuuggccaucuucc

SEQ ID NO: 252318 - RNA, 22 nt, Human
gcaugcagagaauaccugugau

SEQ ID NO: 252319 - RNA, 18 nt, Human
ggguccuguucuuggaag

SEQ ID NO: 252320 - RNA, 22 nt, Human
aaauaaaggaacuguuuuccca

SEQ ID NO: 252321 - RNA, 22 nt, Human
caccaggcacagcucuccugcu

SEQ ID NO: 252322 - RNA, 22 nt, Human
agagucugaggaggaccaacag

SEQ ID NO: 252323 - RNA, 22 nt, Human
caucugaagugaauugcuuuuu

SEQ ID NO: 252324 - RNA, 22 nt, Human
aacaaaagccgaaguagguguc

SEQ ID NO: 252325 - RNA, 22 nt, Human
auuacaauaauacaugcucauu

SEQ ID NO: 252326 - RNA, 23 nt, Human
uuacaguaggaguuggaaaacca

SEQ ID NO: 252327 - RNA, 19 nt, Human
uuuagcuuacguuucauug

SEQ ID NO: 252328 - RNA, 22 nt, Human
cucccuggcuuuguccugaggc

SEQ ID NO: 252329 - RNA, 22 nt, Human
cuagaaacgccuuuagcacaac

SEQ ID NO: 252330 - RNA, 22 nt, Human
uguccuggaucaugccucugaa

SEQ ID NO: 252331 - RNA, 18 nt, Human
aguuagaaaugaaggcca

SEQ ID NO: 252332 - RNA, 22 nt, Human
aggagaaguaaggcuagaugau

SEQ ID NO: 252333 - RNA, 22 nt, Human
cuucugugagucaguguuucug

SEQ ID NO: 252334 - RNA, 22 nt, Human
aaauaauugaguuggucaauau

SEQ ID NO: 252335 - RNA, 22 nt, Human
uuacagcagugggaaggaguca

SEQ ID NO: 252336 - RNA, 22 nt, Human
cagguugggcugcgaggaggag

SEQ ID NO: 252337 - RNA, 20 nt, Human
agggucagagagcgugagug

SEQ ID NO: 252338 - RNA, 22 nt, Human
ucuguucagaaauggaagugcc

SEQ ID NO: 252339 - RNA, 21 nt, Human
cucagagcaguucagagggau

SEQ ID NO: 252340 - RNA, 21 nt, Human
uugcauuccuguuaguauaag

SEQ ID NO: 252341 - RNA, 23 nt, Human
cccaggaguuucacugcaaaggu

SEQ ID NO: 252342 - RNA, 22 nt, Human
ucccucagauuggcaauuagau

SEQ ID NO: 252343 - RNA, 22 nt, Human
uucagcaaauggcuugagauaa

SEQ ID NO: 252344 - RNA, 21 nt, Human
ucuguucaaggaacuacggau

SEQ ID NO: 252345 - RNA, 22 nt, Human
uguuaacauguguauuguauga

SEQ ID NO: 252346 - RNA, 18 nt, Human
gcagggacacagggucac

SEQ ID NO: 252347 - RNA, 22 nt, Human
ucacagacacauuaaacaugug

SEQ ID NO: 252348 - RNA, 22 nt, Human
uguguucauguugauucauagc

SEQ ID NO: 252349 - RNA, 18 nt, Human
uggcucagauggcuuuaa

SEQ ID NO: 252350 - RNA, 22 nt, Human
caacaguauugugggccaggua

SEQ ID NO: 252351 - RNA, 22 nt, Human
acuguacacagugguguacugu

SEQ ID NO: 252352 - RNA, 22 nt, Human
cucuagacaacuugcugugggu

SEQ ID NO: 252353 - RNA, 22 nt, Human
gcagcucucuggccugcccugg

SEQ ID NO: 252354 - RNA, 20 nt, Human
augccucuaauuuugcaaac

SEQ ID NO: 252355 - RNA, 22 nt, Human
gggucuggacggcugcaggaag

SEQ ID NO: 252356 - RNA, 21 nt, Human
uucuagaaccgugggcgguuc

SEQ ID NO: 252357 - RNA, 22 nt, Human
ucuuugaauccuuuacaucuga

SEQ ID NO: 252358 - RNA, 22 nt, Human
aagcgccaugguuccugcgcag

SEQ ID NO: 252359 - RNA, 22 nt, Human
gguaagcacuucauguacauga

SEQ ID NO: 252360 - RNA, 22 nt, Human
gacuccaggugcaggaggagcc

SEQ ID NO: 252361 - RNA, 22 nt, Human
gaauacaucugaaggcuaugaa

SEQ ID NO: 252362 - RNA, 22 nt, Human
acugagggugcacaggcaggca

SEQ ID NO: 252363 - RNA, 22 nt, Human
gaaaauacuucaguguucuggc

SEQ ID NO: 252364 - RNA, 22 nt, Human
aagccaguuagcacaucauugc

SEQ ID NO: 252365 - RNA, 22 nt, Human
ggcaggugcucugugggccugg

SEQ ID NO: 252366 - RNA, 22 nt, Human
guucuucagcauuagaagucau

SEQ ID NO: 252367 - RNA, 22 nt, Human
ucugcaggagagugcccuagag

SEQ ID NO: 252368 - RNA, 22 nt, Human
aucuaagagagagagcaugucu

SEQ ID NO: 252369 - RNA, 22 nt, Human
cuggaggacagaggccaugucu

SEQ ID NO: 252370 - RNA, 22 nt, Human
ucauuuuuagcgcgcaaaaguu

SEQ ID NO: 252371 - RNA, 22 nt, Human
acuguuacagagcaggaaauug

SEQ ID NO: 252372 - RNA, 22 nt, Human
gaugcaaacugugacauagagu

SEQ ID NO: 252373 - RNA, 22 nt, Human
ugggaggcagguaggugaugau

SEQ ID NO: 252374 - RNA, 22 nt, Human
uucauauaaauggaaucagaau

SEQ ID NO: 252375 - RNA, 22 nt, Human
ccaaaugugccuguuucaacaa

SEQ ID NO: 252376 - RNA, 22 nt, Human
guuucuuucuauugacugaaca

SEQ ID NO: 252377 - RNA, 22 nt, Human
auguauuugcguauggacauac

SEQ ID NO: 252378 - RNA, 22 nt, Human
cagccaggcccccgagucguug

SEQ ID NO: 252379 - RNA, 22 nt, Human
cuucuggguugcaggucuuggc

SEQ ID NO: 252380 - RNA, 22 nt, Human
gccucuggggcagcugagucau

SEQ ID NO: 252381 - RNA, 22 nt, Human
agggggcuccuccggugcuucc

SEQ ID NO: 252382 - RNA, 22 nt, Human
gagaggagacuuauccagauug

SEQ ID NO: 252383 - RNA, 22 nt, Human
gaggcucagggaguauaugaau

SEQ ID NO: 252384 - RNA, 22 nt, Human
uauuauugcaaguauauaaagu

SEQ ID NO: 252385 - RNA, 22 nt, Human
cuuggugcccagcagguggcug

SEQ ID NO: 252386 - RNA, 21 nt, Human
aggaauguguauauauacaau

SEQ ID NO: 252387 - RNA, 19 nt, Human
gggcucucgagcaaccaac

SEQ ID NO: 252388 - RNA, 20 nt, Human
ggucucugacagcugguugc

SEQ ID NO: 252389 - RNA, 22 nt, Human
acagcagaccccagugccaugg

SEQ ID NO: 252390 - RNA, 22 nt, Human
ugccuggccagacccuauagag

SEQ ID NO: 252391 - RNA, 22 nt, Human
ugccugugcccuuugcugggag

SEQ ID NO: 252392 - RNA, 22 nt, Human
ccacucugauuuuggcuccacu

SEQ ID NO: 252393 - RNA, 22 nt, Human
cauggaauuuucuaggcauaaa

SEQ ID NO: 252394 - RNA, 22 nt, Human
ucuagaaucacuguuuccaucu

SEQ ID NO: 252395 - RNA, 22 nt, Human
gagccaggcccguacuugcugu

SEQ ID NO: 252396 - RNA, 22 nt, Human
ggccuuagguucccugccucca

SEQ ID NO: 252397 - RNA, 22 nt, Human
accugcuuuauuccuccugccu

SEQ ID NO: 252398 - RNA, 22 nt, Human
aggcugugaguuuugucucaga

SEQ ID NO: 252399 - RNA, 22 nt, Human
cugagagaaucaugcugcaggu

SEQ ID NO: 252400 - RNA, 22 nt, Human
cucaggcugguuuggguuguuu

SEQ ID NO: 252401 - RNA, 22 nt, Human
acucuggcgggcgggcgagcca

SEQ ID NO: 252402 - RNA, 22 nt, Human
caggaagugugccugagcaccu

SEQ ID NO: 252403 - RNA, 22 nt, Human
cagcagaggaaagcaaaucuaa

SEQ ID NO: 252404 - RNA, 22 nt, Human
aguggcagagcugugucuugaa

SEQ ID NO: 252405 - RNA, 22 nt, Human
auuuugaugcuaucuaaugaau

SEQ ID NO: 252406 - RNA, 20 nt, Human
ugagccuugaggagugacug

SEQ ID NO: 252407 - RNA, 22 nt, Human
aacaguagguguaaccaaacaa

SEQ ID NO: 252408 - RNA, 23 nt, Human
ugcaggugugcagagggcucuug

SEQ ID NO: 252409 - RNA, 22 nt, Human
ucaggaagaaauucuguaucuu

SEQ ID NO: 252410 - RNA, 21 nt, Human
gggugggguuccagccuuuuc

SEQ ID NO: 252411 - RNA, 22 nt, Human
aauguuauuacacuugugaaau

SEQ ID NO: 252412 - RNA, 22 nt, Human
gcagauggaaagugcuugaggg

SEQ ID NO: 252413 - RNA, 22 nt, Human
agcucugggaguaguuccaccu

SEQ ID NO: 252414 - RNA, 22 nt, Human
gggucccuggaauuacuugaca

SEQ ID NO: 252415 - RNA, 22 nt, Human
cacaguuugcauaggaaaaaca

SEQ ID NO: 252416 - RNA, 22 nt, Human
gaggccagggaugcaaugagag

SEQ ID NO: 252417 - RNA, 22 nt, Human
aaguuacauuuuggucuaauug

SEQ ID NO: 252418 - RNA, 22 nt, Human
ggucagccuuggauuugguagc

SEQ ID NO: 252419 - RNA, 22 nt, Human
cuggaagcuuguuugccagucu

SEQ ID NO: 252420 - RNA, 22 nt, Human
ugcagagaagaggacaguucua

SEQ ID NO: 252421 - RNA, 17 nt, Human
uggcaagacagcucagg

SEQ ID NO: 252422 - RNA, 22 nt, Human
ucuuugguugcacugcaggugu

SEQ ID NO: 252423 - RNA, 22 nt, Human
cccugcccaccacaugcuggga

SEQ ID NO: 252424 - RNA, 17 nt, Human
ggaacaaauacuaugca

SEQ ID NO: 252425 - RNA, 22 nt, Human
cuggaggaaaacaacugcagac

SEQ ID NO: 252426 - RNA, 22 nt, Human
uucuuuggcugccagucuggag

SEQ ID NO: 252427 - RNA, 22 nt, Human
ugcccuguggggauuuccagcc

SEQ ID NO: 252428 - RNA, 22 nt, Human
ucucagcagggccauccugagc

SEQ ID NO: 252429 - RNA, 22 nt, Human
uggaaagaaaaacaggccauga

SEQ ID NO: 252430 - RNA, 22 nt, Human
acugccuugauucaugcugaug

SEQ ID NO: 252431 - RNA, 17 nt, Human
ggagcagauccaccauu

SEQ ID NO: 252432 - RNA, 22 nt, Human
caguuucuuuccauuguuaccu

SEQ ID NO: 252433 - RNA, 23 nt, Human
augaaacucaagccagauccaag

SEQ ID NO: 252434 - RNA, 22 nt, Human
ugacaagaucacagucaagugu

SEQ ID NO: 252435 - RNA, 22 nt, Human
ugauagaagcagaagcauacca

SEQ ID NO: 252436 - RNA, 22 nt, Human
cagagcuuccugcugggcuucu

SEQ ID NO: 252437 - RNA, 22 nt, Human
caaaggcaucggcaauuaggga

SEQ ID NO: 252438 - RNA, 22 nt, Human
ccugcaagaccugagacacacc

SEQ ID NO: 252439 - RNA, 22 nt, Human
aaaauuuucagcuugacuugau

SEQ ID NO: 252440 - RNA, 22 nt, Human
agcauacaggucugaaacagcu

SEQ ID NO: 252441 - RNA, 22 nt, Human
guucuucaaagugacaacuaaa

SEQ ID NO: 252442 - RNA, 22 nt, Human
ugcaaauuugagcagacuguuc

SEQ ID NO: 252443 - RNA, 22 nt, Human
ugucuccauagaguagcuugau

SEQ ID NO: 252444 - RNA, 22 nt, Human
cagaggaagcuggguguggagu

SEQ ID NO: 252445 - RNA, 22 nt, Human
agagccaguuacaacuguggag

SEQ ID NO: 252446 - RNA, 20 nt, Human
ccacaggaguccagucgacc

SEQ ID NO: 252447 - RNA, 22 nt, Human
uccugugagacuuguccauuau

SEQ ID NO: 252448 - RNA, 22 nt, Human
ugagauuuuccuaaauauaaug

SEQ ID NO: 252449 - RNA, 22 nt, Human
gagcccagcugcggcccucagc

SEQ ID NO: 252450 - RNA, 22 nt, Human
aguguucacucuguggagccca

SEQ ID NO: 252451 - RNA, 22 nt, Human
aaaaguauccacagcucaggag

SEQ ID NO: 252452 - RNA, 22 nt, Human
uaagccaucaucauggcuuugg

SEQ ID NO: 252453 - RNA, 22 nt, Human
gucuguagaugagucuuaagaa

SEQ ID NO: 252454 - RNA, 22 nt, Human
ggguuccuccaguuccuagagc

SEQ ID NO: 252455 - RNA, 22 nt, Human
uuccuucuagagcuuguuuagg

SEQ ID NO: 252456 - RNA, 22 nt, Human
uagaucuuucacuacuguguag

SEQ ID NO: 252457 - RNA, 22 nt, Human
guuucauucggcagcucauaag

SEQ ID NO: 252458 - RNA, 22 nt, Human
caagcagucagccugaagacug

SEQ ID NO: 252459 - RNA, 23 nt, Human
ccagaaucuacucauuggaauga

SEQ ID NO: 252460 - RNA, 22 nt, Human
agcugggaugaggagcauccuu

SEQ ID NO: 252461 - RNA, 22 nt, Human
ccucuuugacuauaguaguuaa

SEQ ID NO: 252462 - RNA, 22 nt, Human
acuuagcauuauguaauuacua

SEQ ID NO: 252463 - RNA, 19 nt, Human
uccagaagucccugagcgg

SEQ ID NO: 252464 - RNA, 22 nt, Human
guccuagagggugagcuaggcu

SEQ ID NO: 252465 - RNA, 17 nt, Human
aaggaaugucagaaguu

SEQ ID NO: 252466 - RNA, 22 nt, Human
guggggaggcauucuucucccu

SEQ ID NO: 252467 - RNA, 22 nt, Human
cugccuguaacuuucugaagca

SEQ ID NO: 252468 - RNA, 22 nt, Human
aacuacagcaucuauacaaaua

SEQ ID NO: 252469 - RNA, 22 nt, Human
cuuuguaucuaaauaucuugaa

SEQ ID NO: 252470 - RNA, 23 nt, Human
agcucaaggcaguccacauuucc

SEQ ID NO: 252471 - RNA, 22 nt, Human
accuggaagugggugcuauggc

SEQ ID NO: 252472 - RNA, 22 nt, Human
acacaugcagguauacauguuc

SEQ ID NO: 252473 - RNA, 22 nt, Human
auggaaaucagguucauccaag

SEQ ID NO: 252474 - RNA, 22 nt, Human
agagauguagcaaagaaccaca

SEQ ID NO: 252475 - RNA, 22 nt, Human
uucuuugcccauguuuccuaag

SEQ ID NO: 252476 - RNA, 22 nt, Human
agcccaggucuggcccagccug

SEQ ID NO: 252477 - RNA, 22 nt, Human
caggcaugaucauaggaguuua

SEQ ID NO: 252478 - RNA, 23 nt, Human
aaguaacagggauaauagcaguu

SEQ ID NO: 252479 - RNA, 22 nt, Human
cuggaggaauaaucuccuaccc

SEQ ID NO: 252480 - RNA, 22 nt, Human
cuucugggagagcuuuugcuuc

SEQ ID NO: 252481 - RNA, 20 nt, Human
gcccaagcgccggccgcaga

SEQ ID NO: 252482 - RNA, 22 nt, Human
uuucaagucauucuauaauauc

SEQ ID NO: 252483 - RNA, 22 nt, Human
cagaaguuggagcuuuccauca

SEQ ID NO: 252484 - RNA, 22 nt, Human
ucacaucacaugagugcaagga

SEQ ID NO: 252485 - RNA, 22 nt, Human
gucuucaacaauaacuaccacu

SEQ ID NO: 252486 - RNA, 22 nt, Human
acuuaaaaccagacagcgucau

SEQ ID NO: 252487 - RNA, 22 nt, Human
cuggaacuccuggggagcuggu

SEQ ID NO: 252488 - RNA, 22 nt, Human
gagucuuucugggcuuguucuu

SEQ ID NO: 252489 - RNA, 22 nt, Human
ugcugccaauuucuggucuuga

SEQ ID NO: 252490 - RNA, 22 nt, Human
caggucuggcaucagcugugug

SEQ ID NO: 252491 - RNA, 22 nt, Human
uuuuugcugauaagcagaauuc

SEQ ID NO: 252492 - RNA, 22 nt, Human
ucguccugugcaccugccugca

SEQ ID NO: 252493 - RNA, 22 nt, Human
gacaggccaggggcugaggugg

SEQ ID NO: 252494 - RNA, 21 nt, Human
ccagaagcugcuugcaggcua

SEQ ID NO: 252495 - RNA, 22 nt, Human
uuggauacagaugaaaggaagg

SEQ ID NO: 252496 - RNA, 20 nt, Human
agggcugagaagggacuagc

SEQ ID NO: 252497 - RNA, 19 nt, Human
agacacacuugauaugugu

SEQ ID NO: 252498 - RNA, 22 nt, Human
ucacagaaaaguggagagccua

SEQ ID NO: 252499 - RNA, 20 nt, Human
ucuguacacucaucuucugc

SEQ ID NO: 252500 - RNA, 22 nt, Human
aggcaggggagcuggaagggua

SEQ ID NO: 252501 - RNA, 22 nt, Human
uuugaaauguaucaguauaggu

SEQ ID NO: 252502 - RNA, 22 nt, Human
ugcugggcugcacccccagagu

SEQ ID NO: 252503 - RNA, 22 nt, Human
ugcacaggaggcuguggagaag

SEQ ID NO: 252504 - RNA, 21 nt, Human
ggacuuggaugguggcaguag

SEQ ID NO: 252505 - RNA, 22 nt, Human
uggucucccagagcagggacgc

SEQ ID NO: 252506 - RNA, 22 nt, Human
cugagccauaagggaggcuggg

SEQ ID NO: 252507 - RNA, 22 nt, Human
cuuaaauuuucaucuacaagaa

SEQ ID NO: 252508 - RNA, 22 nt, Human
ccaggaagcauaauguaguggg

SEQ ID NO: 252509 - RNA, 22 nt, Human
gcucaggcaggagugcaguggc

SEQ ID NO: 252510 - RNA, 22 nt, Human
guccagucucuuuccaagccca

SEQ ID NO: 252511 - RNA, 17 nt, Human
ggcaguggaggaagaga

SEQ ID NO: 252512 - RNA, 22 nt, Human
cuggcugcgcuaguccagaaga

SEQ ID NO: 252513 - RNA, 18 nt, Human
ugaagacaugagguuagu

SEQ ID NO: 252514 - RNA, 22 nt, Human
uucugcauuuaaaauauuacua

SEQ ID NO: 252515 - RNA, 22 nt, Human
gcugggcuucacagagccuuua

SEQ ID NO: 252516 - RNA, 22 nt, Human
gccaggcuaagaaaggugugau

SEQ ID NO: 252517 - RNA, 22 nt, Human
uuaauguuuuaaguuauagaga

SEQ ID NO: 252518 - RNA, 22 nt, Human
aaaguuuaggcuuugaaaccag

SEQ ID NO: 252519 - RNA, 22 nt, Human
ucuaaacuucacuuuaagugcu

SEQ ID NO: 252520 - RNA, 22 nt, Human
uuccuggugaccucacugguag

SEQ ID NO: 252521 - RNA, 22 nt, Human
uuucucuggccucaguuuaaca

SEQ ID NO: 252522 - RNA, 19 nt, Human
ugaggcacaugauaagaac

SEQ ID NO: 252523 - RNA, 22 nt, Human
uacagagacuuuauggcacaaa

SEQ ID NO: 252524 - RNA, 22 nt, Human
gagacacagagaggcuguguga

SEQ ID NO: 252525 - RNA, 22 nt, Human
aguaucaaucacccuuugaagu

SEQ ID NO: 252526 - RNA, 22 nt, Human
cacaagcugggcaaguguauau

SEQ ID NO: 252527 - RNA, 22 nt, Human
aggaugccuucauugcauggcc

SEQ ID NO: 252528 - RNA, 22 nt, Human
ccuuccagaguucagucugccc

SEQ ID NO: 252529 - RNA, 21 nt, Human
uuugaaagcuacaucuauagc

SEQ ID NO: 252530 - RNA, 21 nt, Human
cauuuacaugacagauugguu

SEQ ID NO: 252531 - RNA, 22 nt, Human
aacaggaccuuccaauccauca

SEQ ID NO: 252532 - RNA, 22 nt, Human
aaagcugcugccaaucaggcuu

SEQ ID NO: 252533 - RNA, 22 nt, Human
uccaggcuugagaccaggcucu

SEQ ID NO: 252534 - RNA, 22 nt, Human
uccaggccgcaggggcagcccc

SEQ ID NO: 252535 - RNA, 22 nt, Human
uuagcauuucauuucaagagga

SEQ ID NO: 252536 - RNA, 23 nt, Human
ugugcacaucugacgggugaagg

SEQ ID NO: 252537 - RNA, 22 nt, Human
uuuuauugguaaugauaaaagu

SEQ ID NO: 252538 - RNA, 22 nt, Human
aaucucuuuggcucaaggaucc

SEQ ID NO: 252539 - RNA, 23 nt, Human
aaaggcacagcauugucuagcag

SEQ ID NO: 252540 - RNA, 22 nt, Human
cacaaucucaacugccuuuuag

SEQ ID NO: 252541 - RNA, 22 nt, Human
gagguggugguggaggcauagc

SEQ ID NO: 252542 - RNA, 22 nt, Human
ccagggcaugggaagaacugaa

SEQ ID NO: 252543 - RNA, 22 nt, Human
agguugaaauagguuaucuaag

SEQ ID NO: 252544 - RNA, 20 nt, Human
ggccuuagggagggcuguaa

SEQ ID NO: 252545 - RNA, 22 nt, Human
agcugaaacccaggccucagcu

SEQ ID NO: 252546 - RNA, 21 nt, Human
acauuauaauucauauuccac

SEQ ID NO: 252547 - RNA, 22 nt, Human
cugggaggauucauugagguga

SEQ ID NO: 252548 - RNA, 23 nt, Human
agcaggaaaccgagggugauguu

SEQ ID NO: 252549 - RNA, 22 nt, Human
aggcagcuggaggcagagacua

SEQ ID NO: 252550 - RNA, 22 nt, Human
uccuggguggcucugcccggcu

SEQ ID NO: 252551 - RNA, 22 nt, Human
acaaggagagcacacaugggga

SEQ ID NO: 252552 - RNA, 22 nt, Human
uacaucuauacugaucuacauu

SEQ ID NO: 252553 - RNA, 22 nt, Human
guuuacaacaucuuguccuuca

SEQ ID NO: 252554 - RNA, 22 nt, Human
uggcccugcccucuucaucuuu

SEQ ID NO: 252555 - RNA, 17 nt, Human
uagauuaaacacggcca

SEQ ID NO: 252556 - RNA, 22 nt, Human
gaaaaccaccucccaucaagca

SEQ ID NO: 252557 - RNA, 18 nt, Human
ggcucaggcuauccuaac

SEQ ID NO: 252558 - RNA, 21 nt, Human
aggagaccggcuuguuugugc

SEQ ID NO: 252559 - RNA, 19 nt, Human
uagaaagccagaaaacaga

SEQ ID NO: 252560 - RNA, 22 nt, Human
uacuguauaugcuuguaucuga

SEQ ID NO: 252561 - RNA, 22 nt, Human
ucaugcaguuucuuaucugcca

SEQ ID NO: 252562 - RNA, 22 nt, Human
gagcccugacacugagggaguu

SEQ ID NO: 252563 - RNA, 22 nt, Human
ucugcagguaagcguucuugga

SEQ ID NO: 252564 - RNA, 22 nt, Human
ucacacauucuagguauguuga

SEQ ID NO: 252565 - RNA, 22 nt, Human
gcugagggucuguucauguugc

SEQ ID NO: 252566 - RNA, 22 nt, Human
uuugcuuucccuuguagaaagu

SEQ ID NO: 252567 - RNA, 22 nt, Human
gaauuguacgcuuuacauaggu

SEQ ID NO: 252568 - RNA, 22 nt, Human
gacaccaggucuguuguccucc

SEQ ID NO: 252569 - RNA, 22 nt, Human
acagaaauauagaagguaggaa

SEQ ID NO: 252570 - RNA, 20 nt, Human
ggcugcugguuuggcucugu

SEQ ID NO: 252571 - RNA, 22 nt, Human
cccuccugugccugaggccagc

SEQ ID NO: 252572 - RNA, 22 nt, Human
cacugagcaugagugggcugug

SEQ ID NO: 252573 - RNA, 22 nt, Human
uguuuacuagccaacauggaga

SEQ ID NO: 252574 - RNA, 22 nt, Human
caggcuccagcuuccugcucag

SEQ ID NO: 252575 - RNA, 18 nt, Human
gagacacaagggccugga

SEQ ID NO: 252576 - RNA, 22 nt, Human
uaccaggaguuacaggcagcag

SEQ ID NO: 252577 - RNA, 22 nt, Human
ugccaggcccagcagggcggcc

SEQ ID NO: 252578 - RNA, 22 nt, Human
ucugagagcuguagaagccuau

SEQ ID NO: 252579 - RNA, 22 nt, Human
acauggcuaaauuagcuuuacu

SEQ ID NO: 252580 - RNA, 22 nt, Human
uacuucugaaugugaguuuguu

SEQ ID NO: 252581 - RNA, 22 nt, Human
aaagcacagagcucccacagga

SEQ ID NO: 252582 - RNA, 22 nt, Human
auucuauagacagaaggucaau

SEQ ID NO: 252583 - RNA, 22 nt, Human
agcaugcuauauugauuguagu

SEQ ID NO: 252584 - RNA, 21 nt, Human
cugaggcaugcaggccugggc

SEQ ID NO: 252585 - RNA, 19 nt, Human
ccugggaggcggagguugc

SEQ ID NO: 252586 - RNA, 22 nt, Human
ucaugucagcuguugaugugca

SEQ ID NO: 252587 - RNA, 22 nt, Human
ccucaggcaagucacuuaacau

SEQ ID NO: 252588 - RNA, 22 nt, Human
uuacagugugcaaucccagaau

SEQ ID NO: 252589 - RNA, 22 nt, Human
cagguucuauacugaauaauuu

SEQ ID NO: 252590 - RNA, 22 nt, Human
ccauggcagccuggccuggcuu

SEQ ID NO: 252591 - RNA, 22 nt, Human
gcagagcugagcggcugcccgg

SEQ ID NO: 252592 - RNA, 22 nt, Human
aggucaccauggcaugcuccac

SEQ ID NO: 252593 - RNA, 22 nt, Human
uagaacaugcucauguauaaau

SEQ ID NO: 252594 - RNA, 22 nt, Human
gaggaggcacuugagcagaugu

SEQ ID NO: 252595 - RNA, 22 nt, Human
aguggcuguuccaggugaggac

SEQ ID NO: 252596 - RNA, 17 nt, Human
gucagcagcuugcuugu

SEQ ID NO: 252597 - RNA, 22 nt, Human
gaagcuggagaaugggucuagg

SEQ ID NO: 252598 - RNA, 22 nt, Human
uucuauguaguagcagagccaa

SEQ ID NO: 252599 - RNA, 22 nt, Human
gucucaguuuuccaaacuguca

SEQ ID NO: 252600 - RNA, 22 nt, Human
uucugaaaauugggucauacuu

SEQ ID NO: 252601 - RNA, 22 nt, Human
cuuguauucuuguaccuuucaa

SEQ ID NO: 252602 - RNA, 22 nt, Human
uagaaucaagcaguagagcaga

SEQ ID NO: 252603 - RNA, 22 nt, Human
ugcggaaggcagcgcagggugg

SEQ ID NO: 252604 - RNA, 22 nt, Human
gacccaggcccaaggcugccag

SEQ ID NO: 252605 - RNA, 22 nt, Human
ucauuuguugcuguuaccugag

SEQ ID NO: 252606 - RNA, 22 nt, Human
gcagugcaggacaaaucagugc

SEQ ID NO: 252607 - RNA, 22 nt, Human
ccauccugaauggucucagcca

SEQ ID NO: 252608 - RNA, 22 nt, Human
cuccaguggcacaaaugggugc

SEQ ID NO: 252609 - RNA, 22 nt, Human
uagacacaaaucucagugacac

SEQ ID NO: 252610 - RNA, 22 nt, Human
agcauggcuuuggaggauagca

SEQ ID NO: 252611 - RNA, 22 nt, Human
auggcagcauaguggcaaguua

SEQ ID NO: 252612 - RNA, 22 nt, Human
uucuuuggcuuacgucuggccu

SEQ ID NO: 252613 - RNA, 22 nt, Human
uugcuauuuugagagucauagu

SEQ ID NO: 252614 - RNA, 22 nt, Human
agcugggacucaacugucuggg

SEQ ID NO: 252615 - RNA, 22 nt, Human
ugauuucucuuggcaauauguu

SEQ ID NO: 252616 - RNA, 22 nt, Human
gcccccagcucucaagcucaaa

SEQ ID NO: 252617 - RNA, 22 nt, Human
aacaaauguguggcaguguggg

SEQ ID NO: 252618 - RNA, 22 nt, Human
uuaugauuugccacagauuggu

SEQ ID NO: 252619 - RNA, 22 nt, Human
guuuccuggagguuauuuuuga

SEQ ID NO: 252620 - RNA, 22 nt, Human
uccaggcccugggaugggagca

SEQ ID NO: 252621 - RNA, 22 nt, Human
uggcgugcccuccagacuuggc

SEQ ID NO: 252622 - RNA, 22 nt, Human
gcugcagagggucuuagagagg

SEQ ID NO: 252623 - RNA, 22 nt, Human
gcucagagguuguucuuggguu

SEQ ID NO: 252624 - RNA, 22 nt, Human
cagcuuuauugagguauaauug

SEQ ID NO: 252625 - RNA, 22 nt, Human
uacaguuuacaugagaggaagc

SEQ ID NO: 252626 - RNA, 22 nt, Human
cccugcagaaccacagacaaac

SEQ ID NO: 252627 - RNA, 22 nt, Human
uccuuucucccagguuaguugu

SEQ ID NO: 252628 - RNA, 22 nt, Human
ccugcagaggucaggccagaaa

SEQ ID NO: 252629 - RNA, 22 nt, Human
augguuuacuucauccaaucua

SEQ ID NO: 252630 - RNA, 22 nt, Human
uccauugugauuauauacaaaa

SEQ ID NO: 252631 - RNA, 23 nt, Human
uggcugagcccacuaucuuggcc

SEQ ID NO: 252632 - RNA, 22 nt, Human
gggcagguguuuccaaggugag

SEQ ID NO: 252633 - RNA, 22 nt, Human
gaccucagcuguggggaugcug

SEQ ID NO: 252634 - RNA, 22 nt, Human
ggagcaguuguugagcaagcca

SEQ ID NO: 252635 - RNA, 22 nt, Human
gcagggcauagaggcacggagg

SEQ ID NO: 252636 - RNA, 22 nt, Human
ugagagagcgccugggaucauu

SEQ ID NO: 252637 - RNA, 22 nt, Human
aucgaauaauugcauucuauaa

SEQ ID NO: 252638 - RNA, 22 nt, Human
aacauucuuuagcucuuccugc

SEQ ID NO: 252639 - RNA, 22 nt, Human
auugagaucugcaucauaagcu

SEQ ID NO: 252640 - RNA, 23 nt, Human
acacauauauucagauacagaug

SEQ ID NO: 252641 - RNA, 22 nt, Human
gcuucccacagcuggacugggg

SEQ ID NO: 252642 - RNA, 22 nt, Human
aaagugcaguccaugaaauuaa

SEQ ID NO: 252643 - RNA, 22 nt, Human
cuguggaaucaucaggucuuac

SEQ ID NO: 252644 - RNA, 22 nt, Human
gaggugggagggcagucccuaa

SEQ ID NO: 252645 - RNA, 22 nt, Human
gcucagagcacucagacucagc

SEQ ID NO: 252646 - RNA, 22 nt, Human
ggcugccucagauuugcugacu

SEQ ID NO: 252647 - RNA, 22 nt, Human
caaugaaaauuuaaguugcagc

SEQ ID NO: 252648 - RNA, 22 nt, Human
uuuggacuuagccugcagaauu

SEQ ID NO: 252649 - RNA, 22 nt, Human
ucuuuggaagcuuucagagaag

SEQ ID NO: 252650 - RNA, 22 nt, Human
auggcagagggauugaacagcu

SEQ ID NO: 252651 - RNA, 22 nt, Human
gggaucugauuuaggaugggag

SEQ ID NO: 252652 - RNA, 22 nt, Human
augcugaaccuuaacuuggagc

SEQ ID NO: 252653 - RNA, 22 nt, Human
acccaggaugauaauguucaca

SEQ ID NO: 252654 - RNA, 22 nt, Human
cacucccucuaguugcauucug

SEQ ID NO: 252655 - RNA, 22 nt, Human
ucagagaguccuggucauuugc

SEQ ID NO: 252656 - RNA, 22 nt, Human
cauuucaguguuauucuaauuu

SEQ ID NO: 252657 - RNA, 22 nt, Human
gagaaucuacaggaaaccgaag

SEQ ID NO: 252658 - RNA, 22 nt, Human
cugguacauaguaagaacacaa

SEQ ID NO: 252659 - RNA, 22 nt, Human
aggcugggcuccgcccaacucc

SEQ ID NO: 252660 - RNA, 22 nt, Human
uaaauguauaggcacuaaaccu

SEQ ID NO: 252661 - RNA, 22 nt, Human
gcugagaaucaagauggagagg

SEQ ID NO: 252662 - RNA, 22 nt, Human
aaaguguugggauuauaggcgu

SEQ ID NO: 252663 - RNA, 22 nt, Human
uccaugcagaggagcugguggc

SEQ ID NO: 252664 - RNA, 22 nt, Human
aggaaggaagagacaccauuug

SEQ ID NO: 252665 - RNA, 22 nt, Human
cugcaggacugaaagaugaggu

SEQ ID NO: 252666 - RNA, 22 nt, Human
auucaguuucauggcacagcua

SEQ ID NO: 252667 - RNA, 22 nt, Human
uugcuguuacaauuauuuaccc

SEQ ID NO: 252668 - RNA, 22 nt, Human
ggcucuucuguggcagccaagg

SEQ ID NO: 252669 - RNA, 22 nt, Human
uuucagaaauuauauuagaugc

SEQ ID NO: 252670 - RNA, 22 nt, Human
aagaggccacagcugacagcac

SEQ ID NO: 252671 - RNA, 22 nt, Human
gaaauauuucucuugagccccu

SEQ ID NO: 252672 - RNA, 21 nt, Human
ccauucuuagucaagugucuc

SEQ ID NO: 252673 - RNA, 22 nt, Human
aaugggaagucacuacuguuac

SEQ ID NO: 252674 - RNA, 22 nt, Human
cucaggcuaagaaggccaagug

SEQ ID NO: 252675 - RNA, 23 nt, Human
auuuaaugcugaguugaauguua

SEQ ID NO: 252676 - RNA, 22 nt, Human
uuaaauuaggacucuaguucug

SEQ ID NO: 252677 - RNA, 22 nt, Human
ucagugcuaaaagagcuggugu

SEQ ID NO: 252678 - RNA, 22 nt, Human
ucccacccauccugcaucucuu

SEQ ID NO: 252679 - RNA, 22 nt, Human
ucccagggacugggcuaggcuu

SEQ ID NO: 252680 - RNA, 22 nt, Human
uagcauuucacugaucuucacu

SEQ ID NO: 252681 - RNA, 22 nt, Human
auuucucaucuuugugaauggu

SEQ ID NO: 252682 - RNA, 22 nt, Human
uuagacauguuugcuaaaauga

SEQ ID NO: 252683 - RNA, 17 nt, Human
auuuagcaaguagacag

SEQ ID NO: 252684 - RNA, 22 nt, Human
aauguuuuaaaagagauugaga

SEQ ID NO: 252685 - RNA, 22 nt, Human
gaaggcuggcuuucugagagca

SEQ ID NO: 252686 - RNA, 22 nt, Human
ucuguuauauguuuuuucuaaa

SEQ ID NO: 252687 - RNA, 22 nt, Human
auuagcaaucacgcagucauuu

SEQ ID NO: 252688 - RNA, 22 nt, Human
cugcccucuagaggaggacuga

SEQ ID NO: 252689 - RNA, 22 nt, Human
uagagucagagaaucauuacag

SEQ ID NO: 252690 - RNA, 22 nt, Human
caaggcuagcaagcaguaguca

SEQ ID NO: 252691 - RNA, 20 nt, Human
ucuuggcugugugaggacac

SEQ ID NO: 252692 - RNA, 22 nt, Human
acauguuuaaguuuaaugaaaa

SEQ ID NO: 252693 - RNA, 22 nt, Human
uggcucagccuggcccuuucau

SEQ ID NO: 252694 - RNA, 22 nt, Human
uuaguuaguggggcugucaguc

SEQ ID NO: 252695 - RNA, 22 nt, Human
cuugggcccuccccuugugaau

SEQ ID NO: 252696 - RNA, 22 nt, Human
cagcaggcuggacuucaguccc

SEQ ID NO: 252697 - RNA, 22 nt, Human
caguuaaagcugcaugugucag

SEQ ID NO: 252698 - RNA, 22 nt, Human
ccugcagggaaucgaggcagaa

SEQ ID NO: 252699 - RNA, 19 nt, Human
caucuuuggucaccuaguc

SEQ ID NO: 252700 - RNA, 22 nt, Human
uggggccagagcugcagggagc

SEQ ID NO: 252701 - RNA, 22 nt, Human
gcuggcucuacauuugagguca

SEQ ID NO: 252702 - RNA, 22 nt, Human
ugccauauuauugagcauauua

SEQ ID NO: 252703 - RNA, 22 nt, Human
agaggggaguccuaaucugauu

SEQ ID NO: 252704 - RNA, 22 nt, Human
ucagaagcugggucucagaagc

SEQ ID NO: 252705 - RNA, 22 nt, Human
ccaggguggggcaggcccacug

SEQ ID NO: 252706 - RNA, 20 nt, Human
ugucagcaauuaggagaaaa

SEQ ID NO: 252707 - RNA, 22 nt, Human
gaaggcuuccuggaggaggugg

SEQ ID NO: 252708 - RNA, 22 nt, Human
aggcacagccucccccaacucc

SEQ ID NO: 252709 - RNA, 22 nt, Human
acauaacaaucauaggacauag

SEQ ID NO: 252710 - RNA, 22 nt, Human
cagagacaggaucucgaagacu

SEQ ID NO: 252711 - RNA, 22 nt, Human
agaaggggcccaaggaugucag

SEQ ID NO: 252712 - RNA, 22 nt, Human
cugccugcugccuguggagggu

SEQ ID NO: 252713 - RNA, 22 nt, Human
uggagggcaugcuguccauggg

SEQ ID NO: 252714 - RNA, 22 nt, Human
aaacuucauggauaauauaaag

SEQ ID NO: 252715 - RNA, 22 nt, Human
ucauaaaaguacucauguucau

SEQ ID NO: 252716 - RNA, 22 nt, Human
uuccugguuuauggaaagcaug

SEQ ID NO: 252717 - RNA, 22 nt, Human
ugcuuuauaucucucuucuuag

SEQ ID NO: 252718 - RNA, 22 nt, Human
aaacauuguuaugauaaauuac

SEQ ID NO: 252719 - RNA, 22 nt, Human
aucuuugaugacuaaugcuuug

SEQ ID NO: 252720 - RNA, 23 nt, Human
cuguggcugaguccuguuggagu

SEQ ID NO: 252721 - RNA, 22 nt, Human
aacagaauugcugcugccaaug

SEQ ID NO: 252722 - RNA, 22 nt, Human
gcaggagccagggauuccagga

SEQ ID NO: 252723 - RNA, 17 nt, Human
ggcagccucaggcguuu

SEQ ID NO: 252724 - RNA, 22 nt, Human
uauauuugugugugauuuauga

SEQ ID NO: 252725 - RNA, 22 nt, Human
ccugcuggcgcuugucugggag

SEQ ID NO: 252726 - RNA, 22 nt, Human
aucaagaauugggagcuauuga

SEQ ID NO: 252727 - RNA, 22 nt, Human
gcuccaggcugcucugucccau

SEQ ID NO: 252728 - RNA, 22 nt, Human
auguaguugaagugcuauaaag

SEQ ID NO: 252729 - RNA, 22 nt, Human
gcuggcaggauagaagucuaau

SEQ ID NO: 252730 - RNA, 22 nt, Human
ugggagcagcauugccaugugc

SEQ ID NO: 252731 - RNA, 22 nt, Human
gccuggaguuguggugaagcca

SEQ ID NO: 252732 - RNA, 22 nt, Human
uggcuucugagcauugaaacgu

SEQ ID NO: 252733 - RNA, 20 nt, Human
cacucugagggaguccaugu

SEQ ID NO: 252734 - RNA, 20 nt, Human
agugaauagagacauugccc

SEQ ID NO: 252735 - RNA, 22 nt, Human
uucaaaccuaucuaagaaauag

SEQ ID NO: 252736 - RNA, 22 nt, Human
cuggauguccuuccccugaagc

SEQ ID NO: 252737 - RNA, 22 nt, Human
aauaucacaggaggagaccaag

SEQ ID NO: 252738 - RNA, 22 nt, Human
ucugagcuucugcauuuccaac

SEQ ID NO: 252739 - RNA, 18 nt, Human
aaauuagauggaccugug

SEQ ID NO: 252740 - RNA, 22 nt, Human
ggccagguggcuguccuggcgu

SEQ ID NO: 252741 - RNA, 22 nt, Human
agaagaguaguaacagaaauua

SEQ ID NO: 252742 - RNA, 22 nt, Human
cagugcuguuguaagcucauug

SEQ ID NO: 252743 - RNA, 22 nt, Human
aguuuaaaucauguuuuguaac

SEQ ID NO: 252744 - RNA, 18 nt, Human
ccucccucauuuucccag

SEQ ID NO: 252745 - RNA, 22 nt, Human
acuuuggaaauugucuauaaga

SEQ ID NO: 252746 - RNA, 22 nt, Human
aaauaugugaucagugaauaaa

SEQ ID NO: 252747 - RNA, 22 nt, Human
uuccugagaaauuuguaccugg

SEQ ID NO: 252748 - RNA, 22 nt, Human
ucaggagcagggggaagcucug

SEQ ID NO: 252749 - RNA, 22 nt, Human
cccaggacucugacacccccaa

SEQ ID NO: 252750 - RNA, 20 nt, Human
gcucaggugacagucaggag

SEQ ID NO: 252751 - RNA, 22 nt, Human
ggguccagacacuccagaggaa

SEQ ID NO: 252752 - RNA, 22 nt, Human
gcucugggaacugacugccuuc

SEQ ID NO: 252753 - RNA, 22 nt, Human
uugaagauuauucuauuaaaag

SEQ ID NO: 252754 - RNA, 22 nt, Human
ugagacaguuuuucuauuucca

SEQ ID NO: 252755 - RNA, 22 nt, Human
ggcugcucugccuuccagcugg

SEQ ID NO: 252756 - RNA, 22 nt, Human
augaggcagguggaggcugcca

SEQ ID NO: 252757 - RNA, 22 nt, Human
ucuauuuacagaaagcagaauu

SEQ ID NO: 252758 - RNA, 22 nt, Human
ucccagccuccugacaguuuug

SEQ ID NO: 252759 - RNA, 22 nt, Human
uuaugcuaagugcaacaagcca

SEQ ID NO: 252760 - RNA, 22 nt, Human
gaggcuccagcgacaccuaggc

SEQ ID NO: 252761 - RNA, 22 nt, Human
auucuuaauuccaaagacugag

SEQ ID NO: 252762 - RNA, 22 nt, Human
gcagcucuggggcaggccugag

SEQ ID NO: 252763 - RNA, 22 nt, Human
uuuccagagggugcucagggcg

SEQ ID NO: 252764 - RNA, 20 nt, Human
aggaaggagaaucugagcaa

SEQ ID NO: 252765 - RNA, 22 nt, Human
gagccuggauugaagugggugg

SEQ ID NO: 252766 - RNA, 22 nt, Human
gcagggcugagucaugugugcc

SEQ ID NO: 252767 - RNA, 22 nt, Human
gcugcccauuccacuggauggu

SEQ ID NO: 252768 - RNA, 22 nt, Human
cuccaggagggggauggcugua

SEQ ID NO: 252769 - RNA, 22 nt, Human
ccauucugugucucuccacagc

SEQ ID NO: 252770 - RNA, 22 nt, Human
ugaaauagacacagugcuauac

SEQ ID NO: 252771 - RNA, 20 nt, Human
ggcagggcaucaacagcucu

SEQ ID NO: 252772 - RNA, 22 nt, Human
guuuuacacaccuaugaaagac

SEQ ID NO: 252773 - RNA, 22 nt, Human
ucagaugagugcuuucagcugc

SEQ ID NO: 252774 - RNA, 22 nt, Human
auaauggauucagaaccgucaa

SEQ ID NO: 252775 - RNA, 22 nt, Human
ugcugcuguaucaugccuucau

SEQ ID NO: 252776 - RNA, 22 nt, Human
gcucacagucuggcauagucuc

SEQ ID NO: 252777 - RNA, 22 nt, Human
auuaacaugcagccagacacac

SEQ ID NO: 252778 - RNA, 22 nt, Human
aaauacacguacauguguaaaa

SEQ ID NO: 252779 - RNA, 22 nt, Human
cagucucugugccagauccugg

SEQ ID NO: 252780 - RNA, 20 nt, Human
agggccuguugcaagcguuu

SEQ ID NO: 252781 - RNA, 17 nt, Human
cccagcuggcagugccg

SEQ ID NO: 252782 - RNA, 22 nt, Human
ugguccugagcaccagccugac

SEQ ID NO: 252783 - RNA, 22 nt, Human
uggaauguuuuccuaaaucaga

SEQ ID NO: 252784 - RNA, 22 nt, Human
cucuucuuuaguccagaccauc

SEQ ID NO: 252785 - RNA, 22 nt, Human
gcgacagugcggccaccuucau

SEQ ID NO: 252786 - RNA, 22 nt, Human
gccuggcauauaguaguugugc

SEQ ID NO: 252787 - RNA, 22 nt, Human
agaagcagaaggaagcagggcc

SEQ ID NO: 252788 - RNA, 22 nt, Human
ggcugcccucggggucgcaggc

SEQ ID NO: 252789 - RNA, 22 nt, Human
cuuaauaaaugguagcuguuau

SEQ ID NO: 252790 - RNA, 22 nt, Human
guccucaggaaggcuuucugac

SEQ ID NO: 252791 - RNA, 22 nt, Human
caggcugccgaggcugcagaau

SEQ ID NO: 252792 - RNA, 22 nt, Human
aauuaauucaguuuuuaaggga

SEQ ID NO: 252793 - RNA, 22 nt, Human
uggcccaggaggccagagggca

SEQ ID NO: 252794 - RNA, 22 nt, Human
ucuugagaagcggcugucucag

SEQ ID NO: 252795 - RNA, 22 nt, Human
uaaggguucagaaugcaguggu

SEQ ID NO: 252796 - RNA, 22 nt, Human
guagcaacuguagcccaaauuc

SEQ ID NO: 252797 - RNA, 22 nt, Human
ucaggcuuuucuucccucagug

SEQ ID NO: 252798 - RNA, 22 nt, Human
uagcaagaaaacacaagaauua

SEQ ID NO: 252799 - RNA, 22 nt, Human
uagucaguugggucuaguggca

SEQ ID NO: 252800 - RNA, 22 nt, Human
aaucuauaugcuuuucacauac

SEQ ID NO: 252801 - RNA, 22 nt, Human
auccagugagugcagcuguugu

SEQ ID NO: 252802 - RNA, 22 nt, Human
ucuugaaaggagauuggaggca

SEQ ID NO: 252803 - RNA, 22 nt, Human
cuggccuggcaggggaccucua

SEQ ID NO: 252804 - RNA, 22 nt, Human
ucuuauuuagagaggacuagag

SEQ ID NO: 252805 - RNA, 22 nt, Human
ugcucugggauucagcagccug

SEQ ID NO: 252806 - RNA, 22 nt, Human
aaaaucuugugacuuaggaagg

SEQ ID NO: 252807 - RNA, 22 nt, Human
caacauuucaaggucuuuagga

SEQ ID NO: 252808 - RNA, 19 nt, Human
ucacaggcaucuccccaga

SEQ ID NO: 252809 - RNA, 20 nt, Human
ugucuguaugcagucauaua

SEQ ID NO: 252810 - RNA, 22 nt, Human
caguggagugggacuggucuga

SEQ ID NO: 252811 - RNA, 22 nt, Human
cucagagagguugaacaacuug

SEQ ID NO: 252812 - RNA, 22 nt, Human
caaaaguaccuugugugcuuug

SEQ ID NO: 252813 - RNA, 19 nt, Human
aauggacaggcaauagucu

SEQ ID NO: 252814 - RNA, 22 nt, Human
aaucagaacuccuaccacagag

SEQ ID NO: 252815 - RNA, 22 nt, Human
gggcugagagugacuguucugu

SEQ ID NO: 252816 - RNA, 22 nt, Human
auguacaaucuaucacaagaag

SEQ ID NO: 252817 - RNA, 22 nt, Human
uugauaaaaugauaucuucuuu

SEQ ID NO: 252818 - RNA, 22 nt, Human
gaggcugaguagcuuugugcuc

SEQ ID NO: 252819 - RNA, 22 nt, Human
caggguuucaccauguuagcag

SEQ ID NO: 252820 - RNA, 23 nt, Human
agccacagccagagcuaucucca

SEQ ID NO: 252821 - RNA, 22 nt, Human
caggagaagucucuagggggug

SEQ ID NO: 252822 - RNA, 22 nt, Human
auggucuucucaagcaacacug

SEQ ID NO: 252823 - RNA, 20 nt, Human
agagcagcaguuggugaggu

SEQ ID NO: 252824 - RNA, 22 nt, Human
ugggaccagauaaagggagguc

SEQ ID NO: 252825 - RNA, 22 nt, Human
gacccugaggaugcaccagcag

SEQ ID NO: 252826 - RNA, 22 nt, Human
ugucacaucagggguguugaca

SEQ ID NO: 252827 - RNA, 18 nt, Human
ccuggaggucuucggggu

SEQ ID NO: 252828 - RNA, 22 nt, Human
gauguuaagaaggaauugaagu

SEQ ID NO: 252829 - RNA, 22 nt, Human
uguaggucaaguccauugugcu

SEQ ID NO: 252830 - RNA, 22 nt, Human
cagcauuuagaauuugaagugu

SEQ ID NO: 252831 - RNA, 22 nt, Human
cuggcucaggaaaguugcugcu

SEQ ID NO: 252832 - RNA, 22 nt, Human
cugaggcaggagaauugcugga

SEQ ID NO: 252833 - RNA, 22 nt, Human
agggggcccuugcaggugagcg

SEQ ID NO: 252834 - RNA, 22 nt, Human
uagaggagaacacaaauuauag

SEQ ID NO: 252835 - RNA, 22 nt, Human
uuucagauggagguuuaggaca

SEQ ID NO: 252836 - RNA, 22 nt, Human
aagccaguguggucugcccauu

SEQ ID NO: 252837 - RNA, 22 nt, Human
uauauuguaggugcuauuugaa

SEQ ID NO: 252838 - RNA, 22 nt, Human
gcuggcacugggaaggacugag

SEQ ID NO: 252839 - RNA, 22 nt, Human
aacacugcugcuggguucugug

SEQ ID NO: 252840 - RNA, 22 nt, Human
agcuucucucaggguaucuuuc

SEQ ID NO: 252841 - RNA, 22 nt, Human
cugaaggcuaaaauggacugaa

SEQ ID NO: 252842 - RNA, 22 nt, Human
acagaauagucagcuguaggcc

SEQ ID NO: 252843 - RNA, 22 nt, Human
auauuauaaguuauuucaaguu

SEQ ID NO: 252844 - RNA, 22 nt, Human
ucugcccacugcucugcugccc

SEQ ID NO: 252845 - RNA, 22 nt, Human
uuuuaacacucagcacuaucuc

SEQ ID NO: 252846 - RNA, 22 nt, Human
ugggcuccggcggccucaggcu

SEQ ID NO: 252847 - RNA, 23 nt, Human
aaggccagagagaggcuaguguc

SEQ ID NO: 252848 - RNA, 22 nt, Human
uucccucucuccagggcugccu

SEQ ID NO: 252849 - RNA, 22 nt, Human
ggaaacacaugaucagacaucu

SEQ ID NO: 252850 - RNA, 22 nt, Human
cuuuacagauaggaacuacuca

SEQ ID NO: 252851 - RNA, 22 nt, Human
cugggcgugucuuccagcuggc

SEQ ID NO: 252852 - RNA, 22 nt, Human
agggccagagucuguguagaua

SEQ ID NO: 252853 - RNA, 22 nt, Human
cagaagcaaguagugauucuuu

SEQ ID NO: 252854 - RNA, 22 nt, Human
acaggcacucucauuaaaauag

SEQ ID NO: 252855 - RNA, 22 nt, Human
augaggagcuccuugaaaugag

SEQ ID NO: 252856 - RNA, 18 nt, Human
ucucaaucgcugcagucu

SEQ ID NO: 252857 - RNA, 22 nt, Human
ugucccaguuuaucugggacug

SEQ ID NO: 252858 - RNA, 22 nt, Human
ugccaggcuguccugggccugg

SEQ ID NO: 252859 - RNA, 22 nt, Human
caggccagaggcuguuguugcg

SEQ ID NO: 252860 - RNA, 18 nt, Human
gcuuugcacucauguugu

SEQ ID NO: 252861 - RNA, 22 nt, Human
acucagaggaccaaaaggaaag

SEQ ID NO: 252862 - RNA, 22 nt, Human
gccuggagaauuaaaaggaagg

SEQ ID NO: 252863 - RNA, 22 nt, Human
uuaaaggcugaucuuaauauua

SEQ ID NO: 252864 - RNA, 20 nt, Human
caaaugaagcuguuggccuc

SEQ ID NO: 252865 - RNA, 22 nt, Human
caaauguuuuuauucuacaaca

SEQ ID NO: 252866 - RNA, 22 nt, Human
acacgguggccagcaguaggug

SEQ ID NO: 252867 - RNA, 22 nt, Human
gugcugucguggaacugggcug

SEQ ID NO: 252868 - RNA, 22 nt, Human
cuccuguguucaagcgauucuc

SEQ ID NO: 252869 - RNA, 22 nt, Human
caacauucaaccaacauuuaug

SEQ ID NO: 252870 - RNA, 22 nt, Human
gcugcucugaaaaugacuguug

SEQ ID NO: 252871 - RNA, 22 nt, Human
ggcagcuggggcagugcccugu

SEQ ID NO: 252872 - RNA, 20 nt, Human
ggcuuucugugauccucagu

SEQ ID NO: 252873 - RNA, 22 nt, Human
ggcaggaauaaauuauggacuu

SEQ ID NO: 252874 - RNA, 20 nt, Human
acucaaaucaccugccucaa

SEQ ID NO: 252875 - RNA, 22 nt, Human
ucuuuuucugcacacguguccc

SEQ ID NO: 252876 - RNA, 22 nt, Human
auaaagaggauguauuuacagc

SEQ ID NO: 252877 - RNA, 22 nt, Human
gugagcaaagguuaaacauuua

SEQ ID NO: 252878 - RNA, 22 nt, Human
acaggcagcacuaaucucuggu

SEQ ID NO: 252879 - RNA, 22 nt, Human
uugagacacaaggcacaguaag

SEQ ID NO: 252880 - RNA, 22 nt, Human
agcaccuggauuugauagucag

SEQ ID NO: 252881 - RNA, 22 nt, Human
gguggcagagaggagguaguuu

SEQ ID NO: 252882 - RNA, 22 nt, Human
ccuccccucagacagagacugg

SEQ ID NO: 252883 - RNA, 22 nt, Human
uucucaggugaggcugaggcug

SEQ ID NO: 252884 - RNA, 22 nt, Human
augcugagcagagcugacaugc

SEQ ID NO: 252885 - RNA, 22 nt, Human
auguacaguggaaacuaacaaa

SEQ ID NO: 252886 - RNA, 22 nt, Human
uccaagaguaagaggacucuuu

SEQ ID NO: 252887 - RNA, 22 nt, Human
gcuuggccagcagccgggaugc

SEQ ID NO: 252888 - RNA, 22 nt, Human
ggagggaaccuuggcuggauug

SEQ ID NO: 252889 - RNA, 20 nt, Human
gcaggcuccgggcuugggag

SEQ ID NO: 252890 - RNA, 22 nt, Human
ugccuggcaccccagucugcac

SEQ ID NO: 252891 - RNA, 22 nt, Human
gaaggugcaguggcuggaggcu

SEQ ID NO: 252892 - RNA, 23 nt, Human
aggggcagcaaguuuugguguua

SEQ ID NO: 252893 - RNA, 22 nt, Human
gggcuucuugagcugccggccc

SEQ ID NO: 252894 - RNA, 22 nt, Human
gaggccugcuuuggcacucugg

SEQ ID NO: 252895 - RNA, 22 nt, Human
auuuccauagagcgucucacag

SEQ ID NO: 252896 - RNA, 22 nt, Human
gcucagcugagcgaaggacaug

SEQ ID NO: 252897 - RNA, 22 nt, Human
gaaauauacauugcaggaagag

SEQ ID NO: 252898 - RNA, 22 nt, Human
gccaggacugagaaugggagca

SEQ ID NO: 252899 - RNA, 22 nt, Human
gguacagggcuuccuggacaag

SEQ ID NO: 252900 - RNA, 22 nt, Human
uuuaucugucauuucccauauc

SEQ ID NO: 252901 - RNA, 22 nt, Human
ugcaauuagcauuguauucuua

SEQ ID NO: 252902 - RNA, 22 nt, Human
auugaaaaaugacuauugcuua

SEQ ID NO: 252903 - RNA, 22 nt, Human
ccaggagggaggaguuccugag

SEQ ID NO: 252904 - RNA, 22 nt, Human
gccugggauucccagaggggca

SEQ ID NO: 252905 - RNA, 22 nt, Human
cccugccccaggcggcuucacu

SEQ ID NO: 252906 - RNA, 23 nt, Human
ugucuggcucauggugggucuca

SEQ ID NO: 252907 - RNA, 22 nt, Human
cugagcagcaauugcuggccca

SEQ ID NO: 252908 - RNA, 22 nt, Human
ugggcagguuguuauuugacau

SEQ ID NO: 252909 - RNA, 17 nt, Human
cugcuuggccucugggg

SEQ ID NO: 252910 - RNA, 22 nt, Human
agaagaauuucucucaugauuu

SEQ ID NO: 252911 - RNA, 22 nt, Human
uaaggcuacugucagcuucagg

SEQ ID NO: 252912 - RNA, 22 nt, Human
accugggaagaucuuugaagcu

SEQ ID NO: 252913 - RNA, 22 nt, Human
ugagaagcccacacucuuuccu

SEQ ID NO: 252914 - RNA, 22 nt, Human
ggacagcauucuacuguaggca

SEQ ID NO: 252915 - RNA, 22 nt, Human
ugcagaagaccuuccagggcug

SEQ ID NO: 252916 - RNA, 22 nt, Human
aaacagagggccacugaggcuc

SEQ ID NO: 252917 - RNA, 22 nt, Human
gauguguccuuuucuccaucca

SEQ ID NO: 252918 - RNA, 22 nt, Human
augcagagacagauguggcaug

SEQ ID NO: 252919 - RNA, 22 nt, Human
agaggagugggaagcagugcaa

SEQ ID NO: 252920 - RNA, 22 nt, Human
agacagaccauggcuauucaga

SEQ ID NO: 252921 - RNA, 22 nt, Human
uucucacaggcuggaaugauga

SEQ ID NO: 252922 - RNA, 22 nt, Human
aacucaguguguuucuuaguau

SEQ ID NO: 252923 - RNA, 22 nt, Human
acaauguaggauauguacuugu

SEQ ID NO: 252924 - RNA, 22 nt, Human
accccagguccagguuacagag

SEQ ID NO: 252925 - RNA, 22 nt, Human
uccagcccugcccauucucucg

SEQ ID NO: 252926 - RNA, 22 nt, Human
augcagggcagaguacguuagc

SEQ ID NO: 252927 - RNA, 22 nt, Human
ggaccaggacuggugguaucuc

SEQ ID NO: 252928 - RNA, 22 nt, Human
uucuuuuacauuaagauuucag

SEQ ID NO: 252929 - RNA, 22 nt, Human
ccugcuguagggccccuggggc

SEQ ID NO: 252930 - RNA, 22 nt, Human
uggacagguugaguaggaggag

SEQ ID NO: 252931 - RNA, 22 nt, Human
uugcauuccaugguuuuccuuc

SEQ ID NO: 252932 - RNA, 22 nt, Human
uaaaaggauuagcaggaugggc

SEQ ID NO: 252933 - RNA, 22 nt, Human
aaacuggugucacugagggcug

SEQ ID NO: 252934 - RNA, 22 nt, Human
uuuguucauuuugagcucauca

SEQ ID NO: 252935 - RNA, 22 nt, Human
cuuccugggcaauguucugcuu

SEQ ID NO: 252936 - RNA, 22 nt, Human
uggcaguuauuaaucaagucuu

SEQ ID NO: 252937 - RNA, 22 nt, Human
uaacaacugcugagguauuuga

SEQ ID NO: 252938 - RNA, 22 nt, Human
uccugggaggcugugccuggcu

SEQ ID NO: 252939 - RNA, 22 nt, Human
uaaugcugccaagccaugcaga

SEQ ID NO: 252940 - RNA, 22 nt, Human
gcucucucuuggggauucagca

SEQ ID NO: 252941 - RNA, 22 nt, Human
aggagugagcuuuggggucaga

SEQ ID NO: 252942 - RNA, 22 nt, Human
ucuggcuggcagugauggugug

SEQ ID NO: 252943 - RNA, 22 nt, Human
cuucuucauguauugauagucu

SEQ ID NO: 252944 - RNA, 22 nt, Human
acauauuuugaaagcuuucuaa

SEQ ID NO: 252945 - RNA, 22 nt, Human
acaggcucacagucauuucauu

SEQ ID NO: 252946 - RNA, 22 nt, Human
agagcccagucuuugugugaag

SEQ ID NO: 252947 - RNA, 22 nt, Human
uuugaaacucaugaucaucacu

SEQ ID NO: 252948 - RNA, 22 nt, Human
uuuuauugucucccaguucugg

SEQ ID NO: 252949 - RNA, 22 nt, Human
aguucuuugugaguaauacaga

SEQ ID NO: 252950 - RNA, 22 nt, Human
aucauuuuauggcugagaggac

SEQ ID NO: 252951 - RNA, 22 nt, Human
uggcugagccuuuggggcuuuc

SEQ ID NO: 252952 - RNA, 22 nt, Human
cagggcuggauuucauuucuag

SEQ ID NO: 252953 - RNA, 18 nt, Human
ucagagagcagcuuuauu

SEQ ID NO: 252954 - RNA, 22 nt, Human
cccuggccccucacuccgaggc

SEQ ID NO: 252955 - RNA, 22 nt, Human
ugccagugaaacauggaagaau

SEQ ID NO: 252956 - RNA, 22 nt, Human
uauugucaagaaguuuauagug

SEQ ID NO: 252957 - RNA, 22 nt, Human
cucccagaaaauucucagacaa

SEQ ID NO: 252958 - RNA, 22 nt, Human
cuauugcuaucauucugguggu

SEQ ID NO: 252959 - RNA, 22 nt, Human
cacuggcccagccaggccuguu

SEQ ID NO: 252960 - RNA, 22 nt, Human
cccaggcugugcaaacuucaaa

SEQ ID NO: 252961 - RNA, 22 nt, Human
aaggugguuugcuaaucccaac

SEQ ID NO: 252962 - RNA, 22 nt, Human
ucuggcaaaggcaaccacaguu

SEQ ID NO: 252963 - RNA, 22 nt, Human
caaguauuugcggaguuccacg

SEQ ID NO: 252964 - RNA, 22 nt, Human
gcugcagguuugucuagucugg

SEQ ID NO: 252965 - RNA, 20 nt, Human
uucaaguugggucucuggcu

SEQ ID NO: 252966 - RNA, 22 nt, Human
uuacagugacucacauuaacaa

SEQ ID NO: 252967 - RNA, 22 nt, Human
gagaggaacucccagugccugg

SEQ ID NO: 252968 - RNA, 22 nt, Human
guauucauauuaaacauaucaa

SEQ ID NO: 252969 - RNA, 22 nt, Human
uuggaggaugcaaugagggagu

SEQ ID NO: 252970 - RNA, 20 nt, Human
cugaagaguggccugaucug

SEQ ID NO: 252971 - RNA, 21 nt, Human
caaauagacauggcuagagga

SEQ ID NO: 252972 - RNA, 22 nt, Human
uaaaagagaauggauaacagag

SEQ ID NO: 252973 - RNA, 22 nt, Human
ucugggcugggagcguguggac

SEQ ID NO: 252974 - RNA, 22 nt, Human
ccuggcacacgguggcauucaa

SEQ ID NO: 252975 - RNA, 22 nt, Human
aauguauucugggaaaauguua

SEQ ID NO: 252976 - RNA, 22 nt, Human
agcacagauaacauggagugga

SEQ ID NO: 252977 - RNA, 22 nt, Human
gugcgggccuggggguuucucu

SEQ ID NO: 252978 - RNA, 22 nt, Human
cuugccuucagugucccuuugc

SEQ ID NO: 252979 - RNA, 22 nt, Human
aaauuucuugaggcucucuagc

SEQ ID NO: 252980 - RNA, 22 nt, Human
gaggugaugguugcacaaugcu

SEQ ID NO: 252981 - RNA, 22 nt, Human
cuggagagagaaaaagccuuaa

SEQ ID NO: 252982 - RNA, 22 nt, Human
caaauucucuuacuguuugaca

SEQ ID NO: 252983 - RNA, 22 nt, Human
cugaggcagaaaaagcaagggu

SEQ ID NO: 252984 - RNA, 22 nt, Human
accugcagcuaaagauguaggg

SEQ ID NO: 252985 - RNA, 22 nt, Human
uaagcaagggucucuguaucag

SEQ ID NO: 252986 - RNA, 22 nt, Human
ugaggccagcuucagcagugga

SEQ ID NO: 252987 - RNA, 22 nt, Human
ugggggagagugcaagcaugaa

SEQ ID NO: 252988 - RNA, 22 nt, Human
ugcaaauuucuuuaguacauaa

SEQ ID NO: 252989 - RNA, 22 nt, Human
auggcagaccugggcuggagaa

SEQ ID NO: 252990 - RNA, 22 nt, Human
auagccuugacucacagcucuu

SEQ ID NO: 252991 - RNA, 22 nt, Human
cucucuggaauuaaagcccaau

SEQ ID NO: 252992 - RNA, 22 nt, Human
auggcauuugaaucugucuuuu

SEQ ID NO: 252993 - RNA, 22 nt, Human
ugagcuggagucuguggcuccu

SEQ ID NO: 252994 - RNA, 22 nt, Human
cugagaauuacucugaugagua

SEQ ID NO: 252995 - RNA, 22 nt, Human
ggcccugaagugauugugaguu

SEQ ID NO: 252996 - RNA, 22 nt, Human
caaggcagcccgcugaaccaca

SEQ ID NO: 252997 - RNA, 22 nt, Human
uaagauaauaaguaugucuaug

SEQ ID NO: 252998 - RNA, 22 nt, Human
uccuuuguuaaggagguuuguu

SEQ ID NO: 252999 - RNA, 22 nt, Human
aagcauggcuguucuagcuaua

SEQ ID NO: 253000 - RNA, 22 nt, Human
ccagcuggucugugcucauguu

SEQ ID NO: 253001 - RNA, 22 nt, Human
ucccguugaugacggugcaucc

SEQ ID NO: 253002 - RNA, 22 nt, Human
aaacagcagcuguuuaauuugc

SEQ ID NO: 253003 - RNA, 22 nt, Human
ucuuuucuggacucugcaugga

SEQ ID NO: 253004 - RNA, 22 nt, Human
aucuaagauuuugcuaagauca

SEQ ID NO: 253005 - RNA, 22 nt, Human
gugcucagaaacuugcucauuu

SEQ ID NO: 253006 - RNA, 20 nt, Human
auguggcuuuuugaccugcu

SEQ ID NO: 253007 - RNA, 22 nt, Human
guggcagaaacuggcagaggag

SEQ ID NO: 253008 - RNA, 22 nt, Human
uucacaaucuggcuuagcauug

SEQ ID NO: 253009 - RNA, 20 nt, Human
uacaggcucugagagaugau

SEQ ID NO: 253010 - RNA, 22 nt, Human
auguucuaaucccugcuaugua

SEQ ID NO: 253011 - RNA, 22 nt, Human
aaacauguaaguucagaucacc

SEQ ID NO: 253012 - RNA, 22 nt, Human
cugggagcuagcucugagcuga

SEQ ID NO: 253013 - RNA, 22 nt, Human
ugucugggagggacagggcuac

SEQ ID NO: 253014 - RNA, 22 nt, Human
ggggccaguaggagugauguac

SEQ ID NO: 253015 - RNA, 22 nt, Human
uggcucagcugacucggcuucu

SEQ ID NO: 253016 - RNA, 22 nt, Human
uuuccagugaauuagucuguuu

SEQ ID NO: 253017 - RNA, 22 nt, Human
uugacuucccagacuuguguuu

SEQ ID NO: 253018 - RNA, 20 nt, Human
uaugauaauuacaaaauagu

SEQ ID NO: 253019 - RNA, 22 nt, Human
uaguugacuucucuaucccagc

SEQ ID NO: 253020 - RNA, 22 nt, Human
cagagcucucuuugcuacuaca

SEQ ID NO: 253021 - RNA, 22 nt, Human
ugcuuuauguuaucagaagggu

SEQ ID NO: 253022 - RNA, 22 nt, Human
aagggcugaaugaaggguugaa

SEQ ID NO: 253023 - RNA, 20 nt, Human
gccagcccugacacaggagc

SEQ ID NO: 253024 - RNA, 22 nt, Human
caagaucuuccucaauagaccu

SEQ ID NO: 253025 - RNA, 22 nt, Human
uuauagcaggugacuaaugagu

SEQ ID NO: 253026 - RNA, 21 nt, Human
ucucuuugggaacauuaauca

SEQ ID NO: 253027 - RNA, 22 nt, Human
caggcacgggggcauggccucu

SEQ ID NO: 253028 - RNA, 22 nt, Human
gggcuucuggcuacuguaugag

SEQ ID NO: 253029 - RNA, 22 nt, Human
auaaggcagaaaugauucuagu

SEQ ID NO: 253030 - RNA, 22 nt, Human
cucugugcccuacugcucagcu

SEQ ID NO: 253031 - RNA, 22 nt, Human
auggcagcuuugaauuucuuga

SEQ ID NO: 253032 - RNA, 23 nt, Human
ucuguucuuuuagcugaucauuu

SEQ ID NO: 253033 - RNA, 21 nt, Human
gcugcucgagauccagugcuu

SEQ ID NO: 253034 - RNA, 22 nt, Human
caugcucacaaaagauggcaaa

SEQ ID NO: 253035 - RNA, 22 nt, Human
gacaguuuagguucaaaucuca

SEQ ID NO: 253036 - RNA, 22 nt, Human
cuggaggucauguaauauggaa

SEQ ID NO: 253037 - RNA, 22 nt, Human
ggucuccaaagcugcauugaug

SEQ ID NO: 253038 - RNA, 22 nt, Human
cuucuuaaagauuacacaauga

SEQ ID NO: 253039 - RNA, 22 nt, Human
gauuagaaugggaagauacaag

SEQ ID NO: 253040 - RNA, 23 nt, Human
cugaaauaccagaaaaucagugu

SEQ ID NO: 253041 - RNA, 22 nt, Human
ccagugggagggagcuaggcca

SEQ ID NO: 253042 - RNA, 22 nt, Human
ugaguaaaagugaaucuuaugu

SEQ ID NO: 253043 - RNA, 22 nt, Human
uccaggcccauggagcagagcu

SEQ ID NO: 253044 - RNA, 22 nt, Human
acagaacuucaguaguauuccc

SEQ ID NO: 253045 - RNA, 22 nt, Human
ugccugucuccucugcagggug

SEQ ID NO: 253046 - RNA, 22 nt, Human
gugcuggggagauaggaagaga

SEQ ID NO: 253047 - RNA, 22 nt, Human
agugcucacucuccacagugcc

SEQ ID NO: 253048 - RNA, 22 nt, Human
acauaauggacaauaaugcauc

SEQ ID NO: 253049 - RNA, 23 nt, Human
uccuccagaggcccuccuuggcc

SEQ ID NO: 253050 - RNA, 22 nt, Human
uaugugcaugcugacuugagga

SEQ ID NO: 253051 - RNA, 22 nt, Human
cacuggaauagcauugauucuu

SEQ ID NO: 253052 - RNA, 22 nt, Human
ucccagugagaugaaacaggua

SEQ ID NO: 253053 - RNA, 22 nt, Human
ccacagaaaauaaagcacgauu

SEQ ID NO: 253054 - RNA, 22 nt, Human
cagcggaggacagaugggagcu

SEQ ID NO: 253055 - RNA, 22 nt, Human
acuucaaacaauuaacagagaa

SEQ ID NO: 253056 - RNA, 22 nt, Human
ugagccaggcacugcuccugga

SEQ ID NO: 253057 - RNA, 22 nt, Human
uuacuaguggagaaacugaggc

SEQ ID NO: 253058 - RNA, 18 nt, Human
caggucagccuggccuca

SEQ ID NO: 253059 - RNA, 22 nt, Human
gcuucccagcagaggaaagacu

SEQ ID NO: 253060 - RNA, 22 nt, Human
agggaagaaaauccaucgcugc

SEQ ID NO: 253061 - RNA, 22 nt, Human
caaauuuaagugaggucuuugu

SEQ ID NO: 253062 - RNA, 22 nt, Human
ucugcagaauugucucaagcua

SEQ ID NO: 253063 - RNA, 22 nt, Human
auaccauuuccauguuacauua

SEQ ID NO: 253064 - RNA, 22 nt, Human
agcuuuggagcugggugaaaga

SEQ ID NO: 253065 - RNA, 22 nt, Human
gcccaaggucccauggcagcac

SEQ ID NO: 253066 - RNA, 22 nt, Human
aacaucagaauauccauguugg

SEQ ID NO: 253067 - RNA, 22 nt, Human
aucuagaacaauuauugucaca

SEQ ID NO: 253068 - RNA, 22 nt, Human
uucagcaaacacgaugcuuguu

SEQ ID NO: 253069 - RNA, 22 nt, Human
uuuaaaguuuuugcacauucug

SEQ ID NO: 253070 - RNA, 22 nt, Human
gcucagagaauuuacugcugcc

SEQ ID NO: 253071 - RNA, 22 nt, Human
guggcagggugcucaucaugca

SEQ ID NO: 253072 - RNA, 22 nt, Human
acacuuuguuguggcauauacg

SEQ ID NO: 253073 - RNA, 22 nt, Human
aaauaagcacuuaacuguauca

SEQ ID NO: 253074 - RNA, 22 nt, Human
acuugguugaugucauaagguu

SEQ ID NO: 253075 - RNA, 22 nt, Human
gccuguccacuaaacagccaag

SEQ ID NO: 253076 - RNA, 22 nt, Human
augaguucauacuuucaguacc

SEQ ID NO: 253077 - RNA, 22 nt, Human
agggggcucagcauggauggag

SEQ ID NO: 253078 - RNA, 22 nt, Human
agcuggagaaaccugggagggu

SEQ ID NO: 253079 - RNA, 22 nt, Human
gaccagcuacuuguacaguuca

SEQ ID NO: 253080 - RNA, 22 nt, Human
aaaguacuaaugaauauuuugc

SEQ ID NO: 253081 - RNA, 22 nt, Human
agcugccacagagccuggccag

SEQ ID NO: 253082 - RNA, 20 nt, Human
aggccccagguggacacuag

SEQ ID NO: 253083 - RNA, 20 nt, Human
ugccuggccuuucucugccc

SEQ ID NO: 253084 - RNA, 22 nt, Human
cacagaauaaauugguaucaga

SEQ ID NO: 253085 - RNA, 22 nt, Human
ucauguguguuucauguaugga

SEQ ID NO: 253086 - RNA, 22 nt, Human
agggaagccccgaggaggcacc

SEQ ID NO: 253087 - RNA, 23 nt, Human
uacugucuucuauuaaguaagga

SEQ ID NO: 253088 - RNA, 22 nt, Human
auuauagaggguuacaguuaau

SEQ ID NO: 253089 - RNA, 22 nt, Human
gcagggaccagggccagaucca

SEQ ID NO: 253090 - RNA, 22 nt, Human
uuucaaacauaucuucauuacu

SEQ ID NO: 253091 - RNA, 21 nt, Human
ugcacaaacuuucuguggcuu

SEQ ID NO: 253092 - RNA, 22 nt, Human
aaacugcagagccaugguucaa

SEQ ID NO: 253093 - RNA, 22 nt, Human
uccaggaaucugugccuagccc

SEQ ID NO: 253094 - RNA, 22 nt, Human
gguguccuuguccuuugguacc

SEQ ID NO: 253095 - RNA, 22 nt, Human
aagcaauuugacaguacauauc

SEQ ID NO: 253096 - RNA, 22 nt, Human
cugagggacccugugaguaccu

SEQ ID NO: 253097 - RNA, 22 nt, Human
gucugggcuccuggcaggcagc

SEQ ID NO: 253098 - RNA, 22 nt, Human
ggcaugcucuggggguccuccg

SEQ ID NO: 253099 - RNA, 22 nt, Human
agggccaguaaauguuuccuca

SEQ ID NO: 253100 - RNA, 22 nt, Human
guuuuuacuaagguugcuaagu

SEQ ID NO: 253101 - RNA, 22 nt, Human
uuacagugacaguugcuaugau

SEQ ID NO: 253102 - RNA, 23 nt, Human
acugggucuaucuccagagaaga

SEQ ID NO: 253103 - RNA, 17 nt, Human
uaagugauuaucucaua

SEQ ID NO: 253104 - RNA, 18 nt, Human
cagugcuguuaacaguga

SEQ ID NO: 253105 - RNA, 18 nt, Human
uguuuauucuccugacag

SEQ ID NO: 253106 - RNA, 22 nt, Human
ugcuggagcaacauuauugugc

SEQ ID NO: 253107 - RNA, 22 nt, Human
uuagagguucuaugugucugga

SEQ ID NO: 253108 - RNA, 22 nt, Human
gcugcgagcucuuguucugaga

SEQ ID NO: 253109 - RNA, 22 nt, Human
gcacacauauauaugagcaugu

SEQ ID NO: 253110 - RNA, 22 nt, Human
ucaguuuauggucuaguucaug

SEQ ID NO: 253111 - RNA, 22 nt, Human
cuggugaauggauaaacuguug

SEQ ID NO: 253112 - RNA, 19 nt, Human
aggcuggaugcccaucuua

SEQ ID NO: 253113 - RNA, 19 nt, Human
uuggggugaaugccagaca

SEQ ID NO: 253114 - RNA, 22 nt, Human
uuauuuguaaagguccauagua

SEQ ID NO: 253115 - RNA, 22 nt, Human
cagaaauguacugacaugcagu

SEQ ID NO: 253116 - RNA, 22 nt, Human
augauucuggcaaauuuauuau

SEQ ID NO: 253117 - RNA, 22 nt, Human
ccaaggccacaaacagccuggc

SEQ ID NO: 253118 - RNA, 22 nt, Human
cgcccagcugaaaucuccaggc

SEQ ID NO: 253119 - RNA, 22 nt, Human
ugacaagagcauucccacaccu

SEQ ID NO: 253120 - RNA, 22 nt, Human
aauagacaagcacccugguaaa

SEQ ID NO: 253121 - RNA, 22 nt, Human
ggccaggaggcaggggcucaau

SEQ ID NO: 253122 - RNA, 22 nt, Human
caacuuuucugugaauuuaagu

SEQ ID NO: 253123 - RNA, 22 nt, Human
cugagacacaguggcugaaaag

SEQ ID NO: 253124 - RNA, 22 nt, Human
guacaaaugaaaauagaccacu

SEQ ID NO: 253125 - RNA, 22 nt, Human
cacugauuaagucugcuagagg

SEQ ID NO: 253126 - RNA, 22 nt, Human
agggaggaaggauguuccaaag

SEQ ID NO: 253127 - RNA, 22 nt, Human
gacacagauaucucugagauua

SEQ ID NO: 253128 - RNA, 22 nt, Human
auuagcagugccuugccugucu

SEQ ID NO: 253129 - RNA, 22 nt, Human
ucuccugucuucucagcacccc

SEQ ID NO: 253130 - RNA, 22 nt, Human
cauucaaaugugccacuguccu

SEQ ID NO: 253131 - RNA, 22 nt, Human
ucucagauggcaucagcuagag

SEQ ID NO: 253132 - RNA, 22 nt, Human
cugaggcugggcauggggucca

SEQ ID NO: 253133 - RNA, 21 nt, Human
cccaccccauaaggcagaacc

SEQ ID NO: 253134 - RNA, 22 nt, Human
caaugauugcuauuuacauaaa

SEQ ID NO: 253135 - RNA, 22 nt, Human
ggcagcugagcauggcuaccuu

SEQ ID NO: 253136 - RNA, 22 nt, Human
gcagggucuugagaggcagcca

SEQ ID NO: 253137 - RNA, 19 nt, Human
gcucagagucccccugcgg

SEQ ID NO: 253138 - RNA, 21 nt, Human
agcagcagcaguggggcuucu

SEQ ID NO: 253139 - RNA, 22 nt, Human
aacucacagcuguuuggauuag

SEQ ID NO: 253140 - RNA, 22 nt, Human
gacauaauccuccucaccuacu

SEQ ID NO: 253141 - RNA, 22 nt, Human
uuuguauuuuucccagcuagcu

SEQ ID NO: 253142 - RNA, 22 nt, Human
uccugggucugggugucugagg

SEQ ID NO: 253143 - RNA, 22 nt, Human
ggcucagcuuaucugggcaggc

SEQ ID NO: 253144 - RNA, 22 nt, Human
guuuauaaauucugcuuuuguu

SEQ ID NO: 253145 - RNA, 22 nt, Human
ugcaauuagcguauuaguuuau

SEQ ID NO: 253146 - RNA, 22 nt, Human
ggcuguccaccuaccaugccgg

SEQ ID NO: 253147 - RNA, 22 nt, Human
auuuccaugaauucccacucau

SEQ ID NO: 253148 - RNA, 22 nt, Human
cacaugcaccagaaaucaacau

SEQ ID NO: 253149 - RNA, 22 nt, Human
uuucuauugaucuaauaaacau

SEQ ID NO: 253150 - RNA, 22 nt, Human
cuagggcaaugacucaaagcgg

SEQ ID NO: 253151 - RNA, 21 nt, Human
aaacugaagagacaggaacuu

SEQ ID NO: 253152 - RNA, 22 nt, Human
ugguccuggaagguccugaggg

SEQ ID NO: 253153 - RNA, 20 nt, Human
aacuaugaauagaagagauu

SEQ ID NO: 253154 - RNA, 22 nt, Human
acugggccggugcagaguaguu

SEQ ID NO: 253155 - RNA, 22 nt, Human
ccuggcucaggcacgcauggcu

SEQ ID NO: 253156 - RNA, 22 nt, Human
cuaaaugacagguaccauagug

SEQ ID NO: 253157 - RNA, 22 nt, Human
ugaaauguuaaacaaguggcuc

SEQ ID NO: 253158 - RNA, 22 nt, Human
aaggcuuguugaguaucuacug

SEQ ID NO: 253159 - RNA, 22 nt, Human
cuccuccacuaggcaaaaugug

SEQ ID NO: 253160 - RNA, 21 nt, Human
ugcucaugagcccacagcugc

SEQ ID NO: 253161 - RNA, 22 nt, Human
cacacaugaaucccuaguaccu

SEQ ID NO: 253162 - RNA, 22 nt, Human
caccccagcuucucaggauaga

SEQ ID NO: 253163 - RNA, 22 nt, Human
cugcagguugagcagccagguu

SEQ ID NO: 253164 - RNA, 22 nt, Human
gaaaggagugcuuuccaggucu

SEQ ID NO: 253165 - RNA, 22 nt, Human
ucaaucaaugugucaguuccca

SEQ ID NO: 253166 - RNA, 22 nt, Human
caggguugcaugcaucuguggg

SEQ ID NO: 253167 - RNA, 22 nt, Human
gauccucuuuuccuaggaaggu

SEQ ID NO: 253168 - RNA, 22 nt, Human
aucuaaaaggagcucuuuaucu

SEQ ID NO: 253169 - RNA, 22 nt, Human
cacaauuuggacuucacugguu

SEQ ID NO: 253170 - RNA, 22 nt, Human
ggaggacaggggcugcagcaca

SEQ ID NO: 253171 - RNA, 22 nt, Human
cagcuuggcuucacauucugua

SEQ ID NO: 253172 - RNA, 22 nt, Human
caggaaaucacucugauuuugg

SEQ ID NO: 253173 - RNA, 22 nt, Human
uucucagaaaauguagagaaaa

SEQ ID NO: 253174 - RNA, 21 nt, Human
uacaagaccggauucgggccc

SEQ ID NO: 253175 - RNA, 22 nt, Human
cuuuggauggcuguguguuuau

SEQ ID NO: 253176 - RNA, 19 nt, Human
cagaugagaaaagugaggu

SEQ ID NO: 253177 - RNA, 22 nt, Human
ugccaggcccucccacagauua

SEQ ID NO: 253178 - RNA, 22 nt, Human
auccugugaggauaagcccuug

SEQ ID NO: 253179 - RNA, 23 nt, Human
acaggcaggcauggccaaaugug

SEQ ID NO: 253180 - RNA, 22 nt, Human
uucugggcccacuguagcaucc

SEQ ID NO: 253181 - RNA, 22 nt, Human
gagugugggucucagcuuuaag

SEQ ID NO: 253182 - RNA, 22 nt, Human
ucugugauaguuuuucagcuau

SEQ ID NO: 253183 - RNA, 22 nt, Human
ggcaggugcugggagcaucuca

SEQ ID NO: 253184 - RNA, 23 nt, Human
aggaagcccauuuuagucuaccu

SEQ ID NO: 253185 - RNA, 22 nt, Human
gggagcagccugccucccaccu

SEQ ID NO: 253186 - RNA, 22 nt, Human
caaaugaauagggagugugaug

SEQ ID NO: 253187 - RNA, 22 nt, Human
aguaaaugaaagcaauuuuaga

SEQ ID NO: 253188 - RNA, 22 nt, Human
cuggaaauuggagaugauguuu

SEQ ID NO: 253189 - RNA, 22 nt, Human
agaaccuucagauuaggaggug

SEQ ID NO: 253190 - RNA, 18 nt, Human
uccugggaaaggcauaca

SEQ ID NO: 253191 - RNA, 22 nt, Human
gcugccagcucacucuccugag

SEQ ID NO: 253192 - RNA, 22 nt, Human
uagaugaaggcugagcaccugu

SEQ ID NO: 253193 - RNA, 22 nt, Human
gccagccaggaagaaaguaaga

SEQ ID NO: 253194 - RNA, 19 nt, Human
aguuauuucuaaauuuacc

SEQ ID NO: 253195 - RNA, 22 nt, Human
aguguacacuaaaugaauacaa

SEQ ID NO: 253196 - RNA, 22 nt, Human
ugguccuugcuauagagugaua

SEQ ID NO: 253197 - RNA, 22 nt, Human
cacaggaggaggccagagcgua

SEQ ID NO: 253198 - RNA, 22 nt, Human
auucuuuaauucaauugaagga

SEQ ID NO: 253199 - RNA, 22 nt, Human
cacugggcaauucugagccuaa

SEQ ID NO: 253200 - RNA, 22 nt, Human
ucaggccugcccugaaagcaca

SEQ ID NO: 253201 - RNA, 22 nt, Human
aggccaggaauccuugucccag

SEQ ID NO: 253202 - RNA, 22 nt, Human
cuuauguaaacuacagauaaua

SEQ ID NO: 253203 - RNA, 22 nt, Human
uuuuaugagaaugcgccacuug

SEQ ID NO: 253204 - RNA, 22 nt, Human
aaagacugaggggaaagugaug

SEQ ID NO: 253205 - RNA, 22 nt, Human
aacaggccuuguuuuuguucau

SEQ ID NO: 253206 - RNA, 22 nt, Human
auuaaggugucaauguauuugg

SEQ ID NO: 253207 - RNA, 22 nt, Human
ccaguucuucuugacacgaaag

SEQ ID NO: 253208 - RNA, 22 nt, Human
gacacagucaagaguggaggaa

SEQ ID NO: 253209 - RNA, 22 nt, Human
agaggggaggcgaaccagaguc

SEQ ID NO: 253210 - RNA, 22 nt, Human
uggaauguuuccccagccugca

SEQ ID NO: 253211 - RNA, 22 nt, Human
caggcugauaggguccaaaguu

SEQ ID NO: 253212 - RNA, 22 nt, Human
caagucauuguuuagucauguu

SEQ ID NO: 253213 - RNA, 22 nt, Human
uaagacaaauacuauuucaaga

SEQ ID NO: 253214 - RNA, 22 nt, Human
ugccuggcccugacagcccugg

SEQ ID NO: 253215 - RNA, 22 nt, Human
ugaagaggccaaacuaucauug

SEQ ID NO: 253216 - RNA, 22 nt, Human
caggaagcugagcugcacugca

SEQ ID NO: 253217 - RNA, 22 nt, Human
ucuacagcugcugcuucucaug

SEQ ID NO: 253218 - RNA, 22 nt, Human
gacacuuuaggauuuaaaaguc

SEQ ID NO: 253219 - RNA, 20 nt, Human
aggcucugccugcaggccca

SEQ ID NO: 253220 - RNA, 22 nt, Human
acauagaagugaugcuuaucca

SEQ ID NO: 253221 - RNA, 22 nt, Human
gcugccauguugugaggacacu

SEQ ID NO: 253222 - RNA, 22 nt, Human
agcauaauuccugacacacaag

SEQ ID NO: 253223 - RNA, 22 nt, Human
ugcaauaacuacuuuaauguug

SEQ ID NO: 253224 - RNA, 20 nt, Human
ccugggcucaaagcauccuc

SEQ ID NO: 253225 - RNA, 22 nt, Human
ucagagaauucgauuaaaugca

SEQ ID NO: 253226 - RNA, 19 nt, Human
caggugguaaucugagccu

SEQ ID NO: 253227 - RNA, 22 nt, Human
cuggaggggccauccacagucu

SEQ ID NO: 253228 - RNA, 22 nt, Human
ugcuggagaaaguuuuucugaa

SEQ ID NO: 253229 - RNA, 22 nt, Human
cugccuguggucugugaucuaa

SEQ ID NO: 253230 - RNA, 22 nt, Human
uguaaauaaugcauguaaauca

SEQ ID NO: 253231 - RNA, 21 nt, Human
ugcaguucaagucaaucuacu

SEQ ID NO: 253232 - RNA, 22 nt, Human
guuugccuuuuagauaggaaug

SEQ ID NO: 253233 - RNA, 22 nt, Human
gucacacucaaaagcuaggaug

SEQ ID NO: 253234 - RNA, 22 nt, Human
gacccagaaggagugcccuaga

SEQ ID NO: 253235 - RNA, 22 nt, Human
uagaaguucaugcgaauuauuu

SEQ ID NO: 253236 - RNA, 22 nt, Human
aggccucuguagggcccugaag

SEQ ID NO: 253237 - RNA, 22 nt, Human
auccauaucuggacucuacccc

SEQ ID NO: 253238 - RNA, 22 nt, Human
guuagggagggugcauaugugu

SEQ ID NO: 253239 - RNA, 22 nt, Human
ucaggcucucagaccaacagca

SEQ ID NO: 253240 - RNA, 22 nt, Human
acauaucuguuagacacagcag

SEQ ID NO: 253241 - RNA, 22 nt, Human
ccuuggcuugcacacggccacc

SEQ ID NO: 253242 - RNA, 22 nt, Human
uuccugugugacucaagugguu

SEQ ID NO: 253243 - RNA, 22 nt, Human
cuggcuuuaacccuacaaaccu

SEQ ID NO: 253244 - RNA, 22 nt, Human
gagcccucuucccuagugaucg

SEQ ID NO: 253245 - RNA, 22 nt, Human
ucagagucauugcaaguagaag

SEQ ID NO: 253246 - RNA, 22 nt, Human
augcuacuauccuucugcuuaa

SEQ ID NO: 253247 - RNA, 22 nt, Human
cagggacagagacugcaccuug

SEQ ID NO: 253248 - RNA, 22 nt, Human
gggagggaaagcuugaucuguc

SEQ ID NO: 253249 - RNA, 16 nt, Human
accuccagucaagggu

SEQ ID NO: 253250 - RNA, 22 nt, Human
cagaugaggacagaugacuggg

SEQ ID NO: 253251 - RNA, 22 nt, Human
gcuaaaaggagcacuagagauu

SEQ ID NO: 253252 - RNA, 22 nt, Human
agccugguuuaagcauuuuaua

SEQ ID NO: 253253 - RNA, 22 nt, Human
cgcaccacugaauuccagccug

SEQ ID NO: 253254 - RNA, 22 nt, Human
ucacacagguuugcaaugauuu

SEQ ID NO: 253255 - RNA, 22 nt, Human
acagcuguguuuuauaaucagc

SEQ ID NO: 253256 - RNA, 22 nt, Human
ucugggcuuuaguuuguuaucu

SEQ ID NO: 253257 - RNA, 21 nt, Human
ucucaggcgagaauucuuuua

SEQ ID NO: 253258 - RNA, 22 nt, Human
guugaguggguuaggaugcuga

SEQ ID NO: 253259 - RNA, 22 nt, Human
aggcuccagcccaaggcugcag

SEQ ID NO: 253260 - RNA, 22 nt, Human
aaaugcuagggagaaacucucc

SEQ ID NO: 253261 - RNA, 22 nt, Human
cuuuucaugccagcccaucaca

SEQ ID NO: 253262 - RNA, 22 nt, Human
gaggcugugucuugggguggaa

SEQ ID NO: 253263 - RNA, 22 nt, Human
gcccucagaaugggcucuaauc

SEQ ID NO: 253264 - RNA, 22 nt, Human
uccugaaaugugcacaugacau

SEQ ID NO: 253265 - RNA, 20 nt, Human
uuggaugugcauggccgugc

SEQ ID NO: 253266 - RNA, 22 nt, Human
aagagcauggaauggagaucca

SEQ ID NO: 253267 - RNA, 22 nt, Human
aggaggcugcaacccugaggcc

SEQ ID NO: 253268 - RNA, 22 nt, Human
auaagguaugaaaaguaaaugg

SEQ ID NO: 253269 - RNA, 22 nt, Human
ucuccacagaagguuccaggcc

SEQ ID NO: 253270 - RNA, 23 nt, Human
ggacacaggccuugucugcgccu

SEQ ID NO: 253271 - RNA, 22 nt, Human
ugagucugauuuuucuagcauu

SEQ ID NO: 253272 - RNA, 22 nt, Human
gcauuuauuucuuuacugcauc

SEQ ID NO: 253273 - RNA, 22 nt, Human
gaaaaaugcuccaaaucugugg

SEQ ID NO: 253274 - RNA, 22 nt, Human
aguggcaguagaugagcugguu

SEQ ID NO: 253275 - RNA, 22 nt, Human
aguuuuauuccaaugugcagca

SEQ ID NO: 253276 - RNA, 22 nt, Human
cugugcccaccuggcucugagg

SEQ ID NO: 253277 - RNA, 22 nt, Human
cuggcugugucuuggaggagcu

SEQ ID NO: 253278 - RNA, 22 nt, Human
agaguggcuugcucagcuagca

SEQ ID NO: 253279 - RNA, 22 nt, Human
cacagaggacuguagcggggag

SEQ ID NO: 253280 - RNA, 22 nt, Human
augaggcaaggaucagguaagg

SEQ ID NO: 253281 - RNA, 22 nt, Human
uccccacaucucugcaucaggc

SEQ ID NO: 253282 - RNA, 22 nt, Human
aaugauggucauggcaacuuuu

SEQ ID NO: 253283 - RNA, 22 nt, Human
cugauacaaugcuaauaaauuu

SEQ ID NO: 253284 - RNA, 19 nt, Human
ggaacuuggccuuuaccca

SEQ ID NO: 253285 - RNA, 22 nt, Human
aaguuacagucagagguuaaca

SEQ ID NO: 253286 - RNA, 22 nt, Human
auaugaaguuacagguaagaaa

SEQ ID NO: 253287 - RNA, 22 nt, Human
ugaacuuacaaauuaaaagacu

SEQ ID NO: 253288 - RNA, 22 nt, Human
cuccucugucuggcccugagcc

SEQ ID NO: 253289 - RNA, 22 nt, Human
aaaugcauguauguaauaugcu

SEQ ID NO: 253290 - RNA, 22 nt, Human
aggccacaguacuuugcagacc

SEQ ID NO: 253291 - RNA, 22 nt, Human
cugugggagcagcaccaaggac

SEQ ID NO: 253292 - RNA, 22 nt, Human
gcacugaugcaaaaaucacuca

SEQ ID NO: 253293 - RNA, 22 nt, Human
aggacccagaaggugcagcaga

SEQ ID NO: 253294 - RNA, 22 nt, Human
ucccuccuuuaucaaaaagaga

SEQ ID NO: 253295 - RNA, 22 nt, Human
gcagcccagagcgcaggacccc

SEQ ID NO: 253296 - RNA, 22 nt, Human
uucugcauguguuucaaauacu

SEQ ID NO: 253297 - RNA, 22 nt, Human
ccagagagaguacugggcucug

SEQ ID NO: 253298 - RNA, 22 nt, Human
gugaggagucugaagcacauaa

SEQ ID NO: 253299 - RNA, 22 nt, Human
acaggcucucagccaguuggca

SEQ ID NO: 253300 - RNA, 19 nt, Human
caacaguugcaacacuguc

SEQ ID NO: 253301 - RNA, 22 nt, Human
acugagcacuugguauauuucc

SEQ ID NO: 253302 - RNA, 20 nt, Human
auguaaaauuauaaggcuga

SEQ ID NO: 253303 - RNA, 22 nt, Human
auuugcuuucagguauaaaagg

SEQ ID NO: 253304 - RNA, 22 nt, Human
acagaacaggcugagaaaaaca

SEQ ID NO: 253305 - RNA, 22 nt, Human
ucugaggguaagguuaagguag

SEQ ID NO: 253306 - RNA, 22 nt, Human
cucagagcacuuuugaaagcuc

SEQ ID NO: 253307 - RNA, 22 nt, Human
gcagugucuuugaccuccaccc

SEQ ID NO: 253308 - RNA, 22 nt, Human
ggucuagaguggggccuggaaa

SEQ ID NO: 253309 - RNA, 22 nt, Human
aaagaacuuaagaaauuaggcu

SEQ ID NO: 253310 - RNA, 22 nt, Human
ugacagacuuuacuucuccuau

SEQ ID NO: 253311 - RNA, 22 nt, Human
ccuucagaaugaaauucuaaug

SEQ ID NO: 253312 - RNA, 22 nt, Human
aacaugugucuugcauuucuug

SEQ ID NO: 253313 - RNA, 22 nt, Human
agcuuugggggagguagucugu

SEQ ID NO: 253314 - RNA, 22 nt, Human
ccucccagugccuccagagcag

SEQ ID NO: 253315 - RNA, 22 nt, Human
cugaauuacugaaggucaacuu

SEQ ID NO: 253316 - RNA, 22 nt, Human
aaauugcaaaaguacuuuuagg

SEQ ID NO: 253317 - RNA, 22 nt, Human
aaguguauuaagcaacguuauu

SEQ ID NO: 253318 - RNA, 22 nt, Human
aaaucugaaauagugugaagua

SEQ ID NO: 253319 - RNA, 23 nt, Human
auguauuuaaauuucagugauga

SEQ ID NO: 253320 - RNA, 20 nt, Human
ugaaggugacuccuuucuug

SEQ ID NO: 253321 - RNA, 20 nt, Human
cugcccacuagaacuaccug

SEQ ID NO: 253322 - RNA, 22 nt, Human
ucagggcagccuaaggcaccuc

SEQ ID NO: 253323 - RNA, 22 nt, Human
gauccuguuagaucccauuaga

SEQ ID NO: 253324 - RNA, 23 nt, Human
agcagcuguggaguuuugcauuu

SEQ ID NO: 253325 - RNA, 22 nt, Human
accagagcuggcucugagcacc

SEQ ID NO: 253326 - RNA, 22 nt, Human
aacugcauaauauaucaugcag

SEQ ID NO: 253327 - RNA, 22 nt, Human
uguaaacauauguauguaugua

SEQ ID NO: 253328 - RNA, 22 nt, Human
uguucagaacaaagguaaauga

SEQ ID NO: 253329 - RNA, 22 nt, Human
caccauuuaguagcaagagcuc

SEQ ID NO: 253330 - RNA, 19 nt, Human
cuugaaaugagacugaagg

SEQ ID NO: 253331 - RNA, 22 nt, Human
aggcuggcuuugguagcauggu

SEQ ID NO: 253332 - RNA, 22 nt, Human
gcagcuggagccagccagacac

SEQ ID NO: 253333 - RNA, 22 nt, Human
acucuggguccugccauucacu

SEQ ID NO: 253334 - RNA, 22 nt, Human
aagacucuguaucaugagggag

SEQ ID NO: 253335 - RNA, 22 nt, Human
gaggccagaagucugagaucag

SEQ ID NO: 253336 - RNA, 22 nt, Human
gaggaaggaaugcaguguaugc

SEQ ID NO: 253337 - RNA, 22 nt, Human
acccuggggucacccuucucug

SEQ ID NO: 253338 - RNA, 17 nt, Human
uggcaucuuuugcucau

SEQ ID NO: 253339 - RNA, 19 nt, Human
uucauucuuucuacuuacc

SEQ ID NO: 253340 - RNA, 22 nt, Human
cucagcaucaugguaucugggg

SEQ ID NO: 253341 - RNA, 22 nt, Human
gcagccaagaccccaagaacug

SEQ ID NO: 253342 - RNA, 22 nt, Human
agucaguuguggagauuuaacu

SEQ ID NO: 253343 - RNA, 22 nt, Human
agcuggucugcugcauggagug

SEQ ID NO: 253344 - RNA, 22 nt, Human
ggcucuguggcuggccaugaug

SEQ ID NO: 253345 - RNA, 22 nt, Human
agagacuucugccuuagcaaga

SEQ ID NO: 253346 - RNA, 22 nt, Human
acauauguguuguacaugcaug

SEQ ID NO: 253347 - RNA, 22 nt, Human
agguggcaaggggcgccucucu

SEQ ID NO: 253348 - RNA, 22 nt, Human
auuugguagugauugaaauuau

SEQ ID NO: 253349 - RNA, 22 nt, Human
ccaggugucuguggccagcccu

SEQ ID NO: 253350 - RNA, 18 nt, Human
acauuucuaggugaaagc

SEQ ID NO: 253351 - RNA, 19 nt, Human
cuccacagggauugugauu

SEQ ID NO: 253352 - RNA, 22 nt, Human
ugagcccuaccugcucaucucc

SEQ ID NO: 253353 - RNA, 21 nt, Human
uuccuuuuuauggcuuagugg

SEQ ID NO: 253354 - RNA, 22 nt, Human
agucacacacugucaguucugc

SEQ ID NO: 253355 - RNA, 22 nt, Human
uuucaaauggagucgugaaaug

SEQ ID NO: 253356 - RNA, 22 nt, Human
acacauaagaaacuacaaagag

SEQ ID NO: 253357 - RNA, 22 nt, Human
gggcaguggguggcugcagccu

SEQ ID NO: 253358 - RNA, 22 nt, Human
caagaugaaauugugauauuuu

SEQ ID NO: 253359 - RNA, 22 nt, Human
uacaguuacccuggaaagaaau

SEQ ID NO: 253360 - RNA, 22 nt, Human
agauuugggggcuagggcuggu

SEQ ID NO: 253361 - RNA, 22 nt, Human
guuuccugaaguuauuucaucc

SEQ ID NO: 253362 - RNA, 23 nt, Human
auuuuuugucuuuguaacuagau

SEQ ID NO: 253363 - RNA, 22 nt, Human
uccuguggggaaaagccuaucu

SEQ ID NO: 253364 - RNA, 19 nt, Human
gaauacagauaauaagcag

SEQ ID NO: 253365 - RNA, 22 nt, Human
accuccaggaagcucuugguac

SEQ ID NO: 253366 - RNA, 22 nt, Human
gaguuaaaggaaaauaacuuua

SEQ ID NO: 253367 - RNA, 22 nt, Human
cccaggaggcagaaguugcagu

SEQ ID NO: 253368 - RNA, 22 nt, Human
ucccacaugugaauccucaggu

SEQ ID NO: 253369 - RNA, 22 nt, Human
ccaggagcaggagcugcagcug

SEQ ID NO: 253370 - RNA, 22 nt, Human
augggacagggcuggcuggucc

SEQ ID NO: 253371 - RNA, 22 nt, Human
acuccuggggcugccaucacag

SEQ ID NO: 253372 - RNA, 22 nt, Human
ugcagccccuaucgcggacagg

SEQ ID NO: 253373 - RNA, 19 nt, Human
ccuggccagacuucugccc

SEQ ID NO: 253374 - RNA, 22 nt, Human
accaucuuuuccucugccuccu

SEQ ID NO: 253375 - RNA, 22 nt, Human
agcagugccgcaucuugugacc

SEQ ID NO: 253376 - RNA, 22 nt, Human
uucuaguuuccauuuuaagaca

SEQ ID NO: 253377 - RNA, 22 nt, Human
aacugaaacggugaucuuuuaa

SEQ ID NO: 253378 - RNA, 18 nt, Human
uugugaaauauuggaguc

SEQ ID NO: 253379 - RNA, 22 nt, Human
augguauacaauuauggacugu

SEQ ID NO: 253380 - RNA, 22 nt, Human
acagaacuuccagggaacauac

SEQ ID NO: 253381 - RNA, 22 nt, Human
cucugggccaccgcugguguau

SEQ ID NO: 253382 - RNA, 22 nt, Human
cagaggcaggauaagaacugcg

SEQ ID NO: 253383 - RNA, 22 nt, Human
ugcccagcagggagcuaccugg

SEQ ID NO: 253384 - RNA, 22 nt, Human
ugaguggacgugaggcugagua

SEQ ID NO: 253385 - RNA, 22 nt, Human
augugcaugcacuuacaugugu

SEQ ID NO: 253386 - RNA, 23 nt, Human
cagcuccagugcacucagguagc

SEQ ID NO: 253387 - RNA, 22 nt, Human
cuggcugccacuucagggucuu

SEQ ID NO: 253388 - RNA, 22 nt, Human
aagggcuguuauguuuuuauac

SEQ ID NO: 253389 - RNA, 20 nt, Human
aauguauauuuuaugccagg

SEQ ID NO: 253390 - RNA, 19 nt, Human
gggcaugcuggcucuagag

SEQ ID NO: 253391 - RNA, 15 nt, Human
gcaggcagaucaccg

SEQ ID NO: 253392 - RNA, 22 nt, Human
gagggcucuacucaccacccug

SEQ ID NO: 253393 - RNA, 22 nt, Human
uccacaggaaagcaccucccau

SEQ ID NO: 253394 - RNA, 22 nt, Human
acacacaugccuuuccuaagua

SEQ ID NO: 253395 - RNA, 22 nt, Human
gccacagggcagaugcgcagag

SEQ ID NO: 253396 - RNA, 22 nt, Human
caguuaccaucuucagugauga

SEQ ID NO: 253397 - RNA, 22 nt, Human
cugaauuauuuaaggugaaggg

SEQ ID NO: 253398 - RNA, 22 nt, Human
aagacuugaccagguugaaggc

SEQ ID NO: 253399 - RNA, 19 nt, Human
cagcagccagggggccccu

SEQ ID NO: 253400 - RNA, 22 nt, Human
gagaaaggcauuccuaugcaaa

SEQ ID NO: 253401 - RNA, 22 nt, Human
uaguuucagcuccuucauccug

SEQ ID NO: 253402 - RNA, 22 nt, Human
ccugagcuagggaaggaagacc

SEQ ID NO: 253403 - RNA, 22 nt, Human
ugccuguguccccuucuuggca

SEQ ID NO: 253404 - RNA, 22 nt, Human
ggcuguggucauuaggagguug

SEQ ID NO: 253405 - RNA, 22 nt, Human
cccaggcuggagugcaauggug

SEQ ID NO: 253406 - RNA, 22 nt, Human
cuacauguagguuuccuuaauu

SEQ ID NO: 253407 - RNA, 22 nt, Human
cugucccaggauccugacucca

SEQ ID NO: 253408 - RNA, 22 nt, Human
auccacuuggcugguuguucua

SEQ ID NO: 253409 - RNA, 22 nt, Human
cacuucaaauauggcuucauga

SEQ ID NO: 253410 - RNA, 19 nt, Human
gagcccucuccauggccac

SEQ ID NO: 253411 - RNA, 22 nt, Human
gaaaaugagccucagcuacauu

SEQ ID NO: 253412 - RNA, 22 nt, Human
ugaagagugcuugagauuuuaa

SEQ ID NO: 253413 - RNA, 22 nt, Human
accacaggacccaugagucagu

SEQ ID NO: 253414 - RNA, 22 nt, Human
cuggggcuguaggaggacuuau

SEQ ID NO: 253415 - RNA, 22 nt, Human
uacaugagggcacucugcaucu

SEQ ID NO: 253416 - RNA, 22 nt, Human
agccucugguccucccucagcu

SEQ ID NO: 253417 - RNA, 23 nt, Human
uuuaacauuugaacauguggcca

SEQ ID NO: 253418 - RNA, 22 nt, Human
uggaggcauuugauguucauaa

SEQ ID NO: 253419 - RNA, 22 nt, Human
gcuacagacugagcauggcucu

SEQ ID NO: 253420 - RNA, 20 nt, Human
cuucuucagccuaugcuuca

SEQ ID NO: 253421 - RNA, 23 nt, Human
ggguccagagacaggcaugggug

SEQ ID NO: 253422 - RNA, 22 nt, Human
ucugucuuagccaucucaggcu

SEQ ID NO: 253423 - RNA, 22 nt, Human
aauucaugaguagaaucuauau

SEQ ID NO: 253424 - RNA, 22 nt, Human
ucagagcacuuggcucauggca

SEQ ID NO: 253425 - RNA, 22 nt, Human
augcacuacuuggcuuuacuga

SEQ ID NO: 253426 - RNA, 22 nt, Human
aauauacuauacuacuuucugg

SEQ ID NO: 253427 - RNA, 22 nt, Human
agggcugaagggaggugcucau

SEQ ID NO: 253428 - RNA, 22 nt, Human
augucagauccucagaaagucu

SEQ ID NO: 253429 - RNA, 22 nt, Human
aggcugcugccuuggagagugu

SEQ ID NO: 253430 - RNA, 22 nt, Human
acccaggggcgaagcuggccac

SEQ ID NO: 253431 - RNA, 22 nt, Human
uuauacacaauucuuuuacuac

SEQ ID NO: 253432 - RNA, 22 nt, Human
ucagaacagcucucagauaucc

SEQ ID NO: 253433 - RNA, 22 nt, Human
uaaugcaacgugagauaauuaa

SEQ ID NO: 253434 - RNA, 20 nt, Human
uugaaugaaugucuggcuca

SEQ ID NO: 253435 - RNA, 22 nt, Human
acagcagguagcuuugugccuc

SEQ ID NO: 253436 - RNA, 23 nt, Human
gugugcaggauuauuugcagaca

SEQ ID NO: 253437 - RNA, 22 nt, Human
ccagaagauggcucaaaccaug

SEQ ID NO: 253438 - RNA, 22 nt, Human
ggagcucagaagugagugaguu

SEQ ID NO: 253439 - RNA, 22 nt, Human
auucauuagccacuaacuagca

SEQ ID NO: 253440 - RNA, 22 nt, Human
gggcuggcaucgguugcugaga

SEQ ID NO: 253441 - RNA, 22 nt, Human
aacacuucucaucacugcaagc

SEQ ID NO: 253442 - RNA, 22 nt, Human
caguuucuacgaaggucaaccc

SEQ ID NO: 253443 - RNA, 22 nt, Human
gcuuccugagaaacaaucugau

SEQ ID NO: 253444 - RNA, 22 nt, Human
aaauugcugacacuugaccauu

SEQ ID NO: 253445 - RNA, 22 nt, Human
ugcucgagguccccaccggcuc

SEQ ID NO: 253446 - RNA, 16 nt, Human
agcagccagcacugga

SEQ ID NO: 253447 - RNA, 22 nt, Human
caagacuuagagcaucuugaaa

SEQ ID NO: 253448 - RNA, 21 nt, Human
auaguuuggagugggaaaguc

SEQ ID NO: 253449 - RNA, 22 nt, Human
cugccuagcgccaucugccucu

SEQ ID NO: 253450 - RNA, 22 nt, Human
ucacauuugcaauugcauuguu

SEQ ID NO: 253451 - RNA, 22 nt, Human
accauuuaaggaaaauguauca

SEQ ID NO: 253452 - RNA, 22 nt, Human
gggacauggaggcgcgcaggca

SEQ ID NO: 253453 - RNA, 22 nt, Human
auagacaaacacgaagaugaca

SEQ ID NO: 253454 - RNA, 22 nt, Human
aauauaauuuuauuccuagagu

SEQ ID NO: 253455 - RNA, 22 nt, Human
cagcucuggcagagcccaaccc

SEQ ID NO: 253456 - RNA, 22 nt, Human
agaaacucuaggucaauugagg

SEQ ID NO: 253457 - RNA, 22 nt, Human
ugagagccagaagggccugagg

SEQ ID NO: 253458 - RNA, 22 nt, Human
agaggcaugcacagaugugcug

SEQ ID NO: 253459 - RNA, 22 nt, Human
gcuggcaggauaacuucuaagc

SEQ ID NO: 253460 - RNA, 22 nt, Human
ugcuggcuuauuuaguaaaugu

SEQ ID NO: 253461 - RNA, 22 nt, Human
ugaguccugcucugggcagggu

SEQ ID NO: 253462 - RNA, 22 nt, Human
cuggaucuaaagguggauguag

SEQ ID NO: 253463 - RNA, 22 nt, Human
uggcugagaaaaugguuuuagg

SEQ ID NO: 253464 - RNA, 22 nt, Human
gcccucagaguuccccacagug

SEQ ID NO: 253465 - RNA, 22 nt, Human
cugggaggcaccgcgucgugcu

SEQ ID NO: 253466 - RNA, 22 nt, Human
ugaugugugauucauucucaaa

SEQ ID NO: 253467 - RNA, 22 nt, Human
cuuccuggaugagcaggcugau

SEQ ID NO: 253468 - RNA, 22 nt, Human
guuaucaugcuucaucaucacu

SEQ ID NO: 253469 - RNA, 22 nt, Human
cucugaaaguuagagaaaauag

SEQ ID NO: 253470 - RNA, 22 nt, Human
gaagaacgucuuauaaauucac

SEQ ID NO: 253471 - RNA, 22 nt, Human
ucuguggaguuagacugguauc

SEQ ID NO: 253472 - RNA, 22 nt, Human
uauucagaguauuccaugaggu

SEQ ID NO: 253473 - RNA, 22 nt, Human
aacccaggucuuuggcuuccag

SEQ ID NO: 253474 - RNA, 22 nt, Human
aaugccaaugggcagaacuaga

SEQ ID NO: 253475 - RNA, 22 nt, Human
uuacacaacagugcaucagcag

SEQ ID NO: 253476 - RNA, 22 nt, Human
caggaugagaagggcucuuacg

SEQ ID NO: 253477 - RNA, 22 nt, Human
caucacauuagucucaagagaa

SEQ ID NO: 253478 - RNA, 21 nt, Human
caggaaacugaggccaugggg

SEQ ID NO: 253479 - RNA, 22 nt, Human
aguggcuggagccccaggcugg

SEQ ID NO: 253480 - RNA, 19 nt, Human
uccauaaugaagauagagg

SEQ ID NO: 253481 - RNA, 19 nt, Human
ucuugcagccccagcaggc

SEQ ID NO: 253482 - RNA, 22 nt, Human
ugcucaucaacaugaugaucau

SEQ ID NO: 253483 - RNA, 22 nt, Human
gggccaagggugcguggcagga

SEQ ID NO: 253484 - RNA, 22 nt, Human
augcaauauagggaagauagau

SEQ ID NO: 253485 - RNA, 22 nt, Human
aaauauaauuucugccucaaua

SEQ ID NO: 253486 - RNA, 22 nt, Human
agauggggcagaauggagccau

SEQ ID NO: 253487 - RNA, 22 nt, Human
cuccaggcgccgcuuuugcagu

SEQ ID NO: 253488 - RNA, 22 nt, Human
ucuccaggugaaacuugcaggg

SEQ ID NO: 253489 - RNA, 22 nt, Human
cuuccucaugugcaaugcaagc

SEQ ID NO: 253490 - RNA, 22 nt, Human
aagggccauugcugagagcagu

SEQ ID NO: 253491 - RNA, 22 nt, Human
acauaugugcuuauauccauga

SEQ ID NO: 253492 - RNA, 20 nt, Human
gugcccugugggcuauuuuc

SEQ ID NO: 253493 - RNA, 21 nt, Human
uccagcuccugccacuccuua

SEQ ID NO: 253494 - RNA, 22 nt, Human
ugacaguauugauggcaggauu

SEQ ID NO: 253495 - RNA, 22 nt, Human
uccauucuuuuuaccucucaga

SEQ ID NO: 253496 - RNA, 22 nt, Human
ugucuccauuuucaaguagcag

SEQ ID NO: 253497 - RNA, 22 nt, Human
agcaccaggaaagaaggggcca

SEQ ID NO: 253498 - RNA, 22 nt, Human
ucaggguaaaccuucacuguga

SEQ ID NO: 253499 - RNA, 22 nt, Human
agugucuuacucccucaggcac

SEQ ID NO: 253500 - RNA, 22 nt, Human
gcagcagggagcagggguguca

SEQ ID NO: 253501 - RNA, 22 nt, Human
agagacacaucauauaaguaua

SEQ ID NO: 253502 - RNA, 22 nt, Human
acuccuggaaaagaacgcaggg

SEQ ID NO: 253503 - RNA, 22 nt, Human
gcuggcuuuauggggcuugugg

SEQ ID NO: 253504 - RNA, 22 nt, Human
ucacaggacagccuuccacccg

SEQ ID NO: 253505 - RNA, 22 nt, Human
uuacuaaggacucuaaguucua

SEQ ID NO: 253506 - RNA, 22 nt, Human
ggcuucccugccucacuuauuc

SEQ ID NO: 253507 - RNA, 19 nt, Human
cagccucaaucccucgggc

SEQ ID NO: 253508 - RNA, 17 nt, Human
cugggccuccccugucc

SEQ ID NO: 253509 - RNA, 20 nt, Human
ccagagcugauggcugcccg

SEQ ID NO: 253510 - RNA, 22 nt, Human
guacauuuuacuuuguuugaau

SEQ ID NO: 253511 - RNA, 22 nt, Human
agacccucuccucauggacaug

SEQ ID NO: 253512 - RNA, 22 nt, Human
ugcugcaguucacccugccguc

SEQ ID NO: 253513 - RNA, 22 nt, Human
cacuuaaaacuccuggaauugu

SEQ ID NO: 253514 - RNA, 22 nt, Human
agugugaguuugguugagacuu

SEQ ID NO: 253515 - RNA, 19 nt, Human
gcaggacucccagcuccuc

SEQ ID NO: 253516 - RNA, 22 nt, Human
cugcaggacgaccgccucaucu

SEQ ID NO: 253517 - RNA, 22 nt, Human
aauucauugccagaaucuauga

SEQ ID NO: 253518 - RNA, 20 nt, Human
ucacaauaugagcucauaca

SEQ ID NO: 253519 - RNA, 22 nt, Human
agcccagaugguagcccuagaa

SEQ ID NO: 253520 - RNA, 22 nt, Human
cugcugcccuagacccaguccu

SEQ ID NO: 253521 - RNA, 22 nt, Human
cccucucucaggcugacagccu

SEQ ID NO: 253522 - RNA, 22 nt, Human
ucacacacauaaucuaagauua

SEQ ID NO: 253523 - RNA, 22 nt, Human
gaguccuuuucucuguccacug

SEQ ID NO: 253524 - RNA, 22 nt, Human
gggacaggccccucgcuagcuu

SEQ ID NO: 253525 - RNA, 22 nt, Human
agcagguguagggcucuuugua

SEQ ID NO: 253526 - RNA, 17 nt, Human
aaccagcuguccccucc

SEQ ID NO: 253527 - RNA, 22 nt, Human
ccagcacucuauugaauauucu

SEQ ID NO: 253528 - RNA, 22 nt, Human
uccugcuggaaacuuccucuug

SEQ ID NO: 253529 - RNA, 22 nt, Human
uucaacaucaagaaugcaugga

SEQ ID NO: 253530 - RNA, 22 nt, Human
gacuuuauccugccugaccacg

SEQ ID NO: 253531 - RNA, 22 nt, Human
acuguccaagcaugccuggcuu

SEQ ID NO: 253532 - RNA, 20 nt, Human
uuugacucaggccuuuagcc

SEQ ID NO: 253533 - RNA, 22 nt, Human
acaugccaugaagguauuuuug

SEQ ID NO: 253534 - RNA, 22 nt, Human
ucaacagaagugauagcuauua

SEQ ID NO: 253535 - RNA, 22 nt, Human
cuauuucauugugcugagucug

SEQ ID NO: 253536 - RNA, 17 nt, Human
cugaggagaacagaaag

SEQ ID NO: 253537 - RNA, 22 nt, Human
agcuggcuauacuugaaaaguc

SEQ ID NO: 253538 - RNA, 22 nt, Human
ugggggcugaguaagaugagau

SEQ ID NO: 253539 - RNA, 22 nt, Human
ugaaacaggaaguaaacagaca

SEQ ID NO: 253540 - RNA, 22 nt, Human
cuuucugauuuuaagcucuaau

SEQ ID NO: 253541 - RNA, 22 nt, Human
guugugcagaagugccucagua

SEQ ID NO: 253542 - RNA, 22 nt, Human
agguuacagugauuauagguuu

SEQ ID NO: 253543 - RNA, 22 nt, Human
guguggcagggcguuugcagac

SEQ ID NO: 253544 - RNA, 22 nt, Human
agcaggucuugcucucaacagg

SEQ ID NO: 253545 - RNA, 22 nt, Human
caguucugacuuucauaauguc

SEQ ID NO: 253546 - RNA, 22 nt, Human
cagcugaguggacccuagaggc

SEQ ID NO: 253547 - RNA, 22 nt, Human
gcccaggagaggccagggcuga

SEQ ID NO: 253548 - RNA, 22 nt, Human
ugcuuuaaaauggacuguuuug

SEQ ID NO: 253549 - RNA, 22 nt, Human
ggauaguucuggauauuuuaag

SEQ ID NO: 253550 - RNA, 22 nt, Human
aucuuuggacggucccaacuga

SEQ ID NO: 253551 - RNA, 22 nt, Human
uaucaucuuguugucaugcagc

SEQ ID NO: 253552 - RNA, 22 nt, Human
accaggaguuuugaccaggggc

SEQ ID NO: 253553 - RNA, 20 nt, Human
augcacccucagggucccug

SEQ ID NO: 253554 - RNA, 22 nt, Human
ccaguuugaggaagaaguagau

SEQ ID NO: 253555 - RNA, 22 nt, Human
ugagcucuucuaacuaauugug

SEQ ID NO: 253556 - RNA, 22 nt, Human
cuggcuucugggccagggcaga

SEQ ID NO: 253557 - RNA, 22 nt, Human
uagcagagcagggaucagagcc

SEQ ID NO: 253558 - RNA, 22 nt, Human
gacaggcuuugagucccagaac

SEQ ID NO: 253559 - RNA, 22 nt, Human
ugacaccaaggaaguaucauuu

SEQ ID NO: 253560 - RNA, 22 nt, Human
ugcccaggaucuggcgaugcuc

SEQ ID NO: 253561 - RNA, 21 nt, Human
aaucaagaguacugguguggc

SEQ ID NO: 253562 - RNA, 22 nt, Human
auuacaguaaaugcuacaggca

SEQ ID NO: 253563 - RNA, 22 nt, Human
uuaacacuaucugucauaauua

SEQ ID NO: 253564 - RNA, 22 nt, Human
acagugucaucaguuucucaac

SEQ ID NO: 253565 - RNA, 22 nt, Human
gcccuccaccuggucucucugg

SEQ ID NO: 253566 - RNA, 22 nt, Human
aucagcaaucucguguauuagg

SEQ ID NO: 253567 - RNA, 22 nt, Human
ccagccuuacugcccuucagug

SEQ ID NO: 253568 - RNA, 22 nt, Human
gccuguuuguuugcaaaggagc

SEQ ID NO: 253569 - RNA, 18 nt, Human
aagggcuggccuuuggag

SEQ ID NO: 253570 - RNA, 22 nt, Human
auuugcuggugaauguauagcu

SEQ ID NO: 253571 - RNA, 22 nt, Human
agcagaguuucucaacaucagc

SEQ ID NO: 253572 - RNA, 22 nt, Human
ccugagaggcccucucacuguc

SEQ ID NO: 253573 - RNA, 22 nt, Human
gcaugcaguaaaauucagcaac

SEQ ID NO: 253574 - RNA, 22 nt, Human
ugcacuacugugauacacagcc

SEQ ID NO: 253575 - RNA, 19 nt, Human
ugcuuugcucuuggacuca

SEQ ID NO: 253576 - RNA, 22 nt, Human
acaugacagggaaugaggugaa

SEQ ID NO: 253577 - RNA, 22 nt, Human
ugcagauucaaaugaaaugcaa

SEQ ID NO: 253578 - RNA, 22 nt, Human
agugucugagccagaauuagaa

SEQ ID NO: 253579 - RNA, 19 nt, Human
ugggaaaguaacauacaaa

SEQ ID NO: 253580 - RNA, 22 nt, Human
gccugagagucugcauuucuaa

SEQ ID NO: 253581 - RNA, 22 nt, Human
uuucacaucaugggauggaagc

SEQ ID NO: 253582 - RNA, 22 nt, Human
uguguauguuuugagguugcua

SEQ ID NO: 253583 - RNA, 22 nt, Human
acaaagauucauuugcauuauu

SEQ ID NO: 253584 - RNA, 22 nt, Human
gucaaaaaguagucauuucugu

SEQ ID NO: 253585 - RNA, 22 nt, Human
ccaggcugagcaugauuggagc

SEQ ID NO: 253586 - RNA, 22 nt, Human
augaaaagcauaaacgcugaag

SEQ ID NO: 253587 - RNA, 20 nt, Human
gaaaauaggccagccaggua

SEQ ID NO: 253588 - RNA, 22 nt, Human
cuucccagcaccucagucuggc

SEQ ID NO: 253589 - RNA, 22 nt, Human
aaagccagggacagugugcaug

SEQ ID NO: 253590 - RNA, 22 nt, Human
agagaagggguaaagaguccug

SEQ ID NO: 253591 - RNA, 22 nt, Human
auagggcugccaucacagaaga

SEQ ID NO: 253592 - RNA, 22 nt, Human
aauaguguuguucacucaggag

SEQ ID NO: 253593 - RNA, 22 nt, Human
aggcuagaggcuucuggcuuca

SEQ ID NO: 253594 - RNA, 22 nt, Human
auuguuuaaagauacaucccug

SEQ ID NO: 253595 - RNA, 22 nt, Human
ggcucaggaccugggauugcca

SEQ ID NO: 253596 - RNA, 22 nt, Human
ggcuccaggcuccuauuucacu

SEQ ID NO: 253597 - RNA, 20 nt, Human
uuucuguagcucaguauuca

SEQ ID NO: 253598 - RNA, 22 nt, Human
aguauuugaucagaugauagua

SEQ ID NO: 253599 - RNA, 22 nt, Human
agcauuagauuaaaaauuuaga

SEQ ID NO: 253600 - RNA, 22 nt, Human
ugacaaagugaggucuucagua

SEQ ID NO: 253601 - RNA, 22 nt, Human
uugcauucccagccaaguuagu

SEQ ID NO: 253602 - RNA, 22 nt, Human
aaaaaagauugaugguggaugc

SEQ ID NO: 253603 - RNA, 22 nt, Human
ccucuuugagauucaguuuucc

SEQ ID NO: 253604 - RNA, 22 nt, Human
aagcauuucagguagagauauu

SEQ ID NO: 253605 - RNA, 22 nt, Human
uaaaugcaaugugcuuuaccag

SEQ ID NO: 253606 - RNA, 22 nt, Human
auuaagacugcccauguuuuua

SEQ ID NO: 253607 - RNA, 22 nt, Human
uguaauuuccugauguuagaac

SEQ ID NO: 253608 - RNA, 22 nt, Human
uuaauuuuaaccuguuuguguc

SEQ ID NO: 253609 - RNA, 22 nt, Human
ugacacagauuagagacauacc

SEQ ID NO: 253610 - RNA, 19 nt, Human
ugaagcaggcagagaagau

SEQ ID NO: 253611 - RNA, 22 nt, Human
caaagcugacgaggucagcauc

SEQ ID NO: 253612 - RNA, 22 nt, Human
uccagcagguguuugccaacuu

SEQ ID NO: 253613 - RNA, 20 nt, Human
gggcuagguagccauuuggc

SEQ ID NO: 253614 - RNA, 22 nt, Human
augcacaggcugugggcugguu

SEQ ID NO: 253615 - RNA, 17 nt, Human
cuccuggccaccccucu

SEQ ID NO: 253616 - RNA, 22 nt, Human
gacuuucuguccagugauuucu

SEQ ID NO: 253617 - RNA, 22 nt, Human
aaaguagcuuaguugauauuuc

SEQ ID NO: 253618 - RNA, 18 nt, Human
cugggcucgagagauccu

SEQ ID NO: 253619 - RNA, 22 nt, Human
uaucagcaccgcggacagcauc

SEQ ID NO: 253620 - RNA, 22 nt, Human
uuucuaggacaugauaggauau

SEQ ID NO: 253621 - RNA, 20 nt, Human
agugacugggagaauggauu

SEQ ID NO: 253622 - RNA, 22 nt, Human
caguuacaugcucaugucauca

SEQ ID NO: 253623 - RNA, 22 nt, Human
ucauuuacauagaaacaauaua

SEQ ID NO: 253624 - RNA, 22 nt, Human
auuauauuugaaagguuggaag

SEQ ID NO: 253625 - RNA, 22 nt, Human
ggguugaggcggaugucggcgg

SEQ ID NO: 253626 - RNA, 22 nt, Human
ucucauuugccucaucuauaaa

SEQ ID NO: 253627 - RNA, 22 nt, Human
uucuguaucucuguguuucuug

SEQ ID NO: 253628 - RNA, 22 nt, Human
ccagcaggggaauauuuuuagg

SEQ ID NO: 253629 - RNA, 22 nt, Human
cuguccugggggugguccuugc

SEQ ID NO: 253630 - RNA, 22 nt, Human
uuccuccuucccauuccugggg

SEQ ID NO: 253631 - RNA, 22 nt, Human
ugagacaggcuuccuucuuggg

SEQ ID NO: 253632 - RNA, 22 nt, Human
uacaguuucccagcagaugcaa

SEQ ID NO: 253633 - RNA, 22 nt, Human
gcaggagguugagccaggacug

SEQ ID NO: 253634 - RNA, 22 nt, Human
caggacuggcucgcagugggug

SEQ ID NO: 253635 - RNA, 22 nt, Human
cgcugcagacgcgcuggcgaaa

SEQ ID NO: 253636 - RNA, 22 nt, Human
aggaagaaaacuaauuagaugg

SEQ ID NO: 253637 - RNA, 22 nt, Human
caacuuuagcaauguuaguaua

SEQ ID NO: 253638 - RNA, 22 nt, Human
cuguuuauaaaccaccaguuua

SEQ ID NO: 253639 - RNA, 21 nt, Human
aggcccuggaggucagagaaa

SEQ ID NO: 253640 - RNA, 22 nt, Human
cuccugagaggaucucuguugu

SEQ ID NO: 253641 - RNA, 20 nt, Human
cagucccaauccagggccag

SEQ ID NO: 253642 - RNA, 22 nt, Human
aggcaguuggucauugcucuuu

SEQ ID NO: 253643 - RNA, 22 nt, Human
cuucauuucaggcugaagaaua

SEQ ID NO: 253644 - RNA, 22 nt, Human
aggcuggggaauugaauuugcu

SEQ ID NO: 253645 - RNA, 22 nt, Human
gaaaagaguccugugugaggag

SEQ ID NO: 253646 - RNA, 22 nt, Human
guggaaugaauagauuugcauu

SEQ ID NO: 253647 - RNA, 22 nt, Human
caaaggcaaucuuguucucugg

SEQ ID NO: 253648 - RNA, 22 nt, Human
aagguacaguuuuaagaauaag

SEQ ID NO: 253649 - RNA, 22 nt, Human
augauuuuucagcagaggaucu

SEQ ID NO: 253650 - RNA, 22 nt, Human
ccugagcaaaggaaggaugacu

SEQ ID NO: 253651 - RNA, 22 nt, Human
gucuggaaauuuaagguaugag

SEQ ID NO: 253652 - RNA, 22 nt, Human
cucuccaggcgagguccuacug

SEQ ID NO: 253653 - RNA, 22 nt, Human
cugccaaaaggugcaccugcug

SEQ ID NO: 253654 - RNA, 22 nt, Human
guuagacaugcagaaucucagg

SEQ ID NO: 253655 - RNA, 20 nt, Human
uccaggcuccuccacuuagu

SEQ ID NO: 253656 - RNA, 22 nt, Human
cuagagaaacgccgugggagga

SEQ ID NO: 253657 - RNA, 22 nt, Human
gccuccugguugcuucuccaac

SEQ ID NO: 253658 - RNA, 22 nt, Human
uaaauucuacaacuucaaagau

SEQ ID NO: 253659 - RNA, 22 nt, Human
ggcaagaaggcuucagguagcu

SEQ ID NO: 253660 - RNA, 22 nt, Human
ucuggcccaugauccugcuaac

SEQ ID NO: 253661 - RNA, 22 nt, Human
uacuucugcaccaaccuuaaua

SEQ ID NO: 253662 - RNA, 22 nt, Human
aacaggcuaguuuuaaagcaua

SEQ ID NO: 253663 - RNA, 19 nt, Human
auagagacagaguuuaauc

SEQ ID NO: 253664 - RNA, 22 nt, Human
uucucacaggaaguaggacuuu

SEQ ID NO: 253665 - RNA, 22 nt, Human
cacagaaauuauuaggaugcuu

SEQ ID NO: 253666 - RNA, 22 nt, Human
cagcuccucagcccugccuugg

SEQ ID NO: 253667 - RNA, 22 nt, Human
uagggcuauucugaguaauaau

SEQ ID NO: 253668 - RNA, 22 nt, Human
gccucugggcucugccccuggc

SEQ ID NO: 253669 - RNA, 22 nt, Human
uuccugggcuuuccccucuggu

SEQ ID NO: 253670 - RNA, 22 nt, Human
uugauacauuuuuaggauaaac

SEQ ID NO: 253671 - RNA, 22 nt, Human
cacugagaaagugaccugccaa

SEQ ID NO: 253672 - RNA, 22 nt, Human
uagcaaaaaaacuggcaucucc

SEQ ID NO: 253673 - RNA, 22 nt, Human
aguguggcugcguagggcucuc

SEQ ID NO: 253674 - RNA, 22 nt, Human
acagaacugcaggaggaaaagc

SEQ ID NO: 253675 - RNA, 22 nt, Human
ucuggcugcugcgugagugcuu

SEQ ID NO: 253676 - RNA, 22 nt, Human
uaacacacugaaggugagaugg

SEQ ID NO: 253677 - RNA, 22 nt, Human
ucaguuuauaaauuguauuuag

SEQ ID NO: 253678 - RNA, 22 nt, Human
uacaguuuguuacauuguuagu

SEQ ID NO: 253679 - RNA, 20 nt, Human
uaaagacauaagcuacuauc

SEQ ID NO: 253680 - RNA, 22 nt, Human
uacauuuucuaggggaccaaga

SEQ ID NO: 253681 - RNA, 22 nt, Human
cacacaggaugaagcagcagaa

SEQ ID NO: 253682 - RNA, 22 nt, Human
uuaccaaaugaaauagagauuu

SEQ ID NO: 253683 - RNA, 22 nt, Human
acauggcacccagaucucaaaa

SEQ ID NO: 253684 - RNA, 22 nt, Human
auccaggcuggguguggcuacu

SEQ ID NO: 253685 - RNA, 22 nt, Human
aagcaucuaggugacugacaua

SEQ ID NO: 253686 - RNA, 22 nt, Human
uaguuucuaaagcuuccuaggu

SEQ ID NO: 253687 - RNA, 22 nt, Human
gacccuuagaaugugaucuuau

SEQ ID NO: 253688 - RNA, 19 nt, Human
aaccuuagcuucucaggcc

SEQ ID NO: 253689 - RNA, 22 nt, Human
cccugagaugccucacccuagu

SEQ ID NO: 253690 - RNA, 22 nt, Human
ucugaagccaccucugcuuguc

SEQ ID NO: 253691 - RNA, 22 nt, Human
gauuucuaaggaggcugaacuu

SEQ ID NO: 253692 - RNA, 22 nt, Human
gaaucuaugccucauauagacc

SEQ ID NO: 253693 - RNA, 22 nt, Human
uacagcgaaaauuuagcuugau

SEQ ID NO: 253694 - RNA, 22 nt, Human
uggagggaacaaaggaguccca

SEQ ID NO: 253695 - RNA, 22 nt, Human
ucagagcuaaggggagagcaaa

SEQ ID NO: 253696 - RNA, 22 nt, Human
uggcugggccgggccuugugcc

SEQ ID NO: 253697 - RNA, 22 nt, Human
gagggcugcaaugagacagaga

SEQ ID NO: 253698 - RNA, 18 nt, Human
gccaggcaggguggggaa

SEQ ID NO: 253699 - RNA, 22 nt, Human
uucugggacaucuggacaguuu

SEQ ID NO: 253700 - RNA, 22 nt, Human
aaagcaagaugcauccgucaag

SEQ ID NO: 253701 - RNA, 22 nt, Human
gagucucugggagggaaagaag

SEQ ID NO: 253702 - RNA, 22 nt, Human
ggcuuuauuaagcaggguaagu

SEQ ID NO: 253703 - RNA, 22 nt, Human
ucagucaggagaugccagagau

SEQ ID NO: 253704 - RNA, 22 nt, Human
acacucuacagagcaaucuacc

SEQ ID NO: 253705 - RNA, 22 nt, Human
ggcaguggcauguggguagugg

SEQ ID NO: 253706 - RNA, 22 nt, Human
agaauuuuugauuaucuacucg

SEQ ID NO: 253707 - RNA, 22 nt, Human
uaaaauagcaugugcagugaaa

SEQ ID NO: 253708 - RNA, 22 nt, Human
gaggcuucccgcccaugcugga

SEQ ID NO: 253709 - RNA, 22 nt, Human
uccaggaguccuggguggcccc

SEQ ID NO: 253710 - RNA, 22 nt, Human
gcucagagcagaugguacucag

SEQ ID NO: 253711 - RNA, 20 nt, Human
ucacacauaagugaacgcac

SEQ ID NO: 253712 - RNA, 20 nt, Human
ccaggcuggcaaaugggggc

SEQ ID NO: 253713 - RNA, 22 nt, Human
ugcagggaaaguguuggcagca

SEQ ID NO: 253714 - RNA, 22 nt, Human
uucacaauuaacuuuauacuua

SEQ ID NO: 253715 - RNA, 22 nt, Human
ggaucugggcucugccaaucag

SEQ ID NO: 253716 - RNA, 22 nt, Human
uggaugugagaaggaucaggcu

SEQ ID NO: 253717 - RNA, 22 nt, Human
gaugagugauguugaagaaggu

SEQ ID NO: 253718 - RNA, 20 nt, Human
uuccagccgccacuuccgcc

SEQ ID NO: 253719 - RNA, 22 nt, Human
ccucaggcugucuuccuucugg

SEQ ID NO: 253720 - RNA, 22 nt, Human
aaauguuucuacuugugagcau

SEQ ID NO: 253721 - RNA, 22 nt, Human
ucuuaguuguuugcugucuaac

SEQ ID NO: 253722 - RNA, 22 nt, Human
uacaugcauguguguaaauaua

SEQ ID NO: 253723 - RNA, 22 nt, Human
ugggagcacccugaggagcuuc

SEQ ID NO: 253724 - RNA, 22 nt, Human
uuacauguucucauacacagag

SEQ ID NO: 253725 - RNA, 22 nt, Human
agaucagauucugccuuuguga

SEQ ID NO: 253726 - RNA, 22 nt, Human
gcugggcuggccgccgagaucg

SEQ ID NO: 253727 - RNA, 22 nt, Human
acagguggacacagcagcaguc

SEQ ID NO: 253728 - RNA, 22 nt, Human
gcuuagcaaugugacaagaugc

SEQ ID NO: 253729 - RNA, 22 nt, Human
ccuggcucaguguugaaggggu

SEQ ID NO: 253730 - RNA, 19 nt, Human
ucuccaggugccccaaaca

SEQ ID NO: 253731 - RNA, 20 nt, Human
agcaccuguguagaagcauc

SEQ ID NO: 253732 - RNA, 22 nt, Human
caccaggcugagccucucaucu

SEQ ID NO: 253733 - RNA, 22 nt, Human
uggggguguccuggugcacaca

SEQ ID NO: 253734 - RNA, 22 nt, Human
gggcucuggacccaggcaagag

SEQ ID NO: 253735 - RNA, 22 nt, Human
uguuuaacuaguuuucacacuu

SEQ ID NO: 253736 - RNA, 20 nt, Human
aggcugggguguuuugccca

SEQ ID NO: 253737 - RNA, 22 nt, Human
uaguaagcacauggacaagugg

SEQ ID NO: 253738 - RNA, 22 nt, Human
gugcaagcaguacacucaaagc

SEQ ID NO: 253739 - RNA, 22 nt, Human
uaggguacaugugcacaacaug

SEQ ID NO: 253740 - RNA, 22 nt, Human
ucuguacaccaggggccauucu

SEQ ID NO: 253741 - RNA, 22 nt, Human
uuucuacaauuuuuggcaugag

SEQ ID NO: 253742 - RNA, 22 nt, Human
aacauuuaugguagucauugca

SEQ ID NO: 253743 - RNA, 22 nt, Human
acuucucuuccccggaacucua

SEQ ID NO: 253744 - RNA, 22 nt, Human
ccugccagucacuaugucaccu

SEQ ID NO: 253745 - RNA, 23 nt, Human
uugaggcaaacucuuuucugaaa

SEQ ID NO: 253746 - RNA, 22 nt, Human
uauugcugccaggacccuaucc

SEQ ID NO: 253747 - RNA, 22 nt, Human
cccaggcagggacgugcucugg

SEQ ID NO: 253748 - RNA, 22 nt, Human
aacaaauuaguugcaagacugg

SEQ ID NO: 253749 - RNA, 22 nt, Human
cuguccugauggugccacuggu

SEQ ID NO: 253750 - RNA, 22 nt, Human
agucugugacucauuggaucuc

SEQ ID NO: 253751 - RNA, 22 nt, Human
ugggauaauaaauagaggcaga

SEQ ID NO: 253752 - RNA, 22 nt, Human
uccugaccacacugccuucugc

SEQ ID NO: 253753 - RNA, 22 nt, Human
cuccuggugcuggggcugccgc

SEQ ID NO: 253754 - RNA, 17 nt, Human
gaaagcaucacaugcuc

SEQ ID NO: 253755 - RNA, 22 nt, Human
uuucagaugugugucucugaag

SEQ ID NO: 253756 - RNA, 22 nt, Human
ugaugaaaaccagaacucucau

SEQ ID NO: 253757 - RNA, 22 nt, Human
aaguaguuggaaauaagacaga

SEQ ID NO: 253758 - RNA, 22 nt, Human
auauuaaugggauuuagucagg

SEQ ID NO: 253759 - RNA, 23 nt, Human
acuuaaaugguucuuuaucucag

SEQ ID NO: 253760 - RNA, 21 nt, Human
ccaggcagagcugugaguucu

SEQ ID NO: 253761 - RNA, 22 nt, Human
gagaggccauggcugugcagug

SEQ ID NO: 253762 - RNA, 22 nt, Human
ggcugugaaguagcaggggcag

SEQ ID NO: 253763 - RNA, 22 nt, Human
gaucuuuucagguuucucuagu

SEQ ID NO: 253764 - RNA, 22 nt, Human
aaaagcaguuuauagucaguug

SEQ ID NO: 253765 - RNA, 23 nt, Human
agagcaaggaaaugaggugugau

SEQ ID NO: 253766 - RNA, 22 nt, Human
gaugaggggucauuggcuggga

SEQ ID NO: 253767 - RNA, 22 nt, Human
cucagaagaaucagcagcuauu

SEQ ID NO: 253768 - RNA, 23 nt, Human
uccaggcaugagcucuggaugga

SEQ ID NO: 253769 - RNA, 22 nt, Human
uaguuacacauggguagggaau

SEQ ID NO: 253770 - RNA, 22 nt, Human
aauuucagaacccaaauuagcg

SEQ ID NO: 253771 - RNA, 22 nt, Human
ccuguaggauauuguagaauac

SEQ ID NO: 253772 - RNA, 22 nt, Human
uuuaaauguuuauagagaguac

SEQ ID NO: 253773 - RNA, 22 nt, Human
aguggcugcuucugguugcucc

SEQ ID NO: 253774 - RNA, 22 nt, Human
gaggcucccuuuagguccagau

SEQ ID NO: 253775 - RNA, 22 nt, Human
caggaggugacuuccagggguu

SEQ ID NO: 253776 - RNA, 22 nt, Human
uuuaaauuauaguuaaugucug

SEQ ID NO: 253777 - RNA, 16 nt, Human
aagccuaaauuacaga

SEQ ID NO: 253778 - RNA, 20 nt, Human
aaugucuugagacauuucag

SEQ ID NO: 253779 - RNA, 22 nt, Human
agcuugacagacagaugguagc

SEQ ID NO: 253780 - RNA, 22 nt, Human
cagagcugguguuacaagucca

SEQ ID NO: 253781 - RNA, 22 nt, Human
ucuagggagaguuguuaugggu

SEQ ID NO: 253782 - RNA, 22 nt, Human
ucacagaaguguagugaggaaa

SEQ ID NO: 253783 - RNA, 22 nt, Human
agugguauaagucugaagauca

SEQ ID NO: 253784 - RNA, 22 nt, Human
caauagaaaacucaauacuuaa

SEQ ID NO: 253785 - RNA, 22 nt, Human
aaagcaguccuucccuuaaggu

SEQ ID NO: 253786 - RNA, 22 nt, Human
gccagaugccguaaagaugggc

SEQ ID NO: 253787 - RNA, 22 nt, Human
gcugcagggcucucacaggggg

SEQ ID NO: 253788 - RNA, 22 nt, Human
gaaagcacaguucugaccaugu

SEQ ID NO: 253789 - RNA, 22 nt, Human
uauugcugacugucuucugagu

SEQ ID NO: 253790 - RNA, 22 nt, Human
uugucugacuucuuuaguuacu

SEQ ID NO: 253791 - RNA, 22 nt, Human
aaucuacauagagaucaaauga

SEQ ID NO: 253792 - RNA, 22 nt, Human
cuccugagaauuuucaguugga

SEQ ID NO: 253793 - RNA, 22 nt, Human
cccugaccaccagcuccauuug

SEQ ID NO: 253794 - RNA, 22 nt, Human
ggaacuuuuuaacaagcugcug

SEQ ID NO: 253795 - RNA, 22 nt, Human
agaaucagaugaagacuccugc

SEQ ID NO: 253796 - RNA, 22 nt, Human
ggccccagguagaagauauaga

SEQ ID NO: 253797 - RNA, 22 nt, Human
uaguuacagaucuaggacuguu

SEQ ID NO: 253798 - RNA, 22 nt, Human
aaggcagagggcuggaucagag

SEQ ID NO: 253799 - RNA, 22 nt, Human
ugcuuuaaccaucuuguuugga

SEQ ID NO: 253800 - RNA, 20 nt, Human
augugagggguugaaguggg

SEQ ID NO: 253801 - RNA, 22 nt, Human
agucagaguucuuggggagaca

SEQ ID NO: 253802 - RNA, 22 nt, Human
acuacaauacucuuaguaaaag

SEQ ID NO: 253803 - RNA, 22 nt, Human
aacuuugggccuaaguacuguu

SEQ ID NO: 253804 - RNA, 22 nt, Human
ucagugucagucuuuuagauau

SEQ ID NO: 253805 - RNA, 22 nt, Human
gaagggcuuggcugggaggcca

SEQ ID NO: 253806 - RNA, 22 nt, Human
aggagcccuccguugcuucauc

SEQ ID NO: 253807 - RNA, 22 nt, Human
acuggcagagacccugauggcc

SEQ ID NO: 253808 - RNA, 22 nt, Human
uauggaaauaauuagacaagug

SEQ ID NO: 253809 - RNA, 21 nt, Human
ucacaugcccauuacuggagc

SEQ ID NO: 253810 - RNA, 22 nt, Human
gacaauuagaucauuccuuuga

SEQ ID NO: 253811 - RNA, 22 nt, Human
aucuaauuuucacucauuugcu

SEQ ID NO: 253812 - RNA, 19 nt, Human
cagcucaguuugauucucu

SEQ ID NO: 253813 - RNA, 22 nt, Human
agauguuuuggagacacuaacc

SEQ ID NO: 253814 - RNA, 22 nt, Human
ucccuucacagaugcgauguuu

SEQ ID NO: 253815 - RNA, 22 nt, Human
ugugaagguaagguuugcuuga

SEQ ID NO: 253816 - RNA, 22 nt, Human
ugucuuuacuuagaaguucagg

SEQ ID NO: 253817 - RNA, 22 nt, Human
caaaaguucucacccagacaug

SEQ ID NO: 253818 - RNA, 18 nt, Human
ucaggcuggaaguuugcc

SEQ ID NO: 253819 - RNA, 23 nt, Human
gcccugcugggaccuccugcuac

SEQ ID NO: 253820 - RNA, 22 nt, Human
agacagacuugaaaauguucuu

SEQ ID NO: 253821 - RNA, 19 nt, Human
acugagaccacagacaagu

SEQ ID NO: 253822 - RNA, 22 nt, Human
cuccagugcacuggucuuuuca

SEQ ID NO: 253823 - RNA, 22 nt, Human
uccugaggcacaauccuagaau

SEQ ID NO: 253824 - RNA, 17 nt, Human
cuggagcuguguaaccu

SEQ ID NO: 253825 - RNA, 22 nt, Human
gaauucaucgucuuagcugcca

SEQ ID NO: 253826 - RNA, 20 nt, Human
aggucugauuccagaaucag

SEQ ID NO: 253827 - RNA, 22 nt, Human
aggcugaggaucccuguguucu

SEQ ID NO: 253828 - RNA, 22 nt, Human
ucagggaagagagaucuccuag

SEQ ID NO: 253829 - RNA, 22 nt, Human
uaguuucauaugcaaaauagua

SEQ ID NO: 253830 - RNA, 22 nt, Human
cauauaaauacaacauguguua

SEQ ID NO: 253831 - RNA, 22 nt, Human
cagugcaugaaacaauaugcag

SEQ ID NO: 253832 - RNA, 22 nt, Human
uguggcugcucaggugcagacc

SEQ ID NO: 253833 - RNA, 22 nt, Human
ugugcuugucguggagccaggc

SEQ ID NO: 253834 - RNA, 22 nt, Human
cuuuaugguaaguauagaugac

SEQ ID NO: 253835 - RNA, 22 nt, Human
guccugggggcagcugugucca

SEQ ID NO: 253836 - RNA, 22 nt, Human
cuuguccagauguuuguuaggu

SEQ ID NO: 253837 - RNA, 22 nt, Human
ccagggaggagcauuucauggu

SEQ ID NO: 253838 - RNA, 22 nt, Human
ggaaggguuuaagcaggagagu

SEQ ID NO: 253839 - RNA, 22 nt, Human
aaauagauuuccuagcauugga

SEQ ID NO: 253840 - RNA, 22 nt, Human
cucugaccauucccuugauuuu

SEQ ID NO: 253841 - RNA, 22 nt, Human
aaguacauccuagucucuuuca

SEQ ID NO: 253842 - RNA, 22 nt, Human
gcugaggcucaagucauggguc

SEQ ID NO: 253843 - RNA, 22 nt, Human
agagccaggcucccauggggca

SEQ ID NO: 253844 - RNA, 21 nt, Human
caagacauaugaguacucugg

SEQ ID NO: 253845 - RNA, 22 nt, Human
uauuucuuguuauucucguuga

SEQ ID NO: 253846 - RNA, 22 nt, Human
uugucugugaaauggaaauagu

SEQ ID NO: 253847 - RNA, 22 nt, Human
uggguccucgucuuccaaggca

SEQ ID NO: 253848 - RNA, 22 nt, Human
uucuucuuucccccugugguac

SEQ ID NO: 253849 - RNA, 22 nt, Human
acagccugcugccugcuucuug

SEQ ID NO: 253850 - RNA, 22 nt, Human
ggacauuugcaccuaccucagc

SEQ ID NO: 253851 - RNA, 18 nt, Human
ugacauuuccagagugua

SEQ ID NO: 253852 - RNA, 17 nt, Human
acuccuggucugaaggg

SEQ ID NO: 253853 - RNA, 22 nt, Human
gguguugcaguugaagacuggu

SEQ ID NO: 253854 - RNA, 22 nt, Human
ggcugggcaggucugcacaggg

SEQ ID NO: 253855 - RNA, 22 nt, Human
cugcaaaaguaauugcagguuu

SEQ ID NO: 253856 - RNA, 22 nt, Human
caucuuauuuucuucuagugcu

SEQ ID NO: 253857 - RNA, 18 nt, Human
agaggcuggacaggggau

SEQ ID NO: 253858 - RNA, 22 nt, Human
aucuagauuagguauaagagcu

SEQ ID NO: 253859 - RNA, 22 nt, Human
cuuucaaugugccugccuuggg

SEQ ID NO: 253860 - RNA, 20 nt, Human
caguccugucccugcugccc

SEQ ID NO: 253861 - RNA, 22 nt, Human
agggccagcuagagcccucgcc

SEQ ID NO: 253862 - RNA, 20 nt, Human
gcuuccaggagggcugauau

SEQ ID NO: 253863 - RNA, 22 nt, Human
caaagccaggcuuucuaaugua

SEQ ID NO: 253864 - RNA, 22 nt, Human
ucccagggauccuccgggucgc

SEQ ID NO: 253865 - RNA, 22 nt, Human
caccagccagagugacagcucc

SEQ ID NO: 253866 - RNA, 22 nt, Human
gaacaaacagucaggacagucu

SEQ ID NO: 253867 - RNA, 22 nt, Human
agucucaggcagaggaaggcua

SEQ ID NO: 253868 - RNA, 22 nt, Human
uacagugcacauuucuuaggaa

SEQ ID NO: 253869 - RNA, 22 nt, Human
uuucauguuggggaguugagug

SEQ ID NO: 253870 - RNA, 22 nt, Human
aaagccaggaggagggcgcucg

SEQ ID NO: 253871 - RNA, 23 nt, Human
uuuggcuccauggguggcucauu

SEQ ID NO: 253872 - RNA, 19 nt, Human
gcuguuaaggacccucgga

SEQ ID NO: 253873 - RNA, 23 nt, Human
agcaggcugcuucuccacagcug

SEQ ID NO: 253874 - RNA, 22 nt, Human
cugccagacacguuaugcucau

SEQ ID NO: 253875 - RNA, 22 nt, Human
auuuaagauugcguauucaugu

SEQ ID NO: 253876 - RNA, 22 nt, Human
ucagagaguuacacaaauuguu

SEQ ID NO: 253877 - RNA, 22 nt, Human
gcggguugaagggcgcaucgaa

SEQ ID NO: 253878 - RNA, 21 nt, Human
gaguccuuccaauguccucag

SEQ ID NO: 253879 - RNA, 22 nt, Human
agaagaacuuagcuuucuaucu

SEQ ID NO: 253880 - RNA, 22 nt, Human
agcuggggcugcagagaacagg

SEQ ID NO: 253881 - RNA, 22 nt, Human
caaauagacuucaaucucuuga

SEQ ID NO: 253882 - RNA, 22 nt, Human
uuugaagggcacgacaauaguu

SEQ ID NO: 253883 - RNA, 22 nt, Human
ccuguucacgguguguuguuag

SEQ ID NO: 253884 - RNA, 22 nt, Human
uauccaaaguuucucagaaacu

SEQ ID NO: 253885 - RNA, 21 nt, Human
uucccuucugguuuugagaga

SEQ ID NO: 253886 - RNA, 22 nt, Human
aagcugcagaugugccugugga

SEQ ID NO: 253887 - RNA, 22 nt, Human
ggagggagggcuagaccaaaga

SEQ ID NO: 253888 - RNA, 22 nt, Human
uagcucuggagucuucucagaa

SEQ ID NO: 253889 - RNA, 22 nt, Human
gucucugugguacguuucaucc

SEQ ID NO: 253890 - RNA, 22 nt, Human
ucccacacuugaaacaaggcug

SEQ ID NO: 253891 - RNA, 22 nt, Human
auaaagccuuucuguuuucagg

SEQ ID NO: 253892 - RNA, 22 nt, Human
uagaaaugaauguuuaaaaguc

SEQ ID NO: 253893 - RNA, 19 nt, Human
acccagcccaggaguggca

SEQ ID NO: 253894 - RNA, 22 nt, Human
ucccugcuugcucucagcccuu

SEQ ID NO: 253895 - RNA, 20 nt, Human
gggagaagggcugaugagag

SEQ ID NO: 253896 - RNA, 22 nt, Human
aaucaaagaaugggcuaguugg

SEQ ID NO: 253897 - RNA, 22 nt, Human
uauuuaguuaucuuucauaaaa

SEQ ID NO: 253898 - RNA, 22 nt, Human
auggcugcuucaguaccaguuc

SEQ ID NO: 253899 - RNA, 22 nt, Human
ugaggucugcagggcugugcau

SEQ ID NO: 253900 - RNA, 22 nt, Human
ggccaggagaggagggcacuga

SEQ ID NO: 253901 - RNA, 22 nt, Human
caaaagcagcaaguuuauaugu

SEQ ID NO: 253902 - RNA, 22 nt, Human
ucaauucugguccucaggaacu

SEQ ID NO: 253903 - RNA, 22 nt, Human
uucaaguacuguagauuucagg

SEQ ID NO: 253904 - RNA, 22 nt, Human
ucaauacuuaagcuuaauucua

SEQ ID NO: 253905 - RNA, 22 nt, Human
uugacauuuugucauauugaca

SEQ ID NO: 253906 - RNA, 22 nt, Human
uccuuggaaauuucaucagaca

SEQ ID NO: 253907 - RNA, 22 nt, Human
ugugcacauaaaacaguacuag

SEQ ID NO: 253908 - RNA, 22 nt, Human
uggucugguuauuucuuaauga

SEQ ID NO: 253909 - RNA, 22 nt, Human
ggcuuggcagaggugggugcuu

SEQ ID NO: 253910 - RNA, 22 nt, Human
ucaaaaauggucuuugagcugc

SEQ ID NO: 253911 - RNA, 22 nt, Human
aggacaugaagaaagggcaagg

SEQ ID NO: 253912 - RNA, 22 nt, Human
cagauucugggcccagcuuguc

SEQ ID NO: 253913 - RNA, 22 nt, Human
gacagcaguccuggaguuccca

SEQ ID NO: 253914 - RNA, 22 nt, Human
uucuccugcccuuggacuucca

SEQ ID NO: 253915 - RNA, 22 nt, Human
auuguaaauagugccacaauaa

SEQ ID NO: 253916 - RNA, 22 nt, Human
agugcuccuuucauugcugccc

SEQ ID NO: 253917 - RNA, 22 nt, Human
gcagcugcagacccucagugcu

SEQ ID NO: 253918 - RNA, 22 nt, Human
aacuacaguauguccaaagaau

SEQ ID NO: 253919 - RNA, 22 nt, Human
aggcuaggccuugcccuggaac

SEQ ID NO: 253920 - RNA, 22 nt, Human
uuauuauuccccaagucauuau

SEQ ID NO: 253921 - RNA, 22 nt, Human
uggccugguuguugcugccguu

SEQ ID NO: 253922 - RNA, 22 nt, Human
uuucaguguaucuuccaaaagc

SEQ ID NO: 253923 - RNA, 18 nt, Human
uucuggcucacucaugcu

SEQ ID NO: 253924 - RNA, 22 nt, Human
cccugaggaccaggaaggaggg

SEQ ID NO: 253925 - RNA, 17 nt, Human
uucucugagcuguauug

SEQ ID NO: 253926 - RNA, 22 nt, Human
agaugagggguagaaaggacuu

SEQ ID NO: 253927 - RNA, 20 nt, Human
gacaggagaguuagguaggu

SEQ ID NO: 253928 - RNA, 22 nt, Human
ccuggcacaagagcagcauugg

SEQ ID NO: 253929 - RNA, 23 nt, Human
ggaaagagaggaguugugcauag

SEQ ID NO: 253930 - RNA, 22 nt, Human
gcaugcagaaaaugaacaacga

SEQ ID NO: 253931 - RNA, 22 nt, Human
gcuccaggaggcucccgcgucu

SEQ ID NO: 253932 - RNA, 22 nt, Human
uaaaggcucguauuguugugug

SEQ ID NO: 253933 - RNA, 22 nt, Human
ucuuacaccauucaaauauuuu

SEQ ID NO: 253934 - RNA, 22 nt, Human
acacagcuaugggguaggaaac

SEQ ID NO: 253935 - RNA, 22 nt, Human
uuaucauugucgcagucuaauu

SEQ ID NO: 253936 - RNA, 21 nt, Human
aaaguguucagaccaguucug

SEQ ID NO: 253937 - RNA, 22 nt, Human
ucauuucaaguucugacagcua

SEQ ID NO: 253938 - RNA, 22 nt, Human
ucucugggacacugggucaguu

SEQ ID NO: 253939 - RNA, 22 nt, Human
aaaggcuuaacagaagaccuuu

SEQ ID NO: 253940 - RNA, 22 nt, Human
gugauaggcauuuaacucuaag

SEQ ID NO: 253941 - RNA, 18 nt, Human
ugccugccccguaagggu

SEQ ID NO: 253942 - RNA, 23 nt, Human
aaagccaagucagucuacuggaa

SEQ ID NO: 253943 - RNA, 22 nt, Human
caggaaaugaaagcuagcuaau

SEQ ID NO: 253944 - RNA, 21 nt, Human
auucagaaagggaauaaacuc

SEQ ID NO: 253945 - RNA, 22 nt, Human
ccaggacagugaacauguaaga

SEQ ID NO: 253946 - RNA, 22 nt, Human
aaaguuuggauccagcaaaaga

SEQ ID NO: 253947 - RNA, 16 nt, Human
cuuuuucuccccucuu

SEQ ID NO: 253948 - RNA, 22 nt, Human
cuguucagaaaaaaucuucaug

SEQ ID NO: 253949 - RNA, 22 nt, Human
aagaugcagcuuccacuuuugc

SEQ ID NO: 253950 - RNA, 22 nt, Human
aguacaaagugcuccugguucu

SEQ ID NO: 253951 - RNA, 22 nt, Human
aaaggcuaugauaguccagugg

SEQ ID NO: 253952 - RNA, 22 nt, Human
ugaggcucuuccuccccugcuc

SEQ ID NO: 253953 - RNA, 22 nt, Human
ugcaguuuugccaggcaaugga

SEQ ID NO: 253954 - RNA, 22 nt, Human
agggagcaaagguuucaggguu

SEQ ID NO: 253955 - RNA, 22 nt, Human
agguggcagccgagacauaagg

SEQ ID NO: 253956 - RNA, 22 nt, Human
gcuugucauaguuguuacaaau

SEQ ID NO: 253957 - RNA, 22 nt, Human
auggcccaagugcccugaccug

SEQ ID NO: 253958 - RNA, 22 nt, Human
augcaaaaguaacugugauuuu

SEQ ID NO: 253959 - RNA, 22 nt, Human
gcagugugucuggaguacaugg

SEQ ID NO: 253960 - RNA, 22 nt, Human
uuagauacccaaguggaucugu

SEQ ID NO: 253961 - RNA, 23 nt, Human
guaggaauuuucacuuccucuug

SEQ ID NO: 253962 - RNA, 22 nt, Human
uucuuacagaguuuacagagcc

SEQ ID NO: 253963 - RNA, 22 nt, Human
aaauaauuauagcgagucuauc

SEQ ID NO: 253964 - RNA, 22 nt, Human
agucacaugaucccugggccug

SEQ ID NO: 253965 - RNA, 22 nt, Human
auguuucugaaguuuacagaua

SEQ ID NO: 253966 - RNA, 22 nt, Human
caggcucccacuuggcuuaaag

SEQ ID NO: 253967 - RNA, 22 nt, Human
cuuguucaguugccucuccugc

SEQ ID NO: 253968 - RNA, 22 nt, Human
ugucucuggcccaugagcagag

SEQ ID NO: 253969 - RNA, 22 nt, Human
cagagccaggugguguuggggc

SEQ ID NO: 253970 - RNA, 18 nt, Human
ucuuggcagcaucuggca

SEQ ID NO: 253971 - RNA, 20 nt, Human
ugcacagggugggaagcaac

SEQ ID NO: 253972 - RNA, 23 nt, Human
ucccuguguacagccugcaugag

SEQ ID NO: 253973 - RNA, 22 nt, Human
cugcagggacccaagucuuugg

SEQ ID NO: 253974 - RNA, 22 nt, Human
cugcaggacagggaggagcaag

SEQ ID NO: 253975 - RNA, 22 nt, Human
aggcucucucugccagccgugc

SEQ ID NO: 253976 - RNA, 22 nt, Human
gcucugagccgggggccugucc

SEQ ID NO: 253977 - RNA, 18 nt, Human
gcuccuggagucugacuc

SEQ ID NO: 253978 - RNA, 20 nt, Human
ugcuuccuggccacugcggg

SEQ ID NO: 253979 - RNA, 22 nt, Human
uacaaacucuuuauauuucaua

SEQ ID NO: 253980 - RNA, 22 nt, Human
uccagccaugcaugacaaucac

SEQ ID NO: 253981 - RNA, 22 nt, Human
gagagaagggggauaugagccu

SEQ ID NO: 253982 - RNA, 22 nt, Human
gucaccucucaucacaugcuac

SEQ ID NO: 253983 - RNA, 22 nt, Human
uugauuuuuuucuacuaugcgc

SEQ ID NO: 253984 - RNA, 22 nt, Human
gcgcaggcccgggucagggccg

SEQ ID NO: 253985 - RNA, 21 nt, Human
uucucaguguccauguuaguu

SEQ ID NO: 253986 - RNA, 20 nt, Human
uuucuauggggccagcacau

SEQ ID NO: 253987 - RNA, 22 nt, Human
gcuggguggaucggaggcucug

SEQ ID NO: 253988 - RNA, 22 nt, Human
ugccuggcucuaucaguggugg

SEQ ID NO: 253989 - RNA, 22 nt, Human
ugagggagucaugauuaaggaa

SEQ ID NO: 253990 - RNA, 22 nt, Human
gacuuugguuugagcaagucag

SEQ ID NO: 253991 - RNA, 18 nt, Human
cagagcuccuggaugcag

SEQ ID NO: 253992 - RNA, 22 nt, Human
ucugauuuacuggaaaaaagga

SEQ ID NO: 253993 - RNA, 22 nt, Human
cacugucuccuagggggacuuc

SEQ ID NO: 253994 - RNA, 22 nt, Human
uuguuuacuaagaaccugguca

SEQ ID NO: 253995 - RNA, 22 nt, Human
uaaaaaguugaaaggacuuauc

SEQ ID NO: 253996 - RNA, 22 nt, Human
cuccuugguguaguacugagca

SEQ ID NO: 253997 - RNA, 20 nt, Human
uguuucuuuuaaugagcggc

SEQ ID NO: 253998 - RNA, 22 nt, Human
uaacugccuacugugcaaauau

SEQ ID NO: 253999 - RNA, 22 nt, Human
uggcagguuggccuuugguuca

SEQ ID NO: 254000 - RNA, 22 nt, Human
uggcaguuucaugugauucaac

SEQ ID NO: 254001 - RNA, 22 nt, Human
gaacugaaacuugguuuaaagc

SEQ ID NO: 254002 - RNA, 23 nt, Human
ugacaggccagaagagcagcugg

SEQ ID NO: 254003 - RNA, 22 nt, Human
auugcugggaggauguguguuc

SEQ ID NO: 254004 - RNA, 22 nt, Human
cuccuccacagaguccuugcca

SEQ ID NO: 254005 - RNA, 18 nt, Human
caucuacaaaugccagaa

SEQ ID NO: 254006 - RNA, 22 nt, Human
agaaaugugagccccuuaucaa

SEQ ID NO: 254007 - RNA, 22 nt, Human
agaguggcucugcugggcacag

SEQ ID NO: 254008 - RNA, 22 nt, Human
uagcaacagaaaauaggagugc

SEQ ID NO: 254009 - RNA, 22 nt, Human
uagaaacccauguuuauucagu

SEQ ID NO: 254010 - RNA, 22 nt, Human
aaacauuagacaccauaugcuc

SEQ ID NO: 254011 - RNA, 23 nt, Human
ccugucugugcuggguggacaca

SEQ ID NO: 254012 - RNA, 22 nt, Human
aaggcagccauagcaccaucca

SEQ ID NO: 254013 - RNA, 22 nt, Human
aaauacagauuccagggucuua

SEQ ID NO: 254014 - RNA, 21 nt, Human
auggcucaggccaucaaugga

SEQ ID NO: 254015 - RNA, 22 nt, Human
gccugagauucccggagccgug

SEQ ID NO: 254016 - RNA, 22 nt, Human
uagaacuugauagacaguacaa

SEQ ID NO: 254017 - RNA, 22 nt, Human
gaguuuguaaacuauucacuaa

SEQ ID NO: 254018 - RNA, 22 nt, Human
agaaagggagagccagcacacg

SEQ ID NO: 254019 - RNA, 22 nt, Human
ucauuguugcguuaaugucuuc

SEQ ID NO: 254020 - RNA, 22 nt, Human
cauuaagauuuuuuucuacugg

SEQ ID NO: 254021 - RNA, 20 nt, Human
cagcaacuuuggacugaguu

SEQ ID NO: 254022 - RNA, 22 nt, Human
ggcuccaggaaccuccucuccu

SEQ ID NO: 254023 - RNA, 22 nt, Human
gcaggagcaaacugcagugugg

SEQ ID NO: 254024 - RNA, 22 nt, Human
cagcuucugcuaucgaacaucu

SEQ ID NO: 254025 - RNA, 22 nt, Human
aggggcagccucacaauccucu

SEQ ID NO: 254026 - RNA, 22 nt, Human
gcaggaguucaauugcccauga

SEQ ID NO: 254027 - RNA, 18 nt, Human
uccaaagcugcugguuuu

SEQ ID NO: 254028 - RNA, 22 nt, Human
aagcacaauuucaccuucuugu

SEQ ID NO: 254029 - RNA, 22 nt, Human
auauaacauacauacagaaaag

SEQ ID NO: 254030 - RNA, 22 nt, Human
aaauguguuucuuugugaaugg

SEQ ID NO: 254031 - RNA, 22 nt, Human
auacaguauaacuaauaaaccc

SEQ ID NO: 254032 - RNA, 21 nt, Human
uucuucaguuuaauauaaaau

SEQ ID NO: 254033 - RNA, 18 nt, Human
uguuaaaugaagauuugc

SEQ ID NO: 254034 - RNA, 22 nt, Human
uauucuuguaccuuaaaugauu

SEQ ID NO: 254035 - RNA, 22 nt, Human
ucauucaugaggugcuagugcu

SEQ ID NO: 254036 - RNA, 19 nt, Human
ccacaaaauuauuuuaguu

SEQ ID NO: 254037 - RNA, 22 nt, Human
ucucacagugagccugaggucg

SEQ ID NO: 254038 - RNA, 22 nt, Human
gcaggguccauggaggcagccc

SEQ ID NO: 254039 - RNA, 22 nt, Human
uguuacugauuugauauacagu

SEQ ID NO: 254040 - RNA, 21 nt, Human
gcugggcuccagucugccgcu

SEQ ID NO: 254041 - RNA, 22 nt, Human
cacacauugaauucauucuugu

SEQ ID NO: 254042 - RNA, 23 nt, Human
aucuuagcauagacuugaguccc

SEQ ID NO: 254043 - RNA, 20 nt, Human
gccucagaggguuugaguuu

SEQ ID NO: 254044 - RNA, 22 nt, Human
cuguccugagauaaagaugagg

SEQ ID NO: 254045 - RNA, 22 nt, Human
auuguugggucucacuccuaga

SEQ ID NO: 254046 - RNA, 22 nt, Human
agaacaucuaaauaucugagac

SEQ ID NO: 254047 - RNA, 22 nt, Human
gcuugggaagggcccuguguac

SEQ ID NO: 254048 - RNA, 22 nt, Human
uguggcagggauacugaggcag

SEQ ID NO: 254049 - RNA, 18 nt, Human
uggcaggaaaugcacuuu

SEQ ID NO: 254050 - RNA, 22 nt, Human
cccaggaugaucgagaguggga

SEQ ID NO: 254051 - RNA, 22 nt, Human
uacagaaagaccucucgggaaa

SEQ ID NO: 254052 - RNA, 22 nt, Human
agaauagaauucucauagaauu

SEQ ID NO: 254053 - RNA, 22 nt, Human
ugcuucucaaaaggagguaggu

SEQ ID NO: 254054 - RNA, 22 nt, Human
gagucuggaaugaugaagaccu

SEQ ID NO: 254055 - RNA, 20 nt, Human
agguccugguucucugggau

SEQ ID NO: 254056 - RNA, 22 nt, Human
uaucugauacaacagaauaaca

SEQ ID NO: 254057 - RNA, 22 nt, Human
gaggaggcuguuucucugcauu

SEQ ID NO: 254058 - RNA, 21 nt, Human
aucacugaaugccuucaagga

SEQ ID NO: 254059 - RNA, 22 nt, Human
uguguacauaucuauccuagau

SEQ ID NO: 254060 - RNA, 22 nt, Human
ucuuuacuuguguauuguauau

SEQ ID NO: 254061 - RNA, 22 nt, Human
guguacagugauuugaguucac

SEQ ID NO: 254062 - RNA, 22 nt, Human
uggugcaguagaaggccgacuu

SEQ ID NO: 254063 - RNA, 22 nt, Human
uuaacagagugccuggcaugua

SEQ ID NO: 254064 - RNA, 22 nt, Human
cugggucugugcccagggaccu

SEQ ID NO: 254065 - RNA, 22 nt, Human
uuauuuuuaaaaguucacacag

SEQ ID NO: 254066 - RNA, 22 nt, Human
acaggcagguugagaaacauuu

SEQ ID NO: 254067 - RNA, 22 nt, Human
gcaguguuuacauauuagaaac

SEQ ID NO: 254068 - RNA, 22 nt, Human
ucuccacaaguguugagaguac

SEQ ID NO: 254069 - RNA, 22 nt, Human
agagguggagcucuuggcauca

SEQ ID NO: 254070 - RNA, 22 nt, Human
cccuccccagggucauauugaa

SEQ ID NO: 254071 - RNA, 22 nt, Human
aggugacaggacaggagcuggu

SEQ ID NO: 254072 - RNA, 22 nt, Human
uggcagcucccagagcuuccaa

SEQ ID NO: 254073 - RNA, 22 nt, Human
gggaaaggaucagugggaggcu

SEQ ID NO: 254074 - RNA, 21 nt, Human
ggacagaggagaaggcacccu

SEQ ID NO: 254075 - RNA, 22 nt, Human
ggucaagacgggcucugcccuu

SEQ ID NO: 254076 - RNA, 22 nt, Human
ccucuuugacaaguaccugccc

SEQ ID NO: 254077 - RNA, 22 nt, Human
uaggaagauaaacauuuguaug

SEQ ID NO: 254078 - RNA, 22 nt, Human
ccagguucaaauagcuguguga

SEQ ID NO: 254079 - RNA, 22 nt, Human
gugaggcaggcauucuccuuuc

SEQ ID NO: 254080 - RNA, 22 nt, Human
ugagaaucagcugcacagaggu

SEQ ID NO: 254081 - RNA, 22 nt, Human
aagaaucuaugguacauccaag

SEQ ID NO: 254082 - RNA, 22 nt, Human
aguagcaccagggaagcagggc

SEQ ID NO: 254083 - RNA, 22 nt, Human
uggcaaagcuagacauucccuc

SEQ ID NO: 254084 - RNA, 17 nt, Human
agugagaaugucaugua

SEQ ID NO: 254085 - RNA, 22 nt, Human
caugaaaauaacauuguuguga

SEQ ID NO: 254086 - RNA, 22 nt, Human
ucugaacauccagcaaugcaca

SEQ ID NO: 254087 - RNA, 19 nt, Human
ggcaccuuucugcuguguc

SEQ ID NO: 254088 - RNA, 22 nt, Human
cugacauguauaagcuuuaagu

SEQ ID NO: 254089 - RNA, 22 nt, Human
uguuuccuaagugucucugaag

SEQ ID NO: 254090 - RNA, 22 nt, Human
guaauaaugguccccaaacacu

SEQ ID NO: 254091 - RNA, 19 nt, Human
cugcugggugcugagggag

SEQ ID NO: 254092 - RNA, 22 nt, Human
auuacugugacuagccaucugg

SEQ ID NO: 254093 - RNA, 22 nt, Human
cucuuuuaauugucauaacaac

SEQ ID NO: 254094 - RNA, 21 nt, Human
uggaucugugaucuggggcac

SEQ ID NO: 254095 - RNA, 22 nt, Human
uaacuguacaacugguuaguca

SEQ ID NO: 254096 - RNA, 20 nt, Human
aguaacuuagcaacucuagg

SEQ ID NO: 254097 - RNA, 22 nt, Human
uagcaugggucgcgucucugga

SEQ ID NO: 254098 - RNA, 22 nt, Human
cuuccagagauccaugaauacc

SEQ ID NO: 254099 - RNA, 22 nt, Human
cauaacuuuaaagacagugugg

SEQ ID NO: 254100 - RNA, 22 nt, Human
uccaggcucagcacuugcuacu

SEQ ID NO: 254101 - RNA, 22 nt, Human
uucuuuucccaauauuuugcug

SEQ ID NO: 254102 - RNA, 22 nt, Human
aggucugacucuuugccacaua

SEQ ID NO: 254103 - RNA, 19 nt, Human
aggcucugagcuccuggag

SEQ ID NO: 254104 - RNA, 17 nt, Human
ugggccaguagaaggga

SEQ ID NO: 254105 - RNA, 22 nt, Human
ggcucccuagggagagugggag

SEQ ID NO: 254106 - RNA, 22 nt, Human
caggaaagagcugccaggcagg

SEQ ID NO: 254107 - RNA, 22 nt, Human
aggacccaagcacaguuccugg

SEQ ID NO: 254108 - RNA, 21 nt, Human
uacuacagucucuuuaucagu

SEQ ID NO: 254109 - RNA, 21 nt, Human
agagcugggacuugccugaga

SEQ ID NO: 254110 - RNA, 22 nt, Human
ucaguuagggccucagaagaca

SEQ ID NO: 254111 - RNA, 22 nt, Human
aauuuccagaucagaugacuca

SEQ ID NO: 254112 - RNA, 22 nt, Human
cagagccaggucuaggagucuc

SEQ ID NO: 254113 - RNA, 22 nt, Human
uaucaguuuauucuauaaauag

SEQ ID NO: 254114 - RNA, 22 nt, Human
ugccugccuugcugcuggacag

SEQ ID NO: 254115 - RNA, 22 nt, Human
gggcagguaggugaaauaauga

SEQ ID NO: 254116 - RNA, 22 nt, Human
augaaacagaguacuuaauaua

SEQ ID NO: 254117 - RNA, 22 nt, Human
aaauuuaaaaagcagcauugca

SEQ ID NO: 254118 - RNA, 22 nt, Human
auuuaaugucgagcuauuguag

SEQ ID NO: 254119 - RNA, 22 nt, Human
ugacagguucguuagucauguu

SEQ ID NO: 254120 - RNA, 22 nt, Human
uacaucuagccuuacaauuauu

SEQ ID NO: 254121 - RNA, 22 nt, Human
ugagcucuguuagggcuggaac

SEQ ID NO: 254122 - RNA, 22 nt, Human
ucagaaguuucaaucccagcug

SEQ ID NO: 254123 - RNA, 22 nt, Human
aacauuucauaacuugacuuuu

SEQ ID NO: 254124 - RNA, 22 nt, Human
uccugugucaauuccucauucu

SEQ ID NO: 254125 - RNA, 22 nt, Human
agcacaggaacauggagauggg

SEQ ID NO: 254126 - RNA, 22 nt, Human
aaugaugagaacuggaguaauu

SEQ ID NO: 254127 - RNA, 22 nt, Human
agugucugcgggcagaggagcg

SEQ ID NO: 254128 - RNA, 22 nt, Human
uucaggcccagcacagcgcgug

SEQ ID NO: 254129 - RNA, 22 nt, Human
uagaacaugacuuauuuuugga

SEQ ID NO: 254130 - RNA, 22 nt, Human
gcaggggaguggaugauggauu

SEQ ID NO: 254131 - RNA, 20 nt, Human
agucacaggccuggaacaug

SEQ ID NO: 254132 - RNA, 22 nt, Human
cucuucaguaaaugacacuguu

SEQ ID NO: 254133 - RNA, 22 nt, Human
uauuuuguaauuggucauagcu

SEQ ID NO: 254134 - RNA, 22 nt, Human
cuucagaaacuaguaacagcua

SEQ ID NO: 254135 - RNA, 22 nt, Human
ucagguguguuguauuuuacca

SEQ ID NO: 254136 - RNA, 22 nt, Human
ggaagcuguuaucaucuguauc

SEQ ID NO: 254137 - RNA, 19 nt, Human
aauaagcuuggguaaaacu

SEQ ID NO: 254138 - RNA, 22 nt, Human
uccuuaaauauuuacuguuaac

SEQ ID NO: 254139 - RNA, 22 nt, Human
gguuucucuagggcugaccagu

SEQ ID NO: 254140 - RNA, 22 nt, Human
cuuccuucuguaagaccaguug

SEQ ID NO: 254141 - RNA, 22 nt, Human
cagcuucuccauucuucuggcu

SEQ ID NO: 254142 - RNA, 22 nt, Human
uaagagcacugaagucuucuua

SEQ ID NO: 254143 - RNA, 22 nt, Human
acaauuacucaacuuugcugcu

SEQ ID NO: 254144 - RNA, 22 nt, Human
ggcaggugacggggaugaguau

SEQ ID NO: 254145 - RNA, 22 nt, Human
cucacagguuaguuguguggau

SEQ ID NO: 254146 - RNA, 22 nt, Human
uuguagaaaauucucuuggaua

SEQ ID NO: 254147 - RNA, 22 nt, Human
auuccacauaggccuucaugac

SEQ ID NO: 254148 - RNA, 22 nt, Human
auggcagggaccaagcugucau

SEQ ID NO: 254149 - RNA, 22 nt, Human
guagauaaggauugauuuuuau

SEQ ID NO: 254150 - RNA, 22 nt, Human
acccugagaaagucacaugcau

SEQ ID NO: 254151 - RNA, 22 nt, Human
caucuuuaaaggggagacaccc

SEQ ID NO: 254152 - RNA, 22 nt, Human
aaaugcucuccaaaaugaaagu

SEQ ID NO: 254153 - RNA, 22 nt, Human
cagaagaaaucauuaucuggac

SEQ ID NO: 254154 - RNA, 22 nt, Human
acauucaaaauauuucugaugu

SEQ ID NO: 254155 - RNA, 22 nt, Human
cccuuggcuucuauggguuuuc

SEQ ID NO: 254156 - RNA, 17 nt, Human
ugcuggcaacauacaaa

SEQ ID NO: 254157 - RNA, 22 nt, Human
gcugccucuguagcuuuggacc

SEQ ID NO: 254158 - RNA, 21 nt, Human
aggcaugagcccugcauggac

SEQ ID NO: 254159 - RNA, 22 nt, Human
auuuagcaaaaaaugaugaagc

SEQ ID NO: 254160 - RNA, 22 nt, Human
acugcaccuugcgguccugugg

SEQ ID NO: 254161 - RNA, 23 nt, Human
cacaccaggagccgucugggcca

SEQ ID NO: 254162 - RNA, 21 nt, Human
uacaguaaguugggugguccu

SEQ ID NO: 254163 - RNA, 22 nt, Human
uccaaagccccaugcacuuucu

SEQ ID NO: 254164 - RNA, 22 nt, Human
cugggacauggugcugucuuua

SEQ ID NO: 254165 - RNA, 22 nt, Human
ucccagccauuccuuuaggugu

SEQ ID NO: 254166 - RNA, 22 nt, Human
ucagcccuugauguuugggggu

SEQ ID NO: 254167 - RNA, 17 nt, Human
gcuucuggagcuucugu

SEQ ID NO: 254168 - RNA, 22 nt, Human
uaaggacauuagaaaugaugcu

SEQ ID NO: 254169 - RNA, 22 nt, Human
ucagagaaaugacaauauauag

SEQ ID NO: 254170 - RNA, 22 nt, Human
gggguugaucacagaggggucu

SEQ ID NO: 254171 - RNA, 23 nt, Human
agugcucccaggaccuggggcag

SEQ ID NO: 254172 - RNA, 22 nt, Human
aaguuuaagguggaaguggugg

SEQ ID NO: 254173 - RNA, 22 nt, Human
acagguggggcacuuggagccu

SEQ ID NO: 254174 - RNA, 22 nt, Human
gugaccauaauagauuaugagu

SEQ ID NO: 254175 - RNA, 20 nt, Human
aaagcauuuacuugugauug

SEQ ID NO: 254176 - RNA, 22 nt, Human
acacacugagugccauaggacc

SEQ ID NO: 254177 - RNA, 22 nt, Human
ccaggacaaguguggccauggc

SEQ ID NO: 254178 - RNA, 22 nt, Human
ugcugcucaagcugcagcaaaa

SEQ ID NO: 254179 - RNA, 22 nt, Human
ugaaaaacugaauaguugagua

SEQ ID NO: 254180 - RNA, 22 nt, Human
aaugaauucugaagucuuccaa

SEQ ID NO: 254181 - RNA, 22 nt, Human
accuucaaacuagauagaaguu

SEQ ID NO: 254182 - RNA, 22 nt, Human
uuuauuguugggucuuaagcug

SEQ ID NO: 254183 - RNA, 22 nt, Human
ccuggcucugcgugcagcuccg

SEQ ID NO: 254184 - RNA, 22 nt, Human
cugugaccuuagcaagggaaau

SEQ ID NO: 254185 - RNA, 22 nt, Human
ucaggagcagcuguaggaaggg

SEQ ID NO: 254186 - RNA, 20 nt, Human
aggcuugugcuuugucacuc

SEQ ID NO: 254187 - RNA, 22 nt, Human
gggauggaucuuggcugaggcu

SEQ ID NO: 254188 - RNA, 22 nt, Human
uucccuugaccccagacccugg

SEQ ID NO: 254189 - RNA, 22 nt, Human
ucuuuagagcacgggaaaaaca

SEQ ID NO: 254190 - RNA, 22 nt, Human
gaguggguaaaggugcuuggcu

SEQ ID NO: 254191 - RNA, 22 nt, Human
agccuuguuggucugaguuugg

SEQ ID NO: 254192 - RNA, 22 nt, Human
acugcaaucuggauccuagaag

SEQ ID NO: 254193 - RNA, 19 nt, Human
aggaaggcggcggcugccc

SEQ ID NO: 254194 - RNA, 22 nt, Human
aggcagcuagagagugaaacug

SEQ ID NO: 254195 - RNA, 22 nt, Human
uagcuuuaagacauggugaaug

SEQ ID NO: 254196 - RNA, 22 nt, Human
uacagugcgauuuuuaggccuc

SEQ ID NO: 254197 - RNA, 22 nt, Human
acaguuuauaaaaauaaugagg

SEQ ID NO: 254198 - RNA, 22 nt, Human
gaggccagauacucucuucugc

SEQ ID NO: 254199 - RNA, 22 nt, Human
ccugucuuagggaaagacugga

SEQ ID NO: 254200 - RNA, 22 nt, Human
ugggagagcacugcagccccgg

SEQ ID NO: 254201 - RNA, 22 nt, Human
cacaugagguggagaugaauga

SEQ ID NO: 254202 - RNA, 22 nt, Human
ucucuggccgagagucccuggg

SEQ ID NO: 254203 - RNA, 22 nt, Human
cuuucuaguaggaaguagauca

SEQ ID NO: 254204 - RNA, 20 nt, Human
uguaggaaggacccugucug

SEQ ID NO: 254205 - RNA, 22 nt, Human
acugaugaguaggcagacaagg

SEQ ID NO: 254206 - RNA, 22 nt, Human
ucauugaauuugguucaauaug

SEQ ID NO: 254207 - RNA, 22 nt, Human
cauaacuugguguuggaaacug

SEQ ID NO: 254208 - RNA, 22 nt, Human
gagagaaaugugcaguuugggc

SEQ ID NO: 254209 - RNA, 22 nt, Human
guccuuccugcagggauggaug

SEQ ID NO: 254210 - RNA, 22 nt, Human
aaagcagguugcaauuacagug

SEQ ID NO: 254211 - RNA, 22 nt, Human
guucuucagucacaucacagaa

SEQ ID NO: 254212 - RNA, 19 nt, Human
cccucauucacuuauucuc

SEQ ID NO: 254213 - RNA, 22 nt, Human
aaguauucuggcagucauucag

SEQ ID NO: 254214 - RNA, 22 nt, Human
ucuuauaugcacauacauuggg

SEQ ID NO: 254215 - RNA, 22 nt, Human
acuaucaacaucauugcucuag

SEQ ID NO: 254216 - RNA, 22 nt, Human
cauguacaaggaugcucagagu

SEQ ID NO: 254217 - RNA, 23 nt, Human
uccaauucaauugggucaggaag

SEQ ID NO: 254218 - RNA, 22 nt, Human
uagaauaaguugaugauauaug

SEQ ID NO: 254219 - RNA, 22 nt, Human
uuagagaagcuguaauuauuca

SEQ ID NO: 254220 - RNA, 21 nt, Human
agaagccugaugaggucugcu

SEQ ID NO: 254221 - RNA, 22 nt, Human
cagguccucgggggaggccggc

SEQ ID NO: 254222 - RNA, 21 nt, Human
gcugcagggcccagggcaccc

SEQ ID NO: 254223 - RNA, 22 nt, Human
cccauuuagauaacaguucaaa

SEQ ID NO: 254224 - RNA, 22 nt, Human
ugcccuggugaagugcucuccu

SEQ ID NO: 254225 - RNA, 22 nt, Human
acugcauugagguuucauacuu

SEQ ID NO: 254226 - RNA, 22 nt, Human
cuucucuugguaguucuuguug

SEQ ID NO: 254227 - RNA, 22 nt, Human
uuacagagauaaacuguaagug

SEQ ID NO: 254228 - RNA, 22 nt, Human
aaggacagguuggggcuucagg

SEQ ID NO: 254229 - RNA, 22 nt, Human
auccacagucagaacgggccua

SEQ ID NO: 254230 - RNA, 22 nt, Human
auuauuucucacucacauaaua

SEQ ID NO: 254231 - RNA, 20 nt, Human
cugccgaccacagccaugga

SEQ ID NO: 254232 - RNA, 22 nt, Human
acagagcaugcucaguguguga

SEQ ID NO: 254233 - RNA, 22 nt, Human
gaagccuugaacugcaaacccc

SEQ ID NO: 254234 - RNA, 22 nt, Human
ugccagccagguucugaggcua

SEQ ID NO: 254235 - RNA, 22 nt, Human
gugcuuuaaaccacugugcugu

SEQ ID NO: 254236 - RNA, 22 nt, Human
gggaggcauguguuauccacuu

SEQ ID NO: 254237 - RNA, 22 nt, Human
ucuuucuuauuagccauuguuc

SEQ ID NO: 254238 - RNA, 22 nt, Human
gugcacaucgugcagguuuguu

SEQ ID NO: 254239 - RNA, 22 nt, Human
caaagagcuguucagugucgcu

SEQ ID NO: 254240 - RNA, 21 nt, Human
aguccaggagucacccaagcc

SEQ ID NO: 254241 - RNA, 22 nt, Human
cccccacuaaguugagggcccu

SEQ ID NO: 254242 - RNA, 22 nt, Human
uggaaacuaacaacagagcaga

SEQ ID NO: 254243 - RNA, 22 nt, Human
aggcucugccaauuccuuccuc

SEQ ID NO: 254244 - RNA, 22 nt, Human
cuccagggagcuguggagguuu

SEQ ID NO: 254245 - RNA, 21 nt, Human
agcagcugggcaacauggagg

SEQ ID NO: 254246 - RNA, 22 nt, Human
aggaggagguaagaaaagcaua

SEQ ID NO: 254247 - RNA, 22 nt, Human
uuuccagucccuggauuuaacc

SEQ ID NO: 254248 - RNA, 22 nt, Human
uguaggcauauucauagaguug

SEQ ID NO: 254249 - RNA, 22 nt, Human
aaagacuaaacaaccaauaucu

SEQ ID NO: 254250 - RNA, 22 nt, Human
caggaggguguggaaaacuggg

SEQ ID NO: 254251 - RNA, 22 nt, Human
gagguaucuuagagaguguaga

SEQ ID NO: 254252 - RNA, 22 nt, Human
uuuguguuguuuuaagccacua

SEQ ID NO: 254253 - RNA, 16 nt, Human
aucuaagaugugcauu

SEQ ID NO: 254254 - RNA, 22 nt, Human
aaaggacugaugcugaguaccu

SEQ ID NO: 254255 - RNA, 22 nt, Human
cacauuucuggaauugacuugg

SEQ ID NO: 254256 - RNA, 22 nt, Human
gagcuuggugcugccuguuguc

SEQ ID NO: 254257 - RNA, 22 nt, Human
acagaagugacaauuucuuggg

SEQ ID NO: 254258 - RNA, 22 nt, Human
uuucucucuuaaggaguuuaaa

SEQ ID NO: 254259 - RNA, 22 nt, Human
gcuggcaggagaccauacccua

SEQ ID NO: 254260 - RNA, 22 nt, Human
uucuuuauguuaaugaaucuau

SEQ ID NO: 254261 - RNA, 22 nt, Human
ucaggaagaagacggggcagga

SEQ ID NO: 254262 - RNA, 19 nt, Human
gaggaggcuucagcuuucu

SEQ ID NO: 254263 - RNA, 22 nt, Human
aggacuaaaaagaugcucuccc

SEQ ID NO: 254264 - RNA, 22 nt, Human
uuugcacuagcauuuguccaug

SEQ ID NO: 254265 - RNA, 22 nt, Human
uucuggauaugggagagggagc

SEQ ID NO: 254266 - RNA, 22 nt, Human
ugaggcaaggcugaaugaaggc

SEQ ID NO: 254267 - RNA, 21 nt, Human
ugcagaaaugguuuuucuaag

SEQ ID NO: 254268 - RNA, 22 nt, Human
aagcagcuggaagaguaagaug

SEQ ID NO: 254269 - RNA, 22 nt, Human
uccugggacuuucaaggcuagg

SEQ ID NO: 254270 - RNA, 22 nt, Human
ugcaucagaguuugcugcugcu

SEQ ID NO: 254271 - RNA, 22 nt, Human
uagggacccucccugcucuaac

SEQ ID NO: 254272 - RNA, 23 nt, Human
gccuucagcucgggaaggcuccc

SEQ ID NO: 254273 - RNA, 22 nt, Human
uugaccugggcacagugagcau

SEQ ID NO: 254274 - RNA, 17 nt, Human
aagagaggcugagcugg

SEQ ID NO: 254275 - RNA, 22 nt, Human
gacugguaagguauuggaauuc

SEQ ID NO: 254276 - RNA, 21 nt, Human
ugacaggcacccuggcuguga

SEQ ID NO: 254277 - RNA, 22 nt, Human
ugcugaggaauuugguuuaugu

SEQ ID NO: 254278 - RNA, 22 nt, Human
cagaaagaccugauuggcaguu

SEQ ID NO: 254279 - RNA, 22 nt, Human
gccugaaggagucagagagggc

SEQ ID NO: 254280 - RNA, 22 nt, Human
auggauaaauacuuggugguau

SEQ ID NO: 254281 - RNA, 22 nt, Human
agcagccuugcaggggucgcac

SEQ ID NO: 254282 - RNA, 20 nt, Human
agccuggcaaacacccccag

SEQ ID NO: 254283 - RNA, 22 nt, Human
aggagcugguagucucauuggg

SEQ ID NO: 254284 - RNA, 20 nt, Human
uugaggcaugucuagaagua

SEQ ID NO: 254285 - RNA, 22 nt, Human
cauuuguauagugcuuagacca

SEQ ID NO: 254286 - RNA, 22 nt, Human
ucacagacacagggagaagcau

SEQ ID NO: 254287 - RNA, 22 nt, Human
uucuuguacuggagauacauga

SEQ ID NO: 254288 - RNA, 21 nt, Human
ugcuccagggcagcuuccagc

SEQ ID NO: 254289 - RNA, 19 nt, Human
gccugcagaaaaggcaggg

SEQ ID NO: 254290 - RNA, 22 nt, Human
ugcuuauuuagguagauauuaa

SEQ ID NO: 254291 - RNA, 22 nt, Human
acagagguuuccauugagguuu

SEQ ID NO: 254292 - RNA, 22 nt, Human
uguacagugccaugcaguuugc

SEQ ID NO: 254293 - RNA, 22 nt, Human
gcaaauucuuaacuggacugug

SEQ ID NO: 254294 - RNA, 22 nt, Human
ggagaggugaauggcugcucua

SEQ ID NO: 254295 - RNA, 23 nt, Human
uggcucugagagguucagaugcu

SEQ ID NO: 254296 - RNA, 21 nt, Human
aucauuaauugcugagugaca

SEQ ID NO: 254297 - RNA, 22 nt, Human
caaaccuuguuccagucaacuc

SEQ ID NO: 254298 - RNA, 22 nt, Human
auacacuuuagaaaaacgcugc

SEQ ID NO: 254299 - RNA, 22 nt, Human
cacaucagguagaccuacagag

SEQ ID NO: 254300 - RNA, 22 nt, Human
aucaugaaucuuguguucuaug

SEQ ID NO: 254301 - RNA, 22 nt, Human
acuuuguuuggcuauuagaguc

SEQ ID NO: 254302 - RNA, 22 nt, Human
uggauaaaaugacauuaccuga

SEQ ID NO: 254303 - RNA, 22 nt, Human
aaacagaaauuuccucaugcuc

SEQ ID NO: 254304 - RNA, 22 nt, Human
ccuccuguuguccugcuggggc

SEQ ID NO: 254305 - RNA, 22 nt, Human
agccccaguucccuggaagucu

SEQ ID NO: 254306 - RNA, 22 nt, Human
agcuggggguagugagaaauaa

SEQ ID NO: 254307 - RNA, 22 nt, Human
gagccuuucuagauaauccagg

SEQ ID NO: 254308 - RNA, 22 nt, Human
uaaauguaccuucugccuuacu

SEQ ID NO: 254309 - RNA, 22 nt, Human
agcagcaaguguaacugaauau

SEQ ID NO: 254310 - RNA, 22 nt, Human
gcuuaucuugaaauccaccagc

SEQ ID NO: 254311 - RNA, 22 nt, Human
uggcuucauucagcaugacagu

SEQ ID NO: 254312 - RNA, 22 nt, Human
ggccaugcaggucagagguggg

SEQ ID NO: 254313 - RNA, 22 nt, Human
ccaccuccucggccaugugacg

SEQ ID NO: 254314 - RNA, 23 nt, Human
cuucaugagagcccugaggaaaa

SEQ ID NO: 254315 - RNA, 22 nt, Human
aggccagugccuuuccagggcu

SEQ ID NO: 254316 - RNA, 22 nt, Human
acaguguguucugggaccucca

SEQ ID NO: 254317 - RNA, 22 nt, Human
gaggaggaggaaguggaaccca

SEQ ID NO: 254318 - RNA, 22 nt, Human
gcaaagcaucaguagaaauguu

SEQ ID NO: 254319 - RNA, 22 nt, Human
uagagagguuugaauuggcugc

SEQ ID NO: 254320 - RNA, 22 nt, Human
uaugaaaugguaguaggaaggg

SEQ ID NO: 254321 - RNA, 22 nt, Human
uaauaccacugugcucauuaua

SEQ ID NO: 254322 - RNA, 22 nt, Human
auuguuaaacugaagcauuacu

SEQ ID NO: 254323 - RNA, 22 nt, Human
auacuucuuuaagaguaagucu

SEQ ID NO: 254324 - RNA, 22 nt, Human
uggguccuugcuaacuucuaug

SEQ ID NO: 254325 - RNA, 22 nt, Human
ugcaaauguguuuuaaaccaaa

SEQ ID NO: 254326 - RNA, 22 nt, Human
cccugguggggccagacuugcu

SEQ ID NO: 254327 - RNA, 22 nt, Human
cuuuaguuauuuagacuacagu

SEQ ID NO: 254328 - RNA, 22 nt, Human
guuugaaugcaguaugcauuuu

SEQ ID NO: 254329 - RNA, 22 nt, Human
caguuucuguggucucuuuuca

SEQ ID NO: 254330 - RNA, 22 nt, Human
agaaguuugguccuauaaacuc

SEQ ID NO: 254331 - RNA, 22 nt, Human
aauauguucaaaauagaucacu

SEQ ID NO: 254332 - RNA, 22 nt, Human
ggaggccaccauggagucacuu

SEQ ID NO: 254333 - RNA, 18 nt, Human
acagggaugggguaagug

SEQ ID NO: 254334 - RNA, 22 nt, Human
uagaauacaguuuaagaacuac

SEQ ID NO: 254335 - RNA, 22 nt, Human
acugucacuaacuaagucuagu

SEQ ID NO: 254336 - RNA, 22 nt, Human
cgcagggccgcgagcgggacca

SEQ ID NO: 254337 - RNA, 22 nt, Human
uccugucuaaagaccugcaggc

SEQ ID NO: 254338 - RNA, 20 nt, Human
acugcuguagaccaucugca

SEQ ID NO: 254339 - RNA, 22 nt, Human
aggggagaggugagcaacuucu

SEQ ID NO: 254340 - RNA, 22 nt, Human
augaggcagcuggcuuucuccc

SEQ ID NO: 254341 - RNA, 22 nt, Human
uucauucuuauuugugaucugg

SEQ ID NO: 254342 - RNA, 22 nt, Human
agucaguugcaaacaucaggca

SEQ ID NO: 254343 - RNA, 20 nt, Human
cugaagagacuggaggggca

SEQ ID NO: 254344 - RNA, 22 nt, Human
caauuuuuguacuuauaguacu

SEQ ID NO: 254345 - RNA, 22 nt, Human
cuuagaagaaugccuaggacag

SEQ ID NO: 254346 - RNA, 22 nt, Human
guguguccucauaagauggagg

SEQ ID NO: 254347 - RNA, 22 nt, Human
acaaggcuguuggucacaaacc

SEQ ID NO: 254348 - RNA, 22 nt, Human
ucaguguguacacugagcauuu

SEQ ID NO: 254349 - RNA, 22 nt, Human
ugaggcaguugagcuuccugag

SEQ ID NO: 254350 - RNA, 22 nt, Human
cccuuggccacugcgccaguga

SEQ ID NO: 254351 - RNA, 22 nt, Human
uuggccuucugguguucauuuu

SEQ ID NO: 254352 - RNA, 22 nt, Human
cucagagagggcaccagggcca

SEQ ID NO: 254353 - RNA, 21 nt, Human
uuuagggaccaggucauaggc

SEQ ID NO: 254354 - RNA, 22 nt, Human
uuucuuuuccaauaucccuacu

SEQ ID NO: 254355 - RNA, 22 nt, Human
aguggcagagaccccagccagc

SEQ ID NO: 254356 - RNA, 22 nt, Human
uggggucccaacucugauugau

SEQ ID NO: 254357 - RNA, 22 nt, Human
agcagagcgccugcucagaggg

SEQ ID NO: 254358 - RNA, 22 nt, Human
gaggaagaagcaaaccagcuaa

SEQ ID NO: 254359 - RNA, 22 nt, Human
cccuuggaagguagcuggcagu

SEQ ID NO: 254360 - RNA, 22 nt, Human
agagaaaagccaucccagccaa

SEQ ID NO: 254361 - RNA, 22 nt, Human
uucuagaaacuggagcaaacag

SEQ ID NO: 254362 - RNA, 22 nt, Human
ucaacaguugcacuggagaggu

SEQ ID NO: 254363 - RNA, 22 nt, Human
gcugccugccuugccuggagga

SEQ ID NO: 254364 - RNA, 22 nt, Human
caagaauccuguucuugaagau

SEQ ID NO: 254365 - RNA, 22 nt, Human
aagugguuauuuugaucuagaa

SEQ ID NO: 254366 - RNA, 22 nt, Human
gagcaugagggaaggcagcaga

SEQ ID NO: 254367 - RNA, 22 nt, Human
ucugaaaugcaggcaauuugcu

SEQ ID NO: 254368 - RNA, 22 nt, Human
uauugauaaggauggcugcaau

SEQ ID NO: 254369 - RNA, 22 nt, Human
ugaaagaagccucccuuuggag

SEQ ID NO: 254370 - RNA, 22 nt, Human
uagauuugccugggaaagcuca

SEQ ID NO: 254371 - RNA, 22 nt, Human
cagugaggaguccagggcagag

SEQ ID NO: 254372 - RNA, 22 nt, Human
uucaaacucuugcucugcuagu

SEQ ID NO: 254373 - RNA, 22 nt, Human
cugccugcaggacaccucgcua

SEQ ID NO: 254374 - RNA, 23 nt, Human
ucugugccaguuuccaugucugu

SEQ ID NO: 254375 - RNA, 23 nt, Human
uccagcagccaagaaggguagaa

SEQ ID NO: 254376 - RNA, 22 nt, Human
uguauuuucugaggagcauuag

SEQ ID NO: 254377 - RNA, 22 nt, Human
agaugcuggggccccucggaug

SEQ ID NO: 254378 - RNA, 22 nt, Human
ugggccagcucccugccccugg

SEQ ID NO: 254379 - RNA, 22 nt, Human
aaacucagaagguacagaaggg

SEQ ID NO: 254380 - RNA, 22 nt, Human
uguuugugcugccuggugggca

SEQ ID NO: 254381 - RNA, 22 nt, Human
gaauucauuagggaagcuaucu

SEQ ID NO: 254382 - RNA, 22 nt, Human
acugugauguuugugaucaucu

SEQ ID NO: 254383 - RNA, 22 nt, Human
uucuguuacaagugaaaaaaug

SEQ ID NO: 254384 - RNA, 22 nt, Human
uaugauuuguagacauuugauu

SEQ ID NO: 254385 - RNA, 22 nt, Human
ugcagaagcugcaggucagugg

SEQ ID NO: 254386 - RNA, 22 nt, Human
cuccugggcugggaacucagcc

SEQ ID NO: 254387 - RNA, 22 nt, Human
aagacauguuuuaagaauauuu

SEQ ID NO: 254388 - RNA, 22 nt, Human
ucagcaggucugaggcggggcc

SEQ ID NO: 254389 - RNA, 22 nt, Human
uccacagggaugccugcggcuu

SEQ ID NO: 254390 - RNA, 22 nt, Human
uagaaauggagaacagauuaau

SEQ ID NO: 254391 - RNA, 22 nt, Human
ucuagaauucccuuuugacaau

SEQ ID NO: 254392 - RNA, 22 nt, Human
ccacugcucugccaggagcugg

SEQ ID NO: 254393 - RNA, 16 nt, Human
gcagagcucagggacu

SEQ ID NO: 254394 - RNA, 22 nt, Human
gcuugggagaggguccccagga

SEQ ID NO: 254395 - RNA, 23 nt, Human
uuccugugguauauuuuauaggg

SEQ ID NO: 254396 - RNA, 20 nt, Human
ucugugugccaucaccuaac

SEQ ID NO: 254397 - RNA, 22 nt, Human
uuuuuacacuuagcauugagcg

SEQ ID NO: 254398 - RNA, 22 nt, Human
uggcuccucaucacaguuggug

SEQ ID NO: 254399 - RNA, 20 nt, Human
uuuauucagccuacccucuu

SEQ ID NO: 254400 - RNA, 22 nt, Human
uucugggcacacaggcccuggu

SEQ ID NO: 254401 - RNA, 22 nt, Human
ucaaauguucccuguacuggcc

SEQ ID NO: 254402 - RNA, 22 nt, Human
ucgugcaaaggcccaugugggu

SEQ ID NO: 254403 - RNA, 22 nt, Human
cagcugccuaugaccuagccuc

SEQ ID NO: 254404 - RNA, 23 nt, Human
ucucagugaaucucagaauucgc

SEQ ID NO: 254405 - RNA, 22 nt, Human
acauucauggguuuuacauuau

SEQ ID NO: 254406 - RNA, 22 nt, Human
gugguggaugucuguaaucuca

SEQ ID NO: 254407 - RNA, 22 nt, Human
acuuagaauauguucaagauuu

SEQ ID NO: 254408 - RNA, 22 nt, Human
ucuggaucucccucauccuggg

SEQ ID NO: 254409 - RNA, 22 nt, Human
gccccaggggaggugcccugca

SEQ ID NO: 254410 - RNA, 19 nt, Human
uaguacaaaagcagccaua

SEQ ID NO: 254411 - RNA, 22 nt, Human
cugccccagccuggggccuucu

SEQ ID NO: 254412 - RNA, 22 nt, Human
gcucagagaaagauuagucccu

SEQ ID NO: 254413 - RNA, 21 nt, Human
cagugcagggguuagcgugua

SEQ ID NO: 254414 - RNA, 22 nt, Human
ucugaaaucuaaugcucugugg

SEQ ID NO: 254415 - RNA, 22 nt, Human
ucuucagaagaucacaucagug

SEQ ID NO: 254416 - RNA, 22 nt, Human
ugaaugauuaaaacccggacua

SEQ ID NO: 254417 - RNA, 22 nt, Human
gcacacaugcaugcacaggagu

SEQ ID NO: 254418 - RNA, 22 nt, Human
accugagacuugggaugggaau

SEQ ID NO: 254419 - RNA, 22 nt, Human
aggcagaauguuggaaaggaag

SEQ ID NO: 254420 - RNA, 22 nt, Human
ucagagagaaauaguuuuugac

SEQ ID NO: 254421 - RNA, 22 nt, Human
ucuacuuuauaaguauauaagu

SEQ ID NO: 254422 - RNA, 22 nt, Human
agaugaaauuuguguugaguug

SEQ ID NO: 254423 - RNA, 21 nt, Human
aacacauccagaguauuugac

SEQ ID NO: 254424 - RNA, 22 nt, Human
uuuucucuacaaaauaaccagc

SEQ ID NO: 254425 - RNA, 22 nt, Human
ucucaacuaauggugcaagaug

SEQ ID NO: 254426 - RNA, 22 nt, Human
ucagggcacugucaccugauau

SEQ ID NO: 254427 - RNA, 22 nt, Human
acuaucucuuuugucugcagcu

SEQ ID NO: 254428 - RNA, 22 nt, Human
ccuugccuugguccuucgcagg

SEQ ID NO: 254429 - RNA, 22 nt, Human
ucugggcugcuucagccuucgc

SEQ ID NO: 254430 - RNA, 22 nt, Human
gccagccccuuagggcucuccc

SEQ ID NO: 254431 - RNA, 22 nt, Human
aguucuucauaaccuuacugug

SEQ ID NO: 254432 - RNA, 21 nt, Human
cucaaaauucuuucuguugga

SEQ ID NO: 254433 - RNA, 22 nt, Human
cggccaagccggggccccgaag

SEQ ID NO: 254434 - RNA, 22 nt, Human
gccugagaucagccaagccccu

SEQ ID NO: 254435 - RNA, 22 nt, Human
aaugucacucuguuuccucugc

SEQ ID NO: 254436 - RNA, 20 nt, Human
uggaccugucucuuuaggga

SEQ ID NO: 254437 - RNA, 22 nt, Human
cugaaggauuagagagcacuua

SEQ ID NO: 254438 - RNA, 22 nt, Human
caggccugagacaucugagaua

SEQ ID NO: 254439 - RNA, 22 nt, Human
ucucaaauguaaagcaugauuu

SEQ ID NO: 254440 - RNA, 22 nt, Human
cucaaaagacuuaaacauaaga

SEQ ID NO: 254441 - RNA, 22 nt, Human
ccugcaagacuauuuaguucca

SEQ ID NO: 254442 - RNA, 22 nt, Human
ggcaguuucaucaggagaaaag

SEQ ID NO: 254443 - RNA, 22 nt, Human
aguggcagagccaggguuggga

SEQ ID NO: 254444 - RNA, 22 nt, Human
acaggcagggaccuuggcuaag

SEQ ID NO: 254445 - RNA, 22 nt, Human
ugggugugcccagauggugucc

SEQ ID NO: 254446 - RNA, 22 nt, Human
gcagagguuggauuggugacuu

SEQ ID NO: 254447 - RNA, 22 nt, Human
uccugcaggccuguucccagua

SEQ ID NO: 254448 - RNA, 22 nt, Human
uaaggcuuggacuucuccaacc

SEQ ID NO: 254449 - RNA, 22 nt, Human
caucagaauuacuuggggagcu

SEQ ID NO: 254450 - RNA, 22 nt, Human
aagcauguacaaugagugucuc

SEQ ID NO: 254451 - RNA, 22 nt, Human
aggaaucagaauucuuagaauu

SEQ ID NO: 254452 - RNA, 22 nt, Human
aucuuuuugacauggugauggu

SEQ ID NO: 254453 - RNA, 22 nt, Human
aggaaaaaccuguuaaugguag

SEQ ID NO: 254454 - RNA, 22 nt, Human
cuggcuuccugaguccauuacc

SEQ ID NO: 254455 - RNA, 22 nt, Human
agaggcucugccgccucaggua

SEQ ID NO: 254456 - RNA, 22 nt, Human
ccucagagaaagguauggcuga

SEQ ID NO: 254457 - RNA, 22 nt, Human
uuuggcuuaacuuacaugauau

SEQ ID NO: 254458 - RNA, 22 nt, Human
aauuuaacugagaguacuuuua

SEQ ID NO: 254459 - RNA, 22 nt, Human
cagcuaggagaaaagguguuuu

SEQ ID NO: 254460 - RNA, 22 nt, Human
ugcagcaggcacaggacggaag

SEQ ID NO: 254461 - RNA, 22 nt, Human
uuuuggcuguagcuggaaaucu

SEQ ID NO: 254462 - RNA, 22 nt, Human
uggccaguagauaggcaggcaa

SEQ ID NO: 254463 - RNA, 22 nt, Human
gcagaauacauuuuguuuuccu

SEQ ID NO: 254464 - RNA, 23 nt, Human
uucaaagcuuaagcucuuuccac

SEQ ID NO: 254465 - RNA, 22 nt, Human
auaacagacuuagaguuacaag

SEQ ID NO: 254466 - RNA, 22 nt, Human
gaaaucaaacccuuuucugaua

SEQ ID NO: 254467 - RNA, 22 nt, Human
gcauucuuuagacugagagaua

SEQ ID NO: 254468 - RNA, 22 nt, Human
ggugugacucgcccucagggac

SEQ ID NO: 254469 - RNA, 22 nt, Human
cagacucugaugcagccuugug

SEQ ID NO: 254470 - RNA, 22 nt, Human
ggacacagguaaauaccacuga

SEQ ID NO: 254471 - RNA, 19 nt, Human
cuguuauugucagagcucc

SEQ ID NO: 254472 - RNA, 22 nt, Human
gggcugaguuccugccucacuc

SEQ ID NO: 254473 - RNA, 22 nt, Human
gacccuccugucuucuaaccaa

SEQ ID NO: 254474 - RNA, 22 nt, Human
cuccugggcugucggcgcucug

SEQ ID NO: 254475 - RNA, 22 nt, Human
uucaucuguaguuuuuccaagg

SEQ ID NO: 254476 - RNA, 22 nt, Human
aaccauucacaguguagccaaa

SEQ ID NO: 254477 - RNA, 22 nt, Human
aaauccaugguaaucuguuaca

SEQ ID NO: 254478 - RNA, 22 nt, Human
cugagcagucuagccagguguu

SEQ ID NO: 254479 - RNA, 22 nt, Human
cuggcagcauuaacagagagca

SEQ ID NO: 254480 - RNA, 22 nt, Human
cuuccuccgaagaaguugcugg

SEQ ID NO: 254481 - RNA, 22 nt, Human
ugcaggagcaccagcucacccu

SEQ ID NO: 254482 - RNA, 22 nt, Human
augggaggcagcagagcccagc

SEQ ID NO: 254483 - RNA, 22 nt, Human
aagcaauauacugauaugauua

SEQ ID NO: 254484 - RNA, 22 nt, Human
acugcugauuauugaaguagag

SEQ ID NO: 254485 - RNA, 22 nt, Human
auacacuuguacauuuuuuaau

SEQ ID NO: 254486 - RNA, 22 nt, Human
guggcugcucgggcuccggccc

SEQ ID NO: 254487 - RNA, 22 nt, Human
uagagggaaggaagaauggauu

SEQ ID NO: 254488 - RNA, 22 nt, Human
uacagaauguguaucauuacca

SEQ ID NO: 254489 - RNA, 22 nt, Human
cuguccucaucugccccaaggg

SEQ ID NO: 254490 - RNA, 22 nt, Human
cuggaaagugcugagacaauug

SEQ ID NO: 254491 - RNA, 22 nt, Human
aagcuguauguuaccacuguca

SEQ ID NO: 254492 - RNA, 22 nt, Human
cacugagaggucucauuuccaa

SEQ ID NO: 254493 - RNA, 22 nt, Human
agaaacugaauuauuucugagg

SEQ ID NO: 254494 - RNA, 22 nt, Human
ucagcacaggucuugcaaaaca

SEQ ID NO: 254495 - RNA, 23 nt, Human
uccagggcaguggcugggucugc

SEQ ID NO: 254496 - RNA, 22 nt, Human
gguguccuacugcuugguugcu

SEQ ID NO: 254497 - RNA, 22 nt, Human
ugcaaacaauuuccuauaaagu

SEQ ID NO: 254498 - RNA, 22 nt, Human
uuuuccuuucaucaggacaaag

SEQ ID NO: 254499 - RNA, 22 nt, Human
gguagaaagauggaacguugaa

SEQ ID NO: 254500 - RNA, 22 nt, Human
uugguuuagagagugugguuac

SEQ ID NO: 254501 - RNA, 22 nt, Human
cccuggcugccagucaccagac

SEQ ID NO: 254502 - RNA, 22 nt, Human
uuaggaaaaugaaauuaccugu

SEQ ID NO: 254503 - RNA, 22 nt, Human
uuuacuuugugucaagucaaga

SEQ ID NO: 254504 - RNA, 22 nt, Human
uacagagaacucauagaaagaa

SEQ ID NO: 254505 - RNA, 22 nt, Human
aguuuauguagaauuggcaaua

SEQ ID NO: 254506 - RNA, 19 nt, Human
agaguauugaauuugcccu

SEQ ID NO: 254507 - RNA, 21 nt, Human
cauuucaaagagcuggaaauc

SEQ ID NO: 254508 - RNA, 22 nt, Human
cauaucauuugcuuauaaaucu

SEQ ID NO: 254509 - RNA, 22 nt, Human
uacagaacugaaguagugaaaa

SEQ ID NO: 254510 - RNA, 22 nt, Human
caggcucaaggcugacuuccau

SEQ ID NO: 254511 - RNA, 21 nt, Human
aagaguggcugaggaggugau

SEQ ID NO: 254512 - RNA, 22 nt, Human
gauguguccuaguacggguggg

SEQ ID NO: 254513 - RNA, 22 nt, Human
uaggccaguggcagguugugug

SEQ ID NO: 254514 - RNA, 22 nt, Human
auagucagugucuauaucguug

SEQ ID NO: 254515 - RNA, 22 nt, Human
ccugcagaaaggguccccagga

SEQ ID NO: 254516 - RNA, 22 nt, Human
uccagcacccaauguggcuaag

SEQ ID NO: 254517 - RNA, 22 nt, Human
cagcaggugucuagcaaggguc

SEQ ID NO: 254518 - RNA, 22 nt, Human
cagucccaccaggaucgcucuu

SEQ ID NO: 254519 - RNA, 22 nt, Human
ucucuuugacccuuuagcucca

SEQ ID NO: 254520 - RNA, 22 nt, Human
uaaguguuucuccagugucuuu

SEQ ID NO: 254521 - RNA, 22 nt, Human
auacuuuggggguuaguguaga

SEQ ID NO: 254522 - RNA, 22 nt, Human
guggcagggcaaugcucccucu

SEQ ID NO: 254523 - RNA, 22 nt, Human
aagcugccagcugagcugaggc

SEQ ID NO: 254524 - RNA, 23 nt, Human
agacagaggcugaggcuggccgc

SEQ ID NO: 254525 - RNA, 22 nt, Human
uaguuuacuguucacuuugccc

SEQ ID NO: 254526 - RNA, 19 nt, Human
gcuggcagaauuuugaacc

SEQ ID NO: 254527 - RNA, 22 nt, Human
agggccuggcuucacuuucuca

SEQ ID NO: 254528 - RNA, 22 nt, Human
uggcacaguuaaaguuguagaa

SEQ ID NO: 254529 - RNA, 21 nt, Human
aaggcuggagaugcaggucug

SEQ ID NO: 254530 - RNA, 22 nt, Human
cuuccaaaauuuauauguugaa

SEQ ID NO: 254531 - RNA, 22 nt, Human
uuagaacuuuucaacuccauuc

SEQ ID NO: 254532 - RNA, 22 nt, Human
agcagcaggaggccauugucuu

SEQ ID NO: 254533 - RNA, 22 nt, Human
agggccagaggcaccuugcagc

SEQ ID NO: 254534 - RNA, 22 nt, Human
auucuagaugcuguaaguagca

SEQ ID NO: 254535 - RNA, 22 nt, Human
uacauguguucuguuucaaguu

SEQ ID NO: 254536 - RNA, 22 nt, Human
aaaaugacauuccagugauauu

SEQ ID NO: 254537 - RNA, 23 nt, Human
cuuucauugugguuucacagagc

SEQ ID NO: 254538 - RNA, 22 nt, Human
cuguccuggccgcccuugugag

SEQ ID NO: 254539 - RNA, 20 nt, Human
uuauuucaguugcuagauug

SEQ ID NO: 254540 - RNA, 21 nt, Human
uucuucaugaugauuaauggc

SEQ ID NO: 254541 - RNA, 22 nt, Human
gggucuggcaugcugagaugga

SEQ ID NO: 254542 - RNA, 22 nt, Human
ccuucaaucagcagucuagcuu

SEQ ID NO: 254543 - RNA, 23 nt, Human
acauguggagagaacagauaucu

SEQ ID NO: 254544 - RNA, 22 nt, Human
cuccucagucaggucuaggguc

SEQ ID NO: 254545 - RNA, 22 nt, Human
auguguuuauaauuacucaauc

SEQ ID NO: 254546 - RNA, 22 nt, Human
gaaggaggcuccccaaagucug

SEQ ID NO: 254547 - RNA, 22 nt, Human
gcagggcagugugucugugggg

SEQ ID NO: 254548 - RNA, 22 nt, Human
acaguauauauagucuaaaagc

SEQ ID NO: 254549 - RNA, 22 nt, Human
uagaaucuggaucugggcgcau

SEQ ID NO: 254550 - RNA, 22 nt, Human
uagaugaagcaacauguguaau

SEQ ID NO: 254551 - RNA, 22 nt, Human
ggcagaagauaggacagggaau

SEQ ID NO: 254552 - RNA, 22 nt, Human
uguguguccuugaccucagugg

SEQ ID NO: 254553 - RNA, 22 nt, Human
cauuuacacacagaggugugcu

SEQ ID NO: 254554 - RNA, 18 nt, Human
gagcucugccucccaguc

SEQ ID NO: 254555 - RNA, 22 nt, Human
accauccugaaaccuucaugcu

SEQ ID NO: 254556 - RNA, 20 nt, Human
cuucuucauuaacccuacug

SEQ ID NO: 254557 - RNA, 22 nt, Human
acaggagcucuagggacagcac

SEQ ID NO: 254558 - RNA, 22 nt, Human
agcagcaauaauaaaguaauac

SEQ ID NO: 254559 - RNA, 22 nt, Human
ggaauguucuggaacaccgcuu

SEQ ID NO: 254560 - RNA, 22 nt, Human
uaauaucuggcauucaaacaug

SEQ ID NO: 254561 - RNA, 22 nt, Human
ugggagcaagcuacuuagggaa

SEQ ID NO: 254562 - RNA, 22 nt, Human
cuguccugugcauugucagaug

SEQ ID NO: 254563 - RNA, 22 nt, Human
cccaggucugugccagcucuga

SEQ ID NO: 254564 - RNA, 21 nt, Human
cugggcucaagcaauccuuuc

SEQ ID NO: 254565 - RNA, 21 nt, Human
uggcucaguugcugggcacag

SEQ ID NO: 254566 - RNA, 22 nt, Human
gaauuacauuguuagccuuccu

SEQ ID NO: 254567 - RNA, 22 nt, Human
cagguucuggagaugcagagau

SEQ ID NO: 254568 - RNA, 22 nt, Human
uggcuaugcaaaccugaggcug

SEQ ID NO: 254569 - RNA, 22 nt, Human
aacauucuauuuugcuaaaaca

SEQ ID NO: 254570 - RNA, 22 nt, Human
cacagaacauccuuagcucaug

SEQ ID NO: 254571 - RNA, 22 nt, Human
cuugguuauacuccaggaacca

SEQ ID NO: 254572 - RNA, 22 nt, Human
aaagcagacugauuugcaucac

SEQ ID NO: 254573 - RNA, 21 nt, Human
agggccugugcucuccagguc

SEQ ID NO: 254574 - RNA, 21 nt, Human
cacuuuaaaaauaucuuuaua

SEQ ID NO: 254575 - RNA, 22 nt, Human
ucagaacauuaaggauuugaag

SEQ ID NO: 254576 - RNA, 22 nt, Human
agggcagcugugagccacugug

SEQ ID NO: 254577 - RNA, 22 nt, Human
cugaggccucucccacuccagc

SEQ ID NO: 254578 - RNA, 22 nt, Human
aauugcuuuacaagccguuuaa

SEQ ID NO: 254579 - RNA, 22 nt, Human
uguaauucauucaacugaagaa

SEQ ID NO: 254580 - RNA, 22 nt, Human
aauacaguaauuuugaugaguu

SEQ ID NO: 254581 - RNA, 22 nt, Human
cugcugagaugccaggagcucu

SEQ ID NO: 254582 - RNA, 22 nt, Human
auccaugauuaguaggauaaag

SEQ ID NO: 254583 - RNA, 22 nt, Human
caguuggaggaaugaggcugua

SEQ ID NO: 254584 - RNA, 22 nt, Human
gacagguugaaguaucaaaggu

SEQ ID NO: 254585 - RNA, 22 nt, Human
cuugaaguugcaaaacauuaau

SEQ ID NO: 254586 - RNA, 16 nt, Human
ccccucaggaaguaca

SEQ ID NO: 254587 - RNA, 22 nt, Human
cccuggcacuagcgacggccau

SEQ ID NO: 254588 - RNA, 22 nt, Human
gaguccuuccagcaggcauuua

SEQ ID NO: 254589 - RNA, 22 nt, Human
uggccuuggagaggcacggccc

SEQ ID NO: 254590 - RNA, 22 nt, Human
uuaagagcaacauauggugaca

SEQ ID NO: 254591 - RNA, 22 nt, Human
ugagcuuauucauaaaagugca

SEQ ID NO: 254592 - RNA, 22 nt, Human
uuuugcuugagugcacaaaaug

SEQ ID NO: 254593 - RNA, 22 nt, Human
uaagacuuccaggaaaaggugg

SEQ ID NO: 254594 - RNA, 22 nt, Human
uguccauggauagagcugcucg

SEQ ID NO: 254595 - RNA, 22 nt, Human
uuuaauugcauuuaaagaugga

SEQ ID NO: 254596 - RNA, 22 nt, Human
ugggugaggagaggcugucuaa

SEQ ID NO: 254597 - RNA, 22 nt, Human
uguaaaguuacuuuugaaagga

SEQ ID NO: 254598 - RNA, 22 nt, Human
agagcagauggagcuggaagag

SEQ ID NO: 254599 - RNA, 22 nt, Human
cguugugagcuugguagacacu

SEQ ID NO: 254600 - RNA, 22 nt, Human
cucucucuuguguugcugcaga

SEQ ID NO: 254601 - RNA, 19 nt, Human
ccuguucuuggcugaggcu

SEQ ID NO: 254602 - RNA, 22 nt, Human
ucagacagugugaucagucucu

SEQ ID NO: 254603 - RNA, 22 nt, Human
uucccuggcucuucuacaucgu

SEQ ID NO: 254604 - RNA, 22 nt, Human
aguuuagacaaagucuugcauu

SEQ ID NO: 254605 - RNA, 22 nt, Human
uuccucagggaggcuagcagua

SEQ ID NO: 254606 - RNA, 22 nt, Human
aauaagaucuuaaagguuauau

SEQ ID NO: 254607 - RNA, 22 nt, Human
ugagcugauggcaucccuguuu

SEQ ID NO: 254608 - RNA, 22 nt, Human
cugcccugggugcuggggaucc

SEQ ID NO: 254609 - RNA, 22 nt, Human
caggagccgccaggcacguugg

SEQ ID NO: 254610 - RNA, 22 nt, Human
ucucuaaaucugguucacuugc

SEQ ID NO: 254611 - RNA, 22 nt, Human
gaaaaguacacagcccaaacau

SEQ ID NO: 254612 - RNA, 22 nt, Human
gccuggcugucuggcaagguuc

SEQ ID NO: 254613 - RNA, 22 nt, Human
auguccuuccugagaucccugu

SEQ ID NO: 254614 - RNA, 22 nt, Human
ggccucucuggcauggcugccc

SEQ ID NO: 254615 - RNA, 22 nt, Human
gagaaucucuuugacaagcaga

SEQ ID NO: 254616 - RNA, 22 nt, Human
acaaaguguuuucugaaggccu

SEQ ID NO: 254617 - RNA, 22 nt, Human
aaaugucauauuuaaguaggaa

SEQ ID NO: 254618 - RNA, 22 nt, Human
agaugguucagaauuauaaaga

SEQ ID NO: 254619 - RNA, 22 nt, Human
uaaugaauaaacuugagaguca

SEQ ID NO: 254620 - RNA, 19 nt, Human
gagcaggccacacaugugu

SEQ ID NO: 254621 - RNA, 23 nt, Human
agcugaggcugugggugucagag

SEQ ID NO: 254622 - RNA, 21 nt, Human
uugcuuauggcacugcuuugc

SEQ ID NO: 254623 - RNA, 18 nt, Human
ugcuggguaacuguaugg

SEQ ID NO: 254624 - RNA, 23 nt, Human
agcaccugugauuuccuagcucu

SEQ ID NO: 254625 - RNA, 22 nt, Human
cuaagaaaauagaagcaugcua

SEQ ID NO: 254626 - RNA, 22 nt, Human
uucugcugagugggcaggugca

SEQ ID NO: 254627 - RNA, 22 nt, Human
aggaagcuagaaggucuucuuu

SEQ ID NO: 254628 - RNA, 22 nt, Human
ccugggcaggccggacgcuggg

SEQ ID NO: 254629 - RNA, 22 nt, Human
uaacacaaaagaauaugugugu

SEQ ID NO: 254630 - RNA, 22 nt, Human
aggagacccagaauguugcugu

SEQ ID NO: 254631 - RNA, 22 nt, Human
gaaugcuauuauuucugugugu

SEQ ID NO: 254632 - RNA, 20 nt, Human
aggcugucauuucuggcagg

SEQ ID NO: 254633 - RNA, 22 nt, Human
uuauuaaaaugcggauuuggcu

SEQ ID NO: 254634 - RNA, 22 nt, Human
uccuggaggagauccaaucuga

SEQ ID NO: 254635 - RNA, 22 nt, Human
agcggucaggagaaauaagcau

SEQ ID NO: 254636 - RNA, 19 nt, Human
aaugcauggaaguuggaga

SEQ ID NO: 254637 - RNA, 22 nt, Human
agcaggggcaggguuuugugcu

SEQ ID NO: 254638 - RNA, 22 nt, Human
ugugauucucagaagagggaag

SEQ ID NO: 254639 - RNA, 22 nt, Human
ggucugagcuugagcccaugcu

SEQ ID NO: 254640 - RNA, 22 nt, Human
agcuggcagcucucagggguac

SEQ ID NO: 254641 - RNA, 22 nt, Human
gugauaaaauucaaauagcucu

SEQ ID NO: 254642 - RNA, 22 nt, Human
agggcccaguggagagcugagc

SEQ ID NO: 254643 - RNA, 22 nt, Human
uucagcaccuggaauagcaccu

SEQ ID NO: 254644 - RNA, 22 nt, Human
aggaauguggcaaucuucaagu

SEQ ID NO: 254645 - RNA, 22 nt, Human
agggaggaucugcuccuugucu

SEQ ID NO: 254646 - RNA, 22 nt, Human
aagcacagagaugggcacgccu

SEQ ID NO: 254647 - RNA, 22 nt, Human
gucuguacccacguccugcuag

SEQ ID NO: 254648 - RNA, 22 nt, Human
augcaguuuaaggcacaauuag

SEQ ID NO: 254649 - RNA, 22 nt, Human
ucaggugggaccugcuaggaca

SEQ ID NO: 254650 - RNA, 22 nt, Human
caauuacugguccacagaaauu

SEQ ID NO: 254651 - RNA, 21 nt, Human
ggcaauuaggcuucugaguau

SEQ ID NO: 254652 - RNA, 22 nt, Human
gaagggaaggaaagaaccagca

SEQ ID NO: 254653 - RNA, 22 nt, Human
agagacaaacacugcaacuucu

SEQ ID NO: 254654 - RNA, 22 nt, Human
aagggagaaaacuuguggcuua

SEQ ID NO: 254655 - RNA, 22 nt, Human
caauuucucgaacucuaaucca

SEQ ID NO: 254656 - RNA, 22 nt, Human
ugggcucucagucagacuggca

SEQ ID NO: 254657 - RNA, 22 nt, Human
uucauagcagucccuuucuggg

SEQ ID NO: 254658 - RNA, 22 nt, Human
cuguacaggugaggagggggcu

SEQ ID NO: 254659 - RNA, 22 nt, Human
ucucagagagcuguguuuuccu

SEQ ID NO: 254660 - RNA, 22 nt, Human
cuguagcagacagacccuaggu

SEQ ID NO: 254661 - RNA, 22 nt, Human
uuaaacugcagacucaguguuc

SEQ ID NO: 254662 - RNA, 18 nt, Human
cagggcuguggggucacu

SEQ ID NO: 254663 - RNA, 22 nt, Human
uucaagaaagaguggcuauucc

SEQ ID NO: 254664 - RNA, 22 nt, Human
ucugggagcacacgcagugauc

SEQ ID NO: 254665 - RNA, 22 nt, Human
ugcaauccacuauucuaaagcc

SEQ ID NO: 254666 - RNA, 22 nt, Human
cccugagagugagugccaccuu

SEQ ID NO: 254667 - RNA, 22 nt, Human
cuggagcuaggaaguccaagau

SEQ ID NO: 254668 - RNA, 19 nt, Human
gcacacaguagggcuggca

SEQ ID NO: 254669 - RNA, 22 nt, Human
agcugaaacuucccauuaauug

SEQ ID NO: 254670 - RNA, 22 nt, Human
acacacguauauauacguaugu

SEQ ID NO: 254671 - RNA, 22 nt, Human
aaauuagaucaguggauuuucu

SEQ ID NO: 254672 - RNA, 22 nt, Human
uuuggacaaaugucugacuuuc

SEQ ID NO: 254673 - RNA, 22 nt, Human
aggcagaggagaaugaucuucc

SEQ ID NO: 254674 - RNA, 22 nt, Human
aauuucuucagcucuaaaaugg

SEQ ID NO: 254675 - RNA, 22 nt, Human
gcguccagggaaggcccagcug

SEQ ID NO: 254676 - RNA, 22 nt, Human
gugcugaggagagggggugguc

SEQ ID NO: 254677 - RNA, 22 nt, Human
augguggacgggagacaggacu

SEQ ID NO: 254678 - RNA, 21 nt, Human
gauaaggcaggaggauaagua

SEQ ID NO: 254679 - RNA, 22 nt, Human
aaugauuuccccuacacagaag

SEQ ID NO: 254680 - RNA, 22 nt, Human
gggggcaggucuggaacuuuga

SEQ ID NO: 254681 - RNA, 22 nt, Human
acagggggucccauggccugga

SEQ ID NO: 254682 - RNA, 22 nt, Human
uccugccaccugcacagcuccc

SEQ ID NO: 254683 - RNA, 22 nt, Human
gaaauaaccucaugcaccauga

SEQ ID NO: 254684 - RNA, 22 nt, Human
guugaauauuuuaagaguuuug

SEQ ID NO: 254685 - RNA, 21 nt, Human
uucugcuguucaccaccaccc

SEQ ID NO: 254686 - RNA, 22 nt, Human
gucuggagacuugggucaucaa

SEQ ID NO: 254687 - RNA, 22 nt, Human
agucaguggauuuaccaugcgu

SEQ ID NO: 254688 - RNA, 22 nt, Human
gcuuuagaagacacucuguuuu

SEQ ID NO: 254689 - RNA, 22 nt, Human
ucaaucaaagccagauguccuu

SEQ ID NO: 254690 - RNA, 22 nt, Human
ugcaacagacuuuauuaacucu

SEQ ID NO: 254691 - RNA, 22 nt, Human
aagauucagccaaauuguucau

SEQ ID NO: 254692 - RNA, 22 nt, Human
acucaguuaucauguguccaca

SEQ ID NO: 254693 - RNA, 22 nt, Human
acauguauacaauguguaauga

SEQ ID NO: 254694 - RNA, 22 nt, Human
ccaggucugucuucuuagcuca

SEQ ID NO: 254695 - RNA, 22 nt, Human
cagagccacugcauuuuacagc

SEQ ID NO: 254696 - RNA, 22 nt, Human
gaugcugauuauuucuugcuag

SEQ ID NO: 254697 - RNA, 22 nt, Human
agcaggcauagaguagcacuca

SEQ ID NO: 254698 - RNA, 21 nt, Human
agaagccuggggaauguggcu

SEQ ID NO: 254699 - RNA, 22 nt, Human
cccagccagccucuucccauau

SEQ ID NO: 254700 - RNA, 21 nt, Human
aggcccaggaauaugcauuuu

SEQ ID NO: 254701 - RNA, 22 nt, Human
ucuggcuccguguccgcuccca

SEQ ID NO: 254702 - RNA, 22 nt, Human
ucaguguuggcauucagaaaug

SEQ ID NO: 254703 - RNA, 22 nt, Human
gguguccuugcagaaggcggcg

SEQ ID NO: 254704 - RNA, 22 nt, Human
gcaaacaugugcucauuuugug

SEQ ID NO: 254705 - RNA, 22 nt, Human
agcuccagagccacauccauca

SEQ ID NO: 254706 - RNA, 22 nt, Human
accugggaaagccguggaaagg

SEQ ID NO: 254707 - RNA, 22 nt, Human
auugcaaaggucccauucaaga

SEQ ID NO: 254708 - RNA, 22 nt, Human
auucagagauuguuauucagac

SEQ ID NO: 254709 - RNA, 22 nt, Human
aauuauauugaaguugaauguc

SEQ ID NO: 254710 - RNA, 22 nt, Human
agucuagauguguacuagguua

SEQ ID NO: 254711 - RNA, 22 nt, Human
uuggcuucuguuuuggcucugu

SEQ ID NO: 254712 - RNA, 22 nt, Human
aauuagaagcuguuagcaaaau

SEQ ID NO: 254713 - RNA, 22 nt, Human
caauguuuuuccuuccuuaaua

SEQ ID NO: 254714 - RNA, 22 nt, Human
ucuggagaagcagugagaguca

SEQ ID NO: 254715 - RNA, 22 nt, Human
ucucugcagcuaagaaauuaau

SEQ ID NO: 254716 - RNA, 18 nt, Human
cugaggcccagagagggc

SEQ ID NO: 254717 - RNA, 23 nt, Human
ugcuggguaaauagcugaguaac

SEQ ID NO: 254718 - RNA, 22 nt, Human
auuuugacagaagaggcccuaa

SEQ ID NO: 254719 - RNA, 22 nt, Human
ucagggagggaccugaggcugg

SEQ ID NO: 254720 - RNA, 22 nt, Human
aagauauagauggugguauaaa

SEQ ID NO: 254721 - RNA, 22 nt, Human
caagccaguuuguaguucucuc

SEQ ID NO: 254722 - RNA, 22 nt, Human
aacauguaaccagcauucaucu

SEQ ID NO: 254723 - RNA, 22 nt, Human
guccagcccgggcuccgccagc

SEQ ID NO: 254724 - RNA, 22 nt, Human
ccacugcccaccccgacgucua

SEQ ID NO: 254725 - RNA, 22 nt, Human
ucaggcugagaaaaucuggacc

SEQ ID NO: 254726 - RNA, 22 nt, Human
augcagggagguaagaggugcc

SEQ ID NO: 254727 - RNA, 22 nt, Human
aucuguucuucaaaauauuaca

SEQ ID NO: 254728 - RNA, 22 nt, Human
aaggaaauacaacauguauuca

SEQ ID NO: 254729 - RNA, 22 nt, Human
agguccagguuccguuucugcg

SEQ ID NO: 254730 - RNA, 22 nt, Human
ccuggagaccugauggcagcgg

SEQ ID NO: 254731 - RNA, 22 nt, Human
aaagaucugacuuagacacaga

SEQ ID NO: 254732 - RNA, 22 nt, Human
ucaggcugggagacaaucacug

SEQ ID NO: 254733 - RNA, 22 nt, Human
augagauuuuaaaacuucacuu

SEQ ID NO: 254734 - RNA, 22 nt, Human
ucauuucaugucucaggcacug

SEQ ID NO: 254735 - RNA, 22 nt, Human
acacauguuuguguagucaguu

SEQ ID NO: 254736 - RNA, 22 nt, Human
aacaugcucuuccuggcuaguc

SEQ ID NO: 254737 - RNA, 22 nt, Human
auguggggacaaaaugauggcc

SEQ ID NO: 254738 - RNA, 18 nt, Human
ucauucaaagucuacuga

SEQ ID NO: 254739 - RNA, 22 nt, Human
gagcuuggcuggaccucacgga

SEQ ID NO: 254740 - RNA, 22 nt, Human
uccaggaggcucugguugacgu

SEQ ID NO: 254741 - RNA, 22 nt, Human
uacuuuuugucucuuugaaugu

SEQ ID NO: 254742 - RNA, 22 nt, Human
cucuggagagguucccauggga

SEQ ID NO: 254743 - RNA, 22 nt, Human
gcccuggauggcaggagccauc

SEQ ID NO: 254744 - RNA, 18 nt, Human
ggcaucugcacagcagcc

SEQ ID NO: 254745 - RNA, 22 nt, Human
ucugccuuggcaaccacagcuu

SEQ ID NO: 254746 - RNA, 22 nt, Human
aguguucuagcgcugugcuugu

SEQ ID NO: 254747 - RNA, 22 nt, Human
aguauuuagagacacaagaugg

SEQ ID NO: 254748 - RNA, 22 nt, Human
cuggguggagccuggucaucug

SEQ ID NO: 254749 - RNA, 22 nt, Human
uacaaaguuugagaaugcuuuc

SEQ ID NO: 254750 - RNA, 20 nt, Human
gccucagccaacccaugggg

SEQ ID NO: 254751 - RNA, 22 nt, Human
caguguuuguauagaauaugca

SEQ ID NO: 254752 - RNA, 22 nt, Human
uugaggagucaggggcacggaa

SEQ ID NO: 254753 - RNA, 19 nt, Human
ucucccagcugagaagggc

SEQ ID NO: 254754 - RNA, 22 nt, Human
gggucagggcuggcugucguca

SEQ ID NO: 254755 - RNA, 22 nt, Human
gaaggggguugcagucuagggu

SEQ ID NO: 254756 - RNA, 22 nt, Human
ucaggcugguccccacagugga

SEQ ID NO: 254757 - RNA, 22 nt, Human
uugcucugaaccacaccaucac

SEQ ID NO: 254758 - RNA, 22 nt, Human
auggaacaucagguuaagaaau

SEQ ID NO: 254759 - RNA, 22 nt, Human
agaaaucaugacuaagagcagu

SEQ ID NO: 254760 - RNA, 22 nt, Human
uuuugccuaggguugacccguu

SEQ ID NO: 254761 - RNA, 22 nt, Human
aucuucaaagggauguccaugg

SEQ ID NO: 254762 - RNA, 22 nt, Human
aggagccugugccuggcacucc

SEQ ID NO: 254763 - RNA, 22 nt, Human
gccugggugaauuugauccuaa

SEQ ID NO: 254764 - RNA, 22 nt, Human
gugcaaaaguaauggcaguuuu

SEQ ID NO: 254765 - RNA, 22 nt, Human
aguggcuguaucagucaacccu

SEQ ID NO: 254766 - RNA, 22 nt, Human
gcuggccugggcagaggcuaug

SEQ ID NO: 254767 - RNA, 22 nt, Human
cccuuccuccucgccugucaga

SEQ ID NO: 254768 - RNA, 22 nt, Human
gagccaagcaauauacccaacc

SEQ ID NO: 254769 - RNA, 22 nt, Human
uaaaaggagguugaagcuguca

SEQ ID NO: 254770 - RNA, 22 nt, Human
gcuggcauuacaggagagaacc

SEQ ID NO: 254771 - RNA, 22 nt, Human
ucauauaccugcaugugcaugu

SEQ ID NO: 254772 - RNA, 18 nt, Human
ugcaaauggcuguuugau

SEQ ID NO: 254773 - RNA, 22 nt, Human
uggagcugagagccaggcuggc

SEQ ID NO: 254774 - RNA, 22 nt, Human
auuagagcuguuagugaagugc

SEQ ID NO: 254775 - RNA, 22 nt, Human
cauauccaauaugacuaguguu

SEQ ID NO: 254776 - RNA, 22 nt, Human
ucucaggcccacuguguugaaa

SEQ ID NO: 254777 - RNA, 21 nt, Human
gaggaaugguuugcaaagcac

SEQ ID NO: 254778 - RNA, 22 nt, Human
cagcacagugaccagacccacu

SEQ ID NO: 254779 - RNA, 22 nt, Human
caggugguuaugaggaagguga

SEQ ID NO: 254780 - RNA, 22 nt, Human
aaggaggcagaacucacaugga

SEQ ID NO: 254781 - RNA, 22 nt, Human
aaaaguaauugcaauuuuguag

SEQ ID NO: 254782 - RNA, 22 nt, Human
gcauuuuaaugagguuuaugag

SEQ ID NO: 254783 - RNA, 22 nt, Human
ucuuucccuuagaacauuaaca

SEQ ID NO: 254784 - RNA, 22 nt, Human
cagagccugccaccuuucuccc

SEQ ID NO: 254785 - RNA, 22 nt, Human
caggcacaaauuucuagauaag

SEQ ID NO: 254786 - RNA, 22 nt, Human
cagagcugcacauucuaugaug

SEQ ID NO: 254787 - RNA, 22 nt, Human
uggaagaauuuggggauaaauu

SEQ ID NO: 254788 - RNA, 22 nt, Human
auguacaaaaugccacugaauu

SEQ ID NO: 254789 - RNA, 22 nt, Human
ugguccugcuugcugcuuaaga

SEQ ID NO: 254790 - RNA, 22 nt, Human
auguuuacagaggaagugccuc

SEQ ID NO: 254791 - RNA, 17 nt, Human
acagugucuaugaaaug

SEQ ID NO: 254792 - RNA, 20 nt, Human
cauacacuauucuguauagu

SEQ ID NO: 254793 - RNA, 22 nt, Human
aguggugaugacagcaguuucu

SEQ ID NO: 254794 - RNA, 22 nt, Human
gccagcugggccuuagggcugg

SEQ ID NO: 254795 - RNA, 22 nt, Human
gacagacaugggacuucauacu

SEQ ID NO: 254796 - RNA, 22 nt, Human
gaaucccuugcaaguuguugua

SEQ ID NO: 254797 - RNA, 21 nt, Human
ugcucagucugucuccagcuu

SEQ ID NO: 254798 - RNA, 22 nt, Human
uccgggcaacugaagggagguu

SEQ ID NO: 254799 - RNA, 22 nt, Human
ggucucagagguuucugcucag

SEQ ID NO: 254800 - RNA, 21 nt, Human
agcugggugggcugagugaca

SEQ ID NO: 254801 - RNA, 22 nt, Human
augcaguuuucaaagacuauuc

SEQ ID NO: 254802 - RNA, 22 nt, Human
gaagaacaagcagugcuuuccu

SEQ ID NO: 254803 - RNA, 22 nt, Human
caggcccugggcaggcacagag

SEQ ID NO: 254804 - RNA, 22 nt, Human
caggccucagagaguggcgggg

SEQ ID NO: 254805 - RNA, 22 nt, Human
auucucugaagucaauggaaau

SEQ ID NO: 254806 - RNA, 22 nt, Human
uuuuuugucuugaagaaauggu

SEQ ID NO: 254807 - RNA, 20 nt, Human
cugcuccacccggcucucag

SEQ ID NO: 254808 - RNA, 22 nt, Human
cagcagcugauggggaagugau

SEQ ID NO: 254809 - RNA, 22 nt, Human
acuuugcaaugggcagaaccca

SEQ ID NO: 254810 - RNA, 16 nt, Human
ggugggaggugaggug

SEQ ID NO: 254811 - RNA, 21 nt, Human
uucugggccggagaaggggcg

SEQ ID NO: 254812 - RNA, 22 nt, Human
ggggacagucgaucuagugauu

SEQ ID NO: 254813 - RNA, 22 nt, Human
uagggcaggggaggaaucugaa

SEQ ID NO: 254814 - RNA, 22 nt, Human
caagauuuagccugcugccugu

SEQ ID NO: 254815 - RNA, 22 nt, Human
uccucagaauggauggcagggg

SEQ ID NO: 254816 - RNA, 22 nt, Human
ucuggucccuuuuccugcaguc

SEQ ID NO: 254817 - RNA, 22 nt, Human
cuagaaacauuacauguguuaa

SEQ ID NO: 254818 - RNA, 22 nt, Human
auuauuauauagggaaaguccc

SEQ ID NO: 254819 - RNA, 22 nt, Human
gugugagagaagcugccaugga

SEQ ID NO: 254820 - RNA, 22 nt, Human
ucagacagaaagaugaguaugg

SEQ ID NO: 254821 - RNA, 22 nt, Human
aacaugagugauaaaauuaccu

SEQ ID NO: 254822 - RNA, 21 nt, Human
acauaacugucaaguaacguu

SEQ ID NO: 254823 - RNA, 22 nt, Human
acagagguguuccagaccuagg

SEQ ID NO: 254824 - RNA, 22 nt, Human
aggcccaguagucgacggcgcu

SEQ ID NO: 254825 - RNA, 22 nt, Human
gaacauucacagacucaccauu

SEQ ID NO: 254826 - RNA, 22 nt, Human
ucacaucugauuagugacugau

SEQ ID NO: 254827 - RNA, 22 nt, Human
ugaggacauuaggaagugaagg

SEQ ID NO: 254828 - RNA, 19 nt, Human
uacaggcaguuucuacaau

SEQ ID NO: 254829 - RNA, 22 nt, Human
cugggcuguaauguggcacuga

SEQ ID NO: 254830 - RNA, 22 nt, Human
gcacaggaugauggguugaggg

SEQ ID NO: 254831 - RNA, 22 nt, Human
uauugcauaaaaucagguuaga

SEQ ID NO: 254832 - RNA, 22 nt, Human
cacauguaguaagcaggcaaug

SEQ ID NO: 254833 - RNA, 22 nt, Human
uaguacaacucacuugauuuua

SEQ ID NO: 254834 - RNA, 22 nt, Human
uccuggcuggaauuucucacuc

SEQ ID NO: 254835 - RNA, 22 nt, Human
agaaagcaucuccauuguaggu

SEQ ID NO: 254836 - RNA, 22 nt, Human
gcuguucuccgaugaccccgug

SEQ ID NO: 254837 - RNA, 21 nt, Human
cauuaaguaccagggcacugu

SEQ ID NO: 254838 - RNA, 22 nt, Human
cugcuccagacaccugcagggg

SEQ ID NO: 254839 - RNA, 22 nt, Human
ucucuucccuuuaugguaugug

SEQ ID NO: 254840 - RNA, 22 nt, Human
agcagggcuuuggcuggcuuuc

SEQ ID NO: 254841 - RNA, 22 nt, Human
uuccucagugcccccauacggu

SEQ ID NO: 254842 - RNA, 22 nt, Human
auuagcaauugcccugugcaau

SEQ ID NO: 254843 - RNA, 22 nt, Human
ggaacuggguuagggucucuuc

SEQ ID NO: 254844 - RNA, 22 nt, Human
caugccauucccugauccuaac

SEQ ID NO: 254845 - RNA, 22 nt, Human
ccuggcucugguucccucagcu

SEQ ID NO: 254846 - RNA, 22 nt, Human
ggcagaguggagugcggccucc

SEQ ID NO: 254847 - RNA, 22 nt, Human
caguuuuaaauuguuagauaau

SEQ ID NO: 254848 - RNA, 22 nt, Human
ucagcuuuggucacauugaguu

SEQ ID NO: 254849 - RNA, 22 nt, Human
guccauaugucaggugugaauu

SEQ ID NO: 254850 - RNA, 21 nt, Human
ugucacagauucucagcuugc

SEQ ID NO: 254851 - RNA, 22 nt, Human
ccagagagucgaugggggacac

SEQ ID NO: 254852 - RNA, 22 nt, Human
auacagagaagggguagaggau

SEQ ID NO: 254853 - RNA, 22 nt, Human
aaacacugguaugauguauagu

SEQ ID NO: 254854 - RNA, 22 nt, Human
aaaagagaauccuguacagaga

SEQ ID NO: 254855 - RNA, 23 nt, Human
ccaggcucuuucaccugcuauuc

SEQ ID NO: 254856 - RNA, 19 nt, Human
ggaugagggucaggcauag

SEQ ID NO: 254857 - RNA, 22 nt, Human
aguguaugcagguuuucaaugu

SEQ ID NO: 254858 - RNA, 22 nt, Human
gucaggagagaucaggacagca

SEQ ID NO: 254859 - RNA, 22 nt, Human
gaauuccacuuuggcuuuuggg

SEQ ID NO: 254860 - RNA, 22 nt, Human
uggaaacuauccucacaacuag

SEQ ID NO: 254861 - RNA, 22 nt, Human
gggcugagaauucagcuuuccu

SEQ ID NO: 254862 - RNA, 22 nt, Human
ucuugcagaggcacugugucag

SEQ ID NO: 254863 - RNA, 22 nt, Human
agagggagcccagucauagcug

SEQ ID NO: 254864 - RNA, 22 nt, Human
agaacauuugucgaucaauuug

SEQ ID NO: 254865 - RNA, 22 nt, Human
ggagaagguggcucagcaaagg

SEQ ID NO: 254866 - RNA, 22 nt, Human
ccuguacaucugcucucauugc

SEQ ID NO: 254867 - RNA, 22 nt, Human
auuucaaguguugagcucauaa

SEQ ID NO: 254868 - RNA, 22 nt, Human
agcacagggacaaugccaggug

SEQ ID NO: 254869 - RNA, 22 nt, Human
ucugugcugagcucugagaugu

SEQ ID NO: 254870 - RNA, 22 nt, Human
gacauuucaaucucauuauggg

SEQ ID NO: 254871 - RNA, 20 nt, Human
ugaauaugaccuuauuugga

SEQ ID NO: 254872 - RNA, 22 nt, Human
cccuccagccauggacccaggu

SEQ ID NO: 254873 - RNA, 22 nt, Human
auuagcuuaucacacaagcugc

SEQ ID NO: 254874 - RNA, 22 nt, Human
ugaggcaggagaauggcgggaa

SEQ ID NO: 254875 - RNA, 22 nt, Human
aaugggcuuuggccaguaggag

SEQ ID NO: 254876 - RNA, 22 nt, Human
cccugcagaucagugagaacuu

SEQ ID NO: 254877 - RNA, 22 nt, Human
uggcagcauuuuuuccagaaca

SEQ ID NO: 254878 - RNA, 22 nt, Human
aagcuguggcuuggaggaaaca

SEQ ID NO: 254879 - RNA, 22 nt, Human
acugccuggccuggccucacug

SEQ ID NO: 254880 - RNA, 22 nt, Human
uuccuuucccuugcuucugugc

SEQ ID NO: 254881 - RNA, 22 nt, Human
gaggcuguguuucagugaggcc

SEQ ID NO: 254882 - RNA, 22 nt, Human
gccaggcagcaggaagccagug

SEQ ID NO: 254883 - RNA, 22 nt, Human
uauuaaguaucuugaugacaaa

SEQ ID NO: 254884 - RNA, 22 nt, Human
uuccaagugcccauauuucauc

SEQ ID NO: 254885 - RNA, 22 nt, Human
ucccucagcaggaauguggcag

SEQ ID NO: 254886 - RNA, 22 nt, Human
gccagcuggagacuggcagggg

SEQ ID NO: 254887 - RNA, 22 nt, Human
caugcaggccuauggagcagug

SEQ ID NO: 254888 - RNA, 22 nt, Human
aaaaccugauugaauucuauuu

SEQ ID NO: 254889 - RNA, 22 nt, Human
ccuuuagagcaaacgccaccua

SEQ ID NO: 254890 - RNA, 22 nt, Human
caugcaaaugguggcuaaaugg

SEQ ID NO: 254891 - RNA, 22 nt, Human
ccaggugggaggaaagcagaga

SEQ ID NO: 254892 - RNA, 20 nt, Human
auuucaguguuugcaauuuc

SEQ ID NO: 254893 - RNA, 22 nt, Human
ucugggccuuggaguggggaga

SEQ ID NO: 254894 - RNA, 18 nt, Human
ugaacuuuggugucucuc

SEQ ID NO: 254895 - RNA, 23 nt, Human
ugggaccuguuugcccacagaug

SEQ ID NO: 254896 - RNA, 20 nt, Human
auacacuugcccagcuugug

SEQ ID NO: 254897 - RNA, 22 nt, Human
agcagagucuucaagggcaggc

SEQ ID NO: 254898 - RNA, 22 nt, Human
caggccaaagaucccauugaca

SEQ ID NO: 254899 - RNA, 22 nt, Human
cagacaugauguaagcagaggc

SEQ ID NO: 254900 - RNA, 22 nt, Human
ugcugcucaaugagaugccauc

SEQ ID NO: 254901 - RNA, 22 nt, Human
cagugcuggaggggugcuugca

SEQ ID NO: 254902 - RNA, 22 nt, Human
ccugagcagggcucugcagggc

SEQ ID NO: 254903 - RNA, 20 nt, Human
caggcacacucauuccugcu

SEQ ID NO: 254904 - RNA, 22 nt, Human
ucugaggccccugggcaggaug

SEQ ID NO: 254905 - RNA, 20 nt, Human
ugccugggaaggcguggagg

SEQ ID NO: 254906 - RNA, 22 nt, Human
ucaucugugcaggacucagaag

SEQ ID NO: 254907 - RNA, 22 nt, Human
aacauuucagcaaauaagaaca

SEQ ID NO: 254908 - RNA, 22 nt, Human
aaaucucaauuugaauuguagc

SEQ ID NO: 254909 - RNA, 22 nt, Human
cauuuauuggcauguaguaggu

SEQ ID NO: 254910 - RNA, 22 nt, Human
uucagcaagaccaccauguacc

SEQ ID NO: 254911 - RNA, 22 nt, Human
acugagcagaagagaucuguga

SEQ ID NO: 254912 - RNA, 22 nt, Human
gaagauuucaguuaaguaucua

SEQ ID NO: 254913 - RNA, 21 nt, Human
ucuggucugcuguggaccugg

SEQ ID NO: 254914 - RNA, 22 nt, Human
ucugccuuucucaagggcaaaa

SEQ ID NO: 254915 - RNA, 22 nt, Human
guaggaagcucugaggcuaguu

SEQ ID NO: 254916 - RNA, 22 nt, Human
acaaucuggaaaaguuaacuau

SEQ ID NO: 254917 - RNA, 22 nt, Human
augcaccugaacuccaucagcu

SEQ ID NO: 254918 - RNA, 22 nt, Human
uggcugaguuacgaacagagca

SEQ ID NO: 254919 - RNA, 22 nt, Human
auaaaaguaggaccaacuuaca

SEQ ID NO: 254920 - RNA, 22 nt, Human
gggcacagaagucuaagacauc

SEQ ID NO: 254921 - RNA, 22 nt, Human
ccaucuccaaauaccaucacau

SEQ ID NO: 254922 - RNA, 22 nt, Human
uuuucucuccagguggggugau

SEQ ID NO: 254923 - RNA, 22 nt, Human
uuggauuacaugaaaugcagaa

SEQ ID NO: 254924 - RNA, 22 nt, Human
gcacagaacagagaaauagcca

SEQ ID NO: 254925 - RNA, 22 nt, Human
ggagcagcacugccacacagag

SEQ ID NO: 254926 - RNA, 22 nt, Human
uguccagcggccuggcugcuga

SEQ ID NO: 254927 - RNA, 22 nt, Human
cuggcaguuugccaggagcucg

SEQ ID NO: 254928 - RNA, 22 nt, Human
cucuuuggugcaccuugcaguc

SEQ ID NO: 254929 - RNA, 22 nt, Human
ccugcugugaccggggagcagg

SEQ ID NO: 254930 - RNA, 22 nt, Human
gggcuucucccuaaggacucug

SEQ ID NO: 254931 - RNA, 22 nt, Human
uuuauauagagauuugugcaug

SEQ ID NO: 254932 - RNA, 22 nt, Human
acaguuauucuuuaugcaacca

SEQ ID NO: 254933 - RNA, 22 nt, Human
cuuuggaacaagaagaaauggc

SEQ ID NO: 254934 - RNA, 23 nt, Human
cuugaaugggauggaauucacug

SEQ ID NO: 254935 - RNA, 20 nt, Human
cugcccugcccuggguccug

SEQ ID NO: 254936 - RNA, 22 nt, Human
gaaucucaguggaagcaggaag

SEQ ID NO: 254937 - RNA, 21 nt, Human
ugcuugggggcuucaggagcu

SEQ ID NO: 254938 - RNA, 22 nt, Human
ggaguggcacucugaggcgggg

SEQ ID NO: 254939 - RNA, 22 nt, Human
ggcuacagaggccgugagccug

SEQ ID NO: 254940 - RNA, 22 nt, Human
cuguuaaaugagaaagcagacu

SEQ ID NO: 254941 - RNA, 22 nt, Human
ucuuuggccuuaggagcccuug

SEQ ID NO: 254942 - RNA, 22 nt, Human
gccuggggaacuugauccuguc

SEQ ID NO: 254943 - RNA, 22 nt, Human
ucugugugguaguuucagugaa

SEQ ID NO: 254944 - RNA, 22 nt, Human
uggcucagucuggguugacuga

SEQ ID NO: 254945 - RNA, 22 nt, Human
agggcagcagcugucccugaga

SEQ ID NO: 254946 - RNA, 22 nt, Human
ggcuguaccugccucuccucua

SEQ ID NO: 254947 - RNA, 22 nt, Human
gagugcagaugccagccccagu

SEQ ID NO: 254948 - RNA, 22 nt, Human
cagaggcugaugugggaugggc

SEQ ID NO: 254949 - RNA, 22 nt, Human
ugcagagugggagaggugcggg

SEQ ID NO: 254950 - RNA, 22 nt, Human
gggacaugccccucagugggug

SEQ ID NO: 254951 - RNA, 22 nt, Human
gcaggugggggucggugcaucu

SEQ ID NO: 254952 - RNA, 22 nt, Human
gcuggcagagacaagaagacua

SEQ ID NO: 254953 - RNA, 22 nt, Human
uuaagucauuucugauuauaga

SEQ ID NO: 254954 - RNA, 22 nt, Human
uuccuggcacacuccugaaugu

SEQ ID NO: 254955 - RNA, 22 nt, Human
ucuaugaaaagucuauucauuc

SEQ ID NO: 254956 - RNA, 22 nt, Human
ucaucuugcaguguguguucug

SEQ ID NO: 254957 - RNA, 22 nt, Human
ucacagacucuugauugucuaa

SEQ ID NO: 254958 - RNA, 22 nt, Human
accaggaauauuuugcucauuu

SEQ ID NO: 254959 - RNA, 22 nt, Human
acuguacuuuagaaaguguagu

SEQ ID NO: 254960 - RNA, 22 nt, Human
ggcagguguuuuuauauuaaag

SEQ ID NO: 254961 - RNA, 22 nt, Human
ccugcaccacacucacugcuca

SEQ ID NO: 254962 - RNA, 22 nt, Human
ucagacagagaaguacaaugag

SEQ ID NO: 254963 - RNA, 22 nt, Human
aggaaggggagaaguuaaagcu

SEQ ID NO: 254964 - RNA, 22 nt, Human
agcuaagacuuagugacuuagu

SEQ ID NO: 254965 - RNA, 22 nt, Human
gcuggcuuugucaagggcagca

SEQ ID NO: 254966 - RNA, 22 nt, Human
ggacaagccugugaguggguuu

SEQ ID NO: 254967 - RNA, 22 nt, Human
uuaaaugacuuuuauuauucuc

SEQ ID NO: 254968 - RNA, 22 nt, Human
uacagugcauagaggcaugaua

SEQ ID NO: 254969 - RNA, 22 nt, Human
uuucaggagagaccagaaauga

SEQ ID NO: 254970 - RNA, 22 nt, Human
gcaggaagggaaagguugacuc

SEQ ID NO: 254971 - RNA, 22 nt, Human
cccugaggauagggcaggaccc

SEQ ID NO: 254972 - RNA, 22 nt, Human
accagcuccaggccccugcuga

SEQ ID NO: 254973 - RNA, 22 nt, Human
ucccagggcucuagagugcugg

SEQ ID NO: 254974 - RNA, 22 nt, Human
ccuuuagaugaucucuuggaca

SEQ ID NO: 254975 - RNA, 22 nt, Human
uguauguaugcaucuuuuaugu

SEQ ID NO: 254976 - RNA, 22 nt, Human
acugggcucaagugauuguccu

SEQ ID NO: 254977 - RNA, 22 nt, Human
ugccugggccuucccaccucug

SEQ ID NO: 254978 - RNA, 18 nt, Human
ccuguggcucagcccaca

SEQ ID NO: 254979 - RNA, 22 nt, Human
ccuuagaaauguaccaaaggaa

SEQ ID NO: 254980 - RNA, 22 nt, Human
ggaaggcuuuaagcaccaaagc

SEQ ID NO: 254981 - RNA, 22 nt, Human
gccaggugcauggcugagucuc

SEQ ID NO: 254982 - RNA, 19 nt, Human
agcaggcagguggcccagg

SEQ ID NO: 254983 - RNA, 22 nt, Human
gcugagcuagaaaaggaccaca

SEQ ID NO: 254984 - RNA, 22 nt, Human
gcuuucuggagccugggggaac

SEQ ID NO: 254985 - RNA, 22 nt, Human
gggccugccaggcuuucagcau

SEQ ID NO: 254986 - RNA, 22 nt, Human
ccaggaagccuuuuucuuugac

SEQ ID NO: 254987 - RNA, 22 nt, Human
gcaaggacucccugggucauuc

SEQ ID NO: 254988 - RNA, 22 nt, Human
agccuaggggguccugggccac

SEQ ID NO: 254989 - RNA, 22 nt, Human
augcuccaccuuuugcaggaac

SEQ ID NO: 254990 - RNA, 22 nt, Human
cagguccuggcaucaggcaggu

SEQ ID NO: 254991 - RNA, 22 nt, Human
agcuucucaggagucugaggca

SEQ ID NO: 254992 - RNA, 22 nt, Human
uggauucugggcuguuugcauu

SEQ ID NO: 254993 - RNA, 22 nt, Human
cacagcagaaauaugaaggcag

SEQ ID NO: 254994 - RNA, 22 nt, Human
acuucauauuguuuccacuaga

SEQ ID NO: 254995 - RNA, 22 nt, Human
gcugcccucucuggccccacac

SEQ ID NO: 254996 - RNA, 17 nt, Human
cccaggccgccgggagc

SEQ ID NO: 254997 - RNA, 22 nt, Human
ucaugccauccacaucuguuuc

SEQ ID NO: 254998 - RNA, 17 nt, Human
ucaggcugggugcagug

SEQ ID NO: 254999 - RNA, 22 nt, Human
accaugaucugcucugguguuu

SEQ ID NO: 255000 - RNA, 22 nt, Human
ggccuugauguucuugggagau

SEQ ID NO: 255001 - RNA, 22 nt, Human
acauuagagaagcuuggagaug

SEQ ID NO: 255002 - RNA, 20 nt, Human
ggcuuccccgccaucuuccg

SEQ ID NO: 255003 - RNA, 22 nt, Human
agaauacaguaugcaaaaagau

SEQ ID NO: 255004 - RNA, 22 nt, Human
aaugucuauuugcuacaaagcc

SEQ ID NO: 255005 - RNA, 22 nt, Human
cccuggagugugacgaggcauu

SEQ ID NO: 255006 - RNA, 21 nt, Human
agugucauuugaucauuguua

SEQ ID NO: 255007 - RNA, 18 nt, Human
gacacaggagagaguccc

SEQ ID NO: 255008 - RNA, 22 nt, Human
uucuuuguuguacuuuccuaca

SEQ ID NO: 255009 - RNA, 22 nt, Human
aggaagagguagcugucaaggg

SEQ ID NO: 255010 - RNA, 22 nt, Human
cagggcccauggcucagguagg

SEQ ID NO: 255011 - RNA, 22 nt, Human
acaaaccagcuuaagcaagaug

SEQ ID NO: 255012 - RNA, 22 nt, Human
aagaacuuuuggcaaguguuau

SEQ ID NO: 255013 - RNA, 22 nt, Human
acauuucuuugcuagacagcag

SEQ ID NO: 255014 - RNA, 22 nt, Human
ccaaggaggccccaggucagcu

SEQ ID NO: 255015 - RNA, 22 nt, Human
aagugucuucugauggggugug

SEQ ID NO: 255016 - RNA, 20 nt, Human
ucuguaggcaaguuagcagg

SEQ ID NO: 255017 - RNA, 22 nt, Human
augggcaggcaagguggcgagu

SEQ ID NO: 255018 - RNA, 22 nt, Human
aggcccaguccucugccgucug

SEQ ID NO: 255019 - RNA, 22 nt, Human
gagcuggcuccgccaugcugcu

SEQ ID NO: 255020 - RNA, 22 nt, Human
cuuuaauucagauuugaaggga

SEQ ID NO: 255021 - RNA, 22 nt, Human
aagaaagugcuuuguaaauuau

SEQ ID NO: 255022 - RNA, 22 nt, Human
guauaaaggcacagguuuucug

SEQ ID NO: 255023 - RNA, 20 nt, Human
ugcaaacacagaguguauga

SEQ ID NO: 255024 - RNA, 22 nt, Human
accaaucuccuauuuuguuuca

SEQ ID NO: 255025 - RNA, 22 nt, Human
guuuauuggguauuguggagcc

SEQ ID NO: 255026 - RNA, 22 nt, Human
uuuaaaaucagaugggaguugg

SEQ ID NO: 255027 - RNA, 22 nt, Human
guagaaauauuuaucucugaga

SEQ ID NO: 255028 - RNA, 22 nt, Human
aguuacugcuuucaggaaguuu

SEQ ID NO: 255029 - RNA, 19 nt, Human
guagggacagugguucuga

SEQ ID NO: 255030 - RNA, 22 nt, Human
uagaagauucauuuccucugaa

SEQ ID NO: 255031 - RNA, 21 nt, Human
ccuucuccacagggucuccgg

SEQ ID NO: 255032 - RNA, 22 nt, Human
gagacagaucucggcuccaugc

SEQ ID NO: 255033 - RNA, 22 nt, Human
ucucagaguuccucuggagucc

SEQ ID NO: 255034 - RNA, 22 nt, Human
aaccccaggcuggaggagucuc

SEQ ID NO: 255035 - RNA, 22 nt, Human
ggcuagaugguauauaaggaug

SEQ ID NO: 255036 - RNA, 22 nt, Human
uagaacuugugaaauaucaaug

SEQ ID NO: 255037 - RNA, 22 nt, Human
aaauacaaaaauuagccaggca

SEQ ID NO: 255038 - RNA, 17 nt, Human
ucugagaacuugaagca

SEQ ID NO: 255039 - RNA, 22 nt, Human
guacaggccaccacugaauuuu

SEQ ID NO: 255040 - RNA, 22 nt, Human
agggguuggauuuggccuagag

SEQ ID NO: 255041 - RNA, 22 nt, Human
ggucugcccacuacucuccauu

SEQ ID NO: 255042 - RNA, 22 nt, Human
acaugacagugacuuuauaaga

SEQ ID NO: 255043 - RNA, 18 nt, Human
cuucagugacagucuggc

SEQ ID NO: 255044 - RNA, 22 nt, Human
auucuucauacagacaaguccu

SEQ ID NO: 255045 - RNA, 22 nt, Human
ugcaauaauguaugucacuccc

SEQ ID NO: 255046 - RNA, 22 nt, Human
auugcaaaugagucuuaauaua

SEQ ID NO: 255047 - RNA, 22 nt, Human
ggaaacaugccugcuggacagu

SEQ ID NO: 255048 - RNA, 22 nt, Human
uacuccacacgcuauuauaaug

SEQ ID NO: 255049 - RNA, 17 nt, Human
ucugggcuucagugguc

SEQ ID NO: 255050 - RNA, 22 nt, Human
caugccagguuugaguaucuug

SEQ ID NO: 255051 - RNA, 22 nt, Human
aaauauaccaguugccugcauc

SEQ ID NO: 255052 - RNA, 22 nt, Human
caucuuuucagaagccauucug

SEQ ID NO: 255053 - RNA, 21 nt, Human
aggguccuacagggcucagga

SEQ ID NO: 255054 - RNA, 22 nt, Human
cuuuauuccuacaagauuuucu

SEQ ID NO: 255055 - RNA, 22 nt, Human
aaaaggacaagcuuuggaguua

SEQ ID NO: 255056 - RNA, 17 nt, Human
aggccucaggugaaacc

SEQ ID NO: 255057 - RNA, 22 nt, Human
gggguggccuguaggcagcaug

SEQ ID NO: 255058 - RNA, 22 nt, Human
aagugccccaggcuguuaacau

SEQ ID NO: 255059 - RNA, 22 nt, Human
cuggcaccuccagcucauggcc

SEQ ID NO: 255060 - RNA, 22 nt, Human
uuaucugucaucaggcagacag

SEQ ID NO: 255061 - RNA, 22 nt, Human
guggguggagacugggugcaag

SEQ ID NO: 255062 - RNA, 22 nt, Human
auguuuacaauucaguauuaca

SEQ ID NO: 255063 - RNA, 18 nt, Human
uacuuuauucccccucca

SEQ ID NO: 255064 - RNA, 22 nt, Human
ucuuugcaggagcccuuugaac

SEQ ID NO: 255065 - RNA, 22 nt, Human
ucaggcaggaucccagggaagg

SEQ ID NO: 255066 - RNA, 21 nt, Human
cagcagaagcaucuauggaag

SEQ ID NO: 255067 - RNA, 22 nt, Human
uugaaucucucugagauucagu

SEQ ID NO: 255068 - RNA, 22 nt, Human
uguauacaugucugugugcaca

SEQ ID NO: 255069 - RNA, 22 nt, Human
gucugcuguucagagauguugc

SEQ ID NO: 255070 - RNA, 22 nt, Human
caagauuuccaacccuggguaa

SEQ ID NO: 255071 - RNA, 21 nt, Human
gcauggcaggucacuggggca

SEQ ID NO: 255072 - RNA, 22 nt, Human
aguggcugugaaauacauggga

SEQ ID NO: 255073 - RNA, 22 nt, Human
aaauguguguauguacauauau

SEQ ID NO: 255074 - RNA, 22 nt, Human
ugcagaagcagagccgguggcc

SEQ ID NO: 255075 - RNA, 22 nt, Human
agcagaugcgucugagugggag

SEQ ID NO: 255076 - RNA, 19 nt, Human
uuucccagcccuugcugug

SEQ ID NO: 255077 - RNA, 20 nt, Human
acacacagagacaugcgcau

SEQ ID NO: 255078 - RNA, 22 nt, Human
gugggggcuggcucguccugug

SEQ ID NO: 255079 - RNA, 22 nt, Human
ggugagggacaucacucagcca

SEQ ID NO: 255080 - RNA, 22 nt, Human
ugaggccugcuuggaauugaau

SEQ ID NO: 255081 - RNA, 22 nt, Human
cggcugagacggccauagacac

SEQ ID NO: 255082 - RNA, 22 nt, Human
agggagccaggggccagcuauu

SEQ ID NO: 255083 - RNA, 22 nt, Human
caaaauuagaaaugcagcuguu

SEQ ID NO: 255084 - RNA, 22 nt, Human
ucauuuuucucuuacacguaga

SEQ ID NO: 255085 - RNA, 22 nt, Human
cugccuguauugucugcuuggg

SEQ ID NO: 255086 - RNA, 22 nt, Human
acugcccuggagacagcagagu

SEQ ID NO: 255087 - RNA, 22 nt, Human
caaggaaaaagcgagcucgggg

SEQ ID NO: 255088 - RNA, 22 nt, Human
auacuucuagaaauacuaugca

SEQ ID NO: 255089 - RNA, 22 nt, Human
uccagggaugguaaugagcagu

SEQ ID NO: 255090 - RNA, 22 nt, Human
uuuggcaugggcuauuugcuuu

SEQ ID NO: 255091 - RNA, 22 nt, Human
ccccagccagcaggaccucuga

SEQ ID NO: 255092 - RNA, 22 nt, Human
gaggccuggcucugcccuccug

SEQ ID NO: 255093 - RNA, 22 nt, Human
gcccagggugaagugcaguugu

SEQ ID NO: 255094 - RNA, 16 nt, Human
acccuggguaguccug

SEQ ID NO: 255095 - RNA, 22 nt, Human
auguccaggaucuauccccaga

SEQ ID NO: 255096 - RNA, 22 nt, Human
caaagguauaaguuaauauaca

SEQ ID NO: 255097 - RNA, 22 nt, Human
aaccagcuccucaccccauugu

SEQ ID NO: 255098 - RNA, 22 nt, Human
auguuuccagauaugucacccu

SEQ ID NO: 255099 - RNA, 22 nt, Human
acucccuggcaggucuuuaucu

SEQ ID NO: 255100 - RNA, 22 nt, Human
caguuaaauuuggcuguuuucu

SEQ ID NO: 255101 - RNA, 22 nt, Human
caggaaacauucuugguaagga

SEQ ID NO: 255102 - RNA, 22 nt, Human
caguucuaucauuuuagagaug

SEQ ID NO: 255103 - RNA, 22 nt, Human
cugcagggcagggccuccuggc

SEQ ID NO: 255104 - RNA, 23 nt, Human
uuuguucaucauuagagucuagc

SEQ ID NO: 255105 - RNA, 22 nt, Human
cuuacauugugugcaugagggg

SEQ ID NO: 255106 - RNA, 22 nt, Human
ugggagaauauauuuaaaacuu

SEQ ID NO: 255107 - RNA, 22 nt, Human
ucuggaauucucaaguccugga

SEQ ID NO: 255108 - RNA, 22 nt, Human
aaaguguuuugugagcagucug

SEQ ID NO: 255109 - RNA, 23 nt, Human
uggagcugacagucagagggagg

SEQ ID NO: 255110 - RNA, 22 nt, Human
aacuuucuguuacguccccaga

SEQ ID NO: 255111 - RNA, 22 nt, Human
ccagaggagcaggcuggcucca

SEQ ID NO: 255112 - RNA, 22 nt, Human
ggucuggccaauagacagcccc

SEQ ID NO: 255113 - RNA, 22 nt, Human
cagggacuacagccagcccucc

SEQ ID NO: 255114 - RNA, 22 nt, Human
uuccaaagucauguugcugaua

SEQ ID NO: 255115 - RNA, 22 nt, Human
uagugucaggagggaaaugcaa

SEQ ID NO: 255116 - RNA, 22 nt, Human
uauggcagaggagaggcacuag

SEQ ID NO: 255117 - RNA, 22 nt, Human
auccaaaguagauuaagucaca

SEQ ID NO: 255118 - RNA, 22 nt, Human
agcuaaggacuggaggguuucu

SEQ ID NO: 255119 - RNA, 22 nt, Human
agugugagaugauugaggagca

SEQ ID NO: 255120 - RNA, 22 nt, Human
gaauuccucugagcuaggagau

SEQ ID NO: 255121 - RNA, 22 nt, Human
auaaacagcuccauuuagugcc

SEQ ID NO: 255122 - RNA, 22 nt, Human
ccugcuguaaugugucuuuauu

SEQ ID NO: 255123 - RNA, 22 nt, Human
ucaggcugugucuuuaaacaau

SEQ ID NO: 255124 - RNA, 22 nt, Human
ggugagcacugcccugggucuc

SEQ ID NO: 255125 - RNA, 21 nt, Human
uuagaagcuaaugcagcuggu

SEQ ID NO: 255126 - RNA, 22 nt, Human
uuaaaucaggcaucauuucagu

SEQ ID NO: 255127 - RNA, 22 nt, Human
cagcccagcagucuuagccugc

SEQ ID NO: 255128 - RNA, 22 nt, Human
aggccacagucagugggugcug

SEQ ID NO: 255129 - RNA, 22 nt, Human
ucagggcaaaagggaaaccauu

SEQ ID NO: 255130 - RNA, 22 nt, Human
cuucugggccauggccuuccuc

SEQ ID NO: 255131 - RNA, 22 nt, Human
ggguccugcgugggcccaggac

SEQ ID NO: 255132 - RNA, 22 nt, Human
cuccuaggacgccgcugcuccu

SEQ ID NO: 255133 - RNA, 22 nt, Human
cuuuucauuguuuguacaugca

SEQ ID NO: 255134 - RNA, 22 nt, Human
ggcucugcgccugcggggacuu

SEQ ID NO: 255135 - RNA, 22 nt, Human
aaggcauacauauuguuauagg

SEQ ID NO: 255136 - RNA, 22 nt, Human
cuucuucaguugcauguauugg

SEQ ID NO: 255137 - RNA, 22 nt, Human
uacaagagguauauagaaacag

SEQ ID NO: 255138 - RNA, 22 nt, Human
ccuggacucaggcugugggcac

SEQ ID NO: 255139 - RNA, 22 nt, Human
uauacaguuugaguucuugcau

SEQ ID NO: 255140 - RNA, 22 nt, Human
gcaacaggcaguuugcucaugu

SEQ ID NO: 255141 - RNA, 22 nt, Human
uacaagagaacuaauguaaguc

SEQ ID NO: 255142 - RNA, 22 nt, Human
ucucauugguaugauguguaga

SEQ ID NO: 255143 - RNA, 21 nt, Human
uggcagguucaaaggccuauc

SEQ ID NO: 255144 - RNA, 22 nt, Human
uuucacaugguacugccuguuu

SEQ ID NO: 255145 - RNA, 22 nt, Human
uacacaggguauggcuugagga

SEQ ID NO: 255146 - RNA, 22 nt, Human
uccugcuccaccgugggcugga

SEQ ID NO: 255147 - RNA, 20 nt, Human
ucucuggguucucacucagc

SEQ ID NO: 255148 - RNA, 22 nt, Human
ccuccuggcuuuucccauugaa

SEQ ID NO: 255149 - RNA, 22 nt, Human
auugauaaauugcaauggggcu

SEQ ID NO: 255150 - RNA, 22 nt, Human
uuccuucuuccaaacccaucau

SEQ ID NO: 255151 - RNA, 22 nt, Human
ggcauggucuuugcuugcagga

SEQ ID NO: 255152 - RNA, 22 nt, Human
agcugccuccuggugccccauc

SEQ ID NO: 255153 - RNA, 22 nt, Human
ugaggcaagucucaaucuuuga

SEQ ID NO: 255154 - RNA, 22 nt, Human
aggccaggaccauuagcccaga

SEQ ID NO: 255155 - RNA, 22 nt, Human
uuguaagaauaugaauacaaau

SEQ ID NO: 255156 - RNA, 22 nt, Human
ucugcaggaagcuggcggcuga

SEQ ID NO: 255157 - RNA, 22 nt, Human
caaggcaggccaguuucaaggc

SEQ ID NO: 255158 - RNA, 22 nt, Human
ugcaggagaaaguacggagcgu

SEQ ID NO: 255159 - RNA, 22 nt, Human
ucccaagcaaugagucagggcc

SEQ ID NO: 255160 - RNA, 22 nt, Human
agugcauucuggcagaacaggu

SEQ ID NO: 255161 - RNA, 22 nt, Human
agggaaaguaagcauuucauua

SEQ ID NO: 255162 - RNA, 21 nt, Human
agauuugucccuucccauuua

SEQ ID NO: 255163 - RNA, 22 nt, Human
ucuggcucggauuugucuagca

SEQ ID NO: 255164 - RNA, 22 nt, Human
uggcuccuuccgcagcaugccu

SEQ ID NO: 255165 - RNA, 19 nt, Human
gaauuuaucucuucagucc

SEQ ID NO: 255166 - RNA, 22 nt, Human
gcauuagagcccaucaccugua

SEQ ID NO: 255167 - RNA, 22 nt, Human
aaguccuuuaauaucacauagu

SEQ ID NO: 255168 - RNA, 22 nt, Human
gacagacaggagcucacaggca

SEQ ID NO: 255169 - RNA, 22 nt, Human
cauuugauuacuaaagauaauu

SEQ ID NO: 255170 - RNA, 22 nt, Human
acauuaaacuugcuuggcugua

SEQ ID NO: 255171 - RNA, 22 nt, Human
agggucuguauuucuggcaagc

SEQ ID NO: 255172 - RNA, 22 nt, Human
ucacaggaaccaucagagaaau

SEQ ID NO: 255173 - RNA, 22 nt, Human
uguacaguauauuucaaagcca

SEQ ID NO: 255174 - RNA, 20 nt, Human
agaaggcuccuuuugccaag

SEQ ID NO: 255175 - RNA, 22 nt, Human
uguccaggugugucuaaagaga

SEQ ID NO: 255176 - RNA, 22 nt, Human
cucagugugagugagaagugca

SEQ ID NO: 255177 - RNA, 22 nt, Human
aguuagaaaguaaaucauuuga

SEQ ID NO: 255178 - RNA, 22 nt, Human
ucccagccuuucuuucuccagc

SEQ ID NO: 255179 - RNA, 19 nt, Human
uuuauucaccuuuaccuug

SEQ ID NO: 255180 - RNA, 22 nt, Human
uaguuuuuucaacaaauggugc

SEQ ID NO: 255181 - RNA, 22 nt, Human
ccaagcagaaccauucaggcac

SEQ ID NO: 255182 - RNA, 22 nt, Human
cagccucuguggcugccacacc

SEQ ID NO: 255183 - RNA, 22 nt, Human
uagugugguaaauaaauguuuu

SEQ ID NO: 255184 - RNA, 22 nt, Human
aacauuugcaugcuuuauuaga

SEQ ID NO: 255185 - RNA, 22 nt, Human
cuccugggaugacucuuucuuu

SEQ ID NO: 255186 - RNA, 22 nt, Human
auggugguuugggagaaaaagc

SEQ ID NO: 255187 - RNA, 22 nt, Human
guggguggaucaccugagguca

SEQ ID NO: 255188 - RNA, 22 nt, Human
gugcaauagacugugguauuaa

SEQ ID NO: 255189 - RNA, 22 nt, Human
ggccucaguuucuccauggguu

SEQ ID NO: 255190 - RNA, 22 nt, Human
caagauuuggcauucugaggag

SEQ ID NO: 255191 - RNA, 22 nt, Human
ccaguguauuauuugagaaauu

SEQ ID NO: 255192 - RNA, 22 nt, Human
cugagcugggacucaguagcaa

SEQ ID NO: 255193 - RNA, 22 nt, Human
ggccucaggguugggcccauua

SEQ ID NO: 255194 - RNA, 22 nt, Human
ccucugaguccucccugguugc

SEQ ID NO: 255195 - RNA, 19 nt, Human
uaagacacaaaugcaagcc

SEQ ID NO: 255196 - RNA, 22 nt, Human
accaccccagaauuuuucaagg

SEQ ID NO: 255197 - RNA, 22 nt, Human
agaauuuagcuccuuggucaua

SEQ ID NO: 255198 - RNA, 22 nt, Human
aaucagaacuucucaggguggg

SEQ ID NO: 255199 - RNA, 19 nt, Human
cugucccagacucugcucu

SEQ ID NO: 255200 - RNA, 22 nt, Human
gauuaagagaaguuucuuaucg

SEQ ID NO: 255201 - RNA, 22 nt, Human
gcagcccaggcucgcucacugc

SEQ ID NO: 255202 - RNA, 20 nt, Human
uacauauuauaucagcugca

SEQ ID NO: 255203 - RNA, 22 nt, Human
aaucuucauuuugacaagauuc

SEQ ID NO: 255204 - RNA, 22 nt, Human
cucaccugggucagacaguugu

SEQ ID NO: 255205 - RNA, 21 nt, Human
cucuagaaaucgaauaaccuu

SEQ ID NO: 255206 - RNA, 22 nt, Human
uccuggcacauugcaggggcuc

SEQ ID NO: 255207 - RNA, 23 nt, Human
auaauaacgucugucuugucucu

SEQ ID NO: 255208 - RNA, 22 nt, Human
uuacaacaccaggcaguauccu

SEQ ID NO: 255209 - RNA, 18 nt, Human
agaacacuugguuagauc

SEQ ID NO: 255210 - RNA, 22 nt, Human
acuuagcagaguugaauguacu

SEQ ID NO: 255211 - RNA, 22 nt, Human
ucuuacauauacgucauuuagu

SEQ ID NO: 255212 - RNA, 22 nt, Human
uguuuccauggugacagcagcu

SEQ ID NO: 255213 - RNA, 22 nt, Human
uccaggccugccugguguuugc

SEQ ID NO: 255214 - RNA, 22 nt, Human
uccugaggcccuguuagggucu

SEQ ID NO: 255215 - RNA, 22 nt, Human
aucuguguccuuauaagagaca

SEQ ID NO: 255216 - RNA, 22 nt, Human
cagaaacacuuguagagaaguu

SEQ ID NO: 255217 - RNA, 22 nt, Human
aggcucuguuauucuagagggc

SEQ ID NO: 255218 - RNA, 22 nt, Human
uccuggaucagcgggggcaggc

SEQ ID NO: 255219 - RNA, 18 nt, Human
ugauucaaguugcccucc

SEQ ID NO: 255220 - RNA, 22 nt, Human
uauucaaagugcgaggucaggg

SEQ ID NO: 255221 - RNA, 22 nt, Human
agagucuuaucuuuuacaagua

SEQ ID NO: 255222 - RNA, 22 nt, Human
cagcauggugccagugagucca

SEQ ID NO: 255223 - RNA, 22 nt, Human
guaaagaaggcaaccugguuau

SEQ ID NO: 255224 - RNA, 20 nt, Human
cccuggccuguuucaugccc

SEQ ID NO: 255225 - RNA, 22 nt, Human
gagggcugauguugccaccuca

SEQ ID NO: 255226 - RNA, 22 nt, Human
acugguggcccucaguguucuc

SEQ ID NO: 255227 - RNA, 22 nt, Human
ucugagggugggagaaggagcu

SEQ ID NO: 255228 - RNA, 22 nt, Human
aagagaacagucaccaugcaca

SEQ ID NO: 255229 - RNA, 22 nt, Human
uacagugcuagaaccugcugua

SEQ ID NO: 255230 - RNA, 22 nt, Human
ucagacaguuugcagugugccu

SEQ ID NO: 255231 - RNA, 22 nt, Human
agggaggagaauggacuccuuc

SEQ ID NO: 255232 - RNA, 22 nt, Human
cuucaggaguaguuaccuagca

SEQ ID NO: 255233 - RNA, 22 nt, Human
ugacaauugugggcaguuugug

SEQ ID NO: 255234 - RNA, 22 nt, Human
uuggcagaggggccaccugccc

SEQ ID NO: 255235 - RNA, 22 nt, Human
ugccuauucaauauaugcauuu

SEQ ID NO: 255236 - RNA, 22 nt, Human
acaggauggagauaauagaaaa

SEQ ID NO: 255237 - RNA, 22 nt, Human
ucagggaguaguuugugcuaug

SEQ ID NO: 255238 - RNA, 22 nt, Human
ccaggcucugagaggaauguga

SEQ ID NO: 255239 - RNA, 22 nt, Human
ucucauugccuucacucuucag

SEQ ID NO: 255240 - RNA, 22 nt, Human
caaauguuucuugaacaccaac

SEQ ID NO: 255241 - RNA, 22 nt, Human
ccuccaagcuucaucucaacca

SEQ ID NO: 255242 - RNA, 18 nt, Human
uuugaaggauggccugga

SEQ ID NO: 255243 - RNA, 18 nt, Human
cacuggaagauuaggguc

SEQ ID NO: 255244 - RNA, 22 nt, Human
caggccucuuccaugcagcagc

SEQ ID NO: 255245 - RNA, 22 nt, Human
gguaggggaagacaagugaaaa

SEQ ID NO: 255246 - RNA, 22 nt, Human
cuguggaauugaugcuuagugu

SEQ ID NO: 255247 - RNA, 22 nt, Human
uagaacugacguuagggaagaa

SEQ ID NO: 255248 - RNA, 22 nt, Human
cugggccagaccuuguggucuu

SEQ ID NO: 255249 - RNA, 20 nt, Human
gcuggcagaugucuugagau

SEQ ID NO: 255250 - RNA, 22 nt, Human
uuucuguagggauuucacaguu

SEQ ID NO: 255251 - RNA, 22 nt, Human
caguccugaggaagagcugcug

SEQ ID NO: 255252 - RNA, 22 nt, Human
gaaagacuuccuuugagaguac

SEQ ID NO: 255253 - RNA, 22 nt, Human
ccuggcagacagcacugaagcu

SEQ ID NO: 255254 - RNA, 22 nt, Human
gugcuacagacugaguacacuu

SEQ ID NO: 255255 - RNA, 22 nt, Human
gagaggccaaaaucccugcccc

SEQ ID NO: 255256 - RNA, 22 nt, Human
aggccagggccagauuagccac

SEQ ID NO: 255257 - RNA, 22 nt, Human
uuagcagcggucaguuuugaag

SEQ ID NO: 255258 - RNA, 22 nt, Human
auaagcucuggacagccacauu

SEQ ID NO: 255259 - RNA, 20 nt, Human
uaggaaauauguuuuuaccc

SEQ ID NO: 255260 - RNA, 22 nt, Human
uuggaggaggcauuggaggauu

SEQ ID NO: 255261 - RNA, 22 nt, Human
augcgagugaugcagaguggcu

SEQ ID NO: 255262 - RNA, 22 nt, Human
ggccaggagcugcacagggcuc

SEQ ID NO: 255263 - RNA, 22 nt, Human
acucuauaaagauaccucaauu

SEQ ID NO: 255264 - RNA, 22 nt, Human
ugcauagggaaccucaugcauu

SEQ ID NO: 255265 - RNA, 22 nt, Human
ucaggcugaaaggacuccaguu

SEQ ID NO: 255266 - RNA, 22 nt, Human
cuauuagaaagcaucuucuaua

SEQ ID NO: 255267 - RNA, 22 nt, Human
aaacuguauauuuauggcaugu

SEQ ID NO: 255268 - RNA, 22 nt, Human
ucagaaaggaguuagaggucuc

SEQ ID NO: 255269 - RNA, 22 nt, Human
uuuacaguaagguggaugguac

SEQ ID NO: 255270 - RNA, 22 nt, Human
gugggguagaucuuucucagga

SEQ ID NO: 255271 - RNA, 21 nt, Human
aguacaaaaauuccuuucuca

SEQ ID NO: 255272 - RNA, 22 nt, Human
ggugcaaaaguaauuugguuuu

SEQ ID NO: 255273 - RNA, 23 nt, Human
ggcagcucucaucugaugacuga

SEQ ID NO: 255274 - RNA, 22 nt, Human
uggcucugguaacauuggguag

SEQ ID NO: 255275 - RNA, 22 nt, Human
aagagaaggugaggaagccggu

SEQ ID NO: 255276 - RNA, 22 nt, Human
ugcuacuacuugucaacgguca

SEQ ID NO: 255277 - RNA, 22 nt, Human
cagguccuuuaguguccagaac

SEQ ID NO: 255278 - RNA, 22 nt, Human
cucccaggcagggcugcccacu

SEQ ID NO: 255279 - RNA, 22 nt, Human
acaaaguuaacaguuggauagu

SEQ ID NO: 255280 - RNA, 22 nt, Human
cuccugggcucaagugauccuc

SEQ ID NO: 255281 - RNA, 22 nt, Human
gggaaacugcaacucagagagg

SEQ ID NO: 255282 - RNA, 22 nt, Human
gacaucuccaaggcaaccuguu

SEQ ID NO: 255283 - RNA, 22 nt, Human
aagcugcacuacuugagggacc

SEQ ID NO: 255284 - RNA, 18 nt, Human
gaggauggaaggagaugc

SEQ ID NO: 255285 - RNA, 22 nt, Human
uccugggcagccucucuggaag

SEQ ID NO: 255286 - RNA, 21 nt, Human
aggaaguggccagauugggaa

SEQ ID NO: 255287 - RNA, 22 nt, Human
cagguggcaugacugccuacaa

SEQ ID NO: 255288 - RNA, 22 nt, Human
agcauguguaaucucaauaccu

SEQ ID NO: 255289 - RNA, 18 nt, Human
gagcugagaagaggaugc

SEQ ID NO: 255290 - RNA, 22 nt, Human
uuuguaaauagcaguacucaug

SEQ ID NO: 255291 - RNA, 22 nt, Human
cucuggaagugauggcagguca

SEQ ID NO: 255292 - RNA, 22 nt, Human
gauguacaagauuguaggaaug

SEQ ID NO: 255293 - RNA, 22 nt, Human
caggagaccugguaagccaagu

SEQ ID NO: 255294 - RNA, 22 nt, Human
aagauauucaaagauuuauuag

SEQ ID NO: 255295 - RNA, 19 nt, Human
uacauugcugguggggaug

SEQ ID NO: 255296 - RNA, 22 nt, Human
acaagguauccacauuaaaugu

SEQ ID NO: 255297 - RNA, 22 nt, Human
aagaaagccaaaguucauaccu

SEQ ID NO: 255298 - RNA, 22 nt, Human
agucugguugauuccuuugcac

SEQ ID NO: 255299 - RNA, 22 nt, Human
aggcacagaauggcauucagug

SEQ ID NO: 255300 - RNA, 22 nt, Human
gggucugagcugaggggaaauc

SEQ ID NO: 255301 - RNA, 22 nt, Human
acagcugugacuuagagaaguu

SEQ ID NO: 255302 - RNA, 20 nt, Human
ccagcauguacacaugugga

SEQ ID NO: 255303 - RNA, 22 nt, Human
agcacuuaaguuaauugaacug

SEQ ID NO: 255304 - RNA, 22 nt, Human
ucagggcaagucucagaagguu

SEQ ID NO: 255305 - RNA, 22 nt, Human
uccucuuucucaacauuaguua

SEQ ID NO: 255306 - RNA, 22 nt, Human
ucaggcugcaucuguaagggug

SEQ ID NO: 255307 - RNA, 22 nt, Human
uuaauuaacuagccaaccacua

SEQ ID NO: 255308 - RNA, 22 nt, Human
aaggccuugguucugagcaaua

SEQ ID NO: 255309 - RNA, 22 nt, Human
cagcucuccacccuccugguuc

SEQ ID NO: 255310 - RNA, 22 nt, Human
uaaaagcucuucuguugaguua

SEQ ID NO: 255311 - RNA, 22 nt, Human
uccuggagaauccugccaccug

SEQ ID NO: 255312 - RNA, 22 nt, Human
cugcugccccugagcucagccu

SEQ ID NO: 255313 - RNA, 22 nt, Human
caauagcagcuucugaaugcaa

SEQ ID NO: 255314 - RNA, 22 nt, Human
auuacaguaacagcuacaaugc

SEQ ID NO: 255315 - RNA, 22 nt, Human
gaagggagaagguugggugacg

SEQ ID NO: 255316 - RNA, 19 nt, Human
ucuuucauuucuagcucug

SEQ ID NO: 255317 - RNA, 22 nt, Human
gacacuuucucagguaaagcau

SEQ ID NO: 255318 - RNA, 22 nt, Human
gccuggcugcuagccagaggca

SEQ ID NO: 255319 - RNA, 22 nt, Human
accuugucuuuuauagaacaag

SEQ ID NO: 255320 - RNA, 22 nt, Human
uuuauugaacacuugcacuggc

SEQ ID NO: 255321 - RNA, 22 nt, Human
uggcagaggagaauuaagauua

SEQ ID NO: 255322 - RNA, 22 nt, Human
aaagacucaauuguucccuaau

SEQ ID NO: 255323 - RNA, 22 nt, Human
ccuuggggaauauccauucuuc

SEQ ID NO: 255324 - RNA, 22 nt, Human
aacauugaaauauuugcaauag

SEQ ID NO: 255325 - RNA, 22 nt, Human
cccagccugugacagccguccu

SEQ ID NO: 255326 - RNA, 22 nt, Human
aaaugcacagagccuuagagau

SEQ ID NO: 255327 - RNA, 22 nt, Human
guuuucaugucuauugggcaua

SEQ ID NO: 255328 - RNA, 22 nt, Human
gacucguucauaguuccaauuu

SEQ ID NO: 255329 - RNA, 22 nt, Human
uuggcuuccaggggcuuuuaca

SEQ ID NO: 255330 - RNA, 20 nt, Human
agggcagcuugaggagccgg

SEQ ID NO: 255331 - RNA, 22 nt, Human
ucuggcuguuguuagguuccug

SEQ ID NO: 255332 - RNA, 22 nt, Human
ucuagaacuucucuaaaaugaa

SEQ ID NO: 255333 - RNA, 21 nt, Human
ucagaaucugugagcuaucuc

SEQ ID NO: 255334 - RNA, 22 nt, Human
ugacagggugauuaugagagcu

SEQ ID NO: 255335 - RNA, 22 nt, Human
auugucauuggcuucuaugucu

SEQ ID NO: 255336 - RNA, 22 nt, Human
ugacuaaaauaggacauuaacu

SEQ ID NO: 255337 - RNA, 21 nt, Human
auucugaguugucagucuuca

SEQ ID NO: 255338 - RNA, 22 nt, Human
ccucugaguuggccugucuugu

SEQ ID NO: 255339 - RNA, 22 nt, Human
uacagauugagguuuuuaauau

SEQ ID NO: 255340 - RNA, 22 nt, Human
aaaugcugggaaccauuggauc

SEQ ID NO: 255341 - RNA, 22 nt, Human
guggcugcaguaguguaggguc

SEQ ID NO: 255342 - RNA, 17 nt, Human
ugauaguucauuuuaag

SEQ ID NO: 255343 - RNA, 22 nt, Human
acagagcugggaucugaaccca

SEQ ID NO: 255344 - RNA, 22 nt, Human
auguuaaaugguuuauuauuaa

SEQ ID NO: 255345 - RNA, 22 nt, Human
ggagcugagguaacagugagug

SEQ ID NO: 255346 - RNA, 22 nt, Human
cugaaggcuuguuguuuucuua

SEQ ID NO: 255347 - RNA, 22 nt, Human
uauucugguuuccggaucucua

SEQ ID NO: 255348 - RNA, 22 nt, Human
ucagcucugcacuccacugugg

SEQ ID NO: 255349 - RNA, 22 nt, Human
uauaaagaaggcacagcaagac

SEQ ID NO: 255350 - RNA, 23 nt, Human
auggaaauagcaugugucauuua

SEQ ID NO: 255351 - RNA, 22 nt, Human
agauuuaaagcaguauucgcaa

SEQ ID NO: 255352 - RNA, 22 nt, Human
uuagaaaugucacagaucugau

SEQ ID NO: 255353 - RNA, 22 nt, Human
uaucuguuccaggcacucagcu

SEQ ID NO: 255354 - RNA, 22 nt, Human
ucucagaaggguggugcuggag

SEQ ID NO: 255355 - RNA, 22 nt, Human
ucuguuggacauucaucugcag

SEQ ID NO: 255356 - RNA, 22 nt, Human
ucaggcuugaggucuguaugug

SEQ ID NO: 255357 - RNA, 22 nt, Human
agucugguagaggaagaggccu

SEQ ID NO: 255358 - RNA, 22 nt, Human
caggcacaauuauuucccuuuc

SEQ ID NO: 255359 - RNA, 22 nt, Human
uucuccugaguucccaggucua

SEQ ID NO: 255360 - RNA, 22 nt, Human
uucugcauaggcuauauuuguu

SEQ ID NO: 255361 - RNA, 21 nt, Human
cacugguagauggcccgcagg

SEQ ID NO: 255362 - RNA, 22 nt, Human
cucuuugguuaaucacacagau

SEQ ID NO: 255363 - RNA, 21 nt, Human
guuuucaugauagagucugua

SEQ ID NO: 255364 - RNA, 22 nt, Human
uaguaacaacaacuagcauuuu

SEQ ID NO: 255365 - RNA, 22 nt, Human
aaucuucagcacuccagagacu

SEQ ID NO: 255366 - RNA, 22 nt, Human
gaucacaugaauggaauagaag

SEQ ID NO: 255367 - RNA, 22 nt, Human
agccugagcugccugccgccuc

SEQ ID NO: 255368 - RNA, 22 nt, Human
aggagcagauugguaagaucau

SEQ ID NO: 255369 - RNA, 22 nt, Human
ccuccuggauggauuuggugga

SEQ ID NO: 255370 - RNA, 17 nt, Human
agacagguuauaguuga

SEQ ID NO: 255371 - RNA, 22 nt, Human
uuuccuucccuggaugagaagu

SEQ ID NO: 255372 - RNA, 22 nt, Human
auagauuagcccuauaguuuua

SEQ ID NO: 255373 - RNA, 22 nt, Human
gaggcuccauggaggaguaugg

SEQ ID NO: 255374 - RNA, 22 nt, Human
uuucagaagucacaguugacug

SEQ ID NO: 255375 - RNA, 22 nt, Human
aguuucuaccgguacauucagg

SEQ ID NO: 255376 - RNA, 22 nt, Human
guaagauuuaaaauagcaauug

SEQ ID NO: 255377 - RNA, 22 nt, Human
aaugauauagcagacauagccu

SEQ ID NO: 255378 - RNA, 21 nt, Human
ugucagaaauaagcaugugau

SEQ ID NO: 255379 - RNA, 22 nt, Human
cugaggagaugauaaugucauu

SEQ ID NO: 255380 - RNA, 22 nt, Human
cugagggaacuugggcaagucu

SEQ ID NO: 255381 - RNA, 22 nt, Human
auacagaaaaugaugcagaguu

SEQ ID NO: 255382 - RNA, 22 nt, Human
agcuguguuuccagaugguagc

SEQ ID NO: 255383 - RNA, 22 nt, Human
aaaauacuacugucuucuuccc

SEQ ID NO: 255384 - RNA, 19 nt, Human
aacuagaaagguuuugaga

SEQ ID NO: 255385 - RNA, 22 nt, Human
acuccugugagguagguggcaa

SEQ ID NO: 255386 - RNA, 21 nt, Human
uucagcaguccucuagagaua

SEQ ID NO: 255387 - RNA, 22 nt, Human
aagauguucuauuuucacuuuu

SEQ ID NO: 255388 - RNA, 18 nt, Human
gcuuucuguagaaaaggg

SEQ ID NO: 255389 - RNA, 22 nt, Human
gguggggcucagcaaucugugu

SEQ ID NO: 255390 - RNA, 22 nt, Human
cagcaggucugcauuugagguc

SEQ ID NO: 255391 - RNA, 22 nt, Human
ugugugcauucacaugcaugcc

SEQ ID NO: 255392 - RNA, 20 nt, Human
cugugaccagagacccagga

SEQ ID NO: 255393 - RNA, 22 nt, Human
acugaaauggggacaguccuua

SEQ ID NO: 255394 - RNA, 22 nt, Human
uuggcuucuugugaaaucugag

SEQ ID NO: 255395 - RNA, 22 nt, Human
uuaauugagccagaaaguaucu

SEQ ID NO: 255396 - RNA, 22 nt, Human
gaggcuguuggcugaucugagu

SEQ ID NO: 255397 - RNA, 22 nt, Human
ucaacaguggcaaagaggcacg

SEQ ID NO: 255398 - RNA, 22 nt, Human
cuucauagaacagaaauuuaau

SEQ ID NO: 255399 - RNA, 22 nt, Human
cuacauuauguuuauugggacu

SEQ ID NO: 255400 - RNA, 22 nt, Human
uucauagagcagcucacugaau

SEQ ID NO: 255401 - RNA, 23 nt, Human
caggaagcagaugggguagaaga

SEQ ID NO: 255402 - RNA, 22 nt, Human
uucacuguuaugaagcucuggg

SEQ ID NO: 255403 - RNA, 22 nt, Human
aaaugcuuuggugcugguacag

SEQ ID NO: 255404 - RNA, 22 nt, Human
uucugugucuucuuguucugug

SEQ ID NO: 255405 - RNA, 22 nt, Human
cugcagaguggagccucggcug

SEQ ID NO: 255406 - RNA, 22 nt, Human
gcaggcaggaaggacuaaguaa

SEQ ID NO: 255407 - RNA, 22 nt, Human
ugcugucuguuuacuggcuaua

SEQ ID NO: 255408 - RNA, 22 nt, Human
uccugguggauagaagccaagg

SEQ ID NO: 255409 - RNA, 22 nt, Human
gugcagaggucacaaaagugaa

SEQ ID NO: 255410 - RNA, 22 nt, Human
ucugcaggagcagggcguggag

SEQ ID NO: 255411 - RNA, 22 nt, Human
aucaaaauggaagaauuuggcu

SEQ ID NO: 255412 - RNA, 17 nt, Human
aagacccuagucuaccc

SEQ ID NO: 255413 - RNA, 22 nt, Human
uguugacuugaaccaaaguguu

SEQ ID NO: 255414 - RNA, 22 nt, Human
auuuugaaucaccuuggaagaa

SEQ ID NO: 255415 - RNA, 22 nt, Human
ugugacagaucuuuaaauaaug

SEQ ID NO: 255416 - RNA, 22 nt, Human
cagugcagaggugcaagcaugu

SEQ ID NO: 255417 - RNA, 22 nt, Human
uauguucaugucaaacaaaugc

SEQ ID NO: 255418 - RNA, 22 nt, Human
aagcaguuuagauaggcaaagg

SEQ ID NO: 255419 - RNA, 22 nt, Human
gacaugugcugucucuuaaauu

SEQ ID NO: 255420 - RNA, 22 nt, Human
gcagaggggaagcugaggaauu

SEQ ID NO: 255421 - RNA, 22 nt, Human
caggccuugggacccagacugg

SEQ ID NO: 255422 - RNA, 22 nt, Human
uuccaggaggcauucuuaguuu

SEQ ID NO: 255423 - RNA, 20 nt, Human
uggaagacacugaagggcca

SEQ ID NO: 255424 - RNA, 22 nt, Human
ucugcaggaucagagccagagg

SEQ ID NO: 255425 - RNA, 22 nt, Human
cuggccuucagacucggacuga

SEQ ID NO: 255426 - RNA, 22 nt, Human
cucauuuaccuuugcaaucaag

SEQ ID NO: 255427 - RNA, 22 nt, Human
uuuaagcuguggcauuaauucu

SEQ ID NO: 255428 - RNA, 21 nt, Human
acagccugucaucucaugguc

SEQ ID NO: 255429 - RNA, 22 nt, Human
cuagagaauggcaaagauuaga

SEQ ID NO: 255430 - RNA, 22 nt, Human
augcuaauuccaugagcacagg

SEQ ID NO: 255431 - RNA, 22 nt, Human
ugagaacauuugcagggagagu

SEQ ID NO: 255432 - RNA, 22 nt, Human
ugcuggcuaauggaaaccagau

SEQ ID NO: 255433 - RNA, 22 nt, Human
gcucuagaucauaggucauuau

SEQ ID NO: 255434 - RNA, 18 nt, Human
ggcuucccuacucacuuc

SEQ ID NO: 255435 - RNA, 22 nt, Human
ccaggaagcugucugauaugaa

SEQ ID NO: 255436 - RNA, 22 nt, Human
ugaaugauuucuuaggcaauug

SEQ ID NO: 255437 - RNA, 22 nt, Human
agggcugugucccuaggggagc

SEQ ID NO: 255438 - RNA, 22 nt, Human
aggcagaaccagcugggacuuu

SEQ ID NO: 255439 - RNA, 22 nt, Human
ugcuaacaaagucuaaaucaua

SEQ ID NO: 255440 - RNA, 22 nt, Human
acccaggguagagugcaguggc

SEQ ID NO: 255441 - RNA, 22 nt, Human
uuacauguaaucuaaaauaauu

SEQ ID NO: 255442 - RNA, 22 nt, Human
ugagccaguucuucagauccau

SEQ ID NO: 255443 - RNA, 22 nt, Human
ccucuggguaucuguggaagua

SEQ ID NO: 255444 - RNA, 22 nt, Human
auucaguuccuugaggguauag

SEQ ID NO: 255445 - RNA, 22 nt, Human
gcuccaggaggaugaccuuccu

SEQ ID NO: 255446 - RNA, 19 nt, Human
uuccaaaaucaggauuuga

SEQ ID NO: 255447 - RNA, 22 nt, Human
ccagggccuacagcuuaagucc

SEQ ID NO: 255448 - RNA, 22 nt, Human
agggagaguuugauguuuccuc

SEQ ID NO: 255449 - RNA, 22 nt, Human
cagaaagcccuauguacagugg

SEQ ID NO: 255450 - RNA, 22 nt, Human
augagcucaggugugcaaaaua

SEQ ID NO: 255451 - RNA, 22 nt, Human
guguuuuaucagacaaaguaua

SEQ ID NO: 255452 - RNA, 22 nt, Human
gccaccccaaccucccuaaguu

SEQ ID NO: 255453 - RNA, 22 nt, Human
uuccuucuuuuacaccauaaau

SEQ ID NO: 255454 - RNA, 22 nt, Human
auguccaguuucuacacacaua

SEQ ID NO: 255455 - RNA, 22 nt, Human
uccugggagguaaaccagcauc

SEQ ID NO: 255456 - RNA, 22 nt, Human
acagcuccuaacaaaggcucuc

SEQ ID NO: 255457 - RNA, 21 nt, Human
caagccagaccaauagcagcc

SEQ ID NO: 255458 - RNA, 22 nt, Human
uuaaagaggcagguuaaauaau

SEQ ID NO: 255459 - RNA, 23 nt, Human
uugauuucaaaugcagagaacac

SEQ ID NO: 255460 - RNA, 22 nt, Human
ugcccaggauugugaggucagg

SEQ ID NO: 255461 - RNA, 22 nt, Human
cugccuuuucaucugagcugga

SEQ ID NO: 255462 - RNA, 22 nt, Human
agcccuggauucugagguccaa

SEQ ID NO: 255463 - RNA, 22 nt, Human
agcugggcugggcugagcugag

SEQ ID NO: 255464 - RNA, 23 nt, Human
ucaucuguaaguaucuguggagu

SEQ ID NO: 255465 - RNA, 22 nt, Human
acagaggccucguagguacaac

SEQ ID NO: 255466 - RNA, 22 nt, Human
cucccagagaccaagcugagaa

SEQ ID NO: 255467 - RNA, 22 nt, Human
uggcucuguugugcugagccag

SEQ ID NO: 255468 - RNA, 22 nt, Human
cuugaauguccuguggcaaagu

SEQ ID NO: 255469 - RNA, 22 nt, Human
acacuuucuggagcugcacaua

SEQ ID NO: 255470 - RNA, 22 nt, Human
cugagacuguaccacuuccucc

SEQ ID NO: 255471 - RNA, 22 nt, Human
acagcugggaaucagcugggga

SEQ ID NO: 255472 - RNA, 22 nt, Human
gggaccuggcaccuuugcucug

SEQ ID NO: 255473 - RNA, 22 nt, Human
agcucagaaaugccaguaggua

SEQ ID NO: 255474 - RNA, 22 nt, Human
ucuggcugggugagagcuucuc

SEQ ID NO: 255475 - RNA, 22 nt, Human
ggaccacaauauuugugagguu

SEQ ID NO: 255476 - RNA, 21 nt, Human
uaaggccaagucuauuucugu

SEQ ID NO: 255477 - RNA, 22 nt, Human
aaauguagaccuauagggaccu

SEQ ID NO: 255478 - RNA, 22 nt, Human
cucugaggcuccaugcaggcuu

SEQ ID NO: 255479 - RNA, 22 nt, Human
agaaagcacucugucuuuuacc

SEQ ID NO: 255480 - RNA, 22 nt, Human
caacaauaugccagacucaauu

SEQ ID NO: 255481 - RNA, 22 nt, Human
ucuggcaucacucgcaagagca

SEQ ID NO: 255482 - RNA, 22 nt, Human
ugcagggagcucuggggugcag

SEQ ID NO: 255483 - RNA, 22 nt, Human
auuaauaaaauaccacuuuguu

SEQ ID NO: 255484 - RNA, 22 nt, Human
uuguauuggcaaagaacuugag

SEQ ID NO: 255485 - RNA, 22 nt, Human
auuuauugagccuuuccuaugu

SEQ ID NO: 255486 - RNA, 22 nt, Human
cauuucugucacguucuuuuau

SEQ ID NO: 255487 - RNA, 22 nt, Human
caucacaucagugugaacaguu

SEQ ID NO: 255488 - RNA, 22 nt, Human
ugccuggggauugcucugggcc

SEQ ID NO: 255489 - RNA, 22 nt, Human
uugcaaaucacaagagcagagc

SEQ ID NO: 255490 - RNA, 22 nt, Human
caaaauaccacgacuuguuuua

SEQ ID NO: 255491 - RNA, 22 nt, Human
agcccagccugauucuacaccc

SEQ ID NO: 255492 - RNA, 22 nt, Human
ucccaauuaacagguaucaggc

SEQ ID NO: 255493 - RNA, 22 nt, Human
acccagggcucaagcguaggca

SEQ ID NO: 255494 - RNA, 22 nt, Human
ugcugcagggauuucagagaca

SEQ ID NO: 255495 - RNA, 22 nt, Human
uggccaccuucccacuucugcc

SEQ ID NO: 255496 - RNA, 22 nt, Human
uccuuagacaaagagugggcuu

SEQ ID NO: 255497 - RNA, 22 nt, Human
ucuuggagacucuuguauauuu

SEQ ID NO: 255498 - RNA, 21 nt, Human
caagcugccugagggugguug

SEQ ID NO: 255499 - RNA, 20 nt, Human
ugugccuggcuuuguccuga

SEQ ID NO: 255500 - RNA, 22 nt, Human
acucugcuguuuacucucuaua

SEQ ID NO: 255501 - RNA, 22 nt, Human
uuuacacauaccucuuuaaagu

SEQ ID NO: 255502 - RNA, 18 nt, Human
uacaugcauaaaugaagc

SEQ ID NO: 255503 - RNA, 22 nt, Human
uucacauuagccaagagaugga

SEQ ID NO: 255504 - RNA, 22 nt, Human
gcaaggaagcagaguugcuauc

SEQ ID NO: 255505 - RNA, 22 nt, Human
uuuggugagcugcgagugagga

SEQ ID NO: 255506 - RNA, 22 nt, Human
aaagccagcucugagcugcacc

SEQ ID NO: 255507 - RNA, 22 nt, Human
agguggcuaugaggaugcaguc

SEQ ID NO: 255508 - RNA, 22 nt, Human
aaugcaaacuucuuguuacuug

SEQ ID NO: 255509 - RNA, 22 nt, Human
uuagaaccagcauuuguccugg

SEQ ID NO: 255510 - RNA, 22 nt, Human
augucuguggcaauuguugaug

SEQ ID NO: 255511 - RNA, 22 nt, Human
gcugggcucuuuaccccuguac

SEQ ID NO: 255512 - RNA, 22 nt, Human
gaugggcguggcgcguuuggug

SEQ ID NO: 255513 - RNA, 22 nt, Human
guauagguuuggcucucuccag

SEQ ID NO: 255514 - RNA, 22 nt, Human
uccugggcgaguggugguacac

SEQ ID NO: 255515 - RNA, 19 nt, Human
agacacacuuacguggaau

SEQ ID NO: 255516 - RNA, 22 nt, Human
agcaggcuuguuaugucugaga

SEQ ID NO: 255517 - RNA, 22 nt, Human
uuauacauguguuuugagauga

SEQ ID NO: 255518 - RNA, 22 nt, Human
ucauucuugaucacuaguuagu

SEQ ID NO: 255519 - RNA, 22 nt, Human
cagggcaguuuuacuucucucu

SEQ ID NO: 255520 - RNA, 22 nt, Human
aacugcaaguggggcuugucau

SEQ ID NO: 255521 - RNA, 22 nt, Human
ggcaggcucuuggccuuaugag

SEQ ID NO: 255522 - RNA, 22 nt, Human
auguagaaaguucauagaugcg

SEQ ID NO: 255523 - RNA, 22 nt, Human
gccugucaauuuuguguacaau

SEQ ID NO: 255524 - RNA, 22 nt, Human
aauuuuaucucuaagcaggcuu

SEQ ID NO: 255525 - RNA, 22 nt, Human
gcucucuugguggcuguccugg

SEQ ID NO: 255526 - RNA, 22 nt, Human
agauuuacugagaacugauuac

SEQ ID NO: 255527 - RNA, 22 nt, Human
gcagaagcugggagaagggauu

SEQ ID NO: 255528 - RNA, 22 nt, Human
uuucaaaccuacuuguauguuu

SEQ ID NO: 255529 - RNA, 22 nt, Human
ugcacaguuggcuacaucgugg

SEQ ID NO: 255530 - RNA, 22 nt, Human
gaucuuuucagaauuuaucagu

SEQ ID NO: 255531 - RNA, 22 nt, Human
ccuggcagguuacaaccaguua

SEQ ID NO: 255532 - RNA, 22 nt, Human
ccagagggaacugggccucauu

SEQ ID NO: 255533 - RNA, 22 nt, Human
accuuauuaaaaugaugaugua

SEQ ID NO: 255534 - RNA, 18 nt, Human
ggcugagguugacuagaa

SEQ ID NO: 255535 - RNA, 20 nt, Human
cacccucccagcaccuaugc

SEQ ID NO: 255536 - RNA, 22 nt, Human
cuggucuggcuacccagcgaau

SEQ ID NO: 255537 - RNA, 22 nt, Human
uauacagauuaacagauuuaaa

SEQ ID NO: 255538 - RNA, 22 nt, Human
gugguccucauaauucagugag

SEQ ID NO: 255539 - RNA, 22 nt, Human
ucccugaaacaucucuguggau

SEQ ID NO: 255540 - RNA, 22 nt, Human
agaaagcuggaagagcugggau

SEQ ID NO: 255541 - RNA, 22 nt, Human
cuaggcuggagugcaguggcau

SEQ ID NO: 255542 - RNA, 22 nt, Human
uuugggcauauagcuguucccu

SEQ ID NO: 255543 - RNA, 22 nt, Human
gacuccugccuccucuguuugc

SEQ ID NO: 255544 - RNA, 22 nt, Human
cucucuggcacuucauugcugu

SEQ ID NO: 255545 - RNA, 22 nt, Human
aaggcuccuuuguaguucuuuu

SEQ ID NO: 255546 - RNA, 22 nt, Human
accugggagagaggagccggcg

SEQ ID NO: 255547 - RNA, 22 nt, Human
cccuccagagcuugaccugcug

SEQ ID NO: 255548 - RNA, 22 nt, Human
gcugggaggaauuuggggaaua

SEQ ID NO: 255549 - RNA, 22 nt, Human
auuggucugugagcuguugaca

SEQ ID NO: 255550 - RNA, 22 nt, Human
agcaagauuuaaacccagguca

SEQ ID NO: 255551 - RNA, 22 nt, Human
gagguggauguugcagugagcu

SEQ ID NO: 255552 - RNA, 22 nt, Human
cagcuccucuguuagcccuggg

SEQ ID NO: 255553 - RNA, 19 nt, Human
uuggccuuguuucauaucu

SEQ ID NO: 255554 - RNA, 20 nt, Human
augccuuugauagucaggcu

SEQ ID NO: 255555 - RNA, 22 nt, Human
cagguguauaaacucagugacu

SEQ ID NO: 255556 - RNA, 20 nt, Human
auuauucauacaugugugac

SEQ ID NO: 255557 - RNA, 22 nt, Human
caauaaagaagauuuuugcaau

SEQ ID NO: 255558 - RNA, 22 nt, Human
ccaggcagcaaauuuucugaau

SEQ ID NO: 255559 - RNA, 22 nt, Human
ugccuuccugcuuugaguucug

SEQ ID NO: 255560 - RNA, 22 nt, Human
auacagaaaaguggauagccag

SEQ ID NO: 255561 - RNA, 19 nt, Human
caaggccaccauuucuccg

SEQ ID NO: 255562 - RNA, 22 nt, Human
ugucucagcugugcuucauugg

SEQ ID NO: 255563 - RNA, 22 nt, Human
ugaggggagguuggggcacauc

SEQ ID NO: 255564 - RNA, 22 nt, Human
ugauucuuugaccaaaaaauug

SEQ ID NO: 255565 - RNA, 22 nt, Human
ggcacuuugauuuugagaugca

SEQ ID NO: 255566 - RNA, 21 nt, Human
cuggcaugaggagcuuuguuu

SEQ ID NO: 255567 - RNA, 22 nt, Human
guccagccaggccugucucugg

SEQ ID NO: 255568 - RNA, 22 nt, Human
ugcugggucagugagagcaggg

SEQ ID NO: 255569 - RNA, 19 nt, Human
aggcucuguaggagagggc

SEQ ID NO: 255570 - RNA, 22 nt, Human
aagagcauuuccacuggcacug

SEQ ID NO: 255571 - RNA, 22 nt, Human
ucuuugaaaagggagauagaaa

SEQ ID NO: 255572 - RNA, 22 nt, Human
acacuucucuuugaagaacaau

SEQ ID NO: 255573 - RNA, 22 nt, Human
gcucccuguucucagccaugau

SEQ ID NO: 255574 - RNA, 22 nt, Human
uccaggcagagcaacaaaauau

SEQ ID NO: 255575 - RNA, 18 nt, Human
ccccaaaagucacccugg

SEQ ID NO: 255576 - RNA, 22 nt, Human
cauuggaaugcauuugaagaga

SEQ ID NO: 255577 - RNA, 17 nt, Human
cucuguacaggaaagag

SEQ ID NO: 255578 - RNA, 22 nt, Human
ucagggaccccucugaguggag

SEQ ID NO: 255579 - RNA, 22 nt, Human
augacacuuggugauacuuugu

SEQ ID NO: 255580 - RNA, 22 nt, Human
gucuucuggggccaggcccgcu

SEQ ID NO: 255581 - RNA, 22 nt, Human
uacuuguucuuucaagagauag

SEQ ID NO: 255582 - RNA, 22 nt, Human
gaaucuuauuuuuaaaucuucc

SEQ ID NO: 255583 - RNA, 22 nt, Human
ggaccaggcaagcugaggcggg

SEQ ID NO: 255584 - RNA, 22 nt, Human
gcagaaguuaaucgaaggccau

SEQ ID NO: 255585 - RNA, 22 nt, Human
cucagaguccccacaucugggu

SEQ ID NO: 255586 - RNA, 22 nt, Human
cuaauuguaagcuccuugaggg

SEQ ID NO: 255587 - RNA, 22 nt, Human
acugggcugguuaguuuuacua

SEQ ID NO: 255588 - RNA, 22 nt, Human
ucccaggcucuucaaggaagac

SEQ ID NO: 255589 - RNA, 22 nt, Human
ugugaauagucagcauuuuguu

SEQ ID NO: 255590 - RNA, 23 nt, Human
cugcaacucagucuggagcaguu

SEQ ID NO: 255591 - RNA, 22 nt, Human
aaagcaauagguuaggucaaga

SEQ ID NO: 255592 - RNA, 22 nt, Human
aggaauucaagaccagcugggc

SEQ ID NO: 255593 - RNA, 22 nt, Human
cauuugcauaugaagaaguaag

SEQ ID NO: 255594 - RNA, 22 nt, Human
ucccugagggcagcucaagucc

SEQ ID NO: 255595 - RNA, 22 nt, Human
cagagggaguuucugagguugc

SEQ ID NO: 255596 - RNA, 22 nt, Human
gcacugugcuagaagccagggg

SEQ ID NO: 255597 - RNA, 22 nt, Human
uccaggguugugggcuucagca

SEQ ID NO: 255598 - RNA, 22 nt, Human
ggucuggaauaagguccaggaa

SEQ ID NO: 255599 - RNA, 21 nt, Human
uucaacaaagggaauaaguuu

SEQ ID NO: 255600 - RNA, 22 nt, Human
cuugcaggauuuugcugcugua

SEQ ID NO: 255601 - RNA, 22 nt, Human
uaacaaaguaccauagacugga

SEQ ID NO: 255602 - RNA, 23 nt, Human
cccagcagagaugaggagggguc

SEQ ID NO: 255603 - RNA, 22 nt, Human
agcagccaagguaaccugugcu

SEQ ID NO: 255604 - RNA, 22 nt, Human
ucuagaaaaccaauauuacaug

SEQ ID NO: 255605 - RNA, 22 nt, Human
acuagaaagaaguuuuuugaga

SEQ ID NO: 255606 - RNA, 22 nt, Human
ucucagagggaaacaugaguga

SEQ ID NO: 255607 - RNA, 22 nt, Human
ugggagcaagcuggugcuggag

SEQ ID NO: 255608 - RNA, 20 nt, Human
accuacauguauagugaggg

SEQ ID NO: 255609 - RNA, 22 nt, Human
cacagcugcccuaacuguacuc

SEQ ID NO: 255610 - RNA, 22 nt, Human
gaggccugucgcuaggccucug

SEQ ID NO: 255611 - RNA, 22 nt, Human
aggaggaacucagaaagaaggu

SEQ ID NO: 255612 - RNA, 22 nt, Human
caggagcagaggguggucagca

SEQ ID NO: 255613 - RNA, 22 nt, Human
cagagcagagugauuguucugg

SEQ ID NO: 255614 - RNA, 22 nt, Human
ggagccagaaaugcugugguug

SEQ ID NO: 255615 - RNA, 22 nt, Human
ccuccaguacuccaguccagcg

SEQ ID NO: 255616 - RNA, 22 nt, Human
auuaggaaguaaguaucacaag

SEQ ID NO: 255617 - RNA, 22 nt, Human
ugcuuucuuuagcuccugaguc

SEQ ID NO: 255618 - RNA, 22 nt, Human
ccuccacucuggccucucaggu

SEQ ID NO: 255619 - RNA, 22 nt, Human
uccugagggcauuuuggugacu

SEQ ID NO: 255620 - RNA, 22 nt, Human
ucccaaggugcucggcaacagg

SEQ ID NO: 255621 - RNA, 19 nt, Human
uuuuuacaaguagguguga

SEQ ID NO: 255622 - RNA, 22 nt, Human
ucuuuggcaucagggccagcua

SEQ ID NO: 255623 - RNA, 22 nt, Human
uuuccaaaaugaaucuaaugca

SEQ ID NO: 255624 - RNA, 22 nt, Human
aucuguggucaaaauagaaacu

SEQ ID NO: 255625 - RNA, 22 nt, Human
ucuggguaugaccuauuuuucc

SEQ ID NO: 255626 - RNA, 22 nt, Human
aaauacgugcacauacauacau

SEQ ID NO: 255627 - RNA, 22 nt, Human
gagaacugauuagcauuugcca

SEQ ID NO: 255628 - RNA, 23 nt, Human
uuuaaccuuggucaagaauuucc

SEQ ID NO: 255629 - RNA, 22 nt, Human
uccugaggaaaguucaugaaug

SEQ ID NO: 255630 - RNA, 22 nt, Human
ucugcccuggggucagccucca

SEQ ID NO: 255631 - RNA, 22 nt, Human
uaccagcaacuggaagucagau

SEQ ID NO: 255632 - RNA, 22 nt, Human
gggucucuccuccccagcugug

SEQ ID NO: 255633 - RNA, 22 nt, Human
caggaggaaacuggauucacuu

SEQ ID NO: 255634 - RNA, 22 nt, Human
caggagcucuuaaggaugugau

SEQ ID NO: 255635 - RNA, 22 nt, Human
aaagaacaaaugauauaugguu

SEQ ID NO: 255636 - RNA, 22 nt, Human
gagguucagcugcugccuggua

SEQ ID NO: 255637 - RNA, 22 nt, Human
agagccuuuggagcugcuauua

SEQ ID NO: 255638 - RNA, 22 nt, Human
ugcaaacagaaaagcuacuuug

SEQ ID NO: 255639 - RNA, 22 nt, Human
gaggacaggagacucacuguuu

SEQ ID NO: 255640 - RNA, 20 nt, Human
uuuuccagaaaguaucauug

SEQ ID NO: 255641 - RNA, 22 nt, Human
gugcuuuuaaaggcaauuagua

SEQ ID NO: 255642 - RNA, 22 nt, Human
cggagggguuugaacagaggag

SEQ ID NO: 255643 - RNA, 22 nt, Human
agacaaaugguaauuaugucua

SEQ ID NO: 255644 - RNA, 22 nt, Human
ucuuuagaaacuuuucuucaug

SEQ ID NO: 255645 - RNA, 22 nt, Human
uccugggacucaacuuagaagg

SEQ ID NO: 255646 - RNA, 22 nt, Human
agccuuguagaccauuuuaagg

SEQ ID NO: 255647 - RNA, 22 nt, Human
uuagcuucuuacauuucauccu

SEQ ID NO: 255648 - RNA, 22 nt, Human
cagucugauguucgcaggugaa

SEQ ID NO: 255649 - RNA, 22 nt, Human
gcucacuggccugaagaggacg

SEQ ID NO: 255650 - RNA, 22 nt, Human
ucucuucacauuccuggcaaac

SEQ ID NO: 255651 - RNA, 22 nt, Human
gcccagggcuucaaagagagaa

SEQ ID NO: 255652 - RNA, 19 nt, Human
ggcugggucuggcagguuc

SEQ ID NO: 255653 - RNA, 20 nt, Human
ucccucccuccagcucuggg

SEQ ID NO: 255654 - RNA, 22 nt, Human
caguuacauauuuaguagguua

SEQ ID NO: 255655 - RNA, 22 nt, Human
ccccucauucucugagcuaguu

SEQ ID NO: 255656 - RNA, 22 nt, Human
ucugagugaguguaggccugac

SEQ ID NO: 255657 - RNA, 22 nt, Human
aguccuggccccaaggaaggau

SEQ ID NO: 255658 - RNA, 22 nt, Human
aacaggcaaacugugggauccc

SEQ ID NO: 255659 - RNA, 22 nt, Human
agaggccucuagggccccucag

SEQ ID NO: 255660 - RNA, 21 nt, Human
gagcccaggcaucucauuaau

SEQ ID NO: 255661 - RNA, 22 nt, Human
caggaggcaucauggagcggac

SEQ ID NO: 255662 - RNA, 22 nt, Human
cccugaugacacgggcaucagg

SEQ ID NO: 255663 - RNA, 21 nt, Human
uuccuggcggcagaaacguga

SEQ ID NO: 255664 - RNA, 22 nt, Human
gggccuggcaugcagccccguu

SEQ ID NO: 255665 - RNA, 22 nt, Human
gagcaaagcuuuuagggccuuu

SEQ ID NO: 255666 - RNA, 21 nt, Human
agugugugauaggcaggaaga

SEQ ID NO: 255667 - RNA, 20 nt, Human
acaggagaucugaggaaagg

SEQ ID NO: 255668 - RNA, 22 nt, Human
auuauaaaccuuugaggguggg

SEQ ID NO: 255669 - RNA, 22 nt, Human
cucacaggagaaagucaugguc

SEQ ID NO: 255670 - RNA, 20 nt, Human
agaucuuuucuauagaagug

SEQ ID NO: 255671 - RNA, 22 nt, Human
ggguguggcugcgugccaauaa

SEQ ID NO: 255672 - RNA, 22 nt, Human
aaagaugaucuacaaguucauu

SEQ ID NO: 255673 - RNA, 22 nt, Human
uuguuaaaauuggagccgagag

SEQ ID NO: 255674 - RNA, 22 nt, Human
cagcugguacucaguucuuguc

SEQ ID NO: 255675 - RNA, 22 nt, Human
guuaaacaauaacuggcacaca

SEQ ID NO: 255676 - RNA, 22 nt, Human
aggaagaggugugcaauggugu

SEQ ID NO: 255677 - RNA, 22 nt, Human
acacagauauuuugaauacaua

SEQ ID NO: 255678 - RNA, 22 nt, Human
uagggggcuguccugugcauua

SEQ ID NO: 255679 - RNA, 20 nt, Human
caaguguuauugugcauuua

SEQ ID NO: 255680 - RNA, 19 nt, Human
agugugagacuccaucuca

SEQ ID NO: 255681 - RNA, 22 nt, Human
cucccucaggccuuagcccugc

SEQ ID NO: 255682 - RNA, 22 nt, Human
aggcucugugaugugccaggca

SEQ ID NO: 255683 - RNA, 22 nt, Human
gagugcaggccugagcaccauc

SEQ ID NO: 255684 - RNA, 22 nt, Human
uuaaacagucccagaggcugac

SEQ ID NO: 255685 - RNA, 22 nt, Human
aguauacauauauuagccuucg

SEQ ID NO: 255686 - RNA, 22 nt, Human
uuugcaguguucaucaguauuu

SEQ ID NO: 255687 - RNA, 22 nt, Human
agguccugacgcccuuugaaau

SEQ ID NO: 255688 - RNA, 20 nt, Human
gauguguccucagcaguggu

SEQ ID NO: 255689 - RNA, 22 nt, Human
aaggauucaagaaaugguguag

SEQ ID NO: 255690 - RNA, 22 nt, Human
aagucucugacucacacaaugu

SEQ ID NO: 255691 - RNA, 23 nt, Human
gggaucuguaaaccuggagaacc

SEQ ID NO: 255692 - RNA, 22 nt, Human
augaggaggccaguaagagccu

SEQ ID NO: 255693 - RNA, 22 nt, Human
ggcugucucugugacugccacc

SEQ ID NO: 255694 - RNA, 22 nt, Human
uuguauguuucugugcacauga

SEQ ID NO: 255695 - RNA, 22 nt, Human
cuugggauguaaccuuuguucc

SEQ ID NO: 255696 - RNA, 20 nt, Human
gaggcccagagaggugaagc

SEQ ID NO: 255697 - RNA, 22 nt, Human
uugccuggaugguccccagaga

SEQ ID NO: 255698 - RNA, 22 nt, Human
ucugagaggcaucugcacuucu

SEQ ID NO: 255699 - RNA, 22 nt, Human
guggcucuccauugacauggaa

SEQ ID NO: 255700 - RNA, 22 nt, Human
uugggcucaggaguuugagacc

SEQ ID NO: 255701 - RNA, 22 nt, Human
uacauacagagaugcuaguuaa

SEQ ID NO: 255702 - RNA, 22 nt, Human
uaagaauuaucucauggauaau

SEQ ID NO: 255703 - RNA, 17 nt, Human
gauuagaaaacacauga

SEQ ID NO: 255704 - RNA, 22 nt, Human
ggcuuucugucugcgucugugu

SEQ ID NO: 255705 - RNA, 22 nt, Human
uguccugggaaaucccuuaggc

SEQ ID NO: 255706 - RNA, 22 nt, Human
uucaaguuuacuuugaaguuua

SEQ ID NO: 255707 - RNA, 22 nt, Human
aacacaaaaauucucaggggca

SEQ ID NO: 255708 - RNA, 20 nt, Human
accagagcucucaguaugug

SEQ ID NO: 255709 - RNA, 22 nt, Human
gggagccaaggagagaggccuu

SEQ ID NO: 255710 - RNA, 22 nt, Human
aguguacaaaaugauagauaaa

SEQ ID NO: 255711 - RNA, 22 nt, Human
ugccucugguuaucugguaccu

SEQ ID NO: 255712 - RNA, 22 nt, Human
uuccaggacuggguguuugaag

SEQ ID NO: 255713 - RNA, 22 nt, Human
accgggaaguccugcacugggc

SEQ ID NO: 255714 - RNA, 22 nt, Human
ucuucuuuuugucccacagaau

SEQ ID NO: 255715 - RNA, 19 nt, Human
cuccuucccugguuucugu

SEQ ID NO: 255716 - RNA, 22 nt, Human
cucuggccugcuuccucaggua

SEQ ID NO: 255717 - RNA, 22 nt, Human
gcauaggccacuagugccagga

SEQ ID NO: 255718 - RNA, 22 nt, Human
auucacacuuuacuucuuucca

SEQ ID NO: 255719 - RNA, 23 nt, Human
aauuacaaccaagaacuggaagg

SEQ ID NO: 255720 - RNA, 22 nt, Human
gagacugcauagauggccacaa

SEQ ID NO: 255721 - RNA, 22 nt, Human
ccucagggucauccuaguaaua

SEQ ID NO: 255722 - RNA, 22 nt, Human
uaggugcaggucacaagggaug

SEQ ID NO: 255723 - RNA, 17 nt, Human
cagcccugccguuccca

SEQ ID NO: 255724 - RNA, 22 nt, Human
ccagguccuguuuucaccacag

SEQ ID NO: 255725 - RNA, 22 nt, Human
cuaaggaaaggaaauacaguaa

SEQ ID NO: 255726 - RNA, 22 nt, Human
uuaagcauaauuaaagugaaau

SEQ ID NO: 255727 - RNA, 20 nt, Human
caggcaguuugugguuaggg

SEQ ID NO: 255728 - RNA, 22 nt, Human
acuuugcacuucaauauaacuu

SEQ ID NO: 255729 - RNA, 22 nt, Human
uagggaccuuagaauuguaugu

SEQ ID NO: 255730 - RNA, 22 nt, Human
ugcaggugucucugucuagcgu

SEQ ID NO: 255731 - RNA, 22 nt, Human
gaggccugaggcugccuggagc

SEQ ID NO: 255732 - RNA, 21 nt, Human
gaguccuggcuaggguggcag

SEQ ID NO: 255733 - RNA, 22 nt, Human
gagacagugguugcagaagcuc

SEQ ID NO: 255734 - RNA, 17 nt, Human
gucaacaggauuucuuu

SEQ ID NO: 255735 - RNA, 22 nt, Human
ugaggccagccacagccacccu

SEQ ID NO: 255736 - RNA, 22 nt, Human
auguuuuaugcuucagaugagg

SEQ ID NO: 255737 - RNA, 22 nt, Human
gggccagguggaccccagccuc

SEQ ID NO: 255738 - RNA, 22 nt, Human
gggcuugguggagagaaugcug

SEQ ID NO: 255739 - RNA, 22 nt, Human
aaaguugaccgaaagauuuuga

SEQ ID NO: 255740 - RNA, 22 nt, Human
uggcaggaagacguggggcacc

SEQ ID NO: 255741 - RNA, 22 nt, Human
ccccucugcaaauagccaggcu

SEQ ID NO: 255742 - RNA, 22 nt, Human
gccagcaguggccaccaccagg

SEQ ID NO: 255743 - RNA, 22 nt, Human
ucucuucuauuugagacuauuu

SEQ ID NO: 255744 - RNA, 22 nt, Human
ggcagagguagcuggaaccagg

SEQ ID NO: 255745 - RNA, 22 nt, Human
ccugggagaacugcuggguugg

SEQ ID NO: 255746 - RNA, 22 nt, Human
ggaguccuggacuccaucucac

SEQ ID NO: 255747 - RNA, 22 nt, Human
cuccccauccaggcagcaggug

SEQ ID NO: 255748 - RNA, 22 nt, Human
acgagucugcucuugaaaaagu

SEQ ID NO: 255749 - RNA, 22 nt, Human
cccagguggguuggccucuguc

SEQ ID NO: 255750 - RNA, 22 nt, Human
ccauuuacauuguacucuguga

SEQ ID NO: 255751 - RNA, 22 nt, Human
ccaggcuucugauuccaggcac

SEQ ID NO: 255752 - RNA, 22 nt, Human
gaaaugcauaaucuuaguagau

SEQ ID NO: 255753 - RNA, 22 nt, Human
uggaaggaaagguagcagagaa

SEQ ID NO: 255754 - RNA, 22 nt, Human
acacaggaacucugagaggugg

SEQ ID NO: 255755 - RNA, 22 nt, Human
acagaauugauggaaaucucag

SEQ ID NO: 255756 - RNA, 22 nt, Human
auguguaggugaaucgaggcug

SEQ ID NO: 255757 - RNA, 22 nt, Human
ccuggcugguggcagcgacaag

SEQ ID NO: 255758 - RNA, 22 nt, Human
ucauuguuucugcuuuucauga

SEQ ID NO: 255759 - RNA, 22 nt, Human
ccugagggaucuguggaauagc

SEQ ID NO: 255760 - RNA, 22 nt, Human
uuuaauuauaucugggcaguua

SEQ ID NO: 255761 - RNA, 22 nt, Human
gcgacuguacagaauugccccu

SEQ ID NO: 255762 - RNA, 22 nt, Human
aaacauagcacacacagcucuu

SEQ ID NO: 255763 - RNA, 22 nt, Human
aaacugcacuuuauuuugucaa

SEQ ID NO: 255764 - RNA, 22 nt, Human
aagaguuauauaauguguaguu

SEQ ID NO: 255765 - RNA, 22 nt, Human
aacauuuuuaagaccaagugcu

SEQ ID NO: 255766 - RNA, 22 nt, Human
ucccacauaugcaauccugaau

SEQ ID NO: 255767 - RNA, 22 nt, Human
aggggagcaaggccguggugua

SEQ ID NO: 255768 - RNA, 16 nt, Human
ggggaaggcaagaggg

SEQ ID NO: 255769 - RNA, 22 nt, Human
uuaggaaagucucuuggcuggg

SEQ ID NO: 255770 - RNA, 22 nt, Human
agcugggugcgguggcucaugc

SEQ ID NO: 255771 - RNA, 22 nt, Human
ucaaaucucacucugcauuucu

SEQ ID NO: 255772 - RNA, 22 nt, Human
acagcuuuugaaaaauuacugg

SEQ ID NO: 255773 - RNA, 21 nt, Human
ugcuuuaugggaaaaauguca

SEQ ID NO: 255774 - RNA, 22 nt, Human
acaauuuuaagccagagugggu

SEQ ID NO: 255775 - RNA, 22 nt, Human
ugcaaaaacagccuugaggccu

SEQ ID NO: 255776 - RNA, 22 nt, Human
gaaaauuauugaaaauggcucu

SEQ ID NO: 255777 - RNA, 22 nt, Human
uggaagaauauggggguacaga

SEQ ID NO: 255778 - RNA, 22 nt, Human
ugcaucuuacguuuugaaaggg

SEQ ID NO: 255779 - RNA, 22 nt, Human
ggagggcccugggugcagcucu

SEQ ID NO: 255780 - RNA, 22 nt, Human
ggggggcagcuguccuggccau

SEQ ID NO: 255781 - RNA, 22 nt, Human
cccaggcagccugcagggaagg

SEQ ID NO: 255782 - RNA, 22 nt, Human
ugguggcagcugggacagaggu

SEQ ID NO: 255783 - RNA, 21 nt, Human
uugaggagugagaguggguuu

SEQ ID NO: 255784 - RNA, 22 nt, Human
gcucuuuggauuccuuuacaaa

SEQ ID NO: 255785 - RNA, 22 nt, Human
ucuuacccggcaacgugugucg

SEQ ID NO: 255786 - RNA, 22 nt, Human
uuagaacaguagaagaaagggu

SEQ ID NO: 255787 - RNA, 22 nt, Human
gaagaggaugacaggagccggu

SEQ ID NO: 255788 - RNA, 22 nt, Human
gucugcccucacaugcacucuu

SEQ ID NO: 255789 - RNA, 22 nt, Human
uggaagccguaggguuugggaa

SEQ ID NO: 255790 - RNA, 22 nt, Human
aucaaaguucguaacugauaac

SEQ ID NO: 255791 - RNA, 22 nt, Human
agacagcuguuccuucauguuu

SEQ ID NO: 255792 - RNA, 22 nt, Human
agugcaggccccaggccaggcc

SEQ ID NO: 255793 - RNA, 22 nt, Human
uuguagcuagguuuuuguagaa

SEQ ID NO: 255794 - RNA, 22 nt, Human
guucaguuaugugaccucaaaa

SEQ ID NO: 255795 - RNA, 22 nt, Human
cagcuucugucugauuagcaag

SEQ ID NO: 255796 - RNA, 22 nt, Human
ggugacgaauccauagcaucga

SEQ ID NO: 255797 - RNA, 22 nt, Human
acaguaaaucaacagaauaucu

SEQ ID NO: 255798 - RNA, 22 nt, Human
uaacagaagaaaacauauugga

SEQ ID NO: 255799 - RNA, 22 nt, Human
ugcccugcuugguuuauuuuca

SEQ ID NO: 255800 - RNA, 20 nt, Human
cuuugccuauucucugccug

SEQ ID NO: 255801 - RNA, 22 nt, Human
uucuccagagggcucugcagga

SEQ ID NO: 255802 - RNA, 22 nt, Human
auucaguaggugugaacuuauu

SEQ ID NO: 255803 - RNA, 22 nt, Human
ucuagaagggugccgaucuuag

SEQ ID NO: 255804 - RNA, 22 nt, Human
uccuggcccaaucugcccauga

SEQ ID NO: 255805 - RNA, 22 nt, Human
ucacuccaucuuugcuacuggu

SEQ ID NO: 255806 - RNA, 19 nt, Human
ccaggccucuggggccugu

SEQ ID NO: 255807 - RNA, 22 nt, Human
ugagggcuccccgcugcugugu

SEQ ID NO: 255808 - RNA, 19 nt, Human
uggaggaaguauauuucau

SEQ ID NO: 255809 - RNA, 22 nt, Human
caggccccauuccucuugggac

SEQ ID NO: 255810 - RNA, 22 nt, Human
accagcucagaagccagaaaga

SEQ ID NO: 255811 - RNA, 22 nt, Human
ggcuccaggagggccuuggcca

SEQ ID NO: 255812 - RNA, 22 nt, Human
ucuggcucuauaacuccuagcu

SEQ ID NO: 255813 - RNA, 22 nt, Human
agagacaggauaucugcucaug

SEQ ID NO: 255814 - RNA, 22 nt, Human
gaugaaggggcuggugcccucu

SEQ ID NO: 255815 - RNA, 22 nt, Human
uguccaggacccuauucucacu

SEQ ID NO: 255816 - RNA, 21 nt, Human
uaaaucucuguauucuucagu

SEQ ID NO: 255817 - RNA, 22 nt, Human
uccuggccuagaguuuguguuc

SEQ ID NO: 255818 - RNA, 22 nt, Human
cucuuugggaugggcucugcug

SEQ ID NO: 255819 - RNA, 22 nt, Human
aaaacauaaacugacagcccau

SEQ ID NO: 255820 - RNA, 22 nt, Human
agcagcuggggccugugacgau

SEQ ID NO: 255821 - RNA, 22 nt, Human
auuuaugacaaccaaagaguga

SEQ ID NO: 255822 - RNA, 22 nt, Human
aaaggcuaguggauucauugau

SEQ ID NO: 255823 - RNA, 22 nt, Human
uuuaaaagggguauuaagucca

SEQ ID NO: 255824 - RNA, 22 nt, Human
caguuuauagcucuagcagcuu

SEQ ID NO: 255825 - RNA, 22 nt, Human
cugcuuggguccuggcaugggu

SEQ ID NO: 255826 - RNA, 22 nt, Human
ucucauguuucugguacuccuu

SEQ ID NO: 255827 - RNA, 22 nt, Human
gaggagggagcuggaagcucuu

SEQ ID NO: 255828 - RNA, 22 nt, Human
acaaggacgucacuuccacggu

SEQ ID NO: 255829 - RNA, 22 nt, Human
cuuucgaucaagggucccuuca

SEQ ID NO: 255830 - RNA, 22 nt, Human
ugaaaugcuugggaccagaagu

SEQ ID NO: 255831 - RNA, 20 nt, Human
ccagguggugccuggagagg

SEQ ID NO: 255832 - RNA, 22 nt, Human
gagcacguugaagcgcacuguc

SEQ ID NO: 255833 - RNA, 22 nt, Human
acuaaaacaguggcuaguagac

SEQ ID NO: 255834 - RNA, 22 nt, Human
ggcaggugugagcuguaaagga

SEQ ID NO: 255835 - RNA, 22 nt, Human
uccugcacauuaguauuuuuua

SEQ ID NO: 255836 - RNA, 22 nt, Human
ucuuaaaccacaaaauucagag

SEQ ID NO: 255837 - RNA, 22 nt, Human
uauucaugucggcugaaaaagc

SEQ ID NO: 255838 - RNA, 22 nt, Human
cuggcuuugaaggucuuuccua

SEQ ID NO: 255839 - RNA, 22 nt, Human
cagcugagaagugauagcugca

SEQ ID NO: 255840 - RNA, 22 nt, Human
ugauucaauaggaauugaguag

SEQ ID NO: 255841 - RNA, 22 nt, Human
augacuuuccuggcaaaaguug

SEQ ID NO: 255842 - RNA, 22 nt, Human
ugucacaugaaacuugcucauc

SEQ ID NO: 255843 - RNA, 22 nt, Human
gcagggauugugcagggggcua

SEQ ID NO: 255844 - RNA, 18 nt, Human
acucugggaccuguuauu

SEQ ID NO: 255845 - RNA, 20 nt, Human
acugugaaugcugaauuagc

SEQ ID NO: 255846 - RNA, 22 nt, Human
ccaggcccaccuuggccacuua

SEQ ID NO: 255847 - RNA, 22 nt, Human
aagcagcaugcuaugcuggugg

SEQ ID NO: 255848 - RNA, 22 nt, Human
aaauacucucaauaaagaaagu

SEQ ID NO: 255849 - RNA, 22 nt, Human
ucucagagggaaaggccaauuu

SEQ ID NO: 255850 - RNA, 22 nt, Human
ugagucucugcacuaaggagag

SEQ ID NO: 255851 - RNA, 22 nt, Human
agucaguguucuggguuguaau

SEQ ID NO: 255852 - RNA, 22 nt, Human
gaggccuggugugucucccgcu

SEQ ID NO: 255853 - RNA, 19 nt, Human
aguguauuuuuuucuguag

SEQ ID NO: 255854 - RNA, 22 nt, Human
uacacaguagaguauaaugcgu

SEQ ID NO: 255855 - RNA, 21 nt, Human
cccaggucguggucuucccag

SEQ ID NO: 255856 - RNA, 22 nt, Human
acccucagcuucuuggauuaau

SEQ ID NO: 255857 - RNA, 22 nt, Human
aaucauaauuguauacauucau

SEQ ID NO: 255858 - RNA, 21 nt, Human
gccaccccuggcacaggugcu

SEQ ID NO: 255859 - RNA, 22 nt, Human
ccaggcuguuuucaaacuuggg

SEQ ID NO: 255860 - RNA, 22 nt, Human
gccccagcucugccacaacuag

SEQ ID NO: 255861 - RNA, 22 nt, Human
uuuuccucugcagagcaguuag

SEQ ID NO: 255862 - RNA, 22 nt, Human
ucccagggcacucacccucccu

SEQ ID NO: 255863 - RNA, 19 nt, Human
cacagcucugcucagggaa

SEQ ID NO: 255864 - RNA, 22 nt, Human
aggagcugcuuuggugcgguuu

SEQ ID NO: 255865 - RNA, 22 nt, Human
uuucacauaugguuguugauug

SEQ ID NO: 255866 - RNA, 22 nt, Human
ucaaacauaggcacacauucag

SEQ ID NO: 255867 - RNA, 22 nt, Human
uggcaaaggaaaugauuuaaga

SEQ ID NO: 255868 - RNA, 22 nt, Human
uggaagcuguggcauaacugag

SEQ ID NO: 255869 - RNA, 22 nt, Human
agcacauaccagaaccacaggu

SEQ ID NO: 255870 - RNA, 22 nt, Human
ugagucacagccuugccuuggu

SEQ ID NO: 255871 - RNA, 18 nt, Human
gcagggcugcacacgcau

SEQ ID NO: 255872 - RNA, 22 nt, Human
uccuccaaggcagggggagaga

SEQ ID NO: 255873 - RNA, 22 nt, Human
ucucuuuguggccaggagagga

SEQ ID NO: 255874 - RNA, 22 nt, Human
ggucucagacuggcaggcagug

SEQ ID NO: 255875 - RNA, 22 nt, Human
aggagggacaccaauauauguu

SEQ ID NO: 255876 - RNA, 22 nt, Human
uccaggccgcauaguuacucug

SEQ ID NO: 255877 - RNA, 23 nt, Human
auagaagauuauugcaacagucc

SEQ ID NO: 255878 - RNA, 18 nt, Human
uccuaacuuagauacucc

SEQ ID NO: 255879 - RNA, 22 nt, Human
cucuaggccauccagggccauu

SEQ ID NO: 255880 - RNA, 22 nt, Human
uucuuuuuaaaguguguaugca

SEQ ID NO: 255881 - RNA, 22 nt, Human
cuggaagggucagagugaugag

SEQ ID NO: 255882 - RNA, 20 nt, Human
aggcccugccagggacggag

SEQ ID NO: 255883 - RNA, 22 nt, Human
ggccaugccuggucuggcacca

SEQ ID NO: 255884 - RNA, 22 nt, Human
uugagaaauguuuuuuaagcug

SEQ ID NO: 255885 - RNA, 22 nt, Human
guuagaaacacauucuuauuga

SEQ ID NO: 255886 - RNA, 22 nt, Human
cuguuacuguauuuaaucaucu

SEQ ID NO: 255887 - RNA, 22 nt, Human
gggcucaggccuggccucucac

SEQ ID NO: 255888 - RNA, 22 nt, Human
cauugaaagagauaaagccuuu

SEQ ID NO: 255889 - RNA, 22 nt, Human
ucccucagucccuggacaggca

SEQ ID NO: 255890 - RNA, 22 nt, Human
acagaguggaguucaguaaaua

SEQ ID NO: 255891 - RNA, 22 nt, Human
ucagacaggcuggacagcuugc

SEQ ID NO: 255892 - RNA, 18 nt, Human
cccagaggaaugccugga

SEQ ID NO: 255893 - RNA, 22 nt, Human
auucuggacaaugagaaacugg

SEQ ID NO: 255894 - RNA, 22 nt, Human
uauaaaucuuuguuccuagaau

SEQ ID NO: 255895 - RNA, 22 nt, Human
guccugugucccagagaaagag

SEQ ID NO: 255896 - RNA, 22 nt, Human
agcccagccggauucccaguuc

SEQ ID NO: 255897 - RNA, 22 nt, Human
uauccaaaguggcauauuauag

SEQ ID NO: 255898 - RNA, 22 nt, Human
uccagaggcuccaaagggagau

SEQ ID NO: 255899 - RNA, 22 nt, Human
cuaguacaauuuuagcaagaug

SEQ ID NO: 255900 - RNA, 22 nt, Human
uaaaacugaauacauacugagg

SEQ ID NO: 255901 - RNA, 22 nt, Human
aaauguaguugaaaaguuaagg

SEQ ID NO: 255902 - RNA, 22 nt, Human
cugggcagugguggcaucuuug

SEQ ID NO: 255903 - RNA, 22 nt, Human
gacccauauaggacccuccaaa

SEQ ID NO: 255904 - RNA, 18 nt, Human
agccugggcucugccugg

SEQ ID NO: 255905 - RNA, 22 nt, Human
aguauguagugcaaucagucag

SEQ ID NO: 255906 - RNA, 22 nt, Human
cuuauagauggcgaucuucuug

SEQ ID NO: 255907 - RNA, 22 nt, Human
guggcaggagagacacagccau

SEQ ID NO: 255908 - RNA, 18 nt, Human
cucuagaaugggagauuu

SEQ ID NO: 255909 - RNA, 21 nt, Human
aauuagggugccucuuauaau

SEQ ID NO: 255910 - RNA, 22 nt, Human
gcagccucugaugauggccgua

SEQ ID NO: 255911 - RNA, 22 nt, Human
uccaggcagcccuuccugacuc

SEQ ID NO: 255912 - RNA, 22 nt, Human
guucaauuuagaaagcacaguu

SEQ ID NO: 255913 - RNA, 22 nt, Human
uggaggaaguggcuggccagaa

SEQ ID NO: 255914 - RNA, 22 nt, Human
uggagggcgcuuagauggaggg

SEQ ID NO: 255915 - RNA, 22 nt, Human
cugccuguuuccucuugcuccc

SEQ ID NO: 255916 - RNA, 22 nt, Human
acauuucuugaugccucuguga

SEQ ID NO: 255917 - RNA, 22 nt, Human
uagacuuuucaaaaucuagacc

SEQ ID NO: 255918 - RNA, 22 nt, Human
gggaccugggccagaggacagu

SEQ ID NO: 255919 - RNA, 22 nt, Human
aagugcuuaaaaggguggucua

SEQ ID NO: 255920 - RNA, 22 nt, Human
agugaaaaccuaaucaugcagu

SEQ ID NO: 255921 - RNA, 22 nt, Human
uaagguuuguggggagcaaaag

SEQ ID NO: 255922 - RNA, 22 nt, Human
cccaggagacauauagaaggac

SEQ ID NO: 255923 - RNA, 22 nt, Human
ggcugugggaugcauaggagcu

SEQ ID NO: 255924 - RNA, 22 nt, Human
cagguucucagaaggcagucac

SEQ ID NO: 255925 - RNA, 21 nt, Human
aaacagagcugaguaauagau

SEQ ID NO: 255926 - RNA, 22 nt, Human
aaucuucuacuugacaguucuc

SEQ ID NO: 255927 - RNA, 22 nt, Human
uaaaguguuuguaugcagauaa

SEQ ID NO: 255928 - RNA, 18 nt, Human
uggcagguccagcugugg

SEQ ID NO: 255929 - RNA, 22 nt, Human
auauacacaucuuuuuaaauau

SEQ ID NO: 255930 - RNA, 22 nt, Human
aggacacagugguggggaaaag

SEQ ID NO: 255931 - RNA, 22 nt, Human
gccugcuucacggacaggccuc

SEQ ID NO: 255932 - RNA, 22 nt, Human
ucaggagauguaaccuuagcug

SEQ ID NO: 255933 - RNA, 22 nt, Human
uuaaaaugaauauugauuagca

SEQ ID NO: 255934 - RNA, 22 nt, Human
uggcauugcuagugacccagca

SEQ ID NO: 255935 - RNA, 22 nt, Human
cuuggagucaauaagaucuaga

SEQ ID NO: 255936 - RNA, 22 nt, Human
caggcagaggaagucugggucu

SEQ ID NO: 255937 - RNA, 22 nt, Human
ugcaaaacuucucagagccuuu

SEQ ID NO: 255938 - RNA, 22 nt, Human
agucuugaaagcacauuagagu

SEQ ID NO: 255939 - RNA, 22 nt, Human
uaccauaacguaaugaacuuga

SEQ ID NO: 255940 - RNA, 22 nt, Human
uuucuaggucuuccauacugcc

SEQ ID NO: 255941 - RNA, 20 nt, Human
uacaauauucccacuuugcu

SEQ ID NO: 255942 - RNA, 22 nt, Human
auuccacuccaauaagugucaa

SEQ ID NO: 255943 - RNA, 22 nt, Human
agaggaauuucuggaaggaggc

SEQ ID NO: 255944 - RNA, 22 nt, Human
caggcugcguuugugaaaggua

SEQ ID NO: 255945 - RNA, 21 nt, Human
gccagcugcagggcuuccuug

SEQ ID NO: 255946 - RNA, 22 nt, Human
acucuggccaggugcgguaugu

SEQ ID NO: 255947 - RNA, 20 nt, Human
aacuuuagacauaaucucuu

SEQ ID NO: 255948 - RNA, 22 nt, Human
gcagcccaagccugagcauccu

SEQ ID NO: 255949 - RNA, 22 nt, Human
gcucugagcugucuugcagguc

SEQ ID NO: 255950 - RNA, 22 nt, Human
uauuccaguucaccuuuucauc

SEQ ID NO: 255951 - RNA, 22 nt, Human
ugcaaaagaauauagauauugu

SEQ ID NO: 255952 - RNA, 22 nt, Human
cagcauuuucuuaauguaggug

SEQ ID NO: 255953 - RNA, 21 nt, Human
caguuuaauaacaaagaagga

SEQ ID NO: 255954 - RNA, 22 nt, Human
augugcaacuuuucugucuuuu

SEQ ID NO: 255955 - RNA, 22 nt, Human
cucuucaaaagucuaauccuua

SEQ ID NO: 255956 - RNA, 22 nt, Human
gagaugaagaggcccuuggagu

SEQ ID NO: 255957 - RNA, 22 nt, Human
agcuacaagucaucagcuauca

SEQ ID NO: 255958 - RNA, 22 nt, Human
uauuuaaaaagaggccagcugg

SEQ ID NO: 255959 - RNA, 22 nt, Human
agagugcagaggucaaagaaca

SEQ ID NO: 255960 - RNA, 22 nt, Human
agacaggagagggaacugccgg

SEQ ID NO: 255961 - RNA, 22 nt, Human
uuugcucaguucucuguauuuu

SEQ ID NO: 255962 - RNA, 22 nt, Human
aaacucugaugcuuauugggaa

SEQ ID NO: 255963 - RNA, 22 nt, Human
agagccagauggagccgugugu

SEQ ID NO: 255964 - RNA, 22 nt, Human
uuccucaacaacuucccuacag

SEQ ID NO: 255965 - RNA, 22 nt, Human
uuuguucacugagcaaugauua

SEQ ID NO: 255966 - RNA, 22 nt, Human
auccaggcuuaaugggagccac

SEQ ID NO: 255967 - RNA, 20 nt, Human
uuucacaaugaacaugucuc

SEQ ID NO: 255968 - RNA, 22 nt, Human
uuuccucuuugugacacagcug

SEQ ID NO: 255969 - RNA, 22 nt, Human
cucugcaacuucuagcaguguc

SEQ ID NO: 255970 - RNA, 20 nt, Human
auuccucagccccagccuca

SEQ ID NO: 255971 - RNA, 23 nt, Human
aggcagcagguuguccaggguga

SEQ ID NO: 255972 - RNA, 22 nt, Human
uuuaucugagcugauagauagu

SEQ ID NO: 255973 - RNA, 22 nt, Human
aggaggccuguguuugucugua

SEQ ID NO: 255974 - RNA, 22 nt, Human
aaguaucucaaaaacaguaauc

SEQ ID NO: 255975 - RNA, 22 nt, Human
ugaggcagaaaauagcaguuca

SEQ ID NO: 255976 - RNA, 22 nt, Human
agcaccugucacaagcagaagg

SEQ ID NO: 255977 - RNA, 22 nt, Human
ucuagaauagauucugcugauc

SEQ ID NO: 255978 - RNA, 22 nt, Human
uauacauguuuuacauaaguga

SEQ ID NO: 255979 - RNA, 23 nt, Human
agacugaggcugccagggucaga

SEQ ID NO: 255980 - RNA, 18 nt, Human
acauuucuccuucugacc

SEQ ID NO: 255981 - RNA, 22 nt, Human
ucaaaugccagugguguggauc

SEQ ID NO: 255982 - RNA, 20 nt, Human
gaggagucuuguagaaaaug

SEQ ID NO: 255983 - RNA, 22 nt, Human
cagcuugaaauauuaggagaug

SEQ ID NO: 255984 - RNA, 22 nt, Human
uacuucuguucuuaaaccaaga

SEQ ID NO: 255985 - RNA, 22 nt, Human
ugcaugugcccacucuggcuua

SEQ ID NO: 255986 - RNA, 22 nt, Human
uguaaacauaccagagccaagu

SEQ ID NO: 255987 - RNA, 22 nt, Human
ugcuugucccucuuuaugaugg

SEQ ID NO: 255988 - RNA, 22 nt, Human
ggucagagccguuagcauucag

SEQ ID NO: 255989 - RNA, 22 nt, Human
auuucauagauuguaaaucccu

SEQ ID NO: 255990 - RNA, 22 nt, Human
uucaaagugcauguuccucaga

SEQ ID NO: 255991 - RNA, 22 nt, Human
guggggaguguucugugauugg

SEQ ID NO: 255992 - RNA, 17 nt, Human
ggcagcugccacuuuuu

SEQ ID NO: 255993 - RNA, 22 nt, Human
acugcuuuagaccuagagcucu

SEQ ID NO: 255994 - RNA, 22 nt, Human
aggcacagguggacuucacagu

SEQ ID NO: 255995 - RNA, 22 nt, Human
aaaugguagguuuucuuaagaa

SEQ ID NO: 255996 - RNA, 22 nt, Human
ugauguuuaauacuaugcuuuu

SEQ ID NO: 255997 - RNA, 22 nt, Human
aacaaucaaguuucuaaaugac

SEQ ID NO: 255998 - RNA, 22 nt, Human
cauggcggucaggauguaggug

SEQ ID NO: 255999 - RNA, 22 nt, Human
uuaguaaauaaagucuacuuuc

SEQ ID NO: 256000 - RNA, 22 nt, Human
uuagugcuaaauacucccacag

SEQ ID NO: 256001 - RNA, 22 nt, Human
uuggcccagcaugcgggucugu

SEQ ID NO: 256002 - RNA, 19 nt, Human
gcaggcacagcccugggug

SEQ ID NO: 256003 - RNA, 22 nt, Human
cuggccagguuuugaacaguug

SEQ ID NO: 256004 - RNA, 22 nt, Human
aagaguuaaaugaaugaguggg

SEQ ID NO: 256005 - RNA, 18 nt, Human
cuccuggcugauggugag

SEQ ID NO: 256006 - RNA, 22 nt, Human
ucagaacauuuaaaaagugguu

SEQ ID NO: 256007 - RNA, 22 nt, Human
ggaggugggcuaaggacucucu

SEQ ID NO: 256008 - RNA, 22 nt, Human
acacauuaaaacgucuacaaug

SEQ ID NO: 256009 - RNA, 22 nt, Human
cccagacauugcagggacuggu

SEQ ID NO: 256010 - RNA, 22 nt, Human
uucucagaugauucagauaaac

SEQ ID NO: 256011 - RNA, 22 nt, Human
uagcaaguaugauacuccauga

SEQ ID NO: 256012 - RNA, 22 nt, Human
uauuuccagcaguaagaagaca

SEQ ID NO: 256013 - RNA, 22 nt, Human
uguuuacauggagguuuucagc

SEQ ID NO: 256014 - RNA, 22 nt, Human
cagacaucuguacccagccugu

SEQ ID NO: 256015 - RNA, 22 nt, Human
agggggugaucaaggugcggcg

SEQ ID NO: 256016 - RNA, 22 nt, Human
gcagggcuaauggggcaaguag

SEQ ID NO: 256017 - RNA, 22 nt, Human
uuugcugauauuuugcugauac

SEQ ID NO: 256018 - RNA, 22 nt, Human
caggaggcagaggaugcccagu

SEQ ID NO: 256019 - RNA, 22 nt, Human
acacugucugggacucaggagu

SEQ ID NO: 256020 - RNA, 22 nt, Human
guguucauggaugucaauuuga

SEQ ID NO: 256021 - RNA, 22 nt, Human
gauuaaaaauaacccaugcuga

SEQ ID NO: 256022 - RNA, 22 nt, Human
acuugguggcgaacgaggguca

SEQ ID NO: 256023 - RNA, 22 nt, Human
augaugugugcugaucaagcuu

SEQ ID NO: 256024 - RNA, 22 nt, Human
auguguccacaggugugagaga

SEQ ID NO: 256025 - RNA, 22 nt, Human
uuuuauuaucuuugaaugggac

SEQ ID NO: 256026 - RNA, 23 nt, Human
gaaagucaauaugguagcuuuga

SEQ ID NO: 256027 - RNA, 22 nt, Human
gaacagaauuaccgaagaucug

SEQ ID NO: 256028 - RNA, 22 nt, Human
uguuauuuauuucaccuccaga

SEQ ID NO: 256029 - RNA, 20 nt, Human
cccuggacuccugagcaaac

SEQ ID NO: 256030 - RNA, 18 nt, Human
uccaggccugaagugucc

SEQ ID NO: 256031 - RNA, 22 nt, Human
guuuaaguuucagaagcuaaga

SEQ ID NO: 256032 - RNA, 22 nt, Human
aauguguagauguugcauuccu

SEQ ID NO: 256033 - RNA, 22 nt, Human
ccaggaagaaacagucuuuaua

SEQ ID NO: 256034 - RNA, 22 nt, Human
ugccugucagggggagugggaa

SEQ ID NO: 256035 - RNA, 22 nt, Human
uccuggccagaggacaaagcug

SEQ ID NO: 256036 - RNA, 22 nt, Human
cuaauaauagagguggcauuug

SEQ ID NO: 256037 - RNA, 22 nt, Human
augaggcagcacaugggauugu

SEQ ID NO: 256038 - RNA, 22 nt, Human
ugguaucguguuggcacucagu

SEQ ID NO: 256039 - RNA, 17 nt, Human
auuuccucagggcugag

SEQ ID NO: 256040 - RNA, 22 nt, Human
cugcacccucaaacuccugggc

SEQ ID NO: 256041 - RNA, 22 nt, Human
gguccagucuuucccuucuaga

SEQ ID NO: 256042 - RNA, 20 nt, Human
agguauaagaaaugugauuu

SEQ ID NO: 256043 - RNA, 22 nt, Human
aguaaugucccuuaaauguggu

SEQ ID NO: 256044 - RNA, 22 nt, Human
cagagcuggguuugggaaaccu

SEQ ID NO: 256045 - RNA, 22 nt, Human
gguggcaguggucucugacaga

SEQ ID NO: 256046 - RNA, 22 nt, Human
gggaccucuggagucggccuua

SEQ ID NO: 256047 - RNA, 23 nt, Human
gggggccguccuggggauuauag

SEQ ID NO: 256048 - RNA, 22 nt, Human
ugcuauuugggggcuacaugau

SEQ ID NO: 256049 - RNA, 22 nt, Human
ugggugugccauauuccauuuc

SEQ ID NO: 256050 - RNA, 22 nt, Human
auuuguuccacacauauuuacu

SEQ ID NO: 256051 - RNA, 19 nt, Human
ucuguucacauuguuucgc

SEQ ID NO: 256052 - RNA, 22 nt, Human
ucaagaauuuggauaagaaaug

SEQ ID NO: 256053 - RNA, 22 nt, Human
uagcuucucauaauuuaugcug

SEQ ID NO: 256054 - RNA, 22 nt, Human
aaagcagaggugauaugacuua

SEQ ID NO: 256055 - RNA, 17 nt, Human
ccagggaggggccgcgc

SEQ ID NO: 256056 - RNA, 22 nt, Human
aacauucuacuguacugcauug

SEQ ID NO: 256057 - RNA, 22 nt, Human
uucuauguguugacaagccuga

SEQ ID NO: 256058 - RNA, 22 nt, Human
aagaauguucauuaaacuguug

SEQ ID NO: 256059 - RNA, 22 nt, Human
gagugaggcuggaaucauggcu

SEQ ID NO: 256060 - RNA, 22 nt, Human
ucagcuuuccugcagcuaaggg

SEQ ID NO: 256061 - RNA, 22 nt, Human
aaggaacugcugauguggugac

SEQ ID NO: 256062 - RNA, 23 nt, Human
ucuagaaaaugaaagaaugcagu

SEQ ID NO: 256063 - RNA, 22 nt, Human
auuuaugacuggugaauagaac

SEQ ID NO: 256064 - RNA, 22 nt, Human
gcaggucuguugauuacaguca

SEQ ID NO: 256065 - RNA, 22 nt, Human
uagcccagaugauugaaccaug

SEQ ID NO: 256066 - RNA, 22 nt, Human
acagcaugucuaguuaaauacu

SEQ ID NO: 256067 - RNA, 22 nt, Human
caaagguaaagaucugcugugg

SEQ ID NO: 256068 - RNA, 22 nt, Human
ggagcugggguuggcaucuucc

SEQ ID NO: 256069 - RNA, 22 nt, Human
auacauguucguguacauguuc

SEQ ID NO: 256070 - RNA, 22 nt, Human
cugugggcgccugucagccuca

SEQ ID NO: 256071 - RNA, 22 nt, Human
aacauguagcagaaacgacuaa

SEQ ID NO: 256072 - RNA, 22 nt, Human
ccagccagaugauaagcucuau

SEQ ID NO: 256073 - RNA, 22 nt, Human
ucagauagugauaauagcaugu

SEQ ID NO: 256074 - RNA, 22 nt, Human
uagauaauuuggcaucauauug

SEQ ID NO: 256075 - RNA, 22 nt, Human
guccugugugagugcaccaccu

SEQ ID NO: 256076 - RNA, 22 nt, Human
gcugaaaggggugacauucuuu

SEQ ID NO: 256077 - RNA, 22 nt, Human
accauucugucucuuuacaaau

SEQ ID NO: 256078 - RNA, 22 nt, Human
cucaaguaagaaacagaauugg

SEQ ID NO: 256079 - RNA, 22 nt, Human
gagcaagacccuggguucucuc

SEQ ID NO: 256080 - RNA, 22 nt, Human
gccugggagaaugaccuccaac

SEQ ID NO: 256081 - RNA, 17 nt, Human
gccuggcccagccuggc

SEQ ID NO: 256082 - RNA, 22 nt, Human
ucugagagcaaggcauuagcag

SEQ ID NO: 256083 - RNA, 22 nt, Human
uuacaugcagagggaagggaga

SEQ ID NO: 256084 - RNA, 18 nt, Human
gugggguguugugaggau

SEQ ID NO: 256085 - RNA, 22 nt, Human
uaauuauucuagucacauagca

SEQ ID NO: 256086 - RNA, 20 nt, Human
ucaaaauaggugugggcgga

SEQ ID NO: 256087 - RNA, 22 nt, Human
gcugcgccggaucccacguucc

SEQ ID NO: 256088 - RNA, 22 nt, Human
caggcucccugcaggccaguga

SEQ ID NO: 256089 - RNA, 22 nt, Human
cuaaugaagcugcuuucuauga

SEQ ID NO: 256090 - RNA, 22 nt, Human
cagcaguuuccuaugguucagc

SEQ ID NO: 256091 - RNA, 22 nt, Human
uuccaguuaaggaagcuauucu

SEQ ID NO: 256092 - RNA, 22 nt, Human
cccaggcaucccauuaaggagc

SEQ ID NO: 256093 - RNA, 18 nt, Human
ugagcaggggcugaccuu

SEQ ID NO: 256094 - RNA, 22 nt, Human
cccagugugguucuuuggagaa

SEQ ID NO: 256095 - RNA, 22 nt, Human
acagcauggauaacaaggcacu

SEQ ID NO: 256096 - RNA, 22 nt, Human
uuuagacagcaucuggugacuu

SEQ ID NO: 256097 - RNA, 22 nt, Human
gcugccuagucugcugagcaga

SEQ ID NO: 256098 - RNA, 22 nt, Human
ggagcugagacccaguggcuga

SEQ ID NO: 256099 - RNA, 22 nt, Human
aauguauaaaguguuaauaacu

SEQ ID NO: 256100 - RNA, 22 nt, Human
aggguccuucuguuccugagca

SEQ ID NO: 256101 - RNA, 22 nt, Human
agaggcacuguucuuagcgacu

SEQ ID NO: 256102 - RNA, 22 nt, Human
aaggcauaugcuguguacaguu

SEQ ID NO: 256103 - RNA, 22 nt, Human
auuuggaagaaaucugucacag

SEQ ID NO: 256104 - RNA, 22 nt, Human
ucugcccugcagggagcaguaa

SEQ ID NO: 256105 - RNA, 22 nt, Human
ugagcugcauuacagccucugu

SEQ ID NO: 256106 - RNA, 22 nt, Human
auuccagauggcuucaaguaag

SEQ ID NO: 256107 - RNA, 22 nt, Human
cauguucagugacaguuauuga

SEQ ID NO: 256108 - RNA, 22 nt, Human
agggcagcagcuccuccuagcu

SEQ ID NO: 256109 - RNA, 22 nt, Human
gagcaagauuuuauaaguugug

SEQ ID NO: 256110 - RNA, 22 nt, Human
ugcagggaaucuguggcuggac

SEQ ID NO: 256111 - RNA, 22 nt, Human
uuuagcaaguucucugagagaa

SEQ ID NO: 256112 - RNA, 22 nt, Human
ugcagggcacggugcgcguggg

SEQ ID NO: 256113 - RNA, 22 nt, Human
gcagguggauuaucagaagugc

SEQ ID NO: 256114 - RNA, 22 nt, Human
cucucagggucccugcggagga

SEQ ID NO: 256115 - RNA, 22 nt, Human
auuccacaggacuaccaaugug

SEQ ID NO: 256116 - RNA, 22 nt, Human
agccuuagauaaaugcuagcuc

SEQ ID NO: 256117 - RNA, 20 nt, Human
cugcugugugugccucagcc

SEQ ID NO: 256118 - RNA, 22 nt, Human
uguggcugccacccugaagccg

SEQ ID NO: 256119 - RNA, 22 nt, Human
acucuguacucuagaggaagug

SEQ ID NO: 256120 - RNA, 22 nt, Human
gaaaguuucuucauuaagaugu

SEQ ID NO: 256121 - RNA, 22 nt, Human
aaagaucagucugaagcaacau

SEQ ID NO: 256122 - RNA, 22 nt, Human
uccuggcugccgucguccugcg

SEQ ID NO: 256123 - RNA, 22 nt, Human
uaugugcaguuugcucuuaaca

SEQ ID NO: 256124 - RNA, 22 nt, Human
aaaucccaaugcuagacccggu

SEQ ID NO: 256125 - RNA, 22 nt, Human
ccaggucuggaaccaccagggc

SEQ ID NO: 256126 - RNA, 22 nt, Human
uggcucaguggcagccgcagcu

SEQ ID NO: 256127 - RNA, 22 nt, Human
auguucuuccaaaucuguaaca

SEQ ID NO: 256128 - RNA, 22 nt, Human
gaugcacaugugaguauagaag

SEQ ID NO: 256129 - RNA, 22 nt, Human
agucagagcaaacuggacagac

SEQ ID NO: 256130 - RNA, 22 nt, Human
gaggcugcuuugaugacaggag

SEQ ID NO: 256131 - RNA, 22 nt, Human
ucaggcaggcagagggcaaaug

SEQ ID NO: 256132 - RNA, 18 nt, Human
aaaaagugcucaggccua

SEQ ID NO: 256133 - RNA, 22 nt, Human
gccagccacuucagcuauggcu

SEQ ID NO: 256134 - RNA, 20 nt, Human
cuggacuugcugcucaccug

SEQ ID NO: 256135 - RNA, 22 nt, Human
uagccaugagcagaucacuaua

SEQ ID NO: 256136 - RNA, 20 nt, Human
aacaaacuacaaaauuaugu

SEQ ID NO: 256137 - RNA, 22 nt, Human
gcugcccuccaguucccacagu

SEQ ID NO: 256138 - RNA, 22 nt, Human
ucucucugagcccugcuuuuuc

SEQ ID NO: 256139 - RNA, 22 nt, Human
uuucagugcuucuguuuaccgg

SEQ ID NO: 256140 - RNA, 22 nt, Human
gcugagcacagccuguguccuc

SEQ ID NO: 256141 - RNA, 22 nt, Human
guucacuguacuggugaugguu

SEQ ID NO: 256142 - RNA, 22 nt, Human
augcuauacauaugacaucaca

SEQ ID NO: 256143 - RNA, 22 nt, Human
cuacagagaacucagcugcccu

SEQ ID NO: 256144 - RNA, 22 nt, Human
uuucacauaaauggaguaaaga

SEQ ID NO: 256145 - RNA, 22 nt, Human
ucucuuggacauguggcucugc

SEQ ID NO: 256146 - RNA, 22 nt, Human
cuguuaaaagcacugccauccu

SEQ ID NO: 256147 - RNA, 22 nt, Human
uuucagaaccaagagagacauc

SEQ ID NO: 256148 - RNA, 22 nt, Human
gagcuuggaagcagauccucac

SEQ ID NO: 256149 - RNA, 22 nt, Human
auuugaaguaaguaaugaguau

SEQ ID NO: 256150 - RNA, 22 nt, Human
uuuggaaagugugauuucaagg

SEQ ID NO: 256151 - RNA, 22 nt, Human
uuuguucacugauguaucccaa

SEQ ID NO: 256152 - RNA, 22 nt, Human
gguucacacuaagcuuaagugg

SEQ ID NO: 256153 - RNA, 22 nt, Human
aaguuugacagaaguuucuaau

SEQ ID NO: 256154 - RNA, 23 nt, Human
uagaaucuguauuucugcaguuc

SEQ ID NO: 256155 - RNA, 22 nt, Human
ugguucagauauggagcuggga

SEQ ID NO: 256156 - RNA, 22 nt, Human
ugugucuuacauaauuacaugu

SEQ ID NO: 256157 - RNA, 22 nt, Human
ccucuccagcggccucagggcc

SEQ ID NO: 256158 - RNA, 22 nt, Human
uaagcauuaugguaaagaagua

SEQ ID NO: 256159 - RNA, 22 nt, Human
uguguccucagggaagcagaga

SEQ ID NO: 256160 - RNA, 22 nt, Human
gccuccuccuucccgagggucu

SEQ ID NO: 256161 - RNA, 22 nt, Human
cuguguccuccccaucacuucu

SEQ ID NO: 256162 - RNA, 22 nt, Human
gcgugugugauaugccucugca

SEQ ID NO: 256163 - RNA, 22 nt, Human
ccugccagcccgcguucaugcc

SEQ ID NO: 256164 - RNA, 22 nt, Human
gcagggcucugcuguaguccua

SEQ ID NO: 256165 - RNA, 22 nt, Human
acaucuagaagaucugggagau

SEQ ID NO: 256166 - RNA, 22 nt, Human
acacauuugcuaaaaugagcuc

SEQ ID NO: 256167 - RNA, 22 nt, Human
guccagcuccagggaggcaggc

SEQ ID NO: 256168 - RNA, 22 nt, Human
ucuggcagaucuucccacguuu

SEQ ID NO: 256169 - RNA, 22 nt, Human
uuuuacauugggaaaugccucu

SEQ ID NO: 256170 - RNA, 22 nt, Human
ccucuguaguaagagaacauau

SEQ ID NO: 256171 - RNA, 22 nt, Human
augaggcagcugcuggagaacg

SEQ ID NO: 256172 - RNA, 22 nt, Human
uggcacugaaaaaggagagguu

SEQ ID NO: 256173 - RNA, 22 nt, Human
agaccucaauaccaggcaccac

SEQ ID NO: 256174 - RNA, 22 nt, Human
agcccugagcuggccugggcuu

SEQ ID NO: 256175 - RNA, 22 nt, Human
uagcacaaguaucugcuuuucc

SEQ ID NO: 256176 - RNA, 22 nt, Human
aucuuuaggaaccuaaccuauu

SEQ ID NO: 256177 - RNA, 22 nt, Human
ggacagagcccugguggccuaa

SEQ ID NO: 256178 - RNA, 22 nt, Human
gcucugggguuggaaagugauc

SEQ ID NO: 256179 - RNA, 22 nt, Human
cuggcugcgucugcucugacag

SEQ ID NO: 256180 - RNA, 22 nt, Human
cuccuggcucucuguuuagugu

SEQ ID NO: 256181 - RNA, 22 nt, Human
ggcuuuauuauguggccaugug

SEQ ID NO: 256182 - RNA, 22 nt, Human
agacaaagacagcaucucaggu

SEQ ID NO: 256183 - RNA, 22 nt, Human
agcuucuuuaauucagcaugau

SEQ ID NO: 256184 - RNA, 22 nt, Human
aagaaacugaaaguggcuucau

SEQ ID NO: 256185 - RNA, 22 nt, Human
agcccugcaggaggugggagag

SEQ ID NO: 256186 - RNA, 22 nt, Human
caacagaaaucaauuuucccau

SEQ ID NO: 256187 - RNA, 22 nt, Human
uccugccuaccuugcggaggug

SEQ ID NO: 256188 - RNA, 22 nt, Human
guuacacagcuaagcuucuccu

SEQ ID NO: 256189 - RNA, 22 nt, Human
ccaggagcuggagggugcagug

SEQ ID NO: 256190 - RNA, 22 nt, Human
cagccaggccuggugaccaaag

SEQ ID NO: 256191 - RNA, 22 nt, Human
ucuggagaacuugcaagaggau

SEQ ID NO: 256192 - RNA, 22 nt, Human
augaagauacaggcagggccau

SEQ ID NO: 256193 - RNA, 20 nt, Human
cuggggagcugcucccacga

SEQ ID NO: 256194 - RNA, 22 nt, Human
uggugggaguccgcugugcugc

SEQ ID NO: 256195 - RNA, 23 nt, Human
uaggccagggugaccuggggaga

SEQ ID NO: 256196 - RNA, 22 nt, Human
cugaggcaggauggccuggcug

SEQ ID NO: 256197 - RNA, 22 nt, Human
uggcaaaguuuaucaggaauau

SEQ ID NO: 256198 - RNA, 22 nt, Human
ucuguguauuugugaccuguau

SEQ ID NO: 256199 - RNA, 22 nt, Human
uaggcccaguuccgccucccgg

SEQ ID NO: 256200 - RNA, 22 nt, Human
ccccaggagauuugggagcaca

SEQ ID NO: 256201 - RNA, 22 nt, Human
auauuguacuaggguuacaugu

SEQ ID NO: 256202 - RNA, 22 nt, Human
gggcuacugagcuggaacuggg

SEQ ID NO: 256203 - RNA, 22 nt, Human
uugcaggggagaggaacaaaca

SEQ ID NO: 256204 - RNA, 22 nt, Human
uuucuaguucuaccacaguaau

SEQ ID NO: 256205 - RNA, 22 nt, Human
aagccuuaaauguuucuaauau

SEQ ID NO: 256206 - RNA, 22 nt, Human
uggcucccacaaacucacuacu

SEQ ID NO: 256207 - RNA, 19 nt, Human
ugcagggcugcgccugggg

SEQ ID NO: 256208 - RNA, 22 nt, Human
cacacaucaaccuagacauugu

SEQ ID NO: 256209 - RNA, 22 nt, Human
aauggccagcaacaggagugaa

SEQ ID NO: 256210 - RNA, 22 nt, Human
agcuguggcaaccuugucagac

SEQ ID NO: 256211 - RNA, 22 nt, Human
ucagagcaacuuuuccugcuuu

SEQ ID NO: 256212 - RNA, 22 nt, Human
guauacaauacacaaugcucug

SEQ ID NO: 256213 - RNA, 22 nt, Human
guacagggccccucagcagggc

SEQ ID NO: 256214 - RNA, 21 nt, Human
ucugagagcaacugcccuuua

SEQ ID NO: 256215 - RNA, 22 nt, Human
guccuuauuucacuuaaacgua

SEQ ID NO: 256216 - RNA, 22 nt, Human
gggaggaaaugugcagcgaauu

SEQ ID NO: 256217 - RNA, 22 nt, Human
agauucauuauuaaugugaucu

SEQ ID NO: 256218 - RNA, 22 nt, Human
uggugggacaucugaggagagg

SEQ ID NO: 256219 - RNA, 22 nt, Human
auggaacagacagcugagacaa

SEQ ID NO: 256220 - RNA, 22 nt, Human
ucuguaguagguuguaguucuu

SEQ ID NO: 256221 - RNA, 22 nt, Human
uugauucagaaaaagauggaga

SEQ ID NO: 256222 - RNA, 22 nt, Human
caguaucuugcuuauagacaca

SEQ ID NO: 256223 - RNA, 22 nt, Human
uuuauucauuguuucgucgcag

SEQ ID NO: 256224 - RNA, 22 nt, Human
gcagggcuggguccugucucau

SEQ ID NO: 256225 - RNA, 22 nt, Human
gagagcugggcuuugggugaag

SEQ ID NO: 256226 - RNA, 22 nt, Human
gcaggcugaugacuggaguugg

SEQ ID NO: 256227 - RNA, 22 nt, Human
caaggcaggucugaggagguug

SEQ ID NO: 256228 - RNA, 22 nt, Human
uccaggacagaguagaagcagc

SEQ ID NO: 256229 - RNA, 20 nt, Human
agauggcugucauuucuguc

SEQ ID NO: 256230 - RNA, 22 nt, Human
uagcauuccuuguggcuucuga

SEQ ID NO: 256231 - RNA, 22 nt, Human
auguuucaccagcaaauuaccu

SEQ ID NO: 256232 - RNA, 22 nt, Human
aagccggcugggccgaggcugc

SEQ ID NO: 256233 - RNA, 22 nt, Human
aucagagcugcauuuuagagcc

SEQ ID NO: 256234 - RNA, 22 nt, Human
acugaaggcuuaacucuuucau

SEQ ID NO: 256235 - RNA, 22 nt, Human
aguuccugaacuucuuaaugac

SEQ ID NO: 256236 - RNA, 22 nt, Human
aggcucugcagaccccagcugu

SEQ ID NO: 256237 - RNA, 22 nt, Human
cugaagcaaaugaaacagcucu

SEQ ID NO: 256238 - RNA, 22 nt, Human
uauggaaagggaguuuaauuug

SEQ ID NO: 256239 - RNA, 22 nt, Human
aggccacacaacucuuagagau

SEQ ID NO: 256240 - RNA, 22 nt, Human
uacauaauugucuuuguccuca

SEQ ID NO: 256241 - RNA, 22 nt, Human
ggcaagcucaggccucaggugu

SEQ ID NO: 256242 - RNA, 22 nt, Human
ugucugguggguugacaggcag

SEQ ID NO: 256243 - RNA, 22 nt, Human
auacuguuggcuuuggugaugg

SEQ ID NO: 256244 - RNA, 22 nt, Human
aggcagcugcccucuccuuccu

SEQ ID NO: 256245 - RNA, 22 nt, Human
aggaaagaaguacauucucaug

SEQ ID NO: 256246 - RNA, 22 nt, Human
uugugaauagugcugcaauaaa

SEQ ID NO: 256247 - RNA, 22 nt, Human
ccuucugcucccuggccagggc

SEQ ID NO: 256248 - RNA, 22 nt, Human
gccaggcagauaugugagcuua

SEQ ID NO: 256249 - RNA, 22 nt, Human
uguccagugauucucaugagcc

SEQ ID NO: 256250 - RNA, 22 nt, Human
cucugggcuuccuuuguggguu

SEQ ID NO: 256251 - RNA, 22 nt, Human
cugcggcucugcgggcagcugg

SEQ ID NO: 256252 - RNA, 19 nt, Human
cacuucaauccuuuaucaa

SEQ ID NO: 256253 - RNA, 22 nt, Human
gacuuuaucuuguccuuccugc

SEQ ID NO: 256254 - RNA, 22 nt, Human
gacagguguguguauauuaggg

SEQ ID NO: 256255 - RNA, 20 nt, Human
aucaaaggcugauucagucc

SEQ ID NO: 256256 - RNA, 22 nt, Human
aaagagcaagggcuuugaggcu

SEQ ID NO: 256257 - RNA, 22 nt, Human
acaguacaccacuguguacagu

SEQ ID NO: 256258 - RNA, 22 nt, Human
acugucaaaagagauuauauua

SEQ ID NO: 256259 - RNA, 22 nt, Human
ucuuuaaugugauuguaauuau

SEQ ID NO: 256260 - RNA, 22 nt, Human
cuguagguuugcucugaccugg

SEQ ID NO: 256261 - RNA, 22 nt, Human
cccacagguccccaugaacucg

SEQ ID NO: 256262 - RNA, 22 nt, Human
cagggacccgcacagguagcau

SEQ ID NO: 256263 - RNA, 22 nt, Human
gugcccugaugcaauugucuca

SEQ ID NO: 256264 - RNA, 22 nt, Human
aucagcaagauguaauuucuau

SEQ ID NO: 256265 - RNA, 22 nt, Human
gggcugagccauuugaaccuug

SEQ ID NO: 256266 - RNA, 22 nt, Human
gacacuccagcuuuuggcucaa

SEQ ID NO: 256267 - RNA, 22 nt, Human
aaagguuuucaucacagcaaga

SEQ ID NO: 256268 - RNA, 22 nt, Human
uucuguauuuaguuugaggaca

SEQ ID NO: 256269 - RNA, 22 nt, Human
agucuucuuucauuuacucagu

SEQ ID NO: 256270 - RNA, 22 nt, Human
auugauucucauaggaccaucu

SEQ ID NO: 256271 - RNA, 22 nt, Human
uucuuacaaguauuccaggucc

SEQ ID NO: 256272 - RNA, 18 nt, Human
ugcccagaaaagcaggga

SEQ ID NO: 256273 - RNA, 22 nt, Human
ucucagugaagaguauaacaaa

SEQ ID NO: 256274 - RNA, 22 nt, Human
ggcucuugggagcucagaguug

SEQ ID NO: 256275 - RNA, 22 nt, Human
guccuugcuugagacaggcagu

SEQ ID NO: 256276 - RNA, 22 nt, Human
uucugacaauucaguaacagca

SEQ ID NO: 256277 - RNA, 22 nt, Human
cuguauaaacauauuuucaagu

SEQ ID NO: 256278 - RNA, 22 nt, Human
gagcuccagaguuagacacccg

SEQ ID NO: 256279 - RNA, 21 nt, Human
ccagagagagggaaguggguu

SEQ ID NO: 256280 - RNA, 22 nt, Human
gaugcuggccuggccaucuggg

SEQ ID NO: 256281 - RNA, 22 nt, Human
aaacuguaagagaauaaacuac

SEQ ID NO: 256282 - RNA, 22 nt, Human
guuuuauaguucgggaccuguu

SEQ ID NO: 256283 - RNA, 22 nt, Human
aauggcaagcugaacucagaag

SEQ ID NO: 256284 - RNA, 20 nt, Human
ugagccagucaagcuacauu

SEQ ID NO: 256285 - RNA, 22 nt, Human
gucugcccuuggcucagccaua

SEQ ID NO: 256286 - RNA, 22 nt, Human
uggcacagacagaucaggaguc

SEQ ID NO: 256287 - RNA, 22 nt, Human
gcuuaguccccaagagagacca

SEQ ID NO: 256288 - RNA, 22 nt, Human
acaguauuugcgauacugauga

SEQ ID NO: 256289 - RNA, 22 nt, Human
ccuggagaggcgcugcagagga

SEQ ID NO: 256290 - RNA, 22 nt, Human
gaugaugggauccagcaaugua

SEQ ID NO: 256291 - RNA, 22 nt, Human
ucugaacagaaaagaugcacaa

SEQ ID NO: 256292 - RNA, 22 nt, Human
gaagaggcaauugaauaagcua

SEQ ID NO: 256293 - RNA, 21 nt, Human
acuuuaauauacaugaggagg

SEQ ID NO: 256294 - RNA, 22 nt, Human
cauucacaaaaccacaugccau

SEQ ID NO: 256295 - RNA, 22 nt, Human
ggggcucaguucggacagccug

SEQ ID NO: 256296 - RNA, 22 nt, Human
ugcauggacucaucagacaaga

SEQ ID NO: 256297 - RNA, 23 nt, Human
aggcagguuugggcucuucuugu

SEQ ID NO: 256298 - RNA, 22 nt, Human
gaagccaggggccugacaggca

SEQ ID NO: 256299 - RNA, 22 nt, Human
agcuccaggauaagacaggugc

SEQ ID NO: 256300 - RNA, 22 nt, Human
cagaagcugcagugaucuggga

SEQ ID NO: 256301 - RNA, 22 nt, Human
aaaugcacagaggccagagagg

SEQ ID NO: 256302 - RNA, 22 nt, Human
auuuguuucagggccuugguau

SEQ ID NO: 256303 - RNA, 22 nt, Human
aaaugcugaguguuuagagauc

SEQ ID NO: 256304 - RNA, 22 nt, Human
ugaggaugagaugagauaacac

SEQ ID NO: 256305 - RNA, 22 nt, Human
ugucugugacagaccuuugcua

SEQ ID NO: 256306 - RNA, 22 nt, Human
gggcuucuagaccagcagugag

SEQ ID NO: 256307 - RNA, 22 nt, Human
ucucuggguucucacucagcac

SEQ ID NO: 256308 - RNA, 22 nt, Human
caacuaauauagggcaugagaa

SEQ ID NO: 256309 - RNA, 22 nt, Human
cugggagagacacuucugauua

SEQ ID NO: 256310 - RNA, 22 nt, Human
aaacaucaauugcaucucccaa

SEQ ID NO: 256311 - RNA, 22 nt, Human
caugauaacuucauuacacaau

SEQ ID NO: 256312 - RNA, 22 nt, Human
gguggggcuaggaccucaggau

SEQ ID NO: 256313 - RNA, 22 nt, Human
ggccagggccaaggcuuuccca

SEQ ID NO: 256314 - RNA, 22 nt, Human
uccugggauuaagguggugauu

SEQ ID NO: 256315 - RNA, 22 nt, Human
acauuuccuaacguauacacug

SEQ ID NO: 256316 - RNA, 22 nt, Human
acucuucauucaaguaugcaaa

SEQ ID NO: 256317 - RNA, 22 nt, Human
aagacaucagugaugacauuug

SEQ ID NO: 256318 - RNA, 22 nt, Human
uucuuuuaauguucugaaguuu

SEQ ID NO: 256319 - RNA, 22 nt, Human
agcggcugcuccgcaggcuggc

SEQ ID NO: 256320 - RNA, 19 nt, Human
aggcagcaggccagggaug

SEQ ID NO: 256321 - RNA, 22 nt, Human
aaaugauggaaaugaggcugaa

SEQ ID NO: 256322 - RNA, 22 nt, Human
ggccuugcagccacagaacaca

SEQ ID NO: 256323 - RNA, 22 nt, Human
uacacaucaaccuggcuuuggc

SEQ ID NO: 256324 - RNA, 22 nt, Human
uggagaugggaaaaaggaggua

SEQ ID NO: 256325 - RNA, 22 nt, Human
cuguagcaaguuauucaauaaa

SEQ ID NO: 256326 - RNA, 22 nt, Human
acaguuuacuggccuugccguu

SEQ ID NO: 256327 - RNA, 22 nt, Human
gacuggccuggagaugcagcug

SEQ ID NO: 256328 - RNA, 22 nt, Human
uguacaguggaaaauggauucg

SEQ ID NO: 256329 - RNA, 18 nt, Human
gucuuuggaguggaggua

SEQ ID NO: 256330 - RNA, 22 nt, Human
aaucuucuuucuuaacaguaca

SEQ ID NO: 256331 - RNA, 23 nt, Human
uucuggauguucuagucugagag

SEQ ID NO: 256332 - RNA, 22 nt, Human
agcugguugucauucagaauug

SEQ ID NO: 256333 - RNA, 22 nt, Human
uuacauguuuacggauacacuu

SEQ ID NO: 256334 - RNA, 19 nt, Human
aagcugagggcuguccacc

SEQ ID NO: 256335 - RNA, 22 nt, Human
acugcagguggauggcacuuua

SEQ ID NO: 256336 - RNA, 22 nt, Human
cagcuacagucugauugguuca

SEQ ID NO: 256337 - RNA, 23 nt, Human
ccagggaaggccaucuucaacug

SEQ ID NO: 256338 - RNA, 22 nt, Human
gaggcugggaaguccaauauca

SEQ ID NO: 256339 - RNA, 22 nt, Human
uucuagaaggcaggcugggcca

SEQ ID NO: 256340 - RNA, 22 nt, Human
caggcucagcucuggccagugc

SEQ ID NO: 256341 - RNA, 22 nt, Human
cuguccugaguucuuggagguc

SEQ ID NO: 256342 - RNA, 22 nt, Human
uaacacugguauuucauuuagu

SEQ ID NO: 256343 - RNA, 19 nt, Human
uggcugagcuggacugagg

SEQ ID NO: 256344 - RNA, 22 nt, Human
agcccaaaccugcgagcagagc

SEQ ID NO: 256345 - RNA, 22 nt, Human
uugcugauucuguauuuaaggu

SEQ ID NO: 256346 - RNA, 22 nt, Human
cucagcacugacccaggagaug

SEQ ID NO: 256347 - RNA, 22 nt, Human
ugaucuagguuggcuucaacug

SEQ ID NO: 256348 - RNA, 22 nt, Human
ugaggcuuagauuugguaacuc

SEQ ID NO: 256349 - RNA, 22 nt, Human
gcuggccuccugcuagauggaa

SEQ ID NO: 256350 - RNA, 22 nt, Human
agcaagcagugaaguugaaugu

SEQ ID NO: 256351 - RNA, 22 nt, Human
uaaaggcuucggagugcacacu

SEQ ID NO: 256352 - RNA, 22 nt, Human
ugcccugccaagaccaaguggu

SEQ ID NO: 256353 - RNA, 22 nt, Human
acagaguauuggaaaggcagug

SEQ ID NO: 256354 - RNA, 22 nt, Human
caggcuggagugcagugucgcc

SEQ ID NO: 256355 - RNA, 22 nt, Human
ugcagggccgcuggaggucaug

SEQ ID NO: 256356 - RNA, 22 nt, Human
cacagacagugucccuuuguug

SEQ ID NO: 256357 - RNA, 22 nt, Human
cauuguuaccaucuuuuaccua

SEQ ID NO: 256358 - RNA, 22 nt, Human
gguggcacacuggggagcucgg

SEQ ID NO: 256359 - RNA, 22 nt, Human
cuucuuuccuuccuccaguggc

SEQ ID NO: 256360 - RNA, 22 nt, Human
aauagcuuauugacagugaauu

SEQ ID NO: 256361 - RNA, 22 nt, Human
caagagcuagacuuugucagga

SEQ ID NO: 256362 - RNA, 22 nt, Human
ggcuggguacagggcagugugc

SEQ ID NO: 256363 - RNA, 22 nt, Human
guaacacuagcucugucacuuu

SEQ ID NO: 256364 - RNA, 20 nt, Human
ucagagucaucaaagauggu

SEQ ID NO: 256365 - RNA, 22 nt, Human
ugaaagauugugauucaauaug

SEQ ID NO: 256366 - RNA, 22 nt, Human
caguuauaggagccauuguaua

SEQ ID NO: 256367 - RNA, 22 nt, Human
aagugcauaguaauggagucaa

SEQ ID NO: 256368 - RNA, 22 nt, Human
cauuuaaucuggcucaugagca

SEQ ID NO: 256369 - RNA, 22 nt, Human
aucaaugcucuguacccagaau

SEQ ID NO: 256370 - RNA, 22 nt, Human
auaaagacaugcuuacuugccc

SEQ ID NO: 256371 - RNA, 22 nt, Human
cagcccuugaugauaauuuauc

SEQ ID NO: 256372 - RNA, 22 nt, Human
gcagagcagcaaauggaaagga

SEQ ID NO: 256373 - RNA, 22 nt, Human
auugaaaauaaggccagaaaca

SEQ ID NO: 256374 - RNA, 22 nt, Human
acacagagggcagaagauacau

SEQ ID NO: 256375 - RNA, 22 nt, Human
auuguucauuguacaccuagua

SEQ ID NO: 256376 - RNA, 22 nt, Human
agccuugaucuugguaacagga

SEQ ID NO: 256377 - RNA, 22 nt, Human
ccagugccuauccuucuccugu

SEQ ID NO: 256378 - RNA, 22 nt, Human
acuuggccuuauuuccacagaa

SEQ ID NO: 256379 - RNA, 22 nt, Human
uacaggugcucuacagacagga

SEQ ID NO: 256380 - RNA, 22 nt, Human
acagcuggaggggcugcagagg

SEQ ID NO: 256381 - RNA, 22 nt, Human
aagugcaauuugaaauucugca

SEQ ID NO: 256382 - RNA, 22 nt, Human
uacaaacuguccagcccagagg

SEQ ID NO: 256383 - RNA, 22 nt, Human
uacagaaaaacaucuggagccg

SEQ ID NO: 256384 - RNA, 22 nt, Human
caggcugcagcagcaguggccc

SEQ ID NO: 256385 - RNA, 22 nt, Human
cacagaacaccaaagaaccuuc

SEQ ID NO: 256386 - RNA, 22 nt, Human
uaaagccacgcuggaaaucagg

SEQ ID NO: 256387 - RNA, 22 nt, Human
cacaggcugcccgcagcuggga

SEQ ID NO: 256388 - RNA, 22 nt, Human
caccuguuguuuauucaucucu

SEQ ID NO: 256389 - RNA, 22 nt, Human
gagcugcauagcugggauccuc

SEQ ID NO: 256390 - RNA, 22 nt, Human
acugugcacccuggacaguguc

SEQ ID NO: 256391 - RNA, 22 nt, Human
ucucagagccuaacuaaccuaa

SEQ ID NO: 256392 - RNA, 22 nt, Human
gcacugugacccagagcaggug

SEQ ID NO: 256393 - RNA, 17 nt, Human
ggcucugggugucacau

SEQ ID NO: 256394 - RNA, 22 nt, Human
gccugcagggcccuuguggguc

SEQ ID NO: 256395 - RNA, 22 nt, Human
accaggagaggcacuugcaaug

SEQ ID NO: 256396 - RNA, 22 nt, Human
guuacaaaugccaaagcugaga

SEQ ID NO: 256397 - RNA, 22 nt, Human
ucaaaucuuuaacaugugcaaa

SEQ ID NO: 256398 - RNA, 22 nt, Human
agaaccauuuugacagauauac

SEQ ID NO: 256399 - RNA, 22 nt, Human
guccagaguagucgaguauucu

SEQ ID NO: 256400 - RNA, 22 nt, Human
caagacaugcaauugccacuuu

SEQ ID NO: 256401 - RNA, 22 nt, Human
caggcugccgugaagcaggccu

SEQ ID NO: 256402 - RNA, 22 nt, Human
ucaugcaguuugaaguucaggg

SEQ ID NO: 256403 - RNA, 22 nt, Human
cagcuuccaucuccacugcccu

SEQ ID NO: 256404 - RNA, 22 nt, Human
agccagagaguguuggagaugu

SEQ ID NO: 256405 - RNA, 22 nt, Human
guggauggagcagugacccagg

SEQ ID NO: 256406 - RNA, 22 nt, Human
cugaggcacagugaacuucucc

SEQ ID NO: 256407 - RNA, 22 nt, Human
aauaaugucugcuauuuuaaaa

SEQ ID NO: 256408 - RNA, 22 nt, Human
aggaggcugguucaggccauau

SEQ ID NO: 256409 - RNA, 18 nt, Human
ucuucaucuccugagcug

SEQ ID NO: 256410 - RNA, 22 nt, Human
uagaaaauggccaagcaggacu

SEQ ID NO: 256411 - RNA, 22 nt, Human
uacaggagcauggggaagggau

SEQ ID NO: 256412 - RNA, 22 nt, Human
guuaaugucuuccuauucuaca

SEQ ID NO: 256413 - RNA, 22 nt, Human
acacuuuagauauucccuucug

SEQ ID NO: 256414 - RNA, 22 nt, Human
guaagcaucugucucuucugca

SEQ ID NO: 256415 - RNA, 22 nt, Human
ugugccugagucucggcccacc

SEQ ID NO: 256416 - RNA, 22 nt, Human
ugaauaugcuuugcaauccuaa

SEQ ID NO: 256417 - RNA, 22 nt, Human
uucaguuugaauucuguagaac

SEQ ID NO: 256418 - RNA, 22 nt, Human
aggucugccucacucacuucug

SEQ ID NO: 256419 - RNA, 22 nt, Human
gggcugcaucagcaggacccgg

SEQ ID NO: 256420 - RNA, 20 nt, Human
ucucaggccccaguuuucuu

SEQ ID NO: 256421 - RNA, 22 nt, Human
auuuauuccuuuauggcuggag

SEQ ID NO: 256422 - RNA, 22 nt, Human
auaugcauguacgugugcacaa

SEQ ID NO: 256423 - RNA, 22 nt, Human
augccaggccccacgcugggca

SEQ ID NO: 256424 - RNA, 22 nt, Human
ucugaaagggcuaaauaauuug

SEQ ID NO: 256425 - RNA, 22 nt, Human
uucauugaaggagggacuugcu

SEQ ID NO: 256426 - RNA, 22 nt, Human
gugcauuugacgaauacucacu

SEQ ID NO: 256427 - RNA, 22 nt, Human
ggagcugaaccccaucgugcug

SEQ ID NO: 256428 - RNA, 22 nt, Human
gguggcagugcuugcgggucua

SEQ ID NO: 256429 - RNA, 22 nt, Human
ccagagaguaaacauuuuccgg

SEQ ID NO: 256430 - RNA, 22 nt, Human
caggcuugaagcuucagaguau

SEQ ID NO: 256431 - RNA, 22 nt, Human
uccaggaccaaagacacaugua

SEQ ID NO: 256432 - RNA, 22 nt, Human
cacaccagcauggucucagugu

SEQ ID NO: 256433 - RNA, 22 nt, Human
aggagccaaauuuuagacucug

SEQ ID NO: 256434 - RNA, 22 nt, Human
agugucaauucucaaaucucgg

SEQ ID NO: 256435 - RNA, 22 nt, Human
uucaguguacagugaagggauu

SEQ ID NO: 256436 - RNA, 21 nt, Human
gggcuuuuuauuuagcacugu

SEQ ID NO: 256437 - RNA, 22 nt, Human
acuuccaaauaccaucacauug

SEQ ID NO: 256438 - RNA, 22 nt, Human
cucagcaccccgacaggacauu

SEQ ID NO: 256439 - RNA, 22 nt, Human
uacuguuuuugccucuuuagaa

SEQ ID NO: 256440 - RNA, 21 nt, Human
ucuccaguauccuucucugag

SEQ ID NO: 256441 - RNA, 22 nt, Human
cuguucuggagacacugaugaa

SEQ ID NO: 256442 - RNA, 22 nt, Human
aacaaugccaacagcaugcugg

SEQ ID NO: 256443 - RNA, 22 nt, Human
caauaacugcugaggagaagca

SEQ ID NO: 256444 - RNA, 22 nt, Human
gaggagcuucagaggaaucuua

SEQ ID NO: 256445 - RNA, 22 nt, Human
uagggcagccacccaggcugcu

SEQ ID NO: 256446 - RNA, 22 nt, Human
caggcucacuuucucagucaca

SEQ ID NO: 256447 - RNA, 22 nt, Human
agaccaggaaggccuacagaua

SEQ ID NO: 256448 - RNA, 22 nt, Human
agcagggcacuggaaggcacug

SEQ ID NO: 256449 - RNA, 22 nt, Human
uggcccugcagaacuagccugg

SEQ ID NO: 256450 - RNA, 22 nt, Human
aguguguuuggagcgagggagg

SEQ ID NO: 256451 - RNA, 22 nt, Human
cuuuaguucuagaaagugaaac

SEQ ID NO: 256452 - RNA, 22 nt, Human
gagaagggauauggcuucuuga

SEQ ID NO: 256453 - RNA, 22 nt, Human
gucccaggcagagucaggaggg

SEQ ID NO: 256454 - RNA, 22 nt, Human
acagcugugaaaauccacagga

SEQ ID NO: 256455 - RNA, 22 nt, Human
ucccugagcuucaucaggcuuu

SEQ ID NO: 256456 - RNA, 22 nt, Human
ggcucugggucuguggggagcg

SEQ ID NO: 256457 - RNA, 22 nt, Human
uggcagcaauuugugauguuga

SEQ ID NO: 256458 - RNA, 22 nt, Human
uuuaccacaauuuuaaacaaug

SEQ ID NO: 256459 - RNA, 22 nt, Human
agauggggcugaaaguuccaau

SEQ ID NO: 256460 - RNA, 22 nt, Human
uuuuagacuuguauguaaagcc

SEQ ID NO: 256461 - RNA, 22 nt, Human
aagcugcaugaaguugaguaga

SEQ ID NO: 256462 - RNA, 22 nt, Human
ucccagaaucuccagugcuaca

SEQ ID NO: 256463 - RNA, 22 nt, Human
uacauucauaugugugcauaca

SEQ ID NO: 256464 - RNA, 22 nt, Human
gaucucuggguccuguuggccu

SEQ ID NO: 256465 - RNA, 22 nt, Human
caaauuguguuugcuuuucucu

SEQ ID NO: 256466 - RNA, 22 nt, Human
uagaaggcuuugagagauacuu

SEQ ID NO: 256467 - RNA, 22 nt, Human
cugccaggugccuuugugcagu

SEQ ID NO: 256468 - RNA, 22 nt, Human
ccaggccugugcaaggagggag

SEQ ID NO: 256469 - RNA, 22 nt, Human
ugguccagaagauauucaacca

SEQ ID NO: 256470 - RNA, 22 nt, Human
aguggcaguuugggagcuacag

SEQ ID NO: 256471 - RNA, 22 nt, Human
uucccuuccucacucuacuugu

SEQ ID NO: 256472 - RNA, 22 nt, Human
uuacacagaugguuaguagagg

SEQ ID NO: 256473 - RNA, 22 nt, Human
aacaguuuaugauaaauucuua

SEQ ID NO: 256474 - RNA, 22 nt, Human
aggggcucugagugggccagga

SEQ ID NO: 256475 - RNA, 22 nt, Human
uucuacacuuuucauuagcuag

SEQ ID NO: 256476 - RNA, 22 nt, Human
ucaaaauuucagcacuagcccu

SEQ ID NO: 256477 - RNA, 22 nt, Human
uugauucaaaggggacaagugg

SEQ ID NO: 256478 - RNA, 20 nt, Human
aucugggcaucaauuuugug

SEQ ID NO: 256479 - RNA, 22 nt, Human
ucacuagcauuguugaaggacu

SEQ ID NO: 256480 - RNA, 22 nt, Human
aguuuacauaaaaaggcagagg

SEQ ID NO: 256481 - RNA, 22 nt, Human
ucaggaaauggcuucaugguuu

SEQ ID NO: 256482 - RNA, 22 nt, Human
ggcacagcaagaagggaaauga

SEQ ID NO: 256483 - RNA, 22 nt, Human
uguuggaauaagugcuugaagg

SEQ ID NO: 256484 - RNA, 22 nt, Human
cagggcucuucaucacacagua

SEQ ID NO: 256485 - RNA, 22 nt, Human
ggucacaugguugagcuugauc

SEQ ID NO: 256486 - RNA, 22 nt, Human
ucaggccugagaaaaauccuuu

SEQ ID NO: 256487 - RNA, 22 nt, Human
ggucaguguauguauugauaag

SEQ ID NO: 256488 - RNA, 22 nt, Human
aauaauauuccucugugugcgu

SEQ ID NO: 256489 - RNA, 22 nt, Human
caggaggagcauuagcgucuca

SEQ ID NO: 256490 - RNA, 22 nt, Human
ucaugcagaggaaggcuaguuu

SEQ ID NO: 256491 - RNA, 22 nt, Human
gcugagcugggacaguccuggg

SEQ ID NO: 256492 - RNA, 22 nt, Human
caugccuguauuucugaucuau

SEQ ID NO: 256493 - RNA, 22 nt, Human
acucuggcagcagaaccagugu

SEQ ID NO: 256494 - RNA, 22 nt, Human
auucaaguccagcuucucuaca

SEQ ID NO: 256495 - RNA, 22 nt, Human
cuggcaguauuaagagaaguga

SEQ ID NO: 256496 - RNA, 22 nt, Human
aggcaggugagucaaaacagac

SEQ ID NO: 256497 - RNA, 21 nt, Human
uauuugcugccaucuuugagg

SEQ ID NO: 256498 - RNA, 22 nt, Human
uuaaaauuauggcccauuugga

SEQ ID NO: 256499 - RNA, 20 nt, Human
agcuucauuauagcccacag

SEQ ID NO: 256500 - RNA, 22 nt, Human
gucuagaaaucauguacuguga

SEQ ID NO: 256501 - RNA, 22 nt, Human
guacuaagucaggagaagaauu

SEQ ID NO: 256502 - RNA, 22 nt, Human
gggugagagucaggcagagauu

SEQ ID NO: 256503 - RNA, 22 nt, Human
cuggguaaguuccuaaggcuca

SEQ ID NO: 256504 - RNA, 22 nt, Human
ugcauuuaguuuuaauaaagga

SEQ ID NO: 256505 - RNA, 22 nt, Human
uugacuucagccuguacuugua

SEQ ID NO: 256506 - RNA, 22 nt, Human
ccuccugggccuugcucuguga

SEQ ID NO: 256507 - RNA, 22 nt, Human
gacaagacugguuuauuuaagg

SEQ ID NO: 256508 - RNA, 20 nt, Human
acaguggguggggagcacug

SEQ ID NO: 256509 - RNA, 22 nt, Human
uggaagaauagaagaugguuga

SEQ ID NO: 256510 - RNA, 22 nt, Human
accugaggccuccccagcagac

SEQ ID NO: 256511 - RNA, 22 nt, Human
agcuccagccucuucuggaggu

SEQ ID NO: 256512 - RNA, 22 nt, Human
aagugguuuuaagagguuccuu

SEQ ID NO: 256513 - RNA, 22 nt, Human
ggcaggugcgcauguugcauua

SEQ ID NO: 256514 - RNA, 22 nt, Human
uucuagaacaggcaaaaccaau

SEQ ID NO: 256515 - RNA, 22 nt, Human
ucaaucaaugguuuccaaauuu

SEQ ID NO: 256516 - RNA, 22 nt, Human
uuauccuggauuauauauguga

SEQ ID NO: 256517 - RNA, 22 nt, Human
cagcugaagcccaggcagaacc

SEQ ID NO: 256518 - RNA, 22 nt, Human
gcucccaggcauggagguaauu

SEQ ID NO: 256519 - RNA, 22 nt, Human
gagggcguucagucagugucuc

SEQ ID NO: 256520 - RNA, 22 nt, Human
cagagcagaagcgguccucaca

SEQ ID NO: 256521 - RNA, 22 nt, Human
ucuguuuaugcauauuuaaaac

SEQ ID NO: 256522 - RNA, 22 nt, Human
ucaggccugugcuggaggagau

SEQ ID NO: 256523 - RNA, 22 nt, Human
gcaggcaggcuuccuugaacug

SEQ ID NO: 256524 - RNA, 22 nt, Human
uuauugaguuuacagcuuuaga

SEQ ID NO: 256525 - RNA, 22 nt, Human
caagcugggucccaacaauuac

SEQ ID NO: 256526 - RNA, 22 nt, Human
ggccucugaggacagccuuggc

SEQ ID NO: 256527 - RNA, 21 nt, Human
ucacaggcucagggagagagu

SEQ ID NO: 256528 - RNA, 22 nt, Human
guuagacaugagugugcuuaca

SEQ ID NO: 256529 - RNA, 22 nt, Human
ccuccaggauaagucagggccu

SEQ ID NO: 256530 - RNA, 22 nt, Human
agaagagaaauagugccacugu

SEQ ID NO: 256531 - RNA, 22 nt, Human
guuacucuuccccggggucugg

SEQ ID NO: 256532 - RNA, 17 nt, Human
uugggagagaaagguau

SEQ ID NO: 256533 - RNA, 22 nt, Human
guuuguuagaagagcagaaucu

SEQ ID NO: 256534 - RNA, 22 nt, Human
gcagcucaagagaggugcuaug

SEQ ID NO: 256535 - RNA, 22 nt, Human
caaaugcauaguuuauaagaag

SEQ ID NO: 256536 - RNA, 22 nt, Human
guaugaaaauuguaaaguucuu

SEQ ID NO: 256537 - RNA, 22 nt, Human
aaggugucaggcuugggaaagu

SEQ ID NO: 256538 - RNA, 22 nt, Human
aauaauagcagaguuuacaauc

SEQ ID NO: 256539 - RNA, 22 nt, Human
aggcugggaaauguauuccagc

SEQ ID NO: 256540 - RNA, 22 nt, Human
cuuggagcaacacaugacaucu

SEQ ID NO: 256541 - RNA, 22 nt, Human
accaggacauuuuagucaucuu

SEQ ID NO: 256542 - RNA, 22 nt, Human
uaguuacaaaccaacaggcagc

SEQ ID NO: 256543 - RNA, 22 nt, Human
uguaaagguaggugcaaaauga

SEQ ID NO: 256544 - RNA, 22 nt, Human
guauuuauaggggaaugagagu

SEQ ID NO: 256545 - RNA, 22 nt, Human
ugccagagaagacccagucacu

SEQ ID NO: 256546 - RNA, 20 nt, Human
aaccaacagaaucaugucuc

SEQ ID NO: 256547 - RNA, 22 nt, Human
gcugcugguccucagagcucau

SEQ ID NO: 256548 - RNA, 22 nt, Human
ggccuuccaucugccucuguuu

SEQ ID NO: 256549 - RNA, 22 nt, Human
gaggagagagggacugucugca

SEQ ID NO: 256550 - RNA, 22 nt, Human
aaggaaaugagguugauggaug

SEQ ID NO: 256551 - RNA, 22 nt, Human
uccaggucccuggggagauuuu

SEQ ID NO: 256552 - RNA, 22 nt, Human
aaaaccuucuagacuuuauauu

SEQ ID NO: 256553 - RNA, 22 nt, Human
cucucagauggagugugaaugg

SEQ ID NO: 256554 - RNA, 20 nt, Human
caaaagcaaugaaguuauga

SEQ ID NO: 256555 - RNA, 22 nt, Human
cagcacuuuagcggaggcauca

SEQ ID NO: 256556 - RNA, 22 nt, Human
ggacagguucagcaguuuauaa

SEQ ID NO: 256557 - RNA, 22 nt, Human
guggcugggcuccgagcggcuu

SEQ ID NO: 256558 - RNA, 23 nt, Human
guaacuggggaauuugagcuaug

SEQ ID NO: 256559 - RNA, 23 nt, Human
cuguggagcccuuuguugggaga

SEQ ID NO: 256560 - RNA, 22 nt, Human
uggggugggcaugcgcuguccu

SEQ ID NO: 256561 - RNA, 22 nt, Human
ccacccaugugacuaccucaug

SEQ ID NO: 256562 - RNA, 22 nt, Human
uuucacauaucaacucuauccu

SEQ ID NO: 256563 - RNA, 22 nt, Human
uaacaucuuaacuggauacuuc

SEQ ID NO: 256564 - RNA, 22 nt, Human
uuugacucagcaaauucacagg

SEQ ID NO: 256565 - RNA, 22 nt, Human
gggagcugaauggcaauggaga

SEQ ID NO: 256566 - RNA, 22 nt, Human
agcaugcaguaaguacccugug

SEQ ID NO: 256567 - RNA, 20 nt, Human
uuguuuuaaauccuggauga

SEQ ID NO: 256568 - RNA, 22 nt, Human
ggccucucauguccugggcuuc

SEQ ID NO: 256569 - RNA, 22 nt, Human
cagcuucaccagggccaugguu

SEQ ID NO: 256570 - RNA, 22 nt, Human
ucugcagguguuggaaggguca

SEQ ID NO: 256571 - RNA, 22 nt, Human
acucuaaauagauaaccaugca

SEQ ID NO: 256572 - RNA, 22 nt, Human
aggcugaggcagguggaucauu

SEQ ID NO: 256573 - RNA, 22 nt, Human
guauuaggaggaacacaggccu

SEQ ID NO: 256574 - RNA, 22 nt, Human
acucauugaaacuuaagaucua

SEQ ID NO: 256575 - RNA, 22 nt, Human
uuuaaagaaauuccucaucuuu

SEQ ID NO: 256576 - RNA, 22 nt, Human
cugcagggcuuaccuugcucug

SEQ ID NO: 256577 - RNA, 22 nt, Human
gaaauagaucucugggaugcaa

SEQ ID NO: 256578 - RNA, 22 nt, Human
uuagucuucucauaguaaaacu

SEQ ID NO: 256579 - RNA, 22 nt, Human
uugggaaguuuaaugacagacu

SEQ ID NO: 256580 - RNA, 20 nt, Human
auguuaaauagcauuuagag

SEQ ID NO: 256581 - RNA, 22 nt, Human
ugccagcuuguggucagaggcu

SEQ ID NO: 256582 - RNA, 22 nt, Human
aagggcuggccacauucugggu

SEQ ID NO: 256583 - RNA, 22 nt, Human
uugauuacuauguguugaaagc

SEQ ID NO: 256584 - RNA, 22 nt, Human
uucuguaucuuucuucaagauu

SEQ ID NO: 256585 - RNA, 22 nt, Human
agaagccaaaggggccagauau

SEQ ID NO: 256586 - RNA, 22 nt, Human
uuccaucuuucagcuuuguugg

SEQ ID NO: 256587 - RNA, 22 nt, Human
cuggucugcaaggccauauaga

SEQ ID NO: 256588 - RNA, 22 nt, Human
uggcugagaaugggaugaugcc

SEQ ID NO: 256589 - RNA, 22 nt, Human
cacaaaguguuagaugccacuc

SEQ ID NO: 256590 - RNA, 22 nt, Human
guauaugagaaccauggaggug

SEQ ID NO: 256591 - RNA, 22 nt, Human
cagcugcauuaauuuuagugaa

SEQ ID NO: 256592 - RNA, 22 nt, Human
aauucaaagccgcuugggaauc

SEQ ID NO: 256593 - RNA, 22 nt, Human
ucugucugagugguguuagagu

SEQ ID NO: 256594 - RNA, 22 nt, Human
agccuaggucugggucuagcag

SEQ ID NO: 256595 - RNA, 22 nt, Human
auauaaagagcuuaguauagug

SEQ ID NO: 256596 - RNA, 22 nt, Human
ucucuguaucagcaccugcugg

SEQ ID NO: 256597 - RNA, 22 nt, Human
uacccagcuucaagucaggacu

SEQ ID NO: 256598 - RNA, 22 nt, Human
ccucuccuugcacccgucccgc

SEQ ID NO: 256599 - RNA, 22 nt, Human
aaaugaccagaauacaggcuuc

SEQ ID NO: 256600 - RNA, 22 nt, Human
acauguuaaacaucauggaaug

SEQ ID NO: 256601 - RNA, 22 nt, Human
uuucuaguaaaagcuaauuacc

SEQ ID NO: 256602 - RNA, 22 nt, Human
gaaugaguagaguauaaacaaa

SEQ ID NO: 256603 - RNA, 22 nt, Human
ggcugaaauucagaguaaauuc

SEQ ID NO: 256604 - RNA, 21 nt, Human
ucuguacaucauugagucccc

SEQ ID NO: 256605 - RNA, 22 nt, Human
uguggcugcuccugggugguca

SEQ ID NO: 256606 - RNA, 22 nt, Human
uugcaggguugaccaauaggcu

SEQ ID NO: 256607 - RNA, 22 nt, Human
uaaagguacgaagugagggauu

SEQ ID NO: 256608 - RNA, 19 nt, Human
ggccucugcaggccgcccc

SEQ ID NO: 256609 - RNA, 22 nt, Human
cuuguuuaaauaagauagcagu

SEQ ID NO: 256610 - RNA, 22 nt, Human
uuaagacauucagauauuucua

SEQ ID NO: 256611 - RNA, 21 nt, Human
gcucaaagggcuugccaugcu

SEQ ID NO: 256612 - RNA, 22 nt, Human
auagcaauuaagcuccagaauu

SEQ ID NO: 256613 - RNA, 19 nt, Human
agcuccugggcucugggcc

SEQ ID NO: 256614 - RNA, 22 nt, Human
ggcugaaaccguuauccacuga

SEQ ID NO: 256615 - RNA, 22 nt, Human
ccacagaaugaugacacuucag

SEQ ID NO: 256616 - RNA, 22 nt, Human
gacagucccccagcagcaaacc

SEQ ID NO: 256617 - RNA, 23 nt, Human
aguucucauucaucacggccuau

SEQ ID NO: 256618 - RNA, 22 nt, Human
uguuggaauuaggauacagagg

SEQ ID NO: 256619 - RNA, 22 nt, Human
uaacagaagagcaggcagcccu

SEQ ID NO: 256620 - RNA, 22 nt, Human
uugaaucucuugaaucucuguu

SEQ ID NO: 256621 - RNA, 22 nt, Human
uuaccacacuuauuuacauugg

SEQ ID NO: 256622 - RNA, 22 nt, Human
caggccugcuucuuacccuuca

SEQ ID NO: 256623 - RNA, 22 nt, Human
acacugagauuuuccugacacc

SEQ ID NO: 256624 - RNA, 17 nt, Human
gucucugucuugcuuuu

SEQ ID NO: 256625 - RNA, 22 nt, Human
cuggcagauuggggucagcagu

SEQ ID NO: 256626 - RNA, 22 nt, Human
caggcucugcugcuacagcugu

SEQ ID NO: 256627 - RNA, 22 nt, Human
gccucaagacauuuuuaauugc

SEQ ID NO: 256628 - RNA, 22 nt, Human
auggggagagaagggcugagcu

SEQ ID NO: 256629 - RNA, 22 nt, Human
uacaucucaucugugcucuccg

SEQ ID NO: 256630 - RNA, 22 nt, Human
uucugucaugcucauguaauug

SEQ ID NO: 256631 - RNA, 22 nt, Human
augcuauguaacuggcagauag

SEQ ID NO: 256632 - RNA, 22 nt, Human
uggggcucuccacagugucuca

SEQ ID NO: 256633 - RNA, 22 nt, Human
cuauaacuggguauuagacuac

SEQ ID NO: 256634 - RNA, 22 nt, Human
cugggucuggaggccaagggug

SEQ ID NO: 256635 - RNA, 22 nt, Human
gccagugggacccgcugugggc

SEQ ID NO: 256636 - RNA, 22 nt, Human
uccaggaguccugggagugauu

SEQ ID NO: 256637 - RNA, 22 nt, Human
cuuugaaaacacacgaauagac

SEQ ID NO: 256638 - RNA, 22 nt, Human
ugaacauuaguugaguaaaguc

SEQ ID NO: 256639 - RNA, 22 nt, Human
agagccugagccugaaagcccu

SEQ ID NO: 256640 - RNA, 23 nt, Human
ucucagaggauuccugggccuug

SEQ ID NO: 256641 - RNA, 22 nt, Human
caggugaggcugaacagaugaa

SEQ ID NO: 256642 - RNA, 22 nt, Human
aacaaagucguugccuagaaga

SEQ ID NO: 256643 - RNA, 22 nt, Human
uauuuguugaauaccccugucu

SEQ ID NO: 256644 - RNA, 22 nt, Human
ucuccacagucccaccucgcuu

SEQ ID NO: 256645 - RNA, 22 nt, Human
ggagugggaacaaugacauggu

SEQ ID NO: 256646 - RNA, 22 nt, Human
gagggauggugugagaggcuca

SEQ ID NO: 256647 - RNA, 22 nt, Human
agaaggaaaaccugucuuaugu

SEQ ID NO: 256648 - RNA, 22 nt, Human
gacuucuguuaacuuguaagag

SEQ ID NO: 256649 - RNA, 20 nt, Human
ugggagaagaacacuggaac

SEQ ID NO: 256650 - RNA, 22 nt, Human
agaggccuccgaaaggugggcu

SEQ ID NO: 256651 - RNA, 22 nt, Human
gagagccagcucacuccagggc

SEQ ID NO: 256652 - RNA, 22 nt, Human
cagguucuuguuucaaacagac

SEQ ID NO: 256653 - RNA, 22 nt, Human
acagaugaggcccaucagucug

SEQ ID NO: 256654 - RNA, 22 nt, Human
acugggccuguacagagaaaac

SEQ ID NO: 256655 - RNA, 22 nt, Human
aaguaacaucugaacaugaugu

SEQ ID NO: 256656 - RNA, 22 nt, Human
aucucagaaggcauuuccaaga

SEQ ID NO: 256657 - RNA, 19 nt, Human
acuggcaguuucugcaugg

SEQ ID NO: 256658 - RNA, 22 nt, Human
ggcuucuggugggagcaugacu

SEQ ID NO: 256659 - RNA, 22 nt, Human
cacaggcacgccucuggccagg

SEQ ID NO: 256660 - RNA, 22 nt, Human
ccaugaguagcgauuucauuuu

SEQ ID NO: 256661 - RNA, 22 nt, Human
caggaaauauaggaaaaggaac

SEQ ID NO: 256662 - RNA, 22 nt, Human
ccagaagucaaugcagauguga

SEQ ID NO: 256663 - RNA, 22 nt, Human
ggccuccucacccugcucaggc

SEQ ID NO: 256664 - RNA, 22 nt, Human
uguaauuaaacugaagacagaa

SEQ ID NO: 256665 - RNA, 22 nt, Human
uuucauguauuucccaaagcuu

SEQ ID NO: 256666 - RNA, 22 nt, Human
gauugcugggucccacucccag

SEQ ID NO: 256667 - RNA, 22 nt, Human
uugucuguccaggcaccccaag

SEQ ID NO: 256668 - RNA, 22 nt, Human
uagacagagugaagacaagugg

SEQ ID NO: 256669 - RNA, 22 nt, Human
ccacagaaaguugucuagagua

SEQ ID NO: 256670 - RNA, 22 nt, Human
gccagguggcugagcagcugca

SEQ ID NO: 256671 - RNA, 22 nt, Human
uccucagagcauagcgcugucu

SEQ ID NO: 256672 - RNA, 22 nt, Human
ucaggagcuuagaugcuuugac

SEQ ID NO: 256673 - RNA, 22 nt, Human
ggagcugggaauuggaucaucu

SEQ ID NO: 256674 - RNA, 22 nt, Human
aguaacaugaguuuuucuaaug

SEQ ID NO: 256675 - RNA, 22 nt, Human
uuuggagauggagagagggcau

SEQ ID NO: 256676 - RNA, 22 nt, Human
guacauuucaguuuccuuaaga

SEQ ID NO: 256677 - RNA, 22 nt, Human
uggcccugucugcacacaggau

SEQ ID NO: 256678 - RNA, 22 nt, Human
augcauacagauuuaaaauuuu

SEQ ID NO: 256679 - RNA, 23 nt, Human
aaauucaguccuucaacucugag

SEQ ID NO: 256680 - RNA, 22 nt, Human
ucagcucuacacacaccugugu

SEQ ID NO: 256681 - RNA, 22 nt, Human
caaauucaaauuucaucagugu

SEQ ID NO: 256682 - RNA, 22 nt, Human
ugcccuggggucuggagcagca

SEQ ID NO: 256683 - RNA, 22 nt, Human
augccaaagcccaaguucauca

SEQ ID NO: 256684 - RNA, 22 nt, Human
uaaagaacacagggaauagcac

SEQ ID NO: 256685 - RNA, 22 nt, Human
ggucuggauuuuaucuacugua

SEQ ID NO: 256686 - RNA, 22 nt, Human
gauuuucauuugcacucuagaa

SEQ ID NO: 256687 - RNA, 22 nt, Human
caggugucaaaauacuaagugg

SEQ ID NO: 256688 - RNA, 22 nt, Human
caccugcagggggagucaagag

SEQ ID NO: 256689 - RNA, 22 nt, Human
cugguuuagucauaauggagaa

SEQ ID NO: 256690 - RNA, 22 nt, Human
uaaaugagauguacauaacuca

SEQ ID NO: 256691 - RNA, 22 nt, Human
aagaacaacugcuuuaaaagca

SEQ ID NO: 256692 - RNA, 22 nt, Human
aagagcauauuaauaguggaga

SEQ ID NO: 256693 - RNA, 22 nt, Human
cccaggaggcagauguugcagu

SEQ ID NO: 256694 - RNA, 22 nt, Human
auaagguauaaggccuauuuuu

SEQ ID NO: 256695 - RNA, 22 nt, Human
cgccggcuugaggcaggcggca

SEQ ID NO: 256696 - RNA, 22 nt, Human
aacuuuagcuauuuaaucugau

SEQ ID NO: 256697 - RNA, 21 nt, Human
ccuguucacagaucuguaacu

SEQ ID NO: 256698 - RNA, 22 nt, Human
aucaagaaaagugcuuucggcu

SEQ ID NO: 256699 - RNA, 22 nt, Human
agcacaggaccaaggaagcugu

SEQ ID NO: 256700 - RNA, 23 nt, Human
cugauuugagcagaauaaaauag

SEQ ID NO: 256701 - RNA, 22 nt, Human
ugguugccucucagagauuccg

SEQ ID NO: 256702 - RNA, 22 nt, Human
gcuuuuucaaaugaaagcuggu

SEQ ID NO: 256703 - RNA, 22 nt, Human
ggcagugggaaauaagugagaa

SEQ ID NO: 256704 - RNA, 22 nt, Human
agggcucaccacugugcacucc

SEQ ID NO: 256705 - RNA, 22 nt, Human
aucuaagaguuaacaucaagaa

SEQ ID NO: 256706 - RNA, 22 nt, Human
uaguuuaugauuuuuuggaagg

SEQ ID NO: 256707 - RNA, 22 nt, Human
ggcuccugggagauagagguca

SEQ ID NO: 256708 - RNA, 21 nt, Human
cucccagggugacuguucaac

SEQ ID NO: 256709 - RNA, 22 nt, Human
cuuauucagcacuugcucugua

SEQ ID NO: 256710 - RNA, 22 nt, Human
ugcuuagaugaggcagcaggag

SEQ ID NO: 256711 - RNA, 22 nt, Human
uagaagaaagugaagcugggga

SEQ ID NO: 256712 - RNA, 20 nt, Human
gcuaggcuguguccugccca

SEQ ID NO: 256713 - RNA, 22 nt, Human
ucucuggcuccugccgggucca

SEQ ID NO: 256714 - RNA, 22 nt, Human
agguggggaguauauguaauug

SEQ ID NO: 256715 - RNA, 22 nt, Human
acaaguuaccaaaaaagauuca

SEQ ID NO: 256716 - RNA, 22 nt, Human
aaguuacacagaguuggaggcu

SEQ ID NO: 256717 - RNA, 22 nt, Human
guuaauuuaguagaguccagau

SEQ ID NO: 256718 - RNA, 22 nt, Human
agcuccugggccaucacaacca

SEQ ID NO: 256719 - RNA, 22 nt, Human
ugcaugaaauauuuucuguagg

SEQ ID NO: 256720 - RNA, 20 nt, Human
guggaugaucaguguagugg

SEQ ID NO: 256721 - RNA, 22 nt, Human
ggcacagcuacuugcucacucu

SEQ ID NO: 256722 - RNA, 22 nt, Human
aaguuucugccauacuguggug

SEQ ID NO: 256723 - RNA, 22 nt, Human
aucuccagggugcccuuguucu

SEQ ID NO: 256724 - RNA, 22 nt, Human
uagucaguagcaagguauuuug

SEQ ID NO: 256725 - RNA, 22 nt, Human
aaaaauagcuucucuugucccu

SEQ ID NO: 256726 - RNA, 22 nt, Human
uugccucauuuucuggugaaau

SEQ ID NO: 256727 - RNA, 22 nt, Human
ucucugggaauuuuuuggacau

SEQ ID NO: 256728 - RNA, 22 nt, Human
auuugcuucugcuaaacaacuu

SEQ ID NO: 256729 - RNA, 22 nt, Human
augccuggucccaccucuaggu

SEQ ID NO: 256730 - RNA, 22 nt, Human
cauuugaauggcauuucacuuu

SEQ ID NO: 256731 - RNA, 22 nt, Human
uguauacaggauuacucauagc

SEQ ID NO: 256732 - RNA, 22 nt, Human
uuuacaguuaagaaauguuacc

SEQ ID NO: 256733 - RNA, 21 nt, Human
acugggcuagccugacuucug

SEQ ID NO: 256734 - RNA, 19 nt, Human
uggcugggugccaauggcc

SEQ ID NO: 256735 - RNA, 22 nt, Human
aacauucaaaacccaguucagu

SEQ ID NO: 256736 - RNA, 20 nt, Human
ugccccaggccugcaccugc

SEQ ID NO: 256737 - RNA, 22 nt, Human
uguguucauguauguauacaua

SEQ ID NO: 256738 - RNA, 22 nt, Human
uggcucugucgccguuuggaau

SEQ ID NO: 256739 - RNA, 22 nt, Human
ccuuucagguacaccagggaug

SEQ ID NO: 256740 - RNA, 22 nt, Human
uuuaaaugcagacguugauuca

SEQ ID NO: 256741 - RNA, 22 nt, Human
ugaggggccagaccccaccuag

SEQ ID NO: 256742 - RNA, 22 nt, Human
cagagcagugggguuggucaga

SEQ ID NO: 256743 - RNA, 22 nt, Human
gaggcugcagcuaucagacauu

SEQ ID NO: 256744 - RNA, 22 nt, Human
ucauacaacuaagaguuucaga

SEQ ID NO: 256745 - RNA, 22 nt, Human
uggcaggggaggugcuugcuua

SEQ ID NO: 256746 - RNA, 22 nt, Human
gcugccuguugaagggucugug

SEQ ID NO: 256747 - RNA, 21 nt, Human
gcccacagugaggaggauccc

SEQ ID NO: 256748 - RNA, 22 nt, Human
uguccaggaguaaaaagaccug

SEQ ID NO: 256749 - RNA, 22 nt, Human
cuggcccuggagggcugugcga

SEQ ID NO: 256750 - RNA, 22 nt, Human
uccacccccagacagcugguga

SEQ ID NO: 256751 - RNA, 22 nt, Human
ggcuggccucaggguccucgcu

SEQ ID NO: 256752 - RNA, 19 nt, Human
aucuacaauuauucucagu

SEQ ID NO: 256753 - RNA, 22 nt, Human
acauuacagcaaguuuacguua

SEQ ID NO: 256754 - RNA, 23 nt, Human
auauggcuguuguguguuaacau

SEQ ID NO: 256755 - RNA, 22 nt, Human
aggcugagugcuccccuagaug

SEQ ID NO: 256756 - RNA, 22 nt, Human
auucugggucugggugugauca

SEQ ID NO: 256757 - RNA, 22 nt, Human
uucugcaucugaauuuaaguac

SEQ ID NO: 256758 - RNA, 23 nt, Human
aggagccaugaguuggauauguu

SEQ ID NO: 256759 - RNA, 23 nt, Human
ccuggcuggauucucugcauuca

SEQ ID NO: 256760 - RNA, 22 nt, Human
uucuucagcuucuaccugcguc

SEQ ID NO: 256761 - RNA, 22 nt, Human
uaaaacuagugguugggacuaa

SEQ ID NO: 256762 - RNA, 22 nt, Human
uggcaggcugaguuggccuggu

SEQ ID NO: 256763 - RNA, 22 nt, Human
uacaaaguaauguauaauaucg

SEQ ID NO: 256764 - RNA, 22 nt, Human
aaaucuagaaguuuaaaaggau

SEQ ID NO: 256765 - RNA, 17 nt, Human
ccugaaggcacuuccag

SEQ ID NO: 256766 - RNA, 22 nt, Human
caggaaggcgcggcugugccug

SEQ ID NO: 256767 - RNA, 22 nt, Human
agcuggcaauguaagucccugg

SEQ ID NO: 256768 - RNA, 22 nt, Human
acugaggucucagguggggaag

SEQ ID NO: 256769 - RNA, 22 nt, Human
gcucagagaguuucacaaguuu

SEQ ID NO: 256770 - RNA, 22 nt, Human
caacuuggcucucuggcuaucc

SEQ ID NO: 256771 - RNA, 22 nt, Human
uccaccagcagccugucagccu

SEQ ID NO: 256772 - RNA, 22 nt, Human
aagcaggcucacgccaggcagu

SEQ ID NO: 256773 - RNA, 22 nt, Human
uuuauucuauaggcauuaagca

SEQ ID NO: 256774 - RNA, 22 nt, Human
agggacucccugggccgacacg

SEQ ID NO: 256775 - RNA, 22 nt, Human
ccugcaccacaaggcuucagag

SEQ ID NO: 256776 - RNA, 22 nt, Human
agucucuuaaugggcagaaagu

SEQ ID NO: 256777 - RNA, 20 nt, Human
aacucagagaugaaaaagac

SEQ ID NO: 256778 - RNA, 22 nt, Human
ucagccuggugauuccucuguc

SEQ ID NO: 256779 - RNA, 22 nt, Human
aucuuucuccauauacaucuuu

SEQ ID NO: 256780 - RNA, 22 nt, Human
agaguggcccguuggccugaac

SEQ ID NO: 256781 - RNA, 22 nt, Human
aguguccuagcaagccgguccu

SEQ ID NO: 256782 - RNA, 22 nt, Human
ccagggaggguccuguggcuuc

SEQ ID NO: 256783 - RNA, 22 nt, Human
ucacagacgcauccucagguag

SEQ ID NO: 256784 - RNA, 22 nt, Human
uucucuagguuuuagaugaaga

SEQ ID NO: 256785 - RNA, 22 nt, Human
uuuagaaugugacuguauuuga

SEQ ID NO: 256786 - RNA, 22 nt, Human
cuuucacagcacaagccugccu

SEQ ID NO: 256787 - RNA, 22 nt, Human
cucugggaccauggcaagugcg

SEQ ID NO: 256788 - RNA, 22 nt, Human
uauuucugggaguucagaaauu

SEQ ID NO: 256789 - RNA, 22 nt, Human
gauuuucaugauaaacuuguga

SEQ ID NO: 256790 - RNA, 22 nt, Human
gggcuggcaggaccugggcuga

SEQ ID NO: 256791 - RNA, 22 nt, Human
ucucacaagcucaaggauuagu

SEQ ID NO: 256792 - RNA, 20 nt, Human
cauugcaaaguagcagacug

SEQ ID NO: 256793 - RNA, 22 nt, Human
uaaaucccuacaucuguguuuu

SEQ ID NO: 256794 - RNA, 16 nt, Human
guuccuucccacaccu

SEQ ID NO: 256795 - RNA, 22 nt, Human
ugacauguaagauggaaaagcg

SEQ ID NO: 256796 - RNA, 22 nt, Human
acugaggacagugaggagggcu

SEQ ID NO: 256797 - RNA, 22 nt, Human
ucuguggaguugaggaagguug

SEQ ID NO: 256798 - RNA, 22 nt, Human
ugcagaagaaugagcuuggagu

SEQ ID NO: 256799 - RNA, 22 nt, Human
caggucccugcgccccggccuc

SEQ ID NO: 256800 - RNA, 22 nt, Human
ucugugaacaucacauugacag

SEQ ID NO: 256801 - RNA, 22 nt, Human
acaggcuguugggguccagggu

SEQ ID NO: 256802 - RNA, 19 nt, Human
caucucugcaaggagcugc

SEQ ID NO: 256803 - RNA, 22 nt, Human
gagccgugccagcccugucucg

SEQ ID NO: 256804 - RNA, 22 nt, Human
ucuacccugcggucuuggggca

SEQ ID NO: 256805 - RNA, 22 nt, Human
gcugccucacuccagcccaaua

SEQ ID NO: 256806 - RNA, 19 nt, Human
uugaaauuguuugauaugg

SEQ ID NO: 256807 - RNA, 22 nt, Human
aacugcaaucacuuuugcacca

SEQ ID NO: 256808 - RNA, 22 nt, Human
gucaacaagugguuauugggau

SEQ ID NO: 256809 - RNA, 22 nt, Human
uuugucuuguguccuuaggacc

SEQ ID NO: 256810 - RNA, 22 nt, Human
gucaggaagcaagguugggcau

SEQ ID NO: 256811 - RNA, 22 nt, Human
acuuccagaauuagaauuuaag

SEQ ID NO: 256812 - RNA, 22 nt, Human
agucucaagggaugucucuaua

SEQ ID NO: 256813 - RNA, 22 nt, Human
cuuccucccggcccaugcucug

SEQ ID NO: 256814 - RNA, 22 nt, Human
ggcuuugcauuuugauggaggu

SEQ ID NO: 256815 - RNA, 19 nt, Human
gccaggagggcucuggcug

SEQ ID NO: 256816 - RNA, 22 nt, Human
uguggcugucuguucuccuagg

SEQ ID NO: 256817 - RNA, 18 nt, Human
gcucaggcccuagucagu

SEQ ID NO: 256818 - RNA, 22 nt, Human
uuauauguaugcuuauaaacca

SEQ ID NO: 256819 - RNA, 22 nt, Human
acuaguuugaaaauaucugauu

SEQ ID NO: 256820 - RNA, 22 nt, Human
ucugggagauccaagcagaacu

SEQ ID NO: 256821 - RNA, 22 nt, Human
uggcugaguuucaugcaucaug

SEQ ID NO: 256822 - RNA, 22 nt, Human
cugaggagagaucacguggugu

SEQ ID NO: 256823 - RNA, 22 nt, Human
ugagccaaggccucaagaauuu

SEQ ID NO: 256824 - RNA, 22 nt, Human
ucagggaaccucuccuguuucu

SEQ ID NO: 256825 - RNA, 22 nt, Human
uuauacagcauugcuagugaug

SEQ ID NO: 256826 - RNA, 22 nt, Human
uaaggcagugagaagaaacagg

SEQ ID NO: 256827 - RNA, 22 nt, Human
uucuccagaguuucucucacug

SEQ ID NO: 256828 - RNA, 22 nt, Human
aggaagggcuguuucuccaaga

SEQ ID NO: 256829 - RNA, 22 nt, Human
ucagggcccagagcucaggcaa

SEQ ID NO: 256830 - RNA, 22 nt, Human
augcuugcccauguuucugaag

SEQ ID NO: 256831 - RNA, 22 nt, Human
gggacuuaaugcagagagggac

SEQ ID NO: 256832 - RNA, 22 nt, Human
uuauaauucuggcauaggcugu

SEQ ID NO: 256833 - RNA, 22 nt, Human
ccauggcuaaguaucuguagaa

SEQ ID NO: 256834 - RNA, 22 nt, Human
aacacagcuaauuucugucaau

SEQ ID NO: 256835 - RNA, 16 nt, Human
gaggggagcaguaggc

SEQ ID NO: 256836 - RNA, 22 nt, Human
auuccaaaggcuggccuggagg

SEQ ID NO: 256837 - RNA, 22 nt, Human
ggaggcugagaggucgcagugg

SEQ ID NO: 256838 - RNA, 22 nt, Human
acaguuuaugguguuuuauaua

SEQ ID NO: 256839 - RNA, 22 nt, Human
cuuuuuguuguccacacuagga

SEQ ID NO: 256840 - RNA, 22 nt, Human
aaggaacucacagucuguuggg

SEQ ID NO: 256841 - RNA, 22 nt, Human
uagcaucuguucuuucauuaaa

SEQ ID NO: 256842 - RNA, 22 nt, Human
gcagaggagugauuaugccgug

SEQ ID NO: 256843 - RNA, 22 nt, Human
gagcugcacaucugaggcuaau

SEQ ID NO: 256844 - RNA, 22 nt, Human
ucaggaagaaagaagggagugu

SEQ ID NO: 256845 - RNA, 22 nt, Human
acaggcagagucagguuggguu

SEQ ID NO: 256846 - RNA, 22 nt, Human
cccugggaggcuuccaggcaga

SEQ ID NO: 256847 - RNA, 22 nt, Human
acaguaaugauucugagucucu

SEQ ID NO: 256848 - RNA, 22 nt, Human
uguaaagaaauagcauuuguag

SEQ ID NO: 256849 - RNA, 22 nt, Human
cucacauuccacuugugccaac

SEQ ID NO: 256850 - RNA, 22 nt, Human
agcugagaaucuuccccagugu

SEQ ID NO: 256851 - RNA, 22 nt, Human
gugaggcagagaugccaaaacu

SEQ ID NO: 256852 - RNA, 22 nt, Human
uagacugugagcuccuugaggg

SEQ ID NO: 256853 - RNA, 22 nt, Human
cuguguccucccgcugcaccca

SEQ ID NO: 256854 - RNA, 22 nt, Human
gcuucugcuguugaagccacca

SEQ ID NO: 256855 - RNA, 22 nt, Human
uugcauuguaggauguuagaag

SEQ ID NO: 256856 - RNA, 22 nt, Human
caugcuuugggucagaaaugcc

SEQ ID NO: 256857 - RNA, 21 nt, Human
ucucuccucaagcucgacccc

SEQ ID NO: 256858 - RNA, 22 nt, Human
uccugggaggaacauuuaccua

SEQ ID NO: 256859 - RNA, 22 nt, Human
cccucucccugcagaauguggc

SEQ ID NO: 256860 - RNA, 22 nt, Human
auguagcaugaggcacugugcc

SEQ ID NO: 256861 - RNA, 22 nt, Human
cuggcuccucuacacacccaaa

SEQ ID NO: 256862 - RNA, 20 nt, Human
uugcuuuaucagacaugaua

SEQ ID NO: 256863 - RNA, 22 nt, Human
guacauuucucccaacacuaaa

SEQ ID NO: 256864 - RNA, 22 nt, Human
ugcugaaagaccguauuuaucu

SEQ ID NO: 256865 - RNA, 22 nt, Human
ucugcaggauggaugcucagaa

SEQ ID NO: 256866 - RNA, 22 nt, Human
ggagcuggccgccuaugugcag

SEQ ID NO: 256867 - RNA, 22 nt, Human
aaaguuaguaaaaugggauaua

SEQ ID NO: 256868 - RNA, 22 nt, Human
uuuuucaucugauugauaacuc

SEQ ID NO: 256869 - RNA, 22 nt, Human
aagcaggagagccugggugagc

SEQ ID NO: 256870 - RNA, 22 nt, Human
agcuguaugcccaagaugcuau

SEQ ID NO: 256871 - RNA, 22 nt, Human
cuuugucauuuugucucucagu

SEQ ID NO: 256872 - RNA, 22 nt, Human
guaucuuuugguggaaaaauaa

SEQ ID NO: 256873 - RNA, 22 nt, Human
ccacagcaugcaggccugacac

SEQ ID NO: 256874 - RNA, 22 nt, Human
guuaacauaggaguuuguugua

SEQ ID NO: 256875 - RNA, 22 nt, Human
agggccuccagggcagcagugg

SEQ ID NO: 256876 - RNA, 22 nt, Human
uuaguuaaaauucugcugacau

SEQ ID NO: 256877 - RNA, 22 nt, Human
ugcauuaaaaccaucgaccauc

SEQ ID NO: 256878 - RNA, 22 nt, Human
ugcaaggcacccacucugcuuu

SEQ ID NO: 256879 - RNA, 22 nt, Human
ccaguccagugccaugcauggc

SEQ ID NO: 256880 - RNA, 22 nt, Human
gccugaccucuucugcccuggg

SEQ ID NO: 256881 - RNA, 22 nt, Human
ccagcucucaaggcucccuggg

SEQ ID NO: 256882 - RNA, 22 nt, Human
gaugggguuuugccaggcuggu

SEQ ID NO: 256883 - RNA, 22 nt, Human
uugucaagauugagagaugacu

SEQ ID NO: 256884 - RNA, 22 nt, Human
uagcuuuaagaugagaugugga

SEQ ID NO: 256885 - RNA, 22 nt, Human
aaaagagucuuaggcagucaua

SEQ ID NO: 256886 - RNA, 22 nt, Human
gccugguggacacugggcauca

SEQ ID NO: 256887 - RNA, 22 nt, Human
augggggccugaacaggcaaaa

SEQ ID NO: 256888 - RNA, 22 nt, Human
augggaggcaaagaucgcagaa

SEQ ID NO: 256889 - RNA, 22 nt, Human
agauauuaaucguacauaaggu

SEQ ID NO: 256890 - RNA, 22 nt, Human
gggaagaguaacuagcccaugu

SEQ ID NO: 256891 - RNA, 22 nt, Human
gcagaugggagccccaggggag

SEQ ID NO: 256892 - RNA, 22 nt, Human
ucagggccaucuuuugccucaa

SEQ ID NO: 256893 - RNA, 22 nt, Human
agggaaagguagugaggucaca

SEQ ID NO: 256894 - RNA, 20 nt, Human
augcaucugguaucuuuccu

SEQ ID NO: 256895 - RNA, 22 nt, Human
gcucagguguuaccuccucuag

SEQ ID NO: 256896 - RNA, 22 nt, Human
cagggcucccucuggcucccag

SEQ ID NO: 256897 - RNA, 22 nt, Human
cauaaugucugacacaguaaga

SEQ ID NO: 256898 - RNA, 19 nt, Human
aggcuaguguuacaccugc

SEQ ID NO: 256899 - RNA, 22 nt, Human
cagggccugagggcugcucugc

SEQ ID NO: 256900 - RNA, 22 nt, Human
auauauaaccuggauaaggcuu

SEQ ID NO: 256901 - RNA, 22 nt, Human
gcucaggggaaugggcugccgu

SEQ ID NO: 256902 - RNA, 22 nt, Human
cccagugucauucuaagggagg

SEQ ID NO: 256903 - RNA, 22 nt, Human
uuucuaagugaacauucaaguu

SEQ ID NO: 256904 - RNA, 22 nt, Human
aauagcuuucucaugacuucac

SEQ ID NO: 256905 - RNA, 22 nt, Human
ggcuuuauuucacuguaccaua

SEQ ID NO: 256906 - RNA, 22 nt, Human
uugcagcuucuugcaucagaaa

SEQ ID NO: 256907 - RNA, 22 nt, Human
cauggccccaaaucccaugcau

SEQ ID NO: 256908 - RNA, 22 nt, Human
uaggguccugccuacagagaca

SEQ ID NO: 256909 - RNA, 22 nt, Human
aggagcugugaaugggaggggu

SEQ ID NO: 256910 - RNA, 22 nt, Human
gcagagaaggauugaaaccaga

SEQ ID NO: 256911 - RNA, 23 nt, Human
agaaguggaauggccgugggguc

SEQ ID NO: 256912 - RNA, 22 nt, Human
guggccuggcuggcaccaccuc

SEQ ID NO: 256913 - RNA, 22 nt, Human
uacuucugccuuagagaacacu

SEQ ID NO: 256914 - RNA, 22 nt, Human
agacaauauauaauuuuaguug

SEQ ID NO: 256915 - RNA, 22 nt, Human
ccuugagaggaaguuuguagaa

SEQ ID NO: 256916 - RNA, 22 nt, Human
uggcagagacaaggccgggccu

SEQ ID NO: 256917 - RNA, 18 nt, Human
ccauggcucccuccugcc

SEQ ID NO: 256918 - RNA, 22 nt, Human
aucucugguccaaauguuaccu

SEQ ID NO: 256919 - RNA, 19 nt, Human
cagaggcacuuucucuuag

SEQ ID NO: 256920 - RNA, 22 nt, Human
cguccucagaggccauccgaaa

SEQ ID NO: 256921 - RNA, 22 nt, Human
aaugagucaugaagauuagcaa

SEQ ID NO: 256922 - RNA, 22 nt, Human
aggcagguuggugagaagacug

SEQ ID NO: 256923 - RNA, 18 nt, Human
agcaagcaguuuucaugu

SEQ ID NO: 256924 - RNA, 22 nt, Human
gacaagacaugugaugacauca

SEQ ID NO: 256925 - RNA, 22 nt, Human
uacaguaacauguuguacaagc

SEQ ID NO: 256926 - RNA, 22 nt, Human
auaaaaggaaagccuguuguga

SEQ ID NO: 256927 - RNA, 22 nt, Human
aggcauggggcugcagucaggu

SEQ ID NO: 256928 - RNA, 22 nt, Human
aggaagcuuggggcagggcuac

SEQ ID NO: 256929 - RNA, 22 nt, Human
gggcugugaggugagaacuuac

SEQ ID NO: 256930 - RNA, 22 nt, Human
uacucaguuuaugauuucaagu

SEQ ID NO: 256931 - RNA, 22 nt, Human
ugucucagggcagcagcagggg

SEQ ID NO: 256932 - RNA, 22 nt, Human
acuccagggguugcuauuuaca

SEQ ID NO: 256933 - RNA, 22 nt, Human
gggcaggugugcagagcuguug

SEQ ID NO: 256934 - RNA, 22 nt, Human
agcuuugcagcugugggaggag

SEQ ID NO: 256935 - RNA, 22 nt, Human
aaaugcacaggagaaccaauuc

SEQ ID NO: 256936 - RNA, 22 nt, Human
uaacaguauccccauuugcaag

SEQ ID NO: 256937 - RNA, 22 nt, Human
uuuguuuagaugguaaaucagu

SEQ ID NO: 256938 - RNA, 22 nt, Human
uccagccucauuucuccugcuu

SEQ ID NO: 256939 - RNA, 22 nt, Human
acuuguucauugaguacauaug

SEQ ID NO: 256940 - RNA, 22 nt, Human
cuaaagacacaauaaguagcuu

SEQ ID NO: 256941 - RNA, 22 nt, Human
ccugaggacacacgcugcagga

SEQ ID NO: 256942 - RNA, 22 nt, Human
agcaacagggggauggccacug

SEQ ID NO: 256943 - RNA, 22 nt, Human
uccccacacagauacagaguag

SEQ ID NO: 256944 - RNA, 22 nt, Human
uacuaguuuuuaggaaaaguga

SEQ ID NO: 256945 - RNA, 22 nt, Human
cagaauccagaauugcugaggu

SEQ ID NO: 256946 - RNA, 22 nt, Human
gaggagagggcugcgggcccac

SEQ ID NO: 256947 - RNA, 22 nt, Human
cuuuuucuaaucauaauugucu

SEQ ID NO: 256948 - RNA, 22 nt, Human
ucugcagaaggaaucagcugag

SEQ ID NO: 256949 - RNA, 22 nt, Human
accagucuguuguugcagagug

SEQ ID NO: 256950 - RNA, 22 nt, Human
gccaggcauuuauugauugaau

SEQ ID NO: 256951 - RNA, 22 nt, Human
ucacaggacccugaggguggcg

SEQ ID NO: 256952 - RNA, 22 nt, Human
cuggcaccaggcaugcugggag

SEQ ID NO: 256953 - RNA, 22 nt, Human
gugggggcuggaaaucuugcca

SEQ ID NO: 256954 - RNA, 22 nt, Human
aagcacauuguacauuugugcu

SEQ ID NO: 256955 - RNA, 22 nt, Human
ugccugucucugacugccauua

SEQ ID NO: 256956 - RNA, 22 nt, Human
cugccugggccaugcccagucc

SEQ ID NO: 256957 - RNA, 22 nt, Human
ggcaaacaccaggcgagggagc

SEQ ID NO: 256958 - RNA, 22 nt, Human
ucaguuaauggauucugucaga

SEQ ID NO: 256959 - RNA, 22 nt, Human
gacaauacagaaagggacaugc

SEQ ID NO: 256960 - RNA, 22 nt, Human
acaagcaguaaaggccacaguc

SEQ ID NO: 256961 - RNA, 22 nt, Human
cugcccgucccuuugcucucgc

SEQ ID NO: 256962 - RNA, 22 nt, Human
ggcuggcagaagugugcuggcu

SEQ ID NO: 256963 - RNA, 22 nt, Human
gagagcaggcucucgggggcca

SEQ ID NO: 256964 - RNA, 22 nt, Human
ucugaaaucuguaagcacuagc

SEQ ID NO: 256965 - RNA, 22 nt, Human
cuggccugugggcugucuccgg

SEQ ID NO: 256966 - RNA, 18 nt, Human
agcagguggauuuauugg

SEQ ID NO: 256967 - RNA, 22 nt, Human
guguguccaggcgggagucaag

SEQ ID NO: 256968 - RNA, 22 nt, Human
gcccugagugguaccugugggu

SEQ ID NO: 256969 - RNA, 22 nt, Human
ugaagacaagaaaacacugggg

SEQ ID NO: 256970 - RNA, 22 nt, Human
gcucugagauugagccuuuggu

SEQ ID NO: 256971 - RNA, 20 nt, Human
ucuuauacagaaaacauuuu

SEQ ID NO: 256972 - RNA, 18 nt, Human
gcagagcagaagcucaag

SEQ ID NO: 256973 - RNA, 21 nt, Human
cuacuuaaguaggggauuagg

SEQ ID NO: 256974 - RNA, 22 nt, Human
uuugaaguaccugguucugacu

SEQ ID NO: 256975 - RNA, 19 nt, Human
agucucaguguacagaggc

SEQ ID NO: 256976 - RNA, 22 nt, Human
acaccagccucgcccguguguu

SEQ ID NO: 256977 - RNA, 22 nt, Human
ugcucagggagcuuccuggugg

SEQ ID NO: 256978 - RNA, 22 nt, Human
ucaggaaauggugauuugguug

SEQ ID NO: 256979 - RNA, 22 nt, Human
cagggagcuggcuggcugugcc

SEQ ID NO: 256980 - RNA, 22 nt, Human
agacauauauugcaauucacug

SEQ ID NO: 256981 - RNA, 22 nt, Human
uaccuggcagucagucuuuccg

SEQ ID NO: 256982 - RNA, 22 nt, Human
aagucuuuuguucaggcuggca

SEQ ID NO: 256983 - RNA, 22 nt, Human
gcuuuaaaccucuacucugucc

SEQ ID NO: 256984 - RNA, 17 nt, Human
gccuuccuuccuccaca

SEQ ID NO: 256985 - RNA, 22 nt, Human
uucuguguugugacauucuaga

SEQ ID NO: 256986 - RNA, 22 nt, Human
acacggcacuuuaggaaggggc

SEQ ID NO: 256987 - RNA, 22 nt, Human
ugucugugauuuaggccagggc

SEQ ID NO: 256988 - RNA, 22 nt, Human
agcuucuggaagccuggcagca

SEQ ID NO: 256989 - RNA, 22 nt, Human
ccugggccuugaccucgugggc

SEQ ID NO: 256990 - RNA, 20 nt, Human
cucuggaagaguuuaaaugg

SEQ ID NO: 256991 - RNA, 22 nt, Human
ugcuggaggccagaagucugag

SEQ ID NO: 256992 - RNA, 22 nt, Human
uagggaugauggagccuaugua

SEQ ID NO: 256993 - RNA, 22 nt, Human
ccuaggcccuaggcuuccauca

SEQ ID NO: 256994 - RNA, 22 nt, Human
ucccaggcuaggccucugcguu

SEQ ID NO: 256995 - RNA, 22 nt, Human
auccaaaccuggacaugagugg

SEQ ID NO: 256996 - RNA, 19 nt, Human
acagccuguugguggggcu

SEQ ID NO: 256997 - RNA, 22 nt, Human
cugagaggggaccaggguguuu

SEQ ID NO: 256998 - RNA, 22 nt, Human
cuccugggcucauaucauucag

SEQ ID NO: 256999 - RNA, 22 nt, Human
uuggcuggcuucucgacuuguu

SEQ ID NO: 257000 - RNA, 22 nt, Human
agcuguuuguacuuagauagua

SEQ ID NO: 257001 - RNA, 22 nt, Human
ucauucagguugggcaaguguc

SEQ ID NO: 257002 - RNA, 22 nt, Human
uucaugugaauauauuugucuu

SEQ ID NO: 257003 - RNA, 22 nt, Human
uuaugacaggaaaaucacagaa

SEQ ID NO: 257004 - RNA, 22 nt, Human
gagcucagguggucaaaacaau

SEQ ID NO: 257005 - RNA, 22 nt, Human
caugguuuuuacccuacaccau

SEQ ID NO: 257006 - RNA, 22 nt, Human
ucuuagcagugcugagaagaau

SEQ ID NO: 257007 - RNA, 22 nt, Human
cuucccaguucugcuugagggg

SEQ ID NO: 257008 - RNA, 22 nt, Human
cucaggaggccauucucaaggu

SEQ ID NO: 257009 - RNA, 22 nt, Human
accuguuuggaggagguguuag

SEQ ID NO: 257010 - RNA, 22 nt, Human
ggagccugacagugcccagcau

SEQ ID NO: 257011 - RNA, 22 nt, Human
auuuugaaauacuugaaggaaa

SEQ ID NO: 257012 - RNA, 21 nt, Human
ccagcuuucccaagucccuuu

SEQ ID NO: 257013 - RNA, 22 nt, Human
auagagcuauaagaauuuugug

SEQ ID NO: 257014 - RNA, 22 nt, Human
cuuucuuccauagggcccaguc

SEQ ID NO: 257015 - RNA, 22 nt, Human
cagcugagcucccaggccauca

SEQ ID NO: 257016 - RNA, 22 nt, Human
ccugagagagaagcgaccuggu

SEQ ID NO: 257017 - RNA, 22 nt, Human
gugcaaaaguaauugcaguacu

SEQ ID NO: 257018 - RNA, 22 nt, Human
aagcuacauuaagcagauuuac

SEQ ID NO: 257019 - RNA, 21 nt, Human
agcuggcagugccuggaccuc

SEQ ID NO: 257020 - RNA, 21 nt, Human
uugcacagaaaaccauagaga

SEQ ID NO: 257021 - RNA, 22 nt, Human
gccuguuuguuaugucauggua

SEQ ID NO: 257022 - RNA, 22 nt, Human
aaugaguuauuuaauagaaagg

SEQ ID NO: 257023 - RNA, 22 nt, Human
cacugucuuuugugaagacaau

SEQ ID NO: 257024 - RNA, 22 nt, Human
acaguaauuaaaauggaucugc

SEQ ID NO: 257025 - RNA, 18 nt, Human
agugucuggauauuuggg

SEQ ID NO: 257026 - RNA, 22 nt, Human
gggccaugagagguucaucaac

SEQ ID NO: 257027 - RNA, 21 nt, Human
ugcaggcaggcagagaugcug

SEQ ID NO: 257028 - RNA, 22 nt, Human
auguuuccauuuucuuguauca

SEQ ID NO: 257029 - RNA, 22 nt, Human
uuuggaauucugcagcucaugu

SEQ ID NO: 257030 - RNA, 22 nt, Human
ucugccugugguggaggaaguu

SEQ ID NO: 257031 - RNA, 22 nt, Human
gagggagggacuagcauucucu

SEQ ID NO: 257032 - RNA, 22 nt, Human
aauuguaacuacauugagaaca

SEQ ID NO: 257033 - RNA, 22 nt, Human
cuuccuggcaugggucucauga

SEQ ID NO: 257034 - RNA, 22 nt, Human
ugugaaaaaaguucuagaagga

SEQ ID NO: 257035 - RNA, 21 nt, Human
uggcuucugccaauguuaaga

SEQ ID NO: 257036 - RNA, 22 nt, Human
augcaugagucacucagugcag

SEQ ID NO: 257037 - RNA, 22 nt, Human
uaaaggaagaauucucugugau

SEQ ID NO: 257038 - RNA, 20 nt, Human
cccagagccauagccagaca

SEQ ID NO: 257039 - RNA, 22 nt, Human
caucaucucuggcccuugaagu

SEQ ID NO: 257040 - RNA, 22 nt, Human
uuucgagggccuuaaguauucc

SEQ ID NO: 257041 - RNA, 23 nt, Human
ucagaacaguucuuggugcauag

SEQ ID NO: 257042 - RNA, 22 nt, Human
ugcaggugccaucgcugcucau

SEQ ID NO: 257043 - RNA, 22 nt, Human
uuccugugguguuucccagaca

SEQ ID NO: 257044 - RNA, 22 nt, Human
uaacacugugguguucuuuguc

SEQ ID NO: 257045 - RNA, 22 nt, Human
uguguacacaaugauugcagag

SEQ ID NO: 257046 - RNA, 22 nt, Human
ccugcccacagagagggugcau

SEQ ID NO: 257047 - RNA, 22 nt, Human
uguggggccucgugcuagcugg

SEQ ID NO: 257048 - RNA, 20 nt, Human
ugcuuuaugcuauacuuugu

SEQ ID NO: 257049 - RNA, 22 nt, Human
agugggagcggcagucggggac

SEQ ID NO: 257050 - RNA, 19 nt, Human
ccuggcugcugugggaugc

SEQ ID NO: 257051 - RNA, 22 nt, Human
ucauugcagacuaacaaucuca

SEQ ID NO: 257052 - RNA, 22 nt, Human
cccaguguuccuugaggggcug

SEQ ID NO: 257053 - RNA, 22 nt, Human
acaugcuguccugucuuuguca

SEQ ID NO: 257054 - RNA, 22 nt, Human
uaggaaacaaagcuuagcagga

SEQ ID NO: 257055 - RNA, 19 nt, Human
gguccucagcagagcaugc

SEQ ID NO: 257056 - RNA, 19 nt, Human
agggaauccggcugaggga

SEQ ID NO: 257057 - RNA, 22 nt, Human
gggcuucuugccauggggacgg

SEQ ID NO: 257058 - RNA, 22 nt, Human
gauucuuaugagugaacuuuac

SEQ ID NO: 257059 - RNA, 22 nt, Human
acaguuuggcgugauugauagu

SEQ ID NO: 257060 - RNA, 22 nt, Human
aagcccuggcaaugucagauga

SEQ ID NO: 257061 - RNA, 22 nt, Human
guaguuauugcuguuuacuucu

SEQ ID NO: 257062 - RNA, 22 nt, Human
uucuggguuuacaucugacuuc

SEQ ID NO: 257063 - RNA, 18 nt, Human
uaagcaaugacauugcaa

SEQ ID NO: 257064 - RNA, 22 nt, Human
uggcuccucuucuggguguccc

SEQ ID NO: 257065 - RNA, 22 nt, Human
gggcaugcaggacuguggcaga

SEQ ID NO: 257066 - RNA, 22 nt, Human
ucucagggagggcgagucagcg

SEQ ID NO: 257067 - RNA, 22 nt, Human
ggagccagggaagcugcuuccu

SEQ ID NO: 257068 - RNA, 22 nt, Human
ggucccaaucuaaucacaugag

SEQ ID NO: 257069 - RNA, 22 nt, Human
gccaagccuguagacacaagcu

SEQ ID NO: 257070 - RNA, 22 nt, Human
acagcagaggaaaagucugaua

SEQ ID NO: 257071 - RNA, 22 nt, Human
ccucugggggcuuccuuacccu

SEQ ID NO: 257072 - RNA, 22 nt, Human
auuuuaacccucuuauauauac

SEQ ID NO: 257073 - RNA, 22 nt, Human
agggcgcugucuggccagcggu

SEQ ID NO: 257074 - RNA, 22 nt, Human
caagcaggaugaagcccaggga

SEQ ID NO: 257075 - RNA, 22 nt, Human
gaggagaggccaucguuguuau

SEQ ID NO: 257076 - RNA, 22 nt, Human
gaggaggcuuccgggaggcacg

SEQ ID NO: 257077 - RNA, 22 nt, Human
ucuuuggaucccaacuggcugg

SEQ ID NO: 257078 - RNA, 22 nt, Human
gcuggcaggagaaacggggugc

SEQ ID NO: 257079 - RNA, 22 nt, Human
uuuaaacaucuuguugccuuaa

SEQ ID NO: 257080 - RNA, 22 nt, Human
ccuccuggaggcucuaagggag

SEQ ID NO: 257081 - RNA, 22 nt, Human
aagcauggcugagugcaauggu

SEQ ID NO: 257082 - RNA, 22 nt, Human
ggucacauauccucgguuugga

SEQ ID NO: 257083 - RNA, 22 nt, Human
aaauagaaaccaacaaggucag

SEQ ID NO: 257084 - RNA, 19 nt, Human
cagaacagaggucauggcc

SEQ ID NO: 257085 - RNA, 22 nt, Human
gcugugcugcgggaggauuccg

SEQ ID NO: 257086 - RNA, 22 nt, Human
agacagacaugcuaguuuucuu

SEQ ID NO: 257087 - RNA, 22 nt, Human
ucucaaauauuuggagagagga

SEQ ID NO: 257088 - RNA, 22 nt, Human
uggggagugaugccucggauaa

SEQ ID NO: 257089 - RNA, 22 nt, Human
cuccugcaagccuccccaagca

SEQ ID NO: 257090 - RNA, 22 nt, Human
cugaaauauuuuaaucucagga

SEQ ID NO: 257091 - RNA, 22 nt, Human
gcaggagcuggaaagugauguu

SEQ ID NO: 257092 - RNA, 22 nt, Human
caggauggucucgaucuccuga

SEQ ID NO: 257093 - RNA, 17 nt, Human
agcagaagucagaggga

SEQ ID NO: 257094 - RNA, 22 nt, Human
uccuugagauuaauuaaucacc

SEQ ID NO: 257095 - RNA, 22 nt, Human
augaguaaaaccacuauuuaca

SEQ ID NO: 257096 - RNA, 22 nt, Human
auugugaauagugccgcaguaa

SEQ ID NO: 257097 - RNA, 17 nt, Human
auggcuuccauugacca

SEQ ID NO: 257098 - RNA, 22 nt, Human
uugcccagaguccacagcguac

SEQ ID NO: 257099 - RNA, 22 nt, Human
agauuugcggcuuuacuuugca

SEQ ID NO: 257100 - RNA, 18 nt, Human
gccagugcccuggcucac

SEQ ID NO: 257101 - RNA, 22 nt, Human
auuaaugucuaccaguugugug

SEQ ID NO: 257102 - RNA, 22 nt, Human
cauuaggguaauugaacacuua

SEQ ID NO: 257103 - RNA, 22 nt, Human
caggguagggcaagggaaccug

SEQ ID NO: 257104 - RNA, 22 nt, Human
uggcagcagacaucugaggucu

SEQ ID NO: 257105 - RNA, 22 nt, Human
agcucugccuugacaccuucuc

SEQ ID NO: 257106 - RNA, 22 nt, Human
gggcccucagucccaggccuuc

SEQ ID NO: 257107 - RNA, 18 nt, Human
ugaauuaguuugugguuu

SEQ ID NO: 257108 - RNA, 21 nt, Human
uccuggcuuuaugcuaccucu

SEQ ID NO: 257109 - RNA, 22 nt, Human
ucuuauaaaaggacucccauuu

SEQ ID NO: 257110 - RNA, 22 nt, Human
gcugacagcaaggggcugcccu

SEQ ID NO: 257111 - RNA, 22 nt, Human
ggcuggacugccucccagaguc

SEQ ID NO: 257112 - RNA, 22 nt, Human
gagcugggcacacgccacuuga

SEQ ID NO: 257113 - RNA, 22 nt, Human
caccugguucuagugaaagucu

SEQ ID NO: 257114 - RNA, 22 nt, Human
acaugauuggacuccuuccccu

SEQ ID NO: 257115 - RNA, 22 nt, Human
ucaccaggauugggcuguaggc

SEQ ID NO: 257116 - RNA, 22 nt, Human
gcuggagcugaguucccugggc

SEQ ID NO: 257117 - RNA, 22 nt, Human
uugaaucauuacaauagauaag

SEQ ID NO: 257118 - RNA, 22 nt, Human
aggacagagcccuaguuucaua

SEQ ID NO: 257119 - RNA, 21 nt, Human
ucagcagcaucugccuagagu

SEQ ID NO: 257120 - RNA, 22 nt, Human
gggagcugccaccaccccuggg

SEQ ID NO: 257121 - RNA, 18 nt, Human
agacccucuaagggcagu

SEQ ID NO: 257122 - RNA, 22 nt, Human
aggguucugccagugucuugag

SEQ ID NO: 257123 - RNA, 22 nt, Human
ugucaacaccaaagccucccag

SEQ ID NO: 257124 - RNA, 22 nt, Human
uggcugccuuucaccucaucuc

SEQ ID NO: 257125 - RNA, 22 nt, Human
cugcagggagguuccuuguucu

SEQ ID NO: 257126 - RNA, 22 nt, Human
gugaggagggcuggucccaggc

SEQ ID NO: 257127 - RNA, 22 nt, Human
aucugacaaggccacauauucu

SEQ ID NO: 257128 - RNA, 22 nt, Human
ugcugggcccagggagccucug

SEQ ID NO: 257129 - RNA, 22 nt, Human
ucccagccacagguguagcccu

SEQ ID NO: 257130 - RNA, 22 nt, Human
ucccuguauaucacaagggcua

SEQ ID NO: 257131 - RNA, 22 nt, Human
gagacaggccaggugguacuua

SEQ ID NO: 257132 - RNA, 22 nt, Human
gaggaugguaugaggcaagcaa

SEQ ID NO: 257133 - RNA, 22 nt, Human
agcugaaagugcuuugaggacu

SEQ ID NO: 257134 - RNA, 22 nt, Human
acauacauauguuuaaaugcau

SEQ ID NO: 257135 - RNA, 23 nt, Human
uggggagggaagucauuucugua

SEQ ID NO: 257136 - RNA, 22 nt, Human
cagaguguggcaucuuccaacu

SEQ ID NO: 257137 - RNA, 22 nt, Human
cagcaagagaggcagggcaaau

SEQ ID NO: 257138 - RNA, 22 nt, Human
cauucauaagacuuugcucuug

SEQ ID NO: 257139 - RNA, 22 nt, Human
gccuucagcggccgcucgcugc

SEQ ID NO: 257140 - RNA, 16 nt, Human
auuuccagauuaugca

SEQ ID NO: 257141 - RNA, 22 nt, Human
ccaggcagucaggguugugugu

SEQ ID NO: 257142 - RNA, 22 nt, Human
ugagacgaagucuugcucuguu

SEQ ID NO: 257143 - RNA, 19 nt, Human
aaaagucuauucaauuaca

SEQ ID NO: 257144 - RNA, 22 nt, Human
acagccaacgucuuucuuacuu

SEQ ID NO: 257145 - RNA, 22 nt, Human
gcuccuguccuuagccccagag

SEQ ID NO: 257146 - RNA, 22 nt, Human
auugcacaaacacagucagacu

SEQ ID NO: 257147 - RNA, 18 nt, Human
ggcugcuccucucccuac

SEQ ID NO: 257148 - RNA, 22 nt, Human
ucaggccaaagaaacagcauga

SEQ ID NO: 257149 - RNA, 22 nt, Human
ucaggagaaucagggcuguccu

SEQ ID NO: 257150 - RNA, 22 nt, Human
uaacaagauuuguaaaauugua

SEQ ID NO: 257151 - RNA, 21 nt, Human
gcuuucuguggacucugcacc

SEQ ID NO: 257152 - RNA, 22 nt, Human
cuguggcugcagccuugguccu

SEQ ID NO: 257153 - RNA, 22 nt, Human
uggucccauuguucugcccagg

SEQ ID NO: 257154 - RNA, 22 nt, Human
agcaagaugaaggauucaagac

SEQ ID NO: 257155 - RNA, 22 nt, Human
uagggcuuagaaaagaauuuac

SEQ ID NO: 257156 - RNA, 17 nt, Human
gagccacccugugcgag

SEQ ID NO: 257157 - RNA, 22 nt, Human
guuuauuauacaacaaaagcua

SEQ ID NO: 257158 - RNA, 22 nt, Human
cgugggaguggugggugcucag

SEQ ID NO: 257159 - RNA, 22 nt, Human
aaacaguggccaauucuggaga

SEQ ID NO: 257160 - RNA, 22 nt, Human
augcauuuguaaaauauaaucg

SEQ ID NO: 257161 - RNA, 22 nt, Human
auguuacacauaggcauaaaug

SEQ ID NO: 257162 - RNA, 22 nt, Human
uuuggcaaagaucaacauguua

SEQ ID NO: 257163 - RNA, 22 nt, Human
agaccugggugcccugugcuuu

SEQ ID NO: 257164 - RNA, 22 nt, Human
gaucucuguggacucuuagcac

SEQ ID NO: 257165 - RNA, 22 nt, Human
cuguuuauacgacagguggagg

SEQ ID NO: 257166 - RNA, 22 nt, Human
aagguguucagguuuucccauu

SEQ ID NO: 257167 - RNA, 21 nt, Human
uaagcaaggaaagggcagccc

SEQ ID NO: 257168 - RNA, 22 nt, Human
ucuucccuaaucaccaucuuca

SEQ ID NO: 257169 - RNA, 18 nt, Human
ggccagagggaggguccc

SEQ ID NO: 257170 - RNA, 22 nt, Human
uaaauuaugucacaugacucug

SEQ ID NO: 257171 - RNA, 22 nt, Human
gaaggcuucuccagggcuuacu

SEQ ID NO: 257172 - RNA, 21 nt, Human
cuggaggguagaguugggcug

SEQ ID NO: 257173 - RNA, 22 nt, Human
uccauacaguccacacggugca

SEQ ID NO: 257174 - RNA, 22 nt, Human
cagauuuacucccugcugcugc

SEQ ID NO: 257175 - RNA, 22 nt, Human
gccaaaguccuccagccaugca

SEQ ID NO: 257176 - RNA, 22 nt, Human
ggaaggagggcggcaaugauga

SEQ ID NO: 257177 - RNA, 22 nt, Human
agggaccucuucuugcagcuga

SEQ ID NO: 257178 - RNA, 22 nt, Human
acuguacucuucuagccaucug

SEQ ID NO: 257179 - RNA, 23 nt, Human
ugguaauagggagcagaagguag

SEQ ID NO: 257180 - RNA, 22 nt, Human
ccacaagugaaguacaccugcc

SEQ ID NO: 257181 - RNA, 22 nt, Human
acacaaacugcuagaaaauugg

SEQ ID NO: 257182 - RNA, 22 nt, Human
uugaaaauaucacaggagcagc

SEQ ID NO: 257183 - RNA, 22 nt, Human
uaaggccaggcuguggucggca

SEQ ID NO: 257184 - RNA, 22 nt, Human
gaggccuggguuaccuacucgu

SEQ ID NO: 257185 - RNA, 22 nt, Human
ccuuccagauguaagagcugau

SEQ ID NO: 257186 - RNA, 22 nt, Human
agggcucccgcgguguccggga

SEQ ID NO: 257187 - RNA, 21 nt, Human
ccuggcagaagccugauaugc

SEQ ID NO: 257188 - RNA, 22 nt, Human
cucacaggcaucucaucaggcu

SEQ ID NO: 257189 - RNA, 22 nt, Human
uggggcuggcacagucucuauu

SEQ ID NO: 257190 - RNA, 22 nt, Human
ucaggagaguguucaguggagg

SEQ ID NO: 257191 - RNA, 22 nt, Human
cugggccucauccagccacaac

SEQ ID NO: 257192 - RNA, 22 nt, Human
gcccuggauguacaggcauguu

SEQ ID NO: 257193 - RNA, 22 nt, Human
agaaacugacaggaaaugaauu

SEQ ID NO: 257194 - RNA, 22 nt, Human
ucucugugucuuagugaaggga

SEQ ID NO: 257195 - RNA, 23 nt, Human
uugcuugagcccaggaaguggag

SEQ ID NO: 257196 - RNA, 22 nt, Human
cguccagggcgggcuccccuca

SEQ ID NO: 257197 - RNA, 22 nt, Human
cccauauacuuuuucuggucca

SEQ ID NO: 257198 - RNA, 22 nt, Human
gagcuucagcugccaugacugu

SEQ ID NO: 257199 - RNA, 22 nt, Human
cagcugaauucuucagacucca

SEQ ID NO: 257200 - RNA, 22 nt, Human
cuggcucaccuccgcuccagca

SEQ ID NO: 257201 - RNA, 22 nt, Human
uaaggcuuuuguucagcguggg

SEQ ID NO: 257202 - RNA, 21 nt, Human
uaaauaauaaguugcugagau

SEQ ID NO: 257203 - RNA, 22 nt, Human
uauguacauggagagcaauuga

SEQ ID NO: 257204 - RNA, 22 nt, Human
cuacccuuaaguuucugugggg

SEQ ID NO: 257205 - RNA, 22 nt, Human
gguguccuuguugaacgaaaau

SEQ ID NO: 257206 - RNA, 22 nt, Human
gcuucugcgccuagccucaggu

SEQ ID NO: 257207 - RNA, 22 nt, Human
ucuuguauguguauuuugcugu

SEQ ID NO: 257208 - RNA, 21 nt, Human
cacagagauauuggugagccu

SEQ ID NO: 257209 - RNA, 21 nt, Human
uggcugagccaggugugugga

SEQ ID NO: 257210 - RNA, 22 nt, Human
cacagugugacugaccuucagc

SEQ ID NO: 257211 - RNA, 22 nt, Human
aaugcacaugucuuggccucac

SEQ ID NO: 257212 - RNA, 20 nt, Human
gagggcucguggauggauaa

SEQ ID NO: 257213 - RNA, 22 nt, Human
cccgagugucuacucacuccca

SEQ ID NO: 257214 - RNA, 22 nt, Human
agagauggauguuauuaugggu

SEQ ID NO: 257215 - RNA, 22 nt, Human
aagcagagcaagcguauuuauu

SEQ ID NO: 257216 - RNA, 19 nt, Human
agcugcagaccagaagugc

SEQ ID NO: 257217 - RNA, 22 nt, Human
gaccucagauuuucccaggcca

SEQ ID NO: 257218 - RNA, 22 nt, Human
aggacacaggcaggaggagauc

SEQ ID NO: 257219 - RNA, 22 nt, Human
agcuggcuaugcccugugaacc

SEQ ID NO: 257220 - RNA, 22 nt, Human
gagucaggcaugaagguaauua

SEQ ID NO: 257221 - RNA, 22 nt, Human
gucauauacacugcauguaauc

SEQ ID NO: 257222 - RNA, 22 nt, Human
caggcccucguggugagcuggg

SEQ ID NO: 257223 - RNA, 22 nt, Human
ccagcuuuggaguguuguugcu

SEQ ID NO: 257224 - RNA, 22 nt, Human
gcccagggcagggcaagaguga

SEQ ID NO: 257225 - RNA, 22 nt, Human
uauaauauuccuuguuguaggu

SEQ ID NO: 257226 - RNA, 22 nt, Human
gcucucugcaagucagcagccu

SEQ ID NO: 257227 - RNA, 22 nt, Human
ccagcccuguuuaugugucacu

SEQ ID NO: 257228 - RNA, 22 nt, Human
uaauuaacauacaaaacagcug

SEQ ID NO: 257229 - RNA, 22 nt, Human
ugcagggccaugguggcggcug

SEQ ID NO: 257230 - RNA, 22 nt, Human
uauuuugacuauuaaaccaaca

SEQ ID NO: 257231 - RNA, 22 nt, Human
acuguaaaaugagauauguaua

SEQ ID NO: 257232 - RNA, 22 nt, Human
ccucugcccuuuuccuguauca

SEQ ID NO: 257233 - RNA, 22 nt, Human
gucuuuauuugagauugucauu

SEQ ID NO: 257234 - RNA, 22 nt, Human
aaagcaguaguuuucaaauagu

SEQ ID NO: 257235 - RNA, 22 nt, Human
uaggugucaggccuccuccagc

SEQ ID NO: 257236 - RNA, 19 nt, Human
auuuauuguaugauuccau

SEQ ID NO: 257237 - RNA, 22 nt, Human
acugucuuuauuagaaucuuau

SEQ ID NO: 257238 - RNA, 22 nt, Human
agaguguaccaaauauccuaca

SEQ ID NO: 257239 - RNA, 22 nt, Human
auggcagaaaggcaugugggcc

SEQ ID NO: 257240 - RNA, 22 nt, Human
agauuagguaugguuuaaguag

SEQ ID NO: 257241 - RNA, 22 nt, Human
ugggaguccaagguuuuuauag

SEQ ID NO: 257242 - RNA, 23 nt, Human
ccucccaggcugcgagucccgag

SEQ ID NO: 257243 - RNA, 22 nt, Human
uggaagaauguuugccuuauaa

SEQ ID NO: 257244 - RNA, 22 nt, Human
ugugaaaggggucacagggaaa

SEQ ID NO: 257245 - RNA, 22 nt, Human
uggcuuccugcacagugucugc

SEQ ID NO: 257246 - RNA, 22 nt, Human
uguguauuaccauuuuacagcu

SEQ ID NO: 257247 - RNA, 22 nt, Human
uuagaaaucaccucugaagauc

SEQ ID NO: 257248 - RNA, 22 nt, Human
uuggcugcuuuacucugacggg

SEQ ID NO: 257249 - RNA, 22 nt, Human
aggacaugugccuccagggcag

SEQ ID NO: 257250 - RNA, 19 nt, Human
guucuuucauaguaagagc

SEQ ID NO: 257251 - RNA, 22 nt, Human
gaggaguggaguugcuggguug

SEQ ID NO: 257252 - RNA, 20 nt, Human
ugcagcacgggcccuuucca

SEQ ID NO: 257253 - RNA, 20 nt, Human
uauuuacaacuuagagccuc

SEQ ID NO: 257254 - RNA, 21 nt, Human
ggcuggucgcgugcaugucuc

SEQ ID NO: 257255 - RNA, 21 nt, Human
aagcaggacauaugaugcccu

SEQ ID NO: 257256 - RNA, 22 nt, Human
ucagcacuuggauuucagagau

SEQ ID NO: 257257 - RNA, 23 nt, Human
cugggcuguccugaggucaccuc

SEQ ID NO: 257258 - RNA, 22 nt, Human
agucucagaaaagaagcaugga

SEQ ID NO: 257259 - RNA, 19 nt, Human
agaaucaucuugaagugau

SEQ ID NO: 257260 - RNA, 22 nt, Human
ccacaucugcagucccuucugu

SEQ ID NO: 257261 - RNA, 22 nt, Human
ucugucugagggagugacauuu

SEQ ID NO: 257262 - RNA, 22 nt, Human
ucagcacugauagaagucaaua

SEQ ID NO: 257263 - RNA, 22 nt, Human
aaggaacuuggugcccgugccc

SEQ ID NO: 257264 - RNA, 22 nt, Human
uuggcagaaugggcagcuugag

SEQ ID NO: 257265 - RNA, 22 nt, Human
ugcuggccugggcugcaccuug

SEQ ID NO: 257266 - RNA, 22 nt, Human
uuggcagaugaacacaacugga

SEQ ID NO: 257267 - RNA, 18 nt, Human
ucugaaagcaccggugaa

SEQ ID NO: 257268 - RNA, 22 nt, Human
cagggcuguggcuuugugcugu

SEQ ID NO: 257269 - RNA, 22 nt, Human
cuuccuggcucggugccucacc

SEQ ID NO: 257270 - RNA, 19 nt, Human
uaauaagcaauauggaagu

SEQ ID NO: 257271 - RNA, 22 nt, Human
gcaacacaauaucccaguacau

SEQ ID NO: 257272 - RNA, 22 nt, Human
ccuggacucagaggugcuggug

SEQ ID NO: 257273 - RNA, 22 nt, Human
uaacacaugguucugucaggaa

SEQ ID NO: 257274 - RNA, 22 nt, Human
caagauguuaaaaccacccuug

SEQ ID NO: 257275 - RNA, 22 nt, Human
uucccucugcgcauugaauuuc

SEQ ID NO: 257276 - RNA, 22 nt, Human
gccccagccaaggugacacgaa

SEQ ID NO: 257277 - RNA, 22 nt, Human
ccuccucuggugcugccaaccc

SEQ ID NO: 257278 - RNA, 22 nt, Human
ucugaggaccaucggggagcug

SEQ ID NO: 257279 - RNA, 18 nt, Human
ggcggguguuuuauucac

SEQ ID NO: 257280 - RNA, 17 nt, Human
ggccuguguggcugcag

SEQ ID NO: 257281 - RNA, 22 nt, Human
uaaacaugugagugugcauaua

SEQ ID NO: 257282 - RNA, 22 nt, Human
cauuuaagagaaauauuuaguu

SEQ ID NO: 257283 - RNA, 22 nt, Human
cacgcgcacacucaggucaagu

SEQ ID NO: 257284 - RNA, 22 nt, Human
gggagagaaauuauagcaauga

SEQ ID NO: 257285 - RNA, 22 nt, Human
cugcagcaucgccaccugccuc

SEQ ID NO: 257286 - RNA, 22 nt, Human
auggcuggaggccgggcuuccu

SEQ ID NO: 257287 - RNA, 22 nt, Human
aaagacacacagccagcaagug

SEQ ID NO: 257288 - RNA, 22 nt, Human
cccuggcauaaaacuucuccag

SEQ ID NO: 257289 - RNA, 22 nt, Human
uuuauugggugcagugcccaca

SEQ ID NO: 257290 - RNA, 22 nt, Human
cacugcucgcugcagcauggcc

SEQ ID NO: 257291 - RNA, 22 nt, Human
uggcacagagggacccagcagc

SEQ ID NO: 257292 - RNA, 22 nt, Human
aggccaugggauuuccaauugg

SEQ ID NO: 257293 - RNA, 22 nt, Human
cagccgucagaugugccgcagc

SEQ ID NO: 257294 - RNA, 22 nt, Human
uaauucuagauugacauuuuga

SEQ ID NO: 257295 - RNA, 22 nt, Human
ucaucucagagagguauguuag

SEQ ID NO: 257296 - RNA, 22 nt, Human
ugaggccagugacauauauuaa

SEQ ID NO: 257297 - RNA, 22 nt, Human
guacaauuauuuaaauggugaa

SEQ ID NO: 257298 - RNA, 22 nt, Human
ugcuggcaucuuaauguucugu

SEQ ID NO: 257299 - RNA, 22 nt, Human
auauuuuguaacuuggaauagg

SEQ ID NO: 257300 - RNA, 22 nt, Human
ugagucuagguagagaaaugca

SEQ ID NO: 257301 - RNA, 22 nt, Human
uguuuucuggguggaagguacu

SEQ ID NO: 257302 - RNA, 22 nt, Human
uucagcacuuuguuuugcucau

SEQ ID NO: 257303 - RNA, 22 nt, Human
aggaugagccgcgcaagcugac

SEQ ID NO: 257304 - RNA, 22 nt, Human
cagcugugaauugucuuaucua

SEQ ID NO: 257305 - RNA, 22 nt, Human
cagcucauuccucaaucuagga

SEQ ID NO: 257306 - RNA, 23 nt, Human
ugagucuugagcuuuggauucug

SEQ ID NO: 257307 - RNA, 22 nt, Human
gcagcagcucaguucugggagg

SEQ ID NO: 257308 - RNA, 22 nt, Human
uuagaauuucugcucacuuuga

SEQ ID NO: 257309 - RNA, 22 nt, Human
aaagagcacccucaaugucuga

SEQ ID NO: 257310 - RNA, 22 nt, Human
aagcugccuuccaugugaggaa

SEQ ID NO: 257311 - RNA, 22 nt, Human
gaguauucaauauauacaaaug

SEQ ID NO: 257312 - RNA, 22 nt, Human
gaaauuuauuaucuacaucauu

SEQ ID NO: 257313 - RNA, 22 nt, Human
aaaaugaggaacggaucauggc

SEQ ID NO: 257314 - RNA, 22 nt, Human
ucuagagacaaaggaaggaggg

SEQ ID NO: 257315 - RNA, 22 nt, Human
acacaggcauagccauacaugu

SEQ ID NO: 257316 - RNA, 22 nt, Human
uuucuguauuuaaaagaucugg

SEQ ID NO: 257317 - RNA, 22 nt, Human
ccagggaugccaagcuuuacca

SEQ ID NO: 257318 - RNA, 22 nt, Human
cugccucuauaggaguccacca

SEQ ID NO: 257319 - RNA, 22 nt, Human
ccugccagugccucccacuggu

SEQ ID NO: 257320 - RNA, 22 nt, Human
acagagcugggugcccccugga

SEQ ID NO: 257321 - RNA, 23 nt, Human
uccugcagauaagcugguugaca

SEQ ID NO: 257322 - RNA, 22 nt, Human
gccugggauagaggcaaugcau

SEQ ID NO: 257323 - RNA, 22 nt, Human
uccaggagguagugcuuaauuu

SEQ ID NO: 257324 - RNA, 22 nt, Human
caguuacacaccauugugaaca

SEQ ID NO: 257325 - RNA, 22 nt, Human
cagaaugggaaggacugcaguu

SEQ ID NO: 257326 - RNA, 17 nt, Human
uuacaacaauucaugag

SEQ ID NO: 257327 - RNA, 22 nt, Human
uugagggaacaugagaaucauc

SEQ ID NO: 257328 - RNA, 22 nt, Human
aucaguuuggugcuuucaguga

SEQ ID NO: 257329 - RNA, 22 nt, Human
gcuggcaguuuccucaccgagg

SEQ ID NO: 257330 - RNA, 22 nt, Human
ucaaggaauuuaguuuaguaaa

SEQ ID NO: 257331 - RNA, 22 nt, Human
cuauugcuuuugugugcuccca

SEQ ID NO: 257332 - RNA, 22 nt, Human
ccagaaaacucuacaugcuugu

SEQ ID NO: 257333 - RNA, 23 nt, Human
gggagcuguggugaaaagaggug

SEQ ID NO: 257334 - RNA, 22 nt, Human
gggugcagugguucacgccugu

SEQ ID NO: 257335 - RNA, 22 nt, Human
uggggcaguuaauaaacauucu

SEQ ID NO: 257336 - RNA, 22 nt, Human
cugcagaaauauggaugugaua

SEQ ID NO: 257337 - RNA, 22 nt, Human
ccaggucuucacuuuacugaag

SEQ ID NO: 257338 - RNA, 22 nt, Human
uagaaacauucaguugcagucc

SEQ ID NO: 257339 - RNA, 22 nt, Human
augugggagauuucaggaggug

SEQ ID NO: 257340 - RNA, 22 nt, Human
gaaaggcuugcuuuugcucggu

SEQ ID NO: 257341 - RNA, 22 nt, Human
ggccagcugggccaccaggugc

SEQ ID NO: 257342 - RNA, 22 nt, Human
gcauuuaaauuugaacuucaga

SEQ ID NO: 257343 - RNA, 22 nt, Human
gaaaguuucucacacaugcaga

SEQ ID NO: 257344 - RNA, 22 nt, Human
aacacucucuguugguaaggcu

SEQ ID NO: 257345 - RNA, 22 nt, Human
cugccucagcguuguggcccua

SEQ ID NO: 257346 - RNA, 22 nt, Human
gcagagcuggaacugguacuca

SEQ ID NO: 257347 - RNA, 22 nt, Human
acauuaaaauggagaauuuuga

SEQ ID NO: 257348 - RNA, 22 nt, Human
aagcugugaagagcaagugagg

SEQ ID NO: 257349 - RNA, 22 nt, Human
ugauuucucauauuguucaaaa

SEQ ID NO: 257350 - RNA, 22 nt, Human
agguccugugguuuggguaaaa

SEQ ID NO: 257351 - RNA, 22 nt, Human
gggaucugggacaacagguggu

SEQ ID NO: 257352 - RNA, 19 nt, Human
acagugucuguauauaaau

SEQ ID NO: 257353 - RNA, 22 nt, Human
caccaggcacauaguaggcacu

SEQ ID NO: 257354 - RNA, 22 nt, Human
cagggcaaagagagcacaugcu

SEQ ID NO: 257355 - RNA, 22 nt, Human
cacaguuuugucuugguuucca

SEQ ID NO: 257356 - RNA, 22 nt, Human
cuucuuugaaaaaggcagucag

SEQ ID NO: 257357 - RNA, 22 nt, Human
aacuucuggauguuucaaaugu

SEQ ID NO: 257358 - RNA, 22 nt, Human
ucucugagcucaggagcugcag

SEQ ID NO: 257359 - RNA, 17 nt, Human
caucaaagaaauuucca

SEQ ID NO: 257360 - RNA, 22 nt, Human
cugaggagucagcuuacucacu

SEQ ID NO: 257361 - RNA, 22 nt, Human
gcuaggaguggugggucaagga

SEQ ID NO: 257362 - RNA, 22 nt, Human
cugcaggaauucaaagugagcu

SEQ ID NO: 257363 - RNA, 22 nt, Human
ccagcauccucagcucacuucu

SEQ ID NO: 257364 - RNA, 22 nt, Human
uaaacagccuaaaacuuucuuu

SEQ ID NO: 257365 - RNA, 22 nt, Human
aacacagaucaaaauauuuccu

SEQ ID NO: 257366 - RNA, 22 nt, Human
uuggcauuuauucuaaggucaa

SEQ ID NO: 257367 - RNA, 17 nt, Human
agcuccugcccauggcu

SEQ ID NO: 257368 - RNA, 22 nt, Human
cagcaucuucuagauccaggcu

SEQ ID NO: 257369 - RNA, 22 nt, Human
ggaugggagcagaggacgacca

SEQ ID NO: 257370 - RNA, 22 nt, Human
uaaaguagcaaguuuagacuga

SEQ ID NO: 257371 - RNA, 22 nt, Human
gggcuccagcagaggcagccgg

SEQ ID NO: 257372 - RNA, 22 nt, Human
cccuaggcugaggccagggugc

SEQ ID NO: 257373 - RNA, 22 nt, Human
acucagagucaauguuaauggc

SEQ ID NO: 257374 - RNA, 22 nt, Human
gaaacauucagucaacaguguu

SEQ ID NO: 257375 - RNA, 21 nt, Human
aggcugcuggcucaggguccu

SEQ ID NO: 257376 - RNA, 22 nt, Human
uuacacaugcucacuuauuugu

SEQ ID NO: 257377 - RNA, 19 nt, Human
uuuucucagcuucuagcgg

SEQ ID NO: 257378 - RNA, 20 nt, Human
acaggaugccugccauuuca

SEQ ID NO: 257379 - RNA, 22 nt, Human
aauguguauacuggcaauuaag

SEQ ID NO: 257380 - RNA, 22 nt, Human
agccugcuugagaguccuggcu

SEQ ID NO: 257381 - RNA, 22 nt, Human
uaaucacaucaggguaaauggg

SEQ ID NO: 257382 - RNA, 22 nt, Human
ugcauuaagugucugcauaugg

SEQ ID NO: 257383 - RNA, 22 nt, Human
caguggccugagccaggcuucc

SEQ ID NO: 257384 - RNA, 22 nt, Human
gcaaagugaaauggggcagaga

SEQ ID NO: 257385 - RNA, 22 nt, Human
uuugaaauaugugaugagagag

SEQ ID NO: 257386 - RNA, 22 nt, Human
acaaaagcuuuuggaggguugu

SEQ ID NO: 257387 - RNA, 22 nt, Human
ugcuuccugaggccgucuucuc

SEQ ID NO: 257388 - RNA, 22 nt, Human
cauuugcuguauuuucagauuc

SEQ ID NO: 257389 - RNA, 20 nt, Human
acucaucuacuccagacccu

SEQ ID NO: 257390 - RNA, 22 nt, Human
uacagaaaucacaucgcuuuga

SEQ ID NO: 257391 - RNA, 22 nt, Human
cugggagcccugacuagccugg

SEQ ID NO: 257392 - RNA, 22 nt, Human
cuggcucccaugagcucucacg

SEQ ID NO: 257393 - RNA, 22 nt, Human
agggcugagugggagagaguug

SEQ ID NO: 257394 - RNA, 22 nt, Human
agcccaggcagagggaugcuug

SEQ ID NO: 257395 - RNA, 22 nt, Human
uauugguaugguaagaauugaa

SEQ ID NO: 257396 - RNA, 22 nt, Human
agaaucuacauuuuaacaagau

SEQ ID NO: 257397 - RNA, 22 nt, Human
cagguggguguaugaaugcaaa

SEQ ID NO: 257398 - RNA, 22 nt, Human
gaggccaaguuggagaccaggu

SEQ ID NO: 257399 - RNA, 22 nt, Human
gagacacucaacaaagauauga

SEQ ID NO: 257400 - RNA, 17 nt, Human
uguuaauuccaaugaua

SEQ ID NO: 257401 - RNA, 22 nt, Human
cuggugguucaggagaauggcu

SEQ ID NO: 257402 - RNA, 22 nt, Human
cacaauguguuggguuaaguuu

SEQ ID NO: 257403 - RNA, 17 nt, Human
cuucucuggcagaagau

SEQ ID NO: 257404 - RNA, 22 nt, Human
uauaguuaguuucauaaucaug

SEQ ID NO: 257405 - RNA, 22 nt, Human
ugccccucagggaacggguauc

SEQ ID NO: 257406 - RNA, 22 nt, Human
ccugggucuauagacuucaaga

SEQ ID NO: 257407 - RNA, 22 nt, Human
agaucauaugaaaaauuucaag

SEQ ID NO: 257408 - RNA, 22 nt, Human
ggcugccuuuagaacggaugcu

SEQ ID NO: 257409 - RNA, 22 nt, Human
cucccaggguagggagagacua

SEQ ID NO: 257410 - RNA, 22 nt, Human
ugcccagagccucuuaccucca

SEQ ID NO: 257411 - RNA, 22 nt, Human
cccaguggugcuggcaucugug

SEQ ID NO: 257412 - RNA, 22 nt, Human
gcaggugggagccgcugccuga

SEQ ID NO: 257413 - RNA, 22 nt, Human
uaugugcaaaaugcuagacuag

SEQ ID NO: 257414 - RNA, 22 nt, Human
guuuaucacaauaaauaauucu

SEQ ID NO: 257415 - RNA, 22 nt, Human
uagcaggugcucauuuaacucc

SEQ ID NO: 257416 - RNA, 19 nt, Human
aggaaggaaccugagucug

SEQ ID NO: 257417 - RNA, 22 nt, Human
auguuuacugguuuauagaaua

SEQ ID NO: 257418 - RNA, 23 nt, Human
agcuccagggaacaggcaguagg

SEQ ID NO: 257419 - RNA, 22 nt, Human
ugccuggcugggcugcucaugg

SEQ ID NO: 257420 - RNA, 22 nt, Human
ggaagagagaucccauagaugu

SEQ ID NO: 257421 - RNA, 22 nt, Human
agcauucauugcuagaauguaa

SEQ ID NO: 257422 - RNA, 22 nt, Human
uagaagaacaugucaaacuaua

SEQ ID NO: 257423 - RNA, 23 nt, Human
aaacugcaucucugagccucagc

SEQ ID NO: 257424 - RNA, 22 nt, Human
uuccugugcuuaauucucacug

SEQ ID NO: 257425 - RNA, 22 nt, Human
gcuguagguuuuuccaggaguu

SEQ ID NO: 257426 - RNA, 22 nt, Human
gaggcucaaaccuggacagagc

SEQ ID NO: 257427 - RNA, 22 nt, Human
ccugggcugcaugauggcauuu

SEQ ID NO: 257428 - RNA, 22 nt, Human
guuucacugcaaacugacuuuu

SEQ ID NO: 257429 - RNA, 22 nt, Human
cugggccugagcucugaagagu

SEQ ID NO: 257430 - RNA, 23 nt, Human
aaaguguagccagguuaagaacc

SEQ ID NO: 257431 - RNA, 23 nt, Human
cccugcagucagggugagauggu

SEQ ID NO: 257432 - RNA, 22 nt, Human
uacaagcuggcgcaguuaagau

SEQ ID NO: 257433 - RNA, 22 nt, Human
uuccaagugaaaguagcuuugu

SEQ ID NO: 257434 - RNA, 22 nt, Human
aucaaaaccuugacuuuuaaug

SEQ ID NO: 257435 - RNA, 22 nt, Human
cccagcucugccaucuacccac

SEQ ID NO: 257436 - RNA, 22 nt, Human
ggacugggagaauggaggcaag

SEQ ID NO: 257437 - RNA, 22 nt, Human
cugagcagcaccuucaagaaac

SEQ ID NO: 257438 - RNA, 22 nt, Human
uuguauauauucuuaaagaugu

SEQ ID NO: 257439 - RNA, 22 nt, Human
cugcagcuccuucuggcaugug

SEQ ID NO: 257440 - RNA, 20 nt, Human
caucuccugccuccauguuc

SEQ ID NO: 257441 - RNA, 22 nt, Human
cucagcaagauuaagcagcuug

SEQ ID NO: 257442 - RNA, 22 nt, Human
guacuucuuuagucaauaugua

SEQ ID NO: 257443 - RNA, 19 nt, Human
guguccauggagcauggag

SEQ ID NO: 257444 - RNA, 22 nt, Human
agcgcaggaacacgucugccuu

SEQ ID NO: 257445 - RNA, 22 nt, Human
agaugaaaagauaagcagcaau

SEQ ID NO: 257446 - RNA, 22 nt, Human
cuaaaugcccuacaaugacugg

SEQ ID NO: 257447 - RNA, 22 nt, Human
acacaguugauugucacucagg

SEQ ID NO: 257448 - RNA, 22 nt, Human
uacaguaaaugugguagaaacu

SEQ ID NO: 257449 - RNA, 22 nt, Human
aaggcuuuuaacuacuguuuua

SEQ ID NO: 257450 - RNA, 21 nt, Human
uggcagagugcagucuauaca

SEQ ID NO: 257451 - RNA, 22 nt, Human
ugcagcuucuuguccugugauu

SEQ ID NO: 257452 - RNA, 22 nt, Human
uuccuacaucaccagggggagu

SEQ ID NO: 257453 - RNA, 22 nt, Human
auugaaaauauaauucuaggag

SEQ ID NO: 257454 - RNA, 22 nt, Human
ggaucuggggcucugcugcuca

SEQ ID NO: 257455 - RNA, 22 nt, Human
caggugucggucaggcgguuuu

SEQ ID NO: 257456 - RNA, 22 nt, Human
gaggccagugugcuguguuuuc

SEQ ID NO: 257457 - RNA, 22 nt, Human
aguacaaacuguuucaaaguag

SEQ ID NO: 257458 - RNA, 22 nt, Human
aagaugcaugcugaagcuggcu

SEQ ID NO: 257459 - RNA, 22 nt, Human
uauagauagacugacgauacag

SEQ ID NO: 257460 - RNA, 22 nt, Human
ugucugagucaugcagagauau

SEQ ID NO: 257461 - RNA, 22 nt, Human
agcagggcagcugaugcgcacg

SEQ ID NO: 257462 - RNA, 22 nt, Human
uggcucaggauaauuuucccaa

SEQ ID NO: 257463 - RNA, 22 nt, Human
agccauggcgccacuagaggga

SEQ ID NO: 257464 - RNA, 22 nt, Human
gccagcagcucuugggcgggca

SEQ ID NO: 257465 - RNA, 22 nt, Human
auacaaauuuauagaugcauuu

SEQ ID NO: 257466 - RNA, 19 nt, Human
ucaaaggcuuuuaggagac

SEQ ID NO: 257467 - RNA, 20 nt, Human
agguuccagccacaaccagc

SEQ ID NO: 257468 - RNA, 22 nt, Human
uauucauggggguccagguacc

SEQ ID NO: 257469 - RNA, 22 nt, Human
ugcuuaucguuuaguacauugc

SEQ ID NO: 257470 - RNA, 22 nt, Human
acugcagggcauccuggccaag

SEQ ID NO: 257471 - RNA, 22 nt, Human
aagcccugggauguucagcagu

SEQ ID NO: 257472 - RNA, 22 nt, Human
auuucuaaagagggugguuugg

SEQ ID NO: 257473 - RNA, 20 nt, Human
gggaucuuccaggcucuccu

SEQ ID NO: 257474 - RNA, 22 nt, Human
agggggcaggagagaccugcug

SEQ ID NO: 257475 - RNA, 22 nt, Human
agagucuuggcugagaacaaga

SEQ ID NO: 257476 - RNA, 22 nt, Human
auaaaauuugcuacuguuaaau

SEQ ID NO: 257477 - RNA, 22 nt, Human
gacauucagguguucaaugcca

SEQ ID NO: 257478 - RNA, 22 nt, Human
aggcacuucucaaauucaugcc

SEQ ID NO: 257479 - RNA, 22 nt, Human
cugcucuggcuguguacuucag

SEQ ID NO: 257480 - RNA, 22 nt, Human
ggucucugagugaggaccuggg

SEQ ID NO: 257481 - RNA, 22 nt, Human
agguccaggagauuuggcaauu

SEQ ID NO: 257482 - RNA, 22 nt, Human
cugacuucagggauaaaaagua

SEQ ID NO: 257483 - RNA, 22 nt, Human
ucagaggucacacagcaaguuu

SEQ ID NO: 257484 - RNA, 22 nt, Human
cucagagaaaaggagcaagggu

SEQ ID NO: 257485 - RNA, 22 nt, Human
ccagacccuuucuuggcaugug

SEQ ID NO: 257486 - RNA, 22 nt, Human
gcugggcuugguuucccugcuu

SEQ ID NO: 257487 - RNA, 19 nt, Human
auuugaaagcugugcuugc

SEQ ID NO: 257488 - RNA, 22 nt, Human
acugugaacggacugaagccca

SEQ ID NO: 257489 - RNA, 23 nt, Human
accuagaaauacguuuuacaugg

SEQ ID NO: 257490 - RNA, 21 nt, Human
acaguagcugacacacaguuu

SEQ ID NO: 257491 - RNA, 22 nt, Human
ugucacaaaaaucaguaauugc

SEQ ID NO: 257492 - RNA, 22 nt, Human
auaaacugguaggaaaacagua

SEQ ID NO: 257493 - RNA, 22 nt, Human
auucucugaugcagguggaaga

SEQ ID NO: 257494 - RNA, 22 nt, Human
aagaugacagaugcuuagaguc

SEQ ID NO: 257495 - RNA, 22 nt, Human
cucaggccaauaagcuccagcc

SEQ ID NO: 257496 - RNA, 22 nt, Human
uugauucaaaacaggagguagg

SEQ ID NO: 257497 - RNA, 22 nt, Human
ggaaaagaaagggacugauugg

SEQ ID NO: 257498 - RNA, 22 nt, Human
ucuggugguauacaucuaggag

SEQ ID NO: 257499 - RNA, 22 nt, Human
ucagguguuuaaggauagugau

SEQ ID NO: 257500 - RNA, 22 nt, Human
guggcuucaccccaguugucuc

SEQ ID NO: 257501 - RNA, 23 nt, Human
ggcaccaggccauggagcgggag

SEQ ID NO: 257502 - RNA, 23 nt, Human
cccagaggagcagggcgugagau

SEQ ID NO: 257503 - RNA, 22 nt, Human
augcaguuuaucuccaaaucau

SEQ ID NO: 257504 - RNA, 22 nt, Human
aucgagggugaguacagcggac

SEQ ID NO: 257505 - RNA, 22 nt, Human
uggcauguauacuugaguagga

SEQ ID NO: 257506 - RNA, 16 nt, Human
aagccaguucagcauu

SEQ ID NO: 257507 - RNA, 16 nt, Human
uucuagaaaagaaggu

SEQ ID NO: 257508 - RNA, 22 nt, Human
uugagggagaaagcugaggugu

SEQ ID NO: 257509 - RNA, 22 nt, Human
cauuuauugaguggccacagug

SEQ ID NO: 257510 - RNA, 22 nt, Human
ucugaggagugacccucuugca

SEQ ID NO: 257511 - RNA, 22 nt, Human
uuaaagcuggcguuacaguuug

SEQ ID NO: 257512 - RNA, 22 nt, Human
ucucuuucuauaugugagucuu

SEQ ID NO: 257513 - RNA, 22 nt, Human
ugcuggagaacugcucuguguu

SEQ ID NO: 257514 - RNA, 22 nt, Human
aaugucuacauucugaauucgu

SEQ ID NO: 257515 - RNA, 22 nt, Human
aacuuccuucuaguucauaugu

SEQ ID NO: 257516 - RNA, 22 nt, Human
gagcccugcugggccuugucuc

SEQ ID NO: 257517 - RNA, 22 nt, Human
aggugggguguuggauguuuau

SEQ ID NO: 257518 - RNA, 22 nt, Human
aagauacauaaagguagagucu

SEQ ID NO: 257519 - RNA, 22 nt, Human
cugggcacuugcucacagcucu

SEQ ID NO: 257520 - RNA, 22 nt, Human
aucauuugaacagaauuuguuu

SEQ ID NO: 257521 - RNA, 19 nt, Human
auuugcuugucugcucugc

SEQ ID NO: 257522 - RNA, 22 nt, Human
ggaaggcuacaggaauccagcg

SEQ ID NO: 257523 - RNA, 22 nt, Human
uucuauugacauucacuguaac

SEQ ID NO: 257524 - RNA, 22 nt, Human
acuugguucuaacuaguguaua

SEQ ID NO: 257525 - RNA, 22 nt, Human
uacaagaaugucuuaaaagcuc

SEQ ID NO: 257526 - RNA, 22 nt, Human
gugcucagcccggaugagauca

SEQ ID NO: 257527 - RNA, 22 nt, Human
aaagugaggacuugaguacugu

SEQ ID NO: 257528 - RNA, 22 nt, Human
cccagagaaucuuucagaaagg

SEQ ID NO: 257529 - RNA, 22 nt, Human
uccuggcaguucagcccccuaa

SEQ ID NO: 257530 - RNA, 22 nt, Human
guggcccacacagacagcaucu

SEQ ID NO: 257531 - RNA, 22 nt, Human
uccauuuacuauucucauaucg

SEQ ID NO: 257532 - RNA, 22 nt, Human
gagggggaaagucccuggaguc

SEQ ID NO: 257533 - RNA, 21 nt, Human
ggaaagaaggcaaggcucagg

SEQ ID NO: 257534 - RNA, 22 nt, Human
caccacuucauaggcuuuaagg

SEQ ID NO: 257535 - RNA, 22 nt, Human
uugucuggucaaaucacuugua

SEQ ID NO: 257536 - RNA, 22 nt, Human
uuauucagcauuuagaggaagg

SEQ ID NO: 257537 - RNA, 22 nt, Human
agccuucaguaagggcuuagca

SEQ ID NO: 257538 - RNA, 22 nt, Human
ccagcagccagagaaggaccuc

SEQ ID NO: 257539 - RNA, 20 nt, Human
ucacagaaugccugaagaag

SEQ ID NO: 257540 - RNA, 22 nt, Human
ugcaggaguuaagugcucuccu

SEQ ID NO: 257541 - RNA, 22 nt, Human
auacaguaauuuguaacucauc

SEQ ID NO: 257542 - RNA, 22 nt, Human
gcagaggagcaaguugcuacag

SEQ ID NO: 257543 - RNA, 22 nt, Human
agaucuuuagaagauagaauca

SEQ ID NO: 257544 - RNA, 18 nt, Human
augaucuuagcaaauauu

SEQ ID NO: 257545 - RNA, 22 nt, Human
gaauacaaacuuaaggcuuuac

SEQ ID NO: 257546 - RNA, 22 nt, Human
auauaacucuccauuaagggcc

SEQ ID NO: 257547 - RNA, 22 nt, Human
uuucuuaggcucuaaaaugacu

SEQ ID NO: 257548 - RNA, 22 nt, Human
uagguuuacugaauuaguggaa

SEQ ID NO: 257549 - RNA, 22 nt, Human
ggucaggauccaagucugugcu

SEQ ID NO: 257550 - RNA, 22 nt, Human
ugaggagaaaugcucagagcca

SEQ ID NO: 257551 - RNA, 22 nt, Human
gcagcuuucuugcccuaaucuu

SEQ ID NO: 257552 - RNA, 22 nt, Human
gacaggcuagguugcuguccuc

SEQ ID NO: 257553 - RNA, 22 nt, Human
guccaggcugcccaggguccug

SEQ ID NO: 257554 - RNA, 22 nt, Human
ucucugggaguugagcagcagc

SEQ ID NO: 257555 - RNA, 22 nt, Human
aagcccagguaaguggcucaug

SEQ ID NO: 257556 - RNA, 22 nt, Human
uccugggauuugcccuuuucuc

SEQ ID NO: 257557 - RNA, 22 nt, Human
aacauuaauuacagucaaacau

SEQ ID NO: 257558 - RNA, 20 nt, Human
accaggagauggaggcaggg

SEQ ID NO: 257559 - RNA, 22 nt, Human
gaaggccaguuuugagauaggu

SEQ ID NO: 257560 - RNA, 22 nt, Human
cuggcccuucucuugcuuccug

SEQ ID NO: 257561 - RNA, 22 nt, Human
auccauauaggcagauggcaca

SEQ ID NO: 257562 - RNA, 22 nt, Human
aaaaauugcugagaacggaauu

SEQ ID NO: 257563 - RNA, 22 nt, Human
cagaagucacccucagaauaac

SEQ ID NO: 257564 - RNA, 22 nt, Human
ccacaucuaucuuuaguaugaa

SEQ ID NO: 257565 - RNA, 22 nt, Human
aaggaaagacauauaaaugacu

SEQ ID NO: 257566 - RNA, 22 nt, Human
ugcacagagagaugagacacgu

SEQ ID NO: 257567 - RNA, 22 nt, Human
uucuuauaaguuaauauuucca

SEQ ID NO: 257568 - RNA, 22 nt, Human
uauccauuaggucuauggucaa

SEQ ID NO: 257569 - RNA, 22 nt, Human
cucuucuugcuagacugagugc

SEQ ID NO: 257570 - RNA, 22 nt, Human
aaggccagccugagagcuaaca

SEQ ID NO: 257571 - RNA, 21 nt, Human
agcauucaaaagaugccauaa

SEQ ID NO: 257572 - RNA, 22 nt, Human
gcuggcagguccaagauagagc

SEQ ID NO: 257573 - RNA, 22 nt, Human
ugcucagcugcucuguauucuu

SEQ ID NO: 257574 - RNA, 22 nt, Human
gagccaagcucuucuccaugag

SEQ ID NO: 257575 - RNA, 22 nt, Human
auaaaggccaaaauuugcauuu

SEQ ID NO: 257576 - RNA, 22 nt, Human
gaacuacaguaagaauugaugu

SEQ ID NO: 257577 - RNA, 22 nt, Human
uaauguauaacaaauacucauc

SEQ ID NO: 257578 - RNA, 22 nt, Human
gugcaaaaguaauugcgguuuu

SEQ ID NO: 257579 - RNA, 22 nt, Human
caaauguauucucacuucaggg

SEQ ID NO: 257580 - RNA, 22 nt, Human
cagcaggaccauugaggcauca

SEQ ID NO: 257581 - RNA, 22 nt, Human
uggaggcaggagacagggcaaa

SEQ ID NO: 257582 - RNA, 22 nt, Human
gcuuacagauaaugaggagacu

SEQ ID NO: 257583 - RNA, 22 nt, Human
ugcuggcuggccuggccuggac

SEQ ID NO: 257584 - RNA, 22 nt, Human
auuugcuucauagaucugugga

SEQ ID NO: 257585 - RNA, 22 nt, Human
uccacauuauguuucuccuuuc

SEQ ID NO: 257586 - RNA, 22 nt, Human
uuucauaauagugcaguuuguu

SEQ ID NO: 257587 - RNA, 19 nt, Human
ugacaggcuguugccuuga

SEQ ID NO: 257588 - RNA, 22 nt, Human
aaacacauuuuaggaaaaucua

SEQ ID NO: 257589 - RNA, 22 nt, Human
auccacagucuuagccaucaaa

SEQ ID NO: 257590 - RNA, 22 nt, Human
gcauccaggcugccccucugcg

SEQ ID NO: 257591 - RNA, 22 nt, Human
ugaaguaggcagcaugcugaga

SEQ ID NO: 257592 - RNA, 22 nt, Human
aguauggggcugugugugcaca

SEQ ID NO: 257593 - RNA, 22 nt, Human
agugcccuggacggcggcccca

SEQ ID NO: 257594 - RNA, 22 nt, Human
gucucauugguucugccagagu

SEQ ID NO: 257595 - RNA, 22 nt, Human
cuucucuggcagaugugugucc

SEQ ID NO: 257596 - RNA, 22 nt, Human
uugcucaggcuggugugcagug

SEQ ID NO: 257597 - RNA, 22 nt, Human
guuauuaguaagacucgcacau

SEQ ID NO: 257598 - RNA, 22 nt, Human
ggcccaggcuggagugcggugg

SEQ ID NO: 257599 - RNA, 21 nt, Human
cagagcugaaggguguagugu

SEQ ID NO: 257600 - RNA, 22 nt, Human
cugcccugaccugccucagagu

SEQ ID NO: 257601 - RNA, 22 nt, Human
uuggcugccgagcgcaucccgg

SEQ ID NO: 257602 - RNA, 22 nt, Human
aaaauuaagugucugggaagcc

SEQ ID NO: 257603 - RNA, 22 nt, Human
ucagaggucagcagcuugccca

SEQ ID NO: 257604 - RNA, 22 nt, Human
gacccaggguauccagagcugc

SEQ ID NO: 257605 - RNA, 22 nt, Human
cacaugcuuagauuucagugga

SEQ ID NO: 257606 - RNA, 22 nt, Human
gcccugagcacugcugcugggg

SEQ ID NO: 257607 - RNA, 22 nt, Human
ccauagcaagaggagcagaaau

SEQ ID NO: 257608 - RNA, 22 nt, Human
uuucagaauagcaaagcaagcu

SEQ ID NO: 257609 - RNA, 22 nt, Human
agcaccaggcaccaaagggccu

SEQ ID NO: 257610 - RNA, 22 nt, Human
gcucuguguaaauguagggucc

SEQ ID NO: 257611 - RNA, 18 nt, Human
caggccuuugagacagaa

SEQ ID NO: 257612 - RNA, 22 nt, Human
agggcagcauugccuuucucca

SEQ ID NO: 257613 - RNA, 22 nt, Human
uuccugugucccgggcacccug

SEQ ID NO: 257614 - RNA, 22 nt, Human
ggacccuggagacccacuggga

SEQ ID NO: 257615 - RNA, 22 nt, Human
aaggaggaauaaagagguggug

SEQ ID NO: 257616 - RNA, 22 nt, Human
uucuggaaggguggaguagcuu

SEQ ID NO: 257617 - RNA, 22 nt, Human
ucuccugcagucagcagucuca

SEQ ID NO: 257618 - RNA, 22 nt, Human
agaggaauguauuucccugcaa

SEQ ID NO: 257619 - RNA, 22 nt, Human
uuuccauauucugcgucugcca

SEQ ID NO: 257620 - RNA, 22 nt, Human
ugcucagggagcauagugaauu

SEQ ID NO: 257621 - RNA, 22 nt, Human
gacaggaggcagagcucaggug

SEQ ID NO: 257622 - RNA, 22 nt, Human
acaguuuauugcacagguaacc

SEQ ID NO: 257623 - RNA, 22 nt, Human
cacauaauugaacgugaugagu

SEQ ID NO: 257624 - RNA, 22 nt, Human
gagggggucuaugagguagagc

SEQ ID NO: 257625 - RNA, 22 nt, Human
uuucaguugcagugguugucua

SEQ ID NO: 257626 - RNA, 22 nt, Human
auauucacaguaaguguagcag

SEQ ID NO: 257627 - RNA, 22 nt, Human
agaggccaauaguagguggcau

SEQ ID NO: 257628 - RNA, 22 nt, Human
gcuuccaguaaguugcugccau

SEQ ID NO: 257629 - RNA, 22 nt, Human
acauugaaagcauauuaucucc

SEQ ID NO: 257630 - RNA, 18 nt, Human
gggcccuggcguccgccc

SEQ ID NO: 257631 - RNA, 22 nt, Human
cccaggcacauccacucuguga

SEQ ID NO: 257632 - RNA, 22 nt, Human
ugucuuuaagcaaacaguguuu

SEQ ID NO: 257633 - RNA, 22 nt, Human
agggugcagucacaggaaaugu

SEQ ID NO: 257634 - RNA, 22 nt, Human
cuuuuccucaggaggagacgcg

SEQ ID NO: 257635 - RNA, 22 nt, Human
uuaaaugaacgagauaugcaac

SEQ ID NO: 257636 - RNA, 22 nt, Human
uccaggcugcagucuugcccuc

SEQ ID NO: 257637 - RNA, 17 nt, Human
uauacacagacagacug

SEQ ID NO: 257638 - RNA, 19 nt, Human
uguccucacagagcauaac

SEQ ID NO: 257639 - RNA, 22 nt, Human
acuucucugguugagguccaau

SEQ ID NO: 257640 - RNA, 21 nt, Human
uuggaacaagcagcaguuugc

SEQ ID NO: 257641 - RNA, 22 nt, Human
gguugcaaacuccugggaucaa

SEQ ID NO: 257642 - RNA, 22 nt, Human
agcaugaaaggcgugccaacuu

SEQ ID NO: 257643 - RNA, 22 nt, Human
uuggcagagccccagccuugga

SEQ ID NO: 257644 - RNA, 22 nt, Human
auuccucauuauuuacugagga

SEQ ID NO: 257645 - RNA, 22 nt, Human
ccugccaggcuuucagguuugg

SEQ ID NO: 257646 - RNA, 22 nt, Human
agcaaaauaagguaauuuauug

SEQ ID NO: 257647 - RNA, 22 nt, Human
cucuggccgcagcucagcucug

SEQ ID NO: 257648 - RNA, 22 nt, Human
aaagccuucaaguagauguaag

SEQ ID NO: 257649 - RNA, 22 nt, Human
cagcaucuuucucuucuggagu

SEQ ID NO: 257650 - RNA, 22 nt, Human
acaguucaagacaucaguauga

SEQ ID NO: 257651 - RNA, 22 nt, Human
aaaguuguucaguaagaaacuc

SEQ ID NO: 257652 - RNA, 22 nt, Human
cugcccagaagccagaugggca

SEQ ID NO: 257653 - RNA, 22 nt, Human
aucagaaauagucauguuacuu

SEQ ID NO: 257654 - RNA, 22 nt, Human
ccauggcauuuuaugugucuua

SEQ ID NO: 257655 - RNA, 22 nt, Human
gugcagggcccuccuaacaucu

SEQ ID NO: 257656 - RNA, 22 nt, Human
cacauuaaaauccuaacuucca

SEQ ID NO: 257657 - RNA, 22 nt, Human
uagcuucuggaguguuugaaaa

SEQ ID NO: 257658 - RNA, 22 nt, Human
gaaaugugaccuacuuccuugu

SEQ ID NO: 257659 - RNA, 22 nt, Human
uacaggcuagggagagugacug

SEQ ID NO: 257660 - RNA, 22 nt, Human
uuacaguggucauuugggaaaa

SEQ ID NO: 257661 - RNA, 22 nt, Human
uccaaggcuccggcccuggcgu

SEQ ID NO: 257662 - RNA, 22 nt, Human
ucuucccagcugcugcgaugcc

SEQ ID NO: 257663 - RNA, 22 nt, Human
ugagaggaacaggcaguagguu

SEQ ID NO: 257664 - RNA, 22 nt, Human
caggcuggacauuagauacaua

SEQ ID NO: 257665 - RNA, 22 nt, Human
agaaggcagguuuuaaaauguc

SEQ ID NO: 257666 - RNA, 22 nt, Human
augacagcauucaagacauaga

SEQ ID NO: 257667 - RNA, 22 nt, Human
aacaaauuuagcucugagugcu

SEQ ID NO: 257668 - RNA, 22 nt, Human
ucauuuauauuguauucuguag

SEQ ID NO: 257669 - RNA, 22 nt, Human
ugggggagccuucacaguagcu

SEQ ID NO: 257670 - RNA, 22 nt, Human
aggaagcaguuuauaaugcauu

SEQ ID NO: 257671 - RNA, 22 nt, Human
uuaaauuauuucuagugaggug

SEQ ID NO: 257672 - RNA, 22 nt, Human
uuggcacacaguaagcccuaag

SEQ ID NO: 257673 - RNA, 22 nt, Human
auagcuuuuugucauagagucu

SEQ ID NO: 257674 - RNA, 22 nt, Human
agcagggcuucugugccugugc

SEQ ID NO: 257675 - RNA, 22 nt, Human
uuucuucagagagagcuuuccc

SEQ ID NO: 257676 - RNA, 22 nt, Human
ccuggagguggagguugcagug

SEQ ID NO: 257677 - RNA, 22 nt, Human
uggcccugccacucacugcuga

SEQ ID NO: 257678 - RNA, 22 nt, Human
uauucucagcaacacacaugga

SEQ ID NO: 257679 - RNA, 22 nt, Human
agaagggagagaaaguugguua

SEQ ID NO: 257680 - RNA, 22 nt, Human
ccucagaccccugcugagcuuc

SEQ ID NO: 257681 - RNA, 22 nt, Human
gcugaagauaagugaagaggcu

SEQ ID NO: 257682 - RNA, 22 nt, Human
aggaauguggccuagggaggag

SEQ ID NO: 257683 - RNA, 22 nt, Human
ccagcaccuugaucuuggaguu

SEQ ID NO: 257684 - RNA, 22 nt, Human
acaacugucuucuucaugcucc

SEQ ID NO: 257685 - RNA, 22 nt, Human
accaggcagagcugggccuuaa

SEQ ID NO: 257686 - RNA, 22 nt, Human
uucuaacaaguggcuuguuagu

SEQ ID NO: 257687 - RNA, 22 nt, Human
aucuuuagucaggcguggguau

SEQ ID NO: 257688 - RNA, 22 nt, Human
uagccaguuucuuuaacagcaa

SEQ ID NO: 257689 - RNA, 22 nt, Human
uucuuauucuugaaauguggga

SEQ ID NO: 257690 - RNA, 22 nt, Human
ucagcuccagaguugcacagug

SEQ ID NO: 257691 - RNA, 22 nt, Human
cuguggaaggccuguccugaaa

SEQ ID NO: 257692 - RNA, 22 nt, Human
aacugcucauuugagaguaugc

SEQ ID NO: 257693 - RNA, 22 nt, Human
gugaauuaggacaaaagggcuu

SEQ ID NO: 257694 - RNA, 22 nt, Human
uccaggcauguugggaagauga

SEQ ID NO: 257695 - RNA, 22 nt, Human
aauuuguuuucaagucacugga

SEQ ID NO: 257696 - RNA, 22 nt, Human
aaggcugcuuuuaacaugcaua

SEQ ID NO: 257697 - RNA, 21 nt, Human
cucugcugagcuccauuuuca

SEQ ID NO: 257698 - RNA, 22 nt, Human
guccaugauucuguguaguaga

SEQ ID NO: 257699 - RNA, 22 nt, Human
uuugcugucagccgcuauuuuc

SEQ ID NO: 257700 - RNA, 22 nt, Human
ggcagggguucauuuugucuua

SEQ ID NO: 257701 - RNA, 22 nt, Human
gagaaaugcaugcaugucauca

SEQ ID NO: 257702 - RNA, 22 nt, Human
uggcuccacaggccagggugug

SEQ ID NO: 257703 - RNA, 22 nt, Human
acuguccuggagcucacacucu

SEQ ID NO: 257704 - RNA, 22 nt, Human
ugcagccucucugcuucaggaa

SEQ ID NO: 257705 - RNA, 22 nt, Human
cauaggccacggucagcccaca

SEQ ID NO: 257706 - RNA, 22 nt, Human
gcaccugcuggggcugaugaga

SEQ ID NO: 257707 - RNA, 22 nt, Human
agcugucugugaacacagcauu

SEQ ID NO: 257708 - RNA, 22 nt, Human
auggcuccauagcuucguuuag

SEQ ID NO: 257709 - RNA, 22 nt, Human
uacauucaacaugucacuaugu

SEQ ID NO: 257710 - RNA, 22 nt, Human
cagaguggcagucccaggccca

SEQ ID NO: 257711 - RNA, 22 nt, Human
uggugaucagucaacugucuuc

SEQ ID NO: 257712 - RNA, 22 nt, Human
auggccaugccaguuuacagcc

SEQ ID NO: 257713 - RNA, 22 nt, Human
cauaaagucucauaauucacuu

SEQ ID NO: 257714 - RNA, 22 nt, Human
cugcacagaggucggucugcca

SEQ ID NO: 257715 - RNA, 22 nt, Human
uuaauuaagagauacugcagua

SEQ ID NO: 257716 - RNA, 21 nt, Human
aggaggggucuuucccacuga

SEQ ID NO: 257717 - RNA, 22 nt, Human
ggcuccuguuauuuaaugagga

SEQ ID NO: 257718 - RNA, 22 nt, Human
cucuuuuaugugacguguguga

SEQ ID NO: 257719 - RNA, 22 nt, Human
aaagcaguauaaguaacggaag

SEQ ID NO: 257720 - RNA, 23 nt, Human
gagggcucugagugcuugggcca

SEQ ID NO: 257721 - RNA, 17 nt, Human
ucugucugugguccacu

SEQ ID NO: 257722 - RNA, 22 nt, Human
cagugcugggcagaggagagcg

SEQ ID NO: 257723 - RNA, 22 nt, Human
uuuaauagggcccaaugagacu

SEQ ID NO: 257724 - RNA, 18 nt, Human
gcuucucauuucuaagca

SEQ ID NO: 257725 - RNA, 22 nt, Human
ugucuuuugccaaagaucaguu

SEQ ID NO: 257726 - RNA, 22 nt, Human
ucucugcuaagauugugucuag

SEQ ID NO: 257727 - RNA, 22 nt, Human
cuggaggagaacuugaggaagg

SEQ ID NO: 257728 - RNA, 22 nt, Human
cuauuuggccaagcugcccaca

SEQ ID NO: 257729 - RNA, 22 nt, Human
uccuccaagcagaggcccugaa

SEQ ID NO: 257730 - RNA, 22 nt, Human
ugucucugucuuccagggcugu

SEQ ID NO: 257731 - RNA, 22 nt, Human
cccagacucaucccugggagcu

SEQ ID NO: 257732 - RNA, 22 nt, Human
uggcccagacucugcucuuauc

SEQ ID NO: 257733 - RNA, 22 nt, Human
agggacacugaugagaaauucu

SEQ ID NO: 257734 - RNA, 22 nt, Human
gccagugccugcugcucagggc

SEQ ID NO: 257735 - RNA, 22 nt, Human
ucuggggagcagcccuggugag

SEQ ID NO: 257736 - RNA, 22 nt, Human
gaccccagaggaaggggcgccg

SEQ ID NO: 257737 - RNA, 22 nt, Human
uucucuguaguugccuggugga

SEQ ID NO: 257738 - RNA, 22 nt, Human
uuuuccagagcugucucuugca

SEQ ID NO: 257739 - RNA, 22 nt, Human
aauuacuguaauuuucuacagc

SEQ ID NO: 257740 - RNA, 22 nt, Human
ugguuccaaucgcacuggcuca

SEQ ID NO: 257741 - RNA, 22 nt, Human
caggcccuccugugaucugccu

SEQ ID NO: 257742 - RNA, 22 nt, Human
guggccucuguuggcuccuagg

SEQ ID NO: 257743 - RNA, 22 nt, Human
gaaucuuauccccaguccuuaa

SEQ ID NO: 257744 - RNA, 18 nt, Human
gacccagcagaugggcuu

SEQ ID NO: 257745 - RNA, 22 nt, Human
acauuucgugcucuguuuuguu

SEQ ID NO: 257746 - RNA, 20 nt, Human
agaaaaaguguggaaauuuc

SEQ ID NO: 257747 - RNA, 22 nt, Human
uuaaaguucauuaaaugagcca

SEQ ID NO: 257748 - RNA, 21 nt, Human
ucauuugugaucugauuucca

SEQ ID NO: 257749 - RNA, 22 nt, Human
uagaaugagaaaguguagcagg

SEQ ID NO: 257750 - RNA, 20 nt, Human
uuucugugauagagaggugu

SEQ ID NO: 257751 - RNA, 22 nt, Human
uuucuccacgccagcuugcuua

SEQ ID NO: 257752 - RNA, 17 nt, Human
auccuucuguucuuucu

SEQ ID NO: 257753 - RNA, 22 nt, Human
uucccaaaauauaacaguuaac

SEQ ID NO: 257754 - RNA, 22 nt, Human
gacuuccuaagauucaggaaug

SEQ ID NO: 257755 - RNA, 22 nt, Human
uggcucugugcuucuaguaucu

SEQ ID NO: 257756 - RNA, 22 nt, Human
uauaaauuaaugugcccaugag

SEQ ID NO: 257757 - RNA, 21 nt, Human
aggaggagagcuuggccuacc

SEQ ID NO: 257758 - RNA, 22 nt, Human
ggcaggcaaugaggaugggaag

SEQ ID NO: 257759 - RNA, 19 nt, Human
uuucccagucccaggagug

SEQ ID NO: 257760 - RNA, 17 nt, Human
cgggcauggagggcagg

SEQ ID NO: 257761 - RNA, 22 nt, Human
aguuacaucuguuauguguguu

SEQ ID NO: 257762 - RNA, 22 nt, Human
aagccauggcugcaucagccug

SEQ ID NO: 257763 - RNA, 22 nt, Human
uacaagaaauuucugcauauau

SEQ ID NO: 257764 - RNA, 19 nt, Human
acaaauuggcaaaaugcaa

SEQ ID NO: 257765 - RNA, 22 nt, Human
aauuaugagguagauaucacau

SEQ ID NO: 257766 - RNA, 22 nt, Human
caacauauaauauuugaguucu

SEQ ID NO: 257767 - RNA, 22 nt, Human
gaaaucaaggcuacauucaggu

SEQ ID NO: 257768 - RNA, 22 nt, Human
acauucucuuuuagaaagcugu

SEQ ID NO: 257769 - RNA, 19 nt, Human
aguguucugaguacuccuc

SEQ ID NO: 257770 - RNA, 19 nt, Human
ucucugccgaucagggccc

SEQ ID NO: 257771 - RNA, 22 nt, Human
cagauucaaccuaagacaaucu

SEQ ID NO: 257772 - RNA, 22 nt, Human
cgggcuccgggucuuugcaguc

SEQ ID NO: 257773 - RNA, 22 nt, Human
aaauacuauugaccaggucucu

SEQ ID NO: 257774 - RNA, 20 nt, Human
agcccuguaaauccccugga

SEQ ID NO: 257775 - RNA, 22 nt, Human
ggggcugagucagugggaagag

SEQ ID NO: 257776 - RNA, 22 nt, Human
gcugacucagaugcagcuggau

SEQ ID NO: 257777 - RNA, 22 nt, Human
uuugagaaggugacaaauucua

SEQ ID NO: 257778 - RNA, 22 nt, Human
uaccaccuccauccuccuuuca

SEQ ID NO: 257779 - RNA, 22 nt, Human
ucagcuggaagauggugcagaa

SEQ ID NO: 257780 - RNA, 22 nt, Human
gugcucagguucccaugagugc

SEQ ID NO: 257781 - RNA, 17 nt, Human
aggcauggucuggggug

SEQ ID NO: 257782 - RNA, 22 nt, Human
uguuccuguuuaaugugcucau

SEQ ID NO: 257783 - RNA, 22 nt, Human
cugggaaagcaagguuguggau

SEQ ID NO: 257784 - RNA, 22 nt, Human
ggcuccuuaucucuccuaugcc

SEQ ID NO: 257785 - RNA, 22 nt, Human
acauagaaccuggcacauagua

SEQ ID NO: 257786 - RNA, 22 nt, Human
cacagcugaaguagccaugugg

SEQ ID NO: 257787 - RNA, 18 nt, Human
gaaagccaugcagcagug

SEQ ID NO: 257788 - RNA, 22 nt, Human
ggguccuggaaucugcauuuua

SEQ ID NO: 257789 - RNA, 22 nt, Human
agaacuuuuggagacuuuuagu

SEQ ID NO: 257790 - RNA, 22 nt, Human
ugauacagagaaagcaucuuuu

SEQ ID NO: 257791 - RNA, 22 nt, Human
agguccugaugaucucugagag

SEQ ID NO: 257792 - RNA, 22 nt, Human
gggccagcucugugauguaggg

SEQ ID NO: 257793 - RNA, 22 nt, Human
aacaccuugcagggauuaugac

SEQ ID NO: 257794 - RNA, 22 nt, Human
ugcagaggcgccgugggugggg

SEQ ID NO: 257795 - RNA, 22 nt, Human
uuuagcaauuagaauccagcau

SEQ ID NO: 257796 - RNA, 22 nt, Human
ccaggcauugugagugggcagg

SEQ ID NO: 257797 - RNA, 22 nt, Human
uuuauauguuuguacaauuaag

SEQ ID NO: 257798 - RNA, 22 nt, Human
uguguaaauuuauuuacauaaa

SEQ ID NO: 257799 - RNA, 22 nt, Human
uccugagggcgauucagcaggu

SEQ ID NO: 257800 - RNA, 22 nt, Human
agaagcuauaacaacaauuaua

SEQ ID NO: 257801 - RNA, 22 nt, Human
caugucugaguagagugugauu

SEQ ID NO: 257802 - RNA, 22 nt, Human
auuacacuaaugugacaacaau

SEQ ID NO: 257803 - RNA, 22 nt, Human
aggaugaggcuggacacuucuu

SEQ ID NO: 257804 - RNA, 22 nt, Human
ggagaagggaacugaguuuuug

SEQ ID NO: 257805 - RNA, 23 nt, Human
cugcagagaacugagggacagcc

SEQ ID NO: 257806 - RNA, 22 nt, Human
cuuccucaggcauuagcuggac

SEQ ID NO: 257807 - RNA, 22 nt, Human
cucucugggggccaugccaaga

SEQ ID NO: 257808 - RNA, 22 nt, Human
ccucuguaagccuuagucuaga

SEQ ID NO: 257809 - RNA, 22 nt, Human
aggagcuggccacuaggaugca

SEQ ID NO: 257810 - RNA, 22 nt, Human
cuggaggcugaguugggucucc

SEQ ID NO: 257811 - RNA, 22 nt, Human
gcccuucacgaugguaucuuag

SEQ ID NO: 257812 - RNA, 22 nt, Human
ucaggaaguauaaucagauuca

SEQ ID NO: 257813 - RNA, 22 nt, Human
uuuauuagugcuuguaucacug

SEQ ID NO: 257814 - RNA, 22 nt, Human
uaaagguaugucuuaaucaaac

SEQ ID NO: 257815 - RNA, 22 nt, Human
uagauucucccaucaugagaug

SEQ ID NO: 257816 - RNA, 22 nt, Human
uuccaggaagcucucggccucu

SEQ ID NO: 257817 - RNA, 22 nt, Human
uuuacuucauuuccagugagga

SEQ ID NO: 257818 - RNA, 22 nt, Human
ucuuuguuugccuuuaucaaga

SEQ ID NO: 257819 - RNA, 22 nt, Human
ugaaggcauuugaguuggugag

SEQ ID NO: 257820 - RNA, 22 nt, Human
aagcaggaagcucagguccuug

SEQ ID NO: 257821 - RNA, 22 nt, Human
ucccagcauuaaugccugucag

SEQ ID NO: 257822 - RNA, 22 nt, Human
uccuucaaaaguugagagagcc

SEQ ID NO: 257823 - RNA, 22 nt, Human
ucagagcucaugagcagagcca

SEQ ID NO: 257824 - RNA, 21 nt, Human
gccuggcucucacuggccugg

SEQ ID NO: 257825 - RNA, 22 nt, Human
ugaacuuuguaguaauggagau

SEQ ID NO: 257826 - RNA, 20 nt, Human
ucuuuagauuuaucuuaugu

SEQ ID NO: 257827 - RNA, 22 nt, Human
gaaauauucuugucuuguuuuc

SEQ ID NO: 257828 - RNA, 22 nt, Human
cagaggccauauuucuucacuc

SEQ ID NO: 257829 - RNA, 21 nt, Human
uuucuucacuuugccccaugu

SEQ ID NO: 257830 - RNA, 22 nt, Human
ugcuccagccuaugcucuccgg

SEQ ID NO: 257831 - RNA, 22 nt, Human
ugggcugaguggcagccagagu

SEQ ID NO: 257832 - RNA, 22 nt, Human
ggccuuccuguuguguccaccg

SEQ ID NO: 257833 - RNA, 22 nt, Human
uauuugaaggcauacauuuuga

SEQ ID NO: 257834 - RNA, 22 nt, Human
ccucugggcugccugcacgggu

SEQ ID NO: 257835 - RNA, 22 nt, Human
ccagguguguacagaacagcac

SEQ ID NO: 257836 - RNA, 22 nt, Human
ggggaggaagcuggaacacggg

SEQ ID NO: 257837 - RNA, 22 nt, Human
ucugccagcccugugagucuug

SEQ ID NO: 257838 - RNA, 22 nt, Human
aagaacagauucagccugaacu

SEQ ID NO: 257839 - RNA, 22 nt, Human
uuuauuguguugaaacugaauu

SEQ ID NO: 257840 - RNA, 22 nt, Human
ugcuggaauaauuucauguuaa

SEQ ID NO: 257841 - RNA, 22 nt, Human
uauguguccuguuaccggcagc

SEQ ID NO: 257842 - RNA, 22 nt, Human
acuucccaacgugggccuccca

SEQ ID NO: 257843 - RNA, 18 nt, Human
acccugggcaauucacuc

SEQ ID NO: 257844 - RNA, 22 nt, Human
ucucaggacuccucuggccaua

SEQ ID NO: 257845 - RNA, 22 nt, Human
uacuguacucaacaugugaguu

SEQ ID NO: 257846 - RNA, 22 nt, Human
gagaccuuaagagaugucagcu

SEQ ID NO: 257847 - RNA, 22 nt, Human
gauguguccccagaggauugaa

SEQ ID NO: 257848 - RNA, 22 nt, Human
ugagcaggcucccacuucagug

SEQ ID NO: 257849 - RNA, 22 nt, Human
aucuuugguacuauucuuauca

SEQ ID NO: 257850 - RNA, 22 nt, Human
gcucacugcaaccucugcuucc

SEQ ID NO: 257851 - RNA, 22 nt, Human
guuguacauaugaggauaaguu

SEQ ID NO: 257852 - RNA, 22 nt, Human
gcacugcaucuacuggcaagua

SEQ ID NO: 257853 - RNA, 22 nt, Human
cuccaggacacuaacccaggcu

SEQ ID NO: 257854 - RNA, 22 nt, Human
ccacagcugaccgcaggugagc

SEQ ID NO: 257855 - RNA, 22 nt, Human
ugucauuuucauccuaaggagc

SEQ ID NO: 257856 - RNA, 22 nt, Human
cccuggcuuggcacucuccacu

SEQ ID NO: 257857 - RNA, 22 nt, Human
ggccucucaugcccagagccaa

SEQ ID NO: 257858 - RNA, 22 nt, Human
aacugaggucuccagugcagaa

SEQ ID NO: 257859 - RNA, 22 nt, Human
cugcuuuaaguauucaacaaag

SEQ ID NO: 257860 - RNA, 22 nt, Human
uuuaucuucugcaguucuggcu

SEQ ID NO: 257861 - RNA, 20 nt, Human
uggagcuguaaucuugucug

SEQ ID NO: 257862 - RNA, 22 nt, Human
aaaugcagcagcuaauugaaaa

SEQ ID NO: 257863 - RNA, 20 nt, Human
ugggcacagcuuuggagggc

SEQ ID NO: 257864 - RNA, 22 nt, Human
uguuaaaaaugcagauuccuau

SEQ ID NO: 257865 - RNA, 22 nt, Human
auguauguuaguguauuaucua

SEQ ID NO: 257866 - RNA, 22 nt, Human
acaugagauuagcucacccacu

SEQ ID NO: 257867 - RNA, 22 nt, Human
agggccagggaaacgaucagca

SEQ ID NO: 257868 - RNA, 22 nt, Human
auaugcacauacauacauaggu

SEQ ID NO: 257869 - RNA, 22 nt, Human
uuugcagagugcagaagcaucu

SEQ ID NO: 257870 - RNA, 22 nt, Human
gcacacaugcguguauaugggu

SEQ ID NO: 257871 - RNA, 22 nt, Human
uucuuacagcccuauuacuaaa

SEQ ID NO: 257872 - RNA, 22 nt, Human
cugagcugcuuugcuuuugggg

SEQ ID NO: 257873 - RNA, 22 nt, Human
gcacauccaaugauuguuuuga

SEQ ID NO: 257874 - RNA, 22 nt, Human
cuggcuccugaggcuuggcccc

SEQ ID NO: 257875 - RNA, 20 nt, Human
agugcuguggcugaauaaga

SEQ ID NO: 257876 - RNA, 17 nt, Human
agcacuaaaaugcuucc

SEQ ID NO: 257877 - RNA, 19 nt, Human
agccaguccaaguucuguc

SEQ ID NO: 257878 - RNA, 23 nt, Human
aggcugcuuacugguaucagagc

SEQ ID NO: 257879 - RNA, 20 nt, Human
acaguagaagggauuucaaa

SEQ ID NO: 257880 - RNA, 22 nt, Human
gaguguggaucccagaagcaga

SEQ ID NO: 257881 - RNA, 22 nt, Human
gauccugugguuuuccugugca

SEQ ID NO: 257882 - RNA, 22 nt, Human
uauuagguuggugcaaaauuaa

SEQ ID NO: 257883 - RNA, 22 nt, Human
uuuaaaggccuugcugagccac

SEQ ID NO: 257884 - RNA, 22 nt, Human
cagccugagccuucuguagcaa

SEQ ID NO: 257885 - RNA, 22 nt, Human
acagugcugaacgacauggaag

SEQ ID NO: 257886 - RNA, 22 nt, Human
ugucauuuucuaaucuguuguc

SEQ ID NO: 257887 - RNA, 22 nt, Human
auuuacauaauagacuuuaggu

SEQ ID NO: 257888 - RNA, 22 nt, Human
augguggacucuugauucaggc

SEQ ID NO: 257889 - RNA, 23 nt, Human
gcucagccucagcaggcccagga

SEQ ID NO: 257890 - RNA, 22 nt, Human
uacuuucuguccuucuguuaaa

SEQ ID NO: 257891 - RNA, 22 nt, Human
aggcagacaaguccagaacugg

SEQ ID NO: 257892 - RNA, 22 nt, Human
gagcugugauuggugucucacu

SEQ ID NO: 257893 - RNA, 22 nt, Human
cagucuucuaaccuagcagccu

SEQ ID NO: 257894 - RNA, 22 nt, Human
gaagcuccguacuaugacuuuu

SEQ ID NO: 257895 - RNA, 22 nt, Human
cuugagaaugugagccacagau

SEQ ID NO: 257896 - RNA, 22 nt, Human
agagccagcauuugacacuggc

SEQ ID NO: 257897 - RNA, 22 nt, Human
agccuggggcacuucuccaaac

SEQ ID NO: 257898 - RNA, 22 nt, Human
cuuauucauauauucucgguag

SEQ ID NO: 257899 - RNA, 22 nt, Human
ucacaggcaaagaagauuggug

SEQ ID NO: 257900 - RNA, 22 nt, Human
agcaaagcaguggcuaagcuga

SEQ ID NO: 257901 - RNA, 23 nt, Human
uuggagagggugaguagugucag

SEQ ID NO: 257902 - RNA, 22 nt, Human
cagaguggagauguguguggaa

SEQ ID NO: 257903 - RNA, 22 nt, Human
uugcaaaugugaauaauuacac

SEQ ID NO: 257904 - RNA, 22 nt, Human
ugaaacagaguggauacaguga

SEQ ID NO: 257905 - RNA, 22 nt, Human
augccagggucccuucagagau

SEQ ID NO: 257906 - RNA, 22 nt, Human
aaacuugauuuagaacuaaggc

SEQ ID NO: 257907 - RNA, 22 nt, Human
caggccugguugagcccugaga

SEQ ID NO: 257908 - RNA, 22 nt, Human
aaccuaugaacucuuggugugc

SEQ ID NO: 257909 - RNA, 22 nt, Human
caggcagcaggagcccugcucg

SEQ ID NO: 257910 - RNA, 22 nt, Human
cuugccugggacugaggcauuu

SEQ ID NO: 257911 - RNA, 22 nt, Human
aacagaggcucccugcacuugu

SEQ ID NO: 257912 - RNA, 22 nt, Human
gcugagggggaaggaaagcuga

SEQ ID NO: 257913 - RNA, 22 nt, Human
agucauuguaugaaguguacuc

SEQ ID NO: 257914 - RNA, 22 nt, Human
caaauccagaucccagucguag

SEQ ID NO: 257915 - RNA, 22 nt, Human
cagccagaaccuaggaugagcu

SEQ ID NO: 257916 - RNA, 22 nt, Human
aggcagcugaggucuggcgccc

SEQ ID NO: 257917 - RNA, 22 nt, Human
uucuaucauacuugaauacauu

SEQ ID NO: 257918 - RNA, 22 nt, Human
gcaucccucugaggggccaggc

SEQ ID NO: 257919 - RNA, 22 nt, Human
ugucccuggagcuucugucccc

SEQ ID NO: 257920 - RNA, 22 nt, Human
cacagggccuugugugacugca

SEQ ID NO: 257921 - RNA, 22 nt, Human
ucucuuccucagccuggggccu

SEQ ID NO: 257922 - RNA, 22 nt, Human
cugccuggaaugccagcuucuc

SEQ ID NO: 257923 - RNA, 22 nt, Human
guccagaaggaggucaaguugg

SEQ ID NO: 257924 - RNA, 22 nt, Human
cuggaagguucuuugugugccu

SEQ ID NO: 257925 - RNA, 22 nt, Human
cugggaaauauaauaaaguggu

SEQ ID NO: 257926 - RNA, 22 nt, Human
uuacaacauauuuagcuugauu

SEQ ID NO: 257927 - RNA, 22 nt, Human
acauguguaaaaguggauaaaa

SEQ ID NO: 257928 - RNA, 22 nt, Human
agggcacaagacucugagcccc

SEQ ID NO: 257929 - RNA, 22 nt, Human
auuggucucuagagucuauugu

SEQ ID NO: 257930 - RNA, 22 nt, Human
guuggugaguuucugaucacaa

SEQ ID NO: 257931 - RNA, 22 nt, Human
agcuagaacuacaggcaugugc

SEQ ID NO: 257932 - RNA, 22 nt, Human
gcagcccagguggaguaaucua

SEQ ID NO: 257933 - RNA, 22 nt, Human
gugcagugacccuggagagcug

SEQ ID NO: 257934 - RNA, 22 nt, Human
acccagccauguucaguucucu

SEQ ID NO: 257935 - RNA, 22 nt, Human
gggcuccaaaaucuaugucuuc

SEQ ID NO: 257936 - RNA, 22 nt, Human
ccuguggccgcgucgggcggcg

SEQ ID NO: 257937 - RNA, 22 nt, Human
cucuccagaauaugccgccgug

SEQ ID NO: 257938 - RNA, 22 nt, Human
auugauuuagcucaagacacau

SEQ ID NO: 257939 - RNA, 22 nt, Human
uccagcuggccuaacuucaggg

SEQ ID NO: 257940 - RNA, 23 nt, Human
uuucucauccagagagucagucc

SEQ ID NO: 257941 - RNA, 22 nt, Human
agaaguauaacuauuugcuuuc

SEQ ID NO: 257942 - RNA, 22 nt, Human
augaaaugauugaaaucuuuac

SEQ ID NO: 257943 - RNA, 22 nt, Human
acccagaggugucuagcaagcu

SEQ ID NO: 257944 - RNA, 22 nt, Human
ucccagcauaacaaacugcccg

SEQ ID NO: 257945 - RNA, 22 nt, Human
agaaacaagguguagguugacc

SEQ ID NO: 257946 - RNA, 22 nt, Human
cacaauuauuaucucuuucuac

SEQ ID NO: 257947 - RNA, 22 nt, Human
ggagugauggaaagugcuuggc

SEQ ID NO: 257948 - RNA, 22 nt, Human
ccagaggaguugaggcuuuggg

SEQ ID NO: 257949 - RNA, 22 nt, Human
ucugcccacagccuccugucca

SEQ ID NO: 257950 - RNA, 19 nt, Human
agggauauuuaaaaagcuc

SEQ ID NO: 257951 - RNA, 22 nt, Human
gccuguuuggcugcugacauug

SEQ ID NO: 257952 - RNA, 22 nt, Human
ugcuguggcaguuuauguauag

SEQ ID NO: 257953 - RNA, 22 nt, Human
uugcuuauagagaguuucauac

SEQ ID NO: 257954 - RNA, 22 nt, Human
cugaggagacagaagccaaaua

SEQ ID NO: 257955 - RNA, 22 nt, Human
ugcugagcgcauccggcggccg

SEQ ID NO: 257956 - RNA, 22 nt, Human
ucccugggucauucucuggcac

SEQ ID NO: 257957 - RNA, 22 nt, Human
uggacaugagcugagugggugu

SEQ ID NO: 257958 - RNA, 22 nt, Human
uugagaaugaugagauucuucc

SEQ ID NO: 257959 - RNA, 22 nt, Human
cagggcaggaugcugugauuau

SEQ ID NO: 257960 - RNA, 22 nt, Human
uugaaauuggguguggcuguca

SEQ ID NO: 257961 - RNA, 22 nt, Human
ugcucagcagaucucaggagau

SEQ ID NO: 257962 - RNA, 22 nt, Human
gaauacaaauaauaccaaggug

SEQ ID NO: 257963 - RNA, 22 nt, Human
acaggcauauuucuagauuaca

SEQ ID NO: 257964 - RNA, 22 nt, Human
cuguccugaggcagguggccug

SEQ ID NO: 257965 - RNA, 22 nt, Human
aggaaugucaaguagaugugcg

SEQ ID NO: 257966 - RNA, 22 nt, Human
uccugagagcagaguccaggug

SEQ ID NO: 257967 - RNA, 22 nt, Human
cugcucuggucucuucauguuu

SEQ ID NO: 257968 - RNA, 22 nt, Human
agaccuggauuccaauccuacc

SEQ ID NO: 257969 - RNA, 22 nt, Human
uuggaauucaaguuguagcuua

SEQ ID NO: 257970 - RNA, 23 nt, Human
cugggccuauggucugaauccaa

SEQ ID NO: 257971 - RNA, 22 nt, Human
cuggauguuuugcuaaggacuc

SEQ ID NO: 257972 - RNA, 19 nt, Human
ccuccccuuggaccagcaa

SEQ ID NO: 257973 - RNA, 22 nt, Human
acaaaagcacugcagaguaagc

SEQ ID NO: 257974 - RNA, 22 nt, Human
acacauuauagagaguauaaua

SEQ ID NO: 257975 - RNA, 22 nt, Human
accagcccucaggucagauacu

SEQ ID NO: 257976 - RNA, 22 nt, Human
ugcccacauucaaaaggugaug

SEQ ID NO: 257977 - RNA, 22 nt, Human
gaaggcaguaaauggcuguuuu

SEQ ID NO: 257978 - RNA, 22 nt, Human
uuagugaucaaaaucaaaauug

SEQ ID NO: 257979 - RNA, 22 nt, Human
agguauuauuagcaucucuauu

SEQ ID NO: 257980 - RNA, 22 nt, Human
ugugcagggaagggcaugcuau

SEQ ID NO: 257981 - RNA, 21 nt, Human
cccugcaggccagggcugagc

SEQ ID NO: 257982 - RNA, 22 nt, Human
ucaggcuguggcuuugaccgca

SEQ ID NO: 257983 - RNA, 22 nt, Human
cagggcccaggccacuggguug

SEQ ID NO: 257984 - RNA, 22 nt, Human
uuacagcauuuaaugagaucug

SEQ ID NO: 257985 - RNA, 22 nt, Human
aauguuucguaaauugucuaug

SEQ ID NO: 257986 - RNA, 22 nt, Human
aacaggcaauuuaggacucuuu

SEQ ID NO: 257987 - RNA, 22 nt, Human
auauuucucucagacauggaag

SEQ ID NO: 257988 - RNA, 22 nt, Human
auacacauauguguguauaugu

SEQ ID NO: 257989 - RNA, 22 nt, Human
cacaggacucgacugcagacag

SEQ ID NO: 257990 - RNA, 22 nt, Human
gugccuggcacacagaaggcaa

SEQ ID NO: 257991 - RNA, 22 nt, Human
gccuagugcacuggcagggcuc

SEQ ID NO: 257992 - RNA, 22 nt, Human
uuuuccuucugauacuccauuu

SEQ ID NO: 257993 - RNA, 22 nt, Human
ggcagcugucucugaguuagca

SEQ ID NO: 257994 - RNA, 22 nt, Human
ucucugggucucaguuuguaca

SEQ ID NO: 257995 - RNA, 22 nt, Human
cagaggaaggcucugggaaugu

SEQ ID NO: 257996 - RNA, 22 nt, Human
gcacaugucuuauucacuguua

SEQ ID NO: 257997 - RNA, 22 nt, Human
uaaguuuaaauguacaugaagc

SEQ ID NO: 257998 - RNA, 22 nt, Human
uggagcuguagccaccacccug

SEQ ID NO: 257999 - RNA, 22 nt, Human
aacauucaccucuaccuccuuc

SEQ ID NO: 258000 - RNA, 22 nt, Human
acuggcuuugagggaauagcua

SEQ ID NO: 258001 - RNA, 22 nt, Human
ugcuuuauguggcugauacuca

SEQ ID NO: 258002 - RNA, 22 nt, Human
ggagagguguauucaguggguc

SEQ ID NO: 258003 - RNA, 22 nt, Human
caauaacuuugauauuuugcgg

SEQ ID NO: 258004 - RNA, 22 nt, Human
acaagugcauggaaucagcugu

SEQ ID NO: 258005 - RNA, 22 nt, Human
uuccugguuuauaccuguauca

SEQ ID NO: 258006 - RNA, 22 nt, Human
ucucuggcagggauaucuggcu

SEQ ID NO: 258007 - RNA, 22 nt, Human
gaucccugcccucagccuggac

SEQ ID NO: 258008 - RNA, 22 nt, Human
ucagaaggaaacgaugccagcu

SEQ ID NO: 258009 - RNA, 22 nt, Human
augcauguuuauagggugcuuc

SEQ ID NO: 258010 - RNA, 22 nt, Human
gagugaguuggaaaacagacac

SEQ ID NO: 258011 - RNA, 22 nt, Human
ucuaggguguauaaggaagccu

SEQ ID NO: 258012 - RNA, 22 nt, Human
cuggcuccauuacucagcaucu

SEQ ID NO: 258013 - RNA, 22 nt, Human
gauccacaguuugaugaucaua

SEQ ID NO: 258014 - RNA, 22 nt, Human
ggcuggcuuucucuccgcaccu

SEQ ID NO: 258015 - RNA, 22 nt, Human
uagguucacacaucuuccagau

SEQ ID NO: 258016 - RNA, 19 nt, Human
auguuuacacucaggggcu

SEQ ID NO: 258017 - RNA, 21 nt, Human
guuauuuuaagugagcuuugc

SEQ ID NO: 258018 - RNA, 23 nt, Human
ccagggagguugauugguuaccc

SEQ ID NO: 258019 - RNA, 22 nt, Human
caaggccauauugccuguaugu

SEQ ID NO: 258020 - RNA, 22 nt, Human
uuaugcaaaggggccucuuccu

SEQ ID NO: 258021 - RNA, 22 nt, Human
uuuaguguagccuaagcagaau

SEQ ID NO: 258022 - RNA, 22 nt, Human
ggcaccaggaucagucugucau

SEQ ID NO: 258023 - RNA, 22 nt, Human
acauuccucagugccaguugag

SEQ ID NO: 258024 - RNA, 20 nt, Human
acucuguacugucaauguug

SEQ ID NO: 258025 - RNA, 22 nt, Human
uggacacacauguaugucagag

SEQ ID NO: 258026 - RNA, 22 nt, Human
aacagcagggaaauuccaaguc

SEQ ID NO: 258027 - RNA, 22 nt, Human
ugucaauauguaauaacugaau

SEQ ID NO: 258028 - RNA, 20 nt, Human
acaugaaaggaaacaggaaa

SEQ ID NO: 258029 - RNA, 22 nt, Human
agggcccuaaggaaggcacaca

SEQ ID NO: 258030 - RNA, 22 nt, Human
uugcuuuaucuaagcauggcca

SEQ ID NO: 258031 - RNA, 22 nt, Human
ugaaacauuugaugaucuuugg

SEQ ID NO: 258032 - RNA, 23 nt, Human
aaauaggaguaucuggaucauga

SEQ ID NO: 258033 - RNA, 22 nt, Human
gguaaaaaucacaaauacuuua

SEQ ID NO: 258034 - RNA, 22 nt, Human
ugccuacauuccuugcuuaugg

SEQ ID NO: 258035 - RNA, 22 nt, Human
acuguagucuaaauauagucuu

SEQ ID NO: 258036 - RNA, 22 nt, Human
aaaauccacaacgcucauuuca

SEQ ID NO: 258037 - RNA, 22 nt, Human
aggacuuagaacauuauguacu

SEQ ID NO: 258038 - RNA, 21 nt, Human
guucuacaguuuuagaauucc

SEQ ID NO: 258039 - RNA, 22 nt, Human
cuccaaucugggcaacagagca

SEQ ID NO: 258040 - RNA, 22 nt, Human
gcacccaggccggcgacugcag

SEQ ID NO: 258041 - RNA, 22 nt, Human
acagcagggggagcuguuggac

SEQ ID NO: 258042 - RNA, 22 nt, Human
ggaggggucucuagcgaggaga

SEQ ID NO: 258043 - RNA, 22 nt, Human
aagcaaagugcuuugccuccag

SEQ ID NO: 258044 - RNA, 22 nt, Human
gccagagcaugcacugccugca

SEQ ID NO: 258045 - RNA, 22 nt, Human
aauuaugauuggucuaaaccag

SEQ ID NO: 258046 - RNA, 22 nt, Human
acaugcauaggagaagucuuua

SEQ ID NO: 258047 - RNA, 22 nt, Human
acagagcuguacuacuuacuga

SEQ ID NO: 258048 - RNA, 22 nt, Human
ugcaauuuuaauacauuagagg

SEQ ID NO: 258049 - RNA, 18 nt, Human
gaaaauacucugggcuca

SEQ ID NO: 258050 - RNA, 22 nt, Human
ggagagaaauugagguagcaag

SEQ ID NO: 258051 - RNA, 22 nt, Human
gaguguuuuacucaaagaaaga

SEQ ID NO: 258052 - RNA, 22 nt, Human
uccaggcauguggccaguacuc

SEQ ID NO: 258053 - RNA, 22 nt, Human
uuugcaaagugacuauuauaug

SEQ ID NO: 258054 - RNA, 22 nt, Human
ugcacacauguuuacaagcauc

SEQ ID NO: 258055 - RNA, 23 nt, Human
acacugucucauggauagacugc

SEQ ID NO: 258056 - RNA, 22 nt, Human
ugugcuauuuuugcauaugugu

SEQ ID NO: 258057 - RNA, 23 nt, Human
uuguacagcccagauuccucuuc

SEQ ID NO: 258058 - RNA, 22 nt, Human
uucucucccaugaagcuucuau

SEQ ID NO: 258059 - RNA, 22 nt, Human
gaaagugcuaggaaguguuaga

SEQ ID NO: 258060 - RNA, 22 nt, Human
acagcaggcaugaaugacacug

SEQ ID NO: 258061 - RNA, 22 nt, Human
gcucuguaccugcggagaugag

SEQ ID NO: 258062 - RNA, 22 nt, Human
uggagagaagaggcagugugcu

SEQ ID NO: 258063 - RNA, 20 nt, Human
aaugaguuauuuuguauaug

SEQ ID NO: 258064 - RNA, 18 nt, Human
augcugcccucugagggu

SEQ ID NO: 258065 - RNA, 22 nt, Human
gcugguuucacccaaccgaugu

SEQ ID NO: 258066 - RNA, 22 nt, Human
agcaggagcauuuccaugauuc

SEQ ID NO: 258067 - RNA, 22 nt, Human
uucaugaaaguguaucuugugg

SEQ ID NO: 258068 - RNA, 22 nt, Human
uauuaaagagagaaucaucauc

SEQ ID NO: 258069 - RNA, 22 nt, Human
aaaucccacucacgaguuuugc

SEQ ID NO: 258070 - RNA, 22 nt, Human
uucugauucaugauccaguucu

SEQ ID NO: 258071 - RNA, 22 nt, Human
aaagagaaaaagaucccggcuc

SEQ ID NO: 258072 - RNA, 22 nt, Human
aauaagaauuuacuugucaaga

SEQ ID NO: 258073 - RNA, 22 nt, Human
aggaaugugaaacagguggcug

SEQ ID NO: 258074 - RNA, 23 nt, Human
ccagggagugcuacuaucaagcc

SEQ ID NO: 258075 - RNA, 22 nt, Human
ugacagacuacugccucuauug

SEQ ID NO: 258076 - RNA, 19 nt, Human
ccucuuccucugacacuau

SEQ ID NO: 258077 - RNA, 22 nt, Human
cugggucuggcuacugcuuccu

SEQ ID NO: 258078 - RNA, 22 nt, Human
acugaggauggauaggucauau

SEQ ID NO: 258079 - RNA, 20 nt, Human
acagguucauucugugugac

SEQ ID NO: 258080 - RNA, 20 nt, Human
aauuagcuuaagucaaucag

SEQ ID NO: 258081 - RNA, 22 nt, Human
agagggcaugcuugguggccug

SEQ ID NO: 258082 - RNA, 22 nt, Human
uguagaggaggaaacugaggcu

SEQ ID NO: 258083 - RNA, 22 nt, Human
ugcaagcaaguuuuugaagugg

SEQ ID NO: 258084 - RNA, 22 nt, Human
gccagugugucuugcaggcucc

SEQ ID NO: 258085 - RNA, 22 nt, Human
ugcagaggugaaagacuagcaa

SEQ ID NO: 258086 - RNA, 23 nt, Human
uugcuuagagaccuccucaucag

SEQ ID NO: 258087 - RNA, 22 nt, Human
uggguccuugcugauugcugag

SEQ ID NO: 258088 - RNA, 22 nt, Human
ccagguggaggugugagguccu

SEQ ID NO: 258089 - RNA, 22 nt, Human
ugagcuuacgugggaacagacu

SEQ ID NO: 258090 - RNA, 22 nt, Human
aguaucauguuggaauuaauca

SEQ ID NO: 258091 - RNA, 22 nt, Human
aaaaguauggugguccuuuuua

SEQ ID NO: 258092 - RNA, 22 nt, Human
uucuccaggcuugggccagguc

SEQ ID NO: 258093 - RNA, 18 nt, Human
uagauuaaaauugaauuc

SEQ ID NO: 258094 - RNA, 22 nt, Human
augagguuuuacugccauuuuc

SEQ ID NO: 258095 - RNA, 22 nt, Human
ucauguuuguuggaaauguggc

SEQ ID NO: 258096 - RNA, 22 nt, Human
agcuggaauccuacuucuaaca

SEQ ID NO: 258097 - RNA, 18 nt, Human
uuauucagacgcauauga

SEQ ID NO: 258098 - RNA, 22 nt, Human
auguuuuacccuuugcacaaac

SEQ ID NO: 258099 - RNA, 22 nt, Human
agauguguuucuaguuccugca

SEQ ID NO: 258100 - RNA, 22 nt, Human
agcaugcaggaaccacauggca

SEQ ID NO: 258101 - RNA, 22 nt, Human
cuuuccuccacucccuaggcuu

SEQ ID NO: 258102 - RNA, 22 nt, Human
auucuaaauguaauuuagaauu

SEQ ID NO: 258103 - RNA, 22 nt, Human
acaggcugggcgcuuccugcgg

SEQ ID NO: 258104 - RNA, 22 nt, Human
aggcagaugugauuaauuuccu

SEQ ID NO: 258105 - RNA, 22 nt, Human
ccuguaggaacgccuucauuug

SEQ ID NO: 258106 - RNA, 23 nt, Human
aguaacaugcaaauaacagucug

SEQ ID NO: 258107 - RNA, 22 nt, Human
uaguccugaccuugccaccagc

SEQ ID NO: 258108 - RNA, 22 nt, Human
ucuuggaggagaguaaguaccu

SEQ ID NO: 258109 - RNA, 22 nt, Human
ucuuccuugccuugcuucauca

SEQ ID NO: 258110 - RNA, 22 nt, Human
cuggguuccauguagccaagag

SEQ ID NO: 258111 - RNA, 22 nt, Human
uuuggaauaaucagauccuagu

SEQ ID NO: 258112 - RNA, 22 nt, Human
cuagggccaaaggcugugaugc

SEQ ID NO: 258113 - RNA, 22 nt, Human
aggccaggccuuucuccauucc

SEQ ID NO: 258114 - RNA, 22 nt, Human
ggcuauuucauuuaguacuagg

SEQ ID NO: 258115 - RNA, 22 nt, Human
gaaggagccgagcucuucccca

SEQ ID NO: 258116 - RNA, 22 nt, Human
caucuuuguuucaucuguccag

SEQ ID NO: 258117 - RNA, 22 nt, Human
uuuccaaguuguuaccuucuac

SEQ ID NO: 258118 - RNA, 22 nt, Human
gaguggggaaagccaggacaga

SEQ ID NO: 258119 - RNA, 22 nt, Human
uuauugaguuguaagagcucuu

SEQ ID NO: 258120 - RNA, 22 nt, Human
uuccaggagacuuccagaaaua

SEQ ID NO: 258121 - RNA, 19 nt, Human
cugggaguucacugcugcc

SEQ ID NO: 258122 - RNA, 22 nt, Human
gcagugggagcuuaggcagugc

SEQ ID NO: 258123 - RNA, 22 nt, Human
gaauuuuagaauaugugggcuu

SEQ ID NO: 258124 - RNA, 23 nt, Human
aguuuuucugcaugguucuguau

SEQ ID NO: 258125 - RNA, 22 nt, Human
agaagcaggccucacagaucug

SEQ ID NO: 258126 - RNA, 22 nt, Human
ggcacagcugaugcagacacac

SEQ ID NO: 258127 - RNA, 22 nt, Human
uggagcucugauuaaauuggaa

SEQ ID NO: 258128 - RNA, 22 nt, Human
cugcuuuaaaacugauacauga

SEQ ID NO: 258129 - RNA, 22 nt, Human
uccagaccauggauggcugcaa

SEQ ID NO: 258130 - RNA, 22 nt, Human
gaauuacauaguuucuagguuc

SEQ ID NO: 258131 - RNA, 22 nt, Human
ucccugggccuaucuuagcucc

SEQ ID NO: 258132 - RNA, 22 nt, Human
uuuaagaaguuauguuauaaau

SEQ ID NO: 258133 - RNA, 23 nt, Human
ccaggcaguagcuauugaaguga

SEQ ID NO: 258134 - RNA, 20 nt, Human
agauuaggggcuuucuucuu

SEQ ID NO: 258135 - RNA, 22 nt, Human
agagcugagaauguggcuuccu

SEQ ID NO: 258136 - RNA, 22 nt, Human
gcuccaggugucccagguaaaa

SEQ ID NO: 258137 - RNA, 22 nt, Human
uuaaagaugcagcuuuagagaa

SEQ ID NO: 258138 - RNA, 23 nt, Human
ucugcaagauaaugaagaugaua

SEQ ID NO: 258139 - RNA, 19 nt, Human
ucacauucagccuugcuga

SEQ ID NO: 258140 - RNA, 22 nt, Human
cagcuucugagcaagccagggg

SEQ ID NO: 258141 - RNA, 22 nt, Human
ggcagguguggaguguuauuuu

SEQ ID NO: 258142 - RNA, 22 nt, Human
gcccagcccugaggucacagcu

SEQ ID NO: 258143 - RNA, 22 nt, Human
uagaaacugauagucuugugcu

SEQ ID NO: 258144 - RNA, 22 nt, Human
uuguagcuuuuuaaugugcugc

SEQ ID NO: 258145 - RNA, 22 nt, Human
gcagauuacuggacugauucca

SEQ ID NO: 258146 - RNA, 22 nt, Human
uuugcaaauuucgucuccucag

SEQ ID NO: 258147 - RNA, 23 nt, Human
gggugggccaaauuagguagccu

SEQ ID NO: 258148 - RNA, 22 nt, Human
cagcuuuuuagaaucuagggca

SEQ ID NO: 258149 - RNA, 22 nt, Human
gagaaagauuguccuucagggg

SEQ ID NO: 258150 - RNA, 22 nt, Human
cagcauucuacuuugugaacug

SEQ ID NO: 258151 - RNA, 22 nt, Human
uacacaucacuguaucuuucag

SEQ ID NO: 258152 - RNA, 22 nt, Human
acccacgaagaugagcggcaug

SEQ ID NO: 258153 - RNA, 19 nt, Human
agcuuuuacuaacagcaga

SEQ ID NO: 258154 - RNA, 22 nt, Human
uuuacaagucagggacuguucu

SEQ ID NO: 258155 - RNA, 21 nt, Human
ugggccaguagaaaggaaggc

SEQ ID NO: 258156 - RNA, 22 nt, Human
uacaagaaggauggagcccacu

SEQ ID NO: 258157 - RNA, 22 nt, Human
uggcuuccuaggagcccgugcu

SEQ ID NO: 258158 - RNA, 21 nt, Human
uggggaggggaccugauuaug

SEQ ID NO: 258159 - RNA, 22 nt, Human
ugagcagggacuuuggagucug

SEQ ID NO: 258160 - RNA, 22 nt, Human
uguaggauuuucaccagaccuu

SEQ ID NO: 258161 - RNA, 22 nt, Human
ucugguccucucugugaugcua

SEQ ID NO: 258162 - RNA, 21 nt, Human
cagcuucuucugugaccuggu

SEQ ID NO: 258163 - RNA, 22 nt, Human
uccagagcagguggucagaagg

SEQ ID NO: 258164 - RNA, 22 nt, Human
aacucuuuggucucaggaaagg

SEQ ID NO: 258165 - RNA, 22 nt, Human
ugaggacauuuaucuuggcgca

SEQ ID NO: 258166 - RNA, 22 nt, Human
auuggaaaugcuacaaguuaga

SEQ ID NO: 258167 - RNA, 22 nt, Human
aagucucucugugugggauaag

SEQ ID NO: 258168 - RNA, 22 nt, Human
ggcagugccugaugcugcagga

SEQ ID NO: 258169 - RNA, 22 nt, Human
ccaaggagaaugacaccaugga

SEQ ID NO: 258170 - RNA, 22 nt, Human
acagcuggaguguuggugaggu

SEQ ID NO: 258171 - RNA, 22 nt, Human
auugcuuaucuaucuuuaaguc

SEQ ID NO: 258172 - RNA, 22 nt, Human
ggagcugaggaauagcuuugau

SEQ ID NO: 258173 - RNA, 22 nt, Human
aagcuguugaaguaauucagcc

SEQ ID NO: 258174 - RNA, 22 nt, Human
augaugucaugaauauauuagu

SEQ ID NO: 258175 - RNA, 22 nt, Human
ucaggucaggaaaauaagauug

SEQ ID NO: 258176 - RNA, 22 nt, Human
uuuccuugcacauugguuucca

SEQ ID NO: 258177 - RNA, 22 nt, Human
gccuggcaggccucaugagggg

SEQ ID NO: 258178 - RNA, 22 nt, Human
ccugggcuuacgaccucugacu

SEQ ID NO: 258179 - RNA, 22 nt, Human
cagaaguuugacauguuuagcu

SEQ ID NO: 258180 - RNA, 22 nt, Human
aaaguguaaggaauuuaaguaa

SEQ ID NO: 258181 - RNA, 22 nt, Human
gggugggagucuggcccucaaa

SEQ ID NO: 258182 - RNA, 21 nt, Human
guccuucagcaaguuaguggc

SEQ ID NO: 258183 - RNA, 22 nt, Human
auuaagggccaauccuccagcc

SEQ ID NO: 258184 - RNA, 22 nt, Human
cugggucaaggaaugcuggugg

SEQ ID NO: 258185 - RNA, 22 nt, Human
uaaaguucagugcaugaaugug

SEQ ID NO: 258186 - RNA, 22 nt, Human
augaggcaucugcagucacuag

SEQ ID NO: 258187 - RNA, 22 nt, Human
aaaugcaaggccaugugaagga

SEQ ID NO: 258188 - RNA, 20 nt, Human
aggacagcagcugccacuug

SEQ ID NO: 258189 - RNA, 22 nt, Human
gcagugcuaaggauucugccuu

SEQ ID NO: 258190 - RNA, 22 nt, Human
ugcuggaggaguuuacuguggc

SEQ ID NO: 258191 - RNA, 20 nt, Human
uuuacauuuugaaacaguga

SEQ ID NO: 258192 - RNA, 22 nt, Human
agaguuuggugaagcaauuuga

SEQ ID NO: 258193 - RNA, 22 nt, Human
agcagguguaucggucaccuac

SEQ ID NO: 258194 - RNA, 22 nt, Human
cuuaaauuggaugaguuaaguu

SEQ ID NO: 258195 - RNA, 22 nt, Human
gguggcaggcuggcauuggcaa

SEQ ID NO: 258196 - RNA, 22 nt, Human
ccuggcugguugucugauucua

SEQ ID NO: 258197 - RNA, 22 nt, Human
ggucaacagagguaaugguaac

SEQ ID NO: 258198 - RNA, 22 nt, Human
agcccugcgcucacguucugca

SEQ ID NO: 258199 - RNA, 22 nt, Human
gacagaaggcaucuagggcacg

SEQ ID NO: 258200 - RNA, 22 nt, Human
ucauaaagcauuucagcuuuug

SEQ ID NO: 258201 - RNA, 22 nt, Human
cuuuggcuugcacuauuacacu

SEQ ID NO: 258202 - RNA, 22 nt, Human
auuucaguagaaaaucuugauu

SEQ ID NO: 258203 - RNA, 22 nt, Human
gcuuucugggcuauagaacggg

SEQ ID NO: 258204 - RNA, 22 nt, Human
ccuguucaugaaacugcuuucc

SEQ ID NO: 258205 - RNA, 22 nt, Human
gcauucuuccugggcugggggc

SEQ ID NO: 258206 - RNA, 23 nt, Human
uuaggcacuuaguagggccagag

SEQ ID NO: 258207 - RNA, 22 nt, Human
gcaccucauuuugcagguagaa

SEQ ID NO: 258208 - RNA, 22 nt, Human
uagaaccuauuagaaauguauu

SEQ ID NO: 258209 - RNA, 22 nt, Human
cuggcugggaaguagaguaggu

SEQ ID NO: 258210 - RNA, 22 nt, Human
gucugcccugagcucccagugc

SEQ ID NO: 258211 - RNA, 22 nt, Human
uuaccuguguguuugauacaua

SEQ ID NO: 258212 - RNA, 22 nt, Human
agaggaauaugggugcacuaga

SEQ ID NO: 258213 - RNA, 18 nt, Human
uggaggaaucacaauggc

SEQ ID NO: 258214 - RNA, 22 nt, Human
agacagacacaugguaacagau

SEQ ID NO: 258215 - RNA, 22 nt, Human
uuguuugucauaauaucauuac

SEQ ID NO: 258216 - RNA, 22 nt, Human
aaacugcaauuauguuugcaga

SEQ ID NO: 258217 - RNA, 22 nt, Human
uacuucaugaguuaauaugcag

SEQ ID NO: 258218 - RNA, 22 nt, Human
ccugguggccuucagcccacaa

SEQ ID NO: 258219 - RNA, 22 nt, Human
caugcagucaauaaacaugugu

SEQ ID NO: 258220 - RNA, 22 nt, Human
gcuggcaggagccuuucccuuu

SEQ ID NO: 258221 - RNA, 22 nt, Human
agaggucagaacaggaaagugu

SEQ ID NO: 258222 - RNA, 22 nt, Human
ccuguucaaguugcagggcugg

SEQ ID NO: 258223 - RNA, 22 nt, Human
agucuucacucuucacuacuau

SEQ ID NO: 258224 - RNA, 23 nt, Human
aagcugaacuuguuugcugggag

SEQ ID NO: 258225 - RNA, 22 nt, Human
agcaggccacugcagcuggagc

SEQ ID NO: 258226 - RNA, 22 nt, Human
cccugagcucaggcccuugggg

SEQ ID NO: 258227 - RNA, 22 nt, Human
ggagccuggcccggcccuuggc

SEQ ID NO: 258228 - RNA, 22 nt, Human
cuggguguuggguacugaccgu

SEQ ID NO: 258229 - RNA, 22 nt, Human
guccaggccaugguggacacag

SEQ ID NO: 258230 - RNA, 22 nt, Human
gaaaugcaggcuuggauucagc

SEQ ID NO: 258231 - RNA, 22 nt, Human
cccugcagugugaccucaccua

SEQ ID NO: 258232 - RNA, 22 nt, Human
ccuuguuuuggaaccaaaggau

SEQ ID NO: 258233 - RNA, 22 nt, Human
ggagcccuccaucccuugcggc

SEQ ID NO: 258234 - RNA, 21 nt, Human
cagugagguccccagccuagg

SEQ ID NO: 258235 - RNA, 22 nt, Human
uuccuucuggaggcuccagggg

SEQ ID NO: 258236 - RNA, 21 nt, Human
agccagucucaguacuguacu

SEQ ID NO: 258237 - RNA, 22 nt, Human
aaaguuucaauagaggaagugg

SEQ ID NO: 258238 - RNA, 22 nt, Human
auguaacaggugaagcucugag

SEQ ID NO: 258239 - RNA, 21 nt, Human
uggagagcccuugccugaguc

SEQ ID NO: 258240 - RNA, 22 nt, Human
uuguauuagcuguaaauuuucu

SEQ ID NO: 258241 - RNA, 22 nt, Human
uggcuacauuuauacucucauu

SEQ ID NO: 258242 - RNA, 22 nt, Human
uuggccuaccugggaaugcugg

SEQ ID NO: 258243 - RNA, 22 nt, Human
ggccuggagucagggaaagcaa

SEQ ID NO: 258244 - RNA, 22 nt, Human
agcuagagcugagaagcacuug

SEQ ID NO: 258245 - RNA, 22 nt, Human
uccucccugggagcuucugagu

SEQ ID NO: 258246 - RNA, 22 nt, Human
auaaaggcagauuuuggaccuc

SEQ ID NO: 258247 - RNA, 22 nt, Human
caguccugggcacagcccuggg

SEQ ID NO: 258248 - RNA, 22 nt, Human
uagcaagaaguagcucuggauu

SEQ ID NO: 258249 - RNA, 22 nt, Human
uggcccuguguccugcugccag

SEQ ID NO: 258250 - RNA, 22 nt, Human
uguaagaagggccagagcucca

SEQ ID NO: 258251 - RNA, 21 nt, Human
ucccacugccacagcuucagg

SEQ ID NO: 258252 - RNA, 22 nt, Human
aaacaagcugcagacaagccau

SEQ ID NO: 258253 - RNA, 23 nt, Human
aaauagagauaggccagcuuugc

SEQ ID NO: 258254 - RNA, 23 nt, Human
cacacccaucacuaagagcuccu

SEQ ID NO: 258255 - RNA, 22 nt, Human
aaguacauuuuuaacuuacagc

SEQ ID NO: 258256 - RNA, 22 nt, Human
auagauguacguauguaaauca

SEQ ID NO: 258257 - RNA, 22 nt, Human
gggagaaaugucuggccugcug

SEQ ID NO: 258258 - RNA, 22 nt, Human
cagagccugcugccuucugaag

SEQ ID NO: 258259 - RNA, 22 nt, Human
agccccacacucucucugagaa

SEQ ID NO: 258260 - RNA, 19 nt, Human
gcugggugaggucguugga

SEQ ID NO: 258261 - RNA, 19 nt, Human
uacaagcuuaaaguaaugu

SEQ ID NO: 258262 - RNA, 22 nt, Human
aggaggaggcuggaguacaccc

SEQ ID NO: 258263 - RNA, 22 nt, Human
agauacaguguuacauuuuuau

SEQ ID NO: 258264 - RNA, 22 nt, Human
uguaauaaugaggcauccagcc

SEQ ID NO: 258265 - RNA, 22 nt, Human
cucuuccuuaagacuauaaaga

SEQ ID NO: 258266 - RNA, 22 nt, Human
aggcugagcugaccugguuugg

SEQ ID NO: 258267 - RNA, 22 nt, Human
uagaaacucucacgagugaaac

SEQ ID NO: 258268 - RNA, 22 nt, Human
uaggcagauuccauauuuuggc

SEQ ID NO: 258269 - RNA, 21 nt, Human
gaggcugucugcugcuggccu

SEQ ID NO: 258270 - RNA, 22 nt, Human
gccuuccuuacaccugcucagc

SEQ ID NO: 258271 - RNA, 22 nt, Human
agggccugagaccguggcuuga

SEQ ID NO: 258272 - RNA, 21 nt, Human
agcaggcagugggcuggauuu

SEQ ID NO: 258273 - RNA, 22 nt, Human
gcuguacaucacaauuugcugu

SEQ ID NO: 258274 - RNA, 22 nt, Human
ugaugaaaguucaguagugaau

SEQ ID NO: 258275 - RNA, 22 nt, Human
agcuuaaacucuuugaaguuau

SEQ ID NO: 258276 - RNA, 22 nt, Human
aaacagauaagggacaauuuca

SEQ ID NO: 258277 - RNA, 22 nt, Human
ggagggccaucuugggugugau

SEQ ID NO: 258278 - RNA, 22 nt, Human
uuaguguguccaguucugaaaa

SEQ ID NO: 258279 - RNA, 22 nt, Human
ucucuggcccuguuuucuaucu

SEQ ID NO: 258280 - RNA, 22 nt, Human
ggcaccagcaggcaccgaugcc

SEQ ID NO: 258281 - RNA, 22 nt, Human
gucuuucugccaugugaagaga

SEQ ID NO: 258282 - RNA, 22 nt, Human
ucucuguaaggaagaauuagau

SEQ ID NO: 258283 - RNA, 20 nt, Human
uacaucucucagaugucuaa

SEQ ID NO: 258284 - RNA, 22 nt, Human
agaggaagcugagaugccucuu

SEQ ID NO: 258285 - RNA, 22 nt, Human
aaauaauguuaggccuuugcuc

SEQ ID NO: 258286 - RNA, 22 nt, Human
acacaaugcauauuuuuccaga

SEQ ID NO: 258287 - RNA, 22 nt, Human
gagagggcaaacuuguagcuaa

SEQ ID NO: 258288 - RNA, 22 nt, Human
ugguuagaggcuucuugcuugg

SEQ ID NO: 258289 - RNA, 22 nt, Human
uuccaagagcuuuaauuguuga

SEQ ID NO: 258290 - RNA, 22 nt, Human
ccugagcuccaguagcagccag

SEQ ID NO: 258291 - RNA, 20 nt, Human
ugagccaggcuaggaagggc

SEQ ID NO: 258292 - RNA, 20 nt, Human
agugccagggcaggugagag

SEQ ID NO: 258293 - RNA, 22 nt, Human
acuggcuuggcaggaggaagau

SEQ ID NO: 258294 - RNA, 22 nt, Human
cuuugaaaccugcucugcagaa

SEQ ID NO: 258295 - RNA, 22 nt, Human
gcuucucuggccugcagggcau

SEQ ID NO: 258296 - RNA, 22 nt, Human
aggcccuguccauggugcugaa

SEQ ID NO: 258297 - RNA, 22 nt, Human
agaguuggcccacguguaggcg

SEQ ID NO: 258298 - RNA, 22 nt, Human
acugagacugaaucugaaugau

SEQ ID NO: 258299 - RNA, 22 nt, Human
cagugcaggcuuguggccgcag

SEQ ID NO: 258300 - RNA, 22 nt, Human
uaaaagaccacaaggugguaau

SEQ ID NO: 258301 - RNA, 22 nt, Human
aacaauaggaccuuuauguucu

SEQ ID NO: 258302 - RNA, 22 nt, Human
cuggccucauagccaagcugug

SEQ ID NO: 258303 - RNA, 20 nt, Human
uguccccuagaucccagcuc

SEQ ID NO: 258304 - RNA, 22 nt, Human
uugaccuuggcuuuuaaaauau

SEQ ID NO: 258305 - RNA, 22 nt, Human
cagaaguuccuauuuaccuccu

SEQ ID NO: 258306 - RNA, 22 nt, Human
aucugauucauugaaaugggug

SEQ ID NO: 258307 - RNA, 22 nt, Human
cuggcucccggggaucgagcac

SEQ ID NO: 258308 - RNA, 22 nt, Human
ucuguauucuauggcaguuggu

SEQ ID NO: 258309 - RNA, 22 nt, Human
auuauaugugggauagaauuua

SEQ ID NO: 258310 - RNA, 17 nt, Human
ucuuucccugggagaug

SEQ ID NO: 258311 - RNA, 22 nt, Human
uuuccuuuccaaaauucugccu

SEQ ID NO: 258312 - RNA, 22 nt, Human
gccccaccuugagagcagaaac

SEQ ID NO: 258313 - RNA, 22 nt, Human
uguuuugguuuaaguauaugaa

SEQ ID NO: 258314 - RNA, 22 nt, Human
uacauguauguguacgugcaug

SEQ ID NO: 258315 - RNA, 22 nt, Human
cggacccacucggaucccagcc

SEQ ID NO: 258316 - RNA, 22 nt, Human
aagaguuugucagaucugcacg

SEQ ID NO: 258317 - RNA, 22 nt, Human
gagcccucucuguaggcaagua

SEQ ID NO: 258318 - RNA, 22 nt, Human
gcuugguuucuaacuuuucaua

SEQ ID NO: 258319 - RNA, 22 nt, Human
gagcccagcuugcacauggagc

SEQ ID NO: 258320 - RNA, 21 nt, Human
ugguuucuaagcugucagucu

SEQ ID NO: 258321 - RNA, 22 nt, Human
ccuguucaccauggucacgugc

SEQ ID NO: 258322 - RNA, 22 nt, Human
ccugagucuuggcuucuuggcu

SEQ ID NO: 258323 - RNA, 22 nt, Human
guuccucagcccuuacuuagcc

SEQ ID NO: 258324 - RNA, 22 nt, Human
cauucaaacauuaauuuauuca

SEQ ID NO: 258325 - RNA, 22 nt, Human
agaacguggaauguggcuccuu

SEQ ID NO: 258326 - RNA, 22 nt, Human
uagcuccuggcugcagggccuc

SEQ ID NO: 258327 - RNA, 22 nt, Human
uggaugucauaguuggauauac

SEQ ID NO: 258328 - RNA, 21 nt, Human
uucuaaguguuaccuuuucuu

SEQ ID NO: 258329 - RNA, 22 nt, Human
gguuucaaugagaagugcuugu

SEQ ID NO: 258330 - RNA, 22 nt, Human
aggucuggaggcggagucagga

SEQ ID NO: 258331 - RNA, 22 nt, Human
uaacugguuucauaucauuucc

SEQ ID NO: 258332 - RNA, 22 nt, Human
gcccuccaugagacacagugua

SEQ ID NO: 258333 - RNA, 22 nt, Human
uuuauguacauauccacaagga

SEQ ID NO: 258334 - RNA, 22 nt, Human
cauggcagaaaccugagcugcu

SEQ ID NO: 258335 - RNA, 20 nt, Human
gcagccguggagacuaggag

SEQ ID NO: 258336 - RNA, 22 nt, Human
aaauaguuagcccugcauauau

SEQ ID NO: 258337 - RNA, 22 nt, Human
aaacaggcuuauauuuugcucu

SEQ ID NO: 258338 - RNA, 22 nt, Human
ugcacagaugggcuuguucaua

SEQ ID NO: 258339 - RNA, 22 nt, Human
acccauuuuuaaauauaacuug

SEQ ID NO: 258340 - RNA, 22 nt, Human
uacugaaagaauacauaauuuc

SEQ ID NO: 258341 - RNA, 22 nt, Human
gcugccuucccggaaugucauc

SEQ ID NO: 258342 - RNA, 22 nt, Human
aguguccuacagcuccugccug

SEQ ID NO: 258343 - RNA, 22 nt, Human
gcagugcuaaguagcuggccca

SEQ ID NO: 258344 - RNA, 22 nt, Human
agaggccaugcuagaggccugg

SEQ ID NO: 258345 - RNA, 22 nt, Human
gggcagcuguaucugagcuuau

SEQ ID NO: 258346 - RNA, 22 nt, Human
ggccuccaucuuaucuuacucu

SEQ ID NO: 258347 - RNA, 22 nt, Human
ggagaaaggcauagcagaaccu

SEQ ID NO: 258348 - RNA, 22 nt, Human
cccagcaggugccaucacucug

SEQ ID NO: 258349 - RNA, 22 nt, Human
uuccaggagaggaaaccugauu

SEQ ID NO: 258350 - RNA, 22 nt, Human
cuccuggaagcccgcccugcug

SEQ ID NO: 258351 - RNA, 22 nt, Human
aauaucuuggcccaacuccaga

SEQ ID NO: 258352 - RNA, 22 nt, Human
auaugcauuuaccuggcauaua

SEQ ID NO: 258353 - RNA, 22 nt, Human
gaaguauuacucugaauguauu

SEQ ID NO: 258354 - RNA, 22 nt, Human
ggggacugaggcacugaaggug

SEQ ID NO: 258355 - RNA, 22 nt, Human
uaggaagaugaguaucaacuug

SEQ ID NO: 258356 - RNA, 22 nt, Human
uuccaaacugccaauucagaag

SEQ ID NO: 258357 - RNA, 22 nt, Human
gcucaguguuucugguagaaaa

SEQ ID NO: 258358 - RNA, 22 nt, Human
aggcugaggugugcugugaucg

SEQ ID NO: 258359 - RNA, 21 nt, Human
auggcugguggcucagccucc

SEQ ID NO: 258360 - RNA, 22 nt, Human
ugugugaggugguucugagaag

SEQ ID NO: 258361 - RNA, 21 nt, Human
uccugggagucugagauccug

SEQ ID NO: 258362 - RNA, 22 nt, Human
ggcuucuuuguaacgugccagc

SEQ ID NO: 258363 - RNA, 22 nt, Human
auucugggaguguaggaugguu

SEQ ID NO: 258364 - RNA, 22 nt, Human
cugggagcgcagcaggcacaac

SEQ ID NO: 258365 - RNA, 22 nt, Human
uuggugaacacauacacauuuu

SEQ ID NO: 258366 - RNA, 22 nt, Human
aagcuuuaugacuuggagacag

SEQ ID NO: 258367 - RNA, 22 nt, Human
uacugucuggguucccaagcaa

SEQ ID NO: 258368 - RNA, 21 nt, Human
cacacagcugcccuuagguag

SEQ ID NO: 258369 - RNA, 19 nt, Human
uggcagggagugauauuag

SEQ ID NO: 258370 - RNA, 22 nt, Human
uguugcaguaaaaauggagagg

SEQ ID NO: 258371 - RNA, 22 nt, Human
ccauguguucaauaagggaguu

SEQ ID NO: 258372 - RNA, 23 nt, Human
uucauuuaggaguucauaagagc

SEQ ID NO: 258373 - RNA, 23 nt, Human
acucaaauuucgcuuggaguuca

SEQ ID NO: 258374 - RNA, 22 nt, Human
gggcugcuguguuccugaggca

SEQ ID NO: 258375 - RNA, 22 nt, Human
ucuucagauaaagggagaguau

SEQ ID NO: 258376 - RNA, 22 nt, Human
cagacagggguaaccuuccuca

SEQ ID NO: 258377 - RNA, 22 nt, Human
gggcuucuauucuggcacaaga

SEQ ID NO: 258378 - RNA, 22 nt, Human
ugcuugaacaaggauaaauuug

SEQ ID NO: 258379 - RNA, 22 nt, Human
cagcuuuggcccagucgggagg

SEQ ID NO: 258380 - RNA, 22 nt, Human
agaaaggcaauauuaacuacac

SEQ ID NO: 258381 - RNA, 22 nt, Human
uaagaugguuguagauggacug

SEQ ID NO: 258382 - RNA, 22 nt, Human
auaacaugaccugugcuucaca

SEQ ID NO: 258383 - RNA, 22 nt, Human
cucaguuucugacauuaaaauc

SEQ ID NO: 258384 - RNA, 22 nt, Human
gcacuggagaauggcuguauuc

SEQ ID NO: 258385 - RNA, 22 nt, Human
uggcuuccaguaaucaggauuu

SEQ ID NO: 258386 - RNA, 22 nt, Human
gagagagaaggccugugggugu

SEQ ID NO: 258387 - RNA, 20 nt, Human
ucaagcuaguuuccaaaguu

SEQ ID NO: 258388 - RNA, 22 nt, Human
cuggacagugcugcuugagaug

SEQ ID NO: 258389 - RNA, 22 nt, Human
ccugugcagcccuugccaguuu

SEQ ID NO: 258390 - RNA, 22 nt, Human
gccuugccgcucagcagugggg

SEQ ID NO: 258391 - RNA, 22 nt, Human
ugaggcagcaauuguauuguau

SEQ ID NO: 258392 - RNA, 22 nt, Human
cucugcaggggaggcaugcacu

SEQ ID NO: 258393 - RNA, 22 nt, Human
ucagugcacaaugacgguggcu

SEQ ID NO: 258394 - RNA, 22 nt, Human
caguccugucuuuaugacuuca

SEQ ID NO: 258395 - RNA, 22 nt, Human
ugaaucaaagcugaaguuuuca

SEQ ID NO: 258396 - RNA, 22 nt, Human
augucgauaggagugccaucgg

SEQ ID NO: 258397 - RNA, 22 nt, Human
agagcccucucauuggcuuauu

SEQ ID NO: 258398 - RNA, 22 nt, Human
ccuggggagccgccugagcccc

SEQ ID NO: 258399 - RNA, 22 nt, Human
aggaggggcauagaaauguaau

SEQ ID NO: 258400 - RNA, 22 nt, Human
ugaauacuauuucauaaugugg

SEQ ID NO: 258401 - RNA, 22 nt, Human
gguuccccaggcggcccuugga

SEQ ID NO: 258402 - RNA, 21 nt, Human
accucaagcaacaaccaaggu

SEQ ID NO: 258403 - RNA, 19 nt, Human
cugucugugcagagaugug

SEQ ID NO: 258404 - RNA, 22 nt, Human
caaacauugcuaccagagguuu

SEQ ID NO: 258405 - RNA, 22 nt, Human
gcugccuugaacauccuaagua

SEQ ID NO: 258406 - RNA, 21 nt, Human
uucugggaaaugagcuggggc

SEQ ID NO: 258407 - RNA, 22 nt, Human
agcagcagaagguuugcaccca

SEQ ID NO: 258408 - RNA, 22 nt, Human
cagcacuguucccagaccacug

SEQ ID NO: 258409 - RNA, 22 nt, Human
uuggcugagagcugcucugcag

SEQ ID NO: 258410 - RNA, 22 nt, Human
aggcuggcccuacuggcugccu

SEQ ID NO: 258411 - RNA, 22 nt, Human
ucaccaggauuccuaucaguag

SEQ ID NO: 258412 - RNA, 22 nt, Human
cucaggcacgggucagugagcg

SEQ ID NO: 258413 - RNA, 22 nt, Human
agugacagggaaaaugacacug

SEQ ID NO: 258414 - RNA, 22 nt, Human
ugaggaugguuaaagaacauug

SEQ ID NO: 258415 - RNA, 22 nt, Human
aauacuugucagaugaauaaga

SEQ ID NO: 258416 - RNA, 22 nt, Human
ucagggcauucaagaggccugg

SEQ ID NO: 258417 - RNA, 22 nt, Human
uucaugaauguuccaugugagu

SEQ ID NO: 258418 - RNA, 22 nt, Human
gucuggaggcacuuucucauga

SEQ ID NO: 258419 - RNA, 22 nt, Human
gcggggcacagugauggagcac

SEQ ID NO: 258420 - RNA, 22 nt, Human
agacaucaaugaucagagguag

SEQ ID NO: 258421 - RNA, 22 nt, Human
auucaaacuguguuaggcagca

SEQ ID NO: 258422 - RNA, 22 nt, Human
uuuaguuauuguuacaguauga

SEQ ID NO: 258423 - RNA, 22 nt, Human
gagagucuagugcaccuaguuu

SEQ ID NO: 258424 - RNA, 22 nt, Human
cagcuuggcuuccgcuuuacug

SEQ ID NO: 258425 - RNA, 22 nt, Human
gcagggccuuagcagcggcugc

SEQ ID NO: 258426 - RNA, 22 nt, Human
gcugggcagccuggccgcugcc

SEQ ID NO: 258427 - RNA, 22 nt, Human
gagcacugauuuauuuuugucu

SEQ ID NO: 258428 - RNA, 22 nt, Human
ccagcuccccucagcagguaau

SEQ ID NO: 258429 - RNA, 22 nt, Human
cuuuuacugugaaaagaaacug

SEQ ID NO: 258430 - RNA, 22 nt, Human
cuguacaggagacgucugugca

SEQ ID NO: 258431 - RNA, 22 nt, Human
cucucuccuuagcugcagacca

SEQ ID NO: 258432 - RNA, 19 nt, Human
ugugccucuauagcaugug

SEQ ID NO: 258433 - RNA, 22 nt, Human
gguccugaggggagcugaaggu

SEQ ID NO: 258434 - RNA, 22 nt, Human
ucuguuucuucuucuguuauau

SEQ ID NO: 258435 - RNA, 23 nt, Human
gcacagagcaguuaggggaagau

SEQ ID NO: 258436 - RNA, 22 nt, Human
augcugaauugaugcgagggag

SEQ ID NO: 258437 - RNA, 22 nt, Human
uacaggaaggcucuggaggugc

SEQ ID NO: 258438 - RNA, 22 nt, Human
uuucuagucuucccuaccuccc

SEQ ID NO: 258439 - RNA, 22 nt, Human
cuuugaauuaacgacacaagug

SEQ ID NO: 258440 - RNA, 22 nt, Human
aaaguucagauuagacucaaga

SEQ ID NO: 258441 - RNA, 22 nt, Human
ucugggaagauguuucaaaggu

SEQ ID NO: 258442 - RNA, 22 nt, Human
ccacagcuucuuauaucacugg

SEQ ID NO: 258443 - RNA, 22 nt, Human
ugccucugcugcuguggcauca

SEQ ID NO: 258444 - RNA, 22 nt, Human
aagcuguuaauggcuugcagcu

SEQ ID NO: 258445 - RNA, 22 nt, Human
cugagcccuugaacccaagucc

SEQ ID NO: 258446 - RNA, 22 nt, Human
cccugcaguccuuucuuggcuc

SEQ ID NO: 258447 - RNA, 22 nt, Human
ucuacauuuucuuuauguacau

SEQ ID NO: 258448 - RNA, 22 nt, Human
gccuuggcugccaagcugcuga

SEQ ID NO: 258449 - RNA, 22 nt, Human
cuccuggcagcaacauuuauau

SEQ ID NO: 258450 - RNA, 22 nt, Human
augucccucacuccucauucag

SEQ ID NO: 258451 - RNA, 19 nt, Human
acugugcucgggaaccacu

SEQ ID NO: 258452 - RNA, 20 nt, Human
uguguccaucaucugggcac

SEQ ID NO: 258453 - RNA, 22 nt, Human
auuuggaacaaauauuaguaaa

SEQ ID NO: 258454 - RNA, 22 nt, Human
gcagagugguuucagaguugag

SEQ ID NO: 258455 - RNA, 23 nt, Human
gccagccuugcucuccugcagcc

SEQ ID NO: 258456 - RNA, 22 nt, Human
ugagcugaguggcaggucucag

SEQ ID NO: 258457 - RNA, 22 nt, Human
ugacccuuucauuauucucauu

SEQ ID NO: 258458 - RNA, 23 nt, Human
agcagggccagaauacuugcugu

SEQ ID NO: 258459 - RNA, 22 nt, Human
gugcccaguugaggccaggacu

SEQ ID NO: 258460 - RNA, 22 nt, Human
agaugcugauugaauagauuuc

SEQ ID NO: 258461 - RNA, 22 nt, Human
uggaucucggcaaugcgggacu

SEQ ID NO: 258462 - RNA, 23 nt, Human
uugaggagcagcgcuuuuuaccg

SEQ ID NO: 258463 - RNA, 22 nt, Human
ucaguuaagacugcacuggacu

SEQ ID NO: 258464 - RNA, 22 nt, Human
aagugcauacacuaguuaauug

SEQ ID NO: 258465 - RNA, 22 nt, Human
cagcuguuaccaaucuuagggc

SEQ ID NO: 258466 - RNA, 22 nt, Human
cuggcugguucccugcuccagg

SEQ ID NO: 258467 - RNA, 22 nt, Human
ucuaaagacacuuuuuacaggg

SEQ ID NO: 258468 - RNA, 22 nt, Human
agugcuuggcaaccuucugacc

SEQ ID NO: 258469 - RNA, 22 nt, Human
uuucacagauguuuuggagucu

SEQ ID NO: 258470 - RNA, 17 nt, Human
ugccagccugucccagg

SEQ ID NO: 258471 - RNA, 22 nt, Human
agaaacaucauuggaacacaag

SEQ ID NO: 258472 - RNA, 22 nt, Human
agauuuguaugucuaaauguaa

SEQ ID NO: 258473 - RNA, 22 nt, Human
cagucccaguuugagacucugg

SEQ ID NO: 258474 - RNA, 22 nt, Human
ugacucaccaucggaguuugaa

SEQ ID NO: 258475 - RNA, 22 nt, Human
gccuguguuuuuaacucuagga

SEQ ID NO: 258476 - RNA, 22 nt, Human
cagucccacuagugccaauacc

SEQ ID NO: 258477 - RNA, 22 nt, Human
gccuccugcccagaugagugau

SEQ ID NO: 258478 - RNA, 22 nt, Human
cuguccuguggugacagguaca

SEQ ID NO: 258479 - RNA, 20 nt, Human
ugugugcacacaugacauuc

SEQ ID NO: 258480 - RNA, 22 nt, Human
cccagcucccauguucuccaau

SEQ ID NO: 258481 - RNA, 22 nt, Human
uuacacuuaccuguccauugaa

SEQ ID NO: 258482 - RNA, 22 nt, Human
aauagcuugccuaauccucaug

SEQ ID NO: 258483 - RNA, 22 nt, Human
aagauuuagggccaguuuacau

SEQ ID NO: 258484 - RNA, 22 nt, Human
auuuacauuccauggugguuac

SEQ ID NO: 258485 - RNA, 23 nt, Human
acagccaguucaccucuccuugg

SEQ ID NO: 258486 - RNA, 22 nt, Human
aucauucaagugcucuaaaaug

SEQ ID NO: 258487 - RNA, 22 nt, Human
ucuccugguauguaugcaccug

SEQ ID NO: 258488 - RNA, 22 nt, Human
cccagccucuggguucugccgg

SEQ ID NO: 258489 - RNA, 22 nt, Human
uccuagaauaaguaacaggaca

SEQ ID NO: 258490 - RNA, 22 nt, Human
uucacauguuggacauagagga

SEQ ID NO: 258491 - RNA, 22 nt, Human
gcugcugucagcaggccuuguu

SEQ ID NO: 258492 - RNA, 22 nt, Human
aaauuucuaagucaagaagaac

SEQ ID NO: 258493 - RNA, 22 nt, Human
aagcacagaaaaggagcaugga

SEQ ID NO: 258494 - RNA, 22 nt, Human
gugcuggcaccccucuccaguu

SEQ ID NO: 258495 - RNA, 22 nt, Human
gucaggcagccuggagauucag

SEQ ID NO: 258496 - RNA, 22 nt, Human
cagggcugaaaucaagguguag

SEQ ID NO: 258497 - RNA, 22 nt, Human
aacaugcagguuuuaggguugc

SEQ ID NO: 258498 - RNA, 22 nt, Human
ucucuaaagauauuuauggcaa

SEQ ID NO: 258499 - RNA, 22 nt, Human
gugcacagauuuaauuuuauuc

SEQ ID NO: 258500 - RNA, 22 nt, Human
gccaggcauuuguuaggugcug

SEQ ID NO: 258501 - RNA, 22 nt, Human
auggaauuugcaauaacaggau

SEQ ID NO: 258502 - RNA, 22 nt, Human
uuccuacagcccugaaucucua

SEQ ID NO: 258503 - RNA, 22 nt, Human
ucucugcauccccagggcucuc

SEQ ID NO: 258504 - RNA, 23 nt, Human
uaugagucaucugcuacaaccca

SEQ ID NO: 258505 - RNA, 19 nt, Human
acaugcaaggcaccugcag

SEQ ID NO: 258506 - RNA, 22 nt, Human
gcagaauacauuugggauuacu

SEQ ID NO: 258507 - RNA, 22 nt, Human
ugacucacuuaauuuacaaguc

SEQ ID NO: 258508 - RNA, 22 nt, Human
auucuucauuuacuguuacuug

SEQ ID NO: 258509 - RNA, 22 nt, Human
aagagaauaucgauagcacucu

SEQ ID NO: 258510 - RNA, 22 nt, Human
uuuuacaccucagaugagcaga

SEQ ID NO: 258511 - RNA, 22 nt, Human
ccugugcauugaccacacucuc

SEQ ID NO: 258512 - RNA, 22 nt, Human
agccacagucuguagccagcuu

SEQ ID NO: 258513 - RNA, 22 nt, Human
cccagccugaucucggccagcu

SEQ ID NO: 258514 - RNA, 22 nt, Human
ugcccaggguggagugcagcgg

SEQ ID NO: 258515 - RNA, 16 nt, Human
cuguuacuugacuguu

SEQ ID NO: 258516 - RNA, 22 nt, Human
ucuacaagucaagucuaucaag

SEQ ID NO: 258517 - RNA, 22 nt, Human
cucugggcugccuuuuagcucu

SEQ ID NO: 258518 - RNA, 22 nt, Human
cacaagaaauaagcugccuuuc

SEQ ID NO: 258519 - RNA, 22 nt, Human
aacaugcccgcuguaugccauu

SEQ ID NO: 258520 - RNA, 22 nt, Human
uagaugaagggguucagcaugg

SEQ ID NO: 258521 - RNA, 22 nt, Human
gcuggaaaaggaggcaaaauau

SEQ ID NO: 258522 - RNA, 22 nt, Human
aaacucugccauuuuuggccug

SEQ ID NO: 258523 - RNA, 22 nt, Human
gcauguaaucacucuaggaagg

SEQ ID NO: 258524 - RNA, 22 nt, Human
auuuccaugaaggcagauuuua

SEQ ID NO: 258525 - RNA, 22 nt, Human
uggcuucuagagcccauccuuc

SEQ ID NO: 258526 - RNA, 22 nt, Human
auuuggugagguagccauuguu

SEQ ID NO: 258527 - RNA, 20 nt, Human
uggccuuuuggcuuggagcu

SEQ ID NO: 258528 - RNA, 22 nt, Human
gagccauacaaccuauaaagug

SEQ ID NO: 258529 - RNA, 22 nt, Human
cucagaggguacaggugaaccc

SEQ ID NO: 258530 - RNA, 22 nt, Human
aaguguuuauuuauaacgaucu

SEQ ID NO: 258531 - RNA, 22 nt, Human
gugagucuuaagcaccaccuuu

SEQ ID NO: 258532 - RNA, 22 nt, Human
aggcuccauucaugugaaggca

SEQ ID NO: 258533 - RNA, 22 nt, Human
uaugaucucugggucuggagcu

SEQ ID NO: 258534 - RNA, 22 nt, Human
cucccuucaggagaggcucaca

SEQ ID NO: 258535 - RNA, 22 nt, Human
ccuccagggcagacggggagca

SEQ ID NO: 258536 - RNA, 18 nt, Human
gccuggcugccaacccag

SEQ ID NO: 258537 - RNA, 22 nt, Human
uuauugagaccguaagucaggu

SEQ ID NO: 258538 - RNA, 22 nt, Human
ggcugcagagcugggugggccu

SEQ ID NO: 258539 - RNA, 22 nt, Human
cacagcccccuugacacucugg

SEQ ID NO: 258540 - RNA, 22 nt, Human
agagucuuagccucauuaguca

SEQ ID NO: 258541 - RNA, 22 nt, Human
uggggcagcagaccuuucuugg

SEQ ID NO: 258542 - RNA, 22 nt, Human
uucuucugauugccuucugcaa

SEQ ID NO: 258543 - RNA, 22 nt, Human
aggcaacugacagcauauccug

SEQ ID NO: 258544 - RNA, 22 nt, Human
ucagacccugcgguguuuggau

SEQ ID NO: 258545 - RNA, 22 nt, Human
cuggauccuucucuguguauuu

SEQ ID NO: 258546 - RNA, 22 nt, Human
aucuuucuaugguacuuucucc

SEQ ID NO: 258547 - RNA, 22 nt, Human
ggggaguguuuucaugggcuug

SEQ ID NO: 258548 - RNA, 22 nt, Human
uuucagaaauuguuauuauucu

SEQ ID NO: 258549 - RNA, 22 nt, Human
aguucucaagacaauuaccugu

SEQ ID NO: 258550 - RNA, 21 nt, Human
agugcugaaaaagcaugucuc

SEQ ID NO: 258551 - RNA, 22 nt, Human
cucacaggucaugugguggcuu

SEQ ID NO: 258552 - RNA, 22 nt, Human
ugccuggaaggcccaugggaag

SEQ ID NO: 258553 - RNA, 22 nt, Human
agcuccugcucuuugucccuaa

SEQ ID NO: 258554 - RNA, 22 nt, Human
gccagcuggagugagagugggc

SEQ ID NO: 258555 - RNA, 18 nt, Human
ucccuucucccuugccuc

SEQ ID NO: 258556 - RNA, 22 nt, Human
cagaaauggaauuuuccaucac

SEQ ID NO: 258557 - RNA, 22 nt, Human
aagucagaccuuguugauagcu

SEQ ID NO: 258558 - RNA, 22 nt, Human
ccagggugggaggcugaaggcg

SEQ ID NO: 258559 - RNA, 19 nt, Human
uugagaacaccaaguacug

SEQ ID NO: 258560 - RNA, 22 nt, Human
ucuuuagauguuuagaggaaga

SEQ ID NO: 258561 - RNA, 22 nt, Human
uugcagcuguugcaaagucucu

SEQ ID NO: 258562 - RNA, 20 nt, Human
uccugaauuuccuuucugcu

SEQ ID NO: 258563 - RNA, 22 nt, Human
aucucagggcuggagcccugga

SEQ ID NO: 258564 - RNA, 22 nt, Human
ggccucuguuuggagccaggau

SEQ ID NO: 258565 - RNA, 22 nt, Human
cauuuguuuagaagucuuuaua

SEQ ID NO: 258566 - RNA, 22 nt, Human
uuccuggccucucucugagcag

SEQ ID NO: 258567 - RNA, 22 nt, Human
ggcaggcaggagcucugucucc

SEQ ID NO: 258568 - RNA, 20 nt, Human
uugauucccucuaaacucgc

SEQ ID NO: 258569 - RNA, 22 nt, Human
uggggaagcacuuugaacuuaa

SEQ ID NO: 258570 - RNA, 22 nt, Human
ugcaggucucugcaaggccuau

SEQ ID NO: 258571 - RNA, 22 nt, Human
agaauccucuucaguaaauucu

SEQ ID NO: 258572 - RNA, 22 nt, Human
aggccucucugcuuagcuugua

SEQ ID NO: 258573 - RNA, 22 nt, Human
cugggagaugacucagagcagg

SEQ ID NO: 258574 - RNA, 22 nt, Human
acauuuaaugauccuacuguga

SEQ ID NO: 258575 - RNA, 22 nt, Human
uaucauuuaacagaaucauugc

SEQ ID NO: 258576 - RNA, 22 nt, Human
aggggcugacuggaaagugcca

SEQ ID NO: 258577 - RNA, 15 nt, Human
gcauguguaauaggc

SEQ ID NO: 258578 - RNA, 22 nt, Human
ugcuuggcuuucugagcuucug

SEQ ID NO: 258579 - RNA, 22 nt, Human
cugggccucaugcacagagaug

SEQ ID NO: 258580 - RNA, 22 nt, Human
acaggcaacuucaaaucucacu

SEQ ID NO: 258581 - RNA, 18 nt, Human
gcuuccugaaagcugccc

SEQ ID NO: 258582 - RNA, 22 nt, Human
ccagcacucgcugauuuuagga

SEQ ID NO: 258583 - RNA, 22 nt, Human
ucaggcccuucucccaggacuc

SEQ ID NO: 258584 - RNA, 22 nt, Human
gcuuagcaucuuacaaugcuga

SEQ ID NO: 258585 - RNA, 22 nt, Human
uguccaaugcccuuuccacaug

SEQ ID NO: 258586 - RNA, 22 nt, Human
uaauucaugggcccagugauau

SEQ ID NO: 258587 - RNA, 22 nt, Human
uagggcuauaagagaauaagac

SEQ ID NO: 258588 - RNA, 21 nt, Human
ccagcccagccuccuucucuu

SEQ ID NO: 258589 - RNA, 22 nt, Human
guagccauuggcaaugaagccu

SEQ ID NO: 258590 - RNA, 22 nt, Human
gagcuuccacucuagaaggagu

SEQ ID NO: 258591 - RNA, 22 nt, Human
uuucuuuaaaggaacucuguuu

SEQ ID NO: 258592 - RNA, 22 nt, Human
agggagcccugaaccagagggu

SEQ ID NO: 258593 - RNA, 22 nt, Human
aagauagaugucaucagcauau

SEQ ID NO: 258594 - RNA, 22 nt, Human
acagggauuaugacugacagcc

SEQ ID NO: 258595 - RNA, 22 nt, Human
cucugagguuuccucacaagcu

SEQ ID NO: 258596 - RNA, 22 nt, Human
aauauagauuuacucaagagaa

SEQ ID NO: 258597 - RNA, 22 nt, Human
uuccuggcaccaccacuucuag

SEQ ID NO: 258598 - RNA, 22 nt, Human
cagagcugucauuugccaguga

SEQ ID NO: 258599 - RNA, 22 nt, Human
ugcagagaaaacuccuggguac

SEQ ID NO: 258600 - RNA, 22 nt, Human
aaguuacaguuaugaaacucac

SEQ ID NO: 258601 - RNA, 22 nt, Human
aaaguuacuaucacaaugaaau

SEQ ID NO: 258602 - RNA, 22 nt, Human
agauggcugggagcucuguuug

SEQ ID NO: 258603 - RNA, 22 nt, Human
gaaauguuugggaggagucaac

SEQ ID NO: 258604 - RNA, 22 nt, Human
agcugcagaaaggacaacuaau

SEQ ID NO: 258605 - RNA, 22 nt, Human
ucaaaagaaacaccauguuccu

SEQ ID NO: 258606 - RNA, 22 nt, Human
cuggcccaggaagacguguccc

SEQ ID NO: 258607 - RNA, 22 nt, Human
cuuguucugugcuucuuacauu

SEQ ID NO: 258608 - RNA, 22 nt, Human
gucacacucuucccuccacaug

SEQ ID NO: 258609 - RNA, 22 nt, Human
uucaacaaaauauauuuuucca

SEQ ID NO: 258610 - RNA, 22 nt, Human
cugugcaaauaaagagcaacau

SEQ ID NO: 258611 - RNA, 22 nt, Human
ugcaaacagaaaguuuauugug

SEQ ID NO: 258612 - RNA, 22 nt, Human
ugaggggcgcuggcagguuccu

SEQ ID NO: 258613 - RNA, 22 nt, Human
ggacaacauguuuuaauuaagg

SEQ ID NO: 258614 - RNA, 22 nt, Human
ggacccagguagggaggaagau

SEQ ID NO: 258615 - RNA, 19 nt, Human
agucacagaccuugucucc

SEQ ID NO: 258616 - RNA, 18 nt, Human
gacaccagccucugcccc

SEQ ID NO: 258617 - RNA, 22 nt, Human
gguccuggaugagacagguagu

SEQ ID NO: 258618 - RNA, 21 nt, Human
agcaggucuacagguucauag

SEQ ID NO: 258619 - RNA, 22 nt, Human
agcuggaggaguuucuccuagc

SEQ ID NO: 258620 - RNA, 19 nt, Human
aggcagcauucuggggcuu

SEQ ID NO: 258621 - RNA, 22 nt, Human
agggggcaucagguccuggcuc

SEQ ID NO: 258622 - RNA, 22 nt, Human
gaggccagcuacccaaggguca

SEQ ID NO: 258623 - RNA, 21 nt, Human
gaaauacugccuuaggagcug

SEQ ID NO: 258624 - RNA, 22 nt, Human
gacagacaaauguuuuuaacuu

SEQ ID NO: 258625 - RNA, 22 nt, Human
aggcugugagagguggcuccca

SEQ ID NO: 258626 - RNA, 22 nt, Human
ggugcauguagccaucaagaua

SEQ ID NO: 258627 - RNA, 22 nt, Human
uuugggaauuguagcugucuug

SEQ ID NO: 258628 - RNA, 22 nt, Human
aggccuggccccaguugcuagg

SEQ ID NO: 258629 - RNA, 22 nt, Human
cagcaugguggagcugcucuuu

SEQ ID NO: 258630 - RNA, 22 nt, Human
acccaggcgggagugcaguguc

SEQ ID NO: 258631 - RNA, 22 nt, Human
gagcacccuuugcacaucaguc

SEQ ID NO: 258632 - RNA, 22 nt, Human
aauucugagaacaaaagguacu

SEQ ID NO: 258633 - RNA, 22 nt, Human
ucuauauaaccuccacuucuac

SEQ ID NO: 258634 - RNA, 22 nt, Human
gguccuggcagcucugugucca

SEQ ID NO: 258635 - RNA, 22 nt, Human
ccuggcagacugugagggcagg

SEQ ID NO: 258636 - RNA, 22 nt, Human
uaagugaugauaguaccuagaa

SEQ ID NO: 258637 - RNA, 22 nt, Human
agcugcaguaaagcucuccagg

SEQ ID NO: 258638 - RNA, 22 nt, Human
uucauucccaagaguaaacaua

SEQ ID NO: 258639 - RNA, 22 nt, Human
cccugcagccggccagcucauu

SEQ ID NO: 258640 - RNA, 22 nt, Human
ugccugcccacgacuacagcag

SEQ ID NO: 258641 - RNA, 21 nt, Human
uggcagggguaguaguacagc

SEQ ID NO: 258642 - RNA, 22 nt, Human
cugccaggccuccgcugucccc

SEQ ID NO: 258643 - RNA, 22 nt, Human
uugggaaagggauuaugaguag

SEQ ID NO: 258644 - RNA, 22 nt, Human
ugaauaauuccuuuuugucaag

SEQ ID NO: 258645 - RNA, 22 nt, Human
agaggccucuuugcaaguaggu

SEQ ID NO: 258646 - RNA, 22 nt, Human
auagcaaagaucacuuccuuga

SEQ ID NO: 258647 - RNA, 22 nt, Human
acacagcaacuugcaguaugga

SEQ ID NO: 258648 - RNA, 22 nt, Human
acagagguaggacaugagauau

SEQ ID NO: 258649 - RNA, 22 nt, Human
gcagcauggaguuguggaauga

SEQ ID NO: 258650 - RNA, 22 nt, Human
uuuuuauaacucuuuugugaca

SEQ ID NO: 258651 - RNA, 22 nt, Human
aaacccugcccuucccaagaug

SEQ ID NO: 258652 - RNA, 22 nt, Human
augaauuaaggauaacuggucu

SEQ ID NO: 258653 - RNA, 22 nt, Human
aaaauggucucagcuggcacca

SEQ ID NO: 258654 - RNA, 22 nt, Human
gcagccacccucaaggcugaau

SEQ ID NO: 258655 - RNA, 22 nt, Human
cagagcuggccugugauuuuug

SEQ ID NO: 258656 - RNA, 22 nt, Human
uccugcaggccagaggggugag

SEQ ID NO: 258657 - RNA, 17 nt, Human
caguggcagaucuucuc

SEQ ID NO: 258658 - RNA, 22 nt, Human
caggaugggauguagugggccc

SEQ ID NO: 258659 - RNA, 22 nt, Human
gggagacaaaggugagguucuu

SEQ ID NO: 258660 - RNA, 22 nt, Human
cacuggaauucaagauacugag

SEQ ID NO: 258661 - RNA, 22 nt, Human
ugggcaguggcugggccucucu

SEQ ID NO: 258662 - RNA, 22 nt, Human
gacaucuggaggagaugaaugg

SEQ ID NO: 258663 - RNA, 22 nt, Human
uucucuuuuugcaucucaaccu

SEQ ID NO: 258664 - RNA, 22 nt, Human
uagcaagaggugaagguuucau

SEQ ID NO: 258665 - RNA, 22 nt, Human
gccugcagauauauaggauggu

SEQ ID NO: 258666 - RNA, 22 nt, Human
gcugccuuccaaagaguuuuau

SEQ ID NO: 258667 - RNA, 22 nt, Human
gucugcuggcacgucacagaua

SEQ ID NO: 258668 - RNA, 22 nt, Human
accagcaguuaugaggccagga

SEQ ID NO: 258669 - RNA, 22 nt, Human
gcagcaggcacggucucgacau

SEQ ID NO: 258670 - RNA, 22 nt, Human
gccaacaggccuugcucugcuc

SEQ ID NO: 258671 - RNA, 22 nt, Human
ggcugcucugagaguggguuuu

SEQ ID NO: 258672 - RNA, 22 nt, Human
ggguccagggacguuucugcag

SEQ ID NO: 258673 - RNA, 22 nt, Human
cccagcagggucucugugucua

SEQ ID NO: 258674 - RNA, 22 nt, Human
aggccagcuguuacuagagcca

SEQ ID NO: 258675 - RNA, 22 nt, Human
augaacagaggaauagaauucu

SEQ ID NO: 258676 - RNA, 19 nt, Human
gcucugccagugguaacau

SEQ ID NO: 258677 - RNA, 22 nt, Human
augauuacucccauuugauaga

SEQ ID NO: 258678 - RNA, 22 nt, Human
aacaguuuaucaaguuuuuaca

SEQ ID NO: 258679 - RNA, 22 nt, Human
guccaguggucaauuaucugga

SEQ ID NO: 258680 - RNA, 22 nt, Human
augagucacucagcagaaaagg

SEQ ID NO: 258681 - RNA, 22 nt, Human
uuuaguguaauucugccuuuug

SEQ ID NO: 258682 - RNA, 22 nt, Human
cagcucaguuucaauaccaggu

SEQ ID NO: 258683 - RNA, 22 nt, Human
ggagaagggcaugguaguuuua

SEQ ID NO: 258684 - RNA, 22 nt, Human
acgggccuucucuucaggcgag

SEQ ID NO: 258685 - RNA, 22 nt, Human
guugccaggggcugcugucacc

SEQ ID NO: 258686 - RNA, 22 nt, Human
cuagccugggauuugaacuuau

SEQ ID NO: 258687 - RNA, 22 nt, Human
auucuggggcugguuauuuuga

SEQ ID NO: 258688 - RNA, 20 nt, Human
uggcaggaauagggccagag

SEQ ID NO: 258689 - RNA, 22 nt, Human
gggcugagcuaagcuggguuga

SEQ ID NO: 258690 - RNA, 22 nt, Human
ugguauuuccaggcuuauggua

SEQ ID NO: 258691 - RNA, 20 nt, Human
ucacuggccagaguagcccu

SEQ ID NO: 258692 - RNA, 22 nt, Human
ugagccagguuaagacaggagc

SEQ ID NO: 258693 - RNA, 22 nt, Human
uuggaugagguugagaaucauu

SEQ ID NO: 258694 - RNA, 22 nt, Human
uccgccaggacugagggcccau

SEQ ID NO: 258695 - RNA, 22 nt, Human
uacuuacagaaggaagcaauug

SEQ ID NO: 258696 - RNA, 19 nt, Human
ucccaguggggagaggugu

SEQ ID NO: 258697 - RNA, 22 nt, Human
gccucagguaaaacuugaguuu

SEQ ID NO: 258698 - RNA, 22 nt, Human
cacugggaccuaggacugagcu

SEQ ID NO: 258699 - RNA, 22 nt, Human
ccacaugcucuuguuacagugu

SEQ ID NO: 258700 - RNA, 22 nt, Human
ugugccaugaggcucugauaug

SEQ ID NO: 258701 - RNA, 22 nt, Human
uguuucuugagaguauuacccu

SEQ ID NO: 258702 - RNA, 22 nt, Human
ugcucaguauagaaaaugauau

SEQ ID NO: 258703 - RNA, 22 nt, Human
aaauccuaaggagaauaugauu

SEQ ID NO: 258704 - RNA, 22 nt, Human
uaaggcuuucuaaauaugcaga

SEQ ID NO: 258705 - RNA, 22 nt, Human
aaaaagcuuaaaugagcaguuc

SEQ ID NO: 258706 - RNA, 19 nt, Human
gggucccacugcccgucug

SEQ ID NO: 258707 - RNA, 19 nt, Human
cuugguuaugguaugaugc

SEQ ID NO: 258708 - RNA, 22 nt, Human
gccuggaguagcauggcaagcc

SEQ ID NO: 258709 - RNA, 22 nt, Human
acagauuuggaggccucacccc

SEQ ID NO: 258710 - RNA, 22 nt, Human
acagacuguuugguucaugucu

SEQ ID NO: 258711 - RNA, 22 nt, Human
acagaaaaaugagggagcugga

SEQ ID NO: 258712 - RNA, 22 nt, Human
ccucaggcuagcuacugucccu

SEQ ID NO: 258713 - RNA, 22 nt, Human
uguguggauucaucucaaagag

SEQ ID NO: 258714 - RNA, 22 nt, Human
uacugucuggcaauuaagaauc

SEQ ID NO: 258715 - RNA, 22 nt, Human
auuagaaugaaguauaggauuu

SEQ ID NO: 258716 - RNA, 21 nt, Human
gccugggauaguggccuccgg

SEQ ID NO: 258717 - RNA, 22 nt, Human
cagcacuaauccugcaauuucu

SEQ ID NO: 258718 - RNA, 22 nt, Human
gggcuccagcccgggaccaggu

SEQ ID NO: 258719 - RNA, 22 nt, Human
uguggagaagaaggccacugca

SEQ ID NO: 258720 - RNA, 22 nt, Human
gcuggggagcuagaccucagca

SEQ ID NO: 258721 - RNA, 22 nt, Human
ugggcaaaggcuguaacccauc

SEQ ID NO: 258722 - RNA, 22 nt, Human
gauguggaugaucuuagauggu

SEQ ID NO: 258723 - RNA, 22 nt, Human
uuucuuucucguaaacuuaguu

SEQ ID NO: 258724 - RNA, 22 nt, Human
ugcucaggugccuuggcugcug

SEQ ID NO: 258725 - RNA, 22 nt, Human
ccagccagaaguccgggcuucu

SEQ ID NO: 258726 - RNA, 22 nt, Human
agcagguguuagggauccaaug

SEQ ID NO: 258727 - RNA, 22 nt, Human
aaggcaauauugaguuucccuu

SEQ ID NO: 258728 - RNA, 22 nt, Human
ucugcuuucuuacuaaaaauga

SEQ ID NO: 258729 - RNA, 22 nt, Human
gcaguuccuacaguggaaagcg

SEQ ID NO: 258730 - RNA, 16 nt, Human
ugggaccuguggccaa

SEQ ID NO: 258731 - RNA, 22 nt, Human
aaacaguuuauaacaugauacu

SEQ ID NO: 258732 - RNA, 22 nt, Human
aaacucuguauuugcugugggu

SEQ ID NO: 258733 - RNA, 22 nt, Human
acacgcauaaauacacagucua

SEQ ID NO: 258734 - RNA, 22 nt, Human
aaucuucacagaaaaaugucug

SEQ ID NO: 258735 - RNA, 22 nt, Human
uuggugaauugagaccauuugu

SEQ ID NO: 258736 - RNA, 21 nt, Human
ucgugcagcagcugaggcuug

SEQ ID NO: 258737 - RNA, 22 nt, Human
aacaggcagcagacugaaucug

SEQ ID NO: 258738 - RNA, 22 nt, Human
cagaaauauuuauugagugaca

SEQ ID NO: 258739 - RNA, 22 nt, Human
uugcagggauuaccuuauuuuu

SEQ ID NO: 258740 - RNA, 22 nt, Human
gcuacaggugacagccucugca

SEQ ID NO: 258741 - RNA, 22 nt, Human
gugaggccgcacgccccggagu

SEQ ID NO: 258742 - RNA, 22 nt, Human
gcaguggcuaggagucuggcgu

SEQ ID NO: 258743 - RNA, 22 nt, Human
uagauacauuuuucuuuccugu

SEQ ID NO: 258744 - RNA, 22 nt, Human
ccagugcaccaagaggccuaga

SEQ ID NO: 258745 - RNA, 18 nt, Human
agggagcaucugguugcc

SEQ ID NO: 258746 - RNA, 22 nt, Human
augccucugcucuugguccuca

SEQ ID NO: 258747 - RNA, 22 nt, Human
guggaacauguccauauacauu

SEQ ID NO: 258748 - RNA, 22 nt, Human
uaggagagcugaacuauugucu

SEQ ID NO: 258749 - RNA, 22 nt, Human
cagccaggagcucccccugcuc

SEQ ID NO: 258750 - RNA, 22 nt, Human
cccagagaugggaggugaucgg

SEQ ID NO: 258751 - RNA, 22 nt, Human
acaugugucuaagaaugaaaga

SEQ ID NO: 258752 - RNA, 22 nt, Human
uuguccagcgaccaggcucugu

SEQ ID NO: 258753 - RNA, 22 nt, Human
cuggggccagugaggaggcuuu

SEQ ID NO: 258754 - RNA, 22 nt, Human
ucaaauaaugccauucaucauc

SEQ ID NO: 258755 - RNA, 22 nt, Human
uacccucacgagacuucaaguc

SEQ ID NO: 258756 - RNA, 22 nt, Human
ucaugcauauuuguaguaguuc

SEQ ID NO: 258757 - RNA, 20 nt, Human
uuuagcaaaagggacugcuc

SEQ ID NO: 258758 - RNA, 22 nt, Human
uggccuguugcuccuagggguc

SEQ ID NO: 258759 - RNA, 22 nt, Human
acagugcuucugauaugaugcc

SEQ ID NO: 258760 - RNA, 22 nt, Human
ucugagcugcagaguggggugg

SEQ ID NO: 258761 - RNA, 22 nt, Human
gggaagaagacauggugaaggc

SEQ ID NO: 258762 - RNA, 22 nt, Human
aggucucaauuccugcuccugu

SEQ ID NO: 258763 - RNA, 22 nt, Human
uuguguacuguugguugauauu

SEQ ID NO: 258764 - RNA, 17 nt, Human
agcaaggcuuaaguaaa

SEQ ID NO: 258765 - RNA, 21 nt, Human
ucucugggcccuccugugggg

SEQ ID NO: 258766 - RNA, 20 nt, Human
ccucaguguccuggacuggg

SEQ ID NO: 258767 - RNA, 22 nt, Human
guuuucuuugaaugcuucuaga

SEQ ID NO: 258768 - RNA, 22 nt, Human
cauuagagcagauaauaugugu

SEQ ID NO: 258769 - RNA, 22 nt, Human
gcagugcuuuagucuguccuuu

SEQ ID NO: 258770 - RNA, 22 nt, Human
uauucacaguugauuuacaguu

SEQ ID NO: 258771 - RNA, 22 nt, Human
uuggaaauacagcaguuacuuu

SEQ ID NO: 258772 - RNA, 18 nt, Human
gucuggaggucaggagcu

SEQ ID NO: 258773 - RNA, 21 nt, Human
uccugcaggaggccugagagg

SEQ ID NO: 258774 - RNA, 22 nt, Human
ggcaggguggcagaggcucaga

SEQ ID NO: 258775 - RNA, 22 nt, Human
uagaacucuggucuucucaucc

SEQ ID NO: 258776 - RNA, 22 nt, Human
acaugauauuaaugucuuauuu

SEQ ID NO: 258777 - RNA, 22 nt, Human
aagagcuggaguuugcagcccu

SEQ ID NO: 258778 - RNA, 20 nt, Human
accaggcccggugucuccuc

SEQ ID NO: 258779 - RNA, 22 nt, Human
cacugagcaagucaguacagca

SEQ ID NO: 258780 - RNA, 22 nt, Human
aacaguuuguggauagcuugua

SEQ ID NO: 258781 - RNA, 22 nt, Human
augcugaauaguucacucuucu

SEQ ID NO: 258782 - RNA, 22 nt, Human
gccugccuucggugcgcagcgg

SEQ ID NO: 258783 - RNA, 23 nt, Human
gcucagagguuuuucucuggaug

SEQ ID NO: 258784 - RNA, 22 nt, Human
aacuugaaccacagaagcugcc

SEQ ID NO: 258785 - RNA, 22 nt, Human
uccaggcuucacgucugcccuc

SEQ ID NO: 258786 - RNA, 22 nt, Human
uuaaaggcuauggcugccuggg

SEQ ID NO: 258787 - RNA, 22 nt, Human
gacaagaugacaucauggcuuc

SEQ ID NO: 258788 - RNA, 22 nt, Human
ucuuugaaguaucuuaaauggu

SEQ ID NO: 258789 - RNA, 22 nt, Human
gccauguccugggcaucugcca

SEQ ID NO: 258790 - RNA, 22 nt, Human
ucuaacauugaauggcugauua

SEQ ID NO: 258791 - RNA, 22 nt, Human
agaccagggucccacagagucu

SEQ ID NO: 258792 - RNA, 22 nt, Human
uucuucagacuacugaugauug

SEQ ID NO: 258793 - RNA, 22 nt, Human
gaaauacaaagccagccauuuu

SEQ ID NO: 258794 - RNA, 22 nt, Human
uuagacaaucuguugguaaggu

SEQ ID NO: 258795 - RNA, 22 nt, Human
ggugcaggagcggggugcucgg

SEQ ID NO: 258796 - RNA, 22 nt, Human
caugcaaaggucaagaucagga

SEQ ID NO: 258797 - RNA, 23 nt, Human
uggcuccaggagaagccagaagc

SEQ ID NO: 258798 - RNA, 22 nt, Human
ccucaaauagcccccagucuag

SEQ ID NO: 258799 - RNA, 22 nt, Human
aggcgcagaaggccaggggccu

SEQ ID NO: 258800 - RNA, 22 nt, Human
uuaugaaguuccuguuacagug

SEQ ID NO: 258801 - RNA, 22 nt, Human
uggcuucuuguuugguuuaaga

SEQ ID NO: 258802 - RNA, 22 nt, Human
uccagcuggcccggccaugaau

SEQ ID NO: 258803 - RNA, 22 nt, Human
ggcccaugacccuagccaacug

SEQ ID NO: 258804 - RNA, 22 nt, Human
cagcaaggacugggcaugugaa

SEQ ID NO: 258805 - RNA, 22 nt, Human
gguaacaguuacaguaacagua

SEQ ID NO: 258806 - RNA, 22 nt, Human
agaggcggagcuugcagugagc

SEQ ID NO: 258807 - RNA, 22 nt, Human
ucccuagucgcaucuguggaga

SEQ ID NO: 258808 - RNA, 22 nt, Human
uagaaagcuugggguguuuaaa

SEQ ID NO: 258809 - RNA, 19 nt, Human
guguggcagagagugacca

SEQ ID NO: 258810 - RNA, 22 nt, Human
uaugaaaagguggccaauguag

SEQ ID NO: 258811 - RNA, 17 nt, Human
uucauuaauaaaagcaa

SEQ ID NO: 258812 - RNA, 19 nt, Human
guccaugcuuagaggggcc

SEQ ID NO: 258813 - RNA, 22 nt, Human
uugcaauagccuuauuuccaaa

SEQ ID NO: 258814 - RNA, 22 nt, Human
uucaguuucaaauccugugaag

SEQ ID NO: 258815 - RNA, 22 nt, Human
ugcaucuguucagagcugucga

SEQ ID NO: 258816 - RNA, 21 nt, Human
agguacaggucuugugagucu

SEQ ID NO: 258817 - RNA, 22 nt, Human
cagggcucccugcagccucugu

SEQ ID NO: 258818 - RNA, 22 nt, Human
cagccugucggcuccuucauuc

SEQ ID NO: 258819 - RNA, 19 nt, Human
agcagcucagggaggcacc

SEQ ID NO: 258820 - RNA, 22 nt, Human
ucagacagauuuugacacuugc

SEQ ID NO: 258821 - RNA, 22 nt, Human
ggcaggugagagcucuuugaaa

SEQ ID NO: 258822 - RNA, 20 nt, Human
guauauaaccauagugacua

SEQ ID NO: 258823 - RNA, 19 nt, Human
ugcuuucuaaacacaugca

SEQ ID NO: 258824 - RNA, 22 nt, Human
aauuuguuauaacuugggcuga

SEQ ID NO: 258825 - RNA, 22 nt, Human
ugugugggcgaagacagccuuu

SEQ ID NO: 258826 - RNA, 22 nt, Human
ugaggaguguggauggagcuug

SEQ ID NO: 258827 - RNA, 22 nt, Human
agucuucugaauaagaaucacu

SEQ ID NO: 258828 - RNA, 22 nt, Human
gcaagcagcccagaacagcucu

SEQ ID NO: 258829 - RNA, 22 nt, Human
aauauauagaaguacccguugu

SEQ ID NO: 258830 - RNA, 22 nt, Human
gugggcaggccccaaagcaggg

SEQ ID NO: 258831 - RNA, 22 nt, Human
aagggccaucccagaacagaaa

SEQ ID NO: 258832 - RNA, 22 nt, Human
acucugggccccagguggagcu

SEQ ID NO: 258833 - RNA, 22 nt, Human
ggcuccuucaagccugucacug

SEQ ID NO: 258834 - RNA, 22 nt, Human
gugcuggcuggacauggagcac

SEQ ID NO: 258835 - RNA, 22 nt, Human
aggacagguguagugggcucug

SEQ ID NO: 258836 - RNA, 22 nt, Human
aaacaucuaucagcauuuuuua

SEQ ID NO: 258837 - RNA, 22 nt, Human
uccaggagguaugaguggcccc

SEQ ID NO: 258838 - RNA, 21 nt, Human
uauacaugugcacacacaugc

SEQ ID NO: 258839 - RNA, 20 nt, Human
cccagccccuaccuguugcc

SEQ ID NO: 258840 - RNA, 22 nt, Human
caggcugggaacgccacccgcu

SEQ ID NO: 258841 - RNA, 22 nt, Human
gcucagggaacuuuuugcaggc

SEQ ID NO: 258842 - RNA, 23 nt, Human
cagaaaacccagagcucaguccc

SEQ ID NO: 258843 - RNA, 20 nt, Human
uggcacagaacccuugccua

SEQ ID NO: 258844 - RNA, 22 nt, Human
uagugucauuucaguggaguuu

SEQ ID NO: 258845 - RNA, 22 nt, Human
guggaauuuuuaccuaugaaug

SEQ ID NO: 258846 - RNA, 19 nt, Human
agacagagcucaguggguu

SEQ ID NO: 258847 - RNA, 22 nt, Human
aaagacuuuagguuagaggcau

SEQ ID NO: 258848 - RNA, 22 nt, Human
ccucuggaucuuucuccacacu

SEQ ID NO: 258849 - RNA, 22 nt, Human
cuuugaaauucuucagcugaag

SEQ ID NO: 258850 - RNA, 22 nt, Human
uggaagcaucacuucuugccug

SEQ ID NO: 258851 - RNA, 22 nt, Human
gaccacagaggugugggagaga

SEQ ID NO: 258852 - RNA, 22 nt, Human
gcugaggccaggccccaccgga

SEQ ID NO: 258853 - RNA, 22 nt, Human
uuaacagauguuuauggagcau

SEQ ID NO: 258854 - RNA, 22 nt, Human
uauacuuuccugcaacuuugau

SEQ ID NO: 258855 - RNA, 22 nt, Human
uggggaaaggagagcauuauuu

SEQ ID NO: 258856 - RNA, 23 nt, Human
ggacaugucucuggguauuuuga

SEQ ID NO: 258857 - RNA, 22 nt, Human
uuaaaaugcagauucugauuca

SEQ ID NO: 258858 - RNA, 16 nt, Human
cacauauauuuauaug

SEQ ID NO: 258859 - RNA, 22 nt, Human
uagaaagugaagguuaauuaau

SEQ ID NO: 258860 - RNA, 22 nt, Human
aagcaggcauuccagagacaau

SEQ ID NO: 258861 - RNA, 22 nt, Human
ccuuagcaacacuuagcaacug

SEQ ID NO: 258862 - RNA, 22 nt, Human
gaggaggguuggccuuagguag

SEQ ID NO: 258863 - RNA, 22 nt, Human
ugcccugguagacacagacugu

SEQ ID NO: 258864 - RNA, 22 nt, Human
aggaaauaagggacaagacaaa

SEQ ID NO: 258865 - RNA, 22 nt, Human
augccaaauucuacuuucagca

SEQ ID NO: 258866 - RNA, 22 nt, Human
cuggcuccauccuugagcucug

SEQ ID NO: 258867 - RNA, 22 nt, Human
ugccauuugccccagcacuguc

SEQ ID NO: 258868 - RNA, 22 nt, Human
cacccacauuccaucacucugc

SEQ ID NO: 258869 - RNA, 22 nt, Human
guuagagcacauacuuugcaug

SEQ ID NO: 258870 - RNA, 22 nt, Human
uuuaagaucuaucccauuuugu

SEQ ID NO: 258871 - RNA, 22 nt, Human
aacaguuuauguaaauguccag

SEQ ID NO: 258872 - RNA, 22 nt, Human
acacacgugcucaacacgcucc

SEQ ID NO: 258873 - RNA, 22 nt, Human
uuucuagaugcggggcuugugc

SEQ ID NO: 258874 - RNA, 22 nt, Human
uucuaacuggugcagugcugca

SEQ ID NO: 258875 - RNA, 22 nt, Human
cucagacccccagagcugcuaa

SEQ ID NO: 258876 - RNA, 22 nt, Human
agcaagauuuuucagguuagua

SEQ ID NO: 258877 - RNA, 22 nt, Human
ccagcagaagcucccgcugggu

SEQ ID NO: 258878 - RNA, 22 nt, Human
augaaaagggagugauauuugu

SEQ ID NO: 258879 - RNA, 22 nt, Human
uaaaaccauuccugcuuucaug

SEQ ID NO: 258880 - RNA, 22 nt, Human
cugccuccaggcucaccuugac

SEQ ID NO: 258881 - RNA, 22 nt, Human
gcagcagcucccuauccaggcu

SEQ ID NO: 258882 - RNA, 22 nt, Human
ugcugagggcagaugaauuaga

SEQ ID NO: 258883 - RNA, 22 nt, Human
accaaaaauuguggggcugaau

SEQ ID NO: 258884 - RNA, 22 nt, Human
ccagcagagcucaaacuuccug

SEQ ID NO: 258885 - RNA, 18 nt, Human
uuccuucugauguauaug

SEQ ID NO: 258886 - RNA, 22 nt, Human
uccagcauuuuucaauagaauu

SEQ ID NO: 258887 - RNA, 22 nt, Human
ugcaggugguuuggacacugcu

SEQ ID NO: 258888 - RNA, 22 nt, Human
ggcuucucugucuaguuucuac

SEQ ID NO: 258889 - RNA, 22 nt, Human
uacacaucuggagaagcccugu

SEQ ID NO: 258890 - RNA, 22 nt, Human
cucagagccaguuagcaggugc

SEQ ID NO: 258891 - RNA, 22 nt, Human
aaaguucuaaaacucuuuguga

SEQ ID NO: 258892 - RNA, 22 nt, Human
uauguacucaucaacuauugaa

SEQ ID NO: 258893 - RNA, 22 nt, Human
ugccugaugcaggaguaucaga

SEQ ID NO: 258894 - RNA, 22 nt, Human
acauuaaauuucauagugauua

SEQ ID NO: 258895 - RNA, 22 nt, Human
aagcaggcaugggaggccaucc

SEQ ID NO: 258896 - RNA, 22 nt, Human
agucaacagaguggccgcagcg

SEQ ID NO: 258897 - RNA, 22 nt, Human
uuuucagugggcaaugauguga

SEQ ID NO: 258898 - RNA, 22 nt, Human
agagcagauggccagggggccu

SEQ ID NO: 258899 - RNA, 21 nt, Human
ugaaugaugccccagaguugu

SEQ ID NO: 258900 - RNA, 22 nt, Human
aacuccagggggucaauauuua

SEQ ID NO: 258901 - RNA, 22 nt, Human
uguuuucacaaugaugucagau

SEQ ID NO: 258902 - RNA, 22 nt, Human
guuuauaaugucugugccaaaa

SEQ ID NO: 258903 - RNA, 22 nt, Human
gcuucagcuuugucuccuuggg

SEQ ID NO: 258904 - RNA, 22 nt, Human
gcaggagugacauggaugugga

SEQ ID NO: 258905 - RNA, 22 nt, Human
uugauuaaaaugagacaucauu

SEQ ID NO: 258906 - RNA, 22 nt, Human
augugaaugcaguuaucuauaa

SEQ ID NO: 258907 - RNA, 22 nt, Human
cugccacuuucacccagugcuc

SEQ ID NO: 258908 - RNA, 22 nt, Human
cucugcugcuuugccaguggaa

SEQ ID NO: 258909 - RNA, 22 nt, Human
cagcccaggcucagauguuggg

SEQ ID NO: 258910 - RNA, 22 nt, Human
ugggccaguccagccccaggga

SEQ ID NO: 258911 - RNA, 18 nt, Human
aguaggcacugugggguu

SEQ ID NO: 258912 - RNA, 22 nt, Human
uacacuuuuuacuacagauucu

SEQ ID NO: 258913 - RNA, 22 nt, Human
cuguuuccccaugcccugacuc

SEQ ID NO: 258914 - RNA, 22 nt, Human
caggagucccucuggccagcau

SEQ ID NO: 258915 - RNA, 22 nt, Human
aagccaguggugagaagauagc

SEQ ID NO: 258916 - RNA, 22 nt, Human
uccucagucacgguagcacauu

SEQ ID NO: 258917 - RNA, 22 nt, Human
gaggcuggacgugcauuucuac

SEQ ID NO: 258918 - RNA, 22 nt, Human
uucugggugacucacgcucccc

SEQ ID NO: 258919 - RNA, 22 nt, Human
agacauguccacaaagcauuca

SEQ ID NO: 258920 - RNA, 22 nt, Human
ucccagcagagccagcaagccg

SEQ ID NO: 258921 - RNA, 22 nt, Human
ugucuuuacuuaauaaauauac

SEQ ID NO: 258922 - RNA, 22 nt, Human
ugcagcugaaccuagagucugu

SEQ ID NO: 258923 - RNA, 22 nt, Human
ucugagggcuugaggggaagua

SEQ ID NO: 258924 - RNA, 22 nt, Human
uuugcaaauacagaggucuugc

SEQ ID NO: 258925 - RNA, 22 nt, Human
aagcccuuggcgcacaccgggc

SEQ ID NO: 258926 - RNA, 22 nt, Human
aggcuccugagaggcagaggcu

SEQ ID NO: 258927 - RNA, 21 nt, Human
acagcagacaggcuuaggacc

SEQ ID NO: 258928 - RNA, 18 nt, Human
caguauaaccagcaacuc

SEQ ID NO: 258929 - RNA, 22 nt, Human
cucuucuuggcccccaugaggg

SEQ ID NO: 258930 - RNA, 22 nt, Human
uacauucauggugacuuguaug

SEQ ID NO: 258931 - RNA, 22 nt, Human
ggcagaggagcuggaaacaugg

SEQ ID NO: 258932 - RNA, 22 nt, Human
agguaaggcuguaagcuaagcc

SEQ ID NO: 258933 - RNA, 22 nt, Human
ucucagaagugaucaggauguu

SEQ ID NO: 258934 - RNA, 22 nt, Human
augccuggacuguaucccagau

SEQ ID NO: 258935 - RNA, 22 nt, Human
gagcaggcaaagaugaaaggag

SEQ ID NO: 258936 - RNA, 22 nt, Human
acagccaggaauucuggagaag

SEQ ID NO: 258937 - RNA, 22 nt, Human
uugcuuuaagguaucuggagaa

SEQ ID NO: 258938 - RNA, 22 nt, Human
ccugcaccuaacacaacgcucu

SEQ ID NO: 258939 - RNA, 22 nt, Human
gcccaggugcccucugccuuac

SEQ ID NO: 258940 - RNA, 22 nt, Human
ucaagggaggagacacagcccu

SEQ ID NO: 258941 - RNA, 22 nt, Human
augacaaccugugagcugguau

SEQ ID NO: 258942 - RNA, 21 nt, Human
gcagcagaggcuugacagaca

SEQ ID NO: 258943 - RNA, 20 nt, Human
ucuggcaggugaacgagcug

SEQ ID NO: 258944 - RNA, 22 nt, Human
cagacagcaggccuggaugugu

SEQ ID NO: 258945 - RNA, 22 nt, Human
uccuagaaucuuuguaagauug

SEQ ID NO: 258946 - RNA, 22 nt, Human
acuccagguuuucucucaaguu

SEQ ID NO: 258947 - RNA, 22 nt, Human
aucuccagauugugaucaucag

SEQ ID NO: 258948 - RNA, 22 nt, Human
gcugccagggaggugguggagg

SEQ ID NO: 258949 - RNA, 22 nt, Human
auucuucauaccuacugagguu

SEQ ID NO: 258950 - RNA, 22 nt, Human
uccaggcucccucaggaugcac

SEQ ID NO: 258951 - RNA, 22 nt, Human
gaauaauuuugaucagaaggga

SEQ ID NO: 258952 - RNA, 22 nt, Human
aaugugucauuucccacaggug

SEQ ID NO: 258953 - RNA, 22 nt, Human
ccaaaguauuaaaucuuagcaa

SEQ ID NO: 258954 - RNA, 22 nt, Human
uuacuacagagagagcuccagu

SEQ ID NO: 258955 - RNA, 22 nt, Human
ggcugagguguggggaacuaua

SEQ ID NO: 258956 - RNA, 22 nt, Human
gaacaaaucccuuccugucucc

SEQ ID NO: 258957 - RNA, 18 nt, Human
cagucccaaaccuuagga

SEQ ID NO: 258958 - RNA, 22 nt, Human
ucaggcaggaagggaggacuug

SEQ ID NO: 258959 - RNA, 22 nt, Human
auguuaaaagucugagugggag

SEQ ID NO: 258960 - RNA, 22 nt, Human
aguccagugucaaggugccauu

SEQ ID NO: 258961 - RNA, 17 nt, Human
gaagguuucucuuaggu

SEQ ID NO: 258962 - RNA, 22 nt, Human
cggcugcugccugagucgcugu

SEQ ID NO: 258963 - RNA, 22 nt, Human
uucacacuuuggaauuccaccu

SEQ ID NO: 258964 - RNA, 17 nt, Human
ucugcagaggcaaaccu

SEQ ID NO: 258965 - RNA, 22 nt, Human
agaauacuaggcuucagaaagg

SEQ ID NO: 258966 - RNA, 22 nt, Human
uggagagaacagugucugaaag

SEQ ID NO: 258967 - RNA, 22 nt, Human
agcagaagaaagccacaugacu

SEQ ID NO: 258968 - RNA, 22 nt, Human
uacagagaugugaaaagcucua

SEQ ID NO: 258969 - RNA, 22 nt, Human
cuguuagugaucaaagggagag

SEQ ID NO: 258970 - RNA, 22 nt, Human
acccagaguaacagauggauuc

SEQ ID NO: 258971 - RNA, 22 nt, Human
gcagccaggaaagcuggacccu

SEQ ID NO: 258972 - RNA, 22 nt, Human
ucagaaaagagaaaaucuuaua

SEQ ID NO: 258973 - RNA, 22 nt, Human
uuccacuggcuuucagugaucu

SEQ ID NO: 258974 - RNA, 22 nt, Human
cagcagcaguggcugcagaaca

SEQ ID NO: 258975 - RNA, 22 nt, Human
uguguauuucuggaacagacua

SEQ ID NO: 258976 - RNA, 22 nt, Human
ucagccugcgucauggugacac

SEQ ID NO: 258977 - RNA, 22 nt, Human
uuggaaaagugaaacuagaugc

SEQ ID NO: 258978 - RNA, 22 nt, Human
gaauacauuugccgugguucuc

SEQ ID NO: 258979 - RNA, 22 nt, Human
uaguacaguggagagcaaagaa

SEQ ID NO: 258980 - RNA, 22 nt, Human
agggccccauagucacugcccg

SEQ ID NO: 258981 - RNA, 22 nt, Human
acucagaggcagcugcucaccc

SEQ ID NO: 258982 - RNA, 22 nt, Human
gcugaaaugucuuuagcagugu

SEQ ID NO: 258983 - RNA, 21 nt, Human
ccuuggcuggcaucuagcacc

SEQ ID NO: 258984 - RNA, 22 nt, Human
acuuugcagguacaugagcauc

SEQ ID NO: 258985 - RNA, 20 nt, Human
auuuggcaugaaguauugau

SEQ ID NO: 258986 - RNA, 22 nt, Human
gagucagauugcagacagggcu

SEQ ID NO: 258987 - RNA, 22 nt, Human
aggguccaacugaggcugaacu

SEQ ID NO: 258988 - RNA, 22 nt, Human
agcuggaacgucacaggagcag

SEQ ID NO: 258989 - RNA, 22 nt, Human
ugcuuuuaagaacaaugcugcu

SEQ ID NO: 258990 - RNA, 22 nt, Human
ggcuucccuuuccgagaggaga

SEQ ID NO: 258991 - RNA, 22 nt, Human
cucaucugucugggcugguuuu

SEQ ID NO: 258992 - RNA, 22 nt, Human
gcagguggggcugcuaccagaa

SEQ ID NO: 258993 - RNA, 20 nt, Human
gaaucuuuccccaugcaaug

SEQ ID NO: 258994 - RNA, 22 nt, Human
aggcccagugccauuaguuuug

SEQ ID NO: 258995 - RNA, 22 nt, Human
auugcuuucuuuggggaacugu

SEQ ID NO: 258996 - RNA, 22 nt, Human
guugcaggaagcacacacaugu

SEQ ID NO: 258997 - RNA, 22 nt, Human
cuuuccucuggcacugucuggu

SEQ ID NO: 258998 - RNA, 22 nt, Human
uaauacauuaccuaaccucucu

SEQ ID NO: 258999 - RNA, 22 nt, Human
cuuauuucagcccugggcaccc

SEQ ID NO: 259000 - RNA, 22 nt, Human
ugagaaauuacuucagugaugg

SEQ ID NO: 259001 - RNA, 22 nt, Human
agacaucagcuugugugcaggg

SEQ ID NO: 259002 - RNA, 22 nt, Human
uugcaccccuugauugagccuu

SEQ ID NO: 259003 - RNA, 22 nt, Human
uugcagggcaucgcguacuucu

SEQ ID NO: 259004 - RNA, 22 nt, Human
ucacagaaguguguuucaggag

SEQ ID NO: 259005 - RNA, 23 nt, Human
uauuacaauuggucuuauuaaga

SEQ ID NO: 259006 - RNA, 22 nt, Human
ccaggugugucuggccccgaag

SEQ ID NO: 259007 - RNA, 22 nt, Human
caaacuauuguucacaagacaa

SEQ ID NO: 259008 - RNA, 22 nt, Human
gaggcugcggggaggagccugc

SEQ ID NO: 259009 - RNA, 17 nt, Human
uccugugggugcagcag

SEQ ID NO: 259010 - RNA, 22 nt, Human
uuauuguuuggguauaauuuga

SEQ ID NO: 259011 - RNA, 22 nt, Human
guggauggcccugcacacaggu

SEQ ID NO: 259012 - RNA, 22 nt, Human
gaaggccaagaggcuccaagau

SEQ ID NO: 259013 - RNA, 22 nt, Human
caaugucaaggagaccaaaacg

SEQ ID NO: 259014 - RNA, 22 nt, Human
ccagccaugggccaccuagcug

SEQ ID NO: 259015 - RNA, 20 nt, Human
uccaggcagacagcuauggg

SEQ ID NO: 259016 - RNA, 22 nt, Human
ggcaggcauugcaacauguaca

SEQ ID NO: 259017 - RNA, 22 nt, Human
ccaggcuuccuaaugugugcag

SEQ ID NO: 259018 - RNA, 22 nt, Human
agaaugcuuguaccuuuguuuu

SEQ ID NO: 259019 - RNA, 22 nt, Human
cauuucuaagaaggcugcacau

SEQ ID NO: 259020 - RNA, 22 nt, Human
ucagauggaaagguuacugucc

SEQ ID NO: 259021 - RNA, 22 nt, Human
cagggugggcacccagccucca

SEQ ID NO: 259022 - RNA, 22 nt, Human
caggacucuugucaucaucagu

SEQ ID NO: 259023 - RNA, 22 nt, Human
ucacauuuucuacuacuguacg

SEQ ID NO: 259024 - RNA, 22 nt, Human
ugguguuggagaugguugcauu

SEQ ID NO: 259025 - RNA, 22 nt, Human
gcacuggauuuugaucugcaag

SEQ ID NO: 259026 - RNA, 22 nt, Human
ucuaggagcuuaaaggaggcca

SEQ ID NO: 259027 - RNA, 22 nt, Human
aggccucuggagguggcagugu

SEQ ID NO: 259028 - RNA, 22 nt, Human
uauuuugcguugagucagauuu

SEQ ID NO: 259029 - RNA, 22 nt, Human
uagaggcacccuggaggagacu

SEQ ID NO: 259030 - RNA, 22 nt, Human
cucagagccccaggagggugug

SEQ ID NO: 259031 - RNA, 22 nt, Human
aacuggaucaguugagggaggc

SEQ ID NO: 259032 - RNA, 22 nt, Human
ccaggaggcuucguccguggag

SEQ ID NO: 259033 - RNA, 22 nt, Human
ggccuuccauugcucuuuucua

SEQ ID NO: 259034 - RNA, 23 nt, Human
uggaggaaacacaucagaagacc

SEQ ID NO: 259035 - RNA, 22 nt, Human
uuccugggcucuggcuggccua

SEQ ID NO: 259036 - RNA, 23 nt, Human
acagacauuguacaucuuguuuu

SEQ ID NO: 259037 - RNA, 22 nt, Human
ccugggccaggcuugggaaugc

SEQ ID NO: 259038 - RNA, 22 nt, Human
ucuucaauuagauuuaccaauu

SEQ ID NO: 259039 - RNA, 22 nt, Human
aggaauguguuucuaggcuguu

SEQ ID NO: 259040 - RNA, 22 nt, Human
aguuguaagagacagauauaaa

SEQ ID NO: 259041 - RNA, 21 nt, Human
cuggcauuaugauagcguccu

SEQ ID NO: 259042 - RNA, 18 nt, Human
ggcacugcuguuccccuu

SEQ ID NO: 259043 - RNA, 22 nt, Human
ucaucauccuuuuuugaagagu

SEQ ID NO: 259044 - RNA, 22 nt, Human
cucccuccucaaauaucuuugu

SEQ ID NO: 259045 - RNA, 22 nt, Human
uggcuggcguuggggccaguga

SEQ ID NO: 259046 - RNA, 22 nt, Human
aagcuuuaaggaauuuuaugga

SEQ ID NO: 259047 - RNA, 22 nt, Human
ggcgccagcgguaaguaagaca

SEQ ID NO: 259048 - RNA, 22 nt, Human
aggaaugucugagaaagaggca

SEQ ID NO: 259049 - RNA, 22 nt, Human
uaccuguugucacgauaacacu

SEQ ID NO: 259050 - RNA, 22 nt, Human
ucugccuggaugauggcagggc

SEQ ID NO: 259051 - RNA, 22 nt, Human
cuguagaggaacaagagcucuu

SEQ ID NO: 259052 - RNA, 18 nt, Human
uaucuuuuccagugguau

SEQ ID NO: 259053 - RNA, 21 nt, Human
caugugucauuggagagcaau

SEQ ID NO: 259054 - RNA, 22 nt, Human
gaauaacauuggaacccugaag

SEQ ID NO: 259055 - RNA, 22 nt, Human
ccucugugccucguguccucug

SEQ ID NO: 259056 - RNA, 22 nt, Human
cccaugagguggagguugcagu

SEQ ID NO: 259057 - RNA, 22 nt, Human
aaguucugggguaaugagaauu

SEQ ID NO: 259058 - RNA, 22 nt, Human
uggccugggccugccggugcaa

SEQ ID NO: 259059 - RNA, 22 nt, Human
uccuagaaggaucauucuagug

SEQ ID NO: 259060 - RNA, 22 nt, Human
aauuccuaguuguacuuaguga

SEQ ID NO: 259061 - RNA, 22 nt, Human
caacaguucucauagcagauuc

SEQ ID NO: 259062 - RNA, 19 nt, Human
ccagcccauaguccaucac

SEQ ID NO: 259063 - RNA, 22 nt, Human
aggggaggagcuuuucuugccu

SEQ ID NO: 259064 - RNA, 22 nt, Human
caaaugauccuugcaagcugug

SEQ ID NO: 259065 - RNA, 17 nt, Human
uuccaguuuaguauugu

SEQ ID NO: 259066 - RNA, 22 nt, Human
uaugugucccugcuacucaaca

SEQ ID NO: 259067 - RNA, 22 nt, Human
cacaggagggagcgggcagcca

SEQ ID NO: 259068 - RNA, 22 nt, Human
gaggguggggaauagacugcua

SEQ ID NO: 259069 - RNA, 22 nt, Human
ugucaggacacagcuuucugug

SEQ ID NO: 259070 - RNA, 22 nt, Human
gggagccacagugaggugcaug

SEQ ID NO: 259071 - RNA, 22 nt, Human
cagaagugaaugugauaaacca

SEQ ID NO: 259072 - RNA, 22 nt, Human
acucaggccccaucgcccaucu

SEQ ID NO: 259073 - RNA, 22 nt, Human
caggcuggagugaguguagugg

SEQ ID NO: 259074 - RNA, 22 nt, Human
gcacaauuauuuaugcaguaug

SEQ ID NO: 259075 - RNA, 22 nt, Human
ggcacugauuccauucaugaag

SEQ ID NO: 259076 - RNA, 22 nt, Human
uuucucaaguacugcacaugaa

SEQ ID NO: 259077 - RNA, 22 nt, Human
uguccuuuacugauugcuucug

SEQ ID NO: 259078 - RNA, 22 nt, Human
gcaccagggugcuguguucugg

SEQ ID NO: 259079 - RNA, 22 nt, Human
ucuggguccgggggugaauuga

SEQ ID NO: 259080 - RNA, 22 nt, Human
agugucuuugucucucaagcac

SEQ ID NO: 259081 - RNA, 22 nt, Human
aucucuucucccaacaccuggc

SEQ ID NO: 259082 - RNA, 22 nt, Human
uucuucaguguagcaacuguau

SEQ ID NO: 259083 - RNA, 22 nt, Human
gugcaaaaggcauugugguuuu

SEQ ID NO: 259084 - RNA, 19 nt, Human
gaggagcuaucggagacag

SEQ ID NO: 259085 - RNA, 23 nt, Human
agaccugcaucugauaggcccug

SEQ ID NO: 259086 - RNA, 20 nt, Human
guuuccuauuuaccuccuca

SEQ ID NO: 259087 - RNA, 22 nt, Human
gcugcagcccggcgcgccugag

SEQ ID NO: 259088 - RNA, 22 nt, Human
uaguuaugucugcaugcauauu

SEQ ID NO: 259089 - RNA, 22 nt, Human
aaagccagaguguguuagagac

SEQ ID NO: 259090 - RNA, 22 nt, Human
cagcugaggucuuuuuuaugug

SEQ ID NO: 259091 - RNA, 22 nt, Human
uuauuuaauuuucucacucaga

SEQ ID NO: 259092 - RNA, 22 nt, Human
gcagcauccccaggcagcaggg

SEQ ID NO: 259093 - RNA, 22 nt, Human
cuccaggcuggggugcagguug

SEQ ID NO: 259094 - RNA, 22 nt, Human
gcucagggugcaguguccauga

SEQ ID NO: 259095 - RNA, 20 nt, Human
gcagggcaagggauaugaaa

SEQ ID NO: 259096 - RNA, 22 nt, Human
aaagguuuugguaaggcuuuaa

SEQ ID NO: 259097 - RNA, 22 nt, Human
uagggaggcuacuucuuguagg

SEQ ID NO: 259098 - RNA, 22 nt, Human
aggcuucuugagccccacaggc

SEQ ID NO: 259099 - RNA, 22 nt, Human
cugccagcucaaagcgcagcua

SEQ ID NO: 259100 - RNA, 22 nt, Human
acacagaggcaugacaguggcu

SEQ ID NO: 259101 - RNA, 22 nt, Human
ggcagcugaccuagcaccaucc

SEQ ID NO: 259102 - RNA, 22 nt, Human
aagcaaagacaguuugagugga

SEQ ID NO: 259103 - RNA, 22 nt, Human
augaaucaagugagaacagcau

SEQ ID NO: 259104 - RNA, 17 nt, Human
caggcagacauguaagc

SEQ ID NO: 259105 - RNA, 22 nt, Human
acaaggcucuaauuucauugaa

SEQ ID NO: 259106 - RNA, 21 nt, Human
acagugugcuucucucccucc

SEQ ID NO: 259107 - RNA, 22 nt, Human
aucauaaagugcuaucugauug

SEQ ID NO: 259108 - RNA, 22 nt, Human
aaacccagagacuagaaagacc

SEQ ID NO: 259109 - RNA, 22 nt, Human
guguuuauaggagugaaugcug

SEQ ID NO: 259110 - RNA, 22 nt, Human
ggcacagggagccgcaguugca

SEQ ID NO: 259111 - RNA, 22 nt, Human
uauggaaacuaauucauuuuuc

SEQ ID NO: 259112 - RNA, 22 nt, Human
uuaugaaaacaaucaguaggca

SEQ ID NO: 259113 - RNA, 22 nt, Human
ccugggucacucaggcaggcgg

SEQ ID NO: 259114 - RNA, 21 nt, Human
ugcacuuugggggacaggcug

SEQ ID NO: 259115 - RNA, 18 nt, Human
cuucaguggcugcucugc

SEQ ID NO: 259116 - RNA, 22 nt, Human
ucauaaauaguugugccugaau

SEQ ID NO: 259117 - RNA, 22 nt, Human
gcccucaggcagggagucuuuc

SEQ ID NO: 259118 - RNA, 22 nt, Human
aaagaugugccuguuucauagu

SEQ ID NO: 259119 - RNA, 22 nt, Human
gagaagggauaugccacucucg

SEQ ID NO: 259120 - RNA, 22 nt, Human
gucaaguuuauccgcucauuca

SEQ ID NO: 259121 - RNA, 22 nt, Human
uccuggccaggaugaccuaaca

SEQ ID NO: 259122 - RNA, 22 nt, Human
gcucugagacaguagagauggc

SEQ ID NO: 259123 - RNA, 22 nt, Human
aaaaguuugugcaaacacucag

SEQ ID NO: 259124 - RNA, 22 nt, Human
caggaaacugugggcuuaaauc

SEQ ID NO: 259125 - RNA, 22 nt, Human
aagcacaguucuuagaguuaca

SEQ ID NO: 259126 - RNA, 21 nt, Human
uucauugaacuauuuguggag

SEQ ID NO: 259127 - RNA, 19 nt, Human
agcuggcucuucuuugucu

SEQ ID NO: 259128 - RNA, 22 nt, Human
gaggggcacaguaaaggguccc

SEQ ID NO: 259129 - RNA, 22 nt, Human
acaugaaaccugagucuaacuc

SEQ ID NO: 259130 - RNA, 22 nt, Human
gggaaaggauuuacaguuugau

SEQ ID NO: 259131 - RNA, 22 nt, Human
cuccuggaggcuccaagggaga

SEQ ID NO: 259132 - RNA, 22 nt, Human
ucacucuguuagaggaaagugc

SEQ ID NO: 259133 - RNA, 22 nt, Human
ugaaugcuuggagucauaaaau

SEQ ID NO: 259134 - RNA, 22 nt, Human
gggagggaaggaccuuaugaau

SEQ ID NO: 259135 - RNA, 22 nt, Human
uggaaacugcaguucccgggga

SEQ ID NO: 259136 - RNA, 22 nt, Human
cacuagaaccaaugacauuucu

SEQ ID NO: 259137 - RNA, 23 nt, Human
auaaacugucaaaagccagcccu

SEQ ID NO: 259138 - RNA, 22 nt, Human
acagacaugggccgcucuugag

SEQ ID NO: 259139 - RNA, 22 nt, Human
cagucccaugagcccagaacau

SEQ ID NO: 259140 - RNA, 23 nt, Human
aagaauaaaugacauuaaaggug

SEQ ID NO: 259141 - RNA, 22 nt, Human
ccaccaggcucuguccgagcgg

SEQ ID NO: 259142 - RNA, 22 nt, Human
gguggggccagggcuccaaccu

SEQ ID NO: 259143 - RNA, 22 nt, Human
gcaguagugucaguacagcaaa

SEQ ID NO: 259144 - RNA, 21 nt, Human
aggacacagagacaccuauug

SEQ ID NO: 259145 - RNA, 15 nt, Human
uaccagcugauccgu

SEQ ID NO: 259146 - RNA, 22 nt, Human
acaggcugcugagccauuugcu

SEQ ID NO: 259147 - RNA, 22 nt, Human
acaggaacccagaaacauuucu

SEQ ID NO: 259148 - RNA, 22 nt, Human
aaaugugucauauucaaaguca

SEQ ID NO: 259149 - RNA, 21 nt, Human
acagcaagccuucacaugagu

SEQ ID NO: 259150 - RNA, 21 nt, Human
uuuuacagaugaggggaaggg

SEQ ID NO: 259151 - RNA, 22 nt, Human
gggcggggggagcuggaaugaa

SEQ ID NO: 259152 - RNA, 22 nt, Human
agccccucuguggcucugccuc

SEQ ID NO: 259153 - RNA, 17 nt, Human
ggcaccagacggagagu

SEQ ID NO: 259154 - RNA, 19 nt, Human
aggugacaugugacagccu

SEQ ID NO: 259155 - RNA, 22 nt, Human
cagcccuuaagagucaucccuc

SEQ ID NO: 259156 - RNA, 22 nt, Human
ggaagaggcugguagugcccgu

SEQ ID NO: 259157 - RNA, 22 nt, Human
uuucuuagcgaugcuugauaaa

SEQ ID NO: 259158 - RNA, 22 nt, Human
agggccugcaucaggagcuugg

SEQ ID NO: 259159 - RNA, 21 nt, Human
uagcacuucgcuguaauuggg

SEQ ID NO: 259160 - RNA, 22 nt, Human
uuuuguguuguaaugucagcua

SEQ ID NO: 259161 - RNA, 22 nt, Human
ggcuucuuaaucaugagaguga

SEQ ID NO: 259162 - RNA, 22 nt, Human
aucauacacucacauaaacaga

SEQ ID NO: 259163 - RNA, 22 nt, Human
ggacagcugcuuucaggccaca

SEQ ID NO: 259164 - RNA, 22 nt, Human
aaggcuucuuugcaggcuuuag

SEQ ID NO: 259165 - RNA, 19 nt, Human
ucugaagaauuagagagca

SEQ ID NO: 259166 - RNA, 22 nt, Human
acauggggcccaaagagagguc

SEQ ID NO: 259167 - RNA, 22 nt, Human
cuacauaaauuuaucacagacu

SEQ ID NO: 259168 - RNA, 22 nt, Human
uacagcugcaaggguuucuggg

SEQ ID NO: 259169 - RNA, 22 nt, Human
gccucagagggcagggugguga

SEQ ID NO: 259170 - RNA, 22 nt, Human
agucagcauuuucacugagcua

SEQ ID NO: 259171 - RNA, 17 nt, Human
uucugugcuuccuggcu

SEQ ID NO: 259172 - RNA, 22 nt, Human
aggccuggguguucaccagaag

SEQ ID NO: 259173 - RNA, 22 nt, Human
agguccuguguccaggggccug

SEQ ID NO: 259174 - RNA, 22 nt, Human
ucucuggcacucccuuauggcu

SEQ ID NO: 259175 - RNA, 22 nt, Human
uuucuucucaucccugaaauca

SEQ ID NO: 259176 - RNA, 22 nt, Human
gugcagcugugugagagcucca

SEQ ID NO: 259177 - RNA, 22 nt, Human
uuacagaauguucuuccaacag

SEQ ID NO: 259178 - RNA, 22 nt, Human
caugagauuugggaggggccag

SEQ ID NO: 259179 - RNA, 22 nt, Human
aaggauaaaaaccacuucuaau

SEQ ID NO: 259180 - RNA, 22 nt, Human
ucagguguuagaagaaauuuca

SEQ ID NO: 259181 - RNA, 22 nt, Human
ggaggggcauaguucaccauca

SEQ ID NO: 259182 - RNA, 22 nt, Human
gcaacuuucaagcaccaugggg

SEQ ID NO: 259183 - RNA, 18 nt, Human
ccuguguguguugcaggc

SEQ ID NO: 259184 - RNA, 22 nt, Human
accaggcagcaccaaagccggu

SEQ ID NO: 259185 - RNA, 22 nt, Human
gaacuuggaccugguccuuugg

SEQ ID NO: 259186 - RNA, 22 nt, Human
ucuuuucuguaacucagugucu

SEQ ID NO: 259187 - RNA, 19 nt, Human
cugcuccaggagcugggga

SEQ ID NO: 259188 - RNA, 21 nt, Human
ugggcgcuugaccucugcacu

SEQ ID NO: 259189 - RNA, 22 nt, Human
cuagaacagucaaagugagcuc

SEQ ID NO: 259190 - RNA, 22 nt, Human
uuacaaguauuuaagaugcugu

SEQ ID NO: 259191 - RNA, 22 nt, Human
caggggcuguggcacauggugu

SEQ ID NO: 259192 - RNA, 22 nt, Human
aagacucuaucuuuagagauca

SEQ ID NO: 259193 - RNA, 22 nt, Human
auuuagcaagcaggcaaauuca

SEQ ID NO: 259194 - RNA, 22 nt, Human
gaggcaguuugccaugccagga

SEQ ID NO: 259195 - RNA, 22 nt, Human
ccucugggagacugcuacugag

SEQ ID NO: 259196 - RNA, 22 nt, Human
agguacagaugaaagucuaguu

SEQ ID NO: 259197 - RNA, 22 nt, Human
cugggcucaaauccuaucucca

SEQ ID NO: 259198 - RNA, 22 nt, Human
agguccuggacugcucuuguua

SEQ ID NO: 259199 - RNA, 22 nt, Human
aguguggacuuuuccuaggagg

SEQ ID NO: 259200 - RNA, 22 nt, Human
cuggcugugcagucuuccagaa

SEQ ID NO: 259201 - RNA, 22 nt, Human
gcagaauagugacuuuccuuaa

SEQ ID NO: 259202 - RNA, 22 nt, Human
caaagauuuuagaauuugcaau

SEQ ID NO: 259203 - RNA, 22 nt, Human
aaguuggaaucuggaacugauc

SEQ ID NO: 259204 - RNA, 22 nt, Human
ucuccuggcucuaaaaggcugu

SEQ ID NO: 259205 - RNA, 22 nt, Human
auaaucugagcuauuucaugag

SEQ ID NO: 259206 - RNA, 22 nt, Human
ucucaguguggugcuuaggaua

SEQ ID NO: 259207 - RNA, 22 nt, Human
agucacacugguuguuuacagu

SEQ ID NO: 259208 - RNA, 22 nt, Human
ccacguguagguggacaggauc

SEQ ID NO: 259209 - RNA, 22 nt, Human
cuagggaccucagcuccuggag

SEQ ID NO: 259210 - RNA, 22 nt, Human
ucaaauaggcuuguagugacug

SEQ ID NO: 259211 - RNA, 22 nt, Human
gugcugugcgcuuuuucuguau

SEQ ID NO: 259212 - RNA, 22 nt, Human
gucuggaguaccauaaaaagga

SEQ ID NO: 259213 - RNA, 22 nt, Human
gggucuggagauccgggugaag

SEQ ID NO: 259214 - RNA, 22 nt, Human
auuuggaaauguaagaaugcaa

SEQ ID NO: 259215 - RNA, 22 nt, Human
aaccccgcucaggcugggugag

SEQ ID NO: 259216 - RNA, 22 nt, Human
caaugcauuauucucccacuuc

SEQ ID NO: 259217 - RNA, 22 nt, Human
cucuggcugucccgaugagcag

SEQ ID NO: 259218 - RNA, 22 nt, Human
ucuggcuucaguaggguucacu

SEQ ID NO: 259219 - RNA, 22 nt, Human
cagcuauugguccacagguaug

SEQ ID NO: 259220 - RNA, 22 nt, Human
cuguggcuuuuccggggagccu

SEQ ID NO: 259221 - RNA, 22 nt, Human
gcccugcccugagccguagacc

SEQ ID NO: 259222 - RNA, 19 nt, Human
cuggaccuggaggcccgga

SEQ ID NO: 259223 - RNA, 22 nt, Human
guuccuuccuaucccgagagcc

SEQ ID NO: 259224 - RNA, 22 nt, Human
auggcaggauacccaguccggc

SEQ ID NO: 259225 - RNA, 22 nt, Human
uucuuucucuccacaaggcuug

SEQ ID NO: 259226 - RNA, 22 nt, Human
uacaguuuaacacuuuggagaa

SEQ ID NO: 259227 - RNA, 22 nt, Human
agcuaggauaagcagagacugg

SEQ ID NO: 259228 - RNA, 19 nt, Human
uucuccagggacuuaggga

SEQ ID NO: 259229 - RNA, 22 nt, Human
caggcuggcaaugcgucaagca

SEQ ID NO: 259230 - RNA, 22 nt, Human
ugagguaaauucuggcccaaac

SEQ ID NO: 259231 - RNA, 22 nt, Human
cugagggagaagugaucucuac

SEQ ID NO: 259232 - RNA, 23 nt, Human
ccuccugggcacaggccugaugg

SEQ ID NO: 259233 - RNA, 19 nt, Human
acauuuaaauucagaucuc

SEQ ID NO: 259234 - RNA, 22 nt, Human
ugacauguggcuuugacccagg

SEQ ID NO: 259235 - RNA, 22 nt, Human
acacaguucuuagcaggugucu

SEQ ID NO: 259236 - RNA, 22 nt, Human
ugguuuauuucucugaaagguu

SEQ ID NO: 259237 - RNA, 22 nt, Human
ggcauccaaauaccaagaugua

SEQ ID NO: 259238 - RNA, 22 nt, Human
agccuucacugggaccuuggau

SEQ ID NO: 259239 - RNA, 22 nt, Human
ucugcaggcauuuuugguuguc

SEQ ID NO: 259240 - RNA, 22 nt, Human
uggaaugaaaaguacuucagaa

SEQ ID NO: 259241 - RNA, 22 nt, Human
uugcagcugugagcuuuacacg

SEQ ID NO: 259242 - RNA, 22 nt, Human
uucuggaauccucaaaacauga

SEQ ID NO: 259243 - RNA, 22 nt, Human
cugggaggcccacguugggaag

SEQ ID NO: 259244 - RNA, 18 nt, Human
gagaggcccggcugugcc

SEQ ID NO: 259245 - RNA, 22 nt, Human
cagauggccagaggcagcugca

SEQ ID NO: 259246 - RNA, 19 nt, Human
uggcagggagaguuugaag

SEQ ID NO: 259247 - RNA, 22 nt, Human
ugaccuuucuuugagauuccug

SEQ ID NO: 259248 - RNA, 22 nt, Human
cagaugcuuguuggcuggucuc

SEQ ID NO: 259249 - RNA, 20 nt, Human
ccuggcugguggaggaaagg

SEQ ID NO: 259250 - RNA, 22 nt, Human
gugaggggccaagaguagggca

SEQ ID NO: 259251 - RNA, 22 nt, Human
agacaacaucacuaaagcugag

SEQ ID NO: 259252 - RNA, 22 nt, Human
aaggaacucuagagccuugaac

SEQ ID NO: 259253 - RNA, 22 nt, Human
gugugcagaggcaggaggugcu

SEQ ID NO: 259254 - RNA, 22 nt, Human
aucucauuuugguuucuacuua

SEQ ID NO: 259255 - RNA, 22 nt, Human
auauaauaguuucauaaaggcu

SEQ ID NO: 259256 - RNA, 22 nt, Human
uuauacacguuuauggagcuac

SEQ ID NO: 259257 - RNA, 22 nt, Human
acacuucuauucccugcacaaa

SEQ ID NO: 259258 - RNA, 21 nt, Human
uacaaguugcuuuugaagucc

SEQ ID NO: 259259 - RNA, 22 nt, Human
uccucagauauaaaugagggug

SEQ ID NO: 259260 - RNA, 22 nt, Human
cugggcucagaugagaggaagg

SEQ ID NO: 259261 - RNA, 22 nt, Human
aaaaaugugaccacaggguguu

SEQ ID NO: 259262 - RNA, 22 nt, Human
uuuuaaacuccccuaguuggug

SEQ ID NO: 259263 - RNA, 22 nt, Human
gggugggguguaucggauccua

SEQ ID NO: 259264 - RNA, 22 nt, Human
agggauggaagacuugaagacc

SEQ ID NO: 259265 - RNA, 20 nt, Human
gagucacagaagaagcugaa

SEQ ID NO: 259266 - RNA, 22 nt, Human
acauuucuaauuuaauguaaca

SEQ ID NO: 259267 - RNA, 22 nt, Human
ucugggcuuggauuggcucugc

SEQ ID NO: 259268 - RNA, 22 nt, Human
auucacaauagcagcuugcaug

SEQ ID NO: 259269 - RNA, 22 nt, Human
ggcacagagcccagcuuccuag

SEQ ID NO: 259270 - RNA, 22 nt, Human
auggagggugguaagacagaga

SEQ ID NO: 259271 - RNA, 22 nt, Human
ccaaaguccacaguuuacauua

SEQ ID NO: 259272 - RNA, 22 nt, Human
ugaugagggggaacagagauuu

SEQ ID NO: 259273 - RNA, 22 nt, Human
aucuuuguugcucucauuucug

SEQ ID NO: 259274 - RNA, 22 nt, Human
acaugauuuuuaaagagauaau

SEQ ID NO: 259275 - RNA, 22 nt, Human
ucaggcaguagaauugcuugaa

SEQ ID NO: 259276 - RNA, 23 nt, Human
uucagggccucagaggugaagcu

SEQ ID NO: 259277 - RNA, 18 nt, Human
agagaagagguguuaguc

SEQ ID NO: 259278 - RNA, 22 nt, Human
caugaguucaucugcuucucuu

SEQ ID NO: 259279 - RNA, 22 nt, Human
agacuguagcuucugucuugag

SEQ ID NO: 259280 - RNA, 22 nt, Human
ugaaagaagccuucgaggcucg

SEQ ID NO: 259281 - RNA, 22 nt, Human
gagaucuucaagguuuuagaua

SEQ ID NO: 259282 - RNA, 22 nt, Human
uuccugagucgccgagucuaug

SEQ ID NO: 259283 - RNA, 22 nt, Human
cucaugucuucacccauucuaa

SEQ ID NO: 259284 - RNA, 22 nt, Human
aggccucuguuccccauguuuu

SEQ ID NO: 259285 - RNA, 22 nt, Human
uacuuagacucuaucuagagau

SEQ ID NO: 259286 - RNA, 19 nt, Human
gagguggguccccgcagcc

SEQ ID NO: 259287 - RNA, 22 nt, Human
gccugggagugcacagugaggu

SEQ ID NO: 259288 - RNA, 22 nt, Human
uagguucacugucuugaggagc

SEQ ID NO: 259289 - RNA, 22 nt, Human
cccagcucaucaggagccgccc

SEQ ID NO: 259290 - RNA, 22 nt, Human
acagaugaugugcacagauaga

SEQ ID NO: 259291 - RNA, 22 nt, Human
cagaagaauggugucugagcuc

SEQ ID NO: 259292 - RNA, 21 nt, Human
cuguggaagggaacuagaggg

SEQ ID NO: 259293 - RNA, 22 nt, Human
uggcugagaccaucagggugua

SEQ ID NO: 259294 - RNA, 22 nt, Human
cacaugcaggagccaauguaca

SEQ ID NO: 259295 - RNA, 22 nt, Human
uggcuucucccucugccugauu

SEQ ID NO: 259296 - RNA, 22 nt, Human
uggcgcaguuucucugcugccu

SEQ ID NO: 259297 - RNA, 22 nt, Human
aggcuccagucuccucuggcag

SEQ ID NO: 259298 - RNA, 22 nt, Human
agcucccagcagagcuggccac

SEQ ID NO: 259299 - RNA, 22 nt, Human
agaaagccucaaucuucaggcc

SEQ ID NO: 259300 - RNA, 22 nt, Human
ccacagaauucugucuccagga

SEQ ID NO: 259301 - RNA, 22 nt, Human
uagcaccuagaguauuuuauca

SEQ ID NO: 259302 - RNA, 22 nt, Human
uccaugaggcagggaggcuggc

SEQ ID NO: 259303 - RNA, 22 nt, Human
uagcugaauaaugcgucugcag

SEQ ID NO: 259304 - RNA, 22 nt, Human
cagggacccuacuagcucacac

SEQ ID NO: 259305 - RNA, 22 nt, Human
ccugggucccugagagaugauu

SEQ ID NO: 259306 - RNA, 22 nt, Human
ucagucuauccagcucagaucc

SEQ ID NO: 259307 - RNA, 22 nt, Human
ccuguggaggcugcucagcugg

SEQ ID NO: 259308 - RNA, 19 nt, Human
uaaugcacuuaacacaugg

SEQ ID NO: 259309 - RNA, 22 nt, Human
uguuaacagaggucauuuuggg

SEQ ID NO: 259310 - RNA, 22 nt, Human
acuuggaaaauucaaaauggca

SEQ ID NO: 259311 - RNA, 22 nt, Human
ggaggagauuccccucucacuu

SEQ ID NO: 259312 - RNA, 22 nt, Human
caauuacauuuauugagcauuc

SEQ ID NO: 259313 - RNA, 22 nt, Human
uaggaaauuagaacuuggaaac

SEQ ID NO: 259314 - RNA, 22 nt, Human
gggcucucuuuuuggccugccc

SEQ ID NO: 259315 - RNA, 22 nt, Human
ccucuguacaggucagcaucua

SEQ ID NO: 259316 - RNA, 22 nt, Human
gccacagcggggccgcuagagc

SEQ ID NO: 259317 - RNA, 22 nt, Human
uagaauuuucugcuuugauagu

SEQ ID NO: 259318 - RNA, 22 nt, Human
gaaagccaucuggcugcuggga

SEQ ID NO: 259319 - RNA, 22 nt, Human
ggaaaaacagucuuuauuauuu

SEQ ID NO: 259320 - RNA, 22 nt, Human
cagcugaguaugcauucaagca

SEQ ID NO: 259321 - RNA, 22 nt, Human
cuacaugaauggguguauuacu

SEQ ID NO: 259322 - RNA, 22 nt, Human
gaaggcuggggcaucagugaaa

SEQ ID NO: 259323 - RNA, 22 nt, Human
gccaucugcugcucuccagugu

SEQ ID NO: 259324 - RNA, 22 nt, Human
auuuacaggacagcuuggcauu

SEQ ID NO: 259325 - RNA, 22 nt, Human
uaauuauaacaguuacaucuua

SEQ ID NO: 259326 - RNA, 20 nt, Human
auuccacuuguuugagguac

SEQ ID NO: 259327 - RNA, 22 nt, Human
uuggaaauugcaagugauuugc

SEQ ID NO: 259328 - RNA, 22 nt, Human
ucaggcuggaaugcaguggggc

SEQ ID NO: 259329 - RNA, 22 nt, Human
auuuccagcagcauauuugucu

SEQ ID NO: 259330 - RNA, 22 nt, Human
auaccuuuuagacauguaguug

SEQ ID NO: 259331 - RNA, 22 nt, Human
aaagugcuuuaggauauuugga

SEQ ID NO: 259332 - RNA, 22 nt, Human
cuuaaagaugucaaggcuguuu

SEQ ID NO: 259333 - RNA, 22 nt, Human
ggcuggcuccaccuagguagcu

SEQ ID NO: 259334 - RNA, 22 nt, Human
cuuaaugaaagguugcacaugg

SEQ ID NO: 259335 - RNA, 22 nt, Human
uuagugcuucuguccaaauaua

SEQ ID NO: 259336 - RNA, 17 nt, Human
cugaagaguccuggcua

SEQ ID NO: 259337 - RNA, 22 nt, Human
gugcaggagcuucuggccugac

SEQ ID NO: 259338 - RNA, 22 nt, Human
agagcuggcugcugcggugcuu

SEQ ID NO: 259339 - RNA, 22 nt, Human
cagcaggcggcccgcgggcccg

SEQ ID NO: 259340 - RNA, 22 nt, Human
gcaagcaagcagguagagcuga

SEQ ID NO: 259341 - RNA, 22 nt, Human
gucccccugaaagcagccgcag

SEQ ID NO: 259342 - RNA, 22 nt, Human
aguuuccuuggauucaauuugg

SEQ ID NO: 259343 - RNA, 22 nt, Human
cugcuguuugccgucauugccu

SEQ ID NO: 259344 - RNA, 21 nt, Human
ugggagagggcucagcuaccc

SEQ ID NO: 259345 - RNA, 19 nt, Human
gcacugaagaguuggucac

SEQ ID NO: 259346 - RNA, 22 nt, Human
aaaaccaggcuugcugugcucg

SEQ ID NO: 259347 - RNA, 22 nt, Human
uggcccaggucucucugagccc

SEQ ID NO: 259348 - RNA, 22 nt, Human
uugccugguccugugggugcug

SEQ ID NO: 259349 - RNA, 22 nt, Human
agucaguuuuaccaaucucagu

SEQ ID NO: 259350 - RNA, 22 nt, Human
gcucuggcacuggcgcgggaug

SEQ ID NO: 259351 - RNA, 19 nt, Human
cuguggacucuagaucaug

SEQ ID NO: 259352 - RNA, 22 nt, Human
acugaaauauuuagaagugaag

SEQ ID NO: 259353 - RNA, 22 nt, Human
aggugcuggagucugggcagga

SEQ ID NO: 259354 - RNA, 22 nt, Human
aucugcugucacauguuugaag

SEQ ID NO: 259355 - RNA, 22 nt, Human
aguaaucugauuuuauagcuau

SEQ ID NO: 259356 - RNA, 22 nt, Human
agucacauagaaguggguuuaa

SEQ ID NO: 259357 - RNA, 22 nt, Human
guugggaaggcaagaaguagaa

SEQ ID NO: 259358 - RNA, 22 nt, Human
gugucccaauguucaggacggc

SEQ ID NO: 259359 - RNA, 22 nt, Human
uuuagcuucaguucuagcuucu

SEQ ID NO: 259360 - RNA, 22 nt, Human
gacagcagaauccauucccagu

SEQ ID NO: 259361 - RNA, 23 nt, Human
uguccuuuuugaggccuccuccu

SEQ ID NO: 259362 - RNA, 21 nt, Human
augugaaauaucaucagagca

SEQ ID NO: 259363 - RNA, 22 nt, Human
acucuguagaucucccgggagc

SEQ ID NO: 259364 - RNA, 22 nt, Human
gaacuugggagaagggagugug

SEQ ID NO: 259365 - RNA, 21 nt, Human
aucuuuauuacgcagagaaga

SEQ ID NO: 259366 - RNA, 22 nt, Human
caggacuauguucaacagauag

SEQ ID NO: 259367 - RNA, 22 nt, Human
gaauuagacaugcuuugcuuuu

SEQ ID NO: 259368 - RNA, 22 nt, Human
ucugccuggccuggagggcaca

SEQ ID NO: 259369 - RNA, 22 nt, Human
ggaagccccagcugugggaucc

SEQ ID NO: 259370 - RNA, 22 nt, Human
caggccuggcccccggcacacc

SEQ ID NO: 259371 - RNA, 22 nt, Human
gggaaggcauaccugagggaga

SEQ ID NO: 259372 - RNA, 22 nt, Human
uucugcuuauucaaaugaucuu

SEQ ID NO: 259373 - RNA, 22 nt, Human
cuucuagagcuggagcaaaugu

SEQ ID NO: 259374 - RNA, 22 nt, Human
aggcccagggcugcucucugaa

SEQ ID NO: 259375 - RNA, 22 nt, Human
ucuuuauuuuaugcuugugcaa

SEQ ID NO: 259376 - RNA, 22 nt, Human
aggcaacuuuuggggaugaugg

SEQ ID NO: 259377 - RNA, 22 nt, Human
cucuaggcugcccaggagcuga

SEQ ID NO: 259378 - RNA, 22 nt, Human
accacaggggaggaaugaugcc

SEQ ID NO: 259379 - RNA, 22 nt, Human
uguaauauuguagugacaguac

SEQ ID NO: 259380 - RNA, 22 nt, Human
uguuacucugggguugugguga

SEQ ID NO: 259381 - RNA, 22 nt, Human
ugggacaggaggccucuggaga

SEQ ID NO: 259382 - RNA, 22 nt, Human
ggcuccuggaaagcccucgcuc

SEQ ID NO: 259383 - RNA, 22 nt, Human
acucuggcuugaggaccagguc

SEQ ID NO: 259384 - RNA, 22 nt, Human
agcaaugauguuuucaaguagg

SEQ ID NO: 259385 - RNA, 22 nt, Human
gaggcaguggucugaugcaagg

SEQ ID NO: 259386 - RNA, 22 nt, Human
gaagagcauaugaagagcauau

SEQ ID NO: 259387 - RNA, 22 nt, Human
uuccuggcaaagugagcaucac

SEQ ID NO: 259388 - RNA, 22 nt, Human
uguccucacacguagggaguaa

SEQ ID NO: 259389 - RNA, 22 nt, Human
uucuuuucaagaggggcaagga

SEQ ID NO: 259390 - RNA, 22 nt, Human
ucaagcuggcuguugcuauuuc

SEQ ID NO: 259391 - RNA, 22 nt, Human
acacagugguguuuacaaaauu

SEQ ID NO: 259392 - RNA, 22 nt, Human
gaguuacauucauuguuacgcu

SEQ ID NO: 259393 - RNA, 20 nt, Human
gagugcuuuggcuugcucuc

SEQ ID NO: 259394 - RNA, 22 nt, Human
uugugcuccugugagaaucuag

SEQ ID NO: 259395 - RNA, 22 nt, Human
uccuguagcugucacugggggc

SEQ ID NO: 259396 - RNA, 22 nt, Human
ggcucacgcaauuaucccggcc

SEQ ID NO: 259397 - RNA, 22 nt, Human
cccugcugaaucccauggaguc

SEQ ID NO: 259398 - RNA, 22 nt, Human
uuuggaauuccauuucugcauu

SEQ ID NO: 259399 - RNA, 22 nt, Human
acaggcugauagaccauaaaua

SEQ ID NO: 259400 - RNA, 22 nt, Human
gguagaaauaaucuucaggcug

SEQ ID NO: 259401 - RNA, 22 nt, Human
cuucugugaagagcagaaccau

SEQ ID NO: 259402 - RNA, 22 nt, Human
uugagggucuggaucugcugcu

SEQ ID NO: 259403 - RNA, 22 nt, Human
caggauggucagaugcauuguc

SEQ ID NO: 259404 - RNA, 22 nt, Human
gcacagagagcagugggggaca

SEQ ID NO: 259405 - RNA, 21 nt, Human
gucuuuuaagugaagagaggc

SEQ ID NO: 259406 - RNA, 22 nt, Human
uaaaagcugagauauccuguac

SEQ ID NO: 259407 - RNA, 20 nt, Human
gccugagcuauugccaggau

SEQ ID NO: 259408 - RNA, 22 nt, Human
gugguccugcacccgcuuggcc

SEQ ID NO: 259409 - RNA, 22 nt, Human
cugaggcaugggaaguugggug

SEQ ID NO: 259410 - RNA, 18 nt, Human
ucugucuguacaaguauc

SEQ ID NO: 259411 - RNA, 22 nt, Human
acauguauugacauuauauucu

SEQ ID NO: 259412 - RNA, 22 nt, Human
cuggcagcgguuugcagccugg

SEQ ID NO: 259413 - RNA, 22 nt, Human
gaugaagucauuauccuuuugg

SEQ ID NO: 259414 - RNA, 22 nt, Human
uguuuugcuucucuguuuccca

SEQ ID NO: 259415 - RNA, 22 nt, Human
ccaggacaagccagagggacag

SEQ ID NO: 259416 - RNA, 22 nt, Human
uaacugccagcagcgaugaaca

SEQ ID NO: 259417 - RNA, 22 nt, Human
uaacaguaaaguaaguuagcuu

SEQ ID NO: 259418 - RNA, 22 nt, Human
aggaaagcaauggcugagaaca

SEQ ID NO: 259419 - RNA, 22 nt, Human
ccagagucaggagcucauguga

SEQ ID NO: 259420 - RNA, 22 nt, Human
agacagugcuaucccaucugug

SEQ ID NO: 259421 - RNA, 22 nt, Human
cccccucugccgggguccuuca

SEQ ID NO: 259422 - RNA, 22 nt, Human
ggagcuguugauuguuugagga

SEQ ID NO: 259423 - RNA, 22 nt, Human
caggcccucgcccgcagcgacc

SEQ ID NO: 259424 - RNA, 22 nt, Human
gaggcuuuauaacuauuuguuc

SEQ ID NO: 259425 - RNA, 22 nt, Human
uucugauugcugaugaggccca

SEQ ID NO: 259426 - RNA, 22 nt, Human
gaaaguaugccaucuaccucuu

SEQ ID NO: 259427 - RNA, 22 nt, Human
aaacugcaauuacuuuugcagc

SEQ ID NO: 259428 - RNA, 22 nt, Human
guccuucagcaccucccucggc

SEQ ID NO: 259429 - RNA, 22 nt, Human
ccugccugucccucaguccaca

SEQ ID NO: 259430 - RNA, 22 nt, Human
acagacagaggcuccaugagga

SEQ ID NO: 259431 - RNA, 22 nt, Human
cuccugagcucugaggaagcuu

SEQ ID NO: 259432 - RNA, 22 nt, Human
caccagcuucccaucgcggguc

SEQ ID NO: 259433 - RNA, 22 nt, Human
augguuuaagggagaauauuga

SEQ ID NO: 259434 - RNA, 22 nt, Human
ugcaauauuuuauauccaacaa

SEQ ID NO: 259435 - RNA, 19 nt, Human
aguagcagaaagugcagug

SEQ ID NO: 259436 - RNA, 22 nt, Human
aagaaucugacauaauuuccug

SEQ ID NO: 259437 - RNA, 22 nt, Human
uggaggcagucaaaugacugac

SEQ ID NO: 259438 - RNA, 22 nt, Human
uagaacuggcggcuagaccacu

SEQ ID NO: 259439 - RNA, 22 nt, Human
agguccaguuuucaguucucau

SEQ ID NO: 259440 - RNA, 22 nt, Human
uggcuuccccuaccuuccaauu

SEQ ID NO: 259441 - RNA, 22 nt, Human
caaagugcuggaauuacaggug

SEQ ID NO: 259442 - RNA, 19 nt, Human
uggcuucuggcaacagaug

SEQ ID NO: 259443 - RNA, 22 nt, Human
ucacagaaauaagauaguuauu

SEQ ID NO: 259444 - RNA, 22 nt, Human
gggcugagacgauggggucuuc

SEQ ID NO: 259445 - RNA, 22 nt, Human
gauacaguauuuaaagagcaac

SEQ ID NO: 259446 - RNA, 22 nt, Human
acagugugugcuuucccuuacg

SEQ ID NO: 259447 - RNA, 22 nt, Human
agguccagaggcuccuuauuac

SEQ ID NO: 259448 - RNA, 22 nt, Human
caggccagggagaauaugaagc

SEQ ID NO: 259449 - RNA, 22 nt, Human
acucugggcuuugauuuguuac

SEQ ID NO: 259450 - RNA, 22 nt, Human
cagcaggaagguuuccccugca

SEQ ID NO: 259451 - RNA, 22 nt, Human
ggcucugguggcaauugacugg

SEQ ID NO: 259452 - RNA, 22 nt, Human
gcugucuuccuugcuccaaggg

SEQ ID NO: 259453 - RNA, 22 nt, Human
cagaccagccauuugccucuuc

SEQ ID NO: 259454 - RNA, 22 nt, Human
cagaggcucaccagccuuucac

SEQ ID NO: 259455 - RNA, 20 nt, Human
guaaugaauguaaacaguaa

SEQ ID NO: 259456 - RNA, 22 nt, Human
gggcagguuauuggaguaggga

SEQ ID NO: 259457 - RNA, 22 nt, Human
cagggugugaacaguguaaaac

SEQ ID NO: 259458 - RNA, 22 nt, Human
acuuucuccagaaaaccaagga

SEQ ID NO: 259459 - RNA, 22 nt, Human
aaaaaugaauucuucaguggca

SEQ ID NO: 259460 - RNA, 22 nt, Human
ccugggcucaagcgaucuuguc

SEQ ID NO: 259461 - RNA, 22 nt, Human
agccauuuuccugaaauauaac

SEQ ID NO: 259462 - RNA, 22 nt, Human
gccuguuucuccuccuuggccc

SEQ ID NO: 259463 - RNA, 22 nt, Human
uuggcuucuggcagucuggacg

SEQ ID NO: 259464 - RNA, 22 nt, Human
cccaagccagacccugacccug

SEQ ID NO: 259465 - RNA, 22 nt, Human
uguaaaauaauucuccauguuu

SEQ ID NO: 259466 - RNA, 22 nt, Human
caacauaugauuuuguauauaa

SEQ ID NO: 259467 - RNA, 22 nt, Human
agauugaauauagagauucuug

SEQ ID NO: 259468 - RNA, 18 nt, Human
uuccauaauguauguaac

SEQ ID NO: 259469 - RNA, 22 nt, Human
cacugguagagagaagacaagg

SEQ ID NO: 259470 - RNA, 22 nt, Human
cuuucucuucgaaaaccugccc

SEQ ID NO: 259471 - RNA, 22 nt, Human
gacuuucucuccucccaggugu

SEQ ID NO: 259472 - RNA, 22 nt, Human
ugguggcaucacucagccuccc

SEQ ID NO: 259473 - RNA, 22 nt, Human
uaggacagaguucccugauggc

SEQ ID NO: 259474 - RNA, 22 nt, Human
auuagucuucucauuuggaucc

SEQ ID NO: 259475 - RNA, 22 nt, Human
aacuagaacgagaaagcugaac

SEQ ID NO: 259476 - RNA, 22 nt, Human
gaggacucugggcguguauggg

SEQ ID NO: 259477 - RNA, 22 nt, Human
aggacacagacugauugcagca

SEQ ID NO: 259478 - RNA, 22 nt, Human
ccugguuucaggaacauaaucu

SEQ ID NO: 259479 - RNA, 22 nt, Human
gaaggagaggauugugaggcug

SEQ ID NO: 259480 - RNA, 22 nt, Human
cugagaggcggagcuugcagug

SEQ ID NO: 259481 - RNA, 23 nt, Human
cucagcagccugcugcagauaag

SEQ ID NO: 259482 - RNA, 22 nt, Human
ccuggaagucauuccucguucc

SEQ ID NO: 259483 - RNA, 22 nt, Human
ucugcuucuccuacuucauggg

SEQ ID NO: 259484 - RNA, 22 nt, Human
uggaggcacuaaauggccacaa

SEQ ID NO: 259485 - RNA, 22 nt, Human
aaggccaggcagggagcuguga

SEQ ID NO: 259486 - RNA, 22 nt, Human
gugcauuuauauuugccuuugg

SEQ ID NO: 259487 - RNA, 19 nt, Human
aaggcugguaccauagguu

SEQ ID NO: 259488 - RNA, 22 nt, Human
ucaagaaggagacuccacugug

SEQ ID NO: 259489 - RNA, 22 nt, Human
gcuucaggcugaauuccuccua

SEQ ID NO: 259490 - RNA, 22 nt, Human
auuauuggacacuucuucugca

SEQ ID NO: 259491 - RNA, 19 nt, Human
ugcacacagauaaguaucu

SEQ ID NO: 259492 - RNA, 22 nt, Human
gcccuggaaucucuccauggga

SEQ ID NO: 259493 - RNA, 22 nt, Human
aaauucagcagugaaaugcccc

SEQ ID NO: 259494 - RNA, 22 nt, Human
cauggcagugauucagccuuug

SEQ ID NO: 259495 - RNA, 22 nt, Human
accucuggacacugcauccuuc

SEQ ID NO: 259496 - RNA, 22 nt, Human
cagagcauugagggucugccaa

SEQ ID NO: 259497 - RNA, 22 nt, Human
gugccagcucuccccacaucug

SEQ ID NO: 259498 - RNA, 22 nt, Human
cuugccaaugguacaaacgauu

SEQ ID NO: 259499 - RNA, 21 nt, Human
guauucuuuaugaagugaaaa

SEQ ID NO: 259500 - RNA, 22 nt, Human
uccaggaaugugugugggcuag

SEQ ID NO: 259501 - RNA, 22 nt, Human
gcccacauuuuuggcuuagagg

SEQ ID NO: 259502 - RNA, 22 nt, Human
uuuucaagagaguguucuaugu

SEQ ID NO: 259503 - RNA, 22 nt, Human
aaacugcaugaagcugauuuua

SEQ ID NO: 259504 - RNA, 22 nt, Human
uacacaugaucauuuaguagca

SEQ ID NO: 259505 - RNA, 22 nt, Human
cagcuccuaugaguaugauucc

SEQ ID NO: 259506 - RNA, 22 nt, Human
ugagucuuuagaauucuaacuu

SEQ ID NO: 259507 - RNA, 22 nt, Human
ggagacagugguagggccuaag

SEQ ID NO: 259508 - RNA, 21 nt, Human
uccuucucuaugauugucuga

SEQ ID NO: 259509 - RNA, 22 nt, Human
augacaagaguguucagggaga

SEQ ID NO: 259510 - RNA, 22 nt, Human
cagcagugcuucagugugagau

SEQ ID NO: 259511 - RNA, 22 nt, Human
acagggagugcaauucauauug

SEQ ID NO: 259512 - RNA, 22 nt, Human
uugcauuuuugagcacgaaguu

SEQ ID NO: 259513 - RNA, 22 nt, Human
aacagugcuguuauaaauguac

SEQ ID NO: 259514 - RNA, 22 nt, Human
cugagccacugcuuguucagug

SEQ ID NO: 259515 - RNA, 22 nt, Human
uucucuggauguuucucaguca

SEQ ID NO: 259516 - RNA, 22 nt, Human
acaacauucuuaaauacacuga

SEQ ID NO: 259517 - RNA, 22 nt, Human
ugacauuauuaucaugucacca

SEQ ID NO: 259518 - RNA, 22 nt, Human
ugcaggcaggggaugagcagcc

SEQ ID NO: 259519 - RNA, 22 nt, Human
ugggagcuccuggagggcagga

SEQ ID NO: 259520 - RNA, 22 nt, Human
uaguuaggaauagcagcgacuc

SEQ ID NO: 259521 - RNA, 22 nt, Human
gcaaguuuagcuaacuggccca

SEQ ID NO: 259522 - RNA, 18 nt, Human
gccugcaggcacgggggu

SEQ ID NO: 259523 - RNA, 22 nt, Human
uccugggaguaauugagucaug

SEQ ID NO: 259524 - RNA, 22 nt, Human
uuucaacaggaugauaauaggc

SEQ ID NO: 259525 - RNA, 22 nt, Human
cuggguuuagggucuccccuug

SEQ ID NO: 259526 - RNA, 22 nt, Human
ucacagaagguggccauagcug

SEQ ID NO: 259527 - RNA, 20 nt, Human
gggcagccucgggagugggu

SEQ ID NO: 259528 - RNA, 22 nt, Human
accagccugucugagucguggg

SEQ ID NO: 259529 - RNA, 22 nt, Human
cuacuucuaaguacauggugau

SEQ ID NO: 259530 - RNA, 22 nt, Human
uuucuuuguuguuaucacauca

SEQ ID NO: 259531 - RNA, 22 nt, Human
ggagcugaugacgucaccaugg

SEQ ID NO: 259532 - RNA, 22 nt, Human
uuguguccauuugagucaugug

SEQ ID NO: 259533 - RNA, 22 nt, Human
cagugacguaaacugcaugugc

SEQ ID NO: 259534 - RNA, 22 nt, Human
cccuccaggccugucauguucc

SEQ ID NO: 259535 - RNA, 22 nt, Human
uuccauauuguacucuuuggag

SEQ ID NO: 259536 - RNA, 22 nt, Human
uucagugucccuaguagaaguu

SEQ ID NO: 259537 - RNA, 22 nt, Human
uacuuaaaacugauagaaucuc

SEQ ID NO: 259538 - RNA, 22 nt, Human
gugugcucagcucauuuggaua

SEQ ID NO: 259539 - RNA, 19 nt, Human
auaaauaaaaagugggaga

SEQ ID NO: 259540 - RNA, 22 nt, Human
caagaaaugggauuugacugcc

SEQ ID NO: 259541 - RNA, 20 nt, Human
gcacugaaauucaauguuug

SEQ ID NO: 259542 - RNA, 22 nt, Human
gaaagcugaaccaggaaccaug

SEQ ID NO: 259543 - RNA, 22 nt, Human
aggagcagaccguaguccugca

SEQ ID NO: 259544 - RNA, 22 nt, Human
ccagcucugcagggccuggggu

SEQ ID NO: 259545 - RNA, 23 nt, Human
ugaauguuuauucucggugcaga

SEQ ID NO: 259546 - RNA, 22 nt, Human
augguuuauccuuuaccagucg

SEQ ID NO: 259547 - RNA, 22 nt, Human
agacagcugggaguguccuucu

SEQ ID NO: 259548 - RNA, 22 nt, Human
agguccuguccuuggucucuga

SEQ ID NO: 259549 - RNA, 22 nt, Human
aaggcugagacagcacaggucc

SEQ ID NO: 259550 - RNA, 22 nt, Human
guuuacaugcagaaaaucaaug

SEQ ID NO: 259551 - RNA, 22 nt, Human
ggagcccugcccuaggcagcuc

SEQ ID NO: 259552 - RNA, 22 nt, Human
ucacuuagauggggaucaucac

SEQ ID NO: 259553 - RNA, 22 nt, Human
ccugugggucacaugggugacu

SEQ ID NO: 259554 - RNA, 23 nt, Human
cuagaauuuugcuaaaagacuag

SEQ ID NO: 259555 - RNA, 22 nt, Human
auagaaccuguugugaaauuca

SEQ ID NO: 259556 - RNA, 22 nt, Human
gggcuucuggucauuccucauc

SEQ ID NO: 259557 - RNA, 22 nt, Human
acuuucaagcaagaacacuuug

SEQ ID NO: 259558 - RNA, 22 nt, Human
agauauauuuaagguaauaagu

SEQ ID NO: 259559 - RNA, 22 nt, Human
gagaggaagccuucuguacuug

SEQ ID NO: 259560 - RNA, 22 nt, Human
uggcugaggagagggcggaagu

SEQ ID NO: 259561 - RNA, 22 nt, Human
auaaggcagucccuuaacaagg

SEQ ID NO: 259562 - RNA, 22 nt, Human
aaguaguuaguccgccugcucu

SEQ ID NO: 259563 - RNA, 22 nt, Human
ugucucuggcugcagccuguuc

SEQ ID NO: 259564 - RNA, 22 nt, Human
uuuagggaagaagcccauggcc

SEQ ID NO: 259565 - RNA, 22 nt, Human
gucuccagccauucucugauca

SEQ ID NO: 259566 - RNA, 21 nt, Human
gcagcgcccucugaccuugau

SEQ ID NO: 259567 - RNA, 22 nt, Human
uccuggugaggcuagaaguguc

SEQ ID NO: 259568 - RNA, 22 nt, Human
gccucaugagggaucugcccuc

SEQ ID NO: 259569 - RNA, 19 nt, Human
ugcuuugccuugauuagcu

SEQ ID NO: 259570 - RNA, 22 nt, Human
gggaccugaggcccugcuccac

SEQ ID NO: 259571 - RNA, 22 nt, Human
gcagcaucaauccaugcuucuc

SEQ ID NO: 259572 - RNA, 22 nt, Human
ugcucuucaccauuacaucaug

SEQ ID NO: 259573 - RNA, 22 nt, Human
aaguccaugaucaagauguggc

SEQ ID NO: 259574 - RNA, 22 nt, Human
guuuauauucaacggaguaucu

SEQ ID NO: 259575 - RNA, 22 nt, Human
uaauaauuaguuauugaucgug

SEQ ID NO: 259576 - RNA, 22 nt, Human
ugcugggucaggcaucugcaga

SEQ ID NO: 259577 - RNA, 22 nt, Human
uaugaaggauacaccucugauu

SEQ ID NO: 259578 - RNA, 19 nt, Human
ccugggucugcagcauuca

SEQ ID NO: 259579 - RNA, 22 nt, Human
ggggaagaggcgugauggaucc

SEQ ID NO: 259580 - RNA, 22 nt, Human
ugaaguucaagggcuacauuug

SEQ ID NO: 259581 - RNA, 22 nt, Human
cuuaagaaauugcauucuaauc

SEQ ID NO: 259582 - RNA, 21 nt, Human
uaagcauaucagauagacucu

SEQ ID NO: 259583 - RNA, 22 nt, Human
guaaaauagaauaacguggcua

SEQ ID NO: 259584 - RNA, 22 nt, Human
ggcugcagguugguuggcagcu

SEQ ID NO: 259585 - RNA, 22 nt, Human
gauuuauaaagguugcacugga

SEQ ID NO: 259586 - RNA, 22 nt, Human
gaagagcuguagccugcucuuu

SEQ ID NO: 259587 - RNA, 22 nt, Human
aaaugucuguaggggcugcagg

SEQ ID NO: 259588 - RNA, 22 nt, Human
agcaccugcacaguggaggaaa

SEQ ID NO: 259589 - RNA, 23 nt, Human
aaaugacuaaauguucuuauaga

SEQ ID NO: 259590 - RNA, 22 nt, Human
ugcaguggaaagacucagacuu

SEQ ID NO: 259591 - RNA, 22 nt, Human
uuagagcuacggccuuuaaaaa

SEQ ID NO: 259592 - RNA, 18 nt, Human
agcugaggggacugaaga

SEQ ID NO: 259593 - RNA, 22 nt, Human
cagagaaagaagcccauucauu

SEQ ID NO: 259594 - RNA, 22 nt, Human
caguauacgacuaacgcaugac

SEQ ID NO: 259595 - RNA, 22 nt, Human
agcuaaugauacaugcuccaca

SEQ ID NO: 259596 - RNA, 17 nt, Human
accagccucuccugggg

SEQ ID NO: 259597 - RNA, 22 nt, Human
uugcagcuucgagucuaucugu

SEQ ID NO: 259598 - RNA, 22 nt, Human
uauauucaacaggcuaauguca

SEQ ID NO: 259599 - RNA, 22 nt, Human
cuuggccugggccgcagccacu

SEQ ID NO: 259600 - RNA, 22 nt, Human
guggcuucuggcugggccucag

SEQ ID NO: 259601 - RNA, 22 nt, Human
uugagaaaggggucaauaucuc

SEQ ID NO: 259602 - RNA, 22 nt, Human
guguguccaaggccacaauagc

SEQ ID NO: 259603 - RNA, 22 nt, Human
uaaugcaguacugauauaaaca

SEQ ID NO: 259604 - RNA, 22 nt, Human
aaaugugucaguuucauucucu

SEQ ID NO: 259605 - RNA, 22 nt, Human
agcagguuguuuuguggccagg

SEQ ID NO: 259606 - RNA, 22 nt, Human
auuugucucugcacuuuacuca

SEQ ID NO: 259607 - RNA, 22 nt, Human
aaaggagaaaacauacaggacu

SEQ ID NO: 259608 - RNA, 22 nt, Human
gaucaguaagugaauaaugagu

SEQ ID NO: 259609 - RNA, 22 nt, Human
uuccucagcuuuagacuaugaa

SEQ ID NO: 259610 - RNA, 22 nt, Human
aauuauauguuaaucuucaauu

SEQ ID NO: 259611 - RNA, 22 nt, Human
cuggcagguccagcuggacuca

SEQ ID NO: 259612 - RNA, 22 nt, Human
uauuggauagcuugugcagaau

SEQ ID NO: 259613 - RNA, 18 nt, Human
gcaggcuuuuccuggguc

SEQ ID NO: 259614 - RNA, 23 nt, Human
aaaaaaccauguaggcacucagu

SEQ ID NO: 259615 - RNA, 23 nt, Human
cacuccuguuucuaagccagcau

SEQ ID NO: 259616 - RNA, 22 nt, Human
agaggggcccgguucuccgucu

SEQ ID NO: 259617 - RNA, 22 nt, Human
aaacuaaggugcuguggacuga

SEQ ID NO: 259618 - RNA, 22 nt, Human
uuuccauguuggugaaaugagg

SEQ ID NO: 259619 - RNA, 22 nt, Human
cuccccuccuuaggucuucuag

SEQ ID NO: 259620 - RNA, 22 nt, Human
cucagccaugcaacaugcuggg

SEQ ID NO: 259621 - RNA, 22 nt, Human
uuaccuuuuaggcaagcaucuu

SEQ ID NO: 259622 - RNA, 22 nt, Human
ucaggagggcuaagacuguagc

SEQ ID NO: 259623 - RNA, 22 nt, Human
aguaggguguugcuauaacaag

SEQ ID NO: 259624 - RNA, 21 nt, Human
uauuuauuaauuuguaaggcu

SEQ ID NO: 259625 - RNA, 22 nt, Human
gagaugaugagauuuggaacuu

SEQ ID NO: 259626 - RNA, 22 nt, Human
uuacuugaaaaccaccaguauu

SEQ ID NO: 259627 - RNA, 22 nt, Human
uuaauaacauuguguaucaccc

SEQ ID NO: 259628 - RNA, 22 nt, Human
uaugcaaaucauuagauuuccu

SEQ ID NO: 259629 - RNA, 22 nt, Human
cuucacagccaacaugggcaca

SEQ ID NO: 259630 - RNA, 22 nt, Human
ucacauuuuuuacuggacuuaa

SEQ ID NO: 259631 - RNA, 22 nt, Human
aaacaagucacuuuaucuugaa

SEQ ID NO: 259632 - RNA, 22 nt, Human
cacauuccuuacauucauagag

SEQ ID NO: 259633 - RNA, 22 nt, Human
ucaggucuauacuaugagaggc

SEQ ID NO: 259634 - RNA, 22 nt, Human
aguuuacaaaguuucacuguuc

SEQ ID NO: 259635 - RNA, 23 nt, Human
acucagagaccccgggaagugac

SEQ ID NO: 259636 - RNA, 22 nt, Human
cugccagcucaccggcucagac

SEQ ID NO: 259637 - RNA, 22 nt, Human
ucccagcacuguaauucuuugg

SEQ ID NO: 259638 - RNA, 22 nt, Human
ugaggugguuacuguggugcuc

SEQ ID NO: 259639 - RNA, 22 nt, Human
aaggcagccagauccuuugggu

SEQ ID NO: 259640 - RNA, 22 nt, Human
uuccuucuucauuguguuacag

SEQ ID NO: 259641 - RNA, 22 nt, Human
cuguucaguaaccuauaaaaca

SEQ ID NO: 259642 - RNA, 22 nt, Human
ucuugacauuguuguuagcagg

SEQ ID NO: 259643 - RNA, 22 nt, Human
gcccagccccuggguggacgug

SEQ ID NO: 259644 - RNA, 22 nt, Human
ucuaucuggccccuuuuauaua

SEQ ID NO: 259645 - RNA, 22 nt, Human
uggcagcuacagacagagguga

SEQ ID NO: 259646 - RNA, 22 nt, Human
gggcugagcacauacugacagc

SEQ ID NO: 259647 - RNA, 21 nt, Human
gccugcagaccccaccaggcu

SEQ ID NO: 259648 - RNA, 20 nt, Human
uucagaaauaaggaaugagg

SEQ ID NO: 259649 - RNA, 22 nt, Human
uuuauaucuggaguugcuagga

SEQ ID NO: 259650 - RNA, 22 nt, Human
uucuucuuuaucucaguauccu

SEQ ID NO: 259651 - RNA, 22 nt, Human
caugaaauguuagaauuagaca

SEQ ID NO: 259652 - RNA, 22 nt, Human
auuuagcaccuccaucucaaca

SEQ ID NO: 259653 - RNA, 22 nt, Human
gacucugggcugagccagggcc

SEQ ID NO: 259654 - RNA, 22 nt, Human
uacagaccaguaguucucagcg

SEQ ID NO: 259655 - RNA, 22 nt, Human
uaagauguacuuuuguccucac

SEQ ID NO: 259656 - RNA, 22 nt, Human
ugaggccaggaucccaggcucu

SEQ ID NO: 259657 - RNA, 22 nt, Human
gggagguagcaagccugcagcu

SEQ ID NO: 259658 - RNA, 22 nt, Human
ccaacagguugagagucugaau

SEQ ID NO: 259659 - RNA, 22 nt, Human
uacuuuaaaaacugauaauuca

SEQ ID NO: 259660 - RNA, 22 nt, Human
gaaguauaugucuuuaaucuau

SEQ ID NO: 259661 - RNA, 22 nt, Human
cuuggcagagggcugggcucag

SEQ ID NO: 259662 - RNA, 22 nt, Human
uucagcaaaauaucucagauag

SEQ ID NO: 259663 - RNA, 22 nt, Human
uccuggcaggguggcagcgggu

SEQ ID NO: 259664 - RNA, 23 nt, Human
gcucaggcaucauucuuccuggc

SEQ ID NO: 259665 - RNA, 22 nt, Human
acuuccagcuagguucugcuaa

SEQ ID NO: 259666 - RNA, 22 nt, Human
ccuggccacagggcucugcauu

SEQ ID NO: 259667 - RNA, 20 nt, Human
uccugggguaagccaugguc

SEQ ID NO: 259668 - RNA, 22 nt, Human
caggagcucacugucuaauggg

SEQ ID NO: 259669 - RNA, 22 nt, Human
guuagugugacugaggaaugca

SEQ ID NO: 259670 - RNA, 22 nt, Human
aaacugguaauaaaauggauua

SEQ ID NO: 259671 - RNA, 22 nt, Human
gggaacuucagaaagucgcugc

SEQ ID NO: 259672 - RNA, 22 nt, Human
augaugaaacuaggaacuagag

SEQ ID NO: 259673 - RNA, 22 nt, Human
uacaagacgagggaaguucuuu

SEQ ID NO: 259674 - RNA, 22 nt, Human
ccugggaacagcagaguccugg

SEQ ID NO: 259675 - RNA, 22 nt, Human
ucacaucuugugauguuuucau

SEQ ID NO: 259676 - RNA, 22 nt, Human
uggcuggagucuggugcuagcc

SEQ ID NO: 259677 - RNA, 22 nt, Human
aggcagggcucauuucuuaggc

SEQ ID NO: 259678 - RNA, 22 nt, Human
ugaccaggauacugcagggaug

SEQ ID NO: 259679 - RNA, 22 nt, Human
gcuuuagagaagaaagguugcu

SEQ ID NO: 259680 - RNA, 22 nt, Human
gcuuuaaauggcuugcccaagu

SEQ ID NO: 259681 - RNA, 22 nt, Human
ccugggcaucucaugcaccugc

SEQ ID NO: 259682 - RNA, 22 nt, Human
uaacagaauuugcuaaacuccg

SEQ ID NO: 259683 - RNA, 22 nt, Human
uuggcuuccugcacuugaguuu

SEQ ID NO: 259684 - RNA, 22 nt, Human
ccuggcaggcaagaggaaggga

SEQ ID NO: 259685 - RNA, 22 nt, Human
caggaagauuagaccaagagcu

SEQ ID NO: 259686 - RNA, 22 nt, Human
cugccagggaggcugggaaguu

SEQ ID NO: 259687 - RNA, 22 nt, Human
aaauucuuucauggcuaauaag

SEQ ID NO: 259688 - RNA, 22 nt, Human
gcagggugugucucauacaguu

SEQ ID NO: 259689 - RNA, 21 nt, Human
agagaagggauuccaggcccu

SEQ ID NO: 259690 - RNA, 22 nt, Human
guuucuuuugugaucaccaacc

SEQ ID NO: 259691 - RNA, 22 nt, Human
caaauuaaugugucucaaaaua

SEQ ID NO: 259692 - RNA, 22 nt, Human
gaggagaagcuauuggaaggac

SEQ ID NO: 259693 - RNA, 22 nt, Human
acacaugaaucacugguggaag

SEQ ID NO: 259694 - RNA, 22 nt, Human
cagagacagaaaauggaucuag

SEQ ID NO: 259695 - RNA, 22 nt, Human
uugagaacuagcauggucuauc

SEQ ID NO: 259696 - RNA, 22 nt, Human
aaaauugguuccuuucugaggc

SEQ ID NO: 259697 - RNA, 22 nt, Human
agucuggugguauuuuguagug

SEQ ID NO: 259698 - RNA, 22 nt, Human
gcugugcagguccccacugccu

SEQ ID NO: 259699 - RNA, 23 nt, Human
guggccuccccggaaugccucgc

SEQ ID NO: 259700 - RNA, 22 nt, Human
aucuuuacaguguaagugcaga

SEQ ID NO: 259701 - RNA, 22 nt, Human
aaagcaaugggucuaagguaaa

SEQ ID NO: 259702 - RNA, 22 nt, Human
uccuggcucuaaguccugagug

SEQ ID NO: 259703 - RNA, 22 nt, Human
augcaacacauuugaugagcga

SEQ ID NO: 259704 - RNA, 22 nt, Human
acacaugaggaaggccucaccc

SEQ ID NO: 259705 - RNA, 22 nt, Human
uuacaguuacugguacuguuaa

SEQ ID NO: 259706 - RNA, 20 nt, Human
cagagccaggguuuuguuuu

SEQ ID NO: 259707 - RNA, 22 nt, Human
gcugcccuguuuagccaggguu

SEQ ID NO: 259708 - RNA, 22 nt, Human
cuuggccugcaggcagcagcgc

SEQ ID NO: 259709 - RNA, 22 nt, Human
gaugauuuuugccagugugaug

SEQ ID NO: 259710 - RNA, 22 nt, Human
acauggcaaaagggacuuuaca

SEQ ID NO: 259711 - RNA, 22 nt, Human
uacaguaaucuggacaugauuu

SEQ ID NO: 259712 - RNA, 22 nt, Human
guccugggagaugggacccuga

SEQ ID NO: 259713 - RNA, 22 nt, Human
ucugucuuuagaggccugugcu

SEQ ID NO: 259714 - RNA, 22 nt, Human
ucuggcagggguucugcacuug

SEQ ID NO: 259715 - RNA, 22 nt, Human
aacaaaguguacuuccauacug

SEQ ID NO: 259716 - RNA, 22 nt, Human
acccuggacuggggcugaggcu

SEQ ID NO: 259717 - RNA, 22 nt, Human
ugcaggagcagagauggcugga

SEQ ID NO: 259718 - RNA, 22 nt, Human
gcagggaaggggcaugcuggag

SEQ ID NO: 259719 - RNA, 22 nt, Human
caaaaugaugugauuuuauugu

SEQ ID NO: 259720 - RNA, 22 nt, Human
uuaauuagagcugauguucaua

SEQ ID NO: 259721 - RNA, 22 nt, Human
cuggagggcuggacuaaggaaa

SEQ ID NO: 259722 - RNA, 22 nt, Human
ugggaggaucgcuugagcccag

SEQ ID NO: 259723 - RNA, 22 nt, Human
cacaggaagcugacugcuggca

SEQ ID NO: 259724 - RNA, 22 nt, Human
uggcugccaauggcuuggaaag

SEQ ID NO: 259725 - RNA, 22 nt, Human
cuucaaguugggcggcgggcag

SEQ ID NO: 259726 - RNA, 22 nt, Human
cucaggcagugcccucuggccg

SEQ ID NO: 259727 - RNA, 22 nt, Human
caugcuaaaccagaacauagga

SEQ ID NO: 259728 - RNA, 22 nt, Human
uucagagauggaaggcagaaug

SEQ ID NO: 259729 - RNA, 22 nt, Human
guccagggaaauagcgacaggg

SEQ ID NO: 259730 - RNA, 22 nt, Human
gagauggagucuuuuucuguca

SEQ ID NO: 259731 - RNA, 22 nt, Human
aaggugaacugguaaugacaga

SEQ ID NO: 259732 - RNA, 22 nt, Human
uggcucuggagcuccugggccc

SEQ ID NO: 259733 - RNA, 22 nt, Human
cagagcccugcaugcuccaucu

SEQ ID NO: 259734 - RNA, 22 nt, Human
agcugcagcuacaguguugguu

SEQ ID NO: 259735 - RNA, 22 nt, Human
auugcuuuuccuuaacacaugc

SEQ ID NO: 259736 - RNA, 22 nt, Human
ccugaccuauuuuucucagcug

SEQ ID NO: 259737 - RNA, 22 nt, Human
ccauucugccaugcuucaucua

SEQ ID NO: 259738 - RNA, 22 nt, Human
cacaguuugguuuugcuguaau

SEQ ID NO: 259739 - RNA, 22 nt, Human
cccaaggcugcagugagcauga

SEQ ID NO: 259740 - RNA, 22 nt, Human
agcugagguugaagagugaacg

SEQ ID NO: 259741 - RNA, 22 nt, Human
auguaauuugcccucaaguuaa

SEQ ID NO: 259742 - RNA, 22 nt, Human
gcaggcagagguggaggagaca

SEQ ID NO: 259743 - RNA, 22 nt, Human
ccaggaagguguuuaacuagag

SEQ ID NO: 259744 - RNA, 22 nt, Human
cacugggagucguaagacacgg

SEQ ID NO: 259745 - RNA, 22 nt, Human
uuacuucuuuggccuucagcca

SEQ ID NO: 259746 - RNA, 22 nt, Human
uaguuuuauaauguuaacaucu

SEQ ID NO: 259747 - RNA, 22 nt, Human
cagcacccucggaggcugccgu

SEQ ID NO: 259748 - RNA, 22 nt, Human
uuagguaaguaggaucaaaaaa

SEQ ID NO: 259749 - RNA, 22 nt, Human
cugcacagcccucaagagccug

SEQ ID NO: 259750 - RNA, 22 nt, Human
guuguaaauacagcagauaauu

SEQ ID NO: 259751 - RNA, 22 nt, Human
agugauuagaaaguacacuugg

SEQ ID NO: 259752 - RNA, 22 nt, Human
uaguuacagagaaaugauuuga

SEQ ID NO: 259753 - RNA, 22 nt, Human
ucauuuaauugguuuugcucgu

SEQ ID NO: 259754 - RNA, 22 nt, Human
agagugggacacgggcgcuguc

SEQ ID NO: 259755 - RNA, 22 nt, Human
agaaaugaauauguagugguua

SEQ ID NO: 259756 - RNA, 22 nt, Human
ggugggaguggaacguggaaga

SEQ ID NO: 259757 - RNA, 22 nt, Human
acagaaauugggcaaauggaag

SEQ ID NO: 259758 - RNA, 17 nt, Human
uggcucugaggcugaau

SEQ ID NO: 259759 - RNA, 22 nt, Human
ugcaaggcccagacaagagcuc

SEQ ID NO: 259760 - RNA, 22 nt, Human
ggcccagcccgagucagccuuc

SEQ ID NO: 259761 - RNA, 22 nt, Human
cagcccagccgagggccuggcu

SEQ ID NO: 259762 - RNA, 23 nt, Human
auugccagacggccccugcucgc

SEQ ID NO: 259763 - RNA, 22 nt, Human
uccuucaaucacccagugggga

SEQ ID NO: 259764 - RNA, 22 nt, Human
gggcagcagagcccugccgagu

SEQ ID NO: 259765 - RNA, 22 nt, Human
uagcccucagcuuggagcgugg

SEQ ID NO: 259766 - RNA, 21 nt, Human
aaccagagccaggcucucagc

SEQ ID NO: 259767 - RNA, 22 nt, Human
ggcacacagcuuggcaggagau

SEQ ID NO: 259768 - RNA, 22 nt, Human
cacauuucugugagucaauauu

SEQ ID NO: 259769 - RNA, 22 nt, Human
ccccacccaccuaagagaaacu

SEQ ID NO: 259770 - RNA, 22 nt, Human
uguacacaauucuuaacauaca

SEQ ID NO: 259771 - RNA, 22 nt, Human
uggagcagcucuagcgggcgcc

SEQ ID NO: 259772 - RNA, 22 nt, Human
gggcuguguuaggugcgguuac

SEQ ID NO: 259773 - RNA, 22 nt, Human
ucuagaaaaacaaaguaucuga

SEQ ID NO: 259774 - RNA, 18 nt, Human
uaaaucucucuuuaguca

SEQ ID NO: 259775 - RNA, 22 nt, Human
acaggucugcaguaacugggaa

SEQ ID NO: 259776 - RNA, 22 nt, Human
cauguguguccaugugacuaag

SEQ ID NO: 259777 - RNA, 22 nt, Human
aucagcaggugcugguggagac

SEQ ID NO: 259778 - RNA, 16 nt, Human
uggcuucuuauuucua

SEQ ID NO: 259779 - RNA, 22 nt, Human
cugugaugacaggcagggccaa

SEQ ID NO: 259780 - RNA, 17 nt, Human
ucaggcugugccuggua

SEQ ID NO: 259781 - RNA, 22 nt, Human
uguggccuccuguuccugggua

SEQ ID NO: 259782 - RNA, 22 nt, Human
cuguggcacucaagaagccucc

SEQ ID NO: 259783 - RNA, 20 nt, Human
ucaagaugaggucauacugg

SEQ ID NO: 259784 - RNA, 22 nt, Human
aagugaaauugccauucuuaua

SEQ ID NO: 259785 - RNA, 20 nt, Human
gaggcugaaguguuuuugcu

SEQ ID NO: 259786 - RNA, 22 nt, Human
ucuauuuaccaaauguaguucc

SEQ ID NO: 259787 - RNA, 22 nt, Human
agaagccaccagcugaggaaga

SEQ ID NO: 259788 - RNA, 21 nt, Human
aagcuacagaaaauaauuuga

SEQ ID NO: 259789 - RNA, 22 nt, Human
gcugcaggaugaggcucugcuc

SEQ ID NO: 259790 - RNA, 22 nt, Human
agaaaguuaaacagugauaaga

SEQ ID NO: 259791 - RNA, 22 nt, Human
ccaggagcaggagcuggacaga

SEQ ID NO: 259792 - RNA, 22 nt, Human
ggaggcacuucaugcugacccg

SEQ ID NO: 259793 - RNA, 22 nt, Human
cuuagaacauucugccugggaa

SEQ ID NO: 259794 - RNA, 22 nt, Human
aggcccagagcaggaaaggguu

SEQ ID NO: 259795 - RNA, 22 nt, Human
uagaguguuuuguuaggcagca

SEQ ID NO: 259796 - RNA, 22 nt, Human
uugagacagugggguguugccg

SEQ ID NO: 259797 - RNA, 22 nt, Human
uugcuuuaccauuugaucucua

SEQ ID NO: 259798 - RNA, 17 nt, Human
uggcaagaauggaaaug

SEQ ID NO: 259799 - RNA, 23 nt, Human
guaaaauacgcagugcaguguga

SEQ ID NO: 259800 - RNA, 22 nt, Human
uuagaagcacuaauuacucaca

SEQ ID NO: 259801 - RNA, 20 nt, Human
gagcccaaguagggagaaau

SEQ ID NO: 259802 - RNA, 22 nt, Human
ugucaccucuuuggcugcagcu

SEQ ID NO: 259803 - RNA, 22 nt, Human
agcuccuccugugccaggccag

SEQ ID NO: 259804 - RNA, 22 nt, Human
cugcagagcaaguucucuguug

SEQ ID NO: 259805 - RNA, 22 nt, Human
ggugcauggaaagaguaaguaa

SEQ ID NO: 259806 - RNA, 22 nt, Human
agaugguguuuccccaggugga

SEQ ID NO: 259807 - RNA, 22 nt, Human
aauguauucuucaaccuugcua

SEQ ID NO: 259808 - RNA, 22 nt, Human
aacaacugaaaagcuuuuucug

SEQ ID NO: 259809 - RNA, 22 nt, Human
gcagggcucauucuaguacaau

SEQ ID NO: 259810 - RNA, 22 nt, Human
cuucucagaucucagcuuugag

SEQ ID NO: 259811 - RNA, 22 nt, Human
caucaagagucuuacuaucagu

SEQ ID NO: 259812 - RNA, 22 nt, Human
uucuagaagaacuagccaggaa

SEQ ID NO: 259813 - RNA, 22 nt, Human
gugugcagucugcuaggcaggg

SEQ ID NO: 259814 - RNA, 22 nt, Human
gggcugagcuguucugaguuua

SEQ ID NO: 259815 - RNA, 22 nt, Human
agccagggucucucgcucuguu

SEQ ID NO: 259816 - RNA, 22 nt, Human
cugagccagcgggcucacuuuu

SEQ ID NO: 259817 - RNA, 22 nt, Human
ugacaaaccaguagcaauaaag

SEQ ID NO: 259818 - RNA, 22 nt, Human
ugagcccugaccuagccuggcc

SEQ ID NO: 259819 - RNA, 22 nt, Human
augcacagacccaaaggccauc

SEQ ID NO: 259820 - RNA, 22 nt, Human
aggcucccaugguguggcagga

SEQ ID NO: 259821 - RNA, 19 nt, Human
agguccugaucagcaagga

SEQ ID NO: 259822 - RNA, 22 nt, Human
ugcaaauagccuauauuuauag

SEQ ID NO: 259823 - RNA, 22 nt, Human
uagcuuuaggaugguucucuug

SEQ ID NO: 259824 - RNA, 22 nt, Human
ugggcugcccugaugguccuca

SEQ ID NO: 259825 - RNA, 22 nt, Human
cagugucugggacagaaaguca

SEQ ID NO: 259826 - RNA, 22 nt, Human
uuuauguaaguggaaugaugcc

SEQ ID NO: 259827 - RNA, 18 nt, Human
ugagaggcuauuuuuugc

SEQ ID NO: 259828 - RNA, 22 nt, Human
agcugguccuuggcaguucuca

SEQ ID NO: 259829 - RNA, 22 nt, Human
gaaugugugacucuauugagca

SEQ ID NO: 259830 - RNA, 22 nt, Human
gcagcaggagaguuuguccugc

SEQ ID NO: 259831 - RNA, 22 nt, Human
cacuggucagcaugguagacca

SEQ ID NO: 259832 - RNA, 22 nt, Human
uaguaacagauuuauacagucu

SEQ ID NO: 259833 - RNA, 23 nt, Human
auugaugacuugauuacacuuuu

SEQ ID NO: 259834 - RNA, 22 nt, Human
auucucugucuuuuugaaaaca

SEQ ID NO: 259835 - RNA, 22 nt, Human
ucacaugucaagaagauaauuu

SEQ ID NO: 259836 - RNA, 22 nt, Human
caggcagugugacgcuaggguu

SEQ ID NO: 259837 - RNA, 22 nt, Human
aagcaacuaaggcaaggaaaug

SEQ ID NO: 259838 - RNA, 20 nt, Human
cagggccacgcuccaaggca

SEQ ID NO: 259839 - RNA, 22 nt, Human
gcucuuugcacagcucugcccu

SEQ ID NO: 259840 - RNA, 22 nt, Human
ugagguuauuuauuaugcauga

SEQ ID NO: 259841 - RNA, 22 nt, Human
uccugugacggagcgccagagg

SEQ ID NO: 259842 - RNA, 22 nt, Human
ccaggcagccaagugugugugu

SEQ ID NO: 259843 - RNA, 22 nt, Human
agaaguggucugucuuccagau

SEQ ID NO: 259844 - RNA, 22 nt, Human
cuacugaugcuauacuucucag

SEQ ID NO: 259845 - RNA, 22 nt, Human
uguuuucauuugauguaacaaa

SEQ ID NO: 259846 - RNA, 22 nt, Human
cauuuccugucuggaggucaaa

SEQ ID NO: 259847 - RNA, 17 nt, Human
ucucaggcacguguggc

SEQ ID NO: 259848 - RNA, 22 nt, Human
ugacaagaagaccugguaauga

SEQ ID NO: 259849 - RNA, 22 nt, Human
ccuccugggcuccugucugcac

SEQ ID NO: 259850 - RNA, 22 nt, Human
ugaggccagggauuccaucauu

SEQ ID NO: 259851 - RNA, 19 nt, Human
guggagcuaagaaaaggaa

SEQ ID NO: 259852 - RNA, 23 nt, Human
aucuccugagaacccacaguggu

SEQ ID NO: 259853 - RNA, 22 nt, Human
uuuuagauugggaaauguaaag

SEQ ID NO: 259854 - RNA, 22 nt, Human
cuguaacucugccaagaaggcu

SEQ ID NO: 259855 - RNA, 22 nt, Human
ugggccaccugcucuguuucua

SEQ ID NO: 259856 - RNA, 22 nt, Human
acagucuuugcaggagaaagga

SEQ ID NO: 259857 - RNA, 22 nt, Human
agaugaguacagagcuguacuc

SEQ ID NO: 259858 - RNA, 22 nt, Human
agcaggcagcaugggacccucc

SEQ ID NO: 259859 - RNA, 22 nt, Human
uauugcuguucuuuaaaugaag

SEQ ID NO: 259860 - RNA, 22 nt, Human
cccaggcuucccaaucagaagg

SEQ ID NO: 259861 - RNA, 22 nt, Human
auaaaagucugcuuauuugggc

SEQ ID NO: 259862 - RNA, 22 nt, Human
acuccaguucucuuguuuauaa

SEQ ID NO: 259863 - RNA, 22 nt, Human
aaaugguaagacaacacauuau

SEQ ID NO: 259864 - RNA, 22 nt, Human
gcugcccaggguggagccggcu

SEQ ID NO: 259865 - RNA, 22 nt, Human
ucagaaguaggagacauucuug

SEQ ID NO: 259866 - RNA, 22 nt, Human
ugcccucagccaccuccaaguu

SEQ ID NO: 259867 - RNA, 22 nt, Human
uugcuuuacggcaaggccccag

SEQ ID NO: 259868 - RNA, 22 nt, Human
ccaggcccaggguacugaccaa

SEQ ID NO: 259869 - RNA, 22 nt, Human
agacacaguacuugcccucaug

SEQ ID NO: 259870 - RNA, 22 nt, Human
cuggcucugggcuaagcuccca

SEQ ID NO: 259871 - RNA, 22 nt, Human
uuagaacaucucucuucugcca

SEQ ID NO: 259872 - RNA, 22 nt, Human
ugcagggacaggcucuggggau

SEQ ID NO: 259873 - RNA, 22 nt, Human
uccagcccagcuccucucagaa

SEQ ID NO: 259874 - RNA, 22 nt, Human
uaaauacuuaguuuugugucua

SEQ ID NO: 259875 - RNA, 22 nt, Human
agcagggcugugcuccuuccga

SEQ ID NO: 259876 - RNA, 22 nt, Human
ucuggcccugcugcugugagca

SEQ ID NO: 259877 - RNA, 22 nt, Human
caggggcugagaaggaacgucc

SEQ ID NO: 259878 - RNA, 22 nt, Human
uuggaggauugcucucagccca

SEQ ID NO: 259879 - RNA, 19 nt, Human
uauauuuguugaauaaaaa

SEQ ID NO: 259880 - RNA, 22 nt, Human
ucaguucugcuagaaaaacagu

SEQ ID NO: 259881 - RNA, 22 nt, Human
ugucaguuaaaugagguacaag

SEQ ID NO: 259882 - RNA, 17 nt, Human
cuaaauacuugcguuuc

SEQ ID NO: 259883 - RNA, 22 nt, Human
ugaggcuuggaggcuccagugg

SEQ ID NO: 259884 - RNA, 22 nt, Human
uuuugcugggguggcuagcuua

SEQ ID NO: 259885 - RNA, 22 nt, Human
aggcuccacggcaggaugcugu

SEQ ID NO: 259886 - RNA, 22 nt, Human
gaaaauacaaauagccuugaaa

SEQ ID NO: 259887 - RNA, 23 nt, Human
agccaucauccugcugcuggggc

SEQ ID NO: 259888 - RNA, 22 nt, Human
agcaacaggguggucuucagaa

SEQ ID NO: 259889 - RNA, 22 nt, Human
ucagcagggagaggagaaugca

SEQ ID NO: 259890 - RNA, 22 nt, Human
uguuagcagagcagcugacaga

SEQ ID NO: 259891 - RNA, 22 nt, Human
ggcaggugaggcaugugccugg

SEQ ID NO: 259892 - RNA, 22 nt, Human
caggcucuuuugguggcaagga

SEQ ID NO: 259893 - RNA, 22 nt, Human
guaacauuauucaugagauaca

SEQ ID NO: 259894 - RNA, 22 nt, Human
ggccaguccccuaauccagggc

SEQ ID NO: 259895 - RNA, 22 nt, Human
cagccaggacucccauuuagga

SEQ ID NO: 259896 - RNA, 22 nt, Human
gccuggagcucaugugggcauu

SEQ ID NO: 259897 - RNA, 22 nt, Human
cagcaacuggucauugcucucc

SEQ ID NO: 259898 - RNA, 22 nt, Human
ugccuacuaguacuauuuugug

SEQ ID NO: 259899 - RNA, 22 nt, Human
guacaugugcacaacaugcaug

SEQ ID NO: 259900 - RNA, 22 nt, Human
aaauauuauugcuuaaggggag

SEQ ID NO: 259901 - RNA, 22 nt, Human
ccagugucuagcagaugacagg

SEQ ID NO: 259902 - RNA, 22 nt, Human
caugaagcuugaagcaguccac

SEQ ID NO: 259903 - RNA, 22 nt, Human
uuccaggacuucauggcucuga

SEQ ID NO: 259904 - RNA, 22 nt, Human
aaaagacaucuauuucaggcag

SEQ ID NO: 259905 - RNA, 22 nt, Human
acucucugggcaugccccacca

SEQ ID NO: 259906 - RNA, 22 nt, Human
ucacaacucuuuccauuuaaua

SEQ ID NO: 259907 - RNA, 22 nt, Human
gucugggcuucagaguuagaga

SEQ ID NO: 259908 - RNA, 22 nt, Human
cacagguguucuugcagugaaa

SEQ ID NO: 259909 - RNA, 22 nt, Human
gaggcagcuuaggguacugacu

SEQ ID NO: 259910 - RNA, 22 nt, Human
ccucaguuuucucaucuguaaa

SEQ ID NO: 259911 - RNA, 22 nt, Human
aguaggcauuuaauaaacauga

SEQ ID NO: 259912 - RNA, 22 nt, Human
agaccuggguucgaguccuaac

SEQ ID NO: 259913 - RNA, 22 nt, Human
uuucaugugcaauuagcaauau

SEQ ID NO: 259914 - RNA, 22 nt, Human
cagagccagcuguccuuggcau

SEQ ID NO: 259915 - RNA, 22 nt, Human
aacaagaagagagggacguaau

SEQ ID NO: 259916 - RNA, 22 nt, Human
aaauacagauucugacucagag

SEQ ID NO: 259917 - RNA, 22 nt, Human
ugggcagggaucucuuuugcaa

SEQ ID NO: 259918 - RNA, 22 nt, Human
ugcugccaaaugcgagcucugu

SEQ ID NO: 259919 - RNA, 22 nt, Human
cagggugacugcccuggccacu

SEQ ID NO: 259920 - RNA, 22 nt, Human
gccaggcccugggcacuucgug

SEQ ID NO: 259921 - RNA, 22 nt, Human
guccaugauucugugacacccu

SEQ ID NO: 259922 - RNA, 22 nt, Human
agagggaucacccuguuucugg

SEQ ID NO: 259923 - RNA, 22 nt, Human
uuccugagggccccagaggagg

SEQ ID NO: 259924 - RNA, 22 nt, Human
agggaauggaugauggcagguu

SEQ ID NO: 259925 - RNA, 22 nt, Human
ucaucagagcucccccaaacgu

SEQ ID NO: 259926 - RNA, 22 nt, Human
uaugugucucaguugugauuga

SEQ ID NO: 259927 - RNA, 22 nt, Human
gcagcagaguuugggagauggu

SEQ ID NO: 259928 - RNA, 22 nt, Human
caagcugggugcgggcaguaua

SEQ ID NO: 259929 - RNA, 22 nt, Human
guucucugccacuuaccagcua

SEQ ID NO: 259930 - RNA, 22 nt, Human
uuguagaacaugcagcacaaug

SEQ ID NO: 259931 - RNA, 22 nt, Human
ucuccaggaaccaucaugguaa

SEQ ID NO: 259932 - RNA, 22 nt, Human
ucaggcugcagcugucagcagc

SEQ ID NO: 259933 - RNA, 22 nt, Human
cuggcaggaucuaaccagggaa

SEQ ID NO: 259934 - RNA, 22 nt, Human
uuggaauuuuccagguacagug

SEQ ID NO: 259935 - RNA, 22 nt, Human
caccucuuugauuugaggcaag

SEQ ID NO: 259936 - RNA, 22 nt, Human
gcaagcagacauucagguaggu

SEQ ID NO: 259937 - RNA, 22 nt, Human
ucaggacacccugugcuuccuu

SEQ ID NO: 259938 - RNA, 22 nt, Human
gagcaacacgcaguaguauacg

SEQ ID NO: 259939 - RNA, 22 nt, Human
ugccucugugggcagagcugcc

SEQ ID NO: 259940 - RNA, 22 nt, Human
auuaucuauguagaaugauuuu

SEQ ID NO: 259941 - RNA, 22 nt, Human
gucaauauagguuucaaacaug

SEQ ID NO: 259942 - RNA, 22 nt, Human
uuuaagaucauuuguauuaucc

SEQ ID NO: 259943 - RNA, 22 nt, Human
ugcaaacagccuugaaagaggg

SEQ ID NO: 259944 - RNA, 22 nt, Human
uagggauggaaacuaggaaucu

SEQ ID NO: 259945 - RNA, 22 nt, Human
aauugcuuagagaauccaggua

SEQ ID NO: 259946 - RNA, 22 nt, Human
ugaggcacauccaggccagcuc

SEQ ID NO: 259947 - RNA, 22 nt, Human
acuucaaauuuucagaagaaau

SEQ ID NO: 259948 - RNA, 22 nt, Human
aggaagaaaccuacuagaguuu

SEQ ID NO: 259949 - RNA, 22 nt, Human
caggaagccuuccuugucugcu

SEQ ID NO: 259950 - RNA, 22 nt, Human
ugaacaaauggaaauaaccagu

SEQ ID NO: 259951 - RNA, 22 nt, Human
ucagugcauucuaccaaaaggc

SEQ ID NO: 259952 - RNA, 22 nt, Human
cugugggagaaguugcuggagu

SEQ ID NO: 259953 - RNA, 22 nt, Human
gaagcuuugucuugucuccugg

SEQ ID NO: 259954 - RNA, 22 nt, Human
gcuggagaccucagagaaccca

SEQ ID NO: 259955 - RNA, 22 nt, Human
acagggcaaccucugggagacu

SEQ ID NO: 259956 - RNA, 22 nt, Human
gucugugguagacaggaaggca

SEQ ID NO: 259957 - RNA, 22 nt, Human
ucugggucacugugggagggca

SEQ ID NO: 259958 - RNA, 22 nt, Human
agcugcagagaaaagaggcugg

SEQ ID NO: 259959 - RNA, 22 nt, Human
ggccuuaggcucaacaggcaga

SEQ ID NO: 259960 - RNA, 22 nt, Human
gcagggcuuagaaaugguggcu

SEQ ID NO: 259961 - RNA, 22 nt, Human
ucccagaguucaaugggaaggu

SEQ ID NO: 259962 - RNA, 22 nt, Human
ucagagaguuuucacuagggug

SEQ ID NO: 259963 - RNA, 22 nt, Human
ggcaugcucuuuguccacagua

SEQ ID NO: 259964 - RNA, 22 nt, Human
auucuacaaucauguagauccu

SEQ ID NO: 259965 - RNA, 23 nt, Human
acccugggcaagucaccuaaccu

SEQ ID NO: 259966 - RNA, 22 nt, Human
ccaggaggaugguuguuaggug

SEQ ID NO: 259967 - RNA, 22 nt, Human
acucuugucucaacuuuuguau

SEQ ID NO: 259968 - RNA, 22 nt, Human
cuguuuacuuauugguaaagag

SEQ ID NO: 259969 - RNA, 22 nt, Human
cucuuauuuuauggcauuugug

SEQ ID NO: 259970 - RNA, 22 nt, Human
acugggcuuauuucuugugaac

SEQ ID NO: 259971 - RNA, 22 nt, Human
gagcucagcacuaaaaucaugu

SEQ ID NO: 259972 - RNA, 22 nt, Human
gcugggcuccaggccaggguga

SEQ ID NO: 259973 - RNA, 22 nt, Human
uacaggcauguagcauggugau

SEQ ID NO: 259974 - RNA, 22 nt, Human
acaugagaagcugcaacaugac

SEQ ID NO: 259975 - RNA, 22 nt, Human
uuguuacagcacuuaaccuuuu

SEQ ID NO: 259976 - RNA, 22 nt, Human
auguccagggggcuugacuggu

SEQ ID NO: 259977 - RNA, 22 nt, Human
ucagaagaaagauguuauuacu

SEQ ID NO: 259978 - RNA, 22 nt, Human
cuuucuagaguauggagucugu

SEQ ID NO: 259979 - RNA, 22 nt, Human
aggcaguuuauccccagagccu

SEQ ID NO: 259980 - RNA, 23 nt, Human
cagcucagaguguguccuguuuc

SEQ ID NO: 259981 - RNA, 22 nt, Human
ccagagagaaauggauuugagu

SEQ ID NO: 259982 - RNA, 22 nt, Human
ucacauucuagaauguuaucgu

SEQ ID NO: 259983 - RNA, 22 nt, Human
uggaaugaauuuggcuuccucc

SEQ ID NO: 259984 - RNA, 22 nt, Human
agggcacagccuaaagccuaug

SEQ ID NO: 259985 - RNA, 22 nt, Human
agaaaucauucccaaacccaua

SEQ ID NO: 259986 - RNA, 22 nt, Human
agccuugagcaguucacuuggu

SEQ ID NO: 259987 - RNA, 22 nt, Human
uggaaaauuaguagugaaaggc

SEQ ID NO: 259988 - RNA, 22 nt, Human
uuaaacagacaguaaaugaaac

SEQ ID NO: 259989 - RNA, 22 nt, Human
aaauucaaugaucacuggcuca

SEQ ID NO: 259990 - RNA, 22 nt, Human
uaagaaacuuaacugggaacua

SEQ ID NO: 259991 - RNA, 20 nt, Human
acacaaagcaauggaguaca

SEQ ID NO: 259992 - RNA, 22 nt, Human
uuggagaauguuuuccugcagu

SEQ ID NO: 259993 - RNA, 22 nt, Human
ucagagagcagaacuuuuuuac

SEQ ID NO: 259994 - RNA, 22 nt, Human
ugaguugcuaucuagauccaga

SEQ ID NO: 259995 - RNA, 22 nt, Human
uuggcugaccagaaccugcccc

SEQ ID NO: 259996 - RNA, 22 nt, Human
caugcaggugaccagguguggg

SEQ ID NO: 259997 - RNA, 22 nt, Human
accagaggcaguuucggcuggu

SEQ ID NO: 259998 - RNA, 22 nt, Human
ucccugcagacguccugcgggu

SEQ ID NO: 259999 - RNA, 19 nt, Human
ugcagccacgugagagacu

SEQ ID NO: 260000 - RNA, 22 nt, Human
gucugagggguuucccaggaca

SEQ ID NO: 260001 - RNA, 22 nt, Human
gggaggcacgaggcgcgcagug

SEQ ID NO: 260002 - RNA, 22 nt, Human
gcccuccauggugauccaggcc

SEQ ID NO: 260003 - RNA, 22 nt, Human
ucagcuuucucagaggccuaac

SEQ ID NO: 260004 - RNA, 21 nt, Human
acagacaguccagagaaaaga

SEQ ID NO: 260005 - RNA, 22 nt, Human
caguaaaagauggaaauagaau

SEQ ID NO: 260006 - RNA, 22 nt, Human
uaaugcacauagaaguacuuag

SEQ ID NO: 260007 - RNA, 22 nt, Human
cagagaggauggauuccauagc

SEQ ID NO: 260008 - RNA, 22 nt, Human
cucaaggacuuauucaugccug

SEQ ID NO: 260009 - RNA, 22 nt, Human
cagcaucucugggagaagcauc

SEQ ID NO: 260010 - RNA, 22 nt, Human
ugcaggagacauaauagggacu

SEQ ID NO: 260011 - RNA, 22 nt, Human
uauagaagagacaugugcauag

SEQ ID NO: 260012 - RNA, 22 nt, Human
gcacagacucaccuuaauuuga

SEQ ID NO: 260013 - RNA, 22 nt, Human
agcuuucucucagccaggcugc

SEQ ID NO: 260014 - RNA, 22 nt, Human
gccuguggguuggagcuuggcc

SEQ ID NO: 260015 - RNA, 22 nt, Human
auugcuggaugagcucuuggau

SEQ ID NO: 260016 - RNA, 22 nt, Human
ccaggccuucugaggacacucu

SEQ ID NO: 260017 - RNA, 22 nt, Human
ccaggcuuuucucauggaguca

SEQ ID NO: 260018 - RNA, 20 nt, Human
aggugcaaggcauggcaugu

SEQ ID NO: 260019 - RNA, 22 nt, Human
uuaguguguuauauaccaagcu

SEQ ID NO: 260020 - RNA, 22 nt, Human
uuuuggaaucugggaaaacagu

SEQ ID NO: 260021 - RNA, 22 nt, Human
ugaagcaaacgcuucuguuccu

SEQ ID NO: 260022 - RNA, 22 nt, Human
gagcaacaggugauggggcugu

SEQ ID NO: 260023 - RNA, 22 nt, Human
aucagcagugaguggcuuucau

SEQ ID NO: 260024 - RNA, 22 nt, Human
uauggcuucugcuuucuugacu

SEQ ID NO: 260025 - RNA, 22 nt, Human
ggcugguguugagugccuguag

SEQ ID NO: 260026 - RNA, 22 nt, Human
uccugggagaguuugauucauu

SEQ ID NO: 260027 - RNA, 22 nt, Human
cugaggucuauuuugaaacugc

SEQ ID NO: 260028 - RNA, 22 nt, Human
ugcacagagggaggcauaaaau

SEQ ID NO: 260029 - RNA, 22 nt, Human
caggcuccauuaaucauccugc

SEQ ID NO: 260030 - RNA, 22 nt, Human
gaaggcugccaguggcccucuu

SEQ ID NO: 260031 - RNA, 22 nt, Human
ccuggggaccugccucagcccu

SEQ ID NO: 260032 - RNA, 22 nt, Human
uggcuacaaguguguuuaguuu

SEQ ID NO: 260033 - RNA, 22 nt, Human
augcaggguucugggcuagaga

SEQ ID NO: 260034 - RNA, 21 nt, Human
acaggagaccgccuggcaguc

SEQ ID NO: 260035 - RNA, 22 nt, Human
cagcugcucuucuggccuguca

SEQ ID NO: 260036 - RNA, 22 nt, Human
cagguucccuugcagcuaagug

SEQ ID NO: 260037 - RNA, 22 nt, Human
uuaugaaagacauuucuguugg

SEQ ID NO: 260038 - RNA, 20 nt, Human
accauaauguuaauuacaaa

SEQ ID NO: 260039 - RNA, 22 nt, Human
accuacaucaagggagugguag

SEQ ID NO: 260040 - RNA, 22 nt, Human
caccagcugcaacaccaucucc

SEQ ID NO: 260041 - RNA, 22 nt, Human
caggguggcacucagcgcaucu

SEQ ID NO: 260042 - RNA, 22 nt, Human
ugguccagugacagauaggcac

SEQ ID NO: 260043 - RNA, 22 nt, Human
gaguuacacagaagucaguuug

SEQ ID NO: 260044 - RNA, 22 nt, Human
acucuguagccuguaagagagc

SEQ ID NO: 260045 - RNA, 22 nt, Human
uuuguuacauuaaaaaguaggu

SEQ ID NO: 260046 - RNA, 22 nt, Human
cagguucuggggcuccacugug

SEQ ID NO: 260047 - RNA, 22 nt, Human
gucuagaauggaugagcauuuu

SEQ ID NO: 260048 - RNA, 22 nt, Human
augcagggaccuuugcuuuggu

SEQ ID NO: 260049 - RNA, 22 nt, Human
agauuuacaaaggauuugcuuu

SEQ ID NO: 260050 - RNA, 22 nt, Human
uccugcagacauuuacaccuuu

SEQ ID NO: 260051 - RNA, 22 nt, Human
gccuccccaaagugcugacagc

SEQ ID NO: 260052 - RNA, 22 nt, Human
uuuacaugaguagcagauguuc

SEQ ID NO: 260053 - RNA, 22 nt, Human
agaguggcagcaaaaagugugc

SEQ ID NO: 260054 - RNA, 22 nt, Human
cugcagggaccacaagcagguu

SEQ ID NO: 260055 - RNA, 23 nt, Human
aguuccagaaaaaugcucaagca

SEQ ID NO: 260056 - RNA, 22 nt, Human
guuauaaaugacugcaaaaguu

SEQ ID NO: 260057 - RNA, 22 nt, Human
auguaguguagagauuagucuc

SEQ ID NO: 260058 - RNA, 22 nt, Human
uuagcacuggauuaaucaaagu

SEQ ID NO: 260059 - RNA, 19 nt, Human
auacacuaauauaaaccac

SEQ ID NO: 260060 - RNA, 22 nt, Human
gaggccaggaagcccaagauca

SEQ ID NO: 260061 - RNA, 22 nt, Human
cccagaggaggaucucggcccg

SEQ ID NO: 260062 - RNA, 21 nt, Human
uguuucaugcuauuuucuugu

SEQ ID NO: 260063 - RNA, 19 nt, Human
agaaguuagacauugcaau

SEQ ID NO: 260064 - RNA, 22 nt, Human
caaugacauggauaaucauauu

SEQ ID NO: 260065 - RNA, 22 nt, Human
cugucagguuucccggcucacg

SEQ ID NO: 260066 - RNA, 22 nt, Human
agacuucuuugugagcauuuuc

SEQ ID NO: 260067 - RNA, 22 nt, Human
cucugggucuaccuguggccag

SEQ ID NO: 260068 - RNA, 22 nt, Human
uugugugguagcuucauugaac

SEQ ID NO: 260069 - RNA, 22 nt, Human
uucaucuggaauuuauguuaua

SEQ ID NO: 260070 - RNA, 22 nt, Human
caauguguguguuuuucucaac

SEQ ID NO: 260071 - RNA, 22 nt, Human
uuugguaaaugcagguucuucu

SEQ ID NO: 260072 - RNA, 22 nt, Human
acaacaaggcuuuucauucaua

SEQ ID NO: 260073 - RNA, 22 nt, Human
aauggcaaaaggauaacaagga

SEQ ID NO: 260074 - RNA, 22 nt, Human
gcuccugugaaggcauuaggug

SEQ ID NO: 260075 - RNA, 22 nt, Human
uguggagguuuaaguaauggga

SEQ ID NO: 260076 - RNA, 20 nt, Human
uucucuggauagccagaugu

SEQ ID NO: 260077 - RNA, 22 nt, Human
cauucauuuaugaaauaucuau

SEQ ID NO: 260078 - RNA, 22 nt, Human
cugaggagaaaugggaugguuc

SEQ ID NO: 260079 - RNA, 22 nt, Human
cauuuguugguugcugucuuau

SEQ ID NO: 260080 - RNA, 22 nt, Human
augcaaauuaacauauaguaga

SEQ ID NO: 260081 - RNA, 22 nt, Human
auucagagcacuggguagaauu

SEQ ID NO: 260082 - RNA, 22 nt, Human
ugccuguccugaggaugagggu

SEQ ID NO: 260083 - RNA, 22 nt, Human
gcaggcaggagcccaacugccu

SEQ ID NO: 260084 - RNA, 22 nt, Human
uggcccaagucugcuagaagag

SEQ ID NO: 260085 - RNA, 19 nt, Human
uuuuguguagcugcugguu

SEQ ID NO: 260086 - RNA, 22 nt, Human
cccaaguuaaaauucagugcuc

SEQ ID NO: 260087 - RNA, 22 nt, Human
cagauagaaugcaagaccucuc

SEQ ID NO: 260088 - RNA, 22 nt, Human
gagaacuucaggauuauucaag

SEQ ID NO: 260089 - RNA, 22 nt, Human
auacacauauauacacguuuaa

SEQ ID NO: 260090 - RNA, 22 nt, Human
cugugucccacacgagguguau

SEQ ID NO: 260091 - RNA, 22 nt, Human
acagggcucugacaccaaggua

SEQ ID NO: 260092 - RNA, 22 nt, Human
auuuuacuuugugaauauugac

SEQ ID NO: 260093 - RNA, 22 nt, Human
cuaaauaaucccucuggucuua

SEQ ID NO: 260094 - RNA, 22 nt, Human
agccuucauaaucuugggcuuu

SEQ ID NO: 260095 - RNA, 22 nt, Human
uuucaugccucuugagaaagau

SEQ ID NO: 260096 - RNA, 22 nt, Human
gacacuuuauuaagcuguuguu

SEQ ID NO: 260097 - RNA, 22 nt, Human
caaauaucuuuggcaaagagaa

SEQ ID NO: 260098 - RNA, 22 nt, Human
uagcuuuaggcacguuugaauu

SEQ ID NO: 260099 - RNA, 22 nt, Human
uauuaggguaaauuugacaugc

SEQ ID NO: 260100 - RNA, 22 nt, Human
agcccagggaaccaggaagugg

SEQ ID NO: 260101 - RNA, 22 nt, Human
cugccugugauuuuucucuagu

SEQ ID NO: 260102 - RNA, 22 nt, Human
ugacagaacagguugggagcaa

SEQ ID NO: 260103 - RNA, 22 nt, Human
acccaggcugcuucucaguggc

SEQ ID NO: 260104 - RNA, 22 nt, Human
gaagccaguacugugcucugca

SEQ ID NO: 260105 - RNA, 22 nt, Human
uuccagaauugggagccuugag

SEQ ID NO: 260106 - RNA, 22 nt, Human
auuucaggguaaaaaguguuca

SEQ ID NO: 260107 - RNA, 22 nt, Human
caaggaaguuuuaggagaggaa

SEQ ID NO: 260108 - RNA, 22 nt, Human
agagucuuggcauucaugcguu

SEQ ID NO: 260109 - RNA, 22 nt, Human
uccagcccgacugggccugccg

SEQ ID NO: 260110 - RNA, 22 nt, Human
cugaucuuaaguaacauuauuu

SEQ ID NO: 260111 - RNA, 22 nt, Human
uauuggucuuggaagguuuugu

SEQ ID NO: 260112 - RNA, 22 nt, Human
gagcugaacaaauugcgagugg

SEQ ID NO: 260113 - RNA, 22 nt, Human
guccugugggcccaccaugagc

SEQ ID NO: 260114 - RNA, 22 nt, Human
uaaauuauguuccauguccuuu

SEQ ID NO: 260115 - RNA, 22 nt, Human
aguguauuaaugcuccaggagu

SEQ ID NO: 260116 - RNA, 22 nt, Human
aguggcagccgagcaggagaug

SEQ ID NO: 260117 - RNA, 22 nt, Human
auuguuuacacuaacuucauaa

SEQ ID NO: 260118 - RNA, 22 nt, Human
cagacacagauaugcauauggc

SEQ ID NO: 260119 - RNA, 22 nt, Human
acaggaagugggaagaaacagg

SEQ ID NO: 260120 - RNA, 22 nt, Human
uaauuauagcauuggaguggcc

SEQ ID NO: 260121 - RNA, 21 nt, Human
ugagcaggugcagggaagugg

SEQ ID NO: 260122 - RNA, 22 nt, Human
ccuacaggaaauuguaucaaaa

SEQ ID NO: 260123 - RNA, 19 nt, Human
acaaagugcgugcucuuuu

SEQ ID NO: 260124 - RNA, 22 nt, Human
caauaagccagguguuuguguu

SEQ ID NO: 260125 - RNA, 22 nt, Human
gaggcugcaggcaaugcugccc

SEQ ID NO: 260126 - RNA, 22 nt, Human
uauucacaugaaaacaaauuuu

SEQ ID NO: 260127 - RNA, 22 nt, Human
acuuuagaaaagcauccauaga

SEQ ID NO: 260128 - RNA, 22 nt, Human
aggccucugagcagcacucaug

SEQ ID NO: 260129 - RNA, 22 nt, Human
gcuggaaggcuaggcucaguug

SEQ ID NO: 260130 - RNA, 22 nt, Human
gcaggcagaucaccugucagga

SEQ ID NO: 260131 - RNA, 21 nt, Human
uucuucaggccaaugcucauu

SEQ ID NO: 260132 - RNA, 22 nt, Human
caaagguaguauauauauuguu

SEQ ID NO: 260133 - RNA, 22 nt, Human
uacacauaggucugaauaaaaa

SEQ ID NO: 260134 - RNA, 22 nt, Human
guaaaacugucuaaugguauau

SEQ ID NO: 260135 - RNA, 22 nt, Human
auuuuccuucuaagaggaaggu

SEQ ID NO: 260136 - RNA, 22 nt, Human
agaggggaaguaaugaaugaua

SEQ ID NO: 260137 - RNA, 22 nt, Human
cuuggcuguugggcauugagaa

SEQ ID NO: 260138 - RNA, 22 nt, Human
cagagcauuaaaaccagcucug

SEQ ID NO: 260139 - RNA, 22 nt, Human
accaggcacuccugaggucuga

SEQ ID NO: 260140 - RNA, 19 nt, Human
ucuaacagaagugucgucc

SEQ ID NO: 260141 - RNA, 20 nt, Human
caggaugauuggacacgaug

SEQ ID NO: 260142 - RNA, 22 nt, Human
auagauguuuuaguaauacugu

SEQ ID NO: 260143 - RNA, 22 nt, Human
uucugugacuccucagagauuu

SEQ ID NO: 260144 - RNA, 22 nt, Human
cagcucugguuccugggcccag

SEQ ID NO: 260145 - RNA, 22 nt, Human
ucagagaggauuuuaauaagug

SEQ ID NO: 260146 - RNA, 22 nt, Human
agaagaaaugaggccguucugc

SEQ ID NO: 260147 - RNA, 22 nt, Human
uccaggccucuagccccuaucu

SEQ ID NO: 260148 - RNA, 22 nt, Human
uggaagcagagagcuaucacca

SEQ ID NO: 260149 - RNA, 22 nt, Human
ugcucauuggcgaucugaggga

SEQ ID NO: 260150 - RNA, 22 nt, Human
ugagggaguguggauacaguag

SEQ ID NO: 260151 - RNA, 22 nt, Human
uaguccagccuuggguguagcc

SEQ ID NO: 260152 - RNA, 22 nt, Human
ucaggagcauauauugaugucu

SEQ ID NO: 260153 - RNA, 23 nt, Human
gccuccaaaccucuaggcuggug

SEQ ID NO: 260154 - RNA, 22 nt, Human
cucaggaggaggaaguucauug

SEQ ID NO: 260155 - RNA, 22 nt, Human
ggcaugggccgaggugccuccu

SEQ ID NO: 260156 - RNA, 22 nt, Human
acagaauagguacagucaguca

SEQ ID NO: 260157 - RNA, 22 nt, Human
uuacugauuuuugggcccuacc

SEQ ID NO: 260158 - RNA, 22 nt, Human
cacacuugugaccgauauaaug

SEQ ID NO: 260159 - RNA, 22 nt, Human
auccuggacaguuuccccuauu

SEQ ID NO: 260160 - RNA, 22 nt, Human
guggcaggagacuggaagaugg

SEQ ID NO: 260161 - RNA, 22 nt, Human
ggcuccuggaggcaccacuggu

SEQ ID NO: 260162 - RNA, 22 nt, Human
ggcccagagggucaggagcuga

SEQ ID NO: 260163 - RNA, 22 nt, Human
gugcuccauugucuagaacugg

SEQ ID NO: 260164 - RNA, 22 nt, Human
uauaagugugucagcuuccaac

SEQ ID NO: 260165 - RNA, 22 nt, Human
cugccucugguuuuggucccug

SEQ ID NO: 260166 - RNA, 22 nt, Human
cagggugguaccagcaucuagu

SEQ ID NO: 260167 - RNA, 23 nt, Human
aucuaauuucuccaaaucucuac

SEQ ID NO: 260168 - RNA, 22 nt, Human
gagcucuuugaaccugggcagu

SEQ ID NO: 260169 - RNA, 22 nt, Human
cgcaggggaggaagguacaccu

SEQ ID NO: 260170 - RNA, 22 nt, Human
ucaggugucugccucuuugagu

SEQ ID NO: 260171 - RNA, 20 nt, Human
ucccucaguuuccagcccug

SEQ ID NO: 260172 - RNA, 22 nt, Human
uaucacaggugugauuuacauu

SEQ ID NO: 260173 - RNA, 22 nt, Human
ucucuggcagacuggcugggcu

SEQ ID NO: 260174 - RNA, 22 nt, Human
aauuucuccaagaaugcuuaga

SEQ ID NO: 260175 - RNA, 22 nt, Human
gacccugaggauucccugcuga

SEQ ID NO: 260176 - RNA, 22 nt, Human
uauuacaagaaagggcaugaau

SEQ ID NO: 260177 - RNA, 22 nt, Human
aaacaacaugguggguguguag

SEQ ID NO: 260178 - RNA, 22 nt, Human
gcuguccagguuguggagcaac

SEQ ID NO: 260179 - RNA, 22 nt, Human
aacaugauuuaguauaaugcag

SEQ ID NO: 260180 - RNA, 22 nt, Human
uaagaacauuuucggaaagaua

SEQ ID NO: 260181 - RNA, 22 nt, Human
gugugcagaagacacaagacau

SEQ ID NO: 260182 - RNA, 22 nt, Human
ucuggcaggcaaucggcucugg

SEQ ID NO: 260183 - RNA, 22 nt, Human
ggccagcugcucagugucucug

SEQ ID NO: 260184 - RNA, 22 nt, Human
cucuguagacuccaccuuugag

SEQ ID NO: 260185 - RNA, 22 nt, Human
gccaagcucaccuucugaugga

SEQ ID NO: 260186 - RNA, 22 nt, Human
gcauggcucuggccucagugug

SEQ ID NO: 260187 - RNA, 22 nt, Human
cagcugggccuccugagcccug

SEQ ID NO: 260188 - RNA, 22 nt, Human
gggaaaaauaaugcacagauau

SEQ ID NO: 260189 - RNA, 19 nt, Human
uucugggcauucauauuua

SEQ ID NO: 260190 - RNA, 22 nt, Human
gagcacagauccuggagccaca

SEQ ID NO: 260191 - RNA, 22 nt, Human
gagguucacuuccuggauccuu

SEQ ID NO: 260192 - RNA, 20 nt, Human
aggcagcugggaaaugaggg

SEQ ID NO: 260193 - RNA, 22 nt, Human
aacuagaaccacuuguauuucc

SEQ ID NO: 260194 - RNA, 22 nt, Human
aacuggaauagcacaggaaaag

SEQ ID NO: 260195 - RNA, 22 nt, Human
caggaagcuagauuuuguugcu

SEQ ID NO: 260196 - RNA, 22 nt, Human
ccaggguggcguagaugcuggg

SEQ ID NO: 260197 - RNA, 22 nt, Human
ugucacauguuuaauguggacu

SEQ ID NO: 260198 - RNA, 23 nt, Human
ugguccugccaacggugccccuc

SEQ ID NO: 260199 - RNA, 22 nt, Human
gcugggcuccacccucaacugu

SEQ ID NO: 260200 - RNA, 21 nt, Human
uuacauucagaggaguggaag

SEQ ID NO: 260201 - RNA, 22 nt, Human
ggugcccagagccaggaaugag

SEQ ID NO: 260202 - RNA, 22 nt, Human
gcuugcucuuuagccauggcca

SEQ ID NO: 260203 - RNA, 21 nt, Human
agguggggcugcaccucugcu

SEQ ID NO: 260204 - RNA, 22 nt, Human
gaagaaggaagaucaugcuuga

SEQ ID NO: 260205 - RNA, 22 nt, Human
uaguaacagcagcuucccugug

SEQ ID NO: 260206 - RNA, 22 nt, Human
gaggcucacugggcaaagacuc

SEQ ID NO: 260207 - RNA, 22 nt, Human
agcuaguucacugaagccuaug

SEQ ID NO: 260208 - RNA, 22 nt, Human
ucucaguguuaucuaucugccu

SEQ ID NO: 260209 - RNA, 19 nt, Human
gcucagcagacccagugcu

SEQ ID NO: 260210 - RNA, 22 nt, Human
acagguggagugguuagcaggc

SEQ ID NO: 260211 - RNA, 20 nt, Human
ggguccaggacucugaauuu

SEQ ID NO: 260212 - RNA, 18 nt, Human
aggggcagcuugugugga

SEQ ID NO: 260213 - RNA, 22 nt, Human
cuuuuaaugggagcaguauuug

SEQ ID NO: 260214 - RNA, 19 nt, Human
guauuucaggacaagacgu

SEQ ID NO: 260215 - RNA, 22 nt, Human
agggagcuucuggccucagccu

SEQ ID NO: 260216 - RNA, 22 nt, Human
cauucggagguaguugagguua

SEQ ID NO: 260217 - RNA, 22 nt, Human
caggucucucccaagcuacaau

SEQ ID NO: 260218 - RNA, 22 nt, Human
uucuuucugggguccuucggcu

SEQ ID NO: 260219 - RNA, 22 nt, Human
cagaagguuugaaagaugucuu

SEQ ID NO: 260220 - RNA, 22 nt, Human
cagggagcuuugucuucucauu

SEQ ID NO: 260221 - RNA, 22 nt, Human
gaggcucaguuaugucaucagg

SEQ ID NO: 260222 - RNA, 22 nt, Human
acaaacagaguugaaaaauagg

SEQ ID NO: 260223 - RNA, 18 nt, Human
uggacaggguggagaaaa

SEQ ID NO: 260224 - RNA, 22 nt, Human
ucucuuaauaaguaaauacuga

SEQ ID NO: 260225 - RNA, 22 nt, Human
ucuuucccgccagagcaugagu

SEQ ID NO: 260226 - RNA, 21 nt, Human
ugcagaggcacaaacaagccc

SEQ ID NO: 260227 - RNA, 22 nt, Human
ucucagcucuuuuuucacagaa

SEQ ID NO: 260228 - RNA, 22 nt, Human
acuguacaacugcugagcagaa

SEQ ID NO: 260229 - RNA, 22 nt, Human
aaggugucucucugcuucuugg

SEQ ID NO: 260230 - RNA, 22 nt, Human
ugagaugcaggagaugggacug

SEQ ID NO: 260231 - RNA, 22 nt, Human
uaggaaacaaaguaaugcaacu

SEQ ID NO: 260232 - RNA, 20 nt, Human
uacaagaauccccaguuguc

SEQ ID NO: 260233 - RNA, 22 nt, Human
ucagcagaaaggcacuagauga

SEQ ID NO: 260234 - RNA, 22 nt, Human
cauuucugcagaauugcucuuc

SEQ ID NO: 260235 - RNA, 22 nt, Human
ucugguacuagaggagugcugg

SEQ ID NO: 260236 - RNA, 22 nt, Human
auugcuuuagaaagaaaaauau

SEQ ID NO: 260237 - RNA, 22 nt, Human
guguccauucacugcaacacuu

SEQ ID NO: 260238 - RNA, 22 nt, Human
caggccagguggcaggcaaaac

SEQ ID NO: 260239 - RNA, 22 nt, Human
cagcuggcaaguggagcagggu

SEQ ID NO: 260240 - RNA, 22 nt, Human
gaagcuggcugaaguucagcua

SEQ ID NO: 260241 - RNA, 22 nt, Human
uuaagcauuuauuaugugccag

SEQ ID NO: 260242 - RNA, 22 nt, Human
aaaaagacuagucgagugcagu

SEQ ID NO: 260243 - RNA, 22 nt, Human
aauguuaauuuacugucuucau

SEQ ID NO: 260244 - RNA, 22 nt, Human
ucagugcauggacagauuuaga

SEQ ID NO: 260245 - RNA, 19 nt, Human
cagcaagaaugaaggcaua

SEQ ID NO: 260246 - RNA, 22 nt, Human
aaggccagccuuggaacccuga

SEQ ID NO: 260247 - RNA, 22 nt, Human
uguagauguagacacaggucua

SEQ ID NO: 260248 - RNA, 19 nt, Human
acacaaugacacauauaua

SEQ ID NO: 260249 - RNA, 23 nt, Human
cuagggcaguauuucacagacac

SEQ ID NO: 260250 - RNA, 22 nt, Human
ccauggcuucuuucucugccag

SEQ ID NO: 260251 - RNA, 23 nt, Human
aguccuuuuuauaaaauugagga

SEQ ID NO: 260252 - RNA, 22 nt, Human
ucuuguguggaacugcuuuucu

SEQ ID NO: 260253 - RNA, 22 nt, Human
uggcugccuagugucugagcag

SEQ ID NO: 260254 - RNA, 22 nt, Human
aacacuggaagggacaucaagu

SEQ ID NO: 260255 - RNA, 22 nt, Human
cuucaggauuaauuuggggccu

SEQ ID NO: 260256 - RNA, 22 nt, Human
aauguuaauguguuugcuuaug

SEQ ID NO: 260257 - RNA, 22 nt, Human
auaaucuggucuuuguaugagu

SEQ ID NO: 260258 - RNA, 22 nt, Human
cauucaaagcaggaaaggccuu

SEQ ID NO: 260259 - RNA, 22 nt, Human
acacaucugcaagagccagacc

SEQ ID NO: 260260 - RNA, 22 nt, Human
uaacacuauccagauaugauaa

SEQ ID NO: 260261 - RNA, 22 nt, Human
gcucuguaguauuuaguaaaua

SEQ ID NO: 260262 - RNA, 22 nt, Human
ggcuucucagcacacuguccac

SEQ ID NO: 260263 - RNA, 22 nt, Human
ccaggguuggucucucugaggu

SEQ ID NO: 260264 - RNA, 22 nt, Human
gaggcagagucacaaagagucu

SEQ ID NO: 260265 - RNA, 22 nt, Human
gcuggcuguguuccuucugcca

SEQ ID NO: 260266 - RNA, 22 nt, Human
ccugggaaggggaagagaauuc

SEQ ID NO: 260267 - RNA, 22 nt, Human
cacagaaauauugugucccuug

SEQ ID NO: 260268 - RNA, 22 nt, Human
gcugggaguuacugucuccuuu

SEQ ID NO: 260269 - RNA, 22 nt, Human
cuuaaauucuuaaugcccucau

SEQ ID NO: 260270 - RNA, 22 nt, Human
auguguccuuguucccauucca

SEQ ID NO: 260271 - RNA, 22 nt, Human
acacucaguaaacgacaauggg

SEQ ID NO: 260272 - RNA, 22 nt, Human
uaaauacuuuuacuccacugau

SEQ ID NO: 260273 - RNA, 22 nt, Human
aauagaauuuguacuguguuuu

SEQ ID NO: 260274 - RNA, 22 nt, Human
aaacacagguacugcagaagug

SEQ ID NO: 260275 - RNA, 22 nt, Human
caugccaagcauguucagaagu

SEQ ID NO: 260276 - RNA, 22 nt, Human
cagacaggcuagccagacucac

SEQ ID NO: 260277 - RNA, 22 nt, Human
uuccagaacucaagaaaugccc

SEQ ID NO: 260278 - RNA, 22 nt, Human
accuagaguagucaaauucaua

SEQ ID NO: 260279 - RNA, 22 nt, Human
cuagaaauauuuuacagucaag

SEQ ID NO: 260280 - RNA, 22 nt, Human
gcuuggcuugggcucagaggcc

SEQ ID NO: 260281 - RNA, 22 nt, Human
gccaggcagccacccucugcga

SEQ ID NO: 260282 - RNA, 22 nt, Human
cuaaauacuagccuucagauuu

SEQ ID NO: 260283 - RNA, 22 nt, Human
aauuggcagaacuuuauauauu

SEQ ID NO: 260284 - RNA, 22 nt, Human
acaaaguagucaaaguagauga

SEQ ID NO: 260285 - RNA, 22 nt, Human
uccaggagucagacagauggug

SEQ ID NO: 260286 - RNA, 22 nt, Human
uuacauuucccccuuggaggcu

SEQ ID NO: 260287 - RNA, 22 nt, Human
augguaaugauuuauguaaauu

SEQ ID NO: 260288 - RNA, 22 nt, Human
acccaggguuugagcucugcag

SEQ ID NO: 260289 - RNA, 22 nt, Human
agccacaggaaacagagacagc

SEQ ID NO: 260290 - RNA, 22 nt, Human
aggguggcaccacauaucauag

SEQ ID NO: 260291 - RNA, 22 nt, Human
gcauuagaagggaccucugggg

SEQ ID NO: 260292 - RNA, 23 nt, Human
acuuucccauagcauggcuuccu

SEQ ID NO: 260293 - RNA, 22 nt, Human
gagagcugcaagguagggcggg

SEQ ID NO: 260294 - RNA, 22 nt, Human
gcucuguacgcaggaugagggg

SEQ ID NO: 260295 - RNA, 22 nt, Human
gaggcugagaguuuguucuacu

SEQ ID NO: 260296 - RNA, 22 nt, Human
agucacaugcauuuucuucaau

SEQ ID NO: 260297 - RNA, 20 nt, Human
ccugucuccucuuaccuggc

SEQ ID NO: 260298 - RNA, 22 nt, Human
ggucacugcccucccuuuugca

SEQ ID NO: 260299 - RNA, 22 nt, Human
cacaguuugggucuccggggca

SEQ ID NO: 260300 - RNA, 22 nt, Human
ucuccauaggcaguucauaaca

SEQ ID NO: 260301 - RNA, 22 nt, Human
agaggagcugggaggcccucgu

SEQ ID NO: 260302 - RNA, 22 nt, Human
auguauacgugcaggucacagg

SEQ ID NO: 260303 - RNA, 22 nt, Human
acaccaccgucccagccuccug

SEQ ID NO: 260304 - RNA, 19 nt, Human
ggagaagcaucuagaaaua

SEQ ID NO: 260305 - RNA, 22 nt, Human
gggaaguuugugggaggaauau

SEQ ID NO: 260306 - RNA, 22 nt, Human
caguagcaugcuuaucuuuuga

SEQ ID NO: 260307 - RNA, 22 nt, Human
ccugggucuucagucugcuggu

SEQ ID NO: 260308 - RNA, 22 nt, Human
gcucccagucugauggaggaga

SEQ ID NO: 260309 - RNA, 22 nt, Human
aaauuccaguucuuuuaccugc

SEQ ID NO: 260310 - RNA, 22 nt, Human
aaguaaaagcuuuaccaugcgc

SEQ ID NO: 260311 - RNA, 22 nt, Human
ucagccacuucccucuggucag

SEQ ID NO: 260312 - RNA, 22 nt, Human
aaugcacauauauuuccuuauu

SEQ ID NO: 260313 - RNA, 22 nt, Human
uagucuaagaaaucuuuacuuu

SEQ ID NO: 260314 - RNA, 22 nt, Human
ccuggcucccugcacagggcuc

SEQ ID NO: 260315 - RNA, 22 nt, Human
uaauguuaguauguaaucuuau

SEQ ID NO: 260316 - RNA, 22 nt, Human
uuaaucacagcucugccaugag

SEQ ID NO: 260317 - RNA, 22 nt, Human
aaauucuuuugugcggugaagu

SEQ ID NO: 260318 - RNA, 22 nt, Human
uuaguuagucccugguaccuuu

SEQ ID NO: 260319 - RNA, 17 nt, Human
gcugagaaggggaagag

SEQ ID NO: 260320 - RNA, 22 nt, Human
acugggcuccagaugugauacg

SEQ ID NO: 260321 - RNA, 22 nt, Human
ggagucuguuuuacaugcagga

SEQ ID NO: 260322 - RNA, 22 nt, Human
aaaugcuuagagguguucaaau

SEQ ID NO: 260323 - RNA, 22 nt, Human
ucagcagaggggaaggcaucug

SEQ ID NO: 260324 - RNA, 22 nt, Human
accagucuuguugccaugucug

SEQ ID NO: 260325 - RNA, 22 nt, Human
cauaucuccuccagcacaggcc

SEQ ID NO: 260326 - RNA, 22 nt, Human
caggacugauguuccuccagcc

SEQ ID NO: 260327 - RNA, 21 nt, Human
gcccuaggcuaccuggagcgc

SEQ ID NO: 260328 - RNA, 18 nt, Human
agaauuaccaaagugcuu

SEQ ID NO: 260329 - RNA, 22 nt, Human
gaaaaggaaauuuauagagauc

SEQ ID NO: 260330 - RNA, 22 nt, Human
aagguuagugcaucuuuuguuu

SEQ ID NO: 260331 - RNA, 22 nt, Human
aaaugcacaaaguaaguguaau

SEQ ID NO: 260332 - RNA, 22 nt, Human
acaugcuaugagagauuacuuc

SEQ ID NO: 260333 - RNA, 22 nt, Human
cagcuccagccgacuguaagaa

SEQ ID NO: 260334 - RNA, 22 nt, Human
ugaucccuggacuugaguaagu

SEQ ID NO: 260335 - RNA, 22 nt, Human
gcaggcguguuucacgugccag

SEQ ID NO: 260336 - RNA, 22 nt, Human
uauagcaaaauaguuuccacac

SEQ ID NO: 260337 - RNA, 22 nt, Human
aggcucaguucacgucaacuuu

SEQ ID NO: 260338 - RNA, 22 nt, Human
aaagauguuaugaaauaacuau

SEQ ID NO: 260339 - RNA, 22 nt, Human
uaagacacgggcugaucuaaag

SEQ ID NO: 260340 - RNA, 22 nt, Human
ucccugggaaaugucaguuuca

SEQ ID NO: 260341 - RNA, 22 nt, Human
uuucaaguucuguuccuaaacu

SEQ ID NO: 260342 - RNA, 18 nt, Human
aguuugaacaaggaagaa

SEQ ID NO: 260343 - RNA, 21 nt, Human
gggugggaggacacagcaggc

SEQ ID NO: 260344 - RNA, 22 nt, Human
cacaguuuaugaucucagugaa

SEQ ID NO: 260345 - RNA, 21 nt, Human
aguggcugucaagggggccuu

SEQ ID NO: 260346 - RNA, 22 nt, Human
aaaugcagauugucauucagga

SEQ ID NO: 260347 - RNA, 22 nt, Human
uaaauacugaguuggaguuggc

SEQ ID NO: 260348 - RNA, 22 nt, Human
cagaaauguucuaaugauucag

SEQ ID NO: 260349 - RNA, 17 nt, Human
gugcagggaugaaggau

SEQ ID NO: 260350 - RNA, 22 nt, Human
acagaguccuagcugcaaagaa

SEQ ID NO: 260351 - RNA, 22 nt, Human
uggaaggcugugauuacugugc

SEQ ID NO: 260352 - RNA, 22 nt, Human
cugccccuggugauggacgcca

SEQ ID NO: 260353 - RNA, 23 nt, Human
cauggcagcaagagcucauggcc

SEQ ID NO: 260354 - RNA, 22 nt, Human
aagggagguaaagcuauuuaaa

SEQ ID NO: 260355 - RNA, 22 nt, Human
cacuuagagccagaugcauagu

SEQ ID NO: 260356 - RNA, 16 nt, Human
cuggacagaaaaaccu

SEQ ID NO: 260357 - RNA, 22 nt, Human
agucuucucauuucacaugcuu

SEQ ID NO: 260358 - RNA, 22 nt, Human
agccagacuuuaaaauagauga

SEQ ID NO: 260359 - RNA, 22 nt, Human
cacaggcuugucagcaugaggc

SEQ ID NO: 260360 - RNA, 22 nt, Human
agguucuuuuggccaaccucau

SEQ ID NO: 260361 - RNA, 22 nt, Human
aacaaaugaccugauuucuucc

SEQ ID NO: 260362 - RNA, 22 nt, Human
uggagcugaacuuugaggccag

SEQ ID NO: 260363 - RNA, 23 nt, Human
cucugcaggagagugggcagggc

SEQ ID NO: 260364 - RNA, 22 nt, Human
uggcagaaguucacuaguagcu

SEQ ID NO: 260365 - RNA, 22 nt, Human
acagcaugagagaugaacauuc

SEQ ID NO: 260366 - RNA, 22 nt, Human
uuacaucagcaagaguguaugu

SEQ ID NO: 260367 - RNA, 21 nt, Human
aguuuuauauuauaagcuaaa

SEQ ID NO: 260368 - RNA, 22 nt, Human
uuagaaagcuuuccauagucaa

SEQ ID NO: 260369 - RNA, 22 nt, Human
cagggauggcugucaggaugua

SEQ ID NO: 260370 - RNA, 23 nt, Human
aagaaucucagaauuagaaauac

SEQ ID NO: 260371 - RNA, 22 nt, Human
uauguacuacacuagaacauuu

SEQ ID NO: 260372 - RNA, 22 nt, Human
aagcacuggguauagcaaugau

SEQ ID NO: 260373 - RNA, 17 nt, Human
acagcagggaaguguug

SEQ ID NO: 260374 - RNA, 22 nt, Human
ugaaagauaaguuauuauguac

SEQ ID NO: 260375 - RNA, 22 nt, Human
uccagagcuaauucagcagcug

SEQ ID NO: 260376 - RNA, 22 nt, Human
agcagggcuggauuuggcaaga

SEQ ID NO: 260377 - RNA, 18 nt, Human
acuccccacaggcucugu

SEQ ID NO: 260378 - RNA, 22 nt, Human
cgagagccggaaggggcggugc

SEQ ID NO: 260379 - RNA, 22 nt, Human
ugccaggcugcccuccagucug

SEQ ID NO: 260380 - RNA, 22 nt, Human
ugcucuucggggccacugcuug

SEQ ID NO: 260381 - RNA, 22 nt, Human
aggcaggcuagucgcuugagcc

SEQ ID NO: 260382 - RNA, 22 nt, Human
cguuaguggaguuugaagcugu

SEQ ID NO: 260383 - RNA, 22 nt, Human
gcacagcuccugguaagcuggg

SEQ ID NO: 260384 - RNA, 22 nt, Human
uuugaaauaugaggcauuauga

SEQ ID NO: 260385 - RNA, 22 nt, Human
agggaugguggaggaauuucaa

SEQ ID NO: 260386 - RNA, 22 nt, Human
cuccaggacucaggccccuggg

SEQ ID NO: 260387 - RNA, 21 nt, Human
ugaaacauuugaucaaagcac

SEQ ID NO: 260388 - RNA, 22 nt, Human
ucauuauaaacauaugcuaaag

SEQ ID NO: 260389 - RNA, 22 nt, Human
ggguucuuauaguaucagagcu

SEQ ID NO: 260390 - RNA, 22 nt, Human
gguccucuccagcgccacagug

SEQ ID NO: 260391 - RNA, 22 nt, Human
ucuuaaacuuugcuguaauucu

SEQ ID NO: 260392 - RNA, 22 nt, Human
uaucagaaaugccuuaaauugg

SEQ ID NO: 260393 - RNA, 22 nt, Human
aucuuugaagaggacuugaagu

SEQ ID NO: 260394 - RNA, 22 nt, Human
uuuaauuuucugggcccagcag

SEQ ID NO: 260395 - RNA, 22 nt, Human
uguccauggagaagcucagggc

SEQ ID NO: 260396 - RNA, 22 nt, Human
uuuguaaaagcccaagcuguag

SEQ ID NO: 260397 - RNA, 21 nt, Human
cagagccuguguugacaguug

SEQ ID NO: 260398 - RNA, 22 nt, Human
caaugcuucucauuagccaaug

SEQ ID NO: 260399 - RNA, 22 nt, Human
ugggcuggcguggagaguuuag

SEQ ID NO: 260400 - RNA, 22 nt, Human
ucuccaggggcugcugugccac

SEQ ID NO: 260401 - RNA, 22 nt, Human
aaacacagggauauauauucca

SEQ ID NO: 260402 - RNA, 22 nt, Human
uuucagacaggacuucauaugu

SEQ ID NO: 260403 - RNA, 22 nt, Human
uucuuuuccuacacagcgauuu

SEQ ID NO: 260404 - RNA, 22 nt, Human
uagagcaguggguaccauggca

SEQ ID NO: 260405 - RNA, 22 nt, Human
agcagggcugcggccccaccac

SEQ ID NO: 260406 - RNA, 19 nt, Human
agacaaguuuccagaagcc

SEQ ID NO: 260407 - RNA, 22 nt, Human
gcauuuacauggagcuaucuaa

SEQ ID NO: 260408 - RNA, 22 nt, Human
cagaguguuucuuugggugggu

SEQ ID NO: 260409 - RNA, 23 nt, Human
ugggccuggccucccaguccagc

SEQ ID NO: 260410 - RNA, 22 nt, Human
aggcuaggggcagugccagcau

SEQ ID NO: 260411 - RNA, 22 nt, Human
agucuuaggcuccauuaguaga

SEQ ID NO: 260412 - RNA, 19 nt, Human
ucucucuguacauuagaua

SEQ ID NO: 260413 - RNA, 22 nt, Human
aaagaguucacggaggccaaag

SEQ ID NO: 260414 - RNA, 22 nt, Human
aagggcuggaauaucucuuaga

SEQ ID NO: 260415 - RNA, 19 nt, Human
gcuggggccugaccagaca

SEQ ID NO: 260416 - RNA, 22 nt, Human
uugagcuugaggaguuauuuga

SEQ ID NO: 260417 - RNA, 22 nt, Human
caaguauuuccugauggccugu

SEQ ID NO: 260418 - RNA, 22 nt, Human
ccuccugguaauuagcgaaagg

SEQ ID NO: 260419 - RNA, 22 nt, Human
gaguccuggcguccaauuuccu

SEQ ID NO: 260420 - RNA, 22 nt, Human
agacaauuucaaaguaauauua

SEQ ID NO: 260421 - RNA, 22 nt, Human
uuagccauucugauagguaugu

SEQ ID NO: 260422 - RNA, 22 nt, Human
acauucccaccaacaguguaaa

SEQ ID NO: 260423 - RNA, 22 nt, Human
cugcaucuguuagauuaucacc

SEQ ID NO: 260424 - RNA, 22 nt, Human
acagagacuaagcuuuucauca

SEQ ID NO: 260425 - RNA, 22 nt, Human
cccugggagcugccuggcugac

SEQ ID NO: 260426 - RNA, 22 nt, Human
acacuguagacuguugaaguac

SEQ ID NO: 260427 - RNA, 22 nt, Human
gcaguuauguauguguuugaga

SEQ ID NO: 260428 - RNA, 18 nt, Human
aggccacacuccagaaca

SEQ ID NO: 260429 - RNA, 22 nt, Human
aucuguaaagauaaucauaugu

SEQ ID NO: 260430 - RNA, 22 nt, Human
aauuuacacuucauuuggaggg

SEQ ID NO: 260431 - RNA, 22 nt, Human
agccuggaauuaaggaaaugca

SEQ ID NO: 260432 - RNA, 22 nt, Human
cuguuacuucaaucuucucccg

SEQ ID NO: 260433 - RNA, 19 nt, Human
aucugccuguuaucacaua

SEQ ID NO: 260434 - RNA, 22 nt, Human
uccagcauauauagagaaugag

SEQ ID NO: 260435 - RNA, 22 nt, Human
ggaauugguuucaagggaaagu

SEQ ID NO: 260436 - RNA, 22 nt, Human
agcuucugaaagucuguuuucc

SEQ ID NO: 260437 - RNA, 22 nt, Human
ggcuuuauuaacucauccguaa

SEQ ID NO: 260438 - RNA, 22 nt, Human
gugaccaucaucucagcuaguu

SEQ ID NO: 260439 - RNA, 22 nt, Human
cuuuauguccuugaagaguugu

SEQ ID NO: 260440 - RNA, 22 nt, Human
acaguguagcaugguagcaaug

SEQ ID NO: 260441 - RNA, 22 nt, Human
uuuugauaucaugaugaacaga

SEQ ID NO: 260442 - RNA, 22 nt, Human
uccugcagagacagaggccuca

SEQ ID NO: 260443 - RNA, 22 nt, Human
uacuuuauauuguggcuggcca

SEQ ID NO: 260444 - RNA, 22 nt, Human
gagggaauggugugcaagaggu

SEQ ID NO: 260445 - RNA, 22 nt, Human
cugguacaaaaugcugauauca

SEQ ID NO: 260446 - RNA, 22 nt, Human
uggcuucugguuuauccuuaua

SEQ ID NO: 260447 - RNA, 22 nt, Human
aauuaaaagauaacccaugagu

SEQ ID NO: 260448 - RNA, 22 nt, Human
gagugagggccaacauccagcu

SEQ ID NO: 260449 - RNA, 22 nt, Human
uguguguggggaggcagcagau

SEQ ID NO: 260450 - RNA, 22 nt, Human
agcagcaccuguccucgcugcu

SEQ ID NO: 260451 - RNA, 22 nt, Human
ugcugcacucaccaacagauaa

SEQ ID NO: 260452 - RNA, 22 nt, Human
gaggccaggggccuggagauga

SEQ ID NO: 260453 - RNA, 22 nt, Human
aauguguguucggggcccagag

SEQ ID NO: 260454 - RNA, 20 nt, Human
ucagggcaugggacagcccc

SEQ ID NO: 260455 - RNA, 22 nt, Human
ugcucccuugccagaggggaag

SEQ ID NO: 260456 - RNA, 22 nt, Human
agcugaggguucgguguccaca

SEQ ID NO: 260457 - RNA, 22 nt, Human
aucugggccuguucccucaccu

SEQ ID NO: 260458 - RNA, 22 nt, Human
ccccuggggaucagcuggaauu

SEQ ID NO: 260459 - RNA, 22 nt, Human
cucagcagugacaagagaguau

SEQ ID NO: 260460 - RNA, 22 nt, Human
gcagcuuucuuuuugcaugucu

SEQ ID NO: 260461 - RNA, 22 nt, Human
agaaacuucagcuauucuuuug

SEQ ID NO: 260462 - RNA, 22 nt, Human
uuauauaucuugauuuguucca

SEQ ID NO: 260463 - RNA, 22 nt, Human
cagggccugccugguuccugga

SEQ ID NO: 260464 - RNA, 22 nt, Human
uucccagugauuaaggcagugg

SEQ ID NO: 260465 - RNA, 22 nt, Human
gccaggagagcuccuucagguu

SEQ ID NO: 260466 - RNA, 22 nt, Human
guuuaaauaauuaggggccugu

SEQ ID NO: 260467 - RNA, 17 nt, Human
aggaagcgagcuggccu

SEQ ID NO: 260468 - RNA, 17 nt, Human
ugguuccaaccauacgc

SEQ ID NO: 260469 - RNA, 22 nt, Human
gacccaggcucgugggacggcu

SEQ ID NO: 260470 - RNA, 22 nt, Human
acacagaggaaagugugaaggg

SEQ ID NO: 260471 - RNA, 23 nt, Human
ugggccucuccacccuuuucugu

SEQ ID NO: 260472 - RNA, 22 nt, Human
ucucaguggguuaaaagagaag

SEQ ID NO: 260473 - RNA, 22 nt, Human
accacugggcgggcagccugcu

SEQ ID NO: 260474 - RNA, 22 nt, Human
acuggugguuucuccccagaga

SEQ ID NO: 260475 - RNA, 22 nt, Human
cucacagcugcuucaggaucca

SEQ ID NO: 260476 - RNA, 22 nt, Human
auuuuguggcagaugcagaacc

SEQ ID NO: 260477 - RNA, 22 nt, Human
acuuagcaguuuagaauauguc

SEQ ID NO: 260478 - RNA, 19 nt, Human
aaacacagauuucuuacca

SEQ ID NO: 260479 - RNA, 22 nt, Human
uucuauugggaagugugagagu

SEQ ID NO: 260480 - RNA, 22 nt, Human
ucugaagguuacuucugcucag

SEQ ID NO: 260481 - RNA, 22 nt, Human
auaguuacaaagacuuuuuaaa

SEQ ID NO: 260482 - RNA, 22 nt, Human
augcuuuauuguuaggucaugu

SEQ ID NO: 260483 - RNA, 22 nt, Human
cagaacagaaguaaaauuuacc

SEQ ID NO: 260484 - RNA, 22 nt, Human
uagauucuggagagacagcagu

SEQ ID NO: 260485 - RNA, 22 nt, Human
aagaagaugguuaacuuucagu

SEQ ID NO: 260486 - RNA, 22 nt, Human
uucuuuuccuguggcucaucca

SEQ ID NO: 260487 - RNA, 22 nt, Human
uuucaguugauugcuuggguua

SEQ ID NO: 260488 - RNA, 22 nt, Human
gcuuuacauaaacauuuauuau

SEQ ID NO: 260489 - RNA, 22 nt, Human
uggaccugaagaauaggaagua

SEQ ID NO: 260490 - RNA, 22 nt, Human
gggcucuggggugcccuggcau

SEQ ID NO: 260491 - RNA, 22 nt, Human
uaaucuagucccacauggaauu

SEQ ID NO: 260492 - RNA, 22 nt, Human
acauuuaaauaccuauguuucu

SEQ ID NO: 260493 - RNA, 22 nt, Human
uauuucucuucaaaauugaugu

SEQ ID NO: 260494 - RNA, 22 nt, Human
accaggaguugggggugggacc

SEQ ID NO: 260495 - RNA, 22 nt, Human
auauccaccauucugcaccuuc

SEQ ID NO: 260496 - RNA, 19 nt, Human
ucuggcagguaauuaggga

SEQ ID NO: 260497 - RNA, 22 nt, Human
augcagggucuccgugugacga

SEQ ID NO: 260498 - RNA, 22 nt, Human
uucuaaaaccaauucugcuucu

SEQ ID NO: 260499 - RNA, 22 nt, Human
gaauaauauugacuuugcaggc

SEQ ID NO: 260500 - RNA, 22 nt, Human
gagagcaggaggcagcgggacg

SEQ ID NO: 260501 - RNA, 22 nt, Human
cagggccuccccggcagucuuu

SEQ ID NO: 260502 - RNA, 19 nt, Human
gucuagaacauuguaggug

SEQ ID NO: 260503 - RNA, 22 nt, Human
caauacuuuaguaaaauggccc

SEQ ID NO: 260504 - RNA, 22 nt, Human
aguggcuuuuuaguggcagaug

SEQ ID NO: 260505 - RNA, 22 nt, Human
gcaaagcagaacccucucuauc

SEQ ID NO: 260506 - RNA, 22 nt, Human
agaagcugccuacaugaccagc

SEQ ID NO: 260507 - RNA, 22 nt, Human
ccuucaaggcaaggagggcugg

SEQ ID NO: 260508 - RNA, 22 nt, Human
gguaccaccaauucagcugcca

SEQ ID NO: 260509 - RNA, 22 nt, Human
caacauguguuagacaauagac

SEQ ID NO: 260510 - RNA, 19 nt, Human
gaaggcuuuugguauguuu

SEQ ID NO: 260511 - RNA, 22 nt, Human
ggcucccuggcccuggggacac

SEQ ID NO: 260512 - RNA, 22 nt, Human
aucuuuggccacuugugcugca

SEQ ID NO: 260513 - RNA, 22 nt, Human
gugcaaaauuuggccaauaaca

SEQ ID NO: 260514 - RNA, 22 nt, Human
agcugucugucuccugaggaga

SEQ ID NO: 260515 - RNA, 22 nt, Human
uucugagagagccucucauguu

SEQ ID NO: 260516 - RNA, 22 nt, Human
caaaugcuggcccugcuacuua

SEQ ID NO: 260517 - RNA, 22 nt, Human
ggagcugaggacacuacauuuu

SEQ ID NO: 260518 - RNA, 16 nt, Human
gugagggacauagcuu

SEQ ID NO: 260519 - RNA, 17 nt, Human
agaggcagauacuugga

SEQ ID NO: 260520 - RNA, 22 nt, Human
cucuucaauagauuguugaggg

SEQ ID NO: 260521 - RNA, 22 nt, Human
uaaaugugucuuuuuaaggccu

SEQ ID NO: 260522 - RNA, 22 nt, Human
cuuucuuugcagugagccagag

SEQ ID NO: 260523 - RNA, 22 nt, Human
cgggcacacacuugacagguuc

SEQ ID NO: 260524 - RNA, 22 nt, Human
cagaauuuuucacucaaucuuc

SEQ ID NO: 260525 - RNA, 22 nt, Human
cccaggcuuuuaaguuagacag

SEQ ID NO: 260526 - RNA, 22 nt, Human
ugcaaaggaggaugggaaagaa

SEQ ID NO: 260527 - RNA, 20 nt, Human
agcuacaaugcgaagcuggc

SEQ ID NO: 260528 - RNA, 22 nt, Human
gcucaggcaaauuucuggugaa

SEQ ID NO: 260529 - RNA, 22 nt, Human
acagaccucuagauuacauuug

SEQ ID NO: 260530 - RNA, 22 nt, Human
ccuuucuugcuaagaguuuaug

SEQ ID NO: 260531 - RNA, 22 nt, Human
cuguccauggcaaugaugcaga

SEQ ID NO: 260532 - RNA, 22 nt, Human
acaacaggguaaggcaggccau

SEQ ID NO: 260533 - RNA, 22 nt, Human
aggacagaaucuauauucaguu

SEQ ID NO: 260534 - RNA, 22 nt, Human
guguguccacacauacauacau

SEQ ID NO: 260535 - RNA, 20 nt, Human
ucaggagccuaggacaugau

SEQ ID NO: 260536 - RNA, 22 nt, Human
aggcaguguucuucuaagggca

SEQ ID NO: 260537 - RNA, 22 nt, Human
aggguguguucuccuaugagaa

SEQ ID NO: 260538 - RNA, 22 nt, Human
ugugggaaugacgaggaagagg

SEQ ID NO: 260539 - RNA, 20 nt, Human
gugcauuucaccuguacugu

SEQ ID NO: 260540 - RNA, 22 nt, Human
ccauguguaaauuagauaacuc

SEQ ID NO: 260541 - RNA, 16 nt, Human
gaaggcuuacugcagg

SEQ ID NO: 260542 - RNA, 22 nt, Human
ugcagggaaagggcacugggcu

SEQ ID NO: 260543 - RNA, 22 nt, Human
aggaacacaacuuccugagagc

SEQ ID NO: 260544 - RNA, 22 nt, Human
agccacagucaaccuguccaua

SEQ ID NO: 260545 - RNA, 22 nt, Human
aagcacccaauuuacagcaguu

SEQ ID NO: 260546 - RNA, 20 nt, Human
guguggccaggagcugcgcu

SEQ ID NO: 260547 - RNA, 20 nt, Human
caugguggaggagcagggcc

SEQ ID NO: 260548 - RNA, 22 nt, Human
guccaaaagagccagccgggcg

SEQ ID NO: 260549 - RNA, 22 nt, Human
ucccuggguuaccuuucaaggu

SEQ ID NO: 260550 - RNA, 22 nt, Human
guaaguuauauuaaaauuucag

SEQ ID NO: 260551 - RNA, 23 nt, Human
uggaaacuuaagggggagauguc

SEQ ID NO: 260552 - RNA, 22 nt, Human
caucucugagaccucagcuggg

SEQ ID NO: 260553 - RNA, 22 nt, Human
aacacuuucuuccuugcucagg

SEQ ID NO: 260554 - RNA, 22 nt, Human
cagcagcuguuuacggaacacc

SEQ ID NO: 260555 - RNA, 22 nt, Human
ucaagacagauggguaacuugg

SEQ ID NO: 260556 - RNA, 22 nt, Human
uaaaugucuuugucacguuggg

SEQ ID NO: 260557 - RNA, 22 nt, Human
gauggcuuaagaguaaaaggca

SEQ ID NO: 260558 - RNA, 22 nt, Human
uggcaagaauauuggaccagaa

SEQ ID NO: 260559 - RNA, 21 nt, Human
caucucaguggguugguggau

SEQ ID NO: 260560 - RNA, 22 nt, Human
ucuaugaaucaauuuuaacauc

SEQ ID NO: 260561 - RNA, 22 nt, Human
augcacccagugucuggacuau

SEQ ID NO: 260562 - RNA, 16 nt, Human
gcacacagccagccuu

SEQ ID NO: 260563 - RNA, 21 nt, Human
cugcaggaugcugaagccagg

SEQ ID NO: 260564 - RNA, 22 nt, Human
ucuuuaauauaaaggaaugaau

SEQ ID NO: 260565 - RNA, 22 nt, Human
aaagccaggggagggauuccca

SEQ ID NO: 260566 - RNA, 22 nt, Human
uggcagcauguuauguaaggaa

SEQ ID NO: 260567 - RNA, 20 nt, Human
accaauuucagaggugcaga

SEQ ID NO: 260568 - RNA, 22 nt, Human
gcuuagaaagugauugauacau

SEQ ID NO: 260569 - RNA, 22 nt, Human
gcucucugaggugcuggcagag

SEQ ID NO: 260570 - RNA, 22 nt, Human
gauucagugagggugagaagaa

SEQ ID NO: 260571 - RNA, 22 nt, Human
cuguuuguuggcuauugacagu

SEQ ID NO: 260572 - RNA, 22 nt, Human
cagccugacaccagcuuugggc

SEQ ID NO: 260573 - RNA, 22 nt, Human
guguccugaucaauugagcugg

SEQ ID NO: 260574 - RNA, 22 nt, Human
cagcagcagacauuugaucuuc

SEQ ID NO: 260575 - RNA, 22 nt, Human
gcaugcaggagagaaagacggc

SEQ ID NO: 260576 - RNA, 22 nt, Human
agcagcaucugguucugaugug

SEQ ID NO: 260577 - RNA, 22 nt, Human
acacagcaaggucugacuuugg

SEQ ID NO: 260578 - RNA, 22 nt, Human
agaaggcugaagaagauccguu

SEQ ID NO: 260579 - RNA, 22 nt, Human
uagcucaaagguuaagugugga

SEQ ID NO: 260580 - RNA, 22 nt, Human
aggaaauguacaaaugaagaug

SEQ ID NO: 260581 - RNA, 21 nt, Human
ugaaacagauggaaguauuug

SEQ ID NO: 260582 - RNA, 22 nt, Human
aaauguacgggaguagaauuag

SEQ ID NO: 260583 - RNA, 22 nt, Human
caugaaggaauaauuguuuaga

SEQ ID NO: 260584 - RNA, 22 nt, Human
aaggccagcgcagaccauuguc

SEQ ID NO: 260585 - RNA, 22 nt, Human
uucugaauccucgaaacauagc

SEQ ID NO: 260586 - RNA, 22 nt, Human
ccucugagaacaccuggcgucc

SEQ ID NO: 260587 - RNA, 23 nt, Human
ucuggaaugguacucacuggagu

SEQ ID NO: 260588 - RNA, 22 nt, Human
ugugucuguuuugcucaccauu

SEQ ID NO: 260589 - RNA, 22 nt, Human
ucucaucuucauaucugaaaga

SEQ ID NO: 260590 - RNA, 22 nt, Human
aguccugggugugcaaggcaga

SEQ ID NO: 260591 - RNA, 22 nt, Human
cgugggaggaaaaaugggcuuc

SEQ ID NO: 260592 - RNA, 22 nt, Human
aaagacagauggcaaggaugau

SEQ ID NO: 260593 - RNA, 22 nt, Human
ucaguuaacggaaaggggugug

SEQ ID NO: 260594 - RNA, 22 nt, Human
ccacugccagccgcccggaggc

SEQ ID NO: 260595 - RNA, 22 nt, Human
gcuucucuuucuccccuggcgg

SEQ ID NO: 260596 - RNA, 22 nt, Human
gcccugagcacacaguagcaaa

SEQ ID NO: 260597 - RNA, 22 nt, Human
aauaccaccucauucuggaggc

SEQ ID NO: 260598 - RNA, 22 nt, Human
uccacagacuauuaagugaucu

SEQ ID NO: 260599 - RNA, 22 nt, Human
agucacagaaugauggcuccag

SEQ ID NO: 260600 - RNA, 22 nt, Human
auugcuuuguacaugccuagca

SEQ ID NO: 260601 - RNA, 19 nt, Human
gcuucccaccagccagccc

SEQ ID NO: 260602 - RNA, 22 nt, Human
aaaugucuuucuucugcuacgu

SEQ ID NO: 260603 - RNA, 22 nt, Human
uucauuuuuaccgcgugucaaa

SEQ ID NO: 260604 - RNA, 22 nt, Human
uaggcaaguugcccaaucucuc

SEQ ID NO: 260605 - RNA, 21 nt, Human
uuuguucaggcaaguuacagu

SEQ ID NO: 260606 - RNA, 22 nt, Human
uuuacagcaacagugcagaggu

SEQ ID NO: 260607 - RNA, 22 nt, Human
ucaggaaggcacuugguguguu

SEQ ID NO: 260608 - RNA, 22 nt, Human
caggggcucccugggugccagu

SEQ ID NO: 260609 - RNA, 17 nt, Human
uauguguguguuuauac

SEQ ID NO: 260610 - RNA, 22 nt, Human
gucccaggaacauucuggcuag

SEQ ID NO: 260611 - RNA, 23 nt, Human
ggucccaguggagaggccucacc

SEQ ID NO: 260612 - RNA, 22 nt, Human
cucagagcaaugaacaugcaaa

SEQ ID NO: 260613 - RNA, 22 nt, Human
ggcugccuauagaauuauuagu

SEQ ID NO: 260614 - RNA, 22 nt, Human
gcauuuggaacuugguugagau

SEQ ID NO: 260615 - RNA, 22 nt, Human
aggcugagucgggaggaucacu

SEQ ID NO: 260616 - RNA, 22 nt, Human
aggcauggguagaagagaagcc

SEQ ID NO: 260617 - RNA, 22 nt, Human
agugugggggcuuuggugucac

SEQ ID NO: 260618 - RNA, 20 nt, Human
uucuaguuuggaguuauuaa

SEQ ID NO: 260619 - RNA, 22 nt, Human
ucuacaaagaagaauuaauguc

SEQ ID NO: 260620 - RNA, 22 nt, Human
ugugucugcacugaguccucac

SEQ ID NO: 260621 - RNA, 22 nt, Human
ggaugggaacuugguagggcau

SEQ ID NO: 260622 - RNA, 23 nt, Human
agggccuggcguggagugugugc

SEQ ID NO: 260623 - RNA, 22 nt, Human
gggaccuggggacuccuuguuc

SEQ ID NO: 260624 - RNA, 22 nt, Human
ggcuuugcaaaaucggcuucug

SEQ ID NO: 260625 - RNA, 22 nt, Human
cugggcucuaagggagcaccgu

SEQ ID NO: 260626 - RNA, 22 nt, Human
augucagagcuuccacaauagu

SEQ ID NO: 260627 - RNA, 23 nt, Human
acauucuugauucaggccuuagc

SEQ ID NO: 260628 - RNA, 22 nt, Human
agggagcagcagccacaggaug

SEQ ID NO: 260629 - RNA, 22 nt, Human
caaguaacuugauuaagguaag

SEQ ID NO: 260630 - RNA, 22 nt, Human
uuauaagcucugaaaucuccua

SEQ ID NO: 260631 - RNA, 22 nt, Human
aaagaguugaggcaguuaucca

SEQ ID NO: 260632 - RNA, 22 nt, Human
cagcccagcgcaaacaacuggc

SEQ ID NO: 260633 - RNA, 22 nt, Human
ggcuggagaagggugguugaca

SEQ ID NO: 260634 - RNA, 19 nt, Human
cugcucagagcagcuccag

SEQ ID NO: 260635 - RNA, 23 nt, Human
aaguacauauauuuagauaguga

SEQ ID NO: 260636 - RNA, 22 nt, Human
gaggugucuggccuuuguagga

SEQ ID NO: 260637 - RNA, 20 nt, Human
gucaaacuacuggcagugcc

SEQ ID NO: 260638 - RNA, 23 nt, Human
aggauaaacuaaacucauuuugg

SEQ ID NO: 260639 - RNA, 22 nt, Human
accuagaaugaagcaaugcugu

SEQ ID NO: 260640 - RNA, 22 nt, Human
caugcucugcagcagaccugug

SEQ ID NO: 260641 - RNA, 19 nt, Human
ugagacugggugcaguacu

SEQ ID NO: 260642 - RNA, 23 nt, Human
agaguuuucuguuuucuguaggg

SEQ ID NO: 260643 - RNA, 22 nt, Human
uccaugagcuagcuuuccaaag

SEQ ID NO: 260644 - RNA, 22 nt, Human
uucauucaucacaugcagcugg

SEQ ID NO: 260645 - RNA, 22 nt, Human
cauuuguuaagaaggaaaaagg

SEQ ID NO: 260646 - RNA, 19 nt, Human
auuuggaaauaaggucuuc

SEQ ID NO: 260647 - RNA, 22 nt, Human
ugucacaucaggugguggcugu

SEQ ID NO: 260648 - RNA, 22 nt, Human
gcuguacauucugcacaggccc

SEQ ID NO: 260649 - RNA, 22 nt, Human
aagggacauagacuguacaucu

SEQ ID NO: 260650 - RNA, 22 nt, Human
uauuggucugcuuaaguggauu

SEQ ID NO: 260651 - RNA, 22 nt, Human
guggucagagaugacagugggu

SEQ ID NO: 260652 - RNA, 22 nt, Human
aggcaagcugcagagaguccuu

SEQ ID NO: 260653 - RNA, 22 nt, Human
gcuccuggauguucaagucggc

SEQ ID NO: 260654 - RNA, 22 nt, Human
uucagaaaaaacuucaauaagu

SEQ ID NO: 260655 - RNA, 22 nt, Human
uggcagcuccggguaggggcug

SEQ ID NO: 260656 - RNA, 22 nt, Human
agugcaacuucacguagaguac

SEQ ID NO: 260657 - RNA, 22 nt, Human
agggagaaaauuggaugcacaa

SEQ ID NO: 260658 - RNA, 21 nt, Human
uggaaggcugcucugccaggg

SEQ ID NO: 260659 - RNA, 22 nt, Human
cucagggcuugaguguccagga

SEQ ID NO: 260660 - RNA, 23 nt, Human
acagaugaaaguguggcucagag

SEQ ID NO: 260661 - RNA, 22 nt, Human
aaggaccuauauugucagagga

SEQ ID NO: 260662 - RNA, 22 nt, Human
ugaaggcauaaaucuugggaac

SEQ ID NO: 260663 - RNA, 22 nt, Human
cucauaaggagcucacaaccua

SEQ ID NO: 260664 - RNA, 22 nt, Human
uauccacacucaaggggagggg

SEQ ID NO: 260665 - RNA, 22 nt, Human
ccuggagcacucucccuggcug

SEQ ID NO: 260666 - RNA, 22 nt, Human
uguauuuucugaagauaaucaa

SEQ ID NO: 260667 - RNA, 22 nt, Human
gguggauggacucucgggggcc

SEQ ID NO: 260668 - RNA, 22 nt, Human
ucccagagugugggcaucaagg

SEQ ID NO: 260669 - RNA, 22 nt, Human
auggcugcaucauccugguuga

SEQ ID NO: 260670 - RNA, 22 nt, Human
aacuuucuuucacagaaguauc

SEQ ID NO: 260671 - RNA, 22 nt, Human
ccagccucacuggcaucaccua

SEQ ID NO: 260672 - RNA, 23 nt, Human
cuucucagaagucugugccagga

SEQ ID NO: 260673 - RNA, 22 nt, Human
aggcuggguaccugucauaugc

SEQ ID NO: 260674 - RNA, 18 nt, Human
ggagagugacagagucgu

SEQ ID NO: 260675 - RNA, 22 nt, Human
gaauguaauagucaguagaaca

SEQ ID NO: 260676 - RNA, 22 nt, Human
aggucacauggauaaugaucag

SEQ ID NO: 260677 - RNA, 22 nt, Human
augcaacaauguauuuauguau

SEQ ID NO: 260678 - RNA, 22 nt, Human
aucuaagaggaugguuggaaau

SEQ ID NO: 260679 - RNA, 22 nt, Human
gaaaggagaggguuaaggagcu

SEQ ID NO: 260680 - RNA, 20 nt, Human
guacucagaucaagucagcu

SEQ ID NO: 260681 - RNA, 22 nt, Human
ggaauguuuuagcuugacuuuu

SEQ ID NO: 260682 - RNA, 22 nt, Human
agaggccuaaccaagauguccu

SEQ ID NO: 260683 - RNA, 22 nt, Human
ccugcagguugcagaggcggaa

SEQ ID NO: 260684 - RNA, 22 nt, Human
cugcuuccaugcaauggcaguc

SEQ ID NO: 260685 - RNA, 22 nt, Human
uacuacaagggcccuaaaaggu

SEQ ID NO: 260686 - RNA, 22 nt, Human
ugagaacaguuggaagcaguca

SEQ ID NO: 260687 - RNA, 21 nt, Human
uuuauuaacaacuguggacgu

SEQ ID NO: 260688 - RNA, 22 nt, Human
uuuauucacucauucagccagu

SEQ ID NO: 260689 - RNA, 22 nt, Human
ucuucuuccucauuuauacaua

SEQ ID NO: 260690 - RNA, 17 nt, Human
aagacaagacaaaugca

SEQ ID NO: 260691 - RNA, 22 nt, Human
ggcugcugacaaacaugaucau

SEQ ID NO: 260692 - RNA, 22 nt, Human
gcuuuuggaccucugauguuuc

SEQ ID NO: 260693 - RNA, 22 nt, Human
augcauugcugcuuucaaaaca

SEQ ID NO: 260694 - RNA, 22 nt, Human
caaggcagcguuccuuucugga

SEQ ID NO: 260695 - RNA, 20 nt, Human
uggcccaguggggcagggug

SEQ ID NO: 260696 - RNA, 22 nt, Human
auuuacugcuugacacauuggu

SEQ ID NO: 260697 - RNA, 22 nt, Human
aaaugugcuugugaucagcugu

SEQ ID NO: 260698 - RNA, 22 nt, Human
cucaggccugaguggcaguccc

SEQ ID NO: 260699 - RNA, 22 nt, Human
ugagacagcagucagggaaaua

SEQ ID NO: 260700 - RNA, 22 nt, Human
uccucccaacuuuuccaucuca

SEQ ID NO: 260701 - RNA, 22 nt, Human
gccuggcucccucugcagcucc

SEQ ID NO: 260702 - RNA, 22 nt, Human
uuacauauuauccaaaacugcu

SEQ ID NO: 260703 - RNA, 22 nt, Human
ccacgagggaaccagguggggu

SEQ ID NO: 260704 - RNA, 22 nt, Human
caugagcugcugggagccuguc

SEQ ID NO: 260705 - RNA, 22 nt, Human
cagcccugcucuuagugucucc

SEQ ID NO: 260706 - RNA, 22 nt, Human
uagaacacuugaccacugcucc

SEQ ID NO: 260707 - RNA, 22 nt, Human
aguugggaguuauagacucuau

SEQ ID NO: 260708 - RNA, 22 nt, Human
acccugggugagaggcaaacag

SEQ ID NO: 260709 - RNA, 22 nt, Human
caggccuccuaugagcacuagc

SEQ ID NO: 260710 - RNA, 22 nt, Human
caggcucccugggcaguggcag

SEQ ID NO: 260711 - RNA, 22 nt, Human
cagaguccugcaccagcuccag

SEQ ID NO: 260712 - RNA, 22 nt, Human
uugcagggccuuggcuucuucc

SEQ ID NO: 260713 - RNA, 22 nt, Human
ggcagguguggugaccagagau

SEQ ID NO: 260714 - RNA, 23 nt, Human
caugaagguagcacaaagccucu

SEQ ID NO: 260715 - RNA, 18 nt, Human
ccagguggugacagagau

SEQ ID NO: 260716 - RNA, 22 nt, Human
ccuggcugagccuccaggaaga

SEQ ID NO: 260717 - RNA, 22 nt, Human
ccagcagggaaaaacccaccaa

SEQ ID NO: 260718 - RNA, 22 nt, Human
uggagcaggaagucuauggcug

SEQ ID NO: 260719 - RNA, 22 nt, Human
uccaggccuggcuccauucagu

SEQ ID NO: 260720 - RNA, 22 nt, Human
auaugcacacucugcccacaga

SEQ ID NO: 260721 - RNA, 22 nt, Human
gcugcaggcagaaucucccaau

SEQ ID NO: 260722 - RNA, 23 nt, Human
gaaaucuagucauuuuuagucug

SEQ ID NO: 260723 - RNA, 22 nt, Human
ugcagaguccucuggagggacu

SEQ ID NO: 260724 - RNA, 22 nt, Human
agcuccugggccaagcccaugc

SEQ ID NO: 260725 - RNA, 22 nt, Human
uagaaaugcccagauucugcua

SEQ ID NO: 260726 - RNA, 22 nt, Human
gaucaauacuauuaagaucaua

SEQ ID NO: 260727 - RNA, 22 nt, Human
uaugaaaugauggggaaaauag

SEQ ID NO: 260728 - RNA, 22 nt, Human
aaauguaagucuuuguuucuua

SEQ ID NO: 260729 - RNA, 22 nt, Human
uacaacacugguucgacaugug

SEQ ID NO: 260730 - RNA, 22 nt, Human
aaaggccacuugaaggauuuuu

SEQ ID NO: 260731 - RNA, 22 nt, Human
ccaggccugauugggaaucuug

SEQ ID NO: 260732 - RNA, 22 nt, Human
uucuaggaagggaagcauggca

SEQ ID NO: 260733 - RNA, 22 nt, Human
ccuggucagagcagucaggauc

SEQ ID NO: 260734 - RNA, 22 nt, Human
acagauuuugguauuugcaaug

SEQ ID NO: 260735 - RNA, 20 nt, Human
cuacacuuggcaccuggcau

SEQ ID NO: 260736 - RNA, 22 nt, Human
ccauuggagaguuuuaagaagg

SEQ ID NO: 260737 - RNA, 22 nt, Human
ugcaucaaaacuggacuccuuc

SEQ ID NO: 260738 - RNA, 22 nt, Human
aaacugaguaccucugcauuca

SEQ ID NO: 260739 - RNA, 22 nt, Human
gaagucugccugccuucucugu

SEQ ID NO: 260740 - RNA, 22 nt, Human
gcagcuaccacccaggaaggac

SEQ ID NO: 260741 - RNA, 22 nt, Human
ucuggcuuggcuggcaucucug

SEQ ID NO: 260742 - RNA, 22 nt, Human
cuagaaguuggggcuagggaua

SEQ ID NO: 260743 - RNA, 22 nt, Human
ucucuaaagccuggaagaggag

SEQ ID NO: 260744 - RNA, 22 nt, Human
caucuuuaauuugugacaacua

SEQ ID NO: 260745 - RNA, 22 nt, Human
acucagcuaaacucagucuaug

SEQ ID NO: 260746 - RNA, 22 nt, Human
cuuggucuugggagcagggaca

SEQ ID NO: 260747 - RNA, 21 nt, Human
uaugguaaccagacaagaaug

SEQ ID NO: 260748 - RNA, 21 nt, Human
uggcucccuugaauugucugu

SEQ ID NO: 260749 - RNA, 22 nt, Human
guucucauaguggaaaauaggu

SEQ ID NO: 260750 - RNA, 22 nt, Human
uuugcaaaaugaggugaagagu

SEQ ID NO: 260751 - RNA, 17 nt, Human
uggcuucagauguacau

SEQ ID NO: 260752 - RNA, 22 nt, Human
guaacagaggguuugcagauau

SEQ ID NO: 260753 - RNA, 22 nt, Human
cucauuaaaggaaaucaccugc

SEQ ID NO: 260754 - RNA, 22 nt, Human
ucaggcaccccuugaguagggg

SEQ ID NO: 260755 - RNA, 22 nt, Human
aggccagggucccacacucgca

SEQ ID NO: 260756 - RNA, 22 nt, Human
ggccuucacgugaccuggcgug

SEQ ID NO: 260757 - RNA, 22 nt, Human
uucuuucugaauacaguugagu

SEQ ID NO: 260758 - RNA, 23 nt, Human
gugagcagcaccaugaggcuaga

SEQ ID NO: 260759 - RNA, 22 nt, Human
gggggcggagcacgugaccacg

SEQ ID NO: 260760 - RNA, 22 nt, Human
ucagguguauugaugucuguga

SEQ ID NO: 260761 - RNA, 22 nt, Human
aaacugacaaucucaguccuau

SEQ ID NO: 260762 - RNA, 22 nt, Human
ucauugaagcccuugacaagcc

SEQ ID NO: 260763 - RNA, 22 nt, Human
gcucuggcuacuccacccuguu

SEQ ID NO: 260764 - RNA, 22 nt, Human
ccacaucucuugauguaccuac

SEQ ID NO: 260765 - RNA, 22 nt, Human
cucuuuggcuuugacucccauu

SEQ ID NO: 260766 - RNA, 22 nt, Human
ucauguguccuaguucauauaa

SEQ ID NO: 260767 - RNA, 19 nt, Human
ucccaagauuucuguauca

SEQ ID NO: 260768 - RNA, 22 nt, Human
aguaugcauauuucaaaguaag

SEQ ID NO: 260769 - RNA, 22 nt, Human
uaaguaaauuuauaaugugauu

SEQ ID NO: 260770 - RNA, 22 nt, Human
cacacaucuuaucccaguuauu

SEQ ID NO: 260771 - RNA, 22 nt, Human
agcuguuuuugucugcugaucc

SEQ ID NO: 260772 - RNA, 22 nt, Human
cagagagaggggcugccuggcc

SEQ ID NO: 260773 - RNA, 22 nt, Human
ucuuuguaaaugccuagcauaa

SEQ ID NO: 260774 - RNA, 22 nt, Human
gacacaggaaucaccuuggaug

SEQ ID NO: 260775 - RNA, 22 nt, Human
acaaugcauaccuagcagcuca

SEQ ID NO: 260776 - RNA, 22 nt, Human
agcagcugccacuggaauagga

SEQ ID NO: 260777 - RNA, 22 nt, Human
gagcugaauugaagcaaggagc

SEQ ID NO: 260778 - RNA, 22 nt, Human
ccugcuggccaguggagggcug

SEQ ID NO: 260779 - RNA, 22 nt, Human
agagccuggacuuuucugagcc

SEQ ID NO: 260780 - RNA, 22 nt, Human
uggaagggagcuggaauuugga

SEQ ID NO: 260781 - RNA, 22 nt, Human
aggcucuggcaacagcuggugu

SEQ ID NO: 260782 - RNA, 22 nt, Human
cagcuauuaauguuuuugcuga

SEQ ID NO: 260783 - RNA, 22 nt, Human
ccugguugagggagguguggac

SEQ ID NO: 260784 - RNA, 22 nt, Human
gcugagcuagcuaucucagucu

SEQ ID NO: 260785 - RNA, 22 nt, Human
aagcugaaauuccuccugaaau

SEQ ID NO: 260786 - RNA, 22 nt, Human
gucuggcuuugcucagaugcug

SEQ ID NO: 260787 - RNA, 22 nt, Human
agcccagggaguugauuagcau

SEQ ID NO: 260788 - RNA, 19 nt, Human
cagcccucuuaccacugug

SEQ ID NO: 260789 - RNA, 22 nt, Human
augcaacauccaauuccuuuug

SEQ ID NO: 260790 - RNA, 19 nt, Human
uggaagaggaagggaaaua

SEQ ID NO: 260791 - RNA, 22 nt, Human
agcuugaagccuuggcgagauu

SEQ ID NO: 260792 - RNA, 22 nt, Human
agguccugggaguucuagugug

SEQ ID NO: 260793 - RNA, 22 nt, Human
augaggcucucaacaccuugag

SEQ ID NO: 260794 - RNA, 22 nt, Human
uuugaacaugcugcaugauaau

SEQ ID NO: 260795 - RNA, 22 nt, Human
uucucuggccauagcuggcuag

SEQ ID NO: 260796 - RNA, 18 nt, Human
ggagcccacggcguccca

SEQ ID NO: 260797 - RNA, 22 nt, Human
guucaaauuuucuaggugggug

SEQ ID NO: 260798 - RNA, 22 nt, Human
uucugcagcaugaggcuggagc

SEQ ID NO: 260799 - RNA, 19 nt, Human
ggcugucucggcccagcca

SEQ ID NO: 260800 - RNA, 22 nt, Human
gacuacucaaacuuucucuaua

SEQ ID NO: 260801 - RNA, 22 nt, Human
cuggguguagcccaguaugagg

SEQ ID NO: 260802 - RNA, 22 nt, Human
uccaggcugugcgcaccgugug

SEQ ID NO: 260803 - RNA, 22 nt, Human
uggagcucaaaggccuguggga

SEQ ID NO: 260804 - RNA, 22 nt, Human
uucccagaaugaauggauggag

SEQ ID NO: 260805 - RNA, 20 nt, Human
uccaggccuuguucucagau

SEQ ID NO: 260806 - RNA, 22 nt, Human
ccacaguacaggaaaucuuguu

SEQ ID NO: 260807 - RNA, 22 nt, Human
agauguaccagguauuacagga

SEQ ID NO: 260808 - RNA, 19 nt, Human
ucucuggaugacagacacu

SEQ ID NO: 260809 - RNA, 22 nt, Human
ugaggugguuuguaucacuggg

SEQ ID NO: 260810 - RNA, 22 nt, Human
guuuacuguuuucugauaagug

SEQ ID NO: 260811 - RNA, 22 nt, Human
cugggccacaucagaugaagac

SEQ ID NO: 260812 - RNA, 22 nt, Human
gcccucagugaccacugauuca

SEQ ID NO: 260813 - RNA, 22 nt, Human
gcuucucggggagguuagccag

SEQ ID NO: 260814 - RNA, 22 nt, Human
aauaauuuuagcucagaguugu

SEQ ID NO: 260815 - RNA, 22 nt, Human
aagugcaugguauggucuccau

SEQ ID NO: 260816 - RNA, 22 nt, Human
ugcccugggaguuggagcugcu

SEQ ID NO: 260817 - RNA, 22 nt, Human
uuccaggcucccuuggaggugu

SEQ ID NO: 260818 - RNA, 22 nt, Human
gucagaggggacaagacacaga

SEQ ID NO: 260819 - RNA, 22 nt, Human
aagcagaguuagcuugucaccu

SEQ ID NO: 260820 - RNA, 22 nt, Human
ccacagagagugucagccuuug

SEQ ID NO: 260821 - RNA, 22 nt, Human
aaguuccucuucucugcaggga

SEQ ID NO: 260822 - RNA, 22 nt, Human
aggagccaguggaguuccugcc

SEQ ID NO: 260823 - RNA, 22 nt, Human
ccaagcaaauaaucacccacua

SEQ ID NO: 260824 - RNA, 22 nt, Human
uggaaaaaacccagacucuaga

SEQ ID NO: 260825 - RNA, 22 nt, Human
aaggcuccagugaaugcuggca

SEQ ID NO: 260826 - RNA, 22 nt, Human
auauuaaauggauuuugggagc

SEQ ID NO: 260827 - RNA, 20 nt, Human
cacaggccccaagaccugua

SEQ ID NO: 260828 - RNA, 22 nt, Human
auugcuuuuaagcaccaccuaa

SEQ ID NO: 260829 - RNA, 22 nt, Human
ugacaagagaccccuccgcagg

SEQ ID NO: 260830 - RNA, 22 nt, Human
gucucagagagcuacucucuua

SEQ ID NO: 260831 - RNA, 22 nt, Human
auuuauugaagcuuauuacguu

SEQ ID NO: 260832 - RNA, 22 nt, Human
augcuuuauguucuggcauuuu

SEQ ID NO: 260833 - RNA, 22 nt, Human
gaaaucuacgauuagugaaaau

SEQ ID NO: 260834 - RNA, 22 nt, Human
cagcuauuggcaagaaguggug

SEQ ID NO: 260835 - RNA, 22 nt, Human
agcuguggggcaggcagcgagg

SEQ ID NO: 260836 - RNA, 22 nt, Human
auuauucauugguaggcaagcu

SEQ ID NO: 260837 - RNA, 22 nt, Human
acagacuggagcccuuuugccc

SEQ ID NO: 260838 - RNA, 23 nt, Human
cccaggagccugaguccucucug

SEQ ID NO: 260839 - RNA, 22 nt, Human
ucaggaagugcugaggcugcuu

SEQ ID NO: 260840 - RNA, 22 nt, Human
ccagaggcuggcagccagcuga

SEQ ID NO: 260841 - RNA, 22 nt, Human
acaugauuuuaguaucauaaua

SEQ ID NO: 260842 - RNA, 22 nt, Human
cggcuucuucgaggugucugcg

SEQ ID NO: 260843 - RNA, 22 nt, Human
ucacagaaacagaauggcacag

SEQ ID NO: 260844 - RNA, 22 nt, Human
agggagaggcugaacuauccua

SEQ ID NO: 260845 - RNA, 22 nt, Human
acuguuaaaguaauuaauuguc

SEQ ID NO: 260846 - RNA, 19 nt, Human
agcaggcuaggcugccucu

SEQ ID NO: 260847 - RNA, 22 nt, Human
gaccuucuugcuguguccuaac

SEQ ID NO: 260848 - RNA, 22 nt, Human
gcagcccacaccacucugcuca

SEQ ID NO: 260849 - RNA, 22 nt, Human
ucagagaagguaagugaccugc

SEQ ID NO: 260850 - RNA, 22 nt, Human
ugggcugcugcggugcucuugg

SEQ ID NO: 260851 - RNA, 22 nt, Human
agacccucuccaugcccacugc

SEQ ID NO: 260852 - RNA, 22 nt, Human
ucuguucaucucaugggagaau

SEQ ID NO: 260853 - RNA, 22 nt, Human
aacagcgucuuuccagcuguuc

SEQ ID NO: 260854 - RNA, 22 nt, Human
aacauguugaguugaaaguagc

SEQ ID NO: 260855 - RNA, 23 nt, Human
uggccacaguccaugcaugccca

SEQ ID NO: 260856 - RNA, 23 nt, Human
ggagugcaauggcgccaucucgg

SEQ ID NO: 260857 - RNA, 22 nt, Human
uugaaacugcuuauugaauuug

SEQ ID NO: 260858 - RNA, 22 nt, Human
aaagcuuaagguagguacagag

SEQ ID NO: 260859 - RNA, 22 nt, Human
gcaaagcaaucaggaguagcau

SEQ ID NO: 260860 - RNA, 22 nt, Human
agcaggaacucagggaguucuc

SEQ ID NO: 260861 - RNA, 22 nt, Human
aaaguagaggcauugaucaggu

SEQ ID NO: 260862 - RNA, 22 nt, Human
aucauuuuuaagagacucuucu

SEQ ID NO: 260863 - RNA, 22 nt, Human
uucucuuagcuguaaagucaau

SEQ ID NO: 260864 - RNA, 22 nt, Human
cauuuauucucagauccuuguc

SEQ ID NO: 260865 - RNA, 22 nt, Human
uagaggcaaccaguguugagaa

SEQ ID NO: 260866 - RNA, 22 nt, Human
uccaggucuggccugcuaggca

SEQ ID NO: 260867 - RNA, 22 nt, Human
uuaaaugugauccugguaugca

SEQ ID NO: 260868 - RNA, 22 nt, Human
aaagacuuggcuuaugauuugc

SEQ ID NO: 260869 - RNA, 22 nt, Human
ucuguggcuuccuauuucuugg

SEQ ID NO: 260870 - RNA, 22 nt, Human
ucuccuggauggaccuucucuu

SEQ ID NO: 260871 - RNA, 22 nt, Human
ucuuuguggcgggcuuaaauac

SEQ ID NO: 260872 - RNA, 22 nt, Human
cccaggcaguagaaagaagagg

SEQ ID NO: 260873 - RNA, 22 nt, Human
agcaggguccugaggugaguca

SEQ ID NO: 260874 - RNA, 22 nt, Human
agugggcauaugaagucucaag

SEQ ID NO: 260875 - RNA, 22 nt, Human
cagcuugugucauucaucuugu

SEQ ID NO: 260876 - RNA, 22 nt, Human
aacagagaucuuaauuccugua

SEQ ID NO: 260877 - RNA, 22 nt, Human
cuuccaguggcaccaacaugca

SEQ ID NO: 260878 - RNA, 22 nt, Human
caggauggagagugagggguca

SEQ ID NO: 260879 - RNA, 22 nt, Human
cuguccuguggaccugaggacg

SEQ ID NO: 260880 - RNA, 22 nt, Human
accagccaagacugccuggaau

SEQ ID NO: 260881 - RNA, 22 nt, Human
auuuaugauuagccuauuguug

SEQ ID NO: 260882 - RNA, 22 nt, Human
uuguugcucuuguugccacaug

SEQ ID NO: 260883 - RNA, 22 nt, Human
uccuuggggacgcugacaucgu

SEQ ID NO: 260884 - RNA, 22 nt, Human
agcaucugugauauuuuguuau

SEQ ID NO: 260885 - RNA, 22 nt, Human
aaaauuuccaccaucuuugugu

SEQ ID NO: 260886 - RNA, 22 nt, Human
gaguuauaaccuaguuuaacug

SEQ ID NO: 260887 - RNA, 22 nt, Human
cagucccagcugcucagaaggc

SEQ ID NO: 260888 - RNA, 22 nt, Human
ugacauacuuuuagauagaugg

SEQ ID NO: 260889 - RNA, 22 nt, Human
agucagcugcagcagcuuuggu

SEQ ID NO: 260890 - RNA, 22 nt, Human
aggucuggugggcuuuagauug

SEQ ID NO: 260891 - RNA, 22 nt, Human
ccugguuuuucaaacauacaag

SEQ ID NO: 260892 - RNA, 22 nt, Human
aacaaagaugggugggaaagag

SEQ ID NO: 260893 - RNA, 22 nt, Human
ugugaaggagaugaagggagug

SEQ ID NO: 260894 - RNA, 22 nt, Human
uuuccaaagguggcaggaacaa

SEQ ID NO: 260895 - RNA, 22 nt, Human
gcuaguccacagccauccaggc

SEQ ID NO: 260896 - RNA, 23 nt, Human
uugcauguagcccaugaguaacu

SEQ ID NO: 260897 - RNA, 22 nt, Human
cccagccuggugcacugugggg

SEQ ID NO: 260898 - RNA, 23 nt, Human
cuguccugccauccacagcggcc

SEQ ID NO: 260899 - RNA, 22 nt, Human
uggaggagaccauuccacucag

SEQ ID NO: 260900 - RNA, 23 nt, Human
uuucaguuccagaaaaggggagc

SEQ ID NO: 260901 - RNA, 22 nt, Human
ccaggagaugggagcaucuaaa

SEQ ID NO: 260902 - RNA, 22 nt, Human
aagagcccugguugaaaauaac

SEQ ID NO: 260903 - RNA, 22 nt, Human
cagagcugcuucccaguuugug

SEQ ID NO: 260904 - RNA, 19 nt, Human
ucaaagcaagcauguucug

SEQ ID NO: 260905 - RNA, 22 nt, Human
accugcaagcauuacacuucua

SEQ ID NO: 260906 - RNA, 22 nt, Human
aagccagguguugugguaagag

SEQ ID NO: 260907 - RNA, 20 nt, Human
uucaugggagcaaagaggcc

SEQ ID NO: 260908 - RNA, 23 nt, Human
ugcacuucuccauagaugcaucu

SEQ ID NO: 260909 - RNA, 22 nt, Human
gcuccuccaauauggacuccuc

SEQ ID NO: 260910 - RNA, 22 nt, Human
cagcaggaggcauggcuucccu

SEQ ID NO: 260911 - RNA, 22 nt, Human
ugcaggugagugcaggggcuca

SEQ ID NO: 260912 - RNA, 22 nt, Human
cccagagagcauuuggacaaag

SEQ ID NO: 260913 - RNA, 22 nt, Human
cuggccugggagcugcuagcgu

SEQ ID NO: 260914 - RNA, 22 nt, Human
augauucuaggcauugaagaua

SEQ ID NO: 260915 - RNA, 22 nt, Human
gacagguggggaaacuaaggua

SEQ ID NO: 260916 - RNA, 22 nt, Human
uuggaaaacuuacacagagcug

SEQ ID NO: 260917 - RNA, 22 nt, Human
cugcuguccaggagugcccugu

SEQ ID NO: 260918 - RNA, 22 nt, Human
ucuggcagaaggcagaaauuca

SEQ ID NO: 260919 - RNA, 20 nt, Human
ugacuucuucaugcuguacu

SEQ ID NO: 260920 - RNA, 22 nt, Human
agaaugcuuccuuugaaacuga

SEQ ID NO: 260921 - RNA, 22 nt, Human
cugccaggcagggagauggcug

SEQ ID NO: 260922 - RNA, 20 nt, Human
gucagaggacccuagagcga

SEQ ID NO: 260923 - RNA, 22 nt, Human
gcauguguuagagugugcaugc

SEQ ID NO: 260924 - RNA, 22 nt, Human
uguuacuccuucccuacucaug

SEQ ID NO: 260925 - RNA, 22 nt, Human
ucugccuggguguggagcagag

SEQ ID NO: 260926 - RNA, 22 nt, Human
uuuccuucaucaucugagagcu

SEQ ID NO: 260927 - RNA, 20 nt, Human
uccagaggccacauccagug

SEQ ID NO: 260928 - RNA, 22 nt, Human
cagcagaagcaacauucaggcu

SEQ ID NO: 260929 - RNA, 22 nt, Human
ugccagggugucaggagagcua

SEQ ID NO: 260930 - RNA, 22 nt, Human
ugcuggcuguucuagggaggcc

SEQ ID NO: 260931 - RNA, 22 nt, Human
gaggcuucuggaaagccuggca

SEQ ID NO: 260932 - RNA, 22 nt, Human
caagauaucaaugacauaguau

SEQ ID NO: 260933 - RNA, 22 nt, Human
ucagucuuucccucccucaguu

SEQ ID NO: 260934 - RNA, 22 nt, Human
caggagcuggauaggaccacaa

SEQ ID NO: 260935 - RNA, 22 nt, Human
aauaccuuccaacaucaagaca

SEQ ID NO: 260936 - RNA, 22 nt, Human
aagcugcagacccccugucuca

SEQ ID NO: 260937 - RNA, 22 nt, Human
ucucugggccucccuuuccaag

SEQ ID NO: 260938 - RNA, 23 nt, Human
agcaaucuguguuucagcaagcc

SEQ ID NO: 260939 - RNA, 22 nt, Human
ccuggagccccucuggccagcc

SEQ ID NO: 260940 - RNA, 22 nt, Human
ucccuaggaccccaccuuccgc

SEQ ID NO: 260941 - RNA, 22 nt, Human
uacaugcaauuaagagggugaa

SEQ ID NO: 260942 - RNA, 22 nt, Human
gauguagacacuuggaggcuua

SEQ ID NO: 260943 - RNA, 22 nt, Human
aguuuggaaaaugagacaagga

SEQ ID NO: 260944 - RNA, 22 nt, Human
ugcaggagauaauggugcuuag

SEQ ID NO: 260945 - RNA, 22 nt, Human
uagcaaaggccuuggacacgcu

SEQ ID NO: 260946 - RNA, 22 nt, Human
gcuugggacuggagaauagggu

SEQ ID NO: 260947 - RNA, 23 nt, Human
gacaccaggcguggcccucgaca

SEQ ID NO: 260948 - RNA, 22 nt, Human
gccaaagugcugcucuuuacca

SEQ ID NO: 260949 - RNA, 22 nt, Human
cagccaagaaagcagugcucca

SEQ ID NO: 260950 - RNA, 22 nt, Human
auguuuauggagcagguauuag

SEQ ID NO: 260951 - RNA, 22 nt, Human
caggcuugcugcuagagcacuu

SEQ ID NO: 260952 - RNA, 22 nt, Human
cggggcaggagucccuguagag

SEQ ID NO: 260953 - RNA, 23 nt, Human
agcugcaagacucccugucugag

SEQ ID NO: 260954 - RNA, 22 nt, Human
uuuagggaugucagaacaggga

SEQ ID NO: 260955 - RNA, 22 nt, Human
acucuguaucccucucaaauug

SEQ ID NO: 260956 - RNA, 17 nt, Human
uguuuucauucauugcu

SEQ ID NO: 260957 - RNA, 18 nt, Human
uggguggcuagggaguuu

SEQ ID NO: 260958 - RNA, 22 nt, Human
acauuucucuuagaguuggacu

SEQ ID NO: 260959 - RNA, 22 nt, Human
uucaacaaggcugucaaaaguu

SEQ ID NO: 260960 - RNA, 23 nt, Human
cauguuuuucuaucucagcgugu

SEQ ID NO: 260961 - RNA, 22 nt, Human
cugcccuguggcucugagucau

SEQ ID NO: 260962 - RNA, 22 nt, Human
ccccagggacugguuucaugga

SEQ ID NO: 260963 - RNA, 22 nt, Human
gcugucugcugugcacugagca

SEQ ID NO: 260964 - RNA, 22 nt, Human
agacaagaaacugggagucucu

SEQ ID NO: 260965 - RNA, 23 nt, Human
uggaaacauucugaauguccauc

SEQ ID NO: 260966 - RNA, 22 nt, Human
ugauauuugcugacugcauugu

SEQ ID NO: 260967 - RNA, 22 nt, Human
agccuggguuuuuauuaaggag

SEQ ID NO: 260968 - RNA, 20 nt, Human
agguccugggacuggcagag

SEQ ID NO: 260969 - RNA, 22 nt, Human
caaaugcauagaaagaugaaac

SEQ ID NO: 260970 - RNA, 22 nt, Human
gaggaugcugcagugcaggaca

SEQ ID NO: 260971 - RNA, 21 nt, Human
ucaggcugaugucgauguuag

SEQ ID NO: 260972 - RNA, 22 nt, Human
gcuggucuccgccgcucccuga

SEQ ID NO: 260973 - RNA, 22 nt, Human
ucaagaaagggcuucaccagga

SEQ ID NO: 260974 - RNA, 22 nt, Human
ugccaggcccagcuccagagcu

SEQ ID NO: 260975 - RNA, 22 nt, Human
cugaagccacgauagcuuccua

SEQ ID NO: 260976 - RNA, 22 nt, Human
ucauuucccuccuacaaagagg

SEQ ID NO: 260977 - RNA, 22 nt, Human
ggcuacuagguaccauuuagaa

SEQ ID NO: 260978 - RNA, 22 nt, Human
agcagcaggagccgugggguga

SEQ ID NO: 260979 - RNA, 22 nt, Human
agccuugcuuuuucaguagcac

SEQ ID NO: 260980 - RNA, 22 nt, Human
cagagcuuugugucagggcugu

SEQ ID NO: 260981 - RNA, 22 nt, Human
ugaguagagaauucagcuaagg

SEQ ID NO: 260982 - RNA, 22 nt, Human
agaaauaugcugauuagaugaa

SEQ ID NO: 260983 - RNA, 22 nt, Human
ugccaggaggaggugggacaga

SEQ ID NO: 260984 - RNA, 22 nt, Human
cccauuuaucccaagguuacuc

SEQ ID NO: 260985 - RNA, 19 nt, Human
ugguggaggccccauguuc

SEQ ID NO: 260986 - RNA, 22 nt, Human
gggcuuggccccagaagagcua

SEQ ID NO: 260987 - RNA, 22 nt, Human
ucucuucuaacacuagaaauuc

SEQ ID NO: 260988 - RNA, 22 nt, Human
uucucuagcaaaaccagcuagu

SEQ ID NO: 260989 - RNA, 22 nt, Human
uucuaagaggcuaaugaagaau

SEQ ID NO: 260990 - RNA, 22 nt, Human
uuaauagauaugccucuagagu

SEQ ID NO: 260991 - RNA, 22 nt, Human
aaauucauauguugaaaugcua

SEQ ID NO: 260992 - RNA, 22 nt, Human
uaacauaacuuuuccuugaccc

SEQ ID NO: 260993 - RNA, 22 nt, Human
aauguguuacuguguaagagca

SEQ ID NO: 260994 - RNA, 22 nt, Human
ucagcugccccaguggccccag

SEQ ID NO: 260995 - RNA, 18 nt, Human
uagggcucuagggaguga

SEQ ID NO: 260996 - RNA, 19 nt, Human
ucuccaggcaggugagcga

SEQ ID NO: 260997 - RNA, 22 nt, Human
ugcauugaggggcucucuuccu

SEQ ID NO: 260998 - RNA, 22 nt, Human
aagaaucuguugauuccccacu

SEQ ID NO: 260999 - RNA, 22 nt, Human
aaguguggggucucagagcuga

SEQ ID NO: 261000 - RNA, 22 nt, Human
cuggcauuuagacccacagcaa

SEQ ID NO: 261001 - RNA, 22 nt, Human
uggaugagaaacucuggugacu

SEQ ID NO: 261002 - RNA, 23 nt, Human
uggccaggguacuacacccaccc

SEQ ID NO: 261003 - RNA, 22 nt, Human
auggaguaauauuaacauguua

SEQ ID NO: 261004 - RNA, 22 nt, Human
gcccucagcuugauguuguucu

SEQ ID NO: 261005 - RNA, 22 nt, Human
ccagcuguuucugaugcuaggc

SEQ ID NO: 261006 - RNA, 23 nt, Human
ugaguucuaggcuuaaaacuagc

SEQ ID NO: 261007 - RNA, 22 nt, Human
acagcugggugucccacuucug

SEQ ID NO: 261008 - RNA, 22 nt, Human
gacccauaggaaucuguugucc

SEQ ID NO: 261009 - RNA, 22 nt, Human
gccuggcuccuaagagcacaac

SEQ ID NO: 261010 - RNA, 23 nt, Human
cucagugugugacccauggccuc

SEQ ID NO: 261011 - RNA, 22 nt, Human
gccuuacugagggcaauuuuga

SEQ ID NO: 261012 - RNA, 22 nt, Human
cuucuagauuuuuguaauuguu

SEQ ID NO: 261013 - RNA, 22 nt, Human
ucagcacuuuuacucucuuugc

SEQ ID NO: 261014 - RNA, 22 nt, Human
caaauagauuguucaauccuga

SEQ ID NO: 261015 - RNA, 19 nt, Human
gcuguauuaaagauacaug

SEQ ID NO: 261016 - RNA, 22 nt, Human
ucccuccuggccgucaccgcug

SEQ ID NO: 261017 - RNA, 22 nt, Human
caaggcuuaucagccaggagcc

SEQ ID NO: 261018 - RNA, 22 nt, Human
uauuucagcccuacuacuuggc

SEQ ID NO: 261019 - RNA, 22 nt, Human
ucauucuugcguaugccauggu

SEQ ID NO: 261020 - RNA, 20 nt, Human
uccugagccuccaccauguc

SEQ ID NO: 261021 - RNA, 22 nt, Human
aaguuuuccuguguccaagaug

SEQ ID NO: 261022 - RNA, 21 nt, Human
agacaaugcuguaaaauucag

SEQ ID NO: 261023 - RNA, 22 nt, Human
aagggauguaaacaugaauaag

SEQ ID NO: 261024 - RNA, 22 nt, Human
cuucagaggggacucaaaguca

SEQ ID NO: 261025 - RNA, 22 nt, Human
gacaagacagcuugcagacaac

SEQ ID NO: 261026 - RNA, 17 nt, Human
ccucuuccucucagcug

SEQ ID NO: 261027 - RNA, 22 nt, Human
cuggcacugaguggcuuaugac

SEQ ID NO: 261028 - RNA, 22 nt, Human
uguccaugggcgucaggcagga

SEQ ID NO: 261029 - RNA, 22 nt, Human
ugcucuggguucuugcuguuac

SEQ ID NO: 261030 - RNA, 22 nt, Human
ucagugucucauaugagguuuc

SEQ ID NO: 261031 - RNA, 22 nt, Human
uucauucuuugaaucugaggua

SEQ ID NO: 261032 - RNA, 22 nt, Human
auagcugacuccagacauagcu

SEQ ID NO: 261033 - RNA, 22 nt, Human
cccucccuauguagaugauguu

SEQ ID NO: 261034 - RNA, 22 nt, Human
ugacaagaggcagaaucagcug

SEQ ID NO: 261035 - RNA, 22 nt, Human
agccacccauucccgagcccua

SEQ ID NO: 261036 - RNA, 22 nt, Human
gguuccuucugaggucccugua

SEQ ID NO: 261037 - RNA, 22 nt, Human
aucuuugugcuaauguaguucu

SEQ ID NO: 261038 - RNA, 22 nt, Human
agcugggguugcacacauuuug

SEQ ID NO: 261039 - RNA, 22 nt, Human
ugccugugaucagcugaguuca

SEQ ID NO: 261040 - RNA, 22 nt, Human
ggagccugcgggagcucccauu

SEQ ID NO: 261041 - RNA, 22 nt, Human
auaaaugauucagcaggaaaua

SEQ ID NO: 261042 - RNA, 23 nt, Human
augaaugaauaaggcaggaaagc

SEQ ID NO: 261043 - RNA, 22 nt, Human
gccaggcagcugggagggugcc

SEQ ID NO: 261044 - RNA, 22 nt, Human
cagggcugagaauuuagagaca

SEQ ID NO: 261045 - RNA, 22 nt, Human
ucagagaauuguuuaauggaau

SEQ ID NO: 261046 - RNA, 22 nt, Human
uguccugucucuuuccuaauug

SEQ ID NO: 261047 - RNA, 22 nt, Human
aagauguuauugucuuccuugc

SEQ ID NO: 261048 - RNA, 22 nt, Human
ccuggcaugaggagcaugaggu

SEQ ID NO: 261049 - RNA, 22 nt, Human
gccccagguugccugucccagg

SEQ ID NO: 261050 - RNA, 22 nt, Human
acuucugagaaauuuaaggaca

SEQ ID NO: 261051 - RNA, 22 nt, Human
cuuacagugaucaacacaaaga

SEQ ID NO: 261052 - RNA, 22 nt, Human
uaguuuuuacugcgaguuauaa

SEQ ID NO: 261053 - RNA, 22 nt, Human
uaucuagauaguuuagccaucu

SEQ ID NO: 261054 - RNA, 22 nt, Human
ugcuuuaagagauuguuaguac

SEQ ID NO: 261055 - RNA, 22 nt, Human
ccucaagucaauucugucucgc

SEQ ID NO: 261056 - RNA, 22 nt, Human
caguccagcucaucaguggcac

SEQ ID NO: 261057 - RNA, 22 nt, Human
uuucuuuaauucucacagcaau

SEQ ID NO: 261058 - RNA, 22 nt, Human
ugacagggcuagaggcaaugca

SEQ ID NO: 261059 - RNA, 22 nt, Human
aauaagauugacacaaguaccu

SEQ ID NO: 261060 - RNA, 22 nt, Human
ggcuugggagcaggcaugugac

SEQ ID NO: 261061 - RNA, 22 nt, Human
guguguccaaggcacggaugac

SEQ ID NO: 261062 - RNA, 22 nt, Human
ugauucaacuuucauaacaaaa

SEQ ID NO: 261063 - RNA, 22 nt, Human
ucaggcuuugaagucuagcugg

SEQ ID NO: 261064 - RNA, 22 nt, Human
ugggcucagggaagcuuggccu

SEQ ID NO: 261065 - RNA, 22 nt, Human
acugucacuugcaacugugagg

SEQ ID NO: 261066 - RNA, 21 nt, Human
aaaugaaugugguagugcaag

SEQ ID NO: 261067 - RNA, 22 nt, Human
agcaucuuuaggaagagaaaga

SEQ ID NO: 261068 - RNA, 22 nt, Human
agugugaguaauugagucuguc

SEQ ID NO: 261069 - RNA, 22 nt, Human
ugaaacauuaggaaaucauuau

SEQ ID NO: 261070 - RNA, 22 nt, Human
uaagucguggaugauucuucgg

SEQ ID NO: 261071 - RNA, 22 nt, Human
ugggagcagccaacauggccuu

SEQ ID NO: 261072 - RNA, 22 nt, Human
ucagaggaaagggaacauaguc

SEQ ID NO: 261073 - RNA, 22 nt, Human
acugggccugauugggucggag

SEQ ID NO: 261074 - RNA, 22 nt, Human
agugcagagaccuggucaggca

SEQ ID NO: 261075 - RNA, 22 nt, Human
auuccugguggcagaaacauga

SEQ ID NO: 261076 - RNA, 22 nt, Human
uugagggagccugggagccaug

SEQ ID NO: 261077 - RNA, 22 nt, Human
uuccaugagcucugaguucaca

SEQ ID NO: 261078 - RNA, 22 nt, Human
guguucugggaugauuguagug

SEQ ID NO: 261079 - RNA, 22 nt, Human
cuugaaaugacaggagcacauc

SEQ ID NO: 261080 - RNA, 22 nt, Human
agccauccucccaccucagccu

SEQ ID NO: 261081 - RNA, 22 nt, Human
auguuacagagaaaguggaagc

SEQ ID NO: 261082 - RNA, 22 nt, Human
cagcagcuacuuggagcagcag

SEQ ID NO: 261083 - RNA, 19 nt, Human
augaaugagcugugagguu

SEQ ID NO: 261084 - RNA, 16 nt, Human
ggcuccagaauagcga

SEQ ID NO: 261085 - RNA, 22 nt, Human
ggguuucaugguucucacaaug

SEQ ID NO: 261086 - RNA, 22 nt, Human
cuuugcaaacugucacacuuuc

SEQ ID NO: 261087 - RNA, 22 nt, Human
gugcugggcccugagaccaggg

SEQ ID NO: 261088 - RNA, 22 nt, Human
cauuuguuuauaaguuccccag

SEQ ID NO: 261089 - RNA, 22 nt, Human
gagcccuggcagucugggaugg

SEQ ID NO: 261090 - RNA, 22 nt, Human
auuucuuacauaacaaauuguu

SEQ ID NO: 261091 - RNA, 22 nt, Human
cuggggcuggugaggcaggcuc

SEQ ID NO: 261092 - RNA, 22 nt, Human
uccugggaagacugugaggaca

SEQ ID NO: 261093 - RNA, 22 nt, Human
ccucaaauugucaaauaagaau

SEQ ID NO: 261094 - RNA, 22 nt, Human
agggacaguuacaucaucagac

SEQ ID NO: 261095 - RNA, 22 nt, Human
ucugcugucacucauuugcuuc

SEQ ID NO: 261096 - RNA, 22 nt, Human
uugugagcaggcugcacaaacc

SEQ ID NO: 261097 - RNA, 22 nt, Human
agaccuguuggguucauuggcu

SEQ ID NO: 261098 - RNA, 22 nt, Human
ucccaggcaaaggcagcucauu

SEQ ID NO: 261099 - RNA, 22 nt, Human
cuuucucugugugguaaagggc

SEQ ID NO: 261100 - RNA, 22 nt, Human
cacagcuucccaaaguggaccu

SEQ ID NO: 261101 - RNA, 22 nt, Human
gaggcuggaauauuagaaaugu

SEQ ID NO: 261102 - RNA, 22 nt, Human
ggcuucagaggggagguagugc

SEQ ID NO: 261103 - RNA, 20 nt, Human
agcugaggcaccugagguua

SEQ ID NO: 261104 - RNA, 22 nt, Human
acagauuuauugaagcugcugc

SEQ ID NO: 261105 - RNA, 22 nt, Human
aggccuggccuuuauguucaag

SEQ ID NO: 261106 - RNA, 22 nt, Human
gagccuuugaagcccucagaga

SEQ ID NO: 261107 - RNA, 22 nt, Human
aguuugaaagcuuaacaguaca

SEQ ID NO: 261108 - RNA, 21 nt, Human
agauuacaggugugauccacc

SEQ ID NO: 261109 - RNA, 22 nt, Human
ggagagaauuccauggacaugu

SEQ ID NO: 261110 - RNA, 22 nt, Human
caagucugucugcuccugugug

SEQ ID NO: 261111 - RNA, 22 nt, Human
auacagagacacuugagacugg

SEQ ID NO: 261112 - RNA, 19 nt, Human
caugugucaauacuguacc

SEQ ID NO: 261113 - RNA, 20 nt, Human
uuccuggggaaugauagaag

SEQ ID NO: 261114 - RNA, 22 nt, Human
ucaggcucagguuaggggccaa

SEQ ID NO: 261115 - RNA, 22 nt, Human
cuggcccauggugagcucuggg

SEQ ID NO: 261116 - RNA, 22 nt, Human
acagugucucacugcugaaauc

SEQ ID NO: 261117 - RNA, 22 nt, Human
uuuuagcacuaagugauaugcu

SEQ ID NO: 261118 - RNA, 22 nt, Human
ucugggugacccugggcaaggc

SEQ ID NO: 261119 - RNA, 22 nt, Human
ugacuuccagcaacuuccucca

SEQ ID NO: 261120 - RNA, 22 nt, Human
auugugcaauguuuuacaauuu

SEQ ID NO: 261121 - RNA, 20 nt, Human
uuuauucacagagaagaguu

SEQ ID NO: 261122 - RNA, 22 nt, Human
caaacauucaaguacaagucuu

SEQ ID NO: 261123 - RNA, 22 nt, Human
gcuauucaucaauuguucuagc

SEQ ID NO: 261124 - RNA, 22 nt, Human
caucucuccacggcagcucucg

SEQ ID NO: 261125 - RNA, 22 nt, Human
aguggagaagaggauggucucc

SEQ ID NO: 261126 - RNA, 22 nt, Human
cuuugaaagcucccaggacuua

SEQ ID NO: 261127 - RNA, 22 nt, Human
ugcugaggagggcacccggggg

SEQ ID NO: 261128 - RNA, 22 nt, Human
gaugcaaagauaaaacagacgc

SEQ ID NO: 261129 - RNA, 22 nt, Human
cugcaccacagccugaggcagc

SEQ ID NO: 261130 - RNA, 18 nt, Human
cucucugggugaggacaa

SEQ ID NO: 261131 - RNA, 22 nt, Human
cuauuaaacacuacugugcacu

SEQ ID NO: 261132 - RNA, 22 nt, Human
ccugugucaucagcuguggcua

SEQ ID NO: 261133 - RNA, 22 nt, Human
uagcccaggagaauugucuuuc

SEQ ID NO: 261134 - RNA, 22 nt, Human
ucuucaaauacagucauauuga

SEQ ID NO: 261135 - RNA, 22 nt, Human
cugggcucagcccaugcugucc

SEQ ID NO: 261136 - RNA, 18 nt, Human
auauccaauaaugaacac

SEQ ID NO: 261137 - RNA, 22 nt, Human
aggcugccuguuccaaucuccu

SEQ ID NO: 261138 - RNA, 22 nt, Human
uuagaaaugcacccaagaccua

SEQ ID NO: 261139 - RNA, 19 nt, Human
ccucacccugcagaggagg

SEQ ID NO: 261140 - RNA, 22 nt, Human
uaugaaaauuuagcugaagcau

SEQ ID NO: 261141 - RNA, 22 nt, Human
gacacagagcucacagucuccu

SEQ ID NO: 261142 - RNA, 22 nt, Human
caggaagcucuuagcagucacc

SEQ ID NO: 261143 - RNA, 23 nt, Human
aaagauguucccaaaguucacgu

SEQ ID NO: 261144 - RNA, 22 nt, Human
acuuagcacgaacauuuacuuu

SEQ ID NO: 261145 - RNA, 22 nt, Human
cagcuuguuuuauuuggggacc

SEQ ID NO: 261146 - RNA, 22 nt, Human
ccaggcugugcuuuucauaaau

SEQ ID NO: 261147 - RNA, 21 nt, Human
uuucacaaaaguaugugacaa

SEQ ID NO: 261148 - RNA, 21 nt, Human
uggacauuauggagagaguag

SEQ ID NO: 261149 - RNA, 22 nt, Human
uagauaaauuagaaaguuuacu

SEQ ID NO: 261150 - RNA, 22 nt, Human
aggagaccuuuugagugugaga

SEQ ID NO: 261151 - RNA, 22 nt, Human
gcucaggcauguaugugguugc

SEQ ID NO: 261152 - RNA, 22 nt, Human
ugccuggguccaggccaagccu

SEQ ID NO: 261153 - RNA, 22 nt, Human
ucagggcacaggccuguggguu

SEQ ID NO: 261154 - RNA, 22 nt, Human
agugaggggauucaggcaaggu

SEQ ID NO: 261155 - RNA, 22 nt, Human
cuucccuuucuggugacuucuc

SEQ ID NO: 261156 - RNA, 20 nt, Human
uuucaagucagcaauucuca

SEQ ID NO: 261157 - RNA, 22 nt, Human
uuucucuguucucuaacuguaa

SEQ ID NO: 261158 - RNA, 22 nt, Human
acaggcuguacuucuaaucauc

SEQ ID NO: 261159 - RNA, 22 nt, Human
agcaauuaugauaaggccgcug

SEQ ID NO: 261160 - RNA, 22 nt, Human
cugaggcagagaaugaguuugu

SEQ ID NO: 261161 - RNA, 19 nt, Human
gaaggcugaaaugaagcac

SEQ ID NO: 261162 - RNA, 22 nt, Human
ccaagcuacuuaggagucugag

SEQ ID NO: 261163 - RNA, 22 nt, Human
gccggggcuggggagagacaug

SEQ ID NO: 261164 - RNA, 22 nt, Human
ucuuggcuuucuccuagggaug

SEQ ID NO: 261165 - RNA, 22 nt, Human
ucacaaugcaaguguucagugg

SEQ ID NO: 261166 - RNA, 22 nt, Human
uugcccagagucacccagcuca

SEQ ID NO: 261167 - RNA, 22 nt, Human
uccugagugagagcugggaggu

SEQ ID NO: 261168 - RNA, 18 nt, Human
aggcagcagcaucuucuc

SEQ ID NO: 261169 - RNA, 20 nt, Human
acaaaguauugaggacaagu

SEQ ID NO: 261170 - RNA, 22 nt, Human
uuucuguuguacuuaaacuagg

SEQ ID NO: 261171 - RNA, 22 nt, Human
agggccagggaagcuguauuuu

SEQ ID NO: 261172 - RNA, 22 nt, Human
uuuccagguaucaagcuucagg

SEQ ID NO: 261173 - RNA, 22 nt, Human
gcuggcuugacagaggccuggg

SEQ ID NO: 261174 - RNA, 22 nt, Human
auuuucugaguccagaauuuac

SEQ ID NO: 261175 - RNA, 19 nt, Human
uccaggcuccauuggcaga

SEQ ID NO: 261176 - RNA, 22 nt, Human
cugcagagagugccgggcagcc

SEQ ID NO: 261177 - RNA, 23 nt, Human
aucuagaaaccugaugacucugu

SEQ ID NO: 261178 - RNA, 19 nt, Human
gucaggcacgugagagcau

SEQ ID NO: 261179 - RNA, 22 nt, Human
ggaucugggguagagcaguggg

SEQ ID NO: 261180 - RNA, 21 nt, Human
acaguuuauuagaguaagugc

SEQ ID NO: 261181 - RNA, 22 nt, Human
uuauagcagcaugauuuacaau

SEQ ID NO: 261182 - RNA, 20 nt, Human
auguuuuauaaaagaacggg

SEQ ID NO: 261183 - RNA, 22 nt, Human
ggcagcaugggugccuuuguga

SEQ ID NO: 261184 - RNA, 22 nt, Human
ugauuuaccaguuacuaucuug

SEQ ID NO: 261185 - RNA, 21 nt, Human
ucugggugcuaguguuugcuu

SEQ ID NO: 261186 - RNA, 20 nt, Human
aucuuugucucuguaguugu

SEQ ID NO: 261187 - RNA, 22 nt, Human
uucuacauauauuuuucucacu

SEQ ID NO: 261188 - RNA, 22 nt, Human
gaauauuuucaguacagauggu

SEQ ID NO: 261189 - RNA, 23 nt, Human
ccucagcauggcaggagcccagc

SEQ ID NO: 261190 - RNA, 22 nt, Human
ccagcuggcccagcugugcucc

SEQ ID NO: 261191 - RNA, 22 nt, Human
ucuuuaagccaagauauauuua

SEQ ID NO: 261192 - RNA, 17 nt, Human
uucugggucccagggcc

SEQ ID NO: 261193 - RNA, 22 nt, Human
cucagcagcugcugcugguggg

SEQ ID NO: 261194 - RNA, 22 nt, Human
aaugcacaaaggugucuauugc

SEQ ID NO: 261195 - RNA, 22 nt, Human
aagauacauauuuguucuagug

SEQ ID NO: 261196 - RNA, 21 nt, Human
ugggggagaauugguugcuuu

SEQ ID NO: 261197 - RNA, 22 nt, Human
augccaggcuguuuggccucag

SEQ ID NO: 261198 - RNA, 22 nt, Human
uccugugccaucucuagagacu

SEQ ID NO: 261199 - RNA, 22 nt, Human
ugucacauguguggcauuuuuc

SEQ ID NO: 261200 - RNA, 22 nt, Human
cagagguuugaucgaguagguc

SEQ ID NO: 261201 - RNA, 22 nt, Human
uuccuucuccagaacuucuagg

SEQ ID NO: 261202 - RNA, 22 nt, Human
ugagacaguucugcagcugggu

SEQ ID NO: 261203 - RNA, 22 nt, Human
agcucuuacauuuaggucuaug

SEQ ID NO: 261204 - RNA, 23 nt, Human
gccagcuuuggucugucuccuag

SEQ ID NO: 261205 - RNA, 22 nt, Human
cagagaugggucgcagagaugg

SEQ ID NO: 261206 - RNA, 22 nt, Human
uuucuugagcccaggaggugga

SEQ ID NO: 261207 - RNA, 23 nt, Human
aggcauggcauggaugguggcuc

SEQ ID NO: 261208 - RNA, 22 nt, Human
ccagccuucugagcugccugga

SEQ ID NO: 261209 - RNA, 22 nt, Human
ucagcucugcaaggucaccucc

SEQ ID NO: 261210 - RNA, 22 nt, Human
aagccacagaucguucugucac

SEQ ID NO: 261211 - RNA, 22 nt, Human
agacagagauacuauguuguca

SEQ ID NO: 261212 - RNA, 22 nt, Human
uuauaggaaaaguucuagaaaa

SEQ ID NO: 261213 - RNA, 22 nt, Human
cauaaauucaguucugccucuu

SEQ ID NO: 261214 - RNA, 23 nt, Human
uaaagacagccuucaggauucug

SEQ ID NO: 261215 - RNA, 22 nt, Human
uccuuccugcaggccaaguccu

SEQ ID NO: 261216 - RNA, 22 nt, Human
aaguuucuuuauuagcuugucc

SEQ ID NO: 261217 - RNA, 22 nt, Human
uccaguuuauuuuuggcagggu

SEQ ID NO: 261218 - RNA, 22 nt, Human
cauucaaaaugggcugaccugu

SEQ ID NO: 261219 - RNA, 22 nt, Human
ccaggaagccucagaugcugag

SEQ ID NO: 261220 - RNA, 22 nt, Human
uucaggugucaaggauaggcug

SEQ ID NO: 261221 - RNA, 22 nt, Human
agugauuugcaguauuuacuaa

SEQ ID NO: 261222 - RNA, 21 nt, Human
gauccacugaccuggggaucc

SEQ ID NO: 261223 - RNA, 22 nt, Human
ucuguucauguugggcuuuucc

SEQ ID NO: 261224 - RNA, 22 nt, Human
cuuagcuucucugcaucugugu

SEQ ID NO: 261225 - RNA, 22 nt, Human
guggauggauuuugaggaaugg

SEQ ID NO: 261226 - RNA, 22 nt, Human
cugggucuggccacaggaagua

SEQ ID NO: 261227 - RNA, 22 nt, Human
auaguggugagcugcauuuaug

SEQ ID NO: 261228 - RNA, 22 nt, Human
cucuagaagcugaggggcccaa

SEQ ID NO: 261229 - RNA, 22 nt, Human
cagacauaucccugcucccuua

SEQ ID NO: 261230 - RNA, 22 nt, Human
ugaaggcagugaguuuguguuu

SEQ ID NO: 261231 - RNA, 22 nt, Human
ugcagggcccuugggguugaac

SEQ ID NO: 261232 - RNA, 22 nt, Human
gagacacaguuaucaggcauac

SEQ ID NO: 261233 - RNA, 22 nt, Human
caagagcuggguggcaagcuag

SEQ ID NO: 261234 - RNA, 22 nt, Human
cagcagcuucuguugaucagaa

SEQ ID NO: 261235 - RNA, 20 nt, Human
cagauggcacgucagggcau

SEQ ID NO: 261236 - RNA, 19 nt, Human
uuuggacagaguguccagg

SEQ ID NO: 261237 - RNA, 19 nt, Human
ugugugguuggugaaacuc

SEQ ID NO: 261238 - RNA, 22 nt, Human
uagaaaccaucucacugcucag

SEQ ID NO: 261239 - RNA, 22 nt, Human
uucaaaucccugcuccacuauu

SEQ ID NO: 261240 - RNA, 22 nt, Human
cccucaugccagacagcaugca

SEQ ID NO: 261241 - RNA, 22 nt, Human
uccagcaugaaggggcuuuuau

SEQ ID NO: 261242 - RNA, 22 nt, Human
caaucacaaagagacaaguguc

SEQ ID NO: 261243 - RNA, 21 nt, Human
ugacagguuuaggauuaaaau

SEQ ID NO: 261244 - RNA, 19 nt, Human
ugccuguggcgagcaucuu

SEQ ID NO: 261245 - RNA, 22 nt, Human
agggacacacuccaguguuauu

SEQ ID NO: 261246 - RNA, 22 nt, Human
auucugagaaaugcauugucag

SEQ ID NO: 261247 - RNA, 22 nt, Human
caggaauaguggagcaacaaga

SEQ ID NO: 261248 - RNA, 22 nt, Human
cagggcucugccuugagggaug

SEQ ID NO: 261249 - RNA, 22 nt, Human
agcccugggcuguagauaagca

SEQ ID NO: 261250 - RNA, 22 nt, Human
gcucugaguaaaugaaagcauu

SEQ ID NO: 261251 - RNA, 22 nt, Human
auggcagcccacgauggcaaug

SEQ ID NO: 261252 - RNA, 22 nt, Human
gagagcuguuuaucuucuucaa

SEQ ID NO: 261253 - RNA, 22 nt, Human
uccaggcccauagacacuucuc

SEQ ID NO: 261254 - RNA, 22 nt, Human
uaaggcuucagcauucaaaaca

SEQ ID NO: 261255 - RNA, 22 nt, Human
uagaaauccccagucucauagu

SEQ ID NO: 261256 - RNA, 22 nt, Human
ggacacagauaaucacacagau

SEQ ID NO: 261257 - RNA, 22 nt, Human
aggaccaguaugagagcaucug

SEQ ID NO: 261258 - RNA, 22 nt, Human
uuguaacaggcacucugugcca

SEQ ID NO: 261259 - RNA, 19 nt, Human
ucuugaggaaaguaaggca

SEQ ID NO: 261260 - RNA, 22 nt, Human
acagugcagggugggaagaagg

SEQ ID NO: 261261 - RNA, 22 nt, Human
aagaaaagauguuugguuuuca

SEQ ID NO: 261262 - RNA, 22 nt, Human
agugacauuauuuuguguacua

SEQ ID NO: 261263 - RNA, 22 nt, Human
accuugucugugcaccugggcu

SEQ ID NO: 261264 - RNA, 22 nt, Human
gaauauauuggugaaaauaguu

SEQ ID NO: 261265 - RNA, 22 nt, Human
acacugucucauaugaggggac

SEQ ID NO: 261266 - RNA, 22 nt, Human
cagguaguccacagugagggag

SEQ ID NO: 261267 - RNA, 22 nt, Human
uaugugcauuaucuaguucauu

SEQ ID NO: 261268 - RNA, 22 nt, Human
gcagggauugucaaugcugcuc

SEQ ID NO: 261269 - RNA, 22 nt, Human
cacccagcagcacuuaagacua

SEQ ID NO: 261270 - RNA, 22 nt, Human
acugaacauaugcaagaccauu

SEQ ID NO: 261271 - RNA, 22 nt, Human
guuuuacaagguuaaucagcag

SEQ ID NO: 261272 - RNA, 22 nt, Human
uagauuugugcaagaagggauu

SEQ ID NO: 261273 - RNA, 22 nt, Human
uugaaauaucaaguuauuagug

SEQ ID NO: 261274 - RNA, 22 nt, Human
cugcccaguuugggagccuuuc

SEQ ID NO: 261275 - RNA, 22 nt, Human
ccugagcaucagcgccuccuua

SEQ ID NO: 261276 - RNA, 22 nt, Human
gagcccaggaaguggaggcuga

SEQ ID NO: 261277 - RNA, 22 nt, Human
cagggcucaucugugugaccag

SEQ ID NO: 261278 - RNA, 22 nt, Human
cauuuggauuuugaagagagua

SEQ ID NO: 261279 - RNA, 21 nt, Human
uucuguagcuguuagcuuuuc

SEQ ID NO: 261280 - RNA, 22 nt, Human
cagacaggagacuggaucaugg

SEQ ID NO: 261281 - RNA, 22 nt, Human
aaugcaaagcucuuuaauccuu

SEQ ID NO: 261282 - RNA, 22 nt, Human
uggcugggcccccaccugccuc

SEQ ID NO: 261283 - RNA, 22 nt, Human
ucuuuaauuguggaagagcagc

SEQ ID NO: 261284 - RNA, 22 nt, Human
guucucaguggggagcaggguu

SEQ ID NO: 261285 - RNA, 22 nt, Human
aguaaaauuaauggaucagaag

SEQ ID NO: 261286 - RNA, 22 nt, Human
ucugaaauggggcugaagcacu

SEQ ID NO: 261287 - RNA, 22 nt, Human
uccuggguucauguccuggugc

SEQ ID NO: 261288 - RNA, 19 nt, Human
gguaaaagugagcuucagg

SEQ ID NO: 261289 - RNA, 22 nt, Human
ucauucaucaguugguagagau

SEQ ID NO: 261290 - RNA, 22 nt, Human
ucuaaacaguuucacucuuaau

SEQ ID NO: 261291 - RNA, 23 nt, Human
aggaaagcauucauuuuuaccau

SEQ ID NO: 261292 - RNA, 22 nt, Human
ucuaaacacgucucuuugaaua

SEQ ID NO: 261293 - RNA, 22 nt, Human
gagcacagugcaguuucugcua

SEQ ID NO: 261294 - RNA, 22 nt, Human
auuucuagacuuagaacucuua

SEQ ID NO: 261295 - RNA, 22 nt, Human
acugucacugacagaaucaaca

SEQ ID NO: 261296 - RNA, 21 nt, Human
agccaagccuugggagccagg

SEQ ID NO: 261297 - RNA, 22 nt, Human
uucaacuaauguuuauuuuaug

SEQ ID NO: 261298 - RNA, 22 nt, Human
auuuccugggucucacuccaga

SEQ ID NO: 261299 - RNA, 22 nt, Human
auagcaaacuggcagcuugugg

SEQ ID NO: 261300 - RNA, 22 nt, Human
ggcagcuucucccaggcuguuu

SEQ ID NO: 261301 - RNA, 22 nt, Human
cagcacuuugagggcucuuaau

SEQ ID NO: 261302 - RNA, 22 nt, Human
gcacacagaauugauucacugu

SEQ ID NO: 261303 - RNA, 22 nt, Human
cuguggcuccagugaaccaaug

SEQ ID NO: 261304 - RNA, 22 nt, Human
gguccucaaucccaacaaggca

SEQ ID NO: 261305 - RNA, 22 nt, Human
aaaaccauguaucuauuuccuu

SEQ ID NO: 261306 - RNA, 22 nt, Human
uugggagcuggaagcaaggccu

SEQ ID NO: 261307 - RNA, 22 nt, Human
ccuggccagcagccccuuccuc

SEQ ID NO: 261308 - RNA, 22 nt, Human
caacagucagaaugaagcugag

SEQ ID NO: 261309 - RNA, 22 nt, Human
aguucaaacucuauaagaacuu

SEQ ID NO: 261310 - RNA, 22 nt, Human
aggcuucuggggcaccgagcga

SEQ ID NO: 261311 - RNA, 21 nt, Human
uuguaaagguuuagaagaaug

SEQ ID NO: 261312 - RNA, 22 nt, Human
aaagcugggggcccuggucuag

SEQ ID NO: 261313 - RNA, 22 nt, Human
aagccaugguagaaaacucagu

SEQ ID NO: 261314 - RNA, 22 nt, Human
gucucuggcuuuaugcugguuu

SEQ ID NO: 261315 - RNA, 22 nt, Human
ucaaaugcaccucucauuuguu

SEQ ID NO: 261316 - RNA, 21 nt, Human
cacuccacuuagaacaggguu

SEQ ID NO: 261317 - RNA, 22 nt, Human
cucaaauauguggucagaaagc

SEQ ID NO: 261318 - RNA, 22 nt, Human
cuucucucccuggcacucagac

SEQ ID NO: 261319 - RNA, 22 nt, Human
caggggccuguccuggcuucug

SEQ ID NO: 261320 - RNA, 20 nt, Human
uuccagagaucugcauuuua

SEQ ID NO: 261321 - RNA, 21 nt, Human
ggagcuggggagcuggcccca

SEQ ID NO: 261322 - RNA, 20 nt, Human
aaaaucucccagaaacuuau

SEQ ID NO: 261323 - RNA, 22 nt, Human
ggccacgugaccucuggcuccu

SEQ ID NO: 261324 - RNA, 18 nt, Human
guguccuggcugcggcgc

SEQ ID NO: 261325 - RNA, 22 nt, Human
aacaucucauggacuacauucu

SEQ ID NO: 261326 - RNA, 22 nt, Human
uuguaagucacaccagggcagg

SEQ ID NO: 261327 - RNA, 22 nt, Human
gugcagguguuuuggcugccag

SEQ ID NO: 261328 - RNA, 22 nt, Human
guuuuccugagcccagagaugc

SEQ ID NO: 261329 - RNA, 22 nt, Human
acuaaauagccucugguaguug

SEQ ID NO: 261330 - RNA, 19 nt, Human
caggacaguuugccaagaa

SEQ ID NO: 261331 - RNA, 22 nt, Human
cugggaccuccucacuguucua

SEQ ID NO: 261332 - RNA, 19 nt, Human
aguucuuguccugucuguu

SEQ ID NO: 261333 - RNA, 22 nt, Human
cagcugagucugagguucuuug

SEQ ID NO: 261334 - RNA, 22 nt, Human
auuuguuccaugaguaaggcua

SEQ ID NO: 261335 - RNA, 22 nt, Human
gcuuuggucagguguccagccc

SEQ ID NO: 261336 - RNA, 22 nt, Human
uucacauuaucaggauuguuuc

SEQ ID NO: 261337 - RNA, 22 nt, Human
agagccaaggcugagagcuauu

SEQ ID NO: 261338 - RNA, 22 nt, Human
caaacuuucaguuauaacauga

SEQ ID NO: 261339 - RNA, 22 nt, Human
aagccuucagaguuggcugguc

SEQ ID NO: 261340 - RNA, 22 nt, Human
ugaguguuguaaccauaugauu

SEQ ID NO: 261341 - RNA, 22 nt, Human
ccugagccugcagccgagcaga

SEQ ID NO: 261342 - RNA, 22 nt, Human
gcugagggaggcugaacugagu

SEQ ID NO: 261343 - RNA, 22 nt, Human
ggccaugcaggucugguagguc

SEQ ID NO: 261344 - RNA, 22 nt, Human
uaggcugggagccugaggcuag

SEQ ID NO: 261345 - RNA, 22 nt, Human
gccaggcaugggcuucugggcg

SEQ ID NO: 261346 - RNA, 22 nt, Human
aggaccugcuaaugugccaagu

SEQ ID NO: 261347 - RNA, 22 nt, Human
gaggugguucagguagagccca

SEQ ID NO: 261348 - RNA, 22 nt, Human
ucagaggagcugcagaacgcug

SEQ ID NO: 261349 - RNA, 22 nt, Human
cagguggcuaacggccucauag

SEQ ID NO: 261350 - RNA, 22 nt, Human
gcaggccugacuguagggggca

SEQ ID NO: 261351 - RNA, 22 nt, Human
uaacagaauagcagaaacagaa

SEQ ID NO: 261352 - RNA, 22 nt, Human
uggaccugagccuggcccugcc

SEQ ID NO: 261353 - RNA, 22 nt, Human
gcaccugcuggaaucagucugu

SEQ ID NO: 261354 - RNA, 22 nt, Human
gggaagauaguguugagggccc

SEQ ID NO: 261355 - RNA, 22 nt, Human
cuuauguauauuuggaacguac

SEQ ID NO: 261356 - RNA, 22 nt, Human
ccagcuggggaaguggggcaua

SEQ ID NO: 261357 - RNA, 22 nt, Human
ucugaggggcuggaagggcugc

SEQ ID NO: 261358 - RNA, 19 nt, Human
aucagcaagguaggaugug

SEQ ID NO: 261359 - RNA, 22 nt, Human
uauuuuacagacuacuuuagau

SEQ ID NO: 261360 - RNA, 22 nt, Human
uuuuauacacaugaacaugcag

SEQ ID NO: 261361 - RNA, 22 nt, Human
augggacaauuugaacacagug

SEQ ID NO: 261362 - RNA, 23 nt, Human
ccugcagcugcuggggcuccacc

SEQ ID NO: 261363 - RNA, 22 nt, Human
uuagaaacucaacucugggaau

SEQ ID NO: 261364 - RNA, 22 nt, Human
ccaugagcuuccuauauagggu

SEQ ID NO: 261365 - RNA, 22 nt, Human
agcagucaguccugaaugaagg

SEQ ID NO: 261366 - RNA, 22 nt, Human
ggcacugggaaugcagugauga

SEQ ID NO: 261367 - RNA, 19 nt, Human
aguguccuagucauuugcc

SEQ ID NO: 261368 - RNA, 22 nt, Human
guaaacaucgacccaacagggg

SEQ ID NO: 261369 - RNA, 22 nt, Human
gcagcucaaaggccacggacgg

SEQ ID NO: 261370 - RNA, 23 nt, Human
uccaggacccugguagacacaca

SEQ ID NO: 261371 - RNA, 20 nt, Human
auguucuucauuuaauguuc

SEQ ID NO: 261372 - RNA, 22 nt, Human
cagcugccccuccagggcuggg

SEQ ID NO: 261373 - RNA, 20 nt, Human
ggcaggcaggagguuuccag

SEQ ID NO: 261374 - RNA, 22 nt, Human
uuacaaaguguuaugauaaaca

SEQ ID NO: 261375 - RNA, 22 nt, Human
uuacagcaaagugcgcagaccu

SEQ ID NO: 261376 - RNA, 22 nt, Human
aauccuuacugaaugagaaaaa

SEQ ID NO: 261377 - RNA, 22 nt, Human
agacagugagaaugaguugaaa

SEQ ID NO: 261378 - RNA, 22 nt, Human
gagcagggcuuguccuccucau

SEQ ID NO: 261379 - RNA, 15 nt, Human
auacacaugagggag

SEQ ID NO: 261380 - RNA, 22 nt, Human
auggaaauacagccagagcaga

SEQ ID NO: 261381 - RNA, 22 nt, Human
cuggucccagcagagcucugag

SEQ ID NO: 261382 - RNA, 22 nt, Human
caaggcauacuccuuucucagc

SEQ ID NO: 261383 - RNA, 22 nt, Human
gcuucuaucccuccacugcacu

SEQ ID NO: 261384 - RNA, 22 nt, Human
ggcuuuaucaaaugagacccug

SEQ ID NO: 261385 - RNA, 22 nt, Human
auccugaagcaugaaugucaaa

SEQ ID NO: 261386 - RNA, 22 nt, Human
aagcaaagagauaaccuuuugg

SEQ ID NO: 261387 - RNA, 22 nt, Human
caggccacacggcggcucccug

SEQ ID NO: 261388 - RNA, 22 nt, Human
cugagagaucaagccacaggau

SEQ ID NO: 261389 - RNA, 22 nt, Human
cucuuaaagcuuccaguuucaa

SEQ ID NO: 261390 - RNA, 22 nt, Human
ugccaccaggagaaccagugca

SEQ ID NO: 261391 - RNA, 22 nt, Human
uccucuccaugucucacgccac

SEQ ID NO: 261392 - RNA, 22 nt, Human
agcuggagaucaugcugauacu

SEQ ID NO: 261393 - RNA, 22 nt, Human
aaugucuacaccguauguuguu

SEQ ID NO: 261394 - RNA, 22 nt, Human
ccucccugcuccucaacuggca

SEQ ID NO: 261395 - RNA, 22 nt, Human
agcccugcacaguucgggagga

SEQ ID NO: 261396 - RNA, 22 nt, Human
gccaccauguagcccauuagag

SEQ ID NO: 261397 - RNA, 22 nt, Human
caugccauuucuucucuuuaug

SEQ ID NO: 261398 - RNA, 22 nt, Human
ugguaugaccguggugcaagca

SEQ ID NO: 261399 - RNA, 22 nt, Human
ugauaaacagcugaugaagacc

SEQ ID NO: 261400 - RNA, 22 nt, Human
ccuucucugcagguaguuggcu

SEQ ID NO: 261401 - RNA, 22 nt, Human
aggcuccaccagucaggugcau

SEQ ID NO: 261402 - RNA, 22 nt, Human
cuuucagucuuuacaagguugc

SEQ ID NO: 261403 - RNA, 22 nt, Human
aagaguuaagcaacagauacca

SEQ ID NO: 261404 - RNA, 22 nt, Human
aggcaggaggaucauggaugca

SEQ ID NO: 261405 - RNA, 22 nt, Human
auggcauuguuuauagauugca

SEQ ID NO: 261406 - RNA, 22 nt, Human
gugaggcagcaggagccucugu

SEQ ID NO: 261407 - RNA, 21 nt, Human
uccuguaagcuuggguggcuc

SEQ ID NO: 261408 - RNA, 22 nt, Human
cuacaacauuaugcuuucuguc

SEQ ID NO: 261409 - RNA, 20 nt, Human
ugcugagguugacaugccca

SEQ ID NO: 261410 - RNA, 22 nt, Human
ggucacuccaccuucuccaccu

SEQ ID NO: 261411 - RNA, 22 nt, Human
ucuuuauugcuacugguuuguc

SEQ ID NO: 261412 - RNA, 22 nt, Human
acucauguccuaggaguaaagc

SEQ ID NO: 261413 - RNA, 22 nt, Human
cagauaaauagacuuggucaga

SEQ ID NO: 261414 - RNA, 22 nt, Human
gaaacccugagagguggucugg

SEQ ID NO: 261415 - RNA, 22 nt, Human
uccaggaacgagaggcugggca

SEQ ID NO: 261416 - RNA, 22 nt, Human
aggcucagagagcuguguccau

SEQ ID NO: 261417 - RNA, 22 nt, Human
agauuacagaagaauaaguaga

SEQ ID NO: 261418 - RNA, 22 nt, Human
augcagcugacauuuucauguu

SEQ ID NO: 261419 - RNA, 22 nt, Human
cuucuggcaaucccagggucuu

SEQ ID NO: 261420 - RNA, 22 nt, Human
uauuaaauuauggauuuaggag

SEQ ID NO: 261421 - RNA, 22 nt, Human
acguuugcuuucuuuggccugg

SEQ ID NO: 261422 - RNA, 22 nt, Human
caacugggauaaagagcuaaag

SEQ ID NO: 261423 - RNA, 22 nt, Human
uguuagaaguuaaucacuaauu

SEQ ID NO: 261424 - RNA, 22 nt, Human
cagaaagccaacuccaacuguc

SEQ ID NO: 261425 - RNA, 22 nt, Human
aaguguuuccauugugcaggcu

SEQ ID NO: 261426 - RNA, 22 nt, Human
uccugggcuuaguggcuagguc

SEQ ID NO: 261427 - RNA, 22 nt, Human
uggcacagcccauucagagaag

SEQ ID NO: 261428 - RNA, 22 nt, Human
caguguaagcucuagacuagaa

SEQ ID NO: 261429 - RNA, 22 nt, Human
uucagagccacuucaagucuaa

SEQ ID NO: 261430 - RNA, 22 nt, Human
uggagcuggaauuucugggccu

SEQ ID NO: 261431 - RNA, 22 nt, Human
uuaaagacaucacagauuacac

SEQ ID NO: 261432 - RNA, 22 nt, Human
uaggaggcauuugcucccaggg

SEQ ID NO: 261433 - RNA, 23 nt, Human
acugccugcuacuaugcccacgg

SEQ ID NO: 261434 - RNA, 22 nt, Human
caggcagagucagauuagacuu

SEQ ID NO: 261435 - RNA, 23 nt, Human
cagggcugggcuugguguuaggc

SEQ ID NO: 261436 - RNA, 22 nt, Human
gcuuguuugugauuucuccaga

SEQ ID NO: 261437 - RNA, 22 nt, Human
gaauuuuaaguguucgccucuu

SEQ ID NO: 261438 - RNA, 18 nt, Human
caguggcauaguugagua

SEQ ID NO: 261439 - RNA, 22 nt, Human
gucuuugccacacuucuguaca

SEQ ID NO: 261440 - RNA, 22 nt, Human
gaguggggucugggcaucaguc

SEQ ID NO: 261441 - RNA, 22 nt, Human
aauuaggggaggacguaucaua

SEQ ID NO: 261442 - RNA, 22 nt, Human
ggagagagagcucauuagcugc

SEQ ID NO: 261443 - RNA, 22 nt, Human
uacccagcaaucccuagagguu

SEQ ID NO: 261444 - RNA, 22 nt, Human
gaauauuaguaucaguuauacc

SEQ ID NO: 261445 - RNA, 17 nt, Human
cugaggcccagggccca

SEQ ID NO: 261446 - RNA, 22 nt, Human
ccuggcuccugccucugcaggg

SEQ ID NO: 261447 - RNA, 20 nt, Human
cuacuuuaggcacugagaau

SEQ ID NO: 261448 - RNA, 22 nt, Human
agcugugggagaaucucugggu

SEQ ID NO: 261449 - RNA, 22 nt, Human
uuucccaguuagugaagacaug

SEQ ID NO: 261450 - RNA, 22 nt, Human
aguuuuuccugauuuuacagaa

SEQ ID NO: 261451 - RNA, 22 nt, Human
auguuugucaggauuguaauua

SEQ ID NO: 261452 - RNA, 19 nt, Human
caguggccuggaggucucu

SEQ ID NO: 261453 - RNA, 22 nt, Human
gugggcucaggccucugugggg

SEQ ID NO: 261454 - RNA, 17 nt, Human
ugauucaacuagaaacu

SEQ ID NO: 261455 - RNA, 22 nt, Human
caaaugauacuguuuuuagucu

SEQ ID NO: 261456 - RNA, 22 nt, Human
agcuccugauucucagagauag

SEQ ID NO: 261457 - RNA, 22 nt, Human
uuccugugcuuauucuucucug

SEQ ID NO: 261458 - RNA, 21 nt, Human
ugcagcagauuugggggaaga

SEQ ID NO: 261459 - RNA, 21 nt, Human
agcuuacauuaccauuguugc

SEQ ID NO: 261460 - RNA, 22 nt, Human
agggaccacauccccucugugg

SEQ ID NO: 261461 - RNA, 22 nt, Human
cccagccaaaagcaaguuuacc

SEQ ID NO: 261462 - RNA, 22 nt, Human
cuguauuuguccucuauuuauu

SEQ ID NO: 261463 - RNA, 22 nt, Human
cuccuuccugccccagugauaa

SEQ ID NO: 261464 - RNA, 22 nt, Human
uguggccaggccccugauggug

SEQ ID NO: 261465 - RNA, 22 nt, Human
caucucaucagugagagucagc

SEQ ID NO: 261466 - RNA, 22 nt, Human
ccuggcaggcuggggacagugc

SEQ ID NO: 261467 - RNA, 22 nt, Human
gcagaggcugggugucccaguc

SEQ ID NO: 261468 - RNA, 22 nt, Human
guggcuucuucugccagaagga

SEQ ID NO: 261469 - RNA, 22 nt, Human
ugccaaguuucucucagggacu

SEQ ID NO: 261470 - RNA, 22 nt, Human
ccugcccccgucagaggugaug

SEQ ID NO: 261471 - RNA, 22 nt, Human
cuuagcuagaggcaauuauguu

SEQ ID NO: 261472 - RNA, 22 nt, Human
ucucugugugugugacagcauu

SEQ ID NO: 261473 - RNA, 22 nt, Human
gaagcagaacccacuccccaac

SEQ ID NO: 261474 - RNA, 22 nt, Human
aggccucaugucaaagcagcaa

SEQ ID NO: 261475 - RNA, 23 nt, Human
agcacucaugcugcagaagucau

SEQ ID NO: 261476 - RNA, 20 nt, Human
augaguuuaaacauucagag

SEQ ID NO: 261477 - RNA, 22 nt, Human
gccugggaacucugaucuccug

SEQ ID NO: 261478 - RNA, 22 nt, Human
uauucccacuccucagcaauuu

SEQ ID NO: 261479 - RNA, 22 nt, Human
gagguagccacagauagagacu

SEQ ID NO: 261480 - RNA, 22 nt, Human
aauaucuguggccauacaauuu

SEQ ID NO: 261481 - RNA, 22 nt, Human
auugacaagaaagauauuuuua

SEQ ID NO: 261482 - RNA, 22 nt, Human
ucaauuuaagguacuacuuugg

SEQ ID NO: 261483 - RNA, 22 nt, Human
cuccccaacucagccgaggcuu

SEQ ID NO: 261484 - RNA, 23 nt, Human
auuucuaggggauuuucuggugc

SEQ ID NO: 261485 - RNA, 20 nt, Human
uugaagagucagguagggcc

SEQ ID NO: 261486 - RNA, 21 nt, Human
accaucuuccaugcauuauau

SEQ ID NO: 261487 - RNA, 22 nt, Human
aagccagugggcauagcaguug

SEQ ID NO: 261488 - RNA, 22 nt, Human
cugaggccuaagacaugaauga

SEQ ID NO: 261489 - RNA, 22 nt, Human
gcacuuaugcucaccuuguucu

SEQ ID NO: 261490 - RNA, 22 nt, Human
uuugggaagaggaaucucugga

SEQ ID NO: 261491 - RNA, 22 nt, Human
cagggcagcuuccuuuguuagg

SEQ ID NO: 261492 - RNA, 22 nt, Human
gcacaauggaccgugugcucug

SEQ ID NO: 261493 - RNA, 22 nt, Human
aaccacagagcccccucagaug

SEQ ID NO: 261494 - RNA, 22 nt, Human
cagagccccccuucugaucaca

SEQ ID NO: 261495 - RNA, 20 nt, Human
uggaggcagagccagaggga

SEQ ID NO: 261496 - RNA, 22 nt, Human
gugcaagguacauccuugaugu

SEQ ID NO: 261497 - RNA, 18 nt, Human
uccaaagccagagaaguu

SEQ ID NO: 261498 - RNA, 22 nt, Human
caaaaacugcaauuacuuuuac

SEQ ID NO: 261499 - RNA, 22 nt, Human
auucuaagucuuguucacauuc

SEQ ID NO: 261500 - RNA, 22 nt, Human
aaaugcuacacaggaauucuca

SEQ ID NO: 261501 - RNA, 22 nt, Human
agcucugacauugauucucagc

SEQ ID NO: 261502 - RNA, 22 nt, Human
gaaggcuuuagagagauauaaa

SEQ ID NO: 261503 - RNA, 22 nt, Human
agggauguuaguugugagcuca

SEQ ID NO: 261504 - RNA, 22 nt, Human
ucccugagugggcugguaguau

SEQ ID NO: 261505 - RNA, 22 nt, Human
gggcagcugccagaggccaugg

SEQ ID NO: 261506 - RNA, 22 nt, Human
uccugcaguuacaucccagcca

SEQ ID NO: 261507 - RNA, 22 nt, Human
agaaggcagaugggacggagca

SEQ ID NO: 261508 - RNA, 22 nt, Human
cagagggagcccuccaggagca

SEQ ID NO: 261509 - RNA, 22 nt, Human
gagggagcuaugaauagaagaa

SEQ ID NO: 261510 - RNA, 20 nt, Human
aguaggggaaugcaagagca

SEQ ID NO: 261511 - RNA, 22 nt, Human
gcccugugcgcugaguucaggg

SEQ ID NO: 261512 - RNA, 22 nt, Human
uuucaguuacugcuauaucauu

SEQ ID NO: 261513 - RNA, 22 nt, Human
gaugaugaggccaugaggcagg

SEQ ID NO: 261514 - RNA, 22 nt, Human
caagauaagaucauuuacacua

SEQ ID NO: 261515 - RNA, 22 nt, Human
acagccuuauucuuuaguuuac

SEQ ID NO: 261516 - RNA, 22 nt, Human
uaaguucauuagacuacagaua

SEQ ID NO: 261517 - RNA, 18 nt, Human
cuagaugagcuuggcaag

SEQ ID NO: 261518 - RNA, 22 nt, Human
gcagugcauuacucacauguuu

SEQ ID NO: 261519 - RNA, 21 nt, Human
agcagccauuucacagagacu

SEQ ID NO: 261520 - RNA, 22 nt, Human
uuaguuuucccaucuuuauggu

SEQ ID NO: 261521 - RNA, 20 nt, Human
agcacauuaaacauacuccu

SEQ ID NO: 261522 - RNA, 22 nt, Human
aagguuaguaauauuucuauau

SEQ ID NO: 261523 - RNA, 22 nt, Human
ucagagaaucucuccuuaguuu

SEQ ID NO: 261524 - RNA, 22 nt, Human
gcugggcuucaccuccagaguu

SEQ ID NO: 261525 - RNA, 22 nt, Human
gagcaaacaucagugaugucug

SEQ ID NO: 261526 - RNA, 22 nt, Human
uccugggccaagggcugugagg

SEQ ID NO: 261527 - RNA, 22 nt, Human
cuuaggaguucacuugaauagu

SEQ ID NO: 261528 - RNA, 22 nt, Human
uugggaaacaguauagcuaaca

SEQ ID NO: 261529 - RNA, 22 nt, Human
uguauugaauuguguuauaucu

SEQ ID NO: 261530 - RNA, 22 nt, Human
ccucacagcuuuucaaagugga

SEQ ID NO: 261531 - RNA, 21 nt, Human
cucaaaugccaguuuuauuua

SEQ ID NO: 261532 - RNA, 22 nt, Human
ucuguguuuuacuccaauuaua

SEQ ID NO: 261533 - RNA, 22 nt, Human
ccacagaggacaacugccuggc

SEQ ID NO: 261534 - RNA, 22 nt, Human
caggcuggaguuaccuuuaggg

SEQ ID NO: 261535 - RNA, 22 nt, Human
gccugcuuccuuuucauagaug

SEQ ID NO: 261536 - RNA, 22 nt, Human
ggggcagaguagcuggggugug

SEQ ID NO: 261537 - RNA, 22 nt, Human
gcauucauacaucaauaagcuu

SEQ ID NO: 261538 - RNA, 22 nt, Human
ccaggaucuggguccaugggac

SEQ ID NO: 261539 - RNA, 23 nt, Human
gcuucccagacaauacugcuucc

SEQ ID NO: 261540 - RNA, 22 nt, Human
acacugcuucucuggcagagcc

SEQ ID NO: 261541 - RNA, 22 nt, Human
cuggcccaggagagcaggcauu

SEQ ID NO: 261542 - RNA, 22 nt, Human
gugauuuugagaccuauauagu

SEQ ID NO: 261543 - RNA, 22 nt, Human
caggcucccugccagggccggc

SEQ ID NO: 261544 - RNA, 22 nt, Human
uuucuggguuuaugucacagcu

SEQ ID NO: 261545 - RNA, 22 nt, Human
ugcuuuaucaaagcuauaguga

SEQ ID NO: 261546 - RNA, 22 nt, Human
agugcuuuagcauccaacuguc

SEQ ID NO: 261547 - RNA, 22 nt, Human
auuucucacucacaguccaugu

SEQ ID NO: 261548 - RNA, 22 nt, Human
gccaggaguucagaugcauguu

SEQ ID NO: 261549 - RNA, 22 nt, Human
uuuauuuaccuuauguccucca

SEQ ID NO: 261550 - RNA, 22 nt, Human
auagcacugguuuuucuugguu

SEQ ID NO: 261551 - RNA, 22 nt, Human
ugcugagguuucgucugcuugc

SEQ ID NO: 261552 - RNA, 22 nt, Human
uuccagcaggcagacaggagau

SEQ ID NO: 261553 - RNA, 22 nt, Human
guacaaauuaggaagcuuugug

SEQ ID NO: 261554 - RNA, 22 nt, Human
aggucaaguuuagauagaguua

SEQ ID NO: 261555 - RNA, 22 nt, Human
aucucaggugaaacuucuaggu

SEQ ID NO: 261556 - RNA, 22 nt, Human
cugguguggacuccgcgcggag

SEQ ID NO: 261557 - RNA, 22 nt, Human
aacuuuuaaaauacacagacaa

SEQ ID NO: 261558 - RNA, 22 nt, Human
agaggccugugugcuccagugg

SEQ ID NO: 261559 - RNA, 17 nt, Human
aagucccagcuaacaca

SEQ ID NO: 261560 - RNA, 22 nt, Human
aucagagugggucuggcaugag

SEQ ID NO: 261561 - RNA, 22 nt, Human
gugcuuuuucaaucagaaggga

SEQ ID NO: 261562 - RNA, 22 nt, Human
cacacaccaaucaaaugucaga

SEQ ID NO: 261563 - RNA, 21 nt, Human
agaaccuuggaugccauugca

SEQ ID NO: 261564 - RNA, 23 nt, Human
ucuggaggggacacugcagaugc

SEQ ID NO: 261565 - RNA, 22 nt, Human
ugggaggcagaaguugacugga

SEQ ID NO: 261566 - RNA, 22 nt, Human
auccuucuucaaagagggaaaa

SEQ ID NO: 261567 - RNA, 22 nt, Human
ucuggcucucauacucgccagu

SEQ ID NO: 261568 - RNA, 22 nt, Human
auucuacaccucucucauuuag

SEQ ID NO: 261569 - RNA, 22 nt, Human
auuuagaaguuggagggcaaga

SEQ ID NO: 261570 - RNA, 22 nt, Human
aguccaggacuguuucagcuga

SEQ ID NO: 261571 - RNA, 22 nt, Human
aaggcuucuggagcuugcuggc

SEQ ID NO: 261572 - RNA, 21 nt, Human
cuugagaauuaacuguucauu

SEQ ID NO: 261573 - RNA, 22 nt, Human
uuccuguguccuauuucgacuu

SEQ ID NO: 261574 - RNA, 22 nt, Human
ccagaacugagaaaauaaauuu

SEQ ID NO: 261575 - RNA, 22 nt, Human
gcagggcuguucaggagggugg

SEQ ID NO: 261576 - RNA, 22 nt, Human
aauccauuuaccuuugcuugaa

SEQ ID NO: 261577 - RNA, 22 nt, Human
cuguauaucaugguuuugcagu

SEQ ID NO: 261578 - RNA, 22 nt, Human
agaguuuguaguggugaaugua

SEQ ID NO: 261579 - RNA, 22 nt, Human
caguaguuauuaguugccacug

SEQ ID NO: 261580 - RNA, 21 nt, Human
uggcucuggguaggagagugc

SEQ ID NO: 261581 - RNA, 22 nt, Human
uccugagcuacaguaguaugau

SEQ ID NO: 261582 - RNA, 22 nt, Human
gaacaucaugaagaaaacauau

SEQ ID NO: 261583 - RNA, 22 nt, Human
aaugucaaaggcuauacauuca

SEQ ID NO: 261584 - RNA, 22 nt, Human
acacaugcacaacaguucuuuc

SEQ ID NO: 261585 - RNA, 22 nt, Human
uuugggaauagcagggacugag

SEQ ID NO: 261586 - RNA, 22 nt, Human
aguacaaguagaaugcuacaag

SEQ ID NO: 261587 - RNA, 22 nt, Human
agggacccugaugacugaggag

SEQ ID NO: 261588 - RNA, 22 nt, Human
uuggaauugaggauuuacauag

SEQ ID NO: 261589 - RNA, 22 nt, Human
cucugcaaggcccuccaguagc

SEQ ID NO: 261590 - RNA, 22 nt, Human
ccucugugauuucugagccaau

SEQ ID NO: 261591 - RNA, 22 nt, Human
cccagaggugaaggagguggga

SEQ ID NO: 261592 - RNA, 22 nt, Human
aaugauaugcaaauuaucauca

SEQ ID NO: 261593 - RNA, 22 nt, Human
gcugccucugcacagcucacuc

SEQ ID NO: 261594 - RNA, 22 nt, Human
acucugagggguauguuccuau

SEQ ID NO: 261595 - RNA, 22 nt, Human
ggccaugccaggcugccuggga

SEQ ID NO: 261596 - RNA, 22 nt, Human
uaacagaaaggcucaggugcuc

SEQ ID NO: 261597 - RNA, 22 nt, Human
caggaugcagugggacccaggg

SEQ ID NO: 261598 - RNA, 22 nt, Human
uaugcauagguaucuauacuca

SEQ ID NO: 261599 - RNA, 22 nt, Human
aaauccaacgacagguguacuu

SEQ ID NO: 261600 - RNA, 22 nt, Human
caggcagcccugcaccaagugu

SEQ ID NO: 261601 - RNA, 22 nt, Human
acaugcucuccaaggacagagc

SEQ ID NO: 261602 - RNA, 22 nt, Human
ccuugcucaucccccagugccu

SEQ ID NO: 261603 - RNA, 22 nt, Human
gccugccuuugugaggaagcgg

SEQ ID NO: 261604 - RNA, 22 nt, Human
cagcucuuggagaaaccagagc

SEQ ID NO: 261605 - RNA, 22 nt, Human
uuaugacagaaaugaaaagcug

SEQ ID NO: 261606 - RNA, 22 nt, Human
caggcccugccuugagggaccu

SEQ ID NO: 261607 - RNA, 22 nt, Human
ucagaggaucaugucccuacuc

SEQ ID NO: 261608 - RNA, 22 nt, Human
acagacagauuuugucugaugu

SEQ ID NO: 261609 - RNA, 22 nt, Human
aauuaguucaauggaugauaga

SEQ ID NO: 261610 - RNA, 22 nt, Human
cugacuuuuccaaauaauacuu

SEQ ID NO: 261611 - RNA, 22 nt, Human
uccaaauucuauguucuuucca

SEQ ID NO: 261612 - RNA, 22 nt, Human
aaacaacuucugcacuaugggu

SEQ ID NO: 261613 - RNA, 22 nt, Human
gugcagcugggcgcugaccuuc

SEQ ID NO: 261614 - RNA, 22 nt, Human
guuauacauauguguuaacaaa

SEQ ID NO: 261615 - RNA, 21 nt, Human
gccacugcacuccagccuggg

SEQ ID NO: 261616 - RNA, 22 nt, Human
aagaacauugauauugucuaug

SEQ ID NO: 261617 - RNA, 22 nt, Human
uggaaucaguuacaugugguug

SEQ ID NO: 261618 - RNA, 20 nt, Human
ucagagcugcaggagagaaa

SEQ ID NO: 261619 - RNA, 22 nt, Human
aaauggaucuguggaauacauu

SEQ ID NO: 261620 - RNA, 22 nt, Human
caccucauggauaagauaaacu

SEQ ID NO: 261621 - RNA, 22 nt, Human
uuggcaccucccuaggaagaag

SEQ ID NO: 261622 - RNA, 22 nt, Human
uauuucugucagccagauaugg

SEQ ID NO: 261623 - RNA, 21 nt, Human
uucacaguggauaacuuucug

SEQ ID NO: 261624 - RNA, 22 nt, Human
aaaucaaaagacauguguuuua

SEQ ID NO: 261625 - RNA, 22 nt, Human
caaacuuacuguguuuaaagag

SEQ ID NO: 261626 - RNA, 22 nt, Human
agaagcacaccaguagacaggg

SEQ ID NO: 261627 - RNA, 22 nt, Human
uacaggagcugcucugugauac

SEQ ID NO: 261628 - RNA, 22 nt, Human
agcaggcaggcugccagugaau

SEQ ID NO: 261629 - RNA, 22 nt, Human
agugcuggcccauagcugcugg

SEQ ID NO: 261630 - RNA, 22 nt, Human
acaauuacccuggcuugauaaa

SEQ ID NO: 261631 - RNA, 22 nt, Human
aaauggcaauuuaguuuauuua

SEQ ID NO: 261632 - RNA, 22 nt, Human
ucugggaacgaaggcuaauaug

SEQ ID NO: 261633 - RNA, 22 nt, Human
cuguguccuuuaaaaaagacac

SEQ ID NO: 261634 - RNA, 22 nt, Human
cccagcaugcacgcugacacuc

SEQ ID NO: 261635 - RNA, 22 nt, Human
uccaggacuagcauuucugaua

SEQ ID NO: 261636 - RNA, 23 nt, Human
accuuggacuucccagcuuccag

SEQ ID NO: 261637 - RNA, 22 nt, Human
agguccucugugccugcuggcg

SEQ ID NO: 261638 - RNA, 22 nt, Human
uaaaaaucuuaugaauggcaag

SEQ ID NO: 261639 - RNA, 22 nt, Human
uuagugcaaaccucagagacac

SEQ ID NO: 261640 - RNA, 22 nt, Human
agauggugagggcagaaguaac

SEQ ID NO: 261641 - RNA, 22 nt, Human
acugggcugccugguucuucua

SEQ ID NO: 261642 - RNA, 22 nt, Human
ugggcugaguguggaacuaguu

SEQ ID NO: 261643 - RNA, 22 nt, Human
ugauuucauaguauauacauga

SEQ ID NO: 261644 - RNA, 22 nt, Human
ccccagcugcauacuugccaag

SEQ ID NO: 261645 - RNA, 21 nt, Human
ugaaaucugaugggacaaaug

SEQ ID NO: 261646 - RNA, 22 nt, Human
ccuuagaagaaaguuacuuuuu

SEQ ID NO: 261647 - RNA, 22 nt, Human
cugcaggaaucugugcuaggug

SEQ ID NO: 261648 - RNA, 22 nt, Human
aguggcagagcaggugcuggaa

SEQ ID NO: 261649 - RNA, 19 nt, Human
cccagccaggucuugcauc

SEQ ID NO: 261650 - RNA, 22 nt, Human
gccuuggaaagcuggagcaguu

SEQ ID NO: 261651 - RNA, 22 nt, Human
gcucccaggaagagaagggcca

SEQ ID NO: 261652 - RNA, 22 nt, Human
uugcaaauuccaauccaauauu

SEQ ID NO: 261653 - RNA, 22 nt, Human
uggguccuuuuuggacuucuuc

SEQ ID NO: 261654 - RNA, 22 nt, Human
agaaucuuguuucuuguguguu

SEQ ID NO: 261655 - RNA, 22 nt, Human
cuuuggaaggcagagcucugug

SEQ ID NO: 261656 - RNA, 22 nt, Human
caggcccaugagggcagccaca

SEQ ID NO: 261657 - RNA, 22 nt, Human
gagguggucgaggagggguacc

SEQ ID NO: 261658 - RNA, 22 nt, Human
acccaggcuagaagugaauuau

SEQ ID NO: 261659 - RNA, 22 nt, Human
caaggcaggaagccugucuuau

SEQ ID NO: 261660 - RNA, 22 nt, Human
agcaauuauuguauaagaacaa

SEQ ID NO: 261661 - RNA, 22 nt, Human
gcuaauacuuuggaaagaaugu

SEQ ID NO: 261662 - RNA, 22 nt, Human
cuuuuccacugagccucacaaa

SEQ ID NO: 261663 - RNA, 22 nt, Human
uauuacaaauuauaaugggaga

SEQ ID NO: 261664 - RNA, 22 nt, Human
ucacagaagcaucauacccgga

SEQ ID NO: 261665 - RNA, 22 nt, Human
gagcuccugcugcauccugccu

SEQ ID NO: 261666 - RNA, 22 nt, Human
cacaggagcuguggggcagugu

SEQ ID NO: 261667 - RNA, 22 nt, Human
guuuuucuaaguagcgauauuu

SEQ ID NO: 261668 - RNA, 22 nt, Human
aaagcgcuauauaaauguuaac

SEQ ID NO: 261669 - RNA, 22 nt, Human
gacagggaaacauugaaguguc

SEQ ID NO: 261670 - RNA, 22 nt, Human
gcuucccaggcgccugaccuuu

SEQ ID NO: 261671 - RNA, 19 nt, Human
ccaggcuuuaugcaaauac

SEQ ID NO: 261672 - RNA, 22 nt, Human
ccagguguccccgucacugcag

SEQ ID NO: 261673 - RNA, 22 nt, Human
augcagaaugaguucacgaucu

SEQ ID NO: 261674 - RNA, 22 nt, Human
gagaggcucagggacuugcuga

SEQ ID NO: 261675 - RNA, 22 nt, Human
auucagaagcuauucuuaguuc

SEQ ID NO: 261676 - RNA, 22 nt, Human
cauuuagaagucuuagaacuau

SEQ ID NO: 261677 - RNA, 22 nt, Human
ucuuucugguuauguauagaga

SEQ ID NO: 261678 - RNA, 22 nt, Human
aaaguauauuuacuuacuguga

SEQ ID NO: 261679 - RNA, 22 nt, Human
aagcaacuccuaggaggaaagg

SEQ ID NO: 261680 - RNA, 22 nt, Human
cugagaauaaagccagcaggag

SEQ ID NO: 261681 - RNA, 22 nt, Human
gagcacagcugucuugcaagcu

SEQ ID NO: 261682 - RNA, 20 nt, Human
uccuccagaagggcagggug

SEQ ID NO: 261683 - RNA, 22 nt, Human
acugcaggccuuggugccagca

SEQ ID NO: 261684 - RNA, 22 nt, Human
uccagcccaucccuagccuggg

SEQ ID NO: 261685 - RNA, 18 nt, Human
ccagugccaagaguggca

SEQ ID NO: 261686 - RNA, 20 nt, Human
uguggacucaguuucuugcu

SEQ ID NO: 261687 - RNA, 22 nt, Human
cugcugaaguuguuggucuuuu

SEQ ID NO: 261688 - RNA, 22 nt, Human
ugcaggugcguuuucaagccuc

SEQ ID NO: 261689 - RNA, 22 nt, Human
gagagaagaauguuccgaggcc

SEQ ID NO: 261690 - RNA, 17 nt, Human
uugaacugcugagucag

SEQ ID NO: 261691 - RNA, 22 nt, Human
aacuauguuaauaaguuucauu

SEQ ID NO: 261692 - RNA, 20 nt, Human
ucuuccagguacagucugca

SEQ ID NO: 261693 - RNA, 20 nt, Human
gcacacauagaaaugcauau

SEQ ID NO: 261694 - RNA, 20 nt, Human
uagagagaggauauuaaagu

SEQ ID NO: 261695 - RNA, 22 nt, Human
ggggcaggagguguucucuuuu

SEQ ID NO: 261696 - RNA, 22 nt, Human
ucagugcauuguucauuguagg

SEQ ID NO: 261697 - RNA, 22 nt, Human
agccauuguugucuucaucuuc

SEQ ID NO: 261698 - RNA, 22 nt, Human
gcauguguuauuuuauguauga

SEQ ID NO: 261699 - RNA, 22 nt, Human
uucagagcucagaaaagugucu

SEQ ID NO: 261700 - RNA, 22 nt, Human
ugcccugggaggcuuuccuguu

SEQ ID NO: 261701 - RNA, 22 nt, Human
ggaugucuuuacuuugggauuu

SEQ ID NO: 261702 - RNA, 22 nt, Human
gccaugcauccuuggacuuggc

SEQ ID NO: 261703 - RNA, 22 nt, Human
caggccaggcugcauuugcccc

SEQ ID NO: 261704 - RNA, 22 nt, Human
guuuucauuacugcugugauuu

SEQ ID NO: 261705 - RNA, 22 nt, Human
gcuccagggaacagaauguacu

SEQ ID NO: 261706 - RNA, 20 nt, Human
ccagcucugugguuagauac

SEQ ID NO: 261707 - RNA, 22 nt, Human
caggagagcccggguccgggcu

SEQ ID NO: 261708 - RNA, 22 nt, Human
caggcauggugagaacucagcc

SEQ ID NO: 261709 - RNA, 22 nt, Human
ggaaggggugucgcccauggau

SEQ ID NO: 261710 - RNA, 22 nt, Human
agcccaggugacucauacaccc

SEQ ID NO: 261711 - RNA, 22 nt, Human
uuuguacacugucuacuaugaa

SEQ ID NO: 261712 - RNA, 22 nt, Human
acaccagggauaugaggaagga

SEQ ID NO: 261713 - RNA, 22 nt, Human
ccuccucugggaagauucagag

SEQ ID NO: 261714 - RNA, 22 nt, Human
caggacugaagggcacagggaa

SEQ ID NO: 261715 - RNA, 22 nt, Human
ggcagaggaaggaugaauucac

SEQ ID NO: 261716 - RNA, 22 nt, Human
acugcauuaucaccaagaugua

SEQ ID NO: 261717 - RNA, 22 nt, Human
gcucaggaaaacagucuaguaa

SEQ ID NO: 261718 - RNA, 22 nt, Human
uuucucauagucaugccucuua

SEQ ID NO: 261719 - RNA, 22 nt, Human
cugcaauaugaugucugagaaa

SEQ ID NO: 261720 - RNA, 22 nt, Human
caugaaaucugaguauguuucc

SEQ ID NO: 261721 - RNA, 22 nt, Human
agugucugcuuugagucaggug

SEQ ID NO: 261722 - RNA, 22 nt, Human
cuugcuggaaacucucucugcc

SEQ ID NO: 261723 - RNA, 22 nt, Human
ccagagccggcucccucagcuu

SEQ ID NO: 261724 - RNA, 22 nt, Human
uguuaacauaguggcgcaucug

SEQ ID NO: 261725 - RNA, 22 nt, Human
auacauucaaaggaaggauaga

SEQ ID NO: 261726 - RNA, 22 nt, Human
cagagcucagagcagggcacuc

SEQ ID NO: 261727 - RNA, 22 nt, Human
uccuggguuaauuaugauucac

SEQ ID NO: 261728 - RNA, 22 nt, Human
uccugggaccgagggaagagcu

SEQ ID NO: 261729 - RNA, 22 nt, Human
aaaaagacagaggaugaggcag

SEQ ID NO: 261730 - RNA, 22 nt, Human
ggaacuggagaaugcccucuuu

SEQ ID NO: 261731 - RNA, 21 nt, Human
ggaguuuuucuggaagggacu

SEQ ID NO: 261732 - RNA, 22 nt, Human
aaagcaguauaguggaagggcu

SEQ ID NO: 261733 - RNA, 18 nt, Human
uaacauguuuucauuaag

SEQ ID NO: 261734 - RNA, 22 nt, Human
augcaggauuagaaaguugccu

SEQ ID NO: 261735 - RNA, 22 nt, Human
uacaaagcuguauagccugguc

SEQ ID NO: 261736 - RNA, 22 nt, Human
ucaaugauaguacaaucagccu

SEQ ID NO: 261737 - RNA, 22 nt, Human
cauccauucagugcaaaucaca

SEQ ID NO: 261738 - RNA, 22 nt, Human
uuugacaugcaaagcacuuuag

SEQ ID NO: 261739 - RNA, 22 nt, Human
ugggccacucuucccugggucu

SEQ ID NO: 261740 - RNA, 22 nt, Human
ugcaauuucaggcauauauugu

SEQ ID NO: 261741 - RNA, 22 nt, Human
cauucccacguguucuuugcuu

SEQ ID NO: 261742 - RNA, 22 nt, Human
uguggggcuuacaaaggcagau

SEQ ID NO: 261743 - RNA, 22 nt, Human
uuuuuuauaucaacugaagucu

SEQ ID NO: 261744 - RNA, 22 nt, Human
aaggcucccucuucucgagugu

SEQ ID NO: 261745 - RNA, 22 nt, Human
uuggcccagacucggggacuga

SEQ ID NO: 261746 - RNA, 22 nt, Human
accugucugcaugaucuaaaac

SEQ ID NO: 261747 - RNA, 22 nt, Human
gguguagcucugugucccacug

SEQ ID NO: 261748 - RNA, 22 nt, Human
aguauucuggaauucuauguga

SEQ ID NO: 261749 - RNA, 22 nt, Human
aauguacaccguggguuuuuua

SEQ ID NO: 261750 - RNA, 22 nt, Human
gacaagcucuuguuucaugguu

SEQ ID NO: 261751 - RNA, 22 nt, Human
acugccuugaaagauuguugag

SEQ ID NO: 261752 - RNA, 22 nt, Human
cccaggagguuggggcuacagu

SEQ ID NO: 261753 - RNA, 22 nt, Human
aggcugugcauuuuggagggcc

SEQ ID NO: 261754 - RNA, 22 nt, Human
aggagcugucagagugccagag

SEQ ID NO: 261755 - RNA, 22 nt, Human
cuguaaauaugaagaauauaug

SEQ ID NO: 261756 - RNA, 22 nt, Human
gagaggagguggcuaugacagc

SEQ ID NO: 261757 - RNA, 22 nt, Human
aaauuucuguuguuuugagcca

SEQ ID NO: 261758 - RNA, 22 nt, Human
gcagaggagcaagcuggacacc

SEQ ID NO: 261759 - RNA, 22 nt, Human
uucucaggccuuugggauggga

SEQ ID NO: 261760 - RNA, 22 nt, Human
ucacagcuuugagcagagacca

SEQ ID NO: 261761 - RNA, 22 nt, Human
ugggaacauuuugagcugagag

SEQ ID NO: 261762 - RNA, 22 nt, Human
cuccaggcgcuuaccaagcgcu

SEQ ID NO: 261763 - RNA, 21 nt, Human
uuguguuuccccagucacuuu

SEQ ID NO: 261764 - RNA, 22 nt, Human
uguggacuuuauuuuagggagg

SEQ ID NO: 261765 - RNA, 22 nt, Human
ucuggcuguguaagguagcacc

SEQ ID NO: 261766 - RNA, 19 nt, Human
ugcaaauucuaaaaacuga

SEQ ID NO: 261767 - RNA, 22 nt, Human
ggcacacagauggagcacuagc

SEQ ID NO: 261768 - RNA, 22 nt, Human
gagguuggagggcuggccugca

SEQ ID NO: 261769 - RNA, 19 nt, Human
agugagcauccagagaggu

SEQ ID NO: 261770 - RNA, 22 nt, Human
caggggccaggcugucugcugu

SEQ ID NO: 261771 - RNA, 22 nt, Human
gccugcaguucugugcuaggca

SEQ ID NO: 261772 - RNA, 22 nt, Human
aggcucagcccaagguggagag

SEQ ID NO: 261773 - RNA, 23 nt, Human
uucaaaacuggaaaaucagaugc

SEQ ID NO: 261774 - RNA, 16 nt, Human
gagggcagaggcggaa

SEQ ID NO: 261775 - RNA, 22 nt, Human
uccaggcaaagugcugggcugc

SEQ ID NO: 261776 - RNA, 22 nt, Human
ccuuggcuaggcagcggcuguc

SEQ ID NO: 261777 - RNA, 22 nt, Human
uucuguaggacuucugccaacu

SEQ ID NO: 261778 - RNA, 22 nt, Human
aaguucaaguaguguuacaugg

SEQ ID NO: 261779 - RNA, 22 nt, Human
aguuugccccgucacccuggug

SEQ ID NO: 261780 - RNA, 22 nt, Human
aaaaaugcuuggacuuaauaaa

SEQ ID NO: 261781 - RNA, 22 nt, Human
gaacaauacaggcuuuauuccu

SEQ ID NO: 261782 - RNA, 22 nt, Human
uaaggaaaauggacaucaaaca

SEQ ID NO: 261783 - RNA, 20 nt, Human
aggcucagauacccagggaa

SEQ ID NO: 261784 - RNA, 22 nt, Human
uauaaaacagaaagcacuaccu

SEQ ID NO: 261785 - RNA, 22 nt, Human
guuuccugucugcuuuacuaua

SEQ ID NO: 261786 - RNA, 21 nt, Human
uucucuggauaggccaguccu

SEQ ID NO: 261787 - RNA, 22 nt, Human
ugcccagguuugagugcccaag

SEQ ID NO: 261788 - RNA, 22 nt, Human
gguccguuuuugaagacagugg

SEQ ID NO: 261789 - RNA, 22 nt, Human
aacacuuagauuuuuaagguuu

SEQ ID NO: 261790 - RNA, 22 nt, Human
agaagucuggaauuccugcagg

SEQ ID NO: 261791 - RNA, 22 nt, Human
cauacauaugcauguguguaua

SEQ ID NO: 261792 - RNA, 22 nt, Human
uguuaacagccagauuugguga

SEQ ID NO: 261793 - RNA, 22 nt, Human
ugagcuggcaggggcucaggga

SEQ ID NO: 261794 - RNA, 22 nt, Human
ucccagggugcgccugcccucg

SEQ ID NO: 261795 - RNA, 22 nt, Human
uggagcaggacugcugcccuca

SEQ ID NO: 261796 - RNA, 22 nt, Human
ugcaaauugcgauuuuuauuag

SEQ ID NO: 261797 - RNA, 22 nt, Human
cauagaaaucaggugagaaucu

SEQ ID NO: 261798 - RNA, 22 nt, Human
agaggcacaacagucccauugu

SEQ ID NO: 261799 - RNA, 22 nt, Human
ucuugggauagugucucauggc

SEQ ID NO: 261800 - RNA, 22 nt, Human
ucaggaaagaguuagaugauua

SEQ ID NO: 261801 - RNA, 22 nt, Human
cacagacuccccgccauagugg

SEQ ID NO: 261802 - RNA, 22 nt, Human
aacaaaugauuguugguuggag

SEQ ID NO: 261803 - RNA, 18 nt, Human
cucaggccuuucccugug

SEQ ID NO: 261804 - RNA, 22 nt, Human
cauuuacaauguacagguugug

SEQ ID NO: 261805 - RNA, 22 nt, Human
uggcagcagcuaacuuaggcag

SEQ ID NO: 261806 - RNA, 22 nt, Human
guccagaagcucaaguugaacu

SEQ ID NO: 261807 - RNA, 22 nt, Human
aagccuuuuccaccuaauagag

SEQ ID NO: 261808 - RNA, 22 nt, Human
uuaaggaacuugucuuucucuu

SEQ ID NO: 261809 - RNA, 22 nt, Human
uauuucagacacugaucuugca

SEQ ID NO: 261810 - RNA, 22 nt, Human
uccuggccucacaguccugggu

SEQ ID NO: 261811 - RNA, 22 nt, Human
guuuccugacuguggaauuaua

SEQ ID NO: 261812 - RNA, 22 nt, Human
agagccagaccauugccgugca

SEQ ID NO: 261813 - RNA, 22 nt, Human
uucauguuuguaggacugaggc

SEQ ID NO: 261814 - RNA, 21 nt, Human
uccuccuggccaggcggcccc

SEQ ID NO: 261815 - RNA, 22 nt, Human
agguccaguuuucugacaaggg

SEQ ID NO: 261816 - RNA, 19 nt, Human
guccucucaacaacccggg

SEQ ID NO: 261817 - RNA, 22 nt, Human
gagcccugcgugucugggggca

SEQ ID NO: 261818 - RNA, 22 nt, Human
accuguuuaccugcaccuguuu

SEQ ID NO: 261819 - RNA, 22 nt, Human
aagcauuuuucacagcaacagc

SEQ ID NO: 261820 - RNA, 22 nt, Human
ucuucaguagguccucagaauc

SEQ ID NO: 261821 - RNA, 22 nt, Human
ucuccagucucaagacauugag

SEQ ID NO: 261822 - RNA, 22 nt, Human
uggaaccaucaaagagauccug

SEQ ID NO: 261823 - RNA, 22 nt, Human
gccugaggaauugaggggguaa

SEQ ID NO: 261824 - RNA, 22 nt, Human
gacagcagauacuuucauugaa

SEQ ID NO: 261825 - RNA, 22 nt, Human
gcccagcacuccucucugacau

SEQ ID NO: 261826 - RNA, 22 nt, Human
cugagggagggacuuugagacu

SEQ ID NO: 261827 - RNA, 22 nt, Human
agauaaacccaacuuaaugaag

SEQ ID NO: 261828 - RNA, 22 nt, Human
cagagagcaugggaggcccgag

SEQ ID NO: 261829 - RNA, 22 nt, Human
uugaggaggaacugugaggcaa

SEQ ID NO: 261830 - RNA, 22 nt, Human
cagcugaaccuuucccuggagc

SEQ ID NO: 261831 - RNA, 22 nt, Human
uuuccuguugccaucaagaaug

SEQ ID NO: 261832 - RNA, 22 nt, Human
uggauuuuagcauguaacugug

SEQ ID NO: 261833 - RNA, 22 nt, Human
aaauguaguauguugcauguau

SEQ ID NO: 261834 - RNA, 22 nt, Human
ggguaggagaggugucugugug

SEQ ID NO: 261835 - RNA, 17 nt, Human
ugcaggcuguuauagcc

SEQ ID NO: 261836 - RNA, 22 nt, Human
uggccaguuugcucaggcaguc

SEQ ID NO: 261837 - RNA, 22 nt, Human
ugggggcagccaggcugucaag

SEQ ID NO: 261838 - RNA, 22 nt, Human
gcucccagggacacuggccacu

SEQ ID NO: 261839 - RNA, 22 nt, Human
ccauggccugaaggagugcauc

SEQ ID NO: 261840 - RNA, 22 nt, Human
ucucugagccccugccucuuuc

SEQ ID NO: 261841 - RNA, 22 nt, Human
agagucaguaacauauauggua

SEQ ID NO: 261842 - RNA, 22 nt, Human
cacuuuacuaucuauaaaauaa

SEQ ID NO: 261843 - RNA, 22 nt, Human
agugucugccuauuuuucaagc

SEQ ID NO: 261844 - RNA, 22 nt, Human
uacaugugguagggagggcagu

SEQ ID NO: 261845 - RNA, 22 nt, Human
gcagcuguacuggcagcauugu

SEQ ID NO: 261846 - RNA, 22 nt, Human
aaucuuaaagaauauucuacca

SEQ ID NO: 261847 - RNA, 22 nt, Human
gggcagagaaauggacaguugg

SEQ ID NO: 261848 - RNA, 22 nt, Human
cugaggaguuucuuauaugugu

SEQ ID NO: 261849 - RNA, 22 nt, Human
acccucugccuugagcagugcc

SEQ ID NO: 261850 - RNA, 22 nt, Human
uacaagauaagaauuggcaagg

SEQ ID NO: 261851 - RNA, 22 nt, Human
cucagcaacccuagaacauuug

SEQ ID NO: 261852 - RNA, 22 nt, Human
cuuuuccuauugauucuguuac

SEQ ID NO: 261853 - RNA, 22 nt, Human
gccaaaguccacuugcuuucug

SEQ ID NO: 261854 - RNA, 22 nt, Human
cacuuuauuauaaauuugagag

SEQ ID NO: 261855 - RNA, 22 nt, Human
cuagaaaugcucaagagaaagu

SEQ ID NO: 261856 - RNA, 22 nt, Human
cuuuugcagccauuauugcugc

SEQ ID NO: 261857 - RNA, 22 nt, Human
cuggcucccgaagcccucagug

SEQ ID NO: 261858 - RNA, 22 nt, Human
gcacagagucacuagcuaagca

SEQ ID NO: 261859 - RNA, 22 nt, Human
acccuucauagaggagaagcug

SEQ ID NO: 261860 - RNA, 22 nt, Human
uguggcucugccuggcaguauu

SEQ ID NO: 261861 - RNA, 22 nt, Human
cccagugucucuugugccuuuc

SEQ ID NO: 261862 - RNA, 22 nt, Human
gugcauuacauguaauaaaaua

SEQ ID NO: 261863 - RNA, 22 nt, Human
acuuguuucaacuguacucuca

SEQ ID NO: 261864 - RNA, 22 nt, Human
augacaugauugccauuugaua

SEQ ID NO: 261865 - RNA, 22 nt, Human
aauggagacuucaaaauggauu

SEQ ID NO: 261866 - RNA, 22 nt, Human
uuucucugugccauuuccauaa

SEQ ID NO: 261867 - RNA, 21 nt, Human
ugaucauuuguguaaaggaga

SEQ ID NO: 261868 - RNA, 22 nt, Human
cuuuguuaucuguaaaugguua

SEQ ID NO: 261869 - RNA, 19 nt, Human
gggcaguggcacuagggag

SEQ ID NO: 261870 - RNA, 23 nt, Human
ugcagggcaaguuagagacccca

SEQ ID NO: 261871 - RNA, 22 nt, Human
uucaggcauggaaacuggauua

SEQ ID NO: 261872 - RNA, 22 nt, Human
guacauuucucuuguucuuauu

SEQ ID NO: 261873 - RNA, 22 nt, Human
gcucuguaucuguggggcuucc

SEQ ID NO: 261874 - RNA, 22 nt, Human
aggggaccaaaauguccugccu

SEQ ID NO: 261875 - RNA, 18 nt, Human
ucuguugagcagagaggc

SEQ ID NO: 261876 - RNA, 16 nt, Human
caccaguccuuccugc

SEQ ID NO: 261877 - RNA, 21 nt, Human
uuacaacauuuguguucuaug

SEQ ID NO: 261878 - RNA, 22 nt, Human
uauguuauauuuugucaauugu

SEQ ID NO: 261879 - RNA, 22 nt, Human
ggcagcacugcagcuuguuggg

SEQ ID NO: 261880 - RNA, 22 nt, Human
uuccuggcugaucuaccaaagu

SEQ ID NO: 261881 - RNA, 22 nt, Human
acacuugaggaauguggugauu

SEQ ID NO: 261882 - RNA, 22 nt, Human
ugcaauaaggaguaauaguaaa

SEQ ID NO: 261883 - RNA, 17 nt, Human
agcuccuggggucuuua

SEQ ID NO: 261884 - RNA, 22 nt, Human
cuccaugggggcuggccugugu

SEQ ID NO: 261885 - RNA, 22 nt, Human
aaaguuuuguugauuguggaau

SEQ ID NO: 261886 - RNA, 22 nt, Human
gccaggcaguucaaguacacca

SEQ ID NO: 261887 - RNA, 22 nt, Human
gcuccuggugcaaaguuucuuc

SEQ ID NO: 261888 - RNA, 22 nt, Human
gcaagcaguuacccaggauucg

SEQ ID NO: 261889 - RNA, 22 nt, Human
cauugauuauugaagggucuuu

SEQ ID NO: 261890 - RNA, 22 nt, Human
ucccucaucucacaugugugug

SEQ ID NO: 261891 - RNA, 22 nt, Human
auugaaucugcacuaguauuuu

SEQ ID NO: 261892 - RNA, 22 nt, Human
gugcaaaaauaauugugguuuu

SEQ ID NO: 261893 - RNA, 22 nt, Human
aagaggucauaccagauaaggg

SEQ ID NO: 261894 - RNA, 22 nt, Human
gaggcacaguucuuccuccaga

SEQ ID NO: 261895 - RNA, 22 nt, Human
acagcuggacaggggagaguuu

SEQ ID NO: 261896 - RNA, 22 nt, Human
aagcagcagcaggauuaaagag

SEQ ID NO: 261897 - RNA, 22 nt, Human
aaauaacagucagggacaacau

SEQ ID NO: 261898 - RNA, 22 nt, Human
uucauguaguguaaugucuuca

SEQ ID NO: 261899 - RNA, 22 nt, Human
gaaugagggagauguuggugca

SEQ ID NO: 261900 - RNA, 22 nt, Human
gaugugagugguagcugggauu

SEQ ID NO: 261901 - RNA, 22 nt, Human
uguuucuucucacacaaacuca

SEQ ID NO: 261902 - RNA, 22 nt, Human
ggccuaggaaggggauguaacu

SEQ ID NO: 261903 - RNA, 22 nt, Human
aggccuggugaaugaaguaucu

SEQ ID NO: 261904 - RNA, 23 nt, Human
uuguccagcugguuugggccaca

SEQ ID NO: 261905 - RNA, 22 nt, Human
gcagccucugcaguucaggagg

SEQ ID NO: 261906 - RNA, 22 nt, Human
caggcccugcugcugagaccuu

SEQ ID NO: 261907 - RNA, 22 nt, Human
agugcuggauuacaggcgugag

SEQ ID NO: 261908 - RNA, 22 nt, Human
ugcuggagaccugcuugcacca

SEQ ID NO: 261909 - RNA, 22 nt, Human
cuccagccucaucuccuggcug

SEQ ID NO: 261910 - RNA, 22 nt, Human
ccagagaggccaaggucguggu

SEQ ID NO: 261911 - RNA, 19 nt, Human
uccuggcauuuguaggaaa

SEQ ID NO: 261912 - RNA, 22 nt, Human
gaacuggguccuugagucuaga

SEQ ID NO: 261913 - RNA, 22 nt, Human
aaauagcuucuaagccuuuuga

SEQ ID NO: 261914 - RNA, 22 nt, Human
agguguggcuggggcagaggcc

SEQ ID NO: 261915 - RNA, 22 nt, Human
ccuggcugcaguuuuugcagaa

SEQ ID NO: 261916 - RNA, 22 nt, Human
cagacucuugagcugauuguau

SEQ ID NO: 261917 - RNA, 22 nt, Human
uuccaguucccaugaggauuaa

SEQ ID NO: 261918 - RNA, 18 nt, Human
cugaggcuggcaggagcc

SEQ ID NO: 261919 - RNA, 22 nt, Human
cuggaaaaugaagaagcagagg

SEQ ID NO: 261920 - RNA, 22 nt, Human
guccugagcccucagcacagca

SEQ ID NO: 261921 - RNA, 22 nt, Human
uguuccaauaaggaguugaaau

SEQ ID NO: 261922 - RNA, 22 nt, Human
uuuaaagagaaugugaaggagu

SEQ ID NO: 261923 - RNA, 22 nt, Human
ggauguuuggcguuugaauugc

SEQ ID NO: 261924 - RNA, 22 nt, Human
uguaaacuguagaaaauacuuu

SEQ ID NO: 261925 - RNA, 22 nt, Human
gaggggcaaugagggaaagagu

SEQ ID NO: 261926 - RNA, 22 nt, Human
gaauuguagagggaacagaagc

SEQ ID NO: 261927 - RNA, 22 nt, Human
auuucagagaaugaaccuaauc

SEQ ID NO: 261928 - RNA, 22 nt, Human
cagcaggauaugguggagagag

SEQ ID NO: 261929 - RNA, 22 nt, Human
gacacagcuaauggcuuaggac

SEQ ID NO: 261930 - RNA, 22 nt, Human
uuucacauucuucugaaucuac

SEQ ID NO: 261931 - RNA, 22 nt, Human
uagugaauuccuaauaggaaga

SEQ ID NO: 261932 - RNA, 22 nt, Human
ucucugagcccagugucccccu

SEQ ID NO: 261933 - RNA, 22 nt, Human
aauuuagauugauaaacaugga

SEQ ID NO: 261934 - RNA, 22 nt, Human
auccaggcgaaugcagaaggcc

SEQ ID NO: 261935 - RNA, 21 nt, Human
agaguuacugucauccuaggu

SEQ ID NO: 261936 - RNA, 22 nt, Human
cuauacaguaaccacagugauu

SEQ ID NO: 261937 - RNA, 22 nt, Human
uauuucaacguaugaaaagcug

SEQ ID NO: 261938 - RNA, 22 nt, Human
uccuggcagguguauuggcugu

SEQ ID NO: 261939 - RNA, 22 nt, Human
uaggcugagcuuguagaucgua

SEQ ID NO: 261940 - RNA, 22 nt, Human
agcgugaauuaguugguacaca

SEQ ID NO: 261941 - RNA, 22 nt, Human
aauugcuuuuauuuagggccag

SEQ ID NO: 261942 - RNA, 22 nt, Human
uuccaggaacacucuguguccc

SEQ ID NO: 261943 - RNA, 22 nt, Human
uggcucuguggauguucugacc

SEQ ID NO: 261944 - RNA, 22 nt, Human
ccuccuuccugggacagagcug

SEQ ID NO: 261945 - RNA, 22 nt, Human
aguaggacuagggguugaggca

SEQ ID NO: 261946 - RNA, 22 nt, Human
gggcaauuaaggucccguuucc

SEQ ID NO: 261947 - RNA, 22 nt, Human
ucaaugagcuggggacguguac

SEQ ID NO: 261948 - RNA, 22 nt, Human
uugacaaaaaccucauuucacc

SEQ ID NO: 261949 - RNA, 23 nt, Human
aucaaacuggugagaaugucagu

SEQ ID NO: 261950 - RNA, 18 nt, Human
uggcuucuauuuuacuca

SEQ ID NO: 261951 - RNA, 23 nt, Human
aaacuacaacgccaggcacugag

SEQ ID NO: 261952 - RNA, 20 nt, Human
auagaaucacaaguccugaa

SEQ ID NO: 261953 - RNA, 22 nt, Human
cacaauuuguuuuaucaguauu

SEQ ID NO: 261954 - RNA, 22 nt, Human
agcuccuguucugagagcagga

SEQ ID NO: 261955 - RNA, 22 nt, Human
uaauacaauggaguugggcccc

SEQ ID NO: 261956 - RNA, 22 nt, Human
uaaagcauguuucaguaagguu

SEQ ID NO: 261957 - RNA, 22 nt, Human
gaggcagagugcaccccaggag

SEQ ID NO: 261958 - RNA, 19 nt, Human
agcuguggaugugggauuu

SEQ ID NO: 261959 - RNA, 21 nt, Human
agcagaggggacauguuugau

SEQ ID NO: 261960 - RNA, 22 nt, Human
aggcagagagcaguggccgucu

SEQ ID NO: 261961 - RNA, 22 nt, Human
aacuauacucuguaaaugugcu

SEQ ID NO: 261962 - RNA, 22 nt, Human
gcugggaggcagcaccuuuagc

SEQ ID NO: 261963 - RNA, 22 nt, Human
ugucccucauugacgcugugcc

SEQ ID NO: 261964 - RNA, 22 nt, Human
gcccuggccuucaucucagaca

SEQ ID NO: 261965 - RNA, 22 nt, Human
ggaaagggcauggccuuuucac

SEQ ID NO: 261966 - RNA, 22 nt, Human
acuuucaugcucugagcacugg

SEQ ID NO: 261967 - RNA, 22 nt, Human
uggguccuggcuuugucagggu

SEQ ID NO: 261968 - RNA, 22 nt, Human
guauucagggcuagucagagga

SEQ ID NO: 261969 - RNA, 22 nt, Human
agagugauucuaguuagggaau

SEQ ID NO: 261970 - RNA, 22 nt, Human
gugggaagagccaauuggggua

SEQ ID NO: 261971 - RNA, 22 nt, Human
uccaggaaagugggaugugugu

SEQ ID NO: 261972 - RNA, 22 nt, Human
guuuagaauucuaacuuuaagg

SEQ ID NO: 261973 - RNA, 21 nt, Human
uuuaaagaauaggaagggagg

SEQ ID NO: 261974 - RNA, 20 nt, Human
ggcaguuaaggcacagucau

SEQ ID NO: 261975 - RNA, 22 nt, Human
gcagggaccuugcccacccucc

SEQ ID NO: 261976 - RNA, 22 nt, Human
aagcacaguaaaagcagauuuu

SEQ ID NO: 261977 - RNA, 22 nt, Human
acuacaguacuauaucuauagg

SEQ ID NO: 261978 - RNA, 22 nt, Human
gaaggagacccugaagaugcug

SEQ ID NO: 261979 - RNA, 22 nt, Human
uggccagguguggguucucaga

SEQ ID NO: 261980 - RNA, 22 nt, Human
aucuguacuaauuaauuaaugu

SEQ ID NO: 261981 - RNA, 22 nt, Human
ugauuugcauggagaauaacag

SEQ ID NO: 261982 - RNA, 22 nt, Human
augaagcagaauuucccacucu

SEQ ID NO: 261983 - RNA, 22 nt, Human
ucagaggaagcaucaaguucuc

SEQ ID NO: 261984 - RNA, 22 nt, Human
gggcucucgauuagacccuggg

SEQ ID NO: 261985 - RNA, 22 nt, Human
aggcucaggucucaggucuggc

SEQ ID NO: 261986 - RNA, 22 nt, Human
ucugucauguuuccauuacaug

SEQ ID NO: 261987 - RNA, 22 nt, Human
agaauacaguucaguaauggau

SEQ ID NO: 261988 - RNA, 22 nt, Human
gcccagagggaagaggugucau

SEQ ID NO: 261989 - RNA, 22 nt, Human
uucuguuuugcacagacuugaa

SEQ ID NO: 261990 - RNA, 22 nt, Human
gucucagguauugaaugggaac

SEQ ID NO: 261991 - RNA, 22 nt, Human
cugaggagcguuggucacgugu

SEQ ID NO: 261992 - RNA, 22 nt, Human
uccagccaugacucggacagug

SEQ ID NO: 261993 - RNA, 22 nt, Human
uuuagacaagauccuucugaau

SEQ ID NO: 261994 - RNA, 22 nt, Human
ucugaggaaucuugacacauuu

SEQ ID NO: 261995 - RNA, 22 nt, Human
cagugagguggaguaguuccca

SEQ ID NO: 261996 - RNA, 22 nt, Human
uuccuugaaaguuugaacugac

SEQ ID NO: 261997 - RNA, 22 nt, Human
aagucugggccagggcacagcc

SEQ ID NO: 261998 - RNA, 22 nt, Human
gcagaagucagaccaucugaau

SEQ ID NO: 261999 - RNA, 22 nt, Human
uuggaaaugcaaauauauugaa

SEQ ID NO: 262000 - RNA, 22 nt, Human
ucagacaggcuucuuucucccu

SEQ ID NO: 262001 - RNA, 22 nt, Human
ccucugagaccagcucugcacc

SEQ ID NO: 262002 - RNA, 22 nt, Human
augaggcagcugacagcuguuc

SEQ ID NO: 262003 - RNA, 22 nt, Human
uccagggccaguccuugucugu

SEQ ID NO: 262004 - RNA, 19 nt, Human
aggcccagcgcugggggcu

SEQ ID NO: 262005 - RNA, 22 nt, Human
acagcucuuaggcagaaccaac

SEQ ID NO: 262006 - RNA, 22 nt, Human
aagccuggcacauuggagucug

SEQ ID NO: 262007 - RNA, 22 nt, Human
cucuggagaacuccuugugucu

SEQ ID NO: 262008 - RNA, 22 nt, Human
uguuccugaaugccuggcuggc

SEQ ID NO: 262009 - RNA, 22 nt, Human
gcuguacaaggccucugccauc

SEQ ID NO: 262010 - RNA, 21 nt, Human
auuuagaaggaaauuuugcaa

SEQ ID NO: 262011 - RNA, 22 nt, Human
gggcugggcaugguguucccuc

SEQ ID NO: 262012 - RNA, 22 nt, Human
acaugaaaacugguuccuucag

SEQ ID NO: 262013 - RNA, 22 nt, Human
cagcugucuggggagugcucgc

SEQ ID NO: 262014 - RNA, 22 nt, Human
uggccuguguggcuuccuggga

SEQ ID NO: 262015 - RNA, 22 nt, Human
auggugcuccugcaggaagcag

SEQ ID NO: 262016 - RNA, 22 nt, Human
cgaaaucagcaucuugaggcaa

SEQ ID NO: 262017 - RNA, 22 nt, Human
acuuucuguuagaugaauggau

SEQ ID NO: 262018 - RNA, 22 nt, Human
ucuagagacuauaauguguccu

SEQ ID NO: 262019 - RNA, 22 nt, Human
ugacaauacagagagagcaaaa

SEQ ID NO: 262020 - RNA, 22 nt, Human
uuucuguaaguggcaaauaaug

SEQ ID NO: 262021 - RNA, 22 nt, Human
gguucacauauugagaguauuc

SEQ ID NO: 262022 - RNA, 22 nt, Human
ucuaggaaauuguuacuauauu

SEQ ID NO: 262023 - RNA, 22 nt, Human
uccccacucaccacuggccaaa

SEQ ID NO: 262024 - RNA, 22 nt, Human
uuacagacaaacuguguuaagu

SEQ ID NO: 262025 - RNA, 22 nt, Human
aacaucuacuaagugccaggca

SEQ ID NO: 262026 - RNA, 22 nt, Human
acacuguagauauagaguuagu

SEQ ID NO: 262027 - RNA, 22 nt, Human
gucugagggacagaguccuggc

SEQ ID NO: 262028 - RNA, 22 nt, Human
gucugggauugggguaaagaag

SEQ ID NO: 262029 - RNA, 22 nt, Human
ggggaccuucccagagcaguug

SEQ ID NO: 262030 - RNA, 22 nt, Human
agugugagccuacaggccaaag

SEQ ID NO: 262031 - RNA, 22 nt, Human
uuguaauuaauggcagcaauua

SEQ ID NO: 262032 - RNA, 22 nt, Human
gcuucccauaguggaauucggg

SEQ ID NO: 262033 - RNA, 22 nt, Human
aagcugaagccggaucaaaaag

SEQ ID NO: 262034 - RNA, 22 nt, Human
ccuuaaaagaacuaucucuucu

SEQ ID NO: 262035 - RNA, 22 nt, Human
aaguaucugggagauuugcuuu

SEQ ID NO: 262036 - RNA, 22 nt, Human
acucuguacgcaagagauggag

SEQ ID NO: 262037 - RNA, 19 nt, Human
cuggcuucaagcaguccuc

SEQ ID NO: 262038 - RNA, 22 nt, Human
ucccuggcacaagaaggcuguc

SEQ ID NO: 262039 - RNA, 22 nt, Human
gagcccugugauucuguugugu

SEQ ID NO: 262040 - RNA, 22 nt, Human
aucugggcauggaggaaagaga

SEQ ID NO: 262041 - RNA, 22 nt, Human
uccucagcauuagcacagacau

SEQ ID NO: 262042 - RNA, 22 nt, Human
aggacaguggcaaggcaggaca

SEQ ID NO: 262043 - RNA, 22 nt, Human
aucaucuuaucugacucauuuu

SEQ ID NO: 262044 - RNA, 22 nt, Human
uaagacacauucauaucugucu

SEQ ID NO: 262045 - RNA, 20 nt, Human
uacaaguacauuauaguuau

SEQ ID NO: 262046 - RNA, 22 nt, Human
uucucauucugacucaguguag

SEQ ID NO: 262047 - RNA, 22 nt, Human
ucccugagacucuggaguguaa

SEQ ID NO: 262048 - RNA, 22 nt, Human
uaauuuuaacugugcuguuugg

SEQ ID NO: 262049 - RNA, 22 nt, Human
gccagccugugggggcucugug

SEQ ID NO: 262050 - RNA, 22 nt, Human
aggcaggugggagugauuccuu

SEQ ID NO: 262051 - RNA, 22 nt, Human
uacauauacugagugauuugcu

SEQ ID NO: 262052 - RNA, 22 nt, Human
ccugccagcgcuuaucucucgg

SEQ ID NO: 262053 - RNA, 22 nt, Human
acauugaauucaaaauuacuga

SEQ ID NO: 262054 - RNA, 22 nt, Human
ccaggagacccagggaaggagc

SEQ ID NO: 262055 - RNA, 22 nt, Human
uccagccaacugccuagggagc

SEQ ID NO: 262056 - RNA, 22 nt, Human
guuauugacucucuuguggcuu

SEQ ID NO: 262057 - RNA, 22 nt, Human
ucuguaaucaagauauuugaga

SEQ ID NO: 262058 - RNA, 22 nt, Human
aggcucugaugcaagcccaggg

SEQ ID NO: 262059 - RNA, 22 nt, Human
uacaaugauuagcuaacuugcc

SEQ ID NO: 262060 - RNA, 22 nt, Human
gcauguguaugguaggaauauu

SEQ ID NO: 262061 - RNA, 22 nt, Human
aaaugcagaucccugaaucuca

SEQ ID NO: 262062 - RNA, 22 nt, Human
gagcaacaguggcagugguggg

SEQ ID NO: 262063 - RNA, 22 nt, Human
aaagcaagacaggaguuucaga

SEQ ID NO: 262064 - RNA, 22 nt, Human
auccuucuccaaaacuggcucc

SEQ ID NO: 262065 - RNA, 22 nt, Human
uuguuuccauugcagacugugu

SEQ ID NO: 262066 - RNA, 22 nt, Human
uggggagguucgggaaucuugu

SEQ ID NO: 262067 - RNA, 22 nt, Human
cacaauuccauggcauucuuug

SEQ ID NO: 262068 - RNA, 16 nt, Human
ucuuaguuguguggua

SEQ ID NO: 262069 - RNA, 22 nt, Human
acagggaauggagggaucagua

SEQ ID NO: 262070 - RNA, 22 nt, Human
ucagucaugaccauggggugga

SEQ ID NO: 262071 - RNA, 22 nt, Human
cuggacagaaaaggccacugga

SEQ ID NO: 262072 - RNA, 22 nt, Human
cgccugcucuguuuccaugugg

SEQ ID NO: 262073 - RNA, 22 nt, Human
ggcagcucacgggcauggggug

SEQ ID NO: 262074 - RNA, 22 nt, Human
aauguguacuuuuucaugcuca

SEQ ID NO: 262075 - RNA, 22 nt, Human
gacccauauauacguaauuugu

SEQ ID NO: 262076 - RNA, 22 nt, Human
cuugcuucauuagugucuuagu

SEQ ID NO: 262077 - RNA, 17 nt, Human
ccaggcuccaucacugu

SEQ ID NO: 262078 - RNA, 22 nt, Human
gcacaguaggcucagcucuauc

SEQ ID NO: 262079 - RNA, 21 nt, Human
uccaggccaugguggggaggc

SEQ ID NO: 262080 - RNA, 22 nt, Human
ccuugcccugagcaggggucag

SEQ ID NO: 262081 - RNA, 22 nt, Human
agaagccacaggaaagcagcuu

SEQ ID NO: 262082 - RNA, 22 nt, Human
uggcuucuuucuuuccaugugu

SEQ ID NO: 262083 - RNA, 22 nt, Human
gccaggaggcuuaacuggacag

SEQ ID NO: 262084 - RNA, 22 nt, Human
ugucuguauuagucagcauucu

SEQ ID NO: 262085 - RNA, 22 nt, Human
ugaaaaaccucaguccgcuuua

SEQ ID NO: 262086 - RNA, 22 nt, Human
gcuuucuguagguaguuacugu

SEQ ID NO: 262087 - RNA, 22 nt, Human
aaaggcuuuaaaauguacauau

SEQ ID NO: 262088 - RNA, 22 nt, Human
aauuauacaugaaggcauuaua

SEQ ID NO: 262089 - RNA, 22 nt, Human
gcuggaggcaguucagacacca

SEQ ID NO: 262090 - RNA, 22 nt, Human
cuccaggacagauucagggcca

SEQ ID NO: 262091 - RNA, 18 nt, Human
agcagguggcgucugcag

SEQ ID NO: 262092 - RNA, 22 nt, Human
aaauguaccuugauaguuuggu

SEQ ID NO: 262093 - RNA, 22 nt, Human
aacaaugugauugaagcuagaa

SEQ ID NO: 262094 - RNA, 22 nt, Human
uccuaaaggcugcuuuuauauu

SEQ ID NO: 262095 - RNA, 22 nt, Human
agagcucaguguguuaugguua

SEQ ID NO: 262096 - RNA, 22 nt, Human
ccugccuguacuagagacccag

SEQ ID NO: 262097 - RNA, 22 nt, Human
agagaauuaacauuccauggcu

SEQ ID NO: 262098 - RNA, 22 nt, Human
cugaggaguuggugaauaagcc

SEQ ID NO: 262099 - RNA, 22 nt, Human
caggacaguuugcuuugcccug

SEQ ID NO: 262100 - RNA, 21 nt, Human
aguccaggaggaggccagguu

SEQ ID NO: 262101 - RNA, 22 nt, Human
aguccuuagaacacuguaucug

SEQ ID NO: 262102 - RNA, 22 nt, Human
gaggagcucugcuccauccuuc

SEQ ID NO: 262103 - RNA, 22 nt, Human
uguggaagccggugggaagcag

SEQ ID NO: 262104 - RNA, 22 nt, Human
aaucgcuugguaauuuuaaaag

SEQ ID NO: 262105 - RNA, 22 nt, Human
aaauuguaggaucacaugaccu

SEQ ID NO: 262106 - RNA, 22 nt, Human
gggggaagaaagaacauggcau

SEQ ID NO: 262107 - RNA, 22 nt, Human
agucuccagaaauauagcagug

SEQ ID NO: 262108 - RNA, 22 nt, Human
aguggcugucuuccaaaaucug

SEQ ID NO: 262109 - RNA, 23 nt, Human
caggacaugggaggaaguauggc

SEQ ID NO: 262110 - RNA, 22 nt, Human
auccaagucagggauaguuuga

SEQ ID NO: 262111 - RNA, 22 nt, Human
uugaaagauauguuaaucuuuc

SEQ ID NO: 262112 - RNA, 22 nt, Human
uugauacaggccuucuagauga

SEQ ID NO: 262113 - RNA, 22 nt, Human
aacuuucuccagugccaacuau

SEQ ID NO: 262114 - RNA, 22 nt, Human
ugcaauaacccaguaucuguga

SEQ ID NO: 262115 - RNA, 22 nt, Human
uuguggaagcccuaugagagac

SEQ ID NO: 262116 - RNA, 22 nt, Human
aggcaaauugugagaaaaugaa

SEQ ID NO: 262117 - RNA, 22 nt, Human
caaggcugucuccagcuuccaa

SEQ ID NO: 262118 - RNA, 22 nt, Human
gagagggagccagccaggaacc

SEQ ID NO: 262119 - RNA, 23 nt, Human
uguguacacaauagaugagguuu

SEQ ID NO: 262120 - RNA, 22 nt, Human
aggagccaugagugacaucaca

SEQ ID NO: 262121 - RNA, 22 nt, Human
cucucgcgugugccuuuccgcu

SEQ ID NO: 262122 - RNA, 22 nt, Human
gaauuauaggcaaagcagucau

SEQ ID NO: 262123 - RNA, 22 nt, Human
acauucaaggcagcacugagug

SEQ ID NO: 262124 - RNA, 22 nt, Human
agugucuguuacgcuugcagaa

SEQ ID NO: 262125 - RNA, 22 nt, Human
uauaccaaaaaaauucuugucu

SEQ ID NO: 262126 - RNA, 22 nt, Human
ucugccugagggagcugaggaa

SEQ ID NO: 262127 - RNA, 22 nt, Human
acuggcaguuugagaaugcauu

SEQ ID NO: 262128 - RNA, 17 nt, Human
ccaggagagaugcuugu

SEQ ID NO: 262129 - RNA, 22 nt, Human
uuucuaggcacagugucuuccc

SEQ ID NO: 262130 - RNA, 22 nt, Human
gcuucuaaccugcuuccuguag

SEQ ID NO: 262131 - RNA, 22 nt, Human
accaggaacucacccgcagagg

SEQ ID NO: 262132 - RNA, 22 nt, Human
uggagagugguuugggggacau

SEQ ID NO: 262133 - RNA, 22 nt, Human
aagccaguguuuuugagaguug

SEQ ID NO: 262134 - RNA, 22 nt, Human
caggccuccacuccacgcagac

SEQ ID NO: 262135 - RNA, 22 nt, Human
ugccucugccuccauuguuagu

SEQ ID NO: 262136 - RNA, 22 nt, Human
ucaggaaauuaaacacuugaaa

SEQ ID NO: 262137 - RNA, 22 nt, Human
gcuucuuuccuugggcuggaac

SEQ ID NO: 262138 - RNA, 22 nt, Human
gggagcucgugcgcccaggugc

SEQ ID NO: 262139 - RNA, 22 nt, Human
uguuuaauaauucuaugauagu

SEQ ID NO: 262140 - RNA, 22 nt, Human
uuucuaaaauagauuuuauggu

SEQ ID NO: 262141 - RNA, 22 nt, Human
gugccugguauguagguagcgg

SEQ ID NO: 262142 - RNA, 22 nt, Human
gcagccagagggggugugauca

SEQ ID NO: 262143 - RNA, 22 nt, Human
uuaagauagaacccaguagucu

SEQ ID NO: 262144 - RNA, 22 nt, Human
ugcugaggcccaggagcacuuu

SEQ ID NO: 262145 - RNA, 22 nt, Human
uagaaaguaaacacgaagucuc

SEQ ID NO: 262146 - RNA, 22 nt, Human
uaaguacaaauguauacauaag

SEQ ID NO: 262147 - RNA, 22 nt, Human
cugaggccggagcacugaagag

SEQ ID NO: 262148 - RNA, 22 nt, Human
cagcccugccauggagccuccu

SEQ ID NO: 262149 - RNA, 22 nt, Human
gcugucugggaugucacugcug

SEQ ID NO: 262150 - RNA, 22 nt, Human
uggccugacugucaggcuguau

SEQ ID NO: 262151 - RNA, 22 nt, Human
aggcagccuauggggagcucag

SEQ ID NO: 262152 - RNA, 22 nt, Human
aggcccugcuuuccagagcuca

SEQ ID NO: 262153 - RNA, 22 nt, Human
auucaaaagaccaugcagacuc

SEQ ID NO: 262154 - RNA, 22 nt, Human
uccuggcauaauggcuuugcuc

SEQ ID NO: 262155 - RNA, 17 nt, Human
gaacaguguaagacacu

SEQ ID NO: 262156 - RNA, 22 nt, Human
acauuuaggauguuuugagaga

SEQ ID NO: 262157 - RNA, 22 nt, Human
uccagccauucauuaugacacc

SEQ ID NO: 262158 - RNA, 22 nt, Human
gccugccaaaagaagcugcugg

SEQ ID NO: 262159 - RNA, 22 nt, Human
ggcacagccacuuuggagaacu

SEQ ID NO: 262160 - RNA, 22 nt, Human
gaaaggcuugguuuugaauaua

SEQ ID NO: 262161 - RNA, 22 nt, Human
aaacucuauaggcagaagcaau

SEQ ID NO: 262162 - RNA, 22 nt, Human
ugacuccaaacagaaaacgaau

SEQ ID NO: 262163 - RNA, 22 nt, Human
gcaguaggggcuggagggcugu

SEQ ID NO: 262164 - RNA, 22 nt, Human
acuggcaggcugcuggccggcg

SEQ ID NO: 262165 - RNA, 22 nt, Human
uaguccagaaacugagcuuaua

SEQ ID NO: 262166 - RNA, 22 nt, Human
aaaugcauaucaaagacuugaa

SEQ ID NO: 262167 - RNA, 22 nt, Human
ucugcaccccgcagggucaggu

SEQ ID NO: 262168 - RNA, 21 nt, Human
agacuucuagaagugagauag

SEQ ID NO: 262169 - RNA, 21 nt, Human
uucuucaaagaagaaggcaca

SEQ ID NO: 262170 - RNA, 22 nt, Human
aucaaagugaaaagugcugaug

SEQ ID NO: 262171 - RNA, 22 nt, Human
cccaggcugguccugaacuccu

SEQ ID NO: 262172 - RNA, 22 nt, Human
caauguuuucaacugacaagua

SEQ ID NO: 262173 - RNA, 22 nt, Human
uagcagaggcugucugacuuaa

SEQ ID NO: 262174 - RNA, 22 nt, Human
gcucucucgugaacaggugguu

SEQ ID NO: 262175 - RNA, 22 nt, Human
ugcauauuguccuugauauuau

SEQ ID NO: 262176 - RNA, 22 nt, Human
uugauguaaagugauucauggg

SEQ ID NO: 262177 - RNA, 22 nt, Human
gaccuucaguguguuucucaca

SEQ ID NO: 262178 - RNA, 22 nt, Human
auugaaugcuugcuaacacuuu

SEQ ID NO: 262179 - RNA, 22 nt, Human
auuucaaggcuacagaaaccuu

SEQ ID NO: 262180 - RNA, 22 nt, Human
gaggaguggguuagugcuuauu

SEQ ID NO: 262181 - RNA, 22 nt, Human
ucccucagggugcaguugcuuu

SEQ ID NO: 262182 - RNA, 18 nt, Human
cagagcagagguggagcg

SEQ ID NO: 262183 - RNA, 22 nt, Human
gcacacaggggaguucucagaa

SEQ ID NO: 262184 - RNA, 20 nt, Human
aggcucagcugagcucuugg

SEQ ID NO: 262185 - RNA, 22 nt, Human
cuaucucuuguuuuccugaagc

SEQ ID NO: 262186 - RNA, 22 nt, Human
cugccucucagccugaccgcca

SEQ ID NO: 262187 - RNA, 22 nt, Human
acuggguguauuagugguguuu

SEQ ID NO: 262188 - RNA, 22 nt, Human
augcaucuuaucaaaaauuaua

SEQ ID NO: 262189 - RNA, 22 nt, Human
ucugucccugagagcucaggag

SEQ ID NO: 262190 - RNA, 22 nt, Human
uaggagcuuuuggaguccugug

SEQ ID NO: 262191 - RNA, 22 nt, Human
cuggagcugcuguccuugggug

SEQ ID NO: 262192 - RNA, 22 nt, Human
cuguggcucucagaggcugcug

SEQ ID NO: 262193 - RNA, 22 nt, Human
ucugggugccacugucuguaca

SEQ ID NO: 262194 - RNA, 23 nt, Human
aucauucuccaaucuggagcagg

SEQ ID NO: 262195 - RNA, 22 nt, Human
cuuaggaaugucccuucccaca

SEQ ID NO: 262196 - RNA, 22 nt, Human
ucagcugguguuucuucuccuu

SEQ ID NO: 262197 - RNA, 22 nt, Human
gagcaggcaacucugcagugcc

SEQ ID NO: 262198 - RNA, 22 nt, Human
cucccagguuccgacgccucuu

SEQ ID NO: 262199 - RNA, 22 nt, Human
cuauuuucugucucuauagagu

SEQ ID NO: 262200 - RNA, 22 nt, Human
gcucuggcuacuguggcuaccg

SEQ ID NO: 262201 - RNA, 22 nt, Human
aaaugcacugaacacauguugu

SEQ ID NO: 262202 - RNA, 22 nt, Human
augucugcggcccaggccaggg

SEQ ID NO: 262203 - RNA, 22 nt, Human
gugaggucuuugggaggugauu

SEQ ID NO: 262204 - RNA, 23 nt, Human
ucacaucugccguaguguauucu

SEQ ID NO: 262205 - RNA, 22 nt, Human
ggagacacccacauugcugggu

SEQ ID NO: 262206 - RNA, 22 nt, Human
ggcugggcauccauccaugaga

SEQ ID NO: 262207 - RNA, 22 nt, Human
uggcuccugcagaccaucugga

SEQ ID NO: 262208 - RNA, 22 nt, Human
uucuagaaauccguaagugaau

SEQ ID NO: 262209 - RNA, 22 nt, Human
acccugggacuuccgaguugag

SEQ ID NO: 262210 - RNA, 22 nt, Human
uuugacucauuaaagucuccgu

SEQ ID NO: 262211 - RNA, 22 nt, Human
ucuuaugaaaagcacuuagaac

SEQ ID NO: 262212 - RNA, 22 nt, Human
ccuagacuagaggcagggagcc

SEQ ID NO: 262213 - RNA, 22 nt, Human
aguauaaagugguuuucagcac

SEQ ID NO: 262214 - RNA, 20 nt, Human
acauagaucagugauugaca

SEQ ID NO: 262215 - RNA, 22 nt, Human
gcuguucaaaagccacaguuac

SEQ ID NO: 262216 - RNA, 19 nt, Human
cgugaacaugacugcaugg

SEQ ID NO: 262217 - RNA, 22 nt, Human
uuacauucccagugugcagcau

SEQ ID NO: 262218 - RNA, 22 nt, Human
aggucugggcaccacuggcugc

SEQ ID NO: 262219 - RNA, 23 nt, Human
augugcaaagugcuacaguauag

SEQ ID NO: 262220 - RNA, 22 nt, Human
ccccucucccucacuuaucaau

SEQ ID NO: 262221 - RNA, 22 nt, Human
ucccacacuacacgguuguugg

SEQ ID NO: 262222 - RNA, 22 nt, Human
gaggcaagagaagccagcuuuc

SEQ ID NO: 262223 - RNA, 22 nt, Human
uauuagguaaaggacuugcagg

SEQ ID NO: 262224 - RNA, 22 nt, Human
augacucaaaauuauuguuuug

SEQ ID NO: 262225 - RNA, 22 nt, Human
agcaacaggaccauggagccca

SEQ ID NO: 262226 - RNA, 22 nt, Human
cccagaaggcuugccaggaagc

SEQ ID NO: 262227 - RNA, 22 nt, Human
ccucagugcguacugaacagug

SEQ ID NO: 262228 - RNA, 22 nt, Human
ucuuggaauaccccgaagguca

SEQ ID NO: 262229 - RNA, 19 nt, Human
guguuuacugugugcagaa

SEQ ID NO: 262230 - RNA, 22 nt, Human
uuuuuaucuacagauucucagc

SEQ ID NO: 262231 - RNA, 22 nt, Human
uugauaucucugcuguguuagg

SEQ ID NO: 262232 - RNA, 22 nt, Human
agaggcugcacuugcucaugau

SEQ ID NO: 262233 - RNA, 22 nt, Human
agagucugaugucaacaguucu

SEQ ID NO: 262234 - RNA, 22 nt, Human
cagcagaggugguucacauugu

SEQ ID NO: 262235 - RNA, 23 nt, Human
ucucuggccuuugaucagguuga

SEQ ID NO: 262236 - RNA, 22 nt, Human
uucauucacccaggaaacaucu

SEQ ID NO: 262237 - RNA, 22 nt, Human
acaauucaagaagagagaugaa

SEQ ID NO: 262238 - RNA, 22 nt, Human
uaucaauacauguuaucagugu

SEQ ID NO: 262239 - RNA, 22 nt, Human
cuaggguggauuugugcagagu

SEQ ID NO: 262240 - RNA, 22 nt, Human
gcucagaggccacuguuggaaa

SEQ ID NO: 262241 - RNA, 22 nt, Human
uuacugauacacauaagaauuu

SEQ ID NO: 262242 - RNA, 22 nt, Human
uauuugaaaguguacaaaaacu

SEQ ID NO: 262243 - RNA, 22 nt, Human
guggcccucugauagggucagg

SEQ ID NO: 262244 - RNA, 22 nt, Human
gcagugcagugggacagggcgc

SEQ ID NO: 262245 - RNA, 20 nt, Human
cagcccugugaccuggcccu

SEQ ID NO: 262246 - RNA, 22 nt, Human
gcacagccggaccgaggaaaag

SEQ ID NO: 262247 - RNA, 22 nt, Human
uggccugccacugccacgccac

SEQ ID NO: 262248 - RNA, 22 nt, Human
ucagaggaccuuacugagaacc

SEQ ID NO: 262249 - RNA, 22 nt, Human
cagcagaaauggauuuugagau

SEQ ID NO: 262250 - RNA, 22 nt, Human
cagaggcaaaagagguggaggu

SEQ ID NO: 262251 - RNA, 22 nt, Human
aagcuggacucugccauuuacu

SEQ ID NO: 262252 - RNA, 21 nt, Human
acagagaaagagcagccuccu

SEQ ID NO: 262253 - RNA, 22 nt, Human
auggauuggauuuuuauggacc

SEQ ID NO: 262254 - RNA, 17 nt, Human
gacuuuggaguuucaua

SEQ ID NO: 262255 - RNA, 22 nt, Human
ugggccagcugaagugccgccc

SEQ ID NO: 262256 - RNA, 22 nt, Human
gcaggccuguaaugaagggaca

SEQ ID NO: 262257 - RNA, 22 nt, Human
ucuccaggaagcccucccugac

SEQ ID NO: 262258 - RNA, 22 nt, Human
auuaaauguuccuuaaauuaua

SEQ ID NO: 262259 - RNA, 22 nt, Human
aguccugucaccucuacuuucg

SEQ ID NO: 262260 - RNA, 22 nt, Human
auaguacaagggaagagugaag

SEQ ID NO: 262261 - RNA, 22 nt, Human
augcugagugagugaaacccag

SEQ ID NO: 262262 - RNA, 22 nt, Human
aaagaguucuaugaucuuucca

SEQ ID NO: 262263 - RNA, 20 nt, Human
cacccuacggccucaccucc

SEQ ID NO: 262264 - RNA, 22 nt, Human
ucaaauacagaagauccuuucc

SEQ ID NO: 262265 - RNA, 22 nt, Human
gcccuguggacagugagaagug

SEQ ID NO: 262266 - RNA, 22 nt, Human
ucugcaggugggccccuagaau

SEQ ID NO: 262267 - RNA, 22 nt, Human
cuguggaguuuguggcgcugac

SEQ ID NO: 262268 - RNA, 22 nt, Human
aaaagguuuugaguacaaauau

SEQ ID NO: 262269 - RNA, 22 nt, Human
gcucugcccaaugucccuacac

SEQ ID NO: 262270 - RNA, 22 nt, Human
ggucagugccuaucaugugggc

SEQ ID NO: 262271 - RNA, 17 nt, Human
augaggucauuaagaua

SEQ ID NO: 262272 - RNA, 23 nt, Human
uuugaaguugacugccuuccaga

SEQ ID NO: 262273 - RNA, 22 nt, Human
gcugggcuguaguuugcugacc

SEQ ID NO: 262274 - RNA, 23 nt, Human
ugccucaguggaaugugagggug

SEQ ID NO: 262275 - RNA, 22 nt, Human
caggaaagaaaugagaacacca

SEQ ID NO: 262276 - RNA, 22 nt, Human
ccugugaggucuugcaugugaa

SEQ ID NO: 262277 - RNA, 22 nt, Human
uuccccaggugauucucauggc

SEQ ID NO: 262278 - RNA, 22 nt, Human
aggcagauauuucaguucacau

SEQ ID NO: 262279 - RNA, 22 nt, Human
caggaaagggaugggcugccac

SEQ ID NO: 262280 - RNA, 22 nt, Human
uuccagugugcuuuuauguuag

SEQ ID NO: 262281 - RNA, 22 nt, Human
ggcaaaaaucaccccugguuca

SEQ ID NO: 262282 - RNA, 21 nt, Human
ucugaugguagaugagaugug

SEQ ID NO: 262283 - RNA, 19 nt, Human
ccagcccugucacuucuug

SEQ ID NO: 262284 - RNA, 19 nt, Human
augaguacacuuguacauu

SEQ ID NO: 262285 - RNA, 22 nt, Human
agccugggaauuuagaguucgg

SEQ ID NO: 262286 - RNA, 22 nt, Human
acaggccuugguccugaccuaa

SEQ ID NO: 262287 - RNA, 22 nt, Human
ugcagggauuagaggccgggga

SEQ ID NO: 262288 - RNA, 22 nt, Human
ugaaagaaacagguauauuggg

SEQ ID NO: 262289 - RNA, 22 nt, Human
uugcccugucaguagaagugca

SEQ ID NO: 262290 - RNA, 22 nt, Human
uugggaaauuacucugcuagga

SEQ ID NO: 262291 - RNA, 22 nt, Human
ugggacagugaccccagagguc

SEQ ID NO: 262292 - RNA, 22 nt, Human
cucagagaaccuaagcggagga

SEQ ID NO: 262293 - RNA, 20 nt, Human
aggcugccaggucucacauc

SEQ ID NO: 262294 - RNA, 22 nt, Human
uggacaggggcugcuguuguca

SEQ ID NO: 262295 - RNA, 20 nt, Human
aagggcagagggaacagacu

SEQ ID NO: 262296 - RNA, 22 nt, Human
uacaaagaguuuggucucuaga

SEQ ID NO: 262297 - RNA, 22 nt, Human
ggaggaagcacacggcuuguau

SEQ ID NO: 262298 - RNA, 22 nt, Human
agcugaggaauaauaacaaggu

SEQ ID NO: 262299 - RNA, 22 nt, Human
cuugagcuaggaaggcugaggc

SEQ ID NO: 262300 - RNA, 22 nt, Human
ggcuucuccccuuugagucuuc

SEQ ID NO: 262301 - RNA, 22 nt, Human
caucagaagaaagacaaaugau

SEQ ID NO: 262302 - RNA, 22 nt, Human
gcugucaguuuuacccacagac

SEQ ID NO: 262303 - RNA, 21 nt, Human
uugggaucugagaagugaaaa

SEQ ID NO: 262304 - RNA, 22 nt, Human
uuaguacaagagauuaauuacu

SEQ ID NO: 262305 - RNA, 23 nt, Human
ggcugagaagucccaugauaggu

SEQ ID NO: 262306 - RNA, 22 nt, Human
cugugacugggugacaguccuc

SEQ ID NO: 262307 - RNA, 22 nt, Human
uuuagugugacaguccccagua

SEQ ID NO: 262308 - RNA, 22 nt, Human
ucagaacauucucauugacugc

SEQ ID NO: 262309 - RNA, 22 nt, Human
uuguagcuuaucaaggcuguuu

SEQ ID NO: 262310 - RNA, 23 nt, Human
uuugcaaauuggacacaaccaca

SEQ ID NO: 262311 - RNA, 22 nt, Human
agaggcugggcaggacccacag

SEQ ID NO: 262312 - RNA, 22 nt, Human
uggaagaaaauucaaucgaguu

SEQ ID NO: 262313 - RNA, 22 nt, Human
ggcuuggcugucucccagccca

SEQ ID NO: 262314 - RNA, 22 nt, Human
acaguggcucaugccugucauc

SEQ ID NO: 262315 - RNA, 22 nt, Human
uuuguacauccuaauucugagu

SEQ ID NO: 262316 - RNA, 22 nt, Human
uuagcauucucauuugcauaaa

SEQ ID NO: 262317 - RNA, 22 nt, Human
aaagcauguugggucccucuuu

SEQ ID NO: 262318 - RNA, 22 nt, Human
ucucagggcagcaaggaagcau

SEQ ID NO: 262319 - RNA, 22 nt, Human
agccuucaguaaauccacugug

SEQ ID NO: 262320 - RNA, 22 nt, Human
aucagugcuaaagcaaaugccc

SEQ ID NO: 262321 - RNA, 22 nt, Human
agauauacacccauaucacaua

SEQ ID NO: 262322 - RNA, 22 nt, Human
ugcaaucucggcacuuugggag

SEQ ID NO: 262323 - RNA, 22 nt, Human
ugccugcuuguguaccugguga

SEQ ID NO: 262324 - RNA, 22 nt, Human
augaggagaccaaggccugaug

SEQ ID NO: 262325 - RNA, 22 nt, Human
ucuucucccaucggccgcaggg

SEQ ID NO: 262326 - RNA, 22 nt, Human
cuccuacaguguuugaguccag

SEQ ID NO: 262327 - RNA, 22 nt, Human
aggcagcuuaagcccuggccca

SEQ ID NO: 262328 - RNA, 22 nt, Human
uuucaaaggaggcugagaggau

SEQ ID NO: 262329 - RNA, 22 nt, Human
cuuaggaaugcguuuccugggu

SEQ ID NO: 262330 - RNA, 22 nt, Human
ccaggugugguggcauacaccu

SEQ ID NO: 262331 - RNA, 22 nt, Human
ggguccagggccaguggcugag

SEQ ID NO: 262332 - RNA, 22 nt, Human
gccuggguccacugaucaugcu

SEQ ID NO: 262333 - RNA, 22 nt, Human
ugaaucaauugucuuaagacau

SEQ ID NO: 262334 - RNA, 22 nt, Human
uuguguccucuaaucucaccac

SEQ ID NO: 262335 - RNA, 22 nt, Human
ugaaugauacagaauuauguag

SEQ ID NO: 262336 - RNA, 22 nt, Human
agggaggaaggaacuccuucua

SEQ ID NO: 262337 - RNA, 22 nt, Human
agugacuucuccguggcaggau

SEQ ID NO: 262338 - RNA, 20 nt, Human
uuucacaucugucccuuuaa

SEQ ID NO: 262339 - RNA, 22 nt, Human
auugagaauauugugacagugu

SEQ ID NO: 262340 - RNA, 22 nt, Human
gugagauuugaguggggauaca

SEQ ID NO: 262341 - RNA, 22 nt, Human
agggcccucugggcacuguggc

SEQ ID NO: 262342 - RNA, 19 nt, Human
cuggcagccugucuguguc

SEQ ID NO: 262343 - RNA, 22 nt, Human
uggcuucuuagaccaguggccu

SEQ ID NO: 262344 - RNA, 22 nt, Human
aaacuuuuuauucuaaugucua

SEQ ID NO: 262345 - RNA, 22 nt, Human
uuaauaaacaggugcagcugaa

SEQ ID NO: 262346 - RNA, 22 nt, Human
agguuccaagaaaucaucagug

SEQ ID NO: 262347 - RNA, 22 nt, Human
uuagaaucuuuagagucucacu

SEQ ID NO: 262348 - RNA, 22 nt, Human
gccucagacacugccugggugu

SEQ ID NO: 262349 - RNA, 22 nt, Human
gcuuuaaugcuucguggggcca

SEQ ID NO: 262350 - RNA, 22 nt, Human
cugauuccagagucuguguucu

SEQ ID NO: 262351 - RNA, 21 nt, Human
agauggcucccaggucucugg

SEQ ID NO: 262352 - RNA, 18 nt, Human
guaggucaguaccaagca

SEQ ID NO: 262353 - RNA, 22 nt, Human
cuccugucaauaggcuccuggc

SEQ ID NO: 262354 - RNA, 22 nt, Human
cuucacaggcaagucuguuuuu

SEQ ID NO: 262355 - RNA, 22 nt, Human
uacaaagucacauugaaaugaa

SEQ ID NO: 262356 - RNA, 22 nt, Human
uggcugagguaacuaugaauaa

SEQ ID NO: 262357 - RNA, 19 nt, Human
gcuggccacgccccaguug

SEQ ID NO: 262358 - RNA, 22 nt, Human
cuggagcugccagggcugccgc

SEQ ID NO: 262359 - RNA, 22 nt, Human
gcaaaaaaugcuuguugcuuag

SEQ ID NO: 262360 - RNA, 22 nt, Human
caggggcaagaaugcugucagc

SEQ ID NO: 262361 - RNA, 20 nt, Human
cuguaucagguuacaaagua

SEQ ID NO: 262362 - RNA, 22 nt, Human
uccagggcagugacuacagcgg

SEQ ID NO: 262363 - RNA, 22 nt, Human
acacuguucuuugcacugagaa

SEQ ID NO: 262364 - RNA, 22 nt, Human
auuucuuaugaauauugacugu

SEQ ID NO: 262365 - RNA, 22 nt, Human
aggaccugaaauucuugcuuuu

SEQ ID NO: 262366 - RNA, 20 nt, Human
uccuggccucccuggggcuc

SEQ ID NO: 262367 - RNA, 22 nt, Human
cuggagcugguauagggacaaa

SEQ ID NO: 262368 - RNA, 22 nt, Human
agagcuggaaucagaccucagg

SEQ ID NO: 262369 - RNA, 22 nt, Human
acauucuuucgaugucugauuu

SEQ ID NO: 262370 - RNA, 22 nt, Human
ucuaaaugucaguacagaauga

SEQ ID NO: 262371 - RNA, 22 nt, Human
cuacauuuuaauaagcugcuua

SEQ ID NO: 262372 - RNA, 23 nt, Human
agcaauaagaagggauacaugug

SEQ ID NO: 262373 - RNA, 22 nt, Human
uaaagacaaacccacuaggguu

SEQ ID NO: 262374 - RNA, 18 nt, Human
aaggcuucaaagaguaga

SEQ ID NO: 262375 - RNA, 22 nt, Human
aaucaacauuguuuuaagucaa

SEQ ID NO: 262376 - RNA, 22 nt, Human
uugccuggagggacauggagac

SEQ ID NO: 262377 - RNA, 22 nt, Human
ugaggccugucauugucuuguu

SEQ ID NO: 262378 - RNA, 22 nt, Human
uaacagaaauagaaaugagagu

SEQ ID NO: 262379 - RNA, 22 nt, Human
gucugggcaccuggccugggaa

SEQ ID NO: 262380 - RNA, 22 nt, Human
aagcacuggagaugccagagug

SEQ ID NO: 262381 - RNA, 22 nt, Human
aacacugaguaucagaguuggg

SEQ ID NO: 262382 - RNA, 22 nt, Human
uaagcaagugguagaaggacaa

SEQ ID NO: 262383 - RNA, 22 nt, Human
ugagccugggagauggaggcug

SEQ ID NO: 262384 - RNA, 22 nt, Human
uuucuauucuggaucuguggca

SEQ ID NO: 262385 - RNA, 22 nt, Human
acacugaauguuuaagaacuug

SEQ ID NO: 262386 - RNA, 22 nt, Human
guggccugugcugucuccccaa

SEQ ID NO: 262387 - RNA, 21 nt, Human
gugcucugggcagcagagggc

SEQ ID NO: 262388 - RNA, 22 nt, Human
ugcccucccacauuauggcugu

SEQ ID NO: 262389 - RNA, 21 nt, Human
agacaugugaacuaaagguga

SEQ ID NO: 262390 - RNA, 22 nt, Human
uacaagaagaggcagagcugga

SEQ ID NO: 262391 - RNA, 22 nt, Human
ccugagggaacaugcacccaau

SEQ ID NO: 262392 - RNA, 22 nt, Human
aguaaaaucaccaucucuuugu

SEQ ID NO: 262393 - RNA, 22 nt, Human
cuggaucuguccccuuuuuguu

SEQ ID NO: 262394 - RNA, 22 nt, Human
gcccagggucuacaaaaauauu

SEQ ID NO: 262395 - RNA, 22 nt, Human
uacugucuaauaagauugaugg

SEQ ID NO: 262396 - RNA, 22 nt, Human
ggccaaggcucuugagggcuga

SEQ ID NO: 262397 - RNA, 22 nt, Human
gccaggguucgaauccguaugg

SEQ ID NO: 262398 - RNA, 22 nt, Human
gaggaggggcacuugucuccua

SEQ ID NO: 262399 - RNA, 22 nt, Human
aaaucuguuguaauguuuuuua

SEQ ID NO: 262400 - RNA, 22 nt, Human
accccaggucuccaggcucugg

SEQ ID NO: 262401 - RNA, 22 nt, Human
uacauaauaaggggcauggugu

SEQ ID NO: 262402 - RNA, 22 nt, Human
uuggagagauuuaggucucagu

SEQ ID NO: 262403 - RNA, 22 nt, Human
ggggagaugcuuagguccgggg

SEQ ID NO: 262404 - RNA, 22 nt, Human
uuggcuucauugaucucacuuu

SEQ ID NO: 262405 - RNA, 22 nt, Human
acagguguugaaugaugucaca

SEQ ID NO: 262406 - RNA, 22 nt, Human
agcagggcagugaucagaaagg

SEQ ID NO: 262407 - RNA, 22 nt, Human
gccagccugugcuuggccaggc

SEQ ID NO: 262408 - RNA, 22 nt, Human
aaggcauuuguuggauuucuca

SEQ ID NO: 262409 - RNA, 22 nt, Human
cucugggaguggccacuucuca

SEQ ID NO: 262410 - RNA, 22 nt, Human
ggcacagcacaguggacccagg

SEQ ID NO: 262411 - RNA, 22 nt, Human
gugcaaaagucauugugguuuu

SEQ ID NO: 262412 - RNA, 22 nt, Human
gugcuuuuaacuuuugaaagga

SEQ ID NO: 262413 - RNA, 22 nt, Human
cugaaauucugccucugcacaa

SEQ ID NO: 262414 - RNA, 22 nt, Human
gcucaaaucccagcgggcuccu

SEQ ID NO: 262415 - RNA, 22 nt, Human
gcagcaggucugucaaugucau

SEQ ID NO: 262416 - RNA, 22 nt, Human
agaaagagcucgggauuaacag

SEQ ID NO: 262417 - RNA, 22 nt, Human
aucacaaaggcugcuucaugau

SEQ ID NO: 262418 - RNA, 22 nt, Human
agagaugguagaacagucauaa

SEQ ID NO: 262419 - RNA, 22 nt, Human
aaaacugaaccuugagaucuuu

SEQ ID NO: 262420 - RNA, 22 nt, Human
gaagcuuggauaacuguauggg

SEQ ID NO: 262421 - RNA, 17 nt, Human
uguagcuucuccuucuc

SEQ ID NO: 262422 - RNA, 22 nt, Human
ucagagaaguaggcuaauggug

SEQ ID NO: 262423 - RNA, 22 nt, Human
cugggcacugcagcaggcauca

SEQ ID NO: 262424 - RNA, 22 nt, Human
cagagacaguuucacagggucu

SEQ ID NO: 262425 - RNA, 22 nt, Human
cuauuucagcugccuuugacug

SEQ ID NO: 262426 - RNA, 22 nt, Human
ucucagagaacaguuggugcuu

SEQ ID NO: 262427 - RNA, 22 nt, Human
ucccucucuugggcguggcuca

SEQ ID NO: 262428 - RNA, 22 nt, Human
uucagaaaggauaauuggaagg

SEQ ID NO: 262429 - RNA, 22 nt, Human
caagaauauaaauacuuucaaa

SEQ ID NO: 262430 - RNA, 22 nt, Human
ugcaggcugcagucucaggugg

SEQ ID NO: 262431 - RNA, 22 nt, Human
gaggccaggacaugaaagcuga

SEQ ID NO: 262432 - RNA, 22 nt, Human
cacacauugguuuuacuccuuu

SEQ ID NO: 262433 - RNA, 22 nt, Human
ccucuguguccuggucauugaa

SEQ ID NO: 262434 - RNA, 22 nt, Human
ugaaaccccagauuaccacaaa

SEQ ID NO: 262435 - RNA, 22 nt, Human
ccucccaccguaucucaguggc

SEQ ID NO: 262436 - RNA, 22 nt, Human
aaccaguacuuuacacagcucu

SEQ ID NO: 262437 - RNA, 22 nt, Human
gcccagcagaucucagugucuc

SEQ ID NO: 262438 - RNA, 22 nt, Human
auagucuuacuuuucucugcua

SEQ ID NO: 262439 - RNA, 22 nt, Human
gcucagggccuggcugcggacu

SEQ ID NO: 262440 - RNA, 18 nt, Human
cagcugaggaccaaacug

SEQ ID NO: 262441 - RNA, 22 nt, Human
cucacagcagccagucugccuu

SEQ ID NO: 262442 - RNA, 22 nt, Human
uuaggaaauuccaccuguauuc

SEQ ID NO: 262443 - RNA, 22 nt, Human
aaucuagauucggaucaaaggg

SEQ ID NO: 262444 - RNA, 22 nt, Human
aaacaagagcuuacauggcugc

SEQ ID NO: 262445 - RNA, 21 nt, Human
gaucuuuacuuuccuacuuac

SEQ ID NO: 262446 - RNA, 22 nt, Human
gcccuggggaaggugucuccaa

SEQ ID NO: 262447 - RNA, 22 nt, Human
gauuuuauauggcauacugugg

SEQ ID NO: 262448 - RNA, 22 nt, Human
ugugcaaucuugagcaauuuau

SEQ ID NO: 262449 - RNA, 22 nt, Human
aaaugacagaguaagcuguuua

SEQ ID NO: 262450 - RNA, 22 nt, Human
cugcugucccagccuccucaca

SEQ ID NO: 262451 - RNA, 23 nt, Human
gaggccuggcccugccacaucuc

SEQ ID NO: 262452 - RNA, 21 nt, Human
agggcucaaaugugcuugcug

SEQ ID NO: 262453 - RNA, 22 nt, Human
caagaggcaaauugucuagaag

SEQ ID NO: 262454 - RNA, 22 nt, Human
agaagccauggggucaccagag

SEQ ID NO: 262455 - RNA, 22 nt, Human
agcuagaaguccuagauaaagg

SEQ ID NO: 262456 - RNA, 22 nt, Human
uacugucugcuucuuauagcuu

SEQ ID NO: 262457 - RNA, 22 nt, Human
acaaugucaccucucauguuuu

SEQ ID NO: 262458 - RNA, 22 nt, Human
cacaugaacaugcuggaaaagc

SEQ ID NO: 262459 - RNA, 22 nt, Human
gucccagggaagaaggcagcac

SEQ ID NO: 262460 - RNA, 22 nt, Human
uuggcccacucucagaaugugg

SEQ ID NO: 262461 - RNA, 22 nt, Human
accccagaggcggaggcugcag

SEQ ID NO: 262462 - RNA, 22 nt, Human
gggcacagagaagguuuuagug

SEQ ID NO: 262463 - RNA, 22 nt, Human
aaaaguauuuugagcacuuuau

SEQ ID NO: 262464 - RNA, 23 nt, Human
uagaauccucugagauggaauag

SEQ ID NO: 262465 - RNA, 22 nt, Human
guaggagcucauggggccagga

SEQ ID NO: 262466 - RNA, 22 nt, Human
gaacaucugggaucauugcugu

SEQ ID NO: 262467 - RNA, 22 nt, Human
aguccggggucuggacaccugg

SEQ ID NO: 262468 - RNA, 22 nt, Human
uucuaacuggcuugacaguuuc

SEQ ID NO: 262469 - RNA, 22 nt, Human
uggacaaaugauuucuaccuuu

SEQ ID NO: 262470 - RNA, 22 nt, Human
ucaguguuuccugugguacagc

SEQ ID NO: 262471 - RNA, 22 nt, Human
auccacaggguguguuaagaug

SEQ ID NO: 262472 - RNA, 22 nt, Human
gucuccacagcccagcugccac

SEQ ID NO: 262473 - RNA, 22 nt, Human
agggcugacaguaaaaguauga

SEQ ID NO: 262474 - RNA, 22 nt, Human
gggguguggacggcugugccag

SEQ ID NO: 262475 - RNA, 22 nt, Human
auuagucuacugucuaauaaau

SEQ ID NO: 262476 - RNA, 22 nt, Human
uccauuuggcacucuauuucca

SEQ ID NO: 262477 - RNA, 22 nt, Human
gaaauaauucugugucugaaca

SEQ ID NO: 262478 - RNA, 22 nt, Human
gucuggaagaacuagggauguu

SEQ ID NO: 262479 - RNA, 22 nt, Human
cugaagcagauguggcugagau

SEQ ID NO: 262480 - RNA, 22 nt, Human
ugauaucuaccauaaccauucg

SEQ ID NO: 262481 - RNA, 22 nt, Human
acaaauuuguguaguuauggca

SEQ ID NO: 262482 - RNA, 22 nt, Human
ucuguggaagauuccaggcguu

SEQ ID NO: 262483 - RNA, 22 nt, Human
uuacaguagauuuugaaugugg

SEQ ID NO: 262484 - RNA, 23 nt, Human
ucugggcugagcucgaguguaga

SEQ ID NO: 262485 - RNA, 22 nt, Human
caucucaguguacagggagucu

SEQ ID NO: 262486 - RNA, 22 nt, Human
auccugggcugcacccucagcc

SEQ ID NO: 262487 - RNA, 23 nt, Human
gccuuggagaagucacucaggga

SEQ ID NO: 262488 - RNA, 22 nt, Human
aggccaaguagcuagcauugaa

SEQ ID NO: 262489 - RNA, 22 nt, Human
ucaucucuagacaggaggcugg

SEQ ID NO: 262490 - RNA, 22 nt, Human
agcccugcuucaccauuuacuu

SEQ ID NO: 262491 - RNA, 18 nt, Human
aggccucugugugcccag

SEQ ID NO: 262492 - RNA, 22 nt, Human
agguccuggugaccauggaguu

SEQ ID NO: 262493 - RNA, 22 nt, Human
ugucucugcuuuccuugcaggg

SEQ ID NO: 262494 - RNA, 22 nt, Human
uaaaguuuauuugaacaucucu

SEQ ID NO: 262495 - RNA, 22 nt, Human
cuuuacagcuuagugguaugga

SEQ ID NO: 262496 - RNA, 22 nt, Human
augaaggacaacaggggagcag

SEQ ID NO: 262497 - RNA, 22 nt, Human
uggaaagugcucuagacuuucu

SEQ ID NO: 262498 - RNA, 19 nt, Human
agcaggccacagggccagc

SEQ ID NO: 262499 - RNA, 22 nt, Human
agaaaugacaagacugaucagg

SEQ ID NO: 262500 - RNA, 22 nt, Human
ucccuucaucagugagcaagcc

SEQ ID NO: 262501 - RNA, 22 nt, Human
ccccaaaacuuagugacuuaaa

SEQ ID NO: 262502 - RNA, 22 nt, Human
gcaggccuuggcaaugagccug

SEQ ID NO: 262503 - RNA, 22 nt, Human
uaucugagaaagaagcaccaga

SEQ ID NO: 262504 - RNA, 22 nt, Human
cccacccacucugaccagaagc

SEQ ID NO: 262505 - RNA, 22 nt, Human
ugaaagcuuugggacaguguga

SEQ ID NO: 262506 - RNA, 22 nt, Human
uuugcaauaguccuggccugua

SEQ ID NO: 262507 - RNA, 22 nt, Human
caaggccagagccagcgauaag

SEQ ID NO: 262508 - RNA, 22 nt, Human
ggcuucauggaguucuacacca

SEQ ID NO: 262509 - RNA, 22 nt, Human
aacagaaugcaggggaugcugc

SEQ ID NO: 262510 - RNA, 22 nt, Human
aagccauggcaugccaggauca

SEQ ID NO: 262511 - RNA, 22 nt, Human
uggccacccagcugacgccuuc

SEQ ID NO: 262512 - RNA, 19 nt, Human
ugcauacauguuaacaugu

SEQ ID NO: 262513 - RNA, 22 nt, Human
ccuggaagagcugaaucaggca

SEQ ID NO: 262514 - RNA, 22 nt, Human
augcaggaguuggaaaaaauga

SEQ ID NO: 262515 - RNA, 22 nt, Human
gcagggcugggugggagacaga

SEQ ID NO: 262516 - RNA, 22 nt, Human
aauaucuggagaugcuuuuugu

SEQ ID NO: 262517 - RNA, 22 nt, Human
ugcacacagaugguacaugcau

SEQ ID NO: 262518 - RNA, 22 nt, Human
gaauccaggguuguuugagcua

SEQ ID NO: 262519 - RNA, 22 nt, Human
cagcugcaguucaaugcuugcu

SEQ ID NO: 262520 - RNA, 22 nt, Human
gcaggccuaagagaaggcauug

SEQ ID NO: 262521 - RNA, 22 nt, Human
cagaguccuggacacagagaca

SEQ ID NO: 262522 - RNA, 22 nt, Human
guacauuuauuuuugcagcaua

SEQ ID NO: 262523 - RNA, 22 nt, Human
auucucagggaguauuuucuau

SEQ ID NO: 262524 - RNA, 22 nt, Human
ugggcccuuaugaagcucaaga

SEQ ID NO: 262525 - RNA, 22 nt, Human
acuuagcaaaucuuuuggauuc

SEQ ID NO: 262526 - RNA, 22 nt, Human
uaaaggcacugcgucccucaaa

SEQ ID NO: 262527 - RNA, 22 nt, Human
ucugagggcuguacuaugcacg

SEQ ID NO: 262528 - RNA, 22 nt, Human
ccugccuggggacaaaggaggg

SEQ ID NO: 262529 - RNA, 20 nt, Human
agacaggagcccccauucag

SEQ ID NO: 262530 - RNA, 22 nt, Human
aggcccuggguuagggcccacu

SEQ ID NO: 262531 - RNA, 22 nt, Human
gcucucugggugugucuagaua

SEQ ID NO: 262532 - RNA, 22 nt, Human
aggggagcaacauagucacucu

SEQ ID NO: 262533 - RNA, 22 nt, Human
ugaugaauuaguaacaaaugag

SEQ ID NO: 262534 - RNA, 22 nt, Human
cuuaacauccugcauuuuucuu

SEQ ID NO: 262535 - RNA, 22 nt, Human
cugaccaacauggugaaaccuu

SEQ ID NO: 262536 - RNA, 22 nt, Human
cucugugugguccucuguauug

SEQ ID NO: 262537 - RNA, 22 nt, Human
ggcccacacugacagcugagcu

SEQ ID NO: 262538 - RNA, 22 nt, Human
gugcaccccggggcccugcucc

SEQ ID NO: 262539 - RNA, 22 nt, Human
cuguggaaggacuuagcgauac

SEQ ID NO: 262540 - RNA, 22 nt, Human
aagaguuuucucugauggcauu

SEQ ID NO: 262541 - RNA, 22 nt, Human
uuugaagugggcauuagaaccu

SEQ ID NO: 262542 - RNA, 22 nt, Human
ucauggcauuguuaaggguuuu

SEQ ID NO: 262543 - RNA, 22 nt, Human
uucccuggcccuggcacgcucu

SEQ ID NO: 262544 - RNA, 22 nt, Human
ccaggccuggccaggggaugcc

SEQ ID NO: 262545 - RNA, 22 nt, Human
uccuggcagcccgcaggugcug

SEQ ID NO: 262546 - RNA, 22 nt, Human
cccugcugcagagagcuuucca

SEQ ID NO: 262547 - RNA, 22 nt, Human
uuccagauuucuacacaagacc

SEQ ID NO: 262548 - RNA, 23 nt, Human
aaauaugucugagggcaaagaau

SEQ ID NO: 262549 - RNA, 22 nt, Human
agagaguugaggaagcaacacu

SEQ ID NO: 262550 - RNA, 22 nt, Human
uucucagugaaguuuagaacau

SEQ ID NO: 262551 - RNA, 22 nt, Human
aggcgcagacauacagggucug

SEQ ID NO: 262552 - RNA, 22 nt, Human
gcugggcugagcuagacuuggc

SEQ ID NO: 262553 - RNA, 22 nt, Human
ugcagggccuugggaugugucc

SEQ ID NO: 262554 - RNA, 22 nt, Human
uaauuuugucccccugcacaua

SEQ ID NO: 262555 - RNA, 19 nt, Human
cagucccaaauucuuguca

SEQ ID NO: 262556 - RNA, 22 nt, Human
uguuuauucauggcuaaugaaa

SEQ ID NO: 262557 - RNA, 22 nt, Human
cagcacaguacaaggcacggau

SEQ ID NO: 262558 - RNA, 22 nt, Human
aagaacaugaagucacaaaugc

SEQ ID NO: 262559 - RNA, 22 nt, Human
ccagagagaaaauggagggcca

SEQ ID NO: 262560 - RNA, 22 nt, Human
ugaugaaaguguuuacucaccu

SEQ ID NO: 262561 - RNA, 22 nt, Human
agcuugaaccacaugaaauugc

SEQ ID NO: 262562 - RNA, 22 nt, Human
aauugcuucauuaacauuuagg

SEQ ID NO: 262563 - RNA, 22 nt, Human
ugccuuuuccaguuucuagggg

SEQ ID NO: 262564 - RNA, 22 nt, Human
auauuuguugaguucuuaugau

SEQ ID NO: 262565 - RNA, 22 nt, Human
cuggcucccuggacauggggcc

SEQ ID NO: 262566 - RNA, 22 nt, Human
uuucagaaagcaucaucaaagu

SEQ ID NO: 262567 - RNA, 22 nt, Human
agaaggcuuaaaacauggaaua

SEQ ID NO: 262568 - RNA, 22 nt, Human
uacaguuacuguuauaugugcu

SEQ ID NO: 262569 - RNA, 22 nt, Human
cauucaaaagcuccauguuugu

SEQ ID NO: 262570 - RNA, 22 nt, Human
uaggcuccugaguccacagcac

SEQ ID NO: 262571 - RNA, 18 nt, Human
ugaccugcgcuucacggu

SEQ ID NO: 262572 - RNA, 22 nt, Human
cuuuauuagauguagacuuucu

SEQ ID NO: 262573 - RNA, 17 nt, Human
auuuccugcaagccccu

SEQ ID NO: 262574 - RNA, 22 nt, Human
uaggugguugucugcuuuccua

SEQ ID NO: 262575 - RNA, 22 nt, Human
uuguuuuggaagaacuuacucu

SEQ ID NO: 262576 - RNA, 17 nt, Human
acaggcagaucaccuga

SEQ ID NO: 262577 - RNA, 22 nt, Human
auuuuuaugacaaaccauccuc

SEQ ID NO: 262578 - RNA, 22 nt, Human
cagcuggcccuuugguagccuu

SEQ ID NO: 262579 - RNA, 17 nt, Human
gcaauuauugggcauuu

SEQ ID NO: 262580 - RNA, 22 nt, Human
uuccagccuuuauccauccaga

SEQ ID NO: 262581 - RNA, 22 nt, Human
aaagcagaacugagagagcugg

SEQ ID NO: 262582 - RNA, 22 nt, Human
agaaaguuguuuuagccaaacc

SEQ ID NO: 262583 - RNA, 22 nt, Human
auauucacugagcauaaagcca

SEQ ID NO: 262584 - RNA, 23 nt, Human
aggaaacugaaggggcccucuau

SEQ ID NO: 262585 - RNA, 22 nt, Human
aagaggccuuggucugaccuga

SEQ ID NO: 262586 - RNA, 22 nt, Human
cucugcccccagcuggugcuug

SEQ ID NO: 262587 - RNA, 22 nt, Human
caucucaggucugugguucacu

SEQ ID NO: 262588 - RNA, 22 nt, Human
ggaaggaagugcagacuuuaaa

SEQ ID NO: 262589 - RNA, 22 nt, Human
gcagcaugugccuuaaaucauu

SEQ ID NO: 262590 - RNA, 22 nt, Human
acuuucugugguuaccagggag

SEQ ID NO: 262591 - RNA, 22 nt, Human
uuucuaaguguguuucauagga

SEQ ID NO: 262592 - RNA, 22 nt, Human
uauugcugcuauugucaguuca

SEQ ID NO: 262593 - RNA, 22 nt, Human
ugcccuggaaaugagaggugug

SEQ ID NO: 262594 - RNA, 22 nt, Human
uuccuggccaagcagaguggaa

SEQ ID NO: 262595 - RNA, 22 nt, Human
aggugccauugcuugccaguuu

SEQ ID NO: 262596 - RNA, 22 nt, Human
uggcccagucagcaggagaggg

SEQ ID NO: 262597 - RNA, 22 nt, Human
gcacccaguuugucucaggguu

SEQ ID NO: 262598 - RNA, 22 nt, Human
gcaaacaugcugagaaauaaga

SEQ ID NO: 262599 - RNA, 22 nt, Human
agagagcaguggaucaccuagc

SEQ ID NO: 262600 - RNA, 22 nt, Human
ggagcugaugguagaagaauga

SEQ ID NO: 262601 - RNA, 22 nt, Human
uggcuccaucauccaugcaaga

SEQ ID NO: 262602 - RNA, 22 nt, Human
agcucagggccaucggcccuuu

SEQ ID NO: 262603 - RNA, 22 nt, Human
ccuggcugggguagaagugagg

SEQ ID NO: 262604 - RNA, 22 nt, Human
uuccagaacaauguggacguau

SEQ ID NO: 262605 - RNA, 22 nt, Human
ggaaggucgagcugcaucuggc

SEQ ID NO: 262606 - RNA, 22 nt, Human
cacugcacaauguagcaaagaa

SEQ ID NO: 262607 - RNA, 22 nt, Human
uugcuuuagaaucugcuucugg

SEQ ID NO: 262608 - RNA, 22 nt, Human
aauaauguacauacauauuucg

SEQ ID NO: 262609 - RNA, 22 nt, Human
cucucugggcccaguuggcacc

SEQ ID NO: 262610 - RNA, 19 nt, Human
ugcugcagucaggcgaggg

SEQ ID NO: 262611 - RNA, 22 nt, Human
uaggcagauguuaacaggaaaa

SEQ ID NO: 262612 - RNA, 23 nt, Human
ugugaauugaggacaucaaaagc

SEQ ID NO: 262613 - RNA, 22 nt, Human
uccagccuucucaaggcuggcu

SEQ ID NO: 262614 - RNA, 18 nt, Human
agacuuugaguuagaggg

SEQ ID NO: 262615 - RNA, 22 nt, Human
ccagagagauugcuucuaaaga

SEQ ID NO: 262616 - RNA, 22 nt, Human
guaaaaccugcuuuucaacacc

SEQ ID NO: 262617 - RNA, 22 nt, Human
caaagauaugacauggaaaaug

SEQ ID NO: 262618 - RNA, 22 nt, Human
cugucauuuaagacauucugga

SEQ ID NO: 262619 - RNA, 22 nt, Human
uuagaaccaccuggagagcuuu

SEQ ID NO: 262620 - RNA, 22 nt, Human
gucugggcaagggagauggcgc

SEQ ID NO: 262621 - RNA, 22 nt, Human
uggccucuccuggcagcaucca

SEQ ID NO: 262622 - RNA, 19 nt, Human
uuuacaaguucuuuguaug

SEQ ID NO: 262623 - RNA, 22 nt, Human
aacugguaucucuucaguguaa

SEQ ID NO: 262624 - RNA, 20 nt, Human
ugagagcugggcagggauac

SEQ ID NO: 262625 - RNA, 22 nt, Human
ucuaacuuagggaauacuuuag

SEQ ID NO: 262626 - RNA, 22 nt, Human
ugccacagacaggacagaacag

SEQ ID NO: 262627 - RNA, 22 nt, Human
gaacuuuaccauuuagguaacu

SEQ ID NO: 262628 - RNA, 22 nt, Human
ucaaaucagcaagcagcuuccc

SEQ ID NO: 262629 - RNA, 22 nt, Human
cccagagggaagggaaugaggu

SEQ ID NO: 262630 - RNA, 22 nt, Human
gcuuuagagcccagcuuggugg

SEQ ID NO: 262631 - RNA, 22 nt, Human
uauuuuacaugauccagaguug

SEQ ID NO: 262632 - RNA, 22 nt, Human
gaggcagcgggucaggaccgug

SEQ ID NO: 262633 - RNA, 22 nt, Human
acagggcagagugaaaugcuau

SEQ ID NO: 262634 - RNA, 23 nt, Human
uugagcucaguagcucugcuggu

SEQ ID NO: 262635 - RNA, 22 nt, Human
cccaguggcccagcauguggug

SEQ ID NO: 262636 - RNA, 22 nt, Human
uucuggguggccaguauuuaga

SEQ ID NO: 262637 - RNA, 22 nt, Human
agugaauauuuuuagacaccca

SEQ ID NO: 262638 - RNA, 14 nt, Human
gcagguggaucacu

SEQ ID NO: 262639 - RNA, 22 nt, Human
uccuucuguagucccugucccu

SEQ ID NO: 262640 - RNA, 23 nt, Human
aaaguugauuugcaguuuaagag

SEQ ID NO: 262641 - RNA, 22 nt, Human
ucuccuaggcuggagugcagug

SEQ ID NO: 262642 - RNA, 22 nt, Human
acaggacagucuaguaacagua

SEQ ID NO: 262643 - RNA, 22 nt, Human
caaaauucugcauuucuaauaa

SEQ ID NO: 262644 - RNA, 22 nt, Human
cuccauggcuuucgcaucugca

SEQ ID NO: 262645 - RNA, 22 nt, Human
agcugugggccugggagagcug

SEQ ID NO: 262646 - RNA, 22 nt, Human
ucugggauuuuauagacaugcu

SEQ ID NO: 262647 - RNA, 22 nt, Human
aaaucccagauaguaauguauu

SEQ ID NO: 262648 - RNA, 22 nt, Human
uuccugggagcuagccacaucu

SEQ ID NO: 262649 - RNA, 22 nt, Human
aaggugguucgcugguacccag

SEQ ID NO: 262650 - RNA, 22 nt, Human
acaagguucuuguggaggaauu

SEQ ID NO: 262651 - RNA, 22 nt, Human
ugagauuuguuuuauaaaauag

SEQ ID NO: 262652 - RNA, 22 nt, Human
uaacuggugaguugguugagug

SEQ ID NO: 262653 - RNA, 22 nt, Human
cgaggccaugcaugcugaggac

SEQ ID NO: 262654 - RNA, 22 nt, Human
uacacaucuggugugacugcca

SEQ ID NO: 262655 - RNA, 22 nt, Human
aauugcaacagguagacuuuuc

SEQ ID NO: 262656 - RNA, 22 nt, Human
acaguguuuuagaaaagcuuga

SEQ ID NO: 262657 - RNA, 22 nt, Human
guucauuuaugauguaacaugu

SEQ ID NO: 262658 - RNA, 22 nt, Human
aagaugacccugagggcaauug

SEQ ID NO: 262659 - RNA, 23 nt, Human
cagagcuggcucagagcugccug

SEQ ID NO: 262660 - RNA, 22 nt, Human
aaaaagauagcauugugcuccu

SEQ ID NO: 262661 - RNA, 22 nt, Human
ugcuggcuuggaaggaaagcgc

SEQ ID NO: 262662 - RNA, 22 nt, Human
agacacuuucagaaguguuugc

SEQ ID NO: 262663 - RNA, 22 nt, Human
ccucuggccaucccccauuaag

SEQ ID NO: 262664 - RNA, 22 nt, Human
uuuuauucuaaguaugauggga

SEQ ID NO: 262665 - RNA, 22 nt, Human
agaagauuauuagagacuuugu

SEQ ID NO: 262666 - RNA, 22 nt, Human
uuuauguuugcauuuucaaaga

SEQ ID NO: 262667 - RNA, 22 nt, Human
ccacugaggggucaugguggga

SEQ ID NO: 262668 - RNA, 23 nt, Human
uccuccugacacagccugaguga

SEQ ID NO: 262669 - RNA, 22 nt, Human
cucccaagcugugcugaacugu

SEQ ID NO: 262670 - RNA, 22 nt, Human
aguucacauaucuguuuuauuu

SEQ ID NO: 262671 - RNA, 22 nt, Human
uuugauucuguaaaauaacagg

SEQ ID NO: 262672 - RNA, 22 nt, Human
gcagcagcagcaauuuucuguc

SEQ ID NO: 262673 - RNA, 22 nt, Human
uuucaugaggggcaaaaucuca

SEQ ID NO: 262674 - RNA, 22 nt, Human
ucugcugcugaccaacacugug

SEQ ID NO: 262675 - RNA, 23 nt, Human
ggagugugaagaccugauauagc

SEQ ID NO: 262676 - RNA, 23 nt, Human
uagcaaaguuguuugggaaauuu

SEQ ID NO: 262677 - RNA, 22 nt, Human
guacagugugacuuuggaguga

SEQ ID NO: 262678 - RNA, 22 nt, Human
uugcccugucuuaagcuggcaa

SEQ ID NO: 262679 - RNA, 22 nt, Human
uaguuacaauggguucugugac

SEQ ID NO: 262680 - RNA, 22 nt, Human
uccaggaagccacacugggccu

SEQ ID NO: 262681 - RNA, 22 nt, Human
uacauagaauauuucacuuaaa

SEQ ID NO: 262682 - RNA, 22 nt, Human
acucuggcugccuugugagcau

SEQ ID NO: 262683 - RNA, 22 nt, Human
agucccuucucaaagugugcgg

SEQ ID NO: 262684 - RNA, 22 nt, Human
auaugaaaauguuuuagcugua

SEQ ID NO: 262685 - RNA, 22 nt, Human
ucccugcaggugggguggccag

SEQ ID NO: 262686 - RNA, 22 nt, Human
ggacaggccuggcacaguacug

SEQ ID NO: 262687 - RNA, 22 nt, Human
aguauauaugaggaaccacaaa

SEQ ID NO: 262688 - RNA, 22 nt, Human
cuauucaguaagccaaaaccau

SEQ ID NO: 262689 - RNA, 21 nt, Human
uggccucccacacuuccaugg

SEQ ID NO: 262690 - RNA, 22 nt, Human
cugcuuuaucugagacaaguca

SEQ ID NO: 262691 - RNA, 22 nt, Human
cagcuuugccaaguaaggucuu

SEQ ID NO: 262692 - RNA, 22 nt, Human
ucucaaauuugcuggaccagua

SEQ ID NO: 262693 - RNA, 22 nt, Human
gcuggccugagggccgaggcuc

SEQ ID NO: 262694 - RNA, 22 nt, Human
aaaggccaccaacaugaagcau

SEQ ID NO: 262695 - RNA, 22 nt, Human
gccaggcucucagugacugccc

SEQ ID NO: 262696 - RNA, 22 nt, Human
uagggauguccugagacuuggc

SEQ ID NO: 262697 - RNA, 22 nt, Human
uaauuuuguauugccauuguag

SEQ ID NO: 262698 - RNA, 22 nt, Human
uauuaagagauguaugaagaga

SEQ ID NO: 262699 - RNA, 19 nt, Human
uccauacaaacuguugaaa

SEQ ID NO: 262700 - RNA, 22 nt, Human
aaaccacaguucagugcuuuug

SEQ ID NO: 262701 - RNA, 22 nt, Human
uuggaauugugaacuaagugau

SEQ ID NO: 262702 - RNA, 22 nt, Human
uggcucagaaggcugccuucac

SEQ ID NO: 262703 - RNA, 22 nt, Human
uuuagggaaauugaggguuaag

SEQ ID NO: 262704 - RNA, 22 nt, Human
agugaugguuuccagucacuga

SEQ ID NO: 262705 - RNA, 21 nt, Human
cucugcugucuaccagcuguu

SEQ ID NO: 262706 - RNA, 22 nt, Human
cccaggcuagaaaggccaacaa

SEQ ID NO: 262707 - RNA, 22 nt, Human
auacacauaucagguguauaca

SEQ ID NO: 262708 - RNA, 22 nt, Human
cuuuaguuugugauacgaagau

SEQ ID NO: 262709 - RNA, 22 nt, Human
uuucaaagaccauuaacuauca

SEQ ID NO: 262710 - RNA, 22 nt, Human
guggggaggccuaagcaaguug

SEQ ID NO: 262711 - RNA, 17 nt, Human
uuauugcuauaagcuga

SEQ ID NO: 262712 - RNA, 22 nt, Human
uaugcauacaaugagauauucc

SEQ ID NO: 262713 - RNA, 22 nt, Human
cuguauauggcuuacuuuauau

SEQ ID NO: 262714 - RNA, 22 nt, Human
ugggccuguuucccuucagggc

SEQ ID NO: 262715 - RNA, 22 nt, Human
ccaggucuaucaaguugggcuc

SEQ ID NO: 262716 - RNA, 17 nt, Human
uguuuucugcuaccuuu

SEQ ID NO: 262717 - RNA, 22 nt, Human
cugguuuacccaagauuugcug

SEQ ID NO: 262718 - RNA, 22 nt, Human
cugaggagagguggccuguguu

SEQ ID NO: 262719 - RNA, 22 nt, Human
uguucauuuggcccuuuuguau

SEQ ID NO: 262720 - RNA, 22 nt, Human
uaguauuuauaaucaugcuuaa

SEQ ID NO: 262721 - RNA, 22 nt, Human
aaaugcagaaugauuucaucua

SEQ ID NO: 262722 - RNA, 22 nt, Human
augcaacaaaugcuacgaaucg

SEQ ID NO: 262723 - RNA, 23 nt, Human
ugucugguucaugcuuauuuugg

SEQ ID NO: 262724 - RNA, 22 nt, Human
aaaggcuuguccaguaagggga

SEQ ID NO: 262725 - RNA, 22 nt, Human
agcuugggugugccugcgagcu

SEQ ID NO: 262726 - RNA, 22 nt, Human
ucucuaguugaggacugagcag

SEQ ID NO: 262727 - RNA, 22 nt, Human
guccuggugcuggucauugucg

SEQ ID NO: 262728 - RNA, 22 nt, Human
gaggugaguggggucuccaggg

SEQ ID NO: 262729 - RNA, 22 nt, Human
uuuuucuacugcccacauugua

SEQ ID NO: 262730 - RNA, 22 nt, Human
cuguuacuccuuuggcagauua

SEQ ID NO: 262731 - RNA, 22 nt, Human
aaaguguugggaagaaagugca

SEQ ID NO: 262732 - RNA, 22 nt, Human
gaagguccagcguggccaaguc

SEQ ID NO: 262733 - RNA, 22 nt, Human
ucagagccccuccgcuguccca

SEQ ID NO: 262734 - RNA, 18 nt, Human
ugaacuuuuccugcugcu

SEQ ID NO: 262735 - RNA, 22 nt, Human
caggccucagggcuguccguag

SEQ ID NO: 262736 - RNA, 22 nt, Human
uauaagcacauccuugacugau

SEQ ID NO: 262737 - RNA, 22 nt, Human
gaagaacacuucaugauucauu

SEQ ID NO: 262738 - RNA, 22 nt, Human
uugaaugaagucccuuuuuacu

SEQ ID NO: 262739 - RNA, 22 nt, Human
uuggagauaucacaccuucaca

SEQ ID NO: 262740 - RNA, 22 nt, Human
aagccuccuuauuaaaggauau

SEQ ID NO: 262741 - RNA, 22 nt, Human
uccagccugguugcgggcaucc

SEQ ID NO: 262742 - RNA, 22 nt, Human
acaguuaauuguuguugggugu

SEQ ID NO: 262743 - RNA, 22 nt, Human
gagacacacauucuggagagaa

SEQ ID NO: 262744 - RNA, 22 nt, Human
ugaggaguaugguggggucauu

SEQ ID NO: 262745 - RNA, 22 nt, Human
agaggaggcuggguccagauaa

SEQ ID NO: 262746 - RNA, 22 nt, Human
ugcugagguuucugacuaugga

SEQ ID NO: 262747 - RNA, 22 nt, Human
ucuggcagcaagucuguuucuc

SEQ ID NO: 262748 - RNA, 22 nt, Human
aggagguguugauagaagguuu

SEQ ID NO: 262749 - RNA, 22 nt, Human
ucaguuaaugguaagggugaaa

SEQ ID NO: 262750 - RNA, 22 nt, Human
ugccaggcccugugcuggaugc

SEQ ID NO: 262751 - RNA, 22 nt, Human
gccuguuucuaaucucauuucu

SEQ ID NO: 262752 - RNA, 22 nt, Human
ccagcaucgacuuccugccuga

SEQ ID NO: 262753 - RNA, 22 nt, Human
acacccagagcgccagugccga

SEQ ID NO: 262754 - RNA, 22 nt, Human
gcucaaagguugauagcugugc

SEQ ID NO: 262755 - RNA, 17 nt, Human
ucuggaugucauggaag

SEQ ID NO: 262756 - RNA, 22 nt, Human
gggaccuggacaugugugugcu

SEQ ID NO: 262757 - RNA, 22 nt, Human
ucaggccugcaaaugaauggua

SEQ ID NO: 262758 - RNA, 22 nt, Human
auuuacagacguggauuagugc

SEQ ID NO: 262759 - RNA, 22 nt, Human
acagacugucccaccacaugga

SEQ ID NO: 262760 - RNA, 22 nt, Human
ucugaaagcuagaaaaugcucu

SEQ ID NO: 262761 - RNA, 22 nt, Human
uaggaaaugcugucuuauugua

SEQ ID NO: 262762 - RNA, 22 nt, Human
acagcagguuuuaacuuugaag

SEQ ID NO: 262763 - RNA, 22 nt, Human
ccagugcaggugagcaccaggu

SEQ ID NO: 262764 - RNA, 22 nt, Human
ccugggagugucagacuugcuu

SEQ ID NO: 262765 - RNA, 22 nt, Human
auaguguuguauguacagucug

SEQ ID NO: 262766 - RNA, 22 nt, Human
ccuggcucugccguaaccacca

SEQ ID NO: 262767 - RNA, 22 nt, Human
uuuauuuaaagucguguguuaa

SEQ ID NO: 262768 - RNA, 22 nt, Human
aaaucucaaaggcuuagcaucu

SEQ ID NO: 262769 - RNA, 19 nt, Human
cuccucagucccagagguc

SEQ ID NO: 262770 - RNA, 22 nt, Human
gggcuucugcucuuuuggugcu

SEQ ID NO: 262771 - RNA, 22 nt, Human
aggcuucuaggguuggcagcgg

SEQ ID NO: 262772 - RNA, 22 nt, Human
ggaguauuguagcuuccaguuc

SEQ ID NO: 262773 - RNA, 22 nt, Human
ucuuccagcuucugguggcugc

SEQ ID NO: 262774 - RNA, 20 nt, Human
uucaugcuggaggggcuggc

SEQ ID NO: 262775 - RNA, 22 nt, Human
uuuaggaucaaugagaaagucu

SEQ ID NO: 262776 - RNA, 20 nt, Human
ugcagguguguccaagcacu

SEQ ID NO: 262777 - RNA, 22 nt, Human
cugcuuuaacagaugauggugu

SEQ ID NO: 262778 - RNA, 22 nt, Human
uuacacaacaucuguauuauua

SEQ ID NO: 262779 - RNA, 21 nt, Human
ugacagcauagagcagggagg

SEQ ID NO: 262780 - RNA, 22 nt, Human
uccuggugcugacacccauagc

SEQ ID NO: 262781 - RNA, 22 nt, Human
aaagagaaacuuagaagccuga

SEQ ID NO: 262782 - RNA, 22 nt, Human
acauuucucaucuaguagagua

SEQ ID NO: 262783 - RNA, 22 nt, Human
gaggccauaagaaguucuuggg

SEQ ID NO: 262784 - RNA, 22 nt, Human
guugcagauguggaacucgugc

SEQ ID NO: 262785 - RNA, 22 nt, Human
caggacagaccaagaucgugcu

SEQ ID NO: 262786 - RNA, 22 nt, Human
uuuccugagucagagacaccag

SEQ ID NO: 262787 - RNA, 22 nt, Human
aaagugcagcuugugaucccua

SEQ ID NO: 262788 - RNA, 22 nt, Human
ugaguauugaccagaaaauuua

SEQ ID NO: 262789 - RNA, 22 nt, Human
agcuggaggggccagcaggugu

SEQ ID NO: 262790 - RNA, 22 nt, Human
ucagguguuucuggagaaguaa

SEQ ID NO: 262791 - RNA, 22 nt, Human
uccaggagauacacugcaccag

SEQ ID NO: 262792 - RNA, 22 nt, Human
uuucauaaugucacagucaaaa

SEQ ID NO: 262793 - RNA, 22 nt, Human
cugucauuuucuuccaauauaa

SEQ ID NO: 262794 - RNA, 22 nt, Human
cucugugcucccaugcuaguaa

SEQ ID NO: 262795 - RNA, 22 nt, Human
uaaaucucacuggguauauugg

SEQ ID NO: 262796 - RNA, 22 nt, Human
ccucagcagacacgcuucucac

SEQ ID NO: 262797 - RNA, 22 nt, Human
gccaggcuggcaaaaggaaacc

SEQ ID NO: 262798 - RNA, 21 nt, Human
acagauuuuauaucucugcug

SEQ ID NO: 262799 - RNA, 22 nt, Human
gccaggggacgcggagcgacga

SEQ ID NO: 262800 - RNA, 22 nt, Human
aaaccuuuucagcugaauggag

SEQ ID NO: 262801 - RNA, 22 nt, Human
ugaaauaacuuuugggugaguu

SEQ ID NO: 262802 - RNA, 22 nt, Human
uuugcagugucagcuucugugu

SEQ ID NO: 262803 - RNA, 22 nt, Human
gugugccaggaacuggcugcug

SEQ ID NO: 262804 - RNA, 22 nt, Human
ugcauuauuacaagguaagacu

SEQ ID NO: 262805 - RNA, 22 nt, Human
gagcuccuauggucgguggcuc

SEQ ID NO: 262806 - RNA, 22 nt, Human
augccccaggaggugccaucca

SEQ ID NO: 262807 - RNA, 22 nt, Human
aguccuggacuuggagucaggg

SEQ ID NO: 262808 - RNA, 22 nt, Human
gcaggcuugagagaucagaugg

SEQ ID NO: 262809 - RNA, 22 nt, Human
aaacucugcacugcgguaaggu

SEQ ID NO: 262810 - RNA, 22 nt, Human
aguguucauuuauucauucacu

SEQ ID NO: 262811 - RNA, 22 nt, Human
uggcagugggaagcuggaaguc

SEQ ID NO: 262812 - RNA, 22 nt, Human
aaggccaggacaccaggggacu

SEQ ID NO: 262813 - RNA, 22 nt, Human
gguccaguccugcucaccacuu

SEQ ID NO: 262814 - RNA, 22 nt, Human
ucuuuucauugagaacacacug

SEQ ID NO: 262815 - RNA, 22 nt, Human
gagcuggguauauggcuuuaug

SEQ ID NO: 262816 - RNA, 22 nt, Human
caaaauugaugaauguaugauu

SEQ ID NO: 262817 - RNA, 21 nt, Human
cucuccagugguuccugauuc

SEQ ID NO: 262818 - RNA, 22 nt, Human
uuacaaguacugaauaugauuu

SEQ ID NO: 262819 - RNA, 22 nt, Human
guaugaaagcaucauuccugcu

SEQ ID NO: 262820 - RNA, 22 nt, Human
aacccagagcuggaggagagua

SEQ ID NO: 262821 - RNA, 22 nt, Human
uucuagaaugauaugagguacu

SEQ ID NO: 262822 - RNA, 22 nt, Human
cccagcucugcagaccugcccu

SEQ ID NO: 262823 - RNA, 23 nt, Human
uucuuuggaauugggcugcaagg

SEQ ID NO: 262824 - RNA, 22 nt, Human
aaggccaggccuagcacggagg

SEQ ID NO: 262825 - RNA, 22 nt, Human
gccacuguuccaccaucuugau

SEQ ID NO: 262826 - RNA, 22 nt, Human
ucuuucuacaucauuugcuucu

SEQ ID NO: 262827 - RNA, 22 nt, Human
ggaaggcuuuguagaagugcca

SEQ ID NO: 262828 - RNA, 22 nt, Human
caucugaauuugccuuaguuuc

SEQ ID NO: 262829 - RNA, 22 nt, Human
aacaucuacagugagauguuag

SEQ ID NO: 262830 - RNA, 22 nt, Human
ggccugaggccaccagcagccc

SEQ ID NO: 262831 - RNA, 23 nt, Human
auuugagaaaguauuuuuaagac

SEQ ID NO: 262832 - RNA, 22 nt, Human
agguucuccuuaucaaugaaga

SEQ ID NO: 262833 - RNA, 22 nt, Human
cugaggaggggccugagugaga

SEQ ID NO: 262834 - RNA, 22 nt, Human
ucaaaagucugcauucuucaca

SEQ ID NO: 262835 - RNA, 22 nt, Human
uccugcuagagaauaacagcac

SEQ ID NO: 262836 - RNA, 22 nt, Human
ugaaaugcuuaggaccagaagg

SEQ ID NO: 262837 - RNA, 22 nt, Human
cggagcugcgccgggacacggg

SEQ ID NO: 262838 - RNA, 22 nt, Human
guguccugcauuggcucugccc

SEQ ID NO: 262839 - RNA, 22 nt, Human
ggcuugcuucuuguccaggaau

SEQ ID NO: 262840 - RNA, 22 nt, Human
cacagguagaugccaugcagca

SEQ ID NO: 262841 - RNA, 22 nt, Human
ucaaacagaggaacaauuguuu

SEQ ID NO: 262842 - RNA, 18 nt, Human
agacagacagguuugugc

SEQ ID NO: 262843 - RNA, 22 nt, Human
ugcagggcccucauuccugucc

SEQ ID NO: 262844 - RNA, 22 nt, Human
caggcugugggagucaggaccc

SEQ ID NO: 262845 - RNA, 22 nt, Human
auggcuucaucuuuuaguccuu

SEQ ID NO: 262846 - RNA, 22 nt, Human
ggcccagaaaaaggcuuagaau

SEQ ID NO: 262847 - RNA, 22 nt, Human
ucuccaggccuuucccaucuua

SEQ ID NO: 262848 - RNA, 22 nt, Human
cuaaagcaacugagacacauag

SEQ ID NO: 262849 - RNA, 23 nt, Human
uccuccuuuugcuugugcuuccc

SEQ ID NO: 262850 - RNA, 22 nt, Human
cucucugugcucacaagggcag

SEQ ID NO: 262851 - RNA, 21 nt, Human
agugacuaugacauuauuacc

SEQ ID NO: 262852 - RNA, 22 nt, Human
guauuagguuggugcaaaagua

SEQ ID NO: 262853 - RNA, 22 nt, Human
uacuguacugcaguucugcaaa

SEQ ID NO: 262854 - RNA, 22 nt, Human
aacaaaacauuugucuuguuuc

SEQ ID NO: 262855 - RNA, 22 nt, Human
aauggcuuuaaguagucucaca

SEQ ID NO: 262856 - RNA, 22 nt, Human
auacaacuuuaucuguaaugag

SEQ ID NO: 262857 - RNA, 22 nt, Human
agccuaaugcuuuucccaaagu

SEQ ID NO: 262858 - RNA, 22 nt, Human
cuggucccuguagguauuugac

SEQ ID NO: 262859 - RNA, 22 nt, Human
uguucauucgcuauugucuaug

SEQ ID NO: 262860 - RNA, 15 nt, Human
ccaggcugggugagc

SEQ ID NO: 262861 - RNA, 22 nt, Human
aggcugagauagguggaucauu

SEQ ID NO: 262862 - RNA, 22 nt, Human
caacaguauagcuuuugacugc

SEQ ID NO: 262863 - RNA, 20 nt, Human
agaaccuaaguuaaaacaca

SEQ ID NO: 262864 - RNA, 22 nt, Human
guuauugagacauagaguuaug

SEQ ID NO: 262865 - RNA, 22 nt, Human
accucaguucaauucaguuaga

SEQ ID NO: 262866 - RNA, 22 nt, Human
ccaggagcgcgugaacaggcug

SEQ ID NO: 262867 - RNA, 22 nt, Human
uuguacaacguuuuaaauuuga

SEQ ID NO: 262868 - RNA, 22 nt, Human
gguucucuuccuccugacugag

SEQ ID NO: 262869 - RNA, 22 nt, Human
guuuaauuuuagguugucaagc

SEQ ID NO: 262870 - RNA, 22 nt, Human
cguggcuggggcgacuccacgg

SEQ ID NO: 262871 - RNA, 22 nt, Human
ucaggccuggagaaaggaauga

SEQ ID NO: 262872 - RNA, 21 nt, Human
ugggggugaggccuaggaauc

SEQ ID NO: 262873 - RNA, 22 nt, Human
cagagugcauggugcuguucau

SEQ ID NO: 262874 - RNA, 22 nt, Human
gccagcagggaagccuugggcu

SEQ ID NO: 262875 - RNA, 21 nt, Human
gagcugaauauguucuagggg

SEQ ID NO: 262876 - RNA, 22 nt, Human
uucaaacuuaaggagcagcaga

SEQ ID NO: 262877 - RNA, 22 nt, Human
caggcuccucacucaugcuccc

SEQ ID NO: 262878 - RNA, 22 nt, Human
gucugcccugcugaucucaccc

SEQ ID NO: 262879 - RNA, 22 nt, Human
uacaguaaagcugcuaugaauu

SEQ ID NO: 262880 - RNA, 22 nt, Human
uguauuuugugaggaucacucu

SEQ ID NO: 262881 - RNA, 22 nt, Human
gcuguggucccucuguccucau

SEQ ID NO: 262882 - RNA, 22 nt, Human
aaaugucuuuaucucauguaac

SEQ ID NO: 262883 - RNA, 22 nt, Human
ccuggcugaaccaaugaagugg

SEQ ID NO: 262884 - RNA, 22 nt, Human
uacauuccuucguuuagagauu

SEQ ID NO: 262885 - RNA, 22 nt, Human
gcccucuggcagccuuggcugg

SEQ ID NO: 262886 - RNA, 22 nt, Human
cuaauagauaccacauuggaca

SEQ ID NO: 262887 - RNA, 22 nt, Human
acugcacuucacccugggugac

SEQ ID NO: 262888 - RNA, 21 nt, Human
uucccagcaccuagcacaggu

SEQ ID NO: 262889 - RNA, 22 nt, Human
uaauuuaugaugcaaagaaaag

SEQ ID NO: 262890 - RNA, 22 nt, Human
gaaaagagaacaucugaggauc

SEQ ID NO: 262891 - RNA, 22 nt, Human
ucacagaauagcacuguaagcg

SEQ ID NO: 262892 - RNA, 22 nt, Human
acuucucugcuaccugcaaaga

SEQ ID NO: 262893 - RNA, 22 nt, Human
gaaguuacucucguuaaauaug

SEQ ID NO: 262894 - RNA, 22 nt, Human
cccaugccuucugacucacagg

SEQ ID NO: 262895 - RNA, 22 nt, Human
uucucuuaucuggcauuauugg

SEQ ID NO: 262896 - RNA, 22 nt, Human
cccugagagguugagugucugc

SEQ ID NO: 262897 - RNA, 22 nt, Human
cugcaagguauauguuaucaua

SEQ ID NO: 262898 - RNA, 22 nt, Human
gaaauguguuguucauuucuaa

SEQ ID NO: 262899 - RNA, 17 nt, Human
uggcuucaggcugagca

SEQ ID NO: 262900 - RNA, 22 nt, Human
aaaauguguuuaugcauuucgu

SEQ ID NO: 262901 - RNA, 22 nt, Human
cccugucucauugaucacuugu

SEQ ID NO: 262902 - RNA, 22 nt, Human
agagaauuaauuaggagcacug

SEQ ID NO: 262903 - RNA, 22 nt, Human
uaauacagaaguguauuaaaau

SEQ ID NO: 262904 - RNA, 22 nt, Human
gcagagugagccgaggcugcuc

SEQ ID NO: 262905 - RNA, 22 nt, Human
uuucucagggaggagucaagcc

SEQ ID NO: 262906 - RNA, 22 nt, Human
cucugaauggacacuccagugu

SEQ ID NO: 262907 - RNA, 22 nt, Human
agucaggauuuuggauuauucg

SEQ ID NO: 262908 - RNA, 22 nt, Human
gacauuucuagcccauaaaacu

SEQ ID NO: 262909 - RNA, 22 nt, Human
uucuguacccucgcgauucucc

SEQ ID NO: 262910 - RNA, 22 nt, Human
ccuggggcuuucuuuguaucau

SEQ ID NO: 262911 - RNA, 22 nt, Human
ggcuguggucugggugcucccc

SEQ ID NO: 262912 - RNA, 22 nt, Human
uuaaaggcaugguuagacaugg

SEQ ID NO: 262913 - RNA, 22 nt, Human
aucuuuaggcaaguuacuuaac

SEQ ID NO: 262914 - RNA, 22 nt, Human
cugggagagccuuuccugaguc

SEQ ID NO: 262915 - RNA, 22 nt, Human
caugccaguuuugagaugcacc

SEQ ID NO: 262916 - RNA, 22 nt, Human
aagaacuguaucaagauguagu

SEQ ID NO: 262917 - RNA, 22 nt, Human
agcaccugugcccugauggaga

SEQ ID NO: 262918 - RNA, 22 nt, Human
aaaugucaaggugauagaugca

SEQ ID NO: 262919 - RNA, 22 nt, Human
auucuggguucaugagugagcu

SEQ ID NO: 262920 - RNA, 22 nt, Human
aucuaggauuugaaugcacagu

SEQ ID NO: 262921 - RNA, 22 nt, Human
agcucaggccggagcuacaggc

SEQ ID NO: 262922 - RNA, 22 nt, Human
acaggcuuacaggcugcaagua

SEQ ID NO: 262923 - RNA, 22 nt, Human
uauguacacacacaugcaugua

SEQ ID NO: 262924 - RNA, 22 nt, Human
uacaacauguaaagugguuuaa

SEQ ID NO: 262925 - RNA, 22 nt, Human
ugcacgugugagcauucacaug

SEQ ID NO: 262926 - RNA, 20 nt, Human
agagagagguaaauugagca

SEQ ID NO: 262927 - RNA, 22 nt, Human
cugagacacggagaggcugugu

SEQ ID NO: 262928 - RNA, 22 nt, Human
ugcaacaggagaguucagggca

SEQ ID NO: 262929 - RNA, 22 nt, Human
auuucucucauuguuagcuagg

SEQ ID NO: 262930 - RNA, 22 nt, Human
uucuguguggguagcuccuguu

SEQ ID NO: 262931 - RNA, 22 nt, Human
aguuaucaucccuuacacuuug

SEQ ID NO: 262932 - RNA, 22 nt, Human
ggcaaaaguauuaucucuuuaa

SEQ ID NO: 262933 - RNA, 22 nt, Human
uccuggccucgcuguccaccuu

SEQ ID NO: 262934 - RNA, 22 nt, Human
cagcagggcccccgggugcgcc

SEQ ID NO: 262935 - RNA, 22 nt, Human
uuauuggaaaagggcuguaauu

SEQ ID NO: 262936 - RNA, 22 nt, Human
ugucuuuuggagcaucuuucuu

SEQ ID NO: 262937 - RNA, 22 nt, Human
ccuggaggcagaaauaggacuu

SEQ ID NO: 262938 - RNA, 23 nt, Human
gcugggcuuacucuuucagugag

SEQ ID NO: 262939 - RNA, 22 nt, Human
agcuggcaucugaagucagggc

SEQ ID NO: 262940 - RNA, 22 nt, Human
aggcaggcucuggguaugugca

SEQ ID NO: 262941 - RNA, 22 nt, Human
gaccauuugcuaguaaauugca

SEQ ID NO: 262942 - RNA, 22 nt, Human
ucagggcaagauugguuaauaa

SEQ ID NO: 262943 - RNA, 22 nt, Human
augagaaauuuauuacaagcua

SEQ ID NO: 262944 - RNA, 22 nt, Human
uacaggcacugaaaugcuuauu

SEQ ID NO: 262945 - RNA, 22 nt, Human
ugccucuggccuuuggugccca

SEQ ID NO: 262946 - RNA, 22 nt, Human
uccaggacagcggcaggcagau

SEQ ID NO: 262947 - RNA, 22 nt, Human
ccaggcuagcccagaccacagg

SEQ ID NO: 262948 - RNA, 22 nt, Human
agucuuuauacagaaauauaug

SEQ ID NO: 262949 - RNA, 19 nt, Human
ucaggacugacuugaaguc

SEQ ID NO: 262950 - RNA, 22 nt, Human
gcagcuggauuucaagagggag

SEQ ID NO: 262951 - RNA, 22 nt, Human
aaagcaggguccaaggagaugu

SEQ ID NO: 262952 - RNA, 22 nt, Human
augguggaaucggcgugaaugg

SEQ ID NO: 262953 - RNA, 22 nt, Human
agggcugagcccaggcauguag

SEQ ID NO: 262954 - RNA, 22 nt, Human
ucacacagcuccuuuccuuagu

SEQ ID NO: 262955 - RNA, 22 nt, Human
caguuuuagggcaaugugaaga

SEQ ID NO: 262956 - RNA, 22 nt, Human
ucuggguguagggccuggcaac

SEQ ID NO: 262957 - RNA, 22 nt, Human
gucauggaggauugugaguggu

SEQ ID NO: 262958 - RNA, 22 nt, Human
aguuauauuccauagauucaga

SEQ ID NO: 262959 - RNA, 22 nt, Human
uuccaggacucguucuggcuca

SEQ ID NO: 262960 - RNA, 23 nt, Human
ggcagauuugguuuguuuuaaua

SEQ ID NO: 262961 - RNA, 22 nt, Human
ucccuggccuggaaggauauca

SEQ ID NO: 262962 - RNA, 22 nt, Human
cauggccaggcacgcgcauagc

SEQ ID NO: 262963 - RNA, 22 nt, Human
auaggugugugguucauggccc

SEQ ID NO: 262964 - RNA, 22 nt, Human
ccaguguuuccccagaagagag

SEQ ID NO: 262965 - RNA, 22 nt, Human
augcaaaauuaccauucuguuc

SEQ ID NO: 262966 - RNA, 22 nt, Human
auucaguuuuuauuggaccagc

SEQ ID NO: 262967 - RNA, 22 nt, Human
ugccaggcuuuggucaaaggcu

SEQ ID NO: 262968 - RNA, 22 nt, Human
uucucuguggauugggugagag

SEQ ID NO: 262969 - RNA, 22 nt, Human
aacuugaaacuguuccagaaaa

SEQ ID NO: 262970 - RNA, 18 nt, Human
acuguucucuccugcccu

SEQ ID NO: 262971 - RNA, 22 nt, Human
cacgccagccggacacugggcc

SEQ ID NO: 262972 - RNA, 22 nt, Human
uggcaggugccuguaaucucag

SEQ ID NO: 262973 - RNA, 22 nt, Human
gugugccacugccugaggaccc

SEQ ID NO: 262974 - RNA, 22 nt, Human
uggaggaaaaaaccaggcagag

SEQ ID NO: 262975 - RNA, 22 nt, Human
gcugugugcucacguaguggaa

SEQ ID NO: 262976 - RNA, 22 nt, Human
ugguauuacuucuagacacaag

SEQ ID NO: 262977 - RNA, 22 nt, Human
gaggccagccccucuugaaggc

SEQ ID NO: 262978 - RNA, 20 nt, Human
ucacagcuggcuaugacagg

SEQ ID NO: 262979 - RNA, 22 nt, Human
ugcugauuuugccuacugaucc

SEQ ID NO: 262980 - RNA, 23 nt, Human
ucuuugguaaauaaaguggggau

SEQ ID NO: 262981 - RNA, 22 nt, Human
ugaguccugcugagcagagagg

SEQ ID NO: 262982 - RNA, 22 nt, Human
ccugccugcaaaaugggacaag

SEQ ID NO: 262983 - RNA, 22 nt, Human
uucuguauauuguaaagacuca

SEQ ID NO: 262984 - RNA, 22 nt, Human
ggguaggccagaagggccugga

SEQ ID NO: 262985 - RNA, 22 nt, Human
gccugccuagaauugcagcuuu

SEQ ID NO: 262986 - RNA, 22 nt, Human
ucucuuggaaagcuugcccacu

SEQ ID NO: 262987 - RNA, 22 nt, Human
gauauuuaacucucacaggucc

SEQ ID NO: 262988 - RNA, 22 nt, Human
aguucagaguaaauguugaagg

SEQ ID NO: 262989 - RNA, 22 nt, Human
gaggugucugaguggggaccug

SEQ ID NO: 262990 - RNA, 22 nt, Human
ucugccugcaguguggcagggc

SEQ ID NO: 262991 - RNA, 22 nt, Human
caaaucugagucuacaauuuua

SEQ ID NO: 262992 - RNA, 22 nt, Human
uuggaacaugccgggguccagg

SEQ ID NO: 262993 - RNA, 19 nt, Human
gaggcgaggcgugcaggag

SEQ ID NO: 262994 - RNA, 22 nt, Human
uguguuauugccacugaagacc

SEQ ID NO: 262995 - RNA, 22 nt, Human
ugugcccuguuaaaugcacagu

SEQ ID NO: 262996 - RNA, 22 nt, Human
auguuuccagguucuuccuaug

SEQ ID NO: 262997 - RNA, 17 nt, Human
agugugugaaauggugg

SEQ ID NO: 262998 - RNA, 22 nt, Human
uaggcaugcaaauaaaugugca

SEQ ID NO: 262999 - RNA, 22 nt, Human
caaugacagguucaugacuccu

SEQ ID NO: 263000 - RNA, 22 nt, Human
uaaacaucugucauguguuuau

SEQ ID NO: 263001 - RNA, 22 nt, Human
ucagcuccucaugcaggggaua

SEQ ID NO: 263002 - RNA, 22 nt, Human
aagcuuuagagaugaguuccuu

SEQ ID NO: 263003 - RNA, 22 nt, Human
uaaaugauuuauguaugugaaa

SEQ ID NO: 263004 - RNA, 22 nt, Human
ccucuucucaacuccagccaga

SEQ ID NO: 263005 - RNA, 22 nt, Human
acagaaagauaggcacaagguc

SEQ ID NO: 263006 - RNA, 22 nt, Human
cuuuaguuuaagaacaugauga

SEQ ID NO: 263007 - RNA, 22 nt, Human
ggccucugggguccugagccca

SEQ ID NO: 263008 - RNA, 22 nt, Human
auuugcuucugugaaaucaagu

SEQ ID NO: 263009 - RNA, 22 nt, Human
uucacauuugcccuuaugugug

SEQ ID NO: 263010 - RNA, 22 nt, Human
ucugcagaacuuuaugagcaaa

SEQ ID NO: 263011 - RNA, 22 nt, Human
gagaugguguuccacugccagu

SEQ ID NO: 263012 - RNA, 22 nt, Human
uuuaagaugguauuuuauaaag

SEQ ID NO: 263013 - RNA, 22 nt, Human
cauuaauauuguucuucuuuag

SEQ ID NO: 263014 - RNA, 22 nt, Human
gcucagcugcaccuggagagcc

SEQ ID NO: 263015 - RNA, 22 nt, Human
gcugcuguggcagauuggauuc

SEQ ID NO: 263016 - RNA, 22 nt, Human
agacugggccauuuccccagcu

SEQ ID NO: 263017 - RNA, 22 nt, Human
gaaugcuaagcaugugggaguu

SEQ ID NO: 263018 - RNA, 22 nt, Human
guccugaaugccuuuaggcaga

SEQ ID NO: 263019 - RNA, 19 nt, Human
uuuaaagugacugguauuu

SEQ ID NO: 263020 - RNA, 22 nt, Human
gaacagagaagcuuuacuaaag

SEQ ID NO: 263021 - RNA, 22 nt, Human
guuuuauaggcuguugcuauau

SEQ ID NO: 263022 - RNA, 23 nt, Human
uucuccugaggaagcagggacug

SEQ ID NO: 263023 - RNA, 22 nt, Human
uuacaggguugcagcauugacg

SEQ ID NO: 263024 - RNA, 22 nt, Human
acagucuacuaaacaucaucag

SEQ ID NO: 263025 - RNA, 22 nt, Human
aacagacuuagagcaucccaau

SEQ ID NO: 263026 - RNA, 22 nt, Human
gggcuccagaggcucacccugg

SEQ ID NO: 263027 - RNA, 22 nt, Human
aagauuuaccacuuuauucaag

SEQ ID NO: 263028 - RNA, 22 nt, Human
aggugaggauagguggccaagg

SEQ ID NO: 263029 - RNA, 22 nt, Human
ccuggucagguaacugggcuga

SEQ ID NO: 263030 - RNA, 22 nt, Human
ugacacauaccgaaaauauuug

SEQ ID NO: 263031 - RNA, 22 nt, Human
ucuggcagcuauccucuggcca

SEQ ID NO: 263032 - RNA, 22 nt, Human
uacaccaguaucuuaagcauga

SEQ ID NO: 263033 - RNA, 22 nt, Human
ucagggaacaucguuaaacuag

SEQ ID NO: 263034 - RNA, 22 nt, Human
uccugccaggagugcuggcccu

SEQ ID NO: 263035 - RNA, 19 nt, Human
ccaggccaucccaguuccc

SEQ ID NO: 263036 - RNA, 22 nt, Human
uugccuggauucuaccacagaa

SEQ ID NO: 263037 - RNA, 22 nt, Human
uucucugggaucuggcaaaagg

SEQ ID NO: 263038 - RNA, 22 nt, Human
uggcaaaguaucugucccagcu

SEQ ID NO: 263039 - RNA, 22 nt, Human
uggcuggggccacaguuuuccu

SEQ ID NO: 263040 - RNA, 22 nt, Human
gacagcagcauguuuacaggcc

SEQ ID NO: 263041 - RNA, 22 nt, Human
ccugggugucaugggcagcugg

SEQ ID NO: 263042 - RNA, 22 nt, Human
uaauuacagagguuugccaguu

SEQ ID NO: 263043 - RNA, 22 nt, Human
aaucaguuucuuggcaaguuua

SEQ ID NO: 263044 - RNA, 22 nt, Human
auuugccuugugauuuguaagu

SEQ ID NO: 263045 - RNA, 22 nt, Human
acagucaguaucccaggcaaau

SEQ ID NO: 263046 - RNA, 22 nt, Human
ggcaccaggacaugacucccag

SEQ ID NO: 263047 - RNA, 22 nt, Human
gaggugucauuuaguuaaucag

SEQ ID NO: 263048 - RNA, 22 nt, Human
uaacaguauagccuaacauuuc

SEQ ID NO: 263049 - RNA, 22 nt, Human
ggcaggcaagucugcucuguga

SEQ ID NO: 263050 - RNA, 22 nt, Human
agaggggcaaguaaagagucuu

SEQ ID NO: 263051 - RNA, 22 nt, Human
gaggcacaauacaugucucaag

SEQ ID NO: 263052 - RNA, 18 nt, Human
gcacagcuaggagggucc

SEQ ID NO: 263053 - RNA, 22 nt, Human
aguguagaugaaauuaaaccca

SEQ ID NO: 263054 - RNA, 22 nt, Human
acauucaaccaauguuugcuau

SEQ ID NO: 263055 - RNA, 20 nt, Human
ucuguuauugcauguacaua

SEQ ID NO: 263056 - RNA, 22 nt, Human
cuuauguaaaacggaaagggaa

SEQ ID NO: 263057 - RNA, 19 nt, Human
uccuccuuacuuccucuug

SEQ ID NO: 263058 - RNA, 22 nt, Human
agcaguuugaaucaauggccag

SEQ ID NO: 263059 - RNA, 22 nt, Human
cacaaaguauaacuugauggaa

SEQ ID NO: 263060 - RNA, 22 nt, Human
gaaucauuggaaccacauccaa

SEQ ID NO: 263061 - RNA, 22 nt, Human
ucugccuuagcaauugucaagg

SEQ ID NO: 263062 - RNA, 22 nt, Human
cuccugugaggcuuaagcccag

SEQ ID NO: 263063 - RNA, 22 nt, Human
ccaggacaauucgucacuuucu

SEQ ID NO: 263064 - RNA, 22 nt, Human
uuucagaaccgcuaaaauaaau

SEQ ID NO: 263065 - RNA, 20 nt, Human
ucuuugugucagauggacag

SEQ ID NO: 263066 - RNA, 22 nt, Human
cuucugugcuaaaugcaaaacc

SEQ ID NO: 263067 - RNA, 22 nt, Human
ccaggaggggucucugucuccc

SEQ ID NO: 263068 - RNA, 21 nt, Human
agaaauguaucauucuuuucc

SEQ ID NO: 263069 - RNA, 22 nt, Human
uaaugcacaugacugaacuauu

SEQ ID NO: 263070 - RNA, 22 nt, Human
guuugcauaucugugaaaugga

SEQ ID NO: 263071 - RNA, 22 nt, Human
ggagaucuugcuugaaggcaug

SEQ ID NO: 263072 - RNA, 22 nt, Human
gcuucauuuugcccucuggugg

SEQ ID NO: 263073 - RNA, 22 nt, Human
guguccugcacagcaccuugca

SEQ ID NO: 263074 - RNA, 22 nt, Human
ccugggcugcucauggggauga

SEQ ID NO: 263075 - RNA, 22 nt, Human
aaugucaaaauggaaugagacu

SEQ ID NO: 263076 - RNA, 22 nt, Human
ugucugaagcagccagugcugu

SEQ ID NO: 263077 - RNA, 22 nt, Human
ccuguucauuuguauuugucuu

SEQ ID NO: 263078 - RNA, 22 nt, Human
uguaagaauaaugauuucuaag

SEQ ID NO: 263079 - RNA, 22 nt, Human
auggguuuauagguggacuuuu

SEQ ID NO: 263080 - RNA, 22 nt, Human
gucucagguucgagccuccuua

SEQ ID NO: 263081 - RNA, 22 nt, Human
aguagugaacagccacaggauu

SEQ ID NO: 263082 - RNA, 22 nt, Human
aggcaagugcauuagaagagca

SEQ ID NO: 263083 - RNA, 22 nt, Human
aauuuacaggugcacucgccau

SEQ ID NO: 263084 - RNA, 19 nt, Human
ucucagaauuaagagugcu

SEQ ID NO: 263085 - RNA, 22 nt, Human
gcuuggcagcaacaggcauccc

SEQ ID NO: 263086 - RNA, 22 nt, Human
ucuggagggggaugccucaucc

SEQ ID NO: 263087 - RNA, 22 nt, Human
uuugcagugauucuugcaguga

SEQ ID NO: 263088 - RNA, 22 nt, Human
uacagcaauaaugacaccgcuc

SEQ ID NO: 263089 - RNA, 22 nt, Human
aaagcugcugugaaugguuugg

SEQ ID NO: 263090 - RNA, 22 nt, Human
agcugaggccacgagugaaggg

SEQ ID NO: 263091 - RNA, 22 nt, Human
cuucuuucccaggcauguuuua

SEQ ID NO: 263092 - RNA, 22 nt, Human
acaguacaagcaugauacauaa

SEQ ID NO: 263093 - RNA, 22 nt, Human
uuuguguuuguacaaugcacua

SEQ ID NO: 263094 - RNA, 22 nt, Human
ggagcucaccuuggagucucug

SEQ ID NO: 263095 - RNA, 22 nt, Human
acacacacaagcagguugugga

SEQ ID NO: 263096 - RNA, 22 nt, Human
aaagagucguguuccagguuug

SEQ ID NO: 263097 - RNA, 22 nt, Human
ccucagggaaugggaggcuggg

SEQ ID NO: 263098 - RNA, 22 nt, Human
cugguccccagacugggcuuag

SEQ ID NO: 263099 - RNA, 22 nt, Human
uacaaaugaccauagccacuua

SEQ ID NO: 263100 - RNA, 22 nt, Human
acagcauugcuccaucucaaga

SEQ ID NO: 263101 - RNA, 22 nt, Human
agacagacauagaaauuaguaa

SEQ ID NO: 263102 - RNA, 22 nt, Human
auauauuuuuugagacagaguc

SEQ ID NO: 263103 - RNA, 22 nt, Human
uugccaggcuuguuucuaggcu

SEQ ID NO: 263104 - RNA, 22 nt, Human
acuguccauaauauuggugaac

SEQ ID NO: 263105 - RNA, 22 nt, Human
aggaaugugaggcaaguuguga

SEQ ID NO: 263106 - RNA, 22 nt, Human
acuguucacuagugaggguuga

SEQ ID NO: 263107 - RNA, 22 nt, Human
ggucugagauauuuguucagcu

SEQ ID NO: 263108 - RNA, 22 nt, Human
agcagcagcucauucuuccugu

SEQ ID NO: 263109 - RNA, 22 nt, Human
uuguaaaugaccuuuucuaauu

SEQ ID NO: 263110 - RNA, 22 nt, Human
caggccagugugcuucccaggc

SEQ ID NO: 263111 - RNA, 22 nt, Human
augaggcaggauauuaacuuuu

SEQ ID NO: 263112 - RNA, 22 nt, Human
uuacaacacuacuuauccuuga

SEQ ID NO: 263113 - RNA, 22 nt, Human
cucagagcucgugggaccuugg

SEQ ID NO: 263114 - RNA, 22 nt, Human
cagcacuaggauauacauuucc

SEQ ID NO: 263115 - RNA, 22 nt, Human
gcagauaggguauuaggaguaa

SEQ ID NO: 263116 - RNA, 22 nt, Human
uagcccagagucccaauuccag

SEQ ID NO: 263117 - RNA, 20 nt, Human
ucugaauugagugaaugucu

SEQ ID NO: 263118 - RNA, 22 nt, Human
acaguacauagaucucuacccu

SEQ ID NO: 263119 - RNA, 22 nt, Human
uccagggaucuuuagagucuuu

SEQ ID NO: 263120 - RNA, 22 nt, Human
uuuaucuggacugugauauaaa

SEQ ID NO: 263121 - RNA, 22 nt, Human
uuuauauauggcuggucuggau

SEQ ID NO: 263122 - RNA, 22 nt, Human
ggcaggugccaguuggcuuggg

SEQ ID NO: 263123 - RNA, 19 nt, Human
gacagugcaguuguaguac

SEQ ID NO: 263124 - RNA, 22 nt, Human
uuuucauuuuuguagaugcaag

SEQ ID NO: 263125 - RNA, 22 nt, Human
gggcuucucagagaggcuuuag

SEQ ID NO: 263126 - RNA, 22 nt, Human
aaaguuugcaauuuauguuaau

SEQ ID NO: 263127 - RNA, 22 nt, Human
gacagcugcucccguuucugcu

SEQ ID NO: 263128 - RNA, 22 nt, Human
uagauuugauguaagcauaguc

SEQ ID NO: 263129 - RNA, 22 nt, Human
ucuccuggagcaggaagguggg

SEQ ID NO: 263130 - RNA, 22 nt, Human
uugugcaaggcucuuggaaugu

SEQ ID NO: 263131 - RNA, 22 nt, Human
guguaucuggcaugucgagugu

SEQ ID NO: 263132 - RNA, 22 nt, Human
uuacuuuguucucaagauaugu

SEQ ID NO: 263133 - RNA, 22 nt, Human
ucgugcaaaccugacacagcca

SEQ ID NO: 263134 - RNA, 22 nt, Human
aaaucaugguggaagaaacaga

SEQ ID NO: 263135 - RNA, 22 nt, Human
uccugggaagcgccggccugcg

SEQ ID NO: 263136 - RNA, 22 nt, Human
caggaaauuggcuauuugggau

SEQ ID NO: 263137 - RNA, 22 nt, Human
ucucaaaucaaacuuugagcuu

SEQ ID NO: 263138 - RNA, 22 nt, Human
cagucuaaucuguuacucauua

SEQ ID NO: 263139 - RNA, 22 nt, Human
aacagcugucugccuaucucug

SEQ ID NO: 263140 - RNA, 22 nt, Human
uaggguccaagccuuauaauua

SEQ ID NO: 263141 - RNA, 22 nt, Human
gcucucuuuuuccagugguggu

SEQ ID NO: 263142 - RNA, 22 nt, Human
cagggcuggcuuccaaguuguu

SEQ ID NO: 263143 - RNA, 22 nt, Human
gagaggagucccuaucacaguu

SEQ ID NO: 263144 - RNA, 22 nt, Human
agguggucuuaaacugcucugg

SEQ ID NO: 263145 - RNA, 22 nt, Human
accaggcaacugugaaugggcu

SEQ ID NO: 263146 - RNA, 22 nt, Human
uacaugugaucagaaagugaaa

SEQ ID NO: 263147 - RNA, 22 nt, Human
gcagccucaaacuccccagcuc

SEQ ID NO: 263148 - RNA, 22 nt, Human
gccuuuauuguuuauucagugc

SEQ ID NO: 263149 - RNA, 19 nt, Human
uggcuaauuuuauagaggc

SEQ ID NO: 263150 - RNA, 22 nt, Human
ucaguguuuguggcaaauguua

SEQ ID NO: 263151 - RNA, 19 nt, Human
gugcuccagggcaaggagu

SEQ ID NO: 263152 - RNA, 22 nt, Human
aaacagaaggguagguaaacau

SEQ ID NO: 263153 - RNA, 22 nt, Human
gaguuucuccagugcuaguugu

SEQ ID NO: 263154 - RNA, 22 nt, Human
ugcugccaucucaacugcccuu

SEQ ID NO: 263155 - RNA, 22 nt, Human
ccuggagcaaaaaucuaaggag

SEQ ID NO: 263156 - RNA, 22 nt, Human
agagcccucuucacugccccuu

SEQ ID NO: 263157 - RNA, 22 nt, Human
ccaaguguuuuauaagggacag

SEQ ID NO: 263158 - RNA, 22 nt, Human
auauucuauaagcaguuggaag

SEQ ID NO: 263159 - RNA, 22 nt, Human
ucacaucuuaguuugggacucu

SEQ ID NO: 263160 - RNA, 22 nt, Human
aaaguauucaaaaauauuuggu

SEQ ID NO: 263161 - RNA, 22 nt, Human
auccaugaucaauuuauuacua

SEQ ID NO: 263162 - RNA, 22 nt, Human
acacuaguauuucuauaaguga

SEQ ID NO: 263163 - RNA, 22 nt, Human
ucccagccacaguuuccaccug

SEQ ID NO: 263164 - RNA, 22 nt, Human
cuguuauuucugaaugccaucc

SEQ ID NO: 263165 - RNA, 22 nt, Human
ccugcugugaaacuggcauaug

SEQ ID NO: 263166 - RNA, 22 nt, Human
caguagcaggcacucagcacgu

SEQ ID NO: 263167 - RNA, 22 nt, Human
gucucugucacaacuacucauc

SEQ ID NO: 263168 - RNA, 21 nt, Human
uggguggaagcgggaggccgc

SEQ ID NO: 263169 - RNA, 22 nt, Human
aaaauguaaagcuugaguguag

SEQ ID NO: 263170 - RNA, 22 nt, Human
caaauguguaaggaaguguuag

SEQ ID NO: 263171 - RNA, 19 nt, Human
gucccuucacuccugcugg

SEQ ID NO: 263172 - RNA, 22 nt, Human
uugauucauuuauugagugccu

SEQ ID NO: 263173 - RNA, 22 nt, Human
ugccuuggauugcagggaaccu

SEQ ID NO: 263174 - RNA, 22 nt, Human
uuacagagccucauuuuagaga

SEQ ID NO: 263175 - RNA, 22 nt, Human
cucccucagaggagcaccuguu

SEQ ID NO: 263176 - RNA, 20 nt, Human
ggcauccuuuuggucacagc

SEQ ID NO: 263177 - RNA, 22 nt, Human
cuccccaagccuuggcuucucc

SEQ ID NO: 263178 - RNA, 22 nt, Human
ccaaauaauauuucagaaccau

SEQ ID NO: 263179 - RNA, 22 nt, Human
cccaaguuaauuuguagcugaa

SEQ ID NO: 263180 - RNA, 22 nt, Human
gcucagagaagcgguuucgccu

SEQ ID NO: 263181 - RNA, 22 nt, Human
acaagcuguggugggacaagag

SEQ ID NO: 263182 - RNA, 23 nt, Human
aaauuauugcucuucaauugccu

SEQ ID NO: 263183 - RNA, 23 nt, Human
accuacauuauagggauaugggu

SEQ ID NO: 263184 - RNA, 22 nt, Human
auuuagaaccccuuccaaccug

SEQ ID NO: 263185 - RNA, 22 nt, Human
cuuagaaugucuacucuuacca

SEQ ID NO: 263186 - RNA, 23 nt, Human
cacaggcugcgcauaagcuucuc

SEQ ID NO: 263187 - RNA, 22 nt, Human
gaggcugcccaacuggagugga

SEQ ID NO: 263188 - RNA, 22 nt, Human
cauuuuccucugcugguguuca

SEQ ID NO: 263189 - RNA, 22 nt, Human
gggcagguauuuaucuucuauu

SEQ ID NO: 263190 - RNA, 22 nt, Human
uccugaggcucacuuugaaugu

SEQ ID NO: 263191 - RNA, 22 nt, Human
acuggcugaucaccugccucag

SEQ ID NO: 263192 - RNA, 19 nt, Human
ggggagaacuagagacagc

SEQ ID NO: 263193 - RNA, 22 nt, Human
ccuacauucucugaguuuuccu

SEQ ID NO: 263194 - RNA, 22 nt, Human
gucaacaaagaaaauuguuaau

SEQ ID NO: 263195 - RNA, 22 nt, Human
uggaggucugcaaggcgcugga

SEQ ID NO: 263196 - RNA, 22 nt, Human
caggguggaagcuguagagugg

SEQ ID NO: 263197 - RNA, 22 nt, Human
uggcaaagacugcaaggacuuu

SEQ ID NO: 263198 - RNA, 22 nt, Human
uagaaacaaagaccugggugcu

SEQ ID NO: 263199 - RNA, 22 nt, Human
uuggcuucuucgcacagcagua

SEQ ID NO: 263200 - RNA, 22 nt, Human
uggggccagggaggaccagaca

SEQ ID NO: 263201 - RNA, 22 nt, Human
gggacgagaucuuggcagugug

SEQ ID NO: 263202 - RNA, 22 nt, Human
agcuccagauuaauuguaggag

SEQ ID NO: 263203 - RNA, 22 nt, Human
guaagccugagaaacaccaccu

SEQ ID NO: 263204 - RNA, 22 nt, Human
cagaggcacagugcgggccacu

SEQ ID NO: 263205 - RNA, 22 nt, Human
gaaggcugcgaggggagugccg

SEQ ID NO: 263206 - RNA, 22 nt, Human
cagugcagcugccccgcuggua

SEQ ID NO: 263207 - RNA, 22 nt, Human
ugguaagaacccaucagagaag

SEQ ID NO: 263208 - RNA, 22 nt, Human
aaacauugagcacuugcuauuu

SEQ ID NO: 263209 - RNA, 19 nt, Human
uuugggaagcccagagugu

SEQ ID NO: 263210 - RNA, 22 nt, Human
guggaaggaauuaacagacuag

SEQ ID NO: 263211 - RNA, 22 nt, Human
ugggaacaacaugcacugccac

SEQ ID NO: 263212 - RNA, 22 nt, Human
gaaaguuugccucucucuugag

SEQ ID NO: 263213 - RNA, 22 nt, Human
ccugggagggcaagugcugaug

SEQ ID NO: 263214 - RNA, 20 nt, Human
uaacaguaagugauguuaca

SEQ ID NO: 263215 - RNA, 22 nt, Human
ggccugagaaccauggggccaa

SEQ ID NO: 263216 - RNA, 22 nt, Human
agugggcugagcuugcugggug

SEQ ID NO: 263217 - RNA, 22 nt, Human
aucuguaauuuugaaugcaaau

SEQ ID NO: 263218 - RNA, 22 nt, Human
uucccagacuccacacugaggc

SEQ ID NO: 263219 - RNA, 22 nt, Human
agcccuggagcaaaggugucuu

SEQ ID NO: 263220 - RNA, 22 nt, Human
gagugcuggggugcagagaggu

SEQ ID NO: 263221 - RNA, 22 nt, Human
uccaggccugacuauaaaugua

SEQ ID NO: 263222 - RNA, 21 nt, Human
ucuggcaguggucuuucaaau

SEQ ID NO: 263223 - RNA, 22 nt, Human
uucugagagugccagaaguucu

SEQ ID NO: 263224 - RNA, 22 nt, Human
gcacaaaagguacuucauguag

SEQ ID NO: 263225 - RNA, 22 nt, Human
acaagauugauaagucugcccu

SEQ ID NO: 263226 - RNA, 22 nt, Human
gccaaaucacagggccaaaagc

SEQ ID NO: 263227 - RNA, 22 nt, Human
auugcaaaauuguccuguggaa

SEQ ID NO: 263228 - RNA, 22 nt, Human
caacacauugaagcuaugauga

SEQ ID NO: 263229 - RNA, 22 nt, Human
uucagugugccuaagucaguug

SEQ ID NO: 263230 - RNA, 22 nt, Human
uggagcuggcagcggaaaaggg

SEQ ID NO: 263231 - RNA, 19 nt, Human
agaaaaacugguacugcug

SEQ ID NO: 263232 - RNA, 22 nt, Human
ucguacagcagacugaaguccu

SEQ ID NO: 263233 - RNA, 22 nt, Human
aaguuacaguuaggggugauga

SEQ ID NO: 263234 - RNA, 22 nt, Human
acaaucuuauuaguaguauaga

SEQ ID NO: 263235 - RNA, 22 nt, Human
ucgcugugaaaaccuuggacaa

SEQ ID NO: 263236 - RNA, 22 nt, Human
ggcugggaggaugacuugcuac

SEQ ID NO: 263237 - RNA, 22 nt, Human
ucccugaggaagggguguggug

SEQ ID NO: 263238 - RNA, 22 nt, Human
aacagcauaccaauguacauau

SEQ ID NO: 263239 - RNA, 20 nt, Human
aacugccugcccagaggugg

SEQ ID NO: 263240 - RNA, 22 nt, Human
agaggcaggagguugacuugag

SEQ ID NO: 263241 - RNA, 22 nt, Human
gggcacauguaaagcuggagaa

SEQ ID NO: 263242 - RNA, 22 nt, Human
guguaauuauauaaagaucuac

SEQ ID NO: 263243 - RNA, 20 nt, Human
uugcaaauaucuauugauug

SEQ ID NO: 263244 - RNA, 22 nt, Human
uguuaaauguuccuuuacugga

SEQ ID NO: 263245 - RNA, 22 nt, Human
gagcugaagaugucagaaccgu

SEQ ID NO: 263246 - RNA, 17 nt, Human
ccuggcugggaaucuga

SEQ ID NO: 263247 - RNA, 22 nt, Human
uuccugugauauuagccacugu

SEQ ID NO: 263248 - RNA, 22 nt, Human
gcaccuggacagugacccuagc

SEQ ID NO: 263249 - RNA, 22 nt, Human
agcacagacuggucccaggucu

SEQ ID NO: 263250 - RNA, 22 nt, Human
agagcucaagacgcucacagua

SEQ ID NO: 263251 - RNA, 22 nt, Human
gcugcccugacaagcuacuccc

SEQ ID NO: 263252 - RNA, 22 nt, Human
acaguuaaauauuucuacuggg

SEQ ID NO: 263253 - RNA, 22 nt, Human
uuuggcucaucucaguccuagg

SEQ ID NO: 263254 - RNA, 22 nt, Human
cuggcccucggaguccagcugc

SEQ ID NO: 263255 - RNA, 22 nt, Human
ccagccagucccgcaugaccgc

SEQ ID NO: 263256 - RNA, 22 nt, Human
ugggccucaugcccagccaccc

SEQ ID NO: 263257 - RNA, 22 nt, Human
agcagcagcucaguucucagcu

SEQ ID NO: 263258 - RNA, 22 nt, Human
uugucaagaaaaauggaugaag

SEQ ID NO: 263259 - RNA, 22 nt, Human
agagcacaggcucaccauuguu

SEQ ID NO: 263260 - RNA, 22 nt, Human
uuacuucuugucucaugccuau

SEQ ID NO: 263261 - RNA, 22 nt, Human
gcugaggccucagaaggcugag

SEQ ID NO: 263262 - RNA, 22 nt, Human
ugaccccacugugcucagaggu

SEQ ID NO: 263263 - RNA, 22 nt, Human
uacauuaaggauauggacauga

SEQ ID NO: 263264 - RNA, 22 nt, Human
cccaggcugcaugaguccaugg

SEQ ID NO: 263265 - RNA, 22 nt, Human
ugggguggauagaaagugaugu

SEQ ID NO: 263266 - RNA, 22 nt, Human
uaucagcaacucagagcagucu

SEQ ID NO: 263267 - RNA, 22 nt, Human
aauacuugugaauucaaagucu

SEQ ID NO: 263268 - RNA, 22 nt, Human
uccccagacagcgggaggccug

SEQ ID NO: 263269 - RNA, 22 nt, Human
uagagcuugauuggauucaggg

SEQ ID NO: 263270 - RNA, 22 nt, Human
aguuuacaucuucaaucucauu

SEQ ID NO: 263271 - RNA, 22 nt, Human
ucagggauugcaaaauucaucc

SEQ ID NO: 263272 - RNA, 22 nt, Human
cugggcccacaaguggaaucgu

SEQ ID NO: 263273 - RNA, 22 nt, Human
ugccaggccucaggagucucca

SEQ ID NO: 263274 - RNA, 22 nt, Human
auucugcacuuccuuugcuucc

SEQ ID NO: 263275 - RNA, 23 nt, Human
uuucaacaaugcuuagagaaaac

SEQ ID NO: 263276 - RNA, 22 nt, Human
uuguuucaggaugguuuguuac

SEQ ID NO: 263277 - RNA, 22 nt, Human
uaugacuuuggaaaaauuacuu

SEQ ID NO: 263278 - RNA, 22 nt, Human
ucagaggacuaccuucuccagu

SEQ ID NO: 263279 - RNA, 22 nt, Human
gcaguaugaguguuuuagacau

SEQ ID NO: 263280 - RNA, 22 nt, Human
auacacuugaccuggagugaag

SEQ ID NO: 263281 - RNA, 16 nt, Human
uagggcugggaaggag

SEQ ID NO: 263282 - RNA, 22 nt, Human
uaggaaauugacaccugcuuga

SEQ ID NO: 263283 - RNA, 21 nt, Human
uuucagaccuaucuuugaagg

SEQ ID NO: 263284 - RNA, 22 nt, Human
ucuccccagggguauggguauu

SEQ ID NO: 263285 - RNA, 22 nt, Human
ggcacagcaccuuuucacauug

SEQ ID NO: 263286 - RNA, 22 nt, Human
ugaggcugagauaucagggagg

SEQ ID NO: 263287 - RNA, 22 nt, Human
caggacaguauaggcuuuagga

SEQ ID NO: 263288 - RNA, 20 nt, Human
uccagcccagcagccugaca

SEQ ID NO: 263289 - RNA, 22 nt, Human
aaaggcuauugcugauaauguu

SEQ ID NO: 263290 - RNA, 22 nt, Human
agaaguaugugagaaauuaucc

SEQ ID NO: 263291 - RNA, 22 nt, Human
ugcuccuucccuucccagugag

SEQ ID NO: 263292 - RNA, 22 nt, Human
ucccagcacgucugcuguuucu

SEQ ID NO: 263293 - RNA, 22 nt, Human
ucugaggacagugcugugccug

SEQ ID NO: 263294 - RNA, 22 nt, Human
gacccuguuucuacaaauaauu

SEQ ID NO: 263295 - RNA, 22 nt, Human
ccuccagguguuacauaugacu

SEQ ID NO: 263296 - RNA, 19 nt, Human
ugaggccaaggucacagau

SEQ ID NO: 263297 - RNA, 22 nt, Human
uugagaagguggucauuugcaa

SEQ ID NO: 263298 - RNA, 22 nt, Human
ccaauacacuuuauagaagaaa

SEQ ID NO: 263299 - RNA, 20 nt, Human
agggucugaugugguggccc

SEQ ID NO: 263300 - RNA, 22 nt, Human
gucucuguggcuggcuccuucc

SEQ ID NO: 263301 - RNA, 22 nt, Human
acaugagaggcuguggaguaca

SEQ ID NO: 263302 - RNA, 22 nt, Human
aaaagccaugcauaccuaagag

SEQ ID NO: 263303 - RNA, 22 nt, Human
ucuucagauggccaguuguccc

SEQ ID NO: 263304 - RNA, 22 nt, Human
cccuaggguuuggccagagccc

SEQ ID NO: 263305 - RNA, 22 nt, Human
cugugccacugccccaggccuc

SEQ ID NO: 263306 - RNA, 23 nt, Human
ucuugaaaagccuacagcaguuc

SEQ ID NO: 263307 - RNA, 22 nt, Human
agcugcaacuguccuugccuug

SEQ ID NO: 263308 - RNA, 22 nt, Human
acagggcaugugcaagagacau

SEQ ID NO: 263309 - RNA, 22 nt, Human
aaguuugucgaaauuaucagca

SEQ ID NO: 263310 - RNA, 19 nt, Human
cuggaaggagggacuguuc

SEQ ID NO: 263311 - RNA, 22 nt, Human
aaagcacagggugcuagagagu

SEQ ID NO: 263312 - RNA, 23 nt, Human
acuuuagauaaauuaugugcaca

SEQ ID NO: 263313 - RNA, 22 nt, Human
ugggagaagcagcagccaagug

SEQ ID NO: 263314 - RNA, 22 nt, Human
uuuguucaauccagacaauagc

SEQ ID NO: 263315 - RNA, 22 nt, Human
agagggcuuugauucucaguuc

SEQ ID NO: 263316 - RNA, 22 nt, Human
uauuccucccaguaaguacaac

SEQ ID NO: 263317 - RNA, 22 nt, Human
uaaaggcaguuggaguugagga

SEQ ID NO: 263318 - RNA, 22 nt, Human
gccugccugcugugugcaaguu

SEQ ID NO: 263319 - RNA, 22 nt, Human
ugaggcagguaagcaaguuuug

SEQ ID NO: 263320 - RNA, 22 nt, Human
ucugaaauauugguaauacuuu

SEQ ID NO: 263321 - RNA, 22 nt, Human
aagggcaggugggcauuucugg

SEQ ID NO: 263322 - RNA, 22 nt, Human
aaauauccauaagcacaucuau

SEQ ID NO: 263323 - RNA, 22 nt, Human
ugcaaauauugggacagucuag

SEQ ID NO: 263324 - RNA, 22 nt, Human
gccagccacuucccagacuggc

SEQ ID NO: 263325 - RNA, 22 nt, Human
uggaugguucugggcggcagca

SEQ ID NO: 263326 - RNA, 22 nt, Human
gcucacagucugcugagugcag

SEQ ID NO: 263327 - RNA, 22 nt, Human
gccaggccacucccggguccug

SEQ ID NO: 263328 - RNA, 22 nt, Human
gaauacauccagagcagggcug

SEQ ID NO: 263329 - RNA, 22 nt, Human
aaauuuuccugguaaagaugga

SEQ ID NO: 263330 - RNA, 22 nt, Human
gagcagugccaaagaauuugcg

SEQ ID NO: 263331 - RNA, 22 nt, Human
ugggaaggauacguuacaagau

SEQ ID NO: 263332 - RNA, 22 nt, Human
acagcaauaggaaauacuugca

SEQ ID NO: 263333 - RNA, 22 nt, Human
cuuguuuuggaacagagugaau

SEQ ID NO: 263334 - RNA, 22 nt, Human
auacacgugccauguuggugug

SEQ ID NO: 263335 - RNA, 21 nt, Human
aggcuucuccgugcaggaaga

SEQ ID NO: 263336 - RNA, 22 nt, Human
cuguccacauggagaaccuggu

SEQ ID NO: 263337 - RNA, 22 nt, Human
cuuccagcugauuacaggcuau

SEQ ID NO: 263338 - RNA, 21 nt, Human
uguauaacuucucucccucag

SEQ ID NO: 263339 - RNA, 22 nt, Human
gaacaauagugguaacaaagcc

SEQ ID NO: 263340 - RNA, 22 nt, Human
uugggaucucaaauccagcuau

SEQ ID NO: 263341 - RNA, 22 nt, Human
uagaaauguuagauguauugag

SEQ ID NO: 263342 - RNA, 22 nt, Human
guuuugaauacuacuagaacuu

SEQ ID NO: 263343 - RNA, 20 nt, Human
aagagcuacuuagccuuucc

SEQ ID NO: 263344 - RNA, 22 nt, Human
aggggagaauuucaacucaggu

SEQ ID NO: 263345 - RNA, 22 nt, Human
ugaggacauugagacuggagac

SEQ ID NO: 263346 - RNA, 22 nt, Human
acaguggcaucuacuuaaucug

SEQ ID NO: 263347 - RNA, 19 nt, Human
uccccaagaguucuagcuc

SEQ ID NO: 263348 - RNA, 22 nt, Human
uguuauuuaucugagcauuuau

SEQ ID NO: 263349 - RNA, 21 nt, Human
ugaccagugccccauccuguc

SEQ ID NO: 263350 - RNA, 22 nt, Human
ugucuuuagaaagaagcagaca

SEQ ID NO: 263351 - RNA, 22 nt, Human
aagcacaggggaaauaaguugu

SEQ ID NO: 263352 - RNA, 22 nt, Human
caacuauauagaaauugauugu

SEQ ID NO: 263353 - RNA, 22 nt, Human
caauuucaagauucuguucuuu

SEQ ID NO: 263354 - RNA, 22 nt, Human
ggcuacugugauggucugcaag

SEQ ID NO: 263355 - RNA, 22 nt, Human
uuaauacagaagcaagacacug

SEQ ID NO: 263356 - RNA, 22 nt, Human
guagauuccaguggucuguguc

SEQ ID NO: 263357 - RNA, 23 nt, Human
gaggagggucgugcuguguuccu

SEQ ID NO: 263358 - RNA, 22 nt, Human
acccagggcuuaaggcggugca

SEQ ID NO: 263359 - RNA, 22 nt, Human
acuuucaauucccuuagcaacu

SEQ ID NO: 263360 - RNA, 22 nt, Human
aaaugucuguuagucauaucau

SEQ ID NO: 263361 - RNA, 22 nt, Human
cuauuuugccugccuagaaauc

SEQ ID NO: 263362 - RNA, 22 nt, Human
gaaucuagggccuagaucacag

SEQ ID NO: 263363 - RNA, 22 nt, Human
caggcuggaguacaauugugug

SEQ ID NO: 263364 - RNA, 22 nt, Human
ucucagugacacucuucauaca

SEQ ID NO: 263365 - RNA, 22 nt, Human
ucaggcaggcucagaggaaaac

SEQ ID NO: 263366 - RNA, 22 nt, Human
gaaaugugcagaauguguuaga

SEQ ID NO: 263367 - RNA, 22 nt, Human
uacauucagaauugggaggcaa

SEQ ID NO: 263368 - RNA, 22 nt, Human
gcugcaggcucugcaggaauug

SEQ ID NO: 263369 - RNA, 20 nt, Human
cugcaggguuagaggcucca

SEQ ID NO: 263370 - RNA, 22 nt, Human
gacuuucuuuuaccucaaggau

SEQ ID NO: 263371 - RNA, 23 nt, Human
aaacaagcccuaaugaagagucc

SEQ ID NO: 263372 - RNA, 22 nt, Human
gagugugggggugcugaggaca

SEQ ID NO: 263373 - RNA, 21 nt, Human
ucccacagcgccagcuccugu

SEQ ID NO: 263374 - RNA, 22 nt, Human
uucucagggucuugugcaaggg

SEQ ID NO: 263375 - RNA, 22 nt, Human
ucuggagcaacagagcaggaca

SEQ ID NO: 263376 - RNA, 19 nt, Human
accaggcuuauggucagug

SEQ ID NO: 263377 - RNA, 22 nt, Human
gaacuggucuuuuagguuuucu

SEQ ID NO: 263378 - RNA, 22 nt, Human
acuuuacuacauccacagaugg

SEQ ID NO: 263379 - RNA, 22 nt, Human
ugggccacugcugcggaaggcg

SEQ ID NO: 263380 - RNA, 22 nt, Human
uugagaggcuguugacauucug

SEQ ID NO: 263381 - RNA, 22 nt, Human
uccaguuugcacuguauaauag

SEQ ID NO: 263382 - RNA, 22 nt, Human
ucugagugauguugagucagaa

SEQ ID NO: 263383 - RNA, 22 nt, Human
ucacagagaacuauaauccauc

SEQ ID NO: 263384 - RNA, 22 nt, Human
ugaggauggcagugugcucagc

SEQ ID NO: 263385 - RNA, 22 nt, Human
cuggcaggucucgcugacgugu

SEQ ID NO: 263386 - RNA, 22 nt, Human
cucugugguuagacuauggcug

SEQ ID NO: 263387 - RNA, 22 nt, Human
uacagaggaggggauuuuaaua

SEQ ID NO: 263388 - RNA, 22 nt, Human
gcuguucuguccccauggguaa

SEQ ID NO: 263389 - RNA, 22 nt, Human
ggcugguggggaaagaggacca

SEQ ID NO: 263390 - RNA, 22 nt, Human
acacaggaagucagcacugaug

SEQ ID NO: 263391 - RNA, 22 nt, Human
gcaggggcuaaggacacagaga

SEQ ID NO: 263392 - RNA, 22 nt, Human
gcauuagauuugccuuugaagc

SEQ ID NO: 263393 - RNA, 22 nt, Human
acaggggugcauggugcauggu

SEQ ID NO: 263394 - RNA, 22 nt, Human
cuggccagccugucgaugcccu

SEQ ID NO: 263395 - RNA, 22 nt, Human
caagauuuagcucccuuaucuc

SEQ ID NO: 263396 - RNA, 22 nt, Human
cagagcuguuacuauucaugaa

SEQ ID NO: 263397 - RNA, 22 nt, Human
cuccuggaugcaggcugucugc

SEQ ID NO: 263398 - RNA, 22 nt, Human
uuuaggauauuaauguucagag

SEQ ID NO: 263399 - RNA, 22 nt, Human
auuuacauuuauuugagaaggu

SEQ ID NO: 263400 - RNA, 22 nt, Human
aauuagaguggcgagugauuua

SEQ ID NO: 263401 - RNA, 22 nt, Human
cugcaggguuuuaacaauggac

SEQ ID NO: 263402 - RNA, 22 nt, Human
cucuccagggcaugaguuccac

SEQ ID NO: 263403 - RNA, 22 nt, Human
aucacauugccagugauuaccc

SEQ ID NO: 263404 - RNA, 22 nt, Human
uggcccagcaguucugccccag

SEQ ID NO: 263405 - RNA, 21 nt, Human
auuuucauuuccaggggagga

SEQ ID NO: 263406 - RNA, 17 nt, Human
cagcucugcaucuuccu

SEQ ID NO: 263407 - RNA, 22 nt, Human
gaggaagcauugacauaaucuc

SEQ ID NO: 263408 - RNA, 23 nt, Human
uggaauguuucuuguacugaaug

SEQ ID NO: 263409 - RNA, 22 nt, Human
auuucuuucuggccacgguuuu

SEQ ID NO: 263410 - RNA, 22 nt, Human
ccucuuccugcacugacauuuu

SEQ ID NO: 263411 - RNA, 22 nt, Human
cagcagcaaggugaggguggag

SEQ ID NO: 263412 - RNA, 22 nt, Human
ccuccccacccacggcuggugg

SEQ ID NO: 263413 - RNA, 23 nt, Human
agcugaggcagaggggcauucuc

SEQ ID NO: 263414 - RNA, 23 nt, Human
aggcuggcuucaggagccucucc

SEQ ID NO: 263415 - RNA, 22 nt, Human
aagauacacguuguauugaaua

SEQ ID NO: 263416 - RNA, 22 nt, Human
cccagagagcacaggugguggg

SEQ ID NO: 263417 - RNA, 22 nt, Human
agccagacucauuuggaaguau

SEQ ID NO: 263418 - RNA, 22 nt, Human
agggucuguggaugcaucuggg

SEQ ID NO: 263419 - RNA, 22 nt, Human
uaaaucuuguggcaaugcuucu

SEQ ID NO: 263420 - RNA, 22 nt, Human
ccaggcuagagugcaauggcgc

SEQ ID NO: 263421 - RNA, 22 nt, Human
caguuucuccaaacgcaggcug

SEQ ID NO: 263422 - RNA, 22 nt, Human
uuauucaccauuuauuauguga

SEQ ID NO: 263423 - RNA, 22 nt, Human
agcugaaagcuugacuggggcu

SEQ ID NO: 263424 - RNA, 22 nt, Human
aaaaugcaugagaaugugcucg

SEQ ID NO: 263425 - RNA, 22 nt, Human
uguccaggaauugacccugcaa

SEQ ID NO: 263426 - RNA, 22 nt, Human
acaggaacgaauguacauuguu

SEQ ID NO: 263427 - RNA, 20 nt, Human
ucaguuaaguugcugaaucu

SEQ ID NO: 263428 - RNA, 22 nt, Human
uuucacaaaugucuuuaacuug

SEQ ID NO: 263429 - RNA, 22 nt, Human
aaaagcaaggcagucugucuga

SEQ ID NO: 263430 - RNA, 22 nt, Human
ggauguucugggguucucuugu

SEQ ID NO: 263431 - RNA, 22 nt, Human
uuagggacagcucuguagguga

SEQ ID NO: 263432 - RNA, 22 nt, Human
uucagaaguagcuaagcaguca

SEQ ID NO: 263433 - RNA, 22 nt, Human
cacacaugguagcagguacaag

SEQ ID NO: 263434 - RNA, 19 nt, Human
cacaucagcagggcugugg

SEQ ID NO: 263435 - RNA, 22 nt, Human
agcuccugcgcacggugcacac

SEQ ID NO: 263436 - RNA, 22 nt, Human
caugaaugaguaauuuacaaag

SEQ ID NO: 263437 - RNA, 19 nt, Human
aggcagcacccaguccuug

SEQ ID NO: 263438 - RNA, 22 nt, Human
uuacaggugggaaaacuaagcu

SEQ ID NO: 263439 - RNA, 22 nt, Human
ugaggcucagaagugccaagug

SEQ ID NO: 263440 - RNA, 22 nt, Human
caggcugggcuccggagauaaa

SEQ ID NO: 263441 - RNA, 22 nt, Human
ugggcugccggcaggcucugcc

SEQ ID NO: 263442 - RNA, 22 nt, Human
aggcaggcucaaugcccagucu

SEQ ID NO: 263443 - RNA, 22 nt, Human
auguuuuaaauauguguguaaa

SEQ ID NO: 263444 - RNA, 22 nt, Human
auuagauauuugcuguuggauu

SEQ ID NO: 263445 - RNA, 22 nt, Human
uacaaagauaguguuagaguaa

SEQ ID NO: 263446 - RNA, 22 nt, Human
uagcaagaucgugucucuaaaa

SEQ ID NO: 263447 - RNA, 22 nt, Human
gugcagcaaaguuugagauaua

SEQ ID NO: 263448 - RNA, 22 nt, Human
uauauccauaggcugugccuag

SEQ ID NO: 263449 - RNA, 22 nt, Human
cuugggucuguccugcugugca

SEQ ID NO: 263450 - RNA, 22 nt, Human
gucccagggagguucagggcuu

SEQ ID NO: 263451 - RNA, 22 nt, Human
gcagcaggcuuuucauaccuug

SEQ ID NO: 263452 - RNA, 22 nt, Human
ccucccucccucuuaugguuua

SEQ ID NO: 263453 - RNA, 22 nt, Human
uggcaaauauuuuguuuuguaa

SEQ ID NO: 263454 - RNA, 22 nt, Human
agagccaguuaagcacuuacag

SEQ ID NO: 263455 - RNA, 22 nt, Human
uucacaguuuaauggcaaggau

SEQ ID NO: 263456 - RNA, 22 nt, Human
aggcaaggugcucuugcucuau

SEQ ID NO: 263457 - RNA, 22 nt, Human
aaagacaugacacauuggagag

SEQ ID NO: 263458 - RNA, 22 nt, Human
agaaagcuccccaugagaugau

SEQ ID NO: 263459 - RNA, 22 nt, Human
ugguggggcuuuccuucugcuu

SEQ ID NO: 263460 - RNA, 22 nt, Human
ucagauggauuuauacuauuuc

SEQ ID NO: 263461 - RNA, 18 nt, Human
agagaaagaccaaagcau

SEQ ID NO: 263462 - RNA, 23 nt, Human
uaaugagaagcuuuguuuccuga

SEQ ID NO: 263463 - RNA, 22 nt, Human
agaaggcagaaaguccagguau

SEQ ID NO: 263464 - RNA, 22 nt, Human
aggcugaggcagguggaucacu

SEQ ID NO: 263465 - RNA, 18 nt, Human
ugucucaguucugcuaug

SEQ ID NO: 263466 - RNA, 22 nt, Human
aagcccuccguacgugcuagcu

SEQ ID NO: 263467 - RNA, 22 nt, Human
caggagucucucuugagcccag

SEQ ID NO: 263468 - RNA, 18 nt, Human
cuggcauucuucccugga

SEQ ID NO: 263469 - RNA, 22 nt, Human
ugggcuaauucuuugauuguuu

SEQ ID NO: 263470 - RNA, 22 nt, Human
uucauauaccuugcguuucaca

SEQ ID NO: 263471 - RNA, 22 nt, Human
agagcuaagaaacagaauugcu

SEQ ID NO: 263472 - RNA, 22 nt, Human
ugcucagcacagaccaggccag

SEQ ID NO: 263473 - RNA, 20 nt, Human
aggagaccaagccaagugga

SEQ ID NO: 263474 - RNA, 22 nt, Human
ucagggaacuacuucucccuau

SEQ ID NO: 263475 - RNA, 22 nt, Human
uuuaagagccuguacaaauauu

SEQ ID NO: 263476 - RNA, 22 nt, Human
uucuuuaucaguuacucauagg

SEQ ID NO: 263477 - RNA, 22 nt, Human
ggguucccugccuggccacucu

SEQ ID NO: 263478 - RNA, 22 nt, Human
ggccucugguucguggugaccu

SEQ ID NO: 263479 - RNA, 23 nt, Human
uuccugagugcuggagagagugc

SEQ ID NO: 263480 - RNA, 22 nt, Human
ugccauuuauaaccaguggccu

SEQ ID NO: 263481 - RNA, 22 nt, Human
caaacuuuuccuggaaaagauu

SEQ ID NO: 263482 - RNA, 22 nt, Human
cacauucaucaguguuguacug

SEQ ID NO: 263483 - RNA, 20 nt, Human
ucagagaaggagcuuuccug

SEQ ID NO: 263484 - RNA, 22 nt, Human
ggacaggugugaggcuggcaca

SEQ ID NO: 263485 - RNA, 22 nt, Human
uguuacagggauaaaugaggua

SEQ ID NO: 263486 - RNA, 22 nt, Human
gucaggcauuuaggaugaguuc

SEQ ID NO: 263487 - RNA, 21 nt, Human
ugugugcauaugcauguacau

SEQ ID NO: 263488 - RNA, 22 nt, Human
aagacacaauguagcccagcac

SEQ ID NO: 263489 - RNA, 22 nt, Human
cuucagugaauguugaguaagg

SEQ ID NO: 263490 - RNA, 22 nt, Human
agagcagaggcauggccguggg

SEQ ID NO: 263491 - RNA, 22 nt, Human
ucccagauucuucugugugggc

SEQ ID NO: 263492 - RNA, 22 nt, Human
ugggaaaguguagccugcaggc

SEQ ID NO: 263493 - RNA, 22 nt, Human
cucagccugugaagagcagagg

SEQ ID NO: 263494 - RNA, 22 nt, Human
ugggagauaaagcaucuguucu

SEQ ID NO: 263495 - RNA, 22 nt, Human
auuuauuccugauuccuggcuu

SEQ ID NO: 263496 - RNA, 22 nt, Human
uucaggaauauaggcauugaca

SEQ ID NO: 263497 - RNA, 22 nt, Human
cucuguagccauggguauauuc

SEQ ID NO: 263498 - RNA, 22 nt, Human
acaaaggugcgucccuucagcu

SEQ ID NO: 263499 - RNA, 22 nt, Human
gcuguagguaaggauggcaaag

SEQ ID NO: 263500 - RNA, 22 nt, Human
gcuggcuuccuucugcagcuag

SEQ ID NO: 263501 - RNA, 22 nt, Human
ucucagugcuauccauauucca

SEQ ID NO: 263502 - RNA, 15 nt, Human
ggcagguggaucacu

SEQ ID NO: 263503 - RNA, 22 nt, Human
aaaaccacaaugacuuuugcag

SEQ ID NO: 263504 - RNA, 22 nt, Human
agcaggugagcacagccaggcu

SEQ ID NO: 263505 - RNA, 22 nt, Human
uuucaaauagaaucuuuccaaa

SEQ ID NO: 263506 - RNA, 22 nt, Human
gaggagcugggacccugucauc

SEQ ID NO: 263507 - RNA, 22 nt, Human
gugcucaggggcaauccuggga

SEQ ID NO: 263508 - RNA, 22 nt, Human
uuucuucuugaguaaccagauu

SEQ ID NO: 263509 - RNA, 22 nt, Human
gccacaggcuccagcaucagua

SEQ ID NO: 263510 - RNA, 22 nt, Human
gagagccuuugaagggaaguga

SEQ ID NO: 263511 - RNA, 22 nt, Human
aaggaggaauguagccagcucc

SEQ ID NO: 263512 - RNA, 22 nt, Human
agugucugccugggaggagcau

SEQ ID NO: 263513 - RNA, 22 nt, Human
uggaaacucagggccagaagga

SEQ ID NO: 263514 - RNA, 22 nt, Human
gaucuuuauacuguaauaauga

SEQ ID NO: 263515 - RNA, 22 nt, Human
auucacacauacucauguguga

SEQ ID NO: 263516 - RNA, 22 nt, Human
auguuucuaguuguaugucacu

SEQ ID NO: 263517 - RNA, 22 nt, Human
cccaggcugcguauccacaaua

SEQ ID NO: 263518 - RNA, 22 nt, Human
uucagaaacagagugagugagu

SEQ ID NO: 263519 - RNA, 22 nt, Human
auaauaacaaugccagaugccu

SEQ ID NO: 263520 - RNA, 22 nt, Human
caggguggggcuggcuaucaaa

SEQ ID NO: 263521 - RNA, 22 nt, Human
aaauaucuuaggaguauaugag

SEQ ID NO: 263522 - RNA, 22 nt, Human
acccaggcuggcagaggcuccu

SEQ ID NO: 263523 - RNA, 22 nt, Human
cuccccuuccgccagcucuuga

SEQ ID NO: 263524 - RNA, 22 nt, Human
gaaggcuugcaagugguucaua

SEQ ID NO: 263525 - RNA, 22 nt, Human
ccugggugaaauaguccucaag

SEQ ID NO: 263526 - RNA, 22 nt, Human
ggagaggggaacuuguugcuug

SEQ ID NO: 263527 - RNA, 20 nt, Human
ucuccuggucugguccgugc

SEQ ID NO: 263528 - RNA, 22 nt, Human
agucacaguuccuacccaguaa

SEQ ID NO: 263529 - RNA, 22 nt, Human
cuggccagagguuccucugccc

SEQ ID NO: 263530 - RNA, 22 nt, Human
ucaugcagagccagucaggaua

SEQ ID NO: 263531 - RNA, 22 nt, Human
gggaaggguguugucuuaucuu

SEQ ID NO: 263532 - RNA, 22 nt, Human
ucagauggaaugaugccacugc

SEQ ID NO: 263533 - RNA, 22 nt, Human
uuauuuauguuaacagucgaga

SEQ ID NO: 263534 - RNA, 22 nt, Human
gcagauggaucaccugaggucg

SEQ ID NO: 263535 - RNA, 22 nt, Human
ccacauucucauguaauccuuu

SEQ ID NO: 263536 - RNA, 22 nt, Human
agauuuguugugagcaggaaua

SEQ ID NO: 263537 - RNA, 22 nt, Human
uuuuggaauuuauacaguaaug

SEQ ID NO: 263538 - RNA, 22 nt, Human
cugcugucgccgagcugcaugc

SEQ ID NO: 263539 - RNA, 22 nt, Human
aggccacauagcuugcauguag

SEQ ID NO: 263540 - RNA, 22 nt, Human
gaaaacauccagagauagaccu

SEQ ID NO: 263541 - RNA, 22 nt, Human
agaguacugccucaguuaugaa

SEQ ID NO: 263542 - RNA, 22 nt, Human
auguaggauugagugauagagg

SEQ ID NO: 263543 - RNA, 18 nt, Human
gcuggcugcacuucugcu

SEQ ID NO: 263544 - RNA, 22 nt, Human
uggcagugguaccggcucucag

SEQ ID NO: 263545 - RNA, 22 nt, Human
aggcuguguggucaugguggcu

SEQ ID NO: 263546 - RNA, 22 nt, Human
ugugggcuguacugagggcagg

SEQ ID NO: 263547 - RNA, 22 nt, Human
auugaaaaauucacaauucugg

SEQ ID NO: 263548 - RNA, 22 nt, Human
acaggcagugggccagauuugu

SEQ ID NO: 263549 - RNA, 22 nt, Human
cugucccucaucaccucugggu

SEQ ID NO: 263550 - RNA, 22 nt, Human
cugcugcugagagcucagccug

SEQ ID NO: 263551 - RNA, 22 nt, Human
aauguuauuucugcauaguagu

SEQ ID NO: 263552 - RNA, 21 nt, Human
auguuuacacugacuacugug

SEQ ID NO: 263553 - RNA, 22 nt, Human
agucuuaguaugguuuuagguu

SEQ ID NO: 263554 - RNA, 22 nt, Human
auuugguuacucaguugucuga

SEQ ID NO: 263555 - RNA, 22 nt, Human
acaauacuuaccaauguuuuug

SEQ ID NO: 263556 - RNA, 22 nt, Human
uugauucacaauuaccaagacu

SEQ ID NO: 263557 - RNA, 22 nt, Human
agcaacauugagacugcaguug

SEQ ID NO: 263558 - RNA, 22 nt, Human
gcucuggaagcaucugagagga

SEQ ID NO: 263559 - RNA, 22 nt, Human
uccugaggcuaaagugcagugg

SEQ ID NO: 263560 - RNA, 22 nt, Human
ccagaaucccauugucacuuca

SEQ ID NO: 263561 - RNA, 22 nt, Human
ucugagcccagugagucucgca

SEQ ID NO: 263562 - RNA, 22 nt, Human
ucaagagcauguaucucccuaa

SEQ ID NO: 263563 - RNA, 22 nt, Human
aaacaggcgcuuacuaagaaaa

SEQ ID NO: 263564 - RNA, 21 nt, Human
cucauuuauuuuuguguccaa

SEQ ID NO: 263565 - RNA, 22 nt, Human
ucagggaacaauguuauggcuu

SEQ ID NO: 263566 - RNA, 22 nt, Human
uuacauucagaaagauuugagu

SEQ ID NO: 263567 - RNA, 22 nt, Human
auguuuaaucggcugccuuucc

SEQ ID NO: 263568 - RNA, 22 nt, Human
agggcugagacuaaggccagau

SEQ ID NO: 263569 - RNA, 22 nt, Human
ugauuucuuccuugucauuaga

SEQ ID NO: 263570 - RNA, 22 nt, Human
ccuggcucagaguaugucaucg

SEQ ID NO: 263571 - RNA, 22 nt, Human
uuuagcuuuugugucagauaag

SEQ ID NO: 263572 - RNA, 22 nt, Human
cacaguuucaauaauuauucuu

SEQ ID NO: 263573 - RNA, 22 nt, Human
gcacaguagguauuuacccagu

SEQ ID NO: 263574 - RNA, 22 nt, Human
cauuugcaaaccaacaagauga

SEQ ID NO: 263575 - RNA, 22 nt, Human
aacauugcauucucuaugagau

SEQ ID NO: 263576 - RNA, 22 nt, Human
gaguagcagccacagaggaccc

SEQ ID NO: 263577 - RNA, 22 nt, Human
caaggccacguucugcaugcgg

SEQ ID NO: 263578 - RNA, 22 nt, Human
aucucagaaaguuuaauuuuuc

SEQ ID NO: 263579 - RNA, 21 nt, Human
agauccagugccauaaggccc

SEQ ID NO: 263580 - RNA, 22 nt, Human
gaggagaagcuaagaaacacag

SEQ ID NO: 263581 - RNA, 22 nt, Human
uuaauuaugagaaagggaaaag

SEQ ID NO: 263582 - RNA, 22 nt, Human
uuuacauuucccucugucaguu

SEQ ID NO: 263583 - RNA, 17 nt, Human
uccuguuuaucauugau

SEQ ID NO: 263584 - RNA, 21 nt, Human
ucuggagcccuaagcugagaa

SEQ ID NO: 263585 - RNA, 22 nt, Human
ucugggucuggcugcuggugca

SEQ ID NO: 263586 - RNA, 22 nt, Human
aaacuuuuccugcucuuguccu

SEQ ID NO: 263587 - RNA, 22 nt, Human
aaagcagagguugcagugagcu

SEQ ID NO: 263588 - RNA, 22 nt, Human
aggagggcuaggaaaaccagga

SEQ ID NO: 263589 - RNA, 22 nt, Human
uccaagucuuccuucccaaacc

SEQ ID NO: 263590 - RNA, 22 nt, Human
guauauaugugugaacauguau

SEQ ID NO: 263591 - RNA, 22 nt, Human
uacacaucucugucaguaguga

SEQ ID NO: 263592 - RNA, 22 nt, Human
ucuggagggguuuagagggaca

SEQ ID NO: 263593 - RNA, 22 nt, Human
ucaggaaagccuagaagagaac

SEQ ID NO: 263594 - RNA, 22 nt, Human
cugguuuugucagaagcuuuau

SEQ ID NO: 263595 - RNA, 20 nt, Human
ugaaagcaugugguauuugg

SEQ ID NO: 263596 - RNA, 22 nt, Human
agauggucuuuugaguaaugaa

SEQ ID NO: 263597 - RNA, 22 nt, Human
ugaacagugaucuacauguggc

SEQ ID NO: 263598 - RNA, 22 nt, Human
aacagaaaagguagguggcuuu

SEQ ID NO: 263599 - RNA, 22 nt, Human
aauuuguuaaaagugagugaca

SEQ ID NO: 263600 - RNA, 22 nt, Human
guucagagacacuuauuggaaa

SEQ ID NO: 263601 - RNA, 20 nt, Human
gaggcucugggcauggcgcc

SEQ ID NO: 263602 - RNA, 23 nt, Human
uaaagcaaagucaagugcacucc

SEQ ID NO: 263603 - RNA, 22 nt, Human
ggaugucgaggaugggguagca

SEQ ID NO: 263604 - RNA, 22 nt, Human
uuaucuugaguauugagauucu

SEQ ID NO: 263605 - RNA, 22 nt, Human
aaaguccuguuaacuguuaaca

SEQ ID NO: 263606 - RNA, 22 nt, Human
gcugccaguaguuggagcucca

SEQ ID NO: 263607 - RNA, 22 nt, Human
aaagaaauagauggcauuuaaa

SEQ ID NO: 263608 - RNA, 23 nt, Human
ucuggcuuccaguggguucaacc

SEQ ID NO: 263609 - RNA, 22 nt, Human
uccugccucaggcucuggagua

SEQ ID NO: 263610 - RNA, 18 nt, Human
acacaggcugacagcacc

SEQ ID NO: 263611 - RNA, 22 nt, Human
aagcucuuuucaccauuaaagu

SEQ ID NO: 263612 - RNA, 22 nt, Human
uucugaaaacacacuuugcagc

SEQ ID NO: 263613 - RNA, 22 nt, Human
aggaaacugagguuacgggacu

SEQ ID NO: 263614 - RNA, 22 nt, Human
uucugaggcauagaggaugaga

SEQ ID NO: 263615 - RNA, 22 nt, Human
agacaauggagggaaauacuuc

SEQ ID NO: 263616 - RNA, 22 nt, Human
ugcagaggcuggcucgccgggu

SEQ ID NO: 263617 - RNA, 22 nt, Human
uauguuuacgcugguagaauua

SEQ ID NO: 263618 - RNA, 22 nt, Human
agguggcaugagacuguaccag

SEQ ID NO: 263619 - RNA, 22 nt, Human
uagcaaaagccacgauuacuuu

SEQ ID NO: 263620 - RNA, 22 nt, Human
agcaucuggauggaaagcaagg

SEQ ID NO: 263621 - RNA, 22 nt, Human
uucaaacaguguagaauauaug

SEQ ID NO: 263622 - RNA, 22 nt, Human
gcuuaugauguuuacauaaaag

SEQ ID NO: 263623 - RNA, 22 nt, Human
ugaggaagggugugacggcacc

SEQ ID NO: 263624 - RNA, 22 nt, Human
gagcugaaucagagauauuauu

SEQ ID NO: 263625 - RNA, 18 nt, Human
uccaggcuggauugauga

SEQ ID NO: 263626 - RNA, 22 nt, Human
auguaucagauaaagcaugugg

SEQ ID NO: 263627 - RNA, 22 nt, Human
acacaucuauauugcaucugca

SEQ ID NO: 263628 - RNA, 22 nt, Human
aggggcucaaagugugcaggga

SEQ ID NO: 263629 - RNA, 22 nt, Human
ugucuggguuuugggucauauu

SEQ ID NO: 263630 - RNA, 22 nt, Human
gagccccuucugcagucagguu

SEQ ID NO: 263631 - RNA, 22 nt, Human
ugauucaacuuucuugaaugca

SEQ ID NO: 263632 - RNA, 21 nt, Human
ucccucagaagguagccaagc

SEQ ID NO: 263633 - RNA, 22 nt, Human
uacuauuuuugcaacguauaca

SEQ ID NO: 263634 - RNA, 22 nt, Human
ccaggcuugaagggaagaaugg

SEQ ID NO: 263635 - RNA, 22 nt, Human
ucugugcucaugcaugugaauu

SEQ ID NO: 263636 - RNA, 22 nt, Human
ccaggcagggcucaaggaaccu

SEQ ID NO: 263637 - RNA, 22 nt, Human
ugaaugaugcauuuguuuccca

SEQ ID NO: 263638 - RNA, 23 nt, Human
ucuguacaauugagaagagaaca

SEQ ID NO: 263639 - RNA, 22 nt, Human
caaguccuuuucuuggcucagg

SEQ ID NO: 263640 - RNA, 20 nt, Human
gcugcucuccacggucugca

SEQ ID NO: 263641 - RNA, 22 nt, Human
gcuucccauuauggaaacucuu

SEQ ID NO: 263642 - RNA, 22 nt, Human
cagcagcccacgcgugcugucc

SEQ ID NO: 263643 - RNA, 22 nt, Human
gggagaaguggaaaucucauua

SEQ ID NO: 263644 - RNA, 22 nt, Human
gagcuuggugaugccuccuggu

SEQ ID NO: 263645 - RNA, 18 nt, Human
gagcucagcguguuucua

SEQ ID NO: 263646 - RNA, 22 nt, Human
gugagcauauauguaaucguuu

SEQ ID NO: 263647 - RNA, 22 nt, Human
uuucaaaagcguacguagugaa

SEQ ID NO: 263648 - RNA, 22 nt, Human
uguccauacaauguaacaucuu

SEQ ID NO: 263649 - RNA, 22 nt, Human
uccauauaccugcagccugguu

SEQ ID NO: 263650 - RNA, 22 nt, Human
acuaaagaagccaaaguuuucu

SEQ ID NO: 263651 - RNA, 22 nt, Human
cugaaugaaaucaaggacugag

SEQ ID NO: 263652 - RNA, 22 nt, Human
cauuggaaugaucguuuugcug

SEQ ID NO: 263653 - RNA, 22 nt, Human
agcucuuccaccucaugauggg

SEQ ID NO: 263654 - RNA, 22 nt, Human
aauuucuaauugaaucucucuu

SEQ ID NO: 263655 - RNA, 18 nt, Human
cagagugggccaagagac

SEQ ID NO: 263656 - RNA, 22 nt, Human
uaggugguuaugucagccuaga

SEQ ID NO: 263657 - RNA, 22 nt, Human
agacacagcugcaggagguggg

SEQ ID NO: 263658 - RNA, 22 nt, Human
gcccaggaaguugaggcugccg

SEQ ID NO: 263659 - RNA, 22 nt, Human
agugcauucuccaucaucuagg

SEQ ID NO: 263660 - RNA, 22 nt, Human
ugcuggagagcuaguucugcag

SEQ ID NO: 263661 - RNA, 20 nt, Human
cacucuaaccauauuuccuc

SEQ ID NO: 263662 - RNA, 23 nt, Human
acuuccaguuauaggaacucuuc

SEQ ID NO: 263663 - RNA, 22 nt, Human
agcacaggacguagagcuugga

SEQ ID NO: 263664 - RNA, 22 nt, Human
aguuaaagucugaaauagagaa

SEQ ID NO: 263665 - RNA, 22 nt, Human
uuauagaaggagcauucacuua

SEQ ID NO: 263666 - RNA, 22 nt, Human
ucauguuuuaguaaagugaagg

SEQ ID NO: 263667 - RNA, 22 nt, Human
gccuggcugggcugaaugcuua

SEQ ID NO: 263668 - RNA, 22 nt, Human
uaguucuagccagugaaaugua

SEQ ID NO: 263669 - RNA, 22 nt, Human
cugugagggccagagucagggc

SEQ ID NO: 263670 - RNA, 22 nt, Human
uguaugcagggcuuguaugcag

SEQ ID NO: 263671 - RNA, 22 nt, Human
uuugggaugcuagacaccucag

SEQ ID NO: 263672 - RNA, 22 nt, Human
gggugggaugccgcugucucca

SEQ ID NO: 263673 - RNA, 22 nt, Human
agcaggugacccaagcaggcug

SEQ ID NO: 263674 - RNA, 22 nt, Human
ucuaauuuuggcauuuuaaccu

SEQ ID NO: 263675 - RNA, 22 nt, Human
gaaagcugugaaauagugcucu

SEQ ID NO: 263676 - RNA, 23 nt, Human
ucagaaguuugguuguaacaugg

SEQ ID NO: 263677 - RNA, 22 nt, Human
cagaggccaccuguggccacug

SEQ ID NO: 263678 - RNA, 22 nt, Human
ucaagcagcuuuuacagaagag

SEQ ID NO: 263679 - RNA, 22 nt, Human
aggcuggcuggggaugcgucuu

SEQ ID NO: 263680 - RNA, 22 nt, Human
ucuugagguuauuaagcuguua

SEQ ID NO: 263681 - RNA, 22 nt, Human
ugccucaguuucaucugcagaa

SEQ ID NO: 263682 - RNA, 22 nt, Human
uugagggacuuucucuauuauu

SEQ ID NO: 263683 - RNA, 22 nt, Human
agggacuauuuacccaucucac

SEQ ID NO: 263684 - RNA, 22 nt, Human
ucucuaaaugauuguguacucc

SEQ ID NO: 263685 - RNA, 22 nt, Human
ggucagaaggauucugggaaau

SEQ ID NO: 263686 - RNA, 18 nt, Human
gacaggugggugagacca

SEQ ID NO: 263687 - RNA, 22 nt, Human
cuggaaagauuucuuuggaguc

SEQ ID NO: 263688 - RNA, 22 nt, Human
ugaaugugaugcuaaacauaug

SEQ ID NO: 263689 - RNA, 20 nt, Human
agguggcucuuccugggcuu

SEQ ID NO: 263690 - RNA, 22 nt, Human
ccuggggcuccagagcagcgga

SEQ ID NO: 263691 - RNA, 22 nt, Human
uaacacugaaaaugaugcaugu

SEQ ID NO: 263692 - RNA, 23 nt, Human
acucuguaggcuguccaugugca

SEQ ID NO: 263693 - RNA, 22 nt, Human
cuuuccaggaauccucacagcc

SEQ ID NO: 263694 - RNA, 21 nt, Human
ggagucuguggaugcuguuuc

SEQ ID NO: 263695 - RNA, 22 nt, Human
agccacagagagggagcugcaa

SEQ ID NO: 263696 - RNA, 22 nt, Human
uuucaguuuuugcucgauguau

SEQ ID NO: 263697 - RNA, 22 nt, Human
caaauacuuuuagccuauugag

SEQ ID NO: 263698 - RNA, 22 nt, Human
gcugagaauguuccuacuggua

SEQ ID NO: 263699 - RNA, 22 nt, Human
aacagcuauuagaacuucaugg

SEQ ID NO: 263700 - RNA, 22 nt, Human
cagggccuucguaaguguccgg

SEQ ID NO: 263701 - RNA, 23 nt, Human
augugugggaggucagagagcca

SEQ ID NO: 263702 - RNA, 22 nt, Human
uuucgucaauuguaacaaaugu

SEQ ID NO: 263703 - RNA, 22 nt, Human
uaggaaacauuugaagaggauu

SEQ ID NO: 263704 - RNA, 22 nt, Human
acacaugaccuccgcagcagca

SEQ ID NO: 263705 - RNA, 22 nt, Human
aauaugcauguauacaugugua

SEQ ID NO: 263706 - RNA, 23 nt, Human
uaggugucuaguguccacuaugu

SEQ ID NO: 263707 - RNA, 22 nt, Human
ugcaggugugggcaggggagca

SEQ ID NO: 263708 - RNA, 22 nt, Human
uaaaaucaugacagauugacau

SEQ ID NO: 263709 - RNA, 22 nt, Human
gcaggcaguugcaguuuucuag

SEQ ID NO: 263710 - RNA, 22 nt, Human
agcaggcacaagaaagggaggu

SEQ ID NO: 263711 - RNA, 20 nt, Human
caugugucaguucucaccca

SEQ ID NO: 263712 - RNA, 22 nt, Human
auaugcuuccccuucuuuuugg

SEQ ID NO: 263713 - RNA, 22 nt, Human
acauucuuccagcuggcuguug

SEQ ID NO: 263714 - RNA, 19 nt, Human
ggucacagggguuacaagg

SEQ ID NO: 263715 - RNA, 22 nt, Human
ucugagggauuugucccuuauc

SEQ ID NO: 263716 - RNA, 22 nt, Human
aggcuuuaaguggccuacagcu

SEQ ID NO: 263717 - RNA, 22 nt, Human
ucagagaagcugccaggcgagc

SEQ ID NO: 263718 - RNA, 22 nt, Human
acagcuggagugaggauggagu

SEQ ID NO: 263719 - RNA, 22 nt, Human
aagagcuggauggaaucuggga

SEQ ID NO: 263720 - RNA, 22 nt, Human
cuccccagcucgcgggugacgg

SEQ ID NO: 263721 - RNA, 22 nt, Human
gaguucucaagcaaucaaagag

SEQ ID NO: 263722 - RNA, 22 nt, Human
ccagagccuaagaucugauccu

SEQ ID NO: 263723 - RNA, 22 nt, Human
ccauaaucguguguuaaauaau

SEQ ID NO: 263724 - RNA, 22 nt, Human
uuaauaauaaugagcccauuuu

SEQ ID NO: 263725 - RNA, 22 nt, Human
uggcccugggcagaggcaacau

SEQ ID NO: 263726 - RNA, 22 nt, Human
cugcuccuggucauccuccacu

SEQ ID NO: 263727 - RNA, 20 nt, Human
gcucccagccugcagucccc

SEQ ID NO: 263728 - RNA, 18 nt, Human
gcaacagaucaacagaaa

SEQ ID NO: 263729 - RNA, 22 nt, Human
uguaugcagcaaaacaauuagu

SEQ ID NO: 263730 - RNA, 22 nt, Human
accccaggucaucugagagucc

SEQ ID NO: 263731 - RNA, 22 nt, Human
aggcucuggacagugaggaguu

SEQ ID NO: 263732 - RNA, 22 nt, Human
cuguuagucuuuugcaggagag

SEQ ID NO: 263733 - RNA, 22 nt, Human
ugaaaugagauaauuuaagugc

SEQ ID NO: 263734 - RNA, 22 nt, Human
ggcccucuuuuauccaucauaa

SEQ ID NO: 263735 - RNA, 22 nt, Human
aggcagagcugauguucuguga

SEQ ID NO: 263736 - RNA, 22 nt, Human
ugcagauagcgucauucuugcu

SEQ ID NO: 263737 - RNA, 22 nt, Human
gggcagagacucagaaacagaa

SEQ ID NO: 263738 - RNA, 22 nt, Human
cucuucuugucucugguuagaa

SEQ ID NO: 263739 - RNA, 22 nt, Human
uagucaaaccucagaauacccc

SEQ ID NO: 263740 - RNA, 22 nt, Human
cuagagaaucuuuuaagaagug

SEQ ID NO: 263741 - RNA, 22 nt, Human
aucauucuaguccuuauggucu

SEQ ID NO: 263742 - RNA, 22 nt, Human
caaaguuuggcucucaugacau

SEQ ID NO: 263743 - RNA, 22 nt, Human
gcugccagcccagcaaggugug

SEQ ID NO: 263744 - RNA, 22 nt, Human
ucagcagggaggcucugugccc

SEQ ID NO: 263745 - RNA, 22 nt, Human
aggcagcagucaugaggaaaga

SEQ ID NO: 263746 - RNA, 22 nt, Human
aaaugaacaucaagaauagccu

SEQ ID NO: 263747 - RNA, 22 nt, Human
aacacugagaggggaguggcac

SEQ ID NO: 263748 - RNA, 22 nt, Human
uucagaauguacugauagaaca

SEQ ID NO: 263749 - RNA, 22 nt, Human
uuaggauuugaaaaggggcaga

SEQ ID NO: 263750 - RNA, 22 nt, Human
cagcauggagacaaagugggca

SEQ ID NO: 263751 - RNA, 18 nt, Human
ggaaaaggagugucuagc

SEQ ID NO: 263752 - RNA, 22 nt, Human
ugcaaggcugccucugaggacc

SEQ ID NO: 263753 - RNA, 22 nt, Human
ugguccaggguguaguacagag

SEQ ID NO: 263754 - RNA, 22 nt, Human
gcuggcugaguucugucgucug

SEQ ID NO: 263755 - RNA, 22 nt, Human
gcagauguaauggcuggagguc

SEQ ID NO: 263756 - RNA, 22 nt, Human
ugccaccccucugcacccucag

SEQ ID NO: 263757 - RNA, 22 nt, Human
guuucuuuuaaaauauguagac

SEQ ID NO: 263758 - RNA, 22 nt, Human
agcagcagggucauugcucuuu

SEQ ID NO: 263759 - RNA, 22 nt, Human
cagucuggcacagcacacugaa

SEQ ID NO: 263760 - RNA, 22 nt, Human
acacaauacagggcucaaaaua

SEQ ID NO: 263761 - RNA, 22 nt, Human
ugcucaguuaagcagaggaaau

SEQ ID NO: 263762 - RNA, 22 nt, Human
agagacagaucugagggaccuc

SEQ ID NO: 263763 - RNA, 22 nt, Human
ugggagcaggcugaugauaggu

SEQ ID NO: 263764 - RNA, 22 nt, Human
auuagcaaguuuuccagcuaau

SEQ ID NO: 263765 - RNA, 22 nt, Human
uuccaugaaggagacugagaag

SEQ ID NO: 263766 - RNA, 22 nt, Human
uugaaacuuuucuuggagaaac

SEQ ID NO: 263767 - RNA, 22 nt, Human
uauaauuuaucaugucacaguu

SEQ ID NO: 263768 - RNA, 20 nt, Human
ccugccugccucggcucauu

SEQ ID NO: 263769 - RNA, 22 nt, Human
ccaggugucaugcgugugaccc

SEQ ID NO: 263770 - RNA, 22 nt, Human
gcagagauuggugcacugauga

SEQ ID NO: 263771 - RNA, 22 nt, Human
guguaucaaagcacagacuuca

SEQ ID NO: 263772 - RNA, 22 nt, Human
uccagccuugccacuuuucugu

SEQ ID NO: 263773 - RNA, 23 nt, Human
cggcuucugaaaucccaucuguu

SEQ ID NO: 263774 - RNA, 22 nt, Human
gccuguuucccugacgcuuaca

SEQ ID NO: 263775 - RNA, 22 nt, Human
aagugaaucuccuuucuuuauu

SEQ ID NO: 263776 - RNA, 22 nt, Human
cuuuugcaccuuuuaaguaaug

SEQ ID NO: 263777 - RNA, 22 nt, Human
agggcacuugaggcugggccug

SEQ ID NO: 263778 - RNA, 22 nt, Human
gggaucuugggaacacccuuac

SEQ ID NO: 263779 - RNA, 22 nt, Human
auucagacugucuaaaugguuu

SEQ ID NO: 263780 - RNA, 22 nt, Human
cagccagaaagucuguuaggga

SEQ ID NO: 263781 - RNA, 22 nt, Human
caguuucugggcguucacaggu

SEQ ID NO: 263782 - RNA, 22 nt, Human
gggguccucggagccugggucu

SEQ ID NO: 263783 - RNA, 22 nt, Human
gagaccaggaaguacagcagcc

SEQ ID NO: 263784 - RNA, 23 nt, Human
agcacagacuagaaaggucuuuc

SEQ ID NO: 263785 - RNA, 22 nt, Human
ggcccagugucccggucguggc

SEQ ID NO: 263786 - RNA, 22 nt, Human
uuugacuucugggcauuuuggu

SEQ ID NO: 263787 - RNA, 22 nt, Human
ucacaggagcccaggggagcug

SEQ ID NO: 263788 - RNA, 22 nt, Human
uggcaggaaauacccugccuag

SEQ ID NO: 263789 - RNA, 20 nt, Human
accaggccccgggcccugca

SEQ ID NO: 263790 - RNA, 22 nt, Human
uacugcauaacuggcauguggg

SEQ ID NO: 263791 - RNA, 16 nt, Human
ccucuggcaauuagau

SEQ ID NO: 263792 - RNA, 22 nt, Human
uuauuccauuauuucacuuagg

SEQ ID NO: 263793 - RNA, 22 nt, Human
gcugcccuguccggcucuccug

SEQ ID NO: 263794 - RNA, 22 nt, Human
acuuuuuaguuuccucaaacau

SEQ ID NO: 263795 - RNA, 22 nt, Human
uuccagaaaucuuucagcucaa

SEQ ID NO: 263796 - RNA, 23 nt, Human
guuaacaugguccauggaagagc

SEQ ID NO: 263797 - RNA, 22 nt, Human
uguggcagaaccagaauucaaa

SEQ ID NO: 263798 - RNA, 20 nt, Human
agucacaguaucagucuuag

SEQ ID NO: 263799 - RNA, 22 nt, Human
ucuugagagauauacuacugaa

SEQ ID NO: 263800 - RNA, 22 nt, Human
ucugggaagcugcgugccuguu

SEQ ID NO: 263801 - RNA, 22 nt, Human
cagccccuggcgcacgccgagc

SEQ ID NO: 263802 - RNA, 22 nt, Human
gaggagaggcuggacgcgguga

SEQ ID NO: 263803 - RNA, 22 nt, Human
ucuccagggcagagaauagcaa

SEQ ID NO: 263804 - RNA, 22 nt, Human
gagcccucaaugaaucugcauu

SEQ ID NO: 263805 - RNA, 22 nt, Human
uuucuucagccacuccaaacug

SEQ ID NO: 263806 - RNA, 22 nt, Human
ggagggccccuccagugggcag

SEQ ID NO: 263807 - RNA, 22 nt, Human
uuacauguacugguuugacuua

SEQ ID NO: 263808 - RNA, 22 nt, Human
guucagagugggaaugaucacu

SEQ ID NO: 263809 - RNA, 22 nt, Human
gcuggagcuugagaggacaggg

SEQ ID NO: 263810 - RNA, 22 nt, Human
aggagagaauguuccaggcuug

SEQ ID NO: 263811 - RNA, 22 nt, Human
gucuucuggaagagagccagcu

SEQ ID NO: 263812 - RNA, 22 nt, Human
uccaagcauguggucaggagcc

SEQ ID NO: 263813 - RNA, 20 nt, Human
ucaaagcacugccugucauc

SEQ ID NO: 263814 - RNA, 22 nt, Human
agccaggucagcucacccugcu

SEQ ID NO: 263815 - RNA, 22 nt, Human
gggcagcuccuguggaauccac

SEQ ID NO: 263816 - RNA, 22 nt, Human
aauuauauuguggugugaaugu

SEQ ID NO: 263817 - RNA, 22 nt, Human
cauuccagaugaggccaggccc

SEQ ID NO: 263818 - RNA, 22 nt, Human
ugcugaaggcaggggagguggc

SEQ ID NO: 263819 - RNA, 22 nt, Human
auggacagguacugcagugggu

SEQ ID NO: 263820 - RNA, 22 nt, Human
uaagaacaguagaacaguaggu

SEQ ID NO: 263821 - RNA, 22 nt, Human
cuggugcccuguguggcaggag

SEQ ID NO: 263822 - RNA, 22 nt, Human
cugcugucauagccaucccucc

SEQ ID NO: 263823 - RNA, 22 nt, Human
ucagaguguuuuacuaaacaag

SEQ ID NO: 263824 - RNA, 22 nt, Human
gugugcucuggaggcuagauuu

SEQ ID NO: 263825 - RNA, 22 nt, Human
agcuccuggcaaggucauggug

SEQ ID NO: 263826 - RNA, 22 nt, Human
uugccagggaacagggagaggc

SEQ ID NO: 263827 - RNA, 22 nt, Human
aagggaggaggauuuauuguac

SEQ ID NO: 263828 - RNA, 22 nt, Human
guguaauugaaauugagaacca

SEQ ID NO: 263829 - RNA, 23 nt, Human
ugcccagugccuuugcccaugca

SEQ ID NO: 263830 - RNA, 22 nt, Human
gaggcccaguggagggccaugg

SEQ ID NO: 263831 - RNA, 22 nt, Human
guaaucguggugguuaauucca

SEQ ID NO: 263832 - RNA, 22 nt, Human
cucagcaguaaacguccggaac

SEQ ID NO: 263833 - RNA, 22 nt, Human
gggcuucucucagaaacuauca

SEQ ID NO: 263834 - RNA, 22 nt, Human
gcugucugcaucucuagagcuu

SEQ ID NO: 263835 - RNA, 22 nt, Human
cugggucuggugucaggcgacg

SEQ ID NO: 263836 - RNA, 22 nt, Human
uauugauuccugcuuucugcuc

SEQ ID NO: 263837 - RNA, 22 nt, Human
ucagcaggcagugggucacaau

SEQ ID NO: 263838 - RNA, 22 nt, Human
gggagcuggagcuggaagacuc

SEQ ID NO: 263839 - RNA, 20 nt, Human
uccuaauaaccugaagaaau

SEQ ID NO: 263840 - RNA, 22 nt, Human
aguaaugugccugaaauacuug

SEQ ID NO: 263841 - RNA, 22 nt, Human
cuggugaauauuggaggcauug

SEQ ID NO: 263842 - RNA, 22 nt, Human
uaaagcccucugaucacacugg

SEQ ID NO: 263843 - RNA, 22 nt, Human
gaaguauagcagauguuauuua

SEQ ID NO: 263844 - RNA, 22 nt, Human
ugagcaggucaggaaguacauu

SEQ ID NO: 263845 - RNA, 22 nt, Human
gugagucuuuggagacaguuca

SEQ ID NO: 263846 - RNA, 20 nt, Human
agccagccacuuccugcucc

SEQ ID NO: 263847 - RNA, 22 nt, Human
ugagagccuaguagguggaaaa

SEQ ID NO: 263848 - RNA, 22 nt, Human
gcucugugccacaugcaguguu

SEQ ID NO: 263849 - RNA, 22 nt, Human
gcagcuggugcaaaugucacuc

SEQ ID NO: 263850 - RNA, 22 nt, Human
uagcucagcaggugggacaggu

SEQ ID NO: 263851 - RNA, 22 nt, Human
uuagaaagggugucugaaucug

SEQ ID NO: 263852 - RNA, 20 nt, Human
uacuucugaggcacucugaa

SEQ ID NO: 263853 - RNA, 22 nt, Human
acagcaaaagacaagaacuuaa

SEQ ID NO: 263854 - RNA, 22 nt, Human
gcaggugguggcgcgcgcccug

SEQ ID NO: 263855 - RNA, 22 nt, Human
gauaccagacagggagggagaa

SEQ ID NO: 263856 - RNA, 22 nt, Human
aguugugcugugaugcaggaua

SEQ ID NO: 263857 - RNA, 21 nt, Human
aaaaagcuggggcaugcaugc

SEQ ID NO: 263858 - RNA, 22 nt, Human
aguugguucacuccuucaugcc

SEQ ID NO: 263859 - RNA, 22 nt, Human
aggcugaggggcgagggacccu

SEQ ID NO: 263860 - RNA, 22 nt, Human
uagaacaucagguugaauuugg

SEQ ID NO: 263861 - RNA, 22 nt, Human
uaguuuagcacuaagaaaaaca

SEQ ID NO: 263862 - RNA, 22 nt, Human
auggggaagagccagugagcug

SEQ ID NO: 263863 - RNA, 22 nt, Human
ucacagaagcuugaagauuuuc

SEQ ID NO: 263864 - RNA, 22 nt, Human
uaaaugugaccuucauuuuaua

SEQ ID NO: 263865 - RNA, 22 nt, Human
aagagguaaccauagcaaccac

SEQ ID NO: 263866 - RNA, 22 nt, Human
uuacagaguagugcagaacuca

SEQ ID NO: 263867 - RNA, 23 nt, Human
uugagaacaggugugagaauggc

SEQ ID NO: 263868 - RNA, 20 nt, Human
aucuccugcuaccacccauu

SEQ ID NO: 263869 - RNA, 22 nt, Human
guccugggccugcugaggcuga

SEQ ID NO: 263870 - RNA, 22 nt, Human
gagcucuuccccaucuuacauc

SEQ ID NO: 263871 - RNA, 22 nt, Human
ccaggcucugucuggucagaag

SEQ ID NO: 263872 - RNA, 22 nt, Human
aaaagagugacugauaaguaua

SEQ ID NO: 263873 - RNA, 22 nt, Human
aguuaaagaaagauaauucgcc

SEQ ID NO: 263874 - RNA, 22 nt, Human
uuagcagcuaaacugacagacc

SEQ ID NO: 263875 - RNA, 22 nt, Human
ggcuuugcccuggacugaggca

SEQ ID NO: 263876 - RNA, 22 nt, Human
gcagguggaagcagcagacuca

SEQ ID NO: 263877 - RNA, 22 nt, Human
cacuguacagcauuaacaaggc

SEQ ID NO: 263878 - RNA, 22 nt, Human
acagucucuccacacugcaggg

SEQ ID NO: 263879 - RNA, 20 nt, Human
ucagugcagauuguccaagu

SEQ ID NO: 263880 - RNA, 22 nt, Human
uaaaguguggacaguaucuaua

SEQ ID NO: 263881 - RNA, 22 nt, Human
gagaggcugguaaagucugaac

SEQ ID NO: 263882 - RNA, 22 nt, Human
ugaaucaaugaauugcacuuca

SEQ ID NO: 263883 - RNA, 22 nt, Human
uuaaaugugauuucauuuaugu

SEQ ID NO: 263884 - RNA, 22 nt, Human
aaggcugagccagggccccuau

SEQ ID NO: 263885 - RNA, 22 nt, Human
aagauccaugggaauguuuggc

SEQ ID NO: 263886 - RNA, 22 nt, Human
ugucucagaguguuguauuaga

SEQ ID NO: 263887 - RNA, 22 nt, Human
aggcagcugugaggacuggauu

SEQ ID NO: 263888 - RNA, 22 nt, Human
uugcucaggcuuagagcuacua

SEQ ID NO: 263889 - RNA, 22 nt, Human
gguccagccaggugcucaugcc

SEQ ID NO: 263890 - RNA, 22 nt, Human
uuggcugcaaucacagggacuc

SEQ ID NO: 263891 - RNA, 20 nt, Human
cuguuaaaagguaugaauuc

SEQ ID NO: 263892 - RNA, 22 nt, Human
ucagcugcucaaauuuauguca

SEQ ID NO: 263893 - RNA, 22 nt, Human
ugaauauguauuucuuauuuac

SEQ ID NO: 263894 - RNA, 22 nt, Human
ccaggcaggcuagaauguaaau

SEQ ID NO: 263895 - RNA, 22 nt, Human
ucuggcagugagcaacuugaca

SEQ ID NO: 263896 - RNA, 22 nt, Human
uggcaggugcacuuuugguuuc

SEQ ID NO: 263897 - RNA, 22 nt, Human
cacucugggggcugccgcugcc

SEQ ID NO: 263898 - RNA, 22 nt, Human
gcagagauccuugcuggaugac

SEQ ID NO: 263899 - RNA, 22 nt, Human
ccuggcccuggaauagggcagg

SEQ ID NO: 263900 - RNA, 22 nt, Human
uagaaccaguccacagaauuug

SEQ ID NO: 263901 - RNA, 22 nt, Human
ugucucaggggcauugaaauaa

SEQ ID NO: 263902 - RNA, 22 nt, Human
ugggcuccguugccuggggcag

SEQ ID NO: 263903 - RNA, 22 nt, Human
gccuggaguucagccaaguccc

SEQ ID NO: 263904 - RNA, 22 nt, Human
agagguguggccaggacucaag

SEQ ID NO: 263905 - RNA, 22 nt, Human
agaggccuuucuguugagugaa

SEQ ID NO: 263906 - RNA, 22 nt, Human
ucuggaugggaugaggcaacaa

SEQ ID NO: 263907 - RNA, 21 nt, Human
agccuggguauccuuugagga

SEQ ID NO: 263908 - RNA, 22 nt, Human
aucuccaguuagcaguacugau

SEQ ID NO: 263909 - RNA, 22 nt, Human
caggaggcuuugggauccaagu

SEQ ID NO: 263910 - RNA, 22 nt, Human
aauuagaaccagaagccauauu

SEQ ID NO: 263911 - RNA, 22 nt, Human
cccaggaccauccuucugugcc

SEQ ID NO: 263912 - RNA, 22 nt, Human
aaauguguuucgaaaacuggug

SEQ ID NO: 263913 - RNA, 22 nt, Human
uaaggcacccuucugaguagag

SEQ ID NO: 263914 - RNA, 22 nt, Human
ugagcaggagauaaacagguag

SEQ ID NO: 263915 - RNA, 22 nt, Human
cuucuuuaccaagagauagagu

SEQ ID NO: 263916 - RNA, 23 nt, Human
caggcucccggaccaggauccgc

SEQ ID NO: 263917 - RNA, 22 nt, Human
aauguuuuguaugccucugagc

SEQ ID NO: 263918 - RNA, 21 nt, Human
ucuggcaggcacgggcccagc

SEQ ID NO: 263919 - RNA, 22 nt, Human
ucagggacgugagcucagaguc

SEQ ID NO: 263920 - RNA, 22 nt, Human
gcucugggaaguccuuuaccau

SEQ ID NO: 263921 - RNA, 22 nt, Human
cugucugcccuggccagagccc

SEQ ID NO: 263922 - RNA, 20 nt, Human
ccucucugcccugcaaggcc

SEQ ID NO: 263923 - RNA, 22 nt, Human
uuugcuuugacugucagcaagu

SEQ ID NO: 263924 - RNA, 22 nt, Human
caggccugcaggaaaggcuccc

SEQ ID NO: 263925 - RNA, 22 nt, Human
uauuuagaugcauuuggauugc

SEQ ID NO: 263926 - RNA, 22 nt, Human
uuugcaaacacuuaagaagaga

SEQ ID NO: 263927 - RNA, 22 nt, Human
uggcccagggaguucauggugu

SEQ ID NO: 263928 - RNA, 22 nt, Human
gggcuccaccuagggacacugg

SEQ ID NO: 263929 - RNA, 22 nt, Human
aucuggcuauugacauguuaua

SEQ ID NO: 263930 - RNA, 22 nt, Human
auuugcuuucccuucccugaca

SEQ ID NO: 263931 - RNA, 22 nt, Human
gugcaaccucgucagagcaccu

SEQ ID NO: 263932 - RNA, 22 nt, Human
acaguacaagcaaugcauuuuu

SEQ ID NO: 263933 - RNA, 22 nt, Human
ucuggcuccugaguccaugcuc

SEQ ID NO: 263934 - RNA, 22 nt, Human
agucuuuacauguguuauauau

SEQ ID NO: 263935 - RNA, 22 nt, Human
gcaggcaccgcggcggcagguu

SEQ ID NO: 263936 - RNA, 22 nt, Human
acuuugggaagcugcaauugcc

SEQ ID NO: 263937 - RNA, 22 nt, Human
cuccuggagcagcaggcgcagg

SEQ ID NO: 263938 - RNA, 22 nt, Human
acuccagggcugaacgaggccc

SEQ ID NO: 263939 - RNA, 22 nt, Human
cucugagggcucgagggacgcg

SEQ ID NO: 263940 - RNA, 22 nt, Human
agacauuauggcuuucacuggg

SEQ ID NO: 263941 - RNA, 22 nt, Human
ugcagcugguaucccauggauu

SEQ ID NO: 263942 - RNA, 22 nt, Human
ugaauccagagcuauuucgucc

SEQ ID NO: 263943 - RNA, 23 nt, Human
aggcaggcaguucagcuguuguu

SEQ ID NO: 263944 - RNA, 22 nt, Human
uuuaauaucucacacuuccaug

SEQ ID NO: 263945 - RNA, 22 nt, Human
auuccaguucuccucucuaaag

SEQ ID NO: 263946 - RNA, 22 nt, Human
uggcacagcccggauucuauga

SEQ ID NO: 263947 - RNA, 19 nt, Human
agcagcagaagugugccuu

SEQ ID NO: 263948 - RNA, 22 nt, Human
uccugcagucugcacucugccu

SEQ ID NO: 263949 - RNA, 20 nt, Human
uucuagaaugcccagggaca

SEQ ID NO: 263950 - RNA, 17 nt, Human
cagaggagcuuuggggg

SEQ ID NO: 263951 - RNA, 22 nt, Human
acagcucuguugccagaucugc

SEQ ID NO: 263952 - RNA, 22 nt, Human
ugcuugggaauguggagucaga

SEQ ID NO: 263953 - RNA, 22 nt, Human
aggcugugacuacgcagggaag

SEQ ID NO: 263954 - RNA, 22 nt, Human
uacaugugauaaauugauuaaa

SEQ ID NO: 263955 - RNA, 22 nt, Human
ugcuggcuuuuugugucaaaga

SEQ ID NO: 263956 - RNA, 22 nt, Human
auguuucaugacugagcaaaau

SEQ ID NO: 263957 - RNA, 22 nt, Human
aguuuauagcccagauucaugg

SEQ ID NO: 263958 - RNA, 22 nt, Human
cccaggcuaguaugauaucagu

SEQ ID NO: 263959 - RNA, 22 nt, Human
aaaagacaggugucugcggccc

SEQ ID NO: 263960 - RNA, 22 nt, Human
gcugccucccccauggcuggaa

SEQ ID NO: 263961 - RNA, 22 nt, Human
caggcaagauuagagaugagca

SEQ ID NO: 263962 - RNA, 22 nt, Human
cugaggcaccggcaauguucug

SEQ ID NO: 263963 - RNA, 22 nt, Human
aucaugcauuguauugaguuga

SEQ ID NO: 263964 - RNA, 22 nt, Human
cacaugcuccauacagaauggg

SEQ ID NO: 263965 - RNA, 16 nt, Human
aggcucagaggcugga

SEQ ID NO: 263966 - RNA, 22 nt, Human
augcccugcugccaucuggccg

SEQ ID NO: 263967 - RNA, 22 nt, Human
cucaggccagguuucucccaca

SEQ ID NO: 263968 - RNA, 22 nt, Human
guuuagaaaauagugaagcaag

SEQ ID NO: 263969 - RNA, 22 nt, Human
cauagaaaagaguagguaaugu

SEQ ID NO: 263970 - RNA, 22 nt, Human
ugaugaggcauaugcuacacau

SEQ ID NO: 263971 - RNA, 21 nt, Human
gacuuucuuaccagauuuuug

SEQ ID NO: 263972 - RNA, 22 nt, Human
acagggauuuuccaggcuaccc

SEQ ID NO: 263973 - RNA, 22 nt, Human
guaaacauuacugugcuguaua

SEQ ID NO: 263974 - RNA, 22 nt, Human
ucucucuucaacccuuaacuag

SEQ ID NO: 263975 - RNA, 22 nt, Human
agauggcuauagauagccuuuc

SEQ ID NO: 263976 - RNA, 22 nt, Human
ucuguucaagacugaggugaca

SEQ ID NO: 263977 - RNA, 22 nt, Human
aguguccuugagguuccuagga

SEQ ID NO: 263978 - RNA, 22 nt, Human
uaacauuauacagagaggacag

SEQ ID NO: 263979 - RNA, 22 nt, Human
aaagccuucuucggucugugau

SEQ ID NO: 263980 - RNA, 22 nt, Human
agcauuagaagaaaugauuaua

SEQ ID NO: 263981 - RNA, 22 nt, Human
uggagcccaggagaggauaaac

SEQ ID NO: 263982 - RNA, 22 nt, Human
uagagcuagcuucaaaaugcga

SEQ ID NO: 263983 - RNA, 22 nt, Human
caaugugugcuuacaggccagu

SEQ ID NO: 263984 - RNA, 18 nt, Human
ccagagcuggcuccucgc

SEQ ID NO: 263985 - RNA, 22 nt, Human
ugaucuuuucuauuuaugguag

SEQ ID NO: 263986 - RNA, 20 nt, Human
uuuuaugucaccuuccuguc

SEQ ID NO: 263987 - RNA, 22 nt, Human
gcaguaguccauaaguacucug

SEQ ID NO: 263988 - RNA, 22 nt, Human
ccuggccaguuuccaggcccug

SEQ ID NO: 263989 - RNA, 22 nt, Human
guucuucaucuuaaccaucugu

SEQ ID NO: 263990 - RNA, 22 nt, Human
agggaagaggaccagagucucu

SEQ ID NO: 263991 - RNA, 22 nt, Human
aaaauugaagugaucaggaacu

SEQ ID NO: 263992 - RNA, 22 nt, Human
acuguccuagaaccugcagcuc

SEQ ID NO: 263993 - RNA, 23 nt, Human
aggugccaacugagagcugagag

SEQ ID NO: 263994 - RNA, 22 nt, Human
gggccuccggggugagcugugg

SEQ ID NO: 263995 - RNA, 22 nt, Human
ugagguggcuagggaggcacuc

SEQ ID NO: 263996 - RNA, 22 nt, Human
gcagggacagggcagggccuuu

SEQ ID NO: 263997 - RNA, 22 nt, Human
ucaauguaauaaaauacucuau

SEQ ID NO: 263998 - RNA, 22 nt, Human
ucaggaaagaagaugcucagug

SEQ ID NO: 263999 - RNA, 22 nt, Human
gcccagcccagaaagguucgga

SEQ ID NO: 264000 - RNA, 22 nt, Human
aggcuucuucuuccuauuuagu

SEQ ID NO: 264001 - RNA, 22 nt, Human
ucuucacagaugcauauacuuc

SEQ ID NO: 264002 - RNA, 22 nt, Human
cauguuucugagaaaaguagga

SEQ ID NO: 264003 - RNA, 22 nt, Human
cugagcacagaaauaagauauu

SEQ ID NO: 264004 - RNA, 22 nt, Human
agggaagccaagccuuagagaa

SEQ ID NO: 264005 - RNA, 22 nt, Human
gcagucuuugaaugugaaauag

SEQ ID NO: 264006 - RNA, 22 nt, Human
aggcuaggcugaugccucuucc

SEQ ID NO: 264007 - RNA, 23 nt, Human
gccugggacugguagugugaccu

SEQ ID NO: 264008 - RNA, 22 nt, Human
guguccugagugaggccuggcc

SEQ ID NO: 264009 - RNA, 22 nt, Human
cagcagaacaggcagggaagcu

SEQ ID NO: 264010 - RNA, 22 nt, Human
ucuguaaagucuguguaaaguc

SEQ ID NO: 264011 - RNA, 22 nt, Human
aacaggcuuccaggagggacga

SEQ ID NO: 264012 - RNA, 22 nt, Human
gauuuuuauauaaagugagaaa

SEQ ID NO: 264013 - RNA, 22 nt, Human
uuaguuaauugacuauguugca

SEQ ID NO: 264014 - RNA, 22 nt, Human
guuuauuccagcaaucugcuua

SEQ ID NO: 264015 - RNA, 22 nt, Human
auuugcauuuacauagcauaga

SEQ ID NO: 264016 - RNA, 21 nt, Human
ucagguggcagaguguuuaug

SEQ ID NO: 264017 - RNA, 22 nt, Human
caucuuugcacccucaaaaccu

SEQ ID NO: 264018 - RNA, 23 nt, Human
uaauuuuagccuuacaggacccu

SEQ ID NO: 264019 - RNA, 22 nt, Human
uucuucuccuaaggagaguccu

SEQ ID NO: 264020 - RNA, 22 nt, Human
cauuuauuaguuaguucgaugu

SEQ ID NO: 264021 - RNA, 20 nt, Human
uacagaaacaggacuuuugg

SEQ ID NO: 264022 - RNA, 23 nt, Human
agacuggggcauaagaagauggc

SEQ ID NO: 264023 - RNA, 22 nt, Human
caccaggcugaaccagagggga

SEQ ID NO: 264024 - RNA, 22 nt, Human
gucuccagaauucuugggaggg

SEQ ID NO: 264025 - RNA, 22 nt, Human
uaggcucauuaaguccccaggg

SEQ ID NO: 264026 - RNA, 22 nt, Human
cuucaguuagaguuuacaaagu

SEQ ID NO: 264027 - RNA, 22 nt, Human
auuaagaucauuguagaagauu

SEQ ID NO: 264028 - RNA, 22 nt, Human
aagaaauauugggccuuauaaa

SEQ ID NO: 264029 - RNA, 22 nt, Human
cucauggcagagucaccugucc

SEQ ID NO: 264030 - RNA, 22 nt, Human
guuuuuaucuaauagcaguuau

SEQ ID NO: 264031 - RNA, 22 nt, Human
cuuugugucuguuaauaauuau

SEQ ID NO: 264032 - RNA, 22 nt, Human
ggcugcagauuguagucuguua

SEQ ID NO: 264033 - RNA, 22 nt, Human
auuagauacacagauuuccacu

SEQ ID NO: 264034 - RNA, 22 nt, Human
uauccuguuuugcacaauuaua

SEQ ID NO: 264035 - RNA, 22 nt, Human
uaaaugucuguuaacaugaaug

SEQ ID NO: 264036 - RNA, 22 nt, Human
gcuugggaaacguaguuccuag

SEQ ID NO: 264037 - RNA, 20 nt, Human
acacaguagcaauuagugca

SEQ ID NO: 264038 - RNA, 22 nt, Human
uggcagauuuucucuggaggag

SEQ ID NO: 264039 - RNA, 22 nt, Human
cugacucugacaggacuugugg

SEQ ID NO: 264040 - RNA, 22 nt, Human
uccagggcaggugcugggcucu

SEQ ID NO: 264041 - RNA, 22 nt, Human
acacagagcaaaucaugacaga

SEQ ID NO: 264042 - RNA, 22 nt, Human
acagacacaggcguggagucgc

SEQ ID NO: 264043 - RNA, 22 nt, Human
gcugccucugcgacucugggcg

SEQ ID NO: 264044 - RNA, 22 nt, Human
uguccuguagguuuauuugugu

SEQ ID NO: 264045 - RNA, 22 nt, Human
gcagcaucuguacauagacgcu

SEQ ID NO: 264046 - RNA, 22 nt, Human
aucuuuggugcaugauacuuug

SEQ ID NO: 264047 - RNA, 22 nt, Human
acuucuugaugaaaaugguacu

SEQ ID NO: 264048 - RNA, 20 nt, Human
uagggaugccaguacuucuc

SEQ ID NO: 264049 - RNA, 22 nt, Human
cuuuggaaucauugcuuauuca

SEQ ID NO: 264050 - RNA, 22 nt, Human
uugcuuuacaaaaauugauggu

SEQ ID NO: 264051 - RNA, 17 nt, Human
acacagccagguucucc

SEQ ID NO: 264052 - RNA, 23 nt, Human
ugcuuauucaaaaggugcuuuca

SEQ ID NO: 264053 - RNA, 22 nt, Human
uuauacgcucaauccuaucauc

SEQ ID NO: 264054 - RNA, 22 nt, Human
auuucaaggcuauuaauauaaa

SEQ ID NO: 264055 - RNA, 22 nt, Human
augcaccacaucacuucugcuc

SEQ ID NO: 264056 - RNA, 22 nt, Human
cacacaugguuccgcaggaugc

SEQ ID NO: 264057 - RNA, 22 nt, Human
ucugagacacucuugugauggg

SEQ ID NO: 264058 - RNA, 22 nt, Human
guucuuuaggggcccaauuucc

SEQ ID NO: 264059 - RNA, 22 nt, Human
ugccaggcccugcgggguccca

SEQ ID NO: 264060 - RNA, 22 nt, Human
aaggcuggaccuggaugaaucu

SEQ ID NO: 264061 - RNA, 18 nt, Human
guagauccuugagcuacc

SEQ ID NO: 264062 - RNA, 22 nt, Human
aacuccuaugacccacugaacu

SEQ ID NO: 264063 - RNA, 22 nt, Human
cagucuaacuucacagccugga

SEQ ID NO: 264064 - RNA, 22 nt, Human
acugcagagguggggugcagag

SEQ ID NO: 264065 - RNA, 22 nt, Human
caaggagaguaauugaaugaga

SEQ ID NO: 264066 - RNA, 22 nt, Human
aagaacaugaguuaugaugauu

SEQ ID NO: 264067 - RNA, 22 nt, Human
cuggggaacaauuugccacacu

SEQ ID NO: 264068 - RNA, 22 nt, Human
uucuguaguauucuuuugguca

SEQ ID NO: 264069 - RNA, 22 nt, Human
ccaggcaucacgggcauguggc

SEQ ID NO: 264070 - RNA, 22 nt, Human
ucucugagcuuaagguguuuca

SEQ ID NO: 264071 - RNA, 19 nt, Human
uccaccccagccagcucug

SEQ ID NO: 264072 - RNA, 22 nt, Human
gugugcucccucugucgucaua

SEQ ID NO: 264073 - RNA, 22 nt, Human
caauuucugggccucacacaag

SEQ ID NO: 264074 - RNA, 22 nt, Human
cuuuuucugauguuccaugauu

SEQ ID NO: 264075 - RNA, 21 nt, Human
cacaggugggucagugaggcc

SEQ ID NO: 264076 - RNA, 22 nt, Human
gccaggcuggggggagaugucu

SEQ ID NO: 264077 - RNA, 22 nt, Human
cacuggucagucggucagucuc

SEQ ID NO: 264078 - RNA, 22 nt, Human
aggaccugacuggcuccugcuu

SEQ ID NO: 264079 - RNA, 22 nt, Human
agaccugcagggccaggccugc

SEQ ID NO: 264080 - RNA, 22 nt, Human
gccuggagacagcagaggcggc

SEQ ID NO: 264081 - RNA, 22 nt, Human
agcaucugcauaaugccuuccc

SEQ ID NO: 264082 - RNA, 22 nt, Human
uuaguugauguucuggagguag

SEQ ID NO: 264083 - RNA, 22 nt, Human
ggucccagcuggucacugucag

SEQ ID NO: 264084 - RNA, 22 nt, Human
agaaaacauaggagacaggaaa

SEQ ID NO: 264085 - RNA, 22 nt, Human
gcccagcaccucucucaggguu

SEQ ID NO: 264086 - RNA, 22 nt, Human
caaauacuacgauucuugcagu

SEQ ID NO: 264087 - RNA, 22 nt, Human
cuggcacagagugagcauucaa

SEQ ID NO: 264088 - RNA, 22 nt, Human
uuuuuuggugcuccuaggaagg

SEQ ID NO: 264089 - RNA, 22 nt, Human
agcacuguaguuauagcuaaca

SEQ ID NO: 264090 - RNA, 22 nt, Human
ccaggccaguguuugguccagg

SEQ ID NO: 264091 - RNA, 22 nt, Human
caggcucagaugcccugcgcug

SEQ ID NO: 264092 - RNA, 22 nt, Human
acagugcucaugugacauggug

SEQ ID NO: 264093 - RNA, 22 nt, Human
uuugcugacuggaugcaguugg

SEQ ID NO: 264094 - RNA, 22 nt, Human
guaaaucauggucagaauaaau

SEQ ID NO: 264095 - RNA, 22 nt, Human
caugcacaacauacucaagagg

SEQ ID NO: 264096 - RNA, 22 nt, Human
cuggcuggguuccaggauucca

SEQ ID NO: 264097 - RNA, 22 nt, Human
gcagaauacugagagcugauug

SEQ ID NO: 264098 - RNA, 22 nt, Human
uuuucucuuguuaauguacuga

SEQ ID NO: 264099 - RNA, 22 nt, Human
uucauucccuuauauuagcauu

SEQ ID NO: 264100 - RNA, 22 nt, Human
agggcuccuaugccccauggac

SEQ ID NO: 264101 - RNA, 22 nt, Human
cugcaggcugagcgccugccgg

SEQ ID NO: 264102 - RNA, 22 nt, Human
gagccagggcugugagcugagc

SEQ ID NO: 264103 - RNA, 22 nt, Human
ucaguaaaguucuuucuugcug

SEQ ID NO: 264104 - RNA, 22 nt, Human
ggccuugagagccagugcaggc

SEQ ID NO: 264105 - RNA, 22 nt, Human
guccagagaggcaggaggcuac

SEQ ID NO: 264106 - RNA, 22 nt, Human
ucauagcuaagcuccagagugc

SEQ ID NO: 264107 - RNA, 22 nt, Human
aacagaauaguugauguacagu

SEQ ID NO: 264108 - RNA, 22 nt, Human
ccuggggcucugcacagagcag

SEQ ID NO: 264109 - RNA, 22 nt, Human
ggacuccucuagaaguugaggc

SEQ ID NO: 264110 - RNA, 22 nt, Human
aacacagguucauucugugagg

SEQ ID NO: 264111 - RNA, 22 nt, Human
uguuuacuugagguggaaacaa

SEQ ID NO: 264112 - RNA, 22 nt, Human
uccugagguauaugcuuugcag

SEQ ID NO: 264113 - RNA, 22 nt, Human
auaauaacaccugaauaggaaa

SEQ ID NO: 264114 - RNA, 22 nt, Human
ucccagaggacuguuggugcua

SEQ ID NO: 264115 - RNA, 22 nt, Human
cagcugccaugacauguccugc

SEQ ID NO: 264116 - RNA, 22 nt, Human
ccuccagucaccuggaugagaa

SEQ ID NO: 264117 - RNA, 22 nt, Human
uggguccuggaaggcgacaggu

SEQ ID NO: 264118 - RNA, 22 nt, Human
cccuccagagccuggacauucu

SEQ ID NO: 264119 - RNA, 21 nt, Human
agcugcagucaagccagaggu

SEQ ID NO: 264120 - RNA, 22 nt, Human
agcaggggucucugcuaaugaa

SEQ ID NO: 264121 - RNA, 22 nt, Human
uuacccagugaagccgaggcag

SEQ ID NO: 264122 - RNA, 22 nt, Human
acaagauagcuuagaagauuca

SEQ ID NO: 264123 - RNA, 22 nt, Human
auggaguucugccagcgcugcu

SEQ ID NO: 264124 - RNA, 22 nt, Human
caggcuuggagggcaguggcau

SEQ ID NO: 264125 - RNA, 22 nt, Human
cccugcccuggagacacuuaaa

SEQ ID NO: 264126 - RNA, 19 nt, Human
accaggaguaucagagcug

SEQ ID NO: 264127 - RNA, 20 nt, Human
aaaaagacaaaacgaguugg

SEQ ID NO: 264128 - RNA, 19 nt, Human
aauuagggagucgguuaag

SEQ ID NO: 264129 - RNA, 22 nt, Human
uuguacuugccauagaacaaca

SEQ ID NO: 264130 - RNA, 22 nt, Human
ccucuaggauguggcuggagga

SEQ ID NO: 264131 - RNA, 22 nt, Human
gcugaagacaauggaauugacu

SEQ ID NO: 264132 - RNA, 18 nt, Human
acagacaaaauggaaaug

SEQ ID NO: 264133 - RNA, 22 nt, Human
aagucagaaauuauucaggaau

SEQ ID NO: 264134 - RNA, 20 nt, Human
ugcaaacauuacuugggugu

SEQ ID NO: 264135 - RNA, 22 nt, Human
gagugguaggcaguguuaggaa

SEQ ID NO: 264136 - RNA, 22 nt, Human
agaggauucacugcagaagaca

SEQ ID NO: 264137 - RNA, 22 nt, Human
cucuuuggggcuggaagccuag

SEQ ID NO: 264138 - RNA, 20 nt, Human
uaacagaaguagaagugggu

SEQ ID NO: 264139 - RNA, 22 nt, Human
gaugaggucuacauuguuaaaa

SEQ ID NO: 264140 - RNA, 22 nt, Human
acaucucagaacugaguaaccg

SEQ ID NO: 264141 - RNA, 22 nt, Human
uaaaugcuaucgcauaaaaccu

SEQ ID NO: 264142 - RNA, 22 nt, Human
uacaaagugcuuuagaaaugaa

SEQ ID NO: 264143 - RNA, 22 nt, Human
ugcuuucaaugaauuguauacu

SEQ ID NO: 264144 - RNA, 22 nt, Human
caggucuuuguugcagcaugga

SEQ ID NO: 264145 - RNA, 22 nt, Human
gccuugggaaagugggaggaga

SEQ ID NO: 264146 - RNA, 22 nt, Human
cugugcuggugaaacccacaga

SEQ ID NO: 264147 - RNA, 22 nt, Human
gagggccuacuggacaugucag

SEQ ID NO: 264148 - RNA, 22 nt, Human
ggagaaggaagaaagcuacuau

SEQ ID NO: 264149 - RNA, 22 nt, Human
gggcuugcuaagaagagcgcau

SEQ ID NO: 264150 - RNA, 22 nt, Human
agguucaaauuguugcaguuuc

SEQ ID NO: 264151 - RNA, 22 nt, Human
agccauccuacuaccucagcau

SEQ ID NO: 264152 - RNA, 19 nt, Human
uccaggccauucccagagc

SEQ ID NO: 264153 - RNA, 22 nt, Human
aaaauuguaggaacugaaucaa

SEQ ID NO: 264154 - RNA, 22 nt, Human
auagggcuguugugaggauuaa

SEQ ID NO: 264155 - RNA, 22 nt, Human
ucccucagcuugucuccaugca

SEQ ID NO: 264156 - RNA, 21 nt, Human
auuccacuuuuccuucaggga

SEQ ID NO: 264157 - RNA, 22 nt, Human
ggugaggggagagugaaagaaa

SEQ ID NO: 264158 - RNA, 17 nt, Human
gcucagaguacacgugu

SEQ ID NO: 264159 - RNA, 22 nt, Human
aguuauguccucagcaaaucaa

SEQ ID NO: 264160 - RNA, 17 nt, Human
gagagcugcugcuuccg

SEQ ID NO: 264161 - RNA, 22 nt, Human
uaggaaacucucagcuggucau

SEQ ID NO: 264162 - RNA, 22 nt, Human
ggcuccugaggaccaggcacag

SEQ ID NO: 264163 - RNA, 22 nt, Human
gcagacuggucuucagccuugg

SEQ ID NO: 264164 - RNA, 22 nt, Human
aagaaucuccaucugauucacu

SEQ ID NO: 264165 - RNA, 22 nt, Human
ggcuuuuguuucagcucugcua

SEQ ID NO: 264166 - RNA, 20 nt, Human
aaagagaagccucaccuugu

SEQ ID NO: 264167 - RNA, 22 nt, Human
uggcugagugauauuugcaaag

SEQ ID NO: 264168 - RNA, 22 nt, Human
ggcacagggagaggcggauuuu

SEQ ID NO: 264169 - RNA, 22 nt, Human
uccaagaucuacagcaguuuag

SEQ ID NO: 264170 - RNA, 22 nt, Human
cucugcaggccugugaagggug

SEQ ID NO: 264171 - RNA, 22 nt, Human
cacugguacacugaauggcguu

SEQ ID NO: 264172 - RNA, 22 nt, Human
ggcagguggauuuucuacucua

SEQ ID NO: 264173 - RNA, 22 nt, Human
ucccagagcccaaguuggagag

SEQ ID NO: 264174 - RNA, 22 nt, Human
gcagacuguacacuggacuuug

SEQ ID NO: 264175 - RNA, 22 nt, Human
cuggcagcugugugaagaacug

SEQ ID NO: 264176 - RNA, 22 nt, Human
caaggcaugcaaugucuucagg

SEQ ID NO: 264177 - RNA, 22 nt, Human
auggauaagucaaagaguaucc

SEQ ID NO: 264178 - RNA, 22 nt, Human
ucuguaaguguugguuauucua

SEQ ID NO: 264179 - RNA, 22 nt, Human
cagccccagcacuuagcugagu

SEQ ID NO: 264180 - RNA, 22 nt, Human
aaagauugaaagagaauuuguc

SEQ ID NO: 264181 - RNA, 21 nt, Human
ucaagacagcauauuuaagaa

SEQ ID NO: 264182 - RNA, 22 nt, Human
ucuucaaaaauacagguuuuca

SEQ ID NO: 264183 - RNA, 22 nt, Human
ucuguaucguaaucaugucugg

SEQ ID NO: 264184 - RNA, 23 nt, Human
agaggccagccuuuggagacacc

SEQ ID NO: 264185 - RNA, 22 nt, Human
uccucuggggcgugguccugga

SEQ ID NO: 264186 - RNA, 22 nt, Human
acagauuuaggacuguagcgau

SEQ ID NO: 264187 - RNA, 22 nt, Human
aaaucacuaaguuauagugugg

SEQ ID NO: 264188 - RNA, 22 nt, Human
uuuccaugaucguuauagaacu

SEQ ID NO: 264189 - RNA, 22 nt, Human
accugauguauagauucuagau

SEQ ID NO: 264190 - RNA, 22 nt, Human
augugugcaucaaugauagauc

SEQ ID NO: 264191 - RNA, 22 nt, Human
uggaccugcguaggugcugggc

SEQ ID NO: 264192 - RNA, 22 nt, Human
acaggacuagaugauaaaaugu

SEQ ID NO: 264193 - RNA, 22 nt, Human
gugauccgaugucagucgcaga

SEQ ID NO: 264194 - RNA, 22 nt, Human
aagcugaaacauuagccuaaac

SEQ ID NO: 264195 - RNA, 22 nt, Human
agugucauuccagggacccucg

SEQ ID NO: 264196 - RNA, 22 nt, Human
gccagcagguggagagaucaag

SEQ ID NO: 264197 - RNA, 22 nt, Human
caucccugguuccuguguuuaa

SEQ ID NO: 264198 - RNA, 22 nt, Human
gcuaaugaaaaauagauuauag

SEQ ID NO: 264199 - RNA, 22 nt, Human
uuacaaacugucauauaguauu

SEQ ID NO: 264200 - RNA, 22 nt, Human
auggcccaaaaccuccucccuc

SEQ ID NO: 264201 - RNA, 22 nt, Human
ugaaaguugcacauaagagaau

SEQ ID NO: 264202 - RNA, 22 nt, Human
cuuccugggucagccuggaggu

SEQ ID NO: 264203 - RNA, 19 nt, Human
uggccagguacugucugcu

SEQ ID NO: 264204 - RNA, 22 nt, Human
ugguaccauuucccaggagugu

SEQ ID NO: 264205 - RNA, 23 nt, Human
guuuuacaggugagaaaauggag

SEQ ID NO: 264206 - RNA, 22 nt, Human
aggcacugguccauuuucugca

SEQ ID NO: 264207 - RNA, 22 nt, Human
aaaguacuuugggcuauguuug

SEQ ID NO: 264208 - RNA, 22 nt, Human
gcacccagccagcaucucagag

SEQ ID NO: 264209 - RNA, 22 nt, Human
acugagaagcucgcagugaugc

SEQ ID NO: 264210 - RNA, 22 nt, Human
ugccaaguggagcucaggaauc

SEQ ID NO: 264211 - RNA, 22 nt, Human
aaaguccuguuugaaggaccug

SEQ ID NO: 264212 - RNA, 21 nt, Human
uaaaagaugacaagacagcuc

SEQ ID NO: 264213 - RNA, 22 nt, Human
accaggccuagcaaguacauua

SEQ ID NO: 264214 - RNA, 22 nt, Human
cuacccagcaccuaggcugccu

SEQ ID NO: 264215 - RNA, 22 nt, Human
uuucacauggaagcucucgaga

SEQ ID NO: 264216 - RNA, 22 nt, Human
aauggaauaccuagguggccca

SEQ ID NO: 264217 - RNA, 23 nt, Human
gcccagggacugggaaucagugg

SEQ ID NO: 264218 - RNA, 22 nt, Human
gaguccugcuuucaauucuuuu

SEQ ID NO: 264219 - RNA, 22 nt, Human
uucauacucacuccaauaacug

SEQ ID NO: 264220 - RNA, 22 nt, Human
ugguuuugcuccaguauaaaua

SEQ ID NO: 264221 - RNA, 22 nt, Human
cuagugaaauuugcaaguaauu

SEQ ID NO: 264222 - RNA, 22 nt, Human
uauuauugacuauucagaaugu

SEQ ID NO: 264223 - RNA, 22 nt, Human
uguuaacaaagguuggcugggc

SEQ ID NO: 264224 - RNA, 22 nt, Human
accaggcuccccuuggauccug

SEQ ID NO: 264225 - RNA, 22 nt, Human
aagaggaggauugaugugggag

SEQ ID NO: 264226 - RNA, 22 nt, Human
ugagauuucaggccaaggagug

SEQ ID NO: 264227 - RNA, 22 nt, Human
gugugcugcccaacucgcagau

SEQ ID NO: 264228 - RNA, 22 nt, Human
uuagaaucagguguuauaauca

SEQ ID NO: 264229 - RNA, 22 nt, Human
gaaguauuucugaguugcccag

SEQ ID NO: 264230 - RNA, 22 nt, Human
aucagaguguaaguucuuuccu

SEQ ID NO: 264231 - RNA, 22 nt, Human
acaggacuguggaaggaucucu

SEQ ID NO: 264232 - RNA, 22 nt, Human
gagugugucggucagcguggcg

SEQ ID NO: 264233 - RNA, 22 nt, Human
gaggagggccuggugucccuuc

SEQ ID NO: 264234 - RNA, 22 nt, Human
uucaugagguaccugugaucau

SEQ ID NO: 264235 - RNA, 22 nt, Human
cagaaagcucuuucaaucuugc

SEQ ID NO: 264236 - RNA, 23 nt, Human
uaucucagaggaauguaguuacu

SEQ ID NO: 264237 - RNA, 22 nt, Human
guuuaagaaaauucauguuguu

SEQ ID NO: 264238 - RNA, 22 nt, Human
agaggaacccagacagggcuuu

SEQ ID NO: 264239 - RNA, 22 nt, Human
agcaccagagcuaugggccugc

SEQ ID NO: 264240 - RNA, 22 nt, Human
ucuuguaauuaacuagaaagau

SEQ ID NO: 264241 - RNA, 22 nt, Human
gagucagaauuguauuuuaaac

SEQ ID NO: 264242 - RNA, 22 nt, Human
uauuuuugccucucagauaaaa

SEQ ID NO: 264243 - RNA, 20 nt, Human
acaauauguagaugaauagc

SEQ ID NO: 264244 - RNA, 22 nt, Human
accagugucuuauugaccaucu

SEQ ID NO: 264245 - RNA, 22 nt, Human
ugacauuuuuauaagagucaaa

SEQ ID NO: 264246 - RNA, 22 nt, Human
uauugaauuagacccuaaaaug

SEQ ID NO: 264247 - RNA, 22 nt, Human
agaaagggucacugaaagagga

SEQ ID NO: 264248 - RNA, 22 nt, Human
uuacaggaggugcuagguguuu

SEQ ID NO: 264249 - RNA, 22 nt, Human
caugucacuuuaacaaauuagu

SEQ ID NO: 264250 - RNA, 23 nt, Human
cugcuguguuggucucgauggga

SEQ ID NO: 264251 - RNA, 22 nt, Human
cauguuuaauugcgauguuuga

SEQ ID NO: 264252 - RNA, 22 nt, Human
acuguucauuuggauuucucug

SEQ ID NO: 264253 - RNA, 19 nt, Human
cuguccuuggcugcacugu

SEQ ID NO: 264254 - RNA, 22 nt, Human
agugucuguuguucagaacucu

SEQ ID NO: 264255 - RNA, 22 nt, Human
acauucccuuggcuugaagcag

SEQ ID NO: 264256 - RNA, 22 nt, Human
gcagcaggcacuuaccguugcu

SEQ ID NO: 264257 - RNA, 22 nt, Human
gccugcuggaggagccucaggg

SEQ ID NO: 264258 - RNA, 22 nt, Human
cagcaggugcugccugucaccc

SEQ ID NO: 264259 - RNA, 22 nt, Human
accuaaauucuggcugauuagg

SEQ ID NO: 264260 - RNA, 22 nt, Human
cuuccaggacaccaggguagua

SEQ ID NO: 264261 - RNA, 22 nt, Human
acucugaggagugacuagaggu

SEQ ID NO: 264262 - RNA, 22 nt, Human
uuagaagccaggauggagcagg

SEQ ID NO: 264263 - RNA, 22 nt, Human
aucugggggagcugcucaugga

SEQ ID NO: 264264 - RNA, 22 nt, Human
gucaacagagacagagacacug

SEQ ID NO: 264265 - RNA, 22 nt, Human
cagguucuggguccuggguccu

SEQ ID NO: 264266 - RNA, 22 nt, Human
uugguuuaggaacuggcuugga

SEQ ID NO: 264267 - RNA, 22 nt, Human
agaaaucuuaucaagaaaugcc

SEQ ID NO: 264268 - RNA, 22 nt, Human
acagaaguguguguguaggaau

SEQ ID NO: 264269 - RNA, 22 nt, Human
augaaaauguacauguguauaa

SEQ ID NO: 264270 - RNA, 22 nt, Human
aaaugcaaggauuuuguuaggc

SEQ ID NO: 264271 - RNA, 22 nt, Human
gcugcugucuggucugagggcu

SEQ ID NO: 264272 - RNA, 22 nt, Human
aauaaugaacauuuaaaaccug

SEQ ID NO: 264273 - RNA, 19 nt, Human
uccuagaaugaggguguug

SEQ ID NO: 264274 - RNA, 22 nt, Human
gcugccuugcuuacuccacugc

SEQ ID NO: 264275 - RNA, 22 nt, Human
uacaggaaguuacagacuauga

SEQ ID NO: 264276 - RNA, 22 nt, Human
uccuuggcuaguacuggccagc

SEQ ID NO: 264277 - RNA, 20 nt, Human
gcagugcuggugccucugcu

SEQ ID NO: 264278 - RNA, 22 nt, Human
aaaaaccucaauuacuuuugca

SEQ ID NO: 264279 - RNA, 22 nt, Human
aacagacagaaaaaugugaucu

SEQ ID NO: 264280 - RNA, 22 nt, Human
ccaggagaagcaucugagugua

SEQ ID NO: 264281 - RNA, 22 nt, Human
auucuucaucagagaugcacua

SEQ ID NO: 264282 - RNA, 22 nt, Human
auuuagguagcugucuaagugu

SEQ ID NO: 264283 - RNA, 22 nt, Human
uuugcaaaguccauugaaguua

SEQ ID NO: 264284 - RNA, 22 nt, Human
cuaagacaugcccugcaugaua

SEQ ID NO: 264285 - RNA, 22 nt, Human
ucagugauuucuggggugaggg

SEQ ID NO: 264286 - RNA, 22 nt, Human
aguuguaucugaaugcauguag

SEQ ID NO: 264287 - RNA, 22 nt, Human
uuauuuagucuagaugaauuuu

SEQ ID NO: 264288 - RNA, 22 nt, Human
agcaacuuuauuccacugggca

SEQ ID NO: 264289 - RNA, 22 nt, Human
cuuuucucugcgggucuuucau

SEQ ID NO: 264290 - RNA, 22 nt, Human
uauguuauuuucauacaacaga

SEQ ID NO: 264291 - RNA, 22 nt, Human
ggagcucaguggggggacugug

SEQ ID NO: 264292 - RNA, 22 nt, Human
uaguggcaaaagcauuuugggu

SEQ ID NO: 264293 - RNA, 22 nt, Human
aguuuuaaaugauggugguggu

SEQ ID NO: 264294 - RNA, 22 nt, Human
uugaucucuguugcugucuuug

SEQ ID NO: 264295 - RNA, 22 nt, Human
gggcucuguguucuagcucucg

SEQ ID NO: 264296 - RNA, 22 nt, Human
cauucacaauggauugcuucaa

SEQ ID NO: 264297 - RNA, 22 nt, Human
uuaguucauagaauguaacagg

SEQ ID NO: 264298 - RNA, 22 nt, Human
uuucacagcuuccacuuaagga

SEQ ID NO: 264299 - RNA, 22 nt, Human
cacagcuggggaagcugaggcc

SEQ ID NO: 264300 - RNA, 22 nt, Human
gggcugagucaucuggggccuc

SEQ ID NO: 264301 - RNA, 22 nt, Human
agugguaacuaaguccugcuua

SEQ ID NO: 264302 - RNA, 21 nt, Human
uuuauguacuucauagaguag

SEQ ID NO: 264303 - RNA, 22 nt, Human
gacaggcuggcaaugcccugcu

SEQ ID NO: 264304 - RNA, 22 nt, Human
ccugggaggcggagguugcagu

SEQ ID NO: 264305 - RNA, 18 nt, Human
ucagccuguugucugccu

SEQ ID NO: 264306 - RNA, 22 nt, Human
aaggcugagguagggccuaaaa

SEQ ID NO: 264307 - RNA, 20 nt, Human
ccacagaggacagggcugug

SEQ ID NO: 264308 - RNA, 22 nt, Human
uucugugcguaggcgaugcagu

SEQ ID NO: 264309 - RNA, 21 nt, Human
auaagcaugcugauuacauuu

SEQ ID NO: 264310 - RNA, 22 nt, Human
cucugggcacauuuuccaggac

SEQ ID NO: 264311 - RNA, 22 nt, Human
agaaauguacgauguuaugcag

SEQ ID NO: 264312 - RNA, 22 nt, Human
ugcagagaaaccaguggaggac

SEQ ID NO: 264313 - RNA, 22 nt, Human
uggcugugcggccucgggcaga

SEQ ID NO: 264314 - RNA, 22 nt, Human
acagcagaucuggcuacagguu

SEQ ID NO: 264315 - RNA, 22 nt, Human
agacagguagcaggacagauau

SEQ ID NO: 264316 - RNA, 22 nt, Human
cuuuccaagaaugcagauaccu

SEQ ID NO: 264317 - RNA, 22 nt, Human
auauaaguuaguggucauguuu

SEQ ID NO: 264318 - RNA, 20 nt, Human
cugggcucaagugauccucc

SEQ ID NO: 264319 - RNA, 22 nt, Human
acuagaaaguuuccagaguuau

SEQ ID NO: 264320 - RNA, 22 nt, Human
ugcuccugcugcaugcaucucc

SEQ ID NO: 264321 - RNA, 22 nt, Human
uggcugccagcuccucgccuug

SEQ ID NO: 264322 - RNA, 23 nt, Human
ccuccccaccagacucuaacaua

SEQ ID NO: 264323 - RNA, 22 nt, Human
ucucugugcuugacuuucccau

SEQ ID NO: 264324 - RNA, 16 nt, Human
ggguccagaucugcuc

SEQ ID NO: 264325 - RNA, 22 nt, Human
cuucuucuggacaggcagcucc

SEQ ID NO: 264326 - RNA, 23 nt, Human
uugaggagugcuuuuucuaucca

SEQ ID NO: 264327 - RNA, 22 nt, Human
gcagcacugauccuaaacuuag

SEQ ID NO: 264328 - RNA, 20 nt, Human
aaaaugaugggcagggcagg

SEQ ID NO: 264329 - RNA, 23 nt, Human
uugggcucaguggcaggaagagu

SEQ ID NO: 264330 - RNA, 22 nt, Human
uuccagagaaaagguuuauuuc

SEQ ID NO: 264331 - RNA, 22 nt, Human
gugaggggaguaaagccauguu

SEQ ID NO: 264332 - RNA, 20 nt, Human
aacugagaguucaggaggag

SEQ ID NO: 264333 - RNA, 22 nt, Human
uuugauccguugcuggugagga

SEQ ID NO: 264334 - RNA, 22 nt, Human
cagaagucuuucuguuucaccu

SEQ ID NO: 264335 - RNA, 22 nt, Human
aacucuagugcuccuuggagga

SEQ ID NO: 264336 - RNA, 22 nt, Human
uuuaguauauaaaaagagaagu

SEQ ID NO: 264337 - RNA, 22 nt, Human
gaaaggcuuaaauuguaagggc

SEQ ID NO: 264338 - RNA, 22 nt, Human
ccucagcugucuuuuccgaggu

SEQ ID NO: 264339 - RNA, 22 nt, Human
uucuaaguuucucaguuucagu

SEQ ID NO: 264340 - RNA, 22 nt, Human
ucauucggcaauaguguguuag

SEQ ID NO: 264341 - RNA, 21 nt, Human
aguguccuuuuacugugaaua

SEQ ID NO: 264342 - RNA, 22 nt, Human
gcaucuuucuguccauucagca

SEQ ID NO: 264343 - RNA, 23 nt, Human
uugguuuacaggaauaagcaggg

SEQ ID NO: 264344 - RNA, 22 nt, Human
aguggcaguggggcagggcccu

SEQ ID NO: 264345 - RNA, 22 nt, Human
uuuggcucuucccguaccauaa

SEQ ID NO: 264346 - RNA, 22 nt, Human
caugaggucagggggagccggu

SEQ ID NO: 264347 - RNA, 22 nt, Human
gugccugccccacuccucagca

SEQ ID NO: 264348 - RNA, 22 nt, Human
ugaguuugguaucuaggggguc

SEQ ID NO: 264349 - RNA, 22 nt, Human
gcuggcuggaggagggagguug

SEQ ID NO: 264350 - RNA, 22 nt, Human
gagggucccgagcccugucaga

SEQ ID NO: 264351 - RNA, 22 nt, Human
gugcccaggcccaaggcaccac

SEQ ID NO: 264352 - RNA, 22 nt, Human
cacuugaaaaucagaggaaauu

SEQ ID NO: 264353 - RNA, 22 nt, Human
gacaauugcuuuugccgaauaa

SEQ ID NO: 264354 - RNA, 22 nt, Human
uuugcaaacuuuccucuggacc

SEQ ID NO: 264355 - RNA, 22 nt, Human
cccaucccugauuuucacucgu

SEQ ID NO: 264356 - RNA, 22 nt, Human
ugcagggcaguggagguugagu

SEQ ID NO: 264357 - RNA, 22 nt, Human
ugaaccuucauaaaauuaagug

SEQ ID NO: 264358 - RNA, 22 nt, Human
uggacaggaucugagacugaga

SEQ ID NO: 264359 - RNA, 22 nt, Human
gucuggcuuuauauuugcuauu

SEQ ID NO: 264360 - RNA, 17 nt, Human
uaggugguugcuggucu

SEQ ID NO: 264361 - RNA, 22 nt, Human
uauguuuguuaucacaacuagg

SEQ ID NO: 264362 - RNA, 22 nt, Human
ggaaccuugcuagaugcugagg

SEQ ID NO: 264363 - RNA, 22 nt, Human
ccuguacauggccaucuuuacc

SEQ ID NO: 264364 - RNA, 22 nt, Human
gcugucucgccugacacuggcu

SEQ ID NO: 264365 - RNA, 22 nt, Human
uuucuacagcuggugcaacuuu

SEQ ID NO: 264366 - RNA, 22 nt, Human
ugggccucggagcacaggagac

SEQ ID NO: 264367 - RNA, 22 nt, Human
acagcugacauuggcagcuauu

SEQ ID NO: 264368 - RNA, 22 nt, Human
uucugaggcacuggcucuccca

SEQ ID NO: 264369 - RNA, 22 nt, Human
uccaggcaaggauaauaaacau

SEQ ID NO: 264370 - RNA, 22 nt, Human
guguacaguuagccaccaaauu

SEQ ID NO: 264371 - RNA, 22 nt, Human
cagggaugugaugagcugagcc

SEQ ID NO: 264372 - RNA, 22 nt, Human
agucacaggcaagagggcucca

SEQ ID NO: 264373 - RNA, 20 nt, Human
uucagagucagcaaaugcag

SEQ ID NO: 264374 - RNA, 22 nt, Human
agagcuuugggacauuugcuag

SEQ ID NO: 264375 - RNA, 22 nt, Human
ugcugaaaaguaaauaggccua

SEQ ID NO: 264376 - RNA, 20 nt, Human
acacuguucuucacacauuu

SEQ ID NO: 264377 - RNA, 20 nt, Human
uugagcuuuuaguacagaca

SEQ ID NO: 264378 - RNA, 22 nt, Human
uuacuaaguuuuaugcaacuua

SEQ ID NO: 264379 - RNA, 22 nt, Human
cugccaugugugaaaggggagg

SEQ ID NO: 264380 - RNA, 22 nt, Human
ugcuuaaacccugaucaugugu

SEQ ID NO: 264381 - RNA, 22 nt, Human
aacagugcugcauucauugagc

SEQ ID NO: 264382 - RNA, 22 nt, Human
uuuacaugucaagacuggcagu

SEQ ID NO: 264383 - RNA, 22 nt, Human
aagcccuguuaggcacugggga

SEQ ID NO: 264384 - RNA, 22 nt, Human
gaggagcccuguuccccaggcc

SEQ ID NO: 264385 - RNA, 22 nt, Human
acugggcuuaugcuguggagua

SEQ ID NO: 264386 - RNA, 22 nt, Human
ucagcagaaguauagaggccau

SEQ ID NO: 264387 - RNA, 22 nt, Human
aaagccaucuguauuaagugaa

SEQ ID NO: 264388 - RNA, 21 nt, Human
agcagguguaaaggaggaaau

SEQ ID NO: 264389 - RNA, 22 nt, Human
uccuggccuagcucacccugga

SEQ ID NO: 264390 - RNA, 22 nt, Human
ugcaccccauuuuacauuuaca

SEQ ID NO: 264391 - RNA, 21 nt, Human
ucccucagaagcucuugguca

SEQ ID NO: 264392 - RNA, 22 nt, Human
uaaucuagaacauaugagagca

SEQ ID NO: 264393 - RNA, 22 nt, Human
ugugcuauuacacauuuauuua

SEQ ID NO: 264394 - RNA, 22 nt, Human
caguucaaaguuaagcagcagu

SEQ ID NO: 264395 - RNA, 22 nt, Human
ggcugcugaguuggccaggaga

SEQ ID NO: 264396 - RNA, 22 nt, Human
guuccaggcaagugggauagga

SEQ ID NO: 264397 - RNA, 22 nt, Human
agcugggccugagcuggaagcu

SEQ ID NO: 264398 - RNA, 22 nt, Human
guagcuuacaucagaguugguu

SEQ ID NO: 264399 - RNA, 20 nt, Human
aaguuuucuccaaauacagu

SEQ ID NO: 264400 - RNA, 22 nt, Human
aauagacaauucuagccaacau

SEQ ID NO: 264401 - RNA, 22 nt, Human
ugggccagggcacccaguccag

SEQ ID NO: 264402 - RNA, 22 nt, Human
cagaggcaggaagaugggcagu

SEQ ID NO: 264403 - RNA, 22 nt, Human
ucuaacuugugaguauagauga

SEQ ID NO: 264404 - RNA, 22 nt, Human
aagugauuucugccugcauguu

SEQ ID NO: 264405 - RNA, 22 nt, Human
ucucagguaagcuucuuugaug

SEQ ID NO: 264406 - RNA, 22 nt, Human
uuuuuaaugcagucugagacau

SEQ ID NO: 264407 - RNA, 22 nt, Human
uaggaaacuaauacagucugga

SEQ ID NO: 264408 - RNA, 22 nt, Human
uguacaguguaaauaaguggau

SEQ ID NO: 264409 - RNA, 22 nt, Human
uggguucuuaaagggcuagguu

SEQ ID NO: 264410 - RNA, 22 nt, Human
uacuauuuggaauuuuaaauug

SEQ ID NO: 264411 - RNA, 22 nt, Human
aacaugaaaacuaccugugauu

SEQ ID NO: 264412 - RNA, 19 nt, Human
uuacuucaggagugaaauu

SEQ ID NO: 264413 - RNA, 22 nt, Human
ugaaaugaaugugauucgauag

SEQ ID NO: 264414 - RNA, 22 nt, Human
uccauucuuuugcugucuuccu

SEQ ID NO: 264415 - RNA, 22 nt, Human
augcuuagguuaaauuuguaau

SEQ ID NO: 264416 - RNA, 22 nt, Human
aggucaaggcugcagugagcug

SEQ ID NO: 264417 - RNA, 22 nt, Human
cucuuuggauagaauuacaaag

SEQ ID NO: 264418 - RNA, 22 nt, Human
uccauguguuuuccuguccaca

SEQ ID NO: 264419 - RNA, 22 nt, Human
ugaggguagaggcaggagugca

SEQ ID NO: 264420 - RNA, 22 nt, Human
cagguggcugagcugaccuuug

SEQ ID NO: 264421 - RNA, 18 nt, Human
cugaggccaacuacacug

SEQ ID NO: 264422 - RNA, 22 nt, Human
cugaggcugcccagggccaggu

SEQ ID NO: 264423 - RNA, 22 nt, Human
aaugaacaucaaaugccuacca

SEQ ID NO: 264424 - RNA, 22 nt, Human
agcuuacuguaauuaaaagacu

SEQ ID NO: 264425 - RNA, 20 nt, Human
aacacugagggcuacucuuc

SEQ ID NO: 264426 - RNA, 22 nt, Human
uaaaugaagaaauggagauugu

SEQ ID NO: 264427 - RNA, 22 nt, Human
caugcagggacuugugcuccau

SEQ ID NO: 264428 - RNA, 22 nt, Human
ccaagcuggauuuagcugcaca

SEQ ID NO: 264429 - RNA, 22 nt, Human
gcaauuauaucaccagagaucu

SEQ ID NO: 264430 - RNA, 22 nt, Human
uucuguaggcacacaguuucaa

SEQ ID NO: 264431 - RNA, 22 nt, Human
uuaaagcuagguggaacaaauu

SEQ ID NO: 264432 - RNA, 22 nt, Human
ugacagguuguguagguggcca

SEQ ID NO: 264433 - RNA, 22 nt, Human
cccuccuggaggcggaugccca

SEQ ID NO: 264434 - RNA, 22 nt, Human
ccugaguggccaggcagcugug

SEQ ID NO: 264435 - RNA, 22 nt, Human
gaaugcagauggcugguguaug

SEQ ID NO: 264436 - RNA, 22 nt, Human
auuaaauguuggcauauuuugu

SEQ ID NO: 264437 - RNA, 22 nt, Human
ucacaagacagaaaacauuuag

SEQ ID NO: 264438 - RNA, 22 nt, Human
gucuguagauauucacuccuuc

SEQ ID NO: 264439 - RNA, 22 nt, Human
aggaggcuuuugcaggugccac

SEQ ID NO: 264440 - RNA, 22 nt, Human
agggguggagaguguugccagu

SEQ ID NO: 264441 - RNA, 22 nt, Human
ucucaguguguuuucucucaga

SEQ ID NO: 264442 - RNA, 22 nt, Human
caucuguugcuuccuaacaagu

SEQ ID NO: 264443 - RNA, 22 nt, Human
ucagaaccagcccagcagauga

SEQ ID NO: 264444 - RNA, 22 nt, Human
gaaacugaauauaagaaaggua

SEQ ID NO: 264445 - RNA, 22 nt, Human
aaauuuuaaggcuggaacuuaa

SEQ ID NO: 264446 - RNA, 22 nt, Human
uccuggggcugcaaggccuguc

SEQ ID NO: 264447 - RNA, 22 nt, Human
gggcuucucuuaugcuaacugg

SEQ ID NO: 264448 - RNA, 22 nt, Human
ucaggcagaggauggggagcgu

SEQ ID NO: 264449 - RNA, 19 nt, Human
gacuuuggaaaugcuguuu

SEQ ID NO: 264450 - RNA, 22 nt, Human
uuuguuuagagaauugaagcag

SEQ ID NO: 264451 - RNA, 22 nt, Human
auaacuuagaguaggcaaaagu

SEQ ID NO: 264452 - RNA, 22 nt, Human
gagggcugauaaaugcgcaugg

SEQ ID NO: 264453 - RNA, 22 nt, Human
cagaggcagacccuccagggcg

SEQ ID NO: 264454 - RNA, 22 nt, Human
ccaaaguccauaguuuacuuua

SEQ ID NO: 264455 - RNA, 22 nt, Human
uuuaauguuugagucaguauau

SEQ ID NO: 264456 - RNA, 22 nt, Human
uccugaaauucugguugucacu

SEQ ID NO: 264457 - RNA, 22 nt, Human
guuuccugcacacguguuauau

SEQ ID NO: 264458 - RNA, 21 nt, Human
acccaggggaagcagaaacug

SEQ ID NO: 264459 - RNA, 22 nt, Human
ucaagcaaguguuugguguaaa

SEQ ID NO: 264460 - RNA, 22 nt, Human
aagcaggaaggagcccagggca

SEQ ID NO: 264461 - RNA, 22 nt, Human
aaagcagucucagacuuaagca

SEQ ID NO: 264462 - RNA, 22 nt, Human
acugcaccuguguaccaagaug

SEQ ID NO: 264463 - RNA, 18 nt, Human
aauuuccauaugaauugc

SEQ ID NO: 264464 - RNA, 22 nt, Human
uuaggaaauuaugguuucagau

SEQ ID NO: 264465 - RNA, 22 nt, Human
ucuugagaaauaauuaaacaug

SEQ ID NO: 264466 - RNA, 22 nt, Human
gcuuagaaguacacaugccuuu

SEQ ID NO: 264467 - RNA, 22 nt, Human
ugggcagggagcuggaaccaca

SEQ ID NO: 264468 - RNA, 22 nt, Human
uguuuguagagacagcugaugc

SEQ ID NO: 264469 - RNA, 22 nt, Human
ucugccuuucacacagacggcc

SEQ ID NO: 264470 - RNA, 17 nt, Human
agccagguacaagucca

SEQ ID NO: 264471 - RNA, 22 nt, Human
cucccggcacuuggcaugucau

SEQ ID NO: 264472 - RNA, 22 nt, Human
uuuaccaaauagauuaugucag

SEQ ID NO: 264473 - RNA, 22 nt, Human
ugcauuuaccuggaggucauuu

SEQ ID NO: 264474 - RNA, 22 nt, Human
uguucucaucuggaucucagga

SEQ ID NO: 264475 - RNA, 22 nt, Human
agagaaacugauguccuuugaa

SEQ ID NO: 264476 - RNA, 22 nt, Human
ucuggcuuggacacaaucuucc

SEQ ID NO: 264477 - RNA, 22 nt, Human
cacuuaagcaguuaauuuaucu

SEQ ID NO: 264478 - RNA, 22 nt, Human
augagugugaaguuagcucagu

SEQ ID NO: 264479 - RNA, 22 nt, Human
cagagaaagggugaauuccuuc

SEQ ID NO: 264480 - RNA, 22 nt, Human
cuggucagagcaacugcucaca

SEQ ID NO: 264481 - RNA, 22 nt, Human
ccuuagcaacugucauagagca

SEQ ID NO: 264482 - RNA, 22 nt, Human
aauuugcaugaugagaacaaua

SEQ ID NO: 264483 - RNA, 22 nt, Human
ccugcuuaacauugccaugaca

SEQ ID NO: 264484 - RNA, 22 nt, Human
agcugcaaagaugauuuguugu

SEQ ID NO: 264485 - RNA, 20 nt, Human
agagagcacaggcaggaaag

SEQ ID NO: 264486 - RNA, 22 nt, Human
ccugggcucugucagaauuggg

SEQ ID NO: 264487 - RNA, 22 nt, Human
augaagcaggcacagcuucagg

SEQ ID NO: 264488 - RNA, 22 nt, Human
cccagggcugcagauggaggcu

SEQ ID NO: 264489 - RNA, 22 nt, Human
gucuguuagugauaacuguuuu

SEQ ID NO: 264490 - RNA, 22 nt, Human
uacugucuuuagggguagaaau

SEQ ID NO: 264491 - RNA, 22 nt, Human
ugagaugcuaaagggcugcuca

SEQ ID NO: 264492 - RNA, 22 nt, Human
ucaucuuuaccccuugcuucaa

SEQ ID NO: 264493 - RNA, 22 nt, Human
cccaagagguggagguugcagu

SEQ ID NO: 264494 - RNA, 22 nt, Human
caagcagagagguuagaacaca

SEQ ID NO: 264495 - RNA, 22 nt, Human
cagcagcuggugagacacagcc

SEQ ID NO: 264496 - RNA, 22 nt, Human
gaaauccaguucccuacucuua

SEQ ID NO: 264497 - RNA, 22 nt, Human
ccaggcagggagcuguuuggcc

SEQ ID NO: 264498 - RNA, 18 nt, Human
ugcuccaggcccaugggc

SEQ ID NO: 264499 - RNA, 22 nt, Human
aggcagcaauugaaaucauugu

SEQ ID NO: 264500 - RNA, 22 nt, Human
cucugagaagaguucaaguaaa

SEQ ID NO: 264501 - RNA, 20 nt, Human
ggcagagggccugggagaag

SEQ ID NO: 264502 - RNA, 22 nt, Human
aguuaggacacuugagggcuaa

SEQ ID NO: 264503 - RNA, 22 nt, Human
gccauugaugugaaaguaagac

SEQ ID NO: 264504 - RNA, 22 nt, Human
gucuucuguaagaugagguccc

SEQ ID NO: 264505 - RNA, 22 nt, Human
uagcuauuuugcuuggaaauac

SEQ ID NO: 264506 - RNA, 22 nt, Human
cuuuacuucucaaaauaaagca

SEQ ID NO: 264507 - RNA, 22 nt, Human
uagugcagguuaauaggacuuc

SEQ ID NO: 264508 - RNA, 22 nt, Human
acuuucauuuguaauaaacuuc

SEQ ID NO: 264509 - RNA, 17 nt, Human
uccagccuccucugcug

SEQ ID NO: 264510 - RNA, 22 nt, Human
ccuggcucccuggaccucauua

SEQ ID NO: 264511 - RNA, 22 nt, Human
uccuggcagagagcaugaggcc

SEQ ID NO: 264512 - RNA, 22 nt, Human
ugaucuuugggccauuaauaaa

SEQ ID NO: 264513 - RNA, 22 nt, Human
cacaggagugcugcuauuguug

SEQ ID NO: 264514 - RNA, 22 nt, Human
ugaggcucagagaagugcuguu

SEQ ID NO: 264515 - RNA, 22 nt, Human
gugugcuguuguucagguagaa

SEQ ID NO: 264516 - RNA, 22 nt, Human
cagugcagccaaggacaggcac

SEQ ID NO: 264517 - RNA, 22 nt, Human
cacagcaagagcuaaaugacca

SEQ ID NO: 264518 - RNA, 22 nt, Human
ucucuggagcugcagauccagg

SEQ ID NO: 264519 - RNA, 22 nt, Human
gagcccucaccgccugaccagg

SEQ ID NO: 264520 - RNA, 22 nt, Human
acagagcuguacaugugccaug

SEQ ID NO: 264521 - RNA, 22 nt, Human
cugcugccaagggugccacagg

SEQ ID NO: 264522 - RNA, 22 nt, Human
agggaauucacuggaacgcccu

SEQ ID NO: 264523 - RNA, 22 nt, Human
agggcagcacaaggcauggacu

SEQ ID NO: 264524 - RNA, 22 nt, Human
cagccagaucagggcagggguu

SEQ ID NO: 264525 - RNA, 22 nt, Human
ucaggaggaugucggcaaauuu

SEQ ID NO: 264526 - RNA, 22 nt, Human
aagagcacuaacagagcugaua

SEQ ID NO: 264527 - RNA, 22 nt, Human
cuucucccugggggcucuuuau

SEQ ID NO: 264528 - RNA, 22 nt, Human
aggccacagagagugcaugugc

SEQ ID NO: 264529 - RNA, 22 nt, Human
uuccuggccuaagguaggugac

SEQ ID NO: 264530 - RNA, 22 nt, Human
gugacuuuaacuucagauuaga

SEQ ID NO: 264531 - RNA, 22 nt, Human
uggacaggugagugacucaggg

SEQ ID NO: 264532 - RNA, 22 nt, Human
gcuuccaggucauucucacccu

SEQ ID NO: 264533 - RNA, 22 nt, Human
auucuucacuguuucagaauga

SEQ ID NO: 264534 - RNA, 22 nt, Human
gaaggccauuuuuagguagaau

SEQ ID NO: 264535 - RNA, 22 nt, Human
gugggcugcccuugaggucagc

SEQ ID NO: 264536 - RNA, 22 nt, Human
ugaucuccugaccuuguaaucc

SEQ ID NO: 264537 - RNA, 22 nt, Human
caaaugcuaacuucuuuccaaa

SEQ ID NO: 264538 - RNA, 20 nt, Human
ccucaaauaagugccagcau

SEQ ID NO: 264539 - RNA, 22 nt, Human
acagagagaggcccgaggcugc

SEQ ID NO: 264540 - RNA, 22 nt, Human
acagcugcacuugaagcagguu

SEQ ID NO: 264541 - RNA, 22 nt, Human
cagccagaaaguauguuaggga

SEQ ID NO: 264542 - RNA, 22 nt, Human
aaauuacagaucaccaaugcau

SEQ ID NO: 264543 - RNA, 22 nt, Human
cauggcaggaaaaugaacaggc

SEQ ID NO: 264544 - RNA, 22 nt, Human
cucuucuugaaagaggaauuca

SEQ ID NO: 264545 - RNA, 22 nt, Human
auuauucaaauucccacuauac

SEQ ID NO: 264546 - RNA, 22 nt, Human
uccugggacucugccucaggcu

SEQ ID NO: 264547 - RNA, 22 nt, Human
cuggaaaggguccucauucugu

SEQ ID NO: 264548 - RNA, 22 nt, Human
cucacagguucugcagcucaca

SEQ ID NO: 264549 - RNA, 22 nt, Human
uuugacucuuagcccaggacuc

SEQ ID NO: 264550 - RNA, 22 nt, Human
uucacauuugaaaggaaagaua

SEQ ID NO: 264551 - RNA, 22 nt, Human
caucuagaaaaaagaccuguug

SEQ ID NO: 264552 - RNA, 22 nt, Human
ucauuguauuaaaauauugguu

SEQ ID NO: 264553 - RNA, 22 nt, Human
cuguggagcuuguggcaguggg

SEQ ID NO: 264554 - RNA, 22 nt, Human
uagagacagaaaguagaauggu

SEQ ID NO: 264555 - RNA, 22 nt, Human
ggccucuguucugcauuccucc

SEQ ID NO: 264556 - RNA, 22 nt, Human
aacaaauggaacacaaaucuuu

SEQ ID NO: 264557 - RNA, 22 nt, Human
ggauugagagcacugguagcug

SEQ ID NO: 264558 - RNA, 22 nt, Human
caagauuugccaguggccaacu

SEQ ID NO: 264559 - RNA, 22 nt, Human
ucagcaggcagaaaucugcaga

SEQ ID NO: 264560 - RNA, 20 nt, Human
auucugcuuucugauagagc

SEQ ID NO: 264561 - RNA, 22 nt, Human
ugagcaggugagucuagggcag

SEQ ID NO: 264562 - RNA, 22 nt, Human
ucacacauuugaaggccuguca

SEQ ID NO: 264563 - RNA, 22 nt, Human
cugguacaguguuacaaaaugg

SEQ ID NO: 264564 - RNA, 22 nt, Human
ccacagaagauggggagagugg

SEQ ID NO: 264565 - RNA, 21 nt, Human
uugacaggaaagaggggagau

SEQ ID NO: 264566 - RNA, 22 nt, Human
ugcucuagcucauaggacucau

SEQ ID NO: 264567 - RNA, 22 nt, Human
uugugucccccuuugagagcca

SEQ ID NO: 264568 - RNA, 19 nt, Human
uccaugcccaggcaccaag

SEQ ID NO: 264569 - RNA, 22 nt, Human
uaagacacauuggaguagauga

SEQ ID NO: 264570 - RNA, 22 nt, Human
cacugucuguguguccuugggg

SEQ ID NO: 264571 - RNA, 22 nt, Human
gucagcaaggugcaagcggcug

SEQ ID NO: 264572 - RNA, 23 nt, Human
ucaauuaucaauggaaagaaguu

SEQ ID NO: 264573 - RNA, 22 nt, Human
uucuccagacccuccugcagac

SEQ ID NO: 264574 - RNA, 22 nt, Human
gaagaacaccugcugcccagug

SEQ ID NO: 264575 - RNA, 22 nt, Human
gccaaaggaccugugggugaca

SEQ ID NO: 264576 - RNA, 23 nt, Human
aagcacagaaugguuuaggaguu

SEQ ID NO: 264577 - RNA, 22 nt, Human
aaacuacaucucauggaugagg

SEQ ID NO: 264578 - RNA, 22 nt, Human
uagcaaguagauacucauuuag

SEQ ID NO: 264579 - RNA, 22 nt, Human
caucuuugaacucuguauaaac

SEQ ID NO: 264580 - RNA, 19 nt, Human
ugcccugcacgcuguccug

SEQ ID NO: 264581 - RNA, 22 nt, Human
acugacuuuggaauauuucuag

SEQ ID NO: 264582 - RNA, 22 nt, Human
gaggcugggggcugccuuccuc

SEQ ID NO: 264583 - RNA, 22 nt, Human
uguaugcaccauuguauuaccu

SEQ ID NO: 264584 - RNA, 22 nt, Human
acauuaucccuggcacaacugc

SEQ ID NO: 264585 - RNA, 22 nt, Human
uugacucauaccugccugaccc

SEQ ID NO: 264586 - RNA, 22 nt, Human
ccucagaggugaacaucagugc

SEQ ID NO: 264587 - RNA, 22 nt, Human
auucugggaacuuugucucuca

SEQ ID NO: 264588 - RNA, 22 nt, Human
ccugcaggcugcaggccaguuc

SEQ ID NO: 264589 - RNA, 22 nt, Human
caggagugcagguggugaggca

SEQ ID NO: 264590 - RNA, 22 nt, Human
ccaagcagucugcuaggaguuu

SEQ ID NO: 264591 - RNA, 22 nt, Human
ggcagccuugagggaggccugg

SEQ ID NO: 264592 - RNA, 22 nt, Human
auuggucuccacuuguuuuaga

SEQ ID NO: 264593 - RNA, 20 nt, Human
cagagcccacuuucuuauca

SEQ ID NO: 264594 - RNA, 22 nt, Human
aaggcuuucagcuaacuugauu

SEQ ID NO: 264595 - RNA, 22 nt, Human
auuuccaggcuguuuugugaau

SEQ ID NO: 264596 - RNA, 22 nt, Human
gccaccuccuuauuccaccugu

SEQ ID NO: 264597 - RNA, 22 nt, Human
cuggcagcucuacucagagccu

SEQ ID NO: 264598 - RNA, 22 nt, Human
uggggcagggaugggaaacuau

SEQ ID NO: 264599 - RNA, 22 nt, Human
cugugugccuagaggguggccg

SEQ ID NO: 264600 - RNA, 22 nt, Human
aacgugcaccaggaggucauga

SEQ ID NO: 264601 - RNA, 22 nt, Human
cagcuccagcccaggcagcucc

SEQ ID NO: 264602 - RNA, 22 nt, Human
aaguaaaagcaggugugcuggg

SEQ ID NO: 264603 - RNA, 22 nt, Human
cacaugaugguggaagccauag

SEQ ID NO: 264604 - RNA, 22 nt, Human
gcucugagugauuaaggagcuu

SEQ ID NO: 264605 - RNA, 22 nt, Human
caccagcuugggcuguggaaau

SEQ ID NO: 264606 - RNA, 22 nt, Human
cagcaagauggugaaugagacg

SEQ ID NO: 264607 - RNA, 22 nt, Human
acacuugauaggucaaaucagu

SEQ ID NO: 264608 - RNA, 22 nt, Human
auuauucaaucauauuaaaagu

SEQ ID NO: 264609 - RNA, 22 nt, Human
gcuggccugggcagccugucgg

SEQ ID NO: 264610 - RNA, 23 nt, Human
uccaggagcaugcuggcuggcga

SEQ ID NO: 264611 - RNA, 22 nt, Human
ugcaggaaguuuccugaacuuu

SEQ ID NO: 264612 - RNA, 22 nt, Human
acucuggccccaggaucugugu

SEQ ID NO: 264613 - RNA, 22 nt, Human
ugcugaggcuagaccuggaagu

SEQ ID NO: 264614 - RNA, 22 nt, Human
gucucugugcccccauuuccgu

SEQ ID NO: 264615 - RNA, 22 nt, Human
auuucucauuuugcuucaaagg

SEQ ID NO: 264616 - RNA, 22 nt, Human
aagugucuagcaccuggaugca

SEQ ID NO: 264617 - RNA, 23 nt, Human
ccuggggcacuugaguccucauc

SEQ ID NO: 264618 - RNA, 22 nt, Human
ugcuuagacgucaaguacagcc

SEQ ID NO: 264619 - RNA, 22 nt, Human
gaacugggaaugcugucccauc

SEQ ID NO: 264620 - RNA, 22 nt, Human
agcugcuuguacaugaccacau

SEQ ID NO: 264621 - RNA, 22 nt, Human
gggcacuggcagucggggacgc

SEQ ID NO: 264622 - RNA, 22 nt, Human
caaaugcagauucaggaguucu

SEQ ID NO: 264623 - RNA, 23 nt, Human
cuuuucauugccuuagcgcagag

SEQ ID NO: 264624 - RNA, 22 nt, Human
ccagaaguggcuuucucaggga

SEQ ID NO: 264625 - RNA, 22 nt, Human
accccaggaaguggaggucaug

SEQ ID NO: 264626 - RNA, 22 nt, Human
ugucucagguacaugcguccug

SEQ ID NO: 264627 - RNA, 22 nt, Human
aaucaucuccgaaaaaagagua

SEQ ID NO: 264628 - RNA, 22 nt, Human
aagaugcagcuuuacaauaagg

SEQ ID NO: 264629 - RNA, 22 nt, Human
uacuuuggauccuuacaauagc

SEQ ID NO: 264630 - RNA, 22 nt, Human
guuuacauauuuuaauugguga

SEQ ID NO: 264631 - RNA, 22 nt, Human
caugcaggaggaaaaagcagcu

SEQ ID NO: 264632 - RNA, 23 nt, Human
uucaugagauuaucugcaugugu

SEQ ID NO: 264633 - RNA, 22 nt, Human
aacauuuccggccuuuuguucu

SEQ ID NO: 264634 - RNA, 22 nt, Human
uccugugcuuuggaugcuuaga

SEQ ID NO: 264635 - RNA, 22 nt, Human
cauuuacauuuaagguuaauau

SEQ ID NO: 264636 - RNA, 22 nt, Human
uuugacucugggugcuuuuucg

SEQ ID NO: 264637 - RNA, 21 nt, Human
agcuuguuauuaauucagaac

SEQ ID NO: 264638 - RNA, 22 nt, Human
cuauuucagcagaagccggaga

SEQ ID NO: 264639 - RNA, 21 nt, Human
cccgcaucuuccucuccagca

SEQ ID NO: 264640 - RNA, 22 nt, Human
caaaugaugcauggcuagugag

SEQ ID NO: 264641 - RNA, 22 nt, Human
ugcauaggguucaaaggcugua

SEQ ID NO: 264642 - RNA, 22 nt, Human
ugcagguggccaucuucguucu

SEQ ID NO: 264643 - RNA, 22 nt, Human
ucacauaaauuauacaauuuca

SEQ ID NO: 264644 - RNA, 22 nt, Human
cuguccugaaagggagauuggg

SEQ ID NO: 264645 - RNA, 22 nt, Human
aaacugcaggucaugacccauu

SEQ ID NO: 264646 - RNA, 22 nt, Human
ugcaacaggcugugacauggaa

SEQ ID NO: 264647 - RNA, 22 nt, Human
caugcagcagaauaaugacuau

SEQ ID NO: 264648 - RNA, 22 nt, Human
auccugggcaguuuugagugcu

SEQ ID NO: 264649 - RNA, 20 nt, Human
gaggcugcggacugcuggac

SEQ ID NO: 264650 - RNA, 22 nt, Human
uggggauguagaaaugaacaac

SEQ ID NO: 264651 - RNA, 22 nt, Human
uggcccugaggggcugugcccc

SEQ ID NO: 264652 - RNA, 22 nt, Human
augcaaagcacacacagaaucc

SEQ ID NO: 264653 - RNA, 22 nt, Human
cuagggcacuaggacucaugug

SEQ ID NO: 264654 - RNA, 22 nt, Human
gauguguagagggaauuucaaa

SEQ ID NO: 264655 - RNA, 22 nt, Human
aaggcagaaagggaugugagug

SEQ ID NO: 264656 - RNA, 22 nt, Human
aaacagcuggucucaaauguuc

SEQ ID NO: 264657 - RNA, 22 nt, Human
ccagagaguaucauggagagua

SEQ ID NO: 264658 - RNA, 21 nt, Human
gcugcaaauucuaacaauuau

SEQ ID NO: 264659 - RNA, 22 nt, Human
aagugauuauuguuuucagguu

SEQ ID NO: 264660 - RNA, 22 nt, Human
aggcacaagaaacugcucccca

SEQ ID NO: 264661 - RNA, 22 nt, Human
gcaggcucguuggaaguccccu

SEQ ID NO: 264662 - RNA, 22 nt, Human
uuucaguuugaaggaaaggcca

SEQ ID NO: 264663 - RNA, 22 nt, Human
gugcauuaguuuccuauugcug

SEQ ID NO: 264664 - RNA, 20 nt, Human
ucucgcacucggagcagccg

SEQ ID NO: 264665 - RNA, 22 nt, Human
aggaaaaaagucugugauuaua

SEQ ID NO: 264666 - RNA, 22 nt, Human
gggagcauuucccuguguugaa

SEQ ID NO: 264667 - RNA, 22 nt, Human
ccaaaauauuagugcuuaagua

SEQ ID NO: 264668 - RNA, 19 nt, Human
ccugggccuccaucacccc

SEQ ID NO: 264669 - RNA, 22 nt, Human
ggugacggggcccagguuuccu

SEQ ID NO: 264670 - RNA, 22 nt, Human
uagcccucuuuaauccuucccu

SEQ ID NO: 264671 - RNA, 22 nt, Human
gaauguuauugaacuacgagcu

SEQ ID NO: 264672 - RNA, 22 nt, Human
uccuggauuuaacccuggcucu

SEQ ID NO: 264673 - RNA, 22 nt, Human
auggcuauuuuagagaucaagg

SEQ ID NO: 264674 - RNA, 22 nt, Human
cucaguuuuuuuaagagccaug

SEQ ID NO: 264675 - RNA, 22 nt, Human
ggccugagcucuggggaggcaa

SEQ ID NO: 264676 - RNA, 22 nt, Human
ucaacaaauacuuaaagcagag

SEQ ID NO: 264677 - RNA, 22 nt, Human
aaguacauggaggauagcugcu

SEQ ID NO: 264678 - RNA, 22 nt, Human
aguuacaaccaugacacaagca

SEQ ID NO: 264679 - RNA, 19 nt, Human
uagguguccgccggaggug

SEQ ID NO: 264680 - RNA, 22 nt, Human
agcccagguugaggcugcagug

SEQ ID NO: 264681 - RNA, 22 nt, Human
aaaaagucugcaaaggagguug

SEQ ID NO: 264682 - RNA, 22 nt, Human
cuccuggagggccaaagaaaua

SEQ ID NO: 264683 - RNA, 22 nt, Human
aguaagcaauagagugagaauu

SEQ ID NO: 264684 - RNA, 22 nt, Human
acagugugguuugagcacuggg

SEQ ID NO: 264685 - RNA, 22 nt, Human
gauucaaaguuaaugaagaugc

SEQ ID NO: 264686 - RNA, 22 nt, Human
caggaagcaucuggcuagcuaa

SEQ ID NO: 264687 - RNA, 22 nt, Human
gaagcaaaaugucugcacauau

SEQ ID NO: 264688 - RNA, 22 nt, Human
uuacauaguuaaauaguacagc

SEQ ID NO: 264689 - RNA, 22 nt, Human
ucuucuccaguucauccuacca

SEQ ID NO: 264690 - RNA, 22 nt, Human
aggaaacugggccucagguuag

SEQ ID NO: 264691 - RNA, 22 nt, Human
aaaggcuucuuugcuccauguc

SEQ ID NO: 264692 - RNA, 22 nt, Human
ccugagagggggcccuagaaau

SEQ ID NO: 264693 - RNA, 22 nt, Human
agagaauucuggugcuaacaag

SEQ ID NO: 264694 - RNA, 22 nt, Human
ccucuccccucccaaggcggga

SEQ ID NO: 264695 - RNA, 22 nt, Human
caugacauccugaagcugcaca

SEQ ID NO: 264696 - RNA, 22 nt, Human
ugagaugcugggaacaaggaag

SEQ ID NO: 264697 - RNA, 22 nt, Human
aggcuccagccaaugggucugu

SEQ ID NO: 264698 - RNA, 22 nt, Human
aggcuucugugagcucauacaa

SEQ ID NO: 264699 - RNA, 22 nt, Human
ccuggcucauuaugugccccca

SEQ ID NO: 264700 - RNA, 22 nt, Human
cagggcauaagaugaggcugua

SEQ ID NO: 264701 - RNA, 22 nt, Human
aggcuugcacaugcacgcacgu

SEQ ID NO: 264702 - RNA, 22 nt, Human
agcaggugcauggcgagcgcgg

SEQ ID NO: 264703 - RNA, 22 nt, Human
acacaaugugcaggacaccugu

SEQ ID NO: 264704 - RNA, 22 nt, Human
aauguacaucucaguguaguac

SEQ ID NO: 264705 - RNA, 22 nt, Human
ggggccucugcagucacgcugg

SEQ ID NO: 264706 - RNA, 22 nt, Human
aacuccaggcagggaggccacu

SEQ ID NO: 264707 - RNA, 22 nt, Human
ggcaggcaacggaccacuaguc

SEQ ID NO: 264708 - RNA, 22 nt, Human
uauuuucauucugugugacugu

SEQ ID NO: 264709 - RNA, 22 nt, Human
ugcuagggauauaguggcgagu

SEQ ID NO: 264710 - RNA, 22 nt, Human
guccuucauuuccugaucucua

SEQ ID NO: 264711 - RNA, 22 nt, Human
gaggagccuggccccacaucca

SEQ ID NO: 264712 - RNA, 23 nt, Human
auaauaauuauggcagcaaagug

SEQ ID NO: 264713 - RNA, 22 nt, Human
ugucuuuucuacuguaagcaua

SEQ ID NO: 264714 - RNA, 22 nt, Human
acaagcuuugugauaguagaga

SEQ ID NO: 264715 - RNA, 22 nt, Human
aauaguacaaucuacagacaua

SEQ ID NO: 264716 - RNA, 22 nt, Human
guccuuggcuugaggcaccuca

SEQ ID NO: 264717 - RNA, 23 nt, Human
uguaaaaugggguaguguuacca

SEQ ID NO: 264718 - RNA, 22 nt, Human
aaggcaauguuagcaacauaau

SEQ ID NO: 264719 - RNA, 22 nt, Human
cucucuggauauuuguaugcug

SEQ ID NO: 264720 - RNA, 22 nt, Human
ucucucugccaacucacagcca

SEQ ID NO: 264721 - RNA, 22 nt, Human
ucaggucuguacuauugucuug

SEQ ID NO: 264722 - RNA, 23 nt, Human
aagucagagccaagucaaugaga

SEQ ID NO: 264723 - RNA, 22 nt, Human
agauauauuuccugcccaaggc

SEQ ID NO: 264724 - RNA, 22 nt, Human
guugcugaaauuaauauuggag

SEQ ID NO: 264725 - RNA, 21 nt, Human
gcuggcuuccugagggcugag

SEQ ID NO: 264726 - RNA, 22 nt, Human
gccuggcuucccuuggagcauu

SEQ ID NO: 264727 - RNA, 22 nt, Human
ccugggucccaucccagaguga

SEQ ID NO: 264728 - RNA, 20 nt, Human
ucaggcaguggggaaaggca

SEQ ID NO: 264729 - RNA, 22 nt, Human
aaagcuuuucaguauguucaug

SEQ ID NO: 264730 - RNA, 22 nt, Human
cuucaguuagccaauucagguc

SEQ ID NO: 264731 - RNA, 22 nt, Human
augucuuucucauacaagccca

SEQ ID NO: 264732 - RNA, 22 nt, Human
ugugggaugguuuugccagaau

SEQ ID NO: 264733 - RNA, 22 nt, Human
uagccagugaauguuuccagug

SEQ ID NO: 264734 - RNA, 22 nt, Human
gccuggggggcaugucauaaua

SEQ ID NO: 264735 - RNA, 22 nt, Human
uacagaauagaauagggacagg

SEQ ID NO: 264736 - RNA, 22 nt, Human
gggcuguggagccgcgagggcu

SEQ ID NO: 264737 - RNA, 19 nt, Human
cccagagagaucucuugcc

SEQ ID NO: 264738 - RNA, 22 nt, Human
uugaaguuguaguucagugaag

SEQ ID NO: 264739 - RNA, 22 nt, Human
aggaugagauuccagggucaau

SEQ ID NO: 264740 - RNA, 22 nt, Human
aguguuaaugguguauauuagg

SEQ ID NO: 264741 - RNA, 22 nt, Human
uucucugcagcuuaggcccagu

SEQ ID NO: 264742 - RNA, 22 nt, Human
uguacacaacgugcagguuugu

SEQ ID NO: 264743 - RNA, 22 nt, Human
gcugagaaaugcagacaugcug

SEQ ID NO: 264744 - RNA, 22 nt, Human
ucuagaauuugcguagguuaga

SEQ ID NO: 264745 - RNA, 22 nt, Human
ugagaucauugacuuguuccug

SEQ ID NO: 264746 - RNA, 18 nt, Human
cauuguuuccagaagacc

SEQ ID NO: 264747 - RNA, 21 nt, Human
auaaacugcaucaaguuggug

SEQ ID NO: 264748 - RNA, 22 nt, Human
augacacuguccuaguaaggaa

SEQ ID NO: 264749 - RNA, 22 nt, Human
uuggcucugauggggaucagga

SEQ ID NO: 264750 - RNA, 22 nt, Human
gcagcauccuuggccuccaccc

SEQ ID NO: 264751 - RNA, 22 nt, Human
augcucagggcacacucuggac

SEQ ID NO: 264752 - RNA, 20 nt, Human
cagcccuuuauccuccuaug

SEQ ID NO: 264753 - RNA, 22 nt, Human
auuacacagcgguuacuacuag

SEQ ID NO: 264754 - RNA, 22 nt, Human
auguuucaaauauauagaguug

SEQ ID NO: 264755 - RNA, 22 nt, Human
gcaguccucauccuuuagcagu

SEQ ID NO: 264756 - RNA, 22 nt, Human
uucucuuacauuuucucagccu

SEQ ID NO: 264757 - RNA, 18 nt, Human
cacaggcucccagugagg

SEQ ID NO: 264758 - RNA, 18 nt, Human
agcaguguggcaagcaga

SEQ ID NO: 264759 - RNA, 22 nt, Human
aagggagcggggagacccuaug

SEQ ID NO: 264760 - RNA, 22 nt, Human
cagcuucuccagaugacccuca

SEQ ID NO: 264761 - RNA, 22 nt, Human
gacagacagagaaugggcuuga

SEQ ID NO: 264762 - RNA, 22 nt, Human
ggcacuaggagaccuggggguc

SEQ ID NO: 264763 - RNA, 22 nt, Human
gauuuagagaauguuuuguaag

SEQ ID NO: 264764 - RNA, 22 nt, Human
uggcagaaguacacaagcaugc

SEQ ID NO: 264765 - RNA, 22 nt, Human
cugagcuguggaauaaacacug

SEQ ID NO: 264766 - RNA, 22 nt, Human
uagaggaaccaggcaggcugag

SEQ ID NO: 264767 - RNA, 22 nt, Human
caaagugccuguaccacuuugc

SEQ ID NO: 264768 - RNA, 22 nt, Human
aggaaacuuucuuuugcuucau

SEQ ID NO: 264769 - RNA, 22 nt, Human
ucugggcaguaccccucuccua

SEQ ID NO: 264770 - RNA, 22 nt, Human
agaaaauuuaaagagacacaca

SEQ ID NO: 264771 - RNA, 22 nt, Human
gaggccagaaugagucucuggg

SEQ ID NO: 264772 - RNA, 22 nt, Human
aucuuugggauccugauuuacu

SEQ ID NO: 264773 - RNA, 22 nt, Human
aaaagcagagacucuggagcua

SEQ ID NO: 264774 - RNA, 22 nt, Human
gagcuuuacuucugacuggugc

SEQ ID NO: 264775 - RNA, 22 nt, Human
agccagcaucccuucagucucc

SEQ ID NO: 264776 - RNA, 22 nt, Human
aagucuuaaccaaauaaauguu

SEQ ID NO: 264777 - RNA, 22 nt, Human
gcuccaggauaauaaaguuguu

SEQ ID NO: 264778 - RNA, 22 nt, Human
ucuccugguuuguuaaauaauu

SEQ ID NO: 264779 - RNA, 20 nt, Human
agacccuguguccuguggcc

SEQ ID NO: 264780 - RNA, 22 nt, Human
uucucagagugaccaagucuuu

SEQ ID NO: 264781 - RNA, 22 nt, Human
gcugugagugagcugccuaggc

SEQ ID NO: 264782 - RNA, 20 nt, Human
aggaggcaugaggggauuua

SEQ ID NO: 264783 - RNA, 22 nt, Human
ggcaccugguaagugcucagua

SEQ ID NO: 264784 - RNA, 22 nt, Human
acagcugugauuucuaucauga

SEQ ID NO: 264785 - RNA, 22 nt, Human
agacaggcuuggaaaaaaccuc

SEQ ID NO: 264786 - RNA, 22 nt, Human
gucaguaggaaccuagggucaa

SEQ ID NO: 264787 - RNA, 22 nt, Human
uuccauuuauucuuguccagau

SEQ ID NO: 264788 - RNA, 22 nt, Human
acagauguuagcaaugaugaug

SEQ ID NO: 264789 - RNA, 22 nt, Human
agaagaaacugucggggauauu

SEQ ID NO: 264790 - RNA, 21 nt, Human
cucuggaguuugaaggcuggg

SEQ ID NO: 264791 - RNA, 22 nt, Human
ugggccuggcccuguggaggag

SEQ ID NO: 264792 - RNA, 22 nt, Human
gcaauacaguagguuuauuggu

SEQ ID NO: 264793 - RNA, 22 nt, Human
ucuugcuaaagaccaacacauu

SEQ ID NO: 264794 - RNA, 22 nt, Human
ugauuuacccguaacuauuucu

SEQ ID NO: 264795 - RNA, 22 nt, Human
cugacuuugcucauaggucaaa

SEQ ID NO: 264796 - RNA, 22 nt, Human
aaaugcacacaccaggaaacua

SEQ ID NO: 264797 - RNA, 22 nt, Human
uccagcagaaccagagaccugg

SEQ ID NO: 264798 - RNA, 22 nt, Human
ucugaggccuugggacagaagu

SEQ ID NO: 264799 - RNA, 19 nt, Human
ucuuuagccagagcucugg

SEQ ID NO: 264800 - RNA, 22 nt, Human
ugggcaccugaggccuggcagg

SEQ ID NO: 264801 - RNA, 22 nt, Human
gcagcucccuugaacuucuccu

SEQ ID NO: 264802 - RNA, 22 nt, Human
accaggccaaaaucauauuuac

SEQ ID NO: 264803 - RNA, 22 nt, Human
gagugggggguccgucucagug

SEQ ID NO: 264804 - RNA, 22 nt, Human
uagugaaagucaaagacagcua

SEQ ID NO: 264805 - RNA, 22 nt, Human
ucagggcauggcugcacuuggc

SEQ ID NO: 264806 - RNA, 22 nt, Human
cccagacagucaagaggccugc

SEQ ID NO: 264807 - RNA, 22 nt, Human
gguggcugugagcauuauguga

SEQ ID NO: 264808 - RNA, 22 nt, Human
ucugaaagaagggcagucuuuu

SEQ ID NO: 264809 - RNA, 22 nt, Human
accuccccgggagcagccuccu

SEQ ID NO: 264810 - RNA, 22 nt, Human
uuccuaauggcaaaacauguuu

SEQ ID NO: 264811 - RNA, 22 nt, Human
uccugcagguggaugauucucu

SEQ ID NO: 264812 - RNA, 22 nt, Human
acagcaggaagcuggagggaaa

SEQ ID NO: 264813 - RNA, 22 nt, Human
uuuauugaguaucuacuaugug

SEQ ID NO: 264814 - RNA, 22 nt, Human
gagagaagaacaaugucauuca

SEQ ID NO: 264815 - RNA, 22 nt, Human
ucucagugagcuuuucuauguu

SEQ ID NO: 264816 - RNA, 20 nt, Human
uucugagaguucacagcccc

SEQ ID NO: 264817 - RNA, 22 nt, Human
cuuucucuugagcaagagcugu

SEQ ID NO: 264818 - RNA, 22 nt, Human
agggggugggaagucuagaauc

SEQ ID NO: 264819 - RNA, 22 nt, Human
gcagcaggcauggccgcccugg

SEQ ID NO: 264820 - RNA, 22 nt, Human
ggguccagauggugagaguuaa

SEQ ID NO: 264821 - RNA, 22 nt, Human
gaggcucagagaagucauggua

SEQ ID NO: 264822 - RNA, 22 nt, Human
ggugacagccgcuugcccugua

SEQ ID NO: 264823 - RNA, 22 nt, Human
uucugucuguaaacuucucaau

SEQ ID NO: 264824 - RNA, 22 nt, Human
uggccagguugggcuuugcagc

SEQ ID NO: 264825 - RNA, 19 nt, Human
cagagcagugguuccugaa

SEQ ID NO: 264826 - RNA, 22 nt, Human
caaauguguuuuuucuucuaca

SEQ ID NO: 264827 - RNA, 18 nt, Human
cuccuccacagccccugc

SEQ ID NO: 264828 - RNA, 22 nt, Human
ugcuggcuuuuugguccuugcu

SEQ ID NO: 264829 - RNA, 22 nt, Human
auucacacuguauacacaggau

SEQ ID NO: 264830 - RNA, 22 nt, Human
gguuauauaauucagugcuuuc

SEQ ID NO: 264831 - RNA, 22 nt, Human
auucaguaggucuagaauaaga

SEQ ID NO: 264832 - RNA, 22 nt, Human
uaguuuuagucccauuuuacag

SEQ ID NO: 264833 - RNA, 22 nt, Human
agucaaagaagaugguuccaaa

SEQ ID NO: 264834 - RNA, 22 nt, Human
ugaugaggcuucuuggugaaca

SEQ ID NO: 264835 - RNA, 22 nt, Human
ggaugucuggucuauuucaagu

SEQ ID NO: 264836 - RNA, 22 nt, Human
caacugguggucaaccuucugu

SEQ ID NO: 264837 - RNA, 22 nt, Human
ugcugggccaaagcaggguuuu

SEQ ID NO: 264838 - RNA, 21 nt, Human
uuagcaagucuacccauuucu

SEQ ID NO: 264839 - RNA, 22 nt, Human
uucauuccugagcccauauuua

SEQ ID NO: 264840 - RNA, 22 nt, Human
uauaauuaguaaauggcagauu

SEQ ID NO: 264841 - RNA, 22 nt, Human
uuacagggguguggaggcaauc

SEQ ID NO: 264842 - RNA, 22 nt, Human
cugacucuccugagauggggag

SEQ ID NO: 264843 - RNA, 22 nt, Human
cccugcagccuugcaugccuuc

SEQ ID NO: 264844 - RNA, 22 nt, Human
ugauggaaauaaaagcauagcu

SEQ ID NO: 264845 - RNA, 21 nt, Human
uucucuggcuucuguagcugg

SEQ ID NO: 264846 - RNA, 23 nt, Human
aggaaggagguccuaacaguauc

SEQ ID NO: 264847 - RNA, 22 nt, Human
aacaguaaaaaucauuuaguug

SEQ ID NO: 264848 - RNA, 22 nt, Human
ucuggaauuuucuagggcauca

SEQ ID NO: 264849 - RNA, 22 nt, Human
ggcaggcagauggcugcaccaa

SEQ ID NO: 264850 - RNA, 22 nt, Human
cacaggaaauauuaggagggau

SEQ ID NO: 264851 - RNA, 23 nt, Human
gacagagugagaccuugucuuac

SEQ ID NO: 264852 - RNA, 22 nt, Human
cagacagggcccugugauggua

SEQ ID NO: 264853 - RNA, 22 nt, Human
gcccaggaucugcucagaucau

SEQ ID NO: 264854 - RNA, 22 nt, Human
uuuccuuugaggguccuacacu

SEQ ID NO: 264855 - RNA, 22 nt, Human
gaagauuaaaugaagugaccug

SEQ ID NO: 264856 - RNA, 22 nt, Human
aucuugauuccauuaucuuugu

SEQ ID NO: 264857 - RNA, 22 nt, Human
ccuccuggggugaaggauggga

SEQ ID NO: 264858 - RNA, 22 nt, Human
uucuguauggaaacauccucca

SEQ ID NO: 264859 - RNA, 22 nt, Human
agucagaguuuugaggugugac

SEQ ID NO: 264860 - RNA, 22 nt, Human
cauuuacacuucuaaccacaag

SEQ ID NO: 264861 - RNA, 22 nt, Human
uuuagacacuagggaugcagug

SEQ ID NO: 264862 - RNA, 22 nt, Human
acacauucaugagugcaugcac

SEQ ID NO: 264863 - RNA, 22 nt, Human
uugccauguugccaaggcuggu

SEQ ID NO: 264864 - RNA, 22 nt, Human
guagggcauagagauguuggca

SEQ ID NO: 264865 - RNA, 22 nt, Human
gcagcugucggaaagcuaagug

SEQ ID NO: 264866 - RNA, 22 nt, Human
cugcccagaagcuuagagcuua

SEQ ID NO: 264867 - RNA, 22 nt, Human
guggaugagauaacuguagaag

SEQ ID NO: 264868 - RNA, 22 nt, Human
ucaaaacacuauuaccuuuaau

SEQ ID NO: 264869 - RNA, 22 nt, Human
ugcuugggcggccagcauggcg

SEQ ID NO: 264870 - RNA, 22 nt, Human
uacacacagaggccaugggauu

SEQ ID NO: 264871 - RNA, 22 nt, Human
agugcucccuagaguugugcaa

SEQ ID NO: 264872 - RNA, 22 nt, Human
agacagugugaguucagggugg

SEQ ID NO: 264873 - RNA, 22 nt, Human
uuucagagaaagcccaaagacu

SEQ ID NO: 264874 - RNA, 22 nt, Human
gcuucuggaagcugcuucugcc

SEQ ID NO: 264875 - RNA, 21 nt, Human
cugcugcuggggucugggcag

SEQ ID NO: 264876 - RNA, 22 nt, Human
ccuggguggcugccugccuuuc

SEQ ID NO: 264877 - RNA, 22 nt, Human
aaauggcaggcucuuugcuagu

SEQ ID NO: 264878 - RNA, 22 nt, Human
gguaaaaugcagauucuuagcc

SEQ ID NO: 264879 - RNA, 20 nt, Human
ccuggccaaugagauaggaa

SEQ ID NO: 264880 - RNA, 22 nt, Human
gagucagaauguccuccugcgg

SEQ ID NO: 264881 - RNA, 22 nt, Human
gcugcaggagauuuugagaguc

SEQ ID NO: 264882 - RNA, 22 nt, Human
agggccucuaccauccaagguu

SEQ ID NO: 264883 - RNA, 22 nt, Human
uagcaucuaacaucuuaggacu

SEQ ID NO: 264884 - RNA, 22 nt, Human
ugccaggcgugguggugcgcac

SEQ ID NO: 264885 - RNA, 22 nt, Human
ggaagcaggaggcugggguaaa

SEQ ID NO: 264886 - RNA, 22 nt, Human
cacucuaaccuccaucuuccau

SEQ ID NO: 264887 - RNA, 22 nt, Human
cucuggaggccguuggcccuua

SEQ ID NO: 264888 - RNA, 22 nt, Human
acauguguacuuuuaaggaugu

SEQ ID NO: 264889 - RNA, 18 nt, Human
acauuucuaugcuucugg

SEQ ID NO: 264890 - RNA, 22 nt, Human
ugggguggaacccuucugcugg

SEQ ID NO: 264891 - RNA, 22 nt, Human
cacagccuccuucagagagcau

SEQ ID NO: 264892 - RNA, 22 nt, Human
agaacagcaacaucagacaaag

SEQ ID NO: 264893 - RNA, 22 nt, Human
gagugcauggacuacuggcuug

SEQ ID NO: 264894 - RNA, 22 nt, Human
acagccagaucugagagaucuu

SEQ ID NO: 264895 - RNA, 22 nt, Human
gggagccagagucaccuagaga

SEQ ID NO: 264896 - RNA, 22 nt, Human
uaaagugcaggcuacucagaag

SEQ ID NO: 264897 - RNA, 22 nt, Human
ucagggagagccugucugacgu

SEQ ID NO: 264898 - RNA, 22 nt, Human
ugaggcucagaaauguaaguuu

SEQ ID NO: 264899 - RNA, 22 nt, Human
ccagucuguucucaccucugag

SEQ ID NO: 264900 - RNA, 22 nt, Human
ccuuagcauggcugugcugugu

SEQ ID NO: 264901 - RNA, 20 nt, Human
ugcuccaucuaaagugauua

SEQ ID NO: 264902 - RNA, 22 nt, Human
auaaguuugucuuuguaaagau

SEQ ID NO: 264903 - RNA, 22 nt, Human
acugugcaaugaguaauaaacu

SEQ ID NO: 264904 - RNA, 22 nt, Human
uauuauuuuagcacugaggauu

SEQ ID NO: 264905 - RNA, 18 nt, Human
gaggcagcuagcaauuuu

SEQ ID NO: 264906 - RNA, 23 nt, Human
cccugagcugguccaggcucaac

SEQ ID NO: 264907 - RNA, 22 nt, Human
uucucacuauguauguagauug

SEQ ID NO: 264908 - RNA, 22 nt, Human
uuuccuucucagggagcuucaa

SEQ ID NO: 264909 - RNA, 17 nt, Human
ucuaggagagcagagcu

SEQ ID NO: 264910 - RNA, 22 nt, Human
cagagaccccuggcaugguggu

SEQ ID NO: 264911 - RNA, 22 nt, Human
agggggcugccaaggaauguaa

SEQ ID NO: 264912 - RNA, 22 nt, Human
gggauagguuuggaagaggugg

SEQ ID NO: 264913 - RNA, 22 nt, Human
ucugcucugagagggccaucag

SEQ ID NO: 264914 - RNA, 22 nt, Human
uucugugugccagaguugugcu

SEQ ID NO: 264915 - RNA, 22 nt, Human
gagcaacacuccacauugcuag

SEQ ID NO: 264916 - RNA, 22 nt, Human
cuuucauaagggguuuuauaau

SEQ ID NO: 264917 - RNA, 23 nt, Human
cauuucaacgaauuuuccuucug

SEQ ID NO: 264918 - RNA, 22 nt, Human
cacaugaccacucuuuacuucu

SEQ ID NO: 264919 - RNA, 22 nt, Human
ccaggucuuuggccuuggcacu

SEQ ID NO: 264920 - RNA, 22 nt, Human
aguuaaaucauggccauuggaa

SEQ ID NO: 264921 - RNA, 22 nt, Human
augucacuguuguuauuguuau

SEQ ID NO: 264922 - RNA, 22 nt, Human
agugauguugacuagcuauaag

SEQ ID NO: 264923 - RNA, 19 nt, Human
ccagugcaagguaagauag

SEQ ID NO: 264924 - RNA, 22 nt, Human
ggcucuggugcccuggcuccca

SEQ ID NO: 264925 - RNA, 22 nt, Human
acagcaggcccauacuggaagg

SEQ ID NO: 264926 - RNA, 22 nt, Human
ucagagaaugugaauauuaaac

SEQ ID NO: 264927 - RNA, 22 nt, Human
ccagcuuuucagaaucugccug

SEQ ID NO: 264928 - RNA, 22 nt, Human
aggcuucucaauagguuugaag

SEQ ID NO: 264929 - RNA, 20 nt, Human
gcaggcagggaaugggggug

SEQ ID NO: 264930 - RNA, 22 nt, Human
ucacaucugugugauugucauu

SEQ ID NO: 264931 - RNA, 22 nt, Human
cuggggugucucgucugccauu

SEQ ID NO: 264932 - RNA, 22 nt, Human
uaggugucuaacaauaagugua

SEQ ID NO: 264933 - RNA, 22 nt, Human
ugucucugagaugacucccacc

SEQ ID NO: 264934 - RNA, 21 nt, Human
acauguaagagaguuucaaga

SEQ ID NO: 264935 - RNA, 22 nt, Human
cuccagggagcuuggaaagacc

SEQ ID NO: 264936 - RNA, 21 nt, Human
ggccagcucggaaggucccau

SEQ ID NO: 264937 - RNA, 22 nt, Human
agucauaugacccuucacaaac

SEQ ID NO: 264938 - RNA, 23 nt, Human
guucauuuuauugucugauugcu

SEQ ID NO: 264939 - RNA, 19 nt, Human
guacagugguaagcuauga

SEQ ID NO: 264940 - RNA, 22 nt, Human
caguuuuaucaucugugaaaug

SEQ ID NO: 264941 - RNA, 22 nt, Human
agcaggucgccgaagauagcuc

SEQ ID NO: 264942 - RNA, 22 nt, Human
ucuuuauuucugaaucccccau

SEQ ID NO: 264943 - RNA, 22 nt, Human
ccauggcuccuugcccuguagc

SEQ ID NO: 264944 - RNA, 22 nt, Human
cuucacaguauaggucccugag

SEQ ID NO: 264945 - RNA, 22 nt, Human
agcccagcaaagggagguucag

SEQ ID NO: 264946 - RNA, 22 nt, Human
cuaaaucaucauuuauguuugu

SEQ ID NO: 264947 - RNA, 22 nt, Human
auuuccugcaggggcugguggg

SEQ ID NO: 264948 - RNA, 22 nt, Human
cagcaucuccugugcagaggga

SEQ ID NO: 264949 - RNA, 22 nt, Human
ugccugaagcugcauuccuagu

SEQ ID NO: 264950 - RNA, 22 nt, Human
agcaggcaggaaugguggaaca

SEQ ID NO: 264951 - RNA, 22 nt, Human
auccaggcauucugacuucaag

SEQ ID NO: 264952 - RNA, 22 nt, Human
gagagcuccuucaggaagcuuc

SEQ ID NO: 264953 - RNA, 22 nt, Human
agugagggaugaagaacugcgg

SEQ ID NO: 264954 - RNA, 22 nt, Human
uuaguuaaaagauaauuuugga

SEQ ID NO: 264955 - RNA, 22 nt, Human
agaacuauugcaauaacaagaa

SEQ ID NO: 264956 - RNA, 18 nt, Human
agagacagcagcaaaaga

SEQ ID NO: 264957 - RNA, 22 nt, Human
acagguguggggcugugguacu

SEQ ID NO: 264958 - RNA, 22 nt, Human
agcagcagauuauggucuacau

SEQ ID NO: 264959 - RNA, 22 nt, Human
cugggucuucagcagcaggcgg

SEQ ID NO: 264960 - RNA, 21 nt, Human
acaggcuacaugcaggagcug

SEQ ID NO: 264961 - RNA, 22 nt, Human
uugcugaugguauuaugcuagu

SEQ ID NO: 264962 - RNA, 22 nt, Human
ucuuauuuuuuaaugacagaga

SEQ ID NO: 264963 - RNA, 22 nt, Human
acagguguugacucacaggccc

SEQ ID NO: 264964 - RNA, 22 nt, Human
auuuccuagccucucuugcagu

SEQ ID NO: 264965 - RNA, 23 nt, Human
ucauuccacaaauacuuaucuag

SEQ ID NO: 264966 - RNA, 22 nt, Human
gccagguucuggggagguacaa

SEQ ID NO: 264967 - RNA, 22 nt, Human
gugaagcagggaaggaaaggau

SEQ ID NO: 264968 - RNA, 20 nt, Human
ucucugcagcagaggcuggg

SEQ ID NO: 264969 - RNA, 22 nt, Human
ucugagcuccaugcaggaggcu

SEQ ID NO: 264970 - RNA, 22 nt, Human
gagcgauugcgggggucagagg

SEQ ID NO: 264971 - RNA, 22 nt, Human
ucacccagcgggcgcacacucg

SEQ ID NO: 264972 - RNA, 18 nt, Human
aggucuguggucaccagg

SEQ ID NO: 264973 - RNA, 22 nt, Human
cucaugucaggggugucaaugu

SEQ ID NO: 264974 - RNA, 22 nt, Human
auaaccugguaguauuaaaugu

SEQ ID NO: 264975 - RNA, 22 nt, Human
acaguuucuccauuuacaccuu

SEQ ID NO: 264976 - RNA, 22 nt, Human
gaacuggucaguuuagcccacu

SEQ ID NO: 264977 - RNA, 22 nt, Human
cucccaggugucccuucugcca

SEQ ID NO: 264978 - RNA, 22 nt, Human
cuguacagaagcuagagcaaau

SEQ ID NO: 264979 - RNA, 22 nt, Human
uuuggucaggguaggacaguug

SEQ ID NO: 264980 - RNA, 22 nt, Human
agacgagggcccccaggacagc

SEQ ID NO: 264981 - RNA, 21 nt, Human
auccauucuccgguuaaugag

SEQ ID NO: 264982 - RNA, 22 nt, Human
caaugaaaaugaggacuccugu

SEQ ID NO: 264983 - RNA, 20 nt, Human
ugucuccagggcugagugga

SEQ ID NO: 264984 - RNA, 22 nt, Human
aaaggccagguuggcugguauu

SEQ ID NO: 264985 - RNA, 22 nt, Human
ugacauuucagauaugguauuu

SEQ ID NO: 264986 - RNA, 22 nt, Human
agccugggguuucaguuugcac

SEQ ID NO: 264987 - RNA, 22 nt, Human
ccacugagcaguagcugcgucg

SEQ ID NO: 264988 - RNA, 22 nt, Human
uggaaacuuaucugacacgaac

SEQ ID NO: 264989 - RNA, 22 nt, Human
auggccucuagcugagaccaau

SEQ ID NO: 264990 - RNA, 17 nt, Human
uuauuuuuugggcugag

SEQ ID NO: 264991 - RNA, 22 nt, Human
cucugaagccccaaauaguccg

SEQ ID NO: 264992 - RNA, 22 nt, Human
cugggucugucacuagauaaau

SEQ ID NO: 264993 - RNA, 23 nt, Human
ggcacagaugcugagcaugugca

SEQ ID NO: 264994 - RNA, 22 nt, Human
uguauuaacauuaauaaaaugg

SEQ ID NO: 264995 - RNA, 22 nt, Human
uaaaauugcggugaauauuucc

SEQ ID NO: 264996 - RNA, 20 nt, Human
cagaaggucuaagcuuuaga

SEQ ID NO: 264997 - RNA, 22 nt, Human
uuuacauugcauuagguauuau

SEQ ID NO: 264998 - RNA, 22 nt, Human
agcagggguggaagguagcuuu

SEQ ID NO: 264999 - RNA, 22 nt, Human
cagugcucauagcuguuccucc

SEQ ID NO: 265000 - RNA, 22 nt, Human
cagcagggaagcugugcuguuu

SEQ ID NO: 265001 - RNA, 23 nt, Human
cagaucauauauccagcuguaag

SEQ ID NO: 265002 - RNA, 22 nt, Human
gccugcucagaccuagcaggcc

SEQ ID NO: 265003 - RNA, 21 nt, Human
agcagaggcagaauguaugca

SEQ ID NO: 265004 - RNA, 22 nt, Human
aguagauuuuugaauguaaguu

SEQ ID NO: 265005 - RNA, 20 nt, Human
gcagcugugcauucuuagga

SEQ ID NO: 265006 - RNA, 22 nt, Human
aagcaagcaagguguuacauau

SEQ ID NO: 265007 - RNA, 22 nt, Human
ccaggaggaaagaccagcccau

SEQ ID NO: 265008 - RNA, 22 nt, Human
ggcuuggaccagucacaguggu

SEQ ID NO: 265009 - RNA, 22 nt, Human
acaagacugugcucuaagagug

SEQ ID NO: 265010 - RNA, 20 nt, Human
augugucuguaaacaacucu

SEQ ID NO: 265011 - RNA, 22 nt, Human
gaggucuugucugauagggaaa

SEQ ID NO: 265012 - RNA, 22 nt, Human
ucucaggcaugguuuguucauc

SEQ ID NO: 265013 - RNA, 22 nt, Human
uagcugcuucagucuaggucuc

SEQ ID NO: 265014 - RNA, 22 nt, Human
ucucaggcuguguguggaggac

SEQ ID NO: 265015 - RNA, 22 nt, Human
ucuagaauggcugggcacagcu

SEQ ID NO: 265016 - RNA, 22 nt, Human
gaacuguucccucacaggcugg

SEQ ID NO: 265017 - RNA, 22 nt, Human
uggcagggagccaccggucaug

SEQ ID NO: 265018 - RNA, 22 nt, Human
ucccugcugcacucacaccuac

SEQ ID NO: 265019 - RNA, 22 nt, Human
uggcagguuuccuccucauagu

SEQ ID NO: 265020 - RNA, 22 nt, Human
aagaucagcucccgagucugag

SEQ ID NO: 265021 - RNA, 22 nt, Human
uuagaacuuaaacuucagaaag

SEQ ID NO: 265022 - RNA, 22 nt, Human
guggcacaaggcuuacacagca

SEQ ID NO: 265023 - RNA, 22 nt, Human
uucaggaaaugucugccuacca

SEQ ID NO: 265024 - RNA, 22 nt, Human
cagaucuaucuguugauggugc

SEQ ID NO: 265025 - RNA, 22 nt, Human
aauaauacuucguaaaguuguu

SEQ ID NO: 265026 - RNA, 22 nt, Human
ucucagagcuucagaaagcacc

SEQ ID NO: 265027 - RNA, 22 nt, Human
uccuagaauagugugucuggag

SEQ ID NO: 265028 - RNA, 22 nt, Human
uggaaaaaaauuggcuagcuuc

SEQ ID NO: 265029 - RNA, 20 nt, Human
gcugggcuaccacuggcccu

SEQ ID NO: 265030 - RNA, 22 nt, Human
aaggugugaagagaugggaaga

SEQ ID NO: 265031 - RNA, 22 nt, Human
ucccucagaaauucucucugaa

SEQ ID NO: 265032 - RNA, 22 nt, Human
gcccugugccagucacgcugug

SEQ ID NO: 265033 - RNA, 22 nt, Human
uuuauauuucccaggauuggcc

SEQ ID NO: 265034 - RNA, 22 nt, Human
accuccuggugcccaaguguuu

SEQ ID NO: 265035 - RNA, 22 nt, Human
ucagagagccucaggcacugcc

SEQ ID NO: 265036 - RNA, 22 nt, Human
caucaaaguugguauauuugca

SEQ ID NO: 265037 - RNA, 22 nt, Human
cucuuucugauucgcugggacc

SEQ ID NO: 265038 - RNA, 22 nt, Human
aaguuucaaauauaaaauuaca

SEQ ID NO: 265039 - RNA, 21 nt, Human
caggucuggugaacacucuca

SEQ ID NO: 265040 - RNA, 22 nt, Human
aguccaugguucugacucaucu

SEQ ID NO: 265041 - RNA, 22 nt, Human
ugcagaaauaacucauauugca

SEQ ID NO: 265042 - RNA, 22 nt, Human
gugucccagccccacaggccug

SEQ ID NO: 265043 - RNA, 22 nt, Human
uuucuauaugaggagcuaaagu

SEQ ID NO: 265044 - RNA, 22 nt, Human
ugguaagaauaggggcuuugga

SEQ ID NO: 265045 - RNA, 22 nt, Human
agugucugaugcacaguugucc

SEQ ID NO: 265046 - RNA, 22 nt, Human
aaagugcacuagaauccagauu

SEQ ID NO: 265047 - RNA, 22 nt, Human
auuuaauuuacauuugacagag

SEQ ID NO: 265048 - RNA, 22 nt, Human
gcugagcugaggcagggcuggg

SEQ ID NO: 265049 - RNA, 21 nt, Human
ugcccaugagcagaagucacc

SEQ ID NO: 265050 - RNA, 22 nt, Human
ucucccuggagcccugaagcau

SEQ ID NO: 265051 - RNA, 22 nt, Human
uggcuucucccgacacccuggc

SEQ ID NO: 265052 - RNA, 22 nt, Human
agguggcugguccaggcugcag

SEQ ID NO: 265053 - RNA, 22 nt, Human
uagguagaaauagauauuggua

SEQ ID NO: 265054 - RNA, 22 nt, Human
cagugaaaucacaacuuuaguu

SEQ ID NO: 265055 - RNA, 23 nt, Human
uuucaaauuacucugcagaugac

SEQ ID NO: 265056 - RNA, 22 nt, Human
gcagggcugggauuugagccca

SEQ ID NO: 265057 - RNA, 22 nt, Human
agcugaggcucugagagggaag

SEQ ID NO: 265058 - RNA, 22 nt, Human
uccuggaguuuguaaggugagc

SEQ ID NO: 265059 - RNA, 22 nt, Human
uggcagaugugguuugagacag

SEQ ID NO: 265060 - RNA, 22 nt, Human
acaugccaugguuguuugcugc

SEQ ID NO: 265061 - RNA, 22 nt, Human
cccugaggcaaaggcuagaguu

SEQ ID NO: 265062 - RNA, 22 nt, Human
gagcugaacgggaauuccccga

SEQ ID NO: 265063 - RNA, 22 nt, Human
gacaaaacugagaucacacugu

SEQ ID NO: 265064 - RNA, 22 nt, Human
aggcccagcuggacaaacugcu

SEQ ID NO: 265065 - RNA, 22 nt, Human
gauugucacucccuauauggua

SEQ ID NO: 265066 - RNA, 22 nt, Human
cagcugguuaucagagaggccu

SEQ ID NO: 265067 - RNA, 22 nt, Human
ccugcagguaaggcuaacugcc

SEQ ID NO: 265068 - RNA, 22 nt, Human
cacgggagacgugaucuuggac

SEQ ID NO: 265069 - RNA, 22 nt, Human
agagucuucuuuaggccauuua

SEQ ID NO: 265070 - RNA, 22 nt, Human
aagagagggacuuauuaaaguc

SEQ ID NO: 265071 - RNA, 22 nt, Human
uagcagugccaggauuuugcug

SEQ ID NO: 265072 - RNA, 22 nt, Human
uacuucauuauucuaguuuuga

SEQ ID NO: 265073 - RNA, 22 nt, Human
aaggacagagagccauuccaga

SEQ ID NO: 265074 - RNA, 22 nt, Human
uauguuuuucagacguccuaca

SEQ ID NO: 265075 - RNA, 22 nt, Human
aggagagaauuacuggguguca

SEQ ID NO: 265076 - RNA, 22 nt, Human
ccaagggaaaccgagaggcugg

SEQ ID NO: 265077 - RNA, 22 nt, Human
aacugcaaaauaaucaaguugu

SEQ ID NO: 265078 - RNA, 22 nt, Human
gccccaccgagggugcaguccu

SEQ ID NO: 265079 - RNA, 22 nt, Human
uaugcacaguuacaagaauauc

SEQ ID NO: 265080 - RNA, 22 nt, Human
agagggcuaacugggaagcagg

SEQ ID NO: 265081 - RNA, 22 nt, Human
cagcaagacaguuuccuaagug

SEQ ID NO: 265082 - RNA, 21 nt, Human
aucuggaaauucugccagaga

SEQ ID NO: 265083 - RNA, 22 nt, Human
agaaccuuucuuuagaaauuca

SEQ ID NO: 265084 - RNA, 20 nt, Human
uaggugucuuugccagcuuu

SEQ ID NO: 265085 - RNA, 22 nt, Human
uugcaguuugcuuuuaauggga

SEQ ID NO: 265086 - RNA, 22 nt, Human
cuguuuauaaauagaggggagu

SEQ ID NO: 265087 - RNA, 22 nt, Human
auucucuguagauggcuugaga

SEQ ID NO: 265088 - RNA, 17 nt, Human
agggacagcaguuuagg

SEQ ID NO: 265089 - RNA, 22 nt, Human
guuuugugaggcacccacaggu

SEQ ID NO: 265090 - RNA, 22 nt, Human
gauuuugucaaauuccaaaugu

SEQ ID NO: 265091 - RNA, 22 nt, Human
acagcuugcaugcagaggcacu

SEQ ID NO: 265092 - RNA, 23 nt, Human
uagauccuauggcugugugcaga

SEQ ID NO: 265093 - RNA, 22 nt, Human
ccaggccuagccccugagggua

SEQ ID NO: 265094 - RNA, 22 nt, Human
gcccagcagcugguggagaagg

SEQ ID NO: 265095 - RNA, 22 nt, Human
uccagaccuagggcaccccagu

SEQ ID NO: 265096 - RNA, 22 nt, Human
aaagcauuucaugucuagaaag

SEQ ID NO: 265097 - RNA, 22 nt, Human
cagucccagacccagaaggugg

SEQ ID NO: 265098 - RNA, 22 nt, Human
aaguuucugauauuguuaaagc

SEQ ID NO: 265099 - RNA, 22 nt, Human
cucuuuggccagaaaauguuuu

SEQ ID NO: 265100 - RNA, 22 nt, Human
ggcugccuccugcugggcugga

SEQ ID NO: 265101 - RNA, 22 nt, Human
uccuggcacuuugggggcucgc

SEQ ID NO: 265102 - RNA, 22 nt, Human
uucaguguggugcacaguuuug

SEQ ID NO: 265103 - RNA, 22 nt, Human
ucugggagagggaaagaagacu

SEQ ID NO: 265104 - RNA, 22 nt, Human
ccuggcugccuuguguugaucu

SEQ ID NO: 265105 - RNA, 22 nt, Human
uccagcagcccgaaggcccauc

SEQ ID NO: 265106 - RNA, 22 nt, Human
uuugacucauugauuuucucug

SEQ ID NO: 265107 - RNA, 22 nt, Human
uuaacaauagaguuucuucagg

SEQ ID NO: 265108 - RNA, 22 nt, Human
gucuucuaaguaucaaagcaga

SEQ ID NO: 265109 - RNA, 22 nt, Human
aagacagagggaagcaaugaug

SEQ ID NO: 265110 - RNA, 22 nt, Human
ucuguacuuccuuuaaacuuua

SEQ ID NO: 265111 - RNA, 22 nt, Human
agagcccagaaaguaugucaua

SEQ ID NO: 265112 - RNA, 21 nt, Human
uccuuauauuugaauacuuua

SEQ ID NO: 265113 - RNA, 22 nt, Human
aagugccaucauagcauggcug

SEQ ID NO: 265114 - RNA, 21 nt, Human
uccucugcagugagguggccu

SEQ ID NO: 265115 - RNA, 22 nt, Human
cucagagggucuccuccagaau

SEQ ID NO: 265116 - RNA, 22 nt, Human
uagaaguuaaaggaauacagaa

SEQ ID NO: 265117 - RNA, 22 nt, Human
agcugcaaaggcacacuugggc

SEQ ID NO: 265118 - RNA, 22 nt, Human
uaggcuucacuuccaguuauuc

SEQ ID NO: 265119 - RNA, 22 nt, Human
guccugagucaagugugggcag

SEQ ID NO: 265120 - RNA, 22 nt, Human
uuaguaauguguuaauaugaau

SEQ ID NO: 265121 - RNA, 22 nt, Human
gaagagguagcauuggcaggug

SEQ ID NO: 265122 - RNA, 22 nt, Human
auacagguaauuugaauaauag

SEQ ID NO: 265123 - RNA, 22 nt, Human
acaaauuuggugagaguaaaua

SEQ ID NO: 265124 - RNA, 22 nt, Human
agagcugaauucaagugcuggc

SEQ ID NO: 265125 - RNA, 22 nt, Human
cccagcagugacccagugauac

SEQ ID NO: 265126 - RNA, 22 nt, Human
uaacugguacucugguagccug

SEQ ID NO: 265127 - RNA, 22 nt, Human
gcccucagcauccucagggcca

SEQ ID NO: 265128 - RNA, 22 nt, Human
ggagccugggccuccugcccuu

SEQ ID NO: 265129 - RNA, 22 nt, Human
caguaacaugaagagacaugga

SEQ ID NO: 265130 - RNA, 22 nt, Human
ccucuuugugccugcaggcugc

SEQ ID NO: 265131 - RNA, 22 nt, Human
uuauugcaaaggaagagcuuga

SEQ ID NO: 265132 - RNA, 22 nt, Human
agccucuuauucuccaggacuu

SEQ ID NO: 265133 - RNA, 22 nt, Human
ggccacauguggcugcucguau

SEQ ID NO: 265134 - RNA, 22 nt, Human
uucucaggacuccugccugcuu

SEQ ID NO: 265135 - RNA, 22 nt, Human
cugugcaguccagcccuggaca

SEQ ID NO: 265136 - RNA, 19 nt, Human
aggcagaggcuuggcuagc

SEQ ID NO: 265137 - RNA, 22 nt, Human
uuagaauccaugguugcagugg

SEQ ID NO: 265138 - RNA, 22 nt, Human
uuucucugcugccugugucgau

SEQ ID NO: 265139 - RNA, 20 nt, Human
acaugcacguguguauauau

SEQ ID NO: 265140 - RNA, 22 nt, Human
auugaauagcugcuuguuguau

SEQ ID NO: 265141 - RNA, 22 nt, Human
acaggcaguugagguuugugug

SEQ ID NO: 265142 - RNA, 22 nt, Human
acaugccagccucagcagcagu

SEQ ID NO: 265143 - RNA, 22 nt, Human
uuccugaauugagcuuuagaaa

SEQ ID NO: 265144 - RNA, 22 nt, Human
ucugugccaucagucuccagag

SEQ ID NO: 265145 - RNA, 22 nt, Human
gcacugcuccagguguggcuug

SEQ ID NO: 265146 - RNA, 22 nt, Human
ucauuuggaagccugagagugu

SEQ ID NO: 265147 - RNA, 22 nt, Human
gucucccaucucuguccuugug

SEQ ID NO: 265148 - RNA, 22 nt, Human
ucagcuuucuauguugcuaaac

SEQ ID NO: 265149 - RNA, 22 nt, Human
uucuggcucgauucucugaccg

SEQ ID NO: 265150 - RNA, 22 nt, Human
guccuuucgagggugagugaaa

SEQ ID NO: 265151 - RNA, 22 nt, Human
aaaauuuugcccuauccuucau

SEQ ID NO: 265152 - RNA, 22 nt, Human
auguaacugaaggaaaugcaug

SEQ ID NO: 265153 - RNA, 22 nt, Human
guuuuucuagaaaucuccuccu

SEQ ID NO: 265154 - RNA, 22 nt, Human
agugacuacuggauuuguuucu

SEQ ID NO: 265155 - RNA, 22 nt, Human
cuaggaaagacacagagaguuu

SEQ ID NO: 265156 - RNA, 22 nt, Human
ugcagucuuccagcugcacaaa

SEQ ID NO: 265157 - RNA, 22 nt, Human
guguguggaaugcucauuuauu

SEQ ID NO: 265158 - RNA, 22 nt, Human
ucugacauuagauuaauuggaa

SEQ ID NO: 265159 - RNA, 22 nt, Human
caggcaggucagugaagaagga

SEQ ID NO: 265160 - RNA, 18 nt, Human
ugucucugaauuccagug

SEQ ID NO: 265161 - RNA, 22 nt, Human
gugcagaggacguggcggccuc

SEQ ID NO: 265162 - RNA, 22 nt, Human
acagguguaauuugcccgaggu

SEQ ID NO: 265163 - RNA, 22 nt, Human
caggcaccacacuaggggcuga

SEQ ID NO: 265164 - RNA, 19 nt, Human
cugggcugaggucugccuu

SEQ ID NO: 265165 - RNA, 22 nt, Human
aacccgggaggcagagguugug

SEQ ID NO: 265166 - RNA, 22 nt, Human
agggaaaggcugaugcuguggg

SEQ ID NO: 265167 - RNA, 22 nt, Human
ggaucaggcgccaugggaagug

SEQ ID NO: 265168 - RNA, 22 nt, Human
cuggaagggaaaucucuuggca

SEQ ID NO: 265169 - RNA, 22 nt, Human
ugcuuuauaacuuaguuuaugg

SEQ ID NO: 265170 - RNA, 21 nt, Human
ucagggcagugggagguuccu

SEQ ID NO: 265171 - RNA, 22 nt, Human
aguguuaagagaaaauucugcu

SEQ ID NO: 265172 - RNA, 22 nt, Human
uuucugagaaauuaaacacuuu

SEQ ID NO: 265173 - RNA, 22 nt, Human
gccuggcacucaaucaucugcu

SEQ ID NO: 265174 - RNA, 22 nt, Human
uccuggcuccugaucugucacu

SEQ ID NO: 265175 - RNA, 22 nt, Human
agccugagccccauccagcuga

SEQ ID NO: 265176 - RNA, 22 nt, Human
agcugcaacaucugcuuguccc

SEQ ID NO: 265177 - RNA, 22 nt, Human
gcacacagcuagauuaccauuc

SEQ ID NO: 265178 - RNA, 22 nt, Human
uuccugaggaggaccaggacca

SEQ ID NO: 265179 - RNA, 22 nt, Human
gaguguggugaacaggagcacc

SEQ ID NO: 265180 - RNA, 22 nt, Human
caguuugugcuaggcacuauuu

SEQ ID NO: 265181 - RNA, 22 nt, Human
uacaugcuucuauaugugaagu

SEQ ID NO: 265182 - RNA, 22 nt, Human
ucaacuaaggcacaaucucuaa

SEQ ID NO: 265183 - RNA, 22 nt, Human
uucagcagugcagacacccagu

SEQ ID NO: 265184 - RNA, 22 nt, Human
cccaguccuaaagcagacgcca

SEQ ID NO: 265185 - RNA, 22 nt, Human
ggccccagggaagaaggugguc

SEQ ID NO: 265186 - RNA, 22 nt, Human
uagcaccuuagcauuucuagug

SEQ ID NO: 265187 - RNA, 22 nt, Human
aagagcaggacagaaucagaac

SEQ ID NO: 265188 - RNA, 22 nt, Human
aggcagcuuucagugucucuca

SEQ ID NO: 265189 - RNA, 22 nt, Human
gacuuagacccugucuuuauuc

SEQ ID NO: 265190 - RNA, 22 nt, Human
aauaauaguugcaaaguguuua

SEQ ID NO: 265191 - RNA, 22 nt, Human
ugggaagggucaacagcuggaa

SEQ ID NO: 265192 - RNA, 19 nt, Human
gcugcagaggugaagaaga

SEQ ID NO: 265193 - RNA, 22 nt, Human
ucagggaggugucugccagaga

SEQ ID NO: 265194 - RNA, 22 nt, Human
uuuacagacaacuuaauagggg

SEQ ID NO: 265195 - RNA, 17 nt, Human
ugcaaacaaucacauau

SEQ ID NO: 265196 - RNA, 22 nt, Human
gcucaaaugucauggggagccu

SEQ ID NO: 265197 - RNA, 22 nt, Human
ccaaaaagcucagagauauguu

SEQ ID NO: 265198 - RNA, 19 nt, Human
uggaaacuccugauauuag

SEQ ID NO: 265199 - RNA, 22 nt, Human
gcaaaugcuaaaguguagagac

SEQ ID NO: 265200 - RNA, 22 nt, Human
uaucucuguuccaagccuuauc

SEQ ID NO: 265201 - RNA, 22 nt, Human
caaaagucuuccuauucucuua

SEQ ID NO: 265202 - RNA, 22 nt, Human
ucagaaaauaacuguuaguuug

SEQ ID NO: 265203 - RNA, 22 nt, Human
cagacacagcaauucuguguug

SEQ ID NO: 265204 - RNA, 22 nt, Human
ccucaggaaccacauugcugcu

SEQ ID NO: 265205 - RNA, 22 nt, Human
ugucaaaaugacuuuacuacag

SEQ ID NO: 265206 - RNA, 22 nt, Human
uuugguuaauuuaggcuugcau

SEQ ID NO: 265207 - RNA, 21 nt, Human
cuuggaguugguugaggaugc

SEQ ID NO: 265208 - RNA, 21 nt, Human
uuccuggggacuuccguggga

SEQ ID NO: 265209 - RNA, 22 nt, Human
ugacaaagacaaagauaugucc

SEQ ID NO: 265210 - RNA, 22 nt, Human
ccaggccugcaucugcugcgca

SEQ ID NO: 265211 - RNA, 20 nt, Human
agguggcuccugcugggggu

SEQ ID NO: 265212 - RNA, 18 nt, Human
uauauagagaaacccauu

SEQ ID NO: 265213 - RNA, 22 nt, Human
cuuuaucuguguccucuugccu

SEQ ID NO: 265214 - RNA, 22 nt, Human
agguaagggucacaguucauau

SEQ ID NO: 265215 - RNA, 22 nt, Human
uuccuccagaagcuguagggga

SEQ ID NO: 265216 - RNA, 22 nt, Human
aaacagucugaugccaucugcc

SEQ ID NO: 265217 - RNA, 22 nt, Human
cagagcucuauguucauggagg

SEQ ID NO: 265218 - RNA, 22 nt, Human
ugucgcagcugaaaaucucaau

SEQ ID NO: 265219 - RNA, 22 nt, Human
uuguuacuaagccuuuaaauag

SEQ ID NO: 265220 - RNA, 22 nt, Human
gcuguacaaauuccacaagaga

SEQ ID NO: 265221 - RNA, 22 nt, Human
ucccuccuggugaugaugcaaa

SEQ ID NO: 265222 - RNA, 22 nt, Human
ucucuguggcauccacucaacu

SEQ ID NO: 265223 - RNA, 22 nt, Human
cugguccuaaagcccuacucca

SEQ ID NO: 265224 - RNA, 22 nt, Human
accccaagacaguagaagagaa

SEQ ID NO: 265225 - RNA, 22 nt, Human
ucucccagaggaucccagugga

SEQ ID NO: 265226 - RNA, 22 nt, Human
uauugauaugcagaacugacuu

SEQ ID NO: 265227 - RNA, 22 nt, Human
ugccaggaggggacaccuccuc

SEQ ID NO: 265228 - RNA, 22 nt, Human
cagccucucuguaucucaggau

SEQ ID NO: 265229 - RNA, 22 nt, Human
ugggcaggaugcguugauucuu

SEQ ID NO: 265230 - RNA, 22 nt, Human
ugggccucuguuuccucaucug

SEQ ID NO: 265231 - RNA, 22 nt, Human
cucuagaggcuugaaugggcga

SEQ ID NO: 265232 - RNA, 21 nt, Human
auucagaguaauucaucuuua

SEQ ID NO: 265233 - RNA, 22 nt, Human
uagggcagaguccaggaugggc

SEQ ID NO: 265234 - RNA, 19 nt, Human
aaggugguuugucucugua

SEQ ID NO: 265235 - RNA, 22 nt, Human
acucagaguuuuacccagagac

SEQ ID NO: 265236 - RNA, 22 nt, Human
ugggugcaggaugagugcuggc

SEQ ID NO: 265237 - RNA, 20 nt, Human
auucacaaagccaguguugc

SEQ ID NO: 265238 - RNA, 22 nt, Human
aaguuguauauaccgcuuuaag

SEQ ID NO: 265239 - RNA, 22 nt, Human
ggcuggcaggggaugucagaug

SEQ ID NO: 265240 - RNA, 22 nt, Human
uuacagagguauguaugucucu

SEQ ID NO: 265241 - RNA, 22 nt, Human
uaaauucagugaguaauuucug

SEQ ID NO: 265242 - RNA, 22 nt, Human
aagacccuauacucagugaccc

SEQ ID NO: 265243 - RNA, 22 nt, Human
caagcauacugugagaguuuua

SEQ ID NO: 265244 - RNA, 22 nt, Human
ggcuuccuuucacuacccucag

SEQ ID NO: 265245 - RNA, 19 nt, Human
ucucaggcugggcggcugc

SEQ ID NO: 265246 - RNA, 22 nt, Human
gccuggcuugccagcccuggcg

SEQ ID NO: 265247 - RNA, 22 nt, Human
aaggagcugggagggacacaug

SEQ ID NO: 265248 - RNA, 23 nt, Human
ggacacagagauaagugagacaa

SEQ ID NO: 265249 - RNA, 22 nt, Human
gaccaggcuaguucagagcuuc

SEQ ID NO: 265250 - RNA, 22 nt, Human
acuuucaugguaguuguauucu

SEQ ID NO: 265251 - RNA, 22 nt, Human
ggucacauucugaggaaucagg

SEQ ID NO: 265252 - RNA, 23 nt, Human
caugccaguuugugcaggcagau

SEQ ID NO: 265253 - RNA, 22 nt, Human
aagcacaaugaacaucuuagau

SEQ ID NO: 265254 - RNA, 22 nt, Human
agugcugaggaaggggcccauu

SEQ ID NO: 265255 - RNA, 22 nt, Human
ggacaggcccggggagccugga

SEQ ID NO: 265256 - RNA, 22 nt, Human
cacccagagccugagagggaua

SEQ ID NO: 265257 - RNA, 22 nt, Human
acagccagugcuccgugaggac

SEQ ID NO: 265258 - RNA, 22 nt, Human
ucucaaauuuauacagaguuca

SEQ ID NO: 265259 - RNA, 22 nt, Human
ucuuuucuucuuaaugguuaau

SEQ ID NO: 265260 - RNA, 22 nt, Human
ugcauuuuacuuaccuguuagu

SEQ ID NO: 265261 - RNA, 22 nt, Human
augccuuauuccaacaaucuag

SEQ ID NO: 265262 - RNA, 23 nt, Human
uuuuccagaaucgacucuguaga

SEQ ID NO: 265263 - RNA, 22 nt, Human
ggcuggguuauuuauggccaag

SEQ ID NO: 265264 - RNA, 22 nt, Human
uccaggcugccacagugcaacg

SEQ ID NO: 265265 - RNA, 22 nt, Human
ccagauucauagaaacucauag

SEQ ID NO: 265266 - RNA, 22 nt, Human
acaggcuuuaaauuuaaaacca

SEQ ID NO: 265267 - RNA, 22 nt, Human
ccuguucacugcacaguuuccg

SEQ ID NO: 265268 - RNA, 22 nt, Human
aucuagacaucugaaacauuua

SEQ ID NO: 265269 - RNA, 21 nt, Human
auuucagagcacacaaguaaa

SEQ ID NO: 265270 - RNA, 22 nt, Human
auucuuucaaggaauaguuauu

SEQ ID NO: 265271 - RNA, 22 nt, Human
auguugaguggaugaacaaaca

SEQ ID NO: 265272 - RNA, 22 nt, Human
agcccugcgaucgugauuucuu

SEQ ID NO: 265273 - RNA, 22 nt, Human
aggagaggaaucauuauuacaa

SEQ ID NO: 265274 - RNA, 22 nt, Human
agugauucuuuaaagugguauu

SEQ ID NO: 265275 - RNA, 22 nt, Human
ggcuggcucuuaccgacagcgu

SEQ ID NO: 265276 - RNA, 22 nt, Human
gccagcagggcggagccaucua

SEQ ID NO: 265277 - RNA, 22 nt, Human
gaagaugggaaugaugaguggg

SEQ ID NO: 265278 - RNA, 22 nt, Human
cugugcugaacaauucugcauu

SEQ ID NO: 265279 - RNA, 22 nt, Human
aauguugacaguggugaucuca

SEQ ID NO: 265280 - RNA, 19 nt, Human
uguacaaggauuaugcagg

SEQ ID NO: 265281 - RNA, 22 nt, Human
gagcccagcucuaccucagacu

SEQ ID NO: 265282 - RNA, 20 nt, Human
uauagaucacaucuucuagc

SEQ ID NO: 265283 - RNA, 22 nt, Human
ggacccuuggcuucugcagauu

SEQ ID NO: 265284 - RNA, 22 nt, Human
gccucagccggcggacgccagg

SEQ ID NO: 265285 - RNA, 22 nt, Human
agcagccauagauagcaugcaa

SEQ ID NO: 265286 - RNA, 22 nt, Human
ccagaucuaaguccaaaguacu

SEQ ID NO: 265287 - RNA, 22 nt, Human
ugaaagaagugucacauugcca

SEQ ID NO: 265288 - RNA, 22 nt, Human
auucuauuuuuuaagaaguagu

SEQ ID NO: 265289 - RNA, 22 nt, Human
caaggcuauaauguugcuggaa

SEQ ID NO: 265290 - RNA, 22 nt, Human
uguagaaccuguuuauuauaga

SEQ ID NO: 265291 - RNA, 22 nt, Human
ucagcuuucucucgccaucagg

SEQ ID NO: 265292 - RNA, 21 nt, Human
agaugcagugacccacugggg

SEQ ID NO: 265293 - RNA, 22 nt, Human
uguuucaugauugcugucauuu

SEQ ID NO: 265294 - RNA, 22 nt, Human
aagaguaaaugucuaauuagga

SEQ ID NO: 265295 - RNA, 22 nt, Human
ucuuuggucagaaagauuacac

SEQ ID NO: 265296 - RNA, 22 nt, Human
aggcaggcaaccaccugggaag

SEQ ID NO: 265297 - RNA, 22 nt, Human
ccaggagcaacuugaaggcaag

SEQ ID NO: 265298 - RNA, 23 nt, Human
cuggcccuggcucugugaucaug

SEQ ID NO: 265299 - RNA, 22 nt, Human
gcccagguuucaucugcuccgu

SEQ ID NO: 265300 - RNA, 19 nt, Human
uaauauacagacccaucug

SEQ ID NO: 265301 - RNA, 22 nt, Human
uuccuucucagcccucgaggau

SEQ ID NO: 265302 - RNA, 20 nt, Human
uucaggaauaagauagcagc

SEQ ID NO: 265303 - RNA, 22 nt, Human
aaagcauuacuagacuggauuu

SEQ ID NO: 265304 - RNA, 22 nt, Human
agugauugaguguuagcagucu

SEQ ID NO: 265305 - RNA, 22 nt, Human
uggagaugccuggagauuaggg

SEQ ID NO: 265306 - RNA, 22 nt, Human
aaaguuuuauucaagcauuagu

SEQ ID NO: 265307 - RNA, 21 nt, Human
ccucuggcuugugcugugccc

SEQ ID NO: 265308 - RNA, 22 nt, Human
cucccuggggcuccuccuauuu

SEQ ID NO: 265309 - RNA, 22 nt, Human
ugagucuuuuauccugggaaug

SEQ ID NO: 265310 - RNA, 22 nt, Human
ucagguggcugguugcuggcua

SEQ ID NO: 265311 - RNA, 22 nt, Human
cuguccuggugcuggggauccc

SEQ ID NO: 265312 - RNA, 22 nt, Human
ucugagagcaggaggagcugcu

SEQ ID NO: 265313 - RNA, 22 nt, Human
cacaugacucuggcuacccaga

SEQ ID NO: 265314 - RNA, 22 nt, Human
aagaugugaacagaaccacagg

SEQ ID NO: 265315 - RNA, 20 nt, Human
cuguggaauuuuaccaugcg

SEQ ID NO: 265316 - RNA, 22 nt, Human
ugccacuggggcuaggacuguu

SEQ ID NO: 265317 - RNA, 22 nt, Human
uggcucccaaggagcuccugcc

SEQ ID NO: 265318 - RNA, 22 nt, Human
aacugaggccaagugaggaaag

SEQ ID NO: 265319 - RNA, 22 nt, Human
gggcccagcccucugcucacug

SEQ ID NO: 265320 - RNA, 22 nt, Human
ugauuucuucuaauuuccauca

SEQ ID NO: 265321 - RNA, 22 nt, Human
cuucaucuuucugagccucagu

SEQ ID NO: 265322 - RNA, 22 nt, Human
uugcuuuuaauuaaucauugcu

SEQ ID NO: 265323 - RNA, 22 nt, Human
cuggagccgcauggagcaggga

SEQ ID NO: 265324 - RNA, 22 nt, Human
acugucaaaugcaaugaacuca

SEQ ID NO: 265325 - RNA, 19 nt, Human
ccucaucuuggugugugca

SEQ ID NO: 265326 - RNA, 22 nt, Human
caacaucaguccucaugagaca

SEQ ID NO: 265327 - RNA, 22 nt, Human
cugggaaaacugugaccccugu

SEQ ID NO: 265328 - RNA, 22 nt, Human
acagacaguaaauaguguggcu

SEQ ID NO: 265329 - RNA, 22 nt, Human
cuuucagucaguuaacucagaa

SEQ ID NO: 265330 - RNA, 22 nt, Human
cguguacagucuaucuuuuuuc

SEQ ID NO: 265331 - RNA, 22 nt, Human
ucagcuuggacagcuugguuga

SEQ ID NO: 265332 - RNA, 22 nt, Human
aauguacagcugucuuuccucc

SEQ ID NO: 265333 - RNA, 22 nt, Human
agaaccuuggugagucuaaccu

SEQ ID NO: 265334 - RNA, 22 nt, Human
cacauaaucaccaaguccuuuc

SEQ ID NO: 265335 - RNA, 22 nt, Human
augaaauuaaucaacacauaca

SEQ ID NO: 265336 - RNA, 22 nt, Human
ccugagugcuuccagagucaug

SEQ ID NO: 265337 - RNA, 22 nt, Human
gaugagucacugcaggugcugg

SEQ ID NO: 265338 - RNA, 19 nt, Human
agcaggccaggcagguggc

SEQ ID NO: 265339 - RNA, 22 nt, Human
auguuuuauauuuugcagcagu

SEQ ID NO: 265340 - RNA, 22 nt, Human
uaauacuguauacugcaaauuu

SEQ ID NO: 265341 - RNA, 22 nt, Human
aaacaucucaaagagguauuug

SEQ ID NO: 265342 - RNA, 22 nt, Human
uacaaagcuuguacugugugac

SEQ ID NO: 265343 - RNA, 22 nt, Human
agcugucaggcagaacugagcu

SEQ ID NO: 265344 - RNA, 22 nt, Human
aucuccagaggagucauggucu

SEQ ID NO: 265345 - RNA, 22 nt, Human
agucuccacccaugacaguaca

SEQ ID NO: 265346 - RNA, 20 nt, Human
ugcucaggauggagaggugu

SEQ ID NO: 265347 - RNA, 22 nt, Human
ggguggcacugauaaugagacg

SEQ ID NO: 265348 - RNA, 22 nt, Human
uagcccuguccuuggccugugc

SEQ ID NO: 265349 - RNA, 22 nt, Human
aggagcaaaugaugagacagca

SEQ ID NO: 265350 - RNA, 22 nt, Human
aaauuaguacauugcaaagucc

SEQ ID NO: 265351 - RNA, 22 nt, Human
gaacacugagaaagucagcuuu

SEQ ID NO: 265352 - RNA, 22 nt, Human
uaacacauagauauuuuaacuu

SEQ ID NO: 265353 - RNA, 22 nt, Human
uguauuagaucugagaacuucu

SEQ ID NO: 265354 - RNA, 22 nt, Human
gcagucagacaggaggagcucc

SEQ ID NO: 265355 - RNA, 21 nt, Human
cucugggccauuuucuuccac

SEQ ID NO: 265356 - RNA, 17 nt, Human
acacagagauuaacaca

SEQ ID NO: 265357 - RNA, 18 nt, Human
agcaacaggaucccaggg

SEQ ID NO: 265358 - RNA, 22 nt, Human
augguuuauuagcugcacaggc

SEQ ID NO: 265359 - RNA, 22 nt, Human
agggcuacugccugccuucagg

SEQ ID NO: 265360 - RNA, 22 nt, Human
uuggaaaagcguucucuguagc

SEQ ID NO: 265361 - RNA, 22 nt, Human
acagacagacagagaacuauuc

SEQ ID NO: 265362 - RNA, 22 nt, Human
ugcaagaggauuguaucaauaa

SEQ ID NO: 265363 - RNA, 22 nt, Human
cagauucugaagucuagcugcu

SEQ ID NO: 265364 - RNA, 22 nt, Human
uuugaaccugagcuucugcaug

SEQ ID NO: 265365 - RNA, 22 nt, Human
guguacaguaagugaaucuagg

SEQ ID NO: 265366 - RNA, 22 nt, Human
ccugugggcgcagcuggaguca

SEQ ID NO: 265367 - RNA, 22 nt, Human
uaaggcuuagaagcuaucugcu

SEQ ID NO: 265368 - RNA, 22 nt, Human
ugccauacuauaaggcugucaa

SEQ ID NO: 265369 - RNA, 20 nt, Human
guuaggagguuggacaugga

SEQ ID NO: 265370 - RNA, 22 nt, Human
gacuguggucuguucuccaggu

SEQ ID NO: 265371 - RNA, 22 nt, Human
uuccauauuggaaggcacaggc

SEQ ID NO: 265372 - RNA, 22 nt, Human
agacuuagugaguucuaaguuu

SEQ ID NO: 265373 - RNA, 22 nt, Human
gcucugaggagccaagaaugug

SEQ ID NO: 265374 - RNA, 22 nt, Human
uugguuuagcaacuuccugugu

SEQ ID NO: 265375 - RNA, 22 nt, Human
cuuuggaacauacugcugagcu

SEQ ID NO: 265376 - RNA, 22 nt, Human
ugugaauauacuuaaugccacu

SEQ ID NO: 265377 - RNA, 22 nt, Human
ccucucccgggugccgcugggc

SEQ ID NO: 265378 - RNA, 22 nt, Human
ggucaaaguugaagaagggcau

SEQ ID NO: 265379 - RNA, 22 nt, Human
gaggacaaggccuugcaauucu

SEQ ID NO: 265380 - RNA, 22 nt, Human
caugucuggguauaugcauaug

SEQ ID NO: 265381 - RNA, 22 nt, Human
uggaccugcuggaugggcaggu

SEQ ID NO: 265382 - RNA, 19 nt, Human
ggcagcucuugucuucugc

SEQ ID NO: 265383 - RNA, 22 nt, Human
ucaggaggccugaguagcucua

SEQ ID NO: 265384 - RNA, 20 nt, Human
cuaaacucugcagauuuagu

SEQ ID NO: 265385 - RNA, 22 nt, Human
caagacuucaccgcucugugcu

SEQ ID NO: 265386 - RNA, 22 nt, Human
agaugaagaugccacuaagacc

SEQ ID NO: 265387 - RNA, 22 nt, Human
agagaaggucacuaaggaccca

SEQ ID NO: 265388 - RNA, 22 nt, Human
cugggcaggagggcucuaugga

SEQ ID NO: 265389 - RNA, 22 nt, Human
ggcagacuguaauaggagaauu

SEQ ID NO: 265390 - RNA, 22 nt, Human
cucucuggaccucaacuauuuu

SEQ ID NO: 265391 - RNA, 20 nt, Human
uggguccugcacauucucca

SEQ ID NO: 265392 - RNA, 22 nt, Human
aaagauuaaaucaaauugguca

SEQ ID NO: 265393 - RNA, 22 nt, Human
gcuuuauguaaguccaaaggca

SEQ ID NO: 265394 - RNA, 22 nt, Human
uucacacagaaucugaggagcu

SEQ ID NO: 265395 - RNA, 22 nt, Human
ucaaaucaccaaacucacuggc

SEQ ID NO: 265396 - RNA, 22 nt, Human
gcugggagcccuggucugcucc

SEQ ID NO: 265397 - RNA, 22 nt, Human
aggcacugaaagguggccagag

SEQ ID NO: 265398 - RNA, 22 nt, Human
gaugaaaaauugcugugucaua

SEQ ID NO: 265399 - RNA, 22 nt, Human
gcugaggccccagggugauggg

SEQ ID NO: 265400 - RNA, 22 nt, Human
uuuccaaaggcuaaacucaguu

SEQ ID NO: 265401 - RNA, 22 nt, Human
ugauaucugaaguguauaaaca

SEQ ID NO: 265402 - RNA, 22 nt, Human
caggaggaaaugugacccugcu

SEQ ID NO: 265403 - RNA, 22 nt, Human
gggcugccaagccugccugccu

SEQ ID NO: 265404 - RNA, 22 nt, Human
uauauguagauuguaccaaugu

SEQ ID NO: 265405 - RNA, 22 nt, Human
ucacuugacuuuccagucuugg

SEQ ID NO: 265406 - RNA, 22 nt, Human
ucagaauaaguuaugaaaugaa

SEQ ID NO: 265407 - RNA, 22 nt, Human
agccugauuuugauaauuauau

SEQ ID NO: 265408 - RNA, 22 nt, Human
aucuguguaugugaccuuaucu

SEQ ID NO: 265409 - RNA, 22 nt, Human
ccccuccuggccacacugucag

SEQ ID NO: 265410 - RNA, 22 nt, Human
uauacacauguguguauucaua

SEQ ID NO: 265411 - RNA, 21 nt, Human
agcaacucugacuagaugagg

SEQ ID NO: 265412 - RNA, 23 nt, Human
uguguccuuaacuguauauacua

SEQ ID NO: 265413 - RNA, 22 nt, Human
ggagaggaaaugccagcacuuc

SEQ ID NO: 265414 - RNA, 22 nt, Human
acugucuguacuucuugcaagg

SEQ ID NO: 265415 - RNA, 22 nt, Human
uguuucuuauccaaguggucug

SEQ ID NO: 265416 - RNA, 22 nt, Human
uucaacucuucaagaucacauc

SEQ ID NO: 265417 - RNA, 22 nt, Human
cacuugaauggcauuguuccuu

SEQ ID NO: 265418 - RNA, 22 nt, Human
guccuuggagucaggcaaggcu

SEQ ID NO: 265419 - RNA, 21 nt, Human
aacugcaaaucuuagacugca

SEQ ID NO: 265420 - RNA, 22 nt, Human
gaugauuccuuuguucauugug

SEQ ID NO: 265421 - RNA, 22 nt, Human
ucugcccuuggcucucuuguug

SEQ ID NO: 265422 - RNA, 22 nt, Human
gaagauuaccugagaccacuug

SEQ ID NO: 265423 - RNA, 22 nt, Human
cccugggacccgcugcagaggc

SEQ ID NO: 265424 - RNA, 22 nt, Human
gggcacagcugcuacccagugc

SEQ ID NO: 265425 - RNA, 22 nt, Human
ugugccugugacagcgaccugg

SEQ ID NO: 265426 - RNA, 22 nt, Human
ucugcugcugcagcuacacuau

SEQ ID NO: 265427 - RNA, 22 nt, Human
uggagcugggaguccugggcug

SEQ ID NO: 265428 - RNA, 22 nt, Human
cagaucaagcuguauggucaga

SEQ ID NO: 265429 - RNA, 21 nt, Human
ucuggcagcaguuuguugagu

SEQ ID NO: 265430 - RNA, 22 nt, Human
acaguuuauguaaagcugccaa

SEQ ID NO: 265431 - RNA, 22 nt, Human
ugaugacaguguuacagcucca

SEQ ID NO: 265432 - RNA, 22 nt, Human
uagaaaugauugguugagcucu

SEQ ID NO: 265433 - RNA, 22 nt, Human
gaggagagaacauuccuccaua

SEQ ID NO: 265434 - RNA, 18 nt, Human
gagcccugagucugcaca

SEQ ID NO: 265435 - RNA, 22 nt, Human
agccaaagaucagugugcaagu

SEQ ID NO: 265436 - RNA, 22 nt, Human
ccaggugugauuucaucugagg

SEQ ID NO: 265437 - RNA, 22 nt, Human
cuguguguccucggacgaguuu

SEQ ID NO: 265438 - RNA, 22 nt, Human
augaguacauugggaucaaaga

SEQ ID NO: 265439 - RNA, 22 nt, Human
agguggggaggagugucucuuu

SEQ ID NO: 265440 - RNA, 22 nt, Human
ucagcuggagauccuuguugug

SEQ ID NO: 265441 - RNA, 22 nt, Human
auauguauugagugccaacugu

SEQ ID NO: 265442 - RNA, 22 nt, Human
agccagucggggccaugcuggg

SEQ ID NO: 265443 - RNA, 22 nt, Human
ggguccaggcguggcccagaug

SEQ ID NO: 265444 - RNA, 22 nt, Human
ucagagcuccuaagggcugauu

SEQ ID NO: 265445 - RNA, 22 nt, Human
cucucagguagagcccaagaau

SEQ ID NO: 265446 - RNA, 22 nt, Human
ucuuugauuuuguuacuaagac

SEQ ID NO: 265447 - RNA, 22 nt, Human
guugaugaaaaugaauugcaug

SEQ ID NO: 265448 - RNA, 22 nt, Human
auguccuguuuuggcuugcucu

SEQ ID NO: 265449 - RNA, 22 nt, Human
cuccugccugugggacugagga

SEQ ID NO: 265450 - RNA, 22 nt, Human
cccagacagugauuuacuuaau

SEQ ID NO: 265451 - RNA, 22 nt, Human
gcaaggagacuguagggccaag

SEQ ID NO: 265452 - RNA, 22 nt, Human
cucugcccgcggaugccacguc

SEQ ID NO: 265453 - RNA, 22 nt, Human
cauuacaaaguuauaaacaguu

SEQ ID NO: 265454 - RNA, 23 nt, Human
agagagaguuugugucagguacc

SEQ ID NO: 265455 - RNA, 22 nt, Human
auaacacuaaauguauguaaca

SEQ ID NO: 265456 - RNA, 22 nt, Human
aaucuaagggaaauuggagaug

SEQ ID NO: 265457 - RNA, 22 nt, Human
uucagccuguucaugcuguugc

SEQ ID NO: 265458 - RNA, 22 nt, Human
ugccagaagugcuuuauaagug

SEQ ID NO: 265459 - RNA, 22 nt, Human
auugcuuuucagacaaugaggc

SEQ ID NO: 265460 - RNA, 22 nt, Human
cugcacagcuggccagggagag

SEQ ID NO: 265461 - RNA, 22 nt, Human
cuagagaaaauguuaauacagu

SEQ ID NO: 265462 - RNA, 22 nt, Human
acaaaaaccguggauucagcau

SEQ ID NO: 265463 - RNA, 22 nt, Human
agaaucauuagagagaaaacuu

SEQ ID NO: 265464 - RNA, 22 nt, Human
ucugggcacugcugagccugua

SEQ ID NO: 265465 - RNA, 22 nt, Human
agacccugucaguguuaggaaa

SEQ ID NO: 265466 - RNA, 22 nt, Human
agaaaguuuggggcugggcacg

SEQ ID NO: 265467 - RNA, 22 nt, Human
cucccugaguuuguggcuaagu

SEQ ID NO: 265468 - RNA, 22 nt, Human
ugagacagucccaugaucugca

SEQ ID NO: 265469 - RNA, 22 nt, Human
gauucuuugacaggguguuggg

SEQ ID NO: 265470 - RNA, 22 nt, Human
ugcugcagcagugcgggcagcu

SEQ ID NO: 265471 - RNA, 22 nt, Human
cauugaaaccuaacauaggcug

SEQ ID NO: 265472 - RNA, 19 nt, Human
ugcauaaauuauauacuuu

SEQ ID NO: 265473 - RNA, 22 nt, Human
ccggucccaggugccccgguga

SEQ ID NO: 265474 - RNA, 17 nt, Human
acagagguuauacagac

SEQ ID NO: 265475 - RNA, 21 nt, Human
aggaaaggaaguccccagggu

SEQ ID NO: 265476 - RNA, 22 nt, Human
cacacaggaaaauuggaauuaa

SEQ ID NO: 265477 - RNA, 22 nt, Human
acagggccauuggaggauuaua

SEQ ID NO: 265478 - RNA, 22 nt, Human
ggcagcaacucggagagaagag

SEQ ID NO: 265479 - RNA, 22 nt, Human
ggggcaggagcccuucuucagc

SEQ ID NO: 265480 - RNA, 22 nt, Human
caggagcccagaguccucagcu

SEQ ID NO: 265481 - RNA, 22 nt, Human
caugaauuuuaagacuguuuuu

SEQ ID NO: 265482 - RNA, 22 nt, Human
acccggagucggagguugcagu

SEQ ID NO: 265483 - RNA, 22 nt, Human
uaaaguguccuagcuaggaggc

SEQ ID NO: 265484 - RNA, 22 nt, Human
cugccagaagguuccugcugca

SEQ ID NO: 265485 - RNA, 22 nt, Human
ggccaugccugugggugcaggc

SEQ ID NO: 265486 - RNA, 22 nt, Human
uuggaaaggagauucuauugug

SEQ ID NO: 265487 - RNA, 22 nt, Human
ucuguucauacagaguauagua

SEQ ID NO: 265488 - RNA, 22 nt, Human
cagcagguccugggcguggccu

SEQ ID NO: 265489 - RNA, 22 nt, Human
cuggaggcuggcuuccccuggc

SEQ ID NO: 265490 - RNA, 18 nt, Human
acaggccucaguccugca

SEQ ID NO: 265491 - RNA, 22 nt, Human
acauuucucauucuccccuaac

SEQ ID NO: 265492 - RNA, 22 nt, Human
cuggcuggaggugagucacuga

SEQ ID NO: 265493 - RNA, 22 nt, Human
gcgguccaggagcgcagguccu

SEQ ID NO: 265494 - RNA, 21 nt, Human
caugugucuuguguuacugcu

SEQ ID NO: 265495 - RNA, 22 nt, Human
cugggccucauccccagaguuu

SEQ ID NO: 265496 - RNA, 22 nt, Human
gaggacacggccuuuuggaaaa

SEQ ID NO: 265497 - RNA, 18 nt, Human
agguucugacaguccaaa

SEQ ID NO: 265498 - RNA, 22 nt, Human
aucauacagaaccugagcacuu

SEQ ID NO: 265499 - RNA, 22 nt, Human
acucuuuacuuaaacucuaagu

SEQ ID NO: 265500 - RNA, 22 nt, Human
gauggcagcagcagccagggau

SEQ ID NO: 265501 - RNA, 22 nt, Human
augcugggaaguccuaaccaca

SEQ ID NO: 265502 - RNA, 22 nt, Human
uuucuaagaugugguuucaagg

SEQ ID NO: 265503 - RNA, 22 nt, Human
acuagaaugcaagcuccacaag

SEQ ID NO: 265504 - RNA, 22 nt, Human
uaauuaguguccagcuucugcu

SEQ ID NO: 265505 - RNA, 22 nt, Human
cucugccaucuuggagcucaag

SEQ ID NO: 265506 - RNA, 22 nt, Human
ggccagaggccauccuccugcu

SEQ ID NO: 265507 - RNA, 22 nt, Human
uuuggacaaacagaauagagcu

SEQ ID NO: 265508 - RNA, 21 nt, Human
ucuagaagagguugagaauau

SEQ ID NO: 265509 - RNA, 22 nt, Human
ucaaugaggugauugcuguccu

SEQ ID NO: 265510 - RNA, 22 nt, Human
agugugagauuaaaccgaauca

SEQ ID NO: 265511 - RNA, 22 nt, Human
acagcacagagugguauggcug

SEQ ID NO: 265512 - RNA, 22 nt, Human
uuugcuuucuguugaacagagu

SEQ ID NO: 265513 - RNA, 22 nt, Human
aagcaggcgagggccuggagca

SEQ ID NO: 265514 - RNA, 22 nt, Human
acuuugaaggggaacauuuuaa

SEQ ID NO: 265515 - RNA, 22 nt, Human
gcaagaacgaauccuacuugcu

SEQ ID NO: 265516 - RNA, 22 nt, Human
aggaauguuaguucuguauaca

SEQ ID NO: 265517 - RNA, 22 nt, Human
uguguacagcaggauuucucaa

SEQ ID NO: 265518 - RNA, 22 nt, Human
uuccugaauauaaagacacuag

SEQ ID NO: 265519 - RNA, 22 nt, Human
gcucaaagaggccuccaaaucc

SEQ ID NO: 265520 - RNA, 22 nt, Human
uccugcagccaagggucaucga

SEQ ID NO: 265521 - RNA, 22 nt, Human
uguuagaaauuauuaguaauau

SEQ ID NO: 265522 - RNA, 22 nt, Human
ggauuaagaccugucaguacac

SEQ ID NO: 265523 - RNA, 22 nt, Human
uccaaacgggagccaaaugagc

SEQ ID NO: 265524 - RNA, 22 nt, Human
acaggugucugcaaguuacugg

SEQ ID NO: 265525 - RNA, 20 nt, Human
cucucuggaaggugggagcc

SEQ ID NO: 265526 - RNA, 22 nt, Human
uggcaggcagugugggagcugg

SEQ ID NO: 265527 - RNA, 18 nt, Human
cuucucccaucuuggcca

SEQ ID NO: 265528 - RNA, 22 nt, Human
aaaguaucugaccgauuauaaa

SEQ ID NO: 265529 - RNA, 22 nt, Human
cucugugguaaaauagcaguau

SEQ ID NO: 265530 - RNA, 22 nt, Human
agaguuacugcagagaugaaua

SEQ ID NO: 265531 - RNA, 22 nt, Human
ugcaggaaacagaggcucaaau

SEQ ID NO: 265532 - RNA, 22 nt, Human
gaagcagagccuaaggcagaca

SEQ ID NO: 265533 - RNA, 22 nt, Human
uauugguauaggcauugaaacu

SEQ ID NO: 265534 - RNA, 22 nt, Human
cucagagauauagucccugcuu

SEQ ID NO: 265535 - RNA, 22 nt, Human
ugagccguggucucugagggug

SEQ ID NO: 265536 - RNA, 22 nt, Human
ucucugggaucagguggcccag

SEQ ID NO: 265537 - RNA, 21 nt, Human
ugaggccucuccugggcuggc

SEQ ID NO: 265538 - RNA, 22 nt, Human
ugauugacuuuagaauagcacu

SEQ ID NO: 265539 - RNA, 22 nt, Human
cuagaaauacaggcacgugcca

SEQ ID NO: 265540 - RNA, 22 nt, Human
gagugaguagcuacaguuuuua

SEQ ID NO: 265541 - RNA, 22 nt, Human
cuagagcuuucugcugguguug

SEQ ID NO: 265542 - RNA, 22 nt, Human
cugagguggcgccucucuuuaa

SEQ ID NO: 265543 - RNA, 22 nt, Human
cuggcaggagcuguggccguag

SEQ ID NO: 265544 - RNA, 22 nt, Human
acuacauuucucaguaccugaa

SEQ ID NO: 265545 - RNA, 18 nt, Human
uucauguuggcuuaggga

SEQ ID NO: 265546 - RNA, 22 nt, Human
acagauggcaccuuuuugcugu

SEQ ID NO: 265547 - RNA, 22 nt, Human
cuguccucuguccucagcagga

SEQ ID NO: 265548 - RNA, 20 nt, Human
gggaggccccagaguccagg

SEQ ID NO: 265549 - RNA, 22 nt, Human
caggcccugggcaggaucagcc

SEQ ID NO: 265550 - RNA, 22 nt, Human
augucuuuauaaauguauaaug

SEQ ID NO: 265551 - RNA, 23 nt, Human
uccuccuggauacaaagggaaca

SEQ ID NO: 265552 - RNA, 22 nt, Human
acaucucuuauaaacucucuga

SEQ ID NO: 265553 - RNA, 22 nt, Human
acuagaaagcacuaagcuaggc

SEQ ID NO: 265554 - RNA, 22 nt, Human
uggaaagacauucagccgcugg

SEQ ID NO: 265555 - RNA, 22 nt, Human
agcacuuuccuggcaaaugugg

SEQ ID NO: 265556 - RNA, 22 nt, Human
ugugucagcauccuuugggaca

SEQ ID NO: 265557 - RNA, 22 nt, Human
aagcacuuuaugucaauguccu

SEQ ID NO: 265558 - RNA, 22 nt, Human
agccaggaucacccggggcugu

SEQ ID NO: 265559 - RNA, 22 nt, Human
gcuggcuccucuguccucacgg

SEQ ID NO: 265560 - RNA, 22 nt, Human
caaagccauagaguagauaaga

SEQ ID NO: 265561 - RNA, 22 nt, Human
guaaacaucagccacucuauuu

SEQ ID NO: 265562 - RNA, 22 nt, Human
auccuggcaagcagaggagaac

SEQ ID NO: 265563 - RNA, 20 nt, Human
gaaauucucguauuaguuua

SEQ ID NO: 265564 - RNA, 23 nt, Human
ccagcucauccauuaccucucuu

SEQ ID NO: 265565 - RNA, 22 nt, Human
agcagcagggcucugcccgugc

SEQ ID NO: 265566 - RNA, 22 nt, Human
uuagacauuaaaugccauuuaa

SEQ ID NO: 265567 - RNA, 22 nt, Human
acccagggccacagcccgcagu

SEQ ID NO: 265568 - RNA, 22 nt, Human
gccagucuucauauucauggug

SEQ ID NO: 265569 - RNA, 22 nt, Human
gugcauuugugcaugcacaugu

SEQ ID NO: 265570 - RNA, 22 nt, Human
uggucaggcugcucugcggcgu

SEQ ID NO: 265571 - RNA, 21 nt, Human
gauuaaauuuaagcuacaugc

SEQ ID NO: 265572 - RNA, 22 nt, Human
ugcccuggaaccaucuacaguc

SEQ ID NO: 265573 - RNA, 22 nt, Human
gaauagcuguaggcuagugucu

SEQ ID NO: 265574 - RNA, 22 nt, Human
gaaaguuacagaaaccauuagu

SEQ ID NO: 265575 - RNA, 22 nt, Human
cagcuguguaugagagcaugcu

SEQ ID NO: 265576 - RNA, 22 nt, Human
cagcaaucgggugauaugcaau

SEQ ID NO: 265577 - RNA, 21 nt, Human
aaaggccauaaucacggagca

SEQ ID NO: 265578 - RNA, 22 nt, Human
uuucccaguucccugcucuaua

SEQ ID NO: 265579 - RNA, 22 nt, Human
ugcccugaggcacuccauccau

SEQ ID NO: 265580 - RNA, 22 nt, Human
uccuggcaaagauguugguguu

SEQ ID NO: 265581 - RNA, 22 nt, Human
acaggccuuaggagagaugggg

SEQ ID NO: 265582 - RNA, 22 nt, Human
uucacauucagaaaaagcccgu

SEQ ID NO: 265583 - RNA, 22 nt, Human
ugugucaauuuucauuccuacu

SEQ ID NO: 265584 - RNA, 19 nt, Human
agcccccagacagcaggcc

SEQ ID NO: 265585 - RNA, 22 nt, Human
ccugcucuccauacacuuucua

SEQ ID NO: 265586 - RNA, 22 nt, Human
ucacaaauagcuauauuaagga

SEQ ID NO: 265587 - RNA, 22 nt, Human
ggcauguuucaucacaucaaga

SEQ ID NO: 265588 - RNA, 22 nt, Human
uugaaaggugcugugugcugau

SEQ ID NO: 265589 - RNA, 19 nt, Human
aggcacagguugucuggac

SEQ ID NO: 265590 - RNA, 22 nt, Human
cagcauuucaggaggcugaggu

SEQ ID NO: 265591 - RNA, 22 nt, Human
ccacugucagaggggcugugcc

SEQ ID NO: 265592 - RNA, 22 nt, Human
gcauggccuugcuguaguggua

SEQ ID NO: 265593 - RNA, 22 nt, Human
cagaggccaggcugccugacug

SEQ ID NO: 265594 - RNA, 22 nt, Human
cuacagcuguguguuuaugugc

SEQ ID NO: 265595 - RNA, 22 nt, Human
cugggcccaggcggcucucgga

SEQ ID NO: 265596 - RNA, 22 nt, Human
caugccauuugguggauugaga

SEQ ID NO: 265597 - RNA, 22 nt, Human
uggcugagaaguucugguggga

SEQ ID NO: 265598 - RNA, 22 nt, Human
guguuacuuaccugggacagca

SEQ ID NO: 265599 - RNA, 22 nt, Human
aaucuuuuaggggauccugagg

SEQ ID NO: 265600 - RNA, 22 nt, Human
agcuuacaguucaaugacaaag

SEQ ID NO: 265601 - RNA, 22 nt, Human
uauaauuuuagaagagauggaa

SEQ ID NO: 265602 - RNA, 22 nt, Human
gaggcauaaguagaagagauug

SEQ ID NO: 265603 - RNA, 22 nt, Human
cucucugucuuggcauuugguc

SEQ ID NO: 265604 - RNA, 22 nt, Human
gccuguguggaugggccccugg

SEQ ID NO: 265605 - RNA, 22 nt, Human
ccuccugucuccuuccuauauu

SEQ ID NO: 265606 - RNA, 22 nt, Human
uucauguuggauucacugugag

SEQ ID NO: 265607 - RNA, 22 nt, Human
auaaaaaggacagauguggucu

SEQ ID NO: 265608 - RNA, 22 nt, Human
gccaggcuccccggaucccugg

SEQ ID NO: 265609 - RNA, 22 nt, Human
aggguccaucaaggacugcaca

SEQ ID NO: 265610 - RNA, 22 nt, Human
gcugggcuggaaggccaaggca

SEQ ID NO: 265611 - RNA, 22 nt, Human
uacauguaauuuucauaguaag

SEQ ID NO: 265612 - RNA, 22 nt, Human
agccagagcagggaauuggaca

SEQ ID NO: 265613 - RNA, 22 nt, Human
agcuaaaugugaaaugucaacc

SEQ ID NO: 265614 - RNA, 22 nt, Human
ugggggugugccagggaccucc

SEQ ID NO: 265615 - RNA, 22 nt, Human
aggaaacucugagcggaccagc

SEQ ID NO: 265616 - RNA, 22 nt, Human
ugccgugucccauugugcucug

SEQ ID NO: 265617 - RNA, 21 nt, Human
ugucacauugucccugcugcu

SEQ ID NO: 265618 - RNA, 21 nt, Human
ugagucuuuugcacaaggaau

SEQ ID NO: 265619 - RNA, 22 nt, Human
guccugggcaugcagggcuuuc

SEQ ID NO: 265620 - RNA, 22 nt, Human
aguccaggccuccucuuuuccu

SEQ ID NO: 265621 - RNA, 22 nt, Human
uaaauuauggcuggcagagcag

SEQ ID NO: 265622 - RNA, 22 nt, Human
gagaaugggaaugaaaguagca

SEQ ID NO: 265623 - RNA, 22 nt, Human
cuggagugacuuuguuccuuuu

SEQ ID NO: 265624 - RNA, 22 nt, Human
uauguuacaaaguuuuucuaaa

SEQ ID NO: 265625 - RNA, 22 nt, Human
uaaaucuuuaggaagcucaaac

SEQ ID NO: 265626 - RNA, 22 nt, Human
uaggaaauggcucaguuacugc

SEQ ID NO: 265627 - RNA, 22 nt, Human
aaggcugaggcagugaggcaga

SEQ ID NO: 265628 - RNA, 21 nt, Human
ccugggccaaauucccuggac

SEQ ID NO: 265629 - RNA, 17 nt, Human
uccuggccuggugugug

SEQ ID NO: 265630 - RNA, 22 nt, Human
uuccuggggacuuaccgucauu

SEQ ID NO: 265631 - RNA, 22 nt, Human
ccuucucccucugagaggaacc

SEQ ID NO: 265632 - RNA, 22 nt, Human
agggcagacuaggauggaagug

SEQ ID NO: 265633 - RNA, 22 nt, Human
cugugggcugaaagugcucccg

SEQ ID NO: 265634 - RNA, 22 nt, Human
uauuucccagggagcaacaagc

SEQ ID NO: 265635 - RNA, 22 nt, Human
ccagaauagaaggcagcuguca

SEQ ID NO: 265636 - RNA, 22 nt, Human
acaggcugacuuccugccaugu

SEQ ID NO: 265637 - RNA, 22 nt, Human
auggcuuuucacagaggguucu

SEQ ID NO: 265638 - RNA, 22 nt, Human
aaaugcagauuuugaugcagca

SEQ ID NO: 265639 - RNA, 22 nt, Human
acuguaagguaaggauaaaacc

SEQ ID NO: 265640 - RNA, 22 nt, Human
uuuaccuggauucuuacuuccu

SEQ ID NO: 265641 - RNA, 22 nt, Human
agucccagaucuacaggaggga

SEQ ID NO: 265642 - RNA, 21 nt, Human
aggagccagccugucagucua

SEQ ID NO: 265643 - RNA, 22 nt, Human
augcccugugacucuccuggac

SEQ ID NO: 265644 - RNA, 22 nt, Human
uauacuuaugcuaaaaaauguu

SEQ ID NO: 265645 - RNA, 22 nt, Human
acuucccacacccuguuuucuc

SEQ ID NO: 265646 - RNA, 22 nt, Human
uuuacaggguucaagaaugaaa

SEQ ID NO: 265647 - RNA, 22 nt, Human
gcugccaggcccuggggcuaug

SEQ ID NO: 265648 - RNA, 22 nt, Human
ccuguauuugcaacuuuucuua

SEQ ID NO: 265649 - RNA, 22 nt, Human
agucauuucccauucuucauau

SEQ ID NO: 265650 - RNA, 22 nt, Human
uggccucugugggagcugagca

SEQ ID NO: 265651 - RNA, 22 nt, Human
uuugcauuaguuuagauuucaa

SEQ ID NO: 265652 - RNA, 22 nt, Human
cacagagaucggaacagaagua

SEQ ID NO: 265653 - RNA, 22 nt, Human
uauuugcaggcuuuugucaugg

SEQ ID NO: 265654 - RNA, 22 nt, Human
agacuccaggagggaggcugcu

SEQ ID NO: 265655 - RNA, 22 nt, Human
cagucccaucucccagguggcu

SEQ ID NO: 265656 - RNA, 22 nt, Human
ccauaaucuggcuuugagagag

SEQ ID NO: 265657 - RNA, 22 nt, Human
aggcagcugaccacaguaugau

SEQ ID NO: 265658 - RNA, 22 nt, Human
cuucuguggauguuggaugcau

SEQ ID NO: 265659 - RNA, 22 nt, Human
uaaaugacauucuuaagucuug

SEQ ID NO: 265660 - RNA, 22 nt, Human
agccacugugugaccagcuguc

SEQ ID NO: 265661 - RNA, 22 nt, Human
caggcuuggguucucugaguua

SEQ ID NO: 265662 - RNA, 22 nt, Human
gaggcaggguguugauuacaga

SEQ ID NO: 265663 - RNA, 22 nt, Human
aggcaugacuuuggcugaagaa

SEQ ID NO: 265664 - RNA, 22 nt, Human
uacuuucauggguuuucuuuau

SEQ ID NO: 265665 - RNA, 17 nt, Human
uuugauagaaucagagu

SEQ ID NO: 265666 - RNA, 19 nt, Human
auucagcauucugcacuuc

SEQ ID NO: 265667 - RNA, 22 nt, Human
ccugucuggccaccagggcgau

SEQ ID NO: 265668 - RNA, 22 nt, Human
acauuucuaucauccuguaaug

SEQ ID NO: 265669 - RNA, 22 nt, Human
gcugcagcucgccuuccggccu

SEQ ID NO: 265670 - RNA, 22 nt, Human
acugucugugccagaugcuggg

SEQ ID NO: 265671 - RNA, 22 nt, Human
uaacugaacaucucaaaucaag

SEQ ID NO: 265672 - RNA, 22 nt, Human
cuugugcaauugacauugaauc

SEQ ID NO: 265673 - RNA, 22 nt, Human
acaugcauacacguacauaccu

SEQ ID NO: 265674 - RNA, 22 nt, Human
gaggccagugaaauguuauaaa

SEQ ID NO: 265675 - RNA, 22 nt, Human
agagcaauggcauccagcugau

SEQ ID NO: 265676 - RNA, 22 nt, Human
aaugacagagcacugaacuugg

SEQ ID NO: 265677 - RNA, 22 nt, Human
acacaggacagggauguguuuu

SEQ ID NO: 265678 - RNA, 20 nt, Human
ugcauuaaguggcauugagc

SEQ ID NO: 265679 - RNA, 22 nt, Human
uaguuuccauguuauacaguuu

SEQ ID NO: 265680 - RNA, 22 nt, Human
auuauuaaagcuuaggucuuau

SEQ ID NO: 265681 - RNA, 22 nt, Human
uuaaauuagucaagcuucucug

SEQ ID NO: 265682 - RNA, 22 nt, Human
ccaguccauggauucccaaggu

SEQ ID NO: 265683 - RNA, 22 nt, Human
cccaggucucccugcagcccug

SEQ ID NO: 265684 - RNA, 22 nt, Human
uuacaguuguucuaucagcaug

SEQ ID NO: 265685 - RNA, 22 nt, Human
gagacacaagacgcaacucugu

SEQ ID NO: 265686 - RNA, 22 nt, Human
acagccagaagucaggguggga

SEQ ID NO: 265687 - RNA, 22 nt, Human
ugcauuaugcuacccagaagcu

SEQ ID NO: 265688 - RNA, 22 nt, Human
gagagggguuugccauccuaug

SEQ ID NO: 265689 - RNA, 22 nt, Human
aggcaacaaggguagucaguga

SEQ ID NO: 265690 - RNA, 22 nt, Human
caguugauguuuagacucugca

SEQ ID NO: 265691 - RNA, 22 nt, Human
cagguuggggacuuaggaugac

SEQ ID NO: 265692 - RNA, 22 nt, Human
agcuggggcauuuauccacuaa

SEQ ID NO: 265693 - RNA, 22 nt, Human
cugaggcuuguccucucagcuu

SEQ ID NO: 265694 - RNA, 22 nt, Human
cucugggcugaauggcugaacc

SEQ ID NO: 265695 - RNA, 22 nt, Human
aacacucaauuuacaaacucug

SEQ ID NO: 265696 - RNA, 22 nt, Human
gacacaguucuguucuaguagg

SEQ ID NO: 265697 - RNA, 22 nt, Human
gcucuagcccauuuccugcuug

SEQ ID NO: 265698 - RNA, 22 nt, Human
caugugucuuuauggagccaca

SEQ ID NO: 265699 - RNA, 22 nt, Human
aggccucagccugccaggccug

SEQ ID NO: 265700 - RNA, 22 nt, Human
uagcuuaacagcaaaacuguug

SEQ ID NO: 265701 - RNA, 22 nt, Human
ggggaacaccgggcagaggcgc

SEQ ID NO: 265702 - RNA, 22 nt, Human
cucauuuauccaaaagccaguu

SEQ ID NO: 265703 - RNA, 21 nt, Human
gcagaugggagucaucaggcu

SEQ ID NO: 265704 - RNA, 22 nt, Human
aaaucucauuauuuauaccaua

SEQ ID NO: 265705 - RNA, 22 nt, Human
uagggaugaagaugguauuucu

SEQ ID NO: 265706 - RNA, 22 nt, Human
ggggcccagggcagcagugcag

SEQ ID NO: 265707 - RNA, 22 nt, Human
uauguacaugauuucauuugcu

SEQ ID NO: 265708 - RNA, 22 nt, Human
uuauuaggaacucaggauuuuu

SEQ ID NO: 265709 - RNA, 22 nt, Human
acauucuaacauuguacagaua

SEQ ID NO: 265710 - RNA, 22 nt, Human
cuacaucucaccuuccaggaca

SEQ ID NO: 265711 - RNA, 22 nt, Human
uuuuggaaucauuuacagagca

SEQ ID NO: 265712 - RNA, 22 nt, Human
aacagucuaaauuauacccuuu

SEQ ID NO: 265713 - RNA, 22 nt, Human
uaguuaaaauaauggagauguu

SEQ ID NO: 265714 - RNA, 22 nt, Human
uccugccagcuggggcugcuuc

SEQ ID NO: 265715 - RNA, 22 nt, Human
uucuuucucaacaugaauguuu

SEQ ID NO: 265716 - RNA, 22 nt, Human
gcacuucuggccuggccugugu

SEQ ID NO: 265717 - RNA, 21 nt, Human
cugcaucugagucauuaugcc

SEQ ID NO: 265718 - RNA, 22 nt, Human
cacuucucugauaaucucaguu

SEQ ID NO: 265719 - RNA, 20 nt, Human
ucccaagggcugagaggauc

SEQ ID NO: 265720 - RNA, 22 nt, Human
gcuuuacaaguggugcagauua

SEQ ID NO: 265721 - RNA, 22 nt, Human
ccuguccuccggagcgggcugu

SEQ ID NO: 265722 - RNA, 22 nt, Human
uaguaguaauuguuaucuuauu

SEQ ID NO: 265723 - RNA, 22 nt, Human
cccagccuuugcuuccugguuc

SEQ ID NO: 265724 - RNA, 22 nt, Human
aguaacaagugccaacguuaga

SEQ ID NO: 265725 - RNA, 23 nt, Human
agcaccaggaacagugugguccu

SEQ ID NO: 265726 - RNA, 23 nt, Human
ucugagaagguuucagccagacu

SEQ ID NO: 265727 - RNA, 22 nt, Human
caggcagcucgaugccuuguug

SEQ ID NO: 265728 - RNA, 22 nt, Human
uuuaacuuaaucugcuugauga

SEQ ID NO: 265729 - RNA, 22 nt, Human
ugaaggcugguaguuugggcug

SEQ ID NO: 265730 - RNA, 22 nt, Human
cauacuuuugcccugacauucu

SEQ ID NO: 265731 - RNA, 22 nt, Human
caauuucaugccauguauugcu

SEQ ID NO: 265732 - RNA, 22 nt, Human
uccugggaugacuuuugaaaug

SEQ ID NO: 265733 - RNA, 22 nt, Human
augggacacacaaggaaguaaa

SEQ ID NO: 265734 - RNA, 18 nt, Human
uccaggcuccaggcuaac

SEQ ID NO: 265735 - RNA, 22 nt, Human
ccucccugucuaccuguugugg

SEQ ID NO: 265736 - RNA, 22 nt, Human
agacauuuugcauucccugaag

SEQ ID NO: 265737 - RNA, 22 nt, Human
cacacaugucucuccaugcucu

SEQ ID NO: 265738 - RNA, 22 nt, Human
auuucugauaaacguaagcugc

SEQ ID NO: 265739 - RNA, 22 nt, Human
agagcuggguggacuuguaguu

SEQ ID NO: 265740 - RNA, 22 nt, Human
ggccuuccuggcggcucagggu

SEQ ID NO: 265741 - RNA, 22 nt, Human
caaggaaaagaaguauuucaga

SEQ ID NO: 265742 - RNA, 19 nt, Human
auguucuauccuccaaguu

SEQ ID NO: 265743 - RNA, 22 nt, Human
ggcccugggacacaacaccgaa

SEQ ID NO: 265744 - RNA, 22 nt, Human
acuguccucgaaguaccugugc

SEQ ID NO: 265745 - RNA, 22 nt, Human
uggagcugguucuggggaagcu

SEQ ID NO: 265746 - RNA, 22 nt, Human
uggcuucuaaaguuucuuuuag

SEQ ID NO: 265747 - RNA, 22 nt, Human
gaaagugcuuagagugugguau

SEQ ID NO: 265748 - RNA, 22 nt, Human
agugcaugccuuccuguggaug

SEQ ID NO: 265749 - RNA, 22 nt, Human
aguaauaauuuauauuagggag

SEQ ID NO: 265750 - RNA, 22 nt, Human
ucuccagguggggucaccuuuu

SEQ ID NO: 265751 - RNA, 22 nt, Human
aggaagugcagggggaaguacu

SEQ ID NO: 265752 - RNA, 22 nt, Human
gaaaugugugacaaguuucaau

SEQ ID NO: 265753 - RNA, 22 nt, Human
agcagcaggcuagggaacugcu

SEQ ID NO: 265754 - RNA, 17 nt, Human
uucaaugauuaaugcau

SEQ ID NO: 265755 - RNA, 19 nt, Human
gacaggacgaagggaaguu

SEQ ID NO: 265756 - RNA, 22 nt, Human
gaggugucugcuguguucaaag

SEQ ID NO: 265757 - RNA, 19 nt, Human
gagcaacauauguaaacuc

SEQ ID NO: 265758 - RNA, 22 nt, Human
ucuuccagcaaugugaaaucac

SEQ ID NO: 265759 - RNA, 22 nt, Human
uuuggaaugguaccuucaguug

SEQ ID NO: 265760 - RNA, 22 nt, Human
gauggaggaaaaguuggaaugc

SEQ ID NO: 265761 - RNA, 22 nt, Human
ugauuuacuucuggauaaaucc

SEQ ID NO: 265762 - RNA, 22 nt, Human
uuagaaacuuuggaggauagau

SEQ ID NO: 265763 - RNA, 23 nt, Human
acagugugguggacaaggagcag

SEQ ID NO: 265764 - RNA, 22 nt, Human
ccagagggccuuuggaguuauc

SEQ ID NO: 265765 - RNA, 22 nt, Human
ggaggcacuucccgucucagcc

SEQ ID NO: 265766 - RNA, 22 nt, Human
cagaaagcaagccauucacugu

SEQ ID NO: 265767 - RNA, 22 nt, Human
uuagauaauguuauuguaauuu

SEQ ID NO: 265768 - RNA, 22 nt, Human
uguucuuugcuguugauguaga

SEQ ID NO: 265769 - RNA, 22 nt, Human
cuaggcagacugagcucuaggg

SEQ ID NO: 265770 - RNA, 22 nt, Human
uuucuauuggcgucacuguugu

SEQ ID NO: 265771 - RNA, 22 nt, Human
aggaauguaacaggaguaaaaa

SEQ ID NO: 265772 - RNA, 22 nt, Human
uaguuugucaaccacugucaca

SEQ ID NO: 265773 - RNA, 22 nt, Human
auuguacagaugagguaaguga

SEQ ID NO: 265774 - RNA, 22 nt, Human
ucugugucugcagaaguucagc

SEQ ID NO: 265775 - RNA, 22 nt, Human
uaaugcacagaauugacauggg

SEQ ID NO: 265776 - RNA, 22 nt, Human
caccagcgacugugaccagcaa

SEQ ID NO: 265777 - RNA, 22 nt, Human
uauauugucucugccuugucug

SEQ ID NO: 265778 - RNA, 22 nt, Human
uaaggcauucucaugcugugaa

SEQ ID NO: 265779 - RNA, 19 nt, Human
caacugcccccucaaacau

SEQ ID NO: 265780 - RNA, 22 nt, Human
acuguucuucccauuuauauug

SEQ ID NO: 265781 - RNA, 22 nt, Human
ccuagaacacaaccuauauuag

SEQ ID NO: 265782 - RNA, 22 nt, Human
caggucugcagacagggccaug

SEQ ID NO: 265783 - RNA, 22 nt, Human
ggucagcaucugguugagggca

SEQ ID NO: 265784 - RNA, 22 nt, Human
uuuaguuauugcacagaauuag

SEQ ID NO: 265785 - RNA, 20 nt, Human
acauguacagacagguuucu

SEQ ID NO: 265786 - RNA, 22 nt, Human
ucugagagagcaccuauccacu

SEQ ID NO: 265787 - RNA, 18 nt, Human
uccugcagcuucuaugua

SEQ ID NO: 265788 - RNA, 21 nt, Human
cuggcccagggaucugcauuu

SEQ ID NO: 265789 - RNA, 22 nt, Human
cuuccuggcaaagcaaucagag

SEQ ID NO: 265790 - RNA, 22 nt, Human
caggccugugacaccgugucug

SEQ ID NO: 265791 - RNA, 22 nt, Human
ugcagggccuucuagaccaugg

SEQ ID NO: 265792 - RNA, 21 nt, Human
uauacaugugugcauacgugu

SEQ ID NO: 265793 - RNA, 22 nt, Human
uuacaguguuacuugaugucca

SEQ ID NO: 265794 - RNA, 22 nt, Human
ugugccauuucuauucugcagc

SEQ ID NO: 265795 - RNA, 22 nt, Human
agacauagaaaaucauuaggaa

SEQ ID NO: 265796 - RNA, 22 nt, Human
ucacaacaggaaggaccagcug

SEQ ID NO: 265797 - RNA, 22 nt, Human
caggcucagcaggagccugacc

SEQ ID NO: 265798 - RNA, 22 nt, Human
acagccaggaggaacucaguga

SEQ ID NO: 265799 - RNA, 23 nt, Human
auaaauuacuaucucccuagagc

SEQ ID NO: 265800 - RNA, 20 nt, Human
uggcuccuggcuccucccuc

SEQ ID NO: 265801 - RNA, 22 nt, Human
uguuggggucaggagcuagccu

SEQ ID NO: 265802 - RNA, 16 nt, Human
ccucugggauguuugc

SEQ ID NO: 265803 - RNA, 22 nt, Human
gcaggugguggggcuaugaucu

SEQ ID NO: 265804 - RNA, 22 nt, Human
gcuggaggauggacuggaagaa

SEQ ID NO: 265805 - RNA, 22 nt, Human
ucuccaaaucaaucaauaugaa

SEQ ID NO: 265806 - RNA, 19 nt, Human
uguguucauucaucagagg

SEQ ID NO: 265807 - RNA, 22 nt, Human
aggaaugucgucauaaacauga

SEQ ID NO: 265808 - RNA, 22 nt, Human
uccuuauaguugucuuugaacc

SEQ ID NO: 265809 - RNA, 22 nt, Human
gaacaaauucucaucaacuugu

SEQ ID NO: 265810 - RNA, 17 nt, Human
uccuggcaguccccugg

SEQ ID NO: 265811 - RNA, 22 nt, Human
auaguacaaucaguuaauuagu

SEQ ID NO: 265812 - RNA, 22 nt, Human
uccaggcugggcugaagggugc

SEQ ID NO: 265813 - RNA, 22 nt, Human
acauguaagacuagcuuaaagu

SEQ ID NO: 265814 - RNA, 22 nt, Human
aagacagaagugauuugaugug

SEQ ID NO: 265815 - RNA, 22 nt, Human
aggugucuggauggguguccuu

SEQ ID NO: 265816 - RNA, 22 nt, Human
aaugugaaaccgcacagaauaa

SEQ ID NO: 265817 - RNA, 22 nt, Human
agauggcaggcccugugggggu

SEQ ID NO: 265818 - RNA, 22 nt, Human
uuagaaagaacuuuagauauca

SEQ ID NO: 265819 - RNA, 22 nt, Human
uaacacugcuucauuuuggaga

SEQ ID NO: 265820 - RNA, 22 nt, Human
acucuuauaguauugguuauua

SEQ ID NO: 265821 - RNA, 22 nt, Human
ggagcccucaccggcgagugcc

SEQ ID NO: 265822 - RNA, 22 nt, Human
gggcucugggucgugucuccau

SEQ ID NO: 265823 - RNA, 22 nt, Human
ggcccaguguaccccaggcagu

SEQ ID NO: 265824 - RNA, 22 nt, Human
uccaagaagucaucuaaacugu

SEQ ID NO: 265825 - RNA, 22 nt, Human
aagauuuucagugccuaaaaca

SEQ ID NO: 265826 - RNA, 22 nt, Human
ggcaggcaucaucaguugauca

SEQ ID NO: 265827 - RNA, 22 nt, Human
gagcaguggugguguguuagag

SEQ ID NO: 265828 - RNA, 22 nt, Human
gagaaggccaggaacccagugu

SEQ ID NO: 265829 - RNA, 22 nt, Human
cucucugaugucaggucgcuga

SEQ ID NO: 265830 - RNA, 22 nt, Human
ugucauuuccugaaugcugagu

SEQ ID NO: 265831 - RNA, 22 nt, Human
gaggaagaagggauuagaacuc

SEQ ID NO: 265832 - RNA, 22 nt, Human
gucuuuauuacaaauccuuuuc

SEQ ID NO: 265833 - RNA, 22 nt, Human
ucaggcuugcgauggaagucac

SEQ ID NO: 265834 - RNA, 22 nt, Human
agacucuuggucauuggcauua

SEQ ID NO: 265835 - RNA, 22 nt, Human
ugcuuaaacauccagacaguau

SEQ ID NO: 265836 - RNA, 22 nt, Human
ggcuuguccuucugguugucuu

SEQ ID NO: 265837 - RNA, 22 nt, Human
caauacacuaaacuucucugaa

SEQ ID NO: 265838 - RNA, 17 nt, Human
gccucugcuugugucau

SEQ ID NO: 265839 - RNA, 22 nt, Human
ccaggagcaccaggccugugcc

SEQ ID NO: 265840 - RNA, 22 nt, Human
aaauggcaguagaaaagaaucc

SEQ ID NO: 265841 - RNA, 22 nt, Human
aagccaaaggcuccagugaccu

SEQ ID NO: 265842 - RNA, 22 nt, Human
cuucccuucugugcagggcaga

SEQ ID NO: 265843 - RNA, 22 nt, Human
gcucagcuggaccaucguguuu

SEQ ID NO: 265844 - RNA, 22 nt, Human
ucauauuuauauguuggcacag

SEQ ID NO: 265845 - RNA, 22 nt, Human
gaggaagcagggcuuggcugag

SEQ ID NO: 265846 - RNA, 22 nt, Human
aggcugcucugcgaagucagcu

SEQ ID NO: 265847 - RNA, 22 nt, Human
gaaguugauagaguacaugauu

SEQ ID NO: 265848 - RNA, 22 nt, Human
guggcagaacuaugugauugcu

SEQ ID NO: 265849 - RNA, 22 nt, Human
acagcuggcaggggggcaugaa

SEQ ID NO: 265850 - RNA, 22 nt, Human
cccugcagagagugcuuuugug

SEQ ID NO: 265851 - RNA, 22 nt, Human
ugccacagaggugaagcccacu

SEQ ID NO: 265852 - RNA, 21 nt, Human
gaagagaguccucauccugag

SEQ ID NO: 265853 - RNA, 22 nt, Human
agaaguauuuggcuaaaagaca

SEQ ID NO: 265854 - RNA, 22 nt, Human
cucccuggugacucccaaagcu

SEQ ID NO: 265855 - RNA, 21 nt, Human
ugaauuucgguauggcuauaa

SEQ ID NO: 265856 - RNA, 22 nt, Human
uguccucacaggaaugaacuuu

SEQ ID NO: 265857 - RNA, 22 nt, Human
cguggcuggggaggucagccag

SEQ ID NO: 265858 - RNA, 23 nt, Human
uccuccaaucucauggcccuuaa

SEQ ID NO: 265859 - RNA, 22 nt, Human
cuggcagggugggcuuugcuuu

SEQ ID NO: 265860 - RNA, 22 nt, Human
caucaaagggccuguggugcag

SEQ ID NO: 265861 - RNA, 22 nt, Human
gucuggagagcugagcagaguu

SEQ ID NO: 265862 - RNA, 22 nt, Human
aauggcuucugaagcacacuuu

SEQ ID NO: 265863 - RNA, 22 nt, Human
aaggccagacaggaccacaucu

SEQ ID NO: 265864 - RNA, 21 nt, Human
aaagugguaaggauuauuuug

SEQ ID NO: 265865 - RNA, 22 nt, Human
ugagcaccuacuguauuccagg

SEQ ID NO: 265866 - RNA, 22 nt, Human
gcuuucugaagcaguguuucuc

SEQ ID NO: 265867 - RNA, 22 nt, Human
uuccaggauggcaauaaugaau

SEQ ID NO: 265868 - RNA, 22 nt, Human
ucaugaauauugaaugcuucau

SEQ ID NO: 265869 - RNA, 22 nt, Human
ucuuccugcuuuggugaggcuu

SEQ ID NO: 265870 - RNA, 22 nt, Human
uauuuuagguaauauccauugu

SEQ ID NO: 265871 - RNA, 22 nt, Human
ccaggaucuguacaccucugag

SEQ ID NO: 265872 - RNA, 22 nt, Human
aauaagauuacugguugucuga

SEQ ID NO: 265873 - RNA, 22 nt, Human
cauuuucaugaguuucuguuca

SEQ ID NO: 265874 - RNA, 22 nt, Human
ccagcaucagcacccaaggagc

SEQ ID NO: 265875 - RNA, 22 nt, Human
ucucaggcugacauugggacuc

SEQ ID NO: 265876 - RNA, 22 nt, Human
ucugggcccugagauguucuuc

SEQ ID NO: 265877 - RNA, 22 nt, Human
cugugccuggggggcagagcug

SEQ ID NO: 265878 - RNA, 22 nt, Human
ggcugggagcuggacaggccgg

SEQ ID NO: 265879 - RNA, 22 nt, Human
acaguuaaggaaauggagguuc

SEQ ID NO: 265880 - RNA, 22 nt, Human
ugaggcaguauucuccauucca

SEQ ID NO: 265881 - RNA, 22 nt, Human
ggugcugccuauagucugaaac

SEQ ID NO: 265882 - RNA, 22 nt, Human
ugcagcagguauggcaagcucc

SEQ ID NO: 265883 - RNA, 22 nt, Human
ugggcaaagucacauacaugau

SEQ ID NO: 265884 - RNA, 22 nt, Human
acaggucugugugcacagugcu

SEQ ID NO: 265885 - RNA, 22 nt, Human
cauuucagugucuugugaugaa

SEQ ID NO: 265886 - RNA, 22 nt, Human
aggccaggcgagacacccggcu

SEQ ID NO: 265887 - RNA, 22 nt, Human
cauugcaacuucaaacuccugg

SEQ ID NO: 265888 - RNA, 22 nt, Human
ucaggaaacuacaguugaacua

SEQ ID NO: 265889 - RNA, 22 nt, Human
ugaaaucaugaacaagguaggu

SEQ ID NO: 265890 - RNA, 23 nt, Human
ucacaggggccagcgcucugugg

SEQ ID NO: 265891 - RNA, 22 nt, Human
cagcaggucaugaaagaaaacc

SEQ ID NO: 265892 - RNA, 23 nt, Human
aaggcauuggcuucucucauuuc

SEQ ID NO: 265893 - RNA, 22 nt, Human
ucugagcuauguaagacuugga

SEQ ID NO: 265894 - RNA, 22 nt, Human
agaugaagauaucugcaggggc

SEQ ID NO: 265895 - RNA, 22 nt, Human
cuaccugguacauagaaauguu

SEQ ID NO: 265896 - RNA, 22 nt, Human
uuaguguuuaaagguuucagag

SEQ ID NO: 265897 - RNA, 22 nt, Human
aauaguuugaauuuaucagaug

SEQ ID NO: 265898 - RNA, 22 nt, Human
ggcacagagaggcccuggaagg

SEQ ID NO: 265899 - RNA, 22 nt, Human
acucagagauauggugguugau

SEQ ID NO: 265900 - RNA, 22 nt, Human
gggcuucuauucaagucuguuu

SEQ ID NO: 265901 - RNA, 22 nt, Human
cagccugggcuccagagucccu

SEQ ID NO: 265902 - RNA, 22 nt, Human
ggugcugaggccuuggcaggga

SEQ ID NO: 265903 - RNA, 22 nt, Human
uucuggaaaagaaaguuaagau

SEQ ID NO: 265904 - RNA, 22 nt, Human
caacugguaaucuccacgguca

SEQ ID NO: 265905 - RNA, 22 nt, Human
ucaugccaaacugaacacaguu

SEQ ID NO: 265906 - RNA, 22 nt, Human
acccaggcuggagugcaguguc

SEQ ID NO: 265907 - RNA, 22 nt, Human
ucagguguguggcucuggacca

SEQ ID NO: 265908 - RNA, 22 nt, Human
cagcaagagacuguucucuaag

SEQ ID NO: 265909 - RNA, 22 nt, Human
uaaauuguuuucuagaaguugu

SEQ ID NO: 265910 - RNA, 22 nt, Human
gugcuggcugccaggaggcugc

SEQ ID NO: 265911 - RNA, 22 nt, Human
uacaagcuuuuguguauaaaug

SEQ ID NO: 265912 - RNA, 22 nt, Human
agcuggugccugcuuuugugug

SEQ ID NO: 265913 - RNA, 22 nt, Human
gaaugcaugugaagcaaagaau

SEQ ID NO: 265914 - RNA, 22 nt, Human
ccuggcaagugggcucccagau

SEQ ID NO: 265915 - RNA, 22 nt, Human
ucagcaggugcuuuguuuacuc

SEQ ID NO: 265916 - RNA, 22 nt, Human
caccuacuuugugcagauuuua

SEQ ID NO: 265917 - RNA, 22 nt, Human
ucccaaggccaggcaucuagaa

SEQ ID NO: 265918 - RNA, 22 nt, Human
uggguaaacugggucuggagag

SEQ ID NO: 265919 - RNA, 22 nt, Human
gaggaagcuuuugaucgcccag

SEQ ID NO: 265920 - RNA, 22 nt, Human
uuucuccacuucucuugccaac

SEQ ID NO: 265921 - RNA, 22 nt, Human
cagcuacaggacgggcaucugc

SEQ ID NO: 265922 - RNA, 22 nt, Human
ucaggccugcaaggagaguccc

SEQ ID NO: 265923 - RNA, 22 nt, Human
acugccuucaaacagcgccacc

SEQ ID NO: 265924 - RNA, 22 nt, Human
uaauuuacuugcaaauaacaau

SEQ ID NO: 265925 - RNA, 22 nt, Human
ugcaauuuucagaaauuccaaa

SEQ ID NO: 265926 - RNA, 22 nt, Human
agcuccugccaacacugauggg

SEQ ID NO: 265927 - RNA, 22 nt, Human
cuccaugaauuugagcuuugug

SEQ ID NO: 265928 - RNA, 22 nt, Human
aguuuuucugggaggcacugcu

SEQ ID NO: 265929 - RNA, 22 nt, Human
uuauuguuagugagacuguaga

SEQ ID NO: 265930 - RNA, 22 nt, Human
augcauucagcggaaugcuuag

SEQ ID NO: 265931 - RNA, 22 nt, Human
gcacagccagcaucugagggau

SEQ ID NO: 265932 - RNA, 22 nt, Human
ucaaucacguguuccauguucu

SEQ ID NO: 265933 - RNA, 22 nt, Human
caguagacacauuaauauggaa

SEQ ID NO: 265934 - RNA, 22 nt, Human
cuuugcauacaauuuuuagaaa

SEQ ID NO: 265935 - RNA, 22 nt, Human
uucucuggggacuugguuggag

SEQ ID NO: 265936 - RNA, 22 nt, Human
uuccuuguugaaaaugucugca

SEQ ID NO: 265937 - RNA, 22 nt, Human
cggcuucucgggucggauuccg

SEQ ID NO: 265938 - RNA, 22 nt, Human
auaaaacuuauuagaauugugu

SEQ ID NO: 265939 - RNA, 22 nt, Human
uucccuuuguuaaauuggaaga

SEQ ID NO: 265940 - RNA, 22 nt, Human
agccuugccugggaaacugggu

SEQ ID NO: 265941 - RNA, 22 nt, Human
gucuuauaguacaauuugaagu

SEQ ID NO: 265942 - RNA, 22 nt, Human
ugagcagggagcugggcugagc

SEQ ID NO: 265943 - RNA, 17 nt, Human
gcaaggaaguucuuugc

SEQ ID NO: 265944 - RNA, 22 nt, Human
cuugcuuuccaaaugacucacu

SEQ ID NO: 265945 - RNA, 22 nt, Human
gauccacaggaaccaaaacgca

SEQ ID NO: 265946 - RNA, 22 nt, Human
gaggccuggugcuguguccaca

SEQ ID NO: 265947 - RNA, 22 nt, Human
uauucacauguacauaugcuca

SEQ ID NO: 265948 - RNA, 22 nt, Human
ggaggccaugggcagaaucuuu

SEQ ID NO: 265949 - RNA, 19 nt, Human
cucagcaagauagaaaugg

SEQ ID NO: 265950 - RNA, 22 nt, Human
ugagcaggauucgccucuugca

SEQ ID NO: 265951 - RNA, 20 nt, Human
cacugcccuccagccugagc

SEQ ID NO: 265952 - RNA, 22 nt, Human
accauucugguccauacuguuc

SEQ ID NO: 265953 - RNA, 22 nt, Human
cucucugcuguauccuuaggcu

SEQ ID NO: 265954 - RNA, 22 nt, Human
acagccuggacuggcucucugc

SEQ ID NO: 265955 - RNA, 22 nt, Human
auccuacaaagcagggcuaugg

SEQ ID NO: 265956 - RNA, 22 nt, Human
uuggauguuugaaaucacguac

SEQ ID NO: 265957 - RNA, 22 nt, Human
uucuccagcacauuuucuuuga

SEQ ID NO: 265958 - RNA, 22 nt, Human
gauuuauuuuuaaucagcaggg

SEQ ID NO: 265959 - RNA, 17 nt, Human
uuucuggaaugggcaaa

SEQ ID NO: 265960 - RNA, 22 nt, Human
ugggugggagcacccugucugg

SEQ ID NO: 265961 - RNA, 22 nt, Human
cuaagaaauguugugaaugcca

SEQ ID NO: 265962 - RNA, 22 nt, Human
guucacaauuuuuacugauugg

SEQ ID NO: 265963 - RNA, 22 nt, Human
gucucucugcuaggccuccagu

SEQ ID NO: 265964 - RNA, 22 nt, Human
cuggcucugagcccaccuccag

SEQ ID NO: 265965 - RNA, 22 nt, Human
aggagaccuucaccacuuccac

SEQ ID NO: 265966 - RNA, 22 nt, Human
agcucaggucucaggagguguc

SEQ ID NO: 265967 - RNA, 22 nt, Human
guuuccuauguccauugaggga

SEQ ID NO: 265968 - RNA, 22 nt, Human
aggcuccacccuacagagcucc

SEQ ID NO: 265969 - RNA, 22 nt, Human
gcauuuuagaauauuggagcaa

SEQ ID NO: 265970 - RNA, 22 nt, Human
ucagacagggcuucucaaacuu

SEQ ID NO: 265971 - RNA, 22 nt, Human
uacccaggggcugagcagaggu

SEQ ID NO: 265972 - RNA, 22 nt, Human
ugagacagcagauuagcaauga

SEQ ID NO: 265973 - RNA, 22 nt, Human
cagaagcagauucuaaagcaag

SEQ ID NO: 265974 - RNA, 22 nt, Human
cagcccuggaacagcugacuca

SEQ ID NO: 265975 - RNA, 22 nt, Human
cacaaauguaguagcuuaaaac

SEQ ID NO: 265976 - RNA, 21 nt, Human
gagugggacaugggagugguu

SEQ ID NO: 265977 - RNA, 22 nt, Human
ccugccagcaucuucagccccu

SEQ ID NO: 265978 - RNA, 22 nt, Human
cugacucccuccccaaagcugg

SEQ ID NO: 265979 - RNA, 22 nt, Human
uagauacauacauuuuaaaaug

SEQ ID NO: 265980 - RNA, 22 nt, Human
cacaagacuuauuuguguagaa

SEQ ID NO: 265981 - RNA, 22 nt, Human
ggcaggaggaagaguuagcacc

SEQ ID NO: 265982 - RNA, 22 nt, Human
ugauaaacauuuuaggaacuaa

SEQ ID NO: 265983 - RNA, 22 nt, Human
ugguccugcaguaauagacauc

SEQ ID NO: 265984 - RNA, 22 nt, Human
uuagaaaauggaggugggaggg

SEQ ID NO: 265985 - RNA, 22 nt, Human
auguacaggauggugcucaucu

SEQ ID NO: 265986 - RNA, 22 nt, Human
cagauuaguugugcuauggccu

SEQ ID NO: 265987 - RNA, 22 nt, Human
ugcauucaauacaguaagaaua

SEQ ID NO: 265988 - RNA, 22 nt, Human
guguccuuaugcauaccagagu

SEQ ID NO: 265989 - RNA, 22 nt, Human
gggccucaggccuugcucugug

SEQ ID NO: 265990 - RNA, 22 nt, Human
uaacacauaagcugagaccaug

SEQ ID NO: 265991 - RNA, 22 nt, Human
uauuaauaagugacuacuagcu

SEQ ID NO: 265992 - RNA, 22 nt, Human
agggccagcugaugagaaugag

SEQ ID NO: 265993 - RNA, 22 nt, Human
ccagcagaggggcggagugcag

SEQ ID NO: 265994 - RNA, 22 nt, Human
cagcuguuugggcauggccaga

SEQ ID NO: 265995 - RNA, 22 nt, Human
ugccuggcaagaggggcuggcu

SEQ ID NO: 265996 - RNA, 22 nt, Human
gugcucuguggauugaguugaa

SEQ ID NO: 265997 - RNA, 22 nt, Human
uucuguguucugugcaaugagc

SEQ ID NO: 265998 - RNA, 22 nt, Human
uuucucaguaauguccuggaau

SEQ ID NO: 265999 - RNA, 22 nt, Human
ucagcuguagguauggaugucc

SEQ ID NO: 266000 - RNA, 22 nt, Human
acacacuucacccuugagcuaa

SEQ ID NO: 266001 - RNA, 22 nt, Human
guguauguucuacuuaauauua

SEQ ID NO: 266002 - RNA, 20 nt, Human
acagaugaggaaaaugaagu

SEQ ID NO: 266003 - RNA, 22 nt, Human
agggagcugcucugcuuccgug

SEQ ID NO: 266004 - RNA, 22 nt, Human
uauuucugauugcucaugaggc

SEQ ID NO: 266005 - RNA, 22 nt, Human
uaugcuaaauauguucacauug

SEQ ID NO: 266006 - RNA, 22 nt, Human
uguggggcugugguguucuucu

SEQ ID NO: 266007 - RNA, 22 nt, Human
ucuccuggucaccucagaaguc

SEQ ID NO: 266008 - RNA, 22 nt, Human
cuagcaucagaugagaagcugu

SEQ ID NO: 266009 - RNA, 22 nt, Human
uaacaguaccauuaacuuugau

SEQ ID NO: 266010 - RNA, 22 nt, Human
uaggaaauacuguaaguuuggg

SEQ ID NO: 266011 - RNA, 22 nt, Human
gcaggagagccagcaggcuucc

SEQ ID NO: 266012 - RNA, 22 nt, Human
cuggcucaauuuguacugcugu

SEQ ID NO: 266013 - RNA, 22 nt, Human
auaaagcaucuagucugucacu

SEQ ID NO: 266014 - RNA, 22 nt, Human
cuucuuguaucugccgccgagc

SEQ ID NO: 266015 - RNA, 22 nt, Human
cucugccacucgaagucaagga

SEQ ID NO: 266016 - RNA, 22 nt, Human
acagagagcugugauugaguua

SEQ ID NO: 266017 - RNA, 22 nt, Human
uccuccuuguuuugucucugcu

SEQ ID NO: 266018 - RNA, 22 nt, Human
ugaaaucuacccuauucagggu

SEQ ID NO: 266019 - RNA, 22 nt, Human
uggcuccagcguccacguccug

SEQ ID NO: 266020 - RNA, 22 nt, Human
aagucaagauaaaggugcuggc

SEQ ID NO: 266021 - RNA, 22 nt, Human
ucucuguagaccugaccagcac

SEQ ID NO: 266022 - RNA, 22 nt, Human
cagggaugguaaauauguaaag

SEQ ID NO: 266023 - RNA, 22 nt, Human
uuaaauagucaaaucaguggca

SEQ ID NO: 266024 - RNA, 20 nt, Human
ucauuccaaauaguucagca

SEQ ID NO: 266025 - RNA, 22 nt, Human
aagaaugagcucaaagaucuua

SEQ ID NO: 266026 - RNA, 22 nt, Human
ccucccugguggcucuggucua

SEQ ID NO: 266027 - RNA, 19 nt, Human
cuuauacagauuuucucau

SEQ ID NO: 266028 - RNA, 22 nt, Human
agcuccuguggcagcucuucug

SEQ ID NO: 266029 - RNA, 22 nt, Human
uccugagcuuuacaguaaggac

SEQ ID NO: 266030 - RNA, 22 nt, Human
ucagagagguuaaauaucuugu

SEQ ID NO: 266031 - RNA, 19 nt, Human
ugagauuucuuaggugauu

SEQ ID NO: 266032 - RNA, 22 nt, Human
cugaggcagagggcagaccaga

SEQ ID NO: 266033 - RNA, 22 nt, Human
gcccugcugucuucagaguaua

SEQ ID NO: 266034 - RNA, 22 nt, Human
gccagggagucugggccacaga

SEQ ID NO: 266035 - RNA, 22 nt, Human
auuaagacuauugauauuuaca

SEQ ID NO: 266036 - RNA, 22 nt, Human
gggccacuucuagugccucaga

SEQ ID NO: 266037 - RNA, 22 nt, Human
caaggcugcugcgggucgcacc

SEQ ID NO: 266038 - RNA, 19 nt, Human
ccaggccuccugggagguc

SEQ ID NO: 266039 - RNA, 22 nt, Human
guuguauucuucaauaucagag

SEQ ID NO: 266040 - RNA, 21 nt, Human
caaaugcuggcuggaugagga

SEQ ID NO: 266041 - RNA, 23 nt, Human
uauuagggccaggacuggcaaau

SEQ ID NO: 266042 - RNA, 22 nt, Human
ggucccaggaaucuguguucua

SEQ ID NO: 266043 - RNA, 22 nt, Human
gcugagccccccugcguggguc

SEQ ID NO: 266044 - RNA, 22 nt, Human
auaucauucugauguauaucuu

SEQ ID NO: 266045 - RNA, 22 nt, Human
gcacagccuugcccugugcccu

SEQ ID NO: 266046 - RNA, 22 nt, Human
uaggacaugcuacauaaauagg

SEQ ID NO: 266047 - RNA, 22 nt, Human
ucuucacaggagccugccugcc

SEQ ID NO: 266048 - RNA, 22 nt, Human
ugaagguaauggaaucuccuga

SEQ ID NO: 266049 - RNA, 23 nt, Human
auguuuuaugucucuagcugcca

SEQ ID NO: 266050 - RNA, 22 nt, Human
uccugagguggauugagcagag

SEQ ID NO: 266051 - RNA, 22 nt, Human
aaagagucuggcacuguaccag

SEQ ID NO: 266052 - RNA, 22 nt, Human
aagggcagccugacucacgguc

SEQ ID NO: 266053 - RNA, 22 nt, Human
gugaaaaaucaucaugacuuga

SEQ ID NO: 266054 - RNA, 22 nt, Human
caggagcuucugcccauggcca

SEQ ID NO: 266055 - RNA, 22 nt, Human
uaucuagaguccugcugagaac

SEQ ID NO: 266056 - RNA, 22 nt, Human
guccugagaccauggccuuagu

SEQ ID NO: 266057 - RNA, 22 nt, Human
ccuggcacaugauagaugcuca

SEQ ID NO: 266058 - RNA, 22 nt, Human
cacacaugacccacuuuuaccg

SEQ ID NO: 266059 - RNA, 22 nt, Human
uccugcagcucugagaagcauc

SEQ ID NO: 266060 - RNA, 22 nt, Human
uguuaaaugcucagcucgggga

SEQ ID NO: 266061 - RNA, 22 nt, Human
ugaggcaggaggauugcaggau

SEQ ID NO: 266062 - RNA, 22 nt, Human
agggacaguauccaucucacag

SEQ ID NO: 266063 - RNA, 22 nt, Human
agacagacauucuagagccacc

SEQ ID NO: 266064 - RNA, 22 nt, Human
uucaaaguccugucagguagcc

SEQ ID NO: 266065 - RNA, 21 nt, Human
gccagcugggucuugcaggag

SEQ ID NO: 266066 - RNA, 22 nt, Human
uggagaaaagguugaauccauc

SEQ ID NO: 266067 - RNA, 21 nt, Human
guuauugaccuccaggcuggc

SEQ ID NO: 266068 - RNA, 22 nt, Human
aacagaaaucauuuagggcucu

SEQ ID NO: 266069 - RNA, 22 nt, Human
aaacaugagcauuucuguuuaa

SEQ ID NO: 266070 - RNA, 22 nt, Human
augagcagauauggauuuuaga

SEQ ID NO: 266071 - RNA, 22 nt, Human
gggcuccugccuccuggcaccu

SEQ ID NO: 266072 - RNA, 22 nt, Human
aagaacugaguacguuaauaaa

SEQ ID NO: 266073 - RNA, 22 nt, Human
uacaggagcacaaaagaguuga

SEQ ID NO: 266074 - RNA, 22 nt, Human
uguacacaguaugaggcaucuu

SEQ ID NO: 266075 - RNA, 22 nt, Human
uacagaggaggugguugggagu

SEQ ID NO: 266076 - RNA, 22 nt, Human
caaaucuauauguugauauucu

SEQ ID NO: 266077 - RNA, 22 nt, Human
uggggagagaccggaauguuuc

SEQ ID NO: 266078 - RNA, 22 nt, Human
gggcucuguuuagaucagagau

SEQ ID NO: 266079 - RNA, 22 nt, Human
ucugcuggugaugaccucauaa

SEQ ID NO: 266080 - RNA, 22 nt, Human
caggcauagguaggauguuucu

SEQ ID NO: 266081 - RNA, 22 nt, Human
acagucaaucagaacagcaugu

SEQ ID NO: 266082 - RNA, 22 nt, Human
gugaagaucugagcccucaggu

SEQ ID NO: 266083 - RNA, 21 nt, Human
auauuuuuguuuggacuguca

SEQ ID NO: 266084 - RNA, 22 nt, Human
augcacuucaagcaucucucug

SEQ ID NO: 266085 - RNA, 22 nt, Human
cacagugcgaaagaaacccagc

SEQ ID NO: 266086 - RNA, 22 nt, Human
aaucucagagauaucugugucc

SEQ ID NO: 266087 - RNA, 22 nt, Human
cugagcugcggcaggcaccugg

SEQ ID NO: 266088 - RNA, 22 nt, Human
acaagcucagaucccugucucu

SEQ ID NO: 266089 - RNA, 22 nt, Human
ugcauccuuaaccagcaucacu

SEQ ID NO: 266090 - RNA, 22 nt, Human
cuggauuuaauuaacuguugcu

SEQ ID NO: 266091 - RNA, 22 nt, Human
uugcaaagagauaauccuaggc

SEQ ID NO: 266092 - RNA, 22 nt, Human
cucaguuugugugauauugucu

SEQ ID NO: 266093 - RNA, 22 nt, Human
uugaaugaauuugagcagagau

SEQ ID NO: 266094 - RNA, 22 nt, Human
uauacacaggaaucugugaaaa

SEQ ID NO: 266095 - RNA, 22 nt, Human
aggcucugggaacagacgggug

SEQ ID NO: 266096 - RNA, 22 nt, Human
cagcagcuccaaagaauagcca

SEQ ID NO: 266097 - RNA, 22 nt, Human
ccucagaguuauuugaagugaa

SEQ ID NO: 266098 - RNA, 22 nt, Human
uuuacagcuacuguccuauuuc

SEQ ID NO: 266099 - RNA, 20 nt, Human
ucagugucaguagccacuac

SEQ ID NO: 266100 - RNA, 19 nt, Human
cucuccaccuaacagguau

SEQ ID NO: 266101 - RNA, 22 nt, Human
cugcaggagcaaagccucugcu

SEQ ID NO: 266102 - RNA, 18 nt, Human
caggcccugucuggccuc

SEQ ID NO: 266103 - RNA, 22 nt, Human
aauuaacaaauguagcugugau

SEQ ID NO: 266104 - RNA, 22 nt, Human
uggaaacugggaguuaaaugua

SEQ ID NO: 266105 - RNA, 22 nt, Human
aggucucugcccacacaggcuu

SEQ ID NO: 266106 - RNA, 19 nt, Human
ggcugcugaagagaauuac

SEQ ID NO: 266107 - RNA, 19 nt, Human
cuacuuuauaauaugccuc

SEQ ID NO: 266108 - RNA, 22 nt, Human
uaauuucuagggacuaaggugc

SEQ ID NO: 266109 - RNA, 22 nt, Human
agguccaggccucaugauggcc

SEQ ID NO: 266110 - RNA, 22 nt, Human
acuuggcaaguaucuauaaagu

SEQ ID NO: 266111 - RNA, 22 nt, Human
aauucuauaggcaagcuauuuu

SEQ ID NO: 266112 - RNA, 22 nt, Human
ugucacaaacauacauuauaga

SEQ ID NO: 266113 - RNA, 22 nt, Human
uuuuuuauagcaaugaacccac

SEQ ID NO: 266114 - RNA, 22 nt, Human
gagccuggacaucucaggccca

SEQ ID NO: 266115 - RNA, 22 nt, Human
uguccuggagacacaagguggu

SEQ ID NO: 266116 - RNA, 21 nt, Human
ggcugagauggcagaaucacc

SEQ ID NO: 266117 - RNA, 22 nt, Human
cucuguuucucagccuauuucc

SEQ ID NO: 266118 - RNA, 22 nt, Human
uuuuauucauagggauggagag

SEQ ID NO: 266119 - RNA, 22 nt, Human
uccagcagugcucaggacucac

SEQ ID NO: 266120 - RNA, 22 nt, Human
cuaucuuucgauucuagcuuaa

SEQ ID NO: 266121 - RNA, 22 nt, Human
uuuugccugcacuguauauaua

SEQ ID NO: 266122 - RNA, 22 nt, Human
gugggugugauaagaccaaggg

SEQ ID NO: 266123 - RNA, 22 nt, Human
gucaggaaguggcauuggagaa

SEQ ID NO: 266124 - RNA, 22 nt, Human
ccagaaguuccuaagcaucauu

SEQ ID NO: 266125 - RNA, 22 nt, Human
gggagagaauuauugccagacc

SEQ ID NO: 266126 - RNA, 22 nt, Human
aaaaggcuaauccagagcaacu

SEQ ID NO: 266127 - RNA, 22 nt, Human
gcacuucaugacuuugucaaau

SEQ ID NO: 266128 - RNA, 22 nt, Human
agagaacaaauuaaaggugguu

SEQ ID NO: 266129 - RNA, 22 nt, Human
gaccaggagauuugagcuaggc

SEQ ID NO: 266130 - RNA, 22 nt, Human
gagucuggacuauucuggucuu

SEQ ID NO: 266131 - RNA, 22 nt, Human
uaaauguguuguggaugaaguu

SEQ ID NO: 266132 - RNA, 22 nt, Human
gacaggugugaugauuuaggcu

SEQ ID NO: 266133 - RNA, 22 nt, Human
gccuggcaggccuguuggggcu

SEQ ID NO: 266134 - RNA, 22 nt, Human
acaguacucuaaugaaaagugc

SEQ ID NO: 266135 - RNA, 22 nt, Human
uggccugucuuguugugcuaga

SEQ ID NO: 266136 - RNA, 22 nt, Human
agggacagaugaaugacugagu

SEQ ID NO: 266137 - RNA, 22 nt, Human
gauagaaagagugguucuuuuu

SEQ ID NO: 266138 - RNA, 22 nt, Human
aaaaguuaacuguguucaugca

SEQ ID NO: 266139 - RNA, 20 nt, Human
uauaaauucagagcuuuggu

SEQ ID NO: 266140 - RNA, 22 nt, Human
aguguauuacagaacugacauu

SEQ ID NO: 266141 - RNA, 17 nt, Human
ggaggcaacagacaggg

SEQ ID NO: 266142 - RNA, 20 nt, Human
ccucuguguccugugucaua

SEQ ID NO: 266143 - RNA, 23 nt, Human
ccuggcacacaaggggugcugca

SEQ ID NO: 266144 - RNA, 22 nt, Human
agggugccugcugcagguucag

SEQ ID NO: 266145 - RNA, 22 nt, Human
cuguggcuuugcagggcuuguu

SEQ ID NO: 266146 - RNA, 22 nt, Human
ccagggaugcagagguugcagu

SEQ ID NO: 266147 - RNA, 22 nt, Human
cuauuaaauacucuucaaauug

SEQ ID NO: 266148 - RNA, 22 nt, Human
uuuccagguauuaauacuguau

SEQ ID NO: 266149 - RNA, 22 nt, Human
agcagcagcucuguugcccuac

SEQ ID NO: 266150 - RNA, 22 nt, Human
uauuucacuauucucuguaacu

SEQ ID NO: 266151 - RNA, 22 nt, Human
auucucugugcagauuuaagac

SEQ ID NO: 266152 - RNA, 22 nt, Human
guacuuuaaaucaauguagauu

SEQ ID NO: 266153 - RNA, 22 nt, Human
caguggcucaugccuauaaucc

SEQ ID NO: 266154 - RNA, 22 nt, Human
gacagacacagggccaugauug

SEQ ID NO: 266155 - RNA, 19 nt, Human
ucaaaugccaaugucacag

SEQ ID NO: 266156 - RNA, 19 nt, Human
agaagcccagaucccagcc

SEQ ID NO: 266157 - RNA, 22 nt, Human
aagcagacaucccauacuuuug

SEQ ID NO: 266158 - RNA, 22 nt, Human
uguaaguuuugugaaacaaaca

SEQ ID NO: 266159 - RNA, 22 nt, Human
ugcaauuuuuaucaauucagca

SEQ ID NO: 266160 - RNA, 23 nt, Human
caccccacccugaggaggaggga

SEQ ID NO: 266161 - RNA, 22 nt, Human
uggcagccugcgugaaggagcu

SEQ ID NO: 266162 - RNA, 22 nt, Human
gucagagcugugcaaggcugag

SEQ ID NO: 266163 - RNA, 22 nt, Human
uucagaaauaaaauaucccaac

SEQ ID NO: 266164 - RNA, 22 nt, Human
ucaauguuuguucaugaaaaua

SEQ ID NO: 266165 - RNA, 22 nt, Human
uucagauaucauuaauuuagua

SEQ ID NO: 266166 - RNA, 22 nt, Human
ucaggcuuccaggcucugcuga

SEQ ID NO: 266167 - RNA, 22 nt, Human
auggaauugaagacagcauagg

SEQ ID NO: 266168 - RNA, 22 nt, Human
uaaccagacagaaacagcuaga

SEQ ID NO: 266169 - RNA, 22 nt, Human
gaaagugcuuuugagugugugc

SEQ ID NO: 266170 - RNA, 22 nt, Human
cauuaauaaacauuucagaaga

SEQ ID NO: 266171 - RNA, 22 nt, Human
uggacauguaaaggcucaaggu

SEQ ID NO: 266172 - RNA, 22 nt, Human
aagauuauuuaagacaggaacc

SEQ ID NO: 266173 - RNA, 22 nt, Human
gucagacacauuucuuucagug

SEQ ID NO: 266174 - RNA, 22 nt, Human
ccagccucaucgccugccuguc

SEQ ID NO: 266175 - RNA, 22 nt, Human
ucugauuucucuuguggaugcu

SEQ ID NO: 266176 - RNA, 22 nt, Human
uucccuccgaaccucagugcug

SEQ ID NO: 266177 - RNA, 22 nt, Human
aacugucugaaacugggguuuc

SEQ ID NO: 266178 - RNA, 22 nt, Human
cagagccagcccacuguucccg

SEQ ID NO: 266179 - RNA, 21 nt, Human
ucuuuuccuuucugugugcaa

SEQ ID NO: 266180 - RNA, 22 nt, Human
aaacucuaguaaaauguauuca

SEQ ID NO: 266181 - RNA, 22 nt, Human
acacacaugguauuguucagaa

SEQ ID NO: 266182 - RNA, 22 nt, Human
aaggacaggcuaaccugacauu

SEQ ID NO: 266183 - RNA, 22 nt, Human
cgcaacagcguggcgcccagcu

SEQ ID NO: 266184 - RNA, 22 nt, Human
aggagcugggagaaggacuaaa

SEQ ID NO: 266185 - RNA, 22 nt, Human
cagcucugugcaggccugggga

SEQ ID NO: 266186 - RNA, 22 nt, Human
acaagauuuaaugcaacccaag

SEQ ID NO: 266187 - RNA, 22 nt, Human
aaucucuucccaguaaaaaugg

SEQ ID NO: 266188 - RNA, 22 nt, Human
uaagaacagugucugucucaca

SEQ ID NO: 266189 - RNA, 22 nt, Human
gcugaggaaaggcuggaaggga

SEQ ID NO: 266190 - RNA, 23 nt, Human
aacaggaugugcuucaucuuuug

SEQ ID NO: 266191 - RNA, 22 nt, Human
uggcucuguucgccaucaggag

SEQ ID NO: 266192 - RNA, 22 nt, Human
ggaaagcuacugguguccucug

SEQ ID NO: 266193 - RNA, 22 nt, Human
cugccugcucuauccaggccug

SEQ ID NO: 266194 - RNA, 22 nt, Human
ggcugaaauuggauccuugggc

SEQ ID NO: 266195 - RNA, 22 nt, Human
ggcugccaggagaagcucagug

SEQ ID NO: 266196 - RNA, 22 nt, Human
cugccucuugacagaucguggc

SEQ ID NO: 266197 - RNA, 22 nt, Human
gcaggcuggaggcuguucuggg

SEQ ID NO: 266198 - RNA, 22 nt, Human
augucauuuaaauguuuguaua

SEQ ID NO: 266199 - RNA, 23 nt, Human
ucagggacaugaugugucauauc

SEQ ID NO: 266200 - RNA, 22 nt, Human
uugugaucuguguugauggccu

SEQ ID NO: 266201 - RNA, 19 nt, Human
cuuccccuguuaccucacu

SEQ ID NO: 266202 - RNA, 22 nt, Human
gacgccucuucccugcugcacu

SEQ ID NO: 266203 - RNA, 22 nt, Human
aucuacccacugaacacaauau

SEQ ID NO: 266204 - RNA, 22 nt, Human
cgcaggugaacuguucugcagu

SEQ ID NO: 266205 - RNA, 22 nt, Human
aucuuguuaaagugcagauucu

SEQ ID NO: 266206 - RNA, 22 nt, Human
gccaggcuggugucacaacucu

SEQ ID NO: 266207 - RNA, 22 nt, Human
aacacugucuuauacuucaaug

SEQ ID NO: 266208 - RNA, 22 nt, Human
auucagcaaugagcuuggauuu

SEQ ID NO: 266209 - RNA, 22 nt, Human
ugcuucuggaguaacaggguga

SEQ ID NO: 266210 - RNA, 22 nt, Human
aggcacaguuucauccccgggc

SEQ ID NO: 266211 - RNA, 22 nt, Human
gcagcccacagcuggaggccua

SEQ ID NO: 266212 - RNA, 22 nt, Human
ucucccagugucuggcagucag

SEQ ID NO: 266213 - RNA, 22 nt, Human
agagagaggggcgagcaaacac

SEQ ID NO: 266214 - RNA, 22 nt, Human
caggcagcauuuacucugauga

SEQ ID NO: 266215 - RNA, 22 nt, Human
agggcccuagggaaugagacau

SEQ ID NO: 266216 - RNA, 22 nt, Human
gcacacagauuaggaaacagaa

SEQ ID NO: 266217 - RNA, 22 nt, Human
augagcagaugcuccugccucu

SEQ ID NO: 266218 - RNA, 22 nt, Human
gaagauuaaugagaaaccugcu

SEQ ID NO: 266219 - RNA, 22 nt, Human
cucagcauucaauguccagucc

SEQ ID NO: 266220 - RNA, 22 nt, Human
agcccaagaagagcuuucuugc

SEQ ID NO: 266221 - RNA, 21 nt, Human
cugugaccuuucuuuccuccu

SEQ ID NO: 266222 - RNA, 22 nt, Human
ccaguccauauuuauacugccg

SEQ ID NO: 266223 - RNA, 22 nt, Human
ugucagcagaaguggugcacuc

SEQ ID NO: 266224 - RNA, 22 nt, Human
ucucucagaggaagaggcagug

SEQ ID NO: 266225 - RNA, 22 nt, Human
ucugaaauccuuuaucuuggcu

SEQ ID NO: 266226 - RNA, 22 nt, Human
aggaaacugauguuuuuuacaa

SEQ ID NO: 266227 - RNA, 22 nt, Human
auauucuuccaaaacaucauuu

SEQ ID NO: 266228 - RNA, 22 nt, Human
acugucuuguguuaaagaacca

SEQ ID NO: 266229 - RNA, 22 nt, Human
cucugcaggccuugaguguggu

SEQ ID NO: 266230 - RNA, 22 nt, Human
ucacacagggucggaaagagug

SEQ ID NO: 266231 - RNA, 22 nt, Human
agcuguggaguaggggguugga

SEQ ID NO: 266232 - RNA, 22 nt, Human
gcaaagcagucuucugugccua

SEQ ID NO: 266233 - RNA, 18 nt, Human
uccucucuuuccccaggg

SEQ ID NO: 266234 - RNA, 22 nt, Human
gagcuggggcggauacucagcu

SEQ ID NO: 266235 - RNA, 23 nt, Human
uggcuggcgccugccucacccug

SEQ ID NO: 266236 - RNA, 20 nt, Human
uucuggcaaacagaguucuu

SEQ ID NO: 266237 - RNA, 23 nt, Human
aaagcaaggaauuggcaacagag

SEQ ID NO: 266238 - RNA, 22 nt, Human
acauauugagcucuaaaaguac

SEQ ID NO: 266239 - RNA, 22 nt, Human
auagaagaggaaacugagguug

SEQ ID NO: 266240 - RNA, 22 nt, Human
agggcucagcaucucauucugu

SEQ ID NO: 266241 - RNA, 22 nt, Human
cuucuucaucuguaaaacuugg

SEQ ID NO: 266242 - RNA, 22 nt, Human
ggcuccaagucucagagugaag

SEQ ID NO: 266243 - RNA, 22 nt, Human
uguacaaagccagaacucccaa

SEQ ID NO: 266244 - RNA, 22 nt, Human
guaauagaugaaacaaugugga

SEQ ID NO: 266245 - RNA, 22 nt, Human
ggguccagagccucagcccaga

SEQ ID NO: 266246 - RNA, 22 nt, Human
uggcuucuuugugacagcucuu

SEQ ID NO: 266247 - RNA, 22 nt, Human
gcagcugucgcuaggagcugug

SEQ ID NO: 266248 - RNA, 22 nt, Human
aaggagagagcuuugcuggaac

SEQ ID NO: 266249 - RNA, 22 nt, Human
uuucuuuugcccuguggguuag

SEQ ID NO: 266250 - RNA, 22 nt, Human
ucaggagcucaggcugauggaa

SEQ ID NO: 266251 - RNA, 22 nt, Human
aacuggaaagaucaguaggaag

SEQ ID NO: 266252 - RNA, 22 nt, Human
acaugugcagacagcaagcagg

SEQ ID NO: 266253 - RNA, 22 nt, Human
aaggacaggcacagugguggag

SEQ ID NO: 266254 - RNA, 22 nt, Human
ggcccagacccaagaguggugg

SEQ ID NO: 266255 - RNA, 22 nt, Human
cucccagccuucgccagucuga

SEQ ID NO: 266256 - RNA, 22 nt, Human
caggaagagaacauggaggcug

SEQ ID NO: 266257 - RNA, 22 nt, Human
ugaguggagacuguguguagag

SEQ ID NO: 266258 - RNA, 22 nt, Human
uaaacaaggguuacugagcaug

SEQ ID NO: 266259 - RNA, 22 nt, Human
cuggcugggagcucgccugcgg

SEQ ID NO: 266260 - RNA, 22 nt, Human
accauauaacaaguuuaggaga

SEQ ID NO: 266261 - RNA, 22 nt, Human
ggaagccccagcauggccuugg

SEQ ID NO: 266262 - RNA, 19 nt, Human
auucuucagcagugagacc

SEQ ID NO: 266263 - RNA, 22 nt, Human
uuaaaugucaauagauugcuug

SEQ ID NO: 266264 - RNA, 22 nt, Human
ucuacccagagcuaugaccuga

SEQ ID NO: 266265 - RNA, 21 nt, Human
ugggcaccaaaaccuaggagu

SEQ ID NO: 266266 - RNA, 22 nt, Human
uaggaauccagaucuagacugu

SEQ ID NO: 266267 - RNA, 22 nt, Human
acaaaauuuuuagacaaggcuu

SEQ ID NO: 266268 - RNA, 18 nt, Human
acauacauucugucugca

SEQ ID NO: 266269 - RNA, 22 nt, Human
aguccuuuuguuuugagaugag

SEQ ID NO: 266270 - RNA, 21 nt, Human
gaucuagacuugggcccagua

SEQ ID NO: 266271 - RNA, 22 nt, Human
acuuccaggaggugucacugaa

SEQ ID NO: 266272 - RNA, 22 nt, Human
uagcuuuagaaauauucucaga

SEQ ID NO: 266273 - RNA, 22 nt, Human
aucagagcaauggauaaaauca

SEQ ID NO: 266274 - RNA, 22 nt, Human
aacucacacaaguauugccugc

SEQ ID NO: 266275 - RNA, 22 nt, Human
gugagagaucccccacucaucu

SEQ ID NO: 266276 - RNA, 23 nt, Human
aggaagaggcaauuucucuuaga

SEQ ID NO: 266277 - RNA, 22 nt, Human
uucuucuucauuucugacgaug

SEQ ID NO: 266278 - RNA, 22 nt, Human
gaggcagcagggcugguuccuu

SEQ ID NO: 266279 - RNA, 22 nt, Human
ggcugccuagacuuggaauuuc

SEQ ID NO: 266280 - RNA, 22 nt, Human
ucagugcugaguagcgugcacc

SEQ ID NO: 266281 - RNA, 22 nt, Human
agucuccacacuggcagaugcc

SEQ ID NO: 266282 - RNA, 20 nt, Human
ugccaggcugcacgccugcc

SEQ ID NO: 266283 - RNA, 22 nt, Human
agcuggcucagccggguggucu

SEQ ID NO: 266284 - RNA, 22 nt, Human
uagcuucagggaaaccacugcu

SEQ ID NO: 266285 - RNA, 22 nt, Human
ucuggguccgggacuguggaug

SEQ ID NO: 266286 - RNA, 22 nt, Human
caaggccauaagagauacaaaa

SEQ ID NO: 266287 - RNA, 18 nt, Human
cgcccugcuauaaaugac

SEQ ID NO: 266288 - RNA, 22 nt, Human
uguccuggugcuucuugggauu

SEQ ID NO: 266289 - RNA, 22 nt, Human
ugcagagggaaaaggugcuccu

SEQ ID NO: 266290 - RNA, 22 nt, Human
guuaaaagaacaacucggaggu

SEQ ID NO: 266291 - RNA, 22 nt, Human
auagacaaucccccauccuacc

SEQ ID NO: 266292 - RNA, 22 nt, Human
aaagcacuucaggagcaguuug

SEQ ID NO: 266293 - RNA, 22 nt, Human
uuugcaaagaaauuauugcugu

SEQ ID NO: 266294 - RNA, 22 nt, Human
uacaaacuccgaaguuuguacc

SEQ ID NO: 266295 - RNA, 22 nt, Human
ucagugcuuuugagaagcuccu

SEQ ID NO: 266296 - RNA, 22 nt, Human
gcagggcugauguuauugacga

SEQ ID NO: 266297 - RNA, 22 nt, Human
ccuggcuguggcggugcucuca

SEQ ID NO: 266298 - RNA, 22 nt, Human
aucuuguuaaaaugcagauucu

SEQ ID NO: 266299 - RNA, 22 nt, Human
cuggcugguccucggggacagc

SEQ ID NO: 266300 - RNA, 22 nt, Human
cuuugguggaggggugcaggca

SEQ ID NO: 266301 - RNA, 22 nt, Human
agaucugaguggcugcauguaa

SEQ ID NO: 266302 - RNA, 22 nt, Human
ggcaggugcuaagagagguaaa

SEQ ID NO: 266303 - RNA, 22 nt, Human
caaagcugugaauuccuacaaa

SEQ ID NO: 266304 - RNA, 22 nt, Human
aaguuacaguuauuauuuaaaa

SEQ ID NO: 266305 - RNA, 22 nt, Human
auaugcuuaugaugguuaauuu

SEQ ID NO: 266306 - RNA, 22 nt, Human
aaacaguagaaguguauuuuau

SEQ ID NO: 266307 - RNA, 22 nt, Human
uugcuuuaaugagauuuugcca

SEQ ID NO: 266308 - RNA, 22 nt, Human
ugcugccagggcucugcccaca

SEQ ID NO: 266309 - RNA, 22 nt, Human
auucuucugccuacuuucaucc

SEQ ID NO: 266310 - RNA, 22 nt, Human
guuauuguccagcacaguuggg

SEQ ID NO: 266311 - RNA, 22 nt, Human
augcaacagaaaauugccuggg

SEQ ID NO: 266312 - RNA, 22 nt, Human
acugggccaggggcuuuggagc

SEQ ID NO: 266313 - RNA, 22 nt, Human
ccucaaauaaguuuuauuuauc

SEQ ID NO: 266314 - RNA, 22 nt, Human
cuggaaugccucccugucagag

SEQ ID NO: 266315 - RNA, 22 nt, Human
uugcuuuacauguucugguaaa

SEQ ID NO: 266316 - RNA, 20 nt, Human
uccagcccugcuucucucuu

SEQ ID NO: 266317 - RNA, 22 nt, Human
uucaggcccaacgcacagcuuc

SEQ ID NO: 266318 - RNA, 22 nt, Human
cccuccaccaagcagggcgcca

SEQ ID NO: 266319 - RNA, 22 nt, Human
uggcucagcgguggcagcagac

SEQ ID NO: 266320 - RNA, 22 nt, Human
agucacuucuauucuauuaagu

SEQ ID NO: 266321 - RNA, 22 nt, Human
gggcccuggccgaaucccucug

SEQ ID NO: 266322 - RNA, 19 nt, Human
gcuccugggccucacucau

SEQ ID NO: 266323 - RNA, 17 nt, Human
uguccauuugccuggag

SEQ ID NO: 266324 - RNA, 22 nt, Human
ugaaggaggaauguggccucca

SEQ ID NO: 266325 - RNA, 23 nt, Human
uugagucuuauaggauugaggug

SEQ ID NO: 266326 - RNA, 22 nt, Human
gucugggacaggacuggggaac

SEQ ID NO: 266327 - RNA, 22 nt, Human
agaauuguucuguagcuuggcu

SEQ ID NO: 266328 - RNA, 19 nt, Human
auauauguauacaaugugg

SEQ ID NO: 266329 - RNA, 22 nt, Human
aauugcuuaugccaggugagag

SEQ ID NO: 266330 - RNA, 22 nt, Human
aauucauauggauaugcuagua

SEQ ID NO: 266331 - RNA, 19 nt, Human
agagaggcugugugaggga

SEQ ID NO: 266332 - RNA, 22 nt, Human
ugaggggauacgguacacauug

SEQ ID NO: 266333 - RNA, 22 nt, Human
caucuuuguaacuuccacauaa

SEQ ID NO: 266334 - RNA, 21 nt, Human
agguccaguucugucuuggac

SEQ ID NO: 266335 - RNA, 22 nt, Human
gcugggagccguaccugucacg

SEQ ID NO: 266336 - RNA, 22 nt, Human
ggcuuucucacagcauggcagc

SEQ ID NO: 266337 - RNA, 22 nt, Human
caggucugugugccauuuccaa

SEQ ID NO: 266338 - RNA, 22 nt, Human
acuguuuucuguaaagggccag

SEQ ID NO: 266339 - RNA, 22 nt, Human
ugcaggcauaaccgauguugau

SEQ ID NO: 266340 - RNA, 22 nt, Human
uaaugcuucaauuuccuugauu

SEQ ID NO: 266341 - RNA, 22 nt, Human
gccagcauaguaagcagucauc

SEQ ID NO: 266342 - RNA, 22 nt, Human
caaaugcuacuaauaggcaagu

SEQ ID NO: 266343 - RNA, 22 nt, Human
agugugagugcucauguccauc

SEQ ID NO: 266344 - RNA, 22 nt, Human
agagccacaguggauaggagcc

SEQ ID NO: 266345 - RNA, 22 nt, Human
aggucugucuggccccaugaau

SEQ ID NO: 266346 - RNA, 22 nt, Human
auggaacaggcucagagaugcu

SEQ ID NO: 266347 - RNA, 22 nt, Human
auacacauuugcuagagauggg

SEQ ID NO: 266348 - RNA, 22 nt, Human
gaggaagccccauugaagccag

SEQ ID NO: 266349 - RNA, 22 nt, Human
cauuugaaauaguucauucuug

SEQ ID NO: 266350 - RNA, 22 nt, Human
ccaggacuucgaggcuacagug

SEQ ID NO: 266351 - RNA, 22 nt, Human
cugggccuuggauugacacugu

SEQ ID NO: 266352 - RNA, 18 nt, Human
aaugcacacauuuacucc

SEQ ID NO: 266353 - RNA, 20 nt, Human
aucuuuggcucagaagccuu

SEQ ID NO: 266354 - RNA, 19 nt, Human
cugagcagcggcagcacuu

SEQ ID NO: 266355 - RNA, 22 nt, Human
agaaaacauuacauaggugugu

SEQ ID NO: 266356 - RNA, 22 nt, Human
aucagagaaguuucacuggcau

SEQ ID NO: 266357 - RNA, 22 nt, Human
cuagaaucuaugucaggaacuc

SEQ ID NO: 266358 - RNA, 22 nt, Human
gugcacagaaauugguaagacu

SEQ ID NO: 266359 - RNA, 22 nt, Human
uuguauuuggguaguauagaga

SEQ ID NO: 266360 - RNA, 22 nt, Human
uuaguuguaaaauggaauuugu

SEQ ID NO: 266361 - RNA, 22 nt, Human
agaaggcucacuaagagugacu

SEQ ID NO: 266362 - RNA, 22 nt, Human
gccagcugguaggcaccuagcc

SEQ ID NO: 266363 - RNA, 22 nt, Human
gagcuuggcagugucacuaggg

SEQ ID NO: 266364 - RNA, 20 nt, Human
cuuucucuaauuuauaagua

SEQ ID NO: 266365 - RNA, 22 nt, Human
caggcuucagggaacgcagucu

SEQ ID NO: 266366 - RNA, 22 nt, Human
ugaugagggagauuugagccca

SEQ ID NO: 266367 - RNA, 22 nt, Human
gccauauauauuuugcacuagg

SEQ ID NO: 266368 - RNA, 22 nt, Human
aaaugugugcacaaagacagcu

SEQ ID NO: 266369 - RNA, 22 nt, Human
acagcuuuucaauucugcugag

SEQ ID NO: 266370 - RNA, 22 nt, Human
agcccuccaaagguugggggag

SEQ ID NO: 266371 - RNA, 22 nt, Human
auccaguuccaaagaucauuua

SEQ ID NO: 266372 - RNA, 22 nt, Human
guacauuuaggauucauugaaa

SEQ ID NO: 266373 - RNA, 22 nt, Human
ggaggaaauccuuaguaaggca

SEQ ID NO: 266374 - RNA, 22 nt, Human
uugagacuccugguguagaaua

SEQ ID NO: 266375 - RNA, 22 nt, Human
gccagucagcuggccaggcugg

SEQ ID NO: 266376 - RNA, 22 nt, Human
caggagccacauuccaccuuga

SEQ ID NO: 266377 - RNA, 22 nt, Human
cagcuguucggggcuggcaugu

SEQ ID NO: 266378 - RNA, 22 nt, Human
uagaaacagaauaugagugaga

SEQ ID NO: 266379 - RNA, 22 nt, Human
agggccaggaacaccugaaggg

SEQ ID NO: 266380 - RNA, 22 nt, Human
cugcaaucuccaugcuugauuu

SEQ ID NO: 266381 - RNA, 22 nt, Human
acauucaugcaccuuccuaucc

SEQ ID NO: 266382 - RNA, 22 nt, Human
caguuuuaaauuuugaaugucu

SEQ ID NO: 266383 - RNA, 22 nt, Human
uuagucaauagugaauauagag

SEQ ID NO: 266384 - RNA, 22 nt, Human
agcucuggaauaaugaugugau

SEQ ID NO: 266385 - RNA, 22 nt, Human
cuucaaauccuguguagggcua

SEQ ID NO: 266386 - RNA, 22 nt, Human
agccaacucccucucauugagc

SEQ ID NO: 266387 - RNA, 22 nt, Human
gucagagcacugaguugugggc

SEQ ID NO: 266388 - RNA, 22 nt, Human
guaaaauugcaauuacuuuugc

SEQ ID NO: 266389 - RNA, 19 nt, Human
ugcagaggguaggaaggcc

SEQ ID NO: 266390 - RNA, 22 nt, Human
gcccugagaagaagucggaggg

SEQ ID NO: 266391 - RNA, 22 nt, Human
ggcaucaggaucugucuugcuu

SEQ ID NO: 266392 - RNA, 22 nt, Human
cacaugcauaccuauguguaua

SEQ ID NO: 266393 - RNA, 22 nt, Human
acauuucucauaggagagccac

SEQ ID NO: 266394 - RNA, 22 nt, Human
ccagagcugaugggcccagggu

SEQ ID NO: 266395 - RNA, 22 nt, Human
cccuagggcuaagcaggacugc

SEQ ID NO: 266396 - RNA, 21 nt, Human
aaucugcuucccugugacuug

SEQ ID NO: 266397 - RNA, 22 nt, Human
gcuguauuuauuuucuaggguu

SEQ ID NO: 266398 - RNA, 17 nt, Human
cucagcagggcucacuu

SEQ ID NO: 266399 - RNA, 22 nt, Human
cucugcacccccggcuccucgu

SEQ ID NO: 266400 - RNA, 22 nt, Human
agagcuggcagcagcuucuccu

SEQ ID NO: 266401 - RNA, 22 nt, Human
ugcuuuaguucaacaugccaaa

SEQ ID NO: 266402 - RNA, 22 nt, Human
auggcuugguugguuaaagcac

SEQ ID NO: 266403 - RNA, 22 nt, Human
acagaagcucaagagagcagug

SEQ ID NO: 266404 - RNA, 22 nt, Human
gacagcugugcaggagaagggg

SEQ ID NO: 266405 - RNA, 22 nt, Human
aaagagcucuuacucuagugua

SEQ ID NO: 266406 - RNA, 21 nt, Human
uuucuuucuggcucucacagu

SEQ ID NO: 266407 - RNA, 22 nt, Human
gaggggucuuuuguugucaggg

SEQ ID NO: 266408 - RNA, 22 nt, Human
uagaaccucauaagaaucgaaa

SEQ ID NO: 266409 - RNA, 22 nt, Human
aaaucuuucccuuuacuaucca

SEQ ID NO: 266410 - RNA, 22 nt, Human
uuacagaguggucuggcuaugu

SEQ ID NO: 266411 - RNA, 22 nt, Human
cugcucuucccacucacuccca

SEQ ID NO: 266412 - RNA, 22 nt, Human
aaaguucucuaugguguaaaaa

SEQ ID NO: 266413 - RNA, 22 nt, Human
ugaggcaggaugcuugcacagg

SEQ ID NO: 266414 - RNA, 22 nt, Human
agccacagcaacaagugcaauu

SEQ ID NO: 266415 - RNA, 22 nt, Human
cacuuagauacuagaucacaaa

SEQ ID NO: 266416 - RNA, 22 nt, Human
gguccaugauaggaaguuccga

SEQ ID NO: 266417 - RNA, 22 nt, Human
aggcucaggaggagcugccgga

SEQ ID NO: 266418 - RNA, 22 nt, Human
cagcuggaucccugcagaacuu

SEQ ID NO: 266419 - RNA, 22 nt, Human
ugggggcauggaccagccuggc

SEQ ID NO: 266420 - RNA, 22 nt, Human
ccaggaggcucuugucccuggu

SEQ ID NO: 266421 - RNA, 22 nt, Human
uuuuaaucaugcuucuaugucc

SEQ ID NO: 266422 - RNA, 19 nt, Human
ggcagaagguguaggggga

SEQ ID NO: 266423 - RNA, 19 nt, Human
gaggugucuuuccugagua

SEQ ID NO: 266424 - RNA, 22 nt, Human
aacuuucuuugcaucuaaguuu

SEQ ID NO: 266425 - RNA, 22 nt, Human
uccccccagccuuucacaugag

SEQ ID NO: 266426 - RNA, 22 nt, Human
cgacccuacagacagugcugag

SEQ ID NO: 266427 - RNA, 22 nt, Human
agauaaguacuguuauuauugc

SEQ ID NO: 266428 - RNA, 22 nt, Human
aggacaagacaaggaccagaga

SEQ ID NO: 266429 - RNA, 22 nt, Human
gucugcugcagagcauggcuuu

SEQ ID NO: 266430 - RNA, 22 nt, Human
aucccuggacggcgccucccca

SEQ ID NO: 266431 - RNA, 22 nt, Human
cuguccccugugcuuucacuug

SEQ ID NO: 266432 - RNA, 22 nt, Human
uggggacccggacuccuggguc

SEQ ID NO: 266433 - RNA, 22 nt, Human
uucugagaugaggaggaaaaag

SEQ ID NO: 266434 - RNA, 22 nt, Human
ugccuuuaacuuaaagcaugac

SEQ ID NO: 266435 - RNA, 22 nt, Human
acaugacagugcuuagcaaacu

SEQ ID NO: 266436 - RNA, 22 nt, Human
aguaaaauuguauuggaaaaca

SEQ ID NO: 266437 - RNA, 22 nt, Human
acauaauaaaaauaacagcuca

SEQ ID NO: 266438 - RNA, 22 nt, Human
ucuuccagucuguaggacuagg

SEQ ID NO: 266439 - RNA, 23 nt, Human
uaggaagacagcaaaagaaugga

SEQ ID NO: 266440 - RNA, 22 nt, Human
gccaggugcauauuagaagcau

SEQ ID NO: 266441 - RNA, 22 nt, Human
accuucaacucaaaguguccca

SEQ ID NO: 266442 - RNA, 22 nt, Human
ugcacuguugcuuuauaugauu

SEQ ID NO: 266443 - RNA, 22 nt, Human
caacaaguguucguaaagugcc

SEQ ID NO: 266444 - RNA, 22 nt, Human
acccaggguagaaccucagagc

SEQ ID NO: 266445 - RNA, 19 nt, Human
aggcuaaagagucuugcgu

SEQ ID NO: 266446 - RNA, 22 nt, Human
guucucagggauaacuuccccc

SEQ ID NO: 266447 - RNA, 22 nt, Human
ugucuucaucuccaugcacaga

SEQ ID NO: 266448 - RNA, 17 nt, Human
aaacugaaaaauucacu

SEQ ID NO: 266449 - RNA, 22 nt, Human
ggaaauacaaagauacaccacu

SEQ ID NO: 266450 - RNA, 22 nt, Human
cuugaaaauaagaaagacuuuc

SEQ ID NO: 266451 - RNA, 16 nt, Human
uguuugcaaagcaauc

SEQ ID NO: 266452 - RNA, 22 nt, Human
uacuucauuccuuuguaaaaug

SEQ ID NO: 266453 - RNA, 21 nt, Human
ugccuggccuuugcuuuuccu

SEQ ID NO: 266454 - RNA, 22 nt, Human
aaacauagauaauagauagaug

SEQ ID NO: 266455 - RNA, 22 nt, Human
ggccucuggucaagacaagcau

SEQ ID NO: 266456 - RNA, 22 nt, Human
gagccuggggacccuccugagu

SEQ ID NO: 266457 - RNA, 20 nt, Human
uuucuuguacuuggagaagg

SEQ ID NO: 266458 - RNA, 18 nt, Human
ucucugaauauuuuaugu

SEQ ID NO: 266459 - RNA, 22 nt, Human
uggggcaguggcuuuucacccu

SEQ ID NO: 266460 - RNA, 22 nt, Human
aauguucagggcagcccugcua

SEQ ID NO: 266461 - RNA, 22 nt, Human
aaaacuuucagggauacagaaa

SEQ ID NO: 266462 - RNA, 22 nt, Human
augcaucuguaguguuauauga

SEQ ID NO: 266463 - RNA, 22 nt, Human
uucauacuaaaguguaagaugu

SEQ ID NO: 266464 - RNA, 22 nt, Human
gccuguuuggcaucauugguug

SEQ ID NO: 266465 - RNA, 22 nt, Human
guagucugaacaguaauuuugu

SEQ ID NO: 266466 - RNA, 22 nt, Human
agggccaccagggagucucagg

SEQ ID NO: 266467 - RNA, 18 nt, Human
gccagagguacuacugau

SEQ ID NO: 266468 - RNA, 22 nt, Human
cauaauccauuugcacugcaga

SEQ ID NO: 266469 - RNA, 22 nt, Human
auaguacagagggcuacugguu

SEQ ID NO: 266470 - RNA, 22 nt, Human
gaaaggaagaaaggucauuuua

SEQ ID NO: 266471 - RNA, 22 nt, Human
augcaauuuacuguacauaaau

SEQ ID NO: 266472 - RNA, 22 nt, Human
cagcugcaggaacaaaaaugug

SEQ ID NO: 266473 - RNA, 22 nt, Human
uacuaucucuucuaacuucaga

SEQ ID NO: 266474 - RNA, 22 nt, Human
uuacauguacaaacaauucuua

SEQ ID NO: 266475 - RNA, 22 nt, Human
auggccaaauaacagcuugcau

SEQ ID NO: 266476 - RNA, 22 nt, Human
uggagagaaaguugaauggagg

SEQ ID NO: 266477 - RNA, 22 nt, Human
uguuuagcauaaagauuuucca

SEQ ID NO: 266478 - RNA, 22 nt, Human
ccacagagacaggguccuugcu

SEQ ID NO: 266479 - RNA, 22 nt, Human
uccacagugguugaacuaguuu

SEQ ID NO: 266480 - RNA, 18 nt, Human
ucaugaggaaggagaaga

SEQ ID NO: 266481 - RNA, 22 nt, Human
uguggcugcaggcgauggagga

SEQ ID NO: 266482 - RNA, 22 nt, Human
cugggccuggggcuguugagag

SEQ ID NO: 266483 - RNA, 22 nt, Human
ccugcaguuuguugugaccccg

SEQ ID NO: 266484 - RNA, 22 nt, Human
ggaggcacaccucagacuggga

SEQ ID NO: 266485 - RNA, 22 nt, Human
aggcugaggcuggcagcuccag

SEQ ID NO: 266486 - RNA, 22 nt, Human
aguccaguguguucuggcagca

SEQ ID NO: 266487 - RNA, 21 nt, Human
agccauccugaauggugccau

SEQ ID NO: 266488 - RNA, 23 nt, Human
cuagaugcaagcuccaugaggga

SEQ ID NO: 266489 - RNA, 22 nt, Human
gagcccugaacaacagcaggaa

SEQ ID NO: 266490 - RNA, 22 nt, Human
cuaaagaauuuugcuugaccag

SEQ ID NO: 266491 - RNA, 22 nt, Human
uagcuuggaauaaaaugagaau

SEQ ID NO: 266492 - RNA, 22 nt, Human
uuguuaaagaugcagauuccau

SEQ ID NO: 266493 - RNA, 22 nt, Human
cuuuacauuaauuucuacugau

SEQ ID NO: 266494 - RNA, 22 nt, Human
gauuacauucuccuuguauuag

SEQ ID NO: 266495 - RNA, 22 nt, Human
uacaccagauuauuuauaacau

SEQ ID NO: 266496 - RNA, 22 nt, Human
ccuggcacaugcaguacucaag

SEQ ID NO: 266497 - RNA, 22 nt, Human
guucuuuaaguggagaaggaaa

SEQ ID NO: 266498 - RNA, 21 nt, Human
uuagcuuucuagaaucuuugu

SEQ ID NO: 266499 - RNA, 22 nt, Human
agcagagcaaagcucagaaaug

SEQ ID NO: 266500 - RNA, 23 nt, Human
uuuauccaacucuguaaucucuc

SEQ ID NO: 266501 - RNA, 22 nt, Human
gggagggccagugcucucuaga

SEQ ID NO: 266502 - RNA, 22 nt, Human
uuucugcagcagacucagugug

SEQ ID NO: 266503 - RNA, 22 nt, Human
gccuggagggucccucucugga

SEQ ID NO: 266504 - RNA, 22 nt, Human
caggcacuguguuaggcacugu

SEQ ID NO: 266505 - RNA, 22 nt, Human
cucagcaagacccccaccgugu

SEQ ID NO: 266506 - RNA, 22 nt, Human
uccuuuguugagauaaauuggg

SEQ ID NO: 266507 - RNA, 22 nt, Human
auguagaauuccuucuacuuug

SEQ ID NO: 266508 - RNA, 22 nt, Human
guauuagggccaaaggcaggaa

SEQ ID NO: 266509 - RNA, 22 nt, Human
gacauucauugaugucuuccuc

SEQ ID NO: 266510 - RNA, 22 nt, Human
aucugguauuuccuuugauagc

SEQ ID NO: 266511 - RNA, 21 nt, Human
acacugcuguagcauauuggg

SEQ ID NO: 266512 - RNA, 22 nt, Human
aggauuuaaucaguuggcauuu

SEQ ID NO: 266513 - RNA, 22 nt, Human
cagccccuuccuggcaucugga

SEQ ID NO: 266514 - RNA, 22 nt, Human
uuggcugcauuuuggguucguu

SEQ ID NO: 266515 - RNA, 22 nt, Human
gcccuccagcuguugcgcgucg

SEQ ID NO: 266516 - RNA, 17 nt, Human
uuuucucucuuggauuc

SEQ ID NO: 266517 - RNA, 22 nt, Human
cagcaggacauggaggaguaaa

SEQ ID NO: 266518 - RNA, 22 nt, Human
uucuagaagcugaaaaggggga

SEQ ID NO: 266519 - RNA, 23 nt, Human
acacuuucaaauaugcacagagc

SEQ ID NO: 266520 - RNA, 22 nt, Human
ggccucucagggcagagacccu

SEQ ID NO: 266521 - RNA, 22 nt, Human
cagcagguguccuuuuggugga

SEQ ID NO: 266522 - RNA, 22 nt, Human
auggcccaggcaggcugguacu

SEQ ID NO: 266523 - RNA, 22 nt, Human
auucacaaauaacaggugcaga

SEQ ID NO: 266524 - RNA, 19 nt, Human
ccagguggaacugagguag

SEQ ID NO: 266525 - RNA, 22 nt, Human
uacgaauccuguggaugaaugu

SEQ ID NO: 266526 - RNA, 22 nt, Human
gaaaggcugggauuuagcgcug

SEQ ID NO: 266527 - RNA, 22 nt, Human
auaucaguaucuauguauuugu

SEQ ID NO: 266528 - RNA, 22 nt, Human
acacaggaagagagauaauaau

SEQ ID NO: 266529 - RNA, 22 nt, Human
uccagcagaccaucaaggcuca

SEQ ID NO: 266530 - RNA, 22 nt, Human
agccagcaggaacgucuagguu

SEQ ID NO: 266531 - RNA, 23 nt, Human
acagaaaucauuuguaagguacc

SEQ ID NO: 266532 - RNA, 22 nt, Human
cauuaauuguauuuuucaaagu

SEQ ID NO: 266533 - RNA, 22 nt, Human
agugagcaucuucaggagccaa

SEQ ID NO: 266534 - RNA, 22 nt, Human
cccccaccugaggacagucuua

SEQ ID NO: 266535 - RNA, 22 nt, Human
ggccuaguuuuuucugguaggu

SEQ ID NO: 266536 - RNA, 22 nt, Human
uucucuggagaguaucuucuua

SEQ ID NO: 266537 - RNA, 17 nt, Human
ugccuccagcaggguga

SEQ ID NO: 266538 - RNA, 22 nt, Human
uuacaaagcguugagacaagua

SEQ ID NO: 266539 - RNA, 22 nt, Human
gcugcucacugaaggacccugu

SEQ ID NO: 266540 - RNA, 22 nt, Human
acucaagauagggaaaguacaa

SEQ ID NO: 266541 - RNA, 22 nt, Human
caguuacuguaugucaaagacu

SEQ ID NO: 266542 - RNA, 22 nt, Human
uggaugagucugagauugggca

SEQ ID NO: 266543 - RNA, 22 nt, Human
ucugagguguagcugggcuuca

SEQ ID NO: 266544 - RNA, 22 nt, Human
uaacuacaagggcggucucugu

SEQ ID NO: 266545 - RNA, 21 nt, Human
caaauacuuagaaacuuaaga

SEQ ID NO: 266546 - RNA, 22 nt, Human
ucauggcuuuuucacuguucgc

SEQ ID NO: 266547 - RNA, 23 nt, Human
aaagagacugauacggaaguucc

SEQ ID NO: 266548 - RNA, 22 nt, Human
uucuuagaugauuaaugauggg

SEQ ID NO: 266549 - RNA, 22 nt, Human
caggagcuacucagguuggguu

SEQ ID NO: 266550 - RNA, 22 nt, Human
uaaauuaaagauuggagaagga

SEQ ID NO: 266551 - RNA, 22 nt, Human
aauucaaucuguagauugugau

SEQ ID NO: 266552 - RNA, 22 nt, Human
gagcugaauuacggugagucau

SEQ ID NO: 266553 - RNA, 22 nt, Human
ccaggcccuugcaagucccacc

SEQ ID NO: 266554 - RNA, 22 nt, Human
cugccugcuuaccaugcaucag

SEQ ID NO: 266555 - RNA, 22 nt, Human
agaaggggagaagcuaccagga

SEQ ID NO: 266556 - RNA, 22 nt, Human
aagguguuauagcugaggaaua

SEQ ID NO: 266557 - RNA, 22 nt, Human
acugggccuggauuggcguguc

SEQ ID NO: 266558 - RNA, 22 nt, Human
agaugugacugggcaaguuacu

SEQ ID NO: 266559 - RNA, 22 nt, Human
augaggugauggacauauuaac

SEQ ID NO: 266560 - RNA, 22 nt, Human
aacuuuuagacuuggguauaaa

SEQ ID NO: 266561 - RNA, 22 nt, Human
agauacaaaagauaagauuuag

SEQ ID NO: 266562 - RNA, 22 nt, Human
gaggaaggucccaucagaauuu

SEQ ID NO: 266563 - RNA, 22 nt, Human
ggcucugccugcccagcagcac

SEQ ID NO: 266564 - RNA, 22 nt, Human
gaauuuuaucuuauuacuugca

SEQ ID NO: 266565 - RNA, 22 nt, Human
auucucagaucuuagaggaaua

SEQ ID NO: 266566 - RNA, 22 nt, Human
aaggcuggagaugguuggaaug

SEQ ID NO: 266567 - RNA, 22 nt, Human
caggguuauacagcugaacaaa

SEQ ID NO: 266568 - RNA, 22 nt, Human
uguggggcagcuagccggccug

SEQ ID NO: 266569 - RNA, 22 nt, Human
ugccugggaucugugcccuuug

SEQ ID NO: 266570 - RNA, 22 nt, Human
ugucacauugaauaugauuuau

SEQ ID NO: 266571 - RNA, 22 nt, Human
cuuuacagauggauaauuguuu

SEQ ID NO: 266572 - RNA, 20 nt, Human
cauauauaccuagaagugga

SEQ ID NO: 266573 - RNA, 22 nt, Human
uugagucugcccaaauuaagaa

SEQ ID NO: 266574 - RNA, 22 nt, Human
uccucuggauauaagccucacc

SEQ ID NO: 266575 - RNA, 22 nt, Human
agggaagggaaaaacacucguc

SEQ ID NO: 266576 - RNA, 22 nt, Human
cagcuccuagaucggcgaagug

SEQ ID NO: 266577 - RNA, 22 nt, Human
uccucaguuuucuaguauggca

SEQ ID NO: 266578 - RNA, 22 nt, Human
cauccgcaugcaagugcugucc

SEQ ID NO: 266579 - RNA, 22 nt, Human
aacuuaggaaaauaaggcauga

SEQ ID NO: 266580 - RNA, 22 nt, Human
caggagcucacagucuuugggu

SEQ ID NO: 266581 - RNA, 22 nt, Human
ucugaaaguaucuggaucuuuu

SEQ ID NO: 266582 - RNA, 19 nt, Human
ugggagaggcaacagagua

SEQ ID NO: 266583 - RNA, 22 nt, Human
gggggcuggaauauccaucaac

SEQ ID NO: 266584 - RNA, 22 nt, Human
uacauguuugguaaaugauggc

SEQ ID NO: 266585 - RNA, 23 nt, Human
ucagugucuaguuguggaauuga

SEQ ID NO: 266586 - RNA, 22 nt, Human
ggcuuccagcugggccuuggag

SEQ ID NO: 266587 - RNA, 22 nt, Human
uuaugugcuucaacugagccua

SEQ ID NO: 266588 - RNA, 22 nt, Human
gcacuggagauacagagaugaa

SEQ ID NO: 266589 - RNA, 22 nt, Human
gcaucuaaacuugcaucauugu

SEQ ID NO: 266590 - RNA, 20 nt, Human
gugccuggagaagaggcugu

SEQ ID NO: 266591 - RNA, 22 nt, Human
uuucauguuuucuuaaauggca

SEQ ID NO: 266592 - RNA, 22 nt, Human
uucacauuucucugcuguuuga

SEQ ID NO: 266593 - RNA, 22 nt, Human
guuagaaacgcaggcucuccgg

SEQ ID NO: 266594 - RNA, 22 nt, Human
uaagaaucgauguuuauuuaga

SEQ ID NO: 266595 - RNA, 22 nt, Human
agggaccugucaaugacaguua

SEQ ID NO: 266596 - RNA, 19 nt, Human
aaggugucccaacugcguu

SEQ ID NO: 266597 - RNA, 22 nt, Human
ugaugagggcaguucuuguugc

SEQ ID NO: 266598 - RNA, 22 nt, Human
gucuccugagacugcagucacc

SEQ ID NO: 266599 - RNA, 22 nt, Human
gggcccucugcagcugcccagg

SEQ ID NO: 266600 - RNA, 22 nt, Human
aucucccaaauuagccucuuga

SEQ ID NO: 266601 - RNA, 22 nt, Human
gggugggaacaggaugccagga

SEQ ID NO: 266602 - RNA, 22 nt, Human
aaauacaauuucaggcuguaau

SEQ ID NO: 266603 - RNA, 22 nt, Human
agugugcauuccucuccucagg

SEQ ID NO: 266604 - RNA, 22 nt, Human
aaucagcaaaugcuuacucagg

SEQ ID NO: 266605 - RNA, 19 nt, Human
uuagguauuauugcuuucc

SEQ ID NO: 266606 - RNA, 22 nt, Human
caggaaaugcguaguugaacuu

SEQ ID NO: 266607 - RNA, 22 nt, Human
ggcaggcaggucuucauggccc

SEQ ID NO: 266608 - RNA, 22 nt, Human
ccucaggccugccagagcccca

SEQ ID NO: 266609 - RNA, 22 nt, Human
uuuauuggauauuuacaagaua

SEQ ID NO: 266610 - RNA, 22 nt, Human
cagagggcccccuggccacagu

SEQ ID NO: 266611 - RNA, 22 nt, Human
gaaggcuugauugaggaaugcc

SEQ ID NO: 266612 - RNA, 22 nt, Human
uccugaggaaugugaagagaac

SEQ ID NO: 266613 - RNA, 22 nt, Human
uuugacaugaaguagcuuauaa

SEQ ID NO: 266614 - RNA, 22 nt, Human
cacagccuuuaggguacacaca

SEQ ID NO: 266615 - RNA, 22 nt, Human
gaaaacuaacggaaaaguuagg

SEQ ID NO: 266616 - RNA, 22 nt, Human
cugggcucuggggucccggugc

SEQ ID NO: 266617 - RNA, 21 nt, Human
ucagagaacccggcaggcaag

SEQ ID NO: 266618 - RNA, 22 nt, Human
ggccuggcauggggacuaaggg

SEQ ID NO: 266619 - RNA, 22 nt, Human
accuugaacccagcuugcugca

SEQ ID NO: 266620 - RNA, 22 nt, Human
augcccuggggcuaccucugag

SEQ ID NO: 266621 - RNA, 22 nt, Human
uucuucuugaaacuuuagguug

SEQ ID NO: 266622 - RNA, 23 nt, Human
uugcugccugagccuuccucugg

SEQ ID NO: 266623 - RNA, 22 nt, Human
aacuucaccuuuuugccacacu

SEQ ID NO: 266624 - RNA, 22 nt, Human
acagacugugagucucauuuuc

SEQ ID NO: 266625 - RNA, 22 nt, Human
ucccugggacucagacauggaa

SEQ ID NO: 266626 - RNA, 22 nt, Human
ggcaacucuucuugcaaugggg

SEQ ID NO: 266627 - RNA, 21 nt, Human
caguuacacaaguguuaccag

SEQ ID NO: 266628 - RNA, 18 nt, Human
cccagcuuagcgccccuc

SEQ ID NO: 266629 - RNA, 22 nt, Human
uguucuuugccagugauuuaau

SEQ ID NO: 266630 - RNA, 22 nt, Human
gaggcuccuugaaagggggacu

SEQ ID NO: 266631 - RNA, 22 nt, Human
ugaggccuuaguaacccugcac

SEQ ID NO: 266632 - RNA, 22 nt, Human
cagcuccugccugggcagcugu

SEQ ID NO: 266633 - RNA, 22 nt, Human
gucuagaaauguucucaggggu

SEQ ID NO: 266634 - RNA, 22 nt, Human
acugagcauaaauaugugucca

SEQ ID NO: 266635 - RNA, 22 nt, Human
gugagggauaauaugcgggguu

SEQ ID NO: 266636 - RNA, 22 nt, Human
acuuuagaaguaaggaugaguu

SEQ ID NO: 266637 - RNA, 22 nt, Human
ugucugucuguccuucucauua

SEQ ID NO: 266638 - RNA, 19 nt, Human
aggcuuggaacagccuuau

SEQ ID NO: 266639 - RNA, 22 nt, Human
ccuccuggccugugcagagccc

SEQ ID NO: 266640 - RNA, 22 nt, Human
ggaagugguagagccaugagug

SEQ ID NO: 266641 - RNA, 22 nt, Human
aguaggcauugugaaacugcau

SEQ ID NO: 266642 - RNA, 22 nt, Human
caucaaaauuagacauuguuga

SEQ ID NO: 266643 - RNA, 22 nt, Human
aauguucagaggacaauauaaa

SEQ ID NO: 266644 - RNA, 22 nt, Human
acaacacauguguauaugugug

SEQ ID NO: 266645 - RNA, 22 nt, Human
cagagccaacgccaccugccca

SEQ ID NO: 266646 - RNA, 21 nt, Human
gcuuuagauuuagugagccag

SEQ ID NO: 266647 - RNA, 22 nt, Human
guccucagcaccagaacuaggg

SEQ ID NO: 266648 - RNA, 22 nt, Human
uucauugauuuccuuggaauaa

SEQ ID NO: 266649 - RNA, 22 nt, Human
uguacacaaccuacagucugcu

SEQ ID NO: 266650 - RNA, 22 nt, Human
gagcuggucaguuucaggagag

SEQ ID NO: 266651 - RNA, 22 nt, Human
uuuccagugauugcugcucuca

SEQ ID NO: 266652 - RNA, 22 nt, Human
cuuaggauuuaauuucagacuc

SEQ ID NO: 266653 - RNA, 22 nt, Human
gagaggccauggggugggaugc

SEQ ID NO: 266654 - RNA, 19 nt, Human
uaugacaaguacuaguucu

SEQ ID NO: 266655 - RNA, 22 nt, Human
ugccaaauugcccuauaaauga

SEQ ID NO: 266656 - RNA, 22 nt, Human
uucucuggagggcugcccggcc

SEQ ID NO: 266657 - RNA, 22 nt, Human
uuccaggagccacacaggggcg

SEQ ID NO: 266658 - RNA, 22 nt, Human
ucugagcuguggccauucuucc

SEQ ID NO: 266659 - RNA, 22 nt, Human
cuggaaggcagagguugcagug

SEQ ID NO: 266660 - RNA, 22 nt, Human
uucauucauguauugucuaugg

SEQ ID NO: 266661 - RNA, 22 nt, Human
ugagccagucucucagaacccu

SEQ ID NO: 266662 - RNA, 19 nt, Human
gaugcucauucagguggaa

SEQ ID NO: 266663 - RNA, 22 nt, Human
cugaaagcaaaguaauucuuaa

SEQ ID NO: 266664 - RNA, 22 nt, Human
ugugacuggaguccagcccacu

SEQ ID NO: 266665 - RNA, 22 nt, Human
auuucucaguuccuacuguuua

SEQ ID NO: 266666 - RNA, 22 nt, Human
ccuaagaauuaaugaauacacc

SEQ ID NO: 266667 - RNA, 22 nt, Human
uacacauguccaaggugucacc

SEQ ID NO: 266668 - RNA, 22 nt, Human
gccucaggccuauagcugcugu

SEQ ID NO: 266669 - RNA, 22 nt, Human
uuuguguuuucccauacuauug

SEQ ID NO: 266670 - RNA, 22 nt, Human
ugcucuggaauaguccuaggca

SEQ ID NO: 266671 - RNA, 21 nt, Human
aggcaauucgaaguugcagac

SEQ ID NO: 266672 - RNA, 22 nt, Human
aaaggcaucuagccaaguugag

SEQ ID NO: 266673 - RNA, 22 nt, Human
ugggaacaccugcugcccagug

SEQ ID NO: 266674 - RNA, 22 nt, Human
aguuuaacuuuguaaacgugag

SEQ ID NO: 266675 - RNA, 22 nt, Human
uugcagcuucaagcagguugac

SEQ ID NO: 266676 - RNA, 22 nt, Human
auuugcuuaucuccacaguugu

SEQ ID NO: 266677 - RNA, 22 nt, Human
cccagcccagcguucgaggggu

SEQ ID NO: 266678 - RNA, 22 nt, Human
gcucccugcauuucccacccuu

SEQ ID NO: 266679 - RNA, 19 nt, Human
ugccaggaauacuccagaa

SEQ ID NO: 266680 - RNA, 22 nt, Human
cuguuauuuagaacauggaauc

SEQ ID NO: 266681 - RNA, 22 nt, Human
uuccuggcuggcgguuuuggug

SEQ ID NO: 266682 - RNA, 22 nt, Human
uaccaugucaagcgagacaugu

SEQ ID NO: 266683 - RNA, 22 nt, Human
acaguacaaaacccaccagagg

SEQ ID NO: 266684 - RNA, 22 nt, Human
uaaaugugcacagguuagaagg

SEQ ID NO: 266685 - RNA, 22 nt, Human
ccaugcugugacacaguaguua

SEQ ID NO: 266686 - RNA, 20 nt, Human
ggggcugcaugcagagaaga

SEQ ID NO: 266687 - RNA, 22 nt, Human
ucuuggcaguggaauaccagga

SEQ ID NO: 266688 - RNA, 21 nt, Human
ugcaugcuauguuuuuauuuc

SEQ ID NO: 266689 - RNA, 22 nt, Human
ucuggcuucaacuuuacugaaa

SEQ ID NO: 266690 - RNA, 22 nt, Human
aucuucuucaaggaucuggagc

SEQ ID NO: 266691 - RNA, 22 nt, Human
uguaaugggcuacuaggaagag

SEQ ID NO: 266692 - RNA, 22 nt, Human
ucaguuacucugauguccugug

SEQ ID NO: 266693 - RNA, 20 nt, Human
guucaugucucaaauagaaa

SEQ ID NO: 266694 - RNA, 22 nt, Human
uuguuacacauaauaacauuuu

SEQ ID NO: 266695 - RNA, 22 nt, Human
cauguuaacuaagauuaacuau

SEQ ID NO: 266696 - RNA, 22 nt, Human
gcagcaggauggccaauugcca

SEQ ID NO: 266697 - RNA, 22 nt, Human
guucuucacauuucauugagga

SEQ ID NO: 266698 - RNA, 22 nt, Human
agagaucugucuacuauuuaag

SEQ ID NO: 266699 - RNA, 23 nt, Human
aguggcuggacagacuuuccugg

SEQ ID NO: 266700 - RNA, 22 nt, Human
ucuccaggugacucugauguau

SEQ ID NO: 266701 - RNA, 21 nt, Human
ggagcugcaggagccgaaggc

SEQ ID NO: 266702 - RNA, 22 nt, Human
acaacaguccaguauagacugu

SEQ ID NO: 266703 - RNA, 22 nt, Human
ucagugcaggaauuuccuuaga

SEQ ID NO: 266704 - RNA, 22 nt, Human
aaagcaauuacaaaagggauaa

SEQ ID NO: 266705 - RNA, 22 nt, Human
cuuccuuccacaccuucagaau

SEQ ID NO: 266706 - RNA, 22 nt, Human
aauguuuucucugugaacacau

SEQ ID NO: 266707 - RNA, 22 nt, Human
guauucaguuugauugucuaca

SEQ ID NO: 266708 - RNA, 22 nt, Human
ugugagaauuccugaucacagg

SEQ ID NO: 266709 - RNA, 22 nt, Human
auacagaagccuguauuucugg

SEQ ID NO: 266710 - RNA, 22 nt, Human
ucucccaggcugcccuguggac

SEQ ID NO: 266711 - RNA, 22 nt, Human
cagagacaggaaucagcugcag

SEQ ID NO: 266712 - RNA, 22 nt, Human
uacuucuguuagcucugagagu

SEQ ID NO: 266713 - RNA, 22 nt, Human
uaugucuuuugcuugcaaauag

SEQ ID NO: 266714 - RNA, 22 nt, Human
agcuaagaacuugagcucugga

SEQ ID NO: 266715 - RNA, 23 nt, Human
cagcucagcacauaggagguacu

SEQ ID NO: 266716 - RNA, 22 nt, Human
ggagcagaugucuucauggccu

SEQ ID NO: 266717 - RNA, 20 nt, Human
aggagucccugugcucucuc

SEQ ID NO: 266718 - RNA, 22 nt, Human
uggguccucugagagggcagcg

SEQ ID NO: 266719 - RNA, 22 nt, Human
ggccuuagagaccaccuagucu

SEQ ID NO: 266720 - RNA, 22 nt, Human
ccaggucuuggcccccggaccu

SEQ ID NO: 266721 - RNA, 22 nt, Human
cugacuguuugcugaaaggucu

SEQ ID NO: 266722 - RNA, 22 nt, Human
gcacuggaaauaccuagaugaa

SEQ ID NO: 266723 - RNA, 22 nt, Human
uuugcugaacuaaaauucugaa

SEQ ID NO: 266724 - RNA, 22 nt, Human
agaagccagucgcucucccgca

SEQ ID NO: 266725 - RNA, 22 nt, Human
ugcaaggauauuuagucuagug

SEQ ID NO: 266726 - RNA, 22 nt, Human
ucugugcaccuucuaaugagua

SEQ ID NO: 266727 - RNA, 22 nt, Human
guggcagugccguuugguucag

SEQ ID NO: 266728 - RNA, 22 nt, Human
gggacccugggaggcuggcgca

SEQ ID NO: 266729 - RNA, 22 nt, Human
auguaucaacaaauuguacagu

SEQ ID NO: 266730 - RNA, 22 nt, Human
auuucuguaguccacauucuuu

SEQ ID NO: 266731 - RNA, 22 nt, Human
gugcaaaaguaauugcuguuuu

SEQ ID NO: 266732 - RNA, 22 nt, Human
ugcugggggcuuucuggauacc

SEQ ID NO: 266733 - RNA, 22 nt, Human
ccaguguucugguguucauuuc

SEQ ID NO: 266734 - RNA, 22 nt, Human
uggagcugucacucagaaccaa

SEQ ID NO: 266735 - RNA, 22 nt, Human
uggcaaaggaaccuauuuuaaa

SEQ ID NO: 266736 - RNA, 22 nt, Human
agugaugugggagaguauagcu

SEQ ID NO: 266737 - RNA, 22 nt, Human
cuuccuucugaagcauagaagc

SEQ ID NO: 266738 - RNA, 22 nt, Human
uuuagauaaugcucaagcaauu

SEQ ID NO: 266739 - RNA, 22 nt, Human
gccugcugccacccuggcuccg

SEQ ID NO: 266740 - RNA, 22 nt, Human
auccugggaaguggccuccucc

SEQ ID NO: 266741 - RNA, 23 nt, Human
uaucuuuuucaauguuggaaaua

SEQ ID NO: 266742 - RNA, 22 nt, Human
cuccccaaagauaacggcuucu

SEQ ID NO: 266743 - RNA, 22 nt, Human
gggcugcugccaccagguggau

SEQ ID NO: 266744 - RNA, 22 nt, Human
ucaggggcuugaggugcauguc

SEQ ID NO: 266745 - RNA, 22 nt, Human
ggcacgugccuaaggagcaggc

SEQ ID NO: 266746 - RNA, 22 nt, Human
uuugcugugggauauccaugug

SEQ ID NO: 266747 - RNA, 21 nt, Human
cuacacagcuuucuauaggaa

SEQ ID NO: 266748 - RNA, 22 nt, Human
ucccugaguuuucuuucugacu

SEQ ID NO: 266749 - RNA, 22 nt, Human
ccagcugugccggggaccuggg

SEQ ID NO: 266750 - RNA, 22 nt, Human
cuguccuguacuuugaggcccu

SEQ ID NO: 266751 - RNA, 22 nt, Human
uagggcugcagaacaauggccu

SEQ ID NO: 266752 - RNA, 22 nt, Human
ccagacaggaacacacaucucc

SEQ ID NO: 266753 - RNA, 22 nt, Human
augucuuuggcuuugacauggc

SEQ ID NO: 266754 - RNA, 22 nt, Human
uacaugcucaguaacuuucagu

SEQ ID NO: 266755 - RNA, 22 nt, Human
gcugcucucagagcucaugcug

SEQ ID NO: 266756 - RNA, 22 nt, Human
uccaggaggccucauuuccugu

SEQ ID NO: 266757 - RNA, 22 nt, Human
ucugccuggauuccauucucca

SEQ ID NO: 266758 - RNA, 22 nt, Human
guaacuuaccauuguagcauca

SEQ ID NO: 266759 - RNA, 22 nt, Human
cccacucccugcacgccugccg

SEQ ID NO: 266760 - RNA, 22 nt, Human
uguggaugaauaaagugcagac

SEQ ID NO: 266761 - RNA, 22 nt, Human
uuuuauagcugaauaguauucc

SEQ ID NO: 266762 - RNA, 22 nt, Human
ccucugagugacagccuccucu

SEQ ID NO: 266763 - RNA, 22 nt, Human
aagucuaguauccuucuugacu

SEQ ID NO: 266764 - RNA, 22 nt, Human
cauaucuggagacuccuggucu

SEQ ID NO: 266765 - RNA, 22 nt, Human
gaugaauuguuauggcuacgag

SEQ ID NO: 266766 - RNA, 21 nt, Human
uccugcagaaugccuuccuac

SEQ ID NO: 266767 - RNA, 22 nt, Human
aauguuaguaacuugaguauuu

SEQ ID NO: 266768 - RNA, 19 nt, Human
cucucuccaguggcuggcu

SEQ ID NO: 266769 - RNA, 22 nt, Human
ccagagcugaggagaugggcuu

SEQ ID NO: 266770 - RNA, 22 nt, Human
gaggcucagagggagcaugguc

SEQ ID NO: 266771 - RNA, 22 nt, Human
gcugcagggggugggcgucucc

SEQ ID NO: 266772 - RNA, 22 nt, Human
gagaaggaguagcugaccuggg

SEQ ID NO: 266773 - RNA, 22 nt, Human
gagcacaggcuuugguggacac

SEQ ID NO: 266774 - RNA, 22 nt, Human
ggcuuugcuucuccagaugcuu

SEQ ID NO: 266775 - RNA, 19 nt, Human
uccugcagguggcuugcag

SEQ ID NO: 266776 - RNA, 22 nt, Human
ucuauguuagagauacauccua

SEQ ID NO: 266777 - RNA, 22 nt, Human
caguuuuaugucgaauguauac

SEQ ID NO: 266778 - RNA, 22 nt, Human
ucaaaggaaacacaagcuucug

SEQ ID NO: 266779 - RNA, 22 nt, Human
uguguucuccaacuguagauuu

SEQ ID NO: 266780 - RNA, 22 nt, Human
gagggcagagucuaaugaugca

SEQ ID NO: 266781 - RNA, 22 nt, Human
cccacaggcaggugcaugggcu

SEQ ID NO: 266782 - RNA, 22 nt, Human
uuguuucuccagucuaggaaaa

SEQ ID NO: 266783 - RNA, 22 nt, Human
ucuggcuguguaugagaguuuu

SEQ ID NO: 266784 - RNA, 22 nt, Human
uuacuuuccagcucuagcuuca

SEQ ID NO: 266785 - RNA, 22 nt, Human
uuccaggaacagaugaagguug

SEQ ID NO: 266786 - RNA, 22 nt, Human
uagaaaagauaacauucugugc

SEQ ID NO: 266787 - RNA, 19 nt, Human
agucucacccaagcagucu

SEQ ID NO: 266788 - RNA, 22 nt, Human
ccccacagccgccagcagggag

SEQ ID NO: 266789 - RNA, 22 nt, Human
cagcaagacuucagggcuuggu

SEQ ID NO: 266790 - RNA, 22 nt, Human
ucuccagggacugaggcuggag

SEQ ID NO: 266791 - RNA, 19 nt, Human
ggggccugugauggucaca

SEQ ID NO: 266792 - RNA, 22 nt, Human
gacagaguuguugauguaugcu

SEQ ID NO: 266793 - RNA, 22 nt, Human
cacauucuugaguuacagucua

SEQ ID NO: 266794 - RNA, 22 nt, Human
uuuauucagcagcagcaguggu

SEQ ID NO: 266795 - RNA, 22 nt, Human
cugggagagaagcgaagcuggg

SEQ ID NO: 266796 - RNA, 22 nt, Human
uggcccugcuaugauccugcaa

SEQ ID NO: 266797 - RNA, 22 nt, Human
ucaggcugggcuccucucccca

SEQ ID NO: 266798 - RNA, 22 nt, Human
aaugaucacugcaguugaugag

SEQ ID NO: 266799 - RNA, 22 nt, Human
augcagaagacugaaaagcuga

SEQ ID NO: 266800 - RNA, 22 nt, Human
ggcagugaaucugagagccugg

SEQ ID NO: 266801 - RNA, 22 nt, Human
uguggcaggaagagcuucugag

SEQ ID NO: 266802 - RNA, 22 nt, Human
ucuagagccaaagucuuggggg

SEQ ID NO: 266803 - RNA, 22 nt, Human
gcagggcagcucacugugguuc

SEQ ID NO: 266804 - RNA, 22 nt, Human
ccccagcagacucagggcaggu

SEQ ID NO: 266805 - RNA, 22 nt, Human
auuccucaaagguagcccauua

SEQ ID NO: 266806 - RNA, 22 nt, Human
ucuggcaggguguguauuuaca

SEQ ID NO: 266807 - RNA, 22 nt, Human
gagcccucuugucuauauggua

SEQ ID NO: 266808 - RNA, 22 nt, Human
ggcaaaaaccacaauuacuuuu

SEQ ID NO: 266809 - RNA, 22 nt, Human
uccucagauaccuggcagauca

SEQ ID NO: 266810 - RNA, 22 nt, Human
gcagccaggaagccuuucccuc

SEQ ID NO: 266811 - RNA, 23 nt, Human
acaguuauagcugugaauaacau

SEQ ID NO: 266812 - RNA, 22 nt, Human
ggaagaugagaaguggggcucc

SEQ ID NO: 266813 - RNA, 22 nt, Human
ugaauagagcugcaguggacau

SEQ ID NO: 266814 - RNA, 22 nt, Human
uggcaugaagucagcagcuggg

SEQ ID NO: 266815 - RNA, 22 nt, Human
caaauuuagguaacagucugua

SEQ ID NO: 266816 - RNA, 22 nt, Human
uaaguuuuaagcaaucugauaa

SEQ ID NO: 266817 - RNA, 22 nt, Human
acagaugaauuuuaauuguguu

SEQ ID NO: 266818 - RNA, 22 nt, Human
gagggccacguucagggcucuc

SEQ ID NO: 266819 - RNA, 22 nt, Human
gaagguucuguguacacuacuu

SEQ ID NO: 266820 - RNA, 17 nt, Human
acagggcagaaacagcu

SEQ ID NO: 266821 - RNA, 22 nt, Human
gagucagacagggucacccaga

SEQ ID NO: 266822 - RNA, 22 nt, Human
gaacaaacagaagaggcggaac

SEQ ID NO: 266823 - RNA, 22 nt, Human
gacagagauugaaucaggaaau

SEQ ID NO: 266824 - RNA, 22 nt, Human
uucacagugccagggggcaggc

SEQ ID NO: 266825 - RNA, 22 nt, Human
uguucauugcccccuguguaaa

SEQ ID NO: 266826 - RNA, 22 nt, Human
aggucacacaacugucagaggc

SEQ ID NO: 266827 - RNA, 22 nt, Human
guacacagaugcuugagaaucu

SEQ ID NO: 266828 - RNA, 23 nt, Human
uuucuguuggguauauauccaag

SEQ ID NO: 266829 - RNA, 22 nt, Human
auaauuaucucagacacuuguu

SEQ ID NO: 266830 - RNA, 22 nt, Human
uuucuuguuucauggugucuca

SEQ ID NO: 266831 - RNA, 22 nt, Human
ucagagcacuggugcuaccuug

SEQ ID NO: 266832 - RNA, 22 nt, Human
cacugaaauauuaauaucuuau

SEQ ID NO: 266833 - RNA, 22 nt, Human
uuagggcaggcaugagagaacu

SEQ ID NO: 266834 - RNA, 22 nt, Human
cucccagguugauucuuucccu

SEQ ID NO: 266835 - RNA, 22 nt, Human
aggcucugaggcagauuuucgu

SEQ ID NO: 266836 - RNA, 22 nt, Human
uuuaaugaauaauucaaaucug

SEQ ID NO: 266837 - RNA, 22 nt, Human
aauaggaaaauauuuaacaaga

SEQ ID NO: 266838 - RNA, 20 nt, Human
ggcauccuucugacccagag

SEQ ID NO: 266839 - RNA, 22 nt, Human
acagaagugucuuuuucauuca

SEQ ID NO: 266840 - RNA, 23 nt, Human
uuaaggagcuugcacucugggug

SEQ ID NO: 266841 - RNA, 22 nt, Human
gcagacaucaccucagugcuau

SEQ ID NO: 266842 - RNA, 22 nt, Human
ucuguagcaagugagaggcauu

SEQ ID NO: 266843 - RNA, 22 nt, Human
uaagacacauugagaaacacaa

SEQ ID NO: 266844 - RNA, 22 nt, Human
gcagagcacccugcagugguau

SEQ ID NO: 266845 - RNA, 22 nt, Human
gguguccuuagaaagcagaccu

SEQ ID NO: 266846 - RNA, 22 nt, Human
acaauuccacauggcaugcagg

SEQ ID NO: 266847 - RNA, 22 nt, Human
ucuuuccaaggacucuguagca

SEQ ID NO: 266848 - RNA, 22 nt, Human
ggcuucugguaaagaccacacc

SEQ ID NO: 266849 - RNA, 22 nt, Human
agagccagcaacucuagcccug

SEQ ID NO: 266850 - RNA, 22 nt, Human
uccugugaagaauagcacucaa

SEQ ID NO: 266851 - RNA, 22 nt, Human
auggcagcagggcuugauuaug

SEQ ID NO: 266852 - RNA, 22 nt, Human
cagccagggucaggcagcuucu

SEQ ID NO: 266853 - RNA, 22 nt, Human
aaucugguuugacaacuuuugu

SEQ ID NO: 266854 - RNA, 22 nt, Human
aaaguccuuuuugccaugcaag

SEQ ID NO: 266855 - RNA, 22 nt, Human
uugcaggguugacacugccugc

SEQ ID NO: 266856 - RNA, 21 nt, Human
agagacugucacugcaguacc

SEQ ID NO: 266857 - RNA, 22 nt, Human
gugcaggguagcgacggcagga

SEQ ID NO: 266858 - RNA, 22 nt, Human
acagcaggcacacaaggauaga

SEQ ID NO: 266859 - RNA, 22 nt, Human
caccauuuucuaaaaauaugac

SEQ ID NO: 266860 - RNA, 22 nt, Human
agcuuccacaucugucuucagu

SEQ ID NO: 266861 - RNA, 22 nt, Human
cagcccugaguuagcccacgga

SEQ ID NO: 266862 - RNA, 22 nt, Human
auacuuaugauaaauaauugcu

SEQ ID NO: 266863 - RNA, 22 nt, Human
ccuuucuguguugcccuauuug

SEQ ID NO: 266864 - RNA, 22 nt, Human
ugcaugugucgggccugugcua

SEQ ID NO: 266865 - RNA, 22 nt, Human
auuacugaggcaaaguaguuuu

SEQ ID NO: 266866 - RNA, 22 nt, Human
uccaggcccacucgguggggcu

SEQ ID NO: 266867 - RNA, 22 nt, Human
ggcaccaggcugggcauaggcc

SEQ ID NO: 266868 - RNA, 18 nt, Human
cuccucccuaagggcuca

SEQ ID NO: 266869 - RNA, 19 nt, Human
ugugaccccagacaagcug

SEQ ID NO: 266870 - RNA, 23 nt, Human
ugagagccuggcagccuggguuc

SEQ ID NO: 266871 - RNA, 22 nt, Human
aucugcuugaaugagcaacagg

SEQ ID NO: 266872 - RNA, 22 nt, Human
uaagcaaaggauuuugaucuuu

SEQ ID NO: 266873 - RNA, 21 nt, Human
agcgucaauaucgucaacagg

SEQ ID NO: 266874 - RNA, 22 nt, Human
uuuuauucucagcuccagagag

SEQ ID NO: 266875 - RNA, 22 nt, Human
uuaauagauuugauuuuaaagg

SEQ ID NO: 266876 - RNA, 22 nt, Human
uggaauuaauaggggauauaca

SEQ ID NO: 266877 - RNA, 22 nt, Human
augcaauaguaauucuagucug

SEQ ID NO: 266878 - RNA, 22 nt, Human
ucuccacaagcuuucuccuuuu

SEQ ID NO: 266879 - RNA, 22 nt, Human
uuucugaauaacucuaugauau

SEQ ID NO: 266880 - RNA, 19 nt, Human
gccaggccuggaccugcag

SEQ ID NO: 266881 - RNA, 22 nt, Human
cauguguguggcugacaauuuu

SEQ ID NO: 266882 - RNA, 22 nt, Human
aggcugccucugcaggaucccu

SEQ ID NO: 266883 - RNA, 22 nt, Human
uagcaacagcaauagugguauu

SEQ ID NO: 266884 - RNA, 22 nt, Human
uagcaaaaacugcaguuacuuu

SEQ ID NO: 266885 - RNA, 20 nt, Human
ccuccuggucaggugugcag

SEQ ID NO: 266886 - RNA, 22 nt, Human
ggucuggccuccgggcaggugg

SEQ ID NO: 266887 - RNA, 22 nt, Human
uaguguuccagaagcaaacaag

SEQ ID NO: 266888 - RNA, 22 nt, Human
cagagcucugacagcuacagcc

SEQ ID NO: 266889 - RNA, 22 nt, Human
auuuucaucgcuagguuggccu

SEQ ID NO: 266890 - RNA, 22 nt, Human
cugccagcaaugugaccaugcu

SEQ ID NO: 266891 - RNA, 22 nt, Human
aaagugauuuaaguaccucagg

SEQ ID NO: 266892 - RNA, 22 nt, Human
aaaggcuucuauuggacguugc

SEQ ID NO: 266893 - RNA, 22 nt, Human
uuccugaaugcuguugugcugu

SEQ ID NO: 266894 - RNA, 22 nt, Human
ugcugguaccgcgccuccgcca

SEQ ID NO: 266895 - RNA, 22 nt, Human
cuaaauuaucaugagaauuaug

SEQ ID NO: 266896 - RNA, 22 nt, Human
ggcuuuguggggugaaguaaag

SEQ ID NO: 266897 - RNA, 22 nt, Human
auuaaaauuccaagguaugcca

SEQ ID NO: 266898 - RNA, 22 nt, Human
uucugggcaccaccacagacuu

SEQ ID NO: 266899 - RNA, 22 nt, Human
ccaggaaggaagcagggguuuc

SEQ ID NO: 266900 - RNA, 22 nt, Human
ugaggccucauuuagggagagg

SEQ ID NO: 266901 - RNA, 22 nt, Human
ugaaggagcucaggagauaguc

SEQ ID NO: 266902 - RNA, 21 nt, Human
gagagggcauuauaggaagug

SEQ ID NO: 266903 - RNA, 22 nt, Human
gaagaaucugaggacagucauu

SEQ ID NO: 266904 - RNA, 22 nt, Human
uggcagauaaacaugugauaaa

SEQ ID NO: 266905 - RNA, 21 nt, Human
aacuuuagaaagacugggaag

SEQ ID NO: 266906 - RNA, 22 nt, Human
ccugcuguuuucuucacuucag

SEQ ID NO: 266907 - RNA, 22 nt, Human
cggcuucuuuuaagguugcuga

SEQ ID NO: 266908 - RNA, 16 nt, Human
gaggcuggcagauguc

SEQ ID NO: 266909 - RNA, 22 nt, Human
gauaauuugauaccucaaucag

SEQ ID NO: 266910 - RNA, 21 nt, Human
ccugugcuaucagcuuggguu

SEQ ID NO: 266911 - RNA, 22 nt, Human
uuacacuuguaaauggcaugua

SEQ ID NO: 266912 - RNA, 23 nt, Human
gguccacccgagccugcagcuuc

SEQ ID NO: 266913 - RNA, 17 nt, Human
gagcagggaugcgguuc

SEQ ID NO: 266914 - RNA, 22 nt, Human
agaggaguauuuucuaagggaa

SEQ ID NO: 266915 - RNA, 22 nt, Human
ccccuuggcugcucucaagucc

SEQ ID NO: 266916 - RNA, 22 nt, Human
cuggacacacuggagucuggca

SEQ ID NO: 266917 - RNA, 22 nt, Human
ggcaugcaugcaagguggugua

SEQ ID NO: 266918 - RNA, 22 nt, Human
ccucacccagucaccuaggugg

SEQ ID NO: 266919 - RNA, 22 nt, Human
auccagagacuggggcugggau

SEQ ID NO: 266920 - RNA, 22 nt, Human
gcugugugacugagagccuggc

SEQ ID NO: 266921 - RNA, 22 nt, Human
ccuguaggcgagggauggacag

SEQ ID NO: 266922 - RNA, 22 nt, Human
gaaguuccucguaggagucucu

SEQ ID NO: 266923 - RNA, 21 nt, Human
ggcuccugcuuugugaggggc

SEQ ID NO: 266924 - RNA, 22 nt, Human
gagccaggaggcagagacugca

SEQ ID NO: 266925 - RNA, 22 nt, Human
gugccugggacuugcuccggau

SEQ ID NO: 266926 - RNA, 22 nt, Human
ugggacaguuguccuccacucu

SEQ ID NO: 266927 - RNA, 22 nt, Human
aagcaauagcaacaacuuuaca

SEQ ID NO: 266928 - RNA, 19 nt, Human
ccuugccugucccugcagc

SEQ ID NO: 266929 - RNA, 22 nt, Human
cuggcuugcagcucaucauaaa

SEQ ID NO: 266930 - RNA, 22 nt, Human
uccugccuuagagcaaggaaaa

SEQ ID NO: 266931 - RNA, 22 nt, Human
ugggaaagacucaggacaggag

SEQ ID NO: 266932 - RNA, 22 nt, Human
uuucucauuuagaguggcaggg

SEQ ID NO: 266933 - RNA, 22 nt, Human
ggaugagguagaugaacaaggg

SEQ ID NO: 266934 - RNA, 22 nt, Human
aagugaauaaaauuguguucuu

SEQ ID NO: 266935 - RNA, 22 nt, Human
ggcccagcacagugcuuggggg

SEQ ID NO: 266936 - RNA, 23 nt, Human
ccagugauugccuggaaggaggu

SEQ ID NO: 266937 - RNA, 21 nt, Human
ugauuucugccaaguucacua

SEQ ID NO: 266938 - RNA, 21 nt, Human
ugcauaaagaaauacaaauac

SEQ ID NO: 266939 - RNA, 22 nt, Human
uggccaggggaguuccccucca

SEQ ID NO: 266940 - RNA, 22 nt, Human
cucuggaagaauacacuuagaa

SEQ ID NO: 266941 - RNA, 22 nt, Human
gcagggcugaaggucccaggcc

SEQ ID NO: 266942 - RNA, 22 nt, Human
ccaggaggcucugacuggaccc

SEQ ID NO: 266943 - RNA, 22 nt, Human
cucuggccuggggccugcuccc

SEQ ID NO: 266944 - RNA, 22 nt, Human
gccagcaaggaggggaaaaaug

SEQ ID NO: 266945 - RNA, 22 nt, Human
guuuccaaccccaccaaagugc

SEQ ID NO: 266946 - RNA, 22 nt, Human
uuguacuuaaauaugcaaauag

SEQ ID NO: 266947 - RNA, 22 nt, Human
cuuuauguuggggugucuuagu

SEQ ID NO: 266948 - RNA, 22 nt, Human
uuagauaaauugcaacuugauu

SEQ ID NO: 266949 - RNA, 22 nt, Human
ucugcagguagagcucaggaau

SEQ ID NO: 266950 - RNA, 15 nt, Human
gcagguggaucacuu

SEQ ID NO: 266951 - RNA, 22 nt, Human
agaccugugaucacauggaaug

SEQ ID NO: 266952 - RNA, 22 nt, Human
uuauuacacugaaagaauugcg

SEQ ID NO: 266953 - RNA, 19 nt, Human
acacaugaggagggacccc

SEQ ID NO: 266954 - RNA, 22 nt, Human
cacauuccccagagcuggggcu

SEQ ID NO: 266955 - RNA, 22 nt, Human
ccagaggugccacagaaagagc

SEQ ID NO: 266956 - RNA, 20 nt, Human
cuccacaccuguucgcaggc

SEQ ID NO: 266957 - RNA, 19 nt, Human
gcccucaggcagcuccauc

SEQ ID NO: 266958 - RNA, 22 nt, Human
aagcacauugccuggcacauag

SEQ ID NO: 266959 - RNA, 18 nt, Human
uacaaacuccuugaaggc

SEQ ID NO: 266960 - RNA, 22 nt, Human
ucugagcuuuagcugggauuuu

SEQ ID NO: 266961 - RNA, 22 nt, Human
ccagagccucaacacagguccu

SEQ ID NO: 266962 - RNA, 22 nt, Human
gaaacccaaacuaagacaguag

SEQ ID NO: 266963 - RNA, 20 nt, Human
acucuguagguaaugagacu

SEQ ID NO: 266964 - RNA, 22 nt, Human
uacgugcaaggucccugccccu

SEQ ID NO: 266965 - RNA, 22 nt, Human
uccuccacgauggcacaccugg

SEQ ID NO: 266966 - RNA, 22 nt, Human
uucuccuuuguaauucucaucc

SEQ ID NO: 266967 - RNA, 22 nt, Human
cugcgugucucugucucauggc

SEQ ID NO: 266968 - RNA, 22 nt, Human
cacuggaauguugaggagacaa

SEQ ID NO: 266969 - RNA, 22 nt, Human
aggagacccaaugccagaaaga

SEQ ID NO: 266970 - RNA, 22 nt, Human
uugauucauggacaggccaggu

SEQ ID NO: 266971 - RNA, 22 nt, Human
gugggcuccccuggcaugucca

SEQ ID NO: 266972 - RNA, 19 nt, Human
acaaaugauguugcacuga

SEQ ID NO: 266973 - RNA, 23 nt, Human
cacaacuaaucagaaucucuagg

SEQ ID NO: 266974 - RNA, 22 nt, Human
uaacagcaggguuacaggcauu

SEQ ID NO: 266975 - RNA, 22 nt, Human
caugagagauccuucaugagag

SEQ ID NO: 266976 - RNA, 22 nt, Human
uuuauaguuauauacagauguu

SEQ ID NO: 266977 - RNA, 22 nt, Human
uacaccagcuugccugggcucu

SEQ ID NO: 266978 - RNA, 23 nt, Human
agagcaucaugaugcuaagucug

SEQ ID NO: 266979 - RNA, 23 nt, Human
gcagacagagcagacuaagacaa

SEQ ID NO: 266980 - RNA, 22 nt, Human
caaugcaagcaagauggucaca

SEQ ID NO: 266981 - RNA, 22 nt, Human
ucguuaaaugcuaaaacugaca

SEQ ID NO: 266982 - RNA, 22 nt, Human
uaaacagcuacugugucaaagg

SEQ ID NO: 266983 - RNA, 22 nt, Human
caaaagcaguucuaucugaguu

SEQ ID NO: 266984 - RNA, 22 nt, Human
gcauccaaaccauucaucagcc

SEQ ID NO: 266985 - RNA, 22 nt, Human
aggaggcccuagagcucuagag

SEQ ID NO: 266986 - RNA, 22 nt, Human
uggcugggagcuggaacugggc

SEQ ID NO: 266987 - RNA, 17 nt, Human
agcugaaauugcugaag

SEQ ID NO: 266988 - RNA, 22 nt, Human
gcacuuaggguauguacugggc

SEQ ID NO: 266989 - RNA, 22 nt, Human
uuuacauguaauguuauacaaa

SEQ ID NO: 266990 - RNA, 22 nt, Human
cugagcugcucccgcugcagcg

SEQ ID NO: 266991 - RNA, 22 nt, Human
uauuucacauaccacagagugu

SEQ ID NO: 266992 - RNA, 22 nt, Human
cugauguucauuucuuuuguac

SEQ ID NO: 266993 - RNA, 22 nt, Human
guuacaauguucuucaguucug

SEQ ID NO: 266994 - RNA, 22 nt, Human
cugaaaggcaguggguagugug

SEQ ID NO: 266995 - RNA, 22 nt, Human
auuguauaacagcauguauuuu

SEQ ID NO: 266996 - RNA, 22 nt, Human
ggucuccaaagcuuaggacuac

SEQ ID NO: 266997 - RNA, 21 nt, Human
aagagacauuucucaucagca

SEQ ID NO: 266998 - RNA, 20 nt, Human
gcuuggaccuucugcucugu

SEQ ID NO: 266999 - RNA, 22 nt, Human
aagggcuccauccuuauaaaug

SEQ ID NO: 267000 - RNA, 22 nt, Human
auguccucuucugccucaggcc

SEQ ID NO: 267001 - RNA, 23 nt, Human
auucuucauuaucuucuagaaaa

SEQ ID NO: 267002 - RNA, 22 nt, Human
ggcagacuuuuucucugaaggg

SEQ ID NO: 267003 - RNA, 20 nt, Human
guagaaccaugugugcuggg

SEQ ID NO: 267004 - RNA, 22 nt, Human
agaaacuauuaugguaaacaaa

SEQ ID NO: 267005 - RNA, 22 nt, Human
aaacaguaaguucuaguauuau

SEQ ID NO: 267006 - RNA, 22 nt, Human
ucauaugauuguaaugagaaua

SEQ ID NO: 267007 - RNA, 22 nt, Human
aagggcuggagacugggucuuc

SEQ ID NO: 267008 - RNA, 22 nt, Human
aggguccauguuuccaguuaau

SEQ ID NO: 267009 - RNA, 22 nt, Human
uguguccugcaggugcugccug

SEQ ID NO: 267010 - RNA, 22 nt, Human
aucaauuuugaggauacaagaa

SEQ ID NO: 267011 - RNA, 22 nt, Human
guuuacauguaauguguuauug

SEQ ID NO: 267012 - RNA, 22 nt, Human
gguggcugcacccuggcuaacu

SEQ ID NO: 267013 - RNA, 22 nt, Human
gcaagauguuaacauagggaga

SEQ ID NO: 267014 - RNA, 22 nt, Human
acauucaaaauugugguuuaga

SEQ ID NO: 267015 - RNA, 22 nt, Human
gaggaacaagcugcuuuaucuu

SEQ ID NO: 267016 - RNA, 22 nt, Human
ccugaggagauuguggcugggg

SEQ ID NO: 267017 - RNA, 22 nt, Human
gcuuuagaaaugaguaaauuag

SEQ ID NO: 267018 - RNA, 22 nt, Human
ccaauucaccuccuaugcacau

SEQ ID NO: 267019 - RNA, 22 nt, Human
uaacuuuaggaauagguaaucu

SEQ ID NO: 267020 - RNA, 22 nt, Human
agaggacaaaaugagaagugcu

SEQ ID NO: 267021 - RNA, 22 nt, Human
cacaaugcguacauauaucaaa

SEQ ID NO: 267022 - RNA, 22 nt, Human
uguccugggaggcgggguccag

SEQ ID NO: 267023 - RNA, 22 nt, Human
ugcagggaggccccgcagcccu

SEQ ID NO: 267024 - RNA, 22 nt, Human
uuagcauucucugugugcauaa

SEQ ID NO: 267025 - RNA, 22 nt, Human
uuacauguuuaugugguacaug

SEQ ID NO: 267026 - RNA, 22 nt, Human
gaaccauuucugaauaguuugu

SEQ ID NO: 267027 - RNA, 22 nt, Human
ggcaugugccugaggucacaca

SEQ ID NO: 267028 - RNA, 22 nt, Human
agccuucuaggaugucaucugc

SEQ ID NO: 267029 - RNA, 22 nt, Human
gggcuuggcuggggccaccaga

SEQ ID NO: 267030 - RNA, 22 nt, Human
agguagggaagaaggcaugaaa

SEQ ID NO: 267031 - RNA, 22 nt, Human
ggggccuuggaucugugccccg

SEQ ID NO: 267032 - RNA, 22 nt, Human
gcucaggccuccagaggggcaa

SEQ ID NO: 267033 - RNA, 22 nt, Human
uguuuugguagauugauuaugg

SEQ ID NO: 267034 - RNA, 22 nt, Human
uuacuguucauguuguacacuu

SEQ ID NO: 267035 - RNA, 22 nt, Human
aggcacaggaaugucauccagu

SEQ ID NO: 267036 - RNA, 22 nt, Human
gcuuugcuuccuguucuagccu

SEQ ID NO: 267037 - RNA, 22 nt, Human
auggcccagacucagacuggug

SEQ ID NO: 267038 - RNA, 22 nt, Human
agguuugggaguagaaaucaga

SEQ ID NO: 267039 - RNA, 20 nt, Human
gcauuagaguacuauaugcu

SEQ ID NO: 267040 - RNA, 22 nt, Human
ucugaggaagcagcaggaagug

SEQ ID NO: 267041 - RNA, 22 nt, Human
ucugaggggguguuuauaagcu

SEQ ID NO: 267042 - RNA, 21 nt, Human
agucuuugauaaagacaaagu

SEQ ID NO: 267043 - RNA, 22 nt, Human
aaggcaguaggaucuuccacag

SEQ ID NO: 267044 - RNA, 22 nt, Human
cauguuguaucauucuguuccu

SEQ ID NO: 267045 - RNA, 22 nt, Human
ccuggcugcccauggacccucu

SEQ ID NO: 267046 - RNA, 22 nt, Human
ggcagagaaucuggcuguuuac

SEQ ID NO: 267047 - RNA, 22 nt, Human
ugccuggcaucuagcccuggga

SEQ ID NO: 267048 - RNA, 22 nt, Human
ccuguucaauauucuuccuugu

SEQ ID NO: 267049 - RNA, 19 nt, Human
gugucaggaugugcagggg

SEQ ID NO: 267050 - RNA, 22 nt, Human
ggcugugguggcaucccugagc

SEQ ID NO: 267051 - RNA, 22 nt, Human
aacaguaaugugguguuggguu

SEQ ID NO: 267052 - RNA, 22 nt, Human
uuauuuacuggauggccuuggg

SEQ ID NO: 267053 - RNA, 22 nt, Human
gguccuugggucuccuguguuu

SEQ ID NO: 267054 - RNA, 22 nt, Human
acauuucugcuagaauagguga

SEQ ID NO: 267055 - RNA, 19 nt, Human
uuugucucugaauaauauu

SEQ ID NO: 267056 - RNA, 22 nt, Human
gggaaacuggggacugaaucug

SEQ ID NO: 267057 - RNA, 22 nt, Human
gcugcagcccugcggaucacuu

SEQ ID NO: 267058 - RNA, 22 nt, Human
aguguugggucuuuagaauuua

SEQ ID NO: 267059 - RNA, 22 nt, Human
gcugagguccagcauucgccua

SEQ ID NO: 267060 - RNA, 23 nt, Human
gcccacauuggugcaugaauguu

SEQ ID NO: 267061 - RNA, 22 nt, Human
gaaaugugggucaugacccauu

SEQ ID NO: 267062 - RNA, 22 nt, Human
uggcuaugguauugauggguuu

SEQ ID NO: 267063 - RNA, 22 nt, Human
ucaggagcagccuuggagagcg

SEQ ID NO: 267064 - RNA, 22 nt, Human
ggagaccagaaggaagcuucga

SEQ ID NO: 267065 - RNA, 20 nt, Human
aauuuuacuguccuauagag

SEQ ID NO: 267066 - RNA, 19 nt, Human
aaagcagaggagcaucuga

SEQ ID NO: 267067 - RNA, 22 nt, Human
uguaaagagaagaaacgugagc

SEQ ID NO: 267068 - RNA, 22 nt, Human
gcaggccaagcccucgcagaga

SEQ ID NO: 267069 - RNA, 22 nt, Human
uaaacaagaaacauuuucuguu

SEQ ID NO: 267070 - RNA, 22 nt, Human
agagcugaauuuggguggugga

SEQ ID NO: 267071 - RNA, 22 nt, Human
uucuguuacauggggcacagug

SEQ ID NO: 267072 - RNA, 22 nt, Human
cuuauuaauggaauccuaauga

SEQ ID NO: 267073 - RNA, 22 nt, Human
cugcuggggaggcgccucgacg

SEQ ID NO: 267074 - RNA, 22 nt, Human
ccuuccuggcuguccgccugau

SEQ ID NO: 267075 - RNA, 22 nt, Human
aagcauucugcauuuucaaaga

SEQ ID NO: 267076 - RNA, 22 nt, Human
ugucugagugcauaugugcugg

SEQ ID NO: 267077 - RNA, 22 nt, Human
cugaggaccccacaggaggccc

SEQ ID NO: 267078 - RNA, 22 nt, Human
ggcuuuauuugcagccauuguu

SEQ ID NO: 267079 - RNA, 22 nt, Human
uuguucagaaauuuggacuccu

SEQ ID NO: 267080 - RNA, 22 nt, Human
acacccagauuaugcacacaaa

SEQ ID NO: 267081 - RNA, 22 nt, Human
ugaugaggaccuggucucugcu

SEQ ID NO: 267082 - RNA, 22 nt, Human
aacagcagcaaguaagcagguc

SEQ ID NO: 267083 - RNA, 22 nt, Human
guccaggaaucaaaagauggaa

SEQ ID NO: 267084 - RNA, 22 nt, Human
uccagccccgggauguucuuca

SEQ ID NO: 267085 - RNA, 22 nt, Human
acaauacucaugcucuuuuucu

SEQ ID NO: 267086 - RNA, 22 nt, Human
cauaauauacuacauugaugaa

SEQ ID NO: 267087 - RNA, 22 nt, Human
caauucuuuguagaagcucucc

SEQ ID NO: 267088 - RNA, 22 nt, Human
uggcugaguuccuggcacacgg

SEQ ID NO: 267089 - RNA, 22 nt, Human
ucucuguagagacagcacugug

SEQ ID NO: 267090 - RNA, 22 nt, Human
uggaaauacaagaaguauguca

SEQ ID NO: 267091 - RNA, 21 nt, Human
guacagggauaguagugucaa

SEQ ID NO: 267092 - RNA, 22 nt, Human
acagcuguggccacuugcaucc

SEQ ID NO: 267093 - RNA, 22 nt, Human
aaagaccauguuuacagcuagg

SEQ ID NO: 267094 - RNA, 22 nt, Human
ugaagaaacgcagagagguagg

SEQ ID NO: 267095 - RNA, 23 nt, Human
cuguggcccugcuucaugcagcc

SEQ ID NO: 267096 - RNA, 22 nt, Human
ggaccuggcaauuugcaucucu

SEQ ID NO: 267097 - RNA, 22 nt, Human
gagcuguuaagagggagugaca

SEQ ID NO: 267098 - RNA, 22 nt, Human
uguguauagaugcaugcauaua

SEQ ID NO: 267099 - RNA, 22 nt, Human
ggaggccaccugaccugcuguu

SEQ ID NO: 267100 - RNA, 22 nt, Human
gagucuaaggaaaaauagagua

SEQ ID NO: 267101 - RNA, 22 nt, Human
agcuugauaguggcuaucaagc

SEQ ID NO: 267102 - RNA, 22 nt, Human
agcagcuguacuuucaucuguu

SEQ ID NO: 267103 - RNA, 22 nt, Human
guauucuugguuaucaaaauac

SEQ ID NO: 267104 - RNA, 18 nt, Human
uaacugguuucuucccau

SEQ ID NO: 267105 - RNA, 22 nt, Human
caacagucucuauagcuccuug

SEQ ID NO: 267106 - RNA, 22 nt, Human
uuacagcacagugcuuuuacug

SEQ ID NO: 267107 - RNA, 22 nt, Human
uagcugcccaucuuuccuuuag

SEQ ID NO: 267108 - RNA, 21 nt, Human
gauuugcagaaacuagacagg

SEQ ID NO: 267109 - RNA, 19 nt, Human
aggccugggguuuugcacu

SEQ ID NO: 267110 - RNA, 22 nt, Human
uuccucagcacaaagccaagau

SEQ ID NO: 267111 - RNA, 22 nt, Human
uuauacuuuauacuacaucauu

SEQ ID NO: 267112 - RNA, 22 nt, Human
cacuugaaugagaauuuccugg

SEQ ID NO: 267113 - RNA, 22 nt, Human
caagaacaguuugccaaauugg

SEQ ID NO: 267114 - RNA, 22 nt, Human
uuucucaaguucagauauuuga

SEQ ID NO: 267115 - RNA, 22 nt, Human
acaguaaaaagccuuagaauuu

SEQ ID NO: 267116 - RNA, 22 nt, Human
ucagggcagaauccaaagaauu

SEQ ID NO: 267117 - RNA, 22 nt, Human
uggaccagcagccccagugccu

SEQ ID NO: 267118 - RNA, 22 nt, Human
gcucgcagaucaccugggggcg

SEQ ID NO: 267119 - RNA, 22 nt, Human
gugcuacuaguuucauuuuuca

SEQ ID NO: 267120 - RNA, 22 nt, Human
aaggcagcccuggcucagccug

SEQ ID NO: 267121 - RNA, 22 nt, Human
ugagucucccagcguuaaaccu

SEQ ID NO: 267122 - RNA, 22 nt, Human
agaggggagagcuaagcaauuc

SEQ ID NO: 267123 - RNA, 22 nt, Human
acagacauuuuaagacacuuua

SEQ ID NO: 267124 - RNA, 22 nt, Human
uggaaaaacugagacuuagaca

SEQ ID NO: 267125 - RNA, 23 nt, Human
uucagaagaaaugaguacaggag

SEQ ID NO: 267126 - RNA, 22 nt, Human
ugacagggucagagcugagcug

SEQ ID NO: 267127 - RNA, 22 nt, Human
uuuccagggcucuguagaagaa

SEQ ID NO: 267128 - RNA, 22 nt, Human
ugggucccaaacuccuagaggu

SEQ ID NO: 267129 - RNA, 22 nt, Human
agaagcuugaaggagcagugac

SEQ ID NO: 267130 - RNA, 22 nt, Human
caaauacuguacugaacacugu

SEQ ID NO: 267131 - RNA, 22 nt, Human
uaagauuacagugagaaauaaa

SEQ ID NO: 267132 - RNA, 22 nt, Human
cccuuccuugauuuuaacugga

SEQ ID NO: 267133 - RNA, 22 nt, Human
uguugcuguaugaauaggaagg

SEQ ID NO: 267134 - RNA, 22 nt, Human
cagggacaugacuggucucugu

SEQ ID NO: 267135 - RNA, 22 nt, Human
uacauucagaagaauggacacg

SEQ ID NO: 267136 - RNA, 22 nt, Human
aaguguuauguaggauuucaga

SEQ ID NO: 267137 - RNA, 22 nt, Human
cugggccuugagaaucauguuu

SEQ ID NO: 267138 - RNA, 22 nt, Human
gcacagaggaugaggcagcucu

SEQ ID NO: 267139 - RNA, 22 nt, Human
cuacauaaauauuuaugugucu

SEQ ID NO: 267140 - RNA, 22 nt, Human
auguuagugauaguaaauagug

SEQ ID NO: 267141 - RNA, 22 nt, Human
ccccagggaagcuuugcuuacu

SEQ ID NO: 267142 - RNA, 22 nt, Human
ucauguaaaguguagguuuaga

SEQ ID NO: 267143 - RNA, 22 nt, Human
gaguccuguaacuuucuuccua

SEQ ID NO: 267144 - RNA, 22 nt, Human
uggcagaguucgcugugccuuu

SEQ ID NO: 267145 - RNA, 22 nt, Human
auucaguguuugcagcaacuuu

SEQ ID NO: 267146 - RNA, 22 nt, Human
aacauacuuauacuaaauaaug

SEQ ID NO: 267147 - RNA, 22 nt, Human
aauccauucagaaauugggaau

SEQ ID NO: 267148 - RNA, 22 nt, Human
agcuccuggggguuccaagcag

SEQ ID NO: 267149 - RNA, 22 nt, Human
gguuccaccuggcgagggguau

SEQ ID NO: 267150 - RNA, 22 nt, Human
aagcagaauuucccacuaguug

SEQ ID NO: 267151 - RNA, 22 nt, Human
aaauggauggaauugacauuua

SEQ ID NO: 267152 - RNA, 22 nt, Human
aauccaggguguggccuuucca

SEQ ID NO: 267153 - RNA, 22 nt, Human
aagugaugcuacgacuuugaca

SEQ ID NO: 267154 - RNA, 22 nt, Human
agcaggcaagguccgugccucg

SEQ ID NO: 267155 - RNA, 22 nt, Human
uacaguuacgcugagaaacgaa

SEQ ID NO: 267156 - RNA, 22 nt, Human
cagagcagggguuucccagguu

SEQ ID NO: 267157 - RNA, 22 nt, Human
ugucaucagcauauaagacagu

SEQ ID NO: 267158 - RNA, 22 nt, Human
gcugggccagagcagcagcacu

SEQ ID NO: 267159 - RNA, 22 nt, Human
cagaagcaagagccggagcuag

SEQ ID NO: 267160 - RNA, 22 nt, Human
aucuccucgcaggccagaacac

SEQ ID NO: 267161 - RNA, 22 nt, Human
agcuuccugacuggugcucuua

SEQ ID NO: 267162 - RNA, 22 nt, Human
cuggggcccugggucugcccuc

SEQ ID NO: 267163 - RNA, 22 nt, Human
gaugugaggacucauguggagg

SEQ ID NO: 267164 - RNA, 22 nt, Human
cagagcccauccuauacucucc

SEQ ID NO: 267165 - RNA, 22 nt, Human
auacuguaauaccuaaaugaac

SEQ ID NO: 267166 - RNA, 22 nt, Human
cugccucuggccucaggcccag

SEQ ID NO: 267167 - RNA, 22 nt, Human
augauggagguguccuggauuu

SEQ ID NO: 267168 - RNA, 22 nt, Human
auccugggaaugggagggucau

SEQ ID NO: 267169 - RNA, 22 nt, Human
gcaugaaaugagcgaauauaau

SEQ ID NO: 267170 - RNA, 22 nt, Human
uacuuacagagcuuauaaguua

SEQ ID NO: 267171 - RNA, 19 nt, Human
auugcagcuauagacugcc

SEQ ID NO: 267172 - RNA, 20 nt, Human
ggcccagugaaccaggacgg

SEQ ID NO: 267173 - RNA, 22 nt, Human
guuuacauuaaguauuagcauc

SEQ ID NO: 267174 - RNA, 22 nt, Human
ucagaaucugcauuuaacaaaa

SEQ ID NO: 267175 - RNA, 22 nt, Human
uggcucuggauuaaucuaggaa

SEQ ID NO: 267176 - RNA, 19 nt, Human
agcagcagcaccagggauu

SEQ ID NO: 267177 - RNA, 22 nt, Human
acccaggccugagagacaggag

SEQ ID NO: 267178 - RNA, 19 nt, Human
ugccugcuccuggcuucca

SEQ ID NO: 267179 - RNA, 22 nt, Human
aaagcaaucagauucagauguc

SEQ ID NO: 267180 - RNA, 22 nt, Human
uauuuaaaauaagccccagugg

SEQ ID NO: 267181 - RNA, 22 nt, Human
agauuugaaacuugcuucauaa

SEQ ID NO: 267182 - RNA, 22 nt, Human
uccucagcaaacacuucacucu

SEQ ID NO: 267183 - RNA, 22 nt, Human
gugacguuuaauagugacaugg

SEQ ID NO: 267184 - RNA, 22 nt, Human
acaggcacuuugacaugccauc

SEQ ID NO: 267185 - RNA, 22 nt, Human
agccaguggaauucccaggggu

SEQ ID NO: 267186 - RNA, 19 nt, Human
uccagcccuguucccuuuu

SEQ ID NO: 267187 - RNA, 22 nt, Human
cuucagagcuuguuaaaacugu

SEQ ID NO: 267188 - RNA, 22 nt, Human
aagucagaaaucaucuagugua

SEQ ID NO: 267189 - RNA, 22 nt, Human
aaaugugaguuauagcaauaga

SEQ ID NO: 267190 - RNA, 22 nt, Human
aggcccugggagcagagaugca

SEQ ID NO: 267191 - RNA, 22 nt, Human
cccaaggcagggauuuucugcu

SEQ ID NO: 267192 - RNA, 22 nt, Human
cugagggaugggcugggccgcc

SEQ ID NO: 267193 - RNA, 22 nt, Human
augauuuucugauaaagaacug

SEQ ID NO: 267194 - RNA, 22 nt, Human
cuguggcuucuagguccccgau

SEQ ID NO: 267195 - RNA, 22 nt, Human
auguauuugcuuguuauggauu

SEQ ID NO: 267196 - RNA, 22 nt, Human
agcauuuucugagaguauagau

SEQ ID NO: 267197 - RNA, 22 nt, Human
ggugcagagcagugucagagca

SEQ ID NO: 267198 - RNA, 22 nt, Human
gggaaacuuucacaauguccag

SEQ ID NO: 267199 - RNA, 22 nt, Human
gugcccagugcaggcccgcagg

SEQ ID NO: 267200 - RNA, 22 nt, Human
gaagcagcucagauugacugaa

SEQ ID NO: 267201 - RNA, 22 nt, Human
uccugaagucacaggcucugag

SEQ ID NO: 267202 - RNA, 22 nt, Human
aacaaggcugguaucuuaaaga

SEQ ID NO: 267203 - RNA, 22 nt, Human
uuacaggggacauuggggacau

SEQ ID NO: 267204 - RNA, 22 nt, Human
ccgaggcuggccucagggcugu

SEQ ID NO: 267205 - RNA, 22 nt, Human
gccuggcuccuaaggacuggcu

SEQ ID NO: 267206 - RNA, 21 nt, Human
uggacuggugaguuuaggcug

SEQ ID NO: 267207 - RNA, 22 nt, Human
cccaggacccuucaauggcucc

SEQ ID NO: 267208 - RNA, 22 nt, Human
auuuuuuagccaagacucugca

SEQ ID NO: 267209 - RNA, 20 nt, Human
ucugugcaguggaggggcag

SEQ ID NO: 267210 - RNA, 22 nt, Human
cagcagguggacacacucaccu

SEQ ID NO: 267211 - RNA, 23 nt, Human
uggcugagauccuacuguuugcu

SEQ ID NO: 267212 - RNA, 22 nt, Human
aggcuggagugugcaguggcgc

SEQ ID NO: 267213 - RNA, 19 nt, Human
agagaaggauccuaugguu

SEQ ID NO: 267214 - RNA, 22 nt, Human
cagagcccugggcacaugguag

SEQ ID NO: 267215 - RNA, 22 nt, Human
uccaggcuagagugcaguggcc

SEQ ID NO: 267216 - RNA, 22 nt, Human
aagacauuuuagagauagggaa

SEQ ID NO: 267217 - RNA, 22 nt, Human
gucuguggaguugcuugcugga

SEQ ID NO: 267218 - RNA, 22 nt, Human
ugcucugugugugguuauuucc

SEQ ID NO: 267219 - RNA, 22 nt, Human
cacaucuacugaaugagcagug

SEQ ID NO: 267220 - RNA, 22 nt, Human
ggcagguggaaggucuccauuc

SEQ ID NO: 267221 - RNA, 19 nt, Human
gagaaucucuuugauguuu

SEQ ID NO: 267222 - RNA, 22 nt, Human
uggccuuuucuuucacaggcaa

SEQ ID NO: 267223 - RNA, 23 nt, Human
ucugagagaacaaugccuccuau

SEQ ID NO: 267224 - RNA, 22 nt, Human
gugcuggcuggggcaucaggca

SEQ ID NO: 267225 - RNA, 22 nt, Human
gacuuucuugcagaaauauucc

SEQ ID NO: 267226 - RNA, 23 nt, Human
ggucccugacagcgggcaaguug

SEQ ID NO: 267227 - RNA, 22 nt, Human
cagggccacccucugcugggug

SEQ ID NO: 267228 - RNA, 22 nt, Human
cccaggcucccaggugggacaa

SEQ ID NO: 267229 - RNA, 22 nt, Human
ugaggccucugugccauccagg

SEQ ID NO: 267230 - RNA, 22 nt, Human
gccaggcaggugucggagcccu

SEQ ID NO: 267231 - RNA, 19 nt, Human
ccuaggcauuguccaaggg

SEQ ID NO: 267232 - RNA, 22 nt, Human
aaaugcaggaaauuaugcuuuu

SEQ ID NO: 267233 - RNA, 22 nt, Human
cucaggagagucuuauaucucc

SEQ ID NO: 267234 - RNA, 22 nt, Human
aaacuuuaggaaggaauuuaca

SEQ ID NO: 267235 - RNA, 22 nt, Human
auuuauauuuugggagcuccug

SEQ ID NO: 267236 - RNA, 22 nt, Human
acuucaugaacauguggccugu

SEQ ID NO: 267237 - RNA, 22 nt, Human
ucacaacuugaagcugauuuaa

SEQ ID NO: 267238 - RNA, 22 nt, Human
agaugaaagauuuuuauagaga

SEQ ID NO: 267239 - RNA, 22 nt, Human
uccuggaguuuguggugauaug

SEQ ID NO: 267240 - RNA, 21 nt, Human
ccaggggcaaauugucguuuc

SEQ ID NO: 267241 - RNA, 22 nt, Human
guuuuugucgaguuccuugacc

SEQ ID NO: 267242 - RNA, 22 nt, Human
uuaguuaauaggucuucagcuu

SEQ ID NO: 267243 - RNA, 22 nt, Human
auaacuuaaugggucaugcucu

SEQ ID NO: 267244 - RNA, 22 nt, Human
gaggcuggucagcccuaagauc

SEQ ID NO: 267245 - RNA, 16 nt, Human
uccuggccuuuggaag

SEQ ID NO: 267246 - RNA, 22 nt, Human
auucuuuaguuggcuucuugcc

SEQ ID NO: 267247 - RNA, 22 nt, Human
guugggccccagagguccaggc

SEQ ID NO: 267248 - RNA, 20 nt, Human
cacagaugggacaggaaagg

SEQ ID NO: 267249 - RNA, 22 nt, Human
ggcaggguaugauuaccucuga

SEQ ID NO: 267250 - RNA, 22 nt, Human
uucaaacaguugcacaacuuau

SEQ ID NO: 267251 - RNA, 22 nt, Human
ucuucaaaaaauauccaucagu

SEQ ID NO: 267252 - RNA, 22 nt, Human
uacacauuacauaauacuaucu

SEQ ID NO: 267253 - RNA, 22 nt, Human
aauuccauccauuuguuucaac

SEQ ID NO: 267254 - RNA, 22 nt, Human
auugucagugggauuugucaac

SEQ ID NO: 267255 - RNA, 22 nt, Human
ggugagcagcugucuguaugga

SEQ ID NO: 267256 - RNA, 17 nt, Human
uuuacauugcucgcagu

SEQ ID NO: 267257 - RNA, 22 nt, Human
uuugucauauagacuauuguga

SEQ ID NO: 267258 - RNA, 22 nt, Human
aauccagaugagcaaucauacu

SEQ ID NO: 267259 - RNA, 22 nt, Human
aacuuucaggcaaugaauauuu

SEQ ID NO: 267260 - RNA, 22 nt, Human
gaugaggcauaaacacagucac

SEQ ID NO: 267261 - RNA, 22 nt, Human
ugggcuccuugggagcaaguga

SEQ ID NO: 267262 - RNA, 20 nt, Human
gaagcagcuucauguagaca

SEQ ID NO: 267263 - RNA, 23 nt, Human
ucucugggugggcugugucuaua

SEQ ID NO: 267264 - RNA, 21 nt, Human
aaggcuccuccucuaggccuc

SEQ ID NO: 267265 - RNA, 21 nt, Human
cagugcucaggaauagagaga

SEQ ID NO: 267266 - RNA, 22 nt, Human
uaugauaugcacuuuaucagaa

SEQ ID NO: 267267 - RNA, 22 nt, Human
aucauucuagcuguuguguuga

SEQ ID NO: 267268 - RNA, 20 nt, Human
gcauguguauggaaggggga

SEQ ID NO: 267269 - RNA, 22 nt, Human
uucuuggaaauacauucaauaa

SEQ ID NO: 267270 - RNA, 22 nt, Human
ugcuuugcuggcacuccuggcu

SEQ ID NO: 267271 - RNA, 22 nt, Human
guuuggugguagcauuggcuau

SEQ ID NO: 267272 - RNA, 22 nt, Human
cuacucugaaaacccagaaacu

SEQ ID NO: 267273 - RNA, 18 nt, Human
gcuuuauuucuuggggaa

SEQ ID NO: 267274 - RNA, 22 nt, Human
agggccaccagagcagggcagu

SEQ ID NO: 267275 - RNA, 22 nt, Human
ucacagcuuucagauuguuccc

SEQ ID NO: 267276 - RNA, 22 nt, Human
uauuccuauggccacugcuacu

SEQ ID NO: 267277 - RNA, 22 nt, Human
auaguuuuaaaaccucaggaag

SEQ ID NO: 267278 - RNA, 22 nt, Human
ugagcuuuguggguaaagagag

SEQ ID NO: 267279 - RNA, 22 nt, Human
cuuauucagaaggagaaaugga

SEQ ID NO: 267280 - RNA, 22 nt, Human
aggagcugauaaaaggggguca

SEQ ID NO: 267281 - RNA, 22 nt, Human
caaacauuugacuucucucagg

SEQ ID NO: 267282 - RNA, 22 nt, Human
uagaacuugagaucaggucuuc

SEQ ID NO: 267283 - RNA, 22 nt, Human
ucuauauuauacauccaggauu

SEQ ID NO: 267284 - RNA, 22 nt, Human
cuacuguaguggccuauuuacc

SEQ ID NO: 267285 - RNA, 22 nt, Human
uguuugaguucuagcgcauuua

SEQ ID NO: 267286 - RNA, 22 nt, Human
gcagcagagcuuuguccuggcu

SEQ ID NO: 267287 - RNA, 21 nt, Human
uuacaaagcuacagauguugc

SEQ ID NO: 267288 - RNA, 22 nt, Human
acauucuagauauguuauauuu

SEQ ID NO: 267289 - RNA, 22 nt, Human
uccuggcagugcuuguuuugga

SEQ ID NO: 267290 - RNA, 23 nt, Human
agcccuugauaauaaagcaccag

SEQ ID NO: 267291 - RNA, 22 nt, Human
ugagaacauugggaaagcuaug

SEQ ID NO: 267292 - RNA, 22 nt, Human
gcagggcugauggcuucccuca

SEQ ID NO: 267293 - RNA, 22 nt, Human
aacugcaagcucuuuacugcua

SEQ ID NO: 267294 - RNA, 22 nt, Human
ugcuucucaaagaagcauaaug

SEQ ID NO: 267295 - RNA, 22 nt, Human
uauuuuacaugacagguguuua

SEQ ID NO: 267296 - RNA, 22 nt, Human
caggcacaaugagcgccaucuu

SEQ ID NO: 267297 - RNA, 22 nt, Human
cagucucucuuguagugcagcu

SEQ ID NO: 267298 - RNA, 22 nt, Human
accugccucagugcagcuggau

SEQ ID NO: 267299 - RNA, 22 nt, Human
caugagucauagugaagcagga

SEQ ID NO: 267300 - RNA, 22 nt, Human
uagccauugacuuaaagcuuau

SEQ ID NO: 267301 - RNA, 22 nt, Human
auauuugucaauucacuguuca

SEQ ID NO: 267302 - RNA, 22 nt, Human
uaugaacugcucuuguguuuug

SEQ ID NO: 267303 - RNA, 22 nt, Human
aguuuagaguucaaauuaguuc

SEQ ID NO: 267304 - RNA, 19 nt, Human
cacagugcagccauuucuc

SEQ ID NO: 267305 - RNA, 20 nt, Human
ucagacccuacauuccucag

SEQ ID NO: 267306 - RNA, 22 nt, Human
agcacuguggggaacucacaga

SEQ ID NO: 267307 - RNA, 22 nt, Human
ugcaaauaggggacaacucuuu

SEQ ID NO: 267308 - RNA, 22 nt, Human
augaggcaggagugcaguggca

SEQ ID NO: 267309 - RNA, 22 nt, Human
uauuauuauauuggaugagacu

SEQ ID NO: 267310 - RNA, 22 nt, Human
aagcucagaguagcucagcguc

SEQ ID NO: 267311 - RNA, 22 nt, Human
cagccccuuguccgguagccac

SEQ ID NO: 267312 - RNA, 22 nt, Human
gccuggcugcucagccacucac

SEQ ID NO: 267313 - RNA, 22 nt, Human
ugacauuuaucuucuacaauga

SEQ ID NO: 267314 - RNA, 19 nt, Human
uuuacagggaauggagacc

SEQ ID NO: 267315 - RNA, 22 nt, Human
cuguccucaccuuggcaggggg

SEQ ID NO: 267316 - RNA, 22 nt, Human
cuuagaaagaguuuucuccccu

SEQ ID NO: 267317 - RNA, 22 nt, Human
uccagcuuuggcucuagcuaca

SEQ ID NO: 267318 - RNA, 22 nt, Human
auacagguucucuagggaacag

SEQ ID NO: 267319 - RNA, 22 nt, Human
cgcaggugccggcagauggggu

SEQ ID NO: 267320 - RNA, 22 nt, Human
caggaaguagaguuggccagcc

SEQ ID NO: 267321 - RNA, 22 nt, Human
aggaaacuaauuaguagaauaa

SEQ ID NO: 267322 - RNA, 22 nt, Human
cuccaggacccaguggcuccag

SEQ ID NO: 267323 - RNA, 22 nt, Human
gaaacuguauguaguuuuuggg

SEQ ID NO: 267324 - RNA, 22 nt, Human
caggcagcugcuggguucagcc

SEQ ID NO: 267325 - RNA, 22 nt, Human
acugaauuacagucugcauuuu

SEQ ID NO: 267326 - RNA, 22 nt, Human
caaggcuucagugugacaaaac

SEQ ID NO: 267327 - RNA, 22 nt, Human
ugagccaggcucaagugauccu

SEQ ID NO: 267328 - RNA, 22 nt, Human
gaaggcaucacagaggcuguga

SEQ ID NO: 267329 - RNA, 22 nt, Human
auguccaagucacagauuuuca

SEQ ID NO: 267330 - RNA, 22 nt, Human
ucuuaagaaagugacaaauagg

SEQ ID NO: 267331 - RNA, 22 nt, Human
acauucuauuucaucaugucua

SEQ ID NO: 267332 - RNA, 22 nt, Human
uaaaagauaucuuagggauuug

SEQ ID NO: 267333 - RNA, 22 nt, Human
uccuuucuccgggggacuguug

SEQ ID NO: 267334 - RNA, 22 nt, Human
cccuggccuccaggcaguccug

SEQ ID NO: 267335 - RNA, 21 nt, Human
acacacuacacauuccuaguu

SEQ ID NO: 267336 - RNA, 22 nt, Human
gcugcccaauuacagggccgug

SEQ ID NO: 267337 - RNA, 21 nt, Human
gccuugccacaugugccacag

SEQ ID NO: 267338 - RNA, 22 nt, Human
aggggagccccugguccuggug

SEQ ID NO: 267339 - RNA, 22 nt, Human
uuuagcaacgaagcacucgaca

SEQ ID NO: 267340 - RNA, 22 nt, Human
auauuuguuagagucuaugugu

SEQ ID NO: 267341 - RNA, 17 nt, Human
uagcacaaagcaggauu

SEQ ID NO: 267342 - RNA, 22 nt, Human
uggucagguaccucuggcuguc

SEQ ID NO: 267343 - RNA, 22 nt, Human
acacaaugauucacaagcagca

SEQ ID NO: 267344 - RNA, 22 nt, Human
aucuuguuaaaaagcagauucu

SEQ ID NO: 267345 - RNA, 19 nt, Human
aggugcuggugaggguguu

SEQ ID NO: 267346 - RNA, 22 nt, Human
uccaggcaugucccaagccgga

SEQ ID NO: 267347 - RNA, 22 nt, Human
ucuggcugaaaggggcugugcc

SEQ ID NO: 267348 - RNA, 23 nt, Human
agagccuuuucacacuucaaugu

SEQ ID NO: 267349 - RNA, 22 nt, Human
caaugguugaacccugucauga

SEQ ID NO: 267350 - RNA, 22 nt, Human
gaagccagauuaucacaagcca

SEQ ID NO: 267351 - RNA, 22 nt, Human
gugaaauauuuuguuuauguca

SEQ ID NO: 267352 - RNA, 22 nt, Human
gcauuucugugcauacacauga

SEQ ID NO: 267353 - RNA, 22 nt, Human
uucagaaaucgaguuucauguc

SEQ ID NO: 267354 - RNA, 22 nt, Human
cagcuaggaaaccagagggcag

SEQ ID NO: 267355 - RNA, 22 nt, Human
cauucauuuacuuucaacagcu

SEQ ID NO: 267356 - RNA, 18 nt, Human
uccugccugugccccagg

SEQ ID NO: 267357 - RNA, 22 nt, Human
aggaagaguguuaccuaugggu

SEQ ID NO: 267358 - RNA, 22 nt, Human
guuucuguaagacugaauugac

SEQ ID NO: 267359 - RNA, 22 nt, Human
ucagggcaaugucccucagaag

SEQ ID NO: 267360 - RNA, 22 nt, Human
gccagccuucuguggccugcaa

SEQ ID NO: 267361 - RNA, 22 nt, Human
uguuaagaagaggcaguacuua

SEQ ID NO: 267362 - RNA, 22 nt, Human
aacucaguuacauauuagaaua

SEQ ID NO: 267363 - RNA, 22 nt, Human
uaauaguugugacuuuguaaag

SEQ ID NO: 267364 - RNA, 22 nt, Human
gccccagcccuguggaccaugg

SEQ ID NO: 267365 - RNA, 22 nt, Human
acagaggucauggagaguucuc

SEQ ID NO: 267366 - RNA, 22 nt, Human
ccccagccagcuuguaguagaa

SEQ ID NO: 267367 - RNA, 22 nt, Human
cugggucuaaaaauucucagau

SEQ ID NO: 267368 - RNA, 22 nt, Human
caguuucuucuauuuugaacua

SEQ ID NO: 267369 - RNA, 22 nt, Human
uccagcccgggggcaggugacc

SEQ ID NO: 267370 - RNA, 22 nt, Human
gggcuccaaggaggccagccug

SEQ ID NO: 267371 - RNA, 22 nt, Human
auacauuagcucauaugauuaa

SEQ ID NO: 267372 - RNA, 22 nt, Human
uuuuacaggugaaaaaugaaga

SEQ ID NO: 267373 - RNA, 23 nt, Human
ucuuuagaagaacaucagaaaug

SEQ ID NO: 267374 - RNA, 22 nt, Human
agcuggagaguuuccaggaagg

SEQ ID NO: 267375 - RNA, 20 nt, Human
gcaggcccucucucuagucu

SEQ ID NO: 267376 - RNA, 22 nt, Human
accagcucagagcaggcuccug

SEQ ID NO: 267377 - RNA, 22 nt, Human
ucuggcucuaacuaggcaucag

SEQ ID NO: 267378 - RNA, 23 nt, Human
uggcacagcaggugugcuuuguu

SEQ ID NO: 267379 - RNA, 22 nt, Human
ucaaugcaaucauuggacaagu

SEQ ID NO: 267380 - RNA, 22 nt, Human
agaaggcuaaaguaacuuagua

SEQ ID NO: 267381 - RNA, 22 nt, Human
uaagagaacuggauagauagga

SEQ ID NO: 267382 - RNA, 22 nt, Human
uugggggcauauugaguagugg

SEQ ID NO: 267383 - RNA, 22 nt, Human
acuuuacaauauccugugacuu

SEQ ID NO: 267384 - RNA, 22 nt, Human
aacaaacaaacauuuugucauc

SEQ ID NO: 267385 - RNA, 22 nt, Human
acaguguucacuuaacaaugga

SEQ ID NO: 267386 - RNA, 20 nt, Human
ugcugaggccugaggccugg

SEQ ID NO: 267387 - RNA, 22 nt, Human
ugcaggugcuccgggggugccc

SEQ ID NO: 267388 - RNA, 22 nt, Human
aaauuauucucauguguuucuu

SEQ ID NO: 267389 - RNA, 22 nt, Human
ggugccagaguggcccaggggc

SEQ ID NO: 267390 - RNA, 22 nt, Human
acugagggcauaaaaguacugu

SEQ ID NO: 267391 - RNA, 22 nt, Human
auuaagugacuaaaguaaugcu

SEQ ID NO: 267392 - RNA, 22 nt, Human
cccaaggacacgggcagggaca

SEQ ID NO: 267393 - RNA, 22 nt, Human
acaguguccccagcucugugag

SEQ ID NO: 267394 - RNA, 21 nt, Human
aggguggcucugggucagaac

SEQ ID NO: 267395 - RNA, 22 nt, Human
uggauuuauuagguuggugaaa

SEQ ID NO: 267396 - RNA, 22 nt, Human
uucugugaaucuuuuuucccac

SEQ ID NO: 267397 - RNA, 22 nt, Human
gcaggcugaguauuacccuagu

SEQ ID NO: 267398 - RNA, 22 nt, Human
uuuuauuaguggcuagaugggg

SEQ ID NO: 267399 - RNA, 22 nt, Human
uccuucugaaaaaugcacacga

SEQ ID NO: 267400 - RNA, 22 nt, Human
aaugcagaccaguaugaaaaac

SEQ ID NO: 267401 - RNA, 22 nt, Human
cagagggcucggcggccgcucc

SEQ ID NO: 267402 - RNA, 22 nt, Human
acuguguuaaauacagagaugg

SEQ ID NO: 267403 - RNA, 22 nt, Human
agccacagucugaugccugaga

SEQ ID NO: 267404 - RNA, 22 nt, Human
ucagggggaggagacugccagu

SEQ ID NO: 267405 - RNA, 22 nt, Human
augugaaauagcuggauaugaa

SEQ ID NO: 267406 - RNA, 22 nt, Human
ucucuggggaugcuuauucuug

SEQ ID NO: 267407 - RNA, 22 nt, Human
ucauguguuaaacuccaagaua

SEQ ID NO: 267408 - RNA, 22 nt, Human
uagcaacauaagaaacauuuug

SEQ ID NO: 267409 - RNA, 22 nt, Human
ccagcccugccagagagagcug

SEQ ID NO: 267410 - RNA, 22 nt, Human
ucuccuggaagugauuccccug

SEQ ID NO: 267411 - RNA, 22 nt, Human
ucccucaggugguucuuguuuc

SEQ ID NO: 267412 - RNA, 22 nt, Human
uccuggcuuagguuuccagaac

SEQ ID NO: 267413 - RNA, 22 nt, Human
ucuguuuugugucucucuggug

SEQ ID NO: 267414 - RNA, 19 nt, Human
uuacacuucugcuuuguga

SEQ ID NO: 267415 - RNA, 16 nt, Human
cucuuugggcuuccag

SEQ ID NO: 267416 - RNA, 22 nt, Human
ugcauaaacuucucugguguga

SEQ ID NO: 267417 - RNA, 22 nt, Human
cuuccagguucugguugggaag

SEQ ID NO: 267418 - RNA, 22 nt, Human
agacaacaccaaaugcuagugu

SEQ ID NO: 267419 - RNA, 22 nt, Human
uauacacuguuguugggagucu

SEQ ID NO: 267420 - RNA, 22 nt, Human
augggcuugacccuacagaaag

SEQ ID NO: 267421 - RNA, 22 nt, Human
agccagagagccccagguucua

SEQ ID NO: 267422 - RNA, 22 nt, Human
gaauacaugcacgacacggggg

SEQ ID NO: 267423 - RNA, 22 nt, Human
agucagguacuccgagggcaug

SEQ ID NO: 267424 - RNA, 20 nt, Human
aaaauauguauaacucuucu

SEQ ID NO: 267425 - RNA, 22 nt, Human
cacaaaauaucaagcacuuuua

SEQ ID NO: 267426 - RNA, 22 nt, Human
cucuggguccuggggcuacaag

SEQ ID NO: 267427 - RNA, 22 nt, Human
ucagaaguauuaugcuaaagga

SEQ ID NO: 267428 - RNA, 17 nt, Human
ucuguucaugcauaccu

SEQ ID NO: 267429 - RNA, 22 nt, Human
accaauuuuuacagcugugguu

SEQ ID NO: 267430 - RNA, 22 nt, Human
uuaguacauugauucauuaugu

SEQ ID NO: 267431 - RNA, 22 nt, Human
gaggcaagaaaggacuuucuag

SEQ ID NO: 267432 - RNA, 18 nt, Human
ccugcagcccaggaggcc

SEQ ID NO: 267433 - RNA, 22 nt, Human
aagcagaauuuaauagaaaggu

SEQ ID NO: 267434 - RNA, 22 nt, Human
gaagcagcuuucuggugaggag

SEQ ID NO: 267435 - RNA, 22 nt, Human
gcuaggcucuuccaucagggca

SEQ ID NO: 267436 - RNA, 21 nt, Human
agcugcagccauguacauggc

SEQ ID NO: 267437 - RNA, 20 nt, Human
acagaaagagagaaugucag

SEQ ID NO: 267438 - RNA, 22 nt, Human
cccagugugaugagguugcuaa

SEQ ID NO: 267439 - RNA, 22 nt, Human
uagggauggcagcauguagcuu

SEQ ID NO: 267440 - RNA, 21 nt, Human
ugcagcugacacccuuuggga

SEQ ID NO: 267441 - RNA, 22 nt, Human
cagaagcuagcaggaaaguuuu

SEQ ID NO: 267442 - RNA, 20 nt, Human
uccugaggcuucgccagugu

SEQ ID NO: 267443 - RNA, 22 nt, Human
aggaacaggccucguuuucuau

SEQ ID NO: 267444 - RNA, 22 nt, Human
uugaaugaauaaaagaguaagg

SEQ ID NO: 267445 - RNA, 22 nt, Human
uauuucugaauccaaaagguca

SEQ ID NO: 267446 - RNA, 22 nt, Human
accugcagccacuucucuccuu

SEQ ID NO: 267447 - RNA, 22 nt, Human
ccuccugggagagcacggaggg

SEQ ID NO: 267448 - RNA, 22 nt, Human
uuuuuucagccugucugugcca

SEQ ID NO: 267449 - RNA, 19 nt, Human
ugcugggucauauggaaac

SEQ ID NO: 267450 - RNA, 22 nt, Human
uagaaagcaugcaaguuugaug

SEQ ID NO: 267451 - RNA, 22 nt, Human
ucauucccccauaaugguauuu

SEQ ID NO: 267452 - RNA, 22 nt, Human
uggcucugagcugcaaagcugc

SEQ ID NO: 267453 - RNA, 22 nt, Human
cuucuaauucuuauguaagcuu

SEQ ID NO: 267454 - RNA, 22 nt, Human
cagcccacuucccagcaccuac

SEQ ID NO: 267455 - RNA, 22 nt, Human
gcuccaggaagggaaaucucca

SEQ ID NO: 267456 - RNA, 22 nt, Human
gcaugugucccucagucugugc

SEQ ID NO: 267457 - RNA, 22 nt, Human
uguggcugcaaaggaaggcugc

SEQ ID NO: 267458 - RNA, 21 nt, Human
gugcccuguucccacaugccc

SEQ ID NO: 267459 - RNA, 22 nt, Human
acagaugaguuaaagcagagug

SEQ ID NO: 267460 - RNA, 22 nt, Human
agcaacaggcauaauguguuga

SEQ ID NO: 267461 - RNA, 22 nt, Human
aaaugucuaucuggcauauucc

SEQ ID NO: 267462 - RNA, 22 nt, Human
gcacagcucagcaugggaggac

SEQ ID NO: 267463 - RNA, 22 nt, Human
uccuccugucuaccaguuccug

SEQ ID NO: 267464 - RNA, 22 nt, Human
cuuaggaagcgggaccugugca

SEQ ID NO: 267465 - RNA, 22 nt, Human
uggucaaggcuuggagauagua

SEQ ID NO: 267466 - RNA, 22 nt, Human
uugcaauuaacauaugucaacu

SEQ ID NO: 267467 - RNA, 22 nt, Human
aaccauuugcaguuacugagac

SEQ ID NO: 267468 - RNA, 22 nt, Human
ucaauuacuaaccaaauaaugu

SEQ ID NO: 267469 - RNA, 22 nt, Human
aagcugcaaaaaauuucugucu

SEQ ID NO: 267470 - RNA, 22 nt, Human
uuucuaguaaucaauauaaagu

SEQ ID NO: 267471 - RNA, 22 nt, Human
gcauucugugcuacagccauuc

SEQ ID NO: 267472 - RNA, 22 nt, Human
cauaguuuuagguagaaacugg

SEQ ID NO: 267473 - RNA, 19 nt, Human
uccaggcauccuucaggcu

SEQ ID NO: 267474 - RNA, 22 nt, Human
augcacccuuaugaauaugauc

SEQ ID NO: 267475 - RNA, 22 nt, Human
auuucucaguaggugcacagug

SEQ ID NO: 267476 - RNA, 22 nt, Human
gcacagaaccagacaugaggca

SEQ ID NO: 267477 - RNA, 21 nt, Human
ugggcucuuuaacccaggcac

SEQ ID NO: 267478 - RNA, 22 nt, Human
agacagguguuuuacaacuucg

SEQ ID NO: 267479 - RNA, 22 nt, Human
ccuggcagccucagccaauucu

SEQ ID NO: 267480 - RNA, 22 nt, Human
ccagggccucguguucugagug

SEQ ID NO: 267481 - RNA, 18 nt, Human
cccagcuggugggucagu

SEQ ID NO: 267482 - RNA, 22 nt, Human
uuguauuuauauugaauagcuu

SEQ ID NO: 267483 - RNA, 22 nt, Human
agguggagaagagaugggcagu

SEQ ID NO: 267484 - RNA, 19 nt, Human
uggcuuccaucucucucau

SEQ ID NO: 267485 - RNA, 22 nt, Human
cugcaggggaccaaagucugac

SEQ ID NO: 267486 - RNA, 22 nt, Human
uccccuccucuccugauauggg

SEQ ID NO: 267487 - RNA, 22 nt, Human
ugaggccuaccccccuguguuu

SEQ ID NO: 267488 - RNA, 22 nt, Human
uucucuucccacuuucuguauu

SEQ ID NO: 267489 - RNA, 22 nt, Human
gauguccagcgucuggcugccu

SEQ ID NO: 267490 - RNA, 22 nt, Human
agagacaggaauggcauuaaga

SEQ ID NO: 267491 - RNA, 22 nt, Human
caguuuuaggacauguggaugu

SEQ ID NO: 267492 - RNA, 19 nt, Human
gggcucuggccucaguggg

SEQ ID NO: 267493 - RNA, 22 nt, Human
cugucugucaaguucaucucca

SEQ ID NO: 267494 - RNA, 22 nt, Human
ccuugccucauugugcuucucc

SEQ ID NO: 267495 - RNA, 21 nt, Human
aggaugccgcaggcggagaag

SEQ ID NO: 267496 - RNA, 22 nt, Human
uuucucgcguuugagcucucag

SEQ ID NO: 267497 - RNA, 22 nt, Human
caagagcuucugcucuucaugg

SEQ ID NO: 267498 - RNA, 22 nt, Human
gagaagcaauuuccaacugugc

SEQ ID NO: 267499 - RNA, 22 nt, Human
cagucucugccacuucuaagcu

SEQ ID NO: 267500 - RNA, 22 nt, Human
uccagguccuacuggcccauag

SEQ ID NO: 267501 - RNA, 19 nt, Human
acagcagguguggggauaa

SEQ ID NO: 267502 - RNA, 23 nt, Human
acacagaagaagacccaaggaag

SEQ ID NO: 267503 - RNA, 22 nt, Human
uagaggaaauuuccaaggugag

SEQ ID NO: 267504 - RNA, 22 nt, Human
cagggcugaagaaauucaaaag

SEQ ID NO: 267505 - RNA, 22 nt, Human
ugagaaucauccagaggcuucu

SEQ ID NO: 267506 - RNA, 19 nt, Human
acaaauuguccucaucaag

SEQ ID NO: 267507 - RNA, 22 nt, Human
cccagccucagcuuuacuucca

SEQ ID NO: 267508 - RNA, 22 nt, Human
gcagcuuccugaguguggacag

SEQ ID NO: 267509 - RNA, 22 nt, Human
uccugcagaucaaagccuuuga

SEQ ID NO: 267510 - RNA, 22 nt, Human
cugggccuagcaacagaggagu

SEQ ID NO: 267511 - RNA, 22 nt, Human
gcagggcuagauauuugcaagu

SEQ ID NO: 267512 - RNA, 22 nt, Human
aaccagagugacacucuacaga

SEQ ID NO: 267513 - RNA, 22 nt, Human
auucucugugucugcuuuccca

SEQ ID NO: 267514 - RNA, 22 nt, Human
auuacaauaagguuuauuugua

SEQ ID NO: 267515 - RNA, 22 nt, Human
cccagcucaagcagagagcuaa

SEQ ID NO: 267516 - RNA, 22 nt, Human
cuuaauuacccaaugugguagg

SEQ ID NO: 267517 - RNA, 22 nt, Human
guccuggguccccgcaggucag

SEQ ID NO: 267518 - RNA, 22 nt, Human
uuguuuuccugggauaccaacc

SEQ ID NO: 267519 - RNA, 22 nt, Human
agcuaggccauuuguucaguga

SEQ ID NO: 267520 - RNA, 22 nt, Human
cagguccugccuugguuacccu

SEQ ID NO: 267521 - RNA, 22 nt, Human
agugugaccuuauuuggaaaca

SEQ ID NO: 267522 - RNA, 22 nt, Human
gucccagggaugcagacaugag

SEQ ID NO: 267523 - RNA, 22 nt, Human
cggggcuguagcacagcugagc

SEQ ID NO: 267524 - RNA, 22 nt, Human
gccaggaaauucaugccagauc

SEQ ID NO: 267525 - RNA, 22 nt, Human
ucagaaauagucuuuaaaauga

SEQ ID NO: 267526 - RNA, 22 nt, Human
gcucagagcuugaaguuccacu

SEQ ID NO: 267527 - RNA, 22 nt, Human
uccagcagguccgagacaaguu

SEQ ID NO: 267528 - RNA, 22 nt, Human
ucaguggaacugucugggugag

SEQ ID NO: 267529 - RNA, 22 nt, Human
ucagaauaugcuaaugacauuu

SEQ ID NO: 267530 - RNA, 21 nt, Human
uuuauuuauauaggacacaug

SEQ ID NO: 267531 - RNA, 22 nt, Human
uccagaaaaaguaauuuauuug

SEQ ID NO: 267532 - RNA, 22 nt, Human
ucacaggcuugugaacauugca

SEQ ID NO: 267533 - RNA, 22 nt, Human
auuaauuuuucugacagccaca

SEQ ID NO: 267534 - RNA, 22 nt, Human
gggacaugaggccauagugauu

SEQ ID NO: 267535 - RNA, 22 nt, Human
aggccugccuggaucacacaga

SEQ ID NO: 267536 - RNA, 22 nt, Human
uuguggcagaccaugagucuaa

SEQ ID NO: 267537 - RNA, 22 nt, Human
gcaggccugcagguauggccgg

SEQ ID NO: 267538 - RNA, 22 nt, Human
ugcauugaucauauccuuccug

SEQ ID NO: 267539 - RNA, 22 nt, Human
uagaaaucauuuagaaguauug

SEQ ID NO: 267540 - RNA, 22 nt, Human
gcccagucucuucuggcccugu

SEQ ID NO: 267541 - RNA, 22 nt, Human
acugucuuccaggucuggaggu

SEQ ID NO: 267542 - RNA, 22 nt, Human
uugacagggccaagaauggacc

SEQ ID NO: 267543 - RNA, 22 nt, Human
aggaauguguguccaccgggga

SEQ ID NO: 267544 - RNA, 22 nt, Human
uugacaggaaaaaguuuaggau

SEQ ID NO: 267545 - RNA, 22 nt, Human
uauguauagagucuuuuaaauu

SEQ ID NO: 267546 - RNA, 18 nt, Human
aggcaugguggugcgcac

SEQ ID NO: 267547 - RNA, 22 nt, Human
cagguacauucguagacccauu

SEQ ID NO: 267548 - RNA, 22 nt, Human
auguuacaauccaacaaaauua

SEQ ID NO: 267549 - RNA, 19 nt, Human
cacgaguucucuuagcaaa

SEQ ID NO: 267550 - RNA, 22 nt, Human
agggccuggugaccuggguccu

SEQ ID NO: 267551 - RNA, 22 nt, Human
agacaauuaaaaaauuaugcuu

SEQ ID NO: 267552 - RNA, 22 nt, Human
cuggauguaaagggugaagaaa

SEQ ID NO: 267553 - RNA, 22 nt, Human
agagcugggugaagugccauca

SEQ ID NO: 267554 - RNA, 22 nt, Human
ucugucuuggccagccaucugg

SEQ ID NO: 267555 - RNA, 22 nt, Human
aaaugucagaagcuuuacuucu

SEQ ID NO: 267556 - RNA, 18 nt, Human
acuguuaucugauaaggc

SEQ ID NO: 267557 - RNA, 22 nt, Human
acagagacucaugaaagaugac

SEQ ID NO: 267558 - RNA, 19 nt, Human
ugucccagacuccgugucu

SEQ ID NO: 267559 - RNA, 22 nt, Human
ucugaggaucugaagggaacag

SEQ ID NO: 267560 - RNA, 22 nt, Human
gcugccacauuuucaggacuaa

SEQ ID NO: 267561 - RNA, 22 nt, Human
ucuccaggagcaagucacccag

SEQ ID NO: 267562 - RNA, 22 nt, Human
aagcacaugaaaaugugaagcu

SEQ ID NO: 267563 - RNA, 22 nt, Human
agcugccucagucacucauggc

SEQ ID NO: 267564 - RNA, 22 nt, Human
acagacauucauauccucggua

SEQ ID NO: 267565 - RNA, 22 nt, Human
cggcuggugucgggcacagcaa

SEQ ID NO: 267566 - RNA, 22 nt, Human
ggccagagguguccucaguucu

SEQ ID NO: 267567 - RNA, 22 nt, Human
ucccugaaacauaauagaugcc

SEQ ID NO: 267568 - RNA, 22 nt, Human
ucccucaggacccaacuuguaa

SEQ ID NO: 267569 - RNA, 22 nt, Human
ucacaugaguauuauuuuccaa

SEQ ID NO: 267570 - RNA, 22 nt, Human
gucuagaauugcuuggcagaug

SEQ ID NO: 267571 - RNA, 22 nt, Human
guuggcagagagaagccuagca

SEQ ID NO: 267572 - RNA, 22 nt, Human
ugguggagccuaggcuaagucu

SEQ ID NO: 267573 - RNA, 22 nt, Human
ugugaccauaauuuguaaauaa

SEQ ID NO: 267574 - RNA, 22 nt, Human
agggagcucuuuggucuugccg

SEQ ID NO: 267575 - RNA, 22 nt, Human
uaugcuccuauuggaaugauag

SEQ ID NO: 267576 - RNA, 22 nt, Human
uggcaguucuaauugaccauuu

SEQ ID NO: 267577 - RNA, 22 nt, Human
uacagaaauugccaccagcucu

SEQ ID NO: 267578 - RNA, 22 nt, Human
uuggcaguagugguaguacauu

SEQ ID NO: 267579 - RNA, 22 nt, Human
acuaccuuauacaaaauguagg

SEQ ID NO: 267580 - RNA, 22 nt, Human
cuguuacugcuggagccauuga

SEQ ID NO: 267581 - RNA, 22 nt, Human
uaggcucagggcugggugacgg

SEQ ID NO: 267582 - RNA, 22 nt, Human
gaggggaagacuucuggacagu

SEQ ID NO: 267583 - RNA, 22 nt, Human
ggaggcaucucuguggcugucu

SEQ ID NO: 267584 - RNA, 20 nt, Human
ccucucugaagaggucaucu

SEQ ID NO: 267585 - RNA, 22 nt, Human
agucugguguaugaaagugaau

SEQ ID NO: 267586 - RNA, 22 nt, Human
ucugugcuuucccugccuucuu

SEQ ID NO: 267587 - RNA, 22 nt, Human
ggacuucuggggacuguagauu

SEQ ID NO: 267588 - RNA, 22 nt, Human
agugcuauaaagguagaccaca

SEQ ID NO: 267589 - RNA, 22 nt, Human
auacaucuaugccuuucugaca

SEQ ID NO: 267590 - RNA, 23 nt, Human
aggucaaccacaagcugacaaac

SEQ ID NO: 267591 - RNA, 22 nt, Human
ggcaagagugaggagugucucu

SEQ ID NO: 267592 - RNA, 22 nt, Human
gcugccuugccaggggcagaaa

SEQ ID NO: 267593 - RNA, 22 nt, Human
gugcucuguguauuaggauguc

SEQ ID NO: 267594 - RNA, 22 nt, Human
cuuuaugaaccuguucagcuug

SEQ ID NO: 267595 - RNA, 20 nt, Human
aggaagccaaaggcugucuu

SEQ ID NO: 267596 - RNA, 22 nt, Human
cagccacucucagacaguccca

SEQ ID NO: 267597 - RNA, 19 nt, Human
uagaaccuggauuucagga

SEQ ID NO: 267598 - RNA, 22 nt, Human
cucagaagaacaaaggcucuac

SEQ ID NO: 267599 - RNA, 22 nt, Human
agcuguauuugugaauauuuaa

SEQ ID NO: 267600 - RNA, 22 nt, Human
gaacagcaugcaugcaagacua

SEQ ID NO: 267601 - RNA, 22 nt, Human
cagaugaacucuauccuguggc

SEQ ID NO: 267602 - RNA, 22 nt, Human
gggugguggccagcagugggca

SEQ ID NO: 267603 - RNA, 22 nt, Human
gcagcagaguagacagagcccu

SEQ ID NO: 267604 - RNA, 22 nt, Human
cugccugcuuuucugggagccg

SEQ ID NO: 267605 - RNA, 22 nt, Human
gaaagacauaguugcaagaugg

SEQ ID NO: 267606 - RNA, 22 nt, Human
acccaggcuggagugcaguggu

SEQ ID NO: 267607 - RNA, 22 nt, Human
cugggcaggagaggugguugga

SEQ ID NO: 267608 - RNA, 22 nt, Human
acucagaguuugcguuccauac

SEQ ID NO: 267609 - RNA, 23 nt, Human
ucucccugagguuguuagcauua

SEQ ID NO: 267610 - RNA, 22 nt, Human
ugccaggcaacugcccagccau

SEQ ID NO: 267611 - RNA, 22 nt, Human
gcagaagcagggcaggggcaaa

SEQ ID NO: 267612 - RNA, 22 nt, Human
uccaguggcaccuuggcccuca

SEQ ID NO: 267613 - RNA, 22 nt, Human
gcuuuucuucagcagccugaug

SEQ ID NO: 267614 - RNA, 22 nt, Human
aguuaggaguauaggaaugccu

SEQ ID NO: 267615 - RNA, 22 nt, Human
cuggagagggagcccuggcagu

SEQ ID NO: 267616 - RNA, 22 nt, Human
auaaacaguagagaaagguggu

SEQ ID NO: 267617 - RNA, 22 nt, Human
ugaggccaacuagggagaugga

SEQ ID NO: 267618 - RNA, 20 nt, Human
aggaaggaaguuugcaugga

SEQ ID NO: 267619 - RNA, 22 nt, Human
ucccaggcuaccagugagguca

SEQ ID NO: 267620 - RNA, 20 nt, Human
ucuguucaaaucuuaguucc

SEQ ID NO: 267621 - RNA, 19 nt, Human
acagcagggauuuuuggag

SEQ ID NO: 267622 - RNA, 22 nt, Human
aggcugcuucaauggauaagau

SEQ ID NO: 267623 - RNA, 22 nt, Human
uguuuuccuccugguuucugcc

SEQ ID NO: 267624 - RNA, 22 nt, Human
uggguccaguguccuggcuaug

SEQ ID NO: 267625 - RNA, 21 nt, Human
gagauuuagaaggaucaauuu

SEQ ID NO: 267626 - RNA, 22 nt, Human
guacauaagaaauuacuacaga

SEQ ID NO: 267627 - RNA, 22 nt, Human
cgcccagggcaggaggccgcuc

SEQ ID NO: 267628 - RNA, 22 nt, Human
ucucugcacuugcacauaagcu

SEQ ID NO: 267629 - RNA, 21 nt, Human
guugaauauccauguaugugu

SEQ ID NO: 267630 - RNA, 22 nt, Human
uauuaauaaauauguaggggcc

SEQ ID NO: 267631 - RNA, 22 nt, Human
agaaucuuggaacucagaucac

SEQ ID NO: 267632 - RNA, 22 nt, Human
uacaguguauguauuuguaggu

SEQ ID NO: 267633 - RNA, 22 nt, Human
ucugacccguggcucugccucc

SEQ ID NO: 267634 - RNA, 22 nt, Human
gaauguuaaugcacuucuagcu

SEQ ID NO: 267635 - RNA, 22 nt, Human
uagaaucugaaaguggcuguga

SEQ ID NO: 267636 - RNA, 17 nt, Human
aggagggaaauagcuug

SEQ ID NO: 267637 - RNA, 22 nt, Human
gaggcucaacccacagggguug

SEQ ID NO: 267638 - RNA, 22 nt, Human
agaggcaaguucagagcuagga

SEQ ID NO: 267639 - RNA, 22 nt, Human
acucugaaugugcauguaaauc

SEQ ID NO: 267640 - RNA, 22 nt, Human
acaaggcaauggcaggauuuca

SEQ ID NO: 267641 - RNA, 22 nt, Human
uucuuaacuggaaaaugucaga

SEQ ID NO: 267642 - RNA, 17 nt, Human
uuucaaagcagucagga

SEQ ID NO: 267643 - RNA, 22 nt, Human
cagucccaaggaggaagcaguc

SEQ ID NO: 267644 - RNA, 22 nt, Human
cugccugccuuggccuccagga

SEQ ID NO: 267645 - RNA, 22 nt, Human
ggaacuugaaaaucaagguggu

SEQ ID NO: 267646 - RNA, 22 nt, Human
auuugaagaaaguuuucuagau

SEQ ID NO: 267647 - RNA, 22 nt, Human
guuuuauaggugaaauauuacu

SEQ ID NO: 267648 - RNA, 22 nt, Human
uuauuagguuuacauaaagguu

SEQ ID NO: 267649 - RNA, 22 nt, Human
ggcagccucagguuuucuuuga

SEQ ID NO: 267650 - RNA, 22 nt, Human
cugagcccucuguuuucccucu

SEQ ID NO: 267651 - RNA, 22 nt, Human
gcagcuuucugggacagaaagg

SEQ ID NO: 267652 - RNA, 22 nt, Human
aucaguuuggaacauucaggcc

SEQ ID NO: 267653 - RNA, 22 nt, Human
agcaacagcagguuugcacucc

SEQ ID NO: 267654 - RNA, 22 nt, Human
ugucuguacaaauuuucugugu

SEQ ID NO: 267655 - RNA, 22 nt, Human
uggaccugggguggccuccucu

SEQ ID NO: 267656 - RNA, 22 nt, Human
ugcccugcuguggcucugccca

SEQ ID NO: 267657 - RNA, 22 nt, Human
augagcaguuuuuaaguagcaa

SEQ ID NO: 267658 - RNA, 22 nt, Human
gcuguucacaucuggaccauuu

SEQ ID NO: 267659 - RNA, 22 nt, Human
agggucuguuguuuguucugga

SEQ ID NO: 267660 - RNA, 22 nt, Human
aauggcuggguuucauuuugua

SEQ ID NO: 267661 - RNA, 22 nt, Human
aaguuacacauuuucauuguaa

SEQ ID NO: 267662 - RNA, 22 nt, Human
cugagcagauguugcccagaag

SEQ ID NO: 267663 - RNA, 22 nt, Human
gcccaugggccugaggcccuag

SEQ ID NO: 267664 - RNA, 22 nt, Human
gcccugguuuuagaggagcagg

SEQ ID NO: 267665 - RNA, 22 nt, Human
agggauggaucuuggcccugga

SEQ ID NO: 267666 - RNA, 22 nt, Human
aaauguuccggguaaggagaaa

SEQ ID NO: 267667 - RNA, 22 nt, Human
gacuucugccucaggggaaggu

SEQ ID NO: 267668 - RNA, 22 nt, Human
gaaaggagggaaacagagcggu

SEQ ID NO: 267669 - RNA, 22 nt, Human
ugcagggccuugggucuuucuu

SEQ ID NO: 267670 - RNA, 20 nt, Human
aggaggaagaaagcacacug

SEQ ID NO: 267671 - RNA, 22 nt, Human
gauaacccccaagaaggucuuu

SEQ ID NO: 267672 - RNA, 22 nt, Human
acaguaauuuauugaacaccuu

SEQ ID NO: 267673 - RNA, 22 nt, Human
aaacaucuuucuauugcaaguu

SEQ ID NO: 267674 - RNA, 22 nt, Human
gcaagcaauggacggugacuuu

SEQ ID NO: 267675 - RNA, 19 nt, Human
gggguggcuggggcuccag

SEQ ID NO: 267676 - RNA, 22 nt, Human
cuucucagcuuagguaugguuu

SEQ ID NO: 267677 - RNA, 22 nt, Human
augagaaagaguuguaucuaga

SEQ ID NO: 267678 - RNA, 22 nt, Human
aaggaggacacccaggacuggg

SEQ ID NO: 267679 - RNA, 22 nt, Human
aggagagagguuuuaaaugggg

SEQ ID NO: 267680 - RNA, 22 nt, Human
agccuggcuuagcucucucacu

SEQ ID NO: 267681 - RNA, 22 nt, Human
aagaaagugaugagcuacagau

SEQ ID NO: 267682 - RNA, 22 nt, Human
aguuuauguaaaauuaguaaug

SEQ ID NO: 267683 - RNA, 22 nt, Human
ggcuucccuguuugcugugccu

SEQ ID NO: 267684 - RNA, 22 nt, Human
ucaggucuuuugucuccuagaa

SEQ ID NO: 267685 - RNA, 22 nt, Human
aguuuccaaagcauguucacac

SEQ ID NO: 267686 - RNA, 22 nt, Human
agguucuugacucuaccuucca

SEQ ID NO: 267687 - RNA, 23 nt, Human
aggcaagaacggguuguucaccc

SEQ ID NO: 267688 - RNA, 22 nt, Human
caauucaugggcugaggaaggg
